United States Patent Application Publication US 2005/0244851 A1 - sequence listing, part 69

SEQ ID NO: 2683488 - DNA, 25 bp, Homo sapien
ccccttccgagctggcaggatggag

SEQ ID NO: 2683489 - DNA, 25 bp, Homo sapien
ccatggaagctgctagcgttacgcc

SEQ ID NO: 2683490 - DNA, 25 bp, Homo sapien
gggctgcagacgggcgagcagcgcg

SEQ ID NO: 2683491 - DNA, 25 bp, Homo sapien
gggcagcggcgagtggctgcgctcc

SEQ ID NO: 2683492 - DNA, 25 bp, Homo sapien
cccacatcttgggcgctccctgggc

SEQ ID NO: 2683493 - DNA, 25 bp, Homo sapien
gtccctggcgctgctacggccgctg

SEQ ID NO: 2683494 - DNA, 25 bp, Homo sapien
ggcggccgcacagtggtgctgccat

SEQ ID NO: 2683495 - DNA, 25 bp, Homo sapien
cttcaggtcgcccaggactaattcc

SEQ ID NO: 2683496 - DNA, 25 bp, Homo sapien
cggtccctcggctggacaggacgag

SEQ ID NO: 2683497 - DNA, 25 bp, Homo sapien
taattccaaatcctccacgatgatc

SEQ ID NO: 2683498 - DNA, 25 bp, Homo sapien
ggtcgcccaggactaattccaaatc

SEQ ID NO: 2683499 - DNA, 25 bp, Homo sapien
tactggtaacgacgttcggaggaga

SEQ ID NO: 2683500 - DNA, 25 bp, Homo sapien
ggtaacgacgttcggaggagagcag

SEQ ID NO: 2683501 - DNA, 25 bp, Homo sapien
taacgacgttcggaggagagcaggg

SEQ ID NO: 2683502 - DNA, 25 bp, Homo sapien
ctggtaacgacgttcggaggagagc

SEQ ID NO: 2683503 - DNA, 25 bp, Homo sapien
aattctgccgaaaggaacatgccca

SEQ ID NO: 2683504 - DNA, 25 bp, Homo sapien
taaatacgtttctgtgccgctgtag

SEQ ID NO: 2683505 - DNA, 25 bp, Homo sapien
ttaaccctggtgacgaatggcccat

SEQ ID NO: 2683506 - DNA, 25 bp, Homo sapien
tgtatactaacagccactctcagga

SEQ ID NO: 2683507 - DNA, 25 bp, Homo sapien
cagttaatgctactttctggttctt

SEQ ID NO: 2683508 - DNA, 25 bp, Homo sapien
gtggcgcactgaggcaggctgaggc

SEQ ID NO: 2683509 - DNA, 25 bp, Homo sapien
ggcgtagtggcgcactgaggcaggc

SEQ ID NO: 2683510 - DNA, 25 bp, Homo sapien
tagtggcgcactgaggcaggctgag

SEQ ID NO: 2683511 - DNA, 25 bp, Homo sapien
gtagtggcgcactgaggcaggctga

SEQ ID NO: 2683512 - DNA, 25 bp, Homo sapien
cacacttttctgtaagatgatcaaa

SEQ ID NO: 2683513 - DNA, 25 bp, Homo sapien
tttgccacttttgctaactgtaagg

SEQ ID NO: 2683514 - DNA, 25 bp, Homo sapien
atctgttctgcatgcagtcacacat

SEQ ID NO: 2683515 - DNA, 25 bp, Homo sapien
cactgctgataaatcaggaatgatg

SEQ ID NO: 2683516 - DNA, 25 bp, Homo sapien
gattagagcctgacataaccacgtt

SEQ ID NO: 2683517 - DNA, 25 bp, Homo sapien
tttcagtgtattctgctgattcccg

SEQ ID NO: 2683518 - DNA, 25 bp, Homo sapien
gctgattcccgttttcgcttatttg

SEQ ID NO: 2683519 - DNA, 25 bp, Homo sapien
aaatatataaaagcgtccatgcacg

SEQ ID NO: 2683520 - DNA, 25 bp, Homo sapien
ctggaatgacctgctagagaatgca

SEQ ID NO: 2683521 - DNA, 25 bp, Homo sapien
ccttttatttgggagtgcctggcat

SEQ ID NO: 2683522 - DNA, 25 bp, Homo sapien
gcatgcatcagttgattggttcctt

SEQ ID NO: 2683523 - DNA, 25 bp, Homo sapien
ggagtgcctggcattacggattaaa

SEQ ID NO: 2683524 - DNA, 25 bp, Homo sapien
cagtatacagctcctacgacaagag

SEQ ID NO: 2683525 - DNA, 25 bp, Homo sapien
gaacactaggcatccacttgcagta

SEQ ID NO: 2683526 - DNA, 25 bp, Homo sapien
gatgggttacatgcacaatgggcaa

SEQ ID NO: 2683527 - DNA, 25 bp, Homo sapien
gagattgctttggaaataaaccacc

SEQ ID NO: 2683528 - DNA, 25 bp, Homo sapien
gagctttccttcatatgatggttga

SEQ ID NO: 2683529 - DNA, 25 bp, Homo sapien
gtctatatactgtctattcatgcta

SEQ ID NO: 2683530 - DNA, 25 bp, Homo sapien
tgcttgcaaatttcgttaagtttct

SEQ ID NO: 2683531 - DNA, 25 bp, Homo sapien
gcatatatgtcttccatatgtctat

SEQ ID NO: 2683532 - DNA, 25 bp, Homo sapien
cagcaggttccttctcatattccat

SEQ ID NO: 2683533 - DNA, 25 bp, Homo sapien
tgtaccacagtatccagatgaagtt

SEQ ID NO: 2683534 - DNA, 25 bp, Homo sapien
ccactgtaccacagtatccagatga

SEQ ID NO: 2683535 - DNA, 25 bp, Homo sapien
cagtatccagatgaagtttaggtac

SEQ ID NO: 2683536 - DNA, 25 bp, Homo sapien
tccggttttgtggaaattgttcagc

SEQ ID NO: 2683537 - DNA, 25 bp, Homo sapien
aaatcttagctaaatggctcttcat

SEQ ID NO: 2683538 - DNA, 25 bp, Homo sapien
tgagaaacttttcattgtcgaaaat

SEQ ID NO: 2683539 - DNA, 25 bp, Homo sapien
tttaatattactgagaaacttttca

SEQ ID NO: 2683540 - DNA, 25 bp, Homo sapien
tttcattgtcgaaaatcttagctaa

SEQ ID NO: 2683541 - DNA, 25 bp, Homo sapien
ggtgcctatatgttcctcctcatgg

SEQ ID NO: 2683542 - DNA, 25 bp, Homo sapien
tcagtgtcagatattctccgggcaa

SEQ ID NO: 2683543 - DNA, 25 bp, Homo sapien
cctcatggcaaagtgaaagagccaa

SEQ ID NO: 2683544 - DNA, 25 bp, Homo sapien
caagctgctatagctggtgcctata

SEQ ID NO: 2683545 - DNA, 25 bp, Homo sapien
tcactgtatgcctgcagcactgttt

SEQ ID NO: 2683546 - DNA, 25 bp, Homo sapien
cctgtttcatcatgtggggaggtgg

SEQ ID NO: 2683547 - DNA, 25 bp, Homo sapien
ctgtttcatcatgtggggaggtggg

SEQ ID NO: 2683548 - DNA, 25 bp, Homo sapien
tgtcactgtatgcctgcagcactgt

SEQ ID NO: 2683549 - DNA, 25 bp, Homo sapien
aagataaatatagctaaattccaaa

SEQ ID NO: 2683550 - DNA, 25 bp, Homo sapien
tgattgagaagataaatatagctaa

SEQ ID NO: 2683551 - DNA, 25 bp, Homo sapien
taccattccctcttgttttacaaca

SEQ ID NO: 2683552 - DNA, 25 bp, Homo sapien
tccctcttgttttacaacaattaga

SEQ ID NO: 2683553 - DNA, 25 bp, Homo sapien
tggtttaaaacctgggctggcaaga

SEQ ID NO: 2683554 - DNA, 25 bp, Homo sapien
ctcaattggtttaaaacctgggctg

SEQ ID NO: 2683555 - DNA, 25 bp, Homo sapien
tctaagtttatcctcaattggttta

SEQ ID NO: 2683556 - DNA, 25 bp, Homo sapien
taaaacctgggctggcaagaggcat

SEQ ID NO: 2683557 - DNA, 25 bp, Homo sapien
gccttgcctaggaggatcatcaatc

SEQ ID NO: 2683558 - DNA, 25 bp, Homo sapien
gggccttgcctaggaggatcatcaa

SEQ ID NO: 2683559 - DNA, 25 bp, Homo sapien
gctgggccttgcctaggaggatcat

SEQ ID NO: 2683560 - DNA, 25 bp, Homo sapien
cttgcctaggaggatcatcaatctt

SEQ ID NO: 2683561 - DNA, 25 bp, Homo sapien
taattaaagtagacggtgtgcacag

SEQ ID NO: 2683562 - DNA, 25 bp, Homo sapien
gtctacttaagatggcatgatgaag

SEQ ID NO: 2683563 - DNA, 25 bp, Homo sapien
cttcaagtgttttagcttgagctaa

SEQ ID NO: 2683564 - DNA, 25 bp, Homo sapien
gcttgagctaaagtacaaagtctac

SEQ ID NO: 2683565 - DNA, 25 bp, Homo sapien
gaggttatctaccccacacatttta

SEQ ID NO: 2683566 - DNA, 25 bp, Homo sapien
ccccacacattttatcatagtaaat

SEQ ID NO: 2683567 - DNA, 25 bp, Homo sapien
tagctagtatgagtcagttctagtc

SEQ ID NO: 2683568 - DNA, 25 bp, Homo sapien
tatgagtcagttctagtcattgtct

SEQ ID NO: 2683569 - DNA, 25 bp, Homo sapien
atttttagctagtatgagtcagttc

SEQ ID NO: 2683570 - DNA, 25 bp, Homo sapien
ttctagtcattgtctcatgctccta

SEQ ID NO: 2683571 - DNA, 25 bp, Homo sapien
ggtcagggtgtcaatctggtcaacc

SEQ ID NO: 2683572 - DNA, 25 bp, Homo sapien
tcagggtgtcaatctggtcaaccac

SEQ ID NO: 2683573 - DNA, 25 bp, Homo sapien
tcatcctccagctgtaggtcagagg

SEQ ID NO: 2683574 - DNA, 25 bp, Homo sapien
agaggtcagggtgtcaatctggtca

SEQ ID NO: 2683575 - DNA, 25 bp, Homo sapien
cttgagctactattcagcgtgtccg

SEQ ID NO: 2683576 - DNA, 25 bp, Homo sapien
gtgtccgttttggagctgtcagtca

SEQ ID NO: 2683577 - DNA, 25 bp, Homo sapien
ctggaggctgttgtgccacttgagc

SEQ ID NO: 2683578 - DNA, 25 bp, Homo sapien
ttgatcttctctaggctggaggctg

SEQ ID NO: 2683579 - DNA, 25 bp, Homo sapien
tataccgggtatcacagtcaggaca

SEQ ID NO: 2683580 - DNA, 25 bp, Homo sapien
tatgcatcagaagctggactggagc

SEQ ID NO: 2683581 - DNA, 25 bp, Homo sapien
taagcctccatttcgtagaagggtg

SEQ ID NO: 2683582 - DNA, 25 bp, Homo sapien
caagttactgttgggtatgcagcag

SEQ ID NO: 2683583 - DNA, 25 bp, Homo sapien
gcttgagtagaaagtgctcattact

SEQ ID NO: 2683584 - DNA, 25 bp, Homo sapien
cttgagtagaaagtgctcattactt

SEQ ID NO: 2683585 - DNA, 25 bp, Homo sapien
taatgcatacccaggatataagcaa

SEQ ID NO: 2683586 - DNA, 25 bp, Homo sapien
gatataagcaatgtgctgcatactt

SEQ ID NO: 2683587 - DNA, 25 bp, Homo sapien
tgaggtttttaatgatacaacattt

SEQ ID NO: 2683588 - DNA, 25 bp, Homo sapien
gctgcatacttaccaggtgattttt

SEQ ID NO: 2683589 - DNA, 25 bp, Homo sapien
aaatcccagctcttatagtaaatca

SEQ ID NO: 2683590 - DNA, 25 bp, Homo sapien
cacagtttgtcataggtcaattgca

SEQ ID NO: 2683591 - DNA, 25 bp, Homo sapien
ataggtgaaatctgcaggttcacag

SEQ ID NO: 2683592 - DNA, 25 bp, Homo sapien
tagctgagcatgtaattcataattg

SEQ ID NO: 2683593 - DNA, 25 bp, Homo sapien
ttactattgtttattgatttaacaa

SEQ ID NO: 2683594 - DNA, 25 bp, Homo sapien
gtcattatttactattgtttattga

SEQ ID NO: 2683595 - DNA, 25 bp, Homo sapien
tgtcattatttactattgtttattg

SEQ ID NO: 2683596 - DNA, 25 bp, Homo sapien
gctgaacacatcctgataccagaag

SEQ ID NO: 2683597 - DNA, 25 bp, Homo sapien
tttagaagacagcaacggcccatgg

SEQ ID NO: 2683598 - DNA, 25 bp, Homo sapien
gggaaaaacttacgccaaatgctga

SEQ ID NO: 2683599 - DNA, 25 bp, Homo sapien
aattctcctataaatgtgggtccac

SEQ ID NO: 2683600 - DNA, 25 bp, Homo sapien
tacctggctcatatctattaaacat

SEQ ID NO: 2683601 - DNA, 25 bp, Homo sapien
attatcttcatgtccaacacctatg

SEQ ID NO: 2683602 - DNA, 25 bp, Homo sapien
tgattatggatctgttttgtaactt

SEQ ID NO: 2683603 - DNA, 25 bp, Homo sapien
aactttctgattattgtaagtcgga

SEQ ID NO: 2683604 - DNA, 25 bp, Homo sapien
caaatcaaaatcacacttaactgga

SEQ ID NO: 2683605 - DNA, 25 bp, Homo sapien
actggaacaataacaggactaggag

SEQ ID NO: 2683606 - DNA, 25 bp, Homo sapien
caggactaggagcatatctcatttc

SEQ ID NO: 2683607 - DNA, 25 bp, Homo sapien
tagctttatgccaaattcaatcaca

SEQ ID NO: 2683608 - DNA, 25 bp, Homo sapien
agaactactgcaatgtgtttgggtt

SEQ ID NO: 2683609 - DNA, 25 bp, Homo sapien
gtttgggttgttgctaatgcatgtt

SEQ ID NO: 2683610 - DNA, 25 bp, Homo sapien
ggtcagaactactgcaatgtgtttg

SEQ ID NO: 2683611 - DNA, 25 bp, Homo sapien
tcagaactactgcaatgtgtttggg

SEQ ID NO: 2683612 - DNA, 25 bp, Homo sapien
tcacatcaagtctgcgaaaatgtct

SEQ ID NO: 2683613 - DNA, 25 bp, Homo sapien
gaggttctctatgagaaccaagagc

SEQ ID NO: 2683614 - DNA, 25 bp, Homo sapien
ctggtgttaacctccactaatttct

SEQ ID NO: 2683615 - DNA, 25 bp, Homo sapien
tcaagtctgcgaaaatgtctctttg

SEQ ID NO: 2683616 - DNA, 25 bp, Homo sapien
taagtaagttccatcccatggtagg

SEQ ID NO: 2683617 - DNA, 25 bp, Homo sapien
gagtctggggctcataagtaagttc

SEQ ID NO: 2683618 - DNA, 25 bp, Homo sapien
tggtaggtctgagaatctgtacaag

SEQ ID NO: 2683619 - DNA, 25 bp, Homo sapien
ggtaggatgtgatgtttttggagtc

SEQ ID NO: 2683620 - DNA, 25 bp, Homo sapien
tcttgtttcagacgcttcagccatg

SEQ ID NO: 2683621 - DNA, 25 bp, Homo sapien
ttattcactcatgcgtctccaaaag

SEQ ID NO: 2683622 - DNA, 25 bp, Homo sapien
taaatgcttctatgtcacatacaac

SEQ ID NO: 2683623 - DNA, 25 bp, Homo sapien
caggtctacccgtttcttctggtct

SEQ ID NO: 2683624 - DNA, 25 bp, Homo sapien
catgggaccatctgtgcaaataaca

SEQ ID NO: 2683625 - DNA, 25 bp, Homo sapien
taccctgaatggaagtgacagtgca

SEQ ID NO: 2683626 - DNA, 25 bp, Homo sapien
cgtcctaagactgtgcattgctgca

SEQ ID NO: 2683627 - DNA, 25 bp, Homo sapien
gattttatgcagactctatcagcga

SEQ ID NO: 2683628 - DNA, 25 bp, Homo sapien
cattgcaaggtattctaagtaccag

SEQ ID NO: 2683629 - DNA, 25 bp, Homo sapien
tagtttgggaataagcctaatgacc

SEQ ID NO: 2683630 - DNA, 25 bp, Homo sapien
taagtaccaggagatattgcagagt

SEQ ID NO: 2683631 - DNA, 25 bp, Homo sapien
catctcacaggaactggcaatttga

SEQ ID NO: 2683632 - DNA, 25 bp, Homo sapien
aggttataccatattgtcactgtgt

SEQ ID NO: 2683633 - DNA, 25 bp, Homo sapien
ggttataccatattgtcactgtgtc

SEQ ID NO: 2683634 - DNA, 25 bp, Homo sapien
gttataccatattgtcactgtgtct

SEQ ID NO: 2683635 - DNA, 25 bp, Homo sapien
tgtctgaagcacaacaaagcaaagc

SEQ ID NO: 2683636 - DNA, 25 bp, Homo sapien
tctattaacaaggaaccacgtatat

SEQ ID NO: 2683637 - DNA, 25 bp, Homo sapien
tgttgtactggatacattcagcaca

SEQ ID NO: 2683638 - DNA, 25 bp, Homo sapien
gcaaagcacaataatatgagtcatg

SEQ ID NO: 2683639 - DNA, 25 bp, Homo sapien
gaccagcatcactattgcatgcata

SEQ ID NO: 2683640 - DNA, 25 bp, Homo sapien
tcactattgcatgcatagccagata

SEQ ID NO: 2683641 - DNA, 25 bp, Homo sapien
gttctagaccagcatcactattgca

SEQ ID NO: 2683642 - DNA, 25 bp, Homo sapien
catagccagatagaatatgagccat

SEQ ID NO: 2683643 - DNA, 25 bp, Homo sapien
caattatttggaaagccgttagaca

SEQ ID NO: 2683644 - DNA, 25 bp, Homo sapien
tgatttgcatgtcccaagactctgc

SEQ ID NO: 2683645 - DNA, 25 bp, Homo sapien
tgttctgatttgcatgtcccaagac

SEQ ID NO: 2683646 - DNA, 25 bp, Homo sapien
gccgttagacaagagcctgttctga

SEQ ID NO: 2683647 - DNA, 25 bp, Homo sapien
gccgtcgaggcatggcttcatgagg

SEQ ID NO: 2683648 - DNA, 25 bp, Homo sapien
ctggccaatgagttcaaaaagcacg

SEQ ID NO: 2683649 - DNA, 25 bp, Homo sapien
tcgaggcatggcttcatgagggcca

SEQ ID NO: 2683650 - DNA, 25 bp, Homo sapien
caatgagttcaaaaagcacgtttgc

SEQ ID NO: 2683651 - DNA, 25 bp, Homo sapien
tgtggccctagagccggtgtccacg

SEQ ID NO: 2683652 - DNA, 25 bp, Homo sapien
ggggctctctcacggtttctgagcc

SEQ ID NO: 2683653 - DNA, 25 bp, Homo sapien
ggctctctcacggtttctgagccca

SEQ ID NO: 2683654 - DNA, 25 bp, Homo sapien
gggctctctcacggtttctgagccc

SEQ ID NO: 2683655 - DNA, 25 bp, Homo sapien
cttgagatggtacggtcagtgcaaa

SEQ ID NO: 2683656 - DNA, 25 bp, Homo sapien
tcccttgagatggtacggtcagtgc

SEQ ID NO: 2683657 - DNA, 25 bp, Homo sapien
tgagtcccttgagatggtacggtca

SEQ ID NO: 2683658 - DNA, 25 bp, Homo sapien
tttactgagtcccttgagatggtac

SEQ ID NO: 2683659 - DNA, 25 bp, Homo sapien
cttcacggatacaggcaattggtct

SEQ ID NO: 2683660 - DNA, 25 bp, Homo sapien
cacggatacaggcaattggtctgca

SEQ ID NO: 2683661 - DNA, 25 bp, Homo sapien
ctttgcttcacggatacaggcaatt

SEQ ID NO: 2683662 - DNA, 25 bp, Homo sapien
gatacaggcaattggtctgcatttt

SEQ ID NO: 2683663 - DNA, 25 bp, Homo sapien
tctgctcgtttgttattgagtgtct

SEQ ID NO: 2683664 - DNA, 25 bp, Homo sapien
gacatatacccctccttgctatata

SEQ ID NO: 2683665 - DNA, 25 bp, Homo sapien
cataagccataactggactccgagt

SEQ ID NO: 2683666 - DNA, 25 bp, Homo sapien
gcaaacatttctatagaggttcaga

SEQ ID NO: 2683667 - DNA, 25 bp, Homo sapien
gtgaggagttctgtcttcctcttca

SEQ ID NO: 2683668 - DNA, 25 bp, Homo sapien
agtgaggagttctgtcttcctcttc

SEQ ID NO: 2683669 - DNA, 25 bp, Homo sapien
cagtgaggagttctgtcttcctctt

SEQ ID NO: 2683670 - DNA, 25 bp, Homo sapien
tgaggagttctgtcttcctcttcat

SEQ ID NO: 2683671 - DNA, 25 bp, Homo sapien
aactggagttcaggttctgttcacc

SEQ ID NO: 2683672 - DNA, 25 bp, Homo sapien
tgttcacctctgacgagcaataccg

SEQ ID NO: 2683673 - DNA, 25 bp, Homo sapien
gagcattcttgccagtgtctatcgg

SEQ ID NO: 2683674 - DNA, 25 bp, Homo sapien
gaggctaggccttcctgtttacaaa

SEQ ID NO: 2683675 - DNA, 25 bp, Homo sapien
tatttttggagaactaacgagtcta

SEQ ID NO: 2683676 - DNA, 25 bp, Homo sapien
tgccctgtaaagaataaggccccat

SEQ ID NO: 2683677 - DNA, 25 bp, Homo sapien
taacgagtctagtggaggaaagctg

SEQ ID NO: 2683678 - DNA, 25 bp, Homo sapien
acttcaagacacatgccctgtaaag

SEQ ID NO: 2683679 - DNA, 25 bp, Homo sapien
tcagctttcagttctttccttttcc

SEQ ID NO: 2683680 - DNA, 25 bp, Homo sapien
cagctttcagttctttccttttccg

SEQ ID NO: 2683681 - DNA, 25 bp, Homo sapien
tctctcagctttcagttctttcctt

SEQ ID NO: 2683682 - DNA, 25 bp, Homo sapien
ctctctcagctttcagttctttcct

SEQ ID NO: 2683683 - DNA, 25 bp, Homo sapien
tctatactgaccatacacattcccg

SEQ ID NO: 2683684 - DNA, 25 bp, Homo sapien
cagtttctgaaatccgaggtaggct

SEQ ID NO: 2683685 - DNA, 25 bp, Homo sapien
gaccatacacattcccgtattaaag

SEQ ID NO: 2683686 - DNA, 25 bp, Homo sapien
ggtaggctgcattctatactgacca

SEQ ID NO: 2683687 - DNA, 25 bp, Homo sapien
cattgatcaagaatgaagagttcct

SEQ ID NO: 2683688 - DNA, 25 bp, Homo sapien
tcattgatcaagaatgaagagttcc

SEQ ID NO: 2683689 - DNA, 25 bp, Homo sapien
tctgagcacatagagccagtagtat

SEQ ID NO: 2683690 - DNA, 25 bp, Homo sapien
atttctgagcacatagagccagtag

SEQ ID NO: 2683691 - DNA, 25 bp, Homo sapien
agcacatagagccagtagtatccat

SEQ ID NO: 2683692 - DNA, 25 bp, Homo sapien
gttcttgctgcaatgtgatttctga

SEQ ID NO: 2683693 - DNA, 25 bp, Homo sapien
tatggagataagtaagaggacagca

SEQ ID NO: 2683694 - DNA, 25 bp, Homo sapien
tccgctgcattgaacaatatggaga

SEQ ID NO: 2683695 - DNA, 25 bp, Homo sapien
cagacttctttctccgctgcattga

SEQ ID NO: 2683696 - DNA, 25 bp, Homo sapien
gtttgtggtgtagggccaggcctga

SEQ ID NO: 2683697 - DNA, 25 bp, Homo sapien
aaaataggttagactgtctggatcc

SEQ ID NO: 2683698 - DNA, 25 bp, Homo sapien
cctgaagcattagcaataaaaagtc

SEQ ID NO: 2683699 - DNA, 25 bp, Homo sapien
ctggatccttattcttcaatagtct

SEQ ID NO: 2683700 - DNA, 25 bp, Homo sapien
gacatctgctccaattgatacagta

SEQ ID NO: 2683701 - DNA, 25 bp, Homo sapien
gattcctgagcttgatgggacaagc

SEQ ID NO: 2683702 - DNA, 25 bp, Homo sapien
agaaagattcctgagcttgatggga

SEQ ID NO: 2683703 - DNA, 25 bp, Homo sapien
cctgagcttgatgggacaagctgtc

SEQ ID NO: 2683704 - DNA, 25 bp, Homo sapien
tgagcttgatgggacaagctgtcat

SEQ ID NO: 2683705 - DNA, 25 bp, Homo sapien
tgtaatgttagtggaaaatcatctt

SEQ ID NO: 2683706 - DNA, 25 bp, Homo sapien
tttgtaatgttagtggaaaatcatc

SEQ ID NO: 2683707 - DNA, 25 bp, Homo sapien
atagatttgtaatgttagtggaaaa

SEQ ID NO: 2683708 - DNA, 25 bp, Homo sapien
atttgtaatgttagtggaaaatcat

SEQ ID NO: 2683709 - DNA, 25 bp, Homo sapien
catctgctgatggtcaatgtgttct

SEQ ID NO: 2683710 - DNA, 25 bp, Homo sapien
gccatctgctgatggtcaatgtgtt

SEQ ID NO: 2683711 - DNA, 25 bp, Homo sapien
atctgctgatggtcaatgtgttctc

SEQ ID NO: 2683712 - DNA, 25 bp, Homo sapien
acagccatctgctgatggtcaatgt

SEQ ID NO: 2683713 - DNA, 25 bp, Homo sapien
attttcagtgcattgctttaaggga

SEQ ID NO: 2683714 - DNA, 25 bp, Homo sapien
ttcagtgcattgctttaagggaata

SEQ ID NO: 2683715 - DNA, 25 bp, Homo sapien
cagtgcattgctttaagggaataag

SEQ ID NO: 2683716 - DNA, 25 bp, Homo sapien
gcattgctttaagggaataagctac

SEQ ID NO: 2683717 - DNA, 25 bp, Homo sapien
aatggttttattttcgggccagcag

SEQ ID NO: 2683718 - DNA, 25 bp, Homo sapien
tctgagactcaggatgaactacata

SEQ ID NO: 2683719 - DNA, 25 bp, Homo sapien
tcgggccagcaggtatcttctgaga

SEQ ID NO: 2683720 - DNA, 25 bp, Homo sapien
aaatcctctgctttgggtccatgtt

SEQ ID NO: 2683721 - DNA, 25 bp, Homo sapien
caccaactgagttattagacctttt

SEQ ID NO: 2683722 - DNA, 25 bp, Homo sapien
cactgttaacaccaactgagttatt

SEQ ID NO: 2683723 - DNA, 25 bp, Homo sapien
agactttctcttcacgcaattcctc

SEQ ID NO: 2683724 - DNA, 25 bp, Homo sapien
cccatcactgttaacaccaactgag

SEQ ID NO: 2683725 - DNA, 25 bp, Homo sapien
tttggatgctccctttacacaccat

SEQ ID NO: 2683726 - DNA, 25 bp, Homo sapien
ctggtttttggatgctccctttaca

SEQ ID NO: 2683727 - DNA, 25 bp, Homo sapien
tcaagacctggtttttggatgctcc

SEQ ID NO: 2683728 - DNA, 25 bp, Homo sapien
aagacctggtttttggatgctccct

SEQ ID NO: 2683729 - DNA, 25 bp, Homo sapien
ctcttgacgtttttgcagcataggg

SEQ ID NO: 2683730 - DNA, 25 bp, Homo sapien
gcagcatagggggagtatgtgcttt

SEQ ID NO: 2683731 - DNA, 25 bp, Homo sapien
gagtatgtgctttccagatgttttc

SEQ ID NO: 2683732 - DNA, 25 bp, Homo sapien
gtatgtgctttccagatgttttctt

SEQ ID NO: 2683733 - DNA, 25 bp, Homo sapien
caccttgtatctatgttgcggagca

SEQ ID NO: 2683734 - DNA, 25 bp, Homo sapien
tcagatgagatacaagagaagtagt

SEQ ID NO: 2683735 - DNA, 25 bp, Homo sapien
agcttcctcagctttgtggtcctga

SEQ ID NO: 2683736 - DNA, 25 bp, Homo sapien
ctgagttgggcacagcaccttgtat

SEQ ID NO: 2683737 - DNA, 25 bp, Homo sapien
gcatcgttcaatagtctcttcttac

SEQ ID NO: 2683738 - DNA, 25 bp, Homo sapien
cacttctgcatcgttcaatagtctc

SEQ ID NO: 2683739 - DNA, 25 bp, Homo sapien
tggattatgcctggatccagcatca

SEQ ID NO: 2683740 - DNA, 25 bp, Homo sapien
gcatcacttctgcatcgttcaatag

SEQ ID NO: 2683741 - DNA, 25 bp, Homo sapien
gtggccttgggccaagccagagaat

SEQ ID NO: 2683742 - DNA, 25 bp, Homo sapien
gggccaagccagagaatccagactg

SEQ ID NO: 2683743 - DNA, 25 bp, Homo sapien
ggccaagccagagaatccagactgt

SEQ ID NO: 2683744 - DNA, 25 bp, Homo sapien
gccttgggccaagccagagaatcca

SEQ ID NO: 2683745 - DNA, 25 bp, Homo sapien
gcatctgccttaccatccttatcaa

SEQ ID NO: 2683746 - DNA, 25 bp, Homo sapien
ggaccaccacgcaggtctcagtagc

SEQ ID NO: 2683747 - DNA, 25 bp, Homo sapien
cactggaacaattctctgaggcgga

SEQ ID NO: 2683748 - DNA, 25 bp, Homo sapien
atcaagagtgaactcacttgcagag

SEQ ID NO: 2683749 - DNA, 25 bp, Homo sapien
atcccataagagagccacacccttt

SEQ ID NO: 2683750 - DNA, 25 bp, Homo sapien
ccataagagagccacaccctttttc

SEQ ID NO: 2683751 - DNA, 25 bp, Homo sapien
tcccataagagagccacaccctttt

SEQ ID NO: 2683752 - DNA, 25 bp, Homo sapien
ataagagagccacaccctttttcat

SEQ ID NO: 2683753 - DNA, 25 bp, Homo sapien
catatgggagagagtgacttctgta

SEQ ID NO: 2683754 - DNA, 25 bp, Homo sapien
aggccacttcttctattattgtctt

SEQ ID NO: 2683755 - DNA, 25 bp, Homo sapien
taggagttcctttgtagacatatgg

SEQ ID NO: 2683756 - DNA, 25 bp, Homo sapien
ttgtcttctttagggagtgctccag

SEQ ID NO: 2683757 - DNA, 25 bp, Homo sapien
gctaccaacaagtcagtcgtcctcg

SEQ ID NO: 2683758 - DNA, 25 bp, Homo sapien
gaaggatggggaagacccgggagca

SEQ ID NO: 2683759 - DNA, 25 bp, Homo sapien
taccaacaagtcagtcgtcctcggc

SEQ ID NO: 2683760 - DNA, 25 bp, Homo sapien
gggaagacccgggagcaggccatgc

SEQ ID NO: 2683761 - DNA, 25 bp, Homo sapien
ttattccttagtttgtataaggata

SEQ ID NO: 2683762 - DNA, 25 bp, Homo sapien
gatgggggcgataaactgtgttcat

SEQ ID NO: 2683763 - DNA, 25 bp, Homo sapien
gtgatgggggcgataaactgtgttc

SEQ ID NO: 2683764 - DNA, 25 bp, Homo sapien
tgtataaggatattttacccttctc

SEQ ID NO: 2683765 - DNA, 25 bp, Homo sapien
tctgaatctcaagtatttggaggtc

SEQ ID NO: 2683766 - DNA, 25 bp, Homo sapien
tccacagcagtttctactaccaatg

SEQ ID NO: 2683767 - DNA, 25 bp, Homo sapien
tcactgaaccttggaagatacttcg

SEQ ID NO: 2683768 - DNA, 25 bp, Homo sapien
cggtgaagttccctgctactgccaa

SEQ ID NO: 2683769 - DNA, 25 bp, Homo sapien
gatccataccttgcagagcaattcc

SEQ ID NO: 2683770 - DNA, 25 bp, Homo sapien
gaggatggttgagcatactgttaaa

SEQ ID NO: 2683771 - DNA, 25 bp, Homo sapien
gagcaattccaataccaaagctgat

SEQ ID NO: 2683772 - DNA, 25 bp, Homo sapien
tgaaactgtgggtctaagacttcct

SEQ ID NO: 2683773 - DNA, 25 bp, Homo sapien
gagtagagaatgataagaatcgtag

SEQ ID NO: 2683774 - DNA, 25 bp, Homo sapien
taagaatcgtagaggtcataagcaa

SEQ ID NO: 2683775 - DNA, 25 bp, Homo sapien
cttagcagaagtagtttcagcaact

SEQ ID NO: 2683776 - DNA, 25 bp, Homo sapien
ggtcataagcaacttagcagaagta

SEQ ID NO: 2683777 - DNA, 25 bp, Homo sapien
aaaaattcttcggtggcataggcca

SEQ ID NO: 2683778 - DNA, 25 bp, Homo sapien
caggtgacggcaatgctggtagtct

SEQ ID NO: 2683779 - DNA, 25 bp, Homo sapien
tgtaagaactgtgcttctcaaactg

SEQ ID NO: 2683780 - DNA, 25 bp, Homo sapien
tctttggagtagcaagggattaatc

SEQ ID NO: 2683781 - DNA, 25 bp, Homo sapien
ttttatcaggttttactacaatcat

SEQ ID NO: 2683782 - DNA, 25 bp, Homo sapien
gttttatcaggttttactacaatca

SEQ ID NO: 2683783 - DNA, 25 bp, Homo sapien
tttatcaggttttactacaatcatt

SEQ ID NO: 2683784 - DNA, 25 bp, Homo sapien
tatttgcactgcatccgacatggcc

SEQ ID NO: 2683785 - DNA, 25 bp, Homo sapien
cagaaaccgttgctacatgatccca

SEQ ID NO: 2683786 - DNA, 25 bp, Homo sapien
ttcactgctctttatgctggtgtca

SEQ ID NO: 2683787 - DNA, 25 bp, Homo sapien
ctggtgtcagacgatgctatttgca

SEQ ID NO: 2683788 - DNA, 25 bp, Homo sapien
cttcgtggaaggatgccagcaaaca

SEQ ID NO: 2683789 - DNA, 25 bp, Homo sapien
gcaaacatatctaccaacctttcca

SEQ ID NO: 2683790 - DNA, 25 bp, Homo sapien
ttccatttctactgcagtgacggtt

SEQ ID NO: 2683791 - DNA, 25 bp, Homo sapien
gcagtgacggtttttgtgacagatg

SEQ ID NO: 2683792 - DNA, 25 bp, Homo sapien
ttcaggttagtgattccctttagct

SEQ ID NO: 2683793 - DNA, 25 bp, Homo sapien
ctgtgtgacagcagatctatttcta

SEQ ID NO: 2683794 - DNA, 25 bp, Homo sapien
gcttctcacgttgtatcataatgac

SEQ ID NO: 2683795 - DNA, 25 bp, Homo sapien
ttctactattttgcttctcacgttg

SEQ ID NO: 2683796 - DNA, 25 bp, Homo sapien
attgctctgattctaattctgggtg

SEQ ID NO: 2683797 - DNA, 25 bp, Homo sapien
attctgggtgtttcgtataactcca

SEQ ID NO: 2683798 - DNA, 25 bp, Homo sapien
tagttctttgaggtcgacatttttc

SEQ ID NO: 2683799 - DNA, 25 bp, Homo sapien
tataactccagtgttgttcctctag

SEQ ID NO: 2683800 - DNA, 25 bp, Homo sapien
cttccaagacagatggatttatggg

SEQ ID NO: 2683801 - DNA, 25 bp, Homo sapien
ttccaagacagatggatttatgggt

SEQ ID NO: 2683802 - DNA, 25 bp, Homo sapien
ggtgacagatagcttttgcctagta

SEQ ID NO: 2683803 - DNA, 25 bp, Homo sapien
gtccctggtgacagatagcttttgc

SEQ ID NO: 2683804 - DNA, 25 bp, Homo sapien
gcttttgcctagtatcaagcagcat

SEQ ID NO: 2683805 - DNA, 25 bp, Homo sapien
gatagcttttgcctagtatcaagca

SEQ ID NO: 2683806 - DNA, 25 bp, Homo sapien
tatactgctattaactaagagaccc

SEQ ID NO: 2683807 - DNA, 25 bp, Homo sapien
tggcatccattaaacctgcattata

SEQ ID NO: 2683808 - DNA, 25 bp, Homo sapien
gcatattaatcacaagatgtactaa

SEQ ID NO: 2683809 - DNA, 25 bp, Homo sapien
taagagaccctattatgtcgtacaa

SEQ ID NO: 2683810 - DNA, 25 bp, Homo sapien
attcagggataaaagttggccacag

SEQ ID NO: 2683811 - DNA, 25 bp, Homo sapien
tttctcagcttcaatatcaccttca

SEQ ID NO: 2683812 - DNA, 25 bp, Homo sapien
gccacagatgtaatctgataaggcc

SEQ ID NO: 2683813 - DNA, 25 bp, Homo sapien
tgtaatctgataaggccaacttttc

SEQ ID NO: 2683814 - DNA, 25 bp, Homo sapien
ctcccggcggtccaagacactgaaa

SEQ ID NO: 2683815 - DNA, 25 bp, Homo sapien
acaatcttgactactatgctgtcat

SEQ ID NO: 2683816 - DNA, 25 bp, Homo sapien
gaaacaatcttgactactatgctgt

SEQ ID NO: 2683817 - DNA, 25 bp, Homo sapien
cccggcggtccaagacactgaaact

SEQ ID NO: 2683818 - DNA, 25 bp, Homo sapien
ttgttactatcatcctcattattct

SEQ ID NO: 2683819 - DNA, 25 bp, Homo sapien
tactatcatcctcattattctcatg

SEQ ID NO: 2683820 - DNA, 25 bp, Homo sapien
gttactatcatcctcattattctca

SEQ ID NO: 2683821 - DNA, 25 bp, Homo sapien
tattgttactatcatcctcattatt

SEQ ID NO: 2683822 - DNA, 25 bp, Homo sapien
cttgcgctgaacctttggtccttgt

SEQ ID NO: 2683823 - DNA, 25 bp, Homo sapien
cctttggtccttgttgtggtggatg

SEQ ID NO: 2683824 - DNA, 25 bp, Homo sapien
ccatgatggcgcctacgctggggca

SEQ ID NO: 2683825 - DNA, 25 bp, Homo sapien
atgtggactcccatgatggcgccta

SEQ ID NO: 2683826 - DNA, 25 bp, Homo sapien
ccggccgagaagcttcatcatccgg

SEQ ID NO: 2683827 - DNA, 25 bp, Homo sapien
ttcatcatccggatcatctggcaaa

SEQ ID NO: 2683828 - DNA, 25 bp, Homo sapien
ttttcccggccgagaagcttcatca

SEQ ID NO: 2683829 - DNA, 25 bp, Homo sapien
cttcatcatccggatcatctggcaa

SEQ ID NO: 2683830 - DNA, 25 bp, Homo sapien
acccgcacatcatccattgtggtcc

SEQ ID NO: 2683831 - DNA, 25 bp, Homo sapien
tgaacccgcacatcatccattgtgg

SEQ ID NO: 2683832 - DNA, 25 bp, Homo sapien
ctgaacccgcacatcatccattgtg

SEQ ID NO: 2683833 - DNA, 25 bp, Homo sapien
gcacatcatccattgtggtccccac

SEQ ID NO: 2683834 - DNA, 25 bp, Homo sapien
gatcggagagcataacggtgctgca

SEQ ID NO: 2683835 - DNA, 25 bp, Homo sapien
agtacacctctggacccttgtgaag

SEQ ID NO: 2683836 - DNA, 25 bp, Homo sapien
cctctggacccttgtgaagatcgga

SEQ ID NO: 2683837 - DNA, 25 bp, Homo sapien
ccttgtgaagatcggagagcataac

SEQ ID NO: 2683838 - DNA, 25 bp, Homo sapien
tgttttcatatcttcggctggcccg

SEQ ID NO: 2683839 - DNA, 25 bp, Homo sapien
ctccactgcactcaaactttcggac

SEQ ID NO: 2683840 - DNA, 25 bp, Homo sapien
ttttcatatcttcggctggcccgta

SEQ ID NO: 2683841 - DNA, 25 bp, Homo sapien
gcccgtaggcctccactgcactcaa

SEQ ID NO: 2683842 - DNA, 25 bp, Homo sapien
ccaactgagctgcaaacgtgatctg

SEQ ID NO: 2683843 - DNA, 25 bp, Homo sapien
aaacgtgatctgtgtaaagatggat

SEQ ID NO: 2683844 - DNA, 25 bp, Homo sapien
atccaactgagctgcaaacgtgatc

SEQ ID NO: 2683845 - DNA, 25 bp, Homo sapien
aactgagctgcaaacgtgatctgtg

SEQ ID NO: 2683846 - DNA, 25 bp, Homo sapien
gggctttactgctgctcattgaata

SEQ ID NO: 2683847 - DNA, 25 bp, Homo sapien
tcttatattgtttgagtgggaagag

SEQ ID NO: 2683848 - DNA, 25 bp, Homo sapien
cctcttatattgtttgagtgggaag

SEQ ID NO: 2683849 - DNA, 25 bp, Homo sapien
ccactttagaagggctttactgctg

SEQ ID NO: 2683850 - DNA, 25 bp, Homo sapien
ttaatatctccattcaaaactgctg

SEQ ID NO: 2683851 - DNA, 25 bp, Homo sapien
gttttaatatctccattcaaaactg

SEQ ID NO: 2683852 - DNA, 25 bp, Homo sapien
tttaatatctccattcaaaactgct

SEQ ID NO: 2683853 - DNA, 25 bp, Homo sapien
ttttaatatctccattcaaaactgc

SEQ ID NO: 2683854 - DNA, 25 bp, Homo sapien
gtttagtcctgtagtcgatgaccat

SEQ ID NO: 2683855 - DNA, 25 bp, Homo sapien
gcatgacagctagacttttagcttg

SEQ ID NO: 2683856 - DNA, 25 bp, Homo sapien
ttgaatgcatgacagctagactttt

SEQ ID NO: 2683857 - DNA, 25 bp, Homo sapien
ttcttcatgccccacagtttagtcc

SEQ ID NO: 2683858 - DNA, 25 bp, Homo sapien
gagctagggttctgtgcacagctat

SEQ ID NO: 2683859 - DNA, 25 bp, Homo sapien
cagctatagtcccattaggaaagaa

SEQ ID NO: 2683860 - DNA, 25 bp, Homo sapien
caactgcaagagctagggttctgtg

SEQ ID NO: 2683861 - DNA, 25 bp, Homo sapien
tctccagtaatgcaactgcaagagc

SEQ ID NO: 2683862 - DNA, 25 bp, Homo sapien
gacagattctgcataggctccaaca

SEQ ID NO: 2683863 - DNA, 25 bp, Homo sapien
cagaaagctcaaccaggctattagt

SEQ ID NO: 2683864 - DNA, 25 bp, Homo sapien
tctgcataggctccaacagttggga

SEQ ID NO: 2683865 - DNA, 25 bp, Homo sapien
ctcaaccaggctattagtggaaaga

SEQ ID NO: 2683866 - DNA, 25 bp, Homo sapien
tattgcactagcattgggcagcact

SEQ ID NO: 2683867 - DNA, 25 bp, Homo sapien
ttttattgcactagcattgggcagc

SEQ ID NO: 2683868 - DNA, 25 bp, Homo sapien
gggagttgcaacttttattgcacta

SEQ ID NO: 2683869 - DNA, 25 bp, Homo sapien
tccaaatcttcaattgaattcttac

SEQ ID NO: 2683870 - DNA, 25 bp, Homo sapien
ctgtttggccaatgtctctctaata

SEQ ID NO: 2683871 - DNA, 25 bp, Homo sapien
tggccaatgtctctctaatataaag

SEQ ID NO: 2683872 - DNA, 25 bp, Homo sapien
gtttggccaatgtctctctaatata

SEQ ID NO: 2683873 - DNA, 25 bp, Homo sapien
ttggccaatgtctctctaatataaa

SEQ ID NO: 2683874 - DNA, 25 bp, Homo sapien
taataagtaactggtactgttctgg

SEQ ID NO: 2683875 - DNA, 25 bp, Homo sapien
ggtgtctgcggtgtactgtgaagtc

SEQ ID NO: 2683876 - DNA, 25 bp, Homo sapien
ttacatatcaatcatcagtttcttt

SEQ ID NO: 2683877 - DNA, 25 bp, Homo sapien
ttggcgtggggtcgggcgctggagg

SEQ ID NO: 2683878 - DNA, 25 bp, Homo sapien
gccctcttggcgtggggtcgggcgc

SEQ ID NO: 2683879 - DNA, 25 bp, Homo sapien
gtggggtcgggcgctggaggcgtca

SEQ ID NO: 2683880 - DNA, 25 bp, Homo sapien
tcttggcgtggggtcgggcgctgga

SEQ ID NO: 2683881 - DNA, 25 bp, Homo sapien
gtttccaggaaatcgcacaaatggg

SEQ ID NO: 2683882 - DNA, 25 bp, Homo sapien
acacgtaggacgcatagagctcgag

SEQ ID NO: 2683883 - DNA, 25 bp, Homo sapien
tcatcccgggagaagtaataggcca

SEQ ID NO: 2683884 - DNA, 25 bp, Homo sapien
tagagcgtgcaattccagcaacgac

SEQ ID NO: 2683885 - DNA, 25 bp, Homo sapien
gtgtcaaaaaggtactccgccaggc

SEQ ID NO: 2683886 - DNA, 25 bp, Homo sapien
caagggtatgtgtgtcaaaaaggta

SEQ ID NO: 2683887 - DNA, 25 bp, Homo sapien
ccccatcttcactaagttgtgcacg

SEQ ID NO: 2683888 - DNA, 25 bp, Homo sapien
agttgtgcacgtggtcacctagttc

SEQ ID NO: 2683889 - DNA, 25 bp, Homo sapien
tattggaggaatagtataacagaag

SEQ ID NO: 2683890 - DNA, 25 bp, Homo sapien
aggtgattttaagggcaagaaagca

SEQ ID NO: 2683891 - DNA, 25 bp, Homo sapien
caaatcactttattggaggaatagt

SEQ ID NO: 2683892 - DNA, 25 bp, Homo sapien
tttctacaaatcactttattggagg

SEQ ID NO: 2683893 - DNA, 25 bp, Homo sapien
tggagaacgttagtttgcaccctct

SEQ ID NO: 2683894 - DNA, 25 bp, Homo sapien
gataatacttggcaactggagaacg

SEQ ID NO: 2683895 - DNA, 25 bp, Homo sapien
tagttacctgtgctatcttcgagcc

SEQ ID NO: 2683896 - DNA, 25 bp, Homo sapien
taaggtattgaatatggcaggcact

SEQ ID NO: 2683897 - DNA, 25 bp, Homo sapien
gactgttcacagttggtatttgcct

SEQ ID NO: 2683898 - DNA, 25 bp, Homo sapien
taccaaatgtcccttgtagggcaaa

SEQ ID NO: 2683899 - DNA, 25 bp, Homo sapien
taaccacttataaccaaggactcaa

SEQ ID NO: 2683900 - DNA, 25 bp, Homo sapien
ggcaaaattgccctcatagagagtt

SEQ ID NO: 2683901 - DNA, 25 bp, Homo sapien
tttcactctcaaacatctgatcact

SEQ ID NO: 2683902 - DNA, 25 bp, Homo sapien
caaacatctgatcactatcagccat

SEQ ID NO: 2683903 - DNA, 25 bp, Homo sapien
catatttttcactctcaaacatctg

SEQ ID NO: 2683904 - DNA, 25 bp, Homo sapien
tctcaaacatctgatcactatcagc

SEQ ID NO: 2683905 - DNA, 25 bp, Homo sapien
atgatccgccgctgcctgcacgtga

SEQ ID NO: 2683906 - DNA, 25 bp, Homo sapien
tagatgaaggaatatgatccgccgc

SEQ ID NO: 2683907 - DNA, 25 bp, Homo sapien
gctgcctgcacgtgaaccggtctct

SEQ ID NO: 2683908 - DNA, 25 bp, Homo sapien
gaaccggtctctcagaccgcggctg

SEQ ID NO: 2683909 - DNA, 25 bp, Homo sapien
tgaggttcagagttcccggctgagc

SEQ ID NO: 2683910 - DNA, 25 bp, Homo sapien
ctcgttattgaggttcagagttccc

SEQ ID NO: 2683911 - DNA, 25 bp, Homo sapien
ttattgaggttcagagttcccggct

SEQ ID NO: 2683912 - DNA, 25 bp, Homo sapien
cgttattgaggttcagagttcccgg

SEQ ID NO: 2683913 - DNA, 25 bp, Homo sapien
tctgggtgcacaaagaacagacacc

SEQ ID NO: 2683914 - DNA, 25 bp, Homo sapien
tctccttcacattagaacacactag

SEQ ID NO: 2683915 - DNA, 25 bp, Homo sapien
tgtaatcacctagtaaacatatgtg

SEQ ID NO: 2683916 - DNA, 25 bp, Homo sapien
cacctaacccagaccgagaggagtt

SEQ ID NO: 2683917 - DNA, 25 bp, Homo sapien
tccacttgaatagcccatctgataa

SEQ ID NO: 2683918 - DNA, 25 bp, Homo sapien
cattctgtgtaacttgcatgtccac

SEQ ID NO: 2683919 - DNA, 25 bp, Homo sapien
cattaggaccaccaatccactgact

SEQ ID NO: 2683920 - DNA, 25 bp, Homo sapien
cctctggtgaggaaaccgtagtcct

SEQ ID NO: 2683921 - DNA, 25 bp, Homo sapien
ttttttgacttcagtcggccaacac

SEQ ID NO: 2683922 - DNA, 25 bp, Homo sapien
tcagtcggccaacactcctgacaag

SEQ ID NO: 2683923 - DNA, 25 bp, Homo sapien
tcctgacaagttttcggataactaa

SEQ ID NO: 2683924 - DNA, 25 bp, Homo sapien
cggataactaaaactcgaattctct

SEQ ID NO: 2683925 - DNA, 25 bp, Homo sapien
caagcaatctttgcgcccgtctttg

SEQ ID NO: 2683926 - DNA, 25 bp, Homo sapien
tcttcaagcaatctttgcgcccgtc

SEQ ID NO: 2683927 - DNA, 25 bp, Homo sapien
cgtctttggttttttaacagtgcat

SEQ ID NO: 2683928 - DNA, 25 bp, Homo sapien
ttttaacagtgcatcttcagtaccc

SEQ ID NO: 2683929 - DNA, 25 bp, Homo sapien
ttggtactgtcagttttatctgttc

SEQ ID NO: 2683930 - DNA, 25 bp, Homo sapien
catcaccaagagcagatttagttac

SEQ ID NO: 2683931 - DNA, 25 bp, Homo sapien
aaagatcagacagttataggtatgc

SEQ ID NO: 2683932 - DNA, 25 bp, Homo sapien
tgtcaaagatcagacagttataggt

SEQ ID NO: 2683933 - DNA, 25 bp, Homo sapien
tcaaagatcagacagttataggtat

SEQ ID NO: 2683934 - DNA, 25 bp, Homo sapien
ttgtcaaagatcagacagttatagg

SEQ ID NO: 2683935 - DNA, 25 bp, Homo sapien
gatgctcatttaactcacagaccaa

SEQ ID NO: 2683936 - DNA, 25 bp, Homo sapien
taacaacaatggcacaatagaaggc

SEQ ID NO: 2683937 - DNA, 25 bp, Homo sapien
taattataaaggatcagcgccccaa

SEQ ID NO: 2683938 - DNA, 25 bp, Homo sapien
tcaccttaagtacacagacatatgg

SEQ ID NO: 2683939 - DNA, 25 bp, Homo sapien
tcatgtggttctcccagtgtagcct

SEQ ID NO: 2683940 - DNA, 25 bp, Homo sapien
ctcatgtggttctcccagtgtagcc

SEQ ID NO: 2683941 - DNA, 25 bp, Homo sapien
gctctttcagttgcagtagaatctg

SEQ ID NO: 2683942 - DNA, 25 bp, Homo sapien
ggcaattgctctttcagttgcagta

SEQ ID NO: 2683943 - DNA, 25 bp, Homo sapien
gctagtctggcaattgctctttcag

SEQ ID NO: 2683944 - DNA, 25 bp, Homo sapien
agaggatgtactgctagtctggcaa

SEQ ID NO: 2683945 - DNA, 25 bp, Homo sapien
gagagtgagctatcagatcctttgt

SEQ ID NO: 2683946 - DNA, 25 bp, Homo sapien
gatgacagttgcttcacgctgtaaa

SEQ ID NO: 2683947 - DNA, 25 bp, Homo sapien
caatagtcactgctttaggtccatg

SEQ ID NO: 2683948 - DNA, 25 bp, Homo sapien
caaaattcttctccgccatcactgt

SEQ ID NO: 2683949 - DNA, 25 bp, Homo sapien
tttcgtgtccgtctgactttcccaa

SEQ ID NO: 2683950 - DNA, 25 bp, Homo sapien
cgctatcactatcttcagacatgga

SEQ ID NO: 2683951 - DNA, 25 bp, Homo sapien
gacatggaagactgcttgtaaaacc

SEQ ID NO: 2683952 - DNA, 25 bp, Homo sapien
tttcccaatgaagaagtcgtcaccg

SEQ ID NO: 2683953 - DNA, 25 bp, Homo sapien
tcttgtatccccatgagtttcacct

SEQ ID NO: 2683954 - DNA, 25 bp, Homo sapien
gtttcacctgtatcttctttaagaa

SEQ ID NO: 2683955 - DNA, 25 bp, Homo sapien
tgtcatttcttgtatccccatgagt

SEQ ID NO: 2683956 - DNA, 25 bp, Homo sapien
ctgtacttggcttgattttgtcatt

SEQ ID NO: 2683957 - DNA, 25 bp, Homo sapien
gcttttagatccagataaagagtgg

SEQ ID NO: 2683958 - DNA, 25 bp, Homo sapien
tttagatccagataaagagtggaaa

SEQ ID NO: 2683959 - DNA, 25 bp, Homo sapien
agatccagataaagagtggaaaaac

SEQ ID NO: 2683960 - DNA, 25 bp, Homo sapien
agcttttagatccagataaagagtg

SEQ ID NO: 2683961 - DNA, 25 bp, Homo sapien
tgtttttggagcctgttctttgaaa

SEQ ID NO: 2683962 - DNA, 25 bp, Homo sapien
tcttgtttttggagcctgttctttg

SEQ ID NO: 2683963 - DNA, 25 bp, Homo sapien
gggatcttgtttttggagcctgttc

SEQ ID NO: 2683964 - DNA, 25 bp, Homo sapien
ctagggatcttgtttttggagcctg

SEQ ID NO: 2683965 - DNA, 25 bp, Homo sapien
tcaagtcttcctgatagcttcttat

SEQ ID NO: 2683966 - DNA, 25 bp, Homo sapien
tcctgatagcttcttattaaactga

SEQ ID NO: 2683967 - DNA, 25 bp, Homo sapien
gatctgaggctcattctgtggaaaa

SEQ ID NO: 2683968 - DNA, 25 bp, Homo sapien
aaactgattcttgatctgaggctca

SEQ ID NO: 2683969 - DNA, 25 bp, Homo sapien
tattagattgctgttcttttcgcct

SEQ ID NO: 2683970 - DNA, 25 bp, Homo sapien
ttcccctgaaacacagcaatattag

SEQ ID NO: 2683971 - DNA, 25 bp, Homo sapien
ctgcttgcttcccatgaaggatgaa

SEQ ID NO: 2683972 - DNA, 25 bp, Homo sapien
tgcttcccatgaaggatgaagaggc

SEQ ID NO: 2683973 - DNA, 25 bp, Homo sapien
gaagcacatttcatgataagcacta

SEQ ID NO: 2683974 - DNA, 25 bp, Homo sapien
taaggaaacaacagagctgaaccag

SEQ ID NO: 2683975 - DNA, 25 bp, Homo sapien
tccccaagagacttattcaaatacg

SEQ ID NO: 2683976 - DNA, 25 bp, Homo sapien
acaagggtgatctggtttaaatagc

SEQ ID NO: 2683977 - DNA, 25 bp, Homo sapien
tgaatacaggttaaccagatggcct

SEQ ID NO: 2683978 - DNA, 25 bp, Homo sapien
cacgcccggctgagttatctaaatt

SEQ ID NO: 2683979 - DNA, 25 bp, Homo sapien
tgtgatgtataaagcagtcccttcc

SEQ ID NO: 2683980 - DNA, 25 bp, Homo sapien
gatggccttccctgccattaaagga

SEQ ID NO: 2683981 - DNA, 25 bp, Homo sapien
tttaaagtgcagttcagtggatcct

SEQ ID NO: 2683982 - DNA, 25 bp, Homo sapien
gaggagggaaaccagtattcaccca

SEQ ID NO: 2683983 - DNA, 25 bp, Homo sapien
ttcacaaggtcgtataatcagcgct

SEQ ID NO: 2683984 - DNA, 25 bp, Homo sapien
tctgacttcacgaacagtgttgccg

SEQ ID NO: 2683985 - DNA, 25 bp, Homo sapien
taaagaagagcacagtaaacacatt

SEQ ID NO: 2683986 - DNA, 25 bp, Homo sapien
gcagggttgacagcaaacatattca

SEQ ID NO: 2683987 - DNA, 25 bp, Homo sapien
tcttaacacatgtgaaagggcttac

SEQ ID NO: 2683988 - DNA, 25 bp, Homo sapien
gggcttacttcacttattaaatgga

SEQ ID NO: 2683989 - DNA, 25 bp, Homo sapien
aatgttgccaactaggatgctcacc

SEQ ID NO: 2683990 - DNA, 25 bp, Homo sapien
tgctcaaggtttttacacagggtca

SEQ ID NO: 2683991 - DNA, 25 bp, Homo sapien
cacagggtcaatcacataggcgtaa

SEQ ID NO: 2683992 - DNA, 25 bp, Homo sapien
tactacgttcgcaaaaggctcagag

SEQ ID NO: 2683993 - DNA, 25 bp, Homo sapien
gaatgggagtttaccctacctgcaa

SEQ ID NO: 2683994 - DNA, 25 bp, Homo sapien
gattaagagctacattcaggccaag

SEQ ID NO: 2683995 - DNA, 25 bp, Homo sapien
gatgccggcagaagacatgtggtcc

SEQ ID NO: 2683996 - DNA, 25 bp, Homo sapien
ctgcgacaattttagggatgccggc

SEQ ID NO: 2683997 - DNA, 25 bp, Homo sapien
catgacaatgctggacaacttttaa

SEQ ID NO: 2683998 - DNA, 25 bp, Homo sapien
tctctcctcaagcttatatgctgaa

SEQ ID NO: 2683999 - DNA, 25 bp, Homo sapien
tgggattatcctagcttcagaaaag

SEQ ID NO: 2684000 - DNA, 25 bp, Homo sapien
tacaaatgattgagctcctcccacc

SEQ ID NO: 2684001 - DNA, 25 bp, Homo sapien
cctttttatagattcacattgatgc

SEQ ID NO: 2684002 - DNA, 25 bp, Homo sapien
tttttatagattcacattgatgcat

SEQ ID NO: 2684003 - DNA, 25 bp, Homo sapien
tcctttttatagattcacattgatg

SEQ ID NO: 2684004 - DNA, 25 bp, Homo sapien
ctttttatagattcacattgatgca

SEQ ID NO: 2684005 - DNA, 25 bp, Homo sapien
tttgaccattagtgcgagtctccct

SEQ ID NO: 2684006 - DNA, 25 bp, Homo sapien
ctactctttcccactgaccaccttc

SEQ ID NO: 2684007 - DNA, 25 bp, Homo sapien
tactctttcccactgaccaccttca

SEQ ID NO: 2684008 - DNA, 25 bp, Homo sapien
gctcaaggcaaagcatctgaatatg

SEQ ID NO: 2684009 - DNA, 25 bp, Homo sapien
ggcagcatttgagctataggacata

SEQ ID NO: 2684010 - DNA, 25 bp, Homo sapien
tactaaagagttccagtttcacaag

SEQ ID NO: 2684011 - DNA, 25 bp, Homo sapien
tacagaacatggtgaaataggacct

SEQ ID NO: 2684012 - DNA, 25 bp, Homo sapien
tgaaatctcataggatagtcacact

SEQ ID NO: 2684013 - DNA, 25 bp, Homo sapien
gagttaagtctcattcctagctacc

SEQ ID NO: 2684014 - DNA, 25 bp, Homo sapien
tagctaccaaaattcctgggccact

SEQ ID NO: 2684015 - DNA, 25 bp, Homo sapien
tatcctctaagctaaaatggtgctg

SEQ ID NO: 2684016 - DNA, 25 bp, Homo sapien
tactgtttaaatacatatggacaca

SEQ ID NO: 2684017 - DNA, 25 bp, Homo sapien
gaatttagaaacaatgctcctactg

SEQ ID NO: 2684018 - DNA, 25 bp, Homo sapien
caaacacattaccattggtgtcaag

SEQ ID NO: 2684019 - DNA, 25 bp, Homo sapien
gaaatggcaatacatgtactcagat

SEQ ID NO: 2684020 - DNA, 25 bp, Homo sapien
ctggattttgaacgcttaagtcatc

SEQ ID NO: 2684021 - DNA, 25 bp, Homo sapien
taactggattttgaacgcttaagtc

SEQ ID NO: 2684022 - DNA, 25 bp, Homo sapien
cacataactggattttgaacgctta

SEQ ID NO: 2684023 - DNA, 25 bp, Homo sapien
cataactggattttgaacgcttaag

SEQ ID NO: 2684024 - DNA, 25 bp, Homo sapien
caagctggctactcgacatctagag

SEQ ID NO: 2684025 - DNA, 25 bp, Homo sapien
caaaaggagtgatgcgcttcgcctg

SEQ ID NO: 2684026 - DNA, 25 bp, Homo sapien
cagatccaatgggagaacaacgggc

SEQ ID NO: 2684027 - DNA, 25 bp, Homo sapien
aagttcctgcgctcagtaacctgcg

SEQ ID NO: 2684028 - DNA, 25 bp, Homo sapien
tggggagatggggtccaggtcacct

SEQ ID NO: 2684029 - DNA, 25 bp, Homo sapien
ggagcaagagagatagttggctgtg

SEQ ID NO: 2684030 - DNA, 25 bp, Homo sapien
gtccaggtcacctgagcggcagagt

SEQ ID NO: 2684031 - DNA, 25 bp, Homo sapien
caggtcacctgagcggcagagttct

SEQ ID NO: 2684032 - DNA, 25 bp, Homo sapien
tcatgtggttactgaccgcctgacc

SEQ ID NO: 2684033 - DNA, 25 bp, Homo sapien
cgacaggcagaatttttcatgtggt

SEQ ID NO: 2684034 - DNA, 25 bp, Homo sapien
aaatctcagaagcacatacactttt

SEQ ID NO: 2684035 - DNA, 25 bp, Homo sapien
tgagagccatcagtatcaaaacgac

SEQ ID NO: 2684036 - DNA, 25 bp, Homo sapien
gagcttcaaagataaccgtgttcct

SEQ ID NO: 2684037 - DNA, 25 bp, Homo sapien
cacatctgttgagtgggcaaccagc

SEQ ID NO: 2684038 - DNA, 25 bp, Homo sapien
ggagcccttgatttatggtgacaac

SEQ ID NO: 2684039 - DNA, 25 bp, Homo sapien
caggcattcaagtcagacccagatc

SEQ ID NO: 2684040 - DNA, 25 bp, Homo sapien
ttccctggtgctgtggctgagttgc

SEQ ID NO: 2684041 - DNA, 25 bp, Homo sapien
ctgtggctgagttgccagctgcttt

SEQ ID NO: 2684042 - DNA, 25 bp, Homo sapien
tgctgtggctgagttgccagctgct

SEQ ID NO: 2684043 - DNA, 25 bp, Homo sapien
ctggtgctgtggctgagttgccagc

SEQ ID NO: 2684044 - DNA, 25 bp, Homo sapien
caaaagggacgggactgagttctct

SEQ ID NO: 2684045 - DNA, 25 bp, Homo sapien
gcctggatgtatcctggcaacctgt

SEQ ID NO: 2684046 - DNA, 25 bp, Homo sapien
caggagctggtgtgagtttttgagg

SEQ ID NO: 2684047 - DNA, 25 bp, Homo sapien
tgagtaacaggaaccgcagtctttg

SEQ ID NO: 2684048 - DNA, 25 bp, Homo sapien
ccctttgttaataatgcgctctcca

SEQ ID NO: 2684049 - DNA, 25 bp, Homo sapien
tcaacaccctttgttaataatgcgc

SEQ ID NO: 2684050 - DNA, 25 bp, Homo sapien
aatgcgctctccacccaaagctgtt

SEQ ID NO: 2684051 - DNA, 25 bp, Homo sapien
ttaataatgcgctctccacccaaag

SEQ ID NO: 2684052 - DNA, 25 bp, Homo sapien
tcagcccttcctccgcttgcattca

SEQ ID NO: 2684053 - DNA, 25 bp, Homo sapien
ggtatatgggcatattgtgtaatgc

SEQ ID NO: 2684054 - DNA, 25 bp, Homo sapien
atctttatgcccacgtgtacttgac

SEQ ID NO: 2684055 - DNA, 25 bp, Homo sapien
cccacgtgtacttgacgtttagctc

SEQ ID NO: 2684056 - DNA, 25 bp, Homo sapien
agctcctgtactttggtgccaacaa

SEQ ID NO: 2684057 - DNA, 25 bp, Homo sapien
aatccttgcctttaagagtatcaaa

SEQ ID NO: 2684058 - DNA, 25 bp, Homo sapien
caagaagagctgtgatatctgtgcc

SEQ ID NO: 2684059 - DNA, 25 bp, Homo sapien
gagtatcaaatcaggtctggcacag

SEQ ID NO: 2684060 - DNA, 25 bp, Homo sapien
cgtgactcagagcttcattgcagga

SEQ ID NO: 2684061 - DNA, 25 bp, Homo sapien
gcttcattgcaggacggcagtctgg

SEQ ID NO: 2684062 - DNA, 25 bp, Homo sapien
gtctggaatgttggaaagtcctcat

SEQ ID NO: 2684063 - DNA, 25 bp, Homo sapien
gcctcacagaccgtgactcagagct

SEQ ID NO: 2684064 - DNA, 25 bp, Homo sapien
tttgggcttctgcttagagtgaagg

SEQ ID NO: 2684065 - DNA, 25 bp, Homo sapien
gatttcaggccagactcactttggg

SEQ ID NO: 2684066 - DNA, 25 bp, Homo sapien
cttagagtgaaggttagtgaggtta

SEQ ID NO: 2684067 - DNA, 25 bp, Homo sapien
tgtcctggggttcacaccgttgcca

SEQ ID NO: 2684068 - DNA, 25 bp, Homo sapien
gaaaggctagaataggagtcactag

SEQ ID NO: 2684069 - DNA, 25 bp, Homo sapien
tttcaccaggattaacactctctgt

SEQ ID NO: 2684070 - DNA, 25 bp, Homo sapien
gaaagtgggttctttagaatggtga

SEQ ID NO: 2684071 - DNA, 25 bp, Homo sapien
aggagtcactagagagaagcccagc

SEQ ID NO: 2684072 - DNA, 25 bp, Homo sapien
gctggctttccgatataattcttct

SEQ ID NO: 2684073 - DNA, 25 bp, Homo sapien
gatagtatcacagtcccaggtctct

SEQ ID NO: 2684074 - DNA, 25 bp, Homo sapien
gggctaagctggctttccgatataa

SEQ ID NO: 2684075 - DNA, 25 bp, Homo sapien
taattcttctacttgacagttttga

SEQ ID NO: 2684076 - DNA, 25 bp, Homo sapien
catgaatggcaattgactgggaccc

SEQ ID NO: 2684077 - DNA, 25 bp, Homo sapien
tgtgcggccacaggattcacagggc

SEQ ID NO: 2684078 - DNA, 25 bp, Homo sapien
gatgatctggcaagaatgtgcggcc

SEQ ID NO: 2684079 - DNA, 25 bp, Homo sapien
ggccacagatatagcatacccggaa

SEQ ID NO: 2684080 - DNA, 25 bp, Homo sapien
ttgaggccagtaagatgatcagaac

SEQ ID NO: 2684081 - DNA, 25 bp, Homo sapien
cagaactgtttgagtgtggtgctct

SEQ ID NO: 2684082 - DNA, 25 bp, Homo sapien
gatgatcagaactgtttgagtgtgg

SEQ ID NO: 2684083 - DNA, 25 bp, Homo sapien
tttgagtgtggtgctctgggaccct

SEQ ID NO: 2684084 - DNA, 25 bp, Homo sapien
taaagattcggctacaatgtgggca

SEQ ID NO: 2684085 - DNA, 25 bp, Homo sapien
gcttggctggactgtgcattcggaa

SEQ ID NO: 2684086 - DNA, 25 bp, Homo sapien
tagcagataacagtccttggtcggg

SEQ ID NO: 2684087 - DNA, 25 bp, Homo sapien
gacagggtgccaaattccttaccac

SEQ ID NO: 2684088 - DNA, 25 bp, Homo sapien
attttggcccataaggatgagtttt

SEQ ID NO: 2684089 - DNA, 25 bp, Homo sapien
ttttggcccataaggatgagtttta

SEQ ID NO: 2684090 - DNA, 25 bp, Homo sapien
tattttggcccataaggatgagttt

SEQ ID NO: 2684091 - DNA, 25 bp, Homo sapien
ttgctgcttggaattagtgtactct

SEQ ID NO: 2684092 - DNA, 25 bp, Homo sapien
tacactgggtgctgccctgttcctt

SEQ ID NO: 2684093 - DNA, 25 bp, Homo sapien
gaattagtgtactcttttaggcctc

SEQ ID NO: 2684094 - DNA, 25 bp, Homo sapien
gttacactgggtgctgccctgttcc

SEQ ID NO: 2684095 - DNA, 25 bp, Homo sapien
caggttcacctaatgcgtcttgtgt

SEQ ID NO: 2684096 - DNA, 25 bp, Homo sapien
accaccaggttcacctaatgcgtct

SEQ ID NO: 2684097 - DNA, 25 bp, Homo sapien
atgcgtcttgtgtggcatgaattac

SEQ ID NO: 2684098 - DNA, 25 bp, Homo sapien
cctaatgcgtcttgtgtggcatgaa

SEQ ID NO: 2684099 - DNA, 25 bp, Homo sapien
tattcagccaagagaggtataggcc

SEQ ID NO: 2684100 - DNA, 25 bp, Homo sapien
caacagggagttaacttgaacaggc

SEQ ID NO: 2684101 - DNA, 25 bp, Homo sapien
gctgctttgaggctgatacaaggca

SEQ ID NO: 2684102 - DNA, 25 bp, Homo sapien
taaactcagcataacccagcattgc

SEQ ID NO: 2684103 - DNA, 25 bp, Homo sapien
ggcacgatagctgattctaatctga

SEQ ID NO: 2684104 - DNA, 25 bp, Homo sapien
cataaggcacgatagctgattctaa

SEQ ID NO: 2684105 - DNA, 25 bp, Homo sapien
tgtgagaacataaggcacgatagct

SEQ ID NO: 2684106 - DNA, 25 bp, Homo sapien
gaaccctgtgagaacataaggcacg

SEQ ID NO: 2684107 - DNA, 25 bp, Homo sapien
ggagaaacattctgagggaaaggta

SEQ ID NO: 2684108 - DNA, 25 bp, Homo sapien
gagaaacattctgagggaaaggtaa

SEQ ID NO: 2684109 - DNA, 25 bp, Homo sapien
agtactatgatcatagttccgaaac

SEQ ID NO: 2684110 - DNA, 25 bp, Homo sapien
catagttccgaaactgtttctctca

SEQ ID NO: 2684111 - DNA, 25 bp, Homo sapien
ccaattagcttgaaagggcctaaag

SEQ ID NO: 2684112 - DNA, 25 bp, Homo sapien
agacaaaagcttcattctggtttat

SEQ ID NO: 2684113 - DNA, 25 bp, Homo sapien
gttccaattagcttgaaagggccta

SEQ ID NO: 2684114 - DNA, 25 bp, Homo sapien
tctggtttatagttaattagctctc

SEQ ID NO: 2684115 - DNA, 25 bp, Homo sapien
agaatatcctgccctcatgtgtttt

SEQ ID NO: 2684116 - DNA, 25 bp, Homo sapien
aatatcctgccctcatgtgtttttc

SEQ ID NO: 2684117 - DNA, 25 bp, Homo sapien
gtagagcattcctcacaagttcata

SEQ ID NO: 2684118 - DNA, 25 bp, Homo sapien
tggaagtagagcattcctcacaagt

SEQ ID NO: 2684119 - DNA, 25 bp, Homo sapien
gaagtagagcattcctcacaagttc

SEQ ID NO: 2684120 - DNA, 25 bp, Homo sapien
agagcattcctcacaagttcataaa

SEQ ID NO: 2684121 - DNA, 25 bp, Homo sapien
aggttttctctagccaagatcctga

SEQ ID NO: 2684122 - DNA, 25 bp, Homo sapien
catacatgctgccattgatccgaat

SEQ ID NO: 2684123 - DNA, 25 bp, Homo sapien
ggctagtgctttcacaccttttatg

SEQ ID NO: 2684124 - DNA, 25 bp, Homo sapien
cacatgtttcctcttggctagtgct

SEQ ID NO: 2684125 - DNA, 25 bp, Homo sapien
gccatgggatcatagaatgctgccc

SEQ ID NO: 2684126 - DNA, 25 bp, Homo sapien
aatgctgccctgatatgcaggcatg

SEQ ID NO: 2684127 - DNA, 25 bp, Homo sapien
gatattagtagtccagcggtcagca

SEQ ID NO: 2684128 - DNA, 25 bp, Homo sapien
tgtggtctgtcgatgtgagagccat

SEQ ID NO: 2684129 - DNA, 25 bp, Homo sapien
caatccggtctgtctattggccaac

SEQ ID NO: 2684130 - DNA, 25 bp, Homo sapien
caaatgtcatatctggaaggatcgt

SEQ ID NO: 2684131 - DNA, 25 bp, Homo sapien
tgattgtctagaaaccactggtatt

SEQ ID NO: 2684132 - DNA, 25 bp, Homo sapien
tggatgccgtgtaaaagaatttccc

SEQ ID NO: 2684133 - DNA, 25 bp, Homo sapien
agctcaatgcccctattttataaac

SEQ ID NO: 2684134 - DNA, 25 bp, Homo sapien
tgtgcatctatgatctgaatccagg

SEQ ID NO: 2684135 - DNA, 25 bp, Homo sapien
ttccaacctcttatggtagaaactg

SEQ ID NO: 2684136 - DNA, 25 bp, Homo sapien
aaagttttgttaggcaccatcccag

SEQ ID NO: 2684137 - DNA, 25 bp, Homo sapien
cctgaaccgtgacttggagcaaatc

SEQ ID NO: 2684138 - DNA, 25 bp, Homo sapien
tgagactgattcacgtgaggcccac

SEQ ID NO: 2684139 - DNA, 25 bp, Homo sapien
tcacaactgggcctagaactgacca

SEQ ID NO: 2684140 - DNA, 25 bp, Homo sapien
aaatagcccctgtaagcctgaaccg

SEQ ID NO: 2684141 - DNA, 25 bp, Homo sapien
cagacattgtggctcatgaatgcta

SEQ ID NO: 2684142 - DNA, 25 bp, Homo sapien
catattcacgaccacaaatgtagca

SEQ ID NO: 2684143 - DNA, 25 bp, Homo sapien
cagtaatggtcctgacttctggttt

SEQ ID NO: 2684144 - DNA, 25 bp, Homo sapien
ctctttaggcaacaagttgttttca

SEQ ID NO: 2684145 - DNA, 25 bp, Homo sapien
tgccaggacatagtgtctttatgtc

SEQ ID NO: 2684146 - DNA, 25 bp, Homo sapien
gaagataattctttggacaggcatt

SEQ ID NO: 2684147 - DNA, 25 bp, Homo sapien
acagtgttgccaggacatagtgtct

SEQ ID NO: 2684148 - DNA, 25 bp, Homo sapien
acagcaaattcccataggtccctct

SEQ ID NO: 2684149 - DNA, 25 bp, Homo sapien
cattacagggaaccaactggctgtg

SEQ ID NO: 2684150 - DNA, 25 bp, Homo sapien
cggctttgggtttacaagatcgttg

SEQ ID NO: 2684151 - DNA, 25 bp, Homo sapien
tggtgaacaatcagtctgtctggca

SEQ ID NO: 2684152 - DNA, 25 bp, Homo sapien
ggaaggtacgcccacaaacattaca

SEQ ID NO: 2684153 - DNA, 25 bp, Homo sapien
gcttcatacacataaggatgctggg

SEQ ID NO: 2684154 - DNA, 25 bp, Homo sapien
cacggatgtgaactcattgcgggag

SEQ ID NO: 2684155 - DNA, 25 bp, Homo sapien
tgagagttacaaagagctgcacgga

SEQ ID NO: 2684156 - DNA, 25 bp, Homo sapien
caaggtgaagccatcgtggaatctc

SEQ ID NO: 2684157 - DNA, 25 bp, Homo sapien
tgcatgtttcatgacgtttcatggg

SEQ ID NO: 2684158 - DNA, 25 bp, Homo sapien
gcttgccatctgttgcttctaactg

SEQ ID NO: 2684159 - DNA, 25 bp, Homo sapien
gtttcatgacgtttcatgggcatag

SEQ ID NO: 2684160 - DNA, 25 bp, Homo sapien
tgcttgccatctgttgcttctaact

SEQ ID NO: 2684161 - DNA, 25 bp, Homo sapien
gcagaaaataccagacatgtcagca

SEQ ID NO: 2684162 - DNA, 25 bp, Homo sapien
gaagtaaatagtctccattcccatg

SEQ ID NO: 2684163 - DNA, 25 bp, Homo sapien
atgtcagcatatcaccccgctctgg

SEQ ID NO: 2684164 - DNA, 25 bp, Homo sapien
tctgaggataaagtgtgaactctca

SEQ ID NO: 2684165 - DNA, 25 bp, Homo sapien
ctgtgactttggaagtctgaataac

SEQ ID NO: 2684166 - DNA, 25 bp, Homo sapien
gtgactttggaagtctgaataacag

SEQ ID NO: 2684167 - DNA, 25 bp, Homo sapien
tgtgactttggaagtctgaataaca

SEQ ID NO: 2684168 - DNA, 25 bp, Homo sapien
tcctagggtaaataatttcacttca

SEQ ID NO: 2684169 - DNA, 25 bp, Homo sapien
aataatttcacttcacatatgcttt

SEQ ID NO: 2684170 - DNA, 25 bp, Homo sapien
ccttctctgaaatacttcctagggt

SEQ ID NO: 2684171 - DNA, 25 bp, Homo sapien
tctgaaatacttcctagggtaaata

SEQ ID NO: 2684172 - DNA, 25 bp, Homo sapien
aactgggtccccagtatgctgatga

SEQ ID NO: 2684173 - DNA, 25 bp, Homo sapien
tagacagcactattggcattaactc

SEQ ID NO: 2684174 - DNA, 25 bp, Homo sapien
tgatgaggaactggtgtgtcatcaa

SEQ ID NO: 2684175 - DNA, 25 bp, Homo sapien
aggaactggtgtgtcatcaaagtgc

SEQ ID NO: 2684176 - DNA, 25 bp, Homo sapien
tttcttgtttcagactatttccatg

SEQ ID NO: 2684177 - DNA, 25 bp, Homo sapien
tttccatgtacagaactagtttgac

SEQ ID NO: 2684178 - DNA, 25 bp, Homo sapien
ctagtttgactgttctgagcctttt

SEQ ID NO: 2684179 - DNA, 25 bp, Homo sapien
gtttcagactatttccatgtacaga

SEQ ID NO: 2684180 - DNA, 25 bp, Homo sapien
ctccatataagatgaagcaatgcca

SEQ ID NO: 2684181 - DNA, 25 bp, Homo sapien
ttctgtagtcttgcaatatcccata

SEQ ID NO: 2684182 - DNA, 25 bp, Homo sapien
tagtcttgcaatatcccatatgatg

SEQ ID NO: 2684183 - DNA, 25 bp, Homo sapien
aagcaatgccatattctgtagtctt

SEQ ID NO: 2684184 - DNA, 25 bp, Homo sapien
actgccacgtaaccagatctattgc

SEQ ID NO: 2684185 - DNA, 25 bp, Homo sapien
caactgccacgtaaccagatctatt

SEQ ID NO: 2684186 - DNA, 25 bp, Homo sapien
ctgccacgtaaccagatctattgca

SEQ ID NO: 2684187 - DNA, 25 bp, Homo sapien
tcacaactgccacgtaaccagatct

SEQ ID NO: 2684188 - DNA, 25 bp, Homo sapien
ttgccctgggaaactcatgtctgag

SEQ ID NO: 2684189 - DNA, 25 bp, Homo sapien
gctctttttacctcgactgccgttg

SEQ ID NO: 2684190 - DNA, 25 bp, Homo sapien
gcagagtattttgcgttggcacgga

SEQ ID NO: 2684191 - DNA, 25 bp, Homo sapien
tcaccgtgatccaagcgttaaccgc

SEQ ID NO: 2684192 - DNA, 25 bp, Homo sapien
agaacagcctcagccgaagtaggcg

SEQ ID NO: 2684193 - DNA, 25 bp, Homo sapien
gctcaggagcgcgaagggactgact

SEQ ID NO: 2684194 - DNA, 25 bp, Homo sapien
gactgactgaccgaccgacggaccg

SEQ ID NO: 2684195 - DNA, 25 bp, Homo sapien
agtaggcgggcggtggaggcgctgc

SEQ ID NO: 2684196 - DNA, 25 bp, Homo sapien
gagacttccgcgatcagtaccgaaa

SEQ ID NO: 2684197 - DNA, 25 bp, Homo sapien
caagcagtagcgtgttcctcaaaga

SEQ ID NO: 2684198 - DNA, 25 bp, Homo sapien
taagatcccgggtgacagcaagaat

SEQ ID NO: 2684199 - DNA, 25 bp, Homo sapien
tttcctgtggaaactgtatggctgc

SEQ ID NO: 2684200 - DNA, 25 bp, Homo sapien
gagatgatcaaaccagtagtgctgt

SEQ ID NO: 2684201 - DNA, 25 bp, Homo sapien
aaagggctggcatccggtaaacact

SEQ ID NO: 2684202 - DNA, 25 bp, Homo sapien
taaaactggactcataatgcatggc

SEQ ID NO: 2684203 - DNA, 25 bp, Homo sapien
gaagtcaggaccaacagaggatcca

SEQ ID NO: 2684204 - DNA, 25 bp, Homo sapien
gagaccagaatataaaggccacgat

SEQ ID NO: 2684205 - DNA, 25 bp, Homo sapien
gccagtgtaggttggtgcagtcaca

SEQ ID NO: 2684206 - DNA, 25 bp, Homo sapien
tctgagttgtgcttgcctgccggac

SEQ ID NO: 2684207 - DNA, 25 bp, Homo sapien
tgcagtcacaagacaatgcttcagg

SEQ ID NO: 2684208 - DNA, 25 bp, Homo sapien
gcagcactggacaaagatgggagat

SEQ ID NO: 2684209 - DNA, 25 bp, Homo sapien
gatgcctcctgtccattcaatctga

SEQ ID NO: 2684210 - DNA, 25 bp, Homo sapien
ccactgccaatggtgggctttctaa

SEQ ID NO: 2684211 - DNA, 25 bp, Homo sapien
ttagaagcctagatgtgtgactgga

SEQ ID NO: 2684212 - DNA, 25 bp, Homo sapien
tactgagaggtcatgagcacgcatg

SEQ ID NO: 2684213 - DNA, 25 bp, Homo sapien
aaacggttgtacgatgtgtcacgca

SEQ ID NO: 2684214 - DNA, 25 bp, Homo sapien
aagaaacttgtaatccatgtgccag

SEQ ID NO: 2684215 - DNA, 25 bp, Homo sapien
gaagggcctgcctcaaatagatcaa

SEQ ID NO: 2684216 - DNA, 25 bp, Homo sapien
gatcatctgtcttgaaactaccagg

SEQ ID NO: 2684217 - DNA, 25 bp, Homo sapien
tattgtaactgtgtacgacgtgcac

SEQ ID NO: 2684218 - DNA, 25 bp, Homo sapien
gtgaccttagcccttgacctctgtt

SEQ ID NO: 2684219 - DNA, 25 bp, Homo sapien
tgtgaaaatgcttagcctcagccct

SEQ ID NO: 2684220 - DNA, 25 bp, Homo sapien
attagaatgctggtctcctattcag

SEQ ID NO: 2684221 - DNA, 25 bp, Homo sapien
gcattagaatgctggtctcctattc

SEQ ID NO: 2684222 - DNA, 25 bp, Homo sapien
caagcattagaatgctggtctccta

SEQ ID NO: 2684223 - DNA, 25 bp, Homo sapien
aagcattagaatgctggtctcctat

SEQ ID NO: 2684224 - DNA, 25 bp, Homo sapien
cagatgagatgactctaaatatcac

SEQ ID NO: 2684225 - DNA, 25 bp, Homo sapien
gaaagatacactcatgaggtttgaa

SEQ ID NO: 2684226 - DNA, 25 bp, Homo sapien
agatgaccactacttctttagggaa

SEQ ID NO: 2684227 - DNA, 25 bp, Homo sapien
acagagtgacctactttatgtggct

SEQ ID NO: 2684228 - DNA, 25 bp, Homo sapien
tatagaatgactgcccgaaataatg

SEQ ID NO: 2684229 - DNA, 25 bp, Homo sapien
tggcaagcagccaaggaaggttctt

SEQ ID NO: 2684230 - DNA, 25 bp, Homo sapien
gatccattaggaactttattaccac

SEQ ID NO: 2684231 - DNA, 25 bp, Homo sapien
gaaggttcttgggtataacgtgata

SEQ ID NO: 2684232 - DNA, 25 bp, Homo sapien
agcaaagcccttaagcacaactgct

SEQ ID NO: 2684233 - DNA, 25 bp, Homo sapien
gcaaagcccttaagcacaactgctg

SEQ ID NO: 2684234 - DNA, 25 bp, Homo sapien
aaagcccttaagcacaactgctgcc

SEQ ID NO: 2684235 - DNA, 25 bp, Homo sapien
caaagcccttaagcacaactgctgc

SEQ ID NO: 2684236 - DNA, 25 bp, Homo sapien
aacaattcagcccactgtggcctta

SEQ ID NO: 2684237 - DNA, 25 bp, Homo sapien
ctgcaaacaattcagcccactgtgg

SEQ ID NO: 2684238 - DNA, 25 bp, Homo sapien
tgcaaacaattcagcccactgtggc

SEQ ID NO: 2684239 - DNA, 25 bp, Homo sapien
caaacaattcagcccactgtggcct

SEQ ID NO: 2684240 - DNA, 25 bp, Homo sapien
tcagtcttctatgctgatctcttct

SEQ ID NO: 2684241 - DNA, 25 bp, Homo sapien
cctggtatatgctacgtaagtgcta

SEQ ID NO: 2684242 - DNA, 25 bp, Homo sapien
gaactgaagcctgccataccatcct

SEQ ID NO: 2684243 - DNA, 25 bp, Homo sapien
atttagaacagtgcccgcacctggt

SEQ ID NO: 2684244 - DNA, 25 bp, Homo sapien
tattagtttgccattccattttcat

SEQ ID NO: 2684245 - DNA, 25 bp, Homo sapien
tcaaagacaacgagaggaaacactg

SEQ ID NO: 2684246 - DNA, 25 bp, Homo sapien
gatgttcaaagacaacgagaggaaa

SEQ ID NO: 2684247 - DNA, 25 bp, Homo sapien
caaagacaacgagaggaaacactgg

SEQ ID NO: 2684248 - DNA, 25 bp, Homo sapien
atctgatgttcaaagacaacgagag

SEQ ID NO: 2684249 - DNA, 25 bp, Homo sapien
ccaatgtttcctctatggtgagcca

SEQ ID NO: 2684250 - DNA, 25 bp, Homo sapien
ggtgagccatactgataatctttct

SEQ ID NO: 2684251 - DNA, 25 bp, Homo sapien
gattcctcaatctccaatgtttcct

SEQ ID NO: 2684252 - DNA, 25 bp, Homo sapien
gggtcagaaaacactcagattcctc

SEQ ID NO: 2684253 - DNA, 25 bp, Homo sapien
gtacttggtactagcattcctatga

SEQ ID NO: 2684254 - DNA, 25 bp, Homo sapien
tacaattctcttcacgtcaatactg

SEQ ID NO: 2684255 - DNA, 25 bp, Homo sapien
gagttctccgacttcaaacattcca

SEQ ID NO: 2684256 - DNA, 25 bp, Homo sapien
actgcagagttcctctagatagctc

SEQ ID NO: 2684257 - DNA, 25 bp, Homo sapien
tgatgtcccttaggctcccaactca

SEQ ID NO: 2684258 - DNA, 25 bp, Homo sapien
gacaataccatcaacctcagctgag

SEQ ID NO: 2684259 - DNA, 25 bp, Homo sapien
gacagacttgggtaccatccctgga

SEQ ID NO: 2684260 - DNA, 25 bp, Homo sapien
gttgctccctatggtcaagtcttgg

SEQ ID NO: 2684261 - DNA, 25 bp, Homo sapien
gatgctcatgaagattaggatggta

SEQ ID NO: 2684262 - DNA, 25 bp, Homo sapien
ggatggtacaagtgatgatctcaag

SEQ ID NO: 2684263 - DNA, 25 bp, Homo sapien
ctcaagcacgtctgcagagggcttc

SEQ ID NO: 2684264 - DNA, 25 bp, Homo sapien
gtgatgatctcaagcacgtctgcag

SEQ ID NO: 2684265 - DNA, 25 bp, Homo sapien
ctgtaaatgcccagtgatacatctt

SEQ ID NO: 2684266 - DNA, 25 bp, Homo sapien
aagcagatggccagtgaagttgtca

SEQ ID NO: 2684267 - DNA, 25 bp, Homo sapien
ggtccaggcttggatttacacccaa

SEQ ID NO: 2684268 - DNA, 25 bp, Homo sapien
ttgtcagggctgatgtaaagcacag

SEQ ID NO: 2684269 - DNA, 25 bp, Homo sapien
tgaatccaatatgataccagaagag

SEQ ID NO: 2684270 - DNA, 25 bp, Homo sapien
tagtagacaagggatctgtatcatt

SEQ ID NO: 2684271 - DNA, 25 bp, Homo sapien
tgttagtagacaagggatctgtatc

SEQ ID NO: 2684272 - DNA, 25 bp, Homo sapien
gtagacaagggatctgtatcatttc

SEQ ID NO: 2684273 - DNA, 25 bp, Homo sapien
cctgttagtagacaagggatctgta

SEQ ID NO: 2684274 - DNA, 25 bp, Homo sapien
aaaggactgagagcagagaagcttg

SEQ ID NO: 2684275 - DNA, 25 bp, Homo sapien
tcctctttggcaccacagaaggtca

SEQ ID NO: 2684276 - DNA, 25 bp, Homo sapien
taaccaacataagcaagaaaggact

SEQ ID NO: 2684277 - DNA, 25 bp, Homo sapien
tggcccctctaaggatttcaatttc

SEQ ID NO: 2684278 - DNA, 25 bp, Homo sapien
gaatttgcctctacttcccagcagg

SEQ ID NO: 2684279 - DNA, 25 bp, Homo sapien
tggatggccccaccttagactaagg

SEQ ID NO: 2684280 - DNA, 25 bp, Homo sapien
gactaaggctcctaggcatctggaa

SEQ ID NO: 2684281 - DNA, 25 bp, Homo sapien
tatccagttgagtgtagccattcca

SEQ ID NO: 2684282 - DNA, 25 bp, Homo sapien
attttcccatcacttatcatcatcc

SEQ ID NO: 2684283 - DNA, 25 bp, Homo sapien
ttttcccatcacttatcatcatccc

SEQ ID NO: 2684284 - DNA, 25 bp, Homo sapien
ctggctttccagaagcagcaaacac

SEQ ID NO: 2684285 - DNA, 25 bp, Homo sapien
tattgggtgctagtgttgccttgga

SEQ ID NO: 2684286 - DNA, 25 bp, Homo sapien
ctttgccagagcagtaacttgggtc

SEQ ID NO: 2684287 - DNA, 25 bp, Homo sapien
ccagtgggcactcaaagtcctttgc

SEQ ID NO: 2684288 - DNA, 25 bp, Homo sapien
ttgagtacggtcaaatacttataaa

SEQ ID NO: 2684289 - DNA, 25 bp, Homo sapien
cacattttgagtacggtcaaatact

SEQ ID NO: 2684290 - DNA, 25 bp, Homo sapien
tattcttccttgcacattttgagta

SEQ ID NO: 2684291 - DNA, 25 bp, Homo sapien
tccttgcacattttgagtacggtca

SEQ ID NO: 2684292 - DNA, 25 bp, Homo sapien
caaatcaaggtattcaggggcttcc

SEQ ID NO: 2684293 - DNA, 25 bp, Homo sapien
tccaaatcaaggtattcaggggctt

SEQ ID NO: 2684294 - DNA, 25 bp, Homo sapien
aatcaaggtattcaggggcttccat

SEQ ID NO: 2684295 - DNA, 25 bp, Homo sapien
ttcatccaaatcaaggtattcaggg

SEQ ID NO: 2684296 - DNA, 25 bp, Homo sapien
tttgcctcgcaaagctgatgtatga

SEQ ID NO: 2684297 - DNA, 25 bp, Homo sapien
tggccctgtaaccttgtgaatgtca

SEQ ID NO: 2684298 - DNA, 25 bp, Homo sapien
gagtttatctcagtgtgcggcacgg

SEQ ID NO: 2684299 - DNA, 25 bp, Homo sapien
agtaaggtggccaaatagttctgca

SEQ ID NO: 2684300 - DNA, 25 bp, Homo sapien
cacatctaagctgtattctttgccc

SEQ ID NO: 2684301 - DNA, 25 bp, Homo sapien
tcacatctaagctgtattctttgcc

SEQ ID NO: 2684302 - DNA, 25 bp, Homo sapien
caaagcccattgcatcttccctgtc

SEQ ID NO: 2684303 - DNA, 25 bp, Homo sapien
gtcagtttggccctatgggaaccaa

SEQ ID NO: 2684304 - DNA, 25 bp, Homo sapien
gctcccagggcagcaactactgtca

SEQ ID NO: 2684305 - DNA, 25 bp, Homo sapien
ctccaatccaagcttttgtagcctg

SEQ ID NO: 2684306 - DNA, 25 bp, Homo sapien
gcgtatcacatcttcggcacagttc

SEQ ID NO: 2684307 - DNA, 25 bp, Homo sapien
gcacagttctgggatcgtcttgagt

SEQ ID NO: 2684308 - DNA, 25 bp, Homo sapien
ggatcgtcttgagtgatgtgactga

SEQ ID NO: 2684309 - DNA, 25 bp, Homo sapien
ctgatctgtcttcgttttgcgtatc

SEQ ID NO: 2684310 - DNA, 25 bp, Homo sapien
tattattttcaataccaccagaatt

SEQ ID NO: 2684311 - DNA, 25 bp, Homo sapien
attattttcaataccaccagaattt

SEQ ID NO: 2684312 - DNA, 25 bp, Homo sapien
ttattattttcaataccaccagaat

SEQ ID NO: 2684313 - DNA, 25 bp, Homo sapien
tttattattttcaataccaccagaa

SEQ ID NO: 2684314 - DNA, 25 bp, Homo sapien
tggccgtgcagcacgcacacatttt

SEQ ID NO: 2684315 - DNA, 25 bp, Homo sapien
tgtgagcaggctcagtatggcttct

SEQ ID NO: 2684316 - DNA, 25 bp, Homo sapien
ttaactgaaggtggcgatgttttac

SEQ ID NO: 2684317 - DNA, 25 bp, Homo sapien
tacagggctgatctaccgtcaagga

SEQ ID NO: 2684318 - DNA, 25 bp, Homo sapien
tgtctgggtcttacgaaaacacgtc

SEQ ID NO: 2684319 - DNA, 25 bp, Homo sapien
tctggaaccaagctaacgggatgag

SEQ ID NO: 2684320 - DNA, 25 bp, Homo sapien
taaaagatgacccagtacccttgga

SEQ ID NO: 2684321 - DNA, 25 bp, Homo sapien
ggtttccaagggtctgcactatgca

SEQ ID NO: 2684322 - DNA, 25 bp, Homo sapien
tcactgggcggaacttactgtacac

SEQ ID NO: 2684323 - DNA, 25 bp, Homo sapien
gatctcggtttcttcagtggacagc

SEQ ID NO: 2684324 - DNA, 25 bp, Homo sapien
tttaaccagaggaggtgagatctcg

SEQ ID NO: 2684325 - DNA, 25 bp, Homo sapien
tccatgtcgaggtcgtagtgctcca

SEQ ID NO: 2684326 - DNA, 25 bp, Homo sapien
caaagaagtgaggtgctgtagacac

SEQ ID NO: 2684327 - DNA, 25 bp, Homo sapien
tgtgacgccgcaatatgtaatagat

SEQ ID NO: 2684328 - DNA, 25 bp, Homo sapien
tgtagacactctgcgtgtccctgtg

SEQ ID NO: 2684329 - DNA, 25 bp, Homo sapien
tctagattgtctgcagctaggtgtg

SEQ ID NO: 2684330 - DNA, 25 bp, Homo sapien
cctgctggagtcaacttctcagtgt

SEQ ID NO: 2684331 - DNA, 25 bp, Homo sapien
gcctgctggagtcaacttctcagtg

SEQ ID NO: 2684332 - DNA, 25 bp, Homo sapien
ggcctgctggagtcaacttctcagt

SEQ ID NO: 2684333 - DNA, 25 bp, Homo sapien
cagcttctagctgtggaggttccag

SEQ ID NO: 2684334 - DNA, 25 bp, Homo sapien
caacactttagctcacaaggaatct

SEQ ID NO: 2684335 - DNA, 25 bp, Homo sapien
ctttgcttgacaaatcactctcttc

SEQ ID NO: 2684336 - DNA, 25 bp, Homo sapien
aaaaatagaaatccagcttctagct

SEQ ID NO: 2684337 - DNA, 25 bp, Homo sapien
tctagggtggaaaattaggctatta

SEQ ID NO: 2684338 - DNA, 25 bp, Homo sapien
gaggcatttacagctacaaatctcc

SEQ ID NO: 2684339 - DNA, 25 bp, Homo sapien
cttgtaagtgttggtatgttgtatt

SEQ ID NO: 2684340 - DNA, 25 bp, Homo sapien
tagttgcatcttgtaagtgttggta

SEQ ID NO: 2684341 - DNA, 25 bp, Homo sapien
cctcgtgattaaaacccagattctg

SEQ ID NO: 2684342 - DNA, 25 bp, Homo sapien
tgttccctaccacttatagagcagt

SEQ ID NO: 2684343 - DNA, 25 bp, Homo sapien
ctgccacttagttgcaagaccatgg

SEQ ID NO: 2684344 - DNA, 25 bp, Homo sapien
tgtgaaacagtgaaatagcagggat

SEQ ID NO: 2684345 - DNA, 25 bp, Homo sapien
agcgtacgcactccaactgaccatt

SEQ ID NO: 2684346 - DNA, 25 bp, Homo sapien
tagaacaactcagttctgcaatggc

SEQ ID NO: 2684347 - DNA, 25 bp, Homo sapien
tggcttctgtttcgctcaccatcca

SEQ ID NO: 2684348 - DNA, 25 bp, Homo sapien
tgtttcgctcaccatccagcgtacg

SEQ ID NO: 2684349 - DNA, 25 bp, Homo sapien
ctggccatagcaacctgcgtaatga

SEQ ID NO: 2684350 - DNA, 25 bp, Homo sapien
tagcaacctgcgtaatgaataaggc

SEQ ID NO: 2684351 - DNA, 25 bp, Homo sapien
gcaacctgcgtaatgaataaggctt

SEQ ID NO: 2684352 - DNA, 25 bp, Homo sapien
ccatagcaacctgcgtaatgaataa

SEQ ID NO: 2684353 - DNA, 25 bp, Homo sapien
accttcatgtactgactgaaaactc

SEQ ID NO: 2684354 - DNA, 25 bp, Homo sapien
caaccttcatgtactgactgaaaac

SEQ ID NO: 2684355 - DNA, 25 bp, Homo sapien
cattcaaccttcatgtactgactga

SEQ ID NO: 2684356 - DNA, 25 bp, Homo sapien
tctgctgttttggtaacctgtttta

SEQ ID NO: 2684357 - DNA, 25 bp, Homo sapien
gatgccctgttcttgcataaactga

SEQ ID NO: 2684358 - DNA, 25 bp, Homo sapien
tcatccaacgagatgccctgttctt

SEQ ID NO: 2684359 - DNA, 25 bp, Homo sapien
tgaggctacgtgaacggcactgttg

SEQ ID NO: 2684360 - DNA, 25 bp, Homo sapien
gaggctacgtgaacggcactgttgc

SEQ ID NO: 2684361 - DNA, 25 bp, Homo sapien
gtgaggctacgtgaacggcactgtt

SEQ ID NO: 2684362 - DNA, 25 bp, Homo sapien
tgtgaggctacgtgaacggcactgt

SEQ ID NO: 2684363 - DNA, 25 bp, Homo sapien
gtggtgtgtaaaaaggcatgtctca

SEQ ID NO: 2684364 - DNA, 25 bp, Homo sapien
actgcagcccagaagagataggggg

SEQ ID NO: 2684365 - DNA, 25 bp, Homo sapien
ggataggagctaaagtggtgtgtaa

SEQ ID NO: 2684366 - DNA, 25 bp, Homo sapien
agatagggggataggagctaaagtg

SEQ ID NO: 2684367 - DNA, 25 bp, Homo sapien
ctggatttggtctctggtaattggt

SEQ ID NO: 2684368 - DNA, 25 bp, Homo sapien
gttgctgcgccaacctgatcaggaa

SEQ ID NO: 2684369 - DNA, 25 bp, Homo sapien
ctagtaactggatttggtctctggt

SEQ ID NO: 2684370 - DNA, 25 bp, Homo sapien
ttgctgcgccaacctgatcaggaat

SEQ ID NO: 2684371 - DNA, 25 bp, Homo sapien
agagcctctagggacctttcagcag

SEQ ID NO: 2684372 - DNA, 25 bp, Homo sapien
cctttatgagatatgcagtgcagtc

SEQ ID NO: 2684373 - DNA, 25 bp, Homo sapien
tcatctgcagcccacataaggaggg

SEQ ID NO: 2684374 - DNA, 25 bp, Homo sapien
gtctcttgtcatggttgggctccaa

SEQ ID NO: 2684375 - DNA, 25 bp, Homo sapien
tcctttagctgcttggttaacttca

SEQ ID NO: 2684376 - DNA, 25 bp, Homo sapien
ccagcgtggttctgcatggtgacat

SEQ ID NO: 2684377 - DNA, 25 bp, Homo sapien
caccacttgagaggccagcgacatg

SEQ ID NO: 2684378 - DNA, 25 bp, Homo sapien
gctcggcgctctgggagggcttttc

SEQ ID NO: 2684379 - DNA, 25 bp, Homo sapien
ggttctgcagcgtgacacgttctac

SEQ ID NO: 2684380 - DNA, 25 bp, Homo sapien
ttctagaaattgttggagttggttc

SEQ ID NO: 2684381 - DNA, 25 bp, Homo sapien
gagtgacttgccctctgatttctgg

SEQ ID NO: 2684382 - DNA, 25 bp, Homo sapien
ctgggtgaagaagggagtgacttgc

SEQ ID NO: 2684383 - DNA, 25 bp, Homo sapien
tacgctttctacaatgggctgcggc

SEQ ID NO: 2684384 - DNA, 25 bp, Homo sapien
gattcgttacttgtggaggtccgct

SEQ ID NO: 2684385 - DNA, 25 bp, Homo sapien
tctccatgatagatcgaaaggctcc

SEQ ID NO: 2684386 - DNA, 25 bp, Homo sapien
caagggcaatgtagaggttttcagc

SEQ ID NO: 2684387 - DNA, 25 bp, Homo sapien
cattagacacatgaagttggctttc

SEQ ID NO: 2684388 - DNA, 25 bp, Homo sapien
caatctgtgatattaggaacaacat

SEQ ID NO: 2684389 - DNA, 25 bp, Homo sapien
gattccctcaaggtagtgtgggccc

SEQ ID NO: 2684390 - DNA, 25 bp, Homo sapien
gggtatgtatctaacatgacatgtc

SEQ ID NO: 2684391 - DNA, 25 bp, Homo sapien
tcaatcagcatgttagaggaaagat

SEQ ID NO: 2684392 - DNA, 25 bp, Homo sapien
tcgttacacagatgctcttcaatca

SEQ ID NO: 2684393 - DNA, 25 bp, Homo sapien
gattgatgcagctgctgtacatttc

SEQ ID NO: 2684394 - DNA, 25 bp, Homo sapien
gaaagattgatgcagctgctgtaca

SEQ ID NO: 2684395 - DNA, 25 bp, Homo sapien
acgtcttatttgagaaaggcccttg

SEQ ID NO: 2684396 - DNA, 25 bp, Homo sapien
tgcagaagaactttgcccaaggagg

SEQ ID NO: 2684397 - DNA, 25 bp, Homo sapien
tagttctgatcggaggctgactcac

SEQ ID NO: 2684398 - DNA, 25 bp, Homo sapien
tagagggcactcataaacctggctc

SEQ ID NO: 2684399 - DNA, 25 bp, Homo sapien
aagagtgctgaatggcatgttataa

SEQ ID NO: 2684400 - DNA, 25 bp, Homo sapien
agagtgctgaatggcatgttataat

SEQ ID NO: 2684401 - DNA, 25 bp, Homo sapien
gagtgctgaatggcatgttataatt

SEQ ID NO: 2684402 - DNA, 25 bp, Homo sapien
gacacctgacttctggcaacatgtg

SEQ ID NO: 2684403 - DNA, 25 bp, Homo sapien
ggccggaagcagttcagacacctga

SEQ ID NO: 2684404 - DNA, 25 bp, Homo sapien
catgtgagcctgacccaagcagatc

SEQ ID NO: 2684405 - DNA, 25 bp, Homo sapien
caggcattgggctctcaccattggc

SEQ ID NO: 2684406 - DNA, 25 bp, Homo sapien
tgtgcatccctgctacctgagagga

SEQ ID NO: 2684407 - DNA, 25 bp, Homo sapien
tccctgttgctgtaggagcctggaa

SEQ ID NO: 2684408 - DNA, 25 bp, Homo sapien
ttatctcaggagtgaaccggcctag

SEQ ID NO: 2684409 - DNA, 25 bp, Homo sapien
gattatgagtgagtgaaacctctcc

SEQ ID NO: 2684410 - DNA, 25 bp, Homo sapien
ggatatgctgatagggccatgtaga

SEQ ID NO: 2684411 - DNA, 25 bp, Homo sapien
aactggaatcactgctcactttgtg

SEQ ID NO: 2684412 - DNA, 25 bp, Homo sapien
tttgtgccctaaagatctcagatgg

SEQ ID NO: 2684413 - DNA, 25 bp, Homo sapien
gcccttttgcctatcagtaactgga

SEQ ID NO: 2684414 - DNA, 25 bp, Homo sapien
ttcttttgactctggctcagcaatg

SEQ ID NO: 2684415 - DNA, 25 bp, Homo sapien
gagttcttttgactctggctcagca

SEQ ID NO: 2684416 - DNA, 25 bp, Homo sapien
gcaatgtgctttatgctgtaggatt

SEQ ID NO: 2684417 - DNA, 25 bp, Homo sapien
agttcttttgactctggctcagcaa

SEQ ID NO: 2684418 - DNA, 25 bp, Homo sapien
tgacagaaacaataccactgacctg

SEQ ID NO: 2684419 - DNA, 25 bp, Homo sapien
tctttccaaagaggatagtccagaa

SEQ ID NO: 2684420 - DNA, 25 bp, Homo sapien
cctgtgggtagggtgaatcaatcta

SEQ ID NO: 2684421 - DNA, 25 bp, Homo sapien
tgaaggagctgagccaaatctgccc

SEQ ID NO: 2684422 - DNA, 25 bp, Homo sapien
gatttgttagaaagtaggtgcccca

SEQ ID NO: 2684423 - DNA, 25 bp, Homo sapien
tttgacgcctatgggaaaactgcta

SEQ ID NO: 2684424 - DNA, 25 bp, Homo sapien
gtcccttagaaatcagaacatcaca

SEQ ID NO: 2684425 - DNA, 25 bp, Homo sapien
actgctaaactgagcagtttgttcc

SEQ ID NO: 2684426 - DNA, 25 bp, Homo sapien
atggagtgaaggagttgcatcaaca

SEQ ID NO: 2684427 - DNA, 25 bp, Homo sapien
tggggctgttatgaactcgggctcc

SEQ ID NO: 2684428 - DNA, 25 bp, Homo sapien
ggctgttatgaactcgggctccaca

SEQ ID NO: 2684429 - DNA, 25 bp, Homo sapien
gtgaaggagttgcatcaacaatggg

SEQ ID NO: 2684430 - DNA, 25 bp, Homo sapien
ggacccggacaaggacatagcacat

SEQ ID NO: 2684431 - DNA, 25 bp, Homo sapien
tccagatttcttgggcagggcaacg

SEQ ID NO: 2684432 - DNA, 25 bp, Homo sapien
gggcaacgtccctttcctgagatca

SEQ ID NO: 2684433 - DNA, 25 bp, Homo sapien
catagcacatggactgaaattcaca

SEQ ID NO: 2684434 - DNA, 25 bp, Homo sapien
atttgaagtcttgatactgttttac

SEQ ID NO: 2684435 - DNA, 25 bp, Homo sapien
taatttgctgcgttgaactttggca

SEQ ID NO: 2684436 - DNA, 25 bp, Homo sapien
atccactgaaagcggtgacagtttg

SEQ ID NO: 2684437 - DNA, 25 bp, Homo sapien
tatcttttgaaagcctcatccccac

SEQ ID NO: 2684438 - DNA, 25 bp, Homo sapien
cgtggagtgctccttagagggactc

SEQ ID NO: 2684439 - DNA, 25 bp, Homo sapien
gagtgctccttagagggactctcag

SEQ ID NO: 2684440 - DNA, 25 bp, Homo sapien
gcattgacgtggagtgctccttaga

SEQ ID NO: 2684441 - DNA, 25 bp, Homo sapien
ggtacattgcattgacgtggagtgc

SEQ ID NO: 2684442 - DNA, 25 bp, Homo sapien
agatcctttttcttcctgtaagtag

SEQ ID NO: 2684443 - DNA, 25 bp, Homo sapien
tagatcctttttcttcctgtaagta

SEQ ID NO: 2684444 - DNA, 25 bp, Homo sapien
atttctagatcctttttcttcctgt

SEQ ID NO: 2684445 - DNA, 25 bp, Homo sapien
tctagatcctttttcttcctgtaag

SEQ ID NO: 2684446 - DNA, 25 bp, Homo sapien
tcactatatgggaattgttcatgaa

SEQ ID NO: 2684447 - DNA, 25 bp, Homo sapien
ccttgaggactcactatatgggaat

SEQ ID NO: 2684448 - DNA, 25 bp, Homo sapien
ggactcactatatgggaattgttca

SEQ ID NO: 2684449 - DNA, 25 bp, Homo sapien
tctggccactccttgaggactcact

SEQ ID NO: 2684450 - DNA, 25 bp, Homo sapien
tggctctgcagatccagtgcctgtt

SEQ ID NO: 2684451 - DNA, 25 bp, Homo sapien
gctctgcagatccagtgcctgttac

SEQ ID NO: 2684452 - DNA, 25 bp, Homo sapien
gcactggctctgcagatccagtgcc

SEQ ID NO: 2684453 - DNA, 25 bp, Homo sapien
actggctctgcagatccagtgcctg

SEQ ID NO: 2684454 - DNA, 25 bp, Homo sapien
gcccagttggcctgccaatggatcc

SEQ ID NO: 2684455 - DNA, 25 bp, Homo sapien
atggatcccgctctggatgacagac

SEQ ID NO: 2684456 - DNA, 25 bp, Homo sapien
ttggcctgccaatggatcccgctct

SEQ ID NO: 2684457 - DNA, 25 bp, Homo sapien
cctgccaatggatcccgctctggat

SEQ ID NO: 2684458 - DNA, 25 bp, Homo sapien
tatgaggctccatgcaaggcgaaca

SEQ ID NO: 2684459 - DNA, 25 bp, Homo sapien
ggctggacccagaaatatgaggctc

SEQ ID NO: 2684460 - DNA, 25 bp, Homo sapien
ccatttagggcaagagcttcctgga

SEQ ID NO: 2684461 - DNA, 25 bp, Homo sapien
ccagcactgttggttctttctcaga

SEQ ID NO: 2684462 - DNA, 25 bp, Homo sapien
cacgtgaggacgcttggcttgggtt

SEQ ID NO: 2684463 - DNA, 25 bp, Homo sapien
gttcagggaggattgaagaactgac

SEQ ID NO: 2684464 - DNA, 25 bp, Homo sapien
gaggacgcttggcttgggttgcatc

SEQ ID NO: 2684465 - DNA, 25 bp, Homo sapien
ctagtgaccaaacagttcagggagg

SEQ ID NO: 2684466 - DNA, 25 bp, Homo sapien
ggaggggaaggcgtgctgagagagg

SEQ ID NO: 2684467 - DNA, 25 bp, Homo sapien
tccagcatagcccaattctggaagg

SEQ ID NO: 2684468 - DNA, 25 bp, Homo sapien
agagtggaggggaaggcgtgctgag

SEQ ID NO: 2684469 - DNA, 25 bp, Homo sapien
gcatgcaggctcttgttgaattccc

SEQ ID NO: 2684470 - DNA, 25 bp, Homo sapien
ttgaatttggtgacaaaggacttgc

SEQ ID NO: 2684471 - DNA, 25 bp, Homo sapien
tttgaatttggtgacaaaggacttg

SEQ ID NO: 2684472 - DNA, 25 bp, Homo sapien
ctttgaatttggtgacaaaggactt

SEQ ID NO: 2684473 - DNA, 25 bp, Homo sapien
tatgagcaggcaacatctgactcca

SEQ ID NO: 2684474 - DNA, 25 bp, Homo sapien
gaaaggagcccaatcatacagaggt

SEQ ID NO: 2684475 - DNA, 25 bp, Homo sapien
tctgtaagtactgtagcggatgcct

SEQ ID NO: 2684476 - DNA, 25 bp, Homo sapien
tcattgcgttgcatggtagaagccc

SEQ ID NO: 2684477 - DNA, 25 bp, Homo sapien
taaaggatttcctttcatagaccat

SEQ ID NO: 2684478 - DNA, 25 bp, Homo sapien
aaggatttcctttcatagaccattt

SEQ ID NO: 2684479 - DNA, 25 bp, Homo sapien
gagccacccacctcattatttaaag

SEQ ID NO: 2684480 - DNA, 25 bp, Homo sapien
agctgtatgatgtccagagccaccc

SEQ ID NO: 2684481 - DNA, 25 bp, Homo sapien
tagtggtatagaactagaatctttg

SEQ ID NO: 2684482 - DNA, 25 bp, Homo sapien
tagaactagaatctttgtattttcc

SEQ ID NO: 2684483 - DNA, 25 bp, Homo sapien
gtattttccatagagtgcttcagca

SEQ ID NO: 2684484 - DNA, 25 bp, Homo sapien
ttccatagagtgcttcagcaaagag

SEQ ID NO: 2684485 - DNA, 25 bp, Homo sapien
gtattctagcttggcaccacattta

SEQ ID NO: 2684486 - DNA, 25 bp, Homo sapien
tattctagcttggcaccacatttat

SEQ ID NO: 2684487 - DNA, 25 bp, Homo sapien
atgtattctagcttggcaccacatt

SEQ ID NO: 2684488 - DNA, 25 bp, Homo sapien
tgtattctagcttggcaccacattt

SEQ ID NO: 2684489 - DNA, 25 bp, Homo sapien
tggtggatatcgtccatgcagattg

SEQ ID NO: 2684490 - DNA, 25 bp, Homo sapien
tgtttttcgttcctgacaaactcca

SEQ ID NO: 2684491 - DNA, 25 bp, Homo sapien
acatgtctgttgatttgtgggaagc

SEQ ID NO: 2684492 - DNA, 25 bp, Homo sapien
tgggaagctggctgtttttcgttcc

SEQ ID NO: 2684493 - DNA, 25 bp, Homo sapien
cccctgtgagtaactgatcctcttt

SEQ ID NO: 2684494 - DNA, 25 bp, Homo sapien
tgttttatcctcacacgtttcatcg

SEQ ID NO: 2684495 - DNA, 25 bp, Homo sapien
cgtttcatcgtctttagctgtaagc

SEQ ID NO: 2684496 - DNA, 25 bp, Homo sapien
caatcccctaggttgtgactctgga

SEQ ID NO: 2684497 - DNA, 25 bp, Homo sapien
gagcattccttcaggtgtttggagg

SEQ ID NO: 2684498 - DNA, 25 bp, Homo sapien
gagttggtcgtattatccacataac

SEQ ID NO: 2684499 - DNA, 25 bp, Homo sapien
gaagttggagttggtcgtattatcc

SEQ ID NO: 2684500 - DNA, 25 bp, Homo sapien
tgtttggagggatgtgaacttgatc

SEQ ID NO: 2684501 - DNA, 25 bp, Homo sapien
tttgctgtgaataatggtgagtgaa

SEQ ID NO: 2684502 - DNA, 25 bp, Homo sapien
taatggtgagtgaaggtggatttga

SEQ ID NO: 2684503 - DNA, 25 bp, Homo sapien
aatggtgagtgaaggtggatttgaa

SEQ ID NO: 2684504 - DNA, 25 bp, Homo sapien
atttgctgtgaataatggtgagtga

SEQ ID NO: 2684505 - DNA, 25 bp, Homo sapien
gtaactcccaagagtgacagatcct

SEQ ID NO: 2684506 - DNA, 25 bp, Homo sapien
tactgttgcctttgccttgaaagag

SEQ ID NO: 2684507 - DNA, 25 bp, Homo sapien
tattggcacctgttgaaaccatacc

SEQ ID NO: 2684508 - DNA, 25 bp, Homo sapien
gacagatcctttgagccttggcata

SEQ ID NO: 2684509 - DNA, 25 bp, Homo sapien
tgtctacacttttcccctgaacatc

SEQ ID NO: 2684510 - DNA, 25 bp, Homo sapien
ttgtctacacttttcccctgaacat

SEQ ID NO: 2684511 - DNA, 25 bp, Homo sapien
caattgctgaacctgtttaggtttg

SEQ ID NO: 2684512 - DNA, 25 bp, Homo sapien
gctgaacctgtttaggtttgtggta

SEQ ID NO: 2684513 - DNA, 25 bp, Homo sapien
gctttcaattgctgaacctgtttag

SEQ ID NO: 2684514 - DNA, 25 bp, Homo sapien
ttcaattgctgaacctgtttaggtt

SEQ ID NO: 2684515 - DNA, 25 bp, Homo sapien
gaagccgagtaattgagcacgtgaa

SEQ ID NO: 2684516 - DNA, 25 bp, Homo sapien
tgcattccaggaagccgagtaattg

SEQ ID NO: 2684517 - DNA, 25 bp, Homo sapien
gaaatgcacgatgcattccaggaag

SEQ ID NO: 2684518 - DNA, 25 bp, Homo sapien
gcatgtggaaaacctagaagcaaga

SEQ ID NO: 2684519 - DNA, 25 bp, Homo sapien
acacatgtgtatgcagaatccccat

SEQ ID NO: 2684520 - DNA, 25 bp, Homo sapien
tgtatgcagaatccccatgggccat

SEQ ID NO: 2684521 - DNA, 25 bp, Homo sapien
tgtgtatgcagaatccccatgggcc

SEQ ID NO: 2684522 - DNA, 25 bp, Homo sapien
catgtgtatgcagaatccccatggg

SEQ ID NO: 2684523 - DNA, 25 bp, Homo sapien
gagaactctgtatgggacacccata

SEQ ID NO: 2684524 - DNA, 25 bp, Homo sapien
tcaacagctggtagacgacgcagga

SEQ ID NO: 2684525 - DNA, 25 bp, Homo sapien
cgacgcaggactccggagtagatgt

SEQ ID NO: 2684526 - DNA, 25 bp, Homo sapien
cagtcctgcaggtgatgagaactct

SEQ ID NO: 2684527 - DNA, 25 bp, Homo sapien
agctgagttctttggcggctgacca

SEQ ID NO: 2684528 - DNA, 25 bp, Homo sapien
gctgagttctttggcggctgaccat

SEQ ID NO: 2684529 - DNA, 25 bp, Homo sapien
cagctgagttctttggcggctgacc

SEQ ID NO: 2684530 - DNA, 25 bp, Homo sapien
tcagctgagttctttggcggctgac

SEQ ID NO: 2684531 - DNA, 25 bp, Homo sapien
tgtttaagtataaggccatgcgtct

SEQ ID NO: 2684532 - DNA, 25 bp, Homo sapien
caagttcatgaaccaagaaaaccac

SEQ ID NO: 2684533 - DNA, 25 bp, Homo sapien
tacagtaacatggaacaaaagtgaa

SEQ ID NO: 2684534 - DNA, 25 bp, Homo sapien
tatcatctactccttctcttgtggg

SEQ ID NO: 2684535 - DNA, 25 bp, Homo sapien
tgcaaacaaggtagatggaagaaca

SEQ ID NO: 2684536 - DNA, 25 bp, Homo sapien
gaacataggcttaaatgatgctctg

SEQ ID NO: 2684537 - DNA, 25 bp, Homo sapien
gctctggtgtaagcaggaatccact

SEQ ID NO: 2684538 - DNA, 25 bp, Homo sapien
taagcaggaatccactgggatccct

SEQ ID NO: 2684539 - DNA, 25 bp, Homo sapien
ttagaaccttgacggctccagaact

SEQ ID NO: 2684540 - DNA, 25 bp, Homo sapien
actgagctgtgacgccccggcactt

SEQ ID NO: 2684541 - DNA, 25 bp, Homo sapien
gataagctgtcgcttagaaccttga

SEQ ID NO: 2684542 - DNA, 25 bp, Homo sapien
tgtgagctgatcacggccactgagc

SEQ ID NO: 2684543 - DNA, 25 bp, Homo sapien
cccacccaagtgtcctgccattttt

SEQ ID NO: 2684544 - DNA, 25 bp, Homo sapien
ctggacgataccagtacttcataga

SEQ ID NO: 2684545 - DNA, 25 bp, Homo sapien
tggacgataccagtacttcatagat

SEQ ID NO: 2684546 - DNA, 25 bp, Homo sapien
ttcatagatgcaaacacccacccaa

SEQ ID NO: 2684547 - DNA, 25 bp, Homo sapien
tcaaaaatctgtgactaaggcgaga

SEQ ID NO: 2684548 - DNA, 25 bp, Homo sapien
gaaggaaaggaactagccacactct

SEQ ID NO: 2684549 - DNA, 25 bp, Homo sapien
tagccacactctcacaatggtgggc

SEQ ID NO: 2684550 - DNA, 25 bp, Homo sapien
aaatctgtgactaaggcgagaggtg

SEQ ID NO: 2684551 - DNA, 25 bp, Homo sapien
ggtctctcctgataagtgttagtca

SEQ ID NO: 2684552 - DNA, 25 bp, Homo sapien
gtctctcctgataagtgttagtcat

SEQ ID NO: 2684553 - DNA, 25 bp, Homo sapien
gacataaataaataggtctctcctg

SEQ ID NO: 2684554 - DNA, 25 bp, Homo sapien
ctagacataaataaataggtctctc

SEQ ID NO: 2684555 - DNA, 25 bp, Homo sapien
gactggcggaactccattttcctta

SEQ ID NO: 2684556 - DNA, 25 bp, Homo sapien
agtgtctgagatttctgtaggcaag

SEQ ID NO: 2684557 - DNA, 25 bp, Homo sapien
ggctacaggactggcggaactccat

SEQ ID NO: 2684558 - DNA, 25 bp, Homo sapien
gcaggtaagtcttcactaccaacat

SEQ ID NO: 2684559 - DNA, 25 bp, Homo sapien
tcaagggtttttgacttgtctgtga

SEQ ID NO: 2684560 - DNA, 25 bp, Homo sapien
gtcaagggtttttgacttgtctgtg

SEQ ID NO: 2684561 - DNA, 25 bp, Homo sapien
ttgtcaagggtttttgacttgtctg

SEQ ID NO: 2684562 - DNA, 25 bp, Homo sapien
tgtcaagggtttttgacttgtctgt

SEQ ID NO: 2684563 - DNA, 25 bp, Homo sapien
agaaacgaagctgtacttcaccaaa

SEQ ID NO: 2684564 - DNA, 25 bp, Homo sapien
tgctttataagttcttaccataata

SEQ ID NO: 2684565 - DNA, 25 bp, Homo sapien
ccttaatgtcatacaatgttgggat

SEQ ID NO: 2684566 - DNA, 25 bp, Homo sapien
tttcttccttaatgtcatacaatgt

SEQ ID NO: 2684567 - DNA, 25 bp, Homo sapien
atttgctttataagttcttaccata

SEQ ID NO: 2684568 - DNA, 25 bp, Homo sapien
gaatacagatgttttgactggcttc

SEQ ID NO: 2684569 - DNA, 25 bp, Homo sapien
tcctcactgtagtttaggtctccac

SEQ ID NO: 2684570 - DNA, 25 bp, Homo sapien
gggtgtcaggagcatcaagacaacc

SEQ ID NO: 2684571 - DNA, 25 bp, Homo sapien
tccaccatggtctccagagagcctg

SEQ ID NO: 2684572 - DNA, 25 bp, Homo sapien
tcctgttgatgaaagggtctggctg

SEQ ID NO: 2684573 - DNA, 25 bp, Homo sapien
cttcatgttggaatcattcctgttg

SEQ ID NO: 2684574 - DNA, 25 bp, Homo sapien
aagggtctggctggaaattctctgg

SEQ ID NO: 2684575 - DNA, 25 bp, Homo sapien
catgttggaatcattcctgttgatg

SEQ ID NO: 2684576 - DNA, 25 bp, Homo sapien
taaacagagcttctagctcttcata

SEQ ID NO: 2684577 - DNA, 25 bp, Homo sapien
agtctggctaaacagagcttctagc

SEQ ID NO: 2684578 - DNA, 25 bp, Homo sapien
tctggctaaacagagcttctagctc

SEQ ID NO: 2684579 - DNA, 25 bp, Homo sapien
gctaaacagagcttctagctcttca

SEQ ID NO: 2684580 - DNA, 25 bp, Homo sapien
ctgttgactccagtaggttgcgttt

SEQ ID NO: 2684581 - DNA, 25 bp, Homo sapien
gttgactccagtaggttgcgtttca

SEQ ID NO: 2684582 - DNA, 25 bp, Homo sapien
gactccagtaggttgcgtttcaaag

SEQ ID NO: 2684583 - DNA, 25 bp, Homo sapien
ctccagtaggttgcgtttcaaagct

SEQ ID NO: 2684584 - DNA, 25 bp, Homo sapien
tgaggagaaagggagctgtagaaat

SEQ ID NO: 2684585 - DNA, 25 bp, Homo sapien
ctgaggagaaagggagctgtagaaa

SEQ ID NO: 2684586 - DNA, 25 bp, Homo sapien
gagatactgatacagacagtggaaa

SEQ ID NO: 2684587 - DNA, 25 bp, Homo sapien
agataggcctacagctggaccagca

SEQ ID NO: 2684588 - DNA, 25 bp, Homo sapien
ttgtgggtgagagatactgatacag

SEQ ID NO: 2684589 - DNA, 25 bp, Homo sapien
taggcctacagctggaccagcaaag

SEQ ID NO: 2684590 - DNA, 25 bp, Homo sapien
ctgtgacaccaagaagtaaaataaa

SEQ ID NO: 2684591 - DNA, 25 bp, Homo sapien
gcacttcagacaacacatattcatg

SEQ ID NO: 2684592 - DNA, 25 bp, Homo sapien
ggcttttcctcgtgcttgtcttggt

SEQ ID NO: 2684593 - DNA, 25 bp, Homo sapien
tgaatacactctcattctctggctt

SEQ ID NO: 2684594 - DNA, 25 bp, Homo sapien
caagagactgattgggttctggacc

SEQ ID NO: 2684595 - DNA, 25 bp, Homo sapien
actctcgcttgcctgtcttcctggg

SEQ ID NO: 2684596 - DNA, 25 bp, Homo sapien
caatgagtgtgtattcctggagcct

SEQ ID NO: 2684597 - DNA, 25 bp, Homo sapien
gatcttcactgtgtttaacgattca

SEQ ID NO: 2684598 - DNA, 25 bp, Homo sapien
tattaacaacgcgagtgatcttcac

SEQ ID NO: 2684599 - DNA, 25 bp, Homo sapien
caaattcgtgtctgtttctagttcc

SEQ ID NO: 2684600 - DNA, 25 bp, Homo sapien
cagtgctagtgtcaactctcatggc

SEQ ID NO: 2684601 - DNA, 25 bp, Homo sapien
actaaaagacccaaattcgtgtctg

SEQ ID NO: 2684602 - DNA, 25 bp, Homo sapien
aactttctgcgaagacttttgacta

SEQ ID NO: 2684603 - DNA, 25 bp, Homo sapien
caaagggctcccatacttaactatc

SEQ ID NO: 2684604 - DNA, 25 bp, Homo sapien
gatgggttccatacctccttccaaa

SEQ ID NO: 2684605 - DNA, 25 bp, Homo sapien
tgttgctttactgtgacactctggg

SEQ ID NO: 2684606 - DNA, 25 bp, Homo sapien
gggaaagcggaatgaggagctggga

SEQ ID NO: 2684607 - DNA, 25 bp, Homo sapien
ttcgctcacccgaacgactgcgcga

SEQ ID NO: 2684608 - DNA, 25 bp, Homo sapien
aacgactgcgcgagctgggcctcgc

SEQ ID NO: 2684609 - DNA, 25 bp, Homo sapien
ggacccgtcacgtgagcacgcacgg

SEQ ID NO: 2684610 - DNA, 25 bp, Homo sapien
tgggcctcgcggacccgtcacgtga

SEQ ID NO: 2684611 - DNA, 25 bp, Homo sapien
ccagcggaggaggttccctctcggc

SEQ ID NO: 2684612 - DNA, 25 bp, Homo sapien
gacagtgctggtgaacaggtcctct

SEQ ID NO: 2684613 - DNA, 25 bp, Homo sapien
tggtgaacaggtcctctccgtcctc

SEQ ID NO: 2684614 - DNA, 25 bp, Homo sapien
gatcctcaaagtcggtgggcttccc

SEQ ID NO: 2684615 - DNA, 25 bp, Homo sapien
ccccttcaaaagagctcggtggagg

SEQ ID NO: 2684616 - DNA, 25 bp, Homo sapien
acgtgcaagagacaccgaggaaggc

SEQ ID NO: 2684617 - DNA, 25 bp, Homo sapien
gcaatgctcggttcggttctggccc

SEQ ID NO: 2684618 - DNA, 25 bp, Homo sapien
cctctgaggattaggtcggcacccg

SEQ ID NO: 2684619 - DNA, 25 bp, Homo sapien
ttcattgcgctcccctggcagcggc

SEQ ID NO: 2684620 - DNA, 25 bp, Homo sapien
tcattgcgctcccctggcagcggca

SEQ ID NO: 2684621 - DNA, 25 bp, Homo sapien
cattgcgctcccctggcagcggcac

SEQ ID NO: 2684622 - DNA, 25 bp, Homo sapien
gcagtccgtgaagggccattcctgg

SEQ ID NO: 2684623 - DNA, 25 bp, Homo sapien
cctgggaaagtgcacccattcgttc

SEQ ID NO: 2684624 - DNA, 25 bp, Homo sapien
ggaaagtgcacccattcgttcccca

SEQ ID NO: 2684625 - DNA, 25 bp, Homo sapien
aggaaccagcagtccgtgaagggcc

SEQ ID NO: 2684626 - DNA, 25 bp, Homo sapien
caggaagactagctggttctggaga

SEQ ID NO: 2684627 - DNA, 25 bp, Homo sapien
ttggagtttgcactaatatcttctg

SEQ ID NO: 2684628 - DNA, 25 bp, Homo sapien
aggaagactagctggttctggagat

SEQ ID NO: 2684629 - DNA, 25 bp, Homo sapien
tgggccattggagtttgcactaata

SEQ ID NO: 2684630 - DNA, 25 bp, Homo sapien
tagagattaatgtgaagtcccaacc

SEQ ID NO: 2684631 - DNA, 25 bp, Homo sapien
gaaaatcccaagcttatgagccaca

SEQ ID NO: 2684632 - DNA, 25 bp, Homo sapien
cctaaaagtgggtcaaatggaacag

SEQ ID NO: 2684633 - DNA, 25 bp, Homo sapien
gatggaggattgctgtcttcaaaca

SEQ ID NO: 2684634 - DNA, 25 bp, Homo sapien
gaaatctgagactatagggtgaagg

SEQ ID NO: 2684635 - DNA, 25 bp, Homo sapien
tatcattgtatagtcctcacttggc

SEQ ID NO: 2684636 - DNA, 25 bp, Homo sapien
ctatgatggcatggctatactccag

SEQ ID NO: 2684637 - DNA, 25 bp, Homo sapien
gatcagctgtgcatactgttaagaa

SEQ ID NO: 2684638 - DNA, 25 bp, Homo sapien
agcaatgagtgtagtaggagtgaca

SEQ ID NO: 2684639 - DNA, 25 bp, Homo sapien
actgcaggagaaggttccgaggata

SEQ ID NO: 2684640 - DNA, 25 bp, Homo sapien
tccctggatctatcaaagatcacgg

SEQ ID NO: 2684641 - DNA, 25 bp, Homo sapien
tcacgggagcagacatactctttga

SEQ ID NO: 2684642 - DNA, 25 bp, Homo sapien
ctgatacaccaatttctatgtcaaa

SEQ ID NO: 2684643 - DNA, 25 bp, Homo sapien
ggatctgatacaccaatttctatgt

SEQ ID NO: 2684644 - DNA, 25 bp, Homo sapien
gatctgatacaccaatttctatgtc

SEQ ID NO: 2684645 - DNA, 25 bp, Homo sapien
ctggatctgatacaccaatttctat

SEQ ID NO: 2684646 - DNA, 25 bp, Homo sapien
ctttgttgttactctatatgccata

SEQ ID NO: 2684647 - DNA, 25 bp, Homo sapien
tatatgccatataggcattcatgcc

SEQ ID NO: 2684648 - DNA, 25 bp, Homo sapien
tctatatgccatataggcattcatg

SEQ ID NO: 2684649 - DNA, 25 bp, Homo sapien
gccatataggcattcatgccatcac

SEQ ID NO: 2684650 - DNA, 25 bp, Homo sapien
tgctgtgcaaaccaagaaagtcgct

SEQ ID NO: 2684651 - DNA, 25 bp, Homo sapien
gaaaattcactcttactgaacatgg

SEQ ID NO: 2684652 - DNA, 25 bp, Homo sapien
gaaagtcgctgaatcttcttttcac

SEQ ID NO: 2684653 - DNA, 25 bp, Homo sapien
ctggagctggtggcacaatataacc

SEQ ID NO: 2684654 - DNA, 25 bp, Homo sapien
ccatgcatgattagtataaatgaaa

SEQ ID NO: 2684655 - DNA, 25 bp, Homo sapien
ctgaactagtaacagtaacaaaaat

SEQ ID NO: 2684656 - DNA, 25 bp, Homo sapien
aaaatgttgacagtgaatgactaag

SEQ ID NO: 2684657 - DNA, 25 bp, Homo sapien
aaactattaccaatacattcttcaa

SEQ ID NO: 2684658 - DNA, 25 bp, Homo sapien
aatggaatagtcttcttaggtcaac

SEQ ID NO: 2684659 - DNA, 25 bp, Homo sapien
gttacgtgctaatgaagactctccc

SEQ ID NO: 2684660 - DNA, 25 bp, Homo sapien
tcccttcagtggcagttataaagct

SEQ ID NO: 2684661 - DNA, 25 bp, Homo sapien
cctaccaaagtagagagttacgtgc

SEQ ID NO: 2684662 - DNA, 25 bp, Homo sapien
agctgctctccgtttttctacaaac

SEQ ID NO: 2684663 - DNA, 25 bp, Homo sapien
aaactcagtggatgatgagtcttct

SEQ ID NO: 2684664 - DNA, 25 bp, Homo sapien
tctttacccactttgaccttggtca

SEQ ID NO: 2684665 - DNA, 25 bp, Homo sapien
gatgagtcttctttacccactttga

SEQ ID NO: 2684666 - DNA, 25 bp, Homo sapien
tacagaacaattatacagtactttg

SEQ ID NO: 2684667 - DNA, 25 bp, Homo sapien
tgcttgtagcatataatagaaaaac

SEQ ID NO: 2684668 - DNA, 25 bp, Homo sapien
tatccccagctaactcatgtcttta

SEQ ID NO: 2684669 - DNA, 25 bp, Homo sapien
actcttggtgactacctatgataca

SEQ ID NO: 2684670 - DNA, 25 bp, Homo sapien
gaagtgtggttcttcccatcctccc

SEQ ID NO: 2684671 - DNA, 25 bp, Homo sapien
tagtctttaagtatagctgtccctc

SEQ ID NO: 2684672 - DNA, 25 bp, Homo sapien
ccaacttgtgtcttaaatgctgggc

SEQ ID NO: 2684673 - DNA, 25 bp, Homo sapien
tgcataataacctatggacagcctc

SEQ ID NO: 2684674 - DNA, 25 bp, Homo sapien
caaccatccgatttacctttattct

SEQ ID NO: 2684675 - DNA, 25 bp, Homo sapien
gcaaccatccgatttacctttattc

SEQ ID NO: 2684676 - DNA, 25 bp, Homo sapien
gccttaaatcaggatcctgtagtaa

SEQ ID NO: 2684677 - DNA, 25 bp, Homo sapien
agaactgccttaaatcaggatcctg

SEQ ID NO: 2684678 - DNA, 25 bp, Homo sapien
caggatcctgtagtaaagttggatg

SEQ ID NO: 2684679 - DNA, 25 bp, Homo sapien
aatcaggatcctgtagtaaagttgg

SEQ ID NO: 2684680 - DNA, 25 bp, Homo sapien
tgttgacagcgtcggcagccttgtt

SEQ ID NO: 2684681 - DNA, 25 bp, Homo sapien
cattttgttgacagcgtcggcagcc

SEQ ID NO: 2684682 - DNA, 25 bp, Homo sapien
gagcctgtgtattaactgctctagg

SEQ ID NO: 2684683 - DNA, 25 bp, Homo sapien
gtcattttgttgacagcgtcggcag

SEQ ID NO: 2684684 - DNA, 25 bp, Homo sapien
ttttctatgacagaccaaggcttca

SEQ ID NO: 2684685 - DNA, 25 bp, Homo sapien
acactgacatgaagtttcctaagtt

SEQ ID NO: 2684686 - DNA, 25 bp, Homo sapien
cagattctcaaattgctgctgcttt

SEQ ID NO: 2684687 - DNA, 25 bp, Homo sapien
ttcctaagttgctgatccagattct

SEQ ID NO: 2684688 - DNA, 25 bp, Homo sapien
tcaacctctgcaagctgagacaaag

SEQ ID NO: 2684689 - DNA, 25 bp, Homo sapien
gcacttttagcaaaggcagctgtgt

SEQ ID NO: 2684690 - DNA, 25 bp, Homo sapien
tcagaattacctaacatggcagcac

SEQ ID NO: 2684691 - DNA, 25 bp, Homo sapien
tgagacaaagctctagataaagcag

SEQ ID NO: 2684692 - DNA, 25 bp, Homo sapien
gttttgtcaccgtatgaccatgggt

SEQ ID NO: 2684693 - DNA, 25 bp, Homo sapien
taatgatcccaaatacgaaaggtgg

SEQ ID NO: 2684694 - DNA, 25 bp, Homo sapien
caggaagcactaaacccgagttatt

SEQ ID NO: 2684695 - DNA, 25 bp, Homo sapien
catgttcctatagggatctgaagag

SEQ ID NO: 2684696 - DNA, 25 bp, Homo sapien
tatctggtttgttagcaaccatcat

SEQ ID NO: 2684697 - DNA, 25 bp, Homo sapien
atctggtttgttagcaaccatcatt

SEQ ID NO: 2684698 - DNA, 25 bp, Homo sapien
ttatctggtttgttagcaaccatca

SEQ ID NO: 2684699 - DNA, 25 bp, Homo sapien
ttaagtaaagagattaaagcattta

SEQ ID NO: 2684700 - DNA, 25 bp, Homo sapien
gtaaagagattaaagcatttagtaa

SEQ ID NO: 2684701 - DNA, 25 bp, Homo sapien
agagattaaagcatttagtaatcac

SEQ ID NO: 2684702 - DNA, 25 bp, Homo sapien
taagtaaagagattaaagcatttag

SEQ ID NO: 2684703 - DNA, 25 bp, Homo sapien
tccccttgttgcactttcgcctccc

SEQ ID NO: 2684704 - DNA, 25 bp, Homo sapien
ttcttttcgaatcgttttagatatc

SEQ ID NO: 2684705 - DNA, 25 bp, Homo sapien
gaatcgttttagatatctgttcaaa

SEQ ID NO: 2684706 - DNA, 25 bp, Homo sapien
ttcgaatcgttttagatatctgttc

SEQ ID NO: 2684707 - DNA, 25 bp, Homo sapien
tagaaagctaaattcaactttacca

SEQ ID NO: 2684708 - DNA, 25 bp, Homo sapien
tgttgtgtttgaactagtgattcta

SEQ ID NO: 2684709 - DNA, 25 bp, Homo sapien
gttgttgtgtttgaactagtgattc

SEQ ID NO: 2684710 - DNA, 25 bp, Homo sapien
ttgttgtgtttgaactagtgattct

SEQ ID NO: 2684711 - DNA, 25 bp, Homo sapien
ttctgatggcctaaaactgggaaaa

SEQ ID NO: 2684712 - DNA, 25 bp, Homo sapien
aacacgtgagatagtttccgattag

SEQ ID NO: 2684713 - DNA, 25 bp, Homo sapien
ccttagtgttaagcagaggcaaaaa

SEQ ID NO: 2684714 - DNA, 25 bp, Homo sapien
tgagtttaaatgcccagttcattaa

SEQ ID NO: 2684715 - DNA, 25 bp, Homo sapien
tatgagaatttactcaaacaggtct

SEQ ID NO: 2684716 - DNA, 25 bp, Homo sapien
gagaatttactcaaacaggtctgac

SEQ ID NO: 2684717 - DNA, 25 bp, Homo sapien
tgagaatttactcaaacaggtctga

SEQ ID NO: 2684718 - DNA, 25 bp, Homo sapien
agaatttactcaaacaggtctgacc

SEQ ID NO: 2684719 - DNA, 25 bp, Homo sapien
gcttaagttctatttgttatggaag

SEQ ID NO: 2684720 - DNA, 25 bp, Homo sapien
tagcttaagttctatttgttatgga

SEQ ID NO: 2684721 - DNA, 25 bp, Homo sapien
tttagcttaagttctatttgttatg

SEQ ID NO: 2684722 - DNA, 25 bp, Homo sapien
tgtttagcttaagttctatttgtta

SEQ ID NO: 2684723 - DNA, 25 bp, Homo sapien
agttattctcattacctttttgtca

SEQ ID NO: 2684724 - DNA, 25 bp, Homo sapien
aaaaaatctacataagccgggctgg

SEQ ID NO: 2684725 - DNA, 25 bp, Homo sapien
gcatatatcctgtacagcattaaaa

SEQ ID NO: 2684726 - DNA, 25 bp, Homo sapien
aaatctacataagccgggctgggta

SEQ ID NO: 2684727 - DNA, 25 bp, Homo sapien
tcaggtaggaatgcttcccagtatt

SEQ ID NO: 2684728 - DNA, 25 bp, Homo sapien
cttcaggtaggaatgcttcccagta

SEQ ID NO: 2684729 - DNA, 25 bp, Homo sapien
ttcaggtaggaatgcttcccagtat

SEQ ID NO: 2684730 - DNA, 25 bp, Homo sapien
gtggaatccagcataactggaacaa

SEQ ID NO: 2684731 - DNA, 25 bp, Homo sapien
ggaatccagcataactggaacaaca

SEQ ID NO: 2684732 - DNA, 25 bp, Homo sapien
cttcttaacggcaacaatcttattg

SEQ ID NO: 2684733 - DNA, 25 bp, Homo sapien
catccaaggtcttcttaacggcaac

SEQ ID NO: 2684734 - DNA, 25 bp, Homo sapien
tctggtcttgcagtgcactatttag

SEQ ID NO: 2684735 - DNA, 25 bp, Homo sapien
cacaatagtgttcaattcagcaaag

SEQ ID NO: 2684736 - DNA, 25 bp, Homo sapien
gaatgtcatgccacagtccacttaa

SEQ ID NO: 2684737 - DNA, 25 bp, Homo sapien
cacttcataaagagggtaaacatac

SEQ ID NO: 2684738 - DNA, 25 bp, Homo sapien
aataattaaggaatcatggcatcac

SEQ ID NO: 2684739 - DNA, 25 bp, Homo sapien
ataattaaggaatcatggcatcacc

SEQ ID NO: 2684740 - DNA, 25 bp, Homo sapien
tcatggcatcacctatatacatcta

SEQ ID NO: 2684741 - DNA, 25 bp, Homo sapien
ggcatcacctatatacatctagaag

SEQ ID NO: 2684742 - DNA, 25 bp, Homo sapien
tctaagtagcatacagaatgggtaa

SEQ ID NO: 2684743 - DNA, 25 bp, Homo sapien
tgcccaaggcaaactaaatttcagt

SEQ ID NO: 2684744 - DNA, 25 bp, Homo sapien
cattaaggattagataacagctgtc

SEQ ID NO: 2684745 - DNA, 25 bp, Homo sapien
atgggtaaaaacattgcccaaggca

SEQ ID NO: 2684746 - DNA, 25 bp, Homo sapien
ccatatcttgttcctatggaaggga

SEQ ID NO: 2684747 - DNA, 25 bp, Homo sapien
gcaaacacatgctaaggatacttcg

SEQ ID NO: 2684748 - DNA, 25 bp, Homo sapien
tataaattgtatccagtgactcact

SEQ ID NO: 2684749 - DNA, 25 bp, Homo sapien
aagggatatgtggtggttaagctca

SEQ ID NO: 2684750 - DNA, 25 bp, Homo sapien
tagaaaggcacttcaggaatcaaga

SEQ ID NO: 2684751 - DNA, 25 bp, Homo sapien
catagccactagtcatccacatgtg

SEQ ID NO: 2684752 - DNA, 25 bp, Homo sapien
caatttatataacgacaaaggacgc

SEQ ID NO: 2684753 - DNA, 25 bp, Homo sapien
aaattgtagccggtctgaatggaga

SEQ ID NO: 2684754 - DNA, 25 bp, Homo sapien
tatcagcgtctgaagcaacagttgg

SEQ ID NO: 2684755 - DNA, 25 bp, Homo sapien
aactagctgttggacttactctgca

SEQ ID NO: 2684756 - DNA, 25 bp, Homo sapien
ttgagagtaacaactaggagtcgct

SEQ ID NO: 2684757 - DNA, 25 bp, Homo sapien
taagccctggatctcctagtttagt

SEQ ID NO: 2684758 - DNA, 25 bp, Homo sapien
tagtcccagccacaagatcttgacc

SEQ ID NO: 2684759 - DNA, 25 bp, Homo sapien
gatagtcccagccacaagatcttga

SEQ ID NO: 2684760 - DNA, 25 bp, Homo sapien
ataggagactcaagatagtcccagc

SEQ ID NO: 2684761 - DNA, 25 bp, Homo sapien
ttataggagactcaagatagtccca

SEQ ID NO: 2684762 - DNA, 25 bp, Homo sapien
ttggctggttgactgctgctgcatc

SEQ ID NO: 2684763 - DNA, 25 bp, Homo sapien
agtggttcaggcctttaccatcact

SEQ ID NO: 2684764 - DNA, 25 bp, Homo sapien
ctttaccatcacttggctggttgac

SEQ ID NO: 2684765 - DNA, 25 bp, Homo sapien
gctgctgcatcgaatgttcttataa

SEQ ID NO: 2684766 - DNA, 25 bp, Homo sapien
taggaaaacaggacacgtgggacag

SEQ ID NO: 2684767 - DNA, 25 bp, Homo sapien
cagctaagactagaaagaggttgtc

SEQ ID NO: 2684768 - DNA, 25 bp, Homo sapien
gagtgagagaaccaaactgatttac

SEQ ID NO: 2684769 - DNA, 25 bp, Homo sapien
catgttgatagaagaaacggtgcag

SEQ ID NO: 2684770 - DNA, 25 bp, Homo sapien
gattcgaaggtcagcgtctcctgag

SEQ ID NO: 2684771 - DNA, 25 bp, Homo sapien
tggtgtaccacagagctcgaaagtg

SEQ ID NO: 2684772 - DNA, 25 bp, Homo sapien
taagacaaacgctctggcttcacgc

SEQ ID NO: 2684773 - DNA, 25 bp, Homo sapien
gaaagttggccggtcactaagacaa

SEQ ID NO: 2684774 - DNA, 25 bp, Homo sapien
tgcgggccggactcaggtctgcggg

SEQ ID NO: 2684775 - DNA, 25 bp, Homo sapien
gaggctgcgggccggactcaggtct

SEQ ID NO: 2684776 - DNA, 25 bp, Homo sapien
ctgggcgtgccgggggccggaagca

SEQ ID NO: 2684777 - DNA, 25 bp, Homo sapien
aggtctgcgggctgacccggccgct

SEQ ID NO: 2684778 - DNA, 25 bp, Homo sapien
atagcgaaaggacgggatgtagacc

SEQ ID NO: 2684779 - DNA, 25 bp, Homo sapien
gaaaggacgggatgtagacctccat

SEQ ID NO: 2684780 - DNA, 25 bp, Homo sapien
gctccaggtcgctctcttcatagcg

SEQ ID NO: 2684781 - DNA, 25 bp, Homo sapien
gctctcttcatagcgaaaggacggg

SEQ ID NO: 2684782 - DNA, 25 bp, Homo sapien
gaatgtcccaaagatggtaagccct

SEQ ID NO: 2684783 - DNA, 25 bp, Homo sapien
gaaagccaacgcctctaacaagcag

SEQ ID NO: 2684784 - DNA, 25 bp, Homo sapien
gcttgaaccggtaagatcaacttca

SEQ ID NO: 2684785 - DNA, 25 bp, Homo sapien
aaagcacagctcgtctaatagaaga

SEQ ID NO: 2684786 - DNA, 25 bp, Homo sapien
ggcctgcctgggcaacactgcaaga

SEQ ID NO: 2684787 - DNA, 25 bp, Homo sapien
ctgaagcggtaggatcgcttgagac

SEQ ID NO: 2684788 - DNA, 25 bp, Homo sapien
ctgggcaacactgcaagaccctcac

SEQ ID NO: 2684789 - DNA, 25 bp, Homo sapien
gagaccaggagttcagggcctgcct

SEQ ID NO: 2684790 - DNA, 25 bp, Homo sapien
cctcatcatgactggtttttatcaa

SEQ ID NO: 2684791 - DNA, 25 bp, Homo sapien
tcctcatcatgactggtttttatca

SEQ ID NO: 2684792 - DNA, 25 bp, Homo sapien
tcatcatgactggtttttatcaatc

SEQ ID NO: 2684793 - DNA, 25 bp, Homo sapien
atcatgactggtttttatcaatctt

SEQ ID NO: 2684794 - DNA, 25 bp, Homo sapien
tctcccttagggtcaggcacctgaa

SEQ ID NO: 2684795 - DNA, 25 bp, Homo sapien
gttccaatgtgccatccaccagcag

SEQ ID NO: 2684796 - DNA, 25 bp, Homo sapien
cctgaagtggtgctaacacctgaag

SEQ ID NO: 2684797 - DNA, 25 bp, Homo sapien
aagcccaaaccctcctttgctggtg

SEQ ID NO: 2684798 - DNA, 25 bp, Homo sapien
agtcccatacctgatttcaattaac

SEQ ID NO: 2684799 - DNA, 25 bp, Homo sapien
tcccatacctgatttcaattaacct

SEQ ID NO: 2684800 - DNA, 25 bp, Homo sapien
ctgatttcaattaacctctttggaa

SEQ ID NO: 2684801 - DNA, 25 bp, Homo sapien
catacctgatttcaattaacctctt

SEQ ID NO: 2684802 - DNA, 25 bp, Homo sapien
gcctattggcttgaagactccacca

SEQ ID NO: 2684803 - DNA, 25 bp, Homo sapien
tcctgtaggcagaagatcatgagac

SEQ ID NO: 2684804 - DNA, 25 bp, Homo sapien
gaaaggagcaaactcaggcagaatc

SEQ ID NO: 2684805 - DNA, 25 bp, Homo sapien
tcaccattggctaccagaaggaagt

SEQ ID NO: 2684806 - DNA, 25 bp, Homo sapien
gaccaccaagagaggagtccagtga

SEQ ID NO: 2684807 - DNA, 25 bp, Homo sapien
ccaccaagagaggagtccagtgagg

SEQ ID NO: 2684808 - DNA, 25 bp, Homo sapien
caggaccaccaagagaggagtccag

SEQ ID NO: 2684809 - DNA, 25 bp, Homo sapien
caccaagagaggagtccagtgagga

SEQ ID NO: 2684810 - DNA, 25 bp, Homo sapien
gcatcatctgaacagagtggacatc

SEQ ID NO: 2684811 - DNA, 25 bp, Homo sapien
agattcaggttgagtctcaagcatc

SEQ ID NO: 2684812 - DNA, 25 bp, Homo sapien
gacatccggcatgtgtagtggccat

SEQ ID NO: 2684813 - DNA, 25 bp, Homo sapien
tgtagtggccatctttcaaagcatg

SEQ ID NO: 2684814 - DNA, 25 bp, Homo sapien
ctgcagctgtactggaccctcccag

SEQ ID NO: 2684815 - DNA, 25 bp, Homo sapien
actgcagctgtactggaccctccca

SEQ ID NO: 2684816 - DNA, 25 bp, Homo sapien
ctcactgcagctgtactggaccctc

SEQ ID NO: 2684817 - DNA, 25 bp, Homo sapien
tcactgcagctgtactggaccctcc

SEQ ID NO: 2684818 - DNA, 25 bp, Homo sapien
gactgctctaaattcatcccttgat

SEQ ID NO: 2684819 - DNA, 25 bp, Homo sapien
tgatgtttttcctgacagggaaaac

SEQ ID NO: 2684820 - DNA, 25 bp, Homo sapien
tgagcattatatttctacgggactg

SEQ ID NO: 2684821 - DNA, 25 bp, Homo sapien
cgtaagccaccacaaacggtgagca

SEQ ID NO: 2684822 - DNA, 25 bp, Homo sapien
tcctgagtttctacaaggaaaccat

SEQ ID NO: 2684823 - DNA, 25 bp, Homo sapien
gagtttctacaaggaaaccatcaga

SEQ ID NO: 2684824 - DNA, 25 bp, Homo sapien
ttggccagaagagtctctcctgtgt

SEQ ID NO: 2684825 - DNA, 25 bp, Homo sapien
ccatgtccaaaccagctgcatcctg

SEQ ID NO: 2684826 - DNA, 25 bp, Homo sapien
ctcattggctaggctgtgggcaaca

SEQ ID NO: 2684827 - DNA, 25 bp, Homo sapien
tcattggctaggctgtgggcaacag

SEQ ID NO: 2684828 - DNA, 25 bp, Homo sapien
tgattctttaaccttaactggctgc

SEQ ID NO: 2684829 - DNA, 25 bp, Homo sapien
taagctggcagactgagaataggct

SEQ ID NO: 2684830 - DNA, 25 bp, Homo sapien
caaattccttagagatataagaatg

SEQ ID NO: 2684831 - DNA, 25 bp, Homo sapien
tagagatataagaatgggtgctttc

SEQ ID NO: 2684832 - DNA, 25 bp, Homo sapien
ggaaggctctatgccaaactattac

SEQ ID NO: 2684833 - DNA, 25 bp, Homo sapien
ttgaaaaagcaatttccagaacaat

SEQ ID NO: 2684834 - DNA, 25 bp, Homo sapien
gtctggaaggctctatgccaaacta

SEQ ID NO: 2684835 - DNA, 25 bp, Homo sapien
tgaaaaagcaatttccagaacaata

SEQ ID NO: 2684836 - DNA, 25 bp, Homo sapien
atgccaaatctgatccactactgct

SEQ ID NO: 2684837 - DNA, 25 bp, Homo sapien
caacaggaaaatatatgggatcaat

SEQ ID NO: 2684838 - DNA, 25 bp, Homo sapien
tatgatttccaaggtggagccaaca

SEQ ID NO: 2684839 - DNA, 25 bp, Homo sapien
tactgctatgatttccaaggtggag

SEQ ID NO: 2684840 - DNA, 25 bp, Homo sapien
gaacagatgaggttgtatcacagaa

SEQ ID NO: 2684841 - DNA, 25 bp, Homo sapien
actaacctgatttgttcgtgaacac

SEQ ID NO: 2684842 - DNA, 25 bp, Homo sapien
gatgacattttgctccccgtacaca

SEQ ID NO: 2684843 - DNA, 25 bp, Homo sapien
tgcagccacattcaggtgatgacat

SEQ ID NO: 2684844 - DNA, 25 bp, Homo sapien
gatcctccgtcctgaatgtttgaaa

SEQ ID NO: 2684845 - DNA, 25 bp, Homo sapien
ccgtggtttgaagatatagctgcaa

SEQ ID NO: 2684846 - DNA, 25 bp, Homo sapien
caccaccgtggtttgaagatatagc

SEQ ID NO: 2684847 - DNA, 25 bp, Homo sapien
tttcttcagatcctccgtcctgaat

SEQ ID NO: 2684848 - DNA, 25 bp, Homo sapien
gcttccataaaatgcggaagccact

SEQ ID NO: 2684849 - DNA, 25 bp, Homo sapien
gagctactggtttgtatctctgaag

SEQ ID NO: 2684850 - DNA, 25 bp, Homo sapien
taaaggcagattcaagaaagcaatt

SEQ ID NO: 2684851 - DNA, 25 bp, Homo sapien
tcaggcccaggtttgcctctttgca

SEQ ID NO: 2684852 - DNA, 25 bp, Homo sapien
gacttgtatctaaatcagacctgga

SEQ ID NO: 2684853 - DNA, 25 bp, Homo sapien
ggactctctcttcccaatatgccga

SEQ ID NO: 2684854 - DNA, 25 bp, Homo sapien
aatcctgagttaatccaccattggg

SEQ ID NO: 2684855 - DNA, 25 bp, Homo sapien
tacttctttgctagtaccatggaga

SEQ ID NO: 2684856 - DNA, 25 bp, Homo sapien
tatttcaagttgaatggtctctctc

SEQ ID NO: 2684857 - DNA, 25 bp, Homo sapien
cttatatttcaagttgaatggtctc

SEQ ID NO: 2684858 - DNA, 25 bp, Homo sapien
gctcatacgttacaaagtgatcact

SEQ ID NO: 2684859 - DNA, 25 bp, Homo sapien
ctctctctttcagaagctcatacgt

SEQ ID NO: 2684860 - DNA, 25 bp, Homo sapien
tcattagcacttctatcttaaacac

SEQ ID NO: 2684861 - DNA, 25 bp, Homo sapien
cgctgtatctcttttcaacaaaatg

SEQ ID NO: 2684862 - DNA, 25 bp, Homo sapien
tttcttccattcattagcacttcta

SEQ ID NO: 2684863 - DNA, 25 bp, Homo sapien
caaagcatgaaattcgctgtatctc

SEQ ID NO: 2684864 - DNA, 25 bp, Homo sapien
aaatcgaatacaatcacaagggggc

SEQ ID NO: 2684865 - DNA, 25 bp, Homo sapien
tcgaatacaatcacaagggggcaag

SEQ ID NO: 2684866 - DNA, 25 bp, Homo sapien
cgaatacaatcacaagggggcaagt

SEQ ID NO: 2684867 - DNA, 25 bp, Homo sapien
gccaaatcgaatacaatcacaaggg

SEQ ID NO: 2684868 - DNA, 25 bp, Homo sapien
ctgtaagtatgtttccaagccttgt

SEQ ID NO: 2684869 - DNA, 25 bp, Homo sapien
ttccaagccttgtcgtcgctgttcc

SEQ ID NO: 2684870 - DNA, 25 bp, Homo sapien
gtcgtcgctgttccaagactttggg

SEQ ID NO: 2684871 - DNA, 25 bp, Homo sapien
taagtatgtttccaagccttgtcgt

SEQ ID NO: 2684872 - DNA, 25 bp, Homo sapien
gcatgtcagctttcctattagagca

SEQ ID NO: 2684873 - DNA, 25 bp, Homo sapien
ctgcatgtcagctttcctattagag

SEQ ID NO: 2684874 - DNA, 25 bp, Homo sapien
tgcatgtcagctttcctattagagc

SEQ ID NO: 2684875 - DNA, 25 bp, Homo sapien
ccatggtccagaatgtactagttgc

SEQ ID NO: 2684876 - DNA, 25 bp, Homo sapien
tggtccagaatgtactagttgcccc

SEQ ID NO: 2684877 - DNA, 25 bp, Homo sapien
ggtccagaatgtactagttgcccct

SEQ ID NO: 2684878 - DNA, 25 bp, Homo sapien
tccagaatgtactagttgccccttg

SEQ ID NO: 2684879 - DNA, 25 bp, Homo sapien
ggcatagaccttttactgagatgaa

SEQ ID NO: 2684880 - DNA, 25 bp, Homo sapien
tcactgttcatcaggtagactgcca

SEQ ID NO: 2684881 - DNA, 25 bp, Homo sapien
ctacttttacaggagatcgatttcc

SEQ ID NO: 2684882 - DNA, 25 bp, Homo sapien
tactatacgtacttggatattcagc

SEQ ID NO: 2684883 - DNA, 25 bp, Homo sapien
ggaaatacaccctaacgcattctag

SEQ ID NO: 2684884 - DNA, 25 bp, Homo sapien
gacaaaaattcctgacgagcactga

SEQ ID NO: 2684885 - DNA, 25 bp, Homo sapien
gactataaagtatgaccaagtaggg

SEQ ID NO: 2684886 - DNA, 25 bp, Homo sapien
gcattctaggtagccagcattaccc

SEQ ID NO: 2684887 - DNA, 25 bp, Homo sapien
cattttgaaaccccaaagctagcaa

SEQ ID NO: 2684888 - DNA, 25 bp, Homo sapien
acattttgaaaccccaaagctagca

SEQ ID NO: 2684889 - DNA, 25 bp, Homo sapien
caattctagccacaaaagctgcatg

SEQ ID NO: 2684890 - DNA, 25 bp, Homo sapien
tctctcagtaaattcagttcaattc

SEQ ID NO: 2684891 - DNA, 25 bp, Homo sapien
gatagtcttcccaaatgaccagcaa

SEQ ID NO: 2684892 - DNA, 25 bp, Homo sapien
aatctcagttgatagtcttcccaaa

SEQ ID NO: 2684893 - DNA, 25 bp, Homo sapien
ctgacaatcccagccattaatatta

SEQ ID NO: 2684894 - DNA, 25 bp, Homo sapien
gttaagtactgacaatcccagccat

SEQ ID NO: 2684895 - DNA, 25 bp, Homo sapien
tcacttgtagaaggacggtactgtt

SEQ ID NO: 2684896 - DNA, 25 bp, Homo sapien
cacttgtagaaggacggtactgtta

SEQ ID NO: 2684897 - DNA, 25 bp, Homo sapien
gctggctttctggaaattagcacag

SEQ ID NO: 2684898 - DNA, 25 bp, Homo sapien
aggtctgtgcaacatcaccccacat

SEQ ID NO: 2684899 - DNA, 25 bp, Homo sapien
ctgtttctaaaaggggctttgagct

SEQ ID NO: 2684900 - DNA, 25 bp, Homo sapien
ggaaattagcacaggtctgtgcaac

SEQ ID NO: 2684901 - DNA, 25 bp, Homo sapien
tcttccttggattaaactggagtca

SEQ ID NO: 2684902 - DNA, 25 bp, Homo sapien
agtacatgactatgaaatagacttg

SEQ ID NO: 2684903 - DNA, 25 bp, Homo sapien
tagaaagtacatgactatgaaatag

SEQ ID NO: 2684904 - DNA, 25 bp, Homo sapien
ccttggattaaactggagtcatcaa

SEQ ID NO: 2684905 - DNA, 25 bp, Homo sapien
tgtgctcactcttgacttgcttagt

SEQ ID NO: 2684906 - DNA, 25 bp, Homo sapien
tgcttagtttgcacactttctactt

SEQ ID NO: 2684907 - DNA, 25 bp, Homo sapien
tttaatgaaattaagggtcctgtgc

SEQ ID NO: 2684908 - DNA, 25 bp, Homo sapien
gcttagtttgcacactttctacttc

SEQ ID NO: 2684909 - DNA, 25 bp, Homo sapien
ttttcttgattaagcacccacattt

SEQ ID NO: 2684910 - DNA, 25 bp, Homo sapien
agccaaatcaacagaagaaattatt

SEQ ID NO: 2684911 - DNA, 25 bp, Homo sapien
ttcttgattaagcacccacatttct

SEQ ID NO: 2684912 - DNA, 25 bp, Homo sapien
caattatcttttctccaaataagcc

SEQ ID NO: 2684913 - DNA, 25 bp, Homo sapien
tattgcctatctgcccaaactgcca

SEQ ID NO: 2684914 - DNA, 25 bp, Homo sapien
gggtcaattacagcctaacagccaa

SEQ ID NO: 2684915 - DNA, 25 bp, Homo sapien
gagactcagggctctgaatccacat

SEQ ID NO: 2684916 - DNA, 25 bp, Homo sapien
gtttatagggcagagtggagactca

SEQ ID NO: 2684917 - DNA, 25 bp, Homo sapien
gattagtgagcttctgattgcatga

SEQ ID NO: 2684918 - DNA, 25 bp, Homo sapien
gttaagattagtgagcttctgattg

SEQ ID NO: 2684919 - DNA, 25 bp, Homo sapien
tattacgttacacataattatgacc

SEQ ID NO: 2684920 - DNA, 25 bp, Homo sapien
gattgcatgaagaatagctgtatta

SEQ ID NO: 2684921 - DNA, 25 bp, Homo sapien
gacacagctctcatttgtatgggac

SEQ ID NO: 2684922 - DNA, 25 bp, Homo sapien
tggtcttccaccaacagcaacctgt

SEQ ID NO: 2684923 - DNA, 25 bp, Homo sapien
ttttgagtctgacaaggctgatgcc

SEQ ID NO: 2684924 - DNA, 25 bp, Homo sapien
gacaaagcatgagcaccggcaattt

SEQ ID NO: 2684925 - DNA, 25 bp, Homo sapien
cgacaagggagacatataaacactg

SEQ ID NO: 2684926 - DNA, 25 bp, Homo sapien
ctgtaatgatttcccacgagtttcc

SEQ ID NO: 2684927 - DNA, 25 bp, Homo sapien
aatatcacaggataacgccgtccga

SEQ ID NO: 2684928 - DNA, 25 bp, Homo sapien
ctaaccttcgtgagatgccatcatg

SEQ ID NO: 2684929 - DNA, 25 bp, Homo sapien
tctaccaatgcattcatccgtccat

SEQ ID NO: 2684930 - DNA, 25 bp, Homo sapien
taagcgttttcccatctaccaatgc

SEQ ID NO: 2684931 - DNA, 25 bp, Homo sapien
agcgtatcactctctaagcgttttc

SEQ ID NO: 2684932 - DNA, 25 bp, Homo sapien
tagtgagatagaatcgaaatagcgt

SEQ ID NO: 2684933 - DNA, 25 bp, Homo sapien
actttctgcctttggtagagagggc

SEQ ID NO: 2684934 - DNA, 25 bp, Homo sapien
tttctgcctttggtagagagggcaa

SEQ ID NO: 2684935 - DNA, 25 bp, Homo sapien
caagtgtcgcacatttaggaaatca

SEQ ID NO: 2684936 - DNA, 25 bp, Homo sapien
gtagagagggcaagtgtcgcacatt

SEQ ID NO: 2684937 - DNA, 25 bp, Homo sapien
tcttcagactctgtttcatcaaaag

SEQ ID NO: 2684938 - DNA, 25 bp, Homo sapien
cttgactcttcagactctgtttcat

SEQ ID NO: 2684939 - DNA, 25 bp, Homo sapien
gactcttcagactctgtttcatcaa

SEQ ID NO: 2684940 - DNA, 25 bp, Homo sapien
cttcagactctgtttcatcaaaaga

SEQ ID NO: 2684941 - DNA, 25 bp, Homo sapien
aggcatgtcagcatcaggggacgat

SEQ ID NO: 2684942 - DNA, 25 bp, Homo sapien
tcaggggacgatggtaaacagaaaa

SEQ ID NO: 2684943 - DNA, 25 bp, Homo sapien
agaaaacactacaaactagctttga

SEQ ID NO: 2684944 - DNA, 25 bp, Homo sapien
aaacactacaaactagctttgaggg

SEQ ID NO: 2684945 - DNA, 25 bp, Homo sapien
gctggctgcaggcaagacatatgga

SEQ ID NO: 2684946 - DNA, 25 bp, Homo sapien
gctgcaggcaagacatatggatccc

SEQ ID NO: 2684947 - DNA, 25 bp, Homo sapien
ggcaagacatatggatccctgagga

SEQ ID NO: 2684948 - DNA, 25 bp, Homo sapien
catatggatccctgaggaacagcag

SEQ ID NO: 2684949 - DNA, 25 bp, Homo sapien
taaagagctgttagcagatgacagg

SEQ ID NO: 2684950 - DNA, 25 bp, Homo sapien
tcagtaaagagctgttagcagatga

SEQ ID NO: 2684951 - DNA, 25 bp, Homo sapien
gctgttagcagatgacaggtttgat

SEQ ID NO: 2684952 - DNA, 25 bp, Homo sapien
gagctgttagcagatgacaggtttg

SEQ ID NO: 2684953 - DNA, 25 bp, Homo sapien
ctgtattaaaaacgtggtttatgtg

SEQ ID NO: 2684954 - DNA, 25 bp, Homo sapien
aaaaacgtggtttatgtggtgcagg

SEQ ID NO: 2684955 - DNA, 25 bp, Homo sapien
ttaaaaacgtggtttatgtggtgca

SEQ ID NO: 2684956 - DNA, 25 bp, Homo sapien
cgtggtttatgtggtgcagggtcag

SEQ ID NO: 2684957 - DNA, 25 bp, Homo sapien
cgggaccaatgtcactctgttagac

SEQ ID NO: 2684958 - DNA, 25 bp, Homo sapien
tttattggcagattattaagcccgg

SEQ ID NO: 2684959 - DNA, 25 bp, Homo sapien
gagcactggtttattggcagattat

SEQ ID NO: 2684960 - DNA, 25 bp, Homo sapien
tattaagcccgggaccaatgtcact

SEQ ID NO: 2684961 - DNA, 25 bp, Homo sapien
tatctgccctgcttagttcacaagg

SEQ ID NO: 2684962 - DNA, 25 bp, Homo sapien
gaatttgaaccttggcatctggaca

SEQ ID NO: 2684963 - DNA, 25 bp, Homo sapien
taacagaacactttgagagggactc

SEQ ID NO: 2684964 - DNA, 25 bp, Homo sapien
caaagatgctgcaatgtatatacac

SEQ ID NO: 2684965 - DNA, 25 bp, Homo sapien
gggtaactctactgcgctggtaaca

SEQ ID NO: 2684966 - DNA, 25 bp, Homo sapien
gcaaggtccaccaactagcgatcag

SEQ ID NO: 2684967 - DNA, 25 bp, Homo sapien
tggaggaaacagcacatctgaggcc

SEQ ID NO: 2684968 - DNA, 25 bp, Homo sapien
gacatattacatgacggtggcagac

SEQ ID NO: 2684969 - DNA, 25 bp, Homo sapien
gcaatggtggcagcccaaacgaggt

SEQ ID NO: 2684970 - DNA, 25 bp, Homo sapien
caggaatctgcatcgccaggcatgt

SEQ ID NO: 2684971 - DNA, 25 bp, Homo sapien
gaacttgtgtttgaggcacccgtga

SEQ ID NO: 2684972 - DNA, 25 bp, Homo sapien
tctgaaactcaatgggaagctactg

SEQ ID NO: 2684973 - DNA, 25 bp, Homo sapien
tagatgagggtaaaatatcccatgg

SEQ ID NO: 2684974 - DNA, 25 bp, Homo sapien
aaatatcccatggaggactccttca

SEQ ID NO: 2684975 - DNA, 25 bp, Homo sapien
ggaggactccttcaataaccacatt

SEQ ID NO: 2684976 - DNA, 25 bp, Homo sapien
ctgtagatgagggtaaaatatccca

SEQ ID NO: 2684977 - DNA, 25 bp, Homo sapien
tcagttcacatctgccactagcggg

SEQ ID NO: 2684978 - DNA, 25 bp, Homo sapien
cctgaattaagctgggactgtgcac

SEQ ID NO: 2684979 - DNA, 25 bp, Homo sapien
tttcatgggtttctacgctggcagc

SEQ ID NO: 2684980 - DNA, 25 bp, Homo sapien
tactgaccttggaagctaacccctg

SEQ ID NO: 2684981 - DNA, 25 bp, Homo sapien
gaatgacactgcttggacttgtgca

SEQ ID NO: 2684982 - DNA, 25 bp, Homo sapien
attaagtactcccttctgtggaacg

SEQ ID NO: 2684983 - DNA, 25 bp, Homo sapien
aaagcaatgggtattgcgtgctacc

SEQ ID NO: 2684984 - DNA, 25 bp, Homo sapien
ccaggcatgcctagtgaaatcgaaa

SEQ ID NO: 2684985 - DNA, 25 bp, Homo sapien
acagtccaggcaaaacaccaagtcc

SEQ ID NO: 2684986 - DNA, 25 bp, Homo sapien
caggaaccaggcaggacaaatgatg

SEQ ID NO: 2684987 - DNA, 25 bp, Homo sapien
ggcaaaacaccaagtccaggaacca

SEQ ID NO: 2684988 - DNA, 25 bp, Homo sapien
acatcctgacttaagtggtaatggg

SEQ ID NO: 2684989 - DNA, 25 bp, Homo sapien
tctataaaggactgcccgagagtgg

SEQ ID NO: 2684990 - DNA, 25 bp, Homo sapien
gcctctgtcaaccaaagttccactt

SEQ ID NO: 2684991 - DNA, 25 bp, Homo sapien
gactacgctagatacttcatagaaa

SEQ ID NO: 2684992 - DNA, 25 bp, Homo sapien
tctgacgacctgtggtgattatggg

SEQ ID NO: 2684993 - DNA, 25 bp, Homo sapien
tagtaactggtatgtgtgccaaaag

SEQ ID NO: 2684994 - DNA, 25 bp, Homo sapien
taactggtatgtgtgccaaaagctc

SEQ ID NO: 2684995 - DNA, 25 bp, Homo sapien
tcctgcacccacgacagacagtgct

SEQ ID NO: 2684996 - DNA, 25 bp, Homo sapien
ctgatcagtacagccttattctctg

SEQ ID NO: 2684997 - DNA, 25 bp, Homo sapien
aaagtcacaggtttgatctcggtgc

SEQ ID NO: 2684998 - DNA, 25 bp, Homo sapien
gggccccatgaagcaattatataca

SEQ ID NO: 2684999 - DNA, 25 bp, Homo sapien
tgtgaagcatggcatccactctgca

SEQ ID NO: 2685000 - DNA, 25 bp, Homo sapien
caccacttgtgaattcggtagcagt

SEQ ID NO: 2685001 - DNA, 25 bp, Homo sapien
gatttaaccgtgtctgcttgaagca

SEQ ID NO: 2685002 - DNA, 25 bp, Homo sapien
ttcctggagcatggtgggccttcaa

SEQ ID NO: 2685003 - DNA, 25 bp, Homo sapien
tacagccgccatttgtccgaggtgg

SEQ ID NO: 2685004 - DNA, 25 bp, Homo sapien
gaagaactggtcagcctagggcaca

SEQ ID NO: 2685005 - DNA, 25 bp, Homo sapien
tgaggatccatctcaccgagttgta

SEQ ID NO: 2685006 - DNA, 25 bp, Homo sapien
gagtgcttgatctctgttcagatgg

SEQ ID NO: 2685007 - DNA, 25 bp, Homo sapien
tctgttagaaaacagtgccattgct

SEQ ID NO: 2685008 - DNA, 25 bp, Homo sapien
ccaggactcaagcagtgaggatcca

SEQ ID NO: 2685009 - DNA, 25 bp, Homo sapien
taagactcaggctataaggcctggg

SEQ ID NO: 2685010 - DNA, 25 bp, Homo sapien
gaaagttatctttagcccagttgca

SEQ ID NO: 2685011 - DNA, 25 bp, Homo sapien
gaaatttgactagtgtaatctgaga

SEQ ID NO: 2685012 - DNA, 25 bp, Homo sapien
tctgacaaaagggtgctttgctgtt

SEQ ID NO: 2685013 - DNA, 25 bp, Homo sapien
tttgtattctatcccagatcacagg

SEQ ID NO: 2685014 - DNA, 25 bp, Homo sapien
tatccccttcctcaagtggtgctat

SEQ ID NO: 2685015 - DNA, 25 bp, Homo sapien
cacctgcttagggactttgaactta

SEQ ID NO: 2685016 - DNA, 25 bp, Homo sapien
tgcttgaactttagtaaaccacctg

SEQ ID NO: 2685017 - DNA, 25 bp, Homo sapien
gctcgatcatcaacagtggcaagat

SEQ ID NO: 2685018 - DNA, 25 bp, Homo sapien
caactgatgggcatgaccgtccact

SEQ ID NO: 2685019 - DNA, 25 bp, Homo sapien
aaacgccttttgtggttgagatcgc

SEQ ID NO: 2685020 - DNA, 25 bp, Homo sapien
cagtggtgcactccatagagctcca

SEQ ID NO: 2685021 - DNA, 25 bp, Homo sapien
aaggatggagttttggggactcatc

SEQ ID NO: 2685022 - DNA, 25 bp, Homo sapien
gagttttggggactcatctagcagc

SEQ ID NO: 2685023 - DNA, 25 bp, Homo sapien
ttgagaaggatggagttttggggac

SEQ ID NO: 2685024 - DNA, 25 bp, Homo sapien
tggagttttggggactcatctagca

SEQ ID NO: 2685025 - DNA, 25 bp, Homo sapien
aaagatgttggcagaattgtgattg

SEQ ID NO: 2685026 - DNA, 25 bp, Homo sapien
aaagttgtgcccaagacagtggaaa

SEQ ID NO: 2685027 - DNA, 25 bp, Homo sapien
ctctagcaacaggagaggtatgtct

SEQ ID NO: 2685028 - DNA, 25 bp, Homo sapien
tataaccttccactttgcctttcaa

SEQ ID NO: 2685029 - DNA, 25 bp, Homo sapien
ctgtgcaggatccggcatcgggagt

SEQ ID NO: 2685030 - DNA, 25 bp, Homo sapien
tgcaggatccggcatcgggagtgta

SEQ ID NO: 2685031 - DNA, 25 bp, Homo sapien
ctgaaccaatgccatgggatctgtg

SEQ ID NO: 2685032 - DNA, 25 bp, Homo sapien
atcgggagtgtatgaaataatgcca

SEQ ID NO: 2685033 - DNA, 25 bp, Homo sapien
cccattagtggcactaacttggtcc

SEQ ID NO: 2685034 - DNA, 25 bp, Homo sapien
attagtggcactaacttggtccaca

SEQ ID NO: 2685035 - DNA, 25 bp, Homo sapien
ggcccattagtggcactaacttggt

SEQ ID NO: 2685036 - DNA, 25 bp, Homo sapien
cattagtggcactaacttggtccac

SEQ ID NO: 2685037 - DNA, 25 bp, Homo sapien
gtcggtagtccgaggtgaccagcct

SEQ ID NO: 2685038 - DNA, 25 bp, Homo sapien
aggaaagagactgcccaagtacttc

SEQ ID NO: 2685039 - DNA, 25 bp, Homo sapien
tctgcttggacttcttgtcccgggt

SEQ ID NO: 2685040 - DNA, 25 bp, Homo sapien
gcgggcccgttctccaggaaagaga

SEQ ID NO: 2685041 - DNA, 25 bp, Homo sapien
gaatcccaagttcgggtcgcgagtc

SEQ ID NO: 2685042 - DNA, 25 bp, Homo sapien
tgctacctctcgtgctttgcgtggg

SEQ ID NO: 2685043 - DNA, 25 bp, Homo sapien
gtctgaacttgggaggaacgcgccc

SEQ ID NO: 2685044 - DNA, 25 bp, Homo sapien
gcccctcggtgacggccaaggtgac

SEQ ID NO: 2685045 - DNA, 25 bp, Homo sapien
ctagcaaaaggttccaatgggccat

SEQ ID NO: 2685046 - DNA, 25 bp, Homo sapien
tgggccattggaactcggcggccgc

SEQ ID NO: 2685047 - DNA, 25 bp, Homo sapien
aaggcggcagcaatcacaccgggac

SEQ ID NO: 2685048 - DNA, 25 bp, Homo sapien
ggaccggctgcagagttcccagtcc

SEQ ID NO: 2685049 - DNA, 25 bp, Homo sapien
ggaaagaatcctacatgaccatggt

SEQ ID NO: 2685050 - DNA, 25 bp, Homo sapien
acgcctccagcgatgtcaaagttct

SEQ ID NO: 2685051 - DNA, 25 bp, Homo sapien
ttattcgagtgcaacagggctccac

SEQ ID NO: 2685052 - DNA, 25 bp, Homo sapien
agcattttccagtgttccctagacg

SEQ ID NO: 2685053 - DNA, 25 bp, Homo sapien
taggtacacctaggaatcccatctg

SEQ ID NO: 2685054 - DNA, 25 bp, Homo sapien
ttctagggagctgggaaagatttca

SEQ ID NO: 2685055 - DNA, 25 bp, Homo sapien
cacctcgtagggtaagtgctctgag

SEQ ID NO: 2685056 - DNA, 25 bp, Homo sapien
gagatacccttgtcttgctacacaa

SEQ ID NO: 2685057 - DNA, 25 bp, Homo sapien
acttcacctggagctgggtctatat

SEQ ID NO: 2685058 - DNA, 25 bp, Homo sapien
ttcacctggagctgggtctatatcc

SEQ ID NO: 2685059 - DNA, 25 bp, Homo sapien
caagtctttggtaggtccaacttca

SEQ ID NO: 2685060 - DNA, 25 bp, Homo sapien
cacctggagctgggtctatatccat

SEQ ID NO: 2685061 - DNA, 25 bp, Homo sapien
aatccaaaatccccagagcagctgt

SEQ ID NO: 2685062 - DNA, 25 bp, Homo sapien
ggaatccaaaatccccagagcagct

SEQ ID NO: 2685063 - DNA, 25 bp, Homo sapien
atccaaaatccccagagcagctgtc

SEQ ID NO: 2685064 - DNA, 25 bp, Homo sapien
tggaatccaaaatccccagagcagc

SEQ ID NO: 2685065 - DNA, 25 bp, Homo sapien
tccctgactcaatatttgatcattg

SEQ ID NO: 2685066 - DNA, 25 bp, Homo sapien
tgctggcttagcctatccctgactc

SEQ ID NO: 2685067 - DNA, 25 bp, Homo sapien
gcctatccctgactcaatatttgat

SEQ ID NO: 2685068 - DNA, 25 bp, Homo sapien
ggcttagcctatccctgactcaata

SEQ ID NO: 2685069 - DNA, 25 bp, Homo sapien
tgaagtccagcaacatgatgcctcc

SEQ ID NO: 2685070 - DNA, 25 bp, Homo sapien
cactatttattaaacagggtgtcca

SEQ ID NO: 2685071 - DNA, 25 bp, Homo sapien
tgtgtaaggcaagagatacggattc

SEQ ID NO: 2685072 - DNA, 25 bp, Homo sapien
tataacttcggtaactacagccttg

SEQ ID NO: 2685073 - DNA, 25 bp, Homo sapien
tattagtcagacacatagcttgcaa

SEQ ID NO: 2685074 - DNA, 25 bp, Homo sapien
attagtcagacacatagcttgcaaa

SEQ ID NO: 2685075 - DNA, 25 bp, Homo sapien
ctggatattagtcagacacatagct

SEQ ID NO: 2685076 - DNA, 25 bp, Homo sapien
gatattagtcagacacatagcttgc

SEQ ID NO: 2685077 - DNA, 25 bp, Homo sapien
gaatagagcctttgcttagagctac

SEQ ID NO: 2685078 - DNA, 25 bp, Homo sapien
tgcccagggtcatgtaactagttac

SEQ ID NO: 2685079 - DNA, 25 bp, Homo sapien
cctctatggttaagggtttgcccag

SEQ ID NO: 2685080 - DNA, 25 bp, Homo sapien
taagtccaagttattccccaagtga

SEQ ID NO: 2685081 - DNA, 25 bp, Homo sapien
cagtgatcaagtggctctaaagacc

SEQ ID NO: 2685082 - DNA, 25 bp, Homo sapien
caaagtgcaaggtaccaagctgagc

SEQ ID NO: 2685083 - DNA, 25 bp, Homo sapien
gattgcagggtggatgaatgctcct

SEQ ID NO: 2685084 - DNA, 25 bp, Homo sapien
tatacaggcgtctcctagggaaagt

SEQ ID NO: 2685085 - DNA, 25 bp, Homo sapien
gagggccaaacataaaggatgtcag

SEQ ID NO: 2685086 - DNA, 25 bp, Homo sapien
atccttatttccactgtagccaccc

SEQ ID NO: 2685087 - DNA, 25 bp, Homo sapien
cataaaggatgtcagggagggtccc

SEQ ID NO: 2685088 - DNA, 25 bp, Homo sapien
ggtcccagaggaaatctcttccttc

SEQ ID NO: 2685089 - DNA, 25 bp, Homo sapien
gctgtcttctcctgagattatggat

SEQ ID NO: 2685090 - DNA, 25 bp, Homo sapien
cctgagattatggatgactgccaac

SEQ ID NO: 2685091 - DNA, 25 bp, Homo sapien
gagattatggatgactgccaactat

SEQ ID NO: 2685092 - DNA, 25 bp, Homo sapien
tcttctcctgagattatggatgact

SEQ ID NO: 2685093 - DNA, 25 bp, Homo sapien
gtggatacccgatcaacaaagtgca

SEQ ID NO: 2685094 - DNA, 25 bp, Homo sapien
ttagacaacttgggagccccctgct

SEQ ID NO: 2685095 - DNA, 25 bp, Homo sapien
ttagtgtggatacccgatcaacaaa

SEQ ID NO: 2685096 - DNA, 25 bp, Homo sapien
tagacaacttgggagccccctgctc

SEQ ID NO: 2685097 - DNA, 25 bp, Homo sapien
gaagaaagcaagaagttgacgcacc

SEQ ID NO: 2685098 - DNA, 25 bp, Homo sapien
ttttctcttgggtaatgtgatttgg

SEQ ID NO: 2685099 - DNA, 25 bp, Homo sapien
aaagcaagaagttgacgcacctcat

SEQ ID NO: 2685100 - DNA, 25 bp, Homo sapien
tttctcttgggtaatgtgatttggg

SEQ ID NO: 2685101 - DNA, 25 bp, Homo sapien
tgctaagatgggtttgtgacagcca

SEQ ID NO: 2685102 - DNA, 25 bp, Homo sapien
gaataccttcccagtagtagaattg

SEQ ID NO: 2685103 - DNA, 25 bp, Homo sapien
tatcagttgatgttaggacagtagc

SEQ ID NO: 2685104 - DNA, 25 bp, Homo sapien
tggcaaagtctacaaataaaaggct

SEQ ID NO: 2685105 - DNA, 25 bp, Homo sapien
accaacttggtcttctttctgtaag

SEQ ID NO: 2685106 - DNA, 25 bp, Homo sapien
ccgcggcttccgggatgcccgcaga

SEQ ID NO: 2685107 - DNA, 25 bp, Homo sapien
tccaccgcggcttccgggatgcccg

SEQ ID NO: 2685108 - DNA, 25 bp, Homo sapien
gcggcttccgggatgcccgcagagc

SEQ ID NO: 2685109 - DNA, 25 bp, Homo sapien
cttccgggatgcccgcagagctcgg

SEQ ID NO: 2685110 - DNA, 25 bp, Homo sapien
atagaccaggagtcaggacctcccc

SEQ ID NO: 2685111 - DNA, 25 bp, Homo sapien
agaccaggagtcaggacctcccctg

SEQ ID NO: 2685112 - DNA, 25 bp, Homo sapien
ctggaagggaatagaccaggagtca

SEQ ID NO: 2685113 - DNA, 25 bp, Homo sapien
ggaatagaccaggagtcaggacctc

SEQ ID NO: 2685114 - DNA, 25 bp, Homo sapien
agtttgagggagagccctgaaggtc

SEQ ID NO: 2685115 - DNA, 25 bp, Homo sapien
aggctacaggaacctcccgtgaagg

SEQ ID NO: 2685116 - DNA, 25 bp, Homo sapien
gaccctaaggcccagaggctacagg

SEQ ID NO: 2685117 - DNA, 25 bp, Homo sapien
caagtcgatcccgaggcttacggga

SEQ ID NO: 2685118 - DNA, 25 bp, Homo sapien
cactcggtccagactgacgccagag

SEQ ID NO: 2685119 - DNA, 25 bp, Homo sapien
tgtagccactcggtccagactgacg

SEQ ID NO: 2685120 - DNA, 25 bp, Homo sapien
catgggagagatttggttcccctcg

SEQ ID NO: 2685121 - DNA, 25 bp, Homo sapien
cagaggggctatcatgggagagatt

SEQ ID NO: 2685122 - DNA, 25 bp, Homo sapien
cagaactgccgaagagtggcttgtc

SEQ ID NO: 2685123 - DNA, 25 bp, Homo sapien
aggatgaagttccaggcccgtttca

SEQ ID NO: 2685124 - DNA, 25 bp, Homo sapien
caattaatctgctcgcagaactgcc

SEQ ID NO: 2685125 - DNA, 25 bp, Homo sapien
ggttcattgctgagaaaccaggaca

SEQ ID NO: 2685126 - DNA, 25 bp, Homo sapien
cattttcggtagtagatggtagagg

SEQ ID NO: 2685127 - DNA, 25 bp, Homo sapien
ctggcattttcggtagtagatggta

SEQ ID NO: 2685128 - DNA, 25 bp, Homo sapien
ttgaccgactcaggaggtactttcc

SEQ ID NO: 2685129 - DNA, 25 bp, Homo sapien
gggtgtgtgaaattgaccgactcag

SEQ ID NO: 2685130 - DNA, 25 bp, Homo sapien
ctgccgcaggaggtcacgcataggt

SEQ ID NO: 2685131 - DNA, 25 bp, Homo sapien
tgtttgcggtcagctgcctgcggct

SEQ ID NO: 2685132 - DNA, 25 bp, Homo sapien
tatccagtgttacgtctggtggcac

SEQ ID NO: 2685133 - DNA, 25 bp, Homo sapien
tggcacaactgctccgggacacggg

SEQ ID NO: 2685134 - DNA, 25 bp, Homo sapien
cagcttcccggctggacacgtgggt

SEQ ID NO: 2685135 - DNA, 25 bp, Homo sapien
ttggttccacgctctggcagcttcc

SEQ ID NO: 2685136 - DNA, 25 bp, Homo sapien
tacgacagcacaaaatagagtgagt

SEQ ID NO: 2685137 - DNA, 25 bp, Homo sapien
ctggctccttggttccacgctctgg

SEQ ID NO: 2685138 - DNA, 25 bp, Homo sapien
agtgtgcgccctgcgtgcgctacat

SEQ ID NO: 2685139 - DNA, 25 bp, Homo sapien
tgcgggtgcgcgagagtgtgcgccc

SEQ ID NO: 2685140 - DNA, 25 bp, Homo sapien
gagagtcctagagattgtgccgccc

SEQ ID NO: 2685141 - DNA, 25 bp, Homo sapien
tacatgcccctgagcagcgcgggag

SEQ ID NO: 2685142 - DNA, 25 bp, Homo sapien
ctgaaaactcggtgctgccggtggg

SEQ ID NO: 2685143 - DNA, 25 bp, Homo sapien
gtctccgggcttcagcatgtccggc

SEQ ID NO: 2685144 - DNA, 25 bp, Homo sapien
gcttcagcatgtccggcgcctcgaa

SEQ ID NO: 2685145 - DNA, 25 bp, Homo sapien
gggcttcagcatgtccggcgcctcg

SEQ ID NO: 2685146 - DNA, 25 bp, Homo sapien
gggtctccgggcttcagcatgtccg

SEQ ID NO: 2685147 - DNA, 25 bp, Homo sapien
ggctgtccggcggaggctcagcgcg

SEQ ID NO: 2685148 - DNA, 25 bp, Homo sapien
cggctgaagaggctgcggcgcgctc

SEQ ID NO: 2685149 - DNA, 25 bp, Homo sapien
gctgaagaggctgcggcgcgctcag

SEQ ID NO: 2685150 - DNA, 25 bp, Homo sapien
cgctcaggagacccgcggcgccgct

SEQ ID NO: 2685151 - DNA, 25 bp, Homo sapien
acaccggcagggccgagagaccagc

SEQ ID NO: 2685152 - DNA, 25 bp, Homo sapien
accggcagggccgagagaccagcca

SEQ ID NO: 2685153 - DNA, 25 bp, Homo sapien
ctgcgacaccggcagggccgagaga

SEQ ID NO: 2685154 - DNA, 25 bp, Homo sapien
cgacaccggcagggccgagagacca

SEQ ID NO: 2685155 - DNA, 25 bp, Homo sapien
ccaccaccaccgcacttgacgggcc

SEQ ID NO: 2685156 - DNA, 25 bp, Homo sapien
caccaccgcacttgacgggcccggg

SEQ ID NO: 2685157 - DNA, 25 bp, Homo sapien
gcggctagaggcgcgaacaccggca

SEQ ID NO: 2685158 - DNA, 25 bp, Homo sapien
aggtggcgccgaggcacagttcctt

SEQ ID NO: 2685159 - DNA, 25 bp, Homo sapien
tgtgctggttgagcgggatgatctc

SEQ ID NO: 2685160 - DNA, 25 bp, Homo sapien
gggtcgctggtgtgctggttgagcg

SEQ ID NO: 2685161 - DNA, 25 bp, Homo sapien
ttgttggggtcgctggtgtgctggt

SEQ ID NO: 2685162 - DNA, 25 bp, Homo sapien
ctgctggccatacaggtaatagtcc

SEQ ID NO: 2685163 - DNA, 25 bp, Homo sapien
ccggcgggagggcagaggtctgtta

SEQ ID NO: 2685164 - DNA, 25 bp, Homo sapien
gagggcagaggtctgttaggccggg

SEQ ID NO: 2685165 - DNA, 25 bp, Homo sapien
ctgtccggcgggagggcagaggtct

SEQ ID NO: 2685166 - DNA, 25 bp, Homo sapien
gggcagaggtctgttaggccgggtc

SEQ ID NO: 2685167 - DNA, 25 bp, Homo sapien
cagcgaacagctcccgccggttccc

SEQ ID NO: 2685168 - DNA, 25 bp, Homo sapien
cggcccgaaaatgacccctccagag

SEQ ID NO: 2685169 - DNA, 25 bp, Homo sapien
caaggagaaacggactcagtttcat

SEQ ID NO: 2685170 - DNA, 25 bp, Homo sapien
ctcgtcccggctaaggccaggcagg

SEQ ID NO: 2685171 - DNA, 25 bp, Homo sapien
tcggttgcacaaaaagcctgctggt

SEQ ID NO: 2685172 - DNA, 25 bp, Homo sapien
caggtctgcaatctaaggcgctcgc

SEQ ID NO: 2685173 - DNA, 25 bp, Homo sapien
gcgcagtggatgttcctcggttgca

SEQ ID NO: 2685174 - DNA, 25 bp, Homo sapien
ctggtgtgccactgggctcgaagtt

SEQ ID NO: 2685175 - DNA, 25 bp, Homo sapien
ctgacatgaggcgtggccgccgaca

SEQ ID NO: 2685176 - DNA, 25 bp, Homo sapien
gccgacaccacccacgatccgacgt

SEQ ID NO: 2685177 - DNA, 25 bp, Homo sapien
gcccacgaaaggctctcttctgaca

SEQ ID NO: 2685178 - DNA, 25 bp, Homo sapien
tctcttctgacatgaggcgtggccg

SEQ ID NO: 2685179 - DNA, 25 bp, Homo sapien
catggtaagggagccctcgatttgc

SEQ ID NO: 2685180 - DNA, 25 bp, Homo sapien
ccagcatggtaagggagccctcgat

SEQ ID NO: 2685181 - DNA, 25 bp, Homo sapien
agcatggtaagggagccctcgattt

SEQ ID NO: 2685182 - DNA, 25 bp, Homo sapien
ggtaagggagccctcgatttgccat

SEQ ID NO: 2685183 - DNA, 25 bp, Homo sapien
tcaccctggatgtgccctatctgcg

SEQ ID NO: 2685184 - DNA, 25 bp, Homo sapien
cctatctgcgctgaaatgaccgaaa

SEQ ID NO: 2685185 - DNA, 25 bp, Homo sapien
gccaggcctgttggatcaccctgga

SEQ ID NO: 2685186 - DNA, 25 bp, Homo sapien
gaccgaaatgcccaagaaacttgtg

SEQ ID NO: 2685187 - DNA, 25 bp, Homo sapien
agccggcgcagcgagtgcagtggcc

SEQ ID NO: 2685188 - DNA, 25 bp, Homo sapien
cggttgtccgcgcacatgtcgcaac

SEQ ID NO: 2685189 - DNA, 25 bp, Homo sapien
gcactcgccgttgcggttgtccgcg

SEQ ID NO: 2685190 - DNA, 25 bp, Homo sapien
ccatgcatagggcactcgccgttgc

SEQ ID NO: 2685191 - DNA, 25 bp, Homo sapien
gcggccgcagcgctgctggtgccca

SEQ ID NO: 2685192 - DNA, 25 bp, Homo sapien
gcggcggccgcagcgctgctggtgc

SEQ ID NO: 2685193 - DNA, 25 bp, Homo sapien
ggcggccgcagcgctgctggtgccc

SEQ ID NO: 2685194 - DNA, 25 bp, Homo sapien
gcgcggcggccgcagcgctgctggt

SEQ ID NO: 2685195 - DNA, 25 bp, Homo sapien
gtactggtgcagaggcacacctcgc

SEQ ID NO: 2685196 - DNA, 25 bp, Homo sapien
agaggcacacctcgcgaggcaggtc

SEQ ID NO: 2685197 - DNA, 25 bp, Homo sapien
caggccgggcacagtactggtgcag

SEQ ID NO: 2685198 - DNA, 25 bp, Homo sapien
ggcacagtactggtgcagaggcaca

SEQ ID NO: 2685199 - DNA, 25 bp, Homo sapien
gaaaggtccaatccaggtgccttgc

SEQ ID NO: 2685200 - DNA, 25 bp, Homo sapien
cacgccttggaaaggtccaatccag

SEQ ID NO: 2685201 - DNA, 25 bp, Homo sapien
gcagaagcacgccttggaaaggtcc

SEQ ID NO: 2685202 - DNA, 25 bp, Homo sapien
ttggaaaggtccaatccaggtgcct

SEQ ID NO: 2685203 - DNA, 25 bp, Homo sapien
gctgcgtgttcctcacggcgcctgc

SEQ ID NO: 2685204 - DNA, 25 bp, Homo sapien
tgctgcgtgttcctcacggcgcctg

SEQ ID NO: 2685205 - DNA, 25 bp, Homo sapien
atgctgcgtgttcctcacggcgcct

SEQ ID NO: 2685206 - DNA, 25 bp, Homo sapien
ctgcgtgttcctcacggcgcctgcc

SEQ ID NO: 2685207 - DNA, 25 bp, Homo sapien
ccaagggaggctctcttcgcagttg

SEQ ID NO: 2685208 - DNA, 25 bp, Homo sapien
aggctctcttcgcagttgccacagc

SEQ ID NO: 2685209 - DNA, 25 bp, Homo sapien
gaaatctattctccgctaccctctg

SEQ ID NO: 2685210 - DNA, 25 bp, Homo sapien
aggcgctgtgcagccggccacttac

SEQ ID NO: 2685211 - DNA, 25 bp, Homo sapien
caatgattgcatgcttacaaaccaa

SEQ ID NO: 2685212 - DNA, 25 bp, Homo sapien
cataaatacccagaagagtcaaaat

SEQ ID NO: 2685213 - DNA, 25 bp, Homo sapien
caactctcttggaatttcccataaa

SEQ ID NO: 2685214 - DNA, 25 bp, Homo sapien
gaaaatagagcttctaatgattaaa

SEQ ID NO: 2685215 - DNA, 25 bp, Homo sapien
cttataccgaagtctgtatttcctg

SEQ ID NO: 2685216 - DNA, 25 bp, Homo sapien
gtaaatatacaaggaatgtctgaac

SEQ ID NO: 2685217 - DNA, 25 bp, Homo sapien
atgtctgaactaatgaaatcttggg

SEQ ID NO: 2685218 - DNA, 25 bp, Homo sapien
tatgctaagtacttataccgaagtc

SEQ ID NO: 2685219 - DNA, 25 bp, Homo sapien
acaggcagcctgacaattgctcgac

SEQ ID NO: 2685220 - DNA, 25 bp, Homo sapien
tccaagaagagtacgaacaggcagc

SEQ ID NO: 2685221 - DNA, 25 bp, Homo sapien
cagtgagtaaatcagggtttgagcc

SEQ ID NO: 2685222 - DNA, 25 bp, Homo sapien
tcagtggtgctggttgtaaattcac

SEQ ID NO: 2685223 - DNA, 25 bp, Homo sapien
taagcattgctaagtaaatttacac

SEQ ID NO: 2685224 - DNA, 25 bp, Homo sapien
taatgatactctttatatctatgtg

SEQ ID NO: 2685225 - DNA, 25 bp, Homo sapien
gtaattaaatccaaacgatgtatca

SEQ ID NO: 2685226 - DNA, 25 bp, Homo sapien
catggtctaccattaatacatacaa

SEQ ID NO: 2685227 - DNA, 25 bp, Homo sapien
gcggtgagccaagactgtgccatta

SEQ ID NO: 2685228 - DNA, 25 bp, Homo sapien
tgtgccattacactccagcctgggc

SEQ ID NO: 2685229 - DNA, 25 bp, Homo sapien
tgcggtgagccaagactgtgccatt

SEQ ID NO: 2685230 - DNA, 25 bp, Homo sapien
ggaacgcagcggtgcaatcttggat

SEQ ID NO: 2685231 - DNA, 25 bp, Homo sapien
aacgcagcggtgcaatcttggatca

SEQ ID NO: 2685232 - DNA, 25 bp, Homo sapien
gaacgcagcggtgcaatcttggatc

SEQ ID NO: 2685233 - DNA, 25 bp, Homo sapien
ttagccaggcggagttctgaaatac

SEQ ID NO: 2685234 - DNA, 25 bp, Homo sapien
gtggtcacatagctcacacccagtg

SEQ ID NO: 2685235 - DNA, 25 bp, Homo sapien
tacacacagcagtttacacgcagtg

SEQ ID NO: 2685236 - DNA, 25 bp, Homo sapien
gaagtacaccctgattacttaggag

SEQ ID NO: 2685237 - DNA, 25 bp, Homo sapien
agcaagcagcctccgggatccacag

SEQ ID NO: 2685238 - DNA, 25 bp, Homo sapien
tgagcaagcagcctccgggatccac

SEQ ID NO: 2685239 - DNA, 25 bp, Homo sapien
gaggaactgagcaagcagcctccgg

SEQ ID NO: 2685240 - DNA, 25 bp, Homo sapien
gaactgagcaagcagcctccgggat

SEQ ID NO: 2685241 - DNA, 25 bp, Homo sapien
taaatgaactgttgggttgccgggc

SEQ ID NO: 2685242 - DNA, 25 bp, Homo sapien
attagaaagcttaaagctatttggg

SEQ ID NO: 2685243 - DNA, 25 bp, Homo sapien
gagctctaaaactgttaaaattaca

SEQ ID NO: 2685244 - DNA, 25 bp, Homo sapien
tagagttactctggacttgggtcca

SEQ ID NO: 2685245 - DNA, 25 bp, Homo sapien
tgcgtgatgttaccacaatcaccat

SEQ ID NO: 2685246 - DNA, 25 bp, Homo sapien
tgcctgtgcgtgatgttaccacaat

SEQ ID NO: 2685247 - DNA, 25 bp, Homo sapien
tgtgcgtgatgttaccacaatcacc

SEQ ID NO: 2685248 - DNA, 25 bp, Homo sapien
ctgtgcctgtgcgtgatgttaccac

SEQ ID NO: 2685249 - DNA, 25 bp, Homo sapien
gcgtctacttagcttgactgtttga

SEQ ID NO: 2685250 - DNA, 25 bp, Homo sapien
ggtctctctgacaccgctgacaatg

SEQ ID NO: 2685251 - DNA, 25 bp, Homo sapien
aaaaaatgcgtctacttagcttgac

SEQ ID NO: 2685252 - DNA, 25 bp, Homo sapien
gctgaatcatctgagaagggtctct

SEQ ID NO: 2685253 - DNA, 25 bp, Homo sapien
aactgactacaggtggcttcccaga

SEQ ID NO: 2685254 - DNA, 25 bp, Homo sapien
aaacactcaagagtcaaaagggcca

SEQ ID NO: 2685255 - DNA, 25 bp, Homo sapien
caagagtcaaaagggccaaatactg

SEQ ID NO: 2685256 - DNA, 25 bp, Homo sapien
tactggatccttaggtgtgatgtgc

SEQ ID NO: 2685257 - DNA, 25 bp, Homo sapien
caaggcagtgtgattgccaaaaaca

SEQ ID NO: 2685258 - DNA, 25 bp, Homo sapien
gacagagccgtccaactttccagac

SEQ ID NO: 2685259 - DNA, 25 bp, Homo sapien
taaattttccggatgcagcaatgtc

SEQ ID NO: 2685260 - DNA, 25 bp, Homo sapien
tttcagaggtcgtagatcagtcttc

SEQ ID NO: 2685261 - DNA, 25 bp, Homo sapien
ccttccaggtcgtactcccacatca

SEQ ID NO: 2685262 - DNA, 25 bp, Homo sapien
ttccaggtcgtactcccacatcacc

SEQ ID NO: 2685263 - DNA, 25 bp, Homo sapien
cttccaggtcgtactcccacatcac

SEQ ID NO: 2685264 - DNA, 25 bp, Homo sapien
tccttccaggtcgtactcccacatc

SEQ ID NO: 2685265 - DNA, 25 bp, Homo sapien
tctaggggaagctgtcctagtacag

SEQ ID NO: 2685266 - DNA, 25 bp, Homo sapien
ctctccagggggtgctagcagggcc

SEQ ID NO: 2685267 - DNA, 25 bp, Homo sapien
ctgtcctagtacaggagcacaggct

SEQ ID NO: 2685268 - DNA, 25 bp, Homo sapien
gggaagctgtcctagtacaggagca

SEQ ID NO: 2685269 - DNA, 25 bp, Homo sapien
aagtgttggttctcctcccattcca

SEQ ID NO: 2685270 - DNA, 25 bp, Homo sapien
cacgctgaggactactgctaccatc

SEQ ID NO: 2685271 - DNA, 25 bp, Homo sapien
aatccctaaaactgtcccacgctga

SEQ ID NO: 2685272 - DNA, 25 bp, Homo sapien
gaggactactgctaccatccctagt

SEQ ID NO: 2685273 - DNA, 25 bp, Homo sapien
cgttgcagcaataatatccacagtg

SEQ ID NO: 2685274 - DNA, 25 bp, Homo sapien
tccctcttctccgttgcagcaataa

SEQ ID NO: 2685275 - DNA, 25 bp, Homo sapien
taatatccacagtgcacaactgtct

SEQ ID NO: 2685276 - DNA, 25 bp, Homo sapien
ttttccctcttctccgttgcagcaa

SEQ ID NO: 2685277 - DNA, 25 bp, Homo sapien
tcagatccacagagatccagcactg

SEQ ID NO: 2685278 - DNA, 25 bp, Homo sapien
agcctggagcctcagatccacagag

SEQ ID NO: 2685279 - DNA, 25 bp, Homo sapien
ctggatgcaaagcccgggacatttg

SEQ ID NO: 2685280 - DNA, 25 bp, Homo sapien
tgcaaagcccgggacatttgtggat

SEQ ID NO: 2685281 - DNA, 25 bp, Homo sapien
tgtactgaactactgttagattctg

SEQ ID NO: 2685282 - DNA, 25 bp, Homo sapien
cagtgccttgcacatcggatatacc

SEQ ID NO: 2685283 - DNA, 25 bp, Homo sapien
tagattctgttctccgcagtgcctt

SEQ ID NO: 2685284 - DNA, 25 bp, Homo sapien
taaagtgctgtagtgtcccatcctg

SEQ ID NO: 2685285 - DNA, 25 bp, Homo sapien
tctatgcccggaaactgcctcatca

SEQ ID NO: 2685286 - DNA, 25 bp, Homo sapien
gaaaccaggggcttctctatgcccg

SEQ ID NO: 2685287 - DNA, 25 bp, Homo sapien
tgaatcatcaaagggccaaacccac

SEQ ID NO: 2685288 - DNA, 25 bp, Homo sapien
tcctgaatcatcaaagggccaaacc

SEQ ID NO: 2685289 - DNA, 25 bp, Homo sapien
tcttctgaggcaccgaataggccga

SEQ ID NO: 2685290 - DNA, 25 bp, Homo sapien
gaagcacatcaaagggatttttccc

SEQ ID NO: 2685291 - DNA, 25 bp, Homo sapien
aactgttttcgagcaatgggtggtc

SEQ ID NO: 2685292 - DNA, 25 bp, Homo sapien
agtgggcagagcttccaaaactcgc

SEQ ID NO: 2685293 - DNA, 25 bp, Homo sapien
tcattgtaccacaccagaagctcgg

SEQ ID NO: 2685294 - DNA, 25 bp, Homo sapien
tcatcctgggcaatgcattgtaagg

SEQ ID NO: 2685295 - DNA, 25 bp, Homo sapien
cctagggatatctatacaggctcgg

SEQ ID NO: 2685296 - DNA, 25 bp, Homo sapien
gatcccaaagaaagacgtatagctg

SEQ ID NO: 2685297 - DNA, 25 bp, Homo sapien
gggcgagtttgctgcttttgttgaa

SEQ ID NO: 2685298 - DNA, 25 bp, Homo sapien
tgcatctgtaagaggatccgctggg

SEQ ID NO: 2685299 - DNA, 25 bp, Homo sapien
tgaaagtcttaaagcactgcccaca

SEQ ID NO: 2685300 - DNA, 25 bp, Homo sapien
cagtcactgaactccgagtggagct

SEQ ID NO: 2685301 - DNA, 25 bp, Homo sapien
tttgacagctttgcaggatttatgg

SEQ ID NO: 2685302 - DNA, 25 bp, Homo sapien
tgcaggatttatgggtttgcatgct

SEQ ID NO: 2685303 - DNA, 25 bp, Homo sapien
catcactagcagagtaggtatttcc

SEQ ID NO: 2685304 - DNA, 25 bp, Homo sapien
agtttattgaataagtggcatctgt

SEQ ID NO: 2685305 - DNA, 25 bp, Homo sapien
ggctggcaattccacacttggacat

SEQ ID NO: 2685306 - DNA, 25 bp, Homo sapien
tggaaaggctggcaattccacactt

SEQ ID NO: 2685307 - DNA, 25 bp, Homo sapien
tctgaatcaaataagcccatcaggg

SEQ ID NO: 2685308 - DNA, 25 bp, Homo sapien
tccacacttggacatctgaatcaaa

SEQ ID NO: 2685309 - DNA, 25 bp, Homo sapien
gcctttcttgtacctggttctagca

SEQ ID NO: 2685310 - DNA, 25 bp, Homo sapien
cttgtacctggttctagcaagattt

SEQ ID NO: 2685311 - DNA, 25 bp, Homo sapien
ctttcttgtacctggttctagcaag

SEQ ID NO: 2685312 - DNA, 25 bp, Homo sapien
tgtacctggttctagcaagattttc

SEQ ID NO: 2685313 - DNA, 25 bp, Homo sapien
cagcacagaaatgataggatgtcat

SEQ ID NO: 2685314 - DNA, 25 bp, Homo sapien
aatgataggatgtcattgtgcttgc

SEQ ID NO: 2685315 - DNA, 25 bp, Homo sapien
gataggatgtcattgtgcttgcaga

SEQ ID NO: 2685316 - DNA, 25 bp, Homo sapien
gaaatgataggatgtcattgtgctt

SEQ ID NO: 2685317 - DNA, 25 bp, Homo sapien
actgggagcagtggccgcattggta

SEQ ID NO: 2685318 - DNA, 25 bp, Homo sapien
ggagcagtggccgcattggtagggt

SEQ ID NO: 2685319 - DNA, 25 bp, Homo sapien
ggactgggagcagtggccgcattgg

SEQ ID NO: 2685320 - DNA, 25 bp, Homo sapien
tgggagcagtggccgcattggtagg

SEQ ID NO: 2685321 - DNA, 25 bp, Homo sapien
tagccgcacttgaaaggccggtcac

SEQ ID NO: 2685322 - DNA, 25 bp, Homo sapien
ccacgtggttcctcagttctgaagg

SEQ ID NO: 2685323 - DNA, 25 bp, Homo sapien
ccggtcactagagtgagtgaccacg

SEQ ID NO: 2685324 - DNA, 25 bp, Homo sapien
tggtggccccggcaaaggcacgacc

SEQ ID NO: 2685325 - DNA, 25 bp, Homo sapien
gatgttctaaacttgtggtcacctt

SEQ ID NO: 2685326 - DNA, 25 bp, Homo sapien
tcctgaagggttcaagttctccaaa

SEQ ID NO: 2685327 - DNA, 25 bp, Homo sapien
tggtcacctttctgatgatcgtaag

SEQ ID NO: 2685328 - DNA, 25 bp, Homo sapien
atgatcgtaaggcttgctgatggcc

SEQ ID NO: 2685329 - DNA, 25 bp, Homo sapien
tagtgcttcatataaggcaaaagtg

SEQ ID NO: 2685330 - DNA, 25 bp, Homo sapien
cacgagttggcagtttagtgcttca

SEQ ID NO: 2685331 - DNA, 25 bp, Homo sapien
aaatttgtccaatatatagggtgca

SEQ ID NO: 2685332 - DNA, 25 bp, Homo sapien
catccagattggatggagacactaa

SEQ ID NO: 2685333 - DNA, 25 bp, Homo sapien
tttggtgtattcattaacgtccgtg

SEQ ID NO: 2685334 - DNA, 25 bp, Homo sapien
cctggagtgctgatgacacgttagc

SEQ ID NO: 2685335 - DNA, 25 bp, Homo sapien
cacgttagcgaactgctgattgttt

SEQ ID NO: 2685336 - DNA, 25 bp, Homo sapien
attaacgtccgtgggcagctcatcc

SEQ ID NO: 2685337 - DNA, 25 bp, Homo sapien
tgggcacagacagcgacttctccat

SEQ ID NO: 2685338 - DNA, 25 bp, Homo sapien
ctgcagggtgatgggcttcctctca

SEQ ID NO: 2685339 - DNA, 25 bp, Homo sapien
ctggtggaggcaagagagaaaattg

SEQ ID NO: 2685340 - DNA, 25 bp, Homo sapien
gagaaaattgagaccagggagcggg

SEQ ID NO: 2685341 - DNA, 25 bp, Homo sapien
ggcctgcagggtgatgggcttcctc

SEQ ID NO: 2685342 - DNA, 25 bp, Homo sapien
ggcatccgctggtgtcggctcagct

SEQ ID NO: 2685343 - DNA, 25 bp, Homo sapien
agttattggcttgcactcattgggc

SEQ ID NO: 2685344 - DNA, 25 bp, Homo sapien
gattctgggctctcagttattggct

SEQ ID NO: 2685345 - DNA, 25 bp, Homo sapien
taatccacttcgattgattctgggc

SEQ ID NO: 2685346 - DNA, 25 bp, Homo sapien
aatgtttctcaacgagctgcttcgg

SEQ ID NO: 2685347 - DNA, 25 bp, Homo sapien
cattcttagtcacaacggtgggcag

SEQ ID NO: 2685348 - DNA, 25 bp, Homo sapien
aatgaagggctgtacagtgggtccc

SEQ ID NO: 2685349 - DNA, 25 bp, Homo sapien
gtgcaacgagaaccaagtccctgtg

SEQ ID NO: 2685350 - DNA, 25 bp, Homo sapien
taaaagactgtgtcctgatatcagg

SEQ ID NO: 2685351 - DNA, 25 bp, Homo sapien
tactactttcatgaccaggagatag

SEQ ID NO: 2685352 - DNA, 25 bp, Homo sapien
gaatggcttgagattgggcaacaga

SEQ ID NO: 2685353 - DNA, 25 bp, Homo sapien
gcaacagaggtcagaattagccatt

SEQ ID NO: 2685354 - DNA, 25 bp, Homo sapien
caacctctgtgggaataagcgcaga

SEQ ID NO: 2685355 - DNA, 25 bp, Homo sapien
tgagatttgggcatgacaaaatcag

SEQ ID NO: 2685356 - DNA, 25 bp, Homo sapien
tgaaattctgtccagcaatgagatt

SEQ ID NO: 2685357 - DNA, 25 bp, Homo sapien
taagcattagaacaaggcatggcag

SEQ ID NO: 2685358 - DNA, 25 bp, Homo sapien
gaaactgggcattcactctaaccat

SEQ ID NO: 2685359 - DNA, 25 bp, Homo sapien
tgtcatatcagtggcccttacagca

SEQ ID NO: 2685360 - DNA, 25 bp, Homo sapien
tacagaactggatgtcttccccttg

SEQ ID NO: 2685361 - DNA, 25 bp, Homo sapien
tccagtagggaacatttacagtcct

SEQ ID NO: 2685362 - DNA, 25 bp, Homo sapien
gttggggccagctcacaagtttatt

SEQ ID NO: 2685363 - DNA, 25 bp, Homo sapien
ttatatcatatcaataacaacgtac

SEQ ID NO: 2685364 - DNA, 25 bp, Homo sapien
gatcgaagagaagccctgaatctgc

SEQ ID NO: 2685365 - DNA, 25 bp, Homo sapien
ggccgtgggcagtgtcgcaacttgg

SEQ ID NO: 2685366 - DNA, 25 bp, Homo sapien
tctttcgaaatatgattatcagcac

SEQ ID NO: 2685367 - DNA, 25 bp, Homo sapien
ggaccgctctttgacagtataattc

SEQ ID NO: 2685368 - DNA, 25 bp, Homo sapien
atttcaatcacgtattcttcctcca

SEQ ID NO: 2685369 - DNA, 25 bp, Homo sapien
aatggcgacaatggtttcacccagg

SEQ ID NO: 2685370 - DNA, 25 bp, Homo sapien
tttactgcccattgattttcacaaa

SEQ ID NO: 2685371 - DNA, 25 bp, Homo sapien
tttctgatgtaaatgagggccattc

SEQ ID NO: 2685372 - DNA, 25 bp, Homo sapien
cttctcagggtgctggactatagta

SEQ ID NO: 2685373 - DNA, 25 bp, Homo sapien
ccattctgaggttgtctgagaggta

SEQ ID NO: 2685374 - DNA, 25 bp, Homo sapien
gaattaactggacatgagtttccca

SEQ ID NO: 2685375 - DNA, 25 bp, Homo sapien
ttaactggacatgagtttcccaacc

SEQ ID NO: 2685376 - DNA, 25 bp, Homo sapien
gtgaattaactggacatgagtttcc

SEQ ID NO: 2685377 - DNA, 25 bp, Homo sapien
aattaactggacatgagtttcccaa

SEQ ID NO: 2685378 - DNA, 25 bp, Homo sapien
tggagtttagtgtaaacactccaag

SEQ ID NO: 2685379 - DNA, 25 bp, Homo sapien
ccagtgataaggctgtaaattccct

SEQ ID NO: 2685380 - DNA, 25 bp, Homo sapien
cagccgacatcgctttcaattccag

SEQ ID NO: 2685381 - DNA, 25 bp, Homo sapien
ggcctggagtttagtgtaaacactc

SEQ ID NO: 2685382 - DNA, 25 bp, Homo sapien
ttagatgagcaatggcaagctgcaa

SEQ ID NO: 2685383 - DNA, 25 bp, Homo sapien
ggttcccaagatcagtagatccagg

SEQ ID NO: 2685384 - DNA, 25 bp, Homo sapien
aaatgatgatttttaggttcccaag

SEQ ID NO: 2685385 - DNA, 25 bp, Homo sapien
tctaataaaatggagggtctcagcc

SEQ ID NO: 2685386 - DNA, 25 bp, Homo sapien
ttacagggatcctgctcattagtag

SEQ ID NO: 2685387 - DNA, 25 bp, Homo sapien
ccgtagcaggtgtttatggacttac

SEQ ID NO: 2685388 - DNA, 25 bp, Homo sapien
tagtagctgtgttaagtggcccctg

SEQ ID NO: 2685389 - DNA, 25 bp, Homo sapien
aatggatgctagacaactgagtata

SEQ ID NO: 2685390 - DNA, 25 bp, Homo sapien
cattggatttatgcagtgccctgtc

SEQ ID NO: 2685391 - DNA, 25 bp, Homo sapien
aaagcgcacgagattcactcattgg

SEQ ID NO: 2685392 - DNA, 25 bp, Homo sapien
taaaccctctgtaatagaacatgga

SEQ ID NO: 2685393 - DNA, 25 bp, Homo sapien
aatcaatcgttttcaaaagcgcacg

SEQ ID NO: 2685394 - DNA, 25 bp, Homo sapien
tccaaatccgaccaattgctcatcg

SEQ ID NO: 2685395 - DNA, 25 bp, Homo sapien
agcagacggcggtgggacctggctg

SEQ ID NO: 2685396 - DNA, 25 bp, Homo sapien
gattacccgcgactcaactggacct

SEQ ID NO: 2685397 - DNA, 25 bp, Homo sapien
gctcaccgcaaccatggtctccaaa

SEQ ID NO: 2685398 - DNA, 25 bp, Homo sapien
gctcataacatagttgctgggatgc

SEQ ID NO: 2685399 - DNA, 25 bp, Homo sapien
atgcagagctctgctactggggatg

SEQ ID NO: 2685400 - DNA, 25 bp, Homo sapien
tgcacctatgctcataacatagttg

SEQ ID NO: 2685401 - DNA, 25 bp, Homo sapien
taacatagttgctgggatgcagagc

SEQ ID NO: 2685402 - DNA, 25 bp, Homo sapien
gttccctggttgattagaaccatat

SEQ ID NO: 2685403 - DNA, 25 bp, Homo sapien
ggttccctggttgattagaaccata

SEQ ID NO: 2685404 - DNA, 25 bp, Homo sapien
ttggttccctggttgattagaacca

SEQ ID NO: 2685405 - DNA, 25 bp, Homo sapien
tccctggttgattagaaccatatta

SEQ ID NO: 2685406 - DNA, 25 bp, Homo sapien
ttcagtgatcagaggctgtgccttc

SEQ ID NO: 2685407 - DNA, 25 bp, Homo sapien
gtgccttcctgtaggtgtggagtaa

SEQ ID NO: 2685408 - DNA, 25 bp, Homo sapien
tgccttcctgtaggtgtggagtaag

SEQ ID NO: 2685409 - DNA, 25 bp, Homo sapien
ctgttcagtgatcagaggctgtgcc

SEQ ID NO: 2685410 - DNA, 25 bp, Homo sapien
cattggtgccacagcttgtctatgc

SEQ ID NO: 2685411 - DNA, 25 bp, Homo sapien
gcttgtctatgccatctctgaactt

SEQ ID NO: 2685412 - DNA, 25 bp, Homo sapien
atatccttctgctgaatacgactgc

SEQ ID NO: 2685413 - DNA, 25 bp, Homo sapien
aatacgactgcattggtgccacagc

SEQ ID NO: 2685414 - DNA, 25 bp, Homo sapien
cttaagtccactctgcctacataga

SEQ ID NO: 2685415 - DNA, 25 bp, Homo sapien
ctgaaatcggtgtttctgactcaca

SEQ ID NO: 2685416 - DNA, 25 bp, Homo sapien
caagttatcaagttgcagcgcacaa

SEQ ID NO: 2685417 - DNA, 25 bp, Homo sapien
tgagaagccaaacatcacccaagtt

SEQ ID NO: 2685418 - DNA, 25 bp, Homo sapien
tcggatcgccgaccggaaaggagac

SEQ ID NO: 2685419 - DNA, 25 bp, Homo sapien
gtgtataaagcctaagccgcgccct

SEQ ID NO: 2685420 - DNA, 25 bp, Homo sapien
cggtcattggctggcaaggtgtata

SEQ ID NO: 2685421 - DNA, 25 bp, Homo sapien
gattggtcggatcgccgaccggaaa

SEQ ID NO: 2685422 - DNA, 25 bp, Homo sapien
ccggacccggaagtgaacacatgga

SEQ ID NO: 2685423 - DNA, 25 bp, Homo sapien
gagtagagccgaagattgcaccaac

SEQ ID NO: 2685424 - DNA, 25 bp, Homo sapien
aaaggaaagcgtctgtttagcggcg

SEQ ID NO: 2685425 - DNA, 25 bp, Homo sapien
tcagcgaaaacagccgagtagagcc

SEQ ID NO: 2685426 - DNA, 25 bp, Homo sapien
cgatgcagcccggaatgaatgcaca

SEQ ID NO: 2685427 - DNA, 25 bp, Homo sapien
gcccggaatgaatgcacagcagcgc

SEQ ID NO: 2685428 - DNA, 25 bp, Homo sapien
acagcagcgcctcgcttatccggag

SEQ ID NO: 2685429 - DNA, 25 bp, Homo sapien
tgtcgccaccgatgcagcccggaat

SEQ ID NO: 2685430 - DNA, 25 bp, Homo sapien
ctgcactgccgctggtgcctcctac

SEQ ID NO: 2685431 - DNA, 25 bp, Homo sapien
agagagaggtaacgcagcgctgctc

SEQ ID NO: 2685432 - DNA, 25 bp, Homo sapien
agcgctgctcggattcggtccctgc

SEQ ID NO: 2685433 - DNA, 25 bp, Homo sapien
ggcggcggcacatcacacccgccgg

SEQ ID NO: 2685434 - DNA, 25 bp, Homo sapien
ttctcccttgaaggcagtactgagt

SEQ ID NO: 2685435 - DNA, 25 bp, Homo sapien
catccttgccacagagtaaaggtgg

SEQ ID NO: 2685436 - DNA, 25 bp, Homo sapien
tggtcctggttgaattaaactattc

SEQ ID NO: 2685437 - DNA, 25 bp, Homo sapien
tcccttgaaggcagtactgagtctc

SEQ ID NO: 2685438 - DNA, 25 bp, Homo sapien
atagtccttggcacttcatatgaat

SEQ ID NO: 2685439 - DNA, 25 bp, Homo sapien
catagtccttggcacttcatatgaa

SEQ ID NO: 2685440 - DNA, 25 bp, Homo sapien
acatagtccttggcacttcatatga

SEQ ID NO: 2685441 - DNA, 25 bp, Homo sapien
tcaatgtagcatgagcatcagtcag

SEQ ID NO: 2685442 - DNA, 25 bp, Homo sapien
tccagtgtgggtctatcgaagaaag

SEQ ID NO: 2685443 - DNA, 25 bp, Homo sapien
tagggtgttcccgagagtctttgct

SEQ ID NO: 2685444 - DNA, 25 bp, Homo sapien
tcacgagtgggttaagcagaggtca

SEQ ID NO: 2685445 - DNA, 25 bp, Homo sapien
taaatccttctgaccaagaaactcc

SEQ ID NO: 2685446 - DNA, 25 bp, Homo sapien
caatctcactggaattccaggattc

SEQ ID NO: 2685447 - DNA, 25 bp, Homo sapien
cactggaattccaggattcaaaata

SEQ ID NO: 2685448 - DNA, 25 bp, Homo sapien
actctgctgctctcaaaatatgtaa

SEQ ID NO: 2685449 - DNA, 25 bp, Homo sapien
ccttggattttgatagccatgaggg

SEQ ID NO: 2685450 - DNA, 25 bp, Homo sapien
cccatccttggattttgatagccat

SEQ ID NO: 2685451 - DNA, 25 bp, Homo sapien
ctgtatgaagctatgagcagaagcc

SEQ ID NO: 2685452 - DNA, 25 bp, Homo sapien
cctggaacgaatctgaggaactgta

SEQ ID NO: 2685453 - DNA, 25 bp, Homo sapien
gtgagatttttgcacaggagggcta

SEQ ID NO: 2685454 - DNA, 25 bp, Homo sapien
gcacttttctattagcagagggtct

SEQ ID NO: 2685455 - DNA, 25 bp, Homo sapien
tataggatcgttcttgtgctggaga

SEQ ID NO: 2685456 - DNA, 25 bp, Homo sapien
gctatgtgcagtactggtaacgcca

SEQ ID NO: 2685457 - DNA, 25 bp, Homo sapien
ggagcatgttcatcccattcgtaaa

SEQ ID NO: 2685458 - DNA, 25 bp, Homo sapien
ggtagtcaattaactggagcatgtt

SEQ ID NO: 2685459 - DNA, 25 bp, Homo sapien
ctaggtaactgtaccagatgggtaa

SEQ ID NO: 2685460 - DNA, 25 bp, Homo sapien
tgatgtgagctgatattgatagaga

SEQ ID NO: 2685461 - DNA, 25 bp, Homo sapien
caagtttgcggtactccactttgaa

SEQ ID NO: 2685462 - DNA, 25 bp, Homo sapien
atcaagtttgcggtactccactttg

SEQ ID NO: 2685463 - DNA, 25 bp, Homo sapien
tcaagtttgcggtactccactttga

SEQ ID NO: 2685464 - DNA, 25 bp, Homo sapien
agtttgcggtactccactttgaatt

SEQ ID NO: 2685465 - DNA, 25 bp, Homo sapien
tgtgtcccgatcgaccactaggtcg

SEQ ID NO: 2685466 - DNA, 25 bp, Homo sapien
ttaaaactccagacgatgaagaccc

SEQ ID NO: 2685467 - DNA, 25 bp, Homo sapien
caactctaaagttaggtccaaccat

SEQ ID NO: 2685468 - DNA, 25 bp, Homo sapien
cagttcctcgagtgttgtgtcccga

SEQ ID NO: 2685469 - DNA, 25 bp, Homo sapien
gatagtcaatctctggatggctaaa

SEQ ID NO: 2685470 - DNA, 25 bp, Homo sapien
tatttcagcctactgggctatttta

SEQ ID NO: 2685471 - DNA, 25 bp, Homo sapien
ctaaagtagacactcctatactagg

SEQ ID NO: 2685472 - DNA, 25 bp, Homo sapien
gaacattgcaaaggctttactggca

SEQ ID NO: 2685473 - DNA, 25 bp, Homo sapien
cactgagttccaattgccttgaata

SEQ ID NO: 2685474 - DNA, 25 bp, Homo sapien
tgaatcaatactctgagccccttgt

SEQ ID NO: 2685475 - DNA, 25 bp, Homo sapien
gctacatcactactgtactggaagt

SEQ ID NO: 2685476 - DNA, 25 bp, Homo sapien
caaattagggtacttcacaagatga

SEQ ID NO: 2685477 - DNA, 25 bp, Homo sapien
tattttaccagcatattatcaatgt

SEQ ID NO: 2685478 - DNA, 25 bp, Homo sapien
atattttaccagcatattatcaatg

SEQ ID NO: 2685479 - DNA, 25 bp, Homo sapien
tatattttaccagcatattatcaat

SEQ ID NO: 2685480 - DNA, 25 bp, Homo sapien
cctaggaagtggtaataatcctgat

SEQ ID NO: 2685481 - DNA, 25 bp, Homo sapien
ctcacaataacctaggaagtggtaa

SEQ ID NO: 2685482 - DNA, 25 bp, Homo sapien
agtatatgcaagtatagtgttggtc

SEQ ID NO: 2685483 - DNA, 25 bp, Homo sapien
ttctgaataaaaatggccaaagtat

SEQ ID NO: 2685484 - DNA, 25 bp, Homo sapien
gttaaaatggtcaactagctttgtg

SEQ ID NO: 2685485 - DNA, 25 bp, Homo sapien
taaaatggtcaactagctttgtgtg

SEQ ID NO: 2685486 - DNA, 25 bp, Homo sapien
tgttaaaatggtcaactagctttgt

SEQ ID NO: 2685487 - DNA, 25 bp, Homo sapien
aaatggtcaactagctttgtgtgaa

SEQ ID NO: 2685488 - DNA, 25 bp, Homo sapien
ggtgctttacctctttttcagtata

SEQ ID NO: 2685489 - DNA, 25 bp, Homo sapien
gtgctttacctctttttcagtatat

SEQ ID NO: 2685490 - DNA, 25 bp, Homo sapien
gtctttcttagccaatactaaccat

SEQ ID NO: 2685491 - DNA, 25 bp, Homo sapien
gaaaatcacttacctataacatgta

SEQ ID NO: 2685492 - DNA, 25 bp, Homo sapien
aagtctcaagttttaaatgccctgc

SEQ ID NO: 2685493 - DNA, 25 bp, Homo sapien
gcaatgtctgggacagtattctacc

SEQ ID NO: 2685494 - DNA, 25 bp, Homo sapien
aaaaaaaaatcagattctgccagta

SEQ ID NO: 2685495 - DNA, 25 bp, Homo sapien
gaaaaaaaaatcagattctgccagt

SEQ ID NO: 2685496 - DNA, 25 bp, Homo sapien
aaaaaaatcagattctgccagtaat

SEQ ID NO: 2685497 - DNA, 25 bp, Homo sapien
aagaaaaaaaaatcagattctgcca

SEQ ID NO: 2685498 - DNA, 25 bp, Homo sapien
caacttaattgccacatattcattt

SEQ ID NO: 2685499 - DNA, 25 bp, Homo sapien
aacttaattgccacatattcatttg

SEQ ID NO: 2685500 - DNA, 25 bp, Homo sapien
caaagagatcgctctgctctgcagc

SEQ ID NO: 2685501 - DNA, 25 bp, Homo sapien
tccctcaaagtcaagcaatagccag

SEQ ID NO: 2685502 - DNA, 25 bp, Homo sapien
tacaatgctgccaaagtaaagggat

SEQ ID NO: 2685503 - DNA, 25 bp, Homo sapien
gcagctgtcatactgggcacattga

SEQ ID NO: 2685504 - DNA, 25 bp, Homo sapien
gtggtgctcttgatttcatgggctc

SEQ ID NO: 2685505 - DNA, 25 bp, Homo sapien
atcctaactgcttatagaatctgta

SEQ ID NO: 2685506 - DNA, 25 bp, Homo sapien
tgtattccaaatgtagctgtggtgc

SEQ ID NO: 2685507 - DNA, 25 bp, Homo sapien
gctgtggtgctcttgatttcatggg

SEQ ID NO: 2685508 - DNA, 25 bp, Homo sapien
ccagcaccatagcattgtatttacc

SEQ ID NO: 2685509 - DNA, 25 bp, Homo sapien
gttgtatagctatcatgagaactgt

SEQ ID NO: 2685510 - DNA, 25 bp, Homo sapien
caagggccgaaatagtaaacttgag

SEQ ID NO: 2685511 - DNA, 25 bp, Homo sapien
agtcttccaaactaggtcccagcag

SEQ ID NO: 2685512 - DNA, 25 bp, Homo sapien
catatatctagctgttcctgtaagg

SEQ ID NO: 2685513 - DNA, 25 bp, Homo sapien
ggtcgtcctattaagaagttctcag

SEQ ID NO: 2685514 - DNA, 25 bp, Homo sapien
caagttctttgaatggacatattcc

SEQ ID NO: 2685515 - DNA, 25 bp, Homo sapien
tcctgtaaggctcttgtgttctctg

SEQ ID NO: 2685516 - DNA, 25 bp, Homo sapien
cttccatacttacgaaaggtacaca

SEQ ID NO: 2685517 - DNA, 25 bp, Homo sapien
agtgttagcacagctgctaagttca

SEQ ID NO: 2685518 - DNA, 25 bp, Homo sapien
ccatacttacgaaaggtacacatac

SEQ ID NO: 2685519 - DNA, 25 bp, Homo sapien
gtgttagcacagctgctaagttcaa

SEQ ID NO: 2685520 - DNA, 25 bp, Homo sapien
ttttttgtgttctttcaccaactga

SEQ ID NO: 2685521 - DNA, 25 bp, Homo sapien
tttgtgttctttcaccaactgacat

SEQ ID NO: 2685522 - DNA, 25 bp, Homo sapien
tgtgttctttcaccaactgacatat

SEQ ID NO: 2685523 - DNA, 25 bp, Homo sapien
ttttgtgttctttcaccaactgaca

SEQ ID NO: 2685524 - DNA, 25 bp, Homo sapien
tacagatctagtaactataagtgat

SEQ ID NO: 2685525 - DNA, 25 bp, Homo sapien
ctgtatactacagctctgtcttaaa

SEQ ID NO: 2685526 - DNA, 25 bp, Homo sapien
ttttacattaagattattgagcatc

SEQ ID NO: 2685527 - DNA, 25 bp, Homo sapien
tatctgcttagatgtctattcatgg

SEQ ID NO: 2685528 - DNA, 25 bp, Homo sapien
cctaaagcttctaaatcgtctcttc

SEQ ID NO: 2685529 - DNA, 25 bp, Homo sapien
atacatgaacatatgacctaaagct

SEQ ID NO: 2685530 - DNA, 25 bp, Homo sapien
aaagcttctaaatcgtctcttctac

SEQ ID NO: 2685531 - DNA, 25 bp, Homo sapien
tgaacatatgacctaaagcttctaa

SEQ ID NO: 2685532 - DNA, 25 bp, Homo sapien
tctattggtgtagcccgttttgtat

SEQ ID NO: 2685533 - DNA, 25 bp, Homo sapien
taacacttctattggtgtagcccgt

SEQ ID NO: 2685534 - DNA, 25 bp, Homo sapien
tcacataacacttctattggtgtag

SEQ ID NO: 2685535 - DNA, 25 bp, Homo sapien
ttttctgatacctctcctttaatgt

SEQ ID NO: 2685536 - DNA, 25 bp, Homo sapien
agtagtcatagtctggtttttcaaa

SEQ ID NO: 2685537 - DNA, 25 bp, Homo sapien
aaaaatctagccttcttacataacg

SEQ ID NO: 2685538 - DNA, 25 bp, Homo sapien
cttacataacgaagatatgttgcca

SEQ ID NO: 2685539 - DNA, 25 bp, Homo sapien
cttttcgatcaaacaagtcagtaaa

SEQ ID NO: 2685540 - DNA, 25 bp, Homo sapien
tggattgttgcatcttatctctgtg

SEQ ID NO: 2685541 - DNA, 25 bp, Homo sapien
tttggattgttgcatcttatctctg

SEQ ID NO: 2685542 - DNA, 25 bp, Homo sapien
ttggattgttgcatcttatctctgt

SEQ ID NO: 2685543 - DNA, 25 bp, Homo sapien
ttttggattgttgcatcttatctct

SEQ ID NO: 2685544 - DNA, 25 bp, Homo sapien
catattggagtatggggagcctcaa

SEQ ID NO: 2685545 - DNA, 25 bp, Homo sapien
aaagtgccaagcatattggagtatg

SEQ ID NO: 2685546 - DNA, 25 bp, Homo sapien
ggagcctcaagcatattgttggcca

SEQ ID NO: 2685547 - DNA, 25 bp, Homo sapien
gggagcctcaagcatattgttggcc

SEQ ID NO: 2685548 - DNA, 25 bp, Homo sapien
ctctcaaatggtggggatttgcctg

SEQ ID NO: 2685549 - DNA, 25 bp, Homo sapien
gagctctcaaatggtggggatttgc

SEQ ID NO: 2685550 - DNA, 25 bp, Homo sapien
gcaaggtgagctctcaaatggtggg

SEQ ID NO: 2685551 - DNA, 25 bp, Homo sapien
gtgagctctcaaatggtggggattt

SEQ ID NO: 2685552 - DNA, 25 bp, Homo sapien
gctgtgatgggtgcatttgaacgtc

SEQ ID NO: 2685553 - DNA, 25 bp, Homo sapien
gggtcatctgtgtttaactctccat

SEQ ID NO: 2685554 - DNA, 25 bp, Homo sapien
atccatcacttctacttcagtaggg

SEQ ID NO: 2685555 - DNA, 25 bp, Homo sapien
tgggtgcatttgaacgtcctgcggt

SEQ ID NO: 2685556 - DNA, 25 bp, Homo sapien
tccgatcttcccaactaggaggaca

SEQ ID NO: 2685557 - DNA, 25 bp, Homo sapien
gacttctccgatcttcccaactagg

SEQ ID NO: 2685558 - DNA, 25 bp, Homo sapien
catgaggacttctccgatcttccca

SEQ ID NO: 2685559 - DNA, 25 bp, Homo sapien
tcccaactaggaggacatactccat

SEQ ID NO: 2685560 - DNA, 25 bp, Homo sapien
actcctccaactggttcaattcttt

SEQ ID NO: 2685561 - DNA, 25 bp, Homo sapien
catctttgagaactagtgtaaatgc

SEQ ID NO: 2685562 - DNA, 25 bp, Homo sapien
ttcccttgccaaatcattctcatct

SEQ ID NO: 2685563 - DNA, 25 bp, Homo sapien
caattctttccttgcgtcaacctct

SEQ ID NO: 2685564 - DNA, 25 bp, Homo sapien
tagaactaaccacgtaggactccag

SEQ ID NO: 2685565 - DNA, 25 bp, Homo sapien
tgagagactgttggtacctcctaga

SEQ ID NO: 2685566 - DNA, 25 bp, Homo sapien
tgctcatcctttggttgagagactg

SEQ ID NO: 2685567 - DNA, 25 bp, Homo sapien
caagaagagtttagatcagagaaca

SEQ ID NO: 2685568 - DNA, 25 bp, Homo sapien
tagaagtgacagaccaaatacttag

SEQ ID NO: 2685569 - DNA, 25 bp, Homo sapien
gactacacatgtaagagatttgatc

SEQ ID NO: 2685570 - DNA, 25 bp, Homo sapien
caaatagcagaaagcaagacataaa

SEQ ID NO: 2685571 - DNA, 25 bp, Homo sapien
tggattacccagtcaagagcctaga

SEQ ID NO: 2685572 - DNA, 25 bp, Homo sapien
catttgtggcgctgtatggttttcc

SEQ ID NO: 2685573 - DNA, 25 bp, Homo sapien
tcatttgtggcgctgtatggttttc

SEQ ID NO: 2685574 - DNA, 25 bp, Homo sapien
atcacaagacagcagatgaacatgt

SEQ ID NO: 2685575 - DNA, 25 bp, Homo sapien
tgattttaatcacaagacagcagat

SEQ ID NO: 2685576 - DNA, 25 bp, Homo sapien
tttaatcacaagacagcagatgaac

SEQ ID NO: 2685577 - DNA, 25 bp, Homo sapien
catgtaagtaactccccaggatctg

SEQ ID NO: 2685578 - DNA, 25 bp, Homo sapien
tcattgataccacctcattggtcca

SEQ ID NO: 2685579 - DNA, 25 bp, Homo sapien
ggcaaagcactcatgttttgacaaa

SEQ ID NO: 2685580 - DNA, 25 bp, Homo sapien
ggttgacacttaagatactgtactg

SEQ ID NO: 2685581 - DNA, 25 bp, Homo sapien
tatgaacttctcaaggaataacttc

SEQ ID NO: 2685582 - DNA, 25 bp, Homo sapien
atttcacggagagaatgttaatatg

SEQ ID NO: 2685583 - DNA, 25 bp, Homo sapien
gatttcacggagagaatgttaatat

SEQ ID NO: 2685584 - DNA, 25 bp, Homo sapien
tttcacggagagaatgttaatatga

SEQ ID NO: 2685585 - DNA, 25 bp, Homo sapien
cgaacccatattgctttttcctcag

SEQ ID NO: 2685586 - DNA, 25 bp, Homo sapien
ttttcctcagtacctctgggcagtg

SEQ ID NO: 2685587 - DNA, 25 bp, Homo sapien
ccaccatctgccgaacccatattgc

SEQ ID NO: 2685588 - DNA, 25 bp, Homo sapien
ctcagtacctctgggcagtgactgt

SEQ ID NO: 2685589 - DNA, 25 bp, Homo sapien
tcacatagtgatgcaacaaaagcgg

SEQ ID NO: 2685590 - DNA, 25 bp, Homo sapien
caaaagcggagcacatatttaccac

SEQ ID NO: 2685591 - DNA, 25 bp, Homo sapien
aaataagcgcttttgccacttctgc

SEQ ID NO: 2685592 - DNA, 25 bp, Homo sapien
taatcattcagcagtaagtttcggt

SEQ ID NO: 2685593 - DNA, 25 bp, Homo sapien
caacgaagagactgcatgggaggaa

SEQ ID NO: 2685594 - DNA, 25 bp, Homo sapien
aataaataagcatgcctggaggcac

SEQ ID NO: 2685595 - DNA, 25 bp, Homo sapien
tacttgaaaagtggaatgggcttcc

SEQ ID NO: 2685596 - DNA, 25 bp, Homo sapien
tggaggcacacacttaaagacaacg

SEQ ID NO: 2685597 - DNA, 25 bp, Homo sapien
tttaccactggatttcaagaaagca

SEQ ID NO: 2685598 - DNA, 25 bp, Homo sapien
cctatcttaaattagggagtgacat

SEQ ID NO: 2685599 - DNA, 25 bp, Homo sapien
tattaaagaaagcttagatccttcc

SEQ ID NO: 2685600 - DNA, 25 bp, Homo sapien
ccttcctagtgtgtgctttttacca

SEQ ID NO: 2685601 - DNA, 25 bp, Homo sapien
tattaaacagttcagagaagtataa

SEQ ID NO: 2685602 - DNA, 25 bp, Homo sapien
attattgctctattaaacagttcag

SEQ ID NO: 2685603 - DNA, 25 bp, Homo sapien
gctctattaaacagttcagagaagt

SEQ ID NO: 2685604 - DNA, 25 bp, Homo sapien
tctattaaacagttcagagaagtat

SEQ ID NO: 2685605 - DNA, 25 bp, Homo sapien
cagtaagtagcgtaccattaatgcc

SEQ ID NO: 2685606 - DNA, 25 bp, Homo sapien
gtaagtagcgtaccattaatgccat

SEQ ID NO: 2685607 - DNA, 25 bp, Homo sapien
tccctcagtaagtagcgtaccatta

SEQ ID NO: 2685608 - DNA, 25 bp, Homo sapien
tagcatccctcagtaagtagcgtac

SEQ ID NO: 2685609 - DNA, 25 bp, Homo sapien
tgccccgttgtatacttgagaagtc

SEQ ID NO: 2685610 - DNA, 25 bp, Homo sapien
cttggagacatgaggacactgtggc

SEQ ID NO: 2685611 - DNA, 25 bp, Homo sapien
tttgaagtgactcaagaactagcct

SEQ ID NO: 2685612 - DNA, 25 bp, Homo sapien
aaatgttaccaatactgccccgttg

SEQ ID NO: 2685613 - DNA, 25 bp, Homo sapien
taagtaagacatagaaatcgttgac

SEQ ID NO: 2685614 - DNA, 25 bp, Homo sapien
aatcagggtagtgtaagtaagacat

SEQ ID NO: 2685615 - DNA, 25 bp, Homo sapien
cagggtagtgtaagtaagacataga

SEQ ID NO: 2685616 - DNA, 25 bp, Homo sapien
tagtgtaagtaagacatagaaatcg

SEQ ID NO: 2685617 - DNA, 25 bp, Homo sapien
tccccacttttggtattcattgaaa

SEQ ID NO: 2685618 - DNA, 25 bp, Homo sapien
catttggatggagatctctctatat

SEQ ID NO: 2685619 - DNA, 25 bp, Homo sapien
accagagcttgtttaatacatttgg

SEQ ID NO: 2685620 - DNA, 25 bp, Homo sapien
tgtttaatacatttggatggagatc

SEQ ID NO: 2685621 - DNA, 25 bp, Homo sapien
taatacatttggatggagatctctc

SEQ ID NO: 2685622 - DNA, 25 bp, Homo sapien
gaaggtggagcgagtggtgaagttc

SEQ ID NO: 2685623 - DNA, 25 bp, Homo sapien
aggtggagcgagtggtgaagttcat

SEQ ID NO: 2685624 - DNA, 25 bp, Homo sapien
ctagttggtggagaaggtggagcga

SEQ ID NO: 2685625 - DNA, 25 bp, Homo sapien
gagaaggtggagcgagtggtgaagt

SEQ ID NO: 2685626 - DNA, 25 bp, Homo sapien
ctggtcgcctggacagagcccaggg

SEQ ID NO: 2685627 - DNA, 25 bp, Homo sapien
tggtcgcctggacagagcccaggga

SEQ ID NO: 2685628 - DNA, 25 bp, Homo sapien
ggtcgcctggacagagcccagggac

SEQ ID NO: 2685629 - DNA, 25 bp, Homo sapien
cccggactccaagccgccctggaag

SEQ ID NO: 2685630 - DNA, 25 bp, Homo sapien
gccaggcccccggactccaagccgc

SEQ ID NO: 2685631 - DNA, 25 bp, Homo sapien
ggactccaagccgccctggaagctg

SEQ ID NO: 2685632 - DNA, 25 bp, Homo sapien
ggcgcctgcatagactctggctgtg

SEQ ID NO: 2685633 - DNA, 25 bp, Homo sapien
tcttctccaagtgctaccggatttt

SEQ ID NO: 2685634 - DNA, 25 bp, Homo sapien
cccttcttctccaagtgctaccgga

SEQ ID NO: 2685635 - DNA, 25 bp, Homo sapien
ggaagtaatggcatcagtctctgac

SEQ ID NO: 2685636 - DNA, 25 bp, Homo sapien
ctggaagtaatggcatcagtctctg

SEQ ID NO: 2685637 - DNA, 25 bp, Homo sapien
gtcaatctgcagaactatgcaggca

SEQ ID NO: 2685638 - DNA, 25 bp, Homo sapien
cgaagatctgaatcctcaggttctg

SEQ ID NO: 2685639 - DNA, 25 bp, Homo sapien
aagatctgaatcctcaggttctgga

SEQ ID NO: 2685640 - DNA, 25 bp, Homo sapien
gatctgaatcctcaggttctggatg

SEQ ID NO: 2685641 - DNA, 25 bp, Homo sapien
agtgacagtgtcatcaatgacattg

SEQ ID NO: 2685642 - DNA, 25 bp, Homo sapien
attgcggagcccgtggatgtcgttc

SEQ ID NO: 2685643 - DNA, 25 bp, Homo sapien
acagtgtcatcaatgacattgcgga

SEQ ID NO: 2685644 - DNA, 25 bp, Homo sapien
tgacagtgtcatcaatgacattgcg

SEQ ID NO: 2685645 - DNA, 25 bp, Homo sapien
tctcttcaatctgctgaggccaatg

SEQ ID NO: 2685646 - DNA, 25 bp, Homo sapien
cttcaatctgctgaggccaatgctt

SEQ ID NO: 2685647 - DNA, 25 bp, Homo sapien
ctgctgaggccaatgcttgtccagc

SEQ ID NO: 2685648 - DNA, 25 bp, Homo sapien
aatctgctgaggccaatgcttgtcc

SEQ ID NO: 2685649 - DNA, 25 bp, Homo sapien
atggagtccaggtcatctccaagaa

SEQ ID NO: 2685650 - DNA, 25 bp, Homo sapien
catggagtccaggtcatctccaaga

SEQ ID NO: 2685651 - DNA, 25 bp, Homo sapien
tcatggagtccaggtcatctccaag

SEQ ID NO: 2685652 - DNA, 25 bp, Homo sapien
cttgacgttcagcaggtcctcctac

SEQ ID NO: 2685653 - DNA, 25 bp, Homo sapien
ttcttcagattccaagctggccttc

SEQ ID NO: 2685654 - DNA, 25 bp, Homo sapien
tgacgttcagcaggtcctcctactc

SEQ ID NO: 2685655 - DNA, 25 bp, Homo sapien
tgttcttcagattccaagctggcct

SEQ ID NO: 2685656 - DNA, 25 bp, Homo sapien
cttccagcaggctgcggtaggtggc

SEQ ID NO: 2685657 - DNA, 25 bp, Homo sapien
ttccagcaggctgcggtaggtggcg

SEQ ID NO: 2685658 - DNA, 25 bp, Homo sapien
cagcaggctgcggtaggtggcgatc

SEQ ID NO: 2685659 - DNA, 25 bp, Homo sapien
ccagcaggctgcggtaggtggcgat

SEQ ID NO: 2685660 - DNA, 25 bp, Homo sapien
atccactgtccggtgggtggtggtg

SEQ ID NO: 2685661 - DNA, 25 bp, Homo sapien
agcatcaccaaaattgaagtcctcg

SEQ ID NO: 2685662 - DNA, 25 bp, Homo sapien
tgctgtccagagcatcaccaaaatt

SEQ ID NO: 2685663 - DNA, 25 bp, Homo sapien
tttgccatccactgtccggtgggtg

SEQ ID NO: 2685664 - DNA, 25 bp, Homo sapien
gcttctgttggctgaatgcctcaga

SEQ ID NO: 2685665 - DNA, 25 bp, Homo sapien
ctgcttctgttggctgaatgcctca

SEQ ID NO: 2685666 - DNA, 25 bp, Homo sapien
ggtaccctgcttctgttggctgaat

SEQ ID NO: 2685667 - DNA, 25 bp, Homo sapien
accctgcttctgttggctgaatgcc

SEQ ID NO: 2685668 - DNA, 25 bp, Homo sapien
ctgggtacacggcaaagcactcact

SEQ ID NO: 2685669 - DNA, 25 bp, Homo sapien
cactccttatagctgtttgacaaca

SEQ ID NO: 2685670 - DNA, 25 bp, Homo sapien
caaggtctgggtacacggcaaagca

SEQ ID NO: 2685671 - DNA, 25 bp, Homo sapien
ggcaaagcactcactccttatagct

SEQ ID NO: 2685672 - DNA, 25 bp, Homo sapien
tctttcgtctgcattcccaagcagc

SEQ ID NO: 2685673 - DNA, 25 bp, Homo sapien
caatgctgggctcttccctgttcac

SEQ ID NO: 2685674 - DNA, 25 bp, Homo sapien
cacatttcctgcaccctactgtggg

SEQ ID NO: 2685675 - DNA, 25 bp, Homo sapien
ggtctcatgccagtatttagccata

SEQ ID NO: 2685676 - DNA, 25 bp, Homo sapien
caaacaggcttatagcattctggac

SEQ ID NO: 2685677 - DNA, 25 bp, Homo sapien
ccaggcccaactgggagcccagaaa

SEQ ID NO: 2685678 - DNA, 25 bp, Homo sapien
ctttgctgagagcttgcagggtgca

SEQ ID NO: 2685679 - DNA, 25 bp, Homo sapien
ggttgtcttcataactcgtgctgtc

SEQ ID NO: 2685680 - DNA, 25 bp, Homo sapien
cagagcctcggcttgtgctgcttct

SEQ ID NO: 2685681 - DNA, 25 bp, Homo sapien
cacagccatggaagatattaatttc

SEQ ID NO: 2685682 - DNA, 25 bp, Homo sapien
gcagtaataatcaaggacccagggt

SEQ ID NO: 2685683 - DNA, 25 bp, Homo sapien
gacccagggtcgagtccttagtatg

SEQ ID NO: 2685684 - DNA, 25 bp, Homo sapien
tggaatatactccactgacaattag

SEQ ID NO: 2685685 - DNA, 25 bp, Homo sapien
tactccactgacaattagggcagga

SEQ ID NO: 2685686 - DNA, 25 bp, Homo sapien
tagggcaggaaagcttagggctccc

SEQ ID NO: 2685687 - DNA, 25 bp, Homo sapien
tacaactccagcccaactcttttgg

SEQ ID NO: 2685688 - DNA, 25 bp, Homo sapien
gactttttgacaactagaatgtaag

SEQ ID NO: 2685689 - DNA, 25 bp, Homo sapien
cgtaactgagtctgttcagctagtg

SEQ ID NO: 2685690 - DNA, 25 bp, Homo sapien
tagaatgtaagccaggggaaatgca

SEQ ID NO: 2685691 - DNA, 25 bp, Homo sapien
catgttgagacgtaactgagtctgt

SEQ ID NO: 2685692 - DNA, 25 bp, Homo sapien
tggatgttttggcacctaccacaag

SEQ ID NO: 2685693 - DNA, 25 bp, Homo sapien
taccacaagccctaccagaagtact

SEQ ID NO: 2685694 - DNA, 25 bp, Homo sapien
cctaccagaagtactgaggataaca

SEQ ID NO: 2685695 - DNA, 25 bp, Homo sapien
gttttggcacctaccacaagcccta

SEQ ID NO: 2685696 - DNA, 25 bp, Homo sapien
tccgtgttcgggttcttgggattca

SEQ ID NO: 2685697 - DNA, 25 bp, Homo sapien
aaaagagatatagtctcttttcttc

SEQ ID NO: 2685698 - DNA, 25 bp, Homo sapien
tgtccactccgtgttcgggttcttg

SEQ ID NO: 2685699 - DNA, 25 bp, Homo sapien
ttctctatgtccactccgtgttcgg

SEQ ID NO: 2685700 - DNA, 25 bp, Homo sapien
catttgacgtggatggtgctcctaa

SEQ ID NO: 2685701 - DNA, 25 bp, Homo sapien
catcccaggacccatttgacgtgga

SEQ ID NO: 2685702 - DNA, 25 bp, Homo sapien
tgaaattccattttgagtatcagca

SEQ ID NO: 2685703 - DNA, 25 bp, Homo sapien
tggtgctcctaaaagccccaggaat

SEQ ID NO: 2685704 - DNA, 25 bp, Homo sapien
atagagtctttgtcggggaattggt

SEQ ID NO: 2685705 - DNA, 25 bp, Homo sapien
aatagagtctttgtcggggaattgg

SEQ ID NO: 2685706 - DNA, 25 bp, Homo sapien
tttggattgcctctaggaaaccaga

SEQ ID NO: 2685707 - DNA, 25 bp, Homo sapien
attgatcgctaaatgagccattagc

SEQ ID NO: 2685708 - DNA, 25 bp, Homo sapien
tatttgacaaattgatcgctaaatg

SEQ ID NO: 2685709 - DNA, 25 bp, Homo sapien
tcagtcattacctgcactacatgct

SEQ ID NO: 2685710 - DNA, 25 bp, Homo sapien
gattcaacccatctcttattaatgt

SEQ ID NO: 2685711 - DNA, 25 bp, Homo sapien
agctgcagatcagattcaacccatc

SEQ ID NO: 2685712 - DNA, 25 bp, Homo sapien
gcagtgaatttgctgccagcaagtt

SEQ ID NO: 2685713 - DNA, 25 bp, Homo sapien
ggatgacagccaacaacacattaac

SEQ ID NO: 2685714 - DNA, 25 bp, Homo sapien
gctggaacatactcttgtctagttt

SEQ ID NO: 2685715 - DNA, 25 bp, Homo sapien
catgttgctggaacatactcttgtc

SEQ ID NO: 2685716 - DNA, 25 bp, Homo sapien
ggcctgaaggtccctcagccagatc

SEQ ID NO: 2685717 - DNA, 25 bp, Homo sapien
caacttcacgtacagtgtgagaagg

SEQ ID NO: 2685718 - DNA, 25 bp, Homo sapien
tgcaaggacgcatccttcttgtact

SEQ ID NO: 2685719 - DNA, 25 bp, Homo sapien
cagccagatccacatgcaaggacgc

SEQ ID NO: 2685720 - DNA, 25 bp, Homo sapien
tgacccctgacctcttatattgctg

SEQ ID NO: 2685721 - DNA, 25 bp, Homo sapien
ccttctcggaggcagtttatattgc

SEQ ID NO: 2685722 - DNA, 25 bp, Homo sapien
gaatctctccatcttgtaccattta

SEQ ID NO: 2685723 - DNA, 25 bp, Homo sapien
tgtacctaaactcagcccggaattc

SEQ ID NO: 2685724 - DNA, 25 bp, Homo sapien
tcttcgcatcgaacctaaaagttcc

SEQ ID NO: 2685725 - DNA, 25 bp, Homo sapien
attgttcttcgcatcgaacctaaaa

SEQ ID NO: 2685726 - DNA, 25 bp, Homo sapien
ttcttcgcatcgaacctaaaagttc

SEQ ID NO: 2685727 - DNA, 25 bp, Homo sapien
tgttcttcgcatcgaacctaaaagt

SEQ ID NO: 2685728 - DNA, 25 bp, Homo sapien
tttgttcttttatgcacttgtgaca

SEQ ID NO: 2685729 - DNA, 25 bp, Homo sapien
ttcttttatgcacttgtgacaacca

SEQ ID NO: 2685730 - DNA, 25 bp, Homo sapien
tgttcttttatgcacttgtgacaac

SEQ ID NO: 2685731 - DNA, 25 bp, Homo sapien
ctttgttcttttatgcacttgtgac

SEQ ID NO: 2685732 - DNA, 25 bp, Homo sapien
cacgttgaggccacatgtgctttct

SEQ ID NO: 2685733 - DNA, 25 bp, Homo sapien
cccaaagctgactgacacgatggca

SEQ ID NO: 2685734 - DNA, 25 bp, Homo sapien
ctctgccagcagtaacacgttgagg

SEQ ID NO: 2685735 - DNA, 25 bp, Homo sapien
aaagctgactgacacgatggcaggt

SEQ ID NO: 2685736 - DNA, 25 bp, Homo sapien
tttctccttgtgtagtagaactgaa

SEQ ID NO: 2685737 - DNA, 25 bp, Homo sapien
gagttactctaatcttagtctttat

SEQ ID NO: 2685738 - DNA, 25 bp, Homo sapien
ccttgtgtagtagaactgaataatt

SEQ ID NO: 2685739 - DNA, 25 bp, Homo sapien
cttcctgagttactctaatcttagt

SEQ ID NO: 2685740 - DNA, 25 bp, Homo sapien
attgtatctgttgaacttaacactg

SEQ ID NO: 2685741 - DNA, 25 bp, Homo sapien
ccaaaagagtgcaatattgtatctg

SEQ ID NO: 2685742 - DNA, 25 bp, Homo sapien
ttccccaaaagagtgcaatattgta

SEQ ID NO: 2685743 - DNA, 25 bp, Homo sapien
tatctgttgaacttaacactggcag

SEQ ID NO: 2685744 - DNA, 25 bp, Homo sapien
tcagaggtgcaattctcagcccagt

SEQ ID NO: 2685745 - DNA, 25 bp, Homo sapien
tctgttgtcacaagcccggatgact

SEQ ID NO: 2685746 - DNA, 25 bp, Homo sapien
tcacaagcccggatgactgggcagc

SEQ ID NO: 2685747 - DNA, 25 bp, Homo sapien
gcagctcctcctgtgttcaggactg

SEQ ID NO: 2685748 - DNA, 25 bp, Homo sapien
atgacaactggacggccttcactgt

SEQ ID NO: 2685749 - DNA, 25 bp, Homo sapien
accatgacaactggacggccttcac

SEQ ID NO: 2685750 - DNA, 25 bp, Homo sapien
catgacaactggacggccttcactg

SEQ ID NO: 2685751 - DNA, 25 bp, Homo sapien
tcaccatgacaactggacggccttc

SEQ ID NO: 2685752 - DNA, 25 bp, Homo sapien
cccctaggaaaacattgatctcttt

SEQ ID NO: 2685753 - DNA, 25 bp, Homo sapien
tatctgcacactcccctaggaaaac

SEQ ID NO: 2685754 - DNA, 25 bp, Homo sapien
aacttttgcagtatctgcacactcc

SEQ ID NO: 2685755 - DNA, 25 bp, Homo sapien
aaaacattgatctctttcaccatgc

SEQ ID NO: 2685756 - DNA, 25 bp, Homo sapien
tgagccctttactgacagctcgata

SEQ ID NO: 2685757 - DNA, 25 bp, Homo sapien
cagctcgataacctttcccatggga

SEQ ID NO: 2685758 - DNA, 25 bp, Homo sapien
gctcatcttgcaataagacagcatg

SEQ ID NO: 2685759 - DNA, 25 bp, Homo sapien
gacagcatgactacacttgctttta

SEQ ID NO: 2685760 - DNA, 25 bp, Homo sapien
ttatagctaaagattccaagaccag

SEQ ID NO: 2685761 - DNA, 25 bp, Homo sapien
aaggtgtgagtgctattatttgccc

SEQ ID NO: 2685762 - DNA, 25 bp, Homo sapien
ccaagcttggaattacatttatgac

SEQ ID NO: 2685763 - DNA, 25 bp, Homo sapien
agctgaaatttaaacccacgccctg

SEQ ID NO: 2685764 - DNA, 25 bp, Homo sapien
gcaattagacatcacagcctagcca

SEQ ID NO: 2685765 - DNA, 25 bp, Homo sapien
gatggtcattactcacagcagcctt

SEQ ID NO: 2685766 - DNA, 25 bp, Homo sapien
cagcctgctggatacctttggacaa

SEQ ID NO: 2685767 - DNA, 25 bp, Homo sapien
agtggttcaccatgttccctgggct

SEQ ID NO: 2685768 - DNA, 25 bp, Homo sapien
tctcatgaggcactttacagaaaaa

SEQ ID NO: 2685769 - DNA, 25 bp, Homo sapien
ccacattctcttgggtgactttcag

SEQ ID NO: 2685770 - DNA, 25 bp, Homo sapien
tactgcactgggacaatttgaaaag

SEQ ID NO: 2685771 - DNA, 25 bp, Homo sapien
tatgtgcttcttgtcgtattctgga

SEQ ID NO: 2685772 - DNA, 25 bp, Homo sapien
taattaaatctgctccactttgcga

SEQ ID NO: 2685773 - DNA, 25 bp, Homo sapien
ctccactttgcgaaggagtcaccag

SEQ ID NO: 2685774 - DNA, 25 bp, Homo sapien
ctaggtgcctctcaatgcgttgatt

SEQ ID NO: 2685775 - DNA, 25 bp, Homo sapien
caatgcgttgatttagaaccttaat

SEQ ID NO: 2685776 - DNA, 25 bp, Homo sapien
taaggagctttcaaagacgagatgc

SEQ ID NO: 2685777 - DNA, 25 bp, Homo sapien
ttagtgtaaggagctttcaaagacg

SEQ ID NO: 2685778 - DNA, 25 bp, Homo sapien
tcaaagacgagatgccaaggagagt

SEQ ID NO: 2685779 - DNA, 25 bp, Homo sapien
tacttccccatggattcaaatattt

SEQ ID NO: 2685780 - DNA, 25 bp, Homo sapien
gagactttggcaaatagtctgtttg

SEQ ID NO: 2685781 - DNA, 25 bp, Homo sapien
tactatcctcctccagacattctga

SEQ ID NO: 2685782 - DNA, 25 bp, Homo sapien
tgggtcatcctcttactatcctcct

SEQ ID NO: 2685783 - DNA, 25 bp, Homo sapien
caaaatgacccaagctgccaactgg

SEQ ID NO: 2685784 - DNA, 25 bp, Homo sapien
tcgaagagacaaataggaggaagcc

SEQ ID NO: 2685785 - DNA, 25 bp, Homo sapien
tatgcaaatggagccggacttagag

SEQ ID NO: 2685786 - DNA, 25 bp, Homo sapien
tctactgattggatgatgacacccc

SEQ ID NO: 2685787 - DNA, 25 bp, Homo sapien
tgagactgctactgctggacagagc

SEQ ID NO: 2685788 - DNA, 25 bp, Homo sapien
aatgattgtataggtcaatgcggta

SEQ ID NO: 2685789 - DNA, 25 bp, Homo sapien
gattgtataggtcaatgcggtataa

SEQ ID NO: 2685790 - DNA, 25 bp, Homo sapien
gtataggtcaatgcggtataaagta

SEQ ID NO: 2685791 - DNA, 25 bp, Homo sapien
gtcaatgcggtataaagtactgtat

SEQ ID NO: 2685792 - DNA, 25 bp, Homo sapien
gcatgtgtctgcacacaaccacaca

SEQ ID NO: 2685793 - DNA, 25 bp, Homo sapien
catgtgtctgcacacaaccacacac

SEQ ID NO: 2685794 - DNA, 25 bp, Homo sapien
tgcatgtgtctgcacacaaccacac

SEQ ID NO: 2685795 - DNA, 25 bp, Homo sapien
tttttgtatgtctgagcgaagccca

SEQ ID NO: 2685796 - DNA, 25 bp, Homo sapien
cgacggacacacagctaaatagagg

SEQ ID NO: 2685797 - DNA, 25 bp, Homo sapien
aaatggacactcaagctccgacgga

SEQ ID NO: 2685798 - DNA, 25 bp, Homo sapien
taattgttcataaagggctccctac

SEQ ID NO: 2685799 - DNA, 25 bp, Homo sapien
tgccagatggcacaatcgggttccg

SEQ ID NO: 2685800 - DNA, 25 bp, Homo sapien
cgggttccgtgtgatggcaatgcca

SEQ ID NO: 2685801 - DNA, 25 bp, Homo sapien
tctgccatcacacgaaatccgattg

SEQ ID NO: 2685802 - DNA, 25 bp, Homo sapien
atggcaatgccatgcgtctcccctg

SEQ ID NO: 2685803 - DNA, 25 bp, Homo sapien
aaataacagcaaagaaatgtgccgc

SEQ ID NO: 2685804 - DNA, 25 bp, Homo sapien
tagctgtgcccataatcatgtctgc

SEQ ID NO: 2685805 - DNA, 25 bp, Homo sapien
gatgtcgatccctggcggcatttag

SEQ ID NO: 2685806 - DNA, 25 bp, Homo sapien
tagtttgtttacactctgtcttagc

SEQ ID NO: 2685807 - DNA, 25 bp, Homo sapien
gcctaatgcatatttcttgactgga

SEQ ID NO: 2685808 - DNA, 25 bp, Homo sapien
ctcttgtagaaggtgcctaatgcat

SEQ ID NO: 2685809 - DNA, 25 bp, Homo sapien
gtagaaggtgcctaatgcatatttc

SEQ ID NO: 2685810 - DNA, 25 bp, Homo sapien
aggtgcctaatgcatatttcttgac

SEQ ID NO: 2685811 - DNA, 25 bp, Homo sapien
acaggaagtctttgttagtgccaca

SEQ ID NO: 2685812 - DNA, 25 bp, Homo sapien
gaagtctttgttagtgccacatttc

SEQ ID NO: 2685813 - DNA, 25 bp, Homo sapien
aggaagtctttgttagtgccacatt

SEQ ID NO: 2685814 - DNA, 25 bp, Homo sapien
caggaagtctttgttagtgccacat

SEQ ID NO: 2685815 - DNA, 25 bp, Homo sapien
gcttcagtgtgagatgaaataaatt

SEQ ID NO: 2685816 - DNA, 25 bp, Homo sapien
catcttctataatcagctctgcaca

SEQ ID NO: 2685817 - DNA, 25 bp, Homo sapien
ttcagttgtcagcagtgcttcagtg

SEQ ID NO: 2685818 - DNA, 25 bp, Homo sapien
agctctgcacagctgagtacaccca

SEQ ID NO: 2685819 - DNA, 25 bp, Homo sapien
cattccctggaattgataacaacca

SEQ ID NO: 2685820 - DNA, 25 bp, Homo sapien
tcagattaggtgaacgtggtctatt

SEQ ID NO: 2685821 - DNA, 25 bp, Homo sapien
tagtaattgatcctgcgtgcatgtc

SEQ ID NO: 2685822 - DNA, 25 bp, Homo sapien
tatttgattagtaattgatcctgcg

SEQ ID NO: 2685823 - DNA, 25 bp, Homo sapien
taattgtgtatacggatggtagttt

SEQ ID NO: 2685824 - DNA, 25 bp, Homo sapien
ctttttggtgcacaacacaaattaa

SEQ ID NO: 2685825 - DNA, 25 bp, Homo sapien
ctacatatgatttgttcttaaactg

SEQ ID NO: 2685826 - DNA, 25 bp, Homo sapien
tagatagtactgtcctggtggtgtt

SEQ ID NO: 2685827 - DNA, 25 bp, Homo sapien
tatgatcgaagaaatgtgaatccca

SEQ ID NO: 2685828 - DNA, 25 bp, Homo sapien
tgttggaatgataataagcagaaag

SEQ ID NO: 2685829 - DNA, 25 bp, Homo sapien
tattgagttcatcaagacagcttca

SEQ ID NO: 2685830 - DNA, 25 bp, Homo sapien
tcccaccgcacttggaatatgatcg

SEQ ID NO: 2685831 - DNA, 25 bp, Homo sapien
tttaaaagagacctgcgagagttcc

SEQ ID NO: 2685832 - DNA, 25 bp, Homo sapien
ttgcacctgggaagtgggcccttac

SEQ ID NO: 2685833 - DNA, 25 bp, Homo sapien
tgagaagtgagctctttgcacctgg

SEQ ID NO: 2685834 - DNA, 25 bp, Homo sapien
aggtcacaactatgtatgggctcca

SEQ ID NO: 2685835 - DNA, 25 bp, Homo sapien
ccttcttggtgtatccaacacgcat

SEQ ID NO: 2685836 - DNA, 25 bp, Homo sapien
gaaggcctgagcgtttccttcttgg

SEQ ID NO: 2685837 - DNA, 25 bp, Homo sapien
aggaaagaaggcctgagcgtttcct

SEQ ID NO: 2685838 - DNA, 25 bp, Homo sapien
gagcgtttccttcttggtgtatcca

SEQ ID NO: 2685839 - DNA, 25 bp, Homo sapien
tgtgtctggcacaagaacaatgttt

SEQ ID NO: 2685840 - DNA, 25 bp, Homo sapien
atggttctgccacgtcaggcccaca

SEQ ID NO: 2685841 - DNA, 25 bp, Homo sapien
ctacagcgtggagcttatagcagat

SEQ ID NO: 2685842 - DNA, 25 bp, Homo sapien
gtgtctggcacaagaacaatgtttg

SEQ ID NO: 2685843 - DNA, 25 bp, Homo sapien
atttagcccagacaaatataggcag

SEQ ID NO: 2685844 - DNA, 25 bp, Homo sapien
tcttcctgatatgcagggctttctt

SEQ ID NO: 2685845 - DNA, 25 bp, Homo sapien
aaggctcttggctatatttagccca

SEQ ID NO: 2685846 - DNA, 25 bp, Homo sapien
aggctgctgatccatccatggctca

SEQ ID NO: 2685847 - DNA, 25 bp, Homo sapien
ggaccacacgcaagcaatcagccat

SEQ ID NO: 2685848 - DNA, 25 bp, Homo sapien
cagaactataagcacgctccaccag

SEQ ID NO: 2685849 - DNA, 25 bp, Homo sapien
agctggcagttctatatgacagtgc

SEQ ID NO: 2685850 - DNA, 25 bp, Homo sapien
tattaacagtagaacagctggcagt

SEQ ID NO: 2685851 - DNA, 25 bp, Homo sapien
caggttgaatgtcccaaagctgttc

SEQ ID NO: 2685852 - DNA, 25 bp, Homo sapien
tttgtgcaggatgtgaaaaagcaga

SEQ ID NO: 2685853 - DNA, 25 bp, Homo sapien
tagcccatgtcaggcaatagctact

SEQ ID NO: 2685854 - DNA, 25 bp, Homo sapien
tagataagggtactacaactcagaa

SEQ ID NO: 2685855 - DNA, 25 bp, Homo sapien
tcttagatggaaaggataaaacaca

SEQ ID NO: 2685856 - DNA, 25 bp, Homo sapien
gattttgcagggtattacattgcat

SEQ ID NO: 2685857 - DNA, 25 bp, Homo sapien
aatataggtagtatgtcttagatgg

SEQ ID NO: 2685858 - DNA, 25 bp, Homo sapien
gcattcagctgcaataactgtaata

SEQ ID NO: 2685859 - DNA, 25 bp, Homo sapien
aatatgaatctgaccaaacagctcc

SEQ ID NO: 2685860 - DNA, 25 bp, Homo sapien
gctcctcagagtacaatccatcagt

SEQ ID NO: 2685861 - DNA, 25 bp, Homo sapien
catccatggtatgtttctttccagg

SEQ ID NO: 2685862 - DNA, 25 bp, Homo sapien
gacactgcccatcagggtattttct

SEQ ID NO: 2685863 - DNA, 25 bp, Homo sapien
ggttcaagggatacacattagcgcc

SEQ ID NO: 2685864 - DNA, 25 bp, Homo sapien
tgaacattcactgagggatcacttc

SEQ ID NO: 2685865 - DNA, 25 bp, Homo sapien
ggcacccattgctttacctgtgtga

SEQ ID NO: 2685866 - DNA, 25 bp, Homo sapien
cattagcgccagcattgagatttta

SEQ ID NO: 2685867 - DNA, 25 bp, Homo sapien
tagtgggaagccactagttcaggga

SEQ ID NO: 2685868 - DNA, 25 bp, Homo sapien
gatgagagaaaacttagcagcaatg

SEQ ID NO: 2685869 - DNA, 25 bp, Homo sapien
ggaccatagtgggaagccactagtt

SEQ ID NO: 2685870 - DNA, 25 bp, Homo sapien
ggaagccactagttcagggatgaga

SEQ ID NO: 2685871 - DNA, 25 bp, Homo sapien
gccttctgcatcatcttgaatcttc

SEQ ID NO: 2685872 - DNA, 25 bp, Homo sapien
ctagcctgccacaatctggctcttg

SEQ ID NO: 2685873 - DNA, 25 bp, Homo sapien
atcttgaatcttctcttggtgacct

SEQ ID NO: 2685874 - DNA, 25 bp, Homo sapien
cacaatctggctcttgccttctgca

SEQ ID NO: 2685875 - DNA, 25 bp, Homo sapien
gaatgggccaaaagcatagtctgct

SEQ ID NO: 2685876 - DNA, 25 bp, Homo sapien
tatgagatgtcaaggcgaatgggcc

SEQ ID NO: 2685877 - DNA, 25 bp, Homo sapien
caagatctgaatagaggtcatgact

SEQ ID NO: 2685878 - DNA, 25 bp, Homo sapien
ggtcatgactggatggatatgagat

SEQ ID NO: 2685879 - DNA, 25 bp, Homo sapien
gacacctgcctcttgcgtgcaaaga

SEQ ID NO: 2685880 - DNA, 25 bp, Homo sapien
gtaagctcagaggtcaggcgaacac

SEQ ID NO: 2685881 - DNA, 25 bp, Homo sapien
tccttatagctagatgcaacccctg

SEQ ID NO: 2685882 - DNA, 25 bp, Homo sapien
gatggccaaagcactggtccttata

SEQ ID NO: 2685883 - DNA, 25 bp, Homo sapien
ttcttggatagctgtcttgctgaag

SEQ ID NO: 2685884 - DNA, 25 bp, Homo sapien
cttcttggatagctgtcttgctgaa

SEQ ID NO: 2685885 - DNA, 25 bp, Homo sapien
ctgcacattagattaagctgcctgg

SEQ ID NO: 2685886 - DNA, 25 bp, Homo sapien
ttccaagatgctggatccaactgca

SEQ ID NO: 2685887 - DNA, 25 bp, Homo sapien
tccaagatgctggatccaactgcac

SEQ ID NO: 2685888 - DNA, 25 bp, Homo sapien
cctggtgttaagacttttagtgaag

SEQ ID NO: 2685889 - DNA, 25 bp, Homo sapien
tgttgttgatactgctgcccagtgt

SEQ ID NO: 2685890 - DNA, 25 bp, Homo sapien
ctgttgttgatactgctgcccagtg

SEQ ID NO: 2685891 - DNA, 25 bp, Homo sapien
agagccgcagaaacacaatgcctgg

SEQ ID NO: 2685892 - DNA, 25 bp, Homo sapien
tgtaatctgctcgtcacaagtccag

SEQ ID NO: 2685893 - DNA, 25 bp, Homo sapien
tgaatcgtaaaggataatgctgtcc

SEQ ID NO: 2685894 - DNA, 25 bp, Homo sapien
agcaattagtgctccctgctgccgc

SEQ ID NO: 2685895 - DNA, 25 bp, Homo sapien
cgaagtccttcgtaaagtgccaaca

SEQ ID NO: 2685896 - DNA, 25 bp, Homo sapien
gaaaatgagtgactcccagacaagt

SEQ ID NO: 2685897 - DNA, 25 bp, Homo sapien
gtgtcttgccataactgtgccctaa

SEQ ID NO: 2685898 - DNA, 25 bp, Homo sapien
gctgggtccagacactagatactac

SEQ ID NO: 2685899 - DNA, 25 bp, Homo sapien
tggactacgtatcctcttcatagcg

SEQ ID NO: 2685900 - DNA, 25 bp, Homo sapien
ttttgatggcagcacctagcctggg

SEQ ID NO: 2685901 - DNA, 25 bp, Homo sapien
cttcatagcgttagagatgtccagg

SEQ ID NO: 2685902 - DNA, 25 bp, Homo sapien
cagtgtcactcgttaaactctgtca

SEQ ID NO: 2685903 - DNA, 25 bp, Homo sapien
ttcttcctgtggacttggtacccat

SEQ ID NO: 2685904 - DNA, 25 bp, Homo sapien
ggtggttggcctgagatctgcccag

SEQ ID NO: 2685905 - DNA, 25 bp, Homo sapien
ctgaaaccttaagtcttgtcctgag

SEQ ID NO: 2685906 - DNA, 25 bp, Homo sapien
gacacactcgctgctagggtggttg

SEQ ID NO: 2685907 - DNA, 25 bp, Homo sapien
ctgagtagatctcaacagcctgcct

SEQ ID NO: 2685908 - DNA, 25 bp, Homo sapien
aattctctgctcttagataagttag

SEQ ID NO: 2685909 - DNA, 25 bp, Homo sapien
tctctgctcttagataagttagtgt

SEQ ID NO: 2685910 - DNA, 25 bp, Homo sapien
gctcttagataagttagtgtttctg

SEQ ID NO: 2685911 - DNA, 25 bp, Homo sapien
agataagttagtgtttctggataca

SEQ ID NO: 2685912 - DNA, 25 bp, Homo sapien
ttgagatgcggcttttcttgctgca

SEQ ID NO: 2685913 - DNA, 25 bp, Homo sapien
tctgcaatatctctgctcaaccagg

SEQ ID NO: 2685914 - DNA, 25 bp, Homo sapien
cataaagtcacaacggcattgagat

SEQ ID NO: 2685915 - DNA, 25 bp, Homo sapien
aggcaggttatcctccatgacaggg

SEQ ID NO: 2685916 - DNA, 25 bp, Homo sapien
ccatagggatgggatatttcgaagg

SEQ ID NO: 2685917 - DNA, 25 bp, Homo sapien
tatgggtcacagactagccgttttg

SEQ ID NO: 2685918 - DNA, 25 bp, Homo sapien
tgagtggccaactttcagaatgaca

SEQ ID NO: 2685919 - DNA, 25 bp, Homo sapien
aaatggcggtgcgatggagcatact

SEQ ID NO: 2685920 - DNA, 25 bp, Homo sapien
cacatctgcacgttacaagcgtgag

SEQ ID NO: 2685921 - DNA, 25 bp, Homo sapien
ccatgacctcagattgccatatttc

SEQ ID NO: 2685922 - DNA, 25 bp, Homo sapien
tgtgtggtctatccctctattaaaa

SEQ ID NO: 2685923 - DNA, 25 bp, Homo sapien
cattcattgggtttgttgcagacat

SEQ ID NO: 2685924 - DNA, 25 bp, Homo sapien
gatgatgacgaataacacaaccaac

SEQ ID NO: 2685925 - DNA, 25 bp, Homo sapien
tatttttcctcttgaagtcagttcc

SEQ ID NO: 2685926 - DNA, 25 bp, Homo sapien
tcctctggcttcaataaaacaagtc

SEQ ID NO: 2685927 - DNA, 25 bp, Homo sapien
ctttacagtgtggagccattgttca

SEQ ID NO: 2685928 - DNA, 25 bp, Homo sapien
ttgacaggtgccaagaaattcctgg

SEQ ID NO: 2685929 - DNA, 25 bp, Homo sapien
actctttgacaggtgccaagaaatt

SEQ ID NO: 2685930 - DNA, 25 bp, Homo sapien
gaaattcctgggattgacatcatga

SEQ ID NO: 2685931 - DNA, 25 bp, Homo sapien
taaaggatgtactctttgacaggtg

SEQ ID NO: 2685932 - DNA, 25 bp, Homo sapien
tttttctaggacagcaatgtcattt

SEQ ID NO: 2685933 - DNA, 25 bp, Homo sapien
ggaaataagctcttttctgatcttt

SEQ ID NO: 2685934 - DNA, 25 bp, Homo sapien
tctttcctaatagaaagtaggccaa

SEQ ID NO: 2685935 - DNA, 25 bp, Homo sapien
tcattttgaatttcatggttaccca

SEQ ID NO: 2685936 - DNA, 25 bp, Homo sapien
tcttgtagtggagaaaagtcgtgca

SEQ ID NO: 2685937 - DNA, 25 bp, Homo sapien
cagaaagagagtcatctcattgttc

SEQ ID NO: 2685938 - DNA, 25 bp, Homo sapien
cgcctcagaaggtacagttgtaatg

SEQ ID NO: 2685939 - DNA, 25 bp, Homo sapien
gtcgtgcaccgcctcagaaggtaca

SEQ ID NO: 2685940 - DNA, 25 bp, Homo sapien
gagggagtcatagcagaagtgaaac

SEQ ID NO: 2685941 - DNA, 25 bp, Homo sapien
ctctggtggagggagtcatagcaga

SEQ ID NO: 2685942 - DNA, 25 bp, Homo sapien
agcagaagtgaaactcagagacctc

SEQ ID NO: 2685943 - DNA, 25 bp, Homo sapien
agtcatagcagaagtgaaactcaga

SEQ ID NO: 2685944 - DNA, 25 bp, Homo sapien
gggcagtgccagacctgcaaaggga

SEQ ID NO: 2685945 - DNA, 25 bp, Homo sapien
ggcagtgccagacctgcaaagggag

SEQ ID NO: 2685946 - DNA, 25 bp, Homo sapien
gcagtgccagacctgcaaagggagc

SEQ ID NO: 2685947 - DNA, 25 bp, Homo sapien
cagtgccagacctgcaaagggagct

SEQ ID NO: 2685948 - DNA, 25 bp, Homo sapien
tcttttctatagtcacgtggagaag

SEQ ID NO: 2685949 - DNA, 25 bp, Homo sapien
agctcttcctctgtctaggctggtg

SEQ ID NO: 2685950 - DNA, 25 bp, Homo sapien
tagaggatggtatgttttcagggct

SEQ ID NO: 2685951 - DNA, 25 bp, Homo sapien
gctggtgcattcaggcaaattctct

SEQ ID NO: 2685952 - DNA, 25 bp, Homo sapien
atgccggacatcagcacgctctgga

SEQ ID NO: 2685953 - DNA, 25 bp, Homo sapien
ggcactatgccggacatcagcacgc

SEQ ID NO: 2685954 - DNA, 25 bp, Homo sapien
ttcttcagtggcactatgccggaca

SEQ ID NO: 2685955 - DNA, 25 bp, Homo sapien
tcagtggcactatgccggacatcag

SEQ ID NO: 2685956 - DNA, 25 bp, Homo sapien
tgtcaggagtagtctcaagcaggct

SEQ ID NO: 2685957 - DNA, 25 bp, Homo sapien
gcaggagtgatgagtaaccaggacc

SEQ ID NO: 2685958 - DNA, 25 bp, Homo sapien
cagtcctgtccctgcatagctggca

SEQ ID NO: 2685959 - DNA, 25 bp, Homo sapien
gtagatctccatgacacactgattg

SEQ ID NO: 2685960 - DNA, 25 bp, Homo sapien
cttgaaggagcctaacatgtatctt

SEQ ID NO: 2685961 - DNA, 25 bp, Homo sapien
tttccaaacctcagcgagtgggcca

SEQ ID NO: 2685962 - DNA, 25 bp, Homo sapien
tacaagtaacccgagcaagtctctt

SEQ ID NO: 2685963 - DNA, 25 bp, Homo sapien
gtctctatagcgcaaaatatttcca

SEQ ID NO: 2685964 - DNA, 25 bp, Homo sapien
tgtactcccagaggttcactgagga

SEQ ID NO: 2685965 - DNA, 25 bp, Homo sapien
gacgcagcacagctctttagagaag

SEQ ID NO: 2685966 - DNA, 25 bp, Homo sapien
cattgcttgtgggtaaggactagac

SEQ ID NO: 2685967 - DNA, 25 bp, Homo sapien
tcttgggccagattggcactgtact

SEQ ID NO: 2685968 - DNA, 25 bp, Homo sapien
ctcttgatgagctaaccagccaacc

SEQ ID NO: 2685969 - DNA, 25 bp, Homo sapien
ctaaaaggagtgttgcctgagagtt

SEQ ID NO: 2685970 - DNA, 25 bp, Homo sapien
tggcttcactggacttgacaagtaa

SEQ ID NO: 2685971 - DNA, 25 bp, Homo sapien
tgggtttggcttcactggacttgac

SEQ ID NO: 2685972 - DNA, 25 bp, Homo sapien
agtaactggtgttctctccaatggc

SEQ ID NO: 2685973 - DNA, 25 bp, Homo sapien
agctgactcataggctgacttgtgg

SEQ ID NO: 2685974 - DNA, 25 bp, Homo sapien
tgaagtctcagaatagtcaccacac

SEQ ID NO: 2685975 - DNA, 25 bp, Homo sapien
ctttctgtgaagtctcagaatagtc

SEQ ID NO: 2685976 - DNA, 25 bp, Homo sapien
ttctttctgtgaagtctcagaatag

SEQ ID NO: 2685977 - DNA, 25 bp, Homo sapien
gtttctttctgtgaagtctcagaat

SEQ ID NO: 2685978 - DNA, 25 bp, Homo sapien
ggaccagctgcagcctttgtattct

SEQ ID NO: 2685979 - DNA, 25 bp, Homo sapien
gcagcctttgtattctccttcctac

SEQ ID NO: 2685980 - DNA, 25 bp, Homo sapien
tcatggaccagctgcagcctttgta

SEQ ID NO: 2685981 - DNA, 25 bp, Homo sapien
agctgcagcctttgtattctccttc

SEQ ID NO: 2685982 - DNA, 25 bp, Homo sapien
tgacactatctcctagatgcttccc

SEQ ID NO: 2685983 - DNA, 25 bp, Homo sapien
gtgtgacactatctcctagatgctt

SEQ ID NO: 2685984 - DNA, 25 bp, Homo sapien
tgtgacactatctcctagatgcttc

SEQ ID NO: 2685985 - DNA, 25 bp, Homo sapien
cttgcctgtgtgacactatctccta

SEQ ID NO: 2685986 - DNA, 25 bp, Homo sapien
tctcttagctcctttgtattatcta

SEQ ID NO: 2685987 - DNA, 25 bp, Homo sapien
tgtaagcaagtctcttagctccttt

SEQ ID NO: 2685988 - DNA, 25 bp, Homo sapien
ttagctcctttgtattatctaccct

SEQ ID NO: 2685989 - DNA, 25 bp, Homo sapien
ttgtattatctacccttccaaaatg

SEQ ID NO: 2685990 - DNA, 25 bp, Homo sapien
tgtgacttggtgtttctggattcct

SEQ ID NO: 2685991 - DNA, 25 bp, Homo sapien
tgacttggtgtttctggattccttg

SEQ ID NO: 2685992 - DNA, 25 bp, Homo sapien
gctacaaaattgtcttgttctgctg

SEQ ID NO: 2685993 - DNA, 25 bp, Homo sapien
ctggattccttgctacaaaattgtc

SEQ ID NO: 2685994 - DNA, 25 bp, Homo sapien
tggggagaaccagtagcagatattt

SEQ ID NO: 2685995 - DNA, 25 bp, Homo sapien
gagaaccagtagcagatatttctgc

SEQ ID NO: 2685996 - DNA, 25 bp, Homo sapien
gggagaaccagtagcagatatttct

SEQ ID NO: 2685997 - DNA, 25 bp, Homo sapien
agatggggagaaccagtagcagata

SEQ ID NO: 2685998 - DNA, 25 bp, Homo sapien
gaccatccagcgtgtcaatttcagg

SEQ ID NO: 2685999 - DNA, 25 bp, Homo sapien
catctgcgtgtgtcgagggactgac

SEQ ID NO: 2686000 - DNA, 25 bp, Homo sapien
ggaacgtgctctgacctgtctagga

SEQ ID NO: 2686001 - DNA, 25 bp, Homo sapien
gctgtgtgacgcttctgcaagacca

SEQ ID NO: 2686002 - DNA, 25 bp, Homo sapien
aacgttgtcaggactccaacaagca

SEQ ID NO: 2686003 - DNA, 25 bp, Homo sapien
tctggctgtagtaccattgatcatg

SEQ ID NO: 2686004 - DNA, 25 bp, Homo sapien
aaggactttgtcaacgttgtcagga

SEQ ID NO: 2686005 - DNA, 25 bp, Homo sapien
aaatagaagggcctgccaaggactt

SEQ ID NO: 2686006 - DNA, 25 bp, Homo sapien
gattggacggctgataagctaacac

SEQ ID NO: 2686007 - DNA, 25 bp, Homo sapien
cactggcaaatgaaagatctactgt

SEQ ID NO: 2686008 - DNA, 25 bp, Homo sapien
ttttgatggttgacacattccctgg

SEQ ID NO: 2686009 - DNA, 25 bp, Homo sapien
tgcttgcaaagcaaccgtatgcctt

SEQ ID NO: 2686010 - DNA, 25 bp, Homo sapien
gcagtttaatgactcttcccaagtc

SEQ ID NO: 2686011 - DNA, 25 bp, Homo sapien
ggcagtttaatgactcttcccaagt

SEQ ID NO: 2686012 - DNA, 25 bp, Homo sapien
tgccgcagtaggataaaaacttctg

SEQ ID NO: 2686013 - DNA, 25 bp, Homo sapien
ctgccgcagtaggataaaaacttct

SEQ ID NO: 2686014 - DNA, 25 bp, Homo sapien
tcttctggtgccctatctctcagca

SEQ ID NO: 2686015 - DNA, 25 bp, Homo sapien
tggatccccagtacagctttgaagt

SEQ ID NO: 2686016 - DNA, 25 bp, Homo sapien
tccctgattatctctctactgttct

SEQ ID NO: 2686017 - DNA, 25 bp, Homo sapien
tggtggctccacacacaacaatgaa

SEQ ID NO: 2686018 - DNA, 25 bp, Homo sapien
gcatttactccggtgaaatcaggta

SEQ ID NO: 2686019 - DNA, 25 bp, Homo sapien
agctgagcatttactccggtgaaat

SEQ ID NO: 2686020 - DNA, 25 bp, Homo sapien
ctgaagacagtcagcctgggtagct

SEQ ID NO: 2686021 - DNA, 25 bp, Homo sapien
aagacagtcagcctgggtagcttca

SEQ ID NO: 2686022 - DNA, 25 bp, Homo sapien
tgaagacagtcagcctgggtagctt

SEQ ID NO: 2686023 - DNA, 25 bp, Homo sapien
agacagtcagcctgggtagcttcat

SEQ ID NO: 2686024 - DNA, 25 bp, Homo sapien
caaacgccagagtttttagactggg

SEQ ID NO: 2686025 - DNA, 25 bp, Homo sapien
agtctacaaggcagccaaacgccag

SEQ ID NO: 2686026 - DNA, 25 bp, Homo sapien
tactagtgccgtcaagccatctgtg

SEQ ID NO: 2686027 - DNA, 25 bp, Homo sapien
tgccattatggaaactaagcttccg

SEQ ID NO: 2686028 - DNA, 25 bp, Homo sapien
cataaacatggtcagccaaagcctt

SEQ ID NO: 2686029 - DNA, 25 bp, Homo sapien
taaacatggtcagccaaagccttca

SEQ ID NO: 2686030 - DNA, 25 bp, Homo sapien
tcttgcttctccctcgtctaccccc

SEQ ID NO: 2686031 - DNA, 25 bp, Homo sapien
actgtctcaccaactgtatgtttaa

SEQ ID NO: 2686032 - DNA, 25 bp, Homo sapien
tcactccacccctgtcaggcactgg

SEQ ID NO: 2686033 - DNA, 25 bp, Homo sapien
tagggatatgcggtgagtcactcca

SEQ ID NO: 2686034 - DNA, 25 bp, Homo sapien
cagaggtagggatatgcggtgagtc

SEQ ID NO: 2686035 - DNA, 25 bp, Homo sapien
gatgtgctcagaggtagggatatgc

SEQ ID NO: 2686036 - DNA, 25 bp, Homo sapien
gaaagtggaccacaattctgcatcc

SEQ ID NO: 2686037 - DNA, 25 bp, Homo sapien
ccaagttacatgcaccctgggcagg

SEQ ID NO: 2686038 - DNA, 25 bp, Homo sapien
aagcagcccggcctattcagacata

SEQ ID NO: 2686039 - DNA, 25 bp, Homo sapien
cagctggaaatagtgggagcacgca

SEQ ID NO: 2686040 - DNA, 25 bp, Homo sapien
tattggctgcttgccaaacgaaagc

SEQ ID NO: 2686041 - DNA, 25 bp, Homo sapien
gcagtatcttgattacactctcaca

SEQ ID NO: 2686042 - DNA, 25 bp, Homo sapien
caccctctggtttaagcactggtaa

SEQ ID NO: 2686043 - DNA, 25 bp, Homo sapien
actggcgctagtttatattggctgc

SEQ ID NO: 2686044 - DNA, 25 bp, Homo sapien
gactctggaacgcagtgattcagcc

SEQ ID NO: 2686045 - DNA, 25 bp, Homo sapien
tgattcagcctattggatctaaagc

SEQ ID NO: 2686046 - DNA, 25 bp, Homo sapien
gctaaaatgcagtaaccttctggca

SEQ ID NO: 2686047 - DNA, 25 bp, Homo sapien
tatttgtgctacatcagggactctg

SEQ ID NO: 2686048 - DNA, 25 bp, Homo sapien
gatggctggaaaataggcaatcctg

SEQ ID NO: 2686049 - DNA, 25 bp, Homo sapien
ccttggaactttggcccatcatggt

SEQ ID NO: 2686050 - DNA, 25 bp, Homo sapien
ggtcttatagctattgcgcccttgg

SEQ ID NO: 2686051 - DNA, 25 bp, Homo sapien
gattcccaacataagtccctgttgg

SEQ ID NO: 2686052 - DNA, 25 bp, Homo sapien
gggttgtgaatacggtctaagtaga

SEQ ID NO: 2686053 - DNA, 25 bp, Homo sapien
atacttcatgcactcagggatcagg

SEQ ID NO: 2686054 - DNA, 25 bp, Homo sapien
gatcttaaatacttcatgcactcag

SEQ ID NO: 2686055 - DNA, 25 bp, Homo sapien
tagatgttatcttgaagagttgatc

SEQ ID NO: 2686056 - DNA, 25 bp, Homo sapien
gttcactctctttgcaccggtgtct

SEQ ID NO: 2686057 - DNA, 25 bp, Homo sapien
tgagggccaggagtcttctgttcac

SEQ ID NO: 2686058 - DNA, 25 bp, Homo sapien
tagcacgtgaccaactagagcaagg

SEQ ID NO: 2686059 - DNA, 25 bp, Homo sapien
aaagcccttgagttgagggccagga

SEQ ID NO: 2686060 - DNA, 25 bp, Homo sapien
tggctgatgccatgctgagaacacc

SEQ ID NO: 2686061 - DNA, 25 bp, Homo sapien
tgagtattgtattgtatgctgtcca

SEQ ID NO: 2686062 - DNA, 25 bp, Homo sapien
agagcaggccgtgtggtggctgatg

SEQ ID NO: 2686063 - DNA, 25 bp, Homo sapien
tatgctgtccactgttcccgtcagg

SEQ ID NO: 2686064 - DNA, 25 bp, Homo sapien
caagtttatttaactaggtgcctat

SEQ ID NO: 2686065 - DNA, 25 bp, Homo sapien
tattactcggtagaattcttaggga

SEQ ID NO: 2686066 - DNA, 25 bp, Homo sapien
tctgtgtacttgatgataaagaagc

SEQ ID NO: 2686067 - DNA, 25 bp, Homo sapien
gagcactaggattggaaatcactga

SEQ ID NO: 2686068 - DNA, 25 bp, Homo sapien
caatctcttgtaggagaaagttctc

SEQ ID NO: 2686069 - DNA, 25 bp, Homo sapien
tgggagagatatctacgtatctgta

SEQ ID NO: 2686070 - DNA, 25 bp, Homo sapien
gaaagttctcctggtgtgagttaag

SEQ ID NO: 2686071 - DNA, 25 bp, Homo sapien
ccatcatattgtctggtgtttctaa

SEQ ID NO: 2686072 - DNA, 25 bp, Homo sapien
catctcttgtggttggaggataaat

SEQ ID NO: 2686073 - DNA, 25 bp, Homo sapien
gaatctatcgaattctattatgtgc

SEQ ID NO: 2686074 - DNA, 25 bp, Homo sapien
tctattatgtgcctagcattgtgta

SEQ ID NO: 2686075 - DNA, 25 bp, Homo sapien
gctcattcaatagaatctatcgaat

SEQ ID NO: 2686076 - DNA, 25 bp, Homo sapien
ctagatgtgagcatgggaacggaat

SEQ ID NO: 2686077 - DNA, 25 bp, Homo sapien
cctggctttgcctgccagtctagat

SEQ ID NO: 2686078 - DNA, 25 bp, Homo sapien
ctttggcaagtgacacccctggctt

SEQ ID NO: 2686079 - DNA, 25 bp, Homo sapien
ttggcaagtgacacccctggctttg

SEQ ID NO: 2686080 - DNA, 25 bp, Homo sapien
caggaaggagcactagagtccagtc

SEQ ID NO: 2686081 - DNA, 25 bp, Homo sapien
ggaaggagcactagagtccagtcac

SEQ ID NO: 2686082 - DNA, 25 bp, Homo sapien
acaggaaggagcactagagtccagt

SEQ ID NO: 2686083 - DNA, 25 bp, Homo sapien
aaggagcactagagtccagtcactt

SEQ ID NO: 2686084 - DNA, 25 bp, Homo sapien
atcaggtgggctggccgcgtactga

SEQ ID NO: 2686085 - DNA, 25 bp, Homo sapien
ggctggccgcgtactgagttcctcc

SEQ ID NO: 2686086 - DNA, 25 bp, Homo sapien
gctggccgcgtactgagttcctcct

SEQ ID NO: 2686087 - DNA, 25 bp, Homo sapien
tcaggatcaggtgggctggccgcgt

SEQ ID NO: 2686088 - DNA, 25 bp, Homo sapien
cctttgcacagtttgtatactgtct

SEQ ID NO: 2686089 - DNA, 25 bp, Homo sapien
tttgcacagtttgtatactgtcttg

SEQ ID NO: 2686090 - DNA, 25 bp, Homo sapien
gtatactgtcttgtggatgtcttcc

SEQ ID NO: 2686091 - DNA, 25 bp, Homo sapien
acctttgcacagtttgtatactgtc

SEQ ID NO: 2686092 - DNA, 25 bp, Homo sapien
gcagggtatctagcgaagtctgaca

SEQ ID NO: 2686093 - DNA, 25 bp, Homo sapien
gggaattcggctcgtgggcacaatt

SEQ ID NO: 2686094 - DNA, 25 bp, Homo sapien
agtctgacataacccagtcaggaga

SEQ ID NO: 2686095 - DNA, 25 bp, Homo sapien
ggcacaattgcagggtatctagcga

SEQ ID NO: 2686096 - DNA, 25 bp, Homo sapien
tgtagtagaaacacatattgcctaa

SEQ ID NO: 2686097 - DNA, 25 bp, Homo sapien
tgcttcccctaagagttgtaccagt

SEQ ID NO: 2686098 - DNA, 25 bp, Homo sapien
tatttcctggatgagactgcccatc

SEQ ID NO: 2686099 - DNA, 25 bp, Homo sapien
aatttggaatttgtatgctgggatc

SEQ ID NO: 2686100 - DNA, 25 bp, Homo sapien
caagcacatcacaagcgtatcactg

SEQ ID NO: 2686101 - DNA, 25 bp, Homo sapien
gactgaagctatactcccttctcag

SEQ ID NO: 2686102 - DNA, 25 bp, Homo sapien
aaagcactggattttgggcatgacc

SEQ ID NO: 2686103 - DNA, 25 bp, Homo sapien
gcatgacccagtatgcctggtcttt

SEQ ID NO: 2686104 - DNA, 25 bp, Homo sapien
ccatcacatttacgaaaaggcagaa

SEQ ID NO: 2686105 - DNA, 25 bp, Homo sapien
gaaaggaagagttgtctccatcaca

SEQ ID NO: 2686106 - DNA, 25 bp, Homo sapien
aaaggaagagttgtctccatcacat

SEQ ID NO: 2686107 - DNA, 25 bp, Homo sapien
catcacatttacgaaaaggcagaat

SEQ ID NO: 2686108 - DNA, 25 bp, Homo sapien
cagcaagctgcaaagcgtaaattgc

SEQ ID NO: 2686109 - DNA, 25 bp, Homo sapien
agcaagctgcaaagcgtaaattgct

SEQ ID NO: 2686110 - DNA, 25 bp, Homo sapien
gcaagctgcaaagcgtaaattgctt

SEQ ID NO: 2686111 - DNA, 25 bp, Homo sapien
aagctgcaaagcgtaaattgctttg

SEQ ID NO: 2686112 - DNA, 25 bp, Homo sapien
ctaagcctgaacagcacttgagggc

SEQ ID NO: 2686113 - DNA, 25 bp, Homo sapien
gatcagctgctaagcctgaacagca

SEQ ID NO: 2686114 - DNA, 25 bp, Homo sapien
aagcctgaacagcacttgagggcag

SEQ ID NO: 2686115 - DNA, 25 bp, Homo sapien
cagatcagctgctaagcctgaacag

SEQ ID NO: 2686116 - DNA, 25 bp, Homo sapien
tgagtggtaccaagatagtgtcctg

SEQ ID NO: 2686117 - DNA, 25 bp, Homo sapien
ggtggttgcaagtgagattccctaa

SEQ ID NO: 2686118 - DNA, 25 bp, Homo sapien
tagctcccatacagtgtgactcagg

SEQ ID NO: 2686119 - DNA, 25 bp, Homo sapien
ctgtagccgacccacgatgctttgg

SEQ ID NO: 2686120 - DNA, 25 bp, Homo sapien
ccttggactgtattgtttcagagcc

SEQ ID NO: 2686121 - DNA, 25 bp, Homo sapien
gaactctgtgtactgcagagatgaa

SEQ ID NO: 2686122 - DNA, 25 bp, Homo sapien
ctatagggacacttgcctggccaca

SEQ ID NO: 2686123 - DNA, 25 bp, Homo sapien
tgaaaccaggttgcatgtcgcatgc

SEQ ID NO: 2686124 - DNA, 25 bp, Homo sapien
catgattctttgacagcttagatta

SEQ ID NO: 2686125 - DNA, 25 bp, Homo sapien
ctttgacagcttagattaggtttat

SEQ ID NO: 2686126 - DNA, 25 bp, Homo sapien
gattctttgacagcttagattaggt

SEQ ID NO: 2686127 - DNA, 25 bp, Homo sapien
ttctttgacagcttagattaggttt

SEQ ID NO: 2686128 - DNA, 25 bp, Homo sapien
acatcgcccctcctcttattaatat

SEQ ID NO: 2686129 - DNA, 25 bp, Homo sapien
aatctccaagatctcaagggctttt

SEQ ID NO: 2686130 - DNA, 25 bp, Homo sapien
cagtggcccataattgatgtgttca

SEQ ID NO: 2686131 - DNA, 25 bp, Homo sapien
tgagcttgtaaaacagaggattggc

SEQ ID NO: 2686132 - DNA, 25 bp, Homo sapien
attttccaagaaattggcagcattg

SEQ ID NO: 2686133 - DNA, 25 bp, Homo sapien
tcccatatgctagtgaaaaacattt

SEQ ID NO: 2686134 - DNA, 25 bp, Homo sapien
aagttcccatatgctagtgaaaaac

SEQ ID NO: 2686135 - DNA, 25 bp, Homo sapien
ccaagaaattggcagcattgcactt

SEQ ID NO: 2686136 - DNA, 25 bp, Homo sapien
gattctcttttagtagggttacaga

SEQ ID NO: 2686137 - DNA, 25 bp, Homo sapien
gatcgttggcaaaaacattgatggg

SEQ ID NO: 2686138 - DNA, 25 bp, Homo sapien
agagccttaaaactgtctccatggg

SEQ ID NO: 2686139 - DNA, 25 bp, Homo sapien
tttccccagtttggtagagcatgcc

SEQ ID NO: 2686140 - DNA, 25 bp, Homo sapien
tgtggaggtagccagtaagtcctgc

SEQ ID NO: 2686141 - DNA, 25 bp, Homo sapien
aggtagattgttccctcctgcagac

SEQ ID NO: 2686142 - DNA, 25 bp, Homo sapien
taggtctgatctatgcaggtcatct

SEQ ID NO: 2686143 - DNA, 25 bp, Homo sapien
aggtcatctcttctagtcagctggg

SEQ ID NO: 2686144 - DNA, 25 bp, Homo sapien
gtacagttaggagccatttggcccc

SEQ ID NO: 2686145 - DNA, 25 bp, Homo sapien
tatgtttgagtagggacctgagtac

SEQ ID NO: 2686146 - DNA, 25 bp, Homo sapien
tatattttggttggcgttacgtgct

SEQ ID NO: 2686147 - DNA, 25 bp, Homo sapien
tataagggagaatcaagcaggagaa

SEQ ID NO: 2686148 - DNA, 25 bp, Homo sapien
caagaaatggtcacgttgtcctgag

SEQ ID NO: 2686149 - DNA, 25 bp, Homo sapien
tgatatatcctgtggctgccaagtg

SEQ ID NO: 2686150 - DNA, 25 bp, Homo sapien
tccaatggaaaagactagggcccag

SEQ ID NO: 2686151 - DNA, 25 bp, Homo sapien
ttattgggctggaagaggtcacctc

SEQ ID NO: 2686152 - DNA, 25 bp, Homo sapien
gatgtgataaactcagtacagcctg

SEQ ID NO: 2686153 - DNA, 25 bp, Homo sapien
gatcttgaggattgataccatcttg

SEQ ID NO: 2686154 - DNA, 25 bp, Homo sapien
gggcagctatacaaggtcaagacca

SEQ ID NO: 2686155 - DNA, 25 bp, Homo sapien
agagggttttagagttgacagagca

SEQ ID NO: 2686156 - DNA, 25 bp, Homo sapien
gtgagtcgacttttcaagaccaagg

SEQ ID NO: 2686157 - DNA, 25 bp, Homo sapien
caaaggtagggactggtctaatagg

SEQ ID NO: 2686158 - DNA, 25 bp, Homo sapien
tcaatcccatcgtgagtcgactttt

SEQ ID NO: 2686159 - DNA, 25 bp, Homo sapien
caagaccaaggtatggaattcaaag

SEQ ID NO: 2686160 - DNA, 25 bp, Homo sapien
tggccatgccagaatgagtacggta

SEQ ID NO: 2686161 - DNA, 25 bp, Homo sapien
cacacttcttgcatttgatggccat

SEQ ID NO: 2686162 - DNA, 25 bp, Homo sapien
cagatgagcgcttaaagggcagaaa

SEQ ID NO: 2686163 - DNA, 25 bp, Homo sapien
gatgcttttaaagcgactcagggac

SEQ ID NO: 2686164 - DNA, 25 bp, Homo sapien
tgtccagatggttaggtttaattgt

SEQ ID NO: 2686165 - DNA, 25 bp, Homo sapien
tgaagatttttgtccagatggttag

SEQ ID NO: 2686166 - DNA, 25 bp, Homo sapien
ttgtccagatggttaggtttaattg

SEQ ID NO: 2686167 - DNA, 25 bp, Homo sapien
tcccctgaggcagaattctaatctg

SEQ ID NO: 2686168 - DNA, 25 bp, Homo sapien
tagtttgacaacgttcccctgaggc

SEQ ID NO: 2686169 - DNA, 25 bp, Homo sapien
tatgactgctgttttacttgcacgc

SEQ ID NO: 2686170 - DNA, 25 bp, Homo sapien
catttgctccagcttctagtttgac

SEQ ID NO: 2686171 - DNA, 25 bp, Homo sapien
ctatgggagcagatggagggccctg

SEQ ID NO: 2686172 - DNA, 25 bp, Homo sapien
tatgggagcagatggagggccctgg

SEQ ID NO: 2686173 - DNA, 25 bp, Homo sapien
ggagcagatggagggccctgggctc

SEQ ID NO: 2686174 - DNA, 25 bp, Homo sapien
tgggagcagatggagggccctgggc

SEQ ID NO: 2686175 - DNA, 25 bp, Homo sapien
catcctccagtttatcagtgtgcag

SEQ ID NO: 2686176 - DNA, 25 bp, Homo sapien
gctgtattatcctccacaatctgct

SEQ ID NO: 2686177 - DNA, 25 bp, Homo sapien
atcagtcgcactggtttcttcagca

SEQ ID NO: 2686178 - DNA, 25 bp, Homo sapien
caggttttctatcttatcagtcgca

SEQ ID NO: 2686179 - DNA, 25 bp, Homo sapien
tatatggacctctccctctgtgtct

SEQ ID NO: 2686180 - DNA, 25 bp, Homo sapien
cacagggatcccatctggtattcag

SEQ ID NO: 2686181 - DNA, 25 bp, Homo sapien
tgagagctcaaaggatatgcaacct

SEQ ID NO: 2686182 - DNA, 25 bp, Homo sapien
ttatattttgctaggtctgtgggcc

SEQ ID NO: 2686183 - DNA, 25 bp, Homo sapien
cagacatgttaatggtgaagctgcg

SEQ ID NO: 2686184 - DNA, 25 bp, Homo sapien
gactgggcttgtgcctccctgagat

SEQ ID NO: 2686185 - DNA, 25 bp, Homo sapien
tagacactaagaatcttggttctgg

SEQ ID NO: 2686186 - DNA, 25 bp, Homo sapien
cattatccggcctttgtttgaggtc

SEQ ID NO: 2686187 - DNA, 25 bp, Homo sapien
aaggcttgcactgtaacaaaatcgc

SEQ ID NO: 2686188 - DNA, 25 bp, Homo sapien
aaaatcgctccttttagatggttgg

SEQ ID NO: 2686189 - DNA, 25 bp, Homo sapien
tggttggttgttactaactcgccca

SEQ ID NO: 2686190 - DNA, 25 bp, Homo sapien
tagatggttggttgttactaactcg

SEQ ID NO: 2686191 - DNA, 25 bp, Homo sapien
tccgaacttcggagatcctagatct

SEQ ID NO: 2686192 - DNA, 25 bp, Homo sapien
tagatctccgagaaatgtttcacat

SEQ ID NO: 2686193 - DNA, 25 bp, Homo sapien
tcgctccttccgaacttcggagatc

SEQ ID NO: 2686194 - DNA, 25 bp, Homo sapien
cattcataacttgtagcttcgccca

SEQ ID NO: 2686195 - DNA, 25 bp, Homo sapien
gcaaactctgtgtaggccctgcggt

SEQ ID NO: 2686196 - DNA, 25 bp, Homo sapien
ttatgggactcatgacagggatgcc

SEQ ID NO: 2686197 - DNA, 25 bp, Homo sapien
ccgccgaagggagcacgtaggtaat

SEQ ID NO: 2686198 - DNA, 25 bp, Homo sapien
aaggccccagaggtgtattacaatg

SEQ ID NO: 2686199 - DNA, 25 bp, Homo sapien
ctcctggagagaggcggaatctaca

SEQ ID NO: 2686200 - DNA, 25 bp, Homo sapien
gccttgctgctttcaatgttgccca

SEQ ID NO: 2686201 - DNA, 25 bp, Homo sapien
cattatactgaaggcaggcaactcc

SEQ ID NO: 2686202 - DNA, 25 bp, Homo sapien
ttgtcgaccgaacgccttgctgctt

SEQ ID NO: 2686203 - DNA, 25 bp, Homo sapien
tatgtgcggaccaccatcaacaaga

SEQ ID NO: 2686204 - DNA, 25 bp, Homo sapien
gaagaacaagtatgccctgacctgc

SEQ ID NO: 2686205 - DNA, 25 bp, Homo sapien
gcaactccttcgctaaaaagggctg

SEQ ID NO: 2686206 - DNA, 25 bp, Homo sapien
caatggatggtcgtgaggaactgct

SEQ ID NO: 2686207 - DNA, 25 bp, Homo sapien
cctttccacttttgccgtgtcaggg

SEQ ID NO: 2686208 - DNA, 25 bp, Homo sapien
tcagggctatttgaaacgagttcag

SEQ ID NO: 2686209 - DNA, 25 bp, Homo sapien
tatttgaaacgagttcagtgtccat

SEQ ID NO: 2686210 - DNA, 25 bp, Homo sapien
gccgtgtcagggctatttgaaacga

SEQ ID NO: 2686211 - DNA, 25 bp, Homo sapien
gggagccattcagtttcctcacatt

SEQ ID NO: 2686212 - DNA, 25 bp, Homo sapien
tccacaaagtccactgctatgtgct

SEQ ID NO: 2686213 - DNA, 25 bp, Homo sapien
tatgtgctgcgcaaaatctttcact

SEQ ID NO: 2686214 - DNA, 25 bp, Homo sapien
cgtcctcctagtagaatcaaattgg

SEQ ID NO: 2686215 - DNA, 25 bp, Homo sapien
tggccacatagtgattccacaaagt

SEQ ID NO: 2686216 - DNA, 25 bp, Homo sapien
taactcacgggtgtgctctgattct

SEQ ID NO: 2686217 - DNA, 25 bp, Homo sapien
cactgccttgattttaccgtaactc

SEQ ID NO: 2686218 - DNA, 25 bp, Homo sapien
tccagccgaaggcccttgcaacttg

SEQ ID NO: 2686219 - DNA, 25 bp, Homo sapien
gcttttgggcacttattccagagtc

SEQ ID NO: 2686220 - DNA, 25 bp, Homo sapien
tgagcctgggagcaaaaaaagataa

SEQ ID NO: 2686221 - DNA, 25 bp, Homo sapien
tgtaaacccctatggctggtaacta

SEQ ID NO: 2686222 - DNA, 25 bp, Homo sapien
ttcactgaatgcaatgagcctggga

SEQ ID NO: 2686223 - DNA, 25 bp, Homo sapien
tatagaatcaagacaaacaaaccca

SEQ ID NO: 2686224 - DNA, 25 bp, Homo sapien
tactaaagtgtgtcccacgaaggga

SEQ ID NO: 2686225 - DNA, 25 bp, Homo sapien
cactggacaggcgatgctttgggat

SEQ ID NO: 2686226 - DNA, 25 bp, Homo sapien
cgaagggatctgcacttgaagagca

SEQ ID NO: 2686227 - DNA, 25 bp, Homo sapien
gatgtatccatatcagctatcaggc

SEQ ID NO: 2686228 - DNA, 25 bp, Homo sapien
taacagaattggtgacaaggctacg

SEQ ID NO: 2686229 - DNA, 25 bp, Homo sapien
gacaaggctacgacaggtaaactga

SEQ ID NO: 2686230 - DNA, 25 bp, Homo sapien
tctcgtaaacctgaactggaaggag

SEQ ID NO: 2686231 - DNA, 25 bp, Homo sapien
cctggtctaccagcaagtcaggtaa

SEQ ID NO: 2686232 - DNA, 25 bp, Homo sapien
ggtaccagctggagtcatatattct

SEQ ID NO: 2686233 - DNA, 25 bp, Homo sapien
aatgtgcggcaaacattcgcttcga

SEQ ID NO: 2686234 - DNA, 25 bp, Homo sapien
gttttctctgacaagggtagtgcca

SEQ ID NO: 2686235 - DNA, 25 bp, Homo sapien
caacaggcccatgtgaatgtgcggc

SEQ ID NO: 2686236 - DNA, 25 bp, Homo sapien
ctgcgtacataggccaagagtgagc

SEQ ID NO: 2686237 - DNA, 25 bp, Homo sapien
gcgtacataggccaagagtgagcat

SEQ ID NO: 2686238 - DNA, 25 bp, Homo sapien
tgcgtacataggccaagagtgagca

SEQ ID NO: 2686239 - DNA, 25 bp, Homo sapien
cgtacataggccaagagtgagcatc

SEQ ID NO: 2686240 - DNA, 25 bp, Homo sapien
acccctccttgggaatctgaattct

SEQ ID NO: 2686241 - DNA, 25 bp, Homo sapien
catttccgtccattacccctccttg

SEQ ID NO: 2686242 - DNA, 25 bp, Homo sapien
tgcatcatctctggtacttggcagc

SEQ ID NO: 2686243 - DNA, 25 bp, Homo sapien
tctgaattctgcatcatctctggta

SEQ ID NO: 2686244 - DNA, 25 bp, Homo sapien
gtgaatatttactgtgtaagcagga

SEQ ID NO: 2686245 - DNA, 25 bp, Homo sapien
aatatttactgtgtaagcaggaaag

SEQ ID NO: 2686246 - DNA, 25 bp, Homo sapien
gaatatttactgtgtaagcaggaaa

SEQ ID NO: 2686247 - DNA, 25 bp, Homo sapien
ttgtgaatatttactgtgtaagcag

SEQ ID NO: 2686248 - DNA, 25 bp, Homo sapien
tgccgtaagcaaaatcggcatttat

SEQ ID NO: 2686249 - DNA, 25 bp, Homo sapien
tttttctagtctgccgtaagcaaaa

SEQ ID NO: 2686250 - DNA, 25 bp, Homo sapien
tagtctgccgtaagcaaaatcggca

SEQ ID NO: 2686251 - DNA, 25 bp, Homo sapien
ttctagtctgccgtaagcaaaatcg

SEQ ID NO: 2686252 - DNA, 25 bp, Homo sapien
ttggtcaagctcctgtttacaacat

SEQ ID NO: 2686253 - DNA, 25 bp, Homo sapien
atactgactgtatcagtactttcca

SEQ ID NO: 2686254 - DNA, 25 bp, Homo sapien
ctgtttacaacatatcaagtactgg

SEQ ID NO: 2686255 - DNA, 25 bp, Homo sapien
tactggatgcgtttaatactgactg

SEQ ID NO: 2686256 - DNA, 25 bp, Homo sapien
tttcctttaagaacaccgctacagc

SEQ ID NO: 2686257 - DNA, 25 bp, Homo sapien
gataaagaggctgctcagtcacttg

SEQ ID NO: 2686258 - DNA, 25 bp, Homo sapien
aatttgtacattactccaacctagc

SEQ ID NO: 2686259 - DNA, 25 bp, Homo sapien
ggtaaccaccccatgagtgaaccat

SEQ ID NO: 2686260 - DNA, 25 bp, Homo sapien
cactcatcagcagttccggaaagac

SEQ ID NO: 2686261 - DNA, 25 bp, Homo sapien
taagtacagggttgacactgcaccg

SEQ ID NO: 2686262 - DNA, 25 bp, Homo sapien
ggcttgtaaaggttaaccatgcaga

SEQ ID NO: 2686263 - DNA, 25 bp, Homo sapien
gagtactggcactttcttgctccag

SEQ ID NO: 2686264 - DNA, 25 bp, Homo sapien
tccaggtcgctgatgaaggatccat

SEQ ID NO: 2686265 - DNA, 25 bp, Homo sapien
agcgccatccaggtcgctgatgaag

SEQ ID NO: 2686266 - DNA, 25 bp, Homo sapien
actcagcgccatccaggtcgctgat

SEQ ID NO: 2686267 - DNA, 25 bp, Homo sapien
catccaggtcgctgatgaaggatcc

SEQ ID NO: 2686268 - DNA, 25 bp, Homo sapien
cggctactagtaaattgtgcaggta

SEQ ID NO: 2686269 - DNA, 25 bp, Homo sapien
ggctactagtaaattgtgcaggtac

SEQ ID NO: 2686270 - DNA, 25 bp, Homo sapien
ctactagtaaattgtgcaggtacat

SEQ ID NO: 2686271 - DNA, 25 bp, Homo sapien
ctagtaaattgtgcaggtacattac

SEQ ID NO: 2686272 - DNA, 25 bp, Homo sapien
cagattgaagaatcttagtggccat

SEQ ID NO: 2686273 - DNA, 25 bp, Homo sapien
ttaagccaaggtcacagattgaaga

SEQ ID NO: 2686274 - DNA, 25 bp, Homo sapien
gaagaatcttagtggccatccaggc

SEQ ID NO: 2686275 - DNA, 25 bp, Homo sapien
aagccaaggtcacagattgaagaat

SEQ ID NO: 2686276 - DNA, 25 bp, Homo sapien
taaaaagttctttggtcgctgctgt

SEQ ID NO: 2686277 - DNA, 25 bp, Homo sapien
aaagttctttggtcgctgctgttcc

SEQ ID NO: 2686278 - DNA, 25 bp, Homo sapien
tctttggtcgctgctgttcctttta

SEQ ID NO: 2686279 - DNA, 25 bp, Homo sapien
cataaaaagttctttggtcgctgct

SEQ ID NO: 2686280 - DNA, 25 bp, Homo sapien
agtgtagcaacaagcccacagagac

SEQ ID NO: 2686281 - DNA, 25 bp, Homo sapien
ctagagacagtgtagcaacaagccc

SEQ ID NO: 2686282 - DNA, 25 bp, Homo sapien
agctctcatcagaaaggcatctcca

SEQ ID NO: 2686283 - DNA, 25 bp, Homo sapien
gctctcatcagaaaggcatctccat

SEQ ID NO: 2686284 - DNA, 25 bp, Homo sapien
gcctagggtcaagcctgctcagaaa

SEQ ID NO: 2686285 - DNA, 25 bp, Homo sapien
tacggattcagaccagtctccatat

SEQ ID NO: 2686286 - DNA, 25 bp, Homo sapien
gaaaaggtacggattcagaccagtc

SEQ ID NO: 2686287 - DNA, 25 bp, Homo sapien
gaggagaaaaggtacggattcagac

SEQ ID NO: 2686288 - DNA, 25 bp, Homo sapien
cattctcttggaaagatggctgcct

SEQ ID NO: 2686289 - DNA, 25 bp, Homo sapien
tacaaaagggctctaagtctggaca

SEQ ID NO: 2686290 - DNA, 25 bp, Homo sapien
taaaccctgtgccaattcattggag

SEQ ID NO: 2686291 - DNA, 25 bp, Homo sapien
tctccagcaggcctaatttaccacg

SEQ ID NO: 2686292 - DNA, 25 bp, Homo sapien
agaggaaatgaactacaagggttat

SEQ ID NO: 2686293 - DNA, 25 bp, Homo sapien
aggaaatgaactacaagggttatga

SEQ ID NO: 2686294 - DNA, 25 bp, Homo sapien
gaggaaatgaactacaagggttatg

SEQ ID NO: 2686295 - DNA, 25 bp, Homo sapien
tgggcctgaaccaagacagacatct

SEQ ID NO: 2686296 - DNA, 25 bp, Homo sapien
catcttcacatgtccagcagtcctg

SEQ ID NO: 2686297 - DNA, 25 bp, Homo sapien
tggaatcagaccagcacatgcactc

SEQ ID NO: 2686298 - DNA, 25 bp, Homo sapien
agctccctgaatggtgatctgggcc

SEQ ID NO: 2686299 - DNA, 25 bp, Homo sapien
cattccttgaattgagccagaccaa

SEQ ID NO: 2686300 - DNA, 25 bp, Homo sapien
gatgtcaactttgtgcatggttcac

SEQ ID NO: 2686301 - DNA, 25 bp, Homo sapien
catggttcacatctcagacattagg

SEQ ID NO: 2686302 - DNA, 25 bp, Homo sapien
tagtctctcaaagtcggatgtcaac

SEQ ID NO: 2686303 - DNA, 25 bp, Homo sapien
tcctccaggattctccacaagcact

SEQ ID NO: 2686304 - DNA, 25 bp, Homo sapien
ggattctccacaagcacttcaaact

SEQ ID NO: 2686305 - DNA, 25 bp, Homo sapien
tccaatcctacatgtctcttatcct

SEQ ID NO: 2686306 - DNA, 25 bp, Homo sapien
acaagcacttcaaactccaatccta

SEQ ID NO: 2686307 - DNA, 25 bp, Homo sapien
tcacagtccacttccaggaagctta

SEQ ID NO: 2686308 - DNA, 25 bp, Homo sapien
cacagtccacttccaggaagcttat

SEQ ID NO: 2686309 - DNA, 25 bp, Homo sapien
gagaaactcatcaaccttatcatca

SEQ ID NO: 2686310 - DNA, 25 bp, Homo sapien
aactcatcaaccttatcatcacact

SEQ ID NO: 2686311 - DNA, 25 bp, Homo sapien
ctcatcaaccttatcatcacactca

SEQ ID NO: 2686312 - DNA, 25 bp, Homo sapien
gaaactcatcaaccttatcatcaca

SEQ ID NO: 2686313 - DNA, 25 bp, Homo sapien
gataaacgatcagacaactgaacta

SEQ ID NO: 2686314 - DNA, 25 bp, Homo sapien
agcccaggaagagttggtcatgaag

SEQ ID NO: 2686315 - DNA, 25 bp, Homo sapien
aagagttggtcatgaaggccagcag

SEQ ID NO: 2686316 - DNA, 25 bp, Homo sapien
tcaggaaaacttaaggccaagaagc

SEQ ID NO: 2686317 - DNA, 25 bp, Homo sapien
cctgagcactactgatcttcctgag

SEQ ID NO: 2686318 - DNA, 25 bp, Homo sapien
tttttcggtccatcctgagcactac

SEQ ID NO: 2686319 - DNA, 25 bp, Homo sapien
gccattttagcattctacagggcat

SEQ ID NO: 2686320 - DNA, 25 bp, Homo sapien
ctgagcactactgatcttcctgagt

SEQ ID NO: 2686321 - DNA, 25 bp, Homo sapien
aagacacaggcttcgaagagagact

SEQ ID NO: 2686322 - DNA, 25 bp, Homo sapien
tgaagacacaggcttcgaagagaga

SEQ ID NO: 2686323 - DNA, 25 bp, Homo sapien
gacacaggcttcgaagagagacttc

SEQ ID NO: 2686324 - DNA, 25 bp, Homo sapien
acacaggcttcgaagagagacttca

SEQ ID NO: 2686325 - DNA, 25 bp, Homo sapien
ctgctgttgattggcagtcctctgg

SEQ ID NO: 2686326 - DNA, 25 bp, Homo sapien
tctggccatccagctcaagctgcct

SEQ ID NO: 2686327 - DNA, 25 bp, Homo sapien
ggtgagtattcacctgggcagacac

SEQ ID NO: 2686328 - DNA, 25 bp, Homo sapien
tctgggtgagtattcacctgggcag

SEQ ID NO: 2686329 - DNA, 25 bp, Homo sapien
gagaagggaaggtcgattggcaacc

SEQ ID NO: 2686330 - DNA, 25 bp, Homo sapien
ttggcaacccaacaaagtgacaaag

SEQ ID NO: 2686331 - DNA, 25 bp, Homo sapien
gaagggaaggtcgattggcaaccca

SEQ ID NO: 2686332 - DNA, 25 bp, Homo sapien
ctgcctgaagctaggaaccccatct

SEQ ID NO: 2686333 - DNA, 25 bp, Homo sapien
caaaatctgtgcctctgaccaattc

SEQ ID NO: 2686334 - DNA, 25 bp, Homo sapien
ctcaacctcactgcctgaagctagg

SEQ ID NO: 2686335 - DNA, 25 bp, Homo sapien
tgtgcctctgaccaattctccctca

SEQ ID NO: 2686336 - DNA, 25 bp, Homo sapien
catccctaagagttttatcagtgct

SEQ ID NO: 2686337 - DNA, 25 bp, Homo sapien
cctaagagttttatcagtgctgtgt

SEQ ID NO: 2686338 - DNA, 25 bp, Homo sapien
agagttttatcagtgctgtgttccc

SEQ ID NO: 2686339 - DNA, 25 bp, Homo sapien
tccctaagagttttatcagtgctgt

SEQ ID NO: 2686340 - DNA, 25 bp, Homo sapien
aagaattccaagtaggccaatagaa

SEQ ID NO: 2686341 - DNA, 25 bp, Homo sapien
gaattccaagtaggccaatagaaag

SEQ ID NO: 2686342 - DNA, 25 bp, Homo sapien
ttccaagtaggccaatagaaagctt

SEQ ID NO: 2686343 - DNA, 25 bp, Homo sapien
ccaagtaggccaatagaaagcttca

SEQ ID NO: 2686344 - DNA, 25 bp, Homo sapien
cacatatccacattcagagtcactg

SEQ ID NO: 2686345 - DNA, 25 bp, Homo sapien
tctagcatcacatgtgcacaaacca

SEQ ID NO: 2686346 - DNA, 25 bp, Homo sapien
gtcactggaactctgatttcccgta

SEQ ID NO: 2686347 - DNA, 25 bp, Homo sapien
cgtatgtgagtattctctagcatca

SEQ ID NO: 2686348 - DNA, 25 bp, Homo sapien
tgacatgatctaaatgtagtggtta

SEQ ID NO: 2686349 - DNA, 25 bp, Homo sapien
ccagaacctgtgatagactgagata

SEQ ID NO: 2686350 - DNA, 25 bp, Homo sapien
tagactgagatatagaattataggc

SEQ ID NO: 2686351 - DNA, 25 bp, Homo sapien
gttagagtcccacatgggcccacta

SEQ ID NO: 2686352 - DNA, 25 bp, Homo sapien
cgttgagtgggatggataaccacat

SEQ ID NO: 2686353 - DNA, 25 bp, Homo sapien
cagattttaggtcgttgagtgggat

SEQ ID NO: 2686354 - DNA, 25 bp, Homo sapien
tcagattttaggtcgttgagtggga

SEQ ID NO: 2686355 - DNA, 25 bp, Homo sapien
aggtcgttgagtgggatggataacc

SEQ ID NO: 2686356 - DNA, 25 bp, Homo sapien
tgatgtgttccataagcgttagaaa

SEQ ID NO: 2686357 - DNA, 25 bp, Homo sapien
gcgttagaaatcaccagggattctg

SEQ ID NO: 2686358 - DNA, 25 bp, Homo sapien
cataagcgttagaaatcaccaggga

SEQ ID NO: 2686359 - DNA, 25 bp, Homo sapien
aagtagcatttcatcgtgccaaacc

SEQ ID NO: 2686360 - DNA, 25 bp, Homo sapien
gtatcccagaccgccacaagctttt

SEQ ID NO: 2686361 - DNA, 25 bp, Homo sapien
cccttttcacagtattactgctact

SEQ ID NO: 2686362 - DNA, 25 bp, Homo sapien
acattccagttcataccactttgcc

SEQ ID NO: 2686363 - DNA, 25 bp, Homo sapien
tattactgctactctccttgctgac

SEQ ID NO: 2686364 - DNA, 25 bp, Homo sapien
ttttccactttttccactgccctca

SEQ ID NO: 2686365 - DNA, 25 bp, Homo sapien
tttccactttttccactgccctcat

SEQ ID NO: 2686366 - DNA, 25 bp, Homo sapien
tctctgtcacggtatcctgtttatt

SEQ ID NO: 2686367 - DNA, 25 bp, Homo sapien
ttcatagtacttattgtaagtggca

SEQ ID NO: 2686368 - DNA, 25 bp, Homo sapien
tgtcacggtatcctgtttatttcct

SEQ ID NO: 2686369 - DNA, 25 bp, Homo sapien
tctgtcacggtatcctgtttatttc

SEQ ID NO: 2686370 - DNA, 25 bp, Homo sapien
tggcctttcctgttcacgcagtgaa

SEQ ID NO: 2686371 - DNA, 25 bp, Homo sapien
cattcaataaattctctccattgtc

SEQ ID NO: 2686372 - DNA, 25 bp, Homo sapien
cttggcctttcctgttcacgcagtg

SEQ ID NO: 2686373 - DNA, 25 bp, Homo sapien
ctgttcacgcagtgaacattcaata

SEQ ID NO: 2686374 - DNA, 25 bp, Homo sapien
gcatttatattgtgtctcccaactg

SEQ ID NO: 2686375 - DNA, 25 bp, Homo sapien
tctcccaactggaccataagtattt

SEQ ID NO: 2686376 - DNA, 25 bp, Homo sapien
tgtctcccaactggaccataagtat

SEQ ID NO: 2686377 - DNA, 25 bp, Homo sapien
ttttcatgcatttatattgtgtctc

SEQ ID NO: 2686378 - DNA, 25 bp, Homo sapien
gtctttagtccagagaatctgaagc

SEQ ID NO: 2686379 - DNA, 25 bp, Homo sapien
aaatgtggtgactgatgggatcttt

SEQ ID NO: 2686380 - DNA, 25 bp, Homo sapien
aagctctgtgtactccacatcttta

SEQ ID NO: 2686381 - DNA, 25 bp, Homo sapien
tttggcatctagatgagtgtcagtc

SEQ ID NO: 2686382 - DNA, 25 bp, Homo sapien
tgtcccatgatggtggtgcaaagtt

SEQ ID NO: 2686383 - DNA, 25 bp, Homo sapien
ggtggtgcaaagtttgaagattttg

SEQ ID NO: 2686384 - DNA, 25 bp, Homo sapien
cacatatgtcaggctgtcccatgat

SEQ ID NO: 2686385 - DNA, 25 bp, Homo sapien
cttatctcaaggtgcacatatgtca

SEQ ID NO: 2686386 - DNA, 25 bp, Homo sapien
caatgtcagcacagctgaggtggct

SEQ ID NO: 2686387 - DNA, 25 bp, Homo sapien
tcctgccgaaccagctgagaaagct

SEQ ID NO: 2686388 - DNA, 25 bp, Homo sapien
gctcttttggcatccgttcgtacag

SEQ ID NO: 2686389 - DNA, 25 bp, Homo sapien
gctgtgctaattaactgtcctgccg

SEQ ID NO: 2686390 - DNA, 25 bp, Homo sapien
tgtctgtgtgcgtccgtgtgctaca

SEQ ID NO: 2686391 - DNA, 25 bp, Homo sapien
tatctaaatccctttcaatgccagc

SEQ ID NO: 2686392 - DNA, 25 bp, Homo sapien
tgttctctccaactgtgactagggc

SEQ ID NO: 2686393 - DNA, 25 bp, Homo sapien
gtttgacaagaaccaatgccaacac

SEQ ID NO: 2686394 - DNA, 25 bp, Homo sapien
tagcgcagtgattagaatataaagc

SEQ ID NO: 2686395 - DNA, 25 bp, Homo sapien
gacagatgcttagcgcagtgattag

SEQ ID NO: 2686396 - DNA, 25 bp, Homo sapien
tgcttagcgcagtgattagaatata

SEQ ID NO: 2686397 - DNA, 25 bp, Homo sapien
ctgccggggacagatgcttagcgca

SEQ ID NO: 2686398 - DNA, 25 bp, Homo sapien
gccaccattgggctgcattcgttat

SEQ ID NO: 2686399 - DNA, 25 bp, Homo sapien
aacactagctcctcgcgtgcgtggg

SEQ ID NO: 2686400 - DNA, 25 bp, Homo sapien
taatcagaggaatggaacactagct

SEQ ID NO: 2686401 - DNA, 25 bp, Homo sapien
ctctgagagtgctttcccgctgcct

SEQ ID NO: 2686402 - DNA, 25 bp, Homo sapien
tgctgtaatttataatcatcttgaa

SEQ ID NO: 2686403 - DNA, 25 bp, Homo sapien
gcagaatgctgtaatttataatcat

SEQ ID NO: 2686404 - DNA, 25 bp, Homo sapien
tcaaaagtaagcagaatgctgtaat

SEQ ID NO: 2686405 - DNA, 25 bp, Homo sapien
gtaatttataatcatcttgaagcac

SEQ ID NO: 2686406 - DNA, 25 bp, Homo sapien
tttgtttaaccaccatagaacaaga

SEQ ID NO: 2686407 - DNA, 25 bp, Homo sapien
ttgtttaaccaccatagaacaagaa

SEQ ID NO: 2686408 - DNA, 25 bp, Homo sapien
tgtttaaccaccatagaacaagaaa

SEQ ID NO: 2686409 - DNA, 25 bp, Homo sapien
ctgacaagtttatacaaagaatatg

SEQ ID NO: 2686410 - DNA, 25 bp, Homo sapien
gaatatgtatgatgatattttgcct

SEQ ID NO: 2686411 - DNA, 25 bp, Homo sapien
tatacaaagaatatgtatgatgata

SEQ ID NO: 2686412 - DNA, 25 bp, Homo sapien
tacaaagaatatgtatgatgatatt

SEQ ID NO: 2686413 - DNA, 25 bp, Homo sapien
gctgattgaaccgtctgagttctct

SEQ ID NO: 2686414 - DNA, 25 bp, Homo sapien
gaagctgattgaaccgtctgagttc

SEQ ID NO: 2686415 - DNA, 25 bp, Homo sapien
agacacggtcttccacccctctcag

SEQ ID NO: 2686416 - DNA, 25 bp, Homo sapien
gagaagctgattgaaccgtctgagt

SEQ ID NO: 2686417 - DNA, 25 bp, Homo sapien
cttttgtaatgggcctcatatgcca

SEQ ID NO: 2686418 - DNA, 25 bp, Homo sapien
ttttgtaatgggcctcatatgccat

SEQ ID NO: 2686419 - DNA, 25 bp, Homo sapien
aattttgttgctacatcaccaatgg

SEQ ID NO: 2686420 - DNA, 25 bp, Homo sapien
ttttgttgctacatcaccaatggat

SEQ ID NO: 2686421 - DNA, 25 bp, Homo sapien
attttgttgctacatcaccaatgga

SEQ ID NO: 2686422 - DNA, 25 bp, Homo sapien
gtaggcagtagcacgcttttcatat

SEQ ID NO: 2686423 - DNA, 25 bp, Homo sapien
aggtaggcagtagcacgcttttcat

SEQ ID NO: 2686424 - DNA, 25 bp, Homo sapien
ggtaggcagtagcacgcttttcata

SEQ ID NO: 2686425 - DNA, 25 bp, Homo sapien
taggcagtagcacgcttttcatatt

SEQ ID NO: 2686426 - DNA, 25 bp, Homo sapien
gatgagaaaaaccaccatccttata

SEQ ID NO: 2686427 - DNA, 25 bp, Homo sapien
tttgtgctgtgtaccacaaagaacg

SEQ ID NO: 2686428 - DNA, 25 bp, Homo sapien
gctgtgtaccacaaagaacgtgctt

SEQ ID NO: 2686429 - DNA, 25 bp, Homo sapien
tttccaagccaatttacaacctctg

SEQ ID NO: 2686430 - DNA, 25 bp, Homo sapien
ggaaacatgcacccaaataaatatc

SEQ ID NO: 2686431 - DNA, 25 bp, Homo sapien
aggaaacatgcacccaaataaatat

SEQ ID NO: 2686432 - DNA, 25 bp, Homo sapien
tcctaacagccctgatttccatgtg

SEQ ID NO: 2686433 - DNA, 25 bp, Homo sapien
gtaagtccgatggtaaaatctcatt

SEQ ID NO: 2686434 - DNA, 25 bp, Homo sapien
gggtttgtgtgcattagtaagtccg

SEQ ID NO: 2686435 - DNA, 25 bp, Homo sapien
tgtgcattagtaagtccgatggtaa

SEQ ID NO: 2686436 - DNA, 25 bp, Homo sapien
ttagtaagtccgatggtaaaatctc

SEQ ID NO: 2686437 - DNA, 25 bp, Homo sapien
gcaagagacgaagtataatactgtc

SEQ ID NO: 2686438 - DNA, 25 bp, Homo sapien
tgcatatgctcgcatcctgtggaat

SEQ ID NO: 2686439 - DNA, 25 bp, Homo sapien
tctcttttcttctgaggatggaata

SEQ ID NO: 2686440 - DNA, 25 bp, Homo sapien
tctgaggatggaataacacaatgtt

SEQ ID NO: 2686441 - DNA, 25 bp, Homo sapien
ttcccaaaagttgccgtatctcctg

SEQ ID NO: 2686442 - DNA, 25 bp, Homo sapien
tcacaggccgtctttcactatccca

SEQ ID NO: 2686443 - DNA, 25 bp, Homo sapien
ctcctgcttgacagggatttccctg

SEQ ID NO: 2686444 - DNA, 25 bp, Homo sapien
aaaaagctatccagggccatagtgc

SEQ ID NO: 2686445 - DNA, 25 bp, Homo sapien
cacattcgaatgacaatgtgacaca

SEQ ID NO: 2686446 - DNA, 25 bp, Homo sapien
cagctgatacacagccagtgtcttc

SEQ ID NO: 2686447 - DNA, 25 bp, Homo sapien
gttgttattgccacagctgatacac

SEQ ID NO: 2686448 - DNA, 25 bp, Homo sapien
gccagagacacattcgaatgacaat

SEQ ID NO: 2686449 - DNA, 25 bp, Homo sapien
attaactgatctttctacaccttct

SEQ ID NO: 2686450 - DNA, 25 bp, Homo sapien
ttaactgatctttctacaccttctt

SEQ ID NO: 2686451 - DNA, 25 bp, Homo sapien
gcagcatctcccttatcgtgcatgt

SEQ ID NO: 2686452 - DNA, 25 bp, Homo sapien
tgtcagtcacctcatgatgtactgg

SEQ ID NO: 2686453 - DNA, 25 bp, Homo sapien
gatgtactgggacattgacgaagca

SEQ ID NO: 2686454 - DNA, 25 bp, Homo sapien
tctcccttatcgtgcatgtcagtca

SEQ ID NO: 2686455 - DNA, 25 bp, Homo sapien
ttttgctgcaacataaatcgaaatt

SEQ ID NO: 2686456 - DNA, 25 bp, Homo sapien
gctgcaacataaatcgaaattgctt

SEQ ID NO: 2686457 - DNA, 25 bp, Homo sapien
gcaacataaatcgaaattgcttcat

SEQ ID NO: 2686458 - DNA, 25 bp, Homo sapien
cttctttttgctgcaacataaatcg

SEQ ID NO: 2686459 - DNA, 25 bp, Homo sapien
gacaaatggtctgtactcagtagca

SEQ ID NO: 2686460 - DNA, 25 bp, Homo sapien
cttttgtggaaatacagtacgagtc

SEQ ID NO: 2686461 - DNA, 25 bp, Homo sapien
tattcattctgtcgcaagaggctgc

SEQ ID NO: 2686462 - DNA, 25 bp, Homo sapien
gcgagcttccctacgcttttgtgga

SEQ ID NO: 2686463 - DNA, 25 bp, Homo sapien
aattgactttgacgtgagcagggac

SEQ ID NO: 2686464 - DNA, 25 bp, Homo sapien
cacatctggctagaacaggacagga

SEQ ID NO: 2686465 - DNA, 25 bp, Homo sapien
tggactacttcataccgactaaggg

SEQ ID NO: 2686466 - DNA, 25 bp, Homo sapien
caggacaggaactaaatcccggata

SEQ ID NO: 2686467 - DNA, 25 bp, Homo sapien
tgaggaaactctgagtctctgtcca

SEQ ID NO: 2686468 - DNA, 25 bp, Homo sapien
cagtttcttatcagcactgaggaaa

SEQ ID NO: 2686469 - DNA, 25 bp, Homo sapien
taattgtctggtaattgccagtttc

SEQ ID NO: 2686470 - DNA, 25 bp, Homo sapien
actgaggaaactctgagtctctgtc

SEQ ID NO: 2686471 - DNA, 25 bp, Homo sapien
acaaatataaaaactctgttcacat

SEQ ID NO: 2686472 - DNA, 25 bp, Homo sapien
taacaaatataaaaactctgttcac

SEQ ID NO: 2686473 - DNA, 25 bp, Homo sapien
aaatataaaaactctgttcacataa

SEQ ID NO: 2686474 - DNA, 25 bp, Homo sapien
aaactctgttcacataaaagctttc

SEQ ID NO: 2686475 - DNA, 25 bp, Homo sapien
ggtggccaacatcatgtcatgacct

SEQ ID NO: 2686476 - DNA, 25 bp, Homo sapien
tgacctgtgccagccgtgttgtaca

SEQ ID NO: 2686477 - DNA, 25 bp, Homo sapien
ctcattgtgatagtaacaaatgata

SEQ ID NO: 2686478 - DNA, 25 bp, Homo sapien
acatcatgtcatgacctgtgccagc

SEQ ID NO: 2686479 - DNA, 25 bp, Homo sapien
cacaaaccatatgtacttcctcttc

SEQ ID NO: 2686480 - DNA, 25 bp, Homo sapien
atcacaaaccatatgtacttcctct

SEQ ID NO: 2686481 - DNA, 25 bp, Homo sapien
tcacaaaccatatgtacttcctctt

SEQ ID NO: 2686482 - DNA, 25 bp, Homo sapien
aatcacaaaccatatgtacttcctc

SEQ ID NO: 2686483 - DNA, 25 bp, Homo sapien
agacaaaatttgatacagtttggtc

SEQ ID NO: 2686484 - DNA, 25 bp, Homo sapien
gcgtgtagatatgctttcattcttc

SEQ ID NO: 2686485 - DNA, 25 bp, Homo sapien
gtttggtcatgttatagcgtgtaga

SEQ ID NO: 2686486 - DNA, 25 bp, Homo sapien
caaaatttgatacagtttggtcatg

SEQ ID NO: 2686487 - DNA, 25 bp, Homo sapien
ccattttctagatggtttggcatcc

SEQ ID NO: 2686488 - DNA, 25 bp, Homo sapien
tcatgcaaggtgaaactaaggaagc

SEQ ID NO: 2686489 - DNA, 25 bp, Homo sapien
taaggtttgacttccattgccaagg

SEQ ID NO: 2686490 - DNA, 25 bp, Homo sapien
cactcttgtggttaactaatgtcta

SEQ ID NO: 2686491 - DNA, 25 bp, Homo sapien
taagcttacactctgctctgagtga

SEQ ID NO: 2686492 - DNA, 25 bp, Homo sapien
tcttactcgccaaggaatcatttca

SEQ ID NO: 2686493 - DNA, 25 bp, Homo sapien
tgaagtggaaatatattcttcccaa

SEQ ID NO: 2686494 - DNA, 25 bp, Homo sapien
tgagtgaagcataagggccccagta

SEQ ID NO: 2686495 - DNA, 25 bp, Homo sapien
cacaggcattggagcggaggcaggc

SEQ ID NO: 2686496 - DNA, 25 bp, Homo sapien
cctggtaacggattcagtgaggtaa

SEQ ID NO: 2686497 - DNA, 25 bp, Homo sapien
ctggtaacggattcagtgaggtaat

SEQ ID NO: 2686498 - DNA, 25 bp, Homo sapien
ggatcacaggcattggagcggaggc

SEQ ID NO: 2686499 - DNA, 25 bp, Homo sapien
tggaaaaccttcatagtgatggcag

SEQ ID NO: 2686500 - DNA, 25 bp, Homo sapien
cccatggaaaaccttcatagtgatg

SEQ ID NO: 2686501 - DNA, 25 bp, Homo sapien
catggaaaaccttcatagtgatggc

SEQ ID NO: 2686502 - DNA, 25 bp, Homo sapien
cttccctgacacccatggaaaacct

SEQ ID NO: 2686503 - DNA, 25 bp, Homo sapien
gtaaaattccaatctttcacgtata

SEQ ID NO: 2686504 - DNA, 25 bp, Homo sapien
aaattccaatctttcacgtatagct

SEQ ID NO: 2686505 - DNA, 25 bp, Homo sapien
ggtgaaatctcagcaaccagtttta

SEQ ID NO: 2686506 - DNA, 25 bp, Homo sapien
gaaatctcagcaaccagttttaaaa

SEQ ID NO: 2686507 - DNA, 25 bp, Homo sapien
cacttcccgttctgccggttttgag

SEQ ID NO: 2686508 - DNA, 25 bp, Homo sapien
aatagtccttttaggctgcctccca

SEQ ID NO: 2686509 - DNA, 25 bp, Homo sapien
cacaacttggcataacacatggaat

SEQ ID NO: 2686510 - DNA, 25 bp, Homo sapien
tactacattgccagccacaacttgg

SEQ ID NO: 2686511 - DNA, 25 bp, Homo sapien
tagcccataacagatctcttcatgg

SEQ ID NO: 2686512 - DNA, 25 bp, Homo sapien
atagcccataacagatctcttcatg

SEQ ID NO: 2686513 - DNA, 25 bp, Homo sapien
ctctttcggtgcttctcagtgagtg

SEQ ID NO: 2686514 - DNA, 25 bp, Homo sapien
ctttcggtgcttctcagtgagtgct

SEQ ID NO: 2686515 - DNA, 25 bp, Homo sapien
aaattctgagtgttggacacttggg

SEQ ID NO: 2686516 - DNA, 25 bp, Homo sapien
taaattctgagtgttggacacttgg

SEQ ID NO: 2686517 - DNA, 25 bp, Homo sapien
gcagatgtctgccaacggtagagac

SEQ ID NO: 2686518 - DNA, 25 bp, Homo sapien
gccaagcagatgtctgccaacggta

SEQ ID NO: 2686519 - DNA, 25 bp, Homo sapien
tttgtgggtatcgttagagaggcca

SEQ ID NO: 2686520 - DNA, 25 bp, Homo sapien
gattataggatatttgtgggtatcg

SEQ ID NO: 2686521 - DNA, 25 bp, Homo sapien
gagcattttggtatgagtctttagg

SEQ ID NO: 2686522 - DNA, 25 bp, Homo sapien
tacgagttctaggagcattttggta

SEQ ID NO: 2686523 - DNA, 25 bp, Homo sapien
aagaagtgctggattttgtgaaatg

SEQ ID NO: 2686524 - DNA, 25 bp, Homo sapien
gatgatcgtgtgattttttggttta

SEQ ID NO: 2686525 - DNA, 25 bp, Homo sapien
tcgggtcttaaatctaagtctttga

SEQ ID NO: 2686526 - DNA, 25 bp, Homo sapien
gatgcatattttgcgaagttttttc

SEQ ID NO: 2686527 - DNA, 25 bp, Homo sapien
gcatattttgcgaagttttttctcc

SEQ ID NO: 2686528 - DNA, 25 bp, Homo sapien
tcagatgcatattttgcgaagtttt

SEQ ID NO: 2686529 - DNA, 25 bp, Homo sapien
tctttgttccagctgactgttccat

SEQ ID NO: 2686530 - DNA, 25 bp, Homo sapien
tatcatttctgtacattatccctgg

SEQ ID NO: 2686531 - DNA, 25 bp, Homo sapien
tatccctggattcctctttgttcca

SEQ ID NO: 2686532 - DNA, 25 bp, Homo sapien
tagtggtcccatcactcatactatc

SEQ ID NO: 2686533 - DNA, 25 bp, Homo sapien
ataagaggaatgactgcaagccagt

SEQ ID NO: 2686534 - DNA, 25 bp, Homo sapien
gggataagaggaatgactgcaagcc

SEQ ID NO: 2686535 - DNA, 25 bp, Homo sapien
tggggataagaggaatgactgcaag

SEQ ID NO: 2686536 - DNA, 25 bp, Homo sapien
gataagaggaatgactgcaagccag

SEQ ID NO: 2686537 - DNA, 25 bp, Homo sapien
catccttgtggatcaggcacagaag

SEQ ID NO: 2686538 - DNA, 25 bp, Homo sapien
tcaggcacagaagtgctgacaaaat

SEQ ID NO: 2686539 - DNA, 25 bp, Homo sapien
cagaagtgctgacaaaatattgatg

SEQ ID NO: 2686540 - DNA, 25 bp, Homo sapien
tggatcaggcacagaagtgctgaca

SEQ ID NO: 2686541 - DNA, 25 bp, Homo sapien
ttcagtgtgtatcccgtgtcatcta

SEQ ID NO: 2686542 - DNA, 25 bp, Homo sapien
gtgtgtatcccgtgtcatctacaaa

SEQ ID NO: 2686543 - DNA, 25 bp, Homo sapien
gtgtcatctacaaaacccctgtcct

SEQ ID NO: 2686544 - DNA, 25 bp, Homo sapien
gtatcccgtgtcatctacaaaaccc

SEQ ID NO: 2686545 - DNA, 25 bp, Homo sapien
gggtcacacaggctgattgccatgt

SEQ ID NO: 2686546 - DNA, 25 bp, Homo sapien
taacactagtacttcctccagcagg

SEQ ID NO: 2686547 - DNA, 25 bp, Homo sapien
ccaaggcgaaaggtaaagtcactct

SEQ ID NO: 2686548 - DNA, 25 bp, Homo sapien
gagtcctgactcaggtctctccaga

SEQ ID NO: 2686549 - DNA, 25 bp, Homo sapien
gcagacatcaatcttcaatgagagt

SEQ ID NO: 2686550 - DNA, 25 bp, Homo sapien
catggaatctagagacagatggtgg

SEQ ID NO: 2686551 - DNA, 25 bp, Homo sapien
gcattataatcccatggaatctaga

SEQ ID NO: 2686552 - DNA, 25 bp, Homo sapien
tgcaaagttattgctgacagcatcc

SEQ ID NO: 2686553 - DNA, 25 bp, Homo sapien
acttcacatggtcagtcatactttg

SEQ ID NO: 2686554 - DNA, 25 bp, Homo sapien
ggttctgacaattgcctgtccatct

SEQ ID NO: 2686555 - DNA, 25 bp, Homo sapien
gtcgtttggttctgacaattgcctg

SEQ ID NO: 2686556 - DNA, 25 bp, Homo sapien
tcagtcatactttgtcgtttggttc

SEQ ID NO: 2686557 - DNA, 25 bp, Homo sapien
aaatgtttttctgggcttgatcctt

SEQ ID NO: 2686558 - DNA, 25 bp, Homo sapien
atgtttttctgggcttgatccttac

SEQ ID NO: 2686559 - DNA, 25 bp, Homo sapien
aaaatgtttttctgggcttgatcct

SEQ ID NO: 2686560 - DNA, 25 bp, Homo sapien
aatgtttttctgggcttgatcctta

SEQ ID NO: 2686561 - DNA, 25 bp, Homo sapien
tcagtacagcccagtaaagagacag

SEQ ID NO: 2686562 - DNA, 25 bp, Homo sapien
gcccagtaaagagacagagactttg

SEQ ID NO: 2686563 - DNA, 25 bp, Homo sapien
acagcccagtaaagagacagagact

SEQ ID NO: 2686564 - DNA, 25 bp, Homo sapien
tgttcttcagtacagcccagtaaag

SEQ ID NO: 2686565 - DNA, 25 bp, Homo sapien
cacttgaatccctaattgctttctt

SEQ ID NO: 2686566 - DNA, 25 bp, Homo sapien
gatctcatctttatcccaattagta

SEQ ID NO: 2686567 - DNA, 25 bp, Homo sapien
ctttctactgaccatacctctttct

SEQ ID NO: 2686568 - DNA, 25 bp, Homo sapien
tttctttctactgaccatacctctt

SEQ ID NO: 2686569 - DNA, 25 bp, Homo sapien
gctgtgccgtaaatggaaaccttga

SEQ ID NO: 2686570 - DNA, 25 bp, Homo sapien
cattccagactacagatctcagtgg

SEQ ID NO: 2686571 - DNA, 25 bp, Homo sapien
ctttcggagtccgtgcagctgtgcc

SEQ ID NO: 2686572 - DNA, 25 bp, Homo sapien
tctcagtgggtacagagctctggct

SEQ ID NO: 2686573 - DNA, 25 bp, Homo sapien
ctgatcagcatgatgttatcgatga

SEQ ID NO: 2686574 - DNA, 25 bp, Homo sapien
gatcagcatgatgttatcgatgaaa

SEQ ID NO: 2686575 - DNA, 25 bp, Homo sapien
gcatgatgttatcgatgaaatggct

SEQ ID NO: 2686576 - DNA, 25 bp, Homo sapien
gttatcgatgaaatggcttcatgtg

SEQ ID NO: 2686577 - DNA, 25 bp, Homo sapien
gactccttcaaacagctcttgtcca

SEQ ID NO: 2686578 - DNA, 25 bp, Homo sapien
ccagctacagtcttcttttacctgg

SEQ ID NO: 2686579 - DNA, 25 bp, Homo sapien
ctggactccttcaaacagctcttgt

SEQ ID NO: 2686580 - DNA, 25 bp, Homo sapien
ctcaactactaacaatgtggtacca

SEQ ID NO: 2686581 - DNA, 25 bp, Homo sapien
ttcctttatcacaccatatccagaa

SEQ ID NO: 2686582 - DNA, 25 bp, Homo sapien
ccatatccagaagtggcatgccatt

SEQ ID NO: 2686583 - DNA, 25 bp, Homo sapien
atatccagaagtggcatgccatttc

SEQ ID NO: 2686584 - DNA, 25 bp, Homo sapien
tccagaagtggcatgccatttctgc

SEQ ID NO: 2686585 - DNA, 25 bp, Homo sapien
gtagcttggggcttgcttgctttgg

SEQ ID NO: 2686586 - DNA, 25 bp, Homo sapien
gcttggggcttgcttgctttggggg

SEQ ID NO: 2686587 - DNA, 25 bp, Homo sapien
gcttgcttgctttgggggaacaact

SEQ ID NO: 2686588 - DNA, 25 bp, Homo sapien
cttgcttgctttgggggaacaactt

SEQ ID NO: 2686589 - DNA, 25 bp, Homo sapien
ctctgactgatgaagcggacagtca

SEQ ID NO: 2686590 - DNA, 25 bp, Homo sapien
tctgactgatgaagcggacagtcat

SEQ ID NO: 2686591 - DNA, 25 bp, Homo sapien
tctcctgaaaattgtactggaggtc

SEQ ID NO: 2686592 - DNA, 25 bp, Homo sapien
ggaggtggatgtccattcttgccac

SEQ ID NO: 2686593 - DNA, 25 bp, Homo sapien
atggtgggaggtggatgtccattct

SEQ ID NO: 2686594 - DNA, 25 bp, Homo sapien
cacttctcctgaaaattgtactgga

SEQ ID NO: 2686595 - DNA, 25 bp, Homo sapien
tttggtatcaatgtgccagcatctg

SEQ ID NO: 2686596 - DNA, 25 bp, Homo sapien
tggaggttgggaagtttggtatcaa

SEQ ID NO: 2686597 - DNA, 25 bp, Homo sapien
ggaagtttggtatcaatgtgccagc

SEQ ID NO: 2686598 - DNA, 25 bp, Homo sapien
ttgggaagtttggtatcaatgtgcc

SEQ ID NO: 2686599 - DNA, 25 bp, Homo sapien
gatggaaaggctaaaggcatgcgaa

SEQ ID NO: 2686600 - DNA, 25 bp, Homo sapien
tagtggtacctgttgatacttggca

SEQ ID NO: 2686601 - DNA, 25 bp, Homo sapien
ctaaaggcatgcgaatgggcccaca

SEQ ID NO: 2686602 - DNA, 25 bp, Homo sapien
ttctcatagtggtacctgttgatac

SEQ ID NO: 2686603 - DNA, 25 bp, Homo sapien
gtatcattatgaatacgcagagatg

SEQ ID NO: 2686604 - DNA, 25 bp, Homo sapien
ttatgtatcattatgaatacgcaga

SEQ ID NO: 2686605 - DNA, 25 bp, Homo sapien
tgtatcattatgaatacgcagagat

SEQ ID NO: 2686606 - DNA, 25 bp, Homo sapien
tatgtatcattatgaatacgcagag

SEQ ID NO: 2686607 - DNA, 25 bp, Homo sapien
ttcttttaatgatattgcttcttca

SEQ ID NO: 2686608 - DNA, 25 bp, Homo sapien
catttttctttttaagtgcttcata

SEQ ID NO: 2686609 - DNA, 25 bp, Homo sapien
tctttaattcttttaatgatattgc

SEQ ID NO: 2686610 - DNA, 25 bp, Homo sapien
tcctttttatcctctataacaaaca

SEQ ID NO: 2686611 - DNA, 25 bp, Homo sapien
cttagcattgcttatcactatggga

SEQ ID NO: 2686612 - DNA, 25 bp, Homo sapien
tatcactatgggagataagcctctg

SEQ ID NO: 2686613 - DNA, 25 bp, Homo sapien
caggttgttcttgggtatggagtac

SEQ ID NO: 2686614 - DNA, 25 bp, Homo sapien
tttcaggttgttcttgggtatggag

SEQ ID NO: 2686615 - DNA, 25 bp, Homo sapien
aacacaagctgataggagtaacttc

SEQ ID NO: 2686616 - DNA, 25 bp, Homo sapien
caagattcgtttctcgccatgagag

SEQ ID NO: 2686617 - DNA, 25 bp, Homo sapien
catgagaggtccctatccgattttc

SEQ ID NO: 2686618 - DNA, 25 bp, Homo sapien
cctgaatccattgggaaagggcatg

SEQ ID NO: 2686619 - DNA, 25 bp, Homo sapien
gctttcactgggttaacaaatgcca

SEQ ID NO: 2686620 - DNA, 25 bp, Homo sapien
tcacatcagtctgtttcaattgctc

SEQ ID NO: 2686621 - DNA, 25 bp, Homo sapien
tgctcctcacccctgtataatttgg

SEQ ID NO: 2686622 - DNA, 25 bp, Homo sapien
cttggatggaggaaaagccccggtg

SEQ ID NO: 2686623 - DNA, 25 bp, Homo sapien
gacaatccaaaacgatttcctcctc

SEQ ID NO: 2686624 - DNA, 25 bp, Homo sapien
ccaggccacgacaatccaaaacgat

SEQ ID NO: 2686625 - DNA, 25 bp, Homo sapien
gctgcacaaaagcttcccaggccac

SEQ ID NO: 2686626 - DNA, 25 bp, Homo sapien
caaaacgatttcctcctctgaagtt

SEQ ID NO: 2686627 - DNA, 25 bp, Homo sapien
actatatatttcttgaacgggaact

SEQ ID NO: 2686628 - DNA, 25 bp, Homo sapien
tcacaatagccgtgttcactatata

SEQ ID NO: 2686629 - DNA, 25 bp, Homo sapien
gaacttgcgcactgcttcccatttg

SEQ ID NO: 2686630 - DNA, 25 bp, Homo sapien
ccatttgccttcaatcactagcaga

SEQ ID NO: 2686631 - DNA, 25 bp, Homo sapien
gagatcctgaactataaggaagagg

SEQ ID NO: 2686632 - DNA, 25 bp, Homo sapien
tcttggatgcgtagattcttttcac

SEQ ID NO: 2686633 - DNA, 25 bp, Homo sapien
aagaggattgttctgttacgctttc

SEQ ID NO: 2686634 - DNA, 25 bp, Homo sapien
aagacttggtcacagcgactggata

SEQ ID NO: 2686635 - DNA, 25 bp, Homo sapien
aatccagagacctgatatggtccca

SEQ ID NO: 2686636 - DNA, 25 bp, Homo sapien
tcacaggggaccagtttgttagcac

SEQ ID NO: 2686637 - DNA, 25 bp, Homo sapien
tgtgccaaggctaatcgactgtcaa

SEQ ID NO: 2686638 - DNA, 25 bp, Homo sapien
tgttagcactgtgaccaatccagag

SEQ ID NO: 2686639 - DNA, 25 bp, Homo sapien
ctacaatagtgaacaaaaacccagc

SEQ ID NO: 2686640 - DNA, 25 bp, Homo sapien
aaaacccagcactcgacatttctat

SEQ ID NO: 2686641 - DNA, 25 bp, Homo sapien
aaacccagcactcgacatttctatg

SEQ ID NO: 2686642 - DNA, 25 bp, Homo sapien
ggaagtcccagtgactttgaacaaa

SEQ ID NO: 2686643 - DNA, 25 bp, Homo sapien
aacaaaatgtacccaagtgcctctt

SEQ ID NO: 2686644 - DNA, 25 bp, Homo sapien
agtcccagtgactttgaacaaaatg

SEQ ID NO: 2686645 - DNA, 25 bp, Homo sapien
acaaaatgtacccaagtgcctcttc

SEQ ID NO: 2686646 - DNA, 25 bp, Homo sapien
tttgtagacactgccgaaatcttgc

SEQ ID NO: 2686647 - DNA, 25 bp, Homo sapien
cacgctacatcagaccaaatgttca

SEQ ID NO: 2686648 - DNA, 25 bp, Homo sapien
agcagacgcagctggttgttgcagc

SEQ ID NO: 2686649 - DNA, 25 bp, Homo sapien
tacacgactgagctggctgatggct

SEQ ID NO: 2686650 - DNA, 25 bp, Homo sapien
gaacattccctatgaaacagaccag

SEQ ID NO: 2686651 - DNA, 25 bp, Homo sapien
tcccagtgaagaggtaacacacagt

SEQ ID NO: 2686652 - DNA, 25 bp, Homo sapien
tagaacggcatgctttcatctcaag

SEQ ID NO: 2686653 - DNA, 25 bp, Homo sapien
taataacaccttagagggcacacaa

SEQ ID NO: 2686654 - DNA, 25 bp, Homo sapien
ctgaggaggaatgcagctgtgacca

SEQ ID NO: 2686655 - DNA, 25 bp, Homo sapien
tacagcaacccaggaccctacccag

SEQ ID NO: 2686656 - DNA, 25 bp, Homo sapien
tgaggaggaatgcagctgtgaccat

SEQ ID NO: 2686657 - DNA, 25 bp, Homo sapien
gaccctacccagctgaggaggaatg

SEQ ID NO: 2686658 - DNA, 25 bp, Homo sapien
gctcacacacgatgcctgagcaggt

SEQ ID NO: 2686659 - DNA, 25 bp, Homo sapien
aggctcacacacgatgcctgagcag

SEQ ID NO: 2686660 - DNA, 25 bp, Homo sapien
ggctcacacacgatgcctgagcagg

SEQ ID NO: 2686661 - DNA, 25 bp, Homo sapien
caagagcggtacgaagctctgagct

SEQ ID NO: 2686662 - DNA, 25 bp, Homo sapien
catgtaacaaaacaagagcggtacg

SEQ ID NO: 2686663 - DNA, 25 bp, Homo sapien
gcttgagtcagctggtccataactc

SEQ ID NO: 2686664 - DNA, 25 bp, Homo sapien
ctgagcttgagtcagctggtccata

SEQ ID NO: 2686665 - DNA, 25 bp, Homo sapien
catgactgggtaaatcctgtcagac

SEQ ID NO: 2686666 - DNA, 25 bp, Homo sapien
tgtcagacagaaagtcccagtcgtt

SEQ ID NO: 2686667 - DNA, 25 bp, Homo sapien
acagtcagatactgcgccagcctgg

SEQ ID NO: 2686668 - DNA, 25 bp, Homo sapien
cccagtcgttcaaacagtcagatac

SEQ ID NO: 2686669 - DNA, 25 bp, Homo sapien
caatcactggtgaggtcagctggta

SEQ ID NO: 2686670 - DNA, 25 bp, Homo sapien
ttacacgttattggcggcttttcca

SEQ ID NO: 2686671 - DNA, 25 bp, Homo sapien
gacaatcccggaaagtcagttcact

SEQ ID NO: 2686672 - DNA, 25 bp, Homo sapien
caggcaatcccaatgttacacgtta

SEQ ID NO: 2686673 - DNA, 25 bp, Homo sapien
cagactgtgatcctgtgctagccag

SEQ ID NO: 2686674 - DNA, 25 bp, Homo sapien
caaagtagagcagtttctagctgct

SEQ ID NO: 2686675 - DNA, 25 bp, Homo sapien
tagcaaacatatagcatctgtcttc

SEQ ID NO: 2686676 - DNA, 25 bp, Homo sapien
caatgttacggtctattgtttccat

SEQ ID NO: 2686677 - DNA, 25 bp, Homo sapien
ctggtggaaacgctacagaaaagct

SEQ ID NO: 2686678 - DNA, 25 bp, Homo sapien
ggtggaaacgctacagaaaagctct

SEQ ID NO: 2686679 - DNA, 25 bp, Homo sapien
tggtggaaacgctacagaaaagctc

SEQ ID NO: 2686680 - DNA, 25 bp, Homo sapien
tgtggttaaccgctaagacatcccg

SEQ ID NO: 2686681 - DNA, 25 bp, Homo sapien
tcttgaccccgatcccagtgtaatg

SEQ ID NO: 2686682 - DNA, 25 bp, Homo sapien
gggatgacactgaaccccattctgc

SEQ ID NO: 2686683 - DNA, 25 bp, Homo sapien
tctccattggtatccaataaagcat

SEQ ID NO: 2686684 - DNA, 25 bp, Homo sapien
tttcttcacctttatttagatcttg

SEQ ID NO: 2686685 - DNA, 25 bp, Homo sapien
cttttcttcacctttatttagatct

SEQ ID NO: 2686686 - DNA, 25 bp, Homo sapien
ttcttcacctttatttagatcttgc

SEQ ID NO: 2686687 - DNA, 25 bp, Homo sapien
tgtaacccatgaatagcacttgtgt

SEQ ID NO: 2686688 - DNA, 25 bp, Homo sapien
gggctgcttctacacgtttcgtatt

SEQ ID NO: 2686689 - DNA, 25 bp, Homo sapien
tacagctatggagtgtgtaacccat

SEQ ID NO: 2686690 - DNA, 25 bp, Homo sapien
cctccaggcgctctatttgcaagta

SEQ ID NO: 2686691 - DNA, 25 bp, Homo sapien
cacgactccttgtgctggcagccat

SEQ ID NO: 2686692 - DNA, 25 bp, Homo sapien
cagtgattggaagtaatagtcttag

SEQ ID NO: 2686693 - DNA, 25 bp, Homo sapien
gtttcagtgattggaagtaatagtc

SEQ ID NO: 2686694 - DNA, 25 bp, Homo sapien
ttggaagtaatagtcttagagctat

SEQ ID NO: 2686695 - DNA, 25 bp, Homo sapien
aactaatgtttcagtgattggaagt

SEQ ID NO: 2686696 - DNA, 25 bp, Homo sapien
atccaactgatggtaatggaaatgt

SEQ ID NO: 2686697 - DNA, 25 bp, Homo sapien
ctgtctttgcaatgctttcaaatag

SEQ ID NO: 2686698 - DNA, 25 bp, Homo sapien
gatccaactgatggtaatggaaatg

SEQ ID NO: 2686699 - DNA, 25 bp, Homo sapien
tgatccaactgatggtaatggaaat

SEQ ID NO: 2686700 - DNA, 25 bp, Homo sapien
tagaattcacaaatgttagacacat

SEQ ID NO: 2686701 - DNA, 25 bp, Homo sapien
ttagaattcacaaatgttagacaca

SEQ ID NO: 2686702 - DNA, 25 bp, Homo sapien
tcttgtgcctgaacttctgtctcct

SEQ ID NO: 2686703 - DNA, 25 bp, Homo sapien
tactgacgcagatcctcacaccagt

SEQ ID NO: 2686704 - DNA, 25 bp, Homo sapien
ccttgctattttagggtcctgatta

SEQ ID NO: 2686705 - DNA, 25 bp, Homo sapien
tgctcgtgccttaggctccttgcta

SEQ ID NO: 2686706 - DNA, 25 bp, Homo sapien
aaaggaatgagaagattggctgcct

SEQ ID NO: 2686707 - DNA, 25 bp, Homo sapien
gattggctgcctgatacagcagtac

SEQ ID NO: 2686708 - DNA, 25 bp, Homo sapien
tcataaagcccaaagaactagagaa

SEQ ID NO: 2686709 - DNA, 25 bp, Homo sapien
ctagagaaggtgtcggagacagttc

SEQ ID NO: 2686710 - DNA, 25 bp, Homo sapien
gagacagttctgtatccccaaatcc

SEQ ID NO: 2686711 - DNA, 25 bp, Homo sapien
aatcccccagaaggaatgtgaaagt

SEQ ID NO: 2686712 - DNA, 25 bp, Homo sapien
tggagaggaagactgatgacataga

SEQ ID NO: 2686713 - DNA, 25 bp, Homo sapien
cttggaatccctgagaatgttttgg

SEQ ID NO: 2686714 - DNA, 25 bp, Homo sapien
ttgaaacatgaaaacttggaatccc

SEQ ID NO: 2686715 - DNA, 25 bp, Homo sapien
gcaaaagctcaacaactgcagcaaa

SEQ ID NO: 2686716 - DNA, 25 bp, Homo sapien
gctggcagtgcgaaacattgcttta

SEQ ID NO: 2686717 - DNA, 25 bp, Homo sapien
ccaaataacatgaaaggttccagtg

SEQ ID NO: 2686718 - DNA, 25 bp, Homo sapien
gcctggctggcgcatactggctgct

SEQ ID NO: 2686719 - DNA, 25 bp, Homo sapien
ctaagactgtgattctagcctggct

SEQ ID NO: 2686720 - DNA, 25 bp, Homo sapien
ctttctcccaattgtatagtcattt

SEQ ID NO: 2686721 - DNA, 25 bp, Homo sapien
tttctcccaattgtatagtcatttt

SEQ ID NO: 2686722 - DNA, 25 bp, Homo sapien
gcagggtatactgccgctgcccttt

SEQ ID NO: 2686723 - DNA, 25 bp, Homo sapien
gttgtacctgtagaccttgcatctc

SEQ ID NO: 2686724 - DNA, 25 bp, Homo sapien
acctgtagaccttgcatctctgagg

SEQ ID NO: 2686725 - DNA, 25 bp, Homo sapien
cattcatgtgggcagggtatactgc

SEQ ID NO: 2686726 - DNA, 25 bp, Homo sapien
gctggcctaactgtggatttgtgta

SEQ ID NO: 2686727 - DNA, 25 bp, Homo sapien
agtttagtctctgtccagcctgctg

SEQ ID NO: 2686728 - DNA, 25 bp, Homo sapien
taggttgttgtctgagcatagcaag

SEQ ID NO: 2686729 - DNA, 25 bp, Homo sapien
tggagtaggagtttagtctctgtcc

SEQ ID NO: 2686730 - DNA, 25 bp, Homo sapien
ggaacttgggaaactctattgtcac

SEQ ID NO: 2686731 - DNA, 25 bp, Homo sapien
gaatagcaatgcgtcaaggtgactg

SEQ ID NO: 2686732 - DNA, 25 bp, Homo sapien
tctgtccaatcttctacccatggaa

SEQ ID NO: 2686733 - DNA, 25 bp, Homo sapien
tctattgtcactttcttccgagggt

SEQ ID NO: 2686734 - DNA, 25 bp, Homo sapien
tctgcattgaggtgctgagctgact

SEQ ID NO: 2686735 - DNA, 25 bp, Homo sapien
caaagaagctggctcgggtctgagc

SEQ ID NO: 2686736 - DNA, 25 bp, Homo sapien
ggtctgagctgtgtaattccgccct

SEQ ID NO: 2686737 - DNA, 25 bp, Homo sapien
gagctgactcccacggctttttaag

SEQ ID NO: 2686738 - DNA, 25 bp, Homo sapien
ttacaatccatggctagagaaacat

SEQ ID NO: 2686739 - DNA, 25 bp, Homo sapien
agttacaatccatggctagagaaac

SEQ ID NO: 2686740 - DNA, 25 bp, Homo sapien
gttacaatccatggctagagaaaca

SEQ ID NO: 2686741 - DNA, 25 bp, Homo sapien
aagacacacccacttctgcggagcc

SEQ ID NO: 2686742 - DNA, 25 bp, Homo sapien
tcaagacagtacaagaatactgcgt

SEQ ID NO: 2686743 - DNA, 25 bp, Homo sapien
tactgcgtgcaaaagtatctcctca

SEQ ID NO: 2686744 - DNA, 25 bp, Homo sapien
tcataggaacttcaagacagtacaa

SEQ ID NO: 2686745 - DNA, 25 bp, Homo sapien
ctttccatttgccagagaactgatc

SEQ ID NO: 2686746 - DNA, 25 bp, Homo sapien
attgttgtgctgtagaattctccac

SEQ ID NO: 2686747 - DNA, 25 bp, Homo sapien
tccccagataccaagattattgaaa

SEQ ID NO: 2686748 - DNA, 25 bp, Homo sapien
gattgttgtgctgtagaattctcca

SEQ ID NO: 2686749 - DNA, 25 bp, Homo sapien
gccaatctttacctcccctgtggga

SEQ ID NO: 2686750 - DNA, 25 bp, Homo sapien
cccatgtgggattgacattaggaaa

SEQ ID NO: 2686751 - DNA, 25 bp, Homo sapien
ggtctagctgttctgctaaaccaag

SEQ ID NO: 2686752 - DNA, 25 bp, Homo sapien
gactccttgtctgggataattcccc

SEQ ID NO: 2686753 - DNA, 25 bp, Homo sapien
ggtagtagcatacacagtactcctc

SEQ ID NO: 2686754 - DNA, 25 bp, Homo sapien
caggaagctatgcagagcatacata

SEQ ID NO: 2686755 - DNA, 25 bp, Homo sapien
tacatgtagtcatatgacaggaagc

SEQ ID NO: 2686756 - DNA, 25 bp, Homo sapien
aaatgacaccagtgactgaatggac

SEQ ID NO: 2686757 - DNA, 25 bp, Homo sapien
ggccacttctctgaggggctcttca

SEQ ID NO: 2686758 - DNA, 25 bp, Homo sapien
ccacttctctgaggggctcttcact

SEQ ID NO: 2686759 - DNA, 25 bp, Homo sapien
ggggccacttctctgaggggctctt

SEQ ID NO: 2686760 - DNA, 25 bp, Homo sapien
gccacttctctgaggggctcttcac

SEQ ID NO: 2686761 - DNA, 25 bp, Homo sapien
tgctgatgattcctgtccttactgc

SEQ ID NO: 2686762 - DNA, 25 bp, Homo sapien
gagaggacctaggagaatcttctgc

SEQ ID NO: 2686763 - DNA, 25 bp, Homo sapien
aaggaaaggtgatagaatctatatc

SEQ ID NO: 2686764 - DNA, 25 bp, Homo sapien
aatctatatcataagtctggagagg

SEQ ID NO: 2686765 - DNA, 25 bp, Homo sapien
tctgaactaagaacaccaaacttgc

SEQ ID NO: 2686766 - DNA, 25 bp, Homo sapien
tgggtctgaactaagaacaccaaac

SEQ ID NO: 2686767 - DNA, 25 bp, Homo sapien
ctaagaacaccaaacttgcttgcat

SEQ ID NO: 2686768 - DNA, 25 bp, Homo sapien
cttagttgggtctgaactaagaaca

SEQ ID NO: 2686769 - DNA, 25 bp, Homo sapien
caactcgctgttggccctgtcttct

SEQ ID NO: 2686770 - DNA, 25 bp, Homo sapien
cacatggctgtacgcttccactgag

SEQ ID NO: 2686771 - DNA, 25 bp, Homo sapien
tatcttgtgatatgccagctgccaa

SEQ ID NO: 2686772 - DNA, 25 bp, Homo sapien
gtttgtctgactgcactacctgata

SEQ ID NO: 2686773 - DNA, 25 bp, Homo sapien
tttgggcaatatgtgtattccacct

SEQ ID NO: 2686774 - DNA, 25 bp, Homo sapien
tggatgcttgctgtatccacgtatt

SEQ ID NO: 2686775 - DNA, 25 bp, Homo sapien
cttccgtgagtttataatccaaact

SEQ ID NO: 2686776 - DNA, 25 bp, Homo sapien
gctgtatccacgtatttcttcgtgg

SEQ ID NO: 2686777 - DNA, 25 bp, Homo sapien
cactcagatgaaccatgcagttgat

SEQ ID NO: 2686778 - DNA, 25 bp, Homo sapien
cgcactcagatgaaccatgcagttg

SEQ ID NO: 2686779 - DNA, 25 bp, Homo sapien
gcactcagatgaaccatgcagttga

SEQ ID NO: 2686780 - DNA, 25 bp, Homo sapien
ggagcgtgatttgataaacatttgc

SEQ ID NO: 2686781 - DNA, 25 bp, Homo sapien
agggccttcacgaaaccttggagcg

SEQ ID NO: 2686782 - DNA, 25 bp, Homo sapien
cgaaaccttggagcgtgatttgata

SEQ ID NO: 2686783 - DNA, 25 bp, Homo sapien
catttcatctttagttcctcctctc

SEQ ID NO: 2686784 - DNA, 25 bp, Homo sapien
ttttccctcctggtttgagactcac

SEQ ID NO: 2686785 - DNA, 25 bp, Homo sapien
tttttccctcctggtttgagactca

SEQ ID NO: 2686786 - DNA, 25 bp, Homo sapien
ctgatcccaaggctattttcaacac

SEQ ID NO: 2686787 - DNA, 25 bp, Homo sapien
ctctgatcccaaggctattttcaac

SEQ ID NO: 2686788 - DNA, 25 bp, Homo sapien
tgatcccaaggctattttcaacaca

SEQ ID NO: 2686789 - DNA, 25 bp, Homo sapien
atcccaaggctattttcaacacaga

SEQ ID NO: 2686790 - DNA, 25 bp, Homo sapien
ccgctaaatgcttggttggtccctg

SEQ ID NO: 2686791 - DNA, 25 bp, Homo sapien
gggagatagagcatgaaaacactgg

SEQ ID NO: 2686792 - DNA, 25 bp, Homo sapien
cactggccgctaaatgcttggttgg

SEQ ID NO: 2686793 - DNA, 25 bp, Homo sapien
catgaaaacactggccgctaaatgc

SEQ ID NO: 2686794 - DNA, 25 bp, Homo sapien
ttccgttttgaatcgttcaacttca

SEQ ID NO: 2686795 - DNA, 25 bp, Homo sapien
cagtggatttgctcatggtggggtg

SEQ ID NO: 2686796 - DNA, 25 bp, Homo sapien
ttgaatcgttcaacttcacactgct

SEQ ID NO: 2686797 - DNA, 25 bp, Homo sapien
ccgttttgaatcgttcaacttcaca

SEQ ID NO: 2686798 - DNA, 25 bp, Homo sapien
ttaaatcacaagtgtagcctacagg

SEQ ID NO: 2686799 - DNA, 25 bp, Homo sapien
agtctgctctatggctgtctgctgg

SEQ ID NO: 2686800 - DNA, 25 bp, Homo sapien
cctacagggtgattccatgttgcag

SEQ ID NO: 2686801 - DNA, 25 bp, Homo sapien
agtaagtgccgctttcctgggcagc

SEQ ID NO: 2686802 - DNA, 25 bp, Homo sapien
gcaaaatcaatctggtaaactgaat

SEQ ID NO: 2686803 - DNA, 25 bp, Homo sapien
tccaaaccacatgactctttagtag

SEQ ID NO: 2686804 - DNA, 25 bp, Homo sapien
tagtagtacttaattgatcatggga

SEQ ID NO: 2686805 - DNA, 25 bp, Homo sapien
agcaaaatcaatctggtaaactgaa

SEQ ID NO: 2686806 - DNA, 25 bp, Homo sapien
tatataggtgaggagatcactggca

SEQ ID NO: 2686807 - DNA, 25 bp, Homo sapien
caaagccttgataagtaactgtata

SEQ ID NO: 2686808 - DNA, 25 bp, Homo sapien
ttttctccatcaaagccttgataag

SEQ ID NO: 2686809 - DNA, 25 bp, Homo sapien
gtaactgtatataggtgaggagatc

SEQ ID NO: 2686810 - DNA, 25 bp, Homo sapien
gtcagatctcaacaggacccacagg

SEQ ID NO: 2686811 - DNA, 25 bp, Homo sapien
cagggccaattgtaaaatcaaatct

SEQ ID NO: 2686812 - DNA, 25 bp, Homo sapien
caaccagacacataggtagagtcag

SEQ ID NO: 2686813 - DNA, 25 bp, Homo sapien
gcaaaatgagtccaattccccttat

SEQ ID NO: 2686814 - DNA, 25 bp, Homo sapien
cacgagtggattcagctttgaggat

SEQ ID NO: 2686815 - DNA, 25 bp, Homo sapien
gagtggattcagctttgaggatgca

SEQ ID NO: 2686816 - DNA, 25 bp, Homo sapien
caccacgagtggattcagctttgag

SEQ ID NO: 2686817 - DNA, 25 bp, Homo sapien
ctggaacaccacgagtggattcagc

SEQ ID NO: 2686818 - DNA, 25 bp, Homo sapien
ccaatatcaaggtaatggtgtggag

SEQ ID NO: 2686819 - DNA, 25 bp, Homo sapien
aatggaccaaatttcagggcctgac

SEQ ID NO: 2686820 - DNA, 25 bp, Homo sapien
tagaatggctttgctagcacccagg

SEQ ID NO: 2686821 - DNA, 25 bp, Homo sapien
cacccaggtaacaatgccaatatca

SEQ ID NO: 2686822 - DNA, 25 bp, Homo sapien
tttcagacacatcagcatgattatt

SEQ ID NO: 2686823 - DNA, 25 bp, Homo sapien
cagacacatcagcatgattatttgc

SEQ ID NO: 2686824 - DNA, 25 bp, Homo sapien
tcagacacatcagcatgattatttg

SEQ ID NO: 2686825 - DNA, 25 bp, Homo sapien
gacacatcagcatgattatttgcta

SEQ ID NO: 2686826 - DNA, 25 bp, Homo sapien
cattatctgatatccttgaattagg

SEQ ID NO: 2686827 - DNA, 25 bp, Homo sapien
cgtaccattatctgatatccttgaa

SEQ ID NO: 2686828 - DNA, 25 bp, Homo sapien
gccacgtaccattatctgatatcct

SEQ ID NO: 2686829 - DNA, 25 bp, Homo sapien
atgccacgtaccattatctgatatc

SEQ ID NO: 2686830 - DNA, 25 bp, Homo sapien
ctgatcatcaggcaggaacactgtg

SEQ ID NO: 2686831 - DNA, 25 bp, Homo sapien
ctgcaatttggacagcccaaactga

SEQ ID NO: 2686832 - DNA, 25 bp, Homo sapien
ttggacagcccaaactgatcatcag

SEQ ID NO: 2686833 - DNA, 25 bp, Homo sapien
gcccaaactgatcatcaggcaggaa

SEQ ID NO: 2686834 - DNA, 25 bp, Homo sapien
tacagacacatactcataccctgaa

SEQ ID NO: 2686835 - DNA, 25 bp, Homo sapien
ttctcatgtcttgccaaccatacag

SEQ ID NO: 2686836 - DNA, 25 bp, Homo sapien
tgtggctttcggctcctctaggtga

SEQ ID NO: 2686837 - DNA, 25 bp, Homo sapien
aaggagttccgaagatgtggctttc

SEQ ID NO: 2686838 - DNA, 25 bp, Homo sapien
tgttggaaggtctcacccggttgga

SEQ ID NO: 2686839 - DNA, 25 bp, Homo sapien
ggttcactcacacacctggaaatgt

SEQ ID NO: 2686840 - DNA, 25 bp, Homo sapien
agtcaggtccctcttttgcatggct

SEQ ID NO: 2686841 - DNA, 25 bp, Homo sapien
tctgttaccagtaggcatgcttctg

SEQ ID NO: 2686842 - DNA, 25 bp, Homo sapien
catcatgaagttggtagggaaacct

SEQ ID NO: 2686843 - DNA, 25 bp, Homo sapien
cagtgccgtgtgtaaaaacctcatt

SEQ ID NO: 2686844 - DNA, 25 bp, Homo sapien
aaacctcattcatcatgaagttggt

SEQ ID NO: 2686845 - DNA, 25 bp, Homo sapien
cagccccagtgaaataacagtgccg

SEQ ID NO: 2686846 - DNA, 25 bp, Homo sapien
gggagagttgggcttttcaccactg

SEQ ID NO: 2686847 - DNA, 25 bp, Homo sapien
ttcaccactgacatgtggaaaagca

SEQ ID NO: 2686848 - DNA, 25 bp, Homo sapien
aatcaggtaaccactcagagctgct

SEQ ID NO: 2686849 - DNA, 25 bp, Homo sapien
gcaatcagacactgaattatatggc

SEQ ID NO: 2686850 - DNA, 25 bp, Homo sapien
caaacaatctgatcacagaaggatc

SEQ ID NO: 2686851 - DNA, 25 bp, Homo sapien
caatctgatcacagaaggatcagag

SEQ ID NO: 2686852 - DNA, 25 bp, Homo sapien
ttcaaacaatctgatcacagaagga

SEQ ID NO: 2686853 - DNA, 25 bp, Homo sapien
gatggaggaagactgcgagggcctt

SEQ ID NO: 2686854 - DNA, 25 bp, Homo sapien
ccatctcacatgtagtagtgctcca

SEQ ID NO: 2686855 - DNA, 25 bp, Homo sapien
tctccatctcacatgtagtagtgct

SEQ ID NO: 2686856 - DNA, 25 bp, Homo sapien
tccatctcacatgtagtagtgctcc

SEQ ID NO: 2686857 - DNA, 25 bp, Homo sapien
tcttctccatctcacatgtagtagt

SEQ ID NO: 2686858 - DNA, 25 bp, Homo sapien
ggccacgcctggtccattcttactg

SEQ ID NO: 2686859 - DNA, 25 bp, Homo sapien
cacttcctgatagttgcactgcagg

SEQ ID NO: 2686860 - DNA, 25 bp, Homo sapien
ctgatagttgcactgcaggttctgg

SEQ ID NO: 2686861 - DNA, 25 bp, Homo sapien
tgtggccacgcctggtccattctta

SEQ ID NO: 2686862 - DNA, 25 bp, Homo sapien
taaagatatatctagagctgctggc

SEQ ID NO: 2686863 - DNA, 25 bp, Homo sapien
tgctggctccattatataacagagg

SEQ ID NO: 2686864 - DNA, 25 bp, Homo sapien
ggcccagtgctatctgctgcaatta

SEQ ID NO: 2686865 - DNA, 25 bp, Homo sapien
tagaaacttcatccaacaaggcatc

SEQ ID NO: 2686866 - DNA, 25 bp, Homo sapien
agaatttatattggccttgagccat

SEQ ID NO: 2686867 - DNA, 25 bp, Homo sapien
catgagaatttatattggccttgag

SEQ ID NO: 2686868 - DNA, 25 bp, Homo sapien
tgagaatttatattggccttgagcc

SEQ ID NO: 2686869 - DNA, 25 bp, Homo sapien
tcatgagaatttatattggccttga

SEQ ID NO: 2686870 - DNA, 25 bp, Homo sapien
caaggtctatggttccttgtgacaa

SEQ ID NO: 2686871 - DNA, 25 bp, Homo sapien
gttccttgtgacaaacgcttgctca

SEQ ID NO: 2686872 - DNA, 25 bp, Homo sapien
tatggttccttgtgacaaacgcttg

SEQ ID NO: 2686873 - DNA, 25 bp, Homo sapien
ggcagatcaaggtctatggttcctt

SEQ ID NO: 2686874 - DNA, 25 bp, Homo sapien
taggagtaacgtgtttcagacttgg

SEQ ID NO: 2686875 - DNA, 25 bp, Homo sapien
aggagtaacgtgtttcagacttggg

SEQ ID NO: 2686876 - DNA, 25 bp, Homo sapien
ctaggagtaacgtgtttcagacttg

SEQ ID NO: 2686877 - DNA, 25 bp, Homo sapien
taatacaaggttaagaattcctgct

SEQ ID NO: 2686878 - DNA, 25 bp, Homo sapien
ccctctagggaattcataatacaag

SEQ ID NO: 2686879 - DNA, 25 bp, Homo sapien
taggtgtacaacgttttgcaccaaa

SEQ ID NO: 2686880 - DNA, 25 bp, Homo sapien
gcaccaaattttgtggccttcacca

SEQ ID NO: 2686881 - DNA, 25 bp, Homo sapien
acagataggcggtgattaaaaattc

SEQ ID NO: 2686882 - DNA, 25 bp, Homo sapien
cttgctgacagataggcggtgatta

SEQ ID NO: 2686883 - DNA, 25 bp, Homo sapien
agagcttgctgacagataggcggtg

SEQ ID NO: 2686884 - DNA, 25 bp, Homo sapien
tgctgacagataggcggtgattaaa

SEQ ID NO: 2686885 - DNA, 25 bp, Homo sapien
cagtacgaccattgtaaattgccat

SEQ ID NO: 2686886 - DNA, 25 bp, Homo sapien
aatgtgttacaacaggtcaggtaaa

SEQ ID NO: 2686887 - DNA, 25 bp, Homo sapien
aaatacttggatcttgatggtgtag

SEQ ID NO: 2686888 - DNA, 25 bp, Homo sapien
gatggtgtagtatcaagcttcaaag

SEQ ID NO: 2686889 - DNA, 25 bp, Homo sapien
tgaggaatggactgagaatgttcat

SEQ ID NO: 2686890 - DNA, 25 bp, Homo sapien
tagtgaggaatggactgagaatgtt

SEQ ID NO: 2686891 - DNA, 25 bp, Homo sapien
cttttggtagtgaggaatggactga

SEQ ID NO: 2686892 - DNA, 25 bp, Homo sapien
ctctgagcttttggtagtgaggaat

SEQ ID NO: 2686893 - DNA, 25 bp, Homo sapien
tgccagtttgtctggagtagtcagg

SEQ ID NO: 2686894 - DNA, 25 bp, Homo sapien
gaagtcagactttcccttgatgtgt

SEQ ID NO: 2686895 - DNA, 25 bp, Homo sapien
ggctccatgtcagcttgcttctgca

SEQ ID NO: 2686896 - DNA, 25 bp, Homo sapien
gaatttttggcattgggtctgccag

SEQ ID NO: 2686897 - DNA, 25 bp, Homo sapien
gctgtagattgatctgatgctctga

SEQ ID NO: 2686898 - DNA, 25 bp, Homo sapien
gaggctgtagattgatctgatgctc

SEQ ID NO: 2686899 - DNA, 25 bp, Homo sapien
caacttgggaggctgtagattgatc

SEQ ID NO: 2686900 - DNA, 25 bp, Homo sapien
cttgggaggctgtagattgatctga

SEQ ID NO: 2686901 - DNA, 25 bp, Homo sapien
acagcatgcgtagatgtatggcaac

SEQ ID NO: 2686902 - DNA, 25 bp, Homo sapien
catcagtaagggatgaaggctgaga

SEQ ID NO: 2686903 - DNA, 25 bp, Homo sapien
ttcttgtcggtacctgaaatggtct

SEQ ID NO: 2686904 - DNA, 25 bp, Homo sapien
tgttaacggtgcttgggtaggataa

SEQ ID NO: 2686905 - DNA, 25 bp, Homo sapien
gagtgtgtggcatttttatcccatc

SEQ ID NO: 2686906 - DNA, 25 bp, Homo sapien
ttatcccatccatccgagctgctta

SEQ ID NO: 2686907 - DNA, 25 bp, Homo sapien
atttttatcccatccatccgagctg

SEQ ID NO: 2686908 - DNA, 25 bp, Homo sapien
cttaatgaggagtgtgtggcatttt

SEQ ID NO: 2686909 - DNA, 25 bp, Homo sapien
cgaaggagggaatctactggcatca

SEQ ID NO: 2686910 - DNA, 25 bp, Homo sapien
agggaatctactggcatcatgagct

SEQ ID NO: 2686911 - DNA, 25 bp, Homo sapien
aggagggaatctactggcatcatga

SEQ ID NO: 2686912 - DNA, 25 bp, Homo sapien
gagggaatctactggcatcatgagc

SEQ ID NO: 2686913 - DNA, 25 bp, Homo sapien
tcagccaggcttcggaagcgaacac

SEQ ID NO: 2686914 - DNA, 25 bp, Homo sapien
tgctcagccaggcttcggaagcgaa

SEQ ID NO: 2686915 - DNA, 25 bp, Homo sapien
ccaggcttcggaagcgaacactgaa

SEQ ID NO: 2686916 - DNA, 25 bp, Homo sapien
tgctgctcagccaggcttcggaagc

SEQ ID NO: 2686917 - DNA, 25 bp, Homo sapien
ctgcaagataattaagtttaggcct

SEQ ID NO: 2686918 - DNA, 25 bp, Homo sapien
aaatctccaggttgggggcttgatt

SEQ ID NO: 2686919 - DNA, 25 bp, Homo sapien
tctatattgcttttgcaagggtcca

SEQ ID NO: 2686920 - DNA, 25 bp, Homo sapien
attgcttttgcaagggtccaaagga

SEQ ID NO: 2686921 - DNA, 25 bp, Homo sapien
tcagcacaattgtaagcacctctca

SEQ ID NO: 2686922 - DNA, 25 bp, Homo sapien
tggcatcaatctgtgcccccagctg

SEQ ID NO: 2686923 - DNA, 25 bp, Homo sapien
tgtccaccagtgctggcatcaatct

SEQ ID NO: 2686924 - DNA, 25 bp, Homo sapien
tgagccaaagatctacattcttctc

SEQ ID NO: 2686925 - DNA, 25 bp, Homo sapien
gctggcagatctaattgtaaataaa

SEQ ID NO: 2686926 - DNA, 25 bp, Homo sapien
ggcagatctaattgtaaataaacag

SEQ ID NO: 2686927 - DNA, 25 bp, Homo sapien
ctggaacattgattgattcggtaac

SEQ ID NO: 2686928 - DNA, 25 bp, Homo sapien
aacgtagaacgtttgctttccagct

SEQ ID NO: 2686929 - DNA, 25 bp, Homo sapien
tgcagcatcttttattcccaggacc

SEQ ID NO: 2686930 - DNA, 25 bp, Homo sapien
catctagggtttctcttacaaaatg

SEQ ID NO: 2686931 - DNA, 25 bp, Homo sapien
agggtttctcttacaaaatgcagca

SEQ ID NO: 2686932 - DNA, 25 bp, Homo sapien
caaaatgcagcatcttttattccca

SEQ ID NO: 2686933 - DNA, 25 bp, Homo sapien
tgccacctctaagaatggagatggg

SEQ ID NO: 2686934 - DNA, 25 bp, Homo sapien
tgccagaaatttgcttctgtgccac

SEQ ID NO: 2686935 - DNA, 25 bp, Homo sapien
gagatggggcagatttgccctccat

SEQ ID NO: 2686936 - DNA, 25 bp, Homo sapien
gaaaaatggctattccgatattgcc

SEQ ID NO: 2686937 - DNA, 25 bp, Homo sapien
gaagatgtgtactcttttacagtgc

SEQ ID NO: 2686938 - DNA, 25 bp, Homo sapien
tttggtggagagagtgtccataact

SEQ ID NO: 2686939 - DNA, 25 bp, Homo sapien
tggaagctaagtgtgggtccccaat

SEQ ID NO: 2686940 - DNA, 25 bp, Homo sapien
agctcttgcaggaaacaggttgatg

SEQ ID NO: 2686941 - DNA, 25 bp, Homo sapien
caattgtgatgggtgaaaatggagc

SEQ ID NO: 2686942 - DNA, 25 bp, Homo sapien
tgacttatcagagacacaattgtga

SEQ ID NO: 2686943 - DNA, 25 bp, Homo sapien
ggaggaaagattagcattttcaatt

SEQ ID NO: 2686944 - DNA, 25 bp, Homo sapien
aatctggaagttagaggaggaaaga

SEQ ID NO: 2686945 - DNA, 25 bp, Homo sapien
aacttcctctcaatatcccttcaga

SEQ ID NO: 2686946 - DNA, 25 bp, Homo sapien
tcagaacgagcctgtctgttataac

SEQ ID NO: 2686947 - DNA, 25 bp, Homo sapien
taaccaaaatccaaggagaagctgc

SEQ ID NO: 2686948 - DNA, 25 bp, Homo sapien
gaagctgctagactgatactgaaca

SEQ ID NO: 2686949 - DNA, 25 bp, Homo sapien
tgacctttaagataatgttacgtct

SEQ ID NO: 2686950 - DNA, 25 bp, Homo sapien
tacgtctttgccttaagagcttcat

SEQ ID NO: 2686951 - DNA, 25 bp, Homo sapien
taatgttacgtctttgccttaagag

SEQ ID NO: 2686952 - DNA, 25 bp, Homo sapien
gaaacattcaatgtgacctttaaga

SEQ ID NO: 2686953 - DNA, 25 bp, Homo sapien
ctctttgagccagttggtgtgcttt

SEQ ID NO: 2686954 - DNA, 25 bp, Homo sapien
tttgtatttacaccagatctgccca

SEQ ID NO: 2686955 - DNA, 25 bp, Homo sapien
atctgcccaaccacagctctttgag

SEQ ID NO: 2686956 - DNA, 25 bp, Homo sapien
gcttttcgctcacaagtgctatctc

SEQ ID NO: 2686957 - DNA, 25 bp, Homo sapien
atcttctagaggccaggtgatcttc

SEQ ID NO: 2686958 - DNA, 25 bp, Homo sapien
ttctctcccgtggaacatactcttc

SEQ ID NO: 2686959 - DNA, 25 bp, Homo sapien
gaatgctcctttttgcttgtaggac

SEQ ID NO: 2686960 - DNA, 25 bp, Homo sapien
ctcttccagggcataagctgtgctt

SEQ ID NO: 2686961 - DNA, 25 bp, Homo sapien
gcttttactcaagaccctgatgata

SEQ ID NO: 2686962 - DNA, 25 bp, Homo sapien
tgatgataaacaaggaaaactcccc

SEQ ID NO: 2686963 - DNA, 25 bp, Homo sapien
gggtttctgaggacattacagtatg

SEQ ID NO: 2686964 - DNA, 25 bp, Homo sapien
ccccagtgggcaatcaaagacattc

SEQ ID NO: 2686965 - DNA, 25 bp, Homo sapien
caaacttccagttttgtgcaataca

SEQ ID NO: 2686966 - DNA, 25 bp, Homo sapien
aaacttccagttttgtgcaatacac

SEQ ID NO: 2686967 - DNA, 25 bp, Homo sapien
tcaaacttccagttttgtgcaatac

SEQ ID NO: 2686968 - DNA, 25 bp, Homo sapien
tgtatctttcaagccactcctagca

SEQ ID NO: 2686969 - DNA, 25 bp, Homo sapien
tcttataatcctagttttcctgagc

SEQ ID NO: 2686970 - DNA, 25 bp, Homo sapien
ggcaaatactgagttctcccgaaca

SEQ ID NO: 2686971 - DNA, 25 bp, Homo sapien
agttgacatggcaagtgtgacttca

SEQ ID NO: 2686972 - DNA, 25 bp, Homo sapien
cttattgacccgcaagtcaaggaac

SEQ ID NO: 2686973 - DNA, 25 bp, Homo sapien
aaatctctgcgtttcagctttgtac

SEQ ID NO: 2686974 - DNA, 25 bp, Homo sapien
tgtgcgcttattgacccgcaagtca

SEQ ID NO: 2686975 - DNA, 25 bp, Homo sapien
tgacccgcaagtcaaggaacaacct

SEQ ID NO: 2686976 - DNA, 25 bp, Homo sapien
ccgtgtcactagaaggcagcctttt

SEQ ID NO: 2686977 - DNA, 25 bp, Homo sapien
cggagtctcaaaccggaacaccgtg

SEQ ID NO: 2686978 - DNA, 25 bp, Homo sapien
tgggctgcccggagtctcaaaccgg

SEQ ID NO: 2686979 - DNA, 25 bp, Homo sapien
tggagctgcgtgaggcctccacgtt

SEQ ID NO: 2686980 - DNA, 25 bp, Homo sapien
taacatttccgattagttctgcctc

SEQ ID NO: 2686981 - DNA, 25 bp, Homo sapien
aacatttccgattagttctgcctca

SEQ ID NO: 2686982 - DNA, 25 bp, Homo sapien
aaaatgggtcatggcacagtgtctg

SEQ ID NO: 2686983 - DNA, 25 bp, Homo sapien
catctggtgccatagagtgctcctg

SEQ ID NO: 2686984 - DNA, 25 bp, Homo sapien
ggtgccatagagtgctcctgtcctt

SEQ ID NO: 2686985 - DNA, 25 bp, Homo sapien
tagtgaaaatgggtcatggcacagt

SEQ ID NO: 2686986 - DNA, 25 bp, Homo sapien
cacaaggaagggcaacagatatgac

SEQ ID NO: 2686987 - DNA, 25 bp, Homo sapien
aaggaagggcaacagatatgactgg

SEQ ID NO: 2686988 - DNA, 25 bp, Homo sapien
gctgaccagggtcacagataattct

SEQ ID NO: 2686989 - DNA, 25 bp, Homo sapien
ctgaccagggtcacagataattctc

SEQ ID NO: 2686990 - DNA, 25 bp, Homo sapien
ccctgaaccagagtgcgtgcataga

SEQ ID NO: 2686991 - DNA, 25 bp, Homo sapien
ctgaaccagagtgcgtgcatagagt

SEQ ID NO: 2686992 - DNA, 25 bp, Homo sapien
aggccctgaaccagagtgcgtgcat

SEQ ID NO: 2686993 - DNA, 25 bp, Homo sapien
aaccagagtgcgtgcatagagtgcg

SEQ ID NO: 2686994 - DNA, 25 bp, Homo sapien
atatagatccaagtaactccaaggc

SEQ ID NO: 2686995 - DNA, 25 bp, Homo sapien
tgagccagagctacctagccaattt

SEQ ID NO: 2686996 - DNA, 25 bp, Homo sapien
tttgtggtggccagcctccatgatg

SEQ ID NO: 2686997 - DNA, 25 bp, Homo sapien
tcagccttggattgtccacctcatg

SEQ ID NO: 2686998 - DNA, 25 bp, Homo sapien
ggctctcactaggttataaaagaat

SEQ ID NO: 2686999 - DNA, 25 bp, Homo sapien
tttttaaagcctcatgcacctttcg

SEQ ID NO: 2687000 - DNA, 25 bp, Homo sapien
gaaacccacttagctcagtattggt

SEQ ID NO: 2687001 - DNA, 25 bp, Homo sapien
tggacttcagtcatatgggagaact

SEQ ID NO: 2687002 - DNA, 25 bp, Homo sapien
tttctggcagcataaaaaatcctga

SEQ ID NO: 2687003 - DNA, 25 bp, Homo sapien
tttaggaggagacgtctggcacaca

SEQ ID NO: 2687004 - DNA, 25 bp, Homo sapien
tcctaggccaaaaaactgtagtgtc

SEQ ID NO: 2687005 - DNA, 25 bp, Homo sapien
ggaactggctggaccaactcaagaa

SEQ ID NO: 2687006 - DNA, 25 bp, Homo sapien
taagcgttattagtttggctggctc

SEQ ID NO: 2687007 - DNA, 25 bp, Homo sapien
aataatctctgagctagccttagga

SEQ ID NO: 2687008 - DNA, 25 bp, Homo sapien
taactggctcactttaagagaatgg

SEQ ID NO: 2687009 - DNA, 25 bp, Homo sapien
gcaaaaggctgacaataactggctc

SEQ ID NO: 2687010 - DNA, 25 bp, Homo sapien
cactggatgtctaagggattgtcga

SEQ ID NO: 2687011 - DNA, 25 bp, Homo sapien
ttgtcctggagataagagagtcctg

SEQ ID NO: 2687012 - DNA, 25 bp, Homo sapien
tcccaggtggtcctacagtatttac

SEQ ID NO: 2687013 - DNA, 25 bp, Homo sapien
tttgagctagttgagggagttgtcc

SEQ ID NO: 2687014 - DNA, 25 bp, Homo sapien
gaggcaaattgtgtagccctccctc

SEQ ID NO: 2687015 - DNA, 25 bp, Homo sapien
gcaccatgattgctataagtgagtt

SEQ ID NO: 2687016 - DNA, 25 bp, Homo sapien
gcacacacagaaccttactcagaaa

SEQ ID NO: 2687017 - DNA, 25 bp, Homo sapien
ggacttctactcctcaggcaaataa

SEQ ID NO: 2687018 - DNA, 25 bp, Homo sapien
gcggacctggacacgtcggagcggg

SEQ ID NO: 2687019 - DNA, 25 bp, Homo sapien
cccggcttctaggtccgggtgcgca

SEQ ID NO: 2687020 - DNA, 25 bp, Homo sapien
agcgggcgcgattggtccgacccac

SEQ ID NO: 2687021 - DNA, 25 bp, Homo sapien
tctggagggcaccttcagacttccg

SEQ ID NO: 2687022 - DNA, 25 bp, Homo sapien
cccgagcactttcgcaggctttgtg

SEQ ID NO: 2687023 - DNA, 25 bp, Homo sapien
ttcccgagcactttcgcaggctttg

SEQ ID NO: 2687024 - DNA, 25 bp, Homo sapien
tcttcccgagcactttcgcaggctt

SEQ ID NO: 2687025 - DNA, 25 bp, Homo sapien
tcccgagcactttcgcaggctttgt

SEQ ID NO: 2687026 - DNA, 25 bp, Homo sapien
gacctctttgaagtttgaccattta

SEQ ID NO: 2687027 - DNA, 25 bp, Homo sapien
aaaagtgaggtctaatacagctaca

SEQ ID NO: 2687028 - DNA, 25 bp, Homo sapien
tgcaggctactgtaagcatttgacc

SEQ ID NO: 2687029 - DNA, 25 bp, Homo sapien
caccccatagcatgtcccagatgtt

SEQ ID NO: 2687030 - DNA, 25 bp, Homo sapien
gctcaggtgctgtcacaagagtcct

SEQ ID NO: 2687031 - DNA, 25 bp, Homo sapien
ctcaggtgctgtcacaagagtcctc

SEQ ID NO: 2687032 - DNA, 25 bp, Homo sapien
tgctcaggtgctgtcacaagagtcc

SEQ ID NO: 2687033 - DNA, 25 bp, Homo sapien
gatgtataacaccaaatcagtaagc

SEQ ID NO: 2687034 - DNA, 25 bp, Homo sapien
catggcatgagatccttttagcata

SEQ ID NO: 2687035 - DNA, 25 bp, Homo sapien
tggaaggtcacaaaatactcatggc

SEQ ID NO: 2687036 - DNA, 25 bp, Homo sapien
ctgttgaagtttagcaagtggaaac

SEQ ID NO: 2687037 - DNA, 25 bp, Homo sapien
gagtgaccaatgacggctacatatg

SEQ ID NO: 2687038 - DNA, 25 bp, Homo sapien
aatctttgacatacgtggagtgacc

SEQ ID NO: 2687039 - DNA, 25 bp, Homo sapien
ctaagagtcatggaattacacctgg

SEQ ID NO: 2687040 - DNA, 25 bp, Homo sapien
tacctgagggatatcactggaggga

SEQ ID NO: 2687041 - DNA, 25 bp, Homo sapien
ttaatttagagacaccagttgtacg

SEQ ID NO: 2687042 - DNA, 25 bp, Homo sapien
caatgagctttgtagaatcatagat

SEQ ID NO: 2687043 - DNA, 25 bp, Homo sapien
cgtggtaccttaaactagaccagat

SEQ ID NO: 2687044 - DNA, 25 bp, Homo sapien
agaagagaagtaatagagaccacat

SEQ ID NO: 2687045 - DNA, 25 bp, Homo sapien
tctaggcacactgttgggtatctgg

SEQ ID NO: 2687046 - DNA, 25 bp, Homo sapien
taaaatcagtcacggttactgctgg

SEQ ID NO: 2687047 - DNA, 25 bp, Homo sapien
cacagctgagtaaataagggtatcc

SEQ ID NO: 2687048 - DNA, 25 bp, Homo sapien
tgagacaaatcccagaccacactat

SEQ ID NO: 2687049 - DNA, 25 bp, Homo sapien
aagaagctcatgatatcccatggcg

SEQ ID NO: 2687050 - DNA, 25 bp, Homo sapien
tcccatggcgaaaaataagagagta

SEQ ID NO: 2687051 - DNA, 25 bp, Homo sapien
caaaggtgttaatctacctaaggat

SEQ ID NO: 2687052 - DNA, 25 bp, Homo sapien
tagacatacgtaaggaaaaagaagc

SEQ ID NO: 2687053 - DNA, 25 bp, Homo sapien
ttcacagcagaatgtttcattacgt

SEQ ID NO: 2687054 - DNA, 25 bp, Homo sapien
gaaatgataacccagagtgaggcat

SEQ ID NO: 2687055 - DNA, 25 bp, Homo sapien
gaggcattgctagtaaacttcacag

SEQ ID NO: 2687056 - DNA, 25 bp, Homo sapien
ggttatcttctaggacagagaatga

SEQ ID NO: 2687057 - DNA, 25 bp, Homo sapien
tgttccagcatcaagtctaaagtcc

SEQ ID NO: 2687058 - DNA, 25 bp, Homo sapien
tgtgaaggatccactgctgcgatcc

SEQ ID NO: 2687059 - DNA, 25 bp, Homo sapien
gcgatccaatcatcttctaccaggt

SEQ ID NO: 2687060 - DNA, 25 bp, Homo sapien
gcattgctatagagatatacccaag

SEQ ID NO: 2687061 - DNA, 25 bp, Homo sapien
accttggcctcatatcttcgttcct

SEQ ID NO: 2687062 - DNA, 25 bp, Homo sapien
cttggcctcatatcttcgttccttt

SEQ ID NO: 2687063 - DNA, 25 bp, Homo sapien
caccttggcctcatatcttcgttcc

SEQ ID NO: 2687064 - DNA, 25 bp, Homo sapien
ggcctcatatcttcgttcctttttg

SEQ ID NO: 2687065 - DNA, 25 bp, Homo sapien
gagataaggtttaatactgataaac

SEQ ID NO: 2687066 - DNA, 25 bp, Homo sapien
aactgggtacagttagaagtggtag

SEQ ID NO: 2687067 - DNA, 25 bp, Homo sapien
aagttgagagataaggtttaatact

SEQ ID NO: 2687068 - DNA, 25 bp, Homo sapien
cactaaaactgggtacagttagaag

SEQ ID NO: 2687069 - DNA, 25 bp, Homo sapien
actgtgtccggcctcagccaggtac

SEQ ID NO: 2687070 - DNA, 25 bp, Homo sapien
cagccaggtacttctatatcaaatg

SEQ ID NO: 2687071 - DNA, 25 bp, Homo sapien
aagagagcagacattattaaagaaa

SEQ ID NO: 2687072 - DNA, 25 bp, Homo sapien
gaggtaaaatggcagcggttactaa

SEQ ID NO: 2687073 - DNA, 25 bp, Homo sapien
caggccacgatacttgggaagcaaa

SEQ ID NO: 2687074 - DNA, 25 bp, Homo sapien
ggcctcacagtgaccaaaagaagga

SEQ ID NO: 2687075 - DNA, 25 bp, Homo sapien
gacccagtttctctccacaaaggca

SEQ ID NO: 2687076 - DNA, 25 bp, Homo sapien
ctattcagtggctccgtggctggca

SEQ ID NO: 2687077 - DNA, 25 bp, Homo sapien
ctggtgtcccaacggcagtagctgc

SEQ ID NO: 2687078 - DNA, 25 bp, Homo sapien
tgtttcacttgtaaatgccagactg

SEQ ID NO: 2687079 - DNA, 25 bp, Homo sapien
ccttgcctggtgtcccaacggcagt

SEQ ID NO: 2687080 - DNA, 25 bp, Homo sapien
gctgcaggtcgcacctgtttcactt

SEQ ID NO: 2687081 - DNA, 25 bp, Homo sapien
ctgaagaagaaaggaaaccgcttca

SEQ ID NO: 2687082 - DNA, 25 bp, Homo sapien
gggtaggggattgggctgttggcga

SEQ ID NO: 2687083 - DNA, 25 bp, Homo sapien
taggggattgggctgttggcgacct

SEQ ID NO: 2687084 - DNA, 25 bp, Homo sapien
tggggagtccgcctccacagatggg

SEQ ID NO: 2687085 - DNA, 25 bp, Homo sapien
ggattgggctgttggcgacctgcag

SEQ ID NO: 2687086 - DNA, 25 bp, Homo sapien
cctgaatgaagcatagatttggaga

SEQ ID NO: 2687087 - DNA, 25 bp, Homo sapien
tcctgaatgaagcatagatttggag

SEQ ID NO: 2687088 - DNA, 25 bp, Homo sapien
ggctggaagatgaagacttttttct

SEQ ID NO: 2687089 - DNA, 25 bp, Homo sapien
cagtcgttcttatcacttgctaaag

SEQ ID NO: 2687090 - DNA, 25 bp, Homo sapien
gttcttatcacttgctaaagaggca

SEQ ID NO: 2687091 - DNA, 25 bp, Homo sapien
cttatcacttgctaaagaggcacca

SEQ ID NO: 2687092 - DNA, 25 bp, Homo sapien
tcagtggttcctccgttgggacact

SEQ ID NO: 2687093 - DNA, 25 bp, Homo sapien
cttgtgaaagtgcatattggccttg

SEQ ID NO: 2687094 - DNA, 25 bp, Homo sapien
aacaacttgtgaaagtgcatattgg

SEQ ID NO: 2687095 - DNA, 25 bp, Homo sapien
tcctccgttgggacactaagaaaca

SEQ ID NO: 2687096 - DNA, 25 bp, Homo sapien
gttttctgatacaaagagctttcct

SEQ ID NO: 2687097 - DNA, 25 bp, Homo sapien
tctttctgtagagcacaggtaaagc

SEQ ID NO: 2687098 - DNA, 25 bp, Homo sapien
aatccagttttctgatacaaagagc

SEQ ID NO: 2687099 - DNA, 25 bp, Homo sapien
ttccaaagactttggaatgaaaaca

SEQ ID NO: 2687100 - DNA, 25 bp, Homo sapien
caggctaggccttaactgctccacc

SEQ ID NO: 2687101 - DNA, 25 bp, Homo sapien
ccaggctaggccttaactgctccac

SEQ ID NO: 2687102 - DNA, 25 bp, Homo sapien
ggctaggccttaactgctccacctc

SEQ ID NO: 2687103 - DNA, 25 bp, Homo sapien
aggctaggccttaactgctccacct

SEQ ID NO: 2687104 - DNA, 25 bp, Homo sapien
gagccactgtgcctggccacaaaat

SEQ ID NO: 2687105 - DNA, 25 bp, Homo sapien
actgcgcccggccacatccagctaa

SEQ ID NO: 2687106 - DNA, 25 bp, Homo sapien
ccactgtgcctggccacaaaatgag

SEQ ID NO: 2687107 - DNA, 25 bp, Homo sapien
ctgcgcccggccacatccagctaat

SEQ ID NO: 2687108 - DNA, 25 bp, Homo sapien
tctgtgactgttgctatgatcaggg

SEQ ID NO: 2687109 - DNA, 25 bp, Homo sapien
cagggcgtttggcactagaagagca

SEQ ID NO: 2687110 - DNA, 25 bp, Homo sapien
cactagaagagcagttttggttttc

SEQ ID NO: 2687111 - DNA, 25 bp, Homo sapien
gactgttgctatgatcagggcgttt

SEQ ID NO: 2687112 - DNA, 25 bp, Homo sapien
aagagaccccttaggcagcagagcc

SEQ ID NO: 2687113 - DNA, 25 bp, Homo sapien
acagcactacatgaatgtctacagg

SEQ ID NO: 2687114 - DNA, 25 bp, Homo sapien
gagtcttggtccttggcaagagacc

SEQ ID NO: 2687115 - DNA, 25 bp, Homo sapien
aagatgccctcgctcggctgcatac

SEQ ID NO: 2687116 - DNA, 25 bp, Homo sapien
tacatgtagggcaaaatgaaggctc

SEQ ID NO: 2687117 - DNA, 25 bp, Homo sapien
tagatattgccggatgagaagtgag

SEQ ID NO: 2687118 - DNA, 25 bp, Homo sapien
gaagaaaaggcctggacattaagaa

SEQ ID NO: 2687119 - DNA, 25 bp, Homo sapien
gtcactggtgcctcaaacaagccca

SEQ ID NO: 2687120 - DNA, 25 bp, Homo sapien
aatctctggagagtaaggagacaaa

SEQ ID NO: 2687121 - DNA, 25 bp, Homo sapien
tctctggagagtaaggagacaaata

SEQ ID NO: 2687122 - DNA, 25 bp, Homo sapien
ctggagagtaaggagacaaatatgt

SEQ ID NO: 2687123 - DNA, 25 bp, Homo sapien
tagtagtttgtaagttgaatctctg

SEQ ID NO: 2687124 - DNA, 25 bp, Homo sapien
ggtctgctcggaaactgttttcagc

SEQ ID NO: 2687125 - DNA, 25 bp, Homo sapien
atgaagggcggtctgctcggaaact

SEQ ID NO: 2687126 - DNA, 25 bp, Homo sapien
tgggactgttaccaacacttgtatt

SEQ ID NO: 2687127 - DNA, 25 bp, Homo sapien
cagaagatggattgggactgttacc

SEQ ID NO: 2687128 - DNA, 25 bp, Homo sapien
agatttgtgaatccctctaagccaa

SEQ ID NO: 2687129 - DNA, 25 bp, Homo sapien
tctaagttgtgaagtctctgaaggc

SEQ ID NO: 2687130 - DNA, 25 bp, Homo sapien
tacagtgtgcactagcatggtgcct

SEQ ID NO: 2687131 - DNA, 25 bp, Homo sapien
caccctggtcatggtgtaagcacaa

SEQ ID NO: 2687132 - DNA, 25 bp, Homo sapien
caggcagtatgcaaagctccttaca

SEQ ID NO: 2687133 - DNA, 25 bp, Homo sapien
tcttgaatgcctatctcatatcagg

SEQ ID NO: 2687134 - DNA, 25 bp, Homo sapien
gcagttaaagcttgcctgatgctat

SEQ ID NO: 2687135 - DNA, 25 bp, Homo sapien
tcctggcaaaggtacaattaggctg

SEQ ID NO: 2687136 - DNA, 25 bp, Homo sapien
tagtaaacaggcaggcctttgtaac

SEQ ID NO: 2687137 - DNA, 25 bp, Homo sapien
tttcacctaggcctgacctataaaa

SEQ ID NO: 2687138 - DNA, 25 bp, Homo sapien
gaaatgaagacaggctgatattccc

SEQ ID NO: 2687139 - DNA, 25 bp, Homo sapien
cctaggcctgacctataaaacatag

SEQ ID NO: 2687140 - DNA, 25 bp, Homo sapien
agaactgctatatccttccatgtct

SEQ ID NO: 2687141 - DNA, 25 bp, Homo sapien
tgaggatgttttgaggggaattaaa

SEQ ID NO: 2687142 - DNA, 25 bp, Homo sapien
gggcatctgcccgagttggctttgc

SEQ ID NO: 2687143 - DNA, 25 bp, Homo sapien
ttggagacattcagaactgtttggg

SEQ ID NO: 2687144 - DNA, 25 bp, Homo sapien
actctgttcacatgggcatctgccc

SEQ ID NO: 2687145 - DNA, 25 bp, Homo sapien
cttggagacattcagaactgtttgg

SEQ ID NO: 2687146 - DNA, 25 bp, Homo sapien
gtgaagcatcggacatttctgagac

SEQ ID NO: 2687147 - DNA, 25 bp, Homo sapien
tatggtgaagcatcggacatttctg

SEQ ID NO: 2687148 - DNA, 25 bp, Homo sapien
taagaatatggtgaagcatcggaca

SEQ ID NO: 2687149 - DNA, 25 bp, Homo sapien
catttctgagacttgactttatgta

SEQ ID NO: 2687150 - DNA, 25 bp, Homo sapien
tacacccgaggcaaggtattttcca

SEQ ID NO: 2687151 - DNA, 25 bp, Homo sapien
taaaacaactcagtgccaatgtggt

SEQ ID NO: 2687152 - DNA, 25 bp, Homo sapien
tcgttaggttaacggccaggatctg

SEQ ID NO: 2687153 - DNA, 25 bp, Homo sapien
ccaggatctgatgttcataaaacaa

SEQ ID NO: 2687154 - DNA, 25 bp, Homo sapien
tgtatctcatgtagaaggtcgagat

SEQ ID NO: 2687155 - DNA, 25 bp, Homo sapien
gaaggtcgagatgattagtgcacag

SEQ ID NO: 2687156 - DNA, 25 bp, Homo sapien
caatggaggttagtaaccccagctg

SEQ ID NO: 2687157 - DNA, 25 bp, Homo sapien
tgtccacaatggaggttagtaaccc

SEQ ID NO: 2687158 - DNA, 25 bp, Homo sapien
tatgttagctgtaagctcttgacag

SEQ ID NO: 2687159 - DNA, 25 bp, Homo sapien
cagagaacctccacattgaattgta

SEQ ID NO: 2687160 - DNA, 25 bp, Homo sapien
gaattgtacttgtgacctcaggcca

SEQ ID NO: 2687161 - DNA, 25 bp, Homo sapien
tcttgacagagaacctccacattga

SEQ ID NO: 2687162 - DNA, 25 bp, Homo sapien
gtgactgcccccatacacaggaaag

SEQ ID NO: 2687163 - DNA, 25 bp, Homo sapien
ctagggcaaccaacaggcactactg

SEQ ID NO: 2687164 - DNA, 25 bp, Homo sapien
gggcaaccaacaggcactactgtga

SEQ ID NO: 2687165 - DNA, 25 bp, Homo sapien
aaccaacaggcactactgtgactgc

SEQ ID NO: 2687166 - DNA, 25 bp, Homo sapien
cactgggccctgtgctattaagtaa

SEQ ID NO: 2687167 - DNA, 25 bp, Homo sapien
gactcacgtctgctgcctttctagg

SEQ ID NO: 2687168 - DNA, 25 bp, Homo sapien
tttattgcggcacactaacggcgtc

SEQ ID NO: 2687169 - DNA, 25 bp, Homo sapien
cattaagctccgatgtcagtagtca

SEQ ID NO: 2687170 - DNA, 25 bp, Homo sapien
tgggcgtttgtgacagcagttgtaa

SEQ ID NO: 2687171 - DNA, 25 bp, Homo sapien
aagctaccagatactgggcgtttgt

SEQ ID NO: 2687172 - DNA, 25 bp, Homo sapien
tgaacactgaattctctctaagcct

SEQ ID NO: 2687173 - DNA, 25 bp, Homo sapien
gacagcagttgtaattgaacactga

SEQ ID NO: 2687174 - DNA, 25 bp, Homo sapien
tataagaccttcaacagcatggagc

SEQ ID NO: 2687175 - DNA, 25 bp, Homo sapien
gaatcaaaaagagcacgggtgtggc

SEQ ID NO: 2687176 - DNA, 25 bp, Homo sapien
cccgaaggtgagaagaaggaattgc

SEQ ID NO: 2687177 - DNA, 25 bp, Homo sapien
gatttgccaactagtcaaccagtgg

SEQ ID NO: 2687178 - DNA, 25 bp, Homo sapien
gatgtttggatcttaagacgggtcc

SEQ ID NO: 2687179 - DNA, 25 bp, Homo sapien
gacgggtccgatgttggacatcaaa

SEQ ID NO: 2687180 - DNA, 25 bp, Homo sapien
gaattcatagaagccgggtgctgtg

SEQ ID NO: 2687181 - DNA, 25 bp, Homo sapien
gggacagagaccaaccacgtcagat

SEQ ID NO: 2687182 - DNA, 25 bp, Homo sapien
cattctcaagcaacttctgtaagtt

SEQ ID NO: 2687183 - DNA, 25 bp, Homo sapien
tcagtcaccattctcaagcaacttc

SEQ ID NO: 2687184 - DNA, 25 bp, Homo sapien
accattctcaagcaacttctgtaag

SEQ ID NO: 2687185 - DNA, 25 bp, Homo sapien
agtcaccattctcaagcaacttctg

SEQ ID NO: 2687186 - DNA, 25 bp, Homo sapien
tccgatggcccaagcaatctggtcg

SEQ ID NO: 2687187 - DNA, 25 bp, Homo sapien
tgaggtattccgatggcccaagcaa

SEQ ID NO: 2687188 - DNA, 25 bp, Homo sapien
aagggaaacatgaggtattccgatg

SEQ ID NO: 2687189 - DNA, 25 bp, Homo sapien
gaaacatgaggtattccgatggccc

SEQ ID NO: 2687190 - DNA, 25 bp, Homo sapien
acttttattgcacaagaaccaaaat

SEQ ID NO: 2687191 - DNA, 25 bp, Homo sapien
ggtgcactcaaacaaaacgcctcag

SEQ ID NO: 2687192 - DNA, 25 bp, Homo sapien
gagagtcaaggtcaacttttattgc

SEQ ID NO: 2687193 - DNA, 25 bp, Homo sapien
tggagacctccacatgcaatgtctg

SEQ ID NO: 2687194 - DNA, 25 bp, Homo sapien
tgaagcaaacctgtccacttagagc

SEQ ID NO: 2687195 - DNA, 25 bp, Homo sapien
ggctaattcttgaaaggaccacatt

SEQ ID NO: 2687196 - DNA, 25 bp, Homo sapien
gacgccatcgtggtaattatccaag

SEQ ID NO: 2687197 - DNA, 25 bp, Homo sapien
aagagagtgtgttcgctgggccctt

SEQ ID NO: 2687198 - DNA, 25 bp, Homo sapien
acaggtgatttcaaccagaacataa

SEQ ID NO: 2687199 - DNA, 25 bp, Homo sapien
tttcaaccagaacataacaggagaa

SEQ ID NO: 2687200 - DNA, 25 bp, Homo sapien
ggtgatttcaaccagaacataacag

SEQ ID NO: 2687201 - DNA, 25 bp, Homo sapien
gagaaattaagacacacaggtgatt

SEQ ID NO: 2687202 - DNA, 25 bp, Homo sapien
tactaacatagtccacctacagtct

SEQ ID NO: 2687203 - DNA, 25 bp, Homo sapien
gaatacagacatcctgcttgaaaac

SEQ ID NO: 2687204 - DNA, 25 bp, Homo sapien
ccagggctgggtaagaatcagtcca

SEQ ID NO: 2687205 - DNA, 25 bp, Homo sapien
tgcctcacagattcttgaccagggc

SEQ ID NO: 2687206 - DNA, 25 bp, Homo sapien
taataaaaaccagccaacccatatg

SEQ ID NO: 2687207 - DNA, 25 bp, Homo sapien
ctaggccaacagatacaaacgatgt

SEQ ID NO: 2687208 - DNA, 25 bp, Homo sapien
aggcacagctgtccactaggccaac

SEQ ID NO: 2687209 - DNA, 25 bp, Homo sapien
tatttattaaaagccagaggtgcac

SEQ ID NO: 2687210 - DNA, 25 bp, Homo sapien
aagcatagttaagtcttggttaaag

SEQ ID NO: 2687211 - DNA, 25 bp, Homo sapien
tataagtgagttggtagtagtagat

SEQ ID NO: 2687212 - DNA, 25 bp, Homo sapien
gcatagttaagtcttggttaaagga

SEQ ID NO: 2687213 - DNA, 25 bp, Homo sapien
ggaggaaggaagtataagtgagttg

SEQ ID NO: 2687214 - DNA, 25 bp, Homo sapien
actcataaatgtggactgaggaatg

SEQ ID NO: 2687215 - DNA, 25 bp, Homo sapien
tactggtactttcaacctcatcaat

SEQ ID NO: 2687216 - DNA, 25 bp, Homo sapien
atttaatcctcacactgatactttt

SEQ ID NO: 2687217 - DNA, 25 bp, Homo sapien
taaatgtggactgaggaatgaagca

SEQ ID NO: 2687218 - DNA, 25 bp, Homo sapien
gagaggataggttgggaggtagagg

SEQ ID NO: 2687219 - DNA, 25 bp, Homo sapien
aggcgagaggataggttgggaggta

SEQ ID NO: 2687220 - DNA, 25 bp, Homo sapien
gcgagaggataggttgggaggtaga

SEQ ID NO: 2687221 - DNA, 25 bp, Homo sapien
gaggcgagaggataggttgggaggt

SEQ ID NO: 2687222 - DNA, 25 bp, Homo sapien
taatggtttgcgtagctcatcagga

SEQ ID NO: 2687223 - DNA, 25 bp, Homo sapien
gggatgcatgcttctctgtacaaca

SEQ ID NO: 2687224 - DNA, 25 bp, Homo sapien
taaacgggcaagagcttacataggc

SEQ ID NO: 2687225 - DNA, 25 bp, Homo sapien
gattgcaacgtgatttctccaaggg

SEQ ID NO: 2687226 - DNA, 25 bp, Homo sapien
cggcactaaagcctaacttgcttag

SEQ ID NO: 2687227 - DNA, 25 bp, Homo sapien
taacttgcttaggatcttgctgtac

SEQ ID NO: 2687228 - DNA, 25 bp, Homo sapien
cttctgccacggcactaaagcctaa

SEQ ID NO: 2687229 - DNA, 25 bp, Homo sapien
gcctaacttgcttaggatcttgctg

SEQ ID NO: 2687230 - DNA, 25 bp, Homo sapien
tgagcatttcataactgctgcctcc

SEQ ID NO: 2687231 - DNA, 25 bp, Homo sapien
tattactggtcttatatttgaaggt

SEQ ID NO: 2687232 - DNA, 25 bp, Homo sapien
gttccaaccgctactgctggcaatg

SEQ ID NO: 2687233 - DNA, 25 bp, Homo sapien
cattactggttatcttgagcatttc

SEQ ID NO: 2687234 - DNA, 25 bp, Homo sapien
ggatgcattcccctgtatgcttgga

SEQ ID NO: 2687235 - DNA, 25 bp, Homo sapien
tttgcagtagatacagggtgtctcc

SEQ ID NO: 2687236 - DNA, 25 bp, Homo sapien
ccttaatttgaggtgttccagcagc

SEQ ID NO: 2687237 - DNA, 25 bp, Homo sapien
gaatattgcttgacattacccacct

SEQ ID NO: 2687238 - DNA, 25 bp, Homo sapien
agtctggcagtgatgcctggaaaca

SEQ ID NO: 2687239 - DNA, 25 bp, Homo sapien
tggcagggagtctggcagtgatgcc

SEQ ID NO: 2687240 - DNA, 25 bp, Homo sapien
cagtgatgcctggaaacagtacatg

SEQ ID NO: 2687241 - DNA, 25 bp, Homo sapien
aaacagtacatgagaaggtctactt

SEQ ID NO: 2687242 - DNA, 25 bp, Homo sapien
ccacaccaagcaggcagtgagcatg

SEQ ID NO: 2687243 - DNA, 25 bp, Homo sapien
tctgggcatattggaaaagccaccc

SEQ ID NO: 2687244 - DNA, 25 bp, Homo sapien
taataaaacgatgccataaagggca

SEQ ID NO: 2687245 - DNA, 25 bp, Homo sapien
gatgctctgagatcaattgtgacag

SEQ ID NO: 2687246 - DNA, 25 bp, Homo sapien
tatagagggcaagaattgtaactgc

SEQ ID NO: 2687247 - DNA, 25 bp, Homo sapien
tgtccagaatgggaggtaaaaggcc

SEQ ID NO: 2687248 - DNA, 25 bp, Homo sapien
catttgcagtagaatatccagggat

SEQ ID NO: 2687249 - DNA, 25 bp, Homo sapien
gtatactggccattctgagttgaaa

SEQ ID NO: 2687250 - DNA, 25 bp, Homo sapien
gctgaaaagaattcccagctggaac

SEQ ID NO: 2687251 - DNA, 25 bp, Homo sapien
ccatcgctgaggagctggttaggaa

SEQ ID NO: 2687252 - DNA, 25 bp, Homo sapien
ctccagggacaagaggcgtcaccat

SEQ ID NO: 2687253 - DNA, 25 bp, Homo sapien
tgtgcatttaccacgacgaccaggt

SEQ ID NO: 2687254 - DNA, 25 bp, Homo sapien
aggccagcctgtcccagcggcctga

SEQ ID NO: 2687255 - DNA, 25 bp, Homo sapien
cccccgcgcggaggccagcctgtcc

SEQ ID NO: 2687256 - DNA, 25 bp, Homo sapien
ccagcctgtcccagcggcctgaggc

SEQ ID NO: 2687257 - DNA, 25 bp, Homo sapien
gtcccagcggcctgaggcgtcccat

SEQ ID NO: 2687258 - DNA, 25 bp, Homo sapien
cttcccgcggtgcgctgcgctgcac

SEQ ID NO: 2687259 - DNA, 25 bp, Homo sapien
gctgcgctgcacagcggcgggtcag

SEQ ID NO: 2687260 - DNA, 25 bp, Homo sapien
tgcccatcttccatatcgccgacct

SEQ ID NO: 2687261 - DNA, 25 bp, Homo sapien
aatccgagtcggaaagctgcccatc

SEQ ID NO: 2687262 - DNA, 25 bp, Homo sapien
tggcaattgcagcggcctgtcgctg

SEQ ID NO: 2687263 - DNA, 25 bp, Homo sapien
gcctgtcgctgggtgcgaccgtcat

SEQ ID NO: 2687264 - DNA, 25 bp, Homo sapien
caagataccaagttcagtggccact

SEQ ID NO: 2687265 - DNA, 25 bp, Homo sapien
tctgactgctctggccaaactgaaa

SEQ ID NO: 2687266 - DNA, 25 bp, Homo sapien
taattgtaggtctcggattgtctgc

SEQ ID NO: 2687267 - DNA, 25 bp, Homo sapien
tactggtgcacatgcagttgccgtg

SEQ ID NO: 2687268 - DNA, 25 bp, Homo sapien
cactactcgggctatcaggtctttc

SEQ ID NO: 2687269 - DNA, 25 bp, Homo sapien
tttttgttaccaataatcctcacta

SEQ ID NO: 2687270 - DNA, 25 bp, Homo sapien
ttgttcaacttcagcggtttccatc

SEQ ID NO: 2687271 - DNA, 25 bp, Homo sapien
gcggtttccatcagaagttcaattg

SEQ ID NO: 2687272 - DNA, 25 bp, Homo sapien
tcaagactagcctggtcaacaacat

SEQ ID NO: 2687273 - DNA, 25 bp, Homo sapien
ggtgaaaccctgtctctatcaaaaa

SEQ ID NO: 2687274 - DNA, 25 bp, Homo sapien
gggcatggtagcacatatctgtaat

SEQ ID NO: 2687275 - DNA, 25 bp, Homo sapien
gctgggcatggtagcacatatctgt

SEQ ID NO: 2687276 - DNA, 25 bp, Homo sapien
actgcagcctctgccctccggggtt

SEQ ID NO: 2687277 - DNA, 25 bp, Homo sapien
cctcagcctcacaaagtgctaggat

SEQ ID NO: 2687278 - DNA, 25 bp, Homo sapien
cagcctcacaaagtgctaggattac

SEQ ID NO: 2687279 - DNA, 25 bp, Homo sapien
attataggcactccccaccacgcct

SEQ ID NO: 2687280 - DNA, 25 bp, Homo sapien
cacctggtgttcttcttcgactacc

SEQ ID NO: 2687281 - DNA, 25 bp, Homo sapien
tgttcctcgctgatactaggagtgt

SEQ ID NO: 2687282 - DNA, 25 bp, Homo sapien
ttaatttgttcctcgctgatactag

SEQ ID NO: 2687283 - DNA, 25 bp, Homo sapien
tgatactaggagtgtttttcaagag

SEQ ID NO: 2687284 - DNA, 25 bp, Homo sapien
tgaggtgagagaactgcttgaagct

SEQ ID NO: 2687285 - DNA, 25 bp, Homo sapien
actgcactcagcctaggggacagag

SEQ ID NO: 2687286 - DNA, 25 bp, Homo sapien
tgcactcagcctaggggacagagtg

SEQ ID NO: 2687287 - DNA, 25 bp, Homo sapien
aggtgagagaactgcttgaagctgg

SEQ ID NO: 2687288 - DNA, 25 bp, Homo sapien
tagtcaagttctggcttctaagttc

SEQ ID NO: 2687289 - DNA, 25 bp, Homo sapien
gactgttagcaatatagcaattaaa

SEQ ID NO: 2687290 - DNA, 25 bp, Homo sapien
tggtgactgttagcaatatagcaat

SEQ ID NO: 2687291 - DNA, 25 bp, Homo sapien
ttgtgaggtcatgtacccaaatgga

SEQ ID NO: 2687292 - DNA, 25 bp, Homo sapien
caaaagtttctcgtgatgtatcatc

SEQ ID NO: 2687293 - DNA, 25 bp, Homo sapien
gaatgatcaacttcaatggcttcct

SEQ ID NO: 2687294 - DNA, 25 bp, Homo sapien
catgagaatgatcaacttcaatggc

SEQ ID NO: 2687295 - DNA, 25 bp, Homo sapien
gaggccaaggcctcattcgtgtcac

SEQ ID NO: 2687296 - DNA, 25 bp, Homo sapien
tactcataattagcacatgcaacag

SEQ ID NO: 2687297 - DNA, 25 bp, Homo sapien
gcaaaacgttgcaatctcagtaaaa

SEQ ID NO: 2687298 - DNA, 25 bp, Homo sapien
caaatggtatgttatgacctagaca

SEQ ID NO: 2687299 - DNA, 25 bp, Homo sapien
tagaaaggcttagtcctcaaactgt

SEQ ID NO: 2687300 - DNA, 25 bp, Homo sapien
catcagtatacacctcttaattgta

SEQ ID NO: 2687301 - DNA, 25 bp, Homo sapien
aacttccgacatttatttacttctg

SEQ ID NO: 2687302 - DNA, 25 bp, Homo sapien
gacatttatttacttctggacaaac

SEQ ID NO: 2687303 - DNA, 25 bp, Homo sapien
gaagaatcatcagtatacacctctt

SEQ ID NO: 2687304 - DNA, 25 bp, Homo sapien
tgacagatcaagactctaactaaaa

SEQ ID NO: 2687305 - DNA, 25 bp, Homo sapien
gacagatcaagactctaactaaaaa

SEQ ID NO: 2687306 - DNA, 25 bp, Homo sapien
gtgacagatcaagactctaactaaa

SEQ ID NO: 2687307 - DNA, 25 bp, Homo sapien
cagatcaagactctaactaaaaaac

SEQ ID NO: 2687308 - DNA, 25 bp, Homo sapien
taactcttggaatgtctaaactacc

SEQ ID NO: 2687309 - DNA, 25 bp, Homo sapien
cactgcgccggcatatgtaacattt

SEQ ID NO: 2687310 - DNA, 25 bp, Homo sapien
taagacagtcttaggcaggctgcca

SEQ ID NO: 2687311 - DNA, 25 bp, Homo sapien
tttaagcagaataaggctgggttcg

SEQ ID NO: 2687312 - DNA, 25 bp, Homo sapien
tgcttatgtgattcacccactcaag

SEQ ID NO: 2687313 - DNA, 25 bp, Homo sapien
actcctatgcttatgtgattcaccc

SEQ ID NO: 2687314 - DNA, 25 bp, Homo sapien
ttatgtgattcacccactcaagcct

SEQ ID NO: 2687315 - DNA, 25 bp, Homo sapien
tcctatgcttatgtgattcacccac

SEQ ID NO: 2687316 - DNA, 25 bp, Homo sapien
tatgccacctacagtcaaccgattt

SEQ ID NO: 2687317 - DNA, 25 bp, Homo sapien
ttaacattctgtattggtccgtggc

SEQ ID NO: 2687318 - DNA, 25 bp, Homo sapien
ggaaattgaacatccccatgaagaa

SEQ ID NO: 2687319 - DNA, 25 bp, Homo sapien
tcctctttatatattgcgtatgcca

SEQ ID NO: 2687320 - DNA, 25 bp, Homo sapien
gatttatagagactctcatcagagc

SEQ ID NO: 2687321 - DNA, 25 bp, Homo sapien
gagcagttgttagtgagtttaggca

SEQ ID NO: 2687322 - DNA, 25 bp, Homo sapien
tagagactctcatcagagcagttgt

SEQ ID NO: 2687323 - DNA, 25 bp, Homo sapien
taggacaagtatctttccctgaagc

SEQ ID NO: 2687324 - DNA, 25 bp, Homo sapien
aaatcgtggcaaatgaatctcttca

SEQ ID NO: 2687325 - DNA, 25 bp, Homo sapien
aaggcatgacataacgtcttgggat

SEQ ID NO: 2687326 - DNA, 25 bp, Homo sapien
gggatcatcccttgctttaatgaaa

SEQ ID NO: 2687327 - DNA, 25 bp, Homo sapien
tgttttctttccaaggcatgacata

SEQ ID NO: 2687328 - DNA, 25 bp, Homo sapien
gagagtcttctaaagggccagtatg

SEQ ID NO: 2687329 - DNA, 25 bp, Homo sapien
agagagtcttctaaagggccagtat

SEQ ID NO: 2687330 - DNA, 25 bp, Homo sapien
aagggccagtatggatcccacacac

SEQ ID NO: 2687331 - DNA, 25 bp, Homo sapien
agtatggatcccacacacttctgct

SEQ ID NO: 2687332 - DNA, 25 bp, Homo sapien
gacaactttacgatcttccccatgg

SEQ ID NO: 2687333 - DNA, 25 bp, Homo sapien
atcacagtgctttggtatctggaga

SEQ ID NO: 2687334 - DNA, 25 bp, Homo sapien
tatctggagagaggcgaatgcaaag

SEQ ID NO: 2687335 - DNA, 25 bp, Homo sapien
tagactagtcgcctcctgaagccat

SEQ ID NO: 2687336 - DNA, 25 bp, Homo sapien
cagggtcctgggtggaatttctgaa

SEQ ID NO: 2687337 - DNA, 25 bp, Homo sapien
tgaacgtagaatttgcagagcttgg

SEQ ID NO: 2687338 - DNA, 25 bp, Homo sapien
gctgagaagtaaatgtggccctcct

SEQ ID NO: 2687339 - DNA, 25 bp, Homo sapien
cagagcttggcagtgttttgtgaaa

SEQ ID NO: 2687340 - DNA, 25 bp, Homo sapien
aaaagtactgcaagcgagtagtcgc

SEQ ID NO: 2687341 - DNA, 25 bp, Homo sapien
tcttccactctgaccgagtatcggt

SEQ ID NO: 2687342 - DNA, 25 bp, Homo sapien
gtatcggttgaaaggagtactgccg

SEQ ID NO: 2687343 - DNA, 25 bp, Homo sapien
ggagtactgccgaaactgtaaccaa

SEQ ID NO: 2687344 - DNA, 25 bp, Homo sapien
tccacgtgactaccatgggccaatg

SEQ ID NO: 2687345 - DNA, 25 bp, Homo sapien
tttagaggaacggagaagcacctgg

SEQ ID NO: 2687346 - DNA, 25 bp, Homo sapien
cactcggcggttcagggaaattcaa

SEQ ID NO: 2687347 - DNA, 25 bp, Homo sapien
gatcgatcgcgaaataccctttgta

SEQ ID NO: 2687348 - DNA, 25 bp, Homo sapien
catccgcggcggcacgggggtcgca

SEQ ID NO: 2687349 - DNA, 25 bp, Homo sapien
gcggcacgggggtcgcagtcgccat

SEQ ID NO: 2687350 - DNA, 25 bp, Homo sapien
gggctcagcggcgtggtggggccgc

SEQ ID NO: 2687351 - DNA, 25 bp, Homo sapien
cgcggctgcccatccgcggcggcac

SEQ ID NO: 2687352 - DNA, 25 bp, Homo sapien
tgtacaccgccagccggtcattgag

SEQ ID NO: 2687353 - DNA, 25 bp, Homo sapien
gatgtacaccgccagccggtcattg

SEQ ID NO: 2687354 - DNA, 25 bp, Homo sapien
tgtcgatgtacaccgccagccggtc

SEQ ID NO: 2687355 - DNA, 25 bp, Homo sapien
cttgtcgatgtacaccgccagccgg

SEQ ID NO: 2687356 - DNA, 25 bp, Homo sapien
cgtcggccagctcggtctcgtagag

SEQ ID NO: 2687357 - DNA, 25 bp, Homo sapien
aggagcagctggtcgtgttccgcct

SEQ ID NO: 2687358 - DNA, 25 bp, Homo sapien
ttgcacttgcccagctcgatctgca

SEQ ID NO: 2687359 - DNA, 25 bp, Homo sapien
tcggtctcgtagagcgccttgaggc

SEQ ID NO: 2687360 - DNA, 25 bp, Homo sapien
cggctccccggattcgagtgcgaaa

SEQ ID NO: 2687361 - DNA, 25 bp, Homo sapien
ttaccacgtcccagcgggtatccaa

SEQ ID NO: 2687362 - DNA, 25 bp, Homo sapien
ggagctccttctcggcagtcccagg

SEQ ID NO: 2687363 - DNA, 25 bp, Homo sapien
gcacttaccacgtcccagcgggtat

SEQ ID NO: 2687364 - DNA, 25 bp, Homo sapien
catgctctgcctctaaggtatcttg

SEQ ID NO: 2687365 - DNA, 25 bp, Homo sapien
caccacctgcatggaaactgttgcc

SEQ ID NO: 2687366 - DNA, 25 bp, Homo sapien
ttctctttagaccaagcatttccat

SEQ ID NO: 2687367 - DNA, 25 bp, Homo sapien
ctctgcctctaaggtatcttgtttg

SEQ ID NO: 2687368 - DNA, 25 bp, Homo sapien
tctcataagaggttatgaacacact

SEQ ID NO: 2687369 - DNA, 25 bp, Homo sapien
cataagaggttatgaacacactttt

SEQ ID NO: 2687370 - DNA, 25 bp, Homo sapien
tcataagaggttatgaacacacttt

SEQ ID NO: 2687371 - DNA, 25 bp, Homo sapien
ctcataagaggttatgaacacactt

SEQ ID NO: 2687372 - DNA, 25 bp, Homo sapien
gtaaaatgagattaccttcagatcc

SEQ ID NO: 2687373 - DNA, 25 bp, Homo sapien
gggctccacagcacttggtgcatca

SEQ ID NO: 2687374 - DNA, 25 bp, Homo sapien
ctggaatgtgggtaaaatgagatta

SEQ ID NO: 2687375 - DNA, 25 bp, Homo sapien
tgcatcattctcatatggtgcatgg

SEQ ID NO: 2687376 - DNA, 25 bp, Homo sapien
atctttcgaattcagtgctgcttca

SEQ ID NO: 2687377 - DNA, 25 bp, Homo sapien
agagctgcatctttcgaattcagtg

SEQ ID NO: 2687378 - DNA, 25 bp, Homo sapien
tgggcgccattaagatcagattcct

SEQ ID NO: 2687379 - DNA, 25 bp, Homo sapien
tcatattctcgaagcttgatctggg

SEQ ID NO: 2687380 - DNA, 25 bp, Homo sapien
tggctgcagctaaggaggcttccaa

SEQ ID NO: 2687381 - DNA, 25 bp, Homo sapien
aacgattctccaaatctactttaag

SEQ ID NO: 2687382 - DNA, 25 bp, Homo sapien
tcctcagtaaggctctgacaacgat

SEQ ID NO: 2687383 - DNA, 25 bp, Homo sapien
ttttgcgaaactccaagtcctcagt

SEQ ID NO: 2687384 - DNA, 25 bp, Homo sapien
tacatgtttagctatgacaaagtca

SEQ ID NO: 2687385 - DNA, 25 bp, Homo sapien
ctcaaatgcggtcttttagcagcag

SEQ ID NO: 2687386 - DNA, 25 bp, Homo sapien
gtttacggtaacagcttgagttctc

SEQ ID NO: 2687387 - DNA, 25 bp, Homo sapien
gcagcagtagcttgaataatctacc

SEQ ID NO: 2687388 - DNA, 25 bp, Homo sapien
caaagatgctatgcactctaaaaat

SEQ ID NO: 2687389 - DNA, 25 bp, Homo sapien
aaattcaaagatgctatgcactcta

SEQ ID NO: 2687390 - DNA, 25 bp, Homo sapien
aaaacaaaactgaagaggactatct

SEQ ID NO: 2687391 - DNA, 25 bp, Homo sapien
cttaacatccattctcaaaaaggca

SEQ ID NO: 2687392 - DNA, 25 bp, Homo sapien
tactgaatatatatcatgaatgtaa

SEQ ID NO: 2687393 - DNA, 25 bp, Homo sapien
tgtgagggtgtgaacctgtaatccc

SEQ ID NO: 2687394 - DNA, 25 bp, Homo sapien
ccagttgtgagggtgtgaacctgta

SEQ ID NO: 2687395 - DNA, 25 bp, Homo sapien
aagttaaggccagcgtagtggctca

SEQ ID NO: 2687396 - DNA, 25 bp, Homo sapien
tatacagcctcacttgggcatcatg

SEQ ID NO: 2687397 - DNA, 25 bp, Homo sapien
tactcaatttgacgcccagaatcca

SEQ ID NO: 2687398 - DNA, 25 bp, Homo sapien
tttggcatggtaagtctgctccagc

SEQ ID NO: 2687399 - DNA, 25 bp, Homo sapien
tctcatctcatgaagggcttgcgcc

SEQ ID NO: 2687400 - DNA, 25 bp, Homo sapien
tctctgatgacagtctggcattctc

SEQ ID NO: 2687401 - DNA, 25 bp, Homo sapien
tccctggcactgttgacagtagaag

SEQ ID NO: 2687402 - DNA, 25 bp, Homo sapien
tcatgcggctttccatcagttcttc

SEQ ID NO: 2687403 - DNA, 25 bp, Homo sapien
tctcaattctcatgcggctttccat

SEQ ID NO: 2687404 - DNA, 25 bp, Homo sapien
aattcttatggcctaataggcagca

SEQ ID NO: 2687405 - DNA, 25 bp, Homo sapien
tggcctaataggcagcatgatgaaa

SEQ ID NO: 2687406 - DNA, 25 bp, Homo sapien
gaaattcttatggcctaataggcag

SEQ ID NO: 2687407 - DNA, 25 bp, Homo sapien
tcttatggcctaataggcagcatga

SEQ ID NO: 2687408 - DNA, 25 bp, Homo sapien
tggtaaaagtcaagtctggctccct

SEQ ID NO: 2687409 - DNA, 25 bp, Homo sapien
tcaaatacaaaacacagacctcagg

SEQ ID NO: 2687410 - DNA, 25 bp, Homo sapien
cattccaacattagcaccaggcagc

SEQ ID NO: 2687411 - DNA, 25 bp, Homo sapien
gaaaacagtacaaccctatggaatc

SEQ ID NO: 2687412 - DNA, 25 bp, Homo sapien
tgctgcatttgatcccttatttccg

SEQ ID NO: 2687413 - DNA, 25 bp, Homo sapien
cctgtaagcactgatttccatgtcc

SEQ ID NO: 2687414 - DNA, 25 bp, Homo sapien
tgtcagcatgcgacgagagttgtct

SEQ ID NO: 2687415 - DNA, 25 bp, Homo sapien
tgtccagggctaactttacatcaag

SEQ ID NO: 2687416 - DNA, 25 bp, Homo sapien
tgagaggcaaaaagtggaccataag

SEQ ID NO: 2687417 - DNA, 25 bp, Homo sapien
gagaggcaaaaagtggaccataagg

SEQ ID NO: 2687418 - DNA, 25 bp, Homo sapien
ggtgagaggcaaaaagtggaccata

SEQ ID NO: 2687419 - DNA, 25 bp, Homo sapien
agggtgagaggcaaaaagtggacca

SEQ ID NO: 2687420 - DNA, 25 bp, Homo sapien
gaaagtcatctgatctaccaccacc

SEQ ID NO: 2687421 - DNA, 25 bp, Homo sapien
ttttatcctaaatcagccactttcc

SEQ ID NO: 2687422 - DNA, 25 bp, Homo sapien
cgtacctgtactttcttatgatcac

SEQ ID NO: 2687423 - DNA, 25 bp, Homo sapien
caccacagccactgttatagttggt

SEQ ID NO: 2687424 - DNA, 25 bp, Homo sapien
ctgaggcggaatgagagatgctaac

SEQ ID NO: 2687425 - DNA, 25 bp, Homo sapien
actgtcacacgggaagaagggcttg

SEQ ID NO: 2687426 - DNA, 25 bp, Homo sapien
tacgtacactacgacttgaggatgc

SEQ ID NO: 2687427 - DNA, 25 bp, Homo sapien
gaggatgctcgggatactgtcacac

SEQ ID NO: 2687428 - DNA, 25 bp, Homo sapien
tgccttcagcacatatcttgaggta

SEQ ID NO: 2687429 - DNA, 25 bp, Homo sapien
cttcagcacatatcttgaggtatat

SEQ ID NO: 2687430 - DNA, 25 bp, Homo sapien
ctgccttcagcacatatcttgaggt

SEQ ID NO: 2687431 - DNA, 25 bp, Homo sapien
gccttcagcacatatcttgaggtat

SEQ ID NO: 2687432 - DNA, 25 bp, Homo sapien
aaccttcacatcttcgccagtgccc

SEQ ID NO: 2687433 - DNA, 25 bp, Homo sapien
ggctgtgacaccagcgtttgcagcc

SEQ ID NO: 2687434 - DNA, 25 bp, Homo sapien
atcttcgccagtgccccacgagttc

SEQ ID NO: 2687435 - DNA, 25 bp, Homo sapien
tgacaccagcgtttgcagcccaaat

SEQ ID NO: 2687436 - DNA, 25 bp, Homo sapien
agactgtacttctttgagcaacctc

SEQ ID NO: 2687437 - DNA, 25 bp, Homo sapien
tatgggaagtaagaaatcactgttt

SEQ ID NO: 2687438 - DNA, 25 bp, Homo sapien
ggtctgttagtgaagcaatggtgaa

SEQ ID NO: 2687439 - DNA, 25 bp, Homo sapien
cagtcaaaccacagaattatgggaa

SEQ ID NO: 2687440 - DNA, 25 bp, Homo sapien
ttgagttcagtctgcagcatgtgga

SEQ ID NO: 2687441 - DNA, 25 bp, Homo sapien
tgtacagaagctacatccctaagca

SEQ ID NO: 2687442 - DNA, 25 bp, Homo sapien
actgcctctggaatctcctctctag

SEQ ID NO: 2687443 - DNA, 25 bp, Homo sapien
tagagttagtccctctgattcagct

SEQ ID NO: 2687444 - DNA, 25 bp, Homo sapien
cctaagcattccagactatgtcagt

SEQ ID NO: 2687445 - DNA, 25 bp, Homo sapien
gatctaggtcccttgatcaatcaaa

SEQ ID NO: 2687446 - DNA, 25 bp, Homo sapien
tgtcaactctggctacacattcaga

SEQ ID NO: 2687447 - DNA, 25 bp, Homo sapien
tctaatgtgcagctcaatttgaaaa

SEQ ID NO: 2687448 - DNA, 25 bp, Homo sapien
cagatcctgaggagtttaaaacaaa

SEQ ID NO: 2687449 - DNA, 25 bp, Homo sapien
cacagcttctattggatgctcttgg

SEQ ID NO: 2687450 - DNA, 25 bp, Homo sapien
tgcacagcttctattggatgctctt

SEQ ID NO: 2687451 - DNA, 25 bp, Homo sapien
acagcttctattggatgctcttggg

SEQ ID NO: 2687452 - DNA, 25 bp, Homo sapien
gcacagcttctattggatgctcttg

SEQ ID NO: 2687453 - DNA, 25 bp, Homo sapien
attttgaggaagacagttgaaaatt

SEQ ID NO: 2687454 - DNA, 25 bp, Homo sapien
tattttgaggaagacagttgaaaat

SEQ ID NO: 2687455 - DNA, 25 bp, Homo sapien
catcatccagagtgcttacatggtg

SEQ ID NO: 2687456 - DNA, 25 bp, Homo sapien
gacgcacagtggtttatttaccctc

SEQ ID NO: 2687457 - DNA, 25 bp, Homo sapien
tgaggaaccccttccgaacagtaca

SEQ ID NO: 2687458 - DNA, 25 bp, Homo sapien
ttcaaattacaccaagacgcacagt

SEQ ID NO: 2687459 - DNA, 25 bp, Homo sapien
ctgaaacaatacttttctcccctca

SEQ ID NO: 2687460 - DNA, 25 bp, Homo sapien
ttttgtttagaagccaatgatccag

SEQ ID NO: 2687461 - DNA, 25 bp, Homo sapien
taaaatgacatggacaacccctcct

SEQ ID NO: 2687462 - DNA, 25 bp, Homo sapien
cacagatgcactcatgtatgatagc

SEQ ID NO: 2687463 - DNA, 25 bp, Homo sapien
cccaagaggaacgtgacttagaatc

SEQ ID NO: 2687464 - DNA, 25 bp, Homo sapien
tcaatactgctaatgtgacgcctct

SEQ ID NO: 2687465 - DNA, 25 bp, Homo sapien
tgtattttgccacgtatttgcctca

SEQ ID NO: 2687466 - DNA, 25 bp, Homo sapien
taatgtgacgcctctccctgagaac

SEQ ID NO: 2687467 - DNA, 25 bp, Homo sapien
gacagcaaagcagcatccatttaca

SEQ ID NO: 2687468 - DNA, 25 bp, Homo sapien
taacaagggagtgaaagctggcagt

SEQ ID NO: 2687469 - DNA, 25 bp, Homo sapien
ctggttggaagaggcagcgtaacaa

SEQ ID NO: 2687470 - DNA, 25 bp, Homo sapien
ggaaggctgggtcatgaccccagtc

SEQ ID NO: 2687471 - DNA, 25 bp, Homo sapien
gcatctgctggttggaagaggcagc

SEQ ID NO: 2687472 - DNA, 25 bp, Homo sapien
tgtcccgtgtgtcagagaccaacac

SEQ ID NO: 2687473 - DNA, 25 bp, Homo sapien
gaccaacacgtgctggtgtgtactc

SEQ ID NO: 2687474 - DNA, 25 bp, Homo sapien
cctcttgatgggtcttatgctgctt

SEQ ID NO: 2687475 - DNA, 25 bp, Homo sapien
cctatgtgagagtgaaagtgtcccg

SEQ ID NO: 2687476 - DNA, 25 bp, Homo sapien
aggacagccccaatgcagtgtgcag

SEQ ID NO: 2687477 - DNA, 25 bp, Homo sapien
tttcccatttgagcgctgagcacac

SEQ ID NO: 2687478 - DNA, 25 bp, Homo sapien
aagtgactgccaaacacgttccggg

SEQ ID NO: 2687479 - DNA, 25 bp, Homo sapien
gaacaaacaagcacgatggaggcca

SEQ ID NO: 2687480 - DNA, 25 bp, Homo sapien
taaaactacagctgttatcaagaac

SEQ ID NO: 2687481 - DNA, 25 bp, Homo sapien
agaacaggcaggagatcctgtcatc

SEQ ID NO: 2687482 - DNA, 25 bp, Homo sapien
cagagggccagtgttcagtgtttgt

SEQ ID NO: 2687483 - DNA, 25 bp, Homo sapien
tcttggttccatggatcaagcagag

SEQ ID NO: 2687484 - DNA, 25 bp, Homo sapien
ggaaggaaagtcactcaggcttagt

SEQ ID NO: 2687485 - DNA, 25 bp, Homo sapien
cacatgtctttctggcgtgccagag

SEQ ID NO: 2687486 - DNA, 25 bp, Homo sapien
gatacttcaatcctctttcccagct

SEQ ID NO: 2687487 - DNA, 25 bp, Homo sapien
ccagctgaggccttaaactatttgt

SEQ ID NO: 2687488 - DNA, 25 bp, Homo sapien
tggctaagttcagcaccaagtaagg

SEQ ID NO: 2687489 - DNA, 25 bp, Homo sapien
gaagtgcctgcaacaagcttgcttg

SEQ ID NO: 2687490 - DNA, 25 bp, Homo sapien
tataaccctccaaaatcaggctggg

SEQ ID NO: 2687491 - DNA, 25 bp, Homo sapien
taacacccaacacgaagatctgcag

SEQ ID NO: 2687492 - DNA, 25 bp, Homo sapien
gttgggcgcacacttgcaggccagc

SEQ ID NO: 2687493 - DNA, 25 bp, Homo sapien
ggcctgcccgtgccatgctcaaatt

SEQ ID NO: 2687494 - DNA, 25 bp, Homo sapien
gcgcacacttgcaggccagcgtgag

SEQ ID NO: 2687495 - DNA, 25 bp, Homo sapien
catgctcaaattctcgacgggcctc

SEQ ID NO: 2687496 - DNA, 25 bp, Homo sapien
tgtgcgccacaaggttaatacagga

SEQ ID NO: 2687497 - DNA, 25 bp, Homo sapien
tctcgatgctgtctttgtgcgccac

SEQ ID NO: 2687498 - DNA, 25 bp, Homo sapien
tcagccctgagcaaaccttccttag

SEQ ID NO: 2687499 - DNA, 25 bp, Homo sapien
tatgaaaggcgctcagactgccagg

SEQ ID NO: 2687500 - DNA, 25 bp, Homo sapien
tgcagctccacagaatctttgcatt

SEQ ID NO: 2687501 - DNA, 25 bp, Homo sapien
ttctggacagtacgccagggtcgtg

SEQ ID NO: 2687502 - DNA, 25 bp, Homo sapien
agctctggccgggtcaacctttgca

SEQ ID NO: 2687503 - DNA, 25 bp, Homo sapien
cattctggacagtacgccagggtcg

SEQ ID NO: 2687504 - DNA, 25 bp, Homo sapien
agcaaaattagcagtcctgagttag

SEQ ID NO: 2687505 - DNA, 25 bp, Homo sapien
tctgctatgtgaggagagattcccc

SEQ ID NO: 2687506 - DNA, 25 bp, Homo sapien
tcctgagttaggaggtctgctatgt

SEQ ID NO: 2687507 - DNA, 25 bp, Homo sapien
ggtctgctatgtgaggagagattcc

SEQ ID NO: 2687508 - DNA, 25 bp, Homo sapien
atcctggcggaagttccatctccct

SEQ ID NO: 2687509 - DNA, 25 bp, Homo sapien
ttgcagtcagctcgcctttgaagag

SEQ ID NO: 2687510 - DNA, 25 bp, Homo sapien
gtcagctcgcctttgaagaggagaa

SEQ ID NO: 2687511 - DNA, 25 bp, Homo sapien
cctgaattgcagtcagctcgccttt

SEQ ID NO: 2687512 - DNA, 25 bp, Homo sapien
tccccatttgccacagttagcatgt

SEQ ID NO: 2687513 - DNA, 25 bp, Homo sapien
tgagggtgggagatcctctggggtt

SEQ ID NO: 2687514 - DNA, 25 bp, Homo sapien
tttggactcggccactccccatttg

SEQ ID NO: 2687515 - DNA, 25 bp, Homo sapien
ggttgccgtttggactcggccactc

SEQ ID NO: 2687516 - DNA, 25 bp, Homo sapien
tctctcctgtgttaatgtagtggcc

SEQ ID NO: 2687517 - DNA, 25 bp, Homo sapien
ccactgctgtctagttagcagttat

SEQ ID NO: 2687518 - DNA, 25 bp, Homo sapien
tggttttccagtcttcaagggtgtg

SEQ ID NO: 2687519 - DNA, 25 bp, Homo sapien
gtgttaatgtagtggccaggcgctc

SEQ ID NO: 2687520 - DNA, 25 bp, Homo sapien
agttgggcaagcagccagcttccgg

SEQ ID NO: 2687521 - DNA, 25 bp, Homo sapien
taggaaatgacccatggcccaaaga

SEQ ID NO: 2687522 - DNA, 25 bp, Homo sapien
tggagctgtccacactaggaaatga

SEQ ID NO: 2687523 - DNA, 25 bp, Homo sapien
ccatattggaatccgctcagccttg

SEQ ID NO: 2687524 - DNA, 25 bp, Homo sapien
gaaaatggaggtgaaatcgcagccc

SEQ ID NO: 2687525 - DNA, 25 bp, Homo sapien
aaatggaggtgaaatcgcagcccaa

SEQ ID NO: 2687526 - DNA, 25 bp, Homo sapien
ggtgaaatcgcagcccaagtgaccc

SEQ ID NO: 2687527 - DNA, 25 bp, Homo sapien
tggaggtgaaatcgcagcccaagtg

SEQ ID NO: 2687528 - DNA, 25 bp, Homo sapien
tgatggagctgatgcaggtgtcccc

SEQ ID NO: 2687529 - DNA, 25 bp, Homo sapien
tgtaaagggtctgatccgcagcctg

SEQ ID NO: 2687530 - DNA, 25 bp, Homo sapien
tccaagtgggaaaacgagaagtgca

SEQ ID NO: 2687531 - DNA, 25 bp, Homo sapien
caccgaggcaggagcggatgtcttc

SEQ ID NO: 2687532 - DNA, 25 bp, Homo sapien
tctttcgcgtccattactcaaggag

SEQ ID NO: 2687533 - DNA, 25 bp, Homo sapien
gaaggttgtcctgctacggatgcaa

SEQ ID NO: 2687534 - DNA, 25 bp, Homo sapien
gaaaaagggcgtgagctcacacagt

SEQ ID NO: 2687535 - DNA, 25 bp, Homo sapien
aaaaatatggtgagaagctcgctcc

SEQ ID NO: 2687536 - DNA, 25 bp, Homo sapien
agaacaagatgccagaagggtgccc

SEQ ID NO: 2687537 - DNA, 25 bp, Homo sapien
tggttgcccacggaatccctggcag

SEQ ID NO: 2687538 - DNA, 25 bp, Homo sapien
gtgcccttggttgcccacggaatcc

SEQ ID NO: 2687539 - DNA, 25 bp, Homo sapien
tggggctttcaacagcatgatctct

SEQ ID NO: 2687540 - DNA, 25 bp, Homo sapien
ttagatgtacattcacagccagtga

SEQ ID NO: 2687541 - DNA, 25 bp, Homo sapien
tttccaagaattgatcaacctcatg

SEQ ID NO: 2687542 - DNA, 25 bp, Homo sapien
caggcccttcagtgctgattacggt

SEQ ID NO: 2687543 - DNA, 25 bp, Homo sapien
cagtgaatgatgctgtggcaaggta

SEQ ID NO: 2687544 - DNA, 25 bp, Homo sapien
cccatatcttatccccagcaaggtg

SEQ ID NO: 2687545 - DNA, 25 bp, Homo sapien
gaaccacaatgcggggcaactggaa

SEQ ID NO: 2687546 - DNA, 25 bp, Homo sapien
tgcctccgagcccatatcttatccc

SEQ ID NO: 2687547 - DNA, 25 bp, Homo sapien
ggcaactggaagtggtgtcctgtcc

SEQ ID NO: 2687548 - DNA, 25 bp, Homo sapien
ctccaacagcagtccaacggagtgg

SEQ ID NO: 2687549 - DNA, 25 bp, Homo sapien
ggtcattagacaccagtaaccttcc

SEQ ID NO: 2687550 - DNA, 25 bp, Homo sapien
caacagcagtccaacggagtggtca

SEQ ID NO: 2687551 - DNA, 25 bp, Homo sapien
cagtccaacggagtggtcattagac

SEQ ID NO: 2687552 - DNA, 25 bp, Homo sapien
tcttatttcaatgtctcaggtatcc

SEQ ID NO: 2687553 - DNA, 25 bp, Homo sapien
cagcctcagggctagtaagtggaga

SEQ ID NO: 2687554 - DNA, 25 bp, Homo sapien
gtagataaggaagctgcaactcaga

SEQ ID NO: 2687555 - DNA, 25 bp, Homo sapien
caggtatccttctcatagcagatat

SEQ ID NO: 2687556 - DNA, 25 bp, Homo sapien
gggagaaaaccgtggtcttcactga

SEQ ID NO: 2687557 - DNA, 25 bp, Homo sapien
tccttaagcacatgtggaccaagaa

SEQ ID NO: 2687558 - DNA, 25 bp, Homo sapien
gattcatccctaggtgttctcaaat

SEQ ID NO: 2687559 - DNA, 25 bp, Homo sapien
tcatcttgaaagattccggaccctt

SEQ ID NO: 2687560 - DNA, 25 bp, Homo sapien
catcccatggcgaaatgaacttgct

SEQ ID NO: 2687561 - DNA, 25 bp, Homo sapien
ggaggctggccgtttgatcatccca

SEQ ID NO: 2687562 - DNA, 25 bp, Homo sapien
tagggcctcgcctacaaaaacttca

SEQ ID NO: 2687563 - DNA, 25 bp, Homo sapien
gaggtgctctacaagatttagggcc

SEQ ID NO: 2687564 - DNA, 25 bp, Homo sapien
tggaagccattagcagagtaattgc

SEQ ID NO: 2687565 - DNA, 25 bp, Homo sapien
gcagcctagtgaatgggcagccgca

SEQ ID NO: 2687566 - DNA, 25 bp, Homo sapien
tcagctgcacccgtggtgaagacgg

SEQ ID NO: 2687567 - DNA, 25 bp, Homo sapien
taccatgacaaccagccgctgcagt

SEQ ID NO: 2687568 - DNA, 25 bp, Homo sapien
ctggaagttgggaagatcctgtttt

SEQ ID NO: 2687569 - DNA, 25 bp, Homo sapien
ttctggaagttgggaagatcctgtt

SEQ ID NO: 2687570 - DNA, 25 bp, Homo sapien
tctggaagttgggaagatcctgttt

SEQ ID NO: 2687571 - DNA, 25 bp, Homo sapien
tggaagttgggaagatcctgttttc

SEQ ID NO: 2687572 - DNA, 25 bp, Homo sapien
cacgtccgatgattgttttggacag

SEQ ID NO: 2687573 - DNA, 25 bp, Homo sapien
tttggacagtcaagcctgcttgaca

SEQ ID NO: 2687574 - DNA, 25 bp, Homo sapien
cagcaaggaagggatgacaatcacg

SEQ ID NO: 2687575 - DNA, 25 bp, Homo sapien
cctgcttgacatgtgcgtgtcggga

SEQ ID NO: 2687576 - DNA, 25 bp, Homo sapien
cagccaatgagggtgggaaagggag

SEQ ID NO: 2687577 - DNA, 25 bp, Homo sapien
aggctgctggtgcaaagccagccag

SEQ ID NO: 2687578 - DNA, 25 bp, Homo sapien
tgctggtgcaaagccagccagacac

SEQ ID NO: 2687579 - DNA, 25 bp, Homo sapien
tgagaggacgccaggcagccaatga

SEQ ID NO: 2687580 - DNA, 25 bp, Homo sapien
tgctgggcaaaggcagacgcagacc

SEQ ID NO: 2687581 - DNA, 25 bp, Homo sapien
gctgctgggcaaaggcagacgcaga

SEQ ID NO: 2687582 - DNA, 25 bp, Homo sapien
agggctgctgggcaaaggcagacgc

SEQ ID NO: 2687583 - DNA, 25 bp, Homo sapien
gggctgctgggcaaaggcagacgca

SEQ ID NO: 2687584 - DNA, 25 bp, Homo sapien
ggactggagtccacagccgtctccc

SEQ ID NO: 2687585 - DNA, 25 bp, Homo sapien
gagtccacagccgtctccccactgt

SEQ ID NO: 2687586 - DNA, 25 bp, Homo sapien
tcaggtctcagacaaggactggagt

SEQ ID NO: 2687587 - DNA, 25 bp, Homo sapien
actggagtccacagccgtctcccca

SEQ ID NO: 2687588 - DNA, 25 bp, Homo sapien
ggccactctgtaccaagatgcaggg

SEQ ID NO: 2687589 - DNA, 25 bp, Homo sapien
aaagtccagatggagccagcactcc

SEQ ID NO: 2687590 - DNA, 25 bp, Homo sapien
ggaagagaggccactctgtaccaag

SEQ ID NO: 2687591 - DNA, 25 bp, Homo sapien
gtggagacagcatgccggtcctccc

SEQ ID NO: 2687592 - DNA, 25 bp, Homo sapien
aaaaatgggactattttggctctgt

SEQ ID NO: 2687593 - DNA, 25 bp, Homo sapien
cacagcaaatcgggacctgggcctg

SEQ ID NO: 2687594 - DNA, 25 bp, Homo sapien
cacacagcaaatcgggacctgggcc

SEQ ID NO: 2687595 - DNA, 25 bp, Homo sapien
tcacacagcaaatcgggacctgggc

SEQ ID NO: 2687596 - DNA, 25 bp, Homo sapien
acacagcaaatcgggacctgggcct

SEQ ID NO: 2687597 - DNA, 25 bp, Homo sapien
tgagtttcaaatcggtgggggcaga

SEQ ID NO: 2687598 - DNA, 25 bp, Homo sapien
gagtttcaaatcggtgggggcagaa

SEQ ID NO: 2687599 - DNA, 25 bp, Homo sapien
tccaccagcagaaggcctccagatg

SEQ ID NO: 2687600 - DNA, 25 bp, Homo sapien
agcagaaggcctccagatgctttca

SEQ ID NO: 2687601 - DNA, 25 bp, Homo sapien
accagcagaaggcctccagatgctt

SEQ ID NO: 2687602 - DNA, 25 bp, Homo sapien
cagctccaccagcagaaggcctcca

SEQ ID NO: 2687603 - DNA, 25 bp, Homo sapien
aggacctgactctcgtttccttcca

SEQ ID NO: 2687604 - DNA, 25 bp, Homo sapien
gacctgactctcgtttccttccaag

SEQ ID NO: 2687605 - DNA, 25 bp, Homo sapien
ccacatgccaagtgtttggatggaa

SEQ ID NO: 2687606 - DNA, 25 bp, Homo sapien
ttggatggaaacaacagtggcaatg

SEQ ID NO: 2687607 - DNA, 25 bp, Homo sapien
ttctgtaactgtcaccaagttccct

SEQ ID NO: 2687608 - DNA, 25 bp, Homo sapien
gtatcctctttgtacaccagaatct

SEQ ID NO: 2687609 - DNA, 25 bp, Homo sapien
tgtaactgtcaccaagttccctgtc

SEQ ID NO: 2687610 - DNA, 25 bp, Homo sapien
tctttgtacaccagaatctttctgt

SEQ ID NO: 2687611 - DNA, 25 bp, Homo sapien
taatagctcgacattttgaggcctc

SEQ ID NO: 2687612 - DNA, 25 bp, Homo sapien
tccttttacagcgagggttctagct

SEQ ID NO: 2687613 - DNA, 25 bp, Homo sapien
ggttctagctccctggtccaggaat

SEQ ID NO: 2687614 - DNA, 25 bp, Homo sapien
tgctgtatggaatgtgatctgtcac

SEQ ID NO: 2687615 - DNA, 25 bp, Homo sapien
tttggctggcctttgaagaaactgg

SEQ ID NO: 2687616 - DNA, 25 bp, Homo sapien
cagcaatcataagaggcaggaacac

SEQ ID NO: 2687617 - DNA, 25 bp, Homo sapien
gattgctctggacctttttggaaaa

SEQ ID NO: 2687618 - DNA, 25 bp, Homo sapien
tgacagaatacatgcggattgctct

SEQ ID NO: 2687619 - DNA, 25 bp, Homo sapien
acattctgcatccttccaagatggc

SEQ ID NO: 2687620 - DNA, 25 bp, Homo sapien
tatggctcaagggttcagacatggt

SEQ ID NO: 2687621 - DNA, 25 bp, Homo sapien
gctgtccatccatgttatggctcaa

SEQ ID NO: 2687622 - DNA, 25 bp, Homo sapien
ttcagacatggtatagggaagatgg

SEQ ID NO: 2687623 - DNA, 25 bp, Homo sapien
cagggaaagacatgaactgctgtgc

SEQ ID NO: 2687624 - DNA, 25 bp, Homo sapien
ctttataaaagctctgttaccatca

SEQ ID NO: 2687625 - DNA, 25 bp, Homo sapien
atcttttcaggtaagaactccactt

SEQ ID NO: 2687626 - DNA, 25 bp, Homo sapien
taccatcagtgtcaccattaatctt

SEQ ID NO: 2687627 - DNA, 25 bp, Homo sapien
tcttttcccttcgagagtaatgcat

SEQ ID NO: 2687628 - DNA, 25 bp, Homo sapien
gggagattgagcctcacttaatgca

SEQ ID NO: 2687629 - DNA, 25 bp, Homo sapien
ggagattgagcctcacttaatgcag

SEQ ID NO: 2687630 - DNA, 25 bp, Homo sapien
tctgggagattgagcctcacttaat

SEQ ID NO: 2687631 - DNA, 25 bp, Homo sapien
tcatctgggagattgagcctcactt

SEQ ID NO: 2687632 - DNA, 25 bp, Homo sapien
ggctgccctggagtacttaggaaaa

SEQ ID NO: 2687633 - DNA, 25 bp, Homo sapien
catatataatagtgtggctgccctg

SEQ ID NO: 2687634 - DNA, 25 bp, Homo sapien
ccaactatgttaggagctgccgagt

SEQ ID NO: 2687635 - DNA, 25 bp, Homo sapien
gagtaatccgtcattggaccaccat

SEQ ID NO: 2687636 - DNA, 25 bp, Homo sapien
gggcaacttggcacttagaaccgca

SEQ ID NO: 2687637 - DNA, 25 bp, Homo sapien
ttagaaccgcagcagggacgtcggt

SEQ ID NO: 2687638 - DNA, 25 bp, Homo sapien
tcggtttgctatcgggactcggcga

SEQ ID NO: 2687639 - DNA, 25 bp, Homo sapien
ggacgtcggtttgctatcgggactc

SEQ ID NO: 2687640 - DNA, 25 bp, Homo sapien
ggattttggaatcctggcggaccca

SEQ ID NO: 2687641 - DNA, 25 bp, Homo sapien
gatggataattctagcgacccgcct

SEQ ID NO: 2687642 - DNA, 25 bp, Homo sapien
gaattcatcctttctcggccctcag

SEQ ID NO: 2687643 - DNA, 25 bp, Homo sapien
agagcgacggtctcacaggttccgg

SEQ ID NO: 2687644 - DNA, 25 bp, Homo sapien
tgcctgtttcagtctcagttgcctc

SEQ ID NO: 2687645 - DNA, 25 bp, Homo sapien
cattttgcttcgaaagagtcacata

SEQ ID NO: 2687646 - DNA, 25 bp, Homo sapien
tgttgacccacgaccaagagttcat

SEQ ID NO: 2687647 - DNA, 25 bp, Homo sapien
aagacagggcagaaataaggtacaa

SEQ ID NO: 2687648 - DNA, 25 bp, Homo sapien
caggtattgtaaggatgttgaccca

SEQ ID NO: 2687649 - DNA, 25 bp, Homo sapien
aaatggtgttctccacttgataaac

SEQ ID NO: 2687650 - DNA, 25 bp, Homo sapien
catctcagtgagtggtgttctaaat

SEQ ID NO: 2687651 - DNA, 25 bp, Homo sapien
gattgaacattgttcactgacaggc

SEQ ID NO: 2687652 - DNA, 25 bp, Homo sapien
gctaacaactgtgatctgcgattga

SEQ ID NO: 2687653 - DNA, 25 bp, Homo sapien
gatgctttctgaaggtatcccatat

SEQ ID NO: 2687654 - DNA, 25 bp, Homo sapien
tgttcaagagtcctgatatgacctg

SEQ ID NO: 2687655 - DNA, 25 bp, Homo sapien
ttctattgcctgagaatgttcaaga

SEQ ID NO: 2687656 - DNA, 25 bp, Homo sapien
tatgacatgggattagatgcaccaa

SEQ ID NO: 2687657 - DNA, 25 bp, Homo sapien
tcaatacaaccagggatgccacaga

SEQ ID NO: 2687658 - DNA, 25 bp, Homo sapien
tagtagtcctgtaggacaatcccac

SEQ ID NO: 2687659 - DNA, 25 bp, Homo sapien
acaaagtcctccacttgtgtgtctg

SEQ ID NO: 2687660 - DNA, 25 bp, Homo sapien
ccctaggacccaggttgctgattct

SEQ ID NO: 2687661 - DNA, 25 bp, Homo sapien
aataaagactcaaacgaccctggct

SEQ ID NO: 2687662 - DNA, 25 bp, Homo sapien
tcccttgcagggaaaatactataaa

SEQ ID NO: 2687663 - DNA, 25 bp, Homo sapien
tcaaggagggctgaattggtccagt

SEQ ID NO: 2687664 - DNA, 25 bp, Homo sapien
gttgccttaatggtgtgccctttag

SEQ ID NO: 2687665 - DNA, 25 bp, Homo sapien
gggtacggctgccagttttgctcat

SEQ ID NO: 2687666 - DNA, 25 bp, Homo sapien
tcagtttgcgggagggtacggctgc

SEQ ID NO: 2687667 - DNA, 25 bp, Homo sapien
cagtttgcgggagggtacggctgcc

SEQ ID NO: 2687668 - DNA, 25 bp, Homo sapien
agggtacggctgccagttttgctca

SEQ ID NO: 2687669 - DNA, 25 bp, Homo sapien
cacttagctgaataaacccatggcc

SEQ ID NO: 2687670 - DNA, 25 bp, Homo sapien
tcttcaacgagatcccactcaggtc

SEQ ID NO: 2687671 - DNA, 25 bp, Homo sapien
cccatggcctatttaataagggata

SEQ ID NO: 2687672 - DNA, 25 bp, Homo sapien
aacgagatcccactcaggtcttttc

SEQ ID NO: 2687673 - DNA, 25 bp, Homo sapien
ctgacccagcacatcccagactcag

SEQ ID NO: 2687674 - DNA, 25 bp, Homo sapien
tcaatggggacataggaatcaggct

SEQ ID NO: 2687675 - DNA, 25 bp, Homo sapien
ggaatcaggcttttgagattcattc

SEQ ID NO: 2687676 - DNA, 25 bp, Homo sapien
tggtgggtcgggcttataattctgt

SEQ ID NO: 2687677 - DNA, 25 bp, Homo sapien
cagagtctgtgatttccatctttat

SEQ ID NO: 2687678 - DNA, 25 bp, Homo sapien
ttcaacctttatccactccctcttg

SEQ ID NO: 2687679 - DNA, 25 bp, Homo sapien
cgctctaatagtccccagagtctgt

SEQ ID NO: 2687680 - DNA, 25 bp, Homo sapien
cctgcgtcagttcacttgggataat

SEQ ID NO: 2687681 - DNA, 25 bp, Homo sapien
gagcagtagcctggatccttacaac

SEQ ID NO: 2687682 - DNA, 25 bp, Homo sapien
gagccactgaatagcctggatcaca

SEQ ID NO: 2687683 - DNA, 25 bp, Homo sapien
ccttacaacagcgacaatgatccat

SEQ ID NO: 2687684 - DNA, 25 bp, Homo sapien
gacggcatctcgataggtctcctga

SEQ ID NO: 2687685 - DNA, 25 bp, Homo sapien
gatggcctgtttcatgagttcaaag

SEQ ID NO: 2687686 - DNA, 25 bp, Homo sapien
agctcttgtcctagctgagtgagga

SEQ ID NO: 2687687 - DNA, 25 bp, Homo sapien
caaaatcaatcagctgtcgggttct

SEQ ID NO: 2687688 - DNA, 25 bp, Homo sapien
aaggcttcagggatgtaagggtcaa

SEQ ID NO: 2687689 - DNA, 25 bp, Homo sapien
tcattggccggaattaggtcacttc

SEQ ID NO: 2687690 - DNA, 25 bp, Homo sapien
tcaccggaacggaagcagatctatc

SEQ ID NO: 2687691 - DNA, 25 bp, Homo sapien
caataactgggtctaccaggctgac

SEQ ID NO: 2687692 - DNA, 25 bp, Homo sapien
taaccagctaccatcccttatgagg

SEQ ID NO: 2687693 - DNA, 25 bp, Homo sapien
tatttgccgacctcttggatgtacc

SEQ ID NO: 2687694 - DNA, 25 bp, Homo sapien
gaaataaagccatgacactactgtg

SEQ ID NO: 2687695 - DNA, 25 bp, Homo sapien
gaaggccatccgagagaaatatact

SEQ ID NO: 2687696 - DNA, 25 bp, Homo sapien
gaagacttaacgcttcaggatggca

SEQ ID NO: 2687697 - DNA, 25 bp, Homo sapien
gccgcttcctcagagccggctgcgg

SEQ ID NO: 2687698 - DNA, 25 bp, Homo sapien
gggaggcctcgacccggcgaggtga

SEQ ID NO: 2687699 - DNA, 25 bp, Homo sapien
ggcagcctcacccttttgcacatga

SEQ ID NO: 2687700 - DNA, 25 bp, Homo sapien
cgttctttcactcctcggcgcgtga

SEQ ID NO: 2687701 - DNA, 25 bp, Homo sapien
agtctgtttaggctctctctcttct

SEQ ID NO: 2687702 - DNA, 25 bp, Homo sapien
cagtctgtttaggctctctctcttc

SEQ ID NO: 2687703 - DNA, 25 bp, Homo sapien
tcagtctgtttaggctctctctctt

SEQ ID NO: 2687704 - DNA, 25 bp, Homo sapien
tgtgtaataaactccatcacagtgt

SEQ ID NO: 2687705 - DNA, 25 bp, Homo sapien
gttatgtgtaataaactccatcaca

SEQ ID NO: 2687706 - DNA, 25 bp, Homo sapien
tatgtgtaataaactccatcacagt

SEQ ID NO: 2687707 - DNA, 25 bp, Homo sapien
ttatgtgtaataaactccatcacag

SEQ ID NO: 2687708 - DNA, 25 bp, Homo sapien
aggaactgttgtccaaaaactgctt

SEQ ID NO: 2687709 - DNA, 25 bp, Homo sapien
gaaaaatgctgaggtgaaggaactg

SEQ ID NO: 2687710 - DNA, 25 bp, Homo sapien
gaggtgaaggaactgttgtccaaaa

SEQ ID NO: 2687711 - DNA, 25 bp, Homo sapien
ctgctttctcttcccgggcttactt

SEQ ID NO: 2687712 - DNA, 25 bp, Homo sapien
tcatcaacatcatttaatgagaact

SEQ ID NO: 2687713 - DNA, 25 bp, Homo sapien
tatggtaaaatgtcaacacatttgt

SEQ ID NO: 2687714 - DNA, 25 bp, Homo sapien
ttagatgactagcattaacatttcc

SEQ ID NO: 2687715 - DNA, 25 bp, Homo sapien
taatgagaactacatagggtaaaag

SEQ ID NO: 2687716 - DNA, 25 bp, Homo sapien
caacactgggttgctacatgtgcag

SEQ ID NO: 2687717 - DNA, 25 bp, Homo sapien
gcctggcaaccacaagctgtcaatg

SEQ ID NO: 2687718 - DNA, 25 bp, Homo sapien
tagatcataaatagacacggatggg

SEQ ID NO: 2687719 - DNA, 25 bp, Homo sapien
tcctatatggctggtgtcaacactg

SEQ ID NO: 2687720 - DNA, 25 bp, Homo sapien
tcttcacattcattcactgatttca

SEQ ID NO: 2687721 - DNA, 25 bp, Homo sapien
cttcacattcattcactgatttcat

SEQ ID NO: 2687722 - DNA, 25 bp, Homo sapien
gtatcttcacattcattcactgatt

SEQ ID NO: 2687723 - DNA, 25 bp, Homo sapien
cttgtttctttgtatcttcacattc

SEQ ID NO: 2687724 - DNA, 25 bp, Homo sapien
tttcccagaggataccagtggttgg

SEQ ID NO: 2687725 - DNA, 25 bp, Homo sapien
agatttcccagaggataccagtggt

SEQ ID NO: 2687726 - DNA, 25 bp, Homo sapien
cccagaggataccagtggttggttt

SEQ ID NO: 2687727 - DNA, 25 bp, Homo sapien
cagaggataccagtggttggtttga

SEQ ID NO: 2687728 - DNA, 25 bp, Homo sapien
aggcacagatgactgcagaggcttc

SEQ ID NO: 2687729 - DNA, 25 bp, Homo sapien
ctgcagaggcttccaggctttggtt

SEQ ID NO: 2687730 - DNA, 25 bp, Homo sapien
tccaggctttggttagggcagtcat

SEQ ID NO: 2687731 - DNA, 25 bp, Homo sapien
ggcacagatgactgcagaggcttcc

SEQ ID NO: 2687732 - DNA, 25 bp, Homo sapien
gaagcgggaaagaggaacgtctcaa

SEQ ID NO: 2687733 - DNA, 25 bp, Homo sapien
caagcagcgtcccagaagaaagcaa

SEQ ID NO: 2687734 - DNA, 25 bp, Homo sapien
tcaacgcggttagcgtccaagcagc

SEQ ID NO: 2687735 - DNA, 25 bp, Homo sapien
cagagatcttgagaatcgcagcgca

SEQ ID NO: 2687736 - DNA, 25 bp, Homo sapien
tactatggaatggtttaatcactat

SEQ ID NO: 2687737 - DNA, 25 bp, Homo sapien
cactattgcttgaagatgctttgta

SEQ ID NO: 2687738 - DNA, 25 bp, Homo sapien
atcactattgcttgaagatgctttg

SEQ ID NO: 2687739 - DNA, 25 bp, Homo sapien
tatggaatggtttaatcactattgc

SEQ ID NO: 2687740 - DNA, 25 bp, Homo sapien
cagcgttgtgttacagccattgtcc

SEQ ID NO: 2687741 - DNA, 25 bp, Homo sapien
cacatgaacagcgttgtgttacagc

SEQ ID NO: 2687742 - DNA, 25 bp, Homo sapien
gaacagcgttgtgttacagccattg

SEQ ID NO: 2687743 - DNA, 25 bp, Homo sapien
ctgtcacatgaacagcgttgtgtta

SEQ ID NO: 2687744 - DNA, 25 bp, Homo sapien
ctgaacaatgggtcctttactccgg

SEQ ID NO: 2687745 - DNA, 25 bp, Homo sapien
gacggctggccgcagcagaatggca

SEQ ID NO: 2687746 - DNA, 25 bp, Homo sapien
acggctggccgcagcagaatggcac

SEQ ID NO: 2687747 - DNA, 25 bp, Homo sapien
cctgaacaatgggtcctttactccg

SEQ ID NO: 2687748 - DNA, 25 bp, Homo sapien
gtctctctgatttaagtgtgtctgt

SEQ ID NO: 2687749 - DNA, 25 bp, Homo sapien
ctctctgatttaagtgtgtctgttt

SEQ ID NO: 2687750 - DNA, 25 bp, Homo sapien
tctttaatggatttgcaatgataat

SEQ ID NO: 2687751 - DNA, 25 bp, Homo sapien
tctgaaatccgcttgcttctccttc

SEQ ID NO: 2687752 - DNA, 25 bp, Homo sapien
ttctttaatggatttgcaatgataa

SEQ ID NO: 2687753 - DNA, 25 bp, Homo sapien
ctctgaaatccgcttgcttctcctt

SEQ ID NO: 2687754 - DNA, 25 bp, Homo sapien
agtcctttcgccacccacgaagtct

SEQ ID NO: 2687755 - DNA, 25 bp, Homo sapien
tttagcacagtcctttcgccaccca

SEQ ID NO: 2687756 - DNA, 25 bp, Homo sapien
tttcgccacccacgaagtctcctct

SEQ ID NO: 2687757 - DNA, 25 bp, Homo sapien
ccacccacgaagtctcctcttccca

SEQ ID NO: 2687758 - DNA, 25 bp, Homo sapien
ggcgctgaaggctgcatcttgccat

SEQ ID NO: 2687759 - DNA, 25 bp, Homo sapien
aacagactggcaaggcgctgaaggc

SEQ ID NO: 2687760 - DNA, 25 bp, Homo sapien
actggcaaggcgctgaaggctgcat

SEQ ID NO: 2687761 - DNA, 25 bp, Homo sapien
caaggcgctgaaggctgcatcttgc

SEQ ID NO: 2687762 - DNA, 25 bp, Homo sapien
tctgagacggattcacttggaacag

SEQ ID NO: 2687763 - DNA, 25 bp, Homo sapien
ctctccttctgagacggattcactt

SEQ ID NO: 2687764 - DNA, 25 bp, Homo sapien
aagaagccttctctggtcaccaaat

SEQ ID NO: 2687765 - DNA, 25 bp, Homo sapien
tggtcaccaaatccgatgatctctc

SEQ ID NO: 2687766 - DNA, 25 bp, Homo sapien
cagctgtacaacggactgtgagcaa

SEQ ID NO: 2687767 - DNA, 25 bp, Homo sapien
gctgcacttcccaacaaagcaggcc

SEQ ID NO: 2687768 - DNA, 25 bp, Homo sapien
acagctgtacaacggactgtgagca

SEQ ID NO: 2687769 - DNA, 25 bp, Homo sapien
ccacagctgtacaacggactgtgag

SEQ ID NO: 2687770 - DNA, 25 bp, Homo sapien
tcctggtgccagttaagatagaagt

SEQ ID NO: 2687771 - DNA, 25 bp, Homo sapien
tggtctctgttatgaccaggattta

SEQ ID NO: 2687772 - DNA, 25 bp, Homo sapien
tttatatggcaaacaagcaaagcct

SEQ ID NO: 2687773 - DNA, 25 bp, Homo sapien
ttttcctggtgccagttaagataga

SEQ ID NO: 2687774 - DNA, 25 bp, Homo sapien
ccacatctgttattaggccctttac

SEQ ID NO: 2687775 - DNA, 25 bp, Homo sapien
gagtgtatgtcggacacggtgccaa

SEQ ID NO: 2687776 - DNA, 25 bp, Homo sapien
ggccctttactgtgattgactggag

SEQ ID NO: 2687777 - DNA, 25 bp, Homo sapien
cacggtgccaaaaagctccccataa

SEQ ID NO: 2687778 - DNA, 25 bp, Homo sapien
acagaggtagctggcctcatttgtt

SEQ ID NO: 2687779 - DNA, 25 bp, Homo sapien
gctcaggcatgagttcaaagaaata

SEQ ID NO: 2687780 - DNA, 25 bp, Homo sapien
ctgtcccaatccagtggcataacaa

SEQ ID NO: 2687781 - DNA, 25 bp, Homo sapien
caatccagtggcataacaataaaca

SEQ ID NO: 2687782 - DNA, 25 bp, Homo sapien
taaacaaataaagctcaggcatgag

SEQ ID NO: 2687783 - DNA, 25 bp, Homo sapien
gctacacacattagggtcttcaaga

SEQ ID NO: 2687784 - DNA, 25 bp, Homo sapien
cacacattagggtcttcaagattca

SEQ ID NO: 2687785 - DNA, 25 bp, Homo sapien
ctttcccagtggctacacacattag

SEQ ID NO: 2687786 - DNA, 25 bp, Homo sapien
ccagtggctacacacattagggtct

SEQ ID NO: 2687787 - DNA, 25 bp, Homo sapien
tactggtccccattcttatcaaaac

SEQ ID NO: 2687788 - DNA, 25 bp, Homo sapien
aatgagccctactaccagaattatg

SEQ ID NO: 2687789 - DNA, 25 bp, Homo sapien
tagacgaacctgtcacctgtgcctt

SEQ ID NO: 2687790 - DNA, 25 bp, Homo sapien
cagaattatgcccttggagctcatc

SEQ ID NO: 2687791 - DNA, 25 bp, Homo sapien
tacatagtcttcaaattatgactgc

SEQ ID NO: 2687792 - DNA, 25 bp, Homo sapien
ggttataataatcatgccatgcaca

SEQ ID NO: 2687793 - DNA, 25 bp, Homo sapien
tcaatacccaccaatcattaggcaa

SEQ ID NO: 2687794 - DNA, 25 bp, Homo sapien
taagtgactacacctattttgctca

SEQ ID NO: 2687795 - DNA, 25 bp, Homo sapien
aagagacagaactccatagctctca

SEQ ID NO: 2687796 - DNA, 25 bp, Homo sapien
agagacagaactccatagctctcac

SEQ ID NO: 2687797 - DNA, 25 bp, Homo sapien
cagtgcagctcgtgtagtaaatttg

SEQ ID NO: 2687798 - DNA, 25 bp, Homo sapien
tatgactcttgcacagtcactgagt

SEQ ID NO: 2687799 - DNA, 25 bp, Homo sapien
gccgcgtgcatttaaaccagtttag

SEQ ID NO: 2687800 - DNA, 25 bp, Homo sapien
tcaaagggatgtgggtatgactctt

SEQ ID NO: 2687801 - DNA, 25 bp, Homo sapien
tcttctccccatgtcgataggctgt

SEQ ID NO: 2687802 - DNA, 25 bp, Homo sapien
gacttgcgcctatacatagtcttct

SEQ ID NO: 2687803 - DNA, 25 bp, Homo sapien
atttccccgctttcataaaatccag

SEQ ID NO: 2687804 - DNA, 25 bp, Homo sapien
taaaatccaggacaacactgagact

SEQ ID NO: 2687805 - DNA, 25 bp, Homo sapien
tctctctggattaaccaatccttcc

SEQ ID NO: 2687806 - DNA, 25 bp, Homo sapien
gaagccaagaacatccgactgagaa

SEQ ID NO: 2687807 - DNA, 25 bp, Homo sapien
acagagggtagctgccaacttccca

SEQ ID NO: 2687808 - DNA, 25 bp, Homo sapien
actgagaatgtatggccagccttct

SEQ ID NO: 2687809 - DNA, 25 bp, Homo sapien
taacaaaaacagagttagcagactt

SEQ ID NO: 2687810 - DNA, 25 bp, Homo sapien
acaaaaacagagttagcagacttaa

SEQ ID NO: 2687811 - DNA, 25 bp, Homo sapien
ctaacaaaaacagagttagcagact

SEQ ID NO: 2687812 - DNA, 25 bp, Homo sapien
aaaaacagagttagcagacttaagt

SEQ ID NO: 2687813 - DNA, 25 bp, Homo sapien
tggacgcccccattagaacttgaac

SEQ ID NO: 2687814 - DNA, 25 bp, Homo sapien
acttgaactttgagttaccatttga

SEQ ID NO: 2687815 - DNA, 25 bp, Homo sapien
tgtccttcttacaagccacacttgc

SEQ ID NO: 2687816 - DNA, 25 bp, Homo sapien
gccaggcaataaagtgagttaccca

SEQ ID NO: 2687817 - DNA, 25 bp, Homo sapien
gctctggtaatcaattgtcacactc

SEQ ID NO: 2687818 - DNA, 25 bp, Homo sapien
tggtaatcaattgtcacactccttt

SEQ ID NO: 2687819 - DNA, 25 bp, Homo sapien
ttcactgctctggtaatcaattgtc

SEQ ID NO: 2687820 - DNA, 25 bp, Homo sapien
cactgctctggtaatcaattgtcac

SEQ ID NO: 2687821 - DNA, 25 bp, Homo sapien
ccacgtcggacaccatagcaacaga

SEQ ID NO: 2687822 - DNA, 25 bp, Homo sapien
tgaaccacgtcggacaccatagcaa

SEQ ID NO: 2687823 - DNA, 25 bp, Homo sapien
ggttcctctgaaccacgtcggacac

SEQ ID NO: 2687824 - DNA, 25 bp, Homo sapien
ctctgaaccacgtcggacaccatag

SEQ ID NO: 2687825 - DNA, 25 bp, Homo sapien
gcagaagtttaggttccgatagatg

SEQ ID NO: 2687826 - DNA, 25 bp, Homo sapien
cagagaccaacgacccaaactggaa

SEQ ID NO: 2687827 - DNA, 25 bp, Homo sapien
tatcttccctgctagcagagaccaa

SEQ ID NO: 2687828 - DNA, 25 bp, Homo sapien
cacggtatgtggacaaaaggccttc

SEQ ID NO: 2687829 - DNA, 25 bp, Homo sapien
gcaatacagcgaccatggacacatt

SEQ ID NO: 2687830 - DNA, 25 bp, Homo sapien
caggtgtttggagcaatacagcgac

SEQ ID NO: 2687831 - DNA, 25 bp, Homo sapien
tggacacatttatcagcacagtggg

SEQ ID NO: 2687832 - DNA, 25 bp, Homo sapien
cagcgaccatggacacatttatcag

SEQ ID NO: 2687833 - DNA, 25 bp, Homo sapien
cataatatccttcaaatggattccc

SEQ ID NO: 2687834 - DNA, 25 bp, Homo sapien
ttacagcagactttgctaggaaata

SEQ ID NO: 2687835 - DNA, 25 bp, Homo sapien
tgtgccttatgtttctggctcataa

SEQ ID NO: 2687836 - DNA, 25 bp, Homo sapien
gccagtcaatagatctttacagcag

SEQ ID NO: 2687837 - DNA, 25 bp, Homo sapien
actctccgcagacagcatcgatccc

SEQ ID NO: 2687838 - DNA, 25 bp, Homo sapien
tactctccgcagacagcatcgatcc

SEQ ID NO: 2687839 - DNA, 25 bp, Homo sapien
ctactctccgcagacagcatcgatc

SEQ ID NO: 2687840 - DNA, 25 bp, Homo sapien
ccctggctgcttcggatgctttgcc

SEQ ID NO: 2687841 - DNA, 25 bp, Homo sapien
aaggaaggacttcgcatcacgccct

SEQ ID NO: 2687842 - DNA, 25 bp, Homo sapien
ttcagctcctctatcaaactaagag

SEQ ID NO: 2687843 - DNA, 25 bp, Homo sapien
cgccctctctgtcgaaaacctttgg

SEQ ID NO: 2687844 - DNA, 25 bp, Homo sapien
aaaataagatatcagatatagccat

SEQ ID NO: 2687845 - DNA, 25 bp, Homo sapien
gaacatagaggacctatgtccatgt

SEQ ID NO: 2687846 - DNA, 25 bp, Homo sapien
ttacgagacaggattgcacacattg

SEQ ID NO: 2687847 - DNA, 25 bp, Homo sapien
cattgctgggaacatagaggaccta

SEQ ID NO: 2687848 - DNA, 25 bp, Homo sapien
tgcacacattgctgggaacatagag

SEQ ID NO: 2687849 - DNA, 25 bp, Homo sapien
gatatcagtgggtaagggagaacca

SEQ ID NO: 2687850 - DNA, 25 bp, Homo sapien
aaacagtggatatcagtgggtaagg

SEQ ID NO: 2687851 - DNA, 25 bp, Homo sapien
gaaccagatttcttcgcctctcggg

SEQ ID NO: 2687852 - DNA, 25 bp, Homo sapien
agaaacagtggatatcagtgggtaa

SEQ ID NO: 2687853 - DNA, 25 bp, Homo sapien
gacagtcgttaccataggtgccctg

SEQ ID NO: 2687854 - DNA, 25 bp, Homo sapien
cagcacagtggcaagccccggtgat

SEQ ID NO: 2687855 - DNA, 25 bp, Homo sapien
gagccccatttttgcactggcaccg

SEQ ID NO: 2687856 - DNA, 25 bp, Homo sapien
aggtggctccattctggcactggca

SEQ ID NO: 2687857 - DNA, 25 bp, Homo sapien
ccagtgacgtgatgacacactcctc

SEQ ID NO: 2687858 - DNA, 25 bp, Homo sapien
tgatgacacactcctccattttgac

SEQ ID NO: 2687859 - DNA, 25 bp, Homo sapien
gtgacgtgatgacacactcctccat

SEQ ID NO: 2687860 - DNA, 25 bp, Homo sapien
gacgtgatgacacactcctccattt

SEQ ID NO: 2687861 - DNA, 25 bp, Homo sapien
gacttggaaaattagatgggcctcc

SEQ ID NO: 2687862 - DNA, 25 bp, Homo sapien
acttggaaaattagatgggcctcca

SEQ ID NO: 2687863 - DNA, 25 bp, Homo sapien
cactggcattcttgggaacagttct

SEQ ID NO: 2687864 - DNA, 25 bp, Homo sapien
acacgtccctccattatggcactgg

SEQ ID NO: 2687865 - DNA, 25 bp, Homo sapien
cagttctttccaaagcgaccctcgg

SEQ ID NO: 2687866 - DNA, 25 bp, Homo sapien
tatcctggactgcaatgacattggc

SEQ ID NO: 2687867 - DNA, 25 bp, Homo sapien
ctttctaacatccggaactgctgct

SEQ ID NO: 2687868 - DNA, 25 bp, Homo sapien
tgcgccgctcacgtggtaacacttc

SEQ ID NO: 2687869 - DNA, 25 bp, Homo sapien
tcagcacagagaacgccataggtcc

SEQ ID NO: 2687870 - DNA, 25 bp, Homo sapien
acatttgatgccgtagagcccctca

SEQ ID NO: 2687871 - DNA, 25 bp, Homo sapien
ctgcttcacagaggcatgcgccgct

SEQ ID NO: 2687872 - DNA, 25 bp, Homo sapien
caaatggacatatcagctgcgctga

SEQ ID NO: 2687873 - DNA, 25 bp, Homo sapien
gatgcacgcgtaagtgagttgacac

SEQ ID NO: 2687874 - DNA, 25 bp, Homo sapien
gttgacacaatagggccctctgtgg

SEQ ID NO: 2687875 - DNA, 25 bp, Homo sapien
tgttgctccatagcaaatggacata

SEQ ID NO: 2687876 - DNA, 25 bp, Homo sapien
cacctgaaacagcagccgcattgac

SEQ ID NO: 2687877 - DNA, 25 bp, Homo sapien
tccacctgaaacagcagccgcattg

SEQ ID NO: 2687878 - DNA, 25 bp, Homo sapien
gtctccacctgaaacagcagccgca

SEQ ID NO: 2687879 - DNA, 25 bp, Homo sapien
acctgaaacagcagccgcattgacc

SEQ ID NO: 2687880 - DNA, 25 bp, Homo sapien
tggctgaaacctgatgggtactaca

SEQ ID NO: 2687881 - DNA, 25 bp, Homo sapien
acaggaatgttgtatgaaatcagca

SEQ ID NO: 2687882 - DNA, 25 bp, Homo sapien
caatgatcactaaatgtgtgggtaa

SEQ ID NO: 2687883 - DNA, 25 bp, Homo sapien
cattcccaggcttggtatgatttaa

SEQ ID NO: 2687884 - DNA, 25 bp, Homo sapien
ctcattacagtagagtcctgaccag

SEQ ID NO: 2687885 - DNA, 25 bp, Homo sapien
aatccaggagaacatgtctcattac

SEQ ID NO: 2687886 - DNA, 25 bp, Homo sapien
caggagaacatgtctcattacagta

SEQ ID NO: 2687887 - DNA, 25 bp, Homo sapien
cattacagtagagtcctgaccagcc

SEQ ID NO: 2687888 - DNA, 25 bp, Homo sapien
aatcctggggcacaggtgcactttc

SEQ ID NO: 2687889 - DNA, 25 bp, Homo sapien
tcctggggcacaggtgcactttcca

SEQ ID NO: 2687890 - DNA, 25 bp, Homo sapien
cctggggcacaggtgcactttccag

SEQ ID NO: 2687891 - DNA, 25 bp, Homo sapien
tgaatcctggggcacaggtgcactt

SEQ ID NO: 2687892 - DNA, 25 bp, Homo sapien
cactggaggtcatataaatcatggt

SEQ ID NO: 2687893 - DNA, 25 bp, Homo sapien
tagttttaccagttttcgcagtcat

SEQ ID NO: 2687894 - DNA, 25 bp, Homo sapien
tattgagatgcttcacactgcaccc

SEQ ID NO: 2687895 - DNA, 25 bp, Homo sapien
gatgactttagcacattcactgtat

SEQ ID NO: 2687896 - DNA, 25 bp, Homo sapien
gaggaacagtttatcccataggttc

SEQ ID NO: 2687897 - DNA, 25 bp, Homo sapien
agtacaagacccgtccacaggagag

SEQ ID NO: 2687898 - DNA, 25 bp, Homo sapien
tacagccacagcgagaggaacagtt

SEQ ID NO: 2687899 - DNA, 25 bp, Homo sapien
gcagactgcatcatttttacagcca

SEQ ID NO: 2687900 - DNA, 25 bp, Homo sapien
gcagcagagagccttgttgagcctt

SEQ ID NO: 2687901 - DNA, 25 bp, Homo sapien
agcagagagccttgttgagcctttc

SEQ ID NO: 2687902 - DNA, 25 bp, Homo sapien
tgtgcgacaagaacgccagagcacg

SEQ ID NO: 2687903 - DNA, 25 bp, Homo sapien
agcacgtgagcgaacaaaggcagca

SEQ ID NO: 2687904 - DNA, 25 bp, Homo sapien
gtgcacacgtgcaggtcccgtccag

SEQ ID NO: 2687905 - DNA, 25 bp, Homo sapien
tcccgtccagggtgttgcaggctcc

SEQ ID NO: 2687906 - DNA, 25 bp, Homo sapien
agggaagttcgcatttctccccgcg

SEQ ID NO: 2687907 - DNA, 25 bp, Homo sapien
ttaagttacagccaaagccccatgt

SEQ ID NO: 2687908 - DNA, 25 bp, Homo sapien
cataggcgttttccgtcagggcgct

SEQ ID NO: 2687909 - DNA, 25 bp, Homo sapien
taggcgttttccgtcagggcgctga

SEQ ID NO: 2687910 - DNA, 25 bp, Homo sapien
tcataggcgttttccgtcagggcgc

SEQ ID NO: 2687911 - DNA, 25 bp, Homo sapien
ataggcgttttccgtcagggcgctg

SEQ ID NO: 2687912 - DNA, 25 bp, Homo sapien
gggaggcagcggcaatggcccgtgg

SEQ ID NO: 2687913 - DNA, 25 bp, Homo sapien
tggtagggtggcagccatctgcgtg

SEQ ID NO: 2687914 - DNA, 25 bp, Homo sapien
cggcaatggcccgtggtagggtggc

SEQ ID NO: 2687915 - DNA, 25 bp, Homo sapien
gcccgtggtagggtggcagccatct

SEQ ID NO: 2687916 - DNA, 25 bp, Homo sapien
cactactgaagaggttgctggtgac

SEQ ID NO: 2687917 - DNA, 25 bp, Homo sapien
agaagctctcaacattttccaaggg

SEQ ID NO: 2687918 - DNA, 25 bp, Homo sapien
catattgatgttaccattcacatgg

SEQ ID NO: 2687919 - DNA, 25 bp, Homo sapien
tattgttaagtggacagtattcccc

SEQ ID NO: 2687920 - DNA, 25 bp, Homo sapien
acagtctgaaccttaacatggaagc

SEQ ID NO: 2687921 - DNA, 25 bp, Homo sapien
cagtaccacgatgctgagacggtca

SEQ ID NO: 2687922 - DNA, 25 bp, Homo sapien
gtaatcaggcaaaaagtcaccacag

SEQ ID NO: 2687923 - DNA, 25 bp, Homo sapien
gaagcagtcccaaactataatgtga

SEQ ID NO: 2687924 - DNA, 25 bp, Homo sapien
gccccagcgtccctcagcacacacg

SEQ ID NO: 2687925 - DNA, 25 bp, Homo sapien
ctcagcacacacgctgtcacagtgg

SEQ ID NO: 2687926 - DNA, 25 bp, Homo sapien
ggggccccagcgtccctcagcacac

SEQ ID NO: 2687927 - DNA, 25 bp, Homo sapien
cagcacacacgctgtcacagtggac

SEQ ID NO: 2687928 - DNA, 25 bp, Homo sapien
cctctgacaagtggtgcctcggaag

SEQ ID NO: 2687929 - DNA, 25 bp, Homo sapien
aagcctggtgcacactcgcagatgc

SEQ ID NO: 2687930 - DNA, 25 bp, Homo sapien
tggtgcctcggaagcctggtgcaca

SEQ ID NO: 2687931 - DNA, 25 bp, Homo sapien
acactcgcagatgccatcatcaggg

SEQ ID NO: 2687932 - DNA, 25 bp, Homo sapien
cactgtgggcatgtctggctgcagc

SEQ ID NO: 2687933 - DNA, 25 bp, Homo sapien
acacaggccggtgatgtggtggcag

SEQ ID NO: 2687934 - DNA, 25 bp, Homo sapien
ggctgcagcgatgcccataaaaacc

SEQ ID NO: 2687935 - DNA, 25 bp, Homo sapien
agggcccgctgctgtgaacgcactg

SEQ ID NO: 2687936 - DNA, 25 bp, Homo sapien
ccaaccggggtaacactgacaagat

SEQ ID NO: 2687937 - DNA, 25 bp, Homo sapien
cgttgttggtgcaggtacaaattcc

SEQ ID NO: 2687938 - DNA, 25 bp, Homo sapien
caagatctgtcaatggggttacagg

SEQ ID NO: 2687939 - DNA, 25 bp, Homo sapien
gtcactgccaatccaaccggggtaa

SEQ ID NO: 2687940 - DNA, 25 bp, Homo sapien
acaggcaacactatagtctccattc

SEQ ID NO: 2687941 - DNA, 25 bp, Homo sapien
tggagtgattattgggacaggcaac

SEQ ID NO: 2687942 - DNA, 25 bp, Homo sapien
cagcttcctgtggagtgattattgg

SEQ ID NO: 2687943 - DNA, 25 bp, Homo sapien
tgattattgggacaggcaacactat

SEQ ID NO: 2687944 - DNA, 25 bp, Homo sapien
gaaattacaggtatggagaagtcca

SEQ ID NO: 2687945 - DNA, 25 bp, Homo sapien
aaattacaggtatggagaagtccat

SEQ ID NO: 2687946 - DNA, 25 bp, Homo sapien
ctgaaattacaggtatggagaagtc

SEQ ID NO: 2687947 - DNA, 25 bp, Homo sapien
tgaaattacaggtatggagaagtcc

SEQ ID NO: 2687948 - DNA, 25 bp, Homo sapien
acgtgtggatgcagtttgggcccca

SEQ ID NO: 2687949 - DNA, 25 bp, Homo sapien
cagccaggagtgcatttacattccc

SEQ ID NO: 2687950 - DNA, 25 bp, Homo sapien
ccatcgtaggcgctgcagaaagctc

SEQ ID NO: 2687951 - DNA, 25 bp, Homo sapien
cattatggcagttgcacgtgtggat

SEQ ID NO: 2687952 - DNA, 25 bp, Homo sapien
agctgccctgcaagagtgtcttggg

SEQ ID NO: 2687953 - DNA, 25 bp, Homo sapien
tggcagctgccctgcaagagtgtct

SEQ ID NO: 2687954 - DNA, 25 bp, Homo sapien
gcagctgccctgcaagagtgtcttg

SEQ ID NO: 2687955 - DNA, 25 bp, Homo sapien
ctggcagctgccctgcaagagtgtc

SEQ ID NO: 2687956 - DNA, 25 bp, Homo sapien
cagtgcacaatcttttccataaaac

SEQ ID NO: 2687957 - DNA, 25 bp, Homo sapien
agtgcacaatcttttccataaaacc

SEQ ID NO: 2687958 - DNA, 25 bp, Homo sapien
tacactgcccagaaatgtggtcgca

SEQ ID NO: 2687959 - DNA, 25 bp, Homo sapien
tctgctcacagtgccgtcccatgaa

SEQ ID NO: 2687960 - DNA, 25 bp, Homo sapien
cagctccgttttgacattggcatat

SEQ ID NO: 2687961 - DNA, 25 bp, Homo sapien
tcccatgaatccagtgcggcaagta

SEQ ID NO: 2687962 - DNA, 25 bp, Homo sapien
tccaatgtgagacccgggttctgcc

SEQ ID NO: 2687963 - DNA, 25 bp, Homo sapien
tctgcctctgccatgaagaaagctc

SEQ ID NO: 2687964 - DNA, 25 bp, Homo sapien
tgagtaaccagcgatgatcccaggg

SEQ ID NO: 2687965 - DNA, 25 bp, Homo sapien
gatcttttaaggctctgagcagcca

SEQ ID NO: 2687966 - DNA, 25 bp, Homo sapien
aaagggtggcaatgtttgcatggat

SEQ ID NO: 2687967 - DNA, 25 bp, Homo sapien
gatgagaagttgttaatggaagcag

SEQ ID NO: 2687968 - DNA, 25 bp, Homo sapien
gcagtataaaagtacgatctagaga

SEQ ID NO: 2687969 - DNA, 25 bp, Homo sapien
cgatctagagaaggttgttgaaagg

SEQ ID NO: 2687970 - DNA, 25 bp, Homo sapien
tatggagagtctgtggaattcccat

SEQ ID NO: 2687971 - DNA, 25 bp, Homo sapien
gataatcactaagggcaatttgata

SEQ ID NO: 2687972 - DNA, 25 bp, Homo sapien
ggagagtctgtggaattcccatgga

SEQ ID NO: 2687973 - DNA, 25 bp, Homo sapien
caatttgatacaagtccaccaggca

SEQ ID NO: 2687974 - DNA, 25 bp, Homo sapien
tcctattgaggctgacttgtacccc

SEQ ID NO: 2687975 - DNA, 25 bp, Homo sapien
caagagtgtcccagaactggacagc

SEQ ID NO: 2687976 - DNA, 25 bp, Homo sapien
tttggagcaaggctgtctctgactg

SEQ ID NO: 2687977 - DNA, 25 bp, Homo sapien
gaaagtcaaatgtagctttccaacc

SEQ ID NO: 2687978 - DNA, 25 bp, Homo sapien
gctgcagtaacaggtcccagtgatg

SEQ ID NO: 2687979 - DNA, 25 bp, Homo sapien
catatctggcgacagccatagccat

SEQ ID NO: 2687980 - DNA, 25 bp, Homo sapien
aggtggagttgttcagacaatcaca

SEQ ID NO: 2687981 - DNA, 25 bp, Homo sapien
agtaacaggtcccagtgatgtggtc

SEQ ID NO: 2687982 - DNA, 25 bp, Homo sapien
caactaggacaagaatgatgatgcc

SEQ ID NO: 2687983 - DNA, 25 bp, Homo sapien
tgcaatggccccgatctggtaggaa

SEQ ID NO: 2687984 - DNA, 25 bp, Homo sapien
gtataatctgcattgacgaccctca

SEQ ID NO: 2687985 - DNA, 25 bp, Homo sapien
tgaacaatgccagtaggaagagaac

SEQ ID NO: 2687986 - DNA, 25 bp, Homo sapien
tgagcgtgtggtaactgggattggt

SEQ ID NO: 2687987 - DNA, 25 bp, Homo sapien
gattggtgaagtagtggctattagc

SEQ ID NO: 2687988 - DNA, 25 bp, Homo sapien
gcgtttccaccattgctgtgaggaa

SEQ ID NO: 2687989 - DNA, 25 bp, Homo sapien
tggctattagcgtttccaccattgc

SEQ ID NO: 2687990 - DNA, 25 bp, Homo sapien
cagtcagccggcaatgtcccagtgc

SEQ ID NO: 2687991 - DNA, 25 bp, Homo sapien
tgaggtagccgccatgtttccagtc

SEQ ID NO: 2687992 - DNA, 25 bp, Homo sapien
cgccatgtttccagtcagccggcaa

SEQ ID NO: 2687993 - DNA, 25 bp, Homo sapien
gagctcgttgaggtagccgccatgt

SEQ ID NO: 2687994 - DNA, 25 bp, Homo sapien
tatagcttctgtcaagtccaaaagc

SEQ ID NO: 2687995 - DNA, 25 bp, Homo sapien
tcccatatagcttctgtcaagtcca

SEQ ID NO: 2687996 - DNA, 25 bp, Homo sapien
ccatatagcttctgtcaagtccaaa

SEQ ID NO: 2687997 - DNA, 25 bp, Homo sapien
ttttcccatatagcttctgtcaagt

SEQ ID NO: 2687998 - DNA, 25 bp, Homo sapien
cacactctgagcttttcgggataag

SEQ ID NO: 2687999 - DNA, 25 bp, Homo sapien
tctcagaactgcttagggagcagtt

SEQ ID NO: 2688000 - DNA, 25 bp, Homo sapien
tgagttattgatctctgcatatggg

SEQ ID NO: 2688001 - DNA, 25 bp, Homo sapien
gggaatctcttcgtgccggcgattt

SEQ ID NO: 2688002 - DNA, 25 bp, Homo sapien
gggagagacgcccattattgctgaa

SEQ ID NO: 2688003 - DNA, 25 bp, Homo sapien
tcataatgacaagggatgtgactgt

SEQ ID NO: 2688004 - DNA, 25 bp, Homo sapien
cttgcttaggggaggatgaactgtc

SEQ ID NO: 2688005 - DNA, 25 bp, Homo sapien
tattgctgaatactccttggacaac

SEQ ID NO: 2688006 - DNA, 25 bp, Homo sapien
aaggaccccgatggctattgactca

SEQ ID NO: 2688007 - DNA, 25 bp, Homo sapien
tatcacctagagttgggagccagcc

SEQ ID NO: 2688008 - DNA, 25 bp, Homo sapien
tattccaactcgatacctggcaggg

SEQ ID NO: 2688009 - DNA, 25 bp, Homo sapien
tctccgagggagttctgcaagttca

SEQ ID NO: 2688010 - DNA, 25 bp, Homo sapien
acgatgaaagtttatcatctttgga

SEQ ID NO: 2688011 - DNA, 25 bp, Homo sapien
ggctaagaacgatgaaagtttatca

SEQ ID NO: 2688012 - DNA, 25 bp, Homo sapien
tgtaggctaagaacgatgaaagttt

SEQ ID NO: 2688013 - DNA, 25 bp, Homo sapien
aatgtaggctaagaacgatgaaagt

SEQ ID NO: 2688014 - DNA, 25 bp, Homo sapien
agtccatcatgtaggttccttctct

SEQ ID NO: 2688015 - DNA, 25 bp, Homo sapien
ggagcatctgtctcaccagtccatc

SEQ ID NO: 2688016 - DNA, 25 bp, Homo sapien
gccagtccatcatgtaggttccttc

SEQ ID NO: 2688017 - DNA, 25 bp, Homo sapien
aggagcatctgtctcaccagtccat

SEQ ID NO: 2688018 - DNA, 25 bp, Homo sapien
cacaggtgatcaagaaaggccttcc

SEQ ID NO: 2688019 - DNA, 25 bp, Homo sapien
tgatagtcctataccacacaggtga

SEQ ID NO: 2688020 - DNA, 25 bp, Homo sapien
cagtcaatcaagcagggtaatagga

SEQ ID NO: 2688021 - DNA, 25 bp, Homo sapien
tccagaagtgatgactgagcagcag

SEQ ID NO: 2688022 - DNA, 25 bp, Homo sapien
tggctgatcatattcaaaagcgctg

SEQ ID NO: 2688023 - DNA, 25 bp, Homo sapien
cagaggatttggatactggctgatc

SEQ ID NO: 2688024 - DNA, 25 bp, Homo sapien
aaagcgctgggttcaccagccagct

SEQ ID NO: 2688025 - DNA, 25 bp, Homo sapien
tattcaaaagcgctgggttcaccag

SEQ ID NO: 2688026 - DNA, 25 bp, Homo sapien
cctgtgtttcaagttggtaaatgag

SEQ ID NO: 2688027 - DNA, 25 bp, Homo sapien
ctttgttcacgagaatctagcagtt

SEQ ID NO: 2688028 - DNA, 25 bp, Homo sapien
ttcaagttggtaaatgaggcctgtt

SEQ ID NO: 2688029 - DNA, 25 bp, Homo sapien
tctagcagttttaggtaccattgag

SEQ ID NO: 2688030 - DNA, 25 bp, Homo sapien
aaagtgcctgcgtggtcgctgaaga

SEQ ID NO: 2688031 - DNA, 25 bp, Homo sapien
cttggagaagacaacgaaggcgcac

SEQ ID NO: 2688032 - DNA, 25 bp, Homo sapien
caccctggaagttacctcggcgtgt

SEQ ID NO: 2688033 - DNA, 25 bp, Homo sapien
gaggtcgggacgtagaactacagct

SEQ ID NO: 2688034 - DNA, 25 bp, Homo sapien
atgtgcactcctgcctgctgcaccc

SEQ ID NO: 2688035 - DNA, 25 bp, Homo sapien
ttgcgatgtgcactcctgcctgctg

SEQ ID NO: 2688036 - DNA, 25 bp, Homo sapien
tgcactcctgcctgctgcaccccgc

SEQ ID NO: 2688037 - DNA, 25 bp, Homo sapien
cttgcgatgtgcactcctgcctgct

SEQ ID NO: 2688038 - DNA, 25 bp, Homo sapien
aggagtcccaggtggtgttgtctct

SEQ ID NO: 2688039 - DNA, 25 bp, Homo sapien
gagtcccaggtggtgttgtctctat

SEQ ID NO: 2688040 - DNA, 25 bp, Homo sapien
ggagtcccaggtggtgttgtctcta

SEQ ID NO: 2688041 - DNA, 25 bp, Homo sapien
agtcccaggtggtgttgtctctatt

SEQ ID NO: 2688042 - DNA, 25 bp, Homo sapien
caaagctaacacatgctttttagga

SEQ ID NO: 2688043 - DNA, 25 bp, Homo sapien
aacacacgagatgttagacaactac

SEQ ID NO: 2688044 - DNA, 25 bp, Homo sapien
aaagtccacctaaagcaaaacactg

SEQ ID NO: 2688045 - DNA, 25 bp, Homo sapien
tgagaaaagatgatagtatcttcac

SEQ ID NO: 2688046 - DNA, 25 bp, Homo sapien
gaaggggcggctgaggagtagagta

SEQ ID NO: 2688047 - DNA, 25 bp, Homo sapien
gaggaggcacaaaaggtaatggtgc

SEQ ID NO: 2688048 - DNA, 25 bp, Homo sapien
gagtatgcgagtggtgggaaggact

SEQ ID NO: 2688049 - DNA, 25 bp, Homo sapien
aggaggaggcacaaaaggtaatggt

SEQ ID NO: 2688050 - DNA, 25 bp, Homo sapien
aagtgagatacaggaggattaccga

SEQ ID NO: 2688051 - DNA, 25 bp, Homo sapien
catagaagtaacaagtggtgggaca

SEQ ID NO: 2688052 - DNA, 25 bp, Homo sapien
gaaaatcctgatataggaggacccg

SEQ ID NO: 2688053 - DNA, 25 bp, Homo sapien
aacaggaggtggcatagaagtaaca

SEQ ID NO: 2688054 - DNA, 25 bp, Homo sapien
gaccccgcccactgctaataagaag

SEQ ID NO: 2688055 - DNA, 25 bp, Homo sapien
cattaatgcagagaaagtgggaccc

SEQ ID NO: 2688056 - DNA, 25 bp, Homo sapien
tactccctggaacagtcagtcctga

SEQ ID NO: 2688057 - DNA, 25 bp, Homo sapien
gtaaatcagcaattccatgcctagg

SEQ ID NO: 2688058 - DNA, 25 bp, Homo sapien
tgagtaataggagttggcaaaagac

SEQ ID NO: 2688059 - DNA, 25 bp, Homo sapien
tccctgtgccagagatgtcaaactg

SEQ ID NO: 2688060 - DNA, 25 bp, Homo sapien
tcatcctgacctctagtaattctag

SEQ ID NO: 2688061 - DNA, 25 bp, Homo sapien
ttgctcctctgggaaagtaatggct

SEQ ID NO: 2688062 - DNA, 25 bp, Homo sapien
atacacacttcatgtatacatcatg

SEQ ID NO: 2688063 - DNA, 25 bp, Homo sapien
gccattccagaatgtatacacactt

SEQ ID NO: 2688064 - DNA, 25 bp, Homo sapien
cacacttcatgtatacatcatgttg

SEQ ID NO: 2688065 - DNA, 25 bp, Homo sapien
gaagagatctcttgtacaacagggt

SEQ ID NO: 2688066 - DNA, 25 bp, Homo sapien
caagacctatagagttgaactgggt

SEQ ID NO: 2688067 - DNA, 25 bp, Homo sapien
ctcttaacgagggacaaaatgttgt

SEQ ID NO: 2688068 - DNA, 25 bp, Homo sapien
tgaactgggtattacaactcatgac

SEQ ID NO: 2688069 - DNA, 25 bp, Homo sapien
acacatgctcttaacgagggacaaa

SEQ ID NO: 2688070 - DNA, 25 bp, Homo sapien
ttgtcttatcaagcacagacttcac

SEQ ID NO: 2688071 - DNA, 25 bp, Homo sapien
catgctttctactgaatgttttgtc

SEQ ID NO: 2688072 - DNA, 25 bp, Homo sapien
gcgttgtaatcatgctttctactga

SEQ ID NO: 2688073 - DNA, 25 bp, Homo sapien
atgccagggtccagcgttgtaatca

SEQ ID NO: 2688074 - DNA, 25 bp, Homo sapien
tatcaactgtctggatgattctgga

SEQ ID NO: 2688075 - DNA, 25 bp, Homo sapien
gatgattagtgttcagaggtggtta

SEQ ID NO: 2688076 - DNA, 25 bp, Homo sapien
gatattattaactagatttgcttcc

SEQ ID NO: 2688077 - DNA, 25 bp, Homo sapien
taataattggtcactaagccttgtg

SEQ ID NO: 2688078 - DNA, 25 bp, Homo sapien
tctactacaagggaagcaaagtggc

SEQ ID NO: 2688079 - DNA, 25 bp, Homo sapien
caatacagctccaccaagttgtgtg

SEQ ID NO: 2688080 - DNA, 25 bp, Homo sapien
taaagacacttaacaattgctaggc

SEQ ID NO: 2688081 - DNA, 25 bp, Homo sapien
gaaatcgctgttcaggtacctgctg

SEQ ID NO: 2688082 - DNA, 25 bp, Homo sapien
gggcaatattggactgtccagcttc

SEQ ID NO: 2688083 - DNA, 25 bp, Homo sapien
gcatctcggacagcagcaactttta

SEQ ID NO: 2688084 - DNA, 25 bp, Homo sapien
ggtcactacaatatccagttcacct

SEQ ID NO: 2688085 - DNA, 25 bp, Homo sapien
tacaaccacagctaagccaaagacc

SEQ ID NO: 2688086 - DNA, 25 bp, Homo sapien
aataaaagcttatgggattcaaggg

SEQ ID NO: 2688087 - DNA, 25 bp, Homo sapien
catgactgtatgctggtaataacac

SEQ ID NO: 2688088 - DNA, 25 bp, Homo sapien
tatgaaagagaggacggaattcctg

SEQ ID NO: 2688089 - DNA, 25 bp, Homo sapien
tcttcataatacgatagggctgtct

SEQ ID NO: 2688090 - DNA, 25 bp, Homo sapien
gaagttttctactgacacagctgtc

SEQ ID NO: 2688091 - DNA, 25 bp, Homo sapien
gcagcaattctgcaatgaagttttc

SEQ ID NO: 2688092 - DNA, 25 bp, Homo sapien
cagttcgacgcaagctatctatccg

SEQ ID NO: 2688093 - DNA, 25 bp, Homo sapien
tgtttttcatggatcaccccagttc

SEQ ID NO: 2688094 - DNA, 25 bp, Homo sapien
tattgaaaacaactgtagtaccacc

SEQ ID NO: 2688095 - DNA, 25 bp, Homo sapien
ttagctaacccaaatcatgaaacag

SEQ ID NO: 2688096 - DNA, 25 bp, Homo sapien
tcctctccatgggaagggagaataa

SEQ ID NO: 2688097 - DNA, 25 bp, Homo sapien
aagtaagggtactcaaatatgcaac

SEQ ID NO: 2688098 - DNA, 25 bp, Homo sapien
catggacaggatcttcaaccaccaa

SEQ ID NO: 2688099 - DNA, 25 bp, Homo sapien
aatgccatggacaggatcttcaacc

SEQ ID NO: 2688100 - DNA, 25 bp, Homo sapien
tgccatggacaggatcttcaaccac

SEQ ID NO: 2688101 - DNA, 25 bp, Homo sapien
gccatggacaggatcttcaaccacc

SEQ ID NO: 2688102 - DNA, 25 bp, Homo sapien
cctgtgttaggacccgagaatctgc

SEQ ID NO: 2688103 - DNA, 25 bp, Homo sapien
tccccattaacgaggctaacagtcg

SEQ ID NO: 2688104 - DNA, 25 bp, Homo sapien
tgtatcaagtaatatccagtcctgg

SEQ ID NO: 2688105 - DNA, 25 bp, Homo sapien
ggcatgcctatgaatcccctgaata

SEQ ID NO: 2688106 - DNA, 25 bp, Homo sapien
tatcgctctggctgcactgtagatc

SEQ ID NO: 2688107 - DNA, 25 bp, Homo sapien
gaccacctcagattatagtcctggg

SEQ ID NO: 2688108 - DNA, 25 bp, Homo sapien
tgtagatcatctgccgacgggacat

SEQ ID NO: 2688109 - DNA, 25 bp, Homo sapien
aatgccatgtgccaatcagtccggc

SEQ ID NO: 2688110 - DNA, 25 bp, Homo sapien
gggtggcaggcgctgtttatacatg

SEQ ID NO: 2688111 - DNA, 25 bp, Homo sapien
ggtggcaggcgctgtttatacatgc

SEQ ID NO: 2688112 - DNA, 25 bp, Homo sapien
ctgggtggcaggcgctgtttataca

SEQ ID NO: 2688113 - DNA, 25 bp, Homo sapien
tggcaggcgctgtttatacatgccc

SEQ ID NO: 2688114 - DNA, 25 bp, Homo sapien
tgtggaacatctcccgacaagtagg

SEQ ID NO: 2688115 - DNA, 25 bp, Homo sapien
tacatgtgtacgtgatggccaaaaa

SEQ ID NO: 2688116 - DNA, 25 bp, Homo sapien
tagacgcaaatggtagagaaagcct

SEQ ID NO: 2688117 - DNA, 25 bp, Homo sapien
ccagccctgagatcgtgtgcacata

SEQ ID NO: 2688118 - DNA, 25 bp, Homo sapien
tcaccaggggcaggaaaatttctag

SEQ ID NO: 2688119 - DNA, 25 bp, Homo sapien
ctagcttcaaccaagccatggactg

SEQ ID NO: 2688120 - DNA, 25 bp, Homo sapien
tctagcttcaaccaagccatggact

SEQ ID NO: 2688121 - DNA, 25 bp, Homo sapien
atttctagcttcaaccaagccatgg

SEQ ID NO: 2688122 - DNA, 25 bp, Homo sapien
cgccaaggctagagcaggaggttca

SEQ ID NO: 2688123 - DNA, 25 bp, Homo sapien
ttacgaggaaattactagcactgcc

SEQ ID NO: 2688124 - DNA, 25 bp, Homo sapien
tcacacggttccgagcaggaggctt

SEQ ID NO: 2688125 - DNA, 25 bp, Homo sapien
taacaaccaggagttcttcggaaga

SEQ ID NO: 2688126 - DNA, 25 bp, Homo sapien
tctgttttgtgatactgggcaagca

SEQ ID NO: 2688127 - DNA, 25 bp, Homo sapien
tatactaaggaaaagtcgtcatgcc

SEQ ID NO: 2688128 - DNA, 25 bp, Homo sapien
ggaggctatccaaatgtcaagaaca

SEQ ID NO: 2688129 - DNA, 25 bp, Homo sapien
gaagagactggttcagcaagtcaca

SEQ ID NO: 2688130 - DNA, 25 bp, Homo sapien
ggaggcttccggttgataacaacca

SEQ ID NO: 2688131 - DNA, 25 bp, Homo sapien
gaggcttccggttgataacaaccat

SEQ ID NO: 2688132 - DNA, 25 bp, Homo sapien
taatgaaagttcaccttcccgccac

SEQ ID NO: 2688133 - DNA, 25 bp, Homo sapien
ctggtggtgttcataatgaaagttc

SEQ ID NO: 2688134 - DNA, 25 bp, Homo sapien
gccttgtttacaggtggtgatgata

SEQ ID NO: 2688135 - DNA, 25 bp, Homo sapien
taatagttgctgtcggggacgtgac

SEQ ID NO: 2688136 - DNA, 25 bp, Homo sapien
gtttgaaaaccacaggtgaagcctg

SEQ ID NO: 2688137 - DNA, 25 bp, Homo sapien
tgtttctttatgtttgaaaaccaca

SEQ ID NO: 2688138 - DNA, 25 bp, Homo sapien
ctttatgtttgaaaaccacaggtga

SEQ ID NO: 2688139 - DNA, 25 bp, Homo sapien
tgaaaaccacaggtgaagcctgaga

SEQ ID NO: 2688140 - DNA, 25 bp, Homo sapien
ccctgatggggctaccacttgtcct

SEQ ID NO: 2688141 - DNA, 25 bp, Homo sapien
gggctaccacttgtcctcctgacat

SEQ ID NO: 2688142 - DNA, 25 bp, Homo sapien
gatggggctaccacttgtcctcctg

SEQ ID NO: 2688143 - DNA, 25 bp, Homo sapien
cctgatggggctaccacttgtcctc

SEQ ID NO: 2688144 - DNA, 25 bp, Homo sapien
tcccgccactgagcactgctcaacc

SEQ ID NO: 2688145 - DNA, 25 bp, Homo sapien
agtcccgccactgagcactgctcaa

SEQ ID NO: 2688146 - DNA, 25 bp, Homo sapien
gtcccgccactgagcactgctcaac

SEQ ID NO: 2688147 - DNA, 25 bp, Homo sapien
tcagtcccgccactgagcactgctc

SEQ ID NO: 2688148 - DNA, 25 bp, Homo sapien
caatgtggttgagttattcagggtt

SEQ ID NO: 2688149 - DNA, 25 bp, Homo sapien
tggcaatgtggttgagttattcagg

SEQ ID NO: 2688150 - DNA, 25 bp, Homo sapien
actggcaatgtggttgagttattca

SEQ ID NO: 2688151 - DNA, 25 bp, Homo sapien
gcaatgtggttgagttattcagggt

SEQ ID NO: 2688152 - DNA, 25 bp, Homo sapien
gcatcagagctgaaaagacgggata

SEQ ID NO: 2688153 - DNA, 25 bp, Homo sapien
tataagccatgattgttaatggaaa

SEQ ID NO: 2688154 - DNA, 25 bp, Homo sapien
cagttgaacatggattgctcagcag

SEQ ID NO: 2688155 - DNA, 25 bp, Homo sapien
tgctcagcagtgcttcaagaggctg

SEQ ID NO: 2688156 - DNA, 25 bp, Homo sapien
ttcttatgccactccagaactctag

SEQ ID NO: 2688157 - DNA, 25 bp, Homo sapien
cctgtttcggattacatcttgtctc

SEQ ID NO: 2688158 - DNA, 25 bp, Homo sapien
tctatttagcatgttgctcttctta

SEQ ID NO: 2688159 - DNA, 25 bp, Homo sapien
agctcagcacaatacagctgtctat

SEQ ID NO: 2688160 - DNA, 25 bp, Homo sapien
tgtgtgaggcatcattaacggccaa

SEQ ID NO: 2688161 - DNA, 25 bp, Homo sapien
ccccgagttaaaggagcatcgtctt

SEQ ID NO: 2688162 - DNA, 25 bp, Homo sapien
tcccgaccacgctgtgtgaaagcag

SEQ ID NO: 2688163 - DNA, 25 bp, Homo sapien
gaacagttacaggtagttacaagcc

SEQ ID NO: 2688164 - DNA, 25 bp, Homo sapien
caaagtggcgttcctcatcccttgc

SEQ ID NO: 2688165 - DNA, 25 bp, Homo sapien
agcccagcaggcgtagtcattgcag

SEQ ID NO: 2688166 - DNA, 25 bp, Homo sapien
gtcattgcagccagggtcattcaca

SEQ ID NO: 2688167 - DNA, 25 bp, Homo sapien
tcacactcttagtcacttgctttag

SEQ ID NO: 2688168 - DNA, 25 bp, Homo sapien
tcctcatcacgcagtacatctgtgt

SEQ ID NO: 2688169 - DNA, 25 bp, Homo sapien
ttgtcaggtccatttgtgggtgctc

SEQ ID NO: 2688170 - DNA, 25 bp, Homo sapien
atattttaatcctgataggctttcc

SEQ ID NO: 2688171 - DNA, 25 bp, Homo sapien
caggtccatttgtgggtgctcagga

SEQ ID NO: 2688172 - DNA, 25 bp, Homo sapien
ccatcatcaatctgcggaggtcatg

SEQ ID NO: 2688173 - DNA, 25 bp, Homo sapien
agcacaggatatcctggttttcttt

SEQ ID NO: 2688174 - DNA, 25 bp, Homo sapien
catcatcaatctgcggaggtcatgg

SEQ ID NO: 2688175 - DNA, 25 bp, Homo sapien
gagcacaggatatcctggttttctt

SEQ ID NO: 2688176 - DNA, 25 bp, Homo sapien
caccggacaatgagaatgcccaaga

SEQ ID NO: 2688177 - DNA, 25 bp, Homo sapien
aaagaatccggaagcaccggacaat

SEQ ID NO: 2688178 - DNA, 25 bp, Homo sapien
tccagggacatgctagaatctgctg

SEQ ID NO: 2688179 - DNA, 25 bp, Homo sapien
gaatctgctgattcgttcccaaggg

SEQ ID NO: 2688180 - DNA, 25 bp, Homo sapien
aggccttcaagtccatcagcccagg

SEQ ID NO: 2688181 - DNA, 25 bp, Homo sapien
ctaagcaagggcatggtcgaactgc

SEQ ID NO: 2688182 - DNA, 25 bp, Homo sapien
gggcatggtcgaactgccctttctc

SEQ ID NO: 2688183 - DNA, 25 bp, Homo sapien
gccttcaagtccatcagcccaggta

SEQ ID NO: 2688184 - DNA, 25 bp, Homo sapien
aactactttgggtccattcagcaca

SEQ ID NO: 2688185 - DNA, 25 bp, Homo sapien
tctatgtcagtattaacgctcttgg

SEQ ID NO: 2688186 - DNA, 25 bp, Homo sapien
tattctttagtcagatcaggtggtg

SEQ ID NO: 2688187 - DNA, 25 bp, Homo sapien
ggacccagataggtgcccatgaaat

SEQ ID NO: 2688188 - DNA, 25 bp, Homo sapien
tagattataaatacagcctaacggg

SEQ ID NO: 2688189 - DNA, 25 bp, Homo sapien
caaaaaaggtaatgactagctgagg

SEQ ID NO: 2688190 - DNA, 25 bp, Homo sapien
ggaataagaggtattcacatctccc

SEQ ID NO: 2688191 - DNA, 25 bp, Homo sapien
tgtgcaggacaatttataggagctc

SEQ ID NO: 2688192 - DNA, 25 bp, Homo sapien
acctctgcactagtaaccacattga

SEQ ID NO: 2688193 - DNA, 25 bp, Homo sapien
ctttctcctctctccgtacctctgc

SEQ ID NO: 2688194 - DNA, 25 bp, Homo sapien
tccactttcagggttgctcaaggct

SEQ ID NO: 2688195 - DNA, 25 bp, Homo sapien
tctctccgtacctctgcactagtaa

SEQ ID NO: 2688196 - DNA, 25 bp, Homo sapien
caggcactgctagaactggctctcc

SEQ ID NO: 2688197 - DNA, 25 bp, Homo sapien
ggcactgctagaactggctctcctc

SEQ ID NO: 2688198 - DNA, 25 bp, Homo sapien
actgctagaactggctctcctccca

SEQ ID NO: 2688199 - DNA, 25 bp, Homo sapien
tcaggcactgctagaactggctctc

SEQ ID NO: 2688200 - DNA, 25 bp, Homo sapien
ttccactctctgatattccagtcac

SEQ ID NO: 2688201 - DNA, 25 bp, Homo sapien
tcattccactctctgatattccagt

SEQ ID NO: 2688202 - DNA, 25 bp, Homo sapien
tctgatattccagtcaccttcctct

SEQ ID NO: 2688203 - DNA, 25 bp, Homo sapien
acattcattccactctctgatattc

SEQ ID NO: 2688204 - DNA, 25 bp, Homo sapien
ggtcagtcatcccaactaacactgt

SEQ ID NO: 2688205 - DNA, 25 bp, Homo sapien
cagtcatcccaactaacactgtaac

SEQ ID NO: 2688206 - DNA, 25 bp, Homo sapien
tgagaagtctgagccatttggagtc

SEQ ID NO: 2688207 - DNA, 25 bp, Homo sapien
tgggtcagtcatcccaactaacact

SEQ ID NO: 2688208 - DNA, 25 bp, Homo sapien
gatacccagtgaggatcatctccct

SEQ ID NO: 2688209 - DNA, 25 bp, Homo sapien
gaggctgcagcgtttatcttccaag

SEQ ID NO: 2688210 - DNA, 25 bp, Homo sapien
gcttgtcaacagctgagtcgtttct

SEQ ID NO: 2688211 - DNA, 25 bp, Homo sapien
ttgattcaggcgacagcgagccagg

SEQ ID NO: 2688212 - DNA, 25 bp, Homo sapien
ggttgtttccgctgtcactatgttt

SEQ ID NO: 2688213 - DNA, 25 bp, Homo sapien
aggttgtttccgctgtcactatgtt

SEQ ID NO: 2688214 - DNA, 25 bp, Homo sapien
tcttccaggttgtttccgctgtcac

SEQ ID NO: 2688215 - DNA, 25 bp, Homo sapien
tccaggttgtttccgctgtcactat

SEQ ID NO: 2688216 - DNA, 25 bp, Homo sapien
ggaaagttcactatgttttcattgt

SEQ ID NO: 2688217 - DNA, 25 bp, Homo sapien
tttcattgtgatgaacgcgaggtga

SEQ ID NO: 2688218 - DNA, 25 bp, Homo sapien
atgaacgcgaggtgactgtgcccat

SEQ ID NO: 2688219 - DNA, 25 bp, Homo sapien
tgtctgagagtctaggtgagtgtgt

SEQ ID NO: 2688220 - DNA, 25 bp, Homo sapien
gtctgtatgtcctggactcacccaa

SEQ ID NO: 2688221 - DNA, 25 bp, Homo sapien
tggtctgtatgtcctggactcaccc

SEQ ID NO: 2688222 - DNA, 25 bp, Homo sapien
ggtctgtatgtcctggactcaccca

SEQ ID NO: 2688223 - DNA, 25 bp, Homo sapien
gatgcatttgtagacccaggtgaac

SEQ ID NO: 2688224 - DNA, 25 bp, Homo sapien
gtccaaagacaccagctactttctc

SEQ ID NO: 2688225 - DNA, 25 bp, Homo sapien
ccaggtgaacctgtatccgcttcac

SEQ ID NO: 2688226 - DNA, 25 bp, Homo sapien
ctgacaggaagtacaggtaggatcc

SEQ ID NO: 2688227 - DNA, 25 bp, Homo sapien
tcttgctatagcattgtcccatctc

SEQ ID NO: 2688228 - DNA, 25 bp, Homo sapien
tgctatagcattgtcccatctcaag

SEQ ID NO: 2688229 - DNA, 25 bp, Homo sapien
ggtgtcagactctgggaccacagat

SEQ ID NO: 2688230 - DNA, 25 bp, Homo sapien
agccagacccactgggatcccctgt

SEQ ID NO: 2688231 - DNA, 25 bp, Homo sapien
ttgtggtatatctgactctgaactt

SEQ ID NO: 2688232 - DNA, 25 bp, Homo sapien
tgtggtatatctgactctgaacttc

SEQ ID NO: 2688233 - DNA, 25 bp, Homo sapien
acacagagtctcgctgactgctagc

SEQ ID NO: 2688234 - DNA, 25 bp, Homo sapien
cgcacacagagtctcgctgactgct

SEQ ID NO: 2688235 - DNA, 25 bp, Homo sapien
ctacgcacacagagtctcgctgact

SEQ ID NO: 2688236 - DNA, 25 bp, Homo sapien
tacgcacacagagtctcgctgactg

SEQ ID NO: 2688237 - DNA, 25 bp, Homo sapien
cgcagccaaggtgtagttatgtgac

SEQ ID NO: 2688238 - DNA, 25 bp, Homo sapien
gacacaccagcatgaaacttcaatg

SEQ ID NO: 2688239 - DNA, 25 bp, Homo sapien
cattcaacttgacctctgcactggc

SEQ ID NO: 2688240 - DNA, 25 bp, Homo sapien
tccaaagttaaaagccaggagctcc

SEQ ID NO: 2688241 - DNA, 25 bp, Homo sapien
gaagacagatgggactttgctgaac

SEQ ID NO: 2688242 - DNA, 25 bp, Homo sapien
ttaaaggctcggcagtcaaggaagg

SEQ ID NO: 2688243 - DNA, 25 bp, Homo sapien
catgtgcggtatctagaaagattcc

SEQ ID NO: 2688244 - DNA, 25 bp, Homo sapien
tttgctgaacagtaagtaggagcct

SEQ ID NO: 2688245 - DNA, 25 bp, Homo sapien
tccaaggactcaagttgggccaagg

SEQ ID NO: 2688246 - DNA, 25 bp, Homo sapien
ctgttcagataaagctttagccttt

SEQ ID NO: 2688247 - DNA, 25 bp, Homo sapien
ctccaaggactcaagttgggccaag

SEQ ID NO: 2688248 - DNA, 25 bp, Homo sapien
ttcagataaagctttagccttttct

SEQ ID NO: 2688249 - DNA, 25 bp, Homo sapien
tacatttacacttgccatgctgcac

SEQ ID NO: 2688250 - DNA, 25 bp, Homo sapien
tgtttacatttacacttgccatgct

SEQ ID NO: 2688251 - DNA, 25 bp, Homo sapien
aacgtgtgtttacatttacacttgc

SEQ ID NO: 2688252 - DNA, 25 bp, Homo sapien
atttacacttgccatgctgcacact

SEQ ID NO: 2688253 - DNA, 25 bp, Homo sapien
gggaccgagactccaagcagtttgt

SEQ ID NO: 2688254 - DNA, 25 bp, Homo sapien
agcactgggggaccgagactccaag

SEQ ID NO: 2688255 - DNA, 25 bp, Homo sapien
cactgactgtcaccaaaagagagca

SEQ ID NO: 2688256 - DNA, 25 bp, Homo sapien
gagactccaagcagtttgtcccctg

SEQ ID NO: 2688257 - DNA, 25 bp, Homo sapien
tgaccaggtccagatacatggagct

SEQ ID NO: 2688258 - DNA, 25 bp, Homo sapien
tacatgtggcacagcatgaccaggt

SEQ ID NO: 2688259 - DNA, 25 bp, Homo sapien
ctgaagcagattggcttagaccaga

SEQ ID NO: 2688260 - DNA, 25 bp, Homo sapien
gaccagatctggatgacctcagagc

SEQ ID NO: 2688261 - DNA, 25 bp, Homo sapien
gttggaggatatttggcctgttgaa

SEQ ID NO: 2688262 - DNA, 25 bp, Homo sapien
ttggaggatatttggcctgttgaag

SEQ ID NO: 2688263 - DNA, 25 bp, Homo sapien
tggaggatatttggcctgttgaagc

SEQ ID NO: 2688264 - DNA, 25 bp, Homo sapien
tagggttgtgctctcatggctccag

SEQ ID NO: 2688265 - DNA, 25 bp, Homo sapien
gctctcatggctccaggtgacctca

SEQ ID NO: 2688266 - DNA, 25 bp, Homo sapien
ttccaggtagggttgtgctctcatg

SEQ ID NO: 2688267 - DNA, 25 bp, Homo sapien
caaatttcttccaggtagggttgtg

SEQ ID NO: 2688268 - DNA, 25 bp, Homo sapien
caccaacatgtgtttaactcctgag

SEQ ID NO: 2688269 - DNA, 25 bp, Homo sapien
tgatcaccaacatgtgtttaactcc

SEQ ID NO: 2688270 - DNA, 25 bp, Homo sapien
aacatgtgtttaactcctgagtgca

SEQ ID NO: 2688271 - DNA, 25 bp, Homo sapien
cctcatgatcaccaacatgtgttta

SEQ ID NO: 2688272 - DNA, 25 bp, Homo sapien
acttgttcaagcagttttgattttg

SEQ ID NO: 2688273 - DNA, 25 bp, Homo sapien
tcctccagccgggatacttgttcaa

SEQ ID NO: 2688274 - DNA, 25 bp, Homo sapien
gccgggatacttgttcaagcagttt

SEQ ID NO: 2688275 - DNA, 25 bp, Homo sapien
attttttcatatggtcccccactgg

SEQ ID NO: 2688276 - DNA, 25 bp, Homo sapien
gaagcttttacttcagcttgcaatt

SEQ ID NO: 2688277 - DNA, 25 bp, Homo sapien
tcctgggaagcttttacttcagctt

SEQ ID NO: 2688278 - DNA, 25 bp, Homo sapien
tgggctataagttgctcctgggaag

SEQ ID NO: 2688279 - DNA, 25 bp, Homo sapien
gggctataagttgctcctgggaagc

SEQ ID NO: 2688280 - DNA, 25 bp, Homo sapien
agtcttgagaaagaggctgcatcag

SEQ ID NO: 2688281 - DNA, 25 bp, Homo sapien
aattggtacaggtggttgttcagtt

SEQ ID NO: 2688282 - DNA, 25 bp, Homo sapien
gagaacctctaaaatctgtatattc

SEQ ID NO: 2688283 - DNA, 25 bp, Homo sapien
taaatagggattgtaactgatctgt

SEQ ID NO: 2688284 - DNA, 25 bp, Homo sapien
gtatttgaatatgagaacctctaaa

SEQ ID NO: 2688285 - DNA, 25 bp, Homo sapien
cccatccgatttttcagcaagtaaa

SEQ ID NO: 2688286 - DNA, 25 bp, Homo sapien
gcctgaacctagaggaattcttagt

SEQ ID NO: 2688287 - DNA, 25 bp, Homo sapien
gatggaggcctgaacctagaggaat

SEQ ID NO: 2688288 - DNA, 25 bp, Homo sapien
attcttagtgaattccaagtcctca

SEQ ID NO: 2688289 - DNA, 25 bp, Homo sapien
tcaaacgagcaccatcactgggtgt

SEQ ID NO: 2688290 - DNA, 25 bp, Homo sapien
aagacagcagagagcgtactccact

SEQ ID NO: 2688291 - DNA, 25 bp, Homo sapien
tactccacttgtacacaggtccttt

SEQ ID NO: 2688292 - DNA, 25 bp, Homo sapien
cagcagagagcgtactccacttgta

SEQ ID NO: 2688293 - DNA, 25 bp, Homo sapien
gagagcgtactccacttgtacacag

SEQ ID NO: 2688294 - DNA, 25 bp, Homo sapien
catagtaatttttgacagccacgat

SEQ ID NO: 2688295 - DNA, 25 bp, Homo sapien
ttcttggagcagtctccagctccac

SEQ ID NO: 2688296 - DNA, 25 bp, Homo sapien
cagctccaccctgggttagggatgg

SEQ ID NO: 2688297 - DNA, 25 bp, Homo sapien
ggatggttcctctgaattctcatag

SEQ ID NO: 2688298 - DNA, 25 bp, Homo sapien
ctgagaaccgcctgtatttgtatgg

SEQ ID NO: 2688299 - DNA, 25 bp, Homo sapien
gagaaccgcctgtatttgtatggca

SEQ ID NO: 2688300 - DNA, 25 bp, Homo sapien
gaaccgcctgtatttgtatggcaat

SEQ ID NO: 2688301 - DNA, 25 bp, Homo sapien
cgcctgtatttgtatggcaatctga

SEQ ID NO: 2688302 - DNA, 25 bp, Homo sapien
ctggaaccacaagaagatatccagc

SEQ ID NO: 2688303 - DNA, 25 bp, Homo sapien
tcttgcgatgcagagctgataggca

SEQ ID NO: 2688304 - DNA, 25 bp, Homo sapien
tcttcatcagagagtaatgtggtgt

SEQ ID NO: 2688305 - DNA, 25 bp, Homo sapien
gagctgataggcagggttatcttca

SEQ ID NO: 2688306 - DNA, 25 bp, Homo sapien
tctccctggaaaccttgtcttaaga

SEQ ID NO: 2688307 - DNA, 25 bp, Homo sapien
cttttggggagtagcaggtttgcct

SEQ ID NO: 2688308 - DNA, 25 bp, Homo sapien
gcaagtactcagaggagaagcacaa

SEQ ID NO: 2688309 - DNA, 25 bp, Homo sapien
gagtagcaggtttgcctgggctgac

SEQ ID NO: 2688310 - DNA, 25 bp, Homo sapien
tactgtcgctgcactattgctgtca

SEQ ID NO: 2688311 - DNA, 25 bp, Homo sapien
gataggctcctttaggcctaatatt

SEQ ID NO: 2688312 - DNA, 25 bp, Homo sapien
ccttgaagataggctcctttaggcc

SEQ ID NO: 2688313 - DNA, 25 bp, Homo sapien
gaagataggctcctttaggcctaat

SEQ ID NO: 2688314 - DNA, 25 bp, Homo sapien
tgaagataggctcctttaggcctaa

SEQ ID NO: 2688315 - DNA, 25 bp, Homo sapien
ccaaaaatcaactacttgttcatgt

SEQ ID NO: 2688316 - DNA, 25 bp, Homo sapien
aaaataaacaatttgcagtttgagc

SEQ ID NO: 2688317 - DNA, 25 bp, Homo sapien
cctaatgaccctcaataaatggcca

SEQ ID NO: 2688318 - DNA, 25 bp, Homo sapien
aaagaacccagtgacaacttagaag

SEQ ID NO: 2688319 - DNA, 25 bp, Homo sapien
tctcatttgttaaagatcctttgtc

SEQ ID NO: 2688320 - DNA, 25 bp, Homo sapien
gggaaagatactgccacgtccttga

SEQ ID NO: 2688321 - DNA, 25 bp, Homo sapien
tcaagccaccggtatgttattctca

SEQ ID NO: 2688322 - DNA, 25 bp, Homo sapien
tgttgttattagtaacagttgtggg

SEQ ID NO: 2688323 - DNA, 25 bp, Homo sapien
taattgtcacttaattgtggatgca

SEQ ID NO: 2688324 - DNA, 25 bp, Homo sapien
aacattgtgtacgttttctggtgta

SEQ ID NO: 2688325 - DNA, 25 bp, Homo sapien
tgtggatgcatggtaaacattgtgt

SEQ ID NO: 2688326 - DNA, 25 bp, Homo sapien
tattgctaactgcagtgatctgatc

SEQ ID NO: 2688327 - DNA, 25 bp, Homo sapien
aagagaggcttttttgtagctcaat

SEQ ID NO: 2688328 - DNA, 25 bp, Homo sapien
gtacatctctggtgattaacttctg

SEQ ID NO: 2688329 - DNA, 25 bp, Homo sapien
ggctgataagggtctaggtacatct

SEQ ID NO: 2688330 - DNA, 25 bp, Homo sapien
tgtagctcaattgccctcagctcaa

SEQ ID NO: 2688331 - DNA, 25 bp, Homo sapien
caaggcttgggtcatggctcatgac

SEQ ID NO: 2688332 - DNA, 25 bp, Homo sapien
gacccaaggcttgggtcatggctca

SEQ ID NO: 2688333 - DNA, 25 bp, Homo sapien
ctcgttgggctggtgacccaaggct

SEQ ID NO: 2688334 - DNA, 25 bp, Homo sapien
tgatcactcgttgggctggtgaccc

SEQ ID NO: 2688335 - DNA, 25 bp, Homo sapien
ctctgctagagggaaatccagccta

SEQ ID NO: 2688336 - DNA, 25 bp, Homo sapien
ggaaatccagcctagtgctggatga

SEQ ID NO: 2688337 - DNA, 25 bp, Homo sapien
gattcaccgggtcgctcagagtgac

SEQ ID NO: 2688338 - DNA, 25 bp, Homo sapien
ggatgagaaagattcaccgggtcgc

SEQ ID NO: 2688339 - DNA, 25 bp, Homo sapien
tattttagggacacctgctgacggt

SEQ ID NO: 2688340 - DNA, 25 bp, Homo sapien
tgctgacggtgtcagctgccagaat

SEQ ID NO: 2688341 - DNA, 25 bp, Homo sapien
aaagagcaaagacagggcactgttg

SEQ ID NO: 2688342 - DNA, 25 bp, Homo sapien
tattgctggcaccacatggtacgaa

SEQ ID NO: 2688343 - DNA, 25 bp, Homo sapien
gccaaagaggcacataggccttaaa

SEQ ID NO: 2688344 - DNA, 25 bp, Homo sapien
ttgccaaagaggcacataggcctta

SEQ ID NO: 2688345 - DNA, 25 bp, Homo sapien
tgttgccaaagaggcacataggcct

SEQ ID NO: 2688346 - DNA, 25 bp, Homo sapien
ttgttgccaaagaggcacataggcc

SEQ ID NO: 2688347 - DNA, 25 bp, Homo sapien
tagtgaaagtgctgctaagctcttc

SEQ ID NO: 2688348 - DNA, 25 bp, Homo sapien
ttagtgaaagtgctgctaagctctt

SEQ ID NO: 2688349 - DNA, 25 bp, Homo sapien
agtgaaagtgctgctaagctcttct

SEQ ID NO: 2688350 - DNA, 25 bp, Homo sapien
cagttgttggtatagtatcattggc

SEQ ID NO: 2688351 - DNA, 25 bp, Homo sapien
tgttggtatagtatcattggcaaac

SEQ ID NO: 2688352 - DNA, 25 bp, Homo sapien
ctctacagttgttggtatagtatca

SEQ ID NO: 2688353 - DNA, 25 bp, Homo sapien
ttggtatagtatcattggcaaacat

SEQ ID NO: 2688354 - DNA, 25 bp, Homo sapien
tccttcatatagagtctttatcttc

SEQ ID NO: 2688355 - DNA, 25 bp, Homo sapien
tcatatagagtctttatcttctcat

SEQ ID NO: 2688356 - DNA, 25 bp, Homo sapien
tgatggcattagctgttgccaaatc

SEQ ID NO: 2688357 - DNA, 25 bp, Homo sapien
gtgatggcattagctgttgccaaat

SEQ ID NO: 2688358 - DNA, 25 bp, Homo sapien
tctgaaactaccacatcgcctgctt

SEQ ID NO: 2688359 - DNA, 25 bp, Homo sapien
ctttctgaaactaccacatcgcctg

SEQ ID NO: 2688360 - DNA, 25 bp, Homo sapien
gggagtgtctccctttctgaaacta

SEQ ID NO: 2688361 - DNA, 25 bp, Homo sapien
tgggagtgtctccctttctgaaact

SEQ ID NO: 2688362 - DNA, 25 bp, Homo sapien
tgattgcaagtaccataagccagtg

SEQ ID NO: 2688363 - DNA, 25 bp, Homo sapien
gactgtggaagctctgttacctgga

SEQ ID NO: 2688364 - DNA, 25 bp, Homo sapien
tctgagatttccttgtagactgtgg

SEQ ID NO: 2688365 - DNA, 25 bp, Homo sapien
tgagcagggaaatcaaattccttct

SEQ ID NO: 2688366 - DNA, 25 bp, Homo sapien
tgacatttagctggtgcttgccctt

SEQ ID NO: 2688367 - DNA, 25 bp, Homo sapien
ttagctggtgcttgcccttcatcca

SEQ ID NO: 2688368 - DNA, 25 bp, Homo sapien
gtctgacatttagctggtgcttgcc

SEQ ID NO: 2688369 - DNA, 25 bp, Homo sapien
acatttagctggtgcttgcccttca

SEQ ID NO: 2688370 - DNA, 25 bp, Homo sapien
taatcataaagccaaagtgagcact

SEQ ID NO: 2688371 - DNA, 25 bp, Homo sapien
tcaggccccgttaaatatactctag

SEQ ID NO: 2688372 - DNA, 25 bp, Homo sapien
tactgcccagtatgttaagcttctc

SEQ ID NO: 2688373 - DNA, 25 bp, Homo sapien
tctcatttgataccagggagagtct

SEQ ID NO: 2688374 - DNA, 25 bp, Homo sapien
gaagagaagattcttggatgccata

SEQ ID NO: 2688375 - DNA, 25 bp, Homo sapien
tgccatacttttccgttaggctttc

SEQ ID NO: 2688376 - DNA, 25 bp, Homo sapien
taggctttccctgaagcgagtacaa

SEQ ID NO: 2688377 - DNA, 25 bp, Homo sapien
cctgaagcgagtacaaaaataacca

SEQ ID NO: 2688378 - DNA, 25 bp, Homo sapien
ctgggtgtgtatctccctgtccact

SEQ ID NO: 2688379 - DNA, 25 bp, Homo sapien
gggtgtgtatctccctgtccactgc

SEQ ID NO: 2688380 - DNA, 25 bp, Homo sapien
caggggttgatcttgtgtctgcctt

SEQ ID NO: 2688381 - DNA, 25 bp, Homo sapien
cccaggggttgatcttgtgtctgcc

SEQ ID NO: 2688382 - DNA, 25 bp, Homo sapien
tactggataccacctttcctgtggc

SEQ ID NO: 2688383 - DNA, 25 bp, Homo sapien
actggataccacctttcctgtggct

SEQ ID NO: 2688384 - DNA, 25 bp, Homo sapien
ctggataccacctttcctgtggctc

SEQ ID NO: 2688385 - DNA, 25 bp, Homo sapien
gttactagctgattgaatgcatcca

SEQ ID NO: 2688386 - DNA, 25 bp, Homo sapien
gctacttgacaaagctttgccttta

SEQ ID NO: 2688387 - DNA, 25 bp, Homo sapien
caggcaagcctattcttgacaaggc

SEQ ID NO: 2688388 - DNA, 25 bp, Homo sapien
aggagggagagcacatctattgtgc

SEQ ID NO: 2688389 - DNA, 25 bp, Homo sapien
tctgtaaacagtgatgcagggctga

SEQ ID NO: 2688390 - DNA, 25 bp, Homo sapien
tatgggtgccaccaaaaagtatgca

SEQ ID NO: 2688391 - DNA, 25 bp, Homo sapien
gaaatatacttgttgctagccagat

SEQ ID NO: 2688392 - DNA, 25 bp, Homo sapien
cccaatgaataggaggaagagttct

SEQ ID NO: 2688393 - DNA, 25 bp, Homo sapien
ccagagattgcaacaagaaaggctc

SEQ ID NO: 2688394 - DNA, 25 bp, Homo sapien
tgctggcagctcagtcttgccaagg

SEQ ID NO: 2688395 - DNA, 25 bp, Homo sapien
tgccaaggcgggtctcccggaagcc

SEQ ID NO: 2688396 - DNA, 25 bp, Homo sapien
cagctcagtcttgccaaggcgggtc

SEQ ID NO: 2688397 - DNA, 25 bp, Homo sapien
gtcacggtcactaggaccacatcgc

SEQ ID NO: 2688398 - DNA, 25 bp, Homo sapien
caaaaatgcggcgaagcggcattgc

SEQ ID NO: 2688399 - DNA, 25 bp, Homo sapien
tgatacagcagcaaaaatgcggcga

SEQ ID NO: 2688400 - DNA, 25 bp, Homo sapien
cgaagcggcattgcataggcagtca

SEQ ID NO: 2688401 - DNA, 25 bp, Homo sapien
gctgagtaattctctcagtctgaag

SEQ ID NO: 2688402 - DNA, 25 bp, Homo sapien
aggatggggactccgctcagcttcc

SEQ ID NO: 2688403 - DNA, 25 bp, Homo sapien
ctgaagggaaacctgggttgacagt

SEQ ID NO: 2688404 - DNA, 25 bp, Homo sapien
ctccaaaacttctttcagctgagta

SEQ ID NO: 2688405 - DNA, 25 bp, Homo sapien
tacaaattctcatcagagaccacag

SEQ ID NO: 2688406 - DNA, 25 bp, Homo sapien
gggcttctggtaaacatcctggagg

SEQ ID NO: 2688407 - DNA, 25 bp, Homo sapien
ctggtaaacatcctggagggtcctt

SEQ ID NO: 2688408 - DNA, 25 bp, Homo sapien
ccacaggtgggatgtcatgagtaga

SEQ ID NO: 2688409 - DNA, 25 bp, Homo sapien
caggttgaaaggtgtatcagtgcca

SEQ ID NO: 2688410 - DNA, 25 bp, Homo sapien
gaagcatctatgagcatctgattgg

SEQ ID NO: 2688411 - DNA, 25 bp, Homo sapien
cttataaaatgctctctgacaggga

SEQ ID NO: 2688412 - DNA, 25 bp, Homo sapien
taaggtgtttatttcgtgaagccac

SEQ ID NO: 2688413 - DNA, 25 bp, Homo sapien
tctccagcacttacagctggcaacc

SEQ ID NO: 2688414 - DNA, 25 bp, Homo sapien
cagcacttacagctggcaaccccta

SEQ ID NO: 2688415 - DNA, 25 bp, Homo sapien
ccctctccagcacttacagctggca

SEQ ID NO: 2688416 - DNA, 25 bp, Homo sapien
gcacttacagctggcaacccctaat

SEQ ID NO: 2688417 - DNA, 25 bp, Homo sapien
catgagtggcccacctgtttgcaca

SEQ ID NO: 2688418 - DNA, 25 bp, Homo sapien
tgcaaggaaccagagattgaaggct

SEQ ID NO: 2688419 - DNA, 25 bp, Homo sapien
gcacaccacataggaaggatccaca

SEQ ID NO: 2688420 - DNA, 25 bp, Homo sapien
gggcattctatgaattcccatggag

SEQ ID NO: 2688421 - DNA, 25 bp, Homo sapien
gagctaccagcatgatgaagtctac

SEQ ID NO: 2688422 - DNA, 25 bp, Homo sapien
cctgcagggccatagtaagtagccg

SEQ ID NO: 2688423 - DNA, 25 bp, Homo sapien
gtcacccaaaaggttagcagcattg

SEQ ID NO: 2688424 - DNA, 25 bp, Homo sapien
gttacatccgaaactggacactcag

SEQ ID NO: 2688425 - DNA, 25 bp, Homo sapien
tcctccacccatttaacctgaagct

SEQ ID NO: 2688426 - DNA, 25 bp, Homo sapien
cctccacccatttaacctgaagctc

SEQ ID NO: 2688427 - DNA, 25 bp, Homo sapien
ttcctccacccatttaacctgaagc

SEQ ID NO: 2688428 - DNA, 25 bp, Homo sapien
cagggatgctggatgtgcctcgcat

SEQ ID NO: 2688429 - DNA, 25 bp, Homo sapien
gtgcctcgcattgccttgaccacag

SEQ ID NO: 2688430 - DNA, 25 bp, Homo sapien
tcgcattgccttgaccacagacact

SEQ ID NO: 2688431 - DNA, 25 bp, Homo sapien
agcacatcttgctcagggatgctgg

SEQ ID NO: 2688432 - DNA, 25 bp, Homo sapien
gatagatactctgttcacctggcat

SEQ ID NO: 2688433 - DNA, 25 bp, Homo sapien
tcataatcacagctcttgggaacat

SEQ ID NO: 2688434 - DNA, 25 bp, Homo sapien
ggcttacattgtacctctggatggt

SEQ ID NO: 2688435 - DNA, 25 bp, Homo sapien
catatgcatcctggcttagtctaag

SEQ ID NO: 2688436 - DNA, 25 bp, Homo sapien
ggctttcagtatccaccgtcttagt

SEQ ID NO: 2688437 - DNA, 25 bp, Homo sapien
gatgaaaacaggaggtccttattcc

SEQ ID NO: 2688438 - DNA, 25 bp, Homo sapien
tccttattcccattggcactgttag

SEQ ID NO: 2688439 - DNA, 25 bp, Homo sapien
taaagagagctcgttggatgacaag

SEQ ID NO: 2688440 - DNA, 25 bp, Homo sapien
ttgtggccttgactctccattctgg

SEQ ID NO: 2688441 - DNA, 25 bp, Homo sapien
aagagccagatattgtggccttgac

SEQ ID NO: 2688442 - DNA, 25 bp, Homo sapien
gcattcttcttctcgccacaagagc

SEQ ID NO: 2688443 - DNA, 25 bp, Homo sapien
tggccgctttcccagttccaggcat

SEQ ID NO: 2688444 - DNA, 25 bp, Homo sapien
tctcagctagacacgggtggtggct

SEQ ID NO: 2688445 - DNA, 25 bp, Homo sapien
tgcaagtattgcactctcagctaga

SEQ ID NO: 2688446 - DNA, 25 bp, Homo sapien
ccttggctgcaagtattgcactctc

SEQ ID NO: 2688447 - DNA, 25 bp, Homo sapien
tattgcactctcagctagacacggg

SEQ ID NO: 2688448 - DNA, 25 bp, Homo sapien
taagccgccatgaaatagtcaagca

SEQ ID NO: 2688449 - DNA, 25 bp, Homo sapien
agtcgtagcccacaaataagccgcc

SEQ ID NO: 2688450 - DNA, 25 bp, Homo sapien
catagtagcgtttagcctggaagtc

SEQ ID NO: 2688451 - DNA, 25 bp, Homo sapien
tagtcaagcaacaggcctccagtag

SEQ ID NO: 2688452 - DNA, 25 bp, Homo sapien
ttatgtacagtgaatcagaagggcc

SEQ ID NO: 2688453 - DNA, 25 bp, Homo sapien
caagagggcgacttcattttgtgcc

SEQ ID NO: 2688454 - DNA, 25 bp, Homo sapien
tcctatatctactaacaagagggcg

SEQ ID NO: 2688455 - DNA, 25 bp, Homo sapien
gcctaactgagccataggtgtcctt

SEQ ID NO: 2688456 - DNA, 25 bp, Homo sapien
tgacagtcctgagccttcacctgca

SEQ ID NO: 2688457 - DNA, 25 bp, Homo sapien
acagagtgacagtcctgagccttca

SEQ ID NO: 2688458 - DNA, 25 bp, Homo sapien
gtaaacagagtgacagtcctgagcc

SEQ ID NO: 2688459 - DNA, 25 bp, Homo sapien
ctcagtctgtaaacagagtgacagt

SEQ ID NO: 2688460 - DNA, 25 bp, Homo sapien
ttttcaggtcaaacaagcaacaatc

SEQ ID NO: 2688461 - DNA, 25 bp, Homo sapien
gtaatacttacatcattaaatggcc

SEQ ID NO: 2688462 - DNA, 25 bp, Homo sapien
tccaacatctatccaggtgagagat

SEQ ID NO: 2688463 - DNA, 25 bp, Homo sapien
aaatggcctatggaggattttcagg

SEQ ID NO: 2688464 - DNA, 25 bp, Homo sapien
gaaggctggcaaatatcttgcaggc

SEQ ID NO: 2688465 - DNA, 25 bp, Homo sapien
catgtttactattgcggttcctgaa

SEQ ID NO: 2688466 - DNA, 25 bp, Homo sapien
tcttgcaggcctcgaaacagcattg

SEQ ID NO: 2688467 - DNA, 25 bp, Homo sapien
tagagctcagttccctatcagcaat

SEQ ID NO: 2688468 - DNA, 25 bp, Homo sapien
cctgatctccaacaggtatctatca

SEQ ID NO: 2688469 - DNA, 25 bp, Homo sapien
atcctgatctccaacaggtatctat

SEQ ID NO: 2688470 - DNA, 25 bp, Homo sapien
tcctgatctccaacaggtatctatc

SEQ ID NO: 2688471 - DNA, 25 bp, Homo sapien
ctgatctccaacaggtatctatcac

SEQ ID NO: 2688472 - DNA, 25 bp, Homo sapien
ctcctgttatggctccacagaactc

SEQ ID NO: 2688473 - DNA, 25 bp, Homo sapien
gattccatggatatatgttcttcta

SEQ ID NO: 2688474 - DNA, 25 bp, Homo sapien
gttcttctattagggcacgcaggaa

SEQ ID NO: 2688475 - DNA, 25 bp, Homo sapien
ttaagattccatggatatatgttct

SEQ ID NO: 2688476 - DNA, 25 bp, Homo sapien
cttcagctgtgcaaagttggaacat

SEQ ID NO: 2688477 - DNA, 25 bp, Homo sapien
ctgctagtaatgacaattcagtggc

SEQ ID NO: 2688478 - DNA, 25 bp, Homo sapien
atggctgctagtaatgacaattcag

SEQ ID NO: 2688479 - DNA, 25 bp, Homo sapien
tagtaatgacaattcagtggctgtt

SEQ ID NO: 2688480 - DNA, 25 bp, Homo sapien
taacctcaagataattcagagggca

SEQ ID NO: 2688481 - DNA, 25 bp, Homo sapien
tcattaagtgacaaagtcaatgctg

SEQ ID NO: 2688482 - DNA, 25 bp, Homo sapien
gtcaatgctgtactgtttacaagca

SEQ ID NO: 2688483 - DNA, 25 bp, Homo sapien
gctttgatctattcataagggctct

SEQ ID NO: 2688484 - DNA, 25 bp, Homo sapien
gagattccatattgtccctaaaggg

SEQ ID NO: 2688485 - DNA, 25 bp, Homo sapien
ttagttggacacaagagattccata

SEQ ID NO: 2688486 - DNA, 25 bp, Homo sapien
ggattccatattgtccccaaagtaa

SEQ ID NO: 2688487 - DNA, 25 bp, Homo sapien
tccctaaagggattccatattgtcc

SEQ ID NO: 2688488 - DNA, 25 bp, Homo sapien
cacatataactcagcccgttttctt

SEQ ID NO: 2688489 - DNA, 25 bp, Homo sapien
gtagcagattgggaaatagtctttt

SEQ ID NO: 2688490 - DNA, 25 bp, Homo sapien
atagtcttttactggaatcccccat

SEQ ID NO: 2688491 - DNA, 25 bp, Homo sapien
cagtcggctgtacgtagcagattgg

SEQ ID NO: 2688492 - DNA, 25 bp, Homo sapien
aaatccattggtccaaatttaggca

SEQ ID NO: 2688493 - DNA, 25 bp, Homo sapien
atttcctttttgccacaaggccagc

SEQ ID NO: 2688494 - DNA, 25 bp, Homo sapien
tgggaacctgactgattttgctgta

SEQ ID NO: 2688495 - DNA, 25 bp, Homo sapien
tcagtgccgtggtgggaacctgact

SEQ ID NO: 2688496 - DNA, 25 bp, Homo sapien
cttgagaacagacttgctatcagtg

SEQ ID NO: 2688497 - DNA, 25 bp, Homo sapien
taagggaatataactgtgttcccac

SEQ ID NO: 2688498 - DNA, 25 bp, Homo sapien
agaaacagaaaggtactcctctgca

SEQ ID NO: 2688499 - DNA, 25 bp, Homo sapien
cagaaaggtactcctctgcaggtct

SEQ ID NO: 2688500 - DNA, 25 bp, Homo sapien
gaaaggtactcctctgcaggtctag

SEQ ID NO: 2688501 - DNA, 25 bp, Homo sapien
tgcgtgatttgggttgtgcagaatt

SEQ ID NO: 2688502 - DNA, 25 bp, Homo sapien
gtgatttgggttgtgcagaattcct

SEQ ID NO: 2688503 - DNA, 25 bp, Homo sapien
cgtgatttgggttgtgcagaattcc

SEQ ID NO: 2688504 - DNA, 25 bp, Homo sapien
tctgcgtgatttgggttgtgcagaa

SEQ ID NO: 2688505 - DNA, 25 bp, Homo sapien
taaccagagatcagttccagttgtg

SEQ ID NO: 2688506 - DNA, 25 bp, Homo sapien
caatgccggcaataactacccgtgg

SEQ ID NO: 2688507 - DNA, 25 bp, Homo sapien
aaaagctgatgttccaaggtgagaa

SEQ ID NO: 2688508 - DNA, 25 bp, Homo sapien
tcatctctcagaatacaatgccggc

SEQ ID NO: 2688509 - DNA, 25 bp, Homo sapien
tgtgcagctttcgagcggtagactc

SEQ ID NO: 2688510 - DNA, 25 bp, Homo sapien
tctgtgcagctttcgagcggtagac

SEQ ID NO: 2688511 - DNA, 25 bp, Homo sapien
tgcagctttcgagcggtagactcac

SEQ ID NO: 2688512 - DNA, 25 bp, Homo sapien
gcagctttcgagcggtagactcacc

SEQ ID NO: 2688513 - DNA, 25 bp, Homo sapien
gcgaggtgcgttccccagcctggtt

SEQ ID NO: 2688514 - DNA, 25 bp, Homo sapien
gcgaatctccgctcgtaactccggg

SEQ ID NO: 2688515 - DNA, 25 bp, Homo sapien
ccgcgattccttcgggcgatgctgg

SEQ ID NO: 2688516 - DNA, 25 bp, Homo sapien
gagccgcgggcgaggtgcgttcccc

SEQ ID NO: 2688517 - DNA, 25 bp, Homo sapien
tcagtgcggcttcccactaggcgcg

SEQ ID NO: 2688518 - DNA, 25 bp, Homo sapien
tgcggcttcccactaggcgcgtggt

SEQ ID NO: 2688519 - DNA, 25 bp, Homo sapien
cggcttcccactaggcgcgtggtac

SEQ ID NO: 2688520 - DNA, 25 bp, Homo sapien
agtgcggcttcccactaggcgcgtg

SEQ ID NO: 2688521 - DNA, 25 bp, Homo sapien
gccggtagctgatgctcccgcggca

SEQ ID NO: 2688522 - DNA, 25 bp, Homo sapien
cggcttcagaggctctcgcacgctg

SEQ ID NO: 2688523 - DNA, 25 bp, Homo sapien
ggctgagcccgaaatctcgcgagat

SEQ ID NO: 2688524 - DNA, 25 bp, Homo sapien
tgaactcgcagtacttgggctgagc

SEQ ID NO: 2688525 - DNA, 25 bp, Homo sapien
cacagaggccaccggcagccgagcg

SEQ ID NO: 2688526 - DNA, 25 bp, Homo sapien
tggacggccacagaggccaccggca

SEQ ID NO: 2688527 - DNA, 25 bp, Homo sapien
agaggccaccggcagccgagcgagc

SEQ ID NO: 2688528 - DNA, 25 bp, Homo sapien
ctggacggccacagaggccaccggc

SEQ ID NO: 2688529 - DNA, 25 bp, Homo sapien
cggtggccacagccgcaagaccagg

SEQ ID NO: 2688530 - DNA, 25 bp, Homo sapien
agagcccggcggacgtctccggcag

SEQ ID NO: 2688531 - DNA, 25 bp, Homo sapien
cacagccgcaagaccaggtgagaga

SEQ ID NO: 2688532 - DNA, 25 bp, Homo sapien
cggcggacgtctccggcagcacgcc

SEQ ID NO: 2688533 - DNA, 25 bp, Homo sapien
gcagcggctgacggcgtctccccga

SEQ ID NO: 2688534 - DNA, 25 bp, Homo sapien
agccgtgccgggcagttccaccctg

SEQ ID NO: 2688535 - DNA, 25 bp, Homo sapien
gctcgcgggcgcagcatcctccggc

SEQ ID NO: 2688536 - DNA, 25 bp, Homo sapien
accgagggcacagccgtgccgggca

SEQ ID NO: 2688537 - DNA, 25 bp, Homo sapien
tggaaacggctctggctcggggtgg

SEQ ID NO: 2688538 - DNA, 25 bp, Homo sapien
ctggaaacggctctggctcggggtg

SEQ ID NO: 2688539 - DNA, 25 bp, Homo sapien
agcagcggcccgcccggcgttctcg

SEQ ID NO: 2688540 - DNA, 25 bp, Homo sapien
ccgcagcagcggcccgcccggcgtt

SEQ ID NO: 2688541 - DNA, 25 bp, Homo sapien
gcagcagcggcccgcccggcgttct

SEQ ID NO: 2688542 - DNA, 25 bp, Homo sapien
cagcggcccgcccggcgttctcgga

SEQ ID NO: 2688543 - DNA, 25 bp, Homo sapien
aagttcacgcggaagcggcccttgg

SEQ ID NO: 2688544 - DNA, 25 bp, Homo sapien
tgtcttcagccgacgaggaggcagc

SEQ ID NO: 2688545 - DNA, 25 bp, Homo sapien
ttcctcgctgcctttagccggctcg

SEQ ID NO: 2688546 - DNA, 25 bp, Homo sapien
gctgggtccacgaagttcacgcgga

SEQ ID NO: 2688547 - DNA, 25 bp, Homo sapien
ctggaagctcacgttgggcccgtcg

SEQ ID NO: 2688548 - DNA, 25 bp, Homo sapien
ttttccagctcgtcgtggagctccg

SEQ ID NO: 2688549 - DNA, 25 bp, Homo sapien
ggtatcataatagtagtgctggtgg

SEQ ID NO: 2688550 - DNA, 25 bp, Homo sapien
tagtgatcgatcctgggcacagcgt

SEQ ID NO: 2688551 - DNA, 25 bp, Homo sapien
ccacatcccgcggtcggcatgcacc

SEQ ID NO: 2688552 - DNA, 25 bp, Homo sapien
gccacatcccgcggtcggcatgcac

SEQ ID NO: 2688553 - DNA, 25 bp, Homo sapien
acatcccgcggtcggcatgcaccag

SEQ ID NO: 2688554 - DNA, 25 bp, Homo sapien
cacatcccgcggtcggcatgcacca

SEQ ID NO: 2688555 - DNA, 25 bp, Homo sapien
tgtagaactacttcagtcagtgtac

SEQ ID NO: 2688556 - DNA, 25 bp, Homo sapien
cattgtagaactacttcagtcagtg

SEQ ID NO: 2688557 - DNA, 25 bp, Homo sapien
tagaactacttcagtcagtgtacac

SEQ ID NO: 2688558 - DNA, 25 bp, Homo sapien
ttgtagaactacttcagtcagtgta

SEQ ID NO: 2688559 - DNA, 25 bp, Homo sapien
ttgctgacctccctgtctctccatc

SEQ ID NO: 2688560 - DNA, 25 bp, Homo sapien
tccctgtctctccatcacaccaagc

SEQ ID NO: 2688561 - DNA, 25 bp, Homo sapien
ctccctgtctctccatcacaccaag

SEQ ID NO: 2688562 - DNA, 25 bp, Homo sapien
ctgacctccctgtctctccatcaca

SEQ ID NO: 2688563 - DNA, 25 bp, Homo sapien
tatcggacagcactgataaagacct

SEQ ID NO: 2688564 - DNA, 25 bp, Homo sapien
taagatgataatgggcttttaccaa

SEQ ID NO: 2688565 - DNA, 25 bp, Homo sapien
gaccttaaatggtaacaggccataa

SEQ ID NO: 2688566 - DNA, 25 bp, Homo sapien
aacaactgctagtccaaacttcgga

SEQ ID NO: 2688567 - DNA, 25 bp, Homo sapien
tcacaataacaacccacttcagctg

SEQ ID NO: 2688568 - DNA, 25 bp, Homo sapien
gagtcagggacaatcccaaataata

SEQ ID NO: 2688569 - DNA, 25 bp, Homo sapien
cgaaagatgtatgtacttagtaggc

SEQ ID NO: 2688570 - DNA, 25 bp, Homo sapien
taagaagtgtgcataaacggtaaaa

SEQ ID NO: 2688571 - DNA, 25 bp, Homo sapien
gcaggggcacaccggccaatcacag

SEQ ID NO: 2688572 - DNA, 25 bp, Homo sapien
cttcggcaggggcacaccggccaat

SEQ ID NO: 2688573 - DNA, 25 bp, Homo sapien
cagcgactccaaagcgtgctgcctg

SEQ ID NO: 2688574 - DNA, 25 bp, Homo sapien
agcgactccaaagcgtgctgcctgg

SEQ ID NO: 2688575 - DNA, 25 bp, Homo sapien
gaagcaataaagcagcaaaatgcta

SEQ ID NO: 2688576 - DNA, 25 bp, Homo sapien
gcaataaagcagcaaaatgctaaac

SEQ ID NO: 2688577 - DNA, 25 bp, Homo sapien
atgctaaacatttacaagacggact

SEQ ID NO: 2688578 - DNA, 25 bp, Homo sapien
agcagcaaaatgctaaacatttaca

SEQ ID NO: 2688579 - DNA, 25 bp, Homo sapien
tagaaatactgggtaggaaggacga

SEQ ID NO: 2688580 - DNA, 25 bp, Homo sapien
ccactgtctgaatatagaaatactg

SEQ ID NO: 2688581 - DNA, 25 bp, Homo sapien
atactgggtaggaaggacgatgtct

SEQ ID NO: 2688582 - DNA, 25 bp, Homo sapien
tctgaatatagaaatactgggtagg

SEQ ID NO: 2688583 - DNA, 25 bp, Homo sapien
tggactccaactctagtgaattgct

SEQ ID NO: 2688584 - DNA, 25 bp, Homo sapien
gactccaactctagtgaattgctcc

SEQ ID NO: 2688585 - DNA, 25 bp, Homo sapien
tccaactctagtgaattgctcctct

SEQ ID NO: 2688586 - DNA, 25 bp, Homo sapien
ctggactccaactctagtgaattgc

SEQ ID NO: 2688587 - DNA, 25 bp, Homo sapien
tttctactgcaatcttttctggatc

SEQ ID NO: 2688588 - DNA, 25 bp, Homo sapien
tctactgcaatcttttctggatcca

SEQ ID NO: 2688589 - DNA, 25 bp, Homo sapien
ttgggatttctactgcaatcttttc

SEQ ID NO: 2688590 - DNA, 25 bp, Homo sapien
ctactgcaatcttttctggatccac

SEQ ID NO: 2688591 - DNA, 25 bp, Homo sapien
catccatgaaaattctaaaacctac

SEQ ID NO: 2688592 - DNA, 25 bp, Homo sapien
tcggatggatgtttgaattggattt

SEQ ID NO: 2688593 - DNA, 25 bp, Homo sapien
gatggatgtttgaattggatttctt

SEQ ID NO: 2688594 - DNA, 25 bp, Homo sapien
cggatggatgtttgaattggatttc

SEQ ID NO: 2688595 - DNA, 25 bp, Homo sapien
aacagtcagtcaagtcgtaggtagg

SEQ ID NO: 2688596 - DNA, 25 bp, Homo sapien
acagtcagtcaagtcgtaggtaggc

SEQ ID NO: 2688597 - DNA, 25 bp, Homo sapien
cagtcagtcaagtcgtaggtaggca

SEQ ID NO: 2688598 - DNA, 25 bp, Homo sapien
gtcagtcaagtcgtaggtaggcatc

SEQ ID NO: 2688599 - DNA, 25 bp, Homo sapien
gataagctgctacgatgccatcaat

SEQ ID NO: 2688600 - DNA, 25 bp, Homo sapien
ggcaggtgataagctgctacgatgc

SEQ ID NO: 2688601 - DNA, 25 bp, Homo sapien
agctgctacgatgccatcaatattt

SEQ ID NO: 2688602 - DNA, 25 bp, Homo sapien
ggtgataagctgctacgatgccatc

SEQ ID NO: 2688603 - DNA, 25 bp, Homo sapien
aagtttttctagcagatcgctcagg

SEQ ID NO: 2688604 - DNA, 25 bp, Homo sapien
ttcttgcaaattcttgtcctgcttt

SEQ ID NO: 2688605 - DNA, 25 bp, Homo sapien
tctagcagatcgctcaggttgctct

SEQ ID NO: 2688606 - DNA, 25 bp, Homo sapien
gcaaattcttgtcctgcttttgcta

SEQ ID NO: 2688607 - DNA, 25 bp, Homo sapien
acttcacgactcctttactttctgc

SEQ ID NO: 2688608 - DNA, 25 bp, Homo sapien
taatacacccttgatccagccaaac

SEQ ID NO: 2688609 - DNA, 25 bp, Homo sapien
gaccacagcatctctggttggagta

SEQ ID NO: 2688610 - DNA, 25 bp, Homo sapien
actttctgcagtatacgtgaccaca

SEQ ID NO: 2688611 - DNA, 25 bp, Homo sapien
tgacccacaatccatgacaatctaa

SEQ ID NO: 2688612 - DNA, 25 bp, Homo sapien
gaaaagcatcacaccccaaatgttt

SEQ ID NO: 2688613 - DNA, 25 bp, Homo sapien
attccagcttgacccacaatccatg

SEQ ID NO: 2688614 - DNA, 25 bp, Homo sapien
atctaatgaaaagcatcacacccca

SEQ ID NO: 2688615 - DNA, 25 bp, Homo sapien
tgtcacaacagtggccatcattatt

SEQ ID NO: 2688616 - DNA, 25 bp, Homo sapien
ccatcattattacaaggactgatag

SEQ ID NO: 2688617 - DNA, 25 bp, Homo sapien
tcctgtgatagttgtcacaacagtg

SEQ ID NO: 2688618 - DNA, 25 bp, Homo sapien
ctcctcttacaaatccattagttgc

SEQ ID NO: 2688619 - DNA, 25 bp, Homo sapien
ctgattccattctcccgtagtctct

SEQ ID NO: 2688620 - DNA, 25 bp, Homo sapien
ttccattctcccgtagtctcttagg

SEQ ID NO: 2688621 - DNA, 25 bp, Homo sapien
attctcccgtagtctcttaggtcct

SEQ ID NO: 2688622 - DNA, 25 bp, Homo sapien
cattctcccgtagtctcttaggtcc

SEQ ID NO: 2688623 - DNA, 25 bp, Homo sapien
ttacaggtgctggcagacattttgt

SEQ ID NO: 2688624 - DNA, 25 bp, Homo sapien
tacaggtgctggcagacattttgtc

SEQ ID NO: 2688625 - DNA, 25 bp, Homo sapien
gaggctcacagcctagattctaagg

SEQ ID NO: 2688626 - DNA, 25 bp, Homo sapien
gactaactctgctgaacatatccac

SEQ ID NO: 2688627 - DNA, 25 bp, Homo sapien
actttcattccccagttgtggcaga

SEQ ID NO: 2688628 - DNA, 25 bp, Homo sapien
tggagtacccagttcacgagaagcc

SEQ ID NO: 2688629 - DNA, 25 bp, Homo sapien
cactaattgcagatgatgcagctca

SEQ ID NO: 2688630 - DNA, 25 bp, Homo sapien
cctgaatacaggtgtaatgtgatct

SEQ ID NO: 2688631 - DNA, 25 bp, Homo sapien
gcctgtatctagtttctcccacgtg

SEQ ID NO: 2688632 - DNA, 25 bp, Homo sapien
gaaagcttcgtagtatctggtcact

SEQ ID NO: 2688633 - DNA, 25 bp, Homo sapien
gaggaacaactatgtgattagaggg

SEQ ID NO: 2688634 - DNA, 25 bp, Homo sapien
cagtttacggtaataaggtgacttg

SEQ ID NO: 2688635 - DNA, 25 bp, Homo sapien
tagagggttagcactttcaataccc

SEQ ID NO: 2688636 - DNA, 25 bp, Homo sapien
ccttacatagcttccggattggaca

SEQ ID NO: 2688637 - DNA, 25 bp, Homo sapien
ccactgtggtctgtaggtgtggcct

SEQ ID NO: 2688638 - DNA, 25 bp, Homo sapien
ttccactgtggtctgtaggtgtggc

SEQ ID NO: 2688639 - DNA, 25 bp, Homo sapien
cactgtggtctgtaggtgtggcctc

SEQ ID NO: 2688640 - DNA, 25 bp, Homo sapien
tccactgtggtctgtaggtgtggcc

SEQ ID NO: 2688641 - DNA, 25 bp, Homo sapien
gaacataattagtcagatgccagag

SEQ ID NO: 2688642 - DNA, 25 bp, Homo sapien
gcctttctgttatcgctaaaaatgc

SEQ ID NO: 2688643 - DNA, 25 bp, Homo sapien
tggtcataaactaccctaaactctg

SEQ ID NO: 2688644 - DNA, 25 bp, Homo sapien
tgccagagatactaagtagtgacaa

SEQ ID NO: 2688645 - DNA, 25 bp, Homo sapien
gattagaccaattgcaccaccaaat

SEQ ID NO: 2688646 - DNA, 25 bp, Homo sapien
tccaccacggtttctgcaaatccaa

SEQ ID NO: 2688647 - DNA, 25 bp, Homo sapien
aactgcaacagcgttggcaaaggcg

SEQ ID NO: 2688648 - DNA, 25 bp, Homo sapien
accaccaaattctggccctagactt

SEQ ID NO: 2688649 - DNA, 25 bp, Homo sapien
gatttcatctatcataagtatggaa

SEQ ID NO: 2688650 - DNA, 25 bp, Homo sapien
tccaataattcggatatcattgatt

SEQ ID NO: 2688651 - DNA, 25 bp, Homo sapien
cagctactgagatacctaaaagaat

SEQ ID NO: 2688652 - DNA, 25 bp, Homo sapien
gaatcacgactgtaatggctccaat

SEQ ID NO: 2688653 - DNA, 25 bp, Homo sapien
ctctccagtgggataaatgttccta

SEQ ID NO: 2688654 - DNA, 25 bp, Homo sapien
caatagcaagaagtaggatcaccaa

SEQ ID NO: 2688655 - DNA, 25 bp, Homo sapien
tgttcctatgacgaaatcaccaata

SEQ ID NO: 2688656 - DNA, 25 bp, Homo sapien
aaatcaccaatagcaagaagtagga

SEQ ID NO: 2688657 - DNA, 25 bp, Homo sapien
tcttcctctcgaaaatcgggcccaa

SEQ ID NO: 2688658 - DNA, 25 bp, Homo sapien
aagtctcttcctctcgaaaatcggg

SEQ ID NO: 2688659 - DNA, 25 bp, Homo sapien
tgcaagatcacctgagatatttgct

SEQ ID NO: 2688660 - DNA, 25 bp, Homo sapien
gcaagatcacctgagatatttgctc

SEQ ID NO: 2688661 - DNA, 25 bp, Homo sapien
ctttgggtatggctgactgaggatc

SEQ ID NO: 2688662 - DNA, 25 bp, Homo sapien
gatactgcaattcctacgtaaacca

SEQ ID NO: 2688663 - DNA, 25 bp, Homo sapien
gcaattcctacgtaaaccaatgtag

SEQ ID NO: 2688664 - DNA, 25 bp, Homo sapien
ctaggagtgttcctttgggtatggc

SEQ ID NO: 2688665 - DNA, 25 bp, Homo sapien
tgttagctctgttacgatagtgtca

SEQ ID NO: 2688666 - DNA, 25 bp, Homo sapien
gatagtgtcattaacgtttccagtg

SEQ ID NO: 2688667 - DNA, 25 bp, Homo sapien
taggccataggaacaaggactgctt

SEQ ID NO: 2688668 - DNA, 25 bp, Homo sapien
gtggcatctcgaacaacacaagaac

SEQ ID NO: 2688669 - DNA, 25 bp, Homo sapien
taaacgtaaggtgcttgggtgatag

SEQ ID NO: 2688670 - DNA, 25 bp, Homo sapien
tatgaattgaacactcaacaaagtc

SEQ ID NO: 2688671 - DNA, 25 bp, Homo sapien
tcaacaaagtcaattctctccaaac

SEQ ID NO: 2688672 - DNA, 25 bp, Homo sapien
taccagtttaacgtaattcctatca

SEQ ID NO: 2688673 - DNA, 25 bp, Homo sapien
tacatacaggacgtatatgctgaaa

SEQ ID NO: 2688674 - DNA, 25 bp, Homo sapien
aaaatacatacaggacgtatatgct

SEQ ID NO: 2688675 - DNA, 25 bp, Homo sapien
aatacatacaggacgtatatgctga

SEQ ID NO: 2688676 - DNA, 25 bp, Homo sapien
acatacaggacgtatatgctgaaaa

SEQ ID NO: 2688677 - DNA, 25 bp, Homo sapien
gaaactgacagcctccaaatactgg

SEQ ID NO: 2688678 - DNA, 25 bp, Homo sapien
catgctgcatgactttatatgagcc

SEQ ID NO: 2688679 - DNA, 25 bp, Homo sapien
ggagaagtactactaacctgtctag

SEQ ID NO: 2688680 - DNA, 25 bp, Homo sapien
tctggcagactaaaacttcatttca

SEQ ID NO: 2688681 - DNA, 25 bp, Homo sapien
ggagcactcactagggatgctaatg

SEQ ID NO: 2688682 - DNA, 25 bp, Homo sapien
gtaaatcctgacaccatactcatta

SEQ ID NO: 2688683 - DNA, 25 bp, Homo sapien
ttttgggagcactcactagggatgc

SEQ ID NO: 2688684 - DNA, 25 bp, Homo sapien
gggatgctaatgctgaagaaagagt

SEQ ID NO: 2688685 - DNA, 25 bp, Homo sapien
agatgaatccaagtgcaattaagaa

SEQ ID NO: 2688686 - DNA, 25 bp, Homo sapien
caattaagaatgttaagatgtagcc

SEQ ID NO: 2688687 - DNA, 25 bp, Homo sapien
caattaagatgaatccaagtgcaat

SEQ ID NO: 2688688 - DNA, 25 bp, Homo sapien
gccacgaagaggttcattatttttc

SEQ ID NO: 2688689 - DNA, 25 bp, Homo sapien
attggtgcaataacattcagttcag

SEQ ID NO: 2688690 - DNA, 25 bp, Homo sapien
gaagaagtttgagataattggtgca

SEQ ID NO: 2688691 - DNA, 25 bp, Homo sapien
gatcaatgcatatgatgcaaggaag

SEQ ID NO: 2688692 - DNA, 25 bp, Homo sapien
tttgcaagtgatgcatggaatactg

SEQ ID NO: 2688693 - DNA, 25 bp, Homo sapien
tatacagcccaaggactatcacata

SEQ ID NO: 2688694 - DNA, 25 bp, Homo sapien
tatcacatatgttagcaatgcagcc

SEQ ID NO: 2688695 - DNA, 25 bp, Homo sapien
gctccaagaagtgatatccacatgt

SEQ ID NO: 2688696 - DNA, 25 bp, Homo sapien
aatgcagcccaccagttaatgacga

SEQ ID NO: 2688697 - DNA, 25 bp, Homo sapien
aagtcagggcttgtgtagaggatcc

SEQ ID NO: 2688698 - DNA, 25 bp, Homo sapien
gctgcagtgcattcaggtaagtcag

SEQ ID NO: 2688699 - DNA, 25 bp, Homo sapien
tttttcacgtggtcttccactccag

SEQ ID NO: 2688700 - DNA, 25 bp, Homo sapien
tccactccagaaagacgaattgaat

SEQ ID NO: 2688701 - DNA, 25 bp, Homo sapien
gggtagagcaattctcttttgacat

SEQ ID NO: 2688702 - DNA, 25 bp, Homo sapien
gagagagactgggtagagcaattct

SEQ ID NO: 2688703 - DNA, 25 bp, Homo sapien
catttatctacgtttcagggtttct

SEQ ID NO: 2688704 - DNA, 25 bp, Homo sapien
taaggagggattactcatgactaaa

SEQ ID NO: 2688705 - DNA, 25 bp, Homo sapien
cgtgtggtctctcagacctttttag

SEQ ID NO: 2688706 - DNA, 25 bp, Homo sapien
gacctgcgtgtggtctctcagacct

SEQ ID NO: 2688707 - DNA, 25 bp, Homo sapien
ctaaagctgaagacctgcgtgtggt

SEQ ID NO: 2688708 - DNA, 25 bp, Homo sapien
agctgaagacctgcgtgtggtctct

SEQ ID NO: 2688709 - DNA, 25 bp, Homo sapien
atccttgacatcactatccaaaata

SEQ ID NO: 2688710 - DNA, 25 bp, Homo sapien
caagatgaagtaaagctggacgtga

SEQ ID NO: 2688711 - DNA, 25 bp, Homo sapien
tttgtgaaatcatgaacaagatgaa

SEQ ID NO: 2688712 - DNA, 25 bp, Homo sapien
tcatgaacaagatgaagtaaagctg

SEQ ID NO: 2688713 - DNA, 25 bp, Homo sapien
aagctggacgtgagtttggagcacc

SEQ ID NO: 2688714 - DNA, 25 bp, Homo sapien
aataagccatcgctgatatttggct

SEQ ID NO: 2688715 - DNA, 25 bp, Homo sapien
aagtcatctgcatgtactggagcat

SEQ ID NO: 2688716 - DNA, 25 bp, Homo sapien
gcatgtactggagcataaaatgcct

SEQ ID NO: 2688717 - DNA, 25 bp, Homo sapien
ttttgttcttaataagccatcgctg

SEQ ID NO: 2688718 - DNA, 25 bp, Homo sapien
tgaactagccaggtgagccaaagta

SEQ ID NO: 2688719 - DNA, 25 bp, Homo sapien
gatacgggtagctctatttcctctg

SEQ ID NO: 2688720 - DNA, 25 bp, Homo sapien
taagaaacacacaacagaaacggat

SEQ ID NO: 2688721 - DNA, 25 bp, Homo sapien
gaagacaatactctgagcctcccac

SEQ ID NO: 2688722 - DNA, 25 bp, Homo sapien
gacaagtgtgtttggcttcatacga

SEQ ID NO: 2688723 - DNA, 25 bp, Homo sapien
ccaatctttcttaaatccaaggaca

SEQ ID NO: 2688724 - DNA, 25 bp, Homo sapien
ttcttaaatccaaggacaagtgtgt

SEQ ID NO: 2688725 - DNA, 25 bp, Homo sapien
gcttcatacgaccaagaccagcagc

SEQ ID NO: 2688726 - DNA, 25 bp, Homo sapien
ggcgaataaccactactccatattg

SEQ ID NO: 2688727 - DNA, 25 bp, Homo sapien
taaccactactccatattgtatgtc

SEQ ID NO: 2688728 - DNA, 25 bp, Homo sapien
tcttttaggcgaataaccactactc

SEQ ID NO: 2688729 - DNA, 25 bp, Homo sapien
ccactactccatattgtatgtcaaa

SEQ ID NO: 2688730 - DNA, 25 bp, Homo sapien
acggtgcccagccatagtttttata

SEQ ID NO: 2688731 - DNA, 25 bp, Homo sapien
ccacggtgcccagccatagttttta

SEQ ID NO: 2688732 - DNA, 25 bp, Homo sapien
agtgcaaaggagcaatctcggctta

SEQ ID NO: 2688733 - DNA, 25 bp, Homo sapien
ggattacaagcatgccccactaatt

SEQ ID NO: 2688734 - DNA, 25 bp, Homo sapien
tttaaaatagtatctaagtcatatt

SEQ ID NO: 2688735 - DNA, 25 bp, Homo sapien
ttatttaaaatagtatctaagtcat

SEQ ID NO: 2688736 - DNA, 25 bp, Homo sapien
ctgtagacagaaaattatttaaaat

SEQ ID NO: 2688737 - DNA, 25 bp, Homo sapien
aaatagtatctaagtcatattttaa

SEQ ID NO: 2688738 - DNA, 25 bp, Homo sapien
tttctcttgtgatgacaataattct

SEQ ID NO: 2688739 - DNA, 25 bp, Homo sapien
tatctaaatcggactttttactata

SEQ ID NO: 2688740 - DNA, 25 bp, Homo sapien
ttgtgtgtaattggtttttcactga

SEQ ID NO: 2688741 - DNA, 25 bp, Homo sapien
ttctcttgtgatgacaataattctt

SEQ ID NO: 2688742 - DNA, 25 bp, Homo sapien
cactgttgactgagaataactgact

SEQ ID NO: 2688743 - DNA, 25 bp, Homo sapien
ctgggcctggcagaaagtatttgaa

SEQ ID NO: 2688744 - DNA, 25 bp, Homo sapien
ctggagttaggctgcaagattgcaa

SEQ ID NO: 2688745 - DNA, 25 bp, Homo sapien
taggaaagagtatactacagtgggc

SEQ ID NO: 2688746 - DNA, 25 bp, Homo sapien
tgagttgcagtcttgccatcctctt

SEQ ID NO: 2688747 - DNA, 25 bp, Homo sapien
gttgagttgcagtcttgccatcctc

SEQ ID NO: 2688748 - DNA, 25 bp, Homo sapien
tttttcaacagtggttgagttgcag

SEQ ID NO: 2688749 - DNA, 25 bp, Homo sapien
tggttgagttgcagtcttgccatcc

SEQ ID NO: 2688750 - DNA, 25 bp, Homo sapien
ccggctgtctgggtctaatatttca

SEQ ID NO: 2688751 - DNA, 25 bp, Homo sapien
ggagttaaagagtttacagtatgaa

SEQ ID NO: 2688752 - DNA, 25 bp, Homo sapien
gaactgtaacattacctcaccatgg

SEQ ID NO: 2688753 - DNA, 25 bp, Homo sapien
cagtgtccctacttatcatctaaac

SEQ ID NO: 2688754 - DNA, 25 bp, Homo sapien
aatataaaatgtaagcaaagtaaat

SEQ ID NO: 2688755 - DNA, 25 bp, Homo sapien
aagtcccttttgctgaattcctatc

SEQ ID NO: 2688756 - DNA, 25 bp, Homo sapien
aatgtaagcaaagtaaatattaaag

SEQ ID NO: 2688757 - DNA, 25 bp, Homo sapien
ccttttgctgaattcctatcatttc

SEQ ID NO: 2688758 - DNA, 25 bp, Homo sapien
tttggtcagctacatttaaaggcac

SEQ ID NO: 2688759 - DNA, 25 bp, Homo sapien
aaactgtgtactagcttcaagaagc

SEQ ID NO: 2688760 - DNA, 25 bp, Homo sapien
tcaaaaagccaccagacatcaatag

SEQ ID NO: 2688761 - DNA, 25 bp, Homo sapien
ccagacatcaatagtattctttcct

SEQ ID NO: 2688762 - DNA, 25 bp, Homo sapien
gctctccggtcatggtctattctgt

SEQ ID NO: 2688763 - DNA, 25 bp, Homo sapien
ccattttttcttggtcgtcagaagg

SEQ ID NO: 2688764 - DNA, 25 bp, Homo sapien
tggtcgtcagaaggtaaggtatcaa

SEQ ID NO: 2688765 - DNA, 25 bp, Homo sapien
caatgaatactctgatcttacagtc

SEQ ID NO: 2688766 - DNA, 25 bp, Homo sapien
tctccttagcactgagtaatggaca

SEQ ID NO: 2688767 - DNA, 25 bp, Homo sapien
cctgtgggccatactgaagatatag

SEQ ID NO: 2688768 - DNA, 25 bp, Homo sapien
caagaacacttatctcagggcccaa

SEQ ID NO: 2688769 - DNA, 25 bp, Homo sapien
aaaaggatcatcaacaagcctgatt

SEQ ID NO: 2688770 - DNA, 25 bp, Homo sapien
tatctcctagaaccatgatatcaga

SEQ ID NO: 2688771 - DNA, 25 bp, Homo sapien
gaacttgctaagcaaagtagccatc

SEQ ID NO: 2688772 - DNA, 25 bp, Homo sapien
ggtattgatatctcctagaaccatg

SEQ ID NO: 2688773 - DNA, 25 bp, Homo sapien
tgatatcagaaaagtctatccggaa

SEQ ID NO: 2688774 - DNA, 25 bp, Homo sapien
ggctcaatgatttcctcaaaagcta

SEQ ID NO: 2688775 - DNA, 25 bp, Homo sapien
cattttatctgcaatatcttgctct

SEQ ID NO: 2688776 - DNA, 25 bp, Homo sapien
aagtctgtatggctcaatgatttcc

SEQ ID NO: 2688777 - DNA, 25 bp, Homo sapien
catcttcatgaagtctgtatggctc

SEQ ID NO: 2688778 - DNA, 25 bp, Homo sapien
tcttataaagttcaagctcattatc

SEQ ID NO: 2688779 - DNA, 25 bp, Homo sapien
cttggtcttataaagttcaagctca

SEQ ID NO: 2688780 - DNA, 25 bp, Homo sapien
ttataaagttcaagctcattatctg

SEQ ID NO: 2688781 - DNA, 25 bp, Homo sapien
ggtcttataaagttcaagctcatta

SEQ ID NO: 2688782 - DNA, 25 bp, Homo sapien
tgaaatgaattttcgtgtaataaaa

SEQ ID NO: 2688783 - DNA, 25 bp, Homo sapien
ctgaaatgaattttcgtgtaataaa

SEQ ID NO: 2688784 - DNA, 25 bp, Homo sapien
actgaaatgaattttcgtgtaataa

SEQ ID NO: 2688785 - DNA, 25 bp, Homo sapien
ctgaaatgaaacaggacagtcattc

SEQ ID NO: 2688786 - DNA, 25 bp, Homo sapien
gacaataatattagctgtgcttgaa

SEQ ID NO: 2688787 - DNA, 25 bp, Homo sapien
catttaacctgatctgccggtatgt

SEQ ID NO: 2688788 - DNA, 25 bp, Homo sapien
aataactcatttaacctgatctgcc

SEQ ID NO: 2688789 - DNA, 25 bp, Homo sapien
ctgtgcttgaatgttcctttaataa

SEQ ID NO: 2688790 - DNA, 25 bp, Homo sapien
ttatgaatagaaggtaaggacactc

SEQ ID NO: 2688791 - DNA, 25 bp, Homo sapien
gtggtaggtccttagatagagcttc

SEQ ID NO: 2688792 - DNA, 25 bp, Homo sapien
tgatgattcccacgaactaggagga

SEQ ID NO: 2688793 - DNA, 25 bp, Homo sapien
tagagcttctaaccatgccatgtag

SEQ ID NO: 2688794 - DNA, 25 bp, Homo sapien
tatacccacatgtatgacgcatgac

SEQ ID NO: 2688795 - DNA, 25 bp, Homo sapien
gaagcaaaaatgctgcacaccactg

SEQ ID NO: 2688796 - DNA, 25 bp, Homo sapien
tacactaggcactgaagtaccattc

SEQ ID NO: 2688797 - DNA, 25 bp, Homo sapien
gaaaagtcaccattcgccattgtga

SEQ ID NO: 2688798 - DNA, 25 bp, Homo sapien
ttctgttcttgccactgacaaagac

SEQ ID NO: 2688799 - DNA, 25 bp, Homo sapien
tgggttctgttcttgccactgacaa

SEQ ID NO: 2688800 - DNA, 25 bp, Homo sapien
ggttctgttcttgccactgacaaag

SEQ ID NO: 2688801 - DNA, 25 bp, Homo sapien
ctttgggttctgttcttgccactga

SEQ ID NO: 2688802 - DNA, 25 bp, Homo sapien
gccagaccattgcagccagtaaact

SEQ ID NO: 2688803 - DNA, 25 bp, Homo sapien
gaactagaaaataggctgtgttggt

SEQ ID NO: 2688804 - DNA, 25 bp, Homo sapien
ctaaattgcaattccacaggaggca

SEQ ID NO: 2688805 - DNA, 25 bp, Homo sapien
gaccatcataaagtattggagcagg

SEQ ID NO: 2688806 - DNA, 25 bp, Homo sapien
cgcattcgtgtacttttcggcacta

SEQ ID NO: 2688807 - DNA, 25 bp, Homo sapien
agacacctgtgggactgaattgttc

SEQ ID NO: 2688808 - DNA, 25 bp, Homo sapien
gaattgttcactaatcctcaaagaa

SEQ ID NO: 2688809 - DNA, 25 bp, Homo sapien
aaataaggatttgcccgcattcgtg

SEQ ID NO: 2688810 - DNA, 25 bp, Homo sapien
tctagttctcaaacgggcatggaat

SEQ ID NO: 2688811 - DNA, 25 bp, Homo sapien
attatgaaatggagtacaggcttcc

SEQ ID NO: 2688812 - DNA, 25 bp, Homo sapien
aagattggcattctggttgtgagcc

SEQ ID NO: 2688813 - DNA, 25 bp, Homo sapien
catcacaggagatctggcaaccaaa

SEQ ID NO: 2688814 - DNA, 25 bp, Homo sapien
ggccacttggttcatccctggtctc

SEQ ID NO: 2688815 - DNA, 25 bp, Homo sapien
tccaggccacttggttcatccctgg

SEQ ID NO: 2688816 - DNA, 25 bp, Homo sapien
gagcccacagttcaggggtgatgct

SEQ ID NO: 2688817 - DNA, 25 bp, Homo sapien
ttggttcatccctggtctccttggt

SEQ ID NO: 2688818 - DNA, 25 bp, Homo sapien
tgtggccaaactcagacaaggagct

SEQ ID NO: 2688819 - DNA, 25 bp, Homo sapien
ggagctgggcctaggaattgggtca

SEQ ID NO: 2688820 - DNA, 25 bp, Homo sapien
tagtctgaagtctggaccagcccgg

SEQ ID NO: 2688821 - DNA, 25 bp, Homo sapien
ccagcccggattgctgtgtgtggcc

SEQ ID NO: 2688822 - DNA, 25 bp, Homo sapien
ctcaacactgtggacaccaagggcc

SEQ ID NO: 2688823 - DNA, 25 bp, Homo sapien
cctgaggtctggcacacaactgagt

SEQ ID NO: 2688824 - DNA, 25 bp, Homo sapien
ggcctgtgttctctccgagccgtgg

SEQ ID NO: 2688825 - DNA, 25 bp, Homo sapien
ttccctcaacactgtggacaccaag

SEQ ID NO: 2688826 - DNA, 25 bp, Homo sapien
acagtctaattgcatctggccctga

SEQ ID NO: 2688827 - DNA, 25 bp, Homo sapien
ccacgggtttgtgggcacgagctca

SEQ ID NO: 2688828 - DNA, 25 bp, Homo sapien
aatcatcttccagccacgggtttgt

SEQ ID NO: 2688829 - DNA, 25 bp, Homo sapien
gcccacagtctaattgcatctggcc

SEQ ID NO: 2688830 - DNA, 25 bp, Homo sapien
ttatatgacacacactctaggtgtg

SEQ ID NO: 2688831 - DNA, 25 bp, Homo sapien
tatatgacacacactctaggtgtga

SEQ ID NO: 2688832 - DNA, 25 bp, Homo sapien
atatgacacacactctaggtgtgac

SEQ ID NO: 2688833 - DNA, 25 bp, Homo sapien
tcagggtccttctaatagcaggcat

SEQ ID NO: 2688834 - DNA, 25 bp, Homo sapien
ccttcaaatctctttcgagggctga

SEQ ID NO: 2688835 - DNA, 25 bp, Homo sapien
tgatgaagggatagccagtgacatt

SEQ ID NO: 2688836 - DNA, 25 bp, Homo sapien
cgagggctgatgaagggatagccag

SEQ ID NO: 2688837 - DNA, 25 bp, Homo sapien
agcatatctactgagaactctatca

SEQ ID NO: 2688838 - DNA, 25 bp, Homo sapien
taactgatggtaccatgaaggaaaa

SEQ ID NO: 2688839 - DNA, 25 bp, Homo sapien
tgacgaatcattggtgtatggctga

SEQ ID NO: 2688840 - DNA, 25 bp, Homo sapien
gaaggacatcctaagccatttagac

SEQ ID NO: 2688841 - DNA, 25 bp, Homo sapien
tgtagtccgtagctaatgacgaatc

SEQ ID NO: 2688842 - DNA, 25 bp, Homo sapien
cctcatatgtgaaatggccaaagca

SEQ ID NO: 2688843 - DNA, 25 bp, Homo sapien
caaacctgtgctgaccaaagattag

SEQ ID NO: 2688844 - DNA, 25 bp, Homo sapien
tactgtaggcagctgaagaaccgcc

SEQ ID NO: 2688845 - DNA, 25 bp, Homo sapien
tggaccagtgaccaaacctcatatg

SEQ ID NO: 2688846 - DNA, 25 bp, Homo sapien
aataccttgactgcttgtgagacca

SEQ ID NO: 2688847 - DNA, 25 bp, Homo sapien
catttcatatcaccagacacaccag

SEQ ID NO: 2688848 - DNA, 25 bp, Homo sapien
tgtgagaccattagcattgcaggcc

SEQ ID NO: 2688849 - DNA, 25 bp, Homo sapien
caggcaacagaagttgaagcacaac

SEQ ID NO: 2688850 - DNA, 25 bp, Homo sapien
acagagctgaatgggcagtgtaatc

SEQ ID NO: 2688851 - DNA, 25 bp, Homo sapien
tataacgtagatcgaagccaaagca

SEQ ID NO: 2688852 - DNA, 25 bp, Homo sapien
gcagtctgtaacactttgggtattt

SEQ ID NO: 2688853 - DNA, 25 bp, Homo sapien
cagctgatacacacctgatgatttt

SEQ ID NO: 2688854 - DNA, 25 bp, Homo sapien
tagagaatcatgatatctgcaaaca

SEQ ID NO: 2688855 - DNA, 25 bp, Homo sapien
gataaaatttgacatcctctcttcc

SEQ ID NO: 2688856 - DNA, 25 bp, Homo sapien
aaggcattcttatcttataccagtt

SEQ ID NO: 2688857 - DNA, 25 bp, Homo sapien
aacagataaaatttgacatcctctc

SEQ ID NO: 2688858 - DNA, 25 bp, Homo sapien
taaaaatagacgtacataggaggtg

SEQ ID NO: 2688859 - DNA, 25 bp, Homo sapien
tctagcacagggcaaaatgctaata

SEQ ID NO: 2688860 - DNA, 25 bp, Homo sapien
catcgtgtcttcttactgtacatga

SEQ ID NO: 2688861 - DNA, 25 bp, Homo sapien
tcctaagtcatatgtgttcctccaa

SEQ ID NO: 2688862 - DNA, 25 bp, Homo sapien
ctttgagttaaagcctcatggaaga

SEQ ID NO: 2688863 - DNA, 25 bp, Homo sapien
catggaagactctcataaacttttc

SEQ ID NO: 2688864 - DNA, 25 bp, Homo sapien
caattcagtagagatattttaatga

SEQ ID NO: 2688865 - DNA, 25 bp, Homo sapien
tagaatgtggggtcaatggatcatc

SEQ ID NO: 2688866 - DNA, 25 bp, Homo sapien
agaaagtttcaagaagcaactggca

SEQ ID NO: 2688867 - DNA, 25 bp, Homo sapien
tgtaaagtattctgagaactaaagt

SEQ ID NO: 2688868 - DNA, 25 bp, Homo sapien
caccactataccctagccttggcaa

SEQ ID NO: 2688869 - DNA, 25 bp, Homo sapien
cattttttaatattctaagatgata

SEQ ID NO: 2688870 - DNA, 25 bp, Homo sapien
tgcacacgtgcatatgcgaacacaa

SEQ ID NO: 2688871 - DNA, 25 bp, Homo sapien
actctttaggagaaacgtcgccgtg

SEQ ID NO: 2688872 - DNA, 25 bp, Homo sapien
tgctgtagaacctggcttccggaaa

SEQ ID NO: 2688873 - DNA, 25 bp, Homo sapien
cgtcgccgtgggagtcgtcattgaa

SEQ ID NO: 2688874 - DNA, 25 bp, Homo sapien
ggcagctgacaaaaactgctagcac

SEQ ID NO: 2688875 - DNA, 25 bp, Homo sapien
gcacagcaagccttagtcccttaca

SEQ ID NO: 2688876 - DNA, 25 bp, Homo sapien
caattcatggttgatatatagtcac

SEQ ID NO: 2688877 - DNA, 25 bp, Homo sapien
tacaccctggcagttggaccagaag

SEQ ID NO: 2688878 - DNA, 25 bp, Homo sapien
cgctggatttggaatagtcaacttt

SEQ ID NO: 2688879 - DNA, 25 bp, Homo sapien
ctgatgaggcaacgctggatttgga

SEQ ID NO: 2688880 - DNA, 25 bp, Homo sapien
gaggcaacgctggatttggaatagt

SEQ ID NO: 2688881 - DNA, 25 bp, Homo sapien
tctctctgatgaggcaacgctggat

SEQ ID NO: 2688882 - DNA, 25 bp, Homo sapien
tggaggaaaccagtgcattgtccgt

SEQ ID NO: 2688883 - DNA, 25 bp, Homo sapien
atcacaggcccaacgtgtgcggctc

SEQ ID NO: 2688884 - DNA, 25 bp, Homo sapien
cctggatggaagacgctccctggag

SEQ ID NO: 2688885 - DNA, 25 bp, Homo sapien
tacctatctgttacgtgaccgcgct

SEQ ID NO: 2688886 - DNA, 25 bp, Homo sapien
ttctttctggtgacttttgcagctt

SEQ ID NO: 2688887 - DNA, 25 bp, Homo sapien
tttctttctggtgacttttgcagct

SEQ ID NO: 2688888 - DNA, 25 bp, Homo sapien
gggttgagccccacgtgtggacggc

SEQ ID NO: 2688889 - DNA, 25 bp, Homo sapien
gccggcctctcagtccgggttgagc

SEQ ID NO: 2688890 - DNA, 25 bp, Homo sapien
tctcagtccgggttgagccccacgt

SEQ ID NO: 2688891 - DNA, 25 bp, Homo sapien
tgcgccggcctctcagtccgggttg

SEQ ID NO: 2688892 - DNA, 25 bp, Homo sapien
tatcgatgcgtttagaatagtgagc

SEQ ID NO: 2688893 - DNA, 25 bp, Homo sapien
gatgctcaagtttccccatccttaa

SEQ ID NO: 2688894 - DNA, 25 bp, Homo sapien
tctttcaacttagctcaggtttcct

SEQ ID NO: 2688895 - DNA, 25 bp, Homo sapien
tgtgccctaacaacctccaaaagtg

SEQ ID NO: 2688896 - DNA, 25 bp, Homo sapien
caatgcccacaagataagtatgatg

SEQ ID NO: 2688897 - DNA, 25 bp, Homo sapien
ccccagtgaattagtagaaaatgcc

SEQ ID NO: 2688898 - DNA, 25 bp, Homo sapien
tgatagtcggtgtctttcaagtcac

SEQ ID NO: 2688899 - DNA, 25 bp, Homo sapien
taatcttttcaactaaccaggctgc

SEQ ID NO: 2688900 - DNA, 25 bp, Homo sapien
aggaagacaagtgtgtcctctccat

SEQ ID NO: 2688901 - DNA, 25 bp, Homo sapien
atatcccatgaacaggtgcctcgcc

SEQ ID NO: 2688902 - DNA, 25 bp, Homo sapien
tcctctccatatcccatgaacaggt

SEQ ID NO: 2688903 - DNA, 25 bp, Homo sapien
gaagacaagtgtgtcctctccatat

SEQ ID NO: 2688904 - DNA, 25 bp, Homo sapien
acatcaactcttcaccacttagaca

SEQ ID NO: 2688905 - DNA, 25 bp, Homo sapien
tgatcttatctctgtccattgtcat

SEQ ID NO: 2688906 - DNA, 25 bp, Homo sapien
tctctgacactaaactcctggagga

SEQ ID NO: 2688907 - DNA, 25 bp, Homo sapien
ctctgacactaaactcctggaggac

SEQ ID NO: 2688908 - DNA, 25 bp, Homo sapien
cagttcagtgatcttatctctgtcc

SEQ ID NO: 2688909 - DNA, 25 bp, Homo sapien
gtgcgtctgcactctcttaacccag

SEQ ID NO: 2688910 - DNA, 25 bp, Homo sapien
tcccaggcacacttgactattagaa

SEQ ID NO: 2688911 - DNA, 25 bp, Homo sapien
gagcatgagtaacaatctcccaggc

SEQ ID NO: 2688912 - DNA, 25 bp, Homo sapien
gagaaccgtcaaaatgtgcgtctgc

SEQ ID NO: 2688913 - DNA, 25 bp, Homo sapien
cactttcatggaaacagtcgtttgt

SEQ ID NO: 2688914 - DNA, 25 bp, Homo sapien
tcatggaaacagtcgtttgtagttt

SEQ ID NO: 2688915 - DNA, 25 bp, Homo sapien
ctcactttcatggaaacagtcgttt

SEQ ID NO: 2688916 - DNA, 25 bp, Homo sapien
ctttcatggaaacagtcgtttgtag

SEQ ID NO: 2688917 - DNA, 25 bp, Homo sapien
gatgttgatatacacgagactatca

SEQ ID NO: 2688918 - DNA, 25 bp, Homo sapien
gccatatctcctgtcttccgtgtga

SEQ ID NO: 2688919 - DNA, 25 bp, Homo sapien
gagactatcaattcaaactctttac

SEQ ID NO: 2688920 - DNA, 25 bp, Homo sapien
tttcgtggactcaaggccatatctc

SEQ ID NO: 2688921 - DNA, 25 bp, Homo sapien
tttgccagttctcttggtattccca

SEQ ID NO: 2688922 - DNA, 25 bp, Homo sapien
atttgccagttctcttggtattccc

SEQ ID NO: 2688923 - DNA, 25 bp, Homo sapien
aagttcacaatatagggccgggcgc

SEQ ID NO: 2688924 - DNA, 25 bp, Homo sapien
gcatttcgctgatgactaagagagt

SEQ ID NO: 2688925 - DNA, 25 bp, Homo sapien
ggcccactttctattgtgttgcctg

SEQ ID NO: 2688926 - DNA, 25 bp, Homo sapien
gaagtgcccactttatgatttggcc

SEQ ID NO: 2688927 - DNA, 25 bp, Homo sapien
tgatttggaaaccagcactatcact

SEQ ID NO: 2688928 - DNA, 25 bp, Homo sapien
ctatagaccaacacttaaagaccca

SEQ ID NO: 2688929 - DNA, 25 bp, Homo sapien
taccaggtgacggtgccatcattgc

SEQ ID NO: 2688930 - DNA, 25 bp, Homo sapien
taaagacccactgccccagtgttca

SEQ ID NO: 2688931 - DNA, 25 bp, Homo sapien
ttctatagcaatgtacaaatttgtc

SEQ ID NO: 2688932 - DNA, 25 bp, Homo sapien
atgcttagcgaagtagagggaaccc

SEQ ID NO: 2688933 - DNA, 25 bp, Homo sapien
taaggactcttactttgcacttctg

SEQ ID NO: 2688934 - DNA, 25 bp, Homo sapien
tactttgcacttctgatgcttagcg

SEQ ID NO: 2688935 - DNA, 25 bp, Homo sapien
gttggcctgggtctgcttgttcgtt

SEQ ID NO: 2688936 - DNA, 25 bp, Homo sapien
tggcctgggtctgcttgttcgttca

SEQ ID NO: 2688937 - DNA, 25 bp, Homo sapien
ggcctgggtctgcttgttcgttcat

SEQ ID NO: 2688938 - DNA, 25 bp, Homo sapien
cctgggtctgcttgttcgttcattc

SEQ ID NO: 2688939 - DNA, 25 bp, Homo sapien
gaaatctttgttcgccagtcttcga

SEQ ID NO: 2688940 - DNA, 25 bp, Homo sapien
caaaaactgaaatctttgttcgcca

SEQ ID NO: 2688941 - DNA, 25 bp, Homo sapien
tctttgttcgccagtcttcgaaggc

SEQ ID NO: 2688942 - DNA, 25 bp, Homo sapien
tcgccagtcttcgaaggcttttttc

SEQ ID NO: 2688943 - DNA, 25 bp, Homo sapien
ccagctatttctgccacaccatccc

SEQ ID NO: 2688944 - DNA, 25 bp, Homo sapien
ccacaccatcccagacattgttcat

SEQ ID NO: 2688945 - DNA, 25 bp, Homo sapien
ctccagctatttctgccacaccatc

SEQ ID NO: 2688946 - DNA, 25 bp, Homo sapien
atcatctttctctccagctatttct

SEQ ID NO: 2688947 - DNA, 25 bp, Homo sapien
aggatcatcaggatagaggatccct

SEQ ID NO: 2688948 - DNA, 25 bp, Homo sapien
gaggatcccttatgggcatgaagct

SEQ ID NO: 2688949 - DNA, 25 bp, Homo sapien
gtagtgataggatcatcaggataga

SEQ ID NO: 2688950 - DNA, 25 bp, Homo sapien
tcaggatagaggatcccttatgggc

SEQ ID NO: 2688951 - DNA, 25 bp, Homo sapien
tctatgccatccacacctctattct

SEQ ID NO: 2688952 - DNA, 25 bp, Homo sapien
gccatccacacctctattctccaaa

SEQ ID NO: 2688953 - DNA, 25 bp, Homo sapien
tcatctatgccatccacacctctat

SEQ ID NO: 2688954 - DNA, 25 bp, Homo sapien
tccacacctctattctccaaatatt

SEQ ID NO: 2688955 - DNA, 25 bp, Homo sapien
ttctttttcgcaataatttctcaat

SEQ ID NO: 2688956 - DNA, 25 bp, Homo sapien
tctttttcgcaataatttctcaatc

SEQ ID NO: 2688957 - DNA, 25 bp, Homo sapien
gtttctttttcgcaataatttctca

SEQ ID NO: 2688958 - DNA, 25 bp, Homo sapien
tttctttttcgcaataatttctcaa

SEQ ID NO: 2688959 - DNA, 25 bp, Homo sapien
gtgtagacatttgtgcggatggcca

SEQ ID NO: 2688960 - DNA, 25 bp, Homo sapien
tgccatcttgctccacttcacctct

SEQ ID NO: 2688961 - DNA, 25 bp, Homo sapien
aaaggagcttgctattctgccatct

SEQ ID NO: 2688962 - DNA, 25 bp, Homo sapien
tcacctctgtactttactaaggcag

SEQ ID NO: 2688963 - DNA, 25 bp, Homo sapien
tgttcataatcttgacttggaagtt

SEQ ID NO: 2688964 - DNA, 25 bp, Homo sapien
aaggctgattgttaatccattgaat

SEQ ID NO: 2688965 - DNA, 25 bp, Homo sapien
gttcataatcttgacttggaagttg

SEQ ID NO: 2688966 - DNA, 25 bp, Homo sapien
gattgttaatccattgaattctgtc

SEQ ID NO: 2688967 - DNA, 25 bp, Homo sapien
cttgttaggtgtttctcccttctgc

SEQ ID NO: 2688968 - DNA, 25 bp, Homo sapien
ttaggtgtttctcccttctgcctca

SEQ ID NO: 2688969 - DNA, 25 bp, Homo sapien
gttaggtgtttctcccttctgcctc

SEQ ID NO: 2688970 - DNA, 25 bp, Homo sapien
tgttaggtgtttctcccttctgcct

SEQ ID NO: 2688971 - DNA, 25 bp, Homo sapien
agagttgctgggattgggcggcgcg

SEQ ID NO: 2688972 - DNA, 25 bp, Homo sapien
ctggcgaggctgataaggtataaca

SEQ ID NO: 2688973 - DNA, 25 bp, Homo sapien
caaaggtcatccattgaaccaatta

SEQ ID NO: 2688974 - DNA, 25 bp, Homo sapien
ggtataacagtgtcgcacaaaggtc

SEQ ID NO: 2688975 - DNA, 25 bp, Homo sapien
cactccgagtgtcgttaggctagcc

SEQ ID NO: 2688976 - DNA, 25 bp, Homo sapien
gctagcctagtgtattctcctccga

SEQ ID NO: 2688977 - DNA, 25 bp, Homo sapien
gcgtccggccacctagagaagtgtg

SEQ ID NO: 2688978 - DNA, 25 bp, Homo sapien
aacatggtgggagtgttgcctgccc

SEQ ID NO: 2688979 - DNA, 25 bp, Homo sapien
gactgagaagcgcagcgatttacag

SEQ ID NO: 2688980 - DNA, 25 bp, Homo sapien
gatgactgagaagcgcagcgattta

SEQ ID NO: 2688981 - DNA, 25 bp, Homo sapien
atgatgactgagaagcgcagcgatt

SEQ ID NO: 2688982 - DNA, 25 bp, Homo sapien
ctgagaagcgcagcgatttacagtc

SEQ ID NO: 2688983 - DNA, 25 bp, Homo sapien
ttgagttggaggctgaattcgagcc

SEQ ID NO: 2688984 - DNA, 25 bp, Homo sapien
tcctctcaggtagtctttcccgcga

SEQ ID NO: 2688985 - DNA, 25 bp, Homo sapien
caggtagtctttcccgcgagcttga

SEQ ID NO: 2688986 - DNA, 25 bp, Homo sapien
tttcccgcgagcttgagttggaggc

SEQ ID NO: 2688987 - DNA, 25 bp, Homo sapien
cctgcttctgcgaccctaaacaaac

SEQ ID NO: 2688988 - DNA, 25 bp, Homo sapien
tcaggggtcttggaatctacaaccc

SEQ ID NO: 2688989 - DNA, 25 bp, Homo sapien
tggaatctacaaccccagcgctgcg

SEQ ID NO: 2688990 - DNA, 25 bp, Homo sapien
gacagcggcccgtgccctgcgagtt

SEQ ID NO: 2688991 - DNA, 25 bp, Homo sapien
cgtgccctgcgagttccccaggact

SEQ ID NO: 2688992 - DNA, 25 bp, Homo sapien
tgcaccgaaaaggtcgccccaagtg

SEQ ID NO: 2688993 - DNA, 25 bp, Homo sapien
gaaacagaatcgtaggtttgcaccg

SEQ ID NO: 2688994 - DNA, 25 bp, Homo sapien
aagattaagcttgggtcactgggcg

SEQ ID NO: 2688995 - DNA, 25 bp, Homo sapien
ccccaagtggtgctgaagattaagc

SEQ ID NO: 2688996 - DNA, 25 bp, Homo sapien
ttgtcagcttttccggggcgaagcg

SEQ ID NO: 2688997 - DNA, 25 bp, Homo sapien
tgaagttcttgtcagcttttccggg

SEQ ID NO: 2688998 - DNA, 25 bp, Homo sapien
ttcttgtcagcttttccggggcgaa

SEQ ID NO: 2688999 - DNA, 25 bp, Homo sapien
cctgaagttcttgtcagcttttccg

SEQ ID NO: 2689000 - DNA, 25 bp, Homo sapien
ccacggagaccgcagatcctcacta

SEQ ID NO: 2689001 - DNA, 25 bp, Homo sapien
gggcaactgggccagaagacagctc

SEQ ID NO: 2689002 - DNA, 25 bp, Homo sapien
cagatcctcactactcagggcttac

SEQ ID NO: 2689003 - DNA, 25 bp, Homo sapien
ggccagaagacagctctgatctcag

SEQ ID NO: 2689004 - DNA, 25 bp, Homo sapien
cgtgaacgaagtccggctcattgct

SEQ ID NO: 2689005 - DNA, 25 bp, Homo sapien
ggtgttgagaaaggccaccacgcag

SEQ ID NO: 2689006 - DNA, 25 bp, Homo sapien
gccgaattataatgagcaccacctt

SEQ ID NO: 2689007 - DNA, 25 bp, Homo sapien
cacaggcgcggatgcaattcaggag

SEQ ID NO: 2689008 - DNA, 25 bp, Homo sapien
tctatcttgagaagtagccagtcct

SEQ ID NO: 2689009 - DNA, 25 bp, Homo sapien
tcttggttggcccttgtaaacagaa

SEQ ID NO: 2689010 - DNA, 25 bp, Homo sapien
tgtactttaagacgaatctctcagg

SEQ ID NO: 2689011 - DNA, 25 bp, Homo sapien
caacaattcggtcaacagaaaagcc

SEQ ID NO: 2689012 - DNA, 25 bp, Homo sapien
tgttctaagcactgataatgcgtgg

SEQ ID NO: 2689013 - DNA, 25 bp, Homo sapien
gatatcaggtaaacatgggctcaaa

SEQ ID NO: 2689014 - DNA, 25 bp, Homo sapien
taaatggcttcatggttcagtagct

SEQ ID NO: 2689015 - DNA, 25 bp, Homo sapien
aaaggatatgcctccttacagaagg

SEQ ID NO: 2689016 - DNA, 25 bp, Homo sapien
acttcttactatgggtggctgtctc

SEQ ID NO: 2689017 - DNA, 25 bp, Homo sapien
gctgtttaaagccaactcactaagg

SEQ ID NO: 2689018 - DNA, 25 bp, Homo sapien
tatggatgtactgctactggagagg

SEQ ID NO: 2689019 - DNA, 25 bp, Homo sapien
tgttactgtactgaaaacactgcag

SEQ ID NO: 2689020 - DNA, 25 bp, Homo sapien
caaaccttaaatctcaaacaattca

SEQ ID NO: 2689021 - DNA, 25 bp, Homo sapien
agagttaagcaaaccttaaatctca

SEQ ID NO: 2689022 - DNA, 25 bp, Homo sapien
aaccttaaatctcaaacaattcact

SEQ ID NO: 2689023 - DNA, 25 bp, Homo sapien
taagcaaaccttaaatctcaaacaa

SEQ ID NO: 2689024 - DNA, 25 bp, Homo sapien
tgaaattacaccttgtggaacagaa

SEQ ID NO: 2689025 - DNA, 25 bp, Homo sapien
ggatttcttctaccgttccaagcaa

SEQ ID NO: 2689026 - DNA, 25 bp, Homo sapien
tgagtgaaattacaccttgtggaac

SEQ ID NO: 2689027 - DNA, 25 bp, Homo sapien
tttcatcccccaaacactgatattt

SEQ ID NO: 2689028 - DNA, 25 bp, Homo sapien
tagccttcaaaagaattggatcata

SEQ ID NO: 2689029 - DNA, 25 bp, Homo sapien
agccttcaaaagaattggatcatac

SEQ ID NO: 2689030 - DNA, 25 bp, Homo sapien
aatttctcgcattcattttagcctt

SEQ ID NO: 2689031 - DNA, 25 bp, Homo sapien
tctcgcattcattttagccttcaaa

SEQ ID NO: 2689032 - DNA, 25 bp, Homo sapien
ggtgcttaaattgccggtatacctg

SEQ ID NO: 2689033 - DNA, 25 bp, Homo sapien
gattcaattaccctgaccaaaatca

SEQ ID NO: 2689034 - DNA, 25 bp, Homo sapien
caaacctgcagtgccttcaagagtt

SEQ ID NO: 2689035 - DNA, 25 bp, Homo sapien
ttttgtatcttagtccaaacctgca

SEQ ID NO: 2689036 - DNA, 25 bp, Homo sapien
caggatagctgctgaactatgatac

SEQ ID NO: 2689037 - DNA, 25 bp, Homo sapien
gggttatataaacaatgtcatgagc

SEQ ID NO: 2689038 - DNA, 25 bp, Homo sapien
aaaacctgcagctgactaatcacag

SEQ ID NO: 2689039 - DNA, 25 bp, Homo sapien
gtacaaccaaaagcccacaggacag

SEQ ID NO: 2689040 - DNA, 25 bp, Homo sapien
gattgtttgcaaaggtagcgacaaa

SEQ ID NO: 2689041 - DNA, 25 bp, Homo sapien
gcagtcactccaaaactggcttgct

SEQ ID NO: 2689042 - DNA, 25 bp, Homo sapien
agcgacaaagttctccaatatactg

SEQ ID NO: 2689043 - DNA, 25 bp, Homo sapien
tcactccaaaactggcttgctgaaa

SEQ ID NO: 2689044 - DNA, 25 bp, Homo sapien
cgtagccaatgcactatcagatggt

SEQ ID NO: 2689045 - DNA, 25 bp, Homo sapien
gaagaattatggcttaaagaagtga

SEQ ID NO: 2689046 - DNA, 25 bp, Homo sapien
cctatgtcattagattccgtagcca

SEQ ID NO: 2689047 - DNA, 25 bp, Homo sapien
tcaagggccaattagaagaagtagg

SEQ ID NO: 2689048 - DNA, 25 bp, Homo sapien
gacaccaagtcaaatggctattgca

SEQ ID NO: 2689049 - DNA, 25 bp, Homo sapien
gtaagaagtaacactaaatgcgaac

SEQ ID NO: 2689050 - DNA, 25 bp, Homo sapien
taaatgcgaacaggatgtcggagaa

SEQ ID NO: 2689051 - DNA, 25 bp, Homo sapien
agtcaaatggctattgcagagccag

SEQ ID NO: 2689052 - DNA, 25 bp, Homo sapien
gccaaacgcaccttatgatcctttt

SEQ ID NO: 2689053 - DNA, 25 bp, Homo sapien
ttccaattgccaaacgcaccttatg

SEQ ID NO: 2689054 - DNA, 25 bp, Homo sapien
catcactccgtatgccatttccaat

SEQ ID NO: 2689055 - DNA, 25 bp, Homo sapien
tatatttccaaatctgtctaaaaat

SEQ ID NO: 2689056 - DNA, 25 bp, Homo sapien
tcggtagctgcataaagttcacaca

SEQ ID NO: 2689057 - DNA, 25 bp, Homo sapien
tttgttctcccaattgctccaattc

SEQ ID NO: 2689058 - DNA, 25 bp, Homo sapien
ttcatgaaagatatgcttgattcgg

SEQ ID NO: 2689059 - DNA, 25 bp, Homo sapien
tccaattctcccagtgtagttcatg

SEQ ID NO: 2689060 - DNA, 25 bp, Homo sapien
catctttctgaaagtcatactttat

SEQ ID NO: 2689061 - DNA, 25 bp, Homo sapien
atctttctgaaagtcatactttatt

SEQ ID NO: 2689062 - DNA, 25 bp, Homo sapien
tgtcctgatcctggactattaagtc

SEQ ID NO: 2689063 - DNA, 25 bp, Homo sapien
gaaagtgtctccagtacggtcccaa

SEQ ID NO: 2689064 - DNA, 25 bp, Homo sapien
cattcactcgagaaatgagaagtcc

SEQ ID NO: 2689065 - DNA, 25 bp, Homo sapien
gcaatttgtcttttgtgtgcttata

SEQ ID NO: 2689066 - DNA, 25 bp, Homo sapien
gatatagccacaccatagacgtttg

SEQ ID NO: 2689067 - DNA, 25 bp, Homo sapien
tcagtggttgcgacattttctcctt

SEQ ID NO: 2689068 - DNA, 25 bp, Homo sapien
gacgtttgcttcctgtatgaaatcc

SEQ ID NO: 2689069 - DNA, 25 bp, Homo sapien
aatccaacattccaataacatcagc

SEQ ID NO: 2689070 - DNA, 25 bp, Homo sapien
gaattcttaaaaatcgtggacaagc

SEQ ID NO: 2689071 - DNA, 25 bp, Homo sapien
ctttttccaaatctaaagatgtatt

SEQ ID NO: 2689072 - DNA, 25 bp, Homo sapien
tggacaagcataagctggtagaaat

SEQ ID NO: 2689073 - DNA, 25 bp, Homo sapien
aaaataatagaagccattcctgctc

SEQ ID NO: 2689074 - DNA, 25 bp, Homo sapien
cagtggattaaatccatcttccacc

SEQ ID NO: 2689075 - DNA, 25 bp, Homo sapien
ttccaccaactgatgcttcaatagt

SEQ ID NO: 2689076 - DNA, 25 bp, Homo sapien
caagttatccatgaagtaaagtggt

SEQ ID NO: 2689077 - DNA, 25 bp, Homo sapien
aaagttccctggtcagtagaacata

SEQ ID NO: 2689078 - DNA, 25 bp, Homo sapien
tcactcttcctaagaaagcatatga

SEQ ID NO: 2689079 - DNA, 25 bp, Homo sapien
aaaattatctctcatattaaggaaa

SEQ ID NO: 2689080 - DNA, 25 bp, Homo sapien
gcactgaatctccaaatagataaaa

SEQ ID NO: 2689081 - DNA, 25 bp, Homo sapien
gtgattgtccaaaccgctagccact

SEQ ID NO: 2689082 - DNA, 25 bp, Homo sapien
catttggttgtacatggaactgggt

SEQ ID NO: 2689083 - DNA, 25 bp, Homo sapien
tctttagcatgtgagagactgcatg

SEQ ID NO: 2689084 - DNA, 25 bp, Homo sapien
gactgcatgaagcaaggaaaacttt

SEQ ID NO: 2689085 - DNA, 25 bp, Homo sapien
tccgcaatgccctcctatagaagat

SEQ ID NO: 2689086 - DNA, 25 bp, Homo sapien
gggctcatgcgattccatttgacct

SEQ ID NO: 2689087 - DNA, 25 bp, Homo sapien
catgcgattccatttgacctcccta

SEQ ID NO: 2689088 - DNA, 25 bp, Homo sapien
ttccatttgacctccctaaggcctg

SEQ ID NO: 2689089 - DNA, 25 bp, Homo sapien
catttgacctccctaaggcctgggt

SEQ ID NO: 2689090 - DNA, 25 bp, Homo sapien
ggttcccaaagatccatgcagttag

SEQ ID NO: 2689091 - DNA, 25 bp, Homo sapien
cagtctctgaaacggtcattgtttt

SEQ ID NO: 2689092 - DNA, 25 bp, Homo sapien
cagccatgcaacagtctctgaaacg

SEQ ID NO: 2689093 - DNA, 25 bp, Homo sapien
tgcagttagccactgaaatgctcct

SEQ ID NO: 2689094 - DNA, 25 bp, Homo sapien
tgtgcatcacactagaagtcccaag

SEQ ID NO: 2689095 - DNA, 25 bp, Homo sapien
cactgtggctgatgaaatctcttgg

SEQ ID NO: 2689096 - DNA, 25 bp, Homo sapien
aagtcccaagaagtacaactgattg

SEQ ID NO: 2689097 - DNA, 25 bp, Homo sapien
caactgattgatagatgatcctctg

SEQ ID NO: 2689098 - DNA, 25 bp, Homo sapien
gaaattgacaataccttgggcccag

SEQ ID NO: 2689099 - DNA, 25 bp, Homo sapien
tgtacacagcagagtgaactgttgg

SEQ ID NO: 2689100 - DNA, 25 bp, Homo sapien
gccaccctagttgaagattttcctg

SEQ ID NO: 2689101 - DNA, 25 bp, Homo sapien
actgctccaaccacgatggattgtg

SEQ ID NO: 2689102 - DNA, 25 bp, Homo sapien
ccaaagggacagtccgatagatacc

SEQ ID NO: 2689103 - DNA, 25 bp, Homo sapien
ctcgagatggcagtggtatcttaca

SEQ ID NO: 2689104 - DNA, 25 bp, Homo sapien
cttacaaccaaagggacagtccgat

SEQ ID NO: 2689105 - DNA, 25 bp, Homo sapien
ggcagtggtatcttacaaccaaagg

SEQ ID NO: 2689106 - DNA, 25 bp, Homo sapien
cgcccagtcgcacccagccggctgc

SEQ ID NO: 2689107 - DNA, 25 bp, Homo sapien
gagctccgaggccgcccagtcgcac

SEQ ID NO: 2689108 - DNA, 25 bp, Homo sapien
ccgagcgtctgcgagctccgaggcc

SEQ ID NO: 2689109 - DNA, 25 bp, Homo sapien
gttcccccgagcgtctgcgagctcc

SEQ ID NO: 2689110 - DNA, 25 bp, Homo sapien
gggagcgcaaggaccgccggctccg

SEQ ID NO: 2689111 - DNA, 25 bp, Homo sapien
aacagaagagcaccgggactgtgcc

SEQ ID NO: 2689112 - DNA, 25 bp, Homo sapien
gaaacagaagagcaccgggactgtg

SEQ ID NO: 2689113 - DNA, 25 bp, Homo sapien
aagagcaccgggactgtgcccgacg

SEQ ID NO: 2689114 - DNA, 25 bp, Homo sapien
gtcgatctggtcgccgtacaggctg

SEQ ID NO: 2689115 - DNA, 25 bp, Homo sapien
tcgccgtacaggctgaggaacttct

SEQ ID NO: 2689116 - DNA, 25 bp, Homo sapien
tggcaccgacgagggtcgcgcgaag

SEQ ID NO: 2689117 - DNA, 25 bp, Homo sapien
tctggatgagcagctcgtagcccgc

SEQ ID NO: 2689118 - DNA, 25 bp, Homo sapien
ctcggcgaacagctgcaccacgaat

SEQ ID NO: 2689119 - DNA, 25 bp, Homo sapien
aacagctgcaccacgaatttgcggt

SEQ ID NO: 2689120 - DNA, 25 bp, Homo sapien
ggcgaacagctgcaccacgaatttg

SEQ ID NO: 2689121 - DNA, 25 bp, Homo sapien
gctgcaccacgaatttgcggtgcat

SEQ ID NO: 2689122 - DNA, 25 bp, Homo sapien
aacggcacgaggcgcaccttgcagc

SEQ ID NO: 2689123 - DNA, 25 bp, Homo sapien
ggcacgaggcgcaccttgcagcgct

SEQ ID NO: 2689124 - DNA, 25 bp, Homo sapien
ttgcagcgctcgctcaccgcgaagc

SEQ ID NO: 2689125 - DNA, 25 bp, Homo sapien
cgctcaccgcgaagcccttgggcaa

SEQ ID NO: 2689126 - DNA, 25 bp, Homo sapien
gccccggaacttgcgaaagacgcgc

SEQ ID NO: 2689127 - DNA, 25 bp, Homo sapien
gaacttgcgaaagacgcgcagccct

SEQ ID NO: 2689128 - DNA, 25 bp, Homo sapien
ttcggactcagccactcgcgcaggg

SEQ ID NO: 2689129 - DNA, 25 bp, Homo sapien
gaaagacgcgcagcccttcggactc

SEQ ID NO: 2689130 - DNA, 25 bp, Homo sapien
atataaattcgccagtgaacaatct

SEQ ID NO: 2689131 - DNA, 25 bp, Homo sapien
caaaatataaattcgccagtgaaca

SEQ ID NO: 2689132 - DNA, 25 bp, Homo sapien
tccaaaatataaattcgccagtgaa

SEQ ID NO: 2689133 - DNA, 25 bp, Homo sapien
aaattcgccagtgaacaatctgatc

SEQ ID NO: 2689134 - DNA, 25 bp, Homo sapien
tttggacacttctggcacaggtgtt

SEQ ID NO: 2689135 - DNA, 25 bp, Homo sapien
ttggacacttctggcacaggtgttg

SEQ ID NO: 2689136 - DNA, 25 bp, Homo sapien
gaatgcaggaactttatcgaagcta

SEQ ID NO: 2689137 - DNA, 25 bp, Homo sapien
gtcctctgaatgcaggaactttatc

SEQ ID NO: 2689138 - DNA, 25 bp, Homo sapien
tctgaatgcaggaactttatcgaag

SEQ ID NO: 2689139 - DNA, 25 bp, Homo sapien
tgcaggaactttatcgaagctaaag

SEQ ID NO: 2689140 - DNA, 25 bp, Homo sapien
tggcatccttcttacactgtccatt

SEQ ID NO: 2689141 - DNA, 25 bp, Homo sapien
ctggccacaggctggaaaatgcact

SEQ ID NO: 2689142 - DNA, 25 bp, Homo sapien
ctggaaaatgcactggtggtagcat

SEQ ID NO: 2689143 - DNA, 25 bp, Homo sapien
cttctctgcaggctctgtctttcct

SEQ ID NO: 2689144 - DNA, 25 bp, Homo sapien
cacctattgtgaacattgatgtcac

SEQ ID NO: 2689145 - DNA, 25 bp, Homo sapien
acagatcagggactttttaatttag

SEQ ID NO: 2689146 - DNA, 25 bp, Homo sapien
ggttacaaccctagcttatcagtta

SEQ ID NO: 2689147 - DNA, 25 bp, Homo sapien
gctgtgaaataatacttattggctc

SEQ ID NO: 2689148 - DNA, 25 bp, Homo sapien
gcagaataaggaaagtgaatcataa

SEQ ID NO: 2689149 - DNA, 25 bp, Homo sapien
ggaatgctaacattgcataacttgt

SEQ ID NO: 2689150 - DNA, 25 bp, Homo sapien
atttataaagtagatttccagatgt

SEQ ID NO: 2689151 - DNA, 25 bp, Homo sapien
cttgttatgttaacataatatgcag

SEQ ID NO: 2689152 - DNA, 25 bp, Homo sapien
tgatatgatgtaatgagaatgaccc

SEQ ID NO: 2689153 - DNA, 25 bp, Homo sapien
ttcacaaccccgatccaacaatgag

SEQ ID NO: 2689154 - DNA, 25 bp, Homo sapien
gacaaatgtactgcaggaatatcaa

SEQ ID NO: 2689155 - DNA, 25 bp, Homo sapien
aaactgctatagactagaggagcca

SEQ ID NO: 2689156 - DNA, 25 bp, Homo sapien
cttgaaggtgtaagatttcccaggg

SEQ ID NO: 2689157 - DNA, 25 bp, Homo sapien
gaacctttcctgcatatcacagcag

SEQ ID NO: 2689158 - DNA, 25 bp, Homo sapien
tatccccaaaatacttgatggctgg

SEQ ID NO: 2689159 - DNA, 25 bp, Homo sapien
tgtcccacgctaataatatccccaa

SEQ ID NO: 2689160 - DNA, 25 bp, Homo sapien
caataacaggaattcctaaaatccg

SEQ ID NO: 2689161 - DNA, 25 bp, Homo sapien
taatgccgcttctacttctggtaat

SEQ ID NO: 2689162 - DNA, 25 bp, Homo sapien
tctggtaataccattgaaaacttgg

SEQ ID NO: 2689163 - DNA, 25 bp, Homo sapien
ttgaaccgtgctcccaagaccttta

SEQ ID NO: 2689164 - DNA, 25 bp, Homo sapien
gggcaaacatcctgtccatcatgct

SEQ ID NO: 2689165 - DNA, 25 bp, Homo sapien
ctccagggcagtttgttggatgcac

SEQ ID NO: 2689166 - DNA, 25 bp, Homo sapien
aacaatgtgaacctcgactcctcgg

SEQ ID NO: 2689167 - DNA, 25 bp, Homo sapien
tcagcaacaatgtgaacctcgactc

SEQ ID NO: 2689168 - DNA, 25 bp, Homo sapien
ctatgatcccggttcgagcgagacg

SEQ ID NO: 2689169 - DNA, 25 bp, Homo sapien
tcgtggtcactatgatcccggttcg

SEQ ID NO: 2689170 - DNA, 25 bp, Homo sapien
tcactcgtggtcactatgatcccgg

SEQ ID NO: 2689171 - DNA, 25 bp, Homo sapien
ggtcactatgatcccggttcgagcg

SEQ ID NO: 2689172 - DNA, 25 bp, Homo sapien
gcactcgccttaattagattctgaa

SEQ ID NO: 2689173 - DNA, 25 bp, Homo sapien
ccttatcagctaccagctgaagcag

SEQ ID NO: 2689174 - DNA, 25 bp, Homo sapien
tgaattttggatggtccttatcagc

SEQ ID NO: 2689175 - DNA, 25 bp, Homo sapien
agcagacccgactctggagcactcg

SEQ ID NO: 2689176 - DNA, 25 bp, Homo sapien
gcttgtgtgggcttacagtccttca

SEQ ID NO: 2689177 - DNA, 25 bp, Homo sapien
aggtaagcagcaccggaagcctttg

SEQ ID NO: 2689178 - DNA, 25 bp, Homo sapien
cactaggaggcgcaaaaaaggagcc

SEQ ID NO: 2689179 - DNA, 25 bp, Homo sapien
aaatgctggtactcaaatggtctag

SEQ ID NO: 2689180 - DNA, 25 bp, Homo sapien
tacgatcagagtacacagtagagac

SEQ ID NO: 2689181 - DNA, 25 bp, Homo sapien
gagtgggtaacatgattcagagtcc

SEQ ID NO: 2689182 - DNA, 25 bp, Homo sapien
gatcaatgcaactcactaagtggac

SEQ ID NO: 2689183 - DNA, 25 bp, Homo sapien
caacatcatttggtacggatagatc

SEQ ID NO: 2689184 - DNA, 25 bp, Homo sapien
atagagccatcttgtggaggacaaa

SEQ ID NO: 2689185 - DNA, 25 bp, Homo sapien
ataaatgtcaagattttattacctt

SEQ ID NO: 2689186 - DNA, 25 bp, Homo sapien
tataaatgtcaagattttattacct

SEQ ID NO: 2689187 - DNA, 25 bp, Homo sapien
gagccatcttgtggaggacaaaata

SEQ ID NO: 2689188 - DNA, 25 bp, Homo sapien
gaagtcctgcgtgtttagtaagaca

SEQ ID NO: 2689189 - DNA, 25 bp, Homo sapien
tcagagtcttacaggcggaaatcaa

SEQ ID NO: 2689190 - DNA, 25 bp, Homo sapien
tgagcctgataatatccacctgaag

SEQ ID NO: 2689191 - DNA, 25 bp, Homo sapien
tgtaggtcggaagtacaggcacagc

SEQ ID NO: 2689192 - DNA, 25 bp, Homo sapien
cttcaaacacgcaatagcagctggt

SEQ ID NO: 2689193 - DNA, 25 bp, Homo sapien
aatagcagctggtttcaatgaccat

SEQ ID NO: 2689194 - DNA, 25 bp, Homo sapien
caatagcagctggtttcaatgacca

SEQ ID NO: 2689195 - DNA, 25 bp, Homo sapien
ccttgtgacatctagggacatctat

SEQ ID NO: 2689196 - DNA, 25 bp, Homo sapien
gacatctagggacatctatattgtt

SEQ ID NO: 2689197 - DNA, 25 bp, Homo sapien
ggataagcatgtacaataggaaaag

SEQ ID NO: 2689198 - DNA, 25 bp, Homo sapien
caggataagcatgtacaataggaaa

SEQ ID NO: 2689199 - DNA, 25 bp, Homo sapien
ttggcattgtttgtaggccttttcc

SEQ ID NO: 2689200 - DNA, 25 bp, Homo sapien
ccctcactaaaatatcaattgattg

SEQ ID NO: 2689201 - DNA, 25 bp, Homo sapien
tcctaccactcgtaattctttatta

SEQ ID NO: 2689202 - DNA, 25 bp, Homo sapien
taaaatatcaattgattggatagca

SEQ ID NO: 2689203 - DNA, 25 bp, Homo sapien
ctaacaatgcttttcctggaacaca

SEQ ID NO: 2689204 - DNA, 25 bp, Homo sapien
cctggaacacatgcccctgctgatt

SEQ ID NO: 2689205 - DNA, 25 bp, Homo sapien
cctgctgattccaaagcatgcttac

SEQ ID NO: 2689206 - DNA, 25 bp, Homo sapien
aatgcttttcctggaacacatgccc

SEQ ID NO: 2689207 - DNA, 25 bp, Homo sapien
cagagaaagacagccaatataatat

SEQ ID NO: 2689208 - DNA, 25 bp, Homo sapien
gaaagacagccaatataatattcat

SEQ ID NO: 2689209 - DNA, 25 bp, Homo sapien
catattcaacactggcaatagcagc

SEQ ID NO: 2689210 - DNA, 25 bp, Homo sapien
taatattcatattcaacactggcaa

SEQ ID NO: 2689211 - DNA, 25 bp, Homo sapien
tagaataccgatttgttgcctaaaa

SEQ ID NO: 2689212 - DNA, 25 bp, Homo sapien
gcatctaattcgtttgctgcaaaaa

SEQ ID NO: 2689213 - DNA, 25 bp, Homo sapien
ctccgtattatggaaagaatgccat

SEQ ID NO: 2689214 - DNA, 25 bp, Homo sapien
agttttctacgttatacttcagtgc

SEQ ID NO: 2689215 - DNA, 25 bp, Homo sapien
gatttctctcctcgtgactgttttt

SEQ ID NO: 2689216 - DNA, 25 bp, Homo sapien
aaatgtgtcatcgaatgtgtcgtcc

SEQ ID NO: 2689217 - DNA, 25 bp, Homo sapien
tcttactcacacagtggtctaagcc

SEQ ID NO: 2689218 - DNA, 25 bp, Homo sapien
ggtctaagcctattctcggtcctgg

SEQ ID NO: 2689219 - DNA, 25 bp, Homo sapien
caagaaaagggttgctcgagtccct

SEQ ID NO: 2689220 - DNA, 25 bp, Homo sapien
tagttagacagcagagcaaccactg

SEQ ID NO: 2689221 - DNA, 25 bp, Homo sapien
agtatcctacatgtcatattgtgcc

SEQ ID NO: 2689222 - DNA, 25 bp, Homo sapien
tattgcctcagtgtaccacatctgt

SEQ ID NO: 2689223 - DNA, 25 bp, Homo sapien
tgttttaaggacttggcaaatttca

SEQ ID NO: 2689224 - DNA, 25 bp, Homo sapien
gcatgtgtctatttgaatattctaa

SEQ ID NO: 2689225 - DNA, 25 bp, Homo sapien
ttctggggctaaagaatataaagaa

SEQ ID NO: 2689226 - DNA, 25 bp, Homo sapien
ttcagtattctaattatataactgt

SEQ ID NO: 2689227 - DNA, 25 bp, Homo sapien
tctgcttttgataaactatcaaact

SEQ ID NO: 2689228 - DNA, 25 bp, Homo sapien
cttgcttactagttcattagctaaa

SEQ ID NO: 2689229 - DNA, 25 bp, Homo sapien
cctgcaactttactggactttatca

SEQ ID NO: 2689230 - DNA, 25 bp, Homo sapien
aatctttataactatgaaacagcag

SEQ ID NO: 2689231 - DNA, 25 bp, Homo sapien
gcagttagcaactgatgtactggat

SEQ ID NO: 2689232 - DNA, 25 bp, Homo sapien
ctgagtatgagtatgaagggaagca

SEQ ID NO: 2689233 - DNA, 25 bp, Homo sapien
gattgctgtaaaccaggatgtggcc

SEQ ID NO: 2689234 - DNA, 25 bp, Homo sapien
ttaaggtaactagctgagtatgagt

SEQ ID NO: 2689235 - DNA, 25 bp, Homo sapien
gagagaattctacttgagttgtcca

SEQ ID NO: 2689236 - DNA, 25 bp, Homo sapien
gttgtccatggaaggtactgataag

SEQ ID NO: 2689237 - DNA, 25 bp, Homo sapien
gggatgattgatgagagaattctac

SEQ ID NO: 2689238 - DNA, 25 bp, Homo sapien
gccagtggttctgccttgaggctgc

SEQ ID NO: 2689239 - DNA, 25 bp, Homo sapien
tcagtggccacaaatcagtcatggg

SEQ ID NO: 2689240 - DNA, 25 bp, Homo sapien
cataaacaggaaggtagacgacatc

SEQ ID NO: 2689241 - DNA, 25 bp, Homo sapien
tcaagaaaatgactcatcagtggcc

SEQ ID NO: 2689242 - DNA, 25 bp, Homo sapien
gttcatatcataaacagacctaatg

SEQ ID NO: 2689243 - DNA, 25 bp, Homo sapien
acagaaatctcagagtaaaggtcat

SEQ ID NO: 2689244 - DNA, 25 bp, Homo sapien
agacagaaatctcagagtaaaggtc

SEQ ID NO: 2689245 - DNA, 25 bp, Homo sapien
ctgctgatttgaggaagacagaaat

SEQ ID NO: 2689246 - DNA, 25 bp, Homo sapien
gaagacagaaatctcagagtaaagg

SEQ ID NO: 2689247 - DNA, 25 bp, Homo sapien
taataagagtaatggctagactggt

SEQ ID NO: 2689248 - DNA, 25 bp, Homo sapien
ccaaagaactgtacgaggcacaaag

SEQ ID NO: 2689249 - DNA, 25 bp, Homo sapien
ttaaactctattccacggagcagga

SEQ ID NO: 2689250 - DNA, 25 bp, Homo sapien
gagtaggcggcacaattgtctcact

SEQ ID NO: 2689251 - DNA, 25 bp, Homo sapien
cccaggtgactttgctagggaagct

SEQ ID NO: 2689252 - DNA, 25 bp, Homo sapien
gatgggtctgtttggaatttctaag

SEQ ID NO: 2689253 - DNA, 25 bp, Homo sapien
tctttaaggaagattggtgagatgg

SEQ ID NO: 2689254 - DNA, 25 bp, Homo sapien
agaagctacacattctgatgccagc

SEQ ID NO: 2689255 - DNA, 25 bp, Homo sapien
gcatcagaagtaccaagttaggtct

SEQ ID NO: 2689256 - DNA, 25 bp, Homo sapien
catcagaagtaccaagttaggtctc

SEQ ID NO: 2689257 - DNA, 25 bp, Homo sapien
aagcatcagaagtaccaagttaggt

SEQ ID NO: 2689258 - DNA, 25 bp, Homo sapien
gcaagcatcagaagtaccaagttag

SEQ ID NO: 2689259 - DNA, 25 bp, Homo sapien
gcgacaccgcacttggctaggaata

SEQ ID NO: 2689260 - DNA, 25 bp, Homo sapien
gaggaaagcatgaacctgatcaaga

SEQ ID NO: 2689261 - DNA, 25 bp, Homo sapien
agtcacttagtaaaaacagatccag

SEQ ID NO: 2689262 - DNA, 25 bp, Homo sapien
gatccagacatgacagaagtaataa

SEQ ID NO: 2689263 - DNA, 25 bp, Homo sapien
tcacatccgatttaaggatgattga

SEQ ID NO: 2689264 - DNA, 25 bp, Homo sapien
atttgcatcctctggactaggccag

SEQ ID NO: 2689265 - DNA, 25 bp, Homo sapien
gattgatctgaactgccatttgcat

SEQ ID NO: 2689266 - DNA, 25 bp, Homo sapien
tgcatcctctggactaggccagaca

SEQ ID NO: 2689267 - DNA, 25 bp, Homo sapien
gaaacgatcccattcgacaggaacc

SEQ ID NO: 2689268 - DNA, 25 bp, Homo sapien
ctgaaacgatcccattcgacaggaa

SEQ ID NO: 2689269 - DNA, 25 bp, Homo sapien
accccagctggtaaaggaggcagca

SEQ ID NO: 2689270 - DNA, 25 bp, Homo sapien
ggaaccccagctggtaaaggaggca

SEQ ID NO: 2689271 - DNA, 25 bp, Homo sapien
gccgccagccgggtccaccggctcc

SEQ ID NO: 2689272 - DNA, 25 bp, Homo sapien
cagccgggtccaccggctcccggcg

SEQ ID NO: 2689273 - DNA, 25 bp, Homo sapien
agcgcaggaaacacgacttcccact

SEQ ID NO: 2689274 - DNA, 25 bp, Homo sapien
cactcctcgcggtcgggggcgaact

SEQ ID NO: 2689275 - DNA, 25 bp, Homo sapien
acagagcgcacctcgcgtgagctgc

SEQ ID NO: 2689276 - DNA, 25 bp, Homo sapien
tctgatcggccctccacgggctcct

SEQ ID NO: 2689277 - DNA, 25 bp, Homo sapien
ccaaaggcaccggagccacagagcg

SEQ ID NO: 2689278 - DNA, 25 bp, Homo sapien
ggagccgggactctgatcggccctc

SEQ ID NO: 2689279 - DNA, 25 bp, Homo sapien
ggcagctcctgcgactcgagctcct

SEQ ID NO: 2689280 - DNA, 25 bp, Homo sapien
gctcctgcgactcgagctcctcgtc

SEQ ID NO: 2689281 - DNA, 25 bp, Homo sapien
gcggcagctcctgcgactcgagctc

SEQ ID NO: 2689282 - DNA, 25 bp, Homo sapien
gccccgctggatccccgcggcagct

SEQ ID NO: 2689283 - DNA, 25 bp, Homo sapien
gggatccgcagcaacacttcgtcgc

SEQ ID NO: 2689284 - DNA, 25 bp, Homo sapien
acttcgtcgccatccggctcggcat

SEQ ID NO: 2689285 - DNA, 25 bp, Homo sapien
cagcaggtacaggtcccgagagaag

SEQ ID NO: 2689286 - DNA, 25 bp, Homo sapien
aggaagcggccgtctctccggagca

SEQ ID NO: 2689287 - DNA, 25 bp, Homo sapien
ggttgcggggcggatgctgcccccg

SEQ ID NO: 2689288 - DNA, 25 bp, Homo sapien
gcggggcggatgctgcccccgtggg

SEQ ID NO: 2689289 - DNA, 25 bp, Homo sapien
gcgggaggttgcggggcggatgctg

SEQ ID NO: 2689290 - DNA, 25 bp, Homo sapien
gggccgggatttggccgctgttcca

SEQ ID NO: 2689291 - DNA, 25 bp, Homo sapien
cagggtgccgcagcacagctccggt

SEQ ID NO: 2689292 - DNA, 25 bp, Homo sapien
agcacagctccggtgtagaagcagc

SEQ ID NO: 2689293 - DNA, 25 bp, Homo sapien
aaagaagccagcgagccagggtgcc

SEQ ID NO: 2689294 - DNA, 25 bp, Homo sapien
aagccagcgagccagggtgccgcag

SEQ ID NO: 2689295 - DNA, 25 bp, Homo sapien
tggagatgttccatgggaggcaaac

SEQ ID NO: 2689296 - DNA, 25 bp, Homo sapien
tctagggccaagctcaaaaggagca

SEQ ID NO: 2689297 - DNA, 25 bp, Homo sapien
gagaaggtgcatgcaaatcatcctg

SEQ ID NO: 2689298 - DNA, 25 bp, Homo sapien
ggaggcaaacgatgtagacacctgg

SEQ ID NO: 2689299 - DNA, 25 bp, Homo sapien
catcagtgagccgactggttgtctt

SEQ ID NO: 2689300 - DNA, 25 bp, Homo sapien
ctttgaagtaggttatgaaaaagct

SEQ ID NO: 2689301 - DNA, 25 bp, Homo sapien
caaacacgaaggagattcatcagtg

SEQ ID NO: 2689302 - DNA, 25 bp, Homo sapien
aggaactgagagtgcggcgcaaaca

SEQ ID NO: 2689303 - DNA, 25 bp, Homo sapien
cttttctatcattcctaagattttg

SEQ ID NO: 2689304 - DNA, 25 bp, Homo sapien
atctgatgtcctgatgacattctct

SEQ ID NO: 2689305 - DNA, 25 bp, Homo sapien
tgcctatatacacggtgtgggtgac

SEQ ID NO: 2689306 - DNA, 25 bp, Homo sapien
gccattgtatcattgagtggctcaa

SEQ ID NO: 2689307 - DNA, 25 bp, Homo sapien
tgggtgacctgttatggccattgta

SEQ ID NO: 2689308 - DNA, 25 bp, Homo sapien
tcctcattgagctgtataaatccca

SEQ ID NO: 2689309 - DNA, 25 bp, Homo sapien
aatgataccacagtaatgactgtga

SEQ ID NO: 2689310 - DNA, 25 bp, Homo sapien
gaaatgataccacagtaatgactgt

SEQ ID NO: 2689311 - DNA, 25 bp, Homo sapien
ctgacttctctgtgaccttttcctc

SEQ ID NO: 2689312 - DNA, 25 bp, Homo sapien
gaagagctgacttctctgtgacctt

SEQ ID NO: 2689313 - DNA, 25 bp, Homo sapien
caagtcccttcagtttctggtccat

SEQ ID NO: 2689314 - DNA, 25 bp, Homo sapien
cactcaagtcccttcagtttctggt

SEQ ID NO: 2689315 - DNA, 25 bp, Homo sapien
tcaagtcccttcagtttctggtcca

SEQ ID NO: 2689316 - DNA, 25 bp, Homo sapien
cagggcactcaagtcccttcagttt

SEQ ID NO: 2689317 - DNA, 25 bp, Homo sapien
tctctatgttgtattcttgaggtaa

SEQ ID NO: 2689318 - DNA, 25 bp, Homo sapien
cttgaggtaatttgtatgaatatcg

SEQ ID NO: 2689319 - DNA, 25 bp, Homo sapien
tgggtctgcaaccactacagtctct

SEQ ID NO: 2689320 - DNA, 25 bp, Homo sapien
tatgaatatcgtttccctcttccac

SEQ ID NO: 2689321 - DNA, 25 bp, Homo sapien
ggttagaatgaatctcctggctgca

SEQ ID NO: 2689322 - DNA, 25 bp, Homo sapien
ttaagatggttagaatgaatctcct

SEQ ID NO: 2689323 - DNA, 25 bp, Homo sapien
gatggttagaatgaatctcctggct

SEQ ID NO: 2689324 - DNA, 25 bp, Homo sapien
ttagaatgaatctcctggctgcatc

SEQ ID NO: 2689325 - DNA, 25 bp, Homo sapien
aattccaagcgcactttaaagtttg

SEQ ID NO: 2689326 - DNA, 25 bp, Homo sapien
gctttatcacacgaagattgacctg

SEQ ID NO: 2689327 - DNA, 25 bp, Homo sapien
gaagattgacctgcacactcagact

SEQ ID NO: 2689328 - DNA, 25 bp, Homo sapien
tcatggagcagaataagctttatca

SEQ ID NO: 2689329 - DNA, 25 bp, Homo sapien
tgacctgcacactcagactcttgtg

SEQ ID NO: 2689330 - DNA, 25 bp, Homo sapien
tttctccatgatgcccaatatatag

SEQ ID NO: 2689331 - DNA, 25 bp, Homo sapien
catgatgcccaatatatagttctgg

SEQ ID NO: 2689332 - DNA, 25 bp, Homo sapien
ttttttctccatgatgcccaatata

SEQ ID NO: 2689333 - DNA, 25 bp, Homo sapien
ctccatgatgcccaatatatagttc

SEQ ID NO: 2689334 - DNA, 25 bp, Homo sapien
ccccccagtttgttgacatctctaa

SEQ ID NO: 2689335 - DNA, 25 bp, Homo sapien
gttgacatctctaaatgtatatcat

SEQ ID NO: 2689336 - DNA, 25 bp, Homo sapien
actgaagtcatgtcttccccccagt

SEQ ID NO: 2689337 - DNA, 25 bp, Homo sapien
gaagtcatgtcttccccccagtttg

SEQ ID NO: 2689338 - DNA, 25 bp, Homo sapien
caacagtatcacatggttcatcttt

SEQ ID NO: 2689339 - DNA, 25 bp, Homo sapien
aacagtatcacatggttcatctttg

SEQ ID NO: 2689340 - DNA, 25 bp, Homo sapien
cattctgggtaaggccacattttcc

SEQ ID NO: 2689341 - DNA, 25 bp, Homo sapien
caacttcattctgggtaaggccaca

SEQ ID NO: 2689342 - DNA, 25 bp, Homo sapien
cttgttagccaggaattagtcctcc

SEQ ID NO: 2689343 - DNA, 25 bp, Homo sapien
tttcctcatacaggtcaaccgtaat

SEQ ID NO: 2689344 - DNA, 25 bp, Homo sapien
tcagccaatatgcttaagttgcact

SEQ ID NO: 2689345 - DNA, 25 bp, Homo sapien
gttgcactcgccaactgcatggttg

SEQ ID NO: 2689346 - DNA, 25 bp, Homo sapien
ctggttgcccagaagtaagggaatt

SEQ ID NO: 2689347 - DNA, 25 bp, Homo sapien
caatatgcttaagttgcactcgcca

SEQ ID NO: 2689348 - DNA, 25 bp, Homo sapien
cgtgcagtttttatgaatactaaga

SEQ ID NO: 2689349 - DNA, 25 bp, Homo sapien
cttaacgtgcagtttttatgaatac

SEQ ID NO: 2689350 - DNA, 25 bp, Homo sapien
caacactcttaacgtgcagttttta

SEQ ID NO: 2689351 - DNA, 25 bp, Homo sapien
ttacaacactcttaacgtgcagttt

SEQ ID NO: 2689352 - DNA, 25 bp, Homo sapien
cacattccactcaagtaagctatac

SEQ ID NO: 2689353 - DNA, 25 bp, Homo sapien
tacacattccactcaagtaagctat

SEQ ID NO: 2689354 - DNA, 25 bp, Homo sapien
cactacacattccactcaagtaagc

SEQ ID NO: 2689355 - DNA, 25 bp, Homo sapien
tttcactacacattccactcaagta

SEQ ID NO: 2689356 - DNA, 25 bp, Homo sapien
ttgtgacccatttcatgagcaattg

SEQ ID NO: 2689357 - DNA, 25 bp, Homo sapien
ccatttcatgagcaattgtaaaagc

SEQ ID NO: 2689358 - DNA, 25 bp, Homo sapien
gacccatttcatgagcaattgtaaa

SEQ ID NO: 2689359 - DNA, 25 bp, Homo sapien
tgtgacccatttcatgagcaattgt

SEQ ID NO: 2689360 - DNA, 25 bp, Homo sapien
aaatgcttaatagagagactgaccc

SEQ ID NO: 2689361 - DNA, 25 bp, Homo sapien
aaagtcagtatactccaggtaaagg

SEQ ID NO: 2689362 - DNA, 25 bp, Homo sapien
catgtacttaggtcctgcagtgtga

SEQ ID NO: 2689363 - DNA, 25 bp, Homo sapien
taaaggaacaacatgtacttaggtc

SEQ ID NO: 2689364 - DNA, 25 bp, Homo sapien
tgtttgctcttgcttcactaattct

SEQ ID NO: 2689365 - DNA, 25 bp, Homo sapien
gctcttgcttcactaattcttttaa

SEQ ID NO: 2689366 - DNA, 25 bp, Homo sapien
ttgctcttgcttcactaattctttt

SEQ ID NO: 2689367 - DNA, 25 bp, Homo sapien
gcttcactaattcttttaattgtga

SEQ ID NO: 2689368 - DNA, 25 bp, Homo sapien
gaccatgaaacgtcaccaagattct

SEQ ID NO: 2689369 - DNA, 25 bp, Homo sapien
cattcaccagacatgatatgaagac

SEQ ID NO: 2689370 - DNA, 25 bp, Homo sapien
cttccttgctacatcgagaccatga

SEQ ID NO: 2689371 - DNA, 25 bp, Homo sapien
tcagcacacgatgggtggtcattgt

SEQ ID NO: 2689372 - DNA, 25 bp, Homo sapien
ttgtttgtagcaagcagttactggc

SEQ ID NO: 2689373 - DNA, 25 bp, Homo sapien
tctggcattgttcatcagcagtgta

SEQ ID NO: 2689374 - DNA, 25 bp, Homo sapien
gcagtgtatgtcatccctggcagct

SEQ ID NO: 2689375 - DNA, 25 bp, Homo sapien
cctggcagcttggagggaaccatca

SEQ ID NO: 2689376 - DNA, 25 bp, Homo sapien
aattaatcaagcaaaaagagaaggc

SEQ ID NO: 2689377 - DNA, 25 bp, Homo sapien
caaggaacttagattctcaacacag

SEQ ID NO: 2689378 - DNA, 25 bp, Homo sapien
tgagacagagagtactaaaatagga

SEQ ID NO: 2689379 - DNA, 25 bp, Homo sapien
tacacctgtccagagactaacactc

SEQ ID NO: 2689380 - DNA, 25 bp, Homo sapien
tcaccttctaccttgcaccataatc

SEQ ID NO: 2689381 - DNA, 25 bp, Homo sapien
gggtctagcttggttctgcattctt

SEQ ID NO: 2689382 - DNA, 25 bp, Homo sapien
ctagcttggttctgcattctttctc

SEQ ID NO: 2689383 - DNA, 25 bp, Homo sapien
gtctagcttggttctgcattctttc

SEQ ID NO: 2689384 - DNA, 25 bp, Homo sapien
gaagcatagaattctgtaagcacct

SEQ ID NO: 2689385 - DNA, 25 bp, Homo sapien
tgttatcagttacaaaatcccaagc

SEQ ID NO: 2689386 - DNA, 25 bp, Homo sapien
tgttggaagctattttcacgatggc

SEQ ID NO: 2689387 - DNA, 25 bp, Homo sapien
tttagcactactgcacacaatggca

SEQ ID NO: 2689388 - DNA, 25 bp, Homo sapien
tggtcacccaggaatggttgctaga

SEQ ID NO: 2689389 - DNA, 25 bp, Homo sapien
gtaagttgatcctcctagccctaaa

SEQ ID NO: 2689390 - DNA, 25 bp, Homo sapien
tagatgatggtcgtagcaaacatgg

SEQ ID NO: 2689391 - DNA, 25 bp, Homo sapien
gaaagacgtgggcaattagatgctg

SEQ ID NO: 2689392 - DNA, 25 bp, Homo sapien
tagggaatctgaggttgcacaacca

SEQ ID NO: 2689393 - DNA, 25 bp, Homo sapien
tcttaggtgaacaaatcagggcaca

SEQ ID NO: 2689394 - DNA, 25 bp, Homo sapien
tcttgttgggaaagcagtgcgcaga

SEQ ID NO: 2689395 - DNA, 25 bp, Homo sapien
gaaataaatgtcctacgtcaaagca

SEQ ID NO: 2689396 - DNA, 25 bp, Homo sapien
tggtacattctccagccttacacca

SEQ ID NO: 2689397 - DNA, 25 bp, Homo sapien
aggacatttgcgctctcgactgctg

SEQ ID NO: 2689398 - DNA, 25 bp, Homo sapien
ccagcactgcaggttcggctacaag

SEQ ID NO: 2689399 - DNA, 25 bp, Homo sapien
ttcggctacaaggactccacaggct

SEQ ID NO: 2689400 - DNA, 25 bp, Homo sapien
aggctccactctccggccagatgtt

SEQ ID NO: 2689401 - DNA, 25 bp, Homo sapien
ttcgttagtcttagcttttgctgtc

SEQ ID NO: 2689402 - DNA, 25 bp, Homo sapien
gcatgtttctgtttttcgttagtct

SEQ ID NO: 2689403 - DNA, 25 bp, Homo sapien
ttttcgttagtcttagcttttgctg

SEQ ID NO: 2689404 - DNA, 25 bp, Homo sapien
gtgcttagcatgtttctgtttttcg

SEQ ID NO: 2689405 - DNA, 25 bp, Homo sapien
cactataagcctgacattgccagtc

SEQ ID NO: 2689406 - DNA, 25 bp, Homo sapien
tctctgaatccaggcaaacctgcag

SEQ ID NO: 2689407 - DNA, 25 bp, Homo sapien
tgcaggacaaggtggattctcacat

SEQ ID NO: 2689408 - DNA, 25 bp, Homo sapien
ccaggacagcttgccactgaagtat

SEQ ID NO: 2689409 - DNA, 25 bp, Homo sapien
ctgatagaagaataggctgttcttt

SEQ ID NO: 2689410 - DNA, 25 bp, Homo sapien
tccctgatagccacaagaagttcca

SEQ ID NO: 2689411 - DNA, 25 bp, Homo sapien
caggagagcaaaacaaggcacatgg

SEQ ID NO: 2689412 - DNA, 25 bp, Homo sapien
gccatttgcacagatatctaatccc

SEQ ID NO: 2689413 - DNA, 25 bp, Homo sapien
gctcctctggtgtgattaaaatccc

SEQ ID NO: 2689414 - DNA, 25 bp, Homo sapien
tcttgcaagagaccctaataaacca

SEQ ID NO: 2689415 - DNA, 25 bp, Homo sapien
tccattgccattgcatacaccacaa

SEQ ID NO: 2689416 - DNA, 25 bp, Homo sapien
taaaatcccctttaatgatcttgca

SEQ ID NO: 2689417 - DNA, 25 bp, Homo sapien
tcctccacaactttgattcttcttg

SEQ ID NO: 2689418 - DNA, 25 bp, Homo sapien
taaatagctatgtgccggcttttcc

SEQ ID NO: 2689419 - DNA, 25 bp, Homo sapien
ctaaatagctatgtgccggcttttc

SEQ ID NO: 2689420 - DNA, 25 bp, Homo sapien
tttcctccacaactttgattcttct

SEQ ID NO: 2689421 - DNA, 25 bp, Homo sapien
catataagtcttgagagccctgaac

SEQ ID NO: 2689422 - DNA, 25 bp, Homo sapien
actagagctcccactttgtaaaggc

SEQ ID NO: 2689423 - DNA, 25 bp, Homo sapien
tgtagatttggacttgcacatgcca

SEQ ID NO: 2689424 - DNA, 25 bp, Homo sapien
ttggtgctgcaaacccatatgaggg

SEQ ID NO: 2689425 - DNA, 25 bp, Homo sapien
ggctccagagtgttcaatcttccag

SEQ ID NO: 2689426 - DNA, 25 bp, Homo sapien
cataatgaacggtagttccagccaa

SEQ ID NO: 2689427 - DNA, 25 bp, Homo sapien
cagaggcctcgtcttacataatgaa

SEQ ID NO: 2689428 - DNA, 25 bp, Homo sapien
gactgtttgccagcatctcggagag

SEQ ID NO: 2689429 - DNA, 25 bp, Homo sapien
gatataccttacgactatacccaga

SEQ ID NO: 2689430 - DNA, 25 bp, Homo sapien
caaatgcgtaacacatacagtgtac

SEQ ID NO: 2689431 - DNA, 25 bp, Homo sapien
tgttcagtatatcaacagaatgcct

SEQ ID NO: 2689432 - DNA, 25 bp, Homo sapien
ttttgatgtgcggattgggagacta

SEQ ID NO: 2689433 - DNA, 25 bp, Homo sapien
ccataattctgatcctgaaacagga

SEQ ID NO: 2689434 - DNA, 25 bp, Homo sapien
agggtctgatgggatagtgtattca

SEQ ID NO: 2689435 - DNA, 25 bp, Homo sapien
gatgggatagtgtattcatagtgaa

SEQ ID NO: 2689436 - DNA, 25 bp, Homo sapien
caggtgctttagagctctggttttc

SEQ ID NO: 2689437 - DNA, 25 bp, Homo sapien
ctccacaagtggcatcgcaatcttc

SEQ ID NO: 2689438 - DNA, 25 bp, Homo sapien
cacaagtggcatcgcaatcttccca

SEQ ID NO: 2689439 - DNA, 25 bp, Homo sapien
aagtggcatcgcaatcttcccagct

SEQ ID NO: 2689440 - DNA, 25 bp, Homo sapien
gcatcgcaatcttcccagcttgtgt

SEQ ID NO: 2689441 - DNA, 25 bp, Homo sapien
gatgatcagccttcatcagagattt

SEQ ID NO: 2689442 - DNA, 25 bp, Homo sapien
tgatcagccttcatcagagatttta

SEQ ID NO: 2689443 - DNA, 25 bp, Homo sapien
ctgagatgatcagccttcatcagag

SEQ ID NO: 2689444 - DNA, 25 bp, Homo sapien
gagatgatcagccttcatcagagat

SEQ ID NO: 2689445 - DNA, 25 bp, Homo sapien
gatttttgtgcaggacactgttgtc

SEQ ID NO: 2689446 - DNA, 25 bp, Homo sapien
gctcattgcactttcgaatctgtgg

SEQ ID NO: 2689447 - DNA, 25 bp, Homo sapien
gcatttctcattgtccacaatgctg

SEQ ID NO: 2689448 - DNA, 25 bp, Homo sapien
cttgtttgacatggttgctcattgc

SEQ ID NO: 2689449 - DNA, 25 bp, Homo sapien
gctctctattgcctggcttgtagca

SEQ ID NO: 2689450 - DNA, 25 bp, Homo sapien
cccacgcccattcctcctagaaggg

SEQ ID NO: 2689451 - DNA, 25 bp, Homo sapien
tgatatttgtagaatcctgtgcctg

SEQ ID NO: 2689452 - DNA, 25 bp, Homo sapien
cactcacacgacttattagatattc

SEQ ID NO: 2689453 - DNA, 25 bp, Homo sapien
tattgggtatcacaaatatcgtggc

SEQ ID NO: 2689454 - DNA, 25 bp, Homo sapien
cagaggcttaataccttaccaaagg

SEQ ID NO: 2689455 - DNA, 25 bp, Homo sapien
ttaccaaaggtcacaaaattgtggc

SEQ ID NO: 2689456 - DNA, 25 bp, Homo sapien
caaatgaggctgtagactacttaac

SEQ ID NO: 2689457 - DNA, 25 bp, Homo sapien
cacatctcgtatggcaggaggcaag

SEQ ID NO: 2689458 - DNA, 25 bp, Homo sapien
ggtccaattgacacagttccatgtg

SEQ ID NO: 2689459 - DNA, 25 bp, Homo sapien
gaaagaggtccaattgacacagttc

SEQ ID NO: 2689460 - DNA, 25 bp, Homo sapien
agcaagacacatctcgtatggcagg

SEQ ID NO: 2689461 - DNA, 25 bp, Homo sapien
ctcagttgttgggtacaggccactt

SEQ ID NO: 2689462 - DNA, 25 bp, Homo sapien
cgggctctaatcagtgttccattgc

SEQ ID NO: 2689463 - DNA, 25 bp, Homo sapien
caaggggtccattctgtcatcatcc

SEQ ID NO: 2689464 - DNA, 25 bp, Homo sapien
cttttccacaagttcgtgaacaagg

SEQ ID NO: 2689465 - DNA, 25 bp, Homo sapien
ctcagaccacactcccgcctcccac

SEQ ID NO: 2689466 - DNA, 25 bp, Homo sapien
cagaccacactcccgcctcccacac

SEQ ID NO: 2689467 - DNA, 25 bp, Homo sapien
tcagaccacactcccgcctcccaca

SEQ ID NO: 2689468 - DNA, 25 bp, Homo sapien
tgttatacactacaagcctgtaggg

SEQ ID NO: 2689469 - DNA, 25 bp, Homo sapien
tgcaatgagttaaacaaccttgggt

SEQ ID NO: 2689470 - DNA, 25 bp, Homo sapien
aaatcactatggtttggcatggaac

SEQ ID NO: 2689471 - DNA, 25 bp, Homo sapien
gatcttgtacaagctaggagtcaga

SEQ ID NO: 2689472 - DNA, 25 bp, Homo sapien
ggctcaattaagtactggtttccaa

SEQ ID NO: 2689473 - DNA, 25 bp, Homo sapien
gaattggagatatagatgataggct

SEQ ID NO: 2689474 - DNA, 25 bp, Homo sapien
gataaagttggtgaattggagatat

SEQ ID NO: 2689475 - DNA, 25 bp, Homo sapien
catcagaggttttagataaagttgg

SEQ ID NO: 2689476 - DNA, 25 bp, Homo sapien
cccattcgccacacatagcattttg

SEQ ID NO: 2689477 - DNA, 25 bp, Homo sapien
ccgatgacgtatgcctttgccacac

SEQ ID NO: 2689478 - DNA, 25 bp, Homo sapien
tctaacggtccgatgacgtatgcct

SEQ ID NO: 2689479 - DNA, 25 bp, Homo sapien
gagaggacacacttctttcttgggt

SEQ ID NO: 2689480 - DNA, 25 bp, Homo sapien
tctgagatatggtttaggagatgaa

SEQ ID NO: 2689481 - DNA, 25 bp, Homo sapien
aatccttttgaggttcaacatcaca

SEQ ID NO: 2689482 - DNA, 25 bp, Homo sapien
tataaggaatatcaaaagtaactcc

SEQ ID NO: 2689483 - DNA, 25 bp, Homo sapien
gcatgtatgctccatccttctataa

SEQ ID NO: 2689484 - DNA, 25 bp, Homo sapien
tcctgtgatcttatgcatgcattgg

SEQ ID NO: 2689485 - DNA, 25 bp, Homo sapien
cagtctgggtgatgttatggtattt

SEQ ID NO: 2689486 - DNA, 25 bp, Homo sapien
tgaagatggcatggcctgtatgctg

SEQ ID NO: 2689487 - DNA, 25 bp, Homo sapien
gattacacgggactgcattcctttg

SEQ ID NO: 2689488 - DNA, 25 bp, Homo sapien
cgtatcactcggcagtacactggcc

SEQ ID NO: 2689489 - DNA, 25 bp, Homo sapien
catgtcctgacataggttcttttca

SEQ ID NO: 2689490 - DNA, 25 bp, Homo sapien
tcttttcacgtatcactcggcagta

SEQ ID NO: 2689491 - DNA, 25 bp, Homo sapien
cctgacataggttcttttcacgtat

SEQ ID NO: 2689492 - DNA, 25 bp, Homo sapien
cagcttttgggcatagaagtccctg

SEQ ID NO: 2689493 - DNA, 25 bp, Homo sapien
ctgcagcttttgggcatagaagtcc

SEQ ID NO: 2689494 - DNA, 25 bp, Homo sapien
gcagcttttgggcatagaagtccct

SEQ ID NO: 2689495 - DNA, 25 bp, Homo sapien
tgcagcttttgggcatagaagtccc

SEQ ID NO: 2689496 - DNA, 25 bp, Homo sapien
gagtagcaccttagagatagcccta

SEQ ID NO: 2689497 - DNA, 25 bp, Homo sapien
tgattcgtgaggctaagtactatac

SEQ ID NO: 2689498 - DNA, 25 bp, Homo sapien
tatgctaagtcagtatacattctgg

SEQ ID NO: 2689499 - DNA, 25 bp, Homo sapien
caagcaccacattggatgtttggca

SEQ ID NO: 2689500 - DNA, 25 bp, Homo sapien
catactatcttccaaggcagttcac

SEQ ID NO: 2689501 - DNA, 25 bp, Homo sapien
actcacagcgatagtagtagccagg

SEQ ID NO: 2689502 - DNA, 25 bp, Homo sapien
gcttttcctgtactggctcgttgag

SEQ ID NO: 2689503 - DNA, 25 bp, Homo sapien
tagacagtacctttgttcatcagac

SEQ ID NO: 2689504 - DNA, 25 bp, Homo sapien
cagcctctccatcttctcccaccat

SEQ ID NO: 2689505 - DNA, 25 bp, Homo sapien
aagtttcgtctcagcctctccatct

SEQ ID NO: 2689506 - DNA, 25 bp, Homo sapien
tctcagcctctccatcttctcccac

SEQ ID NO: 2689507 - DNA, 25 bp, Homo sapien
agtttcgtctcagcctctccatctt

SEQ ID NO: 2689508 - DNA, 25 bp, Homo sapien
gacacagaacctagatccaaatata

SEQ ID NO: 2689509 - DNA, 25 bp, Homo sapien
tattggcaagtagagacacagaacc

SEQ ID NO: 2689510 - DNA, 25 bp, Homo sapien
tcaagaagaaatttacttgtctttg

SEQ ID NO: 2689511 - DNA, 25 bp, Homo sapien
gtctttggctctctatattggcaag

SEQ ID NO: 2689512 - DNA, 25 bp, Homo sapien
gtcaggatggttgttatttggcaaa

SEQ ID NO: 2689513 - DNA, 25 bp, Homo sapien
ggagggctgagctcctcgttaaaga

SEQ ID NO: 2689514 - DNA, 25 bp, Homo sapien
taaagactttacgtcaagctgcagg

SEQ ID NO: 2689515 - DNA, 25 bp, Homo sapien
gcagcaggataatttccacccggaa

SEQ ID NO: 2689516 - DNA, 25 bp, Homo sapien
gctgtctgcactggatcccctaatt

SEQ ID NO: 2689517 - DNA, 25 bp, Homo sapien
gatcccctaattcgttgagcagcaa

SEQ ID NO: 2689518 - DNA, 25 bp, Homo sapien
cctaattcgttgagcagcaatattc

SEQ ID NO: 2689519 - DNA, 25 bp, Homo sapien
gcactggatcccctaattcgttgag

SEQ ID NO: 2689520 - DNA, 25 bp, Homo sapien
gcttcctccaaacttaggtcaccat

SEQ ID NO: 2689521 - DNA, 25 bp, Homo sapien
ttgtcatattcctcaatggtccatg

SEQ ID NO: 2689522 - DNA, 25 bp, Homo sapien
catattcctcaatggtccatgaggg

SEQ ID NO: 2689523 - DNA, 25 bp, Homo sapien
gagtgggttattcttcataactgat

SEQ ID NO: 2689524 - DNA, 25 bp, Homo sapien
aagatggagataacgacaagtaaaa

SEQ ID NO: 2689525 - DNA, 25 bp, Homo sapien
ggagtgtacatgtctcccaaccaaa

SEQ ID NO: 2689526 - DNA, 25 bp, Homo sapien
caaccaaaaccgcaggtcattagga

SEQ ID NO: 2689527 - DNA, 25 bp, Homo sapien
taaaatcagacccatacgacagaat

SEQ ID NO: 2689528 - DNA, 25 bp, Homo sapien
caggtgaaaaaagtaatgatagtca

SEQ ID NO: 2689529 - DNA, 25 bp, Homo sapien
tcaggtgaaaaaagtaatgatagtc

SEQ ID NO: 2689530 - DNA, 25 bp, Homo sapien
aggtgaaaaaagtaatgatagtcac

SEQ ID NO: 2689531 - DNA, 25 bp, Homo sapien
cagacgacacagacctgcaggtttc

SEQ ID NO: 2689532 - DNA, 25 bp, Homo sapien
tcttcagcgtgggtttgatgtcagc

SEQ ID NO: 2689533 - DNA, 25 bp, Homo sapien
ctgggactgacatctaatttaggga

SEQ ID NO: 2689534 - DNA, 25 bp, Homo sapien
gagagtgattgagggattcatccca

SEQ ID NO: 2689535 - DNA, 25 bp, Homo sapien
gcaatgaagaggtctgtactcttcc

SEQ ID NO: 2689536 - DNA, 25 bp, Homo sapien
ttcccaaggctccatggtaagctgt

SEQ ID NO: 2689537 - DNA, 25 bp, Homo sapien
caatgaagaggtctgtactcttccc

SEQ ID NO: 2689538 - DNA, 25 bp, Homo sapien
aaaataagattgtcctctttttgct

SEQ ID NO: 2689539 - DNA, 25 bp, Homo sapien
atgtaaaataagattgtcctctttt

SEQ ID NO: 2689540 - DNA, 25 bp, Homo sapien
tgctgcctttttcggaatgtaaaat

SEQ ID NO: 2689541 - DNA, 25 bp, Homo sapien
gctgcctttttcggaatgtaaaata

SEQ ID NO: 2689542 - DNA, 25 bp, Homo sapien
gattctaaacaatccattgcaatta

SEQ ID NO: 2689543 - DNA, 25 bp, Homo sapien
ccttgcattccttggtgatagcaac

SEQ ID NO: 2689544 - DNA, 25 bp, Homo sapien
tgatagcaacagtgcagatgaagtt

SEQ ID NO: 2689545 - DNA, 25 bp, Homo sapien
tgtcagctttcttgattctaaacaa

SEQ ID NO: 2689546 - DNA, 25 bp, Homo sapien
catctagatgactgctcagcttctc

SEQ ID NO: 2689547 - DNA, 25 bp, Homo sapien
ccctctcagtggttcatctagatga

SEQ ID NO: 2689548 - DNA, 25 bp, Homo sapien
caaaacctaattgatctgaactact

SEQ ID NO: 2689549 - DNA, 25 bp, Homo sapien
tgctgatctgctatgatcaaataat

SEQ ID NO: 2689550 - DNA, 25 bp, Homo sapien
tgaccagtgtgttgtcagcagcctt

SEQ ID NO: 2689551 - DNA, 25 bp, Homo sapien
tcagatgaccagtgtgttgtcagca

SEQ ID NO: 2689552 - DNA, 25 bp, Homo sapien
gatgaccagtgtgttgtcagcagcc

SEQ ID NO: 2689553 - DNA, 25 bp, Homo sapien
gtcagcagccttgaagtgtttcttc

SEQ ID NO: 2689554 - DNA, 25 bp, Homo sapien
caattactgacaaggaacagtgggt

SEQ ID NO: 2689555 - DNA, 25 bp, Homo sapien
gaggtgcaccatactctgcattcac

SEQ ID NO: 2689556 - DNA, 25 bp, Homo sapien
aacagtgggtggtgaaacgctgcat

SEQ ID NO: 2689557 - DNA, 25 bp, Homo sapien
gaaacgctgcataaacacacactga

SEQ ID NO: 2689558 - DNA, 25 bp, Homo sapien
gcaagggtcgggagtgaaacttctc

SEQ ID NO: 2689559 - DNA, 25 bp, Homo sapien
ctaggcgccgacaccggctggaggt

SEQ ID NO: 2689560 - DNA, 25 bp, Homo sapien
gggcgcggacgctcgctgggctgtc

SEQ ID NO: 2689561 - DNA, 25 bp, Homo sapien
cggctggaggtcgaagcgccgcgga

SEQ ID NO: 2689562 - DNA, 25 bp, Homo sapien
cccaggtacttctgcgcggtcatca

SEQ ID NO: 2689563 - DNA, 25 bp, Homo sapien
tgctggctggaaaagaactccacgc

SEQ ID NO: 2689564 - DNA, 25 bp, Homo sapien
tgatgtagacatcgtcgtcggcgcg

SEQ ID NO: 2689565 - DNA, 25 bp, Homo sapien
aaaactggtgatcccgggtgctgcc

SEQ ID NO: 2689566 - DNA, 25 bp, Homo sapien
gcaggggctaggaccggttacagag

SEQ ID NO: 2689567 - DNA, 25 bp, Homo sapien
caggggctaggaccggttacagaga

SEQ ID NO: 2689568 - DNA, 25 bp, Homo sapien
tgggcaggggctaggaccggttaca

SEQ ID NO: 2689569 - DNA, 25 bp, Homo sapien
ggcaggggctaggaccggttacaga

SEQ ID NO: 2689570 - DNA, 25 bp, Homo sapien
ctctccgacgaggtaaagactaagg

SEQ ID NO: 2689571 - DNA, 25 bp, Homo sapien
cgaggcggcaccgaaaacagcaagt

SEQ ID NO: 2689572 - DNA, 25 bp, Homo sapien
aaggcgaataaagccaggcaggtgt

SEQ ID NO: 2689573 - DNA, 25 bp, Homo sapien
agaagacgaggaacgggctacgaat

SEQ ID NO: 2689574 - DNA, 25 bp, Homo sapien
cagcatctttactaccatttttgat

SEQ ID NO: 2689575 - DNA, 25 bp, Homo sapien
cagtcagcatctttactaccatttt

SEQ ID NO: 2689576 - DNA, 25 bp, Homo sapien
gtcagcatctttactaccatttttg

SEQ ID NO: 2689577 - DNA, 25 bp, Homo sapien
atctttactaccatttttgatgagc

SEQ ID NO: 2689578 - DNA, 25 bp, Homo sapien
gccaggtcctcccatacagaagttt

SEQ ID NO: 2689579 - DNA, 25 bp, Homo sapien
tctcggctaaagatcatgccaggtc

SEQ ID NO: 2689580 - DNA, 25 bp, Homo sapien
tctgtcccaggtagagaggcttact

SEQ ID NO: 2689581 - DNA, 25 bp, Homo sapien
gctcttcaatattccccaggccagt

SEQ ID NO: 2689582 - DNA, 25 bp, Homo sapien
aaatggcatgtatatgtactatgtg

SEQ ID NO: 2689583 - DNA, 25 bp, Homo sapien
gaatagaatcgctgccctagattat

SEQ ID NO: 2689584 - DNA, 25 bp, Homo sapien
gaatgaatagaatcgctgccctaga

SEQ ID NO: 2689585 - DNA, 25 bp, Homo sapien
tcgctgccctagattataaaatggc

SEQ ID NO: 2689586 - DNA, 25 bp, Homo sapien
gacaggcctgacacctaatgagaaa

SEQ ID NO: 2689587 - DNA, 25 bp, Homo sapien
tgctaataacaaagtctcagacagg

SEQ ID NO: 2689588 - DNA, 25 bp, Homo sapien
tttacaaagctgtgcactccgtagc

SEQ ID NO: 2689589 - DNA, 25 bp, Homo sapien
tataggccactgcttaaagttaagg

SEQ ID NO: 2689590 - DNA, 25 bp, Homo sapien
aatgaatggaatgctaggtgaagac

SEQ ID NO: 2689591 - DNA, 25 bp, Homo sapien
tactgtcttgaacatgaatgaatgg

SEQ ID NO: 2689592 - DNA, 25 bp, Homo sapien
gaagactaggccttcacagcagaat

SEQ ID NO: 2689593 - DNA, 25 bp, Homo sapien
gaagaacacctaaacactatcttgg

SEQ ID NO: 2689594 - DNA, 25 bp, Homo sapien
tattcaccaggttacagcctgtaag

SEQ ID NO: 2689595 - DNA, 25 bp, Homo sapien
aaatgttatattcaccaggttacag

SEQ ID NO: 2689596 - DNA, 25 bp, Homo sapien
acggattcataagtcagtgatggtc

SEQ ID NO: 2689597 - DNA, 25 bp, Homo sapien
gatggtcaagtgtcagtctaaattc

SEQ ID NO: 2689598 - DNA, 25 bp, Homo sapien
tttgatgtaaatgaatcacccatcc

SEQ ID NO: 2689599 - DNA, 25 bp, Homo sapien
gcccagcccatagtaagttttacta

SEQ ID NO: 2689600 - DNA, 25 bp, Homo sapien
caggtgtccatatttcatagtaagt

SEQ ID NO: 2689601 - DNA, 25 bp, Homo sapien
catattaggtgcaaagactgaaaca

SEQ ID NO: 2689602 - DNA, 25 bp, Homo sapien
tagtgaatggcaaaactagagtaag

SEQ ID NO: 2689603 - DNA, 25 bp, Homo sapien
aaagtcctagttatttgtgtgattc

SEQ ID NO: 2689604 - DNA, 25 bp, Homo sapien
cctcagatatgagggctgacccatt

SEQ ID NO: 2689605 - DNA, 25 bp, Homo sapien
gtaagaagccaggtaatctagtgct

SEQ ID NO: 2689606 - DNA, 25 bp, Homo sapien
taactacagcttttgggcctcacat

SEQ ID NO: 2689607 - DNA, 25 bp, Homo sapien
cacctgtacatatgctggaaccaaa

SEQ ID NO: 2689608 - DNA, 25 bp, Homo sapien
agtcacctatagcagtgggctcaaa

SEQ ID NO: 2689609 - DNA, 25 bp, Homo sapien
tgttaaagcaatcgagccaatgtag

SEQ ID NO: 2689610 - DNA, 25 bp, Homo sapien
gccaccatgcccgaaggcatagaat

SEQ ID NO: 2689611 - DNA, 25 bp, Homo sapien
gatatttttactgtacgagttaaca

SEQ ID NO: 2689612 - DNA, 25 bp, Homo sapien
tacctggtaagtacttccaatacat

SEQ ID NO: 2689613 - DNA, 25 bp, Homo sapien
agtgctaagattccatccatgcttg

SEQ ID NO: 2689614 - DNA, 25 bp, Homo sapien
ctccttccatactgtccgaaggaaa

SEQ ID NO: 2689615 - DNA, 25 bp, Homo sapien
caagtcctcatatagcagtttctca

SEQ ID NO: 2689616 - DNA, 25 bp, Homo sapien
tctcaactttgcccaaaaagtagta

SEQ ID NO: 2689617 - DNA, 25 bp, Homo sapien
catactgtccgaaggaaaaatccaa

SEQ ID NO: 2689618 - DNA, 25 bp, Homo sapien
tcaagaaccttttgtgttttcagtc

SEQ ID NO: 2689619 - DNA, 25 bp, Homo sapien
aagaaccttttgtgttttcagtcat

SEQ ID NO: 2689620 - DNA, 25 bp, Homo sapien
gaaccttttgtgttttcagtcatag

SEQ ID NO: 2689621 - DNA, 25 bp, Homo sapien
accttttgtgttttcagtcatagct

SEQ ID NO: 2689622 - DNA, 25 bp, Homo sapien
aactgcgccatgaagttcctctaga

SEQ ID NO: 2689623 - DNA, 25 bp, Homo sapien
tcaactttctgctcccgaatctcat

SEQ ID NO: 2689624 - DNA, 25 bp, Homo sapien
cctctagaattgtggagagcaccag

SEQ ID NO: 2689625 - DNA, 25 bp, Homo sapien
gccttgaggaactataagtacatag

SEQ ID NO: 2689626 - DNA, 25 bp, Homo sapien
caattatgattaatgttacttctct

SEQ ID NO: 2689627 - DNA, 25 bp, Homo sapien
tctatggtgtcctgaaatctgtaaa

SEQ ID NO: 2689628 - DNA, 25 bp, Homo sapien
aatctgtaaaatcagctgtgacatt

SEQ ID NO: 2689629 - DNA, 25 bp, Homo sapien
gatcctttctacagataaaaaacag

SEQ ID NO: 2689630 - DNA, 25 bp, Homo sapien
cgtatgcgtgttgtcaggcccaagg

SEQ ID NO: 2689631 - DNA, 25 bp, Homo sapien
catccttgtcaaggggagtgctaac

SEQ ID NO: 2689632 - DNA, 25 bp, Homo sapien
gtcaaggggagtgctaaccttctct

SEQ ID NO: 2689633 - DNA, 25 bp, Homo sapien
aaggggagtgctaaccttctctcct

SEQ ID NO: 2689634 - DNA, 25 bp, Homo sapien
ccatggatagatagtctttgaggcc

SEQ ID NO: 2689635 - DNA, 25 bp, Homo sapien
taacttagctcttcactttggactc

SEQ ID NO: 2689636 - DNA, 25 bp, Homo sapien
cagaatgtggtcagaacagctaaga

SEQ ID NO: 2689637 - DNA, 25 bp, Homo sapien
taggtggacactctgttacagtaaa

SEQ ID NO: 2689638 - DNA, 25 bp, Homo sapien
tggcatcatctctcatcgagattac

SEQ ID NO: 2689639 - DNA, 25 bp, Homo sapien
taaattagtataaaagagagccaga

SEQ ID NO: 2689640 - DNA, 25 bp, Homo sapien
gaagtccagaagtcatcctgattat

SEQ ID NO: 2689641 - DNA, 25 bp, Homo sapien
ttttctccagaagtccaactggcat

SEQ ID NO: 2689642 - DNA, 25 bp, Homo sapien
tattccataagcactaaagggacca

SEQ ID NO: 2689643 - DNA, 25 bp, Homo sapien
gatggcagacctcagaattgctaca

SEQ ID NO: 2689644 - DNA, 25 bp, Homo sapien
taagatcgttggcaaatgacagaac

SEQ ID NO: 2689645 - DNA, 25 bp, Homo sapien
taagatctcctttgaagcactcagc

SEQ ID NO: 2689646 - DNA, 25 bp, Homo sapien
gtgtccatggtgataccttcatcat

SEQ ID NO: 2689647 - DNA, 25 bp, Homo sapien
ggcacaaaggagcaaagcctactgt

SEQ ID NO: 2689648 - DNA, 25 bp, Homo sapien
acaaaggagcaaagcctactgtgtc

SEQ ID NO: 2689649 - DNA, 25 bp, Homo sapien
tgtgtccatggtgataccttcatca

SEQ ID NO: 2689650 - DNA, 25 bp, Homo sapien
tattcttttggaataaaggcaagga

SEQ ID NO: 2689651 - DNA, 25 bp, Homo sapien
ctccatggggtcctgcgtatcttgg

SEQ ID NO: 2689652 - DNA, 25 bp, Homo sapien
ctattcttttggaataaaggcaagg

SEQ ID NO: 2689653 - DNA, 25 bp, Homo sapien
gtcctgcgtatcttggttctcatcc

SEQ ID NO: 2689654 - DNA, 25 bp, Homo sapien
caatgcatactaagagagtgaattt

SEQ ID NO: 2689655 - DNA, 25 bp, Homo sapien
tctctgacctgctatcactggaggg

SEQ ID NO: 2689656 - DNA, 25 bp, Homo sapien
acatgtatgtgcaccagcgctggca

SEQ ID NO: 2689657 - DNA, 25 bp, Homo sapien
catgctctaaccctaggtgctggga

SEQ ID NO: 2689658 - DNA, 25 bp, Homo sapien
cataatactgagtcgtgaccctgca

SEQ ID NO: 2689659 - DNA, 25 bp, Homo sapien
tgtggtgactagtgcagagatgaac

SEQ ID NO: 2689660 - DNA, 25 bp, Homo sapien
gatgggttgaatcatagttctaaga

SEQ ID NO: 2689661 - DNA, 25 bp, Homo sapien
tcaatccaccgttaatgggcaccaa

SEQ ID NO: 2689662 - DNA, 25 bp, Homo sapien
tgggcaccaaggttgagtctatgtc

SEQ ID NO: 2689663 - DNA, 25 bp, Homo sapien
tcctctactatctcaaaaggcttta

SEQ ID NO: 2689664 - DNA, 25 bp, Homo sapien
tctactatctcaaaaggctttaaag

SEQ ID NO: 2689665 - DNA, 25 bp, Homo sapien
cctctactatctcaaaaggctttaa

SEQ ID NO: 2689666 - DNA, 25 bp, Homo sapien
ctactatctcaaaaggctttaaagt

SEQ ID NO: 2689667 - DNA, 25 bp, Homo sapien
agatgtatcacttgcccatcaaggg

SEQ ID NO: 2689668 - DNA, 25 bp, Homo sapien
ggcctcagctgcattggtggtgaaa

SEQ ID NO: 2689669 - DNA, 25 bp, Homo sapien
tgggaagggtgtccctcatcctgct

SEQ ID NO: 2689670 - DNA, 25 bp, Homo sapien
catcctgctttctaagatgtatcac

SEQ ID NO: 2689671 - DNA, 25 bp, Homo sapien
actgtccctcaatctttttcaggaa

SEQ ID NO: 2689672 - DNA, 25 bp, Homo sapien
ctcaatctttttcaggaacaaaagt

SEQ ID NO: 2689673 - DNA, 25 bp, Homo sapien
tccctcaatctttttcaggaacaaa

SEQ ID NO: 2689674 - DNA, 25 bp, Homo sapien
tgtccctcaatctttttcaggaaca

SEQ ID NO: 2689675 - DNA, 25 bp, Homo sapien
catgtttgctgatataatactgaca

SEQ ID NO: 2689676 - DNA, 25 bp, Homo sapien
ccttcaccagaaacagtagttccag

SEQ ID NO: 2689677 - DNA, 25 bp, Homo sapien
tactgattgggtaggactcaagagt

SEQ ID NO: 2689678 - DNA, 25 bp, Homo sapien
caaagtttccatctccgaaaatgta

SEQ ID NO: 2689679 - DNA, 25 bp, Homo sapien
tgttccaatgccgatgattagcaca

SEQ ID NO: 2689680 - DNA, 25 bp, Homo sapien
gatcgtcagctcattcaagtcagca

SEQ ID NO: 2689681 - DNA, 25 bp, Homo sapien
tatttaagagcccttataccctgcc

SEQ ID NO: 2689682 - DNA, 25 bp, Homo sapien
tctgtaggtacagcttcccacaaag

SEQ ID NO: 2689683 - DNA, 25 bp, Homo sapien
cacactaaatccgtacttcgttcta

SEQ ID NO: 2689684 - DNA, 25 bp, Homo sapien
ttttttacagccacgcgtgcaaaat

SEQ ID NO: 2689685 - DNA, 25 bp, Homo sapien
tacatatacacactaaatccgtact

SEQ ID NO: 2689686 - DNA, 25 bp, Homo sapien
cacgcgtgcaaaataggtaaagcca

SEQ ID NO: 2689687 - DNA, 25 bp, Homo sapien
gagctgtgggaatgaccatctatgg

SEQ ID NO: 2689688 - DNA, 25 bp, Homo sapien
aatgaccatctatggcagtgtggac

SEQ ID NO: 2689689 - DNA, 25 bp, Homo sapien
ggctacaccatgcagagcaggagct

SEQ ID NO: 2689690 - DNA, 25 bp, Homo sapien
gtggactgagagttcatgaaagctc

SEQ ID NO: 2689691 - DNA, 25 bp, Homo sapien
ggtcctaactttgactctgccctca

SEQ ID NO: 2689692 - DNA, 25 bp, Homo sapien
tggcctcccaattaggaactgaagg

SEQ ID NO: 2689693 - DNA, 25 bp, Homo sapien
ggagactaactctatacagaccagc

SEQ ID NO: 2689694 - DNA, 25 bp, Homo sapien
gaatgaccatcattactaacggatg

SEQ ID NO: 2689695 - DNA, 25 bp, Homo sapien
caagattggagtagccagggagtcc

SEQ ID NO: 2689696 - DNA, 25 bp, Homo sapien
cccacagggtgaagagtagtgatac

SEQ ID NO: 2689697 - DNA, 25 bp, Homo sapien
cccacctagccctgctggagtagta

SEQ ID NO: 2689698 - DNA, 25 bp, Homo sapien
acactcagaattgcctcaagatggg

SEQ ID NO: 2689699 - DNA, 25 bp, Homo sapien
tacgttgtcccttggtattggtgac

SEQ ID NO: 2689700 - DNA, 25 bp, Homo sapien
tcaatggcatttcgcctggaaaact

SEQ ID NO: 2689701 - DNA, 25 bp, Homo sapien
gccacaatgacaattctgcagggag

SEQ ID NO: 2689702 - DNA, 25 bp, Homo sapien
taaaatgtccgggactcaatggcat

SEQ ID NO: 2689703 - DNA, 25 bp, Homo sapien
agggaaagagaatcaacatcaattc

SEQ ID NO: 2689704 - DNA, 25 bp, Homo sapien
gaaagagaatcaacatcaattctta

SEQ ID NO: 2689705 - DNA, 25 bp, Homo sapien
agagaatcaacatcaattcttatcc

SEQ ID NO: 2689706 - DNA, 25 bp, Homo sapien
gagaatcaacatcaattcttatccc

SEQ ID NO: 2689707 - DNA, 25 bp, Homo sapien
ccaacctggagaagttaggatgcac

SEQ ID NO: 2689708 - DNA, 25 bp, Homo sapien
taggcatttacctcttccacaaagg

SEQ ID NO: 2689709 - DNA, 25 bp, Homo sapien
ccttctgggtcaatgaactgcatcc

SEQ ID NO: 2689710 - DNA, 25 bp, Homo sapien
ggttttcaaggcatgtcacactggc

SEQ ID NO: 2689711 - DNA, 25 bp, Homo sapien
tgctccatgccgacttaaccataca

SEQ ID NO: 2689712 - DNA, 25 bp, Homo sapien
cacagtatggccaataggaaaatat

SEQ ID NO: 2689713 - DNA, 25 bp, Homo sapien
tatatagtgctccaacatttcagga

SEQ ID NO: 2689714 - DNA, 25 bp, Homo sapien
gactactgtcacttaagcgtgtaca

SEQ ID NO: 2689715 - DNA, 25 bp, Homo sapien
cacactgaagtgtaaatattggatg

SEQ ID NO: 2689716 - DNA, 25 bp, Homo sapien
gtgtaaatattggatgaacaacctt

SEQ ID NO: 2689717 - DNA, 25 bp, Homo sapien
gatgaacaacctttgttggtcccca

SEQ ID NO: 2689718 - DNA, 25 bp, Homo sapien
ggtccccagttgttatctggacaca

SEQ ID NO: 2689719 - DNA, 25 bp, Homo sapien
ctggagtgaaggcaagccgcgggaa

SEQ ID NO: 2689720 - DNA, 25 bp, Homo sapien
tctcttgtaactctccaatggagag

SEQ ID NO: 2689721 - DNA, 25 bp, Homo sapien
ctctcttgtaactctccaatggaga

SEQ ID NO: 2689722 - DNA, 25 bp, Homo sapien
gacttaagttgtagggagcccacta

SEQ ID NO: 2689723 - DNA, 25 bp, Homo sapien
tggaagactccagtaaagggctctc

SEQ ID NO: 2689724 - DNA, 25 bp, Homo sapien
tagccaggtactgtgggagacttaa

SEQ ID NO: 2689725 - DNA, 25 bp, Homo sapien
gggctctccatacctcacaaggaaa

SEQ ID NO: 2689726 - DNA, 25 bp, Homo sapien
tgggcaagacagtcttaacgggaaa

SEQ ID NO: 2689727 - DNA, 25 bp, Homo sapien
gaaacaaactcatgttatctgtgtg

SEQ ID NO: 2689728 - DNA, 25 bp, Homo sapien
ccttctgtccttctgatgatatcac

SEQ ID NO: 2689729 - DNA, 25 bp, Homo sapien
tctgtccttctgatgatatcacact

SEQ ID NO: 2689730 - DNA, 25 bp, Homo sapien
agacctggtgctttggcaatggtcc

SEQ ID NO: 2689731 - DNA, 25 bp, Homo sapien
ctggtgctttggcaatggtccaaag

SEQ ID NO: 2689732 - DNA, 25 bp, Homo sapien
tgctttggcaatggtccaaagtcat

SEQ ID NO: 2689733 - DNA, 25 bp, Homo sapien
acctggtgctttggcaatggtccaa

SEQ ID NO: 2689734 - DNA, 25 bp, Homo sapien
tccaaatgatggaaggtcagctcct

SEQ ID NO: 2689735 - DNA, 25 bp, Homo sapien
tactcttaacagtgggactcctagc

SEQ ID NO: 2689736 - DNA, 25 bp, Homo sapien
gaatcaaacagttctccaaggaccc

SEQ ID NO: 2689737 - DNA, 25 bp, Homo sapien
ggaccacagggctcattctagcatt

SEQ ID NO: 2689738 - DNA, 25 bp, Homo sapien
taccacgcaggtgatgtagtctccg

SEQ ID NO: 2689739 - DNA, 25 bp, Homo sapien
tctgccaaggttgtccactgtcaag

SEQ ID NO: 2689740 - DNA, 25 bp, Homo sapien
cattatctggaacgataccacgcag

SEQ ID NO: 2689741 - DNA, 25 bp, Homo sapien
taacctcggctaggataatgtctgc

SEQ ID NO: 2689742 - DNA, 25 bp, Homo sapien
gtaaccagctctgtactgggataaa

SEQ ID NO: 2689743 - DNA, 25 bp, Homo sapien
tggaagtaaccagctctgtactggg

SEQ ID NO: 2689744 - DNA, 25 bp, Homo sapien
ctgtactgggataaagaggctgaat

SEQ ID NO: 2689745 - DNA, 25 bp, Homo sapien
gctctgtactgggataaagaggctg

SEQ ID NO: 2689746 - DNA, 25 bp, Homo sapien
tctggctgaatccatatttgcatcc

SEQ ID NO: 2689747 - DNA, 25 bp, Homo sapien
ggttctgaaagtggcttgttcccag

SEQ ID NO: 2689748 - DNA, 25 bp, Homo sapien
gcttgttcccagtaggagtcttgta

SEQ ID NO: 2689749 - DNA, 25 bp, Homo sapien
tagtctctgccatatgttcatctgg

SEQ ID NO: 2689750 - DNA, 25 bp, Homo sapien
ccaggatcagacgagattgggcgcg

SEQ ID NO: 2689751 - DNA, 25 bp, Homo sapien
cttccaggatcagacgagattgggc

SEQ ID NO: 2689752 - DNA, 25 bp, Homo sapien
agcttccaggatcagacgagattgg

SEQ ID NO: 2689753 - DNA, 25 bp, Homo sapien
tccaggatcagacgagattgggcgc

SEQ ID NO: 2689754 - DNA, 25 bp, Homo sapien
gatctcacaagatccatccatacaa

SEQ ID NO: 2689755 - DNA, 25 bp, Homo sapien
ttctgtgagtagcacacagatgggc

SEQ ID NO: 2689756 - DNA, 25 bp, Homo sapien
ttcaggtccgcatttctgtgagtag

SEQ ID NO: 2689757 - DNA, 25 bp, Homo sapien
actgccttcaggtccgcatttctgt

SEQ ID NO: 2689758 - DNA, 25 bp, Homo sapien
tcacaccactgtagtgagtctctgt

SEQ ID NO: 2689759 - DNA, 25 bp, Homo sapien
tccatggcatgctcccatccaactt

SEQ ID NO: 2689760 - DNA, 25 bp, Homo sapien
ccatggcatgctcccatccaacttc

SEQ ID NO: 2689761 - DNA, 25 bp, Homo sapien
atggcatgctcccatccaacttcac

SEQ ID NO: 2689762 - DNA, 25 bp, Homo sapien
cttttgctttcggttttgccaccat

SEQ ID NO: 2689763 - DNA, 25 bp, Homo sapien
tcttttgctttcggttttgccacca

SEQ ID NO: 2689764 - DNA, 25 bp, Homo sapien
aatggtgtccacatatgtatcagag

SEQ ID NO: 2689765 - DNA, 25 bp, Homo sapien
tcagattagattcccaatggtgtcc

SEQ ID NO: 2689766 - DNA, 25 bp, Homo sapien
aaaaaggattagcatagccacacag

SEQ ID NO: 2689767 - DNA, 25 bp, Homo sapien
tgcaaagccaaaaaggattagcata

SEQ ID NO: 2689768 - DNA, 25 bp, Homo sapien
catggtgctgagactctgagtcctt

SEQ ID NO: 2689769 - DNA, 25 bp, Homo sapien
ttttatgtctatgatggagaacttt

SEQ ID NO: 2689770 - DNA, 25 bp, Homo sapien
aaatgcattacaagtaatccacaca

SEQ ID NO: 2689771 - DNA, 25 bp, Homo sapien
gcattacaagtaatccacacaattg

SEQ ID NO: 2689772 - DNA, 25 bp, Homo sapien
catgagtatctatgcacaccaaggg

SEQ ID NO: 2689773 - DNA, 25 bp, Homo sapien
atgcatcccacatggctacccggta

SEQ ID NO: 2689774 - DNA, 25 bp, Homo sapien
caccaaggggtcaattccaagtctg

SEQ ID NO: 2689775 - DNA, 25 bp, Homo sapien
ggctacccggtagtcatgagtatct

SEQ ID NO: 2689776 - DNA, 25 bp, Homo sapien
taaaaaagattgtaatggttcacta

SEQ ID NO: 2689777 - DNA, 25 bp, Homo sapien
cacgccaggccttaccttgtaaact

SEQ ID NO: 2689778 - DNA, 25 bp, Homo sapien
tatcttgatgcttaacctcttttga

SEQ ID NO: 2689779 - DNA, 25 bp, Homo sapien
gattgtaatggttcactaatttcaa

SEQ ID NO: 2689780 - DNA, 25 bp, Homo sapien
aacagttggtagtgctaagatcaat

SEQ ID NO: 2689781 - DNA, 25 bp, Homo sapien
gcttggagtggctccgcttccctga

SEQ ID NO: 2689782 - DNA, 25 bp, Homo sapien
gcttgcatatagtcatggcatggat

SEQ ID NO: 2689783 - DNA, 25 bp, Homo sapien
aattatctctacttgttcatgctgg

SEQ ID NO: 2689784 - DNA, 25 bp, Homo sapien
ctccatccagtcagatatttggcat

SEQ ID NO: 2689785 - DNA, 25 bp, Homo sapien
ccatccagtcagatatttggcatca

SEQ ID NO: 2689786 - DNA, 25 bp, Homo sapien
acagtatcctcaaatctccatccag

SEQ ID NO: 2689787 - DNA, 25 bp, Homo sapien
ctggacaacagtatcctcaaatctc

SEQ ID NO: 2689788 - DNA, 25 bp, Homo sapien
atgaagggctgatgcttcatattag

SEQ ID NO: 2689789 - DNA, 25 bp, Homo sapien
tgaagggctgatgcttcatattaga

SEQ ID NO: 2689790 - DNA, 25 bp, Homo sapien
ctatgaagggctgatgcttcatatt

SEQ ID NO: 2689791 - DNA, 25 bp, Homo sapien
tatgaagggctgatgcttcatatta

SEQ ID NO: 2689792 - DNA, 25 bp, Homo sapien
tacttggacgttgtgcttattcacc

SEQ ID NO: 2689793 - DNA, 25 bp, Homo sapien
acttggacgttgtgcttattcacca

SEQ ID NO: 2689794 - DNA, 25 bp, Homo sapien
ctacttggacgttgtgcttattcac

SEQ ID NO: 2689795 - DNA, 25 bp, Homo sapien
tctacttggacgttgtgcttattca

SEQ ID NO: 2689796 - DNA, 25 bp, Homo sapien
gttggcttactgataattctaagta

SEQ ID NO: 2689797 - DNA, 25 bp, Homo sapien
cagcagcagttggcttactgataat

SEQ ID NO: 2689798 - DNA, 25 bp, Homo sapien
ctttttgtctataagcagtagcagc

SEQ ID NO: 2689799 - DNA, 25 bp, Homo sapien
tttttgtctataagcagtagcagca

SEQ ID NO: 2689800 - DNA, 25 bp, Homo sapien
cggagtctagagtgccatggaacag

SEQ ID NO: 2689801 - DNA, 25 bp, Homo sapien
ctagtttggcatttccaagggcctt

SEQ ID NO: 2689802 - DNA, 25 bp, Homo sapien
gccttctctacggagtctagagtgc

SEQ ID NO: 2689803 - DNA, 25 bp, Homo sapien
gtctagtttggcatttccaagggcc

SEQ ID NO: 2689804 - DNA, 25 bp, Homo sapien
ctacaaaatcttggaaatacaaata

SEQ ID NO: 2689805 - DNA, 25 bp, Homo sapien
ttggaaatacaaatagaaccatgaa

SEQ ID NO: 2689806 - DNA, 25 bp, Homo sapien
tggaaatacaaatagaaccatgaac

SEQ ID NO: 2689807 - DNA, 25 bp, Homo sapien
caaaatcttggaaatacaaatagaa

SEQ ID NO: 2689808 - DNA, 25 bp, Homo sapien
tctgggccacaagagagacattgag

SEQ ID NO: 2689809 - DNA, 25 bp, Homo sapien
tgaggatgccattatcatcaatatc

SEQ ID NO: 2689810 - DNA, 25 bp, Homo sapien
gggccacaagagagacattgaggat

SEQ ID NO: 2689811 - DNA, 25 bp, Homo sapien
gccattatcatcaatatcaaaagtg

SEQ ID NO: 2689812 - DNA, 25 bp, Homo sapien
attagtgataataactttgttctcc

SEQ ID NO: 2689813 - DNA, 25 bp, Homo sapien
tcaatgtcttccttgctcaaatggc

SEQ ID NO: 2689814 - DNA, 25 bp, Homo sapien
gaccatacattcaatgtcttccttg

SEQ ID NO: 2689815 - DNA, 25 bp, Homo sapien
caatgtcttccttgctcaaatggcc

SEQ ID NO: 2689816 - DNA, 25 bp, Homo sapien
ctggaccatacattcaatgtcttcc

SEQ ID NO: 2689817 - DNA, 25 bp, Homo sapien
tcgaatgcatagctttcaactgaat

SEQ ID NO: 2689818 - DNA, 25 bp, Homo sapien
cagttgataattttaatacccttat

SEQ ID NO: 2689819 - DNA, 25 bp, Homo sapien
taatacccttatcaagaatcttctg

SEQ ID NO: 2689820 - DNA, 25 bp, Homo sapien
ggtaattatgtggttgcagactttc

SEQ ID NO: 2689821 - DNA, 25 bp, Homo sapien
aggcattccttctggtgtgcctcct

SEQ ID NO: 2689822 - DNA, 25 bp, Homo sapien
ttctggtgtgcctcctgtactctgg

SEQ ID NO: 2689823 - DNA, 25 bp, Homo sapien
tggtgtgcctcctgtactctggtac

SEQ ID NO: 2689824 - DNA, 25 bp, Homo sapien
ccaggcattccttctggtgtgcctc

SEQ ID NO: 2689825 - DNA, 25 bp, Homo sapien
tcttcaatgggggccctggggaagc

SEQ ID NO: 2689826 - DNA, 25 bp, Homo sapien
gccctggggaagctccagcagaggg

SEQ ID NO: 2689827 - DNA, 25 bp, Homo sapien
ttagtcagcctcttcaatgggggcc

SEQ ID NO: 2689828 - DNA, 25 bp, Homo sapien
agtcagcctcttcaatgggggccct

SEQ ID NO: 2689829 - DNA, 25 bp, Homo sapien
tcgagtattgagattggccagtagt

SEQ ID NO: 2689830 - DNA, 25 bp, Homo sapien
gatactgactgctagtttggctatg

SEQ ID NO: 2689831 - DNA, 25 bp, Homo sapien
tactgcagctcaactttaagatggc

SEQ ID NO: 2689832 - DNA, 25 bp, Homo sapien
aaagttatgtacctcccctgtgcac

SEQ ID NO: 2689833 - DNA, 25 bp, Homo sapien
cctcacaaaactgataggaaaagtt

SEQ ID NO: 2689834 - DNA, 25 bp, Homo sapien
ctcacaaaactgataggaaaagttt

SEQ ID NO: 2689835 - DNA, 25 bp, Homo sapien
ggaagcacagtgtgatgcatgctga

SEQ ID NO: 2689836 - DNA, 25 bp, Homo sapien
gatgatcaagaccagctgtggcact

SEQ ID NO: 2689837 - DNA, 25 bp, Homo sapien
gaagcacagtgtgatgcatgctgaa

SEQ ID NO: 2689838 - DNA, 25 bp, Homo sapien
ctccacgatgatcaagaccagctgt

SEQ ID NO: 2689839 - DNA, 25 bp, Homo sapien
gaatctcactaatgtatgccactcc

SEQ ID NO: 2689840 - DNA, 25 bp, Homo sapien
gaacagctgcttaatagaatctcac

SEQ ID NO: 2689841 - DNA, 25 bp, Homo sapien
tatgactctttaccgactcgtccag

SEQ ID NO: 2689842 - DNA, 25 bp, Homo sapien
tccaggaactatgcagtggccttct

SEQ ID NO: 2689843 - DNA, 25 bp, Homo sapien
ggagaaagggcgaagactgccatca

SEQ ID NO: 2689844 - DNA, 25 bp, Homo sapien
tactattgtagcatgactgatggga

SEQ ID NO: 2689845 - DNA, 25 bp, Homo sapien
tcataggccagtactattgtagcat

SEQ ID NO: 2689846 - DNA, 25 bp, Homo sapien
cgtaattgatgcagtcatccaagca

SEQ ID NO: 2689847 - DNA, 25 bp, Homo sapien
tttagtcaccaaaatatgtttagaa

SEQ ID NO: 2689848 - DNA, 25 bp, Homo sapien
ttagtcaccaaaatatgtttagaat

SEQ ID NO: 2689849 - DNA, 25 bp, Homo sapien
ctttagtcaccaaaatatgtttaga

SEQ ID NO: 2689850 - DNA, 25 bp, Homo sapien
gaaaacctgaatgagtacttcacaa

SEQ ID NO: 2689851 - DNA, 25 bp, Homo sapien
gataatactgtgcattgtgaaggca

SEQ ID NO: 2689852 - DNA, 25 bp, Homo sapien
tactatgggataacgtgatggatcc

SEQ ID NO: 2689853 - DNA, 25 bp, Homo sapien
ggttctatcactgagaaaacccgta

SEQ ID NO: 2689854 - DNA, 25 bp, Homo sapien
tgtcattgtcaaactgggcagaagc

SEQ ID NO: 2689855 - DNA, 25 bp, Homo sapien
tgaaagaaggtatcactcccagctg

SEQ ID NO: 2689856 - DNA, 25 bp, Homo sapien
gaagataggcatgacgtctcactgg

SEQ ID NO: 2689857 - DNA, 25 bp, Homo sapien
gagtatagaagcttccctgtcagga

SEQ ID NO: 2689858 - DNA, 25 bp, Homo sapien
ccagtaccggttgcttgtggaacaa

SEQ ID NO: 2689859 - DNA, 25 bp, Homo sapien
taattgtcataagaccagggtagcc

SEQ ID NO: 2689860 - DNA, 25 bp, Homo sapien
gttacagagtcccttccccatagga

SEQ ID NO: 2689861 - DNA, 25 bp, Homo sapien
tatagcagacagttgtgaggagctc

SEQ ID NO: 2689862 - DNA, 25 bp, Homo sapien
aagaatactgctatacctgtgtttt

SEQ ID NO: 2689863 - DNA, 25 bp, Homo sapien
aatactgctatacctgtgttttatt

SEQ ID NO: 2689864 - DNA, 25 bp, Homo sapien
taaataaacaggttctgtcatattt

SEQ ID NO: 2689865 - DNA, 25 bp, Homo sapien
ttaaataaacaggttctgtcatatt

SEQ ID NO: 2689866 - DNA, 25 bp, Homo sapien
caaatatggcttagaccttggcagc

SEQ ID NO: 2689867 - DNA, 25 bp, Homo sapien
tatgatgtttaccaaatcctccaga

SEQ ID NO: 2689868 - DNA, 25 bp, Homo sapien
catgcataatggataacaaaactga

SEQ ID NO: 2689869 - DNA, 25 bp, Homo sapien
tttgatcgaaataaaatcccgcagg

SEQ ID NO: 2689870 - DNA, 25 bp, Homo sapien
gctggtggcaaatcctacggttgga

SEQ ID NO: 2689871 - DNA, 25 bp, Homo sapien
gaaaagagcttgagagtcattgtgg

SEQ ID NO: 2689872 - DNA, 25 bp, Homo sapien
gaatggtaggaaaactaggagtcaa

SEQ ID NO: 2689873 - DNA, 25 bp, Homo sapien
cagggaagaccttaatggcaggaaa

SEQ ID NO: 2689874 - DNA, 25 bp, Homo sapien
tgaacattattgatattgagaaaac

SEQ ID NO: 2689875 - DNA, 25 bp, Homo sapien
ttctgatctcttaggcttcttaaaa

SEQ ID NO: 2689876 - DNA, 25 bp, Homo sapien
acatgccctttctgatctcttaggc

SEQ ID NO: 2689877 - DNA, 25 bp, Homo sapien
gagaaaacagtgataactaaaacat

SEQ ID NO: 2689878 - DNA, 25 bp, Homo sapien
attgcatcttcttccttataagtgg

SEQ ID NO: 2689879 - DNA, 25 bp, Homo sapien
tattgcatcttcttccttataagtg

SEQ ID NO: 2689880 - DNA, 25 bp, Homo sapien
cagaaacccaaatattgcatcttct

SEQ ID NO: 2689881 - DNA, 25 bp, Homo sapien
aacccaaatattgcatcttcttcct

SEQ ID NO: 2689882 - DNA, 25 bp, Homo sapien
gcttctttgacagtgggagcaactg

SEQ ID NO: 2689883 - DNA, 25 bp, Homo sapien
gagttctgcactgattgccccatga

SEQ ID NO: 2689884 - DNA, 25 bp, Homo sapien
tttggatccatcctgacaaatggtg

SEQ ID NO: 2689885 - DNA, 25 bp, Homo sapien
tacaggtcttgtcaatgtgagttct

SEQ ID NO: 2689886 - DNA, 25 bp, Homo sapien
cattaggcacttctctaaaagcagc

SEQ ID NO: 2689887 - DNA, 25 bp, Homo sapien
cacacgtaatacattaggcacttct

SEQ ID NO: 2689888 - DNA, 25 bp, Homo sapien
taaacaagtttgatgggcacacgta

SEQ ID NO: 2689889 - DNA, 25 bp, Homo sapien
gatgggcacacgtaatacattaggc

SEQ ID NO: 2689890 - DNA, 25 bp, Homo sapien
ctgtgcccatcaaacttgtttattc

SEQ ID NO: 2689891 - DNA, 25 bp, Homo sapien
tattccttcttcctgtgatacttgc

SEQ ID NO: 2689892 - DNA, 25 bp, Homo sapien
ttccttcttcctgtgatacttgcat

SEQ ID NO: 2689893 - DNA, 25 bp, Homo sapien
gtttattccttcttcctgtgatact

SEQ ID NO: 2689894 - DNA, 25 bp, Homo sapien
ttggttactagtaggaagtctgcac

SEQ ID NO: 2689895 - DNA, 25 bp, Homo sapien
cacaagcagcaactaccacagttgt

SEQ ID NO: 2689896 - DNA, 25 bp, Homo sapien
ttactagtaggaagtctgcacaagc

SEQ ID NO: 2689897 - DNA, 25 bp, Homo sapien
tctttggttactagtaggaagtctg

SEQ ID NO: 2689898 - DNA, 25 bp, Homo sapien
tgcggccatgtacccagtcatgctg

SEQ ID NO: 2689899 - DNA, 25 bp, Homo sapien
cagcttgactggcagcataaagacc

SEQ ID NO: 2689900 - DNA, 25 bp, Homo sapien
tactgatgcacctgcggccatgtac

SEQ ID NO: 2689901 - DNA, 25 bp, Homo sapien
aaagacccatgcaagcagatgtgac

SEQ ID NO: 2689902 - DNA, 25 bp, Homo sapien
tctatactccaagaatttgattggc

SEQ ID NO: 2689903 - DNA, 25 bp, Homo sapien
caggaagaccagtcaccatgtccac

SEQ ID NO: 2689904 - DNA, 25 bp, Homo sapien
ccacccacagactacagatttggga

SEQ ID NO: 2689905 - DNA, 25 bp, Homo sapien
gattggcgttccttgcccactatgg

SEQ ID NO: 2689906 - DNA, 25 bp, Homo sapien
aagaatgattaacattgggaagggc

SEQ ID NO: 2689907 - DNA, 25 bp, Homo sapien
attttctgttgtaggaatcactcca

SEQ ID NO: 2689908 - DNA, 25 bp, Homo sapien
aaccacacatcaaaagtaccaccaa

SEQ ID NO: 2689909 - DNA, 25 bp, Homo sapien
aggccctgggtggggtcacagcaca

SEQ ID NO: 2689910 - DNA, 25 bp, Homo sapien
ggccctgggtggggtcacagcacac

SEQ ID NO: 2689911 - DNA, 25 bp, Homo sapien
acatcttcaagtagagtcagctctt

SEQ ID NO: 2689912 - DNA, 25 bp, Homo sapien
catcttcaagtagagtcagctcttc

SEQ ID NO: 2689913 - DNA, 25 bp, Homo sapien
atcttcaagtagagtcagctcttca

SEQ ID NO: 2689914 - DNA, 25 bp, Homo sapien
ctcatgtcagaatggtaattgcttc

SEQ ID NO: 2689915 - DNA, 25 bp, Homo sapien
gacaaaaactctcctagcctagaag

SEQ ID NO: 2689916 - DNA, 25 bp, Homo sapien
tctgccttagggataacaaaaccag

SEQ ID NO: 2689917 - DNA, 25 bp, Homo sapien
ggcacaggctgggttacatacatga

SEQ ID NO: 2689918 - DNA, 25 bp, Homo sapien
gtgtagcatcaataattgctatttt

SEQ ID NO: 2689919 - DNA, 25 bp, Homo sapien
ctttctacacaatatgggcctttga

SEQ ID NO: 2689920 - DNA, 25 bp, Homo sapien
tctacacaatatgggcctttgagag

SEQ ID NO: 2689921 - DNA, 25 bp, Homo sapien
aagtgtagcatcaataattgctatt

SEQ ID NO: 2689922 - DNA, 25 bp, Homo sapien
tctgttttatattggaaggatcact

SEQ ID NO: 2689923 - DNA, 25 bp, Homo sapien
tcacttgacttggaattctaagact

SEQ ID NO: 2689924 - DNA, 25 bp, Homo sapien
tgaactctgacaacctggcaactta

SEQ ID NO: 2689925 - DNA, 25 bp, Homo sapien
ccttgttcaatcacttgactggttg

SEQ ID NO: 2689926 - DNA, 25 bp, Homo sapien
tctctcttcagtttcctcttttcca

SEQ ID NO: 2689927 - DNA, 25 bp, Homo sapien
ctctctcttcagtttcctcttttcc

SEQ ID NO: 2689928 - DNA, 25 bp, Homo sapien
cctctctcttcagtttcctcttttc

SEQ ID NO: 2689929 - DNA, 25 bp, Homo sapien
ctctcttcagtttcctcttttccat

SEQ ID NO: 2689930 - DNA, 25 bp, Homo sapien
ttgaaggagtcagatgtagtagaca

SEQ ID NO: 2689931 - DNA, 25 bp, Homo sapien
gaaggagtcagatgtagtagacacc

SEQ ID NO: 2689932 - DNA, 25 bp, Homo sapien
tgaaggagtcagatgtagtagacac

SEQ ID NO: 2689933 - DNA, 25 bp, Homo sapien
ggagattactgcattcagacatggc

SEQ ID NO: 2689934 - DNA, 25 bp, Homo sapien
tgcattcagacatggcaacaaccaa

SEQ ID NO: 2689935 - DNA, 25 bp, Homo sapien
taatcctggagattactgcattcag

SEQ ID NO: 2689936 - DNA, 25 bp, Homo sapien
cagacatggcaacaaccaaaacact

SEQ ID NO: 2689937 - DNA, 25 bp, Homo sapien
ctttgttcctttatgcttgttcttc

SEQ ID NO: 2689938 - DNA, 25 bp, Homo sapien
ttgttcctttatgcttgttcttcct

SEQ ID NO: 2689939 - DNA, 25 bp, Homo sapien
tttgttcctttatgcttgttcttcc

SEQ ID NO: 2689940 - DNA, 25 bp, Homo sapien
acacagcacatggagcttcccccac

SEQ ID NO: 2689941 - DNA, 25 bp, Homo sapien
acagcacatggagcttcccccactt

SEQ ID NO: 2689942 - DNA, 25 bp, Homo sapien
ttcacacacagcacatggagcttcc

SEQ ID NO: 2689943 - DNA, 25 bp, Homo sapien
agcacatggagcttcccccacttca

SEQ ID NO: 2689944 - DNA, 25 bp, Homo sapien
tttggtgccgatgtccctgagcact

SEQ ID NO: 2689945 - DNA, 25 bp, Homo sapien
ggtgccgatgtccctgagcactcac

SEQ ID NO: 2689946 - DNA, 25 bp, Homo sapien
tctttggtgccgatgtccctgagca

SEQ ID NO: 2689947 - DNA, 25 bp, Homo sapien
tggtgccgatgtccctgagcactca

SEQ ID NO: 2689948 - DNA, 25 bp, Homo sapien
aagaaatatattcattaaaaatagg

SEQ ID NO: 2689949 - DNA, 25 bp, Homo sapien
aaatatattcattaaaaataggcat

SEQ ID NO: 2689950 - DNA, 25 bp, Homo sapien
ctaccaaagaaatatattcattaaa

SEQ ID NO: 2689951 - DNA, 25 bp, Homo sapien
taccaaagaaatatattcattaaaa

SEQ ID NO: 2689952 - DNA, 25 bp, Homo sapien
gaaaactgccatgttaaatccagga

SEQ ID NO: 2689953 - DNA, 25 bp, Homo sapien
aaaatctataaatgcgagcagcgtg

SEQ ID NO: 2689954 - DNA, 25 bp, Homo sapien
tgttaaatccaggaatcctctccag

SEQ ID NO: 2689955 - DNA, 25 bp, Homo sapien
gcgagcagcgtgttgaatatgtcac

SEQ ID NO: 2689956 - DNA, 25 bp, Homo sapien
taaaaactggtaagccatctctcct

SEQ ID NO: 2689957 - DNA, 25 bp, Homo sapien
gtaagccatctctcctttccgtatt

SEQ ID NO: 2689958 - DNA, 25 bp, Homo sapien
catcagctccttaaacttggtaaaa

SEQ ID NO: 2689959 - DNA, 25 bp, Homo sapien
tgatcccatcagctccttaaacttg

SEQ ID NO: 2689960 - DNA, 25 bp, Homo sapien
gcttgactccaacagttctgagttt

SEQ ID NO: 2689961 - DNA, 25 bp, Homo sapien
tgcttgactccaacagttctgagtt

SEQ ID NO: 2689962 - DNA, 25 bp, Homo sapien
ctgcttgactccaacagttctgagt

SEQ ID NO: 2689963 - DNA, 25 bp, Homo sapien
atctttcacccagcttctgaacaac

SEQ ID NO: 2689964 - DNA, 25 bp, Homo sapien
gatctttcacccagcttctgaacaa

SEQ ID NO: 2689965 - DNA, 25 bp, Homo sapien
ggtctacaacagctagttgccacca

SEQ ID NO: 2689966 - DNA, 25 bp, Homo sapien
tgtccttggtctacaacagctagtt

SEQ ID NO: 2689967 - DNA, 25 bp, Homo sapien
ggagaacaggatagtgttttgtcct

SEQ ID NO: 2689968 - DNA, 25 bp, Homo sapien
gttttgtccttggtctacaacagct

SEQ ID NO: 2689969 - DNA, 25 bp, Homo sapien
tccactggaccatgtaagagatctg

SEQ ID NO: 2689970 - DNA, 25 bp, Homo sapien
ttagtcccatatactcagggttgtt

SEQ ID NO: 2689971 - DNA, 25 bp, Homo sapien
cccatatactcagggttgttagaag

SEQ ID NO: 2689972 - DNA, 25 bp, Homo sapien
tgttagaagttcagtgtcattcatt

SEQ ID NO: 2689973 - DNA, 25 bp, Homo sapien
cagggttgttagaagttcagtgtca

SEQ ID NO: 2689974 - DNA, 25 bp, Homo sapien
tttttgtatcatgaacttcggtcat

SEQ ID NO: 2689975 - DNA, 25 bp, Homo sapien
taatttttgtatcatgaacttcggt

SEQ ID NO: 2689976 - DNA, 25 bp, Homo sapien
ttaatttttgtatcatgaacttcgg

SEQ ID NO: 2689977 - DNA, 25 bp, Homo sapien
aatttttgtatcatgaacttcggtc

SEQ ID NO: 2689978 - DNA, 25 bp, Homo sapien
catttctaacagagagctggtgcag

SEQ ID NO: 2689979 - DNA, 25 bp, Homo sapien
cacagaacgagaccatttctaacag

SEQ ID NO: 2689980 - DNA, 25 bp, Homo sapien
aacccacacagaacgagaccatttc

SEQ ID NO: 2689981 - DNA, 25 bp, Homo sapien
tggtgcagggtgttagctgttggca

SEQ ID NO: 2689982 - DNA, 25 bp, Homo sapien
ttccgccattgactccttgtttctg

SEQ ID NO: 2689983 - DNA, 25 bp, Homo sapien
gcagctttccgccattgactccttg

SEQ ID NO: 2689984 - DNA, 25 bp, Homo sapien
tcagctgtccaactatgtgtcactt

SEQ ID NO: 2689985 - DNA, 25 bp, Homo sapien
cagcagcagctttccgccattgact

SEQ ID NO: 2689986 - DNA, 25 bp, Homo sapien
attttcttacattcacttttctgta

SEQ ID NO: 2689987 - DNA, 25 bp, Homo sapien
ttttcttacattcacttttctgtac

SEQ ID NO: 2689988 - DNA, 25 bp, Homo sapien
tttcttacattcacttttctgtaca

SEQ ID NO: 2689989 - DNA, 25 bp, Homo sapien
ttcttacattcacttttctgtacat

SEQ ID NO: 2689990 - DNA, 25 bp, Homo sapien
agcaccacgttttggaccttttgtg

SEQ ID NO: 2689991 - DNA, 25 bp, Homo sapien
cagtgagcaccacgttttggacctt

SEQ ID NO: 2689992 - DNA, 25 bp, Homo sapien
ttcccagcccaacatcagtgagcac

SEQ ID NO: 2689993 - DNA, 25 bp, Homo sapien
atcagtgagcaccacgttttggacc

SEQ ID NO: 2689994 - DNA, 25 bp, Homo sapien
tccatgttgacttggcccattgcct

SEQ ID NO: 2689995 - DNA, 25 bp, Homo sapien
ggttatctcagttctgtcttgtcct

SEQ ID NO: 2689996 - DNA, 25 bp, Homo sapien
tctgactctgcatcccaacttttgg

SEQ ID NO: 2689997 - DNA, 25 bp, Homo sapien
ccattgcctcctgggactgtcgtgc

SEQ ID NO: 2689998 - DNA, 25 bp, Homo sapien
aatgctgctccataactattttggt

SEQ ID NO: 2689999 - DNA, 25 bp, Homo sapien
gaaaaacttatagtgagtacagagc

SEQ ID NO: 2690000 - DNA, 25 bp, Homo sapien
gctctgggactaaattgctgccctt

SEQ ID NO: 2690001 - DNA, 25 bp, Homo sapien
agtacagagcttaaatgctgctcca

SEQ ID NO: 2690002 - DNA, 25 bp, Homo sapien
acgtgggttgaatttgtcatataca

SEQ ID NO: 2690003 - DNA, 25 bp, Homo sapien
ttgattctgctttaaattagtctcc

SEQ ID NO: 2690004 - DNA, 25 bp, Homo sapien
tgtgggtgatgagaacctttcatta

SEQ ID NO: 2690005 - DNA, 25 bp, Homo sapien
ttcctctgactcacaaacatacgag

SEQ ID NO: 2690006 - DNA, 25 bp, Homo sapien
ttaatttctatcctgctcccatcta

SEQ ID NO: 2690007 - DNA, 25 bp, Homo sapien
attaatttctatcctgctcccatct

SEQ ID NO: 2690008 - DNA, 25 bp, Homo sapien
ttacaggtgtttctctgcttgccgt

SEQ ID NO: 2690009 - DNA, 25 bp, Homo sapien
tgtctcttcctccagggcagctttg

SEQ ID NO: 2690010 - DNA, 25 bp, Homo sapien
tgtttctctgcttgccgtgtctctt

SEQ ID NO: 2690011 - DNA, 25 bp, Homo sapien
caggtgtttctctgcttgccgtgtc

SEQ ID NO: 2690012 - DNA, 25 bp, Homo sapien
atgtacacgggcttgattttctgac

SEQ ID NO: 2690013 - DNA, 25 bp, Homo sapien
tgcagttttcgggttaaaagatgaa

SEQ ID NO: 2690014 - DNA, 25 bp, Homo sapien
gtgcttatgtacacgggcttgattt

SEQ ID NO: 2690015 - DNA, 25 bp, Homo sapien
tcaatgcagttttcgggttaaaaga

SEQ ID NO: 2690016 - DNA, 25 bp, Homo sapien
cccactgattttgcttgaagtctct

SEQ ID NO: 2690017 - DNA, 25 bp, Homo sapien
gcttgaagtctctgtaagtaatata

SEQ ID NO: 2690018 - DNA, 25 bp, Homo sapien
ccactgattttgcttgaagtctctg

SEQ ID NO: 2690019 - DNA, 25 bp, Homo sapien
aagtctctgtaagtaatatatcatg

SEQ ID NO: 2690020 - DNA, 25 bp, Homo sapien
tgaggaagtcagaatcagtctgctt

SEQ ID NO: 2690021 - DNA, 25 bp, Homo sapien
agtcctccccatatagcaggtttcc

SEQ ID NO: 2690022 - DNA, 25 bp, Homo sapien
tctctgtgtgccgacgctcagagta

SEQ ID NO: 2690023 - DNA, 25 bp, Homo sapien
gtgtgccgacgctcagagtaaaaat

SEQ ID NO: 2690024 - DNA, 25 bp, Homo sapien
aagtcctccccatatagcaggtttc

SEQ ID NO: 2690025 - DNA, 25 bp, Homo sapien
ctgagactcagtgcaccttctatct

SEQ ID NO: 2690026 - DNA, 25 bp, Homo sapien
tgagactcagtgcaccttctatctg

SEQ ID NO: 2690027 - DNA, 25 bp, Homo sapien
gagactcagtgcaccttctatctgc

SEQ ID NO: 2690028 - DNA, 25 bp, Homo sapien
gtcataaaagcggaaaaaactgatg

SEQ ID NO: 2690029 - DNA, 25 bp, Homo sapien
ataaaagcggaaaaaactgatgagg

SEQ ID NO: 2690030 - DNA, 25 bp, Homo sapien
agtcataaaagcggaaaaaactgat

SEQ ID NO: 2690031 - DNA, 25 bp, Homo sapien
tggctccttgaagcttctttgcagg

SEQ ID NO: 2690032 - DNA, 25 bp, Homo sapien
gcatgtcttcaggatattggctcct

SEQ ID NO: 2690033 - DNA, 25 bp, Homo sapien
attggctccttgaagcttctttgca

SEQ ID NO: 2690034 - DNA, 25 bp, Homo sapien
gggaaatcatcccttgtgggttgca

SEQ ID NO: 2690035 - DNA, 25 bp, Homo sapien
ggctacagatatatagtacaagtac

SEQ ID NO: 2690036 - DNA, 25 bp, Homo sapien
tcatcatggctacagatatatagta

SEQ ID NO: 2690037 - DNA, 25 bp, Homo sapien
ctactgtagattcatcatggctaca

SEQ ID NO: 2690038 - DNA, 25 bp, Homo sapien
catggctacagatatatagtacaag

SEQ ID NO: 2690039 - DNA, 25 bp, Homo sapien
gctgagatctggtggtctctcctca

SEQ ID NO: 2690040 - DNA, 25 bp, Homo sapien
ctgagatctggtggtctctcctcaa

SEQ ID NO: 2690041 - DNA, 25 bp, Homo sapien
ccttacaattgggctacttacttgt

SEQ ID NO: 2690042 - DNA, 25 bp, Homo sapien
ttacaattgggctacttacttgtgt

SEQ ID NO: 2690043 - DNA, 25 bp, Homo sapien
cttacaattgggctacttacttgtg

SEQ ID NO: 2690044 - DNA, 25 bp, Homo sapien
tgtgtggaattacttctgagctgca

SEQ ID NO: 2690045 - DNA, 25 bp, Homo sapien
gtgctcaatcgaggccaagaatttt

SEQ ID NO: 2690046 - DNA, 25 bp, Homo sapien
tggaattacttctgagctgcacctt

SEQ ID NO: 2690047 - DNA, 25 bp, Homo sapien
cagaaactttgttgatcaagtgctc

SEQ ID NO: 2690048 - DNA, 25 bp, Homo sapien
cacagtcttgggtaagaacattaaa

SEQ ID NO: 2690049 - DNA, 25 bp, Homo sapien
tggtcacagtcttgggtaagaacat

SEQ ID NO: 2690050 - DNA, 25 bp, Homo sapien
cagtcttgggtaagaacattaaata

SEQ ID NO: 2690051 - DNA, 25 bp, Homo sapien
ataatttaaacttcaaattcctcat

SEQ ID NO: 2690052 - DNA, 25 bp, Homo sapien
ctctgtaacactttgcgttatcttt

SEQ ID NO: 2690053 - DNA, 25 bp, Homo sapien
cctctgtaacactttgcgttatctt

SEQ ID NO: 2690054 - DNA, 25 bp, Homo sapien
ggtctgcatagctgaactgtctcat

SEQ ID NO: 2690055 - DNA, 25 bp, Homo sapien
catctgtgggcccatcatgatgatc

SEQ ID NO: 2690056 - DNA, 25 bp, Homo sapien
actgtctcatctgtgggcccatcat

SEQ ID NO: 2690057 - DNA, 25 bp, Homo sapien
taggtctgcatagctgaactgtctc

SEQ ID NO: 2690058 - DNA, 25 bp, Homo sapien
gatacagttatagggcctttgttaa

SEQ ID NO: 2690059 - DNA, 25 bp, Homo sapien
tggggatacagttatagggcctttg

SEQ ID NO: 2690060 - DNA, 25 bp, Homo sapien
gctcataatgtttatacccttcaaa

SEQ ID NO: 2690061 - DNA, 25 bp, Homo sapien
atgtttatacccttcaaatagtggg

SEQ ID NO: 2690062 - DNA, 25 bp, Homo sapien
acactgatctcaggggtttaggtcc

SEQ ID NO: 2690063 - DNA, 25 bp, Homo sapien
tggagacactgatctcaggggttta

SEQ ID NO: 2690064 - DNA, 25 bp, Homo sapien
gagacactgatctcaggggtttagg

SEQ ID NO: 2690065 - DNA, 25 bp, Homo sapien
gggtttaggtcctgtgcattttctc

SEQ ID NO: 2690066 - DNA, 25 bp, Homo sapien
tcactgtttaaaacagggtgatgtt

SEQ ID NO: 2690067 - DNA, 25 bp, Homo sapien
ctattccacacccgacatgctgagt

SEQ ID NO: 2690068 - DNA, 25 bp, Homo sapien
tccacacccgacatgctgagtcctg

SEQ ID NO: 2690069 - DNA, 25 bp, Homo sapien
cactgtttaaaacagggtgatgttt

SEQ ID NO: 2690070 - DNA, 25 bp, Homo sapien
tctcatgaagatacttgtgtagtac

SEQ ID NO: 2690071 - DNA, 25 bp, Homo sapien
cctctcatgaagatacttgtgtagt

SEQ ID NO: 2690072 - DNA, 25 bp, Homo sapien
catgaagatacttgtgtagtactgg

SEQ ID NO: 2690073 - DNA, 25 bp, Homo sapien
tcctctcatgaagatacttgtgtag

SEQ ID NO: 2690074 - DNA, 25 bp, Homo sapien
cactgcaatctttgcatcctggttc

SEQ ID NO: 2690075 - DNA, 25 bp, Homo sapien
actgcaatctttgcatcctggttca

SEQ ID NO: 2690076 - DNA, 25 bp, Homo sapien
ctgcaatctttgcatcctggttcaa

SEQ ID NO: 2690077 - DNA, 25 bp, Homo sapien
ctgaacctggccggggattcagttt

SEQ ID NO: 2690078 - DNA, 25 bp, Homo sapien
caaaagacccgcaatagacaatgct

SEQ ID NO: 2690079 - DNA, 25 bp, Homo sapien
ggacagagtacccaggaacaaattc

SEQ ID NO: 2690080 - DNA, 25 bp, Homo sapien
gataccaagaacataccctggagga

SEQ ID NO: 2690081 - DNA, 25 bp, Homo sapien
cacacacatagacaattgaaacagg

SEQ ID NO: 2690082 - DNA, 25 bp, Homo sapien
tccatgccttgtgaaagcagatggt

SEQ ID NO: 2690083 - DNA, 25 bp, Homo sapien
ggaaagaggcttgggattggagata

SEQ ID NO: 2690084 - DNA, 25 bp, Homo sapien
gcttgggattggagataagaatttt

SEQ ID NO: 2690085 - DNA, 25 bp, Homo sapien
tattgacatttccatgccttgtgaa

SEQ ID NO: 2690086 - DNA, 25 bp, Homo sapien
ttaccagcttgtcatagccagcggg

SEQ ID NO: 2690087 - DNA, 25 bp, Homo sapien
ttaaggcccattacttgtgtgatga

SEQ ID NO: 2690088 - DNA, 25 bp, Homo sapien
tgtgtgatgatttaccagcttgtca

SEQ ID NO: 2690089 - DNA, 25 bp, Homo sapien
ggcccattacttgtgtgatgattta

SEQ ID NO: 2690090 - DNA, 25 bp, Homo sapien
tcaggcataggtggatcttaccgtt

SEQ ID NO: 2690091 - DNA, 25 bp, Homo sapien
ttaccgttgaggctttcgtctgtag

SEQ ID NO: 2690092 - DNA, 25 bp, Homo sapien
cataggtggatcttaccgttgaggc

SEQ ID NO: 2690093 - DNA, 25 bp, Homo sapien
ggatcttaccgttgaggctttcgtc

SEQ ID NO: 2690094 - DNA, 25 bp, Homo sapien
agtaagtgctgctctcgtattcctg

SEQ ID NO: 2690095 - DNA, 25 bp, Homo sapien
tctgcccaacgacaagatctatggc

SEQ ID NO: 2690096 - DNA, 25 bp, Homo sapien
gcccaacgacaagatctatggctgt

SEQ ID NO: 2690097 - DNA, 25 bp, Homo sapien
tgtctgtgtgctcttagagtaagtg

SEQ ID NO: 2690098 - DNA, 25 bp, Homo sapien
gctccaatgccttggctgctcgggt

SEQ ID NO: 2690099 - DNA, 25 bp, Homo sapien
gccttggctgctcgggttagtctgt

SEQ ID NO: 2690100 - DNA, 25 bp, Homo sapien
ccaatgccttggctgctcgggttag

SEQ ID NO: 2690101 - DNA, 25 bp, Homo sapien
aatgccttggctgctcgggttagtc

SEQ ID NO: 2690102 - DNA, 25 bp, Homo sapien
gccagaggatctgattgtatctagc

SEQ ID NO: 2690103 - DNA, 25 bp, Homo sapien
ccagaggatctgattgtatctagct

SEQ ID NO: 2690104 - DNA, 25 bp, Homo sapien
tcatacttctgcacctttagatcct

SEQ ID NO: 2690105 - DNA, 25 bp, Homo sapien
ggaagcaacgcatcatctcctcttt

SEQ ID NO: 2690106 - DNA, 25 bp, Homo sapien
gccttggatccttgaactgtgcagt

SEQ ID NO: 2690107 - DNA, 25 bp, Homo sapien
acttatgctggaagcaacgcatcat

SEQ ID NO: 2690108 - DNA, 25 bp, Homo sapien
agcctttcctgcaacgtcccggttg

SEQ ID NO: 2690109 - DNA, 25 bp, Homo sapien
catttgtgatttcgccgggatatgg

SEQ ID NO: 2690110 - DNA, 25 bp, Homo sapien
tcccctttcttctgagcgatgagct

SEQ ID NO: 2690111 - DNA, 25 bp, Homo sapien
ggctttctgttgcattttggatcca

SEQ ID NO: 2690112 - DNA, 25 bp, Homo sapien
gggcatctgtgctcgtctgtgccat

SEQ ID NO: 2690113 - DNA, 25 bp, Homo sapien
gcatctgtgctcgtctgtgccatct

SEQ ID NO: 2690114 - DNA, 25 bp, Homo sapien
atctgtgctcgtctgtgccatctgc

SEQ ID NO: 2690115 - DNA, 25 bp, Homo sapien
tgggcgccctggcgttgggggtgag

SEQ ID NO: 2690116 - DNA, 25 bp, Homo sapien
gcgggttggccagccctaggcctat

SEQ ID NO: 2690117 - DNA, 25 bp, Homo sapien
cttggcgtgcgagtagagtagctct

SEQ ID NO: 2690118 - DNA, 25 bp, Homo sapien
tgaggagggacctcttcccggcgca

SEQ ID NO: 2690119 - DNA, 25 bp, Homo sapien
gcgcaggaggtaggcgtgccgggag

SEQ ID NO: 2690120 - DNA, 25 bp, Homo sapien
tctctatcactttccgagtctcgac

SEQ ID NO: 2690121 - DNA, 25 bp, Homo sapien
ttctgccacaaaggggccaatttct

SEQ ID NO: 2690122 - DNA, 25 bp, Homo sapien
ctctatcactttccgagtctcgact

SEQ ID NO: 2690123 - DNA, 25 bp, Homo sapien
caaaggggccaatttctctatcact

SEQ ID NO: 2690124 - DNA, 25 bp, Homo sapien
cgtgcaaaaatggaaacgccaggtt

SEQ ID NO: 2690125 - DNA, 25 bp, Homo sapien
tgtagtcctccgtaatcactttttc

SEQ ID NO: 2690126 - DNA, 25 bp, Homo sapien
ctccgtaatcactttttctaactcg

SEQ ID NO: 2690127 - DNA, 25 bp, Homo sapien
tggaaacgccaggttatccttgtag

SEQ ID NO: 2690128 - DNA, 25 bp, Homo sapien
agctgaacgcctggttttcgcggtt

SEQ ID NO: 2690129 - DNA, 25 bp, Homo sapien
gcgcgctatgaactcggccaacttt

SEQ ID NO: 2690130 - DNA, 25 bp, Homo sapien
tcctttctgtggtagaggaattgcc

SEQ ID NO: 2690131 - DNA, 25 bp, Homo sapien
gatggtttccatctcgggatccccg

SEQ ID NO: 2690132 - DNA, 25 bp, Homo sapien
tggagcggggatgacgggggggaca

SEQ ID NO: 2690133 - DNA, 25 bp, Homo sapien
gagcggggatgacgggggggacaca

SEQ ID NO: 2690134 - DNA, 25 bp, Homo sapien
gctgcggaggctggctccccggggg

SEQ ID NO: 2690135 - DNA, 25 bp, Homo sapien
tcttgacggtggctgcggaggctgg

SEQ ID NO: 2690136 - DNA, 25 bp, Homo sapien
gcggaggctggctccccgggggcgc

SEQ ID NO: 2690137 - DNA, 25 bp, Homo sapien
ctcttgacggtggctgcggaggctg

SEQ ID NO: 2690138 - DNA, 25 bp, Homo sapien
gtgagggagaggcatccacgtccct

SEQ ID NO: 2690139 - DNA, 25 bp, Homo sapien
tgaggtcctgaactgacagaggtga

SEQ ID NO: 2690140 - DNA, 25 bp, Homo sapien
ctcagcaggtgagagctctactttg

SEQ ID NO: 2690141 - DNA, 25 bp, Homo sapien
ctttgttctcttcaggcctccaccg

SEQ ID NO: 2690142 - DNA, 25 bp, Homo sapien
tgaggcccgctagacccacggactt

SEQ ID NO: 2690143 - DNA, 25 bp, Homo sapien
gcttctgggagcacgatagctccgt

SEQ ID NO: 2690144 - DNA, 25 bp, Homo sapien
acggacttcccgttctcatagccga

SEQ ID NO: 2690145 - DNA, 25 bp, Homo sapien
ggacttcccgttctcatagccgagc

SEQ ID NO: 2690146 - DNA, 25 bp, Homo sapien
cggcccattccctcgtcttgttcat

SEQ ID NO: 2690147 - DNA, 25 bp, Homo sapien
ctcggcccattccctcgtcttgttc

SEQ ID NO: 2690148 - DNA, 25 bp, Homo sapien
tcggcccattccctcgtcttgttca

SEQ ID NO: 2690149 - DNA, 25 bp, Homo sapien
gtgcttgcctcggctcatcttcgtc

SEQ ID NO: 2690150 - DNA, 25 bp, Homo sapien
cgagtagtcaggctcgcgaccctcc

SEQ ID NO: 2690151 - DNA, 25 bp, Homo sapien
gaagtgcttgcctcggctcatcttc

SEQ ID NO: 2690152 - DNA, 25 bp, Homo sapien
gcttgcctcggctcatcttcgtcag

SEQ ID NO: 2690153 - DNA, 25 bp, Homo sapien
atcttcatcagcacgttctcctcgg

SEQ ID NO: 2690154 - DNA, 25 bp, Homo sapien
tcagcacgttctcctcggtgagctt

SEQ ID NO: 2690155 - DNA, 25 bp, Homo sapien
ttcatcagcacgttctcctcggtga

SEQ ID NO: 2690156 - DNA, 25 bp, Homo sapien
cacgttctcctcggtgagcttgaac

SEQ ID NO: 2690157 - DNA, 25 bp, Homo sapien
tcaatgccgaagccggcaccagcca

SEQ ID NO: 2690158 - DNA, 25 bp, Homo sapien
atgccgaagccggcaccagccactg

SEQ ID NO: 2690159 - DNA, 25 bp, Homo sapien
tgatgccctggctcgctgaggccct

SEQ ID NO: 2690160 - DNA, 25 bp, Homo sapien
tcttgatgccctggctcgctgaggc

SEQ ID NO: 2690161 - DNA, 25 bp, Homo sapien
ggcagaaatacaggtcggaacatgc

SEQ ID NO: 2690162 - DNA, 25 bp, Homo sapien
tacaggtcggaacatgctacagtcc

SEQ ID NO: 2690163 - DNA, 25 bp, Homo sapien
aaatacaggtcggaacatgctacag

SEQ ID NO: 2690164 - DNA, 25 bp, Homo sapien
ggtcggaacatgctacagtccaggg

SEQ ID NO: 2690165 - DNA, 25 bp, Homo sapien
ctgacttttatgtttggaactgaag

SEQ ID NO: 2690166 - DNA, 25 bp, Homo sapien
gacttttatgtttggaactgaagcc

SEQ ID NO: 2690167 - DNA, 25 bp, Homo sapien
cttttatgtttggaactgaagccag

SEQ ID NO: 2690168 - DNA, 25 bp, Homo sapien
ttatgtttggaactgaagccagcca

SEQ ID NO: 2690169 - DNA, 25 bp, Homo sapien
attatcataaatattaagaggaatg

SEQ ID NO: 2690170 - DNA, 25 bp, Homo sapien
cttattatcataaatattaagagga

SEQ ID NO: 2690171 - DNA, 25 bp, Homo sapien
tcataaatattaagaggaatgtaca

SEQ ID NO: 2690172 - DNA, 25 bp, Homo sapien
tatcataaatattaagaggaatgta

SEQ ID NO: 2690173 - DNA, 25 bp, Homo sapien
cctccgtcgccgccggtgcgatact

SEQ ID NO: 2690174 - DNA, 25 bp, Homo sapien
gtcgccgccggtgcgatactgcctc

SEQ ID NO: 2690175 - DNA, 25 bp, Homo sapien
gtgcgatactgcctccgccggtccg

SEQ ID NO: 2690176 - DNA, 25 bp, Homo sapien
ccggtgcgatactgcctccgccggt

SEQ ID NO: 2690177 - DNA, 25 bp, Homo sapien
ctgccttggtcatggtgacaccggc

SEQ ID NO: 2690178 - DNA, 25 bp, Homo sapien
ctactgccttggtcatggtgacacc

SEQ ID NO: 2690179 - DNA, 25 bp, Homo sapien
gtcatggtgacaccggctgggcggg

SEQ ID NO: 2690180 - DNA, 25 bp, Homo sapien
ccttggtcatggtgacaccggctgg

SEQ ID NO: 2690181 - DNA, 25 bp, Homo sapien
cacaggtccagttcgttgcagtcca

SEQ ID NO: 2690182 - DNA, 25 bp, Homo sapien
caggtcgctgagacacaggtccagt

SEQ ID NO: 2690183 - DNA, 25 bp, Homo sapien
tgggacttcattcaggtcgctgaga

SEQ ID NO: 2690184 - DNA, 25 bp, Homo sapien
gttcgttgcagtccagcttgtcgcg

SEQ ID NO: 2690185 - DNA, 25 bp, Homo sapien
acataagttgggcaggactccacag

SEQ ID NO: 2690186 - DNA, 25 bp, Homo sapien
gccacataagttgggcaggactcca

SEQ ID NO: 2690187 - DNA, 25 bp, Homo sapien
gaagccacataagttgggcaggact

SEQ ID NO: 2690188 - DNA, 25 bp, Homo sapien
ataagttgggcaggactccacagga

SEQ ID NO: 2690189 - DNA, 25 bp, Homo sapien
tattcctcagattcgaggtaatgat

SEQ ID NO: 2690190 - DNA, 25 bp, Homo sapien
catattcctcagattcgaggtaatg

SEQ ID NO: 2690191 - DNA, 25 bp, Homo sapien
ttcctcagattcgaggtaatgatcc

SEQ ID NO: 2690192 - DNA, 25 bp, Homo sapien
tttcatattcctcagattcgaggta

SEQ ID NO: 2690193 - DNA, 25 bp, Homo sapien
ttaaacttgacatactggccacagc

SEQ ID NO: 2690194 - DNA, 25 bp, Homo sapien
tttacatctgatcctaaggcagcca

SEQ ID NO: 2690195 - DNA, 25 bp, Homo sapien
ccttcatttgtctgcttaaacttga

SEQ ID NO: 2690196 - DNA, 25 bp, Homo sapien
cacagctggtttctccaaggtttac

SEQ ID NO: 2690197 - DNA, 25 bp, Homo sapien
ttcctgaggatacgccaccttggat

SEQ ID NO: 2690198 - DNA, 25 bp, Homo sapien
gaggatacgccaccttggatctact

SEQ ID NO: 2690199 - DNA, 25 bp, Homo sapien
ctcttcctgaggatacgccaccttg

SEQ ID NO: 2690200 - DNA, 25 bp, Homo sapien
ccttggatctactccctggggctgg

SEQ ID NO: 2690201 - DNA, 25 bp, Homo sapien
taattctgtaggagctttgctctga

SEQ ID NO: 2690202 - DNA, 25 bp, Homo sapien
agttgatggcattcctgagtatgcc

SEQ ID NO: 2690203 - DNA, 25 bp, Homo sapien
gagtatgcctgatgtagaacaaaag

SEQ ID NO: 2690204 - DNA, 25 bp, Homo sapien
ctttaattctgtaggagctttgctc

SEQ ID NO: 2690205 - DNA, 25 bp, Homo sapien
caggacacattgtattttgttggca

SEQ ID NO: 2690206 - DNA, 25 bp, Homo sapien
gtcaggtgtcctcccatatatctgg

SEQ ID NO: 2690207 - DNA, 25 bp, Homo sapien
agagaaattgatgagctgatctcaa

SEQ ID NO: 2690208 - DNA, 25 bp, Homo sapien
gctgatctcaattcttgtcccagga

SEQ ID NO: 2690209 - DNA, 25 bp, Homo sapien
gaagataaaccttgaagttctagat

SEQ ID NO: 2690210 - DNA, 25 bp, Homo sapien
aaccttgaagttctagatcatccat

SEQ ID NO: 2690211 - DNA, 25 bp, Homo sapien
gataaaccttgaagttctagatcat

SEQ ID NO: 2690212 - DNA, 25 bp, Homo sapien
taaaccttgaagttctagatcatcc

SEQ ID NO: 2690213 - DNA, 25 bp, Homo sapien
ctctggcttccagtagggtgtgaag

SEQ ID NO: 2690214 - DNA, 25 bp, Homo sapien
tctctggcttccagtagggtgtgaa

SEQ ID NO: 2690215 - DNA, 25 bp, Homo sapien
tctggcttccagtagggtgtgaaga

SEQ ID NO: 2690216 - DNA, 25 bp, Homo sapien
tgtcagctgcagtatgggatgccac

SEQ ID NO: 2690217 - DNA, 25 bp, Homo sapien
taagcattcctctgcactgggtcaa

SEQ ID NO: 2690218 - DNA, 25 bp, Homo sapien
tattcaaaggcttggcataattagg

SEQ ID NO: 2690219 - DNA, 25 bp, Homo sapien
tattcactgacctgtattggatggt

SEQ ID NO: 2690220 - DNA, 25 bp, Homo sapien
caaactgcagtgcagggtacaatca

SEQ ID NO: 2690221 - DNA, 25 bp, Homo sapien
ttgcccaaactgcagtgcagggtac

SEQ ID NO: 2690222 - DNA, 25 bp, Homo sapien
aaaagtagaccttgtagagatgagg

SEQ ID NO: 2690223 - DNA, 25 bp, Homo sapien
taaaaagtagaccttgtagagatga

SEQ ID NO: 2690224 - DNA, 25 bp, Homo sapien
cctgtaggttgacgttttgtaatag

SEQ ID NO: 2690225 - DNA, 25 bp, Homo sapien
aggttgacgttttgtaatagtgatg

SEQ ID NO: 2690226 - DNA, 25 bp, Homo sapien
gatccctgtaggttgacgttttgta

SEQ ID NO: 2690227 - DNA, 25 bp, Homo sapien
ttcattgatccctgtaggttgacgt

SEQ ID NO: 2690228 - DNA, 25 bp, Homo sapien
cttaacatactggaaattgcctaac

SEQ ID NO: 2690229 - DNA, 25 bp, Homo sapien
catactggaaattgcctaacttaat

SEQ ID NO: 2690230 - DNA, 25 bp, Homo sapien
aacatactggaaattgcctaactta

SEQ ID NO: 2690231 - DNA, 25 bp, Homo sapien
ttaacatactggaaattgcctaact

SEQ ID NO: 2690232 - DNA, 25 bp, Homo sapien
tttcttgaatctctccatacacagg

SEQ ID NO: 2690233 - DNA, 25 bp, Homo sapien
actggaaattgcctaacttaatcat

SEQ ID NO: 2690234 - DNA, 25 bp, Homo sapien
taagttaggcaatttccagtatgtt

SEQ ID NO: 2690235 - DNA, 25 bp, Homo sapien
atgattaagttaggcaatttccagt

SEQ ID NO: 2690236 - DNA, 25 bp, Homo sapien
agttaggcaatttccagtatgttaa

SEQ ID NO: 2690237 - DNA, 25 bp, Homo sapien
cctgtgtatggagagattcaagaaa

SEQ ID NO: 2690238 - DNA, 25 bp, Homo sapien
gttaggcaatttccagtatgttaag

SEQ ID NO: 2690239 - DNA, 25 bp, Homo sapien
gattaagttaggcaatttccagtat

SEQ ID NO: 2690240 - DNA, 25 bp, Homo sapien
ggtcaggaaatcgaaactatcctga

SEQ ID NO: 2690241 - DNA, 25 bp, Homo sapien
gaaatcgaaactatcctgactaaca

SEQ ID NO: 2690242 - DNA, 25 bp, Homo sapien
cgcctgttgtcccactactcgggag

SEQ ID NO: 2690243 - DNA, 25 bp, Homo sapien
ggaaatcgaaactatcctgactaac

SEQ ID NO: 2690244 - DNA, 25 bp, Homo sapien
aatcgaaactatcctgactaacatg

SEQ ID NO: 2690245 - DNA, 25 bp, Homo sapien
caggaaatcgaaactatcctgacta

SEQ ID NO: 2690246 - DNA, 25 bp, Homo sapien
tagtcaggatagtttcgatttcctg

SEQ ID NO: 2690247 - DNA, 25 bp, Homo sapien
ctcccgagtagtgggacaacaggcg

SEQ ID NO: 2690248 - DNA, 25 bp, Homo sapien
tcaggatagtttcgatttcctgacc

SEQ ID NO: 2690249 - DNA, 25 bp, Homo sapien
tgttagtcaggatagtttcgatttc

SEQ ID NO: 2690250 - DNA, 25 bp, Homo sapien
gttagtcaggatagtttcgatttcc

SEQ ID NO: 2690251 - DNA, 25 bp, Homo sapien
catgttagtcaggatagtttcgatt

SEQ ID NO: 2690252 - DNA, 25 bp, Homo sapien
tgtagtcgcgttactaatgcgccac

SEQ ID NO: 2690253 - DNA, 25 bp, Homo sapien
cgctacctccagagcagtcgagtag

SEQ ID NO: 2690254 - DNA, 25 bp, Homo sapien
gaatcactaggcagcatctcccttt

SEQ ID NO: 2690255 - DNA, 25 bp, Homo sapien
gcctctcagcaaccaatcaaagact

SEQ ID NO: 2690256 - DNA, 25 bp, Homo sapien
acaggtagtctaacatgggagaggc

SEQ ID NO: 2690257 - DNA, 25 bp, Homo sapien
aaactatcactcaaagacaagggca

SEQ ID NO: 2690258 - DNA, 25 bp, Homo sapien
caacatttgtgcagccagactagaa

SEQ ID NO: 2690259 - DNA, 25 bp, Homo sapien
tagcaccactgtaagaagacaatgg

SEQ ID NO: 2690260 - DNA, 25 bp, Homo sapien
cctgtgcagtgttttaaagagctgt

SEQ ID NO: 2690261 - DNA, 25 bp, Homo sapien
taaaaacttgttgtctggtcctgtg

SEQ ID NO: 2690262 - DNA, 25 bp, Homo sapien
aaaacttgttgtctggtcctgtgca

SEQ ID NO: 2690263 - DNA, 25 bp, Homo sapien
tctggtcctgtgcagtgttttaaag

SEQ ID NO: 2690264 - DNA, 25 bp, Homo sapien
acaggtgtgtgccaccatgcccggc

SEQ ID NO: 2690265 - DNA, 25 bp, Homo sapien
ttctcctccctcaagggattacagg

SEQ ID NO: 2690266 - DNA, 25 bp, Homo sapien
cctcaagtaatttgcctgcctctgc

SEQ ID NO: 2690267 - DNA, 25 bp, Homo sapien
gagccactgagcccagcctatgttg

SEQ ID NO: 2690268 - DNA, 25 bp, Homo sapien
aattcttcatttatctttattctgg

SEQ ID NO: 2690269 - DNA, 25 bp, Homo sapien
ctattttcttagaagaagtttcact

SEQ ID NO: 2690270 - DNA, 25 bp, Homo sapien
ctcttctattttcttagaagaagtt

SEQ ID NO: 2690271 - DNA, 25 bp, Homo sapien
gaattcttcatttatctttattctg

SEQ ID NO: 2690272 - DNA, 25 bp, Homo sapien
gccactggaggtacataaactgagt

SEQ ID NO: 2690273 - DNA, 25 bp, Homo sapien
caggaggcccattaagaggctgtta

SEQ ID NO: 2690274 - DNA, 25 bp, Homo sapien
ttggactcggagataattacaggga

SEQ ID NO: 2690275 - DNA, 25 bp, Homo sapien
tgagtcaagtcctagatataaggct

SEQ ID NO: 2690276 - DNA, 25 bp, Homo sapien
cagtgtattgtggtctgtgtgaata

SEQ ID NO: 2690277 - DNA, 25 bp, Homo sapien
caacatcagaacctattttcattag

SEQ ID NO: 2690278 - DNA, 25 bp, Homo sapien
taccttgtataacagatgttctgag

SEQ ID NO: 2690279 - DNA, 25 bp, Homo sapien
gtaataattcaacatcagaacctat

SEQ ID NO: 2690280 - DNA, 25 bp, Homo sapien
tacgtgacagtatagacactgctaa

SEQ ID NO: 2690281 - DNA, 25 bp, Homo sapien
tctacgtgacagtatagacactgct

SEQ ID NO: 2690282 - DNA, 25 bp, Homo sapien
tcttgtcatttctacgtgacagtat

SEQ ID NO: 2690283 - DNA, 25 bp, Homo sapien
catttctacgtgacagtatagacac

SEQ ID NO: 2690284 - DNA, 25 bp, Homo sapien
gcttctgagttggtgcatcacaata

SEQ ID NO: 2690285 - DNA, 25 bp, Homo sapien
gagttggtgcatcacaatatggcac

SEQ ID NO: 2690286 - DNA, 25 bp, Homo sapien
ggtgcatcacaatatggcacatttt

SEQ ID NO: 2690287 - DNA, 25 bp, Homo sapien
attgcttctgagttggtgcatcaca

SEQ ID NO: 2690288 - DNA, 25 bp, Homo sapien
tgttagatggtagaatgccaggacc

SEQ ID NO: 2690289 - DNA, 25 bp, Homo sapien
taaaacgatgagaatgtagccaccg

SEQ ID NO: 2690290 - DNA, 25 bp, Homo sapien
cagcgcccgggcctatatcaatata

SEQ ID NO: 2690291 - DNA, 25 bp, Homo sapien
caaaggccactttctgtagagagct

SEQ ID NO: 2690292 - DNA, 25 bp, Homo sapien
tgattataagaataggcagggtgca

SEQ ID NO: 2690293 - DNA, 25 bp, Homo sapien
tatgattataagaataggcagggtg

SEQ ID NO: 2690294 - DNA, 25 bp, Homo sapien
aatatatgattataagaataggcag

SEQ ID NO: 2690295 - DNA, 25 bp, Homo sapien
tatatgattataagaataggcaggg

SEQ ID NO: 2690296 - DNA, 25 bp, Homo sapien
aggtgtgtatcaccatgtcctgcta

SEQ ID NO: 2690297 - DNA, 25 bp, Homo sapien
attttgcatttttaatagagatggg

SEQ ID NO: 2690298 - DNA, 25 bp, Homo sapien
tacaggtgtgtatcaccatgtcctg

SEQ ID NO: 2690299 - DNA, 25 bp, Homo sapien
ttacaggtgtgtatcaccatgtcct

SEQ ID NO: 2690300 - DNA, 25 bp, Homo sapien
tatatttgggcaaccccttgtgtga

SEQ ID NO: 2690301 - DNA, 25 bp, Homo sapien
catataccccactttcactagatct

SEQ ID NO: 2690302 - DNA, 25 bp, Homo sapien
taaagctggttatggtggtatgcac

SEQ ID NO: 2690303 - DNA, 25 bp, Homo sapien
tcactagatctcaatagtcaaagca

SEQ ID NO: 2690304 - DNA, 25 bp, Homo sapien
caaatctgactctcctgctatatac

SEQ ID NO: 2690305 - DNA, 25 bp, Homo sapien
tctaacttccgctaaaagattgtgt

SEQ ID NO: 2690306 - DNA, 25 bp, Homo sapien
ttgtgttagaaagtcctgctgggcc

SEQ ID NO: 2690307 - DNA, 25 bp, Homo sapien
tgagatgcatctacaggaaaataag

SEQ ID NO: 2690308 - DNA, 25 bp, Homo sapien
gcttattttagaagtctattcccag

SEQ ID NO: 2690309 - DNA, 25 bp, Homo sapien
gcatgtatccactttggcttcagaa

SEQ ID NO: 2690310 - DNA, 25 bp, Homo sapien
caattgtcctatctaggaacatagt

SEQ ID NO: 2690311 - DNA, 25 bp, Homo sapien
tccatttctgattggtgacaactga

SEQ ID NO: 2690312 - DNA, 25 bp, Homo sapien
ggtggctcaagtctctactctcagc

SEQ ID NO: 2690313 - DNA, 25 bp, Homo sapien
caaaaaggccctatagtcaggtgtg

SEQ ID NO: 2690314 - DNA, 25 bp, Homo sapien
tccagagtataaataagccaccttt

SEQ ID NO: 2690315 - DNA, 25 bp, Homo sapien
gacataggtggcaaataactttctc

SEQ ID NO: 2690316 - DNA, 25 bp, Homo sapien
atttgaatttctggattagggatac

SEQ ID NO: 2690317 - DNA, 25 bp, Homo sapien
tgttggtgggtcagaaagttttgga

SEQ ID NO: 2690318 - DNA, 25 bp, Homo sapien
gaatttctggattagggatacccaa

SEQ ID NO: 2690319 - DNA, 25 bp, Homo sapien
ttgaatttctggattagggataccc

SEQ ID NO: 2690320 - DNA, 25 bp, Homo sapien
gaaaatctgaaatcttccagtggcc

SEQ ID NO: 2690321 - DNA, 25 bp, Homo sapien
aaatctgaaatcttccagtggccat

SEQ ID NO: 2690322 - DNA, 25 bp, Homo sapien
atctgaaatcttccagtggccattt

SEQ ID NO: 2690323 - DNA, 25 bp, Homo sapien
tgagcactccaaatctgaaaatctg

SEQ ID NO: 2690324 - DNA, 25 bp, Homo sapien
aatgtaacaactatcaaatgtggga

SEQ ID NO: 2690325 - DNA, 25 bp, Homo sapien
taagtgaatttctagcaacacctgc

SEQ ID NO: 2690326 - DNA, 25 bp, Homo sapien
aacaatatttaaacgtgcaggagta

SEQ ID NO: 2690327 - DNA, 25 bp, Homo sapien
aatgaacatccgttttctgaaatgc

SEQ ID NO: 2690328 - DNA, 25 bp, Homo sapien
gccaaattatggctaaatcgccaaa

SEQ ID NO: 2690329 - DNA, 25 bp, Homo sapien
tgcagaatacatggagcataacgcc

SEQ ID NO: 2690330 - DNA, 25 bp, Homo sapien
cacaagtaagggaatgatatccaca

SEQ ID NO: 2690331 - DNA, 25 bp, Homo sapien
gttttttgaatacatacacacttgg

SEQ ID NO: 2690332 - DNA, 25 bp, Homo sapien
cctcagtaagatgaagtagaccaag

SEQ ID NO: 2690333 - DNA, 25 bp, Homo sapien
attgatgcacaacataaatcctcag

SEQ ID NO: 2690334 - DNA, 25 bp, Homo sapien
aactattattcaggagtaagggtga

SEQ ID NO: 2690335 - DNA, 25 bp, Homo sapien
ggagccggcttatcacagggcaaga

SEQ ID NO: 2690336 - DNA, 25 bp, Homo sapien
tttctaagagttgccccactgatgg

SEQ ID NO: 2690337 - DNA, 25 bp, Homo sapien
tcctgagagtgttggctgcagaagc

SEQ ID NO: 2690338 - DNA, 25 bp, Homo sapien
gatgtccccttcagaaacaggcatt

SEQ ID NO: 2690339 - DNA, 25 bp, Homo sapien
gaagctgacagctatggctctttct

SEQ ID NO: 2690340 - DNA, 25 bp, Homo sapien
catggtaagccaccaaacactgtta

SEQ ID NO: 2690341 - DNA, 25 bp, Homo sapien
taagtcccagtgaaccatggtaagc

SEQ ID NO: 2690342 - DNA, 25 bp, Homo sapien
gaggatttactttcagccaagtgag

SEQ ID NO: 2690343 - DNA, 25 bp, Homo sapien
taatatgcaggagaatttaggcacc

SEQ ID NO: 2690344 - DNA, 25 bp, Homo sapien
ttcattctctgacagaggtcctgca

SEQ ID NO: 2690345 - DNA, 25 bp, Homo sapien
gtttcattctctgacagaggtcctg

SEQ ID NO: 2690346 - DNA, 25 bp, Homo sapien
cattctctgacagaggtcctgcagc

SEQ ID NO: 2690347 - DNA, 25 bp, Homo sapien
tcattctctgacagaggtcctgcag

SEQ ID NO: 2690348 - DNA, 25 bp, Homo sapien
tgtgatccaattgcattgcagcccc

SEQ ID NO: 2690349 - DNA, 25 bp, Homo sapien
tatgtattgcacacctctcgtggtg

SEQ ID NO: 2690350 - DNA, 25 bp, Homo sapien
gctagcttcaatacatagcctgtga

SEQ ID NO: 2690351 - DNA, 25 bp, Homo sapien
taaattagggtacatgcagcttggc

SEQ ID NO: 2690352 - DNA, 25 bp, Homo sapien
gataactacattcaaagtagtatga

SEQ ID NO: 2690353 - DNA, 25 bp, Homo sapien
acagctttacagttgaatgacaaga

SEQ ID NO: 2690354 - DNA, 25 bp, Homo sapien
aaatgggatggtatgagttctacat

SEQ ID NO: 2690355 - DNA, 25 bp, Homo sapien
gccaccacaacgtgccagacacaat

SEQ ID NO: 2690356 - DNA, 25 bp, Homo sapien
tacctgtgaggtctgttgtgagaaa

SEQ ID NO: 2690357 - DNA, 25 bp, Homo sapien
tcgttagccttagccttggaacagg

SEQ ID NO: 2690358 - DNA, 25 bp, Homo sapien
acatggtgtacggagtcagagtctg

SEQ ID NO: 2690359 - DNA, 25 bp, Homo sapien
tctgctgcataattagttaggtgac

SEQ ID NO: 2690360 - DNA, 25 bp, Homo sapien
gtcgcctttgtctcagccgcccgct

SEQ ID NO: 2690361 - DNA, 25 bp, Homo sapien
ctgcgctccccagcgcgctcgcagc

SEQ ID NO: 2690362 - DNA, 25 bp, Homo sapien
caggctcgcgcgcgggttgggcgga

SEQ ID NO: 2690363 - DNA, 25 bp, Homo sapien
ccgccccaacgcctgcagctgcgct

SEQ ID NO: 2690364 - DNA, 25 bp, Homo sapien
cgagagggcgaggcgtggcggccga

SEQ ID NO: 2690365 - DNA, 25 bp, Homo sapien
agagccctcagggacgagggttcgg

SEQ ID NO: 2690366 - DNA, 25 bp, Homo sapien
gagggcgaggcgtggcggccgacgc

SEQ ID NO: 2690367 - DNA, 25 bp, Homo sapien
gaccccagtggaattaatgaaattg

SEQ ID NO: 2690368 - DNA, 25 bp, Homo sapien
atcctcaataaagcatgggcagttc

SEQ ID NO: 2690369 - DNA, 25 bp, Homo sapien
tctgatgatttggagggtctactgc

SEQ ID NO: 2690370 - DNA, 25 bp, Homo sapien
aagaaaaatctcaccctgggcaaag

SEQ ID NO: 2690371 - DNA, 25 bp, Homo sapien
tacagacttagcctatcgcacctgg

SEQ ID NO: 2690372 - DNA, 25 bp, Homo sapien
aattgcagttttagtatgtacaagc

SEQ ID NO: 2690373 - DNA, 25 bp, Homo sapien
ttgtcttgacataatgaaataccag

SEQ ID NO: 2690374 - DNA, 25 bp, Homo sapien
gacttagcctatcgcacctggccaa

SEQ ID NO: 2690375 - DNA, 25 bp, Homo sapien
caaaggaagtccctactgtcataaa

SEQ ID NO: 2690376 - DNA, 25 bp, Homo sapien
taatttcaaggactcacaaatggca

SEQ ID NO: 2690377 - DNA, 25 bp, Homo sapien
tattgtttcgggcattgtagacagc

SEQ ID NO: 2690378 - DNA, 25 bp, Homo sapien
caaccagtgtaaaagctctaagcca

SEQ ID NO: 2690379 - DNA, 25 bp, Homo sapien
gagagaggcacaatcagctaaccag

SEQ ID NO: 2690380 - DNA, 25 bp, Homo sapien
agtctgccatgctgtaaatgtccca

SEQ ID NO: 2690381 - DNA, 25 bp, Homo sapien
tcactcacaaggaagaataggccag

SEQ ID NO: 2690382 - DNA, 25 bp, Homo sapien
cactgccagtggtctgctgataaat

SEQ ID NO: 2690383 - DNA, 25 bp, Homo sapien
gaaacgtaaaactatgcagccactt

SEQ ID NO: 2690384 - DNA, 25 bp, Homo sapien
tataactaatgcttcactgaatact

SEQ ID NO: 2690385 - DNA, 25 bp, Homo sapien
ggccacatatttcctacacggctga

SEQ ID NO: 2690386 - DNA, 25 bp, Homo sapien
cctacacggctgatggaaacgtaaa

SEQ ID NO: 2690387 - DNA, 25 bp, Homo sapien
agcgcacaccaccataggcaacctc

SEQ ID NO: 2690388 - DNA, 25 bp, Homo sapien
aaaaggaatatatgatcattgtaaa

SEQ ID NO: 2690389 - DNA, 25 bp, Homo sapien
ccaggctagactcaagtcctttggc

SEQ ID NO: 2690390 - DNA, 25 bp, Homo sapien
taggcaacctctattatcatttaaa

SEQ ID NO: 2690391 - DNA, 25 bp, Homo sapien
ccaccatgcctagctaattttttat

SEQ ID NO: 2690392 - DNA, 25 bp, Homo sapien
gagtagttgagacaacaggcatgcg

SEQ ID NO: 2690393 - DNA, 25 bp, Homo sapien
tttatttagtagagatggggtttca

SEQ ID NO: 2690394 - DNA, 25 bp, Homo sapien
cccgagtagttgagacaacaggcat

SEQ ID NO: 2690395 - DNA, 25 bp, Homo sapien
aattatatggtcaccctaatttata

SEQ ID NO: 2690396 - DNA, 25 bp, Homo sapien
gacaggtttcaatgtgtaagccagg

SEQ ID NO: 2690397 - DNA, 25 bp, Homo sapien
agacaggtttcaatgtgtaagccag

SEQ ID NO: 2690398 - DNA, 25 bp, Homo sapien
gcgccaggcctacaacataattatt

SEQ ID NO: 2690399 - DNA, 25 bp, Homo sapien
gaccgcagattcactgtcagtagtt

SEQ ID NO: 2690400 - DNA, 25 bp, Homo sapien
cacattcagctacttctgggttaag

SEQ ID NO: 2690401 - DNA, 25 bp, Homo sapien
tcagcaatggagtaacacattcagc

SEQ ID NO: 2690402 - DNA, 25 bp, Homo sapien
tattatgcatacagatgaccgcaga

SEQ ID NO: 2690403 - DNA, 25 bp, Homo sapien
ctggttctgacggtaaagttggaca

SEQ ID NO: 2690404 - DNA, 25 bp, Homo sapien
ctcaaacataaaggagagaacctgg

SEQ ID NO: 2690405 - DNA, 25 bp, Homo sapien
cataatcctagagggaagcagtgtg

SEQ ID NO: 2690406 - DNA, 25 bp, Homo sapien
cattgtctggagtagaactaaccac

SEQ ID NO: 2690407 - DNA, 25 bp, Homo sapien
tagtactttcttgcaggcactgtcc

SEQ ID NO: 2690408 - DNA, 25 bp, Homo sapien
tcaccggacgtgtaaataaagctgc

SEQ ID NO: 2690409 - DNA, 25 bp, Homo sapien
aaatgcccctggagagtgattcccc

SEQ ID NO: 2690410 - DNA, 25 bp, Homo sapien
tggaaagaccatggcgcagacatag

SEQ ID NO: 2690411 - DNA, 25 bp, Homo sapien
tcaggtataggcacgggcaaggact

SEQ ID NO: 2690412 - DNA, 25 bp, Homo sapien
attcaggtataggcacgggcaagga

SEQ ID NO: 2690413 - DNA, 25 bp, Homo sapien
ttcaggtataggcacgggcaaggac

SEQ ID NO: 2690414 - DNA, 25 bp, Homo sapien
aggaccacatagattcacagccaaa

SEQ ID NO: 2690415 - DNA, 25 bp, Homo sapien
ccaggaccacatagattcacagcca

SEQ ID NO: 2690416 - DNA, 25 bp, Homo sapien
tacaaggaggaactgttaccattcc

SEQ ID NO: 2690417 - DNA, 25 bp, Homo sapien
ttctaccagaggtacaaggaggaac

SEQ ID NO: 2690418 - DNA, 25 bp, Homo sapien
caggagttggtgtttttgaaaagat

SEQ ID NO: 2690419 - DNA, 25 bp, Homo sapien
aatgaatccaggagttggtgttttt

SEQ ID NO: 2690420 - DNA, 25 bp, Homo sapien
agactaataaagaagaaaagagaga

SEQ ID NO: 2690421 - DNA, 25 bp, Homo sapien
caacaaaattgatagaccgctagca

SEQ ID NO: 2690422 - DNA, 25 bp, Homo sapien
cttgacacctcatgtggccgggtac

SEQ ID NO: 2690423 - DNA, 25 bp, Homo sapien
tactctgtgctaacggaggaagttc

SEQ ID NO: 2690424 - DNA, 25 bp, Homo sapien
aatgactgacgagctgacagaggaa

SEQ ID NO: 2690425 - DNA, 25 bp, Homo sapien
gggcagacttgacacctcatgtggc

SEQ ID NO: 2690426 - DNA, 25 bp, Homo sapien
agtggctggtggtaccagttgctcc

SEQ ID NO: 2690427 - DNA, 25 bp, Homo sapien
tggctggtggtaccagttgctcctt

SEQ ID NO: 2690428 - DNA, 25 bp, Homo sapien
gctggtggtaccagttgctcctttc

SEQ ID NO: 2690429 - DNA, 25 bp, Homo sapien
cagtggctggtggtaccagttgctc

SEQ ID NO: 2690430 - DNA, 25 bp, Homo sapien
ttgctgctgacaacttaatgaagtt

SEQ ID NO: 2690431 - DNA, 25 bp, Homo sapien
gttttgctgctgacaacttaatgaa

SEQ ID NO: 2690432 - DNA, 25 bp, Homo sapien
gctgacaacttaatgaagttaaact

SEQ ID NO: 2690433 - DNA, 25 bp, Homo sapien
ctgacaacttaatgaagttaaactc

SEQ ID NO: 2690434 - DNA, 25 bp, Homo sapien
ctgccactaataactatactaatag

SEQ ID NO: 2690435 - DNA, 25 bp, Homo sapien
gaagtattgaattcttcacaagaaa

SEQ ID NO: 2690436 - DNA, 25 bp, Homo sapien
cttcaaggaagtattgaattcttca

SEQ ID NO: 2690437 - DNA, 25 bp, Homo sapien
cactgccactaataactatactaat

SEQ ID NO: 2690438 - DNA, 25 bp, Homo sapien
gaaggttccaaatctcaactcggga

SEQ ID NO: 2690439 - DNA, 25 bp, Homo sapien
ggaagtcaagtatcttacacagtcg

SEQ ID NO: 2690440 - DNA, 25 bp, Homo sapien
taaatgagcaccaatgaaggttcca

SEQ ID NO: 2690441 - DNA, 25 bp, Homo sapien
tacgatgatgtccagtgatgccaag

SEQ ID NO: 2690442 - DNA, 25 bp, Homo sapien
gaggctgttctgcaatacagcagtt

SEQ ID NO: 2690443 - DNA, 25 bp, Homo sapien
gcagttgaaacacaaccagaattca

SEQ ID NO: 2690444 - DNA, 25 bp, Homo sapien
gctgttctgcaatacagcagttgaa

SEQ ID NO: 2690445 - DNA, 25 bp, Homo sapien
tgcaatacagcagttgaaacacaac

SEQ ID NO: 2690446 - DNA, 25 bp, Homo sapien
gaattcactatagttctgtcaacag

SEQ ID NO: 2690447 - DNA, 25 bp, Homo sapien
tctgatgctcaataagttggtgaag

SEQ ID NO: 2690448 - DNA, 25 bp, Homo sapien
aagctaccttagaagctgaccagta

SEQ ID NO: 2690449 - DNA, 25 bp, Homo sapien
ctcaataagttggtgaagaattcac

SEQ ID NO: 2690450 - DNA, 25 bp, Homo sapien
tacttttgctgatgtcacattttaa

SEQ ID NO: 2690451 - DNA, 25 bp, Homo sapien
ttgctgatgtcacattttaagtaac

SEQ ID NO: 2690452 - DNA, 25 bp, Homo sapien
gcttgcttcatcttgaggtatgtag

SEQ ID NO: 2690453 - DNA, 25 bp, Homo sapien
ggtcctactatgttacaccccaggc

SEQ ID NO: 2690454 - DNA, 25 bp, Homo sapien
acatggatgtatgttggctactgac

SEQ ID NO: 2690455 - DNA, 25 bp, Homo sapien
cctagtaagtcatatataggctgac

SEQ ID NO: 2690456 - DNA, 25 bp, Homo sapien
taggctgacatggatgtatgttggc

SEQ ID NO: 2690457 - DNA, 25 bp, Homo sapien
aaactaagccctcctagtaagtcat

SEQ ID NO: 2690458 - DNA, 25 bp, Homo sapien
gctccatgctctgactactatgatc

SEQ ID NO: 2690459 - DNA, 25 bp, Homo sapien
acatggaatgtgctcacccaaaggg

SEQ ID NO: 2690460 - DNA, 25 bp, Homo sapien
tatgatcaatggtctacaacatgga

SEQ ID NO: 2690461 - DNA, 25 bp, Homo sapien
ggaatgtgggaggaaaatactagac

SEQ ID NO: 2690462 - DNA, 25 bp, Homo sapien
aattcaaatccggatctgtctgaca

SEQ ID NO: 2690463 - DNA, 25 bp, Homo sapien
tcttgaatcctatgagacaggtgtc

SEQ ID NO: 2690464 - DNA, 25 bp, Homo sapien
agagaaccagccctcacatgaaaag

SEQ ID NO: 2690465 - DNA, 25 bp, Homo sapien
caaaatattgctggtaagagaccag

SEQ ID NO: 2690466 - DNA, 25 bp, Homo sapien
ggctctctagaaaaggacctgctga

SEQ ID NO: 2690467 - DNA, 25 bp, Homo sapien
gaagagttcgaatctagctgcaggc

SEQ ID NO: 2690468 - DNA, 25 bp, Homo sapien
tccaaacgaggcttagtgtgcacgg

SEQ ID NO: 2690469 - DNA, 25 bp, Homo sapien
tgtacgcagttaggcagtggctcac

SEQ ID NO: 2690470 - DNA, 25 bp, Homo sapien
aagtcaaagtacagaaaggaaagat

SEQ ID NO: 2690471 - DNA, 25 bp, Homo sapien
aagtacagaaaggaaagatattttg

SEQ ID NO: 2690472 - DNA, 25 bp, Homo sapien
tcaaagtacagaaaggaaagatatt

SEQ ID NO: 2690473 - DNA, 25 bp, Homo sapien
ctaagtcaaagtacagaaaggaaag

SEQ ID NO: 2690474 - DNA, 25 bp, Homo sapien
ccagaggagatgagagtcacaccat

SEQ ID NO: 2690475 - DNA, 25 bp, Homo sapien
cagaggagatgagagtcacaccata

SEQ ID NO: 2690476 - DNA, 25 bp, Homo sapien
gaggagatgagagtcacaccataga

SEQ ID NO: 2690477 - DNA, 25 bp, Homo sapien
agaggagatgagagtcacaccatag

SEQ ID NO: 2690478 - DNA, 25 bp, Homo sapien
tgtactgtatcttctacggtgggaa

SEQ ID NO: 2690479 - DNA, 25 bp, Homo sapien
cttctatacatgaacttgtactgta

SEQ ID NO: 2690480 - DNA, 25 bp, Homo sapien
ctgtatcttctacggtgggaaaaat

SEQ ID NO: 2690481 - DNA, 25 bp, Homo sapien
tactgtatcttctacggtgggaaaa

SEQ ID NO: 2690482 - DNA, 25 bp, Homo sapien
tagtaccttctatagcagtatatga

SEQ ID NO: 2690483 - DNA, 25 bp, Homo sapien
caaatctgggatcctctggcaaact

SEQ ID NO: 2690484 - DNA, 25 bp, Homo sapien
gagtacttataagataccaggcaca

SEQ ID NO: 2690485 - DNA, 25 bp, Homo sapien
gccatgaactcatttgctagtacct

SEQ ID NO: 2690486 - DNA, 25 bp, Homo sapien
tatagtcaaataataatagatgctg

SEQ ID NO: 2690487 - DNA, 25 bp, Homo sapien
tgacccaggacccccttactgagta

SEQ ID NO: 2690488 - DNA, 25 bp, Homo sapien
caggacccccttactgagtatatac

SEQ ID NO: 2690489 - DNA, 25 bp, Homo sapien
gtgaaaaacagaagtatcatttgac

SEQ ID NO: 2690490 - DNA, 25 bp, Homo sapien
ccaaactggagataagagactgaga

SEQ ID NO: 2690491 - DNA, 25 bp, Homo sapien
gatttggtaacagtgagagggagga

SEQ ID NO: 2690492 - DNA, 25 bp, Homo sapien
gccaagttaatgagatttcctagac

SEQ ID NO: 2690493 - DNA, 25 bp, Homo sapien
tttcagcagagagtgtgcaattcac

SEQ ID NO: 2690494 - DNA, 25 bp, Homo sapien
tgtcctgtgaacctgcagaagcaac

SEQ ID NO: 2690495 - DNA, 25 bp, Homo sapien
cactaggaggagtcttgatcaaccc

SEQ ID NO: 2690496 - DNA, 25 bp, Homo sapien
aattttctcagcatgtgggcaggac

SEQ ID NO: 2690497 - DNA, 25 bp, Homo sapien
cagaaaccatagtgtgctcaggcca

SEQ ID NO: 2690498 - DNA, 25 bp, Homo sapien
tggcacacggttatctgaacacagg

SEQ ID NO: 2690499 - DNA, 25 bp, Homo sapien
aaaagtagtagtctgctgaccccag

SEQ ID NO: 2690500 - DNA, 25 bp, Homo sapien
tactgaaacgctggcatgatcctga

SEQ ID NO: 2690501 - DNA, 25 bp, Homo sapien
tccagtaattctgcgtggcacacgg

SEQ ID NO: 2690502 - DNA, 25 bp, Homo sapien
ttctagctgggaactaaacctgttg

SEQ ID NO: 2690503 - DNA, 25 bp, Homo sapien
taccctcagtcactattattgttgg

SEQ ID NO: 2690504 - DNA, 25 bp, Homo sapien
cagtggtttgaatacactgtctgat

SEQ ID NO: 2690505 - DNA, 25 bp, Homo sapien
ggttattattcagattatacccaat

SEQ ID NO: 2690506 - DNA, 25 bp, Homo sapien
gatccaacatgagctgtatgcacaa

SEQ ID NO: 2690507 - DNA, 25 bp, Homo sapien
cattccactgaacaggtctcctgat

SEQ ID NO: 2690508 - DNA, 25 bp, Homo sapien
gggctctccaatcatacttctgtca

SEQ ID NO: 2690509 - DNA, 25 bp, Homo sapien
tatgcacaaagtttgtgggctctcc

SEQ ID NO: 2690510 - DNA, 25 bp, Homo sapien
ctgcatgtcccaccaacatacttac

SEQ ID NO: 2690511 - DNA, 25 bp, Homo sapien
gacaaacgtcgttgctgtatccagg

SEQ ID NO: 2690512 - DNA, 25 bp, Homo sapien
ctttccggcaaggttcaaatgtcat

SEQ ID NO: 2690513 - DNA, 25 bp, Homo sapien
cactctatgttgatgcaggaaacaa

SEQ ID NO: 2690514 - DNA, 25 bp, Homo sapien
tgcttacctagtaactgcagtgaca

SEQ ID NO: 2690515 - DNA, 25 bp, Homo sapien
gacattggcaggcattccacctcca

SEQ ID NO: 2690516 - DNA, 25 bp, Homo sapien
ccttcgtatccacgagctgcatctg

SEQ ID NO: 2690517 - DNA, 25 bp, Homo sapien
tatcccgccttcgtatccacgagct

SEQ ID NO: 2690518 - DNA, 25 bp, Homo sapien
cctccataacctcccttggactgca

SEQ ID NO: 2690519 - DNA, 25 bp, Homo sapien
gaatcctccccaaccagatgtttta

SEQ ID NO: 2690520 - DNA, 25 bp, Homo sapien
tttaaaggacacataagaagcatct

SEQ ID NO: 2690521 - DNA, 25 bp, Homo sapien
tatttactattattggcctggccat

SEQ ID NO: 2690522 - DNA, 25 bp, Homo sapien
gctcggcctcaatactcaaaataat

SEQ ID NO: 2690523 - DNA, 25 bp, Homo sapien
gcaatcacaggacaaaaaaaaatta

SEQ ID NO: 2690524 - DNA, 25 bp, Homo sapien
agaatagtggacagagaaaatatag

SEQ ID NO: 2690525 - DNA, 25 bp, Homo sapien
aattacagaatagtggacagagaaa

SEQ ID NO: 2690526 - DNA, 25 bp, Homo sapien
aaaaaattacagaatagtggacaga

SEQ ID NO: 2690527 - DNA, 25 bp, Homo sapien
tctcactggaataatcacgacaggg

SEQ ID NO: 2690528 - DNA, 25 bp, Homo sapien
gaaatgcaggattcgtctgacagta

SEQ ID NO: 2690529 - DNA, 25 bp, Homo sapien
cacgacagggtggacaaggtgccat

SEQ ID NO: 2690530 - DNA, 25 bp, Homo sapien
catgagtccaaaggcatgcatgcca

SEQ ID NO: 2690531 - DNA, 25 bp, Homo sapien
acttggtgccacagctaaactttat

SEQ ID NO: 2690532 - DNA, 25 bp, Homo sapien
acttcataaagcatgcagatatcta

SEQ ID NO: 2690533 - DNA, 25 bp, Homo sapien
taatttctggcatcccatgggctct

SEQ ID NO: 2690534 - DNA, 25 bp, Homo sapien
catgggctcttaccgaagcaacaac

SEQ ID NO: 2690535 - DNA, 25 bp, Homo sapien
tacaaaattcgtgcaaggacaaaca

SEQ ID NO: 2690536 - DNA, 25 bp, Homo sapien
gcagttagtagtacaggccagaagt

SEQ ID NO: 2690537 - DNA, 25 bp, Homo sapien
tggaggagagtatgaccgcaacact

SEQ ID NO: 2690538 - DNA, 25 bp, Homo sapien
caataattcagccaggtcggtatgt

SEQ ID NO: 2690539 - DNA, 25 bp, Homo sapien
gaaatgttaatcctaccaaatgtag

SEQ ID NO: 2690540 - DNA, 25 bp, Homo sapien
tcttggactaaggtaaatgaaggca

SEQ ID NO: 2690541 - DNA, 25 bp, Homo sapien
tctggtgccccgctgtactgggtaa

SEQ ID NO: 2690542 - DNA, 25 bp, Homo sapien
gaagataaagtgatccctgttcctt

SEQ ID NO: 2690543 - DNA, 25 bp, Homo sapien
tgtctactccgaagatgcaaatgtt

SEQ ID NO: 2690544 - DNA, 25 bp, Homo sapien
ctgtgcttgggattgacacaaaggc

SEQ ID NO: 2690545 - DNA, 25 bp, Homo sapien
tgcaaaatgtctactccgaagatgc

SEQ ID NO: 2690546 - DNA, 25 bp, Homo sapien
cttgggattgacacaaaggctcaaa

SEQ ID NO: 2690547 - DNA, 25 bp, Homo sapien
caacacatgctggtcgttggagcag

SEQ ID NO: 2690548 - DNA, 25 bp, Homo sapien
tggcagctgcagagtagttataggc

SEQ ID NO: 2690549 - DNA, 25 bp, Homo sapien
tgagtcagggaaaaggatcacggct

SEQ ID NO: 2690550 - DNA, 25 bp, Homo sapien
ccaagaaactgaccgtgcctggctg

SEQ ID NO: 2690551 - DNA, 25 bp, Homo sapien
tgaatcaaaatcaatactttctttt

SEQ ID NO: 2690552 - DNA, 25 bp, Homo sapien
ttgaatcaaaatcaatactttcttt

SEQ ID NO: 2690553 - DNA, 25 bp, Homo sapien
tattgaatcaaaatcaatactttct

SEQ ID NO: 2690554 - DNA, 25 bp, Homo sapien
tttattgaatcaaaatcaatacttt

SEQ ID NO: 2690555 - DNA, 25 bp, Homo sapien
ggcaaaccagatacaacattaagat

SEQ ID NO: 2690556 - DNA, 25 bp, Homo sapien
tataaggtcccagatcaaacacttg

SEQ ID NO: 2690557 - DNA, 25 bp, Homo sapien
aacacttgatcttactcagggagta

SEQ ID NO: 2690558 - DNA, 25 bp, Homo sapien
gggtcaaaatgagcctagaggttgc

SEQ ID NO: 2690559 - DNA, 25 bp, Homo sapien
tctactgtgtccttcacagtagaat

SEQ ID NO: 2690560 - DNA, 25 bp, Homo sapien
cctctactgtgtccttcacagtaga

SEQ ID NO: 2690561 - DNA, 25 bp, Homo sapien
aatcacagattggactgcctgaccc

SEQ ID NO: 2690562 - DNA, 25 bp, Homo sapien
tgtaaaactcccgttaatcacagat

SEQ ID NO: 2690563 - DNA, 25 bp, Homo sapien
gagtcttcagaacaaaacgtccttg

SEQ ID NO: 2690564 - DNA, 25 bp, Homo sapien
tccaaagtctgagggaagtgccccc

SEQ ID NO: 2690565 - DNA, 25 bp, Homo sapien
ttattctgccatcttacttcattga

SEQ ID NO: 2690566 - DNA, 25 bp, Homo sapien
gaaatctggtaatcttcaaaagttg

SEQ ID NO: 2690567 - DNA, 25 bp, Homo sapien
ttaactgtgctgctgtctaatgtgg

SEQ ID NO: 2690568 - DNA, 25 bp, Homo sapien
taactgtgctgctgtctaatgtgga

SEQ ID NO: 2690569 - DNA, 25 bp, Homo sapien
tctaatgtggaatgtagtggcagat

SEQ ID NO: 2690570 - DNA, 25 bp, Homo sapien
gtctaatgtggaatgtagtggcaga

SEQ ID NO: 2690571 - DNA, 25 bp, Homo sapien
ggaaccctaatttccacagaatgaa

SEQ ID NO: 2690572 - DNA, 25 bp, Homo sapien
tctcatagcaccaggttgtgtctga

SEQ ID NO: 2690573 - DNA, 25 bp, Homo sapien
tatgctgcatcgaattgtaactgaa

SEQ ID NO: 2690574 - DNA, 25 bp, Homo sapien
gtctgacctgacataccctgcagct

SEQ ID NO: 2690575 - DNA, 25 bp, Homo sapien
gaattataagcatgaactaccgccc

SEQ ID NO: 2690576 - DNA, 25 bp, Homo sapien
aattataagcatgaactaccgcccc

SEQ ID NO: 2690577 - DNA, 25 bp, Homo sapien
aaaaaatatgatgcaatgaaactta

SEQ ID NO: 2690578 - DNA, 25 bp, Homo sapien
taaataagataaaactctagaacca

SEQ ID NO: 2690579 - DNA, 25 bp, Homo sapien
aataaaagtgggaatgaatttagag

SEQ ID NO: 2690580 - DNA, 25 bp, Homo sapien
tatgatgcaatgaaacttataaatt

SEQ ID NO: 2690581 - DNA, 25 bp, Homo sapien
gcttttcttgttcgctgttatgcca

SEQ ID NO: 2690582 - DNA, 25 bp, Homo sapien
tgttatgccaattgtcttcagccat

SEQ ID NO: 2690583 - DNA, 25 bp, Homo sapien
tcttgttcgctgttatgccaattgt

SEQ ID NO: 2690584 - DNA, 25 bp, Homo sapien
aaatggcttttcttgttcgctgtta

SEQ ID NO: 2690585 - DNA, 25 bp, Homo sapien
ctgagtgagttttgctggcttcttg

SEQ ID NO: 2690586 - DNA, 25 bp, Homo sapien
gagtgagttttgctggcttcttgtc

SEQ ID NO: 2690587 - DNA, 25 bp, Homo sapien
tctggaagcaggtttaatccttttc

SEQ ID NO: 2690588 - DNA, 25 bp, Homo sapien
gcttcttgtctttttctaggaattc

SEQ ID NO: 2690589 - DNA, 25 bp, Homo sapien
ggttgatgatgacggtttctctctc

SEQ ID NO: 2690590 - DNA, 25 bp, Homo sapien
tctattactccctaagggtggatca

SEQ ID NO: 2690591 - DNA, 25 bp, Homo sapien
tccctaagggtggatcatatttcat

SEQ ID NO: 2690592 - DNA, 25 bp, Homo sapien
ttgatgatgacggtttctctctcct

SEQ ID NO: 2690593 - DNA, 25 bp, Homo sapien
tgttcaaattcaggagattgtgaca

SEQ ID NO: 2690594 - DNA, 25 bp, Homo sapien
caaattcaggagattgtgacagttt

SEQ ID NO: 2690595 - DNA, 25 bp, Homo sapien
tcaggagattgtgacagttttttaa

SEQ ID NO: 2690596 - DNA, 25 bp, Homo sapien
tcaaattcaggagattgtgacagtt

SEQ ID NO: 2690597 - DNA, 25 bp, Homo sapien
tctaccacacatgcagttgcttcct

SEQ ID NO: 2690598 - DNA, 25 bp, Homo sapien
ttctaccacacatgcagttgcttcc

SEQ ID NO: 2690599 - DNA, 25 bp, Homo sapien
tacgcaaagcccaaggaatgagctg

SEQ ID NO: 2690600 - DNA, 25 bp, Homo sapien
tagatgtcttatgagattgttctgc

SEQ ID NO: 2690601 - DNA, 25 bp, Homo sapien
tttgttccaattggcatactctggg

SEQ ID NO: 2690602 - DNA, 25 bp, Homo sapien
acataatgcctacttctggtagatg

SEQ ID NO: 2690603 - DNA, 25 bp, Homo sapien
attgtagctctgtatagcacttgga

SEQ ID NO: 2690604 - DNA, 25 bp, Homo sapien
cacttggataatgtctgggtgtctc

SEQ ID NO: 2690605 - DNA, 25 bp, Homo sapien
gggtgtctccttaaccatcaaactg

SEQ ID NO: 2690606 - DNA, 25 bp, Homo sapien
gtatagcacttggataatgtctggg

SEQ ID NO: 2690607 - DNA, 25 bp, Homo sapien
caactagtattgtctataatgctga

SEQ ID NO: 2690608 - DNA, 25 bp, Homo sapien
cacttctcaattgttgcctttgtac

SEQ ID NO: 2690609 - DNA, 25 bp, Homo sapien
ccaaagcatcggcaaaaacaatact

SEQ ID NO: 2690610 - DNA, 25 bp, Homo sapien
gtatcaaccctcatgaacccatagg

SEQ ID NO: 2690611 - DNA, 25 bp, Homo sapien
agcaacagtgtctcatgatttaatg

SEQ ID NO: 2690612 - DNA, 25 bp, Homo sapien
taaacagcctgttaattataagaaa

SEQ ID NO: 2690613 - DNA, 25 bp, Homo sapien
tgttatgttatccacccaagtgtac

SEQ ID NO: 2690614 - DNA, 25 bp, Homo sapien
ggtacagagatctataaaaccttga

SEQ ID NO: 2690615 - DNA, 25 bp, Homo sapien
gtgagctgtggtcgcgctttgcact

SEQ ID NO: 2690616 - DNA, 25 bp, Homo sapien
gttaaaagggcaaattgtatgtgta

SEQ ID NO: 2690617 - DNA, 25 bp, Homo sapien
gaagctaatctttgatatgagccag

SEQ ID NO: 2690618 - DNA, 25 bp, Homo sapien
tatgtgtatttttgcacagttaaaa

SEQ ID NO: 2690619 - DNA, 25 bp, Homo sapien
aacagggatgtaggaggtgtctcca

SEQ ID NO: 2690620 - DNA, 25 bp, Homo sapien
aaccttctatgtgaaatcaataagc

SEQ ID NO: 2690621 - DNA, 25 bp, Homo sapien
tttactagaggtaaccttctatgtg

SEQ ID NO: 2690622 - DNA, 25 bp, Homo sapien
aagtagccatcaggcacaatggcgc

SEQ ID NO: 2690623 - DNA, 25 bp, Homo sapien
tctcagcactgacaagttgttgaac

SEQ ID NO: 2690624 - DNA, 25 bp, Homo sapien
gacaagttgttgaactttgttatca

SEQ ID NO: 2690625 - DNA, 25 bp, Homo sapien
gcactgacaagttgttgaactttgt

SEQ ID NO: 2690626 - DNA, 25 bp, Homo sapien
cttcaatctcagcactgacaagttg

SEQ ID NO: 2690627 - DNA, 25 bp, Homo sapien
caacattgccaacttcgggaggtcc

SEQ ID NO: 2690628 - DNA, 25 bp, Homo sapien
caaagttaatcgaagtgagtgctgt

SEQ ID NO: 2690629 - DNA, 25 bp, Homo sapien
tgatgagaggttccgtcagtgtctg

SEQ ID NO: 2690630 - DNA, 25 bp, Homo sapien
tacacacaggctcatgttatcagtg

SEQ ID NO: 2690631 - DNA, 25 bp, Homo sapien
taatcttggtgttatatactcatcc

SEQ ID NO: 2690632 - DNA, 25 bp, Homo sapien
tgtacttacgatctgcaatagctct

SEQ ID NO: 2690633 - DNA, 25 bp, Homo sapien
tgccatttggccacatgaacatata

SEQ ID NO: 2690634 - DNA, 25 bp, Homo sapien
ctttgatgatagacagagtttgctt

SEQ ID NO: 2690635 - DNA, 25 bp, Homo sapien
agattcttaaggagcgaggtgcagt

SEQ ID NO: 2690636 - DNA, 25 bp, Homo sapien
gcaggattgcttgaaagcttactca

SEQ ID NO: 2690637 - DNA, 25 bp, Homo sapien
gattgcttgaaagcttactcaaaga

SEQ ID NO: 2690638 - DNA, 25 bp, Homo sapien
aaagattcttaaggagcgaggtgca

SEQ ID NO: 2690639 - DNA, 25 bp, Homo sapien
gcagctcttttagttgtaatctgca

SEQ ID NO: 2690640 - DNA, 25 bp, Homo sapien
tgcatttgttacactggagctatgt

SEQ ID NO: 2690641 - DNA, 25 bp, Homo sapien
tctgggatgtgacctttggaagtat

SEQ ID NO: 2690642 - DNA, 25 bp, Homo sapien
gctatgttgatatggaagtaaggtg

SEQ ID NO: 2690643 - DNA, 25 bp, Homo sapien
aatccccatgctatcttaattacta

SEQ ID NO: 2690644 - DNA, 25 bp, Homo sapien
ccaatccccatgctatcttaattac

SEQ ID NO: 2690645 - DNA, 25 bp, Homo sapien
cccatgctatcttaattactatatc

SEQ ID NO: 2690646 - DNA, 25 bp, Homo sapien
tcccaatccccatgctatcttaatt

SEQ ID NO: 2690647 - DNA, 25 bp, Homo sapien
tccgcctgatcaggagcgcctcttt

SEQ ID NO: 2690648 - DNA, 25 bp, Homo sapien
tgcgatgtgctgtgtgggtagacta

SEQ ID NO: 2690649 - DNA, 25 bp, Homo sapien
tctaacagtcctctttcatgtgtat

SEQ ID NO: 2690650 - DNA, 25 bp, Homo sapien
tgtattttacgtttttgccatgtag

SEQ ID NO: 2690651 - DNA, 25 bp, Homo sapien
tcatcagattcggtgagaggttttc

SEQ ID NO: 2690652 - DNA, 25 bp, Homo sapien
tacttcatggctcttgcagctatgc

SEQ ID NO: 2690653 - DNA, 25 bp, Homo sapien
tatatgatcttcactcagattgagc

SEQ ID NO: 2690654 - DNA, 25 bp, Homo sapien
gctatgctgtgaaacctctgtgact

SEQ ID NO: 2690655 - DNA, 25 bp, Homo sapien
atttcaccaagtatagtgtcataga

SEQ ID NO: 2690656 - DNA, 25 bp, Homo sapien
ccaagtatagtgtcatagagcagta

SEQ ID NO: 2690657 - DNA, 25 bp, Homo sapien
tagtgtcatagagcagtataacagc

SEQ ID NO: 2690658 - DNA, 25 bp, Homo sapien
gtcatagagcagtataacagccatt

SEQ ID NO: 2690659 - DNA, 25 bp, Homo sapien
cattcattatctcttacagcttctt

SEQ ID NO: 2690660 - DNA, 25 bp, Homo sapien
tacattcattatctcttacagcttc

SEQ ID NO: 2690661 - DNA, 25 bp, Homo sapien
attcattatctcttacagcttcttc

SEQ ID NO: 2690662 - DNA, 25 bp, Homo sapien
acattcattatctcttacagcttct

SEQ ID NO: 2690663 - DNA, 25 bp, Homo sapien
gattaagcctttttgcattgcagca

SEQ ID NO: 2690664 - DNA, 25 bp, Homo sapien
cagacttcttggtatgtcatctgac

SEQ ID NO: 2690665 - DNA, 25 bp, Homo sapien
tcttgtggtttcagataaatatggt

SEQ ID NO: 2690666 - DNA, 25 bp, Homo sapien
catggagagccttttatttgagtta

SEQ ID NO: 2690667 - DNA, 25 bp, Homo sapien
tgtgaaatggtaggactggatagat

SEQ ID NO: 2690668 - DNA, 25 bp, Homo sapien
gtgaaatggtaggactggatagatg

SEQ ID NO: 2690669 - DNA, 25 bp, Homo sapien
ttgtgaaatggtaggactggataga

SEQ ID NO: 2690670 - DNA, 25 bp, Homo sapien
caagcatgtttttacgacaggacca

SEQ ID NO: 2690671 - DNA, 25 bp, Homo sapien
gaccatttttcccagcgattccagt

SEQ ID NO: 2690672 - DNA, 25 bp, Homo sapien
cgggcaccgtgtgttattccaagca

SEQ ID NO: 2690673 - DNA, 25 bp, Homo sapien
tgggacccttttagatgggcaccta

SEQ ID NO: 2690674 - DNA, 25 bp, Homo sapien
gggtgtcaacctgatcctgccatta

SEQ ID NO: 2690675 - DNA, 25 bp, Homo sapien
gccattatagggttgcctatcaacc

SEQ ID NO: 2690676 - DNA, 25 bp, Homo sapien
cacatttctagtggtgctaagatgg

SEQ ID NO: 2690677 - DNA, 25 bp, Homo sapien
gcatccattggtgatgattacagta

SEQ ID NO: 2690678 - DNA, 25 bp, Homo sapien
tcattcaatgagcaatttaagcaga

SEQ ID NO: 2690679 - DNA, 25 bp, Homo sapien
taagttttggaatcggttatgactc

SEQ ID NO: 2690680 - DNA, 25 bp, Homo sapien
tgtgttgcttgcctaaagttattca

SEQ ID NO: 2690681 - DNA, 25 bp, Homo sapien
tttaaacattgcaagggtggcctca

SEQ ID NO: 2690682 - DNA, 25 bp, Homo sapien
ttcctggcaccgagtagagttgggc

SEQ ID NO: 2690683 - DNA, 25 bp, Homo sapien
gctggattggacctcagccgccgta

SEQ ID NO: 2690684 - DNA, 25 bp, Homo sapien
gctgcgttccagctccgttggcgtt

SEQ ID NO: 2690685 - DNA, 25 bp, Homo sapien
agcaccgcggcctgagactttgggt

SEQ ID NO: 2690686 - DNA, 25 bp, Homo sapien
agccacgcgcgactctgctcctccg

SEQ ID NO: 2690687 - DNA, 25 bp, Homo sapien
ccccagccacgcgcgactctgctcc

SEQ ID NO: 2690688 - DNA, 25 bp, Homo sapien
ccagccacgcgcgactctgctcctc

SEQ ID NO: 2690689 - DNA, 25 bp, Homo sapien
tttgtttacgacctgcccccagcca

SEQ ID NO: 2690690 - DNA, 25 bp, Homo sapien
tcggtgttccgacccgagcggaagc

SEQ ID NO: 2690691 - DNA, 25 bp, Homo sapien
gccgcgccgagagcagcatctggtc

SEQ ID NO: 2690692 - DNA, 25 bp, Homo sapien
tgcgggttcaggtagggcgctgtgg

SEQ ID NO: 2690693 - DNA, 25 bp, Homo sapien
ccagattgcgggttcaggtagggcg

SEQ ID NO: 2690694 - DNA, 25 bp, Homo sapien
tcggttgcccgtggttccctacgca

SEQ ID NO: 2690695 - DNA, 25 bp, Homo sapien
ccctacgcaactctgtgggtgcggg

SEQ ID NO: 2690696 - DNA, 25 bp, Homo sapien
tctgatggtcgctgacagcttcaca

SEQ ID NO: 2690697 - DNA, 25 bp, Homo sapien
gctgacaaggaagagtcggttgccc

SEQ ID NO: 2690698 - DNA, 25 bp, Homo sapien
cccggtgtcagggttctaggcgcta

SEQ ID NO: 2690699 - DNA, 25 bp, Homo sapien
taggcgctagtacaaactgcccgca

SEQ ID NO: 2690700 - DNA, 25 bp, Homo sapien
tcttccaagagactaattcccggtg

SEQ ID NO: 2690701 - DNA, 25 bp, Homo sapien
ggtttcgaactacagagctaaagcg

SEQ ID NO: 2690702 - DNA, 25 bp, Homo sapien
tgggtaaatgctgaatctcggattt

SEQ ID NO: 2690703 - DNA, 25 bp, Homo sapien
ggtaaatgctgaatctcggattttc

SEQ ID NO: 2690704 - DNA, 25 bp, Homo sapien
ttagaagtcctctttgggtaaatgc

SEQ ID NO: 2690705 - DNA, 25 bp, Homo sapien
tctggttagaagtcctctttgggta

SEQ ID NO: 2690706 - DNA, 25 bp, Homo sapien
tagatcaataatccgcatggtagaa

SEQ ID NO: 2690707 - DNA, 25 bp, Homo sapien
tctcttagatcaataatccgcatgg

SEQ ID NO: 2690708 - DNA, 25 bp, Homo sapien
tgtctcttagatcaataatccgcat

SEQ ID NO: 2690709 - DNA, 25 bp, Homo sapien
tcttagatcaataatccgcatggta

SEQ ID NO: 2690710 - DNA, 25 bp, Homo sapien
gaatttctgacttgggtagattcat

SEQ ID NO: 2690711 - DNA, 25 bp, Homo sapien
ctcttgacacgtttttggagaaacg

SEQ ID NO: 2690712 - DNA, 25 bp, Homo sapien
gattcatagtcatgcatttttgttt

SEQ ID NO: 2690713 - DNA, 25 bp, Homo sapien
ttctcttgacacgtttttggagaaa

SEQ ID NO: 2690714 - DNA, 25 bp, Homo sapien
catgttggcacaatcatcagttgta

SEQ ID NO: 2690715 - DNA, 25 bp, Homo sapien
tcagttgcgggctgtgggttagcac

SEQ ID NO: 2690716 - DNA, 25 bp, Homo sapien
tgttgccagggagtatcagcctcag

SEQ ID NO: 2690717 - DNA, 25 bp, Homo sapien
aattggagtgttgccagggagtatc

SEQ ID NO: 2690718 - DNA, 25 bp, Homo sapien
gatgttgaggaactgaactactggg

SEQ ID NO: 2690719 - DNA, 25 bp, Homo sapien
tcagtgctaaaacagatctgaacac

SEQ ID NO: 2690720 - DNA, 25 bp, Homo sapien
cagatctgaacactaacaaatgcca

SEQ ID NO: 2690721 - DNA, 25 bp, Homo sapien
cctgcaatcatatcaagctcgttga

SEQ ID NO: 2690722 - DNA, 25 bp, Homo sapien
agggagcacaatcaggcacttcaag

SEQ ID NO: 2690723 - DNA, 25 bp, Homo sapien
gctatgactcagtgtagctgtctcc

SEQ ID NO: 2690724 - DNA, 25 bp, Homo sapien
tagctcgggtgttaggttgagatta

SEQ ID NO: 2690725 - DNA, 25 bp, Homo sapien
gggcatcgagtacaacactctctta

SEQ ID NO: 2690726 - DNA, 25 bp, Homo sapien
gaaagcccaggcatatacagtcatt

SEQ ID NO: 2690727 - DNA, 25 bp, Homo sapien
tctgttctaactgaggatgcccatg

SEQ ID NO: 2690728 - DNA, 25 bp, Homo sapien
gttaccatgtatgaagtgcccagca

SEQ ID NO: 2690729 - DNA, 25 bp, Homo sapien
gagatcaattctaagcactggctgt

SEQ ID NO: 2690730 - DNA, 25 bp, Homo sapien
aaggaggtctccaagtaccagggag

SEQ ID NO: 2690731 - DNA, 25 bp, Homo sapien
ggcccaagaggtgaggcacttgaca

SEQ ID NO: 2690732 - DNA, 25 bp, Homo sapien
gaaaggaagaggatgctcaagcacc

SEQ ID NO: 2690733 - DNA, 25 bp, Homo sapien
tatggcagggagcaagattagcagc

SEQ ID NO: 2690734 - DNA, 25 bp, Homo sapien
agttccgtctccaaagatgatgggt

SEQ ID NO: 2690735 - DNA, 25 bp, Homo sapien
caaagatgatgggttccttccagtg

SEQ ID NO: 2690736 - DNA, 25 bp, Homo sapien
gagagccccagtgattggtgttcat

SEQ ID NO: 2690737 - DNA, 25 bp, Homo sapien
ggtcagtgtgaacaacgcccaatgg

SEQ ID NO: 2690738 - DNA, 25 bp, Homo sapien
gggtcttcttgtgtaccagcacttt

SEQ ID NO: 2690739 - DNA, 25 bp, Homo sapien
gcagggtcttcttgtgtaccagcac

SEQ ID NO: 2690740 - DNA, 25 bp, Homo sapien
gaggacacacgtgccctccattatt

SEQ ID NO: 2690741 - DNA, 25 bp, Homo sapien
cactcgagggcacttgtggcagcag

SEQ ID NO: 2690742 - DNA, 25 bp, Homo sapien
ttctcctggtagtgggagtctgagt

SEQ ID NO: 2690743 - DNA, 25 bp, Homo sapien
tctcaggctcaacggccacatgtgt

SEQ ID NO: 2690744 - DNA, 25 bp, Homo sapien
tgctccacagggcacaaggtctgtg

SEQ ID NO: 2690745 - DNA, 25 bp, Homo sapien
caaagtggttttgtcctagatgtcc

SEQ ID NO: 2690746 - DNA, 25 bp, Homo sapien
tgtggttattcctgggcctacttcc

SEQ ID NO: 2690747 - DNA, 25 bp, Homo sapien
taggtgtggttattcctgggcctac

SEQ ID NO: 2690748 - DNA, 25 bp, Homo sapien
tgtagctcctaattcatgtgaatct

SEQ ID NO: 2690749 - DNA, 25 bp, Homo sapien
tggtaggtgtggttattcctgggcc

SEQ ID NO: 2690750 - DNA, 25 bp, Homo sapien
actaaccatccactgggtccacaga

SEQ ID NO: 2690751 - DNA, 25 bp, Homo sapien
gagcccttggggttgtccttcagga

SEQ ID NO: 2690752 - DNA, 25 bp, Homo sapien
gttggcctcgccagagttcccacta

SEQ ID NO: 2690753 - DNA, 25 bp, Homo sapien
gtgtgatgctcccattccttgcgtt

SEQ ID NO: 2690754 - DNA, 25 bp, Homo sapien
tggagaaccctgtgtgctgagaacc

SEQ ID NO: 2690755 - DNA, 25 bp, Homo sapien
gcaggtgtaaactccttgcaggcag

SEQ ID NO: 2690756 - DNA, 25 bp, Homo sapien
ttagagctccaaggttccagtcacc

SEQ ID NO: 2690757 - DNA, 25 bp, Homo sapien
caagcatagatgagaggaattccca

SEQ ID NO: 2690758 - DNA, 25 bp, Homo sapien
ctctttagtagagttatgtgctttt

SEQ ID NO: 2690759 - DNA, 25 bp, Homo sapien
atcccttccactcagccagtaacag

SEQ ID NO: 2690760 - DNA, 25 bp, Homo sapien
cccttccactcagccagtaacagga

SEQ ID NO: 2690761 - DNA, 25 bp, Homo sapien
ctctctttagtagagttatgtgctt

SEQ ID NO: 2690762 - DNA, 25 bp, Homo sapien
ggctgcaagaccacttgtgaccggg

SEQ ID NO: 2690763 - DNA, 25 bp, Homo sapien
gaagacttgatcttctgtggctgca

SEQ ID NO: 2690764 - DNA, 25 bp, Homo sapien
ggtgtctaggggctgcaagaccact

SEQ ID NO: 2690765 - DNA, 25 bp, Homo sapien
tgaagacttgatcttctgtggctgc

SEQ ID NO: 2690766 - DNA, 25 bp, Homo sapien
ctccctctggctattcgtaggtaag

SEQ ID NO: 2690767 - DNA, 25 bp, Homo sapien
aggtaagtgcccgtcctgtccgcgt

SEQ ID NO: 2690768 - DNA, 25 bp, Homo sapien
gctattcgtaggtaagtgcccgtcc

SEQ ID NO: 2690769 - DNA, 25 bp, Homo sapien
tcgtaggtaagtgcccgtcctgtcc

SEQ ID NO: 2690770 - DNA, 25 bp, Homo sapien
tcatggctgatggtctctggtgggc

SEQ ID NO: 2690771 - DNA, 25 bp, Homo sapien
tgggagggctgcgtatagagaaggc

SEQ ID NO: 2690772 - DNA, 25 bp, Homo sapien
tgatggtctctggtgggcctgaaga

SEQ ID NO: 2690773 - DNA, 25 bp, Homo sapien
aaggcccggctgcctgagcgctgtc

SEQ ID NO: 2690774 - DNA, 25 bp, Homo sapien
gctgagttcaagctggagcagctct

SEQ ID NO: 2690775 - DNA, 25 bp, Homo sapien
tgccaagcttgagatcccagcaaag

SEQ ID NO: 2690776 - DNA, 25 bp, Homo sapien
ggctgagttcaagctggagcagctc

SEQ ID NO: 2690777 - DNA, 25 bp, Homo sapien
tgtggttttctaacggccgcaagag

SEQ ID NO: 2690778 - DNA, 25 bp, Homo sapien
ggcgtcactctgatttccctaatta

SEQ ID NO: 2690779 - DNA, 25 bp, Homo sapien
ccgggaggaggaactctctgctcgt

SEQ ID NO: 2690780 - DNA, 25 bp, Homo sapien
tgctcgtaccctgctctcaggcaat

SEQ ID NO: 2690781 - DNA, 25 bp, Homo sapien
gttgtttctatcgtcaggccccttc

SEQ ID NO: 2690782 - DNA, 25 bp, Homo sapien
gccctccagcagatttctagtgact

SEQ ID NO: 2690783 - DNA, 25 bp, Homo sapien
tctgggtggtctgccactggttctt

SEQ ID NO: 2690784 - DNA, 25 bp, Homo sapien
gctggctccgatggcttctcagacc

SEQ ID NO: 2690785 - DNA, 25 bp, Homo sapien
tgagtgcaggtctacccagagctat

SEQ ID NO: 2690786 - DNA, 25 bp, Homo sapien
tgtacccttggccacgggttcagtg

SEQ ID NO: 2690787 - DNA, 25 bp, Homo sapien
cccagagcccgaagggtgctcatca

SEQ ID NO: 2690788 - DNA, 25 bp, Homo sapien
ggtctacccagagctatcctgtcca

SEQ ID NO: 2690789 - DNA, 25 bp, Homo sapien
taattgtcatcttacgatttttctt

SEQ ID NO: 2690790 - DNA, 25 bp, Homo sapien
tgtaattgtcatcttacgatttttc

SEQ ID NO: 2690791 - DNA, 25 bp, Homo sapien
taatgtaattgtcatcttacgattt

SEQ ID NO: 2690792 - DNA, 25 bp, Homo sapien
caggaaattacaactgggtaatatc

SEQ ID NO: 2690793 - DNA, 25 bp, Homo sapien
tcggctttgcttggctcgttgctgt

SEQ ID NO: 2690794 - DNA, 25 bp, Homo sapien
cggagatcggctttgcttggctcgt

SEQ ID NO: 2690795 - DNA, 25 bp, Homo sapien
gatcggctttgcttggctcgttgct

SEQ ID NO: 2690796 - DNA, 25 bp, Homo sapien
gctagcggagatcggctttgcttgg

SEQ ID NO: 2690797 - DNA, 25 bp, Homo sapien
agtgctcttcccagataatcacgca

SEQ ID NO: 2690798 - DNA, 25 bp, Homo sapien
gtcataagccagacctcgacatggg

SEQ ID NO: 2690799 - DNA, 25 bp, Homo sapien
caaaagggatttgagctttagcggt

SEQ ID NO: 2690800 - DNA, 25 bp, Homo sapien
tttagcggtaagagggtcataagcc

SEQ ID NO: 2690801 - DNA, 25 bp, Homo sapien
gctctgtgtttcacatgactccagg

SEQ ID NO: 2690802 - DNA, 25 bp, Homo sapien
ggctgcagggctctgtgtttcacat

SEQ ID NO: 2690803 - DNA, 25 bp, Homo sapien
tgcagggctctgtgtttcacatgac

SEQ ID NO: 2690804 - DNA, 25 bp, Homo sapien
tttcacatgactccaggacaagctc

SEQ ID NO: 2690805 - DNA, 25 bp, Homo sapien
ccagtacaccatggaagaaaaggtc

SEQ ID NO: 2690806 - DNA, 25 bp, Homo sapien
tcagaggaggacgatagtgtctgtc

SEQ ID NO: 2690807 - DNA, 25 bp, Homo sapien
tgaggagggagatctctgcttgttc

SEQ ID NO: 2690808 - DNA, 25 bp, Homo sapien
gaaagtcctgtaggatgcatacaca

SEQ ID NO: 2690809 - DNA, 25 bp, Homo sapien
taagagggttgccttccaggcaagg

SEQ ID NO: 2690810 - DNA, 25 bp, Homo sapien
ttaaacctctgattaagagggttgc

SEQ ID NO: 2690811 - DNA, 25 bp, Homo sapien
aagttagagggcttaaacctctgat

SEQ ID NO: 2690812 - DNA, 25 bp, Homo sapien
caggcaaggggacccatcaggcaga

SEQ ID NO: 2690813 - DNA, 25 bp, Homo sapien
cactgatttacggttggttccctgg

SEQ ID NO: 2690814 - DNA, 25 bp, Homo sapien
agctctcaggcctgggttctgccac

SEQ ID NO: 2690815 - DNA, 25 bp, Homo sapien
tgctcacgtcacctctgctgttggc

SEQ ID NO: 2690816 - DNA, 25 bp, Homo sapien
cactgcatgtctcccagttgtcaga

SEQ ID NO: 2690817 - DNA, 25 bp, Homo sapien
tgtgacccgcttggctgctgtgctc

SEQ ID NO: 2690818 - DNA, 25 bp, Homo sapien
tctttttgcatcctggaagctggtt

SEQ ID NO: 2690819 - DNA, 25 bp, Homo sapien
tggttcagaaagtgcccgtataccc

SEQ ID NO: 2690820 - DNA, 25 bp, Homo sapien
tgctgtgctcctaaagcagctgggt

SEQ ID NO: 2690821 - DNA, 25 bp, Homo sapien
ccttgaaatccagtggcaactgagc

SEQ ID NO: 2690822 - DNA, 25 bp, Homo sapien
caatggccattagaatccagactaa

SEQ ID NO: 2690823 - DNA, 25 bp, Homo sapien
actgagcacgccctctatgagtagc

SEQ ID NO: 2690824 - DNA, 25 bp, Homo sapien
ctctatgagtagctggtgccagatg

SEQ ID NO: 2690825 - DNA, 25 bp, Homo sapien
gtgcaccctcgcctttctattccct

SEQ ID NO: 2690826 - DNA, 25 bp, Homo sapien
gcctccacctgtgcaccctcgcctt

SEQ ID NO: 2690827 - DNA, 25 bp, Homo sapien
tcaggaaaaagccaccgagcgggcc

SEQ ID NO: 2690828 - DNA, 25 bp, Homo sapien
aaaagccaccgagcgggcccagctg

SEQ ID NO: 2690829 - DNA, 25 bp, Homo sapien
catgacctcggttgtatttccgctg

SEQ ID NO: 2690830 - DNA, 25 bp, Homo sapien
caccctttccatggcatcacaagtg

SEQ ID NO: 2690831 - DNA, 25 bp, Homo sapien
agtcactgtgacaagctcctccgcc

SEQ ID NO: 2690832 - DNA, 25 bp, Homo sapien
tcacaagtgtcagatttaatctgcc

SEQ ID NO: 2690833 - DNA, 25 bp, Homo sapien
tatctgggtagttggccaccacagc

SEQ ID NO: 2690834 - DNA, 25 bp, Homo sapien
gccgttcgatgaaccagggaggaat

SEQ ID NO: 2690835 - DNA, 25 bp, Homo sapien
ttggccaccacagcgcttccgtgag

SEQ ID NO: 2690836 - DNA, 25 bp, Homo sapien
tggagggacatgttcctaaaagcaa

SEQ ID NO: 2690837 - DNA, 25 bp, Homo sapien
agctgtcacgggctcctcgcagaga

SEQ ID NO: 2690838 - DNA, 25 bp, Homo sapien
tcacgggctcctcgcagagagctca

SEQ ID NO: 2690839 - DNA, 25 bp, Homo sapien
tcagctgtcacgggctcctcgcaga

SEQ ID NO: 2690840 - DNA, 25 bp, Homo sapien
tgtcacgggctcctcgcagagagct

SEQ ID NO: 2690841 - DNA, 25 bp, Homo sapien
cttggtgccgcttcccaatacagaa

SEQ ID NO: 2690842 - DNA, 25 bp, Homo sapien
ttgtcccatgggcttcgggcagctt

SEQ ID NO: 2690843 - DNA, 25 bp, Homo sapien
tcccatgggcttcgggcagcttctc

SEQ ID NO: 2690844 - DNA, 25 bp, Homo sapien
caatacagaattactggtgttccag

SEQ ID NO: 2690845 - DNA, 25 bp, Homo sapien
gaggcactctgtcttgttctggtcc

SEQ ID NO: 2690846 - DNA, 25 bp, Homo sapien
ctgtcttgttctggtccttcgtggg

SEQ ID NO: 2690847 - DNA, 25 bp, Homo sapien
cactctgtcttgttctggtccttcg

SEQ ID NO: 2690848 - DNA, 25 bp, Homo sapien
aggaggcactctgtcttgttctggt

SEQ ID NO: 2690849 - DNA, 25 bp, Homo sapien
gggtcatgggagcttggagtccggg

SEQ ID NO: 2690850 - DNA, 25 bp, Homo sapien
taagtgtgttataatttcatcgatc

SEQ ID NO: 2690851 - DNA, 25 bp, Homo sapien
agttaacccagcttgtcttcaaggg

SEQ ID NO: 2690852 - DNA, 25 bp, Homo sapien
tcatcgatcatgttagagcagttaa

SEQ ID NO: 2690853 - DNA, 25 bp, Homo sapien
cttccccattgaggttgttgaagtc

SEQ ID NO: 2690854 - DNA, 25 bp, Homo sapien
tttaagaatgctctcaattgctgat

SEQ ID NO: 2690855 - DNA, 25 bp, Homo sapien
acagccctgttgaatgcctccaggt

SEQ ID NO: 2690856 - DNA, 25 bp, Homo sapien
gatgcgttctgtaaactcttgacag

SEQ ID NO: 2690857 - DNA, 25 bp, Homo sapien
tgcctccaggtttggccttcgaagg

SEQ ID NO: 2690858 - DNA, 25 bp, Homo sapien
cacagggatcccaaaccctcaacag

SEQ ID NO: 2690859 - DNA, 25 bp, Homo sapien
agggatcccaaaccctcaacagctt

SEQ ID NO: 2690860 - DNA, 25 bp, Homo sapien
caacacagggatcccaaaccctcaa

SEQ ID NO: 2690861 - DNA, 25 bp, Homo sapien
gccaacacagggatcccaaaccctc

SEQ ID NO: 2690862 - DNA, 25 bp, Homo sapien
ggccaggggcagacatggcaggaga

SEQ ID NO: 2690863 - DNA, 25 bp, Homo sapien
ccgtggccaggggcagacatggcag

SEQ ID NO: 2690864 - DNA, 25 bp, Homo sapien
cgtgggtgcggccgtggccaggggc

SEQ ID NO: 2690865 - DNA, 25 bp, Homo sapien
ccaggggcagacatggcaggagatt

SEQ ID NO: 2690866 - DNA, 25 bp, Homo sapien
accagctgaggagcaagccatgacg

SEQ ID NO: 2690867 - DNA, 25 bp, Homo sapien
gaccagctgaggagcaagccatgac

SEQ ID NO: 2690868 - DNA, 25 bp, Homo sapien
caggctgtaatggtgatgaccagct

SEQ ID NO: 2690869 - DNA, 25 bp, Homo sapien
tggcattaggtgagtccaggctgta

SEQ ID NO: 2690870 - DNA, 25 bp, Homo sapien
ttcctccggaattcattccagtcac

SEQ ID NO: 2690871 - DNA, 25 bp, Homo sapien
tcaccgtccttgatatggattggat

SEQ ID NO: 2690872 - DNA, 25 bp, Homo sapien
tccagtcaccgtccttgatatggat

SEQ ID NO: 2690873 - DNA, 25 bp, Homo sapien
cagtttcctccggaattcattccag

SEQ ID NO: 2690874 - DNA, 25 bp, Homo sapien
tcaaaagatcgcgaggctcaaagtc

SEQ ID NO: 2690875 - DNA, 25 bp, Homo sapien
caaagtcgtctgttgagcctgcgca

SEQ ID NO: 2690876 - DNA, 25 bp, Homo sapien
ttctcaagggttttcagatagaacg

SEQ ID NO: 2690877 - DNA, 25 bp, Homo sapien
agcctgcgcattctcaagggttttc

SEQ ID NO: 2690878 - DNA, 25 bp, Homo sapien
ggacatggctcctctgctaaaataa

SEQ ID NO: 2690879 - DNA, 25 bp, Homo sapien
acacaaccgcacaaggccaaatggg

SEQ ID NO: 2690880 - DNA, 25 bp, Homo sapien
gaggtacaaatgaacatgctcccca

SEQ ID NO: 2690881 - DNA, 25 bp, Homo sapien
taacaattcatctgatgccgcagga

SEQ ID NO: 2690882 - DNA, 25 bp, Homo sapien
cagtctcccttaaaatggtcactaa

SEQ ID NO: 2690883 - DNA, 25 bp, Homo sapien
tttgtggcacaccagtctcccttaa

SEQ ID NO: 2690884 - DNA, 25 bp, Homo sapien
tcactaagtcccaagtcaaattgag

SEQ ID NO: 2690885 - DNA, 25 bp, Homo sapien
atccacgtggcaggatcaagccacc

SEQ ID NO: 2690886 - DNA, 25 bp, Homo sapien
gcctcttgcaggcatcagtcactaa

SEQ ID NO: 2690887 - DNA, 25 bp, Homo sapien
ctgacccactctccagggtgtgaag

SEQ ID NO: 2690888 - DNA, 25 bp, Homo sapien
ctaacacaggaccagcagaggagac

SEQ ID NO: 2690889 - DNA, 25 bp, Homo sapien
gaggaggtggcaagcagcgactcat

SEQ ID NO: 2690890 - DNA, 25 bp, Homo sapien
tcaaatgggggcttgagtccagggc

SEQ ID NO: 2690891 - DNA, 25 bp, Homo sapien
aaatgggggcttgagtccagggcag

SEQ ID NO: 2690892 - DNA, 25 bp, Homo sapien
agtcaaatgggggcttgagtccagg

SEQ ID NO: 2690893 - DNA, 25 bp, Homo sapien
ctcagagcagttgctccactgagtc

SEQ ID NO: 2690894 - DNA, 25 bp, Homo sapien
atgggcagtgcctccgatgaggtcc

SEQ ID NO: 2690895 - DNA, 25 bp, Homo sapien
gcagtgcctccgatgaggtccacgc

SEQ ID NO: 2690896 - DNA, 25 bp, Homo sapien
cttgtcttctcgacctccatgccct

SEQ ID NO: 2690897 - DNA, 25 bp, Homo sapien
ttgtcttctcgacctccatgccctc

SEQ ID NO: 2690898 - DNA, 25 bp, Homo sapien
cacagcggccagtctgggctgggct

SEQ ID NO: 2690899 - DNA, 25 bp, Homo sapien
tccacagcggccagtctgggctggg

SEQ ID NO: 2690900 - DNA, 25 bp, Homo sapien
ctccacagcggccagtctgggctgg

SEQ ID NO: 2690901 - DNA, 25 bp, Homo sapien
cgtctccacagcggccagtctgggc

SEQ ID NO: 2690902 - DNA, 25 bp, Homo sapien
gggcccagggattcccctctgctgg

SEQ ID NO: 2690903 - DNA, 25 bp, Homo sapien
tgggcccagggattcccctctgctg

SEQ ID NO: 2690904 - DNA, 25 bp, Homo sapien
caggtcccgggagcaccctgggtca

SEQ ID NO: 2690905 - DNA, 25 bp, Homo sapien
aagggctgagtctccaagtgcaggc

SEQ ID NO: 2690906 - DNA, 25 bp, Homo sapien
gctgtccttgctgcccgctgatctc

SEQ ID NO: 2690907 - DNA, 25 bp, Homo sapien
cccaggcaagtctctgccaaagcag

SEQ ID NO: 2690908 - DNA, 25 bp, Homo sapien
aggacagggaaccatcctcctcagt

SEQ ID NO: 2690909 - DNA, 25 bp, Homo sapien
tgctcgagcctgactgatggcaaag

SEQ ID NO: 2690910 - DNA, 25 bp, Homo sapien
ccagcttggaacaccaggacaggga

SEQ ID NO: 2690911 - DNA, 25 bp, Homo sapien
gtggctgagccatacagattttcca

SEQ ID NO: 2690912 - DNA, 25 bp, Homo sapien
cccagccccaggaggcaaacgccac

SEQ ID NO: 2690913 - DNA, 25 bp, Homo sapien
ctgcatcaccgacaggagatcctgg

SEQ ID NO: 2690914 - DNA, 25 bp, Homo sapien
tacacctcaaaaagggaagctgccc

SEQ ID NO: 2690915 - DNA, 25 bp, Homo sapien
gagatcctggtaccgcatggcacca

SEQ ID NO: 2690916 - DNA, 25 bp, Homo sapien
tcgccaagctccaattccagtttgg

SEQ ID NO: 2690917 - DNA, 25 bp, Homo sapien
ggtgaggtagggagtccggcctcca

SEQ ID NO: 2690918 - DNA, 25 bp, Homo sapien
gtgaggtagggagtccggcctccac

SEQ ID NO: 2690919 - DNA, 25 bp, Homo sapien
ctagccgcagagggcaaccttctgg

SEQ ID NO: 2690920 - DNA, 25 bp, Homo sapien
gcagagggcaaccttctggacacac

SEQ ID NO: 2690921 - DNA, 25 bp, Homo sapien
gccgcagagggcaaccttctggaca

SEQ ID NO: 2690922 - DNA, 25 bp, Homo sapien
cgcagagggcaaccttctggacaca

SEQ ID NO: 2690923 - DNA, 25 bp, Homo sapien
tagctgaggccacggaagttattca

SEQ ID NO: 2690924 - DNA, 25 bp, Homo sapien
gatctggcagcggtacatgtctgtg

SEQ ID NO: 2690925 - DNA, 25 bp, Homo sapien
gcagatcttcagagcgtgaggccca

SEQ ID NO: 2690926 - DNA, 25 bp, Homo sapien
tccacatggctaaggtgaggaccca

SEQ ID NO: 2690927 - DNA, 25 bp, Homo sapien
cctccagagaactttagcctttctc

SEQ ID NO: 2690928 - DNA, 25 bp, Homo sapien
ccagagaactttagcctttctctct

SEQ ID NO: 2690929 - DNA, 25 bp, Homo sapien
cagagaactttagcctttctctctg

SEQ ID NO: 2690930 - DNA, 25 bp, Homo sapien
gagaactttagcctttctctctgtg

SEQ ID NO: 2690931 - DNA, 25 bp, Homo sapien
gagcgggcgggtgcagagatgctgc

SEQ ID NO: 2690932 - DNA, 25 bp, Homo sapien
ctgggcgagcgggcgggtgcagaga

SEQ ID NO: 2690933 - DNA, 25 bp, Homo sapien
tgcaggccacagtgcccaagagcag

SEQ ID NO: 2690934 - DNA, 25 bp, Homo sapien
cacagtgcccaagagcagcaggctc

SEQ ID NO: 2690935 - DNA, 25 bp, Homo sapien
tactcaggttcaggagacgccgggc

SEQ ID NO: 2690936 - DNA, 25 bp, Homo sapien
gcagcagtgtctctactcaggttca

SEQ ID NO: 2690937 - DNA, 25 bp, Homo sapien
tctctactcaggttcaggagacgcc

SEQ ID NO: 2690938 - DNA, 25 bp, Homo sapien
cagtgtctctactcaggttcaggag

SEQ ID NO: 2690939 - DNA, 25 bp, Homo sapien
tctgagatgacttctactgtttcat

SEQ ID NO: 2690940 - DNA, 25 bp, Homo sapien
ctggaggtcaaacatttctgagatg

SEQ ID NO: 2690941 - DNA, 25 bp, Homo sapien
tggaggtcaaacatttctgagatga

SEQ ID NO: 2690942 - DNA, 25 bp, Homo sapien
aacatttctgagatgacttctactg

SEQ ID NO: 2690943 - DNA, 25 bp, Homo sapien
ccgcaggccctgcttgtacagctcc

SEQ ID NO: 2690944 - DNA, 25 bp, Homo sapien
cagtgctgcttgtagtggctggcca

SEQ ID NO: 2690945 - DNA, 25 bp, Homo sapien
gtcaaggggcccttgagcttggtga

SEQ ID NO: 2690946 - DNA, 25 bp, Homo sapien
cttgtagtggctggccatcatggtc

SEQ ID NO: 2690947 - DNA, 25 bp, Homo sapien
aggtgataatctgggttgcacagga

SEQ ID NO: 2690948 - DNA, 25 bp, Homo sapien
tcaggttctctttgaaactttcaaa

SEQ ID NO: 2690949 - DNA, 25 bp, Homo sapien
tcccagcagtcaaaggggatgacaa

SEQ ID NO: 2690950 - DNA, 25 bp, Homo sapien
tttcaaaggtgataatctgggttgc

SEQ ID NO: 2690951 - DNA, 25 bp, Homo sapien
tattacggtaaaacatcttgaataa

SEQ ID NO: 2690952 - DNA, 25 bp, Homo sapien
gagagcagctccccggcttggccag

SEQ ID NO: 2690953 - DNA, 25 bp, Homo sapien
ttcttctgccatgcctgtatcaggg

SEQ ID NO: 2690954 - DNA, 25 bp, Homo sapien
gatttctgtcagtataaaatattcc

SEQ ID NO: 2690955 - DNA, 25 bp, Homo sapien
ctgcccgcctaagacttggggcaca

SEQ ID NO: 2690956 - DNA, 25 bp, Homo sapien
ggccctgctgcccgcctaagacttg

SEQ ID NO: 2690957 - DNA, 25 bp, Homo sapien
cctgctgcccgcctaagacttgggg

SEQ ID NO: 2690958 - DNA, 25 bp, Homo sapien
ctggccctgctgcccgcctaagact

SEQ ID NO: 2690959 - DNA, 25 bp, Homo sapien
acggtctttctgcatgagcatggag

SEQ ID NO: 2690960 - DNA, 25 bp, Homo sapien
ggtctttctgcatgagcatggagtg

SEQ ID NO: 2690961 - DNA, 25 bp, Homo sapien
cggtctttctgcatgagcatggagt

SEQ ID NO: 2690962 - DNA, 25 bp, Homo sapien
caagctggtccgagccctgggcttg

SEQ ID NO: 2690963 - DNA, 25 bp, Homo sapien
aggtgcatggtattacttgaaggtg

SEQ ID NO: 2690964 - DNA, 25 bp, Homo sapien
tggtattacttgaaggtgactccaa

SEQ ID NO: 2690965 - DNA, 25 bp, Homo sapien
gactccaagctggtccgagccctgg

SEQ ID NO: 2690966 - DNA, 25 bp, Homo sapien
ccccagagcacatgagccaggagca

SEQ ID NO: 2690967 - DNA, 25 bp, Homo sapien
tgacccccagagcacatgagccagg

SEQ ID NO: 2690968 - DNA, 25 bp, Homo sapien
gagcacatgagccaggagcacgtac

SEQ ID NO: 2690969 - DNA, 25 bp, Homo sapien
cagagcacatgagccaggagcacgt

SEQ ID NO: 2690970 - DNA, 25 bp, Homo sapien
tttgtaaactcctcatagcagagct

SEQ ID NO: 2690971 - DNA, 25 bp, Homo sapien
gagctcctgaaacaggttcagggct

SEQ ID NO: 2690972 - DNA, 25 bp, Homo sapien
aaaccttcgttatgtgatggtcctg

SEQ ID NO: 2690973 - DNA, 25 bp, Homo sapien
taatgagactcttcagggtgaaggt

SEQ ID NO: 2690974 - DNA, 25 bp, Homo sapien
acacccttgtctgccggcccagggc

SEQ ID NO: 2690975 - DNA, 25 bp, Homo sapien
acccagcagtaagttgttcctgatg

SEQ ID NO: 2690976 - DNA, 25 bp, Homo sapien
cccaacccagcagtaagttgttcct

SEQ ID NO: 2690977 - DNA, 25 bp, Homo sapien
ccaatcaatttcctgcagtgctaac

SEQ ID NO: 2690978 - DNA, 25 bp, Homo sapien
tgactggattgtgggctttctctgg

SEQ ID NO: 2690979 - DNA, 25 bp, Homo sapien
gaatcacagggctaccctccatgtt

SEQ ID NO: 2690980 - DNA, 25 bp, Homo sapien
tgacatctgatcctgaatcacaggg

SEQ ID NO: 2690981 - DNA, 25 bp, Homo sapien
gactggattgtgggctttctctgga

SEQ ID NO: 2690982 - DNA, 25 bp, Homo sapien
aagaggtaccagaagctccctgtca

SEQ ID NO: 2690983 - DNA, 25 bp, Homo sapien
gttgagccagatgccctgaggtcct

SEQ ID NO: 2690984 - DNA, 25 bp, Homo sapien
agaagctccctgtcaacccttctga

SEQ ID NO: 2690985 - DNA, 25 bp, Homo sapien
agttgagccagatgccctgaggtcc

SEQ ID NO: 2690986 - DNA, 25 bp, Homo sapien
tcaggtggccgtcactgcagtctct

SEQ ID NO: 2690987 - DNA, 25 bp, Homo sapien
ttggtttagtacagccagcttccca

SEQ ID NO: 2690988 - DNA, 25 bp, Homo sapien
tgatgagggcagtcacttggtttag

SEQ ID NO: 2690989 - DNA, 25 bp, Homo sapien
ttcatgggtagctgtttggtgactt

SEQ ID NO: 2690990 - DNA, 25 bp, Homo sapien
agttcagagcagagaccctcacagt

SEQ ID NO: 2690991 - DNA, 25 bp, Homo sapien
ctgaggaacagataacagtccaccc

SEQ ID NO: 2690992 - DNA, 25 bp, Homo sapien
cacagtcccctgaggaacagataac

SEQ ID NO: 2690993 - DNA, 25 bp, Homo sapien
gagaccctcacagtcccctgaggaa

SEQ ID NO: 2690994 - DNA, 25 bp, Homo sapien
tcactgctggcacttgatgccatga

SEQ ID NO: 2690995 - DNA, 25 bp, Homo sapien
acttgatgccatgaggggccctcct

SEQ ID NO: 2690996 - DNA, 25 bp, Homo sapien
cagactctggaacatagtcactgct

SEQ ID NO: 2690997 - DNA, 25 bp, Homo sapien
ctggaacatagtcactgctggcact

SEQ ID NO: 2690998 - DNA, 25 bp, Homo sapien
gggtatggctcgaggctctggcagc

SEQ ID NO: 2690999 - DNA, 25 bp, Homo sapien
cagagcccaaggctgcatatctctg

SEQ ID NO: 2691000 - DNA, 25 bp, Homo sapien
gccccataggcacaagaacctttgg

SEQ ID NO: 2691001 - DNA, 25 bp, Homo sapien
gaacctttggtgtgaccatggccca

SEQ ID NO: 2691002 - DNA, 25 bp, Homo sapien
cctggaattgctcccctgggtcaaa

SEQ ID NO: 2691003 - DNA, 25 bp, Homo sapien
ggcctggaattgctcccctgggtca

SEQ ID NO: 2691004 - DNA, 25 bp, Homo sapien
accttttaggccctcaggcctctgg

SEQ ID NO: 2691005 - DNA, 25 bp, Homo sapien
ctggcctggaattgctcccctgggt

SEQ ID NO: 2691006 - DNA, 25 bp, Homo sapien
tcaatattagatggggagagggacc

SEQ ID NO: 2691007 - DNA, 25 bp, Homo sapien
gtactcaatattagatggggagagg

SEQ ID NO: 2691008 - DNA, 25 bp, Homo sapien
cagtgagtactcaatattagatggg

SEQ ID NO: 2691009 - DNA, 25 bp, Homo sapien
ctcaatattagatggggagagggac

SEQ ID NO: 2691010 - DNA, 25 bp, Homo sapien
tcactactgctagggacaaaagctg

SEQ ID NO: 2691011 - DNA, 25 bp, Homo sapien
gctgcctgacaggtgtctctgatac

SEQ ID NO: 2691012 - DNA, 25 bp, Homo sapien
tatagccgccccaacccagatgata

SEQ ID NO: 2691013 - DNA, 25 bp, Homo sapien
gatactgattctgctcactactgct

SEQ ID NO: 2691014 - DNA, 25 bp, Homo sapien
tgaagggctttctttaaggcatccc

SEQ ID NO: 2691015 - DNA, 25 bp, Homo sapien
ttctttaaggcatcccatcacaagc

SEQ ID NO: 2691016 - DNA, 25 bp, Homo sapien
ctttctttaaggcatcccatcacaa

SEQ ID NO: 2691017 - DNA, 25 bp, Homo sapien
ttgaagggctttctttaaggcatcc

SEQ ID NO: 2691018 - DNA, 25 bp, Homo sapien
taaagctgccagaacggactggtgg

SEQ ID NO: 2691019 - DNA, 25 bp, Homo sapien
gacctgagtacagttcctgtccatc

SEQ ID NO: 2691020 - DNA, 25 bp, Homo sapien
actggtggactggttggatccgccc

SEQ ID NO: 2691021 - DNA, 25 bp, Homo sapien
tgagtacagttcctgtccatcctgc

SEQ ID NO: 2691022 - DNA, 25 bp, Homo sapien
ttcattggtacaatggattcctcca

SEQ ID NO: 2691023 - DNA, 25 bp, Homo sapien
ccatagggcaagtgtcatatccatg

SEQ ID NO: 2691024 - DNA, 25 bp, Homo sapien
cattcatggacactagggcagctgc

SEQ ID NO: 2691025 - DNA, 25 bp, Homo sapien
tgttttagactcttcattggtacaa

SEQ ID NO: 2691026 - DNA, 25 bp, Homo sapien
aagtcctggagataagaagtgtggc

SEQ ID NO: 2691027 - DNA, 25 bp, Homo sapien
tcctggagataagaagtgtggctgc

SEQ ID NO: 2691028 - DNA, 25 bp, Homo sapien
gctgccagcgtgatagaggtgggaa

SEQ ID NO: 2691029 - DNA, 25 bp, Homo sapien
ccaagtcctggagataagaagtgtg

SEQ ID NO: 2691030 - DNA, 25 bp, Homo sapien
tttttatgattagagtcagagttcc

SEQ ID NO: 2691031 - DNA, 25 bp, Homo sapien
tgctgcatgtcaagttcagttcttt

SEQ ID NO: 2691032 - DNA, 25 bp, Homo sapien
cagttctttttatgattagagtcag

SEQ ID NO: 2691033 - DNA, 25 bp, Homo sapien
cagttcaagatgcaagagcaccagg

SEQ ID NO: 2691034 - DNA, 25 bp, Homo sapien
ctgttggaattggcggagcgctgcc

SEQ ID NO: 2691035 - DNA, 25 bp, Homo sapien
tgttggaattggcggagcgctgcca

SEQ ID NO: 2691036 - DNA, 25 bp, Homo sapien
gttggaattggcggagcgctgccag

SEQ ID NO: 2691037 - DNA, 25 bp, Homo sapien
tcctgggctcgactggtgcctctga

SEQ ID NO: 2691038 - DNA, 25 bp, Homo sapien
cctgggctcgactggtgcctctgag

SEQ ID NO: 2691039 - DNA, 25 bp, Homo sapien
ctgggctcgactggtgcctctgagg

SEQ ID NO: 2691040 - DNA, 25 bp, Homo sapien
tgggctcgactggtgcctctgagga

SEQ ID NO: 2691041 - DNA, 25 bp, Homo sapien
gactcctgatagcagcagacacaaa

SEQ ID NO: 2691042 - DNA, 25 bp, Homo sapien
caggtgccacactaaggatcccatc

SEQ ID NO: 2691043 - DNA, 25 bp, Homo sapien
tcccatcctgattgagccctgtaga

SEQ ID NO: 2691044 - DNA, 25 bp, Homo sapien
ccttggagcctcgtggtttctgtct

SEQ ID NO: 2691045 - DNA, 25 bp, Homo sapien
ttctcccagttagccctgtcctgag

SEQ ID NO: 2691046 - DNA, 25 bp, Homo sapien
ggcctcttctcccagttagccctgt

SEQ ID NO: 2691047 - DNA, 25 bp, Homo sapien
tcttctcccagttagccctgtcctg

SEQ ID NO: 2691048 - DNA, 25 bp, Homo sapien
ggtggggcctcttctcccagttagc

SEQ ID NO: 2691049 - DNA, 25 bp, Homo sapien
tccaaggaggccagacacttgccct

SEQ ID NO: 2691050 - DNA, 25 bp, Homo sapien
tctctgcggcagtggagaaagctct

SEQ ID NO: 2691051 - DNA, 25 bp, Homo sapien
tctcttggtgagtcctgtgctcaga

SEQ ID NO: 2691052 - DNA, 25 bp, Homo sapien
tgcttgggctgtccatacggcagtc

SEQ ID NO: 2691053 - DNA, 25 bp, Homo sapien
aatccaggtctcaggtttgggtcag

SEQ ID NO: 2691054 - DNA, 25 bp, Homo sapien
aagtggatctatcaaaaccagaggg

SEQ ID NO: 2691055 - DNA, 25 bp, Homo sapien
gtggatctatcaaaaccagagggtt

SEQ ID NO: 2691056 - DNA, 25 bp, Homo sapien
agtggatctatcaaaaccagagggt

SEQ ID NO: 2691057 - DNA, 25 bp, Homo sapien
caaaactgtgcactatggttccaac

SEQ ID NO: 2691058 - DNA, 25 bp, Homo sapien
cattcggtttgctagacttgtttca

SEQ ID NO: 2691059 - DNA, 25 bp, Homo sapien
caatatagcacctttccttgggctt

SEQ ID NO: 2691060 - DNA, 25 bp, Homo sapien
aagtgggacttctcactaatgggag

SEQ ID NO: 2691061 - DNA, 25 bp, Homo sapien
tagtccaatgatttatatcctgtgg

SEQ ID NO: 2691062 - DNA, 25 bp, Homo sapien
tctgaaatagtggtaaatagcatgc

SEQ ID NO: 2691063 - DNA, 25 bp, Homo sapien
tgcatgaacaaatgtgaccctgaaa

SEQ ID NO: 2691064 - DNA, 25 bp, Homo sapien
aagccatttggtgactagaggccac

SEQ ID NO: 2691065 - DNA, 25 bp, Homo sapien
gaaactgtggcagcttccaaaagcc

SEQ ID NO: 2691066 - DNA, 25 bp, Homo sapien
agtggaggacctgggaatgaaactg

SEQ ID NO: 2691067 - DNA, 25 bp, Homo sapien
ctgaggtcacatgaagtctcattgc

SEQ ID NO: 2691068 - DNA, 25 bp, Homo sapien
tcattgctggtaagtggaggacctg

SEQ ID NO: 2691069 - DNA, 25 bp, Homo sapien
tagaaacgtgactggcacactaggt

SEQ ID NO: 2691070 - DNA, 25 bp, Homo sapien
gtctcatgcaaaaaaccactgggtc

SEQ ID NO: 2691071 - DNA, 25 bp, Homo sapien
tctataccccaagatcatgaggatg

SEQ ID NO: 2691072 - DNA, 25 bp, Homo sapien
tacagagtggcagctacagtagaac

SEQ ID NO: 2691073 - DNA, 25 bp, Homo sapien
catgattcctggtgcacatataaac

SEQ ID NO: 2691074 - DNA, 25 bp, Homo sapien
tatctaggagtggaaatgtggagtc

SEQ ID NO: 2691075 - DNA, 25 bp, Homo sapien
catccgtgttgcttgtgtagctgta

SEQ ID NO: 2691076 - DNA, 25 bp, Homo sapien
gctagcttggtacatgttacggact

SEQ ID NO: 2691077 - DNA, 25 bp, Homo sapien
tgggaacccctcctagatcacatct

SEQ ID NO: 2691078 - DNA, 25 bp, Homo sapien
cattgtctcatgatgtgtggtactc

SEQ ID NO: 2691079 - DNA, 25 bp, Homo sapien
tagaaaagagaacgttttcaagtca

SEQ ID NO: 2691080 - DNA, 25 bp, Homo sapien
cagtacctcaggagccccttgggaa

SEQ ID NO: 2691081 - DNA, 25 bp, Homo sapien
tgtccctaccagaagccttaaagag

SEQ ID NO: 2691082 - DNA, 25 bp, Homo sapien
tgtctagcgcctagcaaggtgcctt

SEQ ID NO: 2691083 - DNA, 25 bp, Homo sapien
cagagggagaccatactagggcgac

SEQ ID NO: 2691084 - DNA, 25 bp, Homo sapien
caaggctaggatcaaagtggctgca

SEQ ID NO: 2691085 - DNA, 25 bp, Homo sapien
tcctgggaccctcttggtgagagaa

SEQ ID NO: 2691086 - DNA, 25 bp, Homo sapien
ttctcatcctgttgtcactcctggg

SEQ ID NO: 2691087 - DNA, 25 bp, Homo sapien
tcccagtaatattaggcctcttgag

SEQ ID NO: 2691088 - DNA, 25 bp, Homo sapien
tggtccacggctcctgaggttaatg

SEQ ID NO: 2691089 - DNA, 25 bp, Homo sapien
aaggtgactaccgaacaagacatgc

SEQ ID NO: 2691090 - DNA, 25 bp, Homo sapien
gggaaggtgactaccgaacaagaca

SEQ ID NO: 2691091 - DNA, 25 bp, Homo sapien
ggtgactaccgaacaagacatgctg

SEQ ID NO: 2691092 - DNA, 25 bp, Homo sapien
tacaacctcttgcggagcggggaag

SEQ ID NO: 2691093 - DNA, 25 bp, Homo sapien
tctgagtttgatccacagggctgtg

SEQ ID NO: 2691094 - DNA, 25 bp, Homo sapien
gagcagcaaactactagagccagag

SEQ ID NO: 2691095 - DNA, 25 bp, Homo sapien
gaagtagtgctttggccatgagtca

SEQ ID NO: 2691096 - DNA, 25 bp, Homo sapien
gccttaccataggagaaagcagggc

SEQ ID NO: 2691097 - DNA, 25 bp, Homo sapien
tatgtcccaaacaaactgggtccag

SEQ ID NO: 2691098 - DNA, 25 bp, Homo sapien
tcagtgatcatatgcagttcaccca

SEQ ID NO: 2691099 - DNA, 25 bp, Homo sapien
gccagggcccgcctcaagcagtgtt

SEQ ID NO: 2691100 - DNA, 25 bp, Homo sapien
tgctgctgtctgagtgtccatgaag

SEQ ID NO: 2691101 - DNA, 25 bp, Homo sapien
ggcagctggccacccatgttgtgct

SEQ ID NO: 2691102 - DNA, 25 bp, Homo sapien
cactcagtctcaccaggaatagcag

SEQ ID NO: 2691103 - DNA, 25 bp, Homo sapien
tgatgtagcacggtaattcttgact

SEQ ID NO: 2691104 - DNA, 25 bp, Homo sapien
catgcagtagaccactgtgggagtc

SEQ ID NO: 2691105 - DNA, 25 bp, Homo sapien
ggcttccttgtgctgttgacaggat

SEQ ID NO: 2691106 - DNA, 25 bp, Homo sapien
ccaggtatttttggtacaggaatct

SEQ ID NO: 2691107 - DNA, 25 bp, Homo sapien
gctgttgacaggatttccaggtatt

SEQ ID NO: 2691108 - DNA, 25 bp, Homo sapien
tgctgaaccaggcttccttgtgctg

SEQ ID NO: 2691109 - DNA, 25 bp, Homo sapien
tttcagctgtagctcacatgtttgc

SEQ ID NO: 2691110 - DNA, 25 bp, Homo sapien
tcagctgtagctcacatgtttgctg

SEQ ID NO: 2691111 - DNA, 25 bp, Homo sapien
gctgtagctcacatgtttgctgtag

SEQ ID NO: 2691112 - DNA, 25 bp, Homo sapien
tggttcttctatctgttgacattct

SEQ ID NO: 2691113 - DNA, 25 bp, Homo sapien
gaatgccagacctcttggtagaggg

SEQ ID NO: 2691114 - DNA, 25 bp, Homo sapien
tgccagtcagtggtattgaaggctt

SEQ ID NO: 2691115 - DNA, 25 bp, Homo sapien
actgtctcgacatttcctttgccag

SEQ ID NO: 2691116 - DNA, 25 bp, Homo sapien
ttctcctaggaactgtctcgacatt

SEQ ID NO: 2691117 - DNA, 25 bp, Homo sapien
caagcagttgctaacccagtgggac

SEQ ID NO: 2691118 - DNA, 25 bp, Homo sapien
tccggccagaggacttcccggagga

SEQ ID NO: 2691119 - DNA, 25 bp, Homo sapien
gcggagacccgtgataattcgttaa

SEQ ID NO: 2691120 - DNA, 25 bp, Homo sapien
tgggccattggatcagaaagtcttt

SEQ ID NO: 2691121 - DNA, 25 bp, Homo sapien
agctggccgagaggtctgggaatcc

SEQ ID NO: 2691122 - DNA, 25 bp, Homo sapien
gccactgggtatgagcctggccgcc

SEQ ID NO: 2691123 - DNA, 25 bp, Homo sapien
atgtcgccgagtccagtagctgcca

SEQ ID NO: 2691124 - DNA, 25 bp, Homo sapien
ggcctggccataggacgccagctgt

SEQ ID NO: 2691125 - DNA, 25 bp, Homo sapien
tggtccagctccacccagatgtctg

SEQ ID NO: 2691126 - DNA, 25 bp, Homo sapien
caaggccaggaactcgaatggtgga

SEQ ID NO: 2691127 - DNA, 25 bp, Homo sapien
gtctgctctcttagaagcctgctgg

SEQ ID NO: 2691128 - DNA, 25 bp, Homo sapien
agcctgctggtcaaggccaggaact

SEQ ID NO: 2691129 - DNA, 25 bp, Homo sapien
gccagagagaactttagatgccttc

SEQ ID NO: 2691130 - DNA, 25 bp, Homo sapien
tttagatgccttcatttcagtgtga

SEQ ID NO: 2691131 - DNA, 25 bp, Homo sapien
ggtcaggttctgtacctggagtttg

SEQ ID NO: 2691132 - DNA, 25 bp, Homo sapien
aaacccactcataaggtaccctgag

SEQ ID NO: 2691133 - DNA, 25 bp, Homo sapien
tcaggttctgtacctggagtttggg

SEQ ID NO: 2691134 - DNA, 25 bp, Homo sapien
gggccatgctgtaaacccactcata

SEQ ID NO: 2691135 - DNA, 25 bp, Homo sapien
tccgggggaatgtgaagtggtcctc

SEQ ID NO: 2691136 - DNA, 25 bp, Homo sapien
gagtctctgggcagtgtaatccatc

SEQ ID NO: 2691137 - DNA, 25 bp, Homo sapien
tggtcctcctgaatatgaccttcct

SEQ ID NO: 2691138 - DNA, 25 bp, Homo sapien
tttacttctgtccgggggaatgtga

SEQ ID NO: 2691139 - DNA, 25 bp, Homo sapien
atttcacatcccaaagactgcctac

SEQ ID NO: 2691140 - DNA, 25 bp, Homo sapien
ttgcttgtttcccccgatttcacat

SEQ ID NO: 2691141 - DNA, 25 bp, Homo sapien
gatttcacatcccaaagactgccta

SEQ ID NO: 2691142 - DNA, 25 bp, Homo sapien
tgtttcccccgatttcacatcccaa

SEQ ID NO: 2691143 - DNA, 25 bp, Homo sapien
gataaggaccctgctcttgggctcc

SEQ ID NO: 2691144 - DNA, 25 bp, Homo sapien
aacccgcaaagaggagaactgcttg

SEQ ID NO: 2691145 - DNA, 25 bp, Homo sapien
gctcttgggctcctcacaggtggtg

SEQ ID NO: 2691146 - DNA, 25 bp, Homo sapien
gtggtgggatgaaatgtgtccactg

SEQ ID NO: 2691147 - DNA, 25 bp, Homo sapien
gctctcagagatccccgcgttcgga

SEQ ID NO: 2691148 - DNA, 25 bp, Homo sapien
tcgacaccggccctttgaagtcgct

SEQ ID NO: 2691149 - DNA, 25 bp, Homo sapien
tgtgaggagccctctgaaccaagaa

SEQ ID NO: 2691150 - DNA, 25 bp, Homo sapien
tgctcgggccttggatctgcaggcc

SEQ ID NO: 2691151 - DNA, 25 bp, Homo sapien
cggagcctgagccggactctgagga

SEQ ID NO: 2691152 - DNA, 25 bp, Homo sapien
gagcctgagccggactctgaggagg

SEQ ID NO: 2691153 - DNA, 25 bp, Homo sapien
gcagccggagcctgagccggactct

SEQ ID NO: 2691154 - DNA, 25 bp, Homo sapien
agccggagcctgagccggactctga

SEQ ID NO: 2691155 - DNA, 25 bp, Homo sapien
gtgaggggcgcgctgaagtcccggc

SEQ ID NO: 2691156 - DNA, 25 bp, Homo sapien
cccagggcgaaggcccgcgcagggt

SEQ ID NO: 2691157 - DNA, 25 bp, Homo sapien
ggcccgcgcagggtcacggaatggg

SEQ ID NO: 2691158 - DNA, 25 bp, Homo sapien
cgaaggcccgcgcagggtcacggaa

SEQ ID NO: 2691159 - DNA, 25 bp, Homo sapien
gccttcaagcctcggatacacaggg

SEQ ID NO: 2691160 - DNA, 25 bp, Homo sapien
cgagaacccggtctcagacatggga

SEQ ID NO: 2691161 - DNA, 25 bp, Homo sapien
tctgtagagctgtctagacccctgg

SEQ ID NO: 2691162 - DNA, 25 bp, Homo sapien
tcttgggagattcttcgcgggatcg

SEQ ID NO: 2691163 - DNA, 25 bp, Homo sapien
ggaagtggatggacctctgtcttct

SEQ ID NO: 2691164 - DNA, 25 bp, Homo sapien
gtcttctcagattcagcgaggaccc

SEQ ID NO: 2691165 - DNA, 25 bp, Homo sapien
ttctcagattcagcgaggaccccag

SEQ ID NO: 2691166 - DNA, 25 bp, Homo sapien
aaagtgggaagtggatggacctctg

SEQ ID NO: 2691167 - DNA, 25 bp, Homo sapien
ctcccaagaactggacagaagtctc

SEQ ID NO: 2691168 - DNA, 25 bp, Homo sapien
gaagtctcttaaagcccagccggct

SEQ ID NO: 2691169 - DNA, 25 bp, Homo sapien
cctcccaagaactggacagaagtct

SEQ ID NO: 2691170 - DNA, 25 bp, Homo sapien
tggacagaagtctcttaaagcccag

SEQ ID NO: 2691171 - DNA, 25 bp, Homo sapien
ggttcaaaagctgccagtgacccca

SEQ ID NO: 2691172 - DNA, 25 bp, Homo sapien
agctggttcaaaagctgccagtgac

SEQ ID NO: 2691173 - DNA, 25 bp, Homo sapien
cccagctggttcaaaagctgccagt

SEQ ID NO: 2691174 - DNA, 25 bp, Homo sapien
tggttcaaaagctgccagtgacccc

SEQ ID NO: 2691175 - DNA, 25 bp, Homo sapien
gatgcggttctgtgcctccaggtgt

SEQ ID NO: 2691176 - DNA, 25 bp, Homo sapien
acagtgtgaggtgatcgtggcagcc

SEQ ID NO: 2691177 - DNA, 25 bp, Homo sapien
cacagggcagccaatgcagccttgc

SEQ ID NO: 2691178 - DNA, 25 bp, Homo sapien
gcagccaatgcagccttgctgccag

SEQ ID NO: 2691179 - DNA, 25 bp, Homo sapien
ggagttggtggggggattagagctc

SEQ ID NO: 2691180 - DNA, 25 bp, Homo sapien
gagttggtggggggattagagctct

SEQ ID NO: 2691181 - DNA, 25 bp, Homo sapien
catgcccaggaagtgtgattttgct

SEQ ID NO: 2691182 - DNA, 25 bp, Homo sapien
gctgggcctttgatacacttttcat

SEQ ID NO: 2691183 - DNA, 25 bp, Homo sapien
gaagctgggcctttgatacactttt

SEQ ID NO: 2691184 - DNA, 25 bp, Homo sapien
tgtcagaaaggtcctggacctatag

SEQ ID NO: 2691185 - DNA, 25 bp, Homo sapien
tgagccttgctgtcatcaggggcac

SEQ ID NO: 2691186 - DNA, 25 bp, Homo sapien
ctggatctcaggatcgatgtggatc

SEQ ID NO: 2691187 - DNA, 25 bp, Homo sapien
tcgatgtggatcctgtgtgcctgag

SEQ ID NO: 2691188 - DNA, 25 bp, Homo sapien
aggatcgatgtggatcctgtgtgcc

SEQ ID NO: 2691189 - DNA, 25 bp, Homo sapien
tgctcatcatctgaggaacatggga

SEQ ID NO: 2691190 - DNA, 25 bp, Homo sapien
ctcatcatctgaggaacatgggatg

SEQ ID NO: 2691191 - DNA, 25 bp, Homo sapien
tcatcatctgaggaacatgggatgg

SEQ ID NO: 2691192 - DNA, 25 bp, Homo sapien
gctcatcatctgaggaacatgggat

SEQ ID NO: 2691193 - DNA, 25 bp, Homo sapien
cagaatccaggattgcccggagtag

SEQ ID NO: 2691194 - DNA, 25 bp, Homo sapien
gtccagaatccaggattgcccggag

SEQ ID NO: 2691195 - DNA, 25 bp, Homo sapien
ccagaatccaggattgcccggagta

SEQ ID NO: 2691196 - DNA, 25 bp, Homo sapien
gaatccaggattgcccggagtagag

SEQ ID NO: 2691197 - DNA, 25 bp, Homo sapien
tggctgtgtgatagccgcaaaccaa

SEQ ID NO: 2691198 - DNA, 25 bp, Homo sapien
cccgctgcaagcacagtgacttctt

SEQ ID NO: 2691199 - DNA, 25 bp, Homo sapien
tgtgatagccgcaaaccaaggccta

SEQ ID NO: 2691200 - DNA, 25 bp, Homo sapien
aatctcccccgctgcaagcacagtg

SEQ ID NO: 2691201 - DNA, 25 bp, Homo sapien
ggacaggaccagagatatgacttct

SEQ ID NO: 2691202 - DNA, 25 bp, Homo sapien
tctgctagaagcaccacaggatggc

SEQ ID NO: 2691203 - DNA, 25 bp, Homo sapien
gacaggcctgcagcctaagttctgc

SEQ ID NO: 2691204 - DNA, 25 bp, Homo sapien
ttatgccatggcaaaacaaggccct

SEQ ID NO: 2691205 - DNA, 25 bp, Homo sapien
caggtcttggcttcaataccccttc

SEQ ID NO: 2691206 - DNA, 25 bp, Homo sapien
tttgcctgccttaccattcctagcc

SEQ ID NO: 2691207 - DNA, 25 bp, Homo sapien
gaacttgtggtgcaagacctcacct

SEQ ID NO: 2691208 - DNA, 25 bp, Homo sapien
ttttctctgaacttgtggtgcaaga

SEQ ID NO: 2691209 - DNA, 25 bp, Homo sapien
caggatagagaagcccaagagcctt

SEQ ID NO: 2691210 - DNA, 25 bp, Homo sapien
ctgaggtccaggatagagaagccca

SEQ ID NO: 2691211 - DNA, 25 bp, Homo sapien
ccatcagagcaagtttctgagacac

SEQ ID NO: 2691212 - DNA, 25 bp, Homo sapien
gggccatcagagcaagtttctgaga

SEQ ID NO: 2691213 - DNA, 25 bp, Homo sapien
tcctcgatggctccagctagctcca

SEQ ID NO: 2691214 - DNA, 25 bp, Homo sapien
atcccactcggggatgtgtgccagg

SEQ ID NO: 2691215 - DNA, 25 bp, Homo sapien
tggtcctagggccaactgtggtttc

SEQ ID NO: 2691216 - DNA, 25 bp, Homo sapien
cagcatggggacaatgggccctgtg

SEQ ID NO: 2691217 - DNA, 25 bp, Homo sapien
tgcagctgcctctctaggcctgaac

SEQ ID NO: 2691218 - DNA, 25 bp, Homo sapien
gcctctctaggcctgaactctgtgg

SEQ ID NO: 2691219 - DNA, 25 bp, Homo sapien
actgcccctcccacggtcacccatg

SEQ ID NO: 2691220 - DNA, 25 bp, Homo sapien
gggtccactgcagggccatcagagc

SEQ ID NO: 2691221 - DNA, 25 bp, Homo sapien
cttcctgaactgtggtgggtactgg

SEQ ID NO: 2691222 - DNA, 25 bp, Homo sapien
cctgaactgtggtgggtactgggta

SEQ ID NO: 2691223 - DNA, 25 bp, Homo sapien
tcctgaactgtggtgggtactgggt

SEQ ID NO: 2691224 - DNA, 25 bp, Homo sapien
ctgaactgtggtgggtactgggtag

SEQ ID NO: 2691225 - DNA, 25 bp, Homo sapien
gagatcccaggcttggtctgccatc

SEQ ID NO: 2691226 - DNA, 25 bp, Homo sapien
agggggttgtccatatggagatccc

SEQ ID NO: 2691227 - DNA, 25 bp, Homo sapien
ggttgtccatatggagatcccaggc

SEQ ID NO: 2691228 - DNA, 25 bp, Homo sapien
ttctggcccagtcccggtgcctgag

SEQ ID NO: 2691229 - DNA, 25 bp, Homo sapien
ttctgggcatggcaccgaaggcatc

SEQ ID NO: 2691230 - DNA, 25 bp, Homo sapien
tgagatttgagggatcaagggttaa

SEQ ID NO: 2691231 - DNA, 25 bp, Homo sapien
gcaaccagctaagacccaaggatca

SEQ ID NO: 2691232 - DNA, 25 bp, Homo sapien
cttatgagtcagaatgcaaccagct

SEQ ID NO: 2691233 - DNA, 25 bp, Homo sapien
cctcggagcccaggtcgactctgca

SEQ ID NO: 2691234 - DNA, 25 bp, Homo sapien
tgcttgggctccgcggccacgggct

SEQ ID NO: 2691235 - DNA, 25 bp, Homo sapien
gcagcatcctgtacacctcggagcc

SEQ ID NO: 2691236 - DNA, 25 bp, Homo sapien
caggtcgactctgcagtcccggctc

SEQ ID NO: 2691237 - DNA, 25 bp, Homo sapien
gccctgcaagtagcggaaggagcct

SEQ ID NO: 2691238 - DNA, 25 bp, Homo sapien
ctctagcatgccctgcaagtagcgg

SEQ ID NO: 2691239 - DNA, 25 bp, Homo sapien
gcatgccctgcaagtagcggaagga

SEQ ID NO: 2691240 - DNA, 25 bp, Homo sapien
tagcatgccctgcaagtagcggaag

SEQ ID NO: 2691241 - DNA, 25 bp, Homo sapien
gatggggacaggtggcaggcgtctt

SEQ ID NO: 2691242 - DNA, 25 bp, Homo sapien
ggaaggcagatggggacaggtggca

SEQ ID NO: 2691243 - DNA, 25 bp, Homo sapien
ctgcagggagtgggaaggcagatgg

SEQ ID NO: 2691244 - DNA, 25 bp, Homo sapien
ggcagatggggacaggtggcaggcg

SEQ ID NO: 2691245 - DNA, 25 bp, Homo sapien
ccagggcgtagcaaggttgtagcaa

SEQ ID NO: 2691246 - DNA, 25 bp, Homo sapien
tgtagcaagggcgtgggaccgggcc

SEQ ID NO: 2691247 - DNA, 25 bp, Homo sapien
ccgcagagaccgaagagggcaggtg

SEQ ID NO: 2691248 - DNA, 25 bp, Homo sapien
ggtggagagggaatcgggaagccag

SEQ ID NO: 2691249 - DNA, 25 bp, Homo sapien
ttgggcgccagacgggccatcggca

SEQ ID NO: 2691250 - DNA, 25 bp, Homo sapien
tctgcggggtgtttggttgggcgcc

SEQ ID NO: 2691251 - DNA, 25 bp, Homo sapien
catgaacggggtgaggaggtcagaa

SEQ ID NO: 2691252 - DNA, 25 bp, Homo sapien
aacccggagcgtaggtggcatgaac

SEQ ID NO: 2691253 - DNA, 25 bp, Homo sapien
ggccgcagcgcgtgcactcgggcag

SEQ ID NO: 2691254 - DNA, 25 bp, Homo sapien
ctggccgtgggcttgaggttccggg

SEQ ID NO: 2691255 - DNA, 25 bp, Homo sapien
atgccgtggccgcagcgcgtgcact

SEQ ID NO: 2691256 - DNA, 25 bp, Homo sapien
agcggagcgcccagcttgctggccg

SEQ ID NO: 2691257 - DNA, 25 bp, Homo sapien
gactgatgggttcacgactgcgccc

SEQ ID NO: 2691258 - DNA, 25 bp, Homo sapien
cagcgtcgagtgactgatgggttca

SEQ ID NO: 2691259 - DNA, 25 bp, Homo sapien
atgggttcacgactgcgcccgcatc

SEQ ID NO: 2691260 - DNA, 25 bp, Homo sapien
aacgagacaggacagcgtcgagtga

SEQ ID NO: 2691261 - DNA, 25 bp, Homo sapien
tgtcccgtgccttgacgatggtgcc

SEQ ID NO: 2691262 - DNA, 25 bp, Homo sapien
caggccgcagtcactgcacatgaag

SEQ ID NO: 2691263 - DNA, 25 bp, Homo sapien
gatggtagagcttgtcccgtgcctt

SEQ ID NO: 2691264 - DNA, 25 bp, Homo sapien
gcacatgaagcactcgggatggtag

SEQ ID NO: 2691265 - DNA, 25 bp, Homo sapien
ccgctcgtccagaaagaagtaacca

SEQ ID NO: 2691266 - DNA, 25 bp, Homo sapien
acgtcgtagccctcgggcggcttca

SEQ ID NO: 2691267 - DNA, 25 bp, Homo sapien
tctcacagtagagccgctcgtccag

SEQ ID NO: 2691268 - DNA, 25 bp, Homo sapien
ttcacgcgcgccttggcgtggctct

SEQ ID NO: 2691269 - DNA, 25 bp, Homo sapien
ccttggcattggggtacaccgccac

SEQ ID NO: 2691270 - DNA, 25 bp, Homo sapien
ccaccttggcattggggtacaccgc

SEQ ID NO: 2691271 - DNA, 25 bp, Homo sapien
accttggcattggggtacaccgcca

SEQ ID NO: 2691272 - DNA, 25 bp, Homo sapien
caccttggcattggggtacaccgcc

SEQ ID NO: 2691273 - DNA, 25 bp, Homo sapien
aacatatttacaccggccgagcagg

SEQ ID NO: 2691274 - DNA, 25 bp, Homo sapien
accttaagaagcaggcgtgggagca

SEQ ID NO: 2691275 - DNA, 25 bp, Homo sapien
agctttattagagggacagggtgaa

SEQ ID NO: 2691276 - DNA, 25 bp, Homo sapien
gcagaggagctttattagagggaca

SEQ ID NO: 2691277 - DNA, 25 bp, Homo sapien
tactgtactcgggagccatgcatgg

SEQ ID NO: 2691278 - DNA, 25 bp, Homo sapien
ccttcgtattactagagctggcccg

SEQ ID NO: 2691279 - DNA, 25 bp, Homo sapien
caaatgtacgttactctgggctcgc

SEQ ID NO: 2691280 - DNA, 25 bp, Homo sapien
taaactagagggtagatccacgcga

SEQ ID NO: 2691281 - DNA, 25 bp, Homo sapien
gaaaaggtggactagctcagaggat

SEQ ID NO: 2691282 - DNA, 25 bp, Homo sapien
tttaaaacgctaggcagaggaccag

SEQ ID NO: 2691283 - DNA, 25 bp, Homo sapien
tctgaaagcccctgaggtaaggaac

SEQ ID NO: 2691284 - DNA, 25 bp, Homo sapien
gctttaaatgctagtgggaggacca

SEQ ID NO: 2691285 - DNA, 25 bp, Homo sapien
gaatccctactcctagaatcctaga

SEQ ID NO: 2691286 - DNA, 25 bp, Homo sapien
caatttctagcaggccatggtctat

SEQ ID NO: 2691287 - DNA, 25 bp, Homo sapien
taatgcaagcaatagtgagcggctg

SEQ ID NO: 2691288 - DNA, 25 bp, Homo sapien
cataatgtatggtgaaggaagccct

SEQ ID NO: 2691289 - DNA, 25 bp, Homo sapien
gagcttgatgccactgtacacttgg

SEQ ID NO: 2691290 - DNA, 25 bp, Homo sapien
cgttcccgggagctcgcgctgagct

SEQ ID NO: 2691291 - DNA, 25 bp, Homo sapien
ctgaaggcgttggagcgttcccggg

SEQ ID NO: 2691292 - DNA, 25 bp, Homo sapien
gaaacaggctgaaggcgttggagcg

SEQ ID NO: 2691293 - DNA, 25 bp, Homo sapien
ctgttagaaattggggcgcgaagcc

SEQ ID NO: 2691294 - DNA, 25 bp, Homo sapien
cagcgttctcaggacagtgtcttgt

SEQ ID NO: 2691295 - DNA, 25 bp, Homo sapien
gctccccaaggatgttagaacgttc

SEQ ID NO: 2691296 - DNA, 25 bp, Homo sapien
tacgggtgatgacagcgttctcagg

SEQ ID NO: 2691297 - DNA, 25 bp, Homo sapien
gcttcccactgccgctccgaaactt

SEQ ID NO: 2691298 - DNA, 25 bp, Homo sapien
tcccactgccgctccgaaacttgca

SEQ ID NO: 2691299 - DNA, 25 bp, Homo sapien
cccactgccgctccgaaacttgcaa

SEQ ID NO: 2691300 - DNA, 25 bp, Homo sapien
ttcccactgccgctccgaaacttgc

SEQ ID NO: 2691301 - DNA, 25 bp, Homo sapien
gggtccccgccaggaacacgactga

SEQ ID NO: 2691302 - DNA, 25 bp, Homo sapien
ctgacataccattgaagccattggg

SEQ ID NO: 2691303 - DNA, 25 bp, Homo sapien
cgatggtggcgagccggtagcggct

SEQ ID NO: 2691304 - DNA, 25 bp, Homo sapien
gcagcgggacactgttgttgcgcca

SEQ ID NO: 2691305 - DNA, 25 bp, Homo sapien
agggagtctcaaggggggctgacgc

SEQ ID NO: 2691306 - DNA, 25 bp, Homo sapien
gggtcaacggtctcggcctggcacc

SEQ ID NO: 2691307 - DNA, 25 bp, Homo sapien
gagggtcaggcactcccgggtcaac

SEQ ID NO: 2691308 - DNA, 25 bp, Homo sapien
aggcactcccgggtcaacggtctcg

SEQ ID NO: 2691309 - DNA, 25 bp, Homo sapien
cccaatgagcctcaggaggccatct

SEQ ID NO: 2691310 - DNA, 25 bp, Homo sapien
ccagctggggtttcgccttctgtgc

SEQ ID NO: 2691311 - DNA, 25 bp, Homo sapien
tgcacccaatgagcctcaggaggcc

SEQ ID NO: 2691312 - DNA, 25 bp, Homo sapien
ttccttgcacccaatgagcctcagg

SEQ ID NO: 2691313 - DNA, 25 bp, Homo sapien
aaaatcatgccaacccaaactgagg

SEQ ID NO: 2691314 - DNA, 25 bp, Homo sapien
cattaccaaaaagtgcataacgcaa

SEQ ID NO: 2691315 - DNA, 25 bp, Homo sapien
catgtacccactggtatgatgccca

SEQ ID NO: 2691316 - DNA, 25 bp, Homo sapien
gcccagagaatgcatcacttctaag

SEQ ID NO: 2691317 - DNA, 25 bp, Homo sapien
acaaaagcatattctgagatcctgg

SEQ ID NO: 2691318 - DNA, 25 bp, Homo sapien
aaaagcatattctgagatcctggtg

SEQ ID NO: 2691319 - DNA, 25 bp, Homo sapien
aggcaaacagtttggggtgaggcag

SEQ ID NO: 2691320 - DNA, 25 bp, Homo sapien
gaacaaaagcatattctgagatcct

SEQ ID NO: 2691321 - DNA, 25 bp, Homo sapien
ggaaaagcctcactgatgagttctg

SEQ ID NO: 2691322 - DNA, 25 bp, Homo sapien
cattggaggctaaaccaaagcagaa

SEQ ID NO: 2691323 - DNA, 25 bp, Homo sapien
tattagaaaagctaccacagatgga

SEQ ID NO: 2691324 - DNA, 25 bp, Homo sapien
catttacaaacaactaagccagaag

SEQ ID NO: 2691325 - DNA, 25 bp, Homo sapien
gatcccctggttgcactcacgagga

SEQ ID NO: 2691326 - DNA, 25 bp, Homo sapien
ctgggataagggcaatcaaggctct

SEQ ID NO: 2691327 - DNA, 25 bp, Homo sapien
gaatctctgccgtatgaatgagctg

SEQ ID NO: 2691328 - DNA, 25 bp, Homo sapien
tcttgagagcaatcttaggctgtcc

SEQ ID NO: 2691329 - DNA, 25 bp, Homo sapien
tctttgtgatcattctatttggagt

SEQ ID NO: 2691330 - DNA, 25 bp, Homo sapien
tcttctgttaaggcccttgagttac

SEQ ID NO: 2691331 - DNA, 25 bp, Homo sapien
cctctcctagtaattctattatgca

SEQ ID NO: 2691332 - DNA, 25 bp, Homo sapien
gctatgtttaatggtgttccccatt

SEQ ID NO: 2691333 - DNA, 25 bp, Homo sapien
tatatatatttcacggtttgggtct

SEQ ID NO: 2691334 - DNA, 25 bp, Homo sapien
tgagatatgatttatacaccataac

SEQ ID NO: 2691335 - DNA, 25 bp, Homo sapien
tgtcattgtgcagtgtatcagcact

SEQ ID NO: 2691336 - DNA, 25 bp, Homo sapien
taatatgccatggtttgggctgggt

SEQ ID NO: 2691337 - DNA, 25 bp, Homo sapien
cacgaaggagccgaggagcacgcct

SEQ ID NO: 2691338 - DNA, 25 bp, Homo sapien
agctgcccggacacgaaggagccga

SEQ ID NO: 2691339 - DNA, 25 bp, Homo sapien
agccgaggagcacgcctacgaagaa

SEQ ID NO: 2691340 - DNA, 25 bp, Homo sapien
gacagctgcccggacacgaaggagc

SEQ ID NO: 2691341 - DNA, 25 bp, Homo sapien
catggttgcgaagagaacgttcttc

SEQ ID NO: 2691342 - DNA, 25 bp, Homo sapien
ctagtatgaaggctaccacatagtt

SEQ ID NO: 2691343 - DNA, 25 bp, Homo sapien
ggaagctgaagccagtctgtacagc

SEQ ID NO: 2691344 - DNA, 25 bp, Homo sapien
tatgaaggctaccacatagttggag

SEQ ID NO: 2691345 - DNA, 25 bp, Homo sapien
gccccagggacctcttcatgacctt

SEQ ID NO: 2691346 - DNA, 25 bp, Homo sapien
tgaccttgtaactgatgagtcttcc

SEQ ID NO: 2691347 - DNA, 25 bp, Homo sapien
cccagggacctcttcatgaccttgt

SEQ ID NO: 2691348 - DNA, 25 bp, Homo sapien
ttcatgaccttgtaactgatgagtc

SEQ ID NO: 2691349 - DNA, 25 bp, Homo sapien
tctgttccagatggtccttcaggtc

SEQ ID NO: 2691350 - DNA, 25 bp, Homo sapien
tctctggcttcaccgtgactctcta

SEQ ID NO: 2691351 - DNA, 25 bp, Homo sapien
gtgctgcccattctatagaaccggg

SEQ ID NO: 2691352 - DNA, 25 bp, Homo sapien
gctccagaatcaccctgtgccacta

SEQ ID NO: 2691353 - DNA, 25 bp, Homo sapien
atgtgggaccacatgctgcatggga

SEQ ID NO: 2691354 - DNA, 25 bp, Homo sapien
tcaccctgcatgtgggaccacatgc

SEQ ID NO: 2691355 - DNA, 25 bp, Homo sapien
cctgcatgtgggaccacatgctgca

SEQ ID NO: 2691356 - DNA, 25 bp, Homo sapien
tgcatgtgggaccacatgctgcatg

SEQ ID NO: 2691357 - DNA, 25 bp, Homo sapien
tgactggctggcttgactgatcttc

SEQ ID NO: 2691358 - DNA, 25 bp, Homo sapien
cttccatggccttactttccccttg

SEQ ID NO: 2691359 - DNA, 25 bp, Homo sapien
tggctggcttgactgatcttccatg

SEQ ID NO: 2691360 - DNA, 25 bp, Homo sapien
tccatggccttactttccccttggc

SEQ ID NO: 2691361 - DNA, 25 bp, Homo sapien
aaaaaatgtgcacactcctaatgta

SEQ ID NO: 2691362 - DNA, 25 bp, Homo sapien
tggcagcagcatatagccaactgca

SEQ ID NO: 2691363 - DNA, 25 bp, Homo sapien
aaaaatgtgcacactcctaatgtag

SEQ ID NO: 2691364 - DNA, 25 bp, Homo sapien
atatagccaactgcaaaaaatgtgc

SEQ ID NO: 2691365 - DNA, 25 bp, Homo sapien
tacattagttggatagagtgagatt

SEQ ID NO: 2691366 - DNA, 25 bp, Homo sapien
tatatgatagggaagcttgaagaat

SEQ ID NO: 2691367 - DNA, 25 bp, Homo sapien
ctaatcgttatatgatagggaagct

SEQ ID NO: 2691368 - DNA, 25 bp, Homo sapien
ttacattagttggatagagtgagat

SEQ ID NO: 2691369 - DNA, 25 bp, Homo sapien
cactcagcttgtcagtgctggtccc

SEQ ID NO: 2691370 - DNA, 25 bp, Homo sapien
tgggatgttcagaagaaagctattt

SEQ ID NO: 2691371 - DNA, 25 bp, Homo sapien
tgtccctggtacagtatgcccacag

SEQ ID NO: 2691372 - DNA, 25 bp, Homo sapien
tgcaaggatgggatgttcagaagaa

SEQ ID NO: 2691373 - DNA, 25 bp, Homo sapien
atcagccatcggggagattcaggaa

SEQ ID NO: 2691374 - DNA, 25 bp, Homo sapien
tatcagccatcggggagattcagga

SEQ ID NO: 2691375 - DNA, 25 bp, Homo sapien
gggatatcagccatcggggagattc

SEQ ID NO: 2691376 - DNA, 25 bp, Homo sapien
gatatcagccatcggggagattcag

SEQ ID NO: 2691377 - DNA, 25 bp, Homo sapien
ttttgcagctttttggatgatatct

SEQ ID NO: 2691378 - DNA, 25 bp, Homo sapien
tttgcagctttttggatgatatctt

SEQ ID NO: 2691379 - DNA, 25 bp, Homo sapien
cactgctggtacagctatgttgttc

SEQ ID NO: 2691380 - DNA, 25 bp, Homo sapien
gctggtacagctatgttgttcattt

SEQ ID NO: 2691381 - DNA, 25 bp, Homo sapien
tccagttcaggctagatgtgcatca

SEQ ID NO: 2691382 - DNA, 25 bp, Homo sapien
cactatttggattgtagagccccag

SEQ ID NO: 2691383 - DNA, 25 bp, Homo sapien
tttgtggccctacagtgcatgcgca

SEQ ID NO: 2691384 - DNA, 25 bp, Homo sapien
taaatgcaggttgccaggttcctcc

SEQ ID NO: 2691385 - DNA, 25 bp, Homo sapien
tatggcaatattccgagtcctgaac

SEQ ID NO: 2691386 - DNA, 25 bp, Homo sapien
gagtcctgaacaggtccagaatgaa

SEQ ID NO: 2691387 - DNA, 25 bp, Homo sapien
catagcagcaaagacataatggtca

SEQ ID NO: 2691388 - DNA, 25 bp, Homo sapien
taatggtcattatggcaatattccg

SEQ ID NO: 2691389 - DNA, 25 bp, Homo sapien
gaaacagttcaggtaggcatctcca

SEQ ID NO: 2691390 - DNA, 25 bp, Homo sapien
ctgggcagggttcgcaatagcagcc

SEQ ID NO: 2691391 - DNA, 25 bp, Homo sapien
ccatgtaaattaggagcatccagag

SEQ ID NO: 2691392 - DNA, 25 bp, Homo sapien
gctatgatataacgcctgggcaggg

SEQ ID NO: 2691393 - DNA, 25 bp, Homo sapien
caggtaccagttgaatgaagagaag

SEQ ID NO: 2691394 - DNA, 25 bp, Homo sapien
ccacaggtaccagttgaatgaagag

SEQ ID NO: 2691395 - DNA, 25 bp, Homo sapien
aggtaccagttgaatgaagagaagc

SEQ ID NO: 2691396 - DNA, 25 bp, Homo sapien
cacaggtaccagttgaatgaagaga

SEQ ID NO: 2691397 - DNA, 25 bp, Homo sapien
taaagattcagaccagaaaaccact

SEQ ID NO: 2691398 - DNA, 25 bp, Homo sapien
ttgggcatggacaaagatggagctc

SEQ ID NO: 2691399 - DNA, 25 bp, Homo sapien
tcattaatgcattcagtgacctttg

SEQ ID NO: 2691400 - DNA, 25 bp, Homo sapien
attatgagaacgtcagacacaaggg

SEQ ID NO: 2691401 - DNA, 25 bp, Homo sapien
atgttcctgaccagggttgggtaga

SEQ ID NO: 2691402 - DNA, 25 bp, Homo sapien
agaggtgatcccaaattttcccagc

SEQ ID NO: 2691403 - DNA, 25 bp, Homo sapien
actctggaggccgtggatgtgaccc

SEQ ID NO: 2691404 - DNA, 25 bp, Homo sapien
tttcccagcatgaccagaccaatgg

SEQ ID NO: 2691405 - DNA, 25 bp, Homo sapien
tctcaggtgtggcacagggcaactg

SEQ ID NO: 2691406 - DNA, 25 bp, Homo sapien
gtgtctgaccactggaccatctgag

SEQ ID NO: 2691407 - DNA, 25 bp, Homo sapien
tgaacatgccgctgaaacacctctg

SEQ ID NO: 2691408 - DNA, 25 bp, Homo sapien
tacagagcttacagaggaacagcac

SEQ ID NO: 2691409 - DNA, 25 bp, Homo sapien
tacccatgacgatgtagggcagcat

SEQ ID NO: 2691410 - DNA, 25 bp, Homo sapien
tggaagagtcattcccaaactttca

SEQ ID NO: 2691411 - DNA, 25 bp, Homo sapien
gctctaaggtttctggaagagtcat

SEQ ID NO: 2691412 - DNA, 25 bp, Homo sapien
aatcaggacagtcagactacccatg

SEQ ID NO: 2691413 - DNA, 25 bp, Homo sapien
tgtctccattgagtctcttgttttt

SEQ ID NO: 2691414 - DNA, 25 bp, Homo sapien
ctgtctccattgagtctcttgtttt

SEQ ID NO: 2691415 - DNA, 25 bp, Homo sapien
tctgtctccattgagtctcttgttt

SEQ ID NO: 2691416 - DNA, 25 bp, Homo sapien
tccagagtttactgtatgacgagca

SEQ ID NO: 2691417 - DNA, 25 bp, Homo sapien
tgacgagcatttcttgatagcaagg

SEQ ID NO: 2691418 - DNA, 25 bp, Homo sapien
ggtgtcaatcgttacagtcagtcca

SEQ ID NO: 2691419 - DNA, 25 bp, Homo sapien
tgggaacaacgaatttctccacagg

SEQ ID NO: 2691420 - DNA, 25 bp, Homo sapien
ttcataaaacaagtccttagagacc

SEQ ID NO: 2691421 - DNA, 25 bp, Homo sapien
cataaaacaagtccttagagaccta

SEQ ID NO: 2691422 - DNA, 25 bp, Homo sapien
agattcataaaacaagtccttagag

SEQ ID NO: 2691423 - DNA, 25 bp, Homo sapien
taaaacaagtccttagagacctaca

SEQ ID NO: 2691424 - DNA, 25 bp, Homo sapien
gcaaaataaccagctaacatcataa

SEQ ID NO: 2691425 - DNA, 25 bp, Homo sapien
tgacaggatcaaattcacacataac

SEQ ID NO: 2691426 - DNA, 25 bp, Homo sapien
cccatccgtgtcctgtattcaggag

SEQ ID NO: 2691427 - DNA, 25 bp, Homo sapien
atgaagaaactgcatgaactaacaa

SEQ ID NO: 2691428 - DNA, 25 bp, Homo sapien
gctggagggatcacaaggtataaac

SEQ ID NO: 2691429 - DNA, 25 bp, Homo sapien
gatacagtgtacatactaggcccaa

SEQ ID NO: 2691430 - DNA, 25 bp, Homo sapien
aaagatgaaatctagccttgagccc

SEQ ID NO: 2691431 - DNA, 25 bp, Homo sapien
tatctacggccaactgggtaaacca

SEQ ID NO: 2691432 - DNA, 25 bp, Homo sapien
tatttgggatatgaaccacttatca

SEQ ID NO: 2691433 - DNA, 25 bp, Homo sapien
ttacatatttgggatatgaaccact

SEQ ID NO: 2691434 - DNA, 25 bp, Homo sapien
gggatatgaaccacttatcagatac

SEQ ID NO: 2691435 - DNA, 25 bp, Homo sapien
ggatatgaaccacttatcagataca

SEQ ID NO: 2691436 - DNA, 25 bp, Homo sapien
tgtcgagatgactactgacagcttg

SEQ ID NO: 2691437 - DNA, 25 bp, Homo sapien
tccttcagcatcagttgggtgtcga

SEQ ID NO: 2691438 - DNA, 25 bp, Homo sapien
tgaggcccaccaacaaccttgagtg

SEQ ID NO: 2691439 - DNA, 25 bp, Homo sapien
tggaccagaaccactcagttaagtg

SEQ ID NO: 2691440 - DNA, 25 bp, Homo sapien
tccgcggagggtaggctcgcgagct

SEQ ID NO: 2691441 - DNA, 25 bp, Homo sapien
aggcgacccaagaccgtccgcggag

SEQ ID NO: 2691442 - DNA, 25 bp, Homo sapien
cacgaccagggaaggttgcgggcct

SEQ ID NO: 2691443 - DNA, 25 bp, Homo sapien
cgcggctggccttacatagggcgca

SEQ ID NO: 2691444 - DNA, 25 bp, Homo sapien
gccgccctcagaggcccacagagcg

SEQ ID NO: 2691445 - DNA, 25 bp, Homo sapien
ccctcagaggcccacagagcgcggc

SEQ ID NO: 2691446 - DNA, 25 bp, Homo sapien
tcagaggcccacagagcgcggcctg

SEQ ID NO: 2691447 - DNA, 25 bp, Homo sapien
cagagcgcggcctggggtcggggaa

SEQ ID NO: 2691448 - DNA, 25 bp, Homo sapien
cagtgggacagtgtggttgcgccag

SEQ ID NO: 2691449 - DNA, 25 bp, Homo sapien
gggtcgctatcaggaacacggagga

SEQ ID NO: 2691450 - DNA, 25 bp, Homo sapien
gtgctccggggtcgctatcaggaac

SEQ ID NO: 2691451 - DNA, 25 bp, Homo sapien
aacacggaggacaggccggtgaagc

SEQ ID NO: 2691452 - DNA, 25 bp, Homo sapien
cagccccagcaggggccggcaccca

SEQ ID NO: 2691453 - DNA, 25 bp, Homo sapien
tcagccccagcaggggccggcaccc

SEQ ID NO: 2691454 - DNA, 25 bp, Homo sapien
agccccagcaggggccggcacccac

SEQ ID NO: 2691455 - DNA, 25 bp, Homo sapien
gagagaggagctcgggttcaaggac

SEQ ID NO: 2691456 - DNA, 25 bp, Homo sapien
gcgacaggtcctccgagccctggtc

SEQ ID NO: 2691457 - DNA, 25 bp, Homo sapien
gagctcgggttcaaggaccgcgaca

SEQ ID NO: 2691458 - DNA, 25 bp, Homo sapien
tcgggttcaaggaccgcgacaggtc

SEQ ID NO: 2691459 - DNA, 25 bp, Homo sapien
ccatcgctagggtgttgaccgttgg

SEQ ID NO: 2691460 - DNA, 25 bp, Homo sapien
gggagtgacagcgtccagtgcgcat

SEQ ID NO: 2691461 - DNA, 25 bp, Homo sapien
tggagggtctccatcgctagggtgt

SEQ ID NO: 2691462 - DNA, 25 bp, Homo sapien
gggtctccatcgctagggtgttgac

SEQ ID NO: 2691463 - DNA, 25 bp, Homo sapien
cagggaggagcacactgtggctgga

SEQ ID NO: 2691464 - DNA, 25 bp, Homo sapien
ctgtgcagggaggagcacactgtgg

SEQ ID NO: 2691465 - DNA, 25 bp, Homo sapien
gaggagcacactgtggctggaggtc

SEQ ID NO: 2691466 - DNA, 25 bp, Homo sapien
tgcagggaggagcacactgtggctg

SEQ ID NO: 2691467 - DNA, 25 bp, Homo sapien
ctggtaccctcttcaaagtggccat

SEQ ID NO: 2691468 - DNA, 25 bp, Homo sapien
caaagtggccatcaggacgggaggc

SEQ ID NO: 2691469 - DNA, 25 bp, Homo sapien
agagcatcgcccagggaccgccagg

SEQ ID NO: 2691470 - DNA, 25 bp, Homo sapien
agggccatagagcatcgcccaggga

SEQ ID NO: 2691471 - DNA, 25 bp, Homo sapien
aaatcaagagactagaggaaaaacg

SEQ ID NO: 2691472 - DNA, 25 bp, Homo sapien
gaaatcaagagactagaggaaaaac

SEQ ID NO: 2691473 - DNA, 25 bp, Homo sapien
agaaatcaagagactagaggaaaaa

SEQ ID NO: 2691474 - DNA, 25 bp, Homo sapien
ggcatgaccagattgtcgtttttgg

SEQ ID NO: 2691475 - DNA, 25 bp, Homo sapien
agggcatgaccagattgtcgttttt

SEQ ID NO: 2691476 - DNA, 25 bp, Homo sapien
catgaccagattgtcgtttttgggt

SEQ ID NO: 2691477 - DNA, 25 bp, Homo sapien
tgaccagattgtcgtttttgggttg

SEQ ID NO: 2691478 - DNA, 25 bp, Homo sapien
ttttcatagcattgtaggccccact

SEQ ID NO: 2691479 - DNA, 25 bp, Homo sapien
tcatagcattgtaggccccactgtc

SEQ ID NO: 2691480 - DNA, 25 bp, Homo sapien
atagcattgtaggccccactgtctt

SEQ ID NO: 2691481 - DNA, 25 bp, Homo sapien
tttcatagcattgtaggccccactg

SEQ ID NO: 2691482 - DNA, 25 bp, Homo sapien
cacgaagaacaaggagattgtgagt

SEQ ID NO: 2691483 - DNA, 25 bp, Homo sapien
cagcacacccacgaagaacaaggag

SEQ ID NO: 2691484 - DNA, 25 bp, Homo sapien
cacccacgaagaacaaggagattgt

SEQ ID NO: 2691485 - DNA, 25 bp, Homo sapien
gcacacccacgaagaacaaggagat

SEQ ID NO: 2691486 - DNA, 25 bp, Homo sapien
gccaggctactgcagaagtgaatca

SEQ ID NO: 2691487 - DNA, 25 bp, Homo sapien
gaatgctggtcttcttgggactaca

SEQ ID NO: 2691488 - DNA, 25 bp, Homo sapien
gacaccgtggcactactacagatct

SEQ ID NO: 2691489 - DNA, 25 bp, Homo sapien
tggcatattacctagtcaaccgggt

SEQ ID NO: 2691490 - DNA, 25 bp, Homo sapien
gaacttcatgaaagctacggacctc

SEQ ID NO: 2691491 - DNA, 25 bp, Homo sapien
tatctggctgcgcatggtgtctcac

SEQ ID NO: 2691492 - DNA, 25 bp, Homo sapien
gaagacacaacataatggacccctc

SEQ ID NO: 2691493 - DNA, 25 bp, Homo sapien
caccggctaacccaccgatttgtgg

SEQ ID NO: 2691494 - DNA, 25 bp, Homo sapien
cacaaggcaggctggtataatctct

SEQ ID NO: 2691495 - DNA, 25 bp, Homo sapien
gaaactctcgcctggtagtagactc

SEQ ID NO: 2691496 - DNA, 25 bp, Homo sapien
taaaatgcccaggaaaatgccctag

SEQ ID NO: 2691497 - DNA, 25 bp, Homo sapien
gcaccagtccttggcagttcagggt

SEQ ID NO: 2691498 - DNA, 25 bp, Homo sapien
ctgcatgcccatggtcacgaacagc

SEQ ID NO: 2691499 - DNA, 25 bp, Homo sapien
caaggacaaacagcacgacaaacat

SEQ ID NO: 2691500 - DNA, 25 bp, Homo sapien
gacaaatgctgccacatagttggag

SEQ ID NO: 2691501 - DNA, 25 bp, Homo sapien
aaattcttcgagaagatctgcagga

SEQ ID NO: 2691502 - DNA, 25 bp, Homo sapien
ctcaactccaacctgatggtcatac

SEQ ID NO: 2691503 - DNA, 25 bp, Homo sapien
tacgaactgacttgccaagaatttc

SEQ ID NO: 2691504 - DNA, 25 bp, Homo sapien
atacgaactgacttgccaagaattt

SEQ ID NO: 2691505 - DNA, 25 bp, Homo sapien
acgaactgacttgccaagaatttct

SEQ ID NO: 2691506 - DNA, 25 bp, Homo sapien
cgccagtctcggatgaagtaagcaa

SEQ ID NO: 2691507 - DNA, 25 bp, Homo sapien
gcagcatccgccagtctcggatgaa

SEQ ID NO: 2691508 - DNA, 25 bp, Homo sapien
acagtggcagcaccatgtagccaaa

SEQ ID NO: 2691509 - DNA, 25 bp, Homo sapien
gcaccatgtagccaaatgcataaaa

SEQ ID NO: 2691510 - DNA, 25 bp, Homo sapien
tgcagaaccagagcttgtggaatgt

SEQ ID NO: 2691511 - DNA, 25 bp, Homo sapien
gaagcaaagagctgatccacacgca

SEQ ID NO: 2691512 - DNA, 25 bp, Homo sapien
tggtgatcacaagccagaagcaaag

SEQ ID NO: 2691513 - DNA, 25 bp, Homo sapien
tctgtgcatgtctatgtcagcccag

SEQ ID NO: 2691514 - DNA, 25 bp, Homo sapien
ctggcagtacaaggtccaatctcag

SEQ ID NO: 2691515 - DNA, 25 bp, Homo sapien
cagtacaaggtccaatctcagtgag

SEQ ID NO: 2691516 - DNA, 25 bp, Homo sapien
aaggtccaatctcagtgaggcctcc

SEQ ID NO: 2691517 - DNA, 25 bp, Homo sapien
tacaaggtccaatctcagtgaggcc

SEQ ID NO: 2691518 - DNA, 25 bp, Homo sapien
tcgggtcaaagatagtggaaggcac

SEQ ID NO: 2691519 - DNA, 25 bp, Homo sapien
gagagatgagccatcggggggactc

SEQ ID NO: 2691520 - DNA, 25 bp, Homo sapien
tcttcaaatcgtccctgagagatga

SEQ ID NO: 2691521 - DNA, 25 bp, Homo sapien
tctgcctcttcaaatcgtccctgag

SEQ ID NO: 2691522 - DNA, 25 bp, Homo sapien
aacttctgagtgttaacagggcccg

SEQ ID NO: 2691523 - DNA, 25 bp, Homo sapien
ggtgacaagccaccttaggtataag

SEQ ID NO: 2691524 - DNA, 25 bp, Homo sapien
aatgaaaatctgaaacccgtggtga

SEQ ID NO: 2691525 - DNA, 25 bp, Homo sapien
tgaaaggcctattactcaaaaagag

SEQ ID NO: 2691526 - DNA, 25 bp, Homo sapien
gagtgttacgtttctaagaacagta

SEQ ID NO: 2691527 - DNA, 25 bp, Homo sapien
cagtaagtatactgactgtgtttta

SEQ ID NO: 2691528 - DNA, 25 bp, Homo sapien
gaggtggtcagagactcagagcaca

SEQ ID NO: 2691529 - DNA, 25 bp, Homo sapien
atacttgaatccctggcatcttagc

SEQ ID NO: 2691530 - DNA, 25 bp, Homo sapien
cagcattatggacatgatggtgacc

SEQ ID NO: 2691531 - DNA, 25 bp, Homo sapien
aagcagatccagaatgttgtgggac

SEQ ID NO: 2691532 - DNA, 25 bp, Homo sapien
gatggtgaccatccggatattccag

SEQ ID NO: 2691533 - DNA, 25 bp, Homo sapien
tccaggttcgaagcagatccagaat

SEQ ID NO: 2691534 - DNA, 25 bp, Homo sapien
ggaccgtttatggacatcccaggag

SEQ ID NO: 2691535 - DNA, 25 bp, Homo sapien
caactcagggaatggtgaactgcct

SEQ ID NO: 2691536 - DNA, 25 bp, Homo sapien
gagtatgtgcatgagtccccaggaa

SEQ ID NO: 2691537 - DNA, 25 bp, Homo sapien
ggttcggccgctgagcaaaagctag

SEQ ID NO: 2691538 - DNA, 25 bp, Homo sapien
gctggaaaagcagtatccacatctt

SEQ ID NO: 2691539 - DNA, 25 bp, Homo sapien
gaaagctggaaaagcagtatccaca

SEQ ID NO: 2691540 - DNA, 25 bp, Homo sapien
agaaagctggaaaagcagtatccac

SEQ ID NO: 2691541 - DNA, 25 bp, Homo sapien
aagctggaaaagcagtatccacatc

SEQ ID NO: 2691542 - DNA, 25 bp, Homo sapien
tcaaccatcgctgaaaggaagcagt

SEQ ID NO: 2691543 - DNA, 25 bp, Homo sapien
caaagatgtccccatgcaagttagg

SEQ ID NO: 2691544 - DNA, 25 bp, Homo sapien
agttaggagtatcaagcgaaagccc

SEQ ID NO: 2691545 - DNA, 25 bp, Homo sapien
atgaagagaaggacactgccaccca

SEQ ID NO: 2691546 - DNA, 25 bp, Homo sapien
cactgcaggcactatggaattaact

SEQ ID NO: 2691547 - DNA, 25 bp, Homo sapien
gaggctcccaaatctacaggtacac

SEQ ID NO: 2691548 - DNA, 25 bp, Homo sapien
gcctgatgggcccaaaagtgaccat

SEQ ID NO: 2691549 - DNA, 25 bp, Homo sapien
ctagggtgtacgttccatgagggcc

SEQ ID NO: 2691550 - DNA, 25 bp, Homo sapien
cacgtagaccatggaaaaggcagcc

SEQ ID NO: 2691551 - DNA, 25 bp, Homo sapien
aaaggcagccgtgactccaaacttg

SEQ ID NO: 2691552 - DNA, 25 bp, Homo sapien
tcaccactgtgggatacagctcggc

SEQ ID NO: 2691553 - DNA, 25 bp, Homo sapien
caaggtaaacgaagtagggagacag

SEQ ID NO: 2691554 - DNA, 25 bp, Homo sapien
cccatgagaatgtagggcaggaagc

SEQ ID NO: 2691555 - DNA, 25 bp, Homo sapien
ggctgtcaggatggtcagacttccc

SEQ ID NO: 2691556 - DNA, 25 bp, Homo sapien
cctttgactcttagcatctggtcaa

SEQ ID NO: 2691557 - DNA, 25 bp, Homo sapien
agaaacaaggtgaggatggctgtca

SEQ ID NO: 2691558 - DNA, 25 bp, Homo sapien
tgcttttaaggattgtgggcctttc

SEQ ID NO: 2691559 - DNA, 25 bp, Homo sapien
tttaaggattgtgggcctttcttga

SEQ ID NO: 2691560 - DNA, 25 bp, Homo sapien
gctgtgcttttaaggattgtgggcc

SEQ ID NO: 2691561 - DNA, 25 bp, Homo sapien
ttagaaggctgtgcttttaaggatt

SEQ ID NO: 2691562 - DNA, 25 bp, Homo sapien
cacaagctggccatttctggcaaga

SEQ ID NO: 2691563 - DNA, 25 bp, Homo sapien
ggtgcccatccaggagcaagtcaga

SEQ ID NO: 2691564 - DNA, 25 bp, Homo sapien
aggactcggagtctgcacaagctgg

SEQ ID NO: 2691565 - DNA, 25 bp, Homo sapien
caagtcagacacaggtcaagaggac

SEQ ID NO: 2691566 - DNA, 25 bp, Homo sapien
cagatctcactggttctagtgaaaa

SEQ ID NO: 2691567 - DNA, 25 bp, Homo sapien
tgtaatagttaggacttagatgaag

SEQ ID NO: 2691568 - DNA, 25 bp, Homo sapien
tcattgtaatagttaggacttagat

SEQ ID NO: 2691569 - DNA, 25 bp, Homo sapien
gatgaagttgtctgtaggtagcccc

SEQ ID NO: 2691570 - DNA, 25 bp, Homo sapien
aaaatgtacatttagcatatgcttc

SEQ ID NO: 2691571 - DNA, 25 bp, Homo sapien
gggacttagacctctagccttatta

SEQ ID NO: 2691572 - DNA, 25 bp, Homo sapien
tgggggacttagacctctagcctta

SEQ ID NO: 2691573 - DNA, 25 bp, Homo sapien
acttagacctctagccttattaggg

SEQ ID NO: 2691574 - DNA, 25 bp, Homo sapien
gcaaggaggtttccacagcagtgga

SEQ ID NO: 2691575 - DNA, 25 bp, Homo sapien
ggtcttaagagctcacacatcagtg

SEQ ID NO: 2691576 - DNA, 25 bp, Homo sapien
gacactgtttttggcacttagagaa

SEQ ID NO: 2691577 - DNA, 25 bp, Homo sapien
tggtaaggccttgcaccagtggcag

SEQ ID NO: 2691578 - DNA, 25 bp, Homo sapien
aggctgacagtaggcgagtttacat

SEQ ID NO: 2691579 - DNA, 25 bp, Homo sapien
tcccaagctgtcaggaagcccagat

SEQ ID NO: 2691580 - DNA, 25 bp, Homo sapien
cagggagcccatatccatctcatgg

SEQ ID NO: 2691581 - DNA, 25 bp, Homo sapien
tcaggaagcccagatactattagtc

SEQ ID NO: 2691582 - DNA, 25 bp, Homo sapien
gacctgaccgctggcggcgcctcgg

SEQ ID NO: 2691583 - DNA, 25 bp, Homo sapien
ggcccgggacctgaccgctggcggc

SEQ ID NO: 2691584 - DNA, 25 bp, Homo sapien
cagccggcccgggacctgaccgctg

SEQ ID NO: 2691585 - DNA, 25 bp, Homo sapien
gggacctgaccgctggcggcgcctc

SEQ ID NO: 2691586 - DNA, 25 bp, Homo sapien
cggcgcttcggccgaccgggacagg

SEQ ID NO: 2691587 - DNA, 25 bp, Homo sapien
ggctgggcaggcccgccgtaagtgg

SEQ ID NO: 2691588 - DNA, 25 bp, Homo sapien
cgtaagtggaaaggcgcccgcggcg

SEQ ID NO: 2691589 - DNA, 25 bp, Homo sapien
gcaggcccgccgtaagtggaaaggc

SEQ ID NO: 2691590 - DNA, 25 bp, Homo sapien
tcattttcctcaacgacatcggcag

SEQ ID NO: 2691591 - DNA, 25 bp, Homo sapien
agtcctggccacgaccgctttcatt

SEQ ID NO: 2691592 - DNA, 25 bp, Homo sapien
attctgcgcccctcgcctgaaacgg

SEQ ID NO: 2691593 - DNA, 25 bp, Homo sapien
catcggcaggaaagcgaaagcgaaa

SEQ ID NO: 2691594 - DNA, 25 bp, Homo sapien
ccatcctcaggacttgcggcgggga

SEQ ID NO: 2691595 - DNA, 25 bp, Homo sapien
tggctggtggctggcattcaactct

SEQ ID NO: 2691596 - DNA, 25 bp, Homo sapien
ggcattcaactctccagcagccagg

SEQ ID NO: 2691597 - DNA, 25 bp, Homo sapien
ttctctgctggccatcctcaggact

SEQ ID NO: 2691598 - DNA, 25 bp, Homo sapien
gtctgaaggctctgaataccgaaat

SEQ ID NO: 2691599 - DNA, 25 bp, Homo sapien
tgcctgcttgcagcttccttgtggc

SEQ ID NO: 2691600 - DNA, 25 bp, Homo sapien
gagctgcccattgcctacactgata

SEQ ID NO: 2691601 - DNA, 25 bp, Homo sapien
tggacttccccatggaggccagatg

SEQ ID NO: 2691602 - DNA, 25 bp, Homo sapien
gattcaggactttatgtgagctccc

SEQ ID NO: 2691603 - DNA, 25 bp, Homo sapien
ttggcagattcaggactttatgtga

SEQ ID NO: 2691604 - DNA, 25 bp, Homo sapien
cagattcaggactttatgtgagctc

SEQ ID NO: 2691605 - DNA, 25 bp, Homo sapien
tcaggactttatgtgagctcccaca

SEQ ID NO: 2691606 - DNA, 25 bp, Homo sapien
aaaaacagcactggagctgggcatg

SEQ ID NO: 2691607 - DNA, 25 bp, Homo sapien
tgagtttgtaatcagtaataaaaat

SEQ ID NO: 2691608 - DNA, 25 bp, Homo sapien
aagaaaaacagcactggagctgggc

SEQ ID NO: 2691609 - DNA, 25 bp, Homo sapien
taataaaaatacactctccaaagaa

SEQ ID NO: 2691610 - DNA, 25 bp, Homo sapien
gatgaactagcagtacatctacgtg

SEQ ID NO: 2691611 - DNA, 25 bp, Homo sapien
gtattttaaacagggcaagccatgg

SEQ ID NO: 2691612 - DNA, 25 bp, Homo sapien
catctacgtggtggaatacatacca

SEQ ID NO: 2691613 - DNA, 25 bp, Homo sapien
ggacactgcactgattggtacaagg

SEQ ID NO: 2691614 - DNA, 25 bp, Homo sapien
aaaacctggctcttgtaggaacaca

SEQ ID NO: 2691615 - DNA, 25 bp, Homo sapien
tagtagcagtttcgttcacagatct

SEQ ID NO: 2691616 - DNA, 25 bp, Homo sapien
tggcaaaaaagaatccgacgagagc

SEQ ID NO: 2691617 - DNA, 25 bp, Homo sapien
gagagctatgcctccaccaaaggca

SEQ ID NO: 2691618 - DNA, 25 bp, Homo sapien
tgggggacaatcacagtgcaaagct

SEQ ID NO: 2691619 - DNA, 25 bp, Homo sapien
ggacaatcacagtgcaaagctgaga

SEQ ID NO: 2691620 - DNA, 25 bp, Homo sapien
tattcccatacagggggaatgcaaa

SEQ ID NO: 2691621 - DNA, 25 bp, Homo sapien
gctgggggacaatcacagtgcaaag

SEQ ID NO: 2691622 - DNA, 25 bp, Homo sapien
aacatagctgtcttctcgccgccag

SEQ ID NO: 2691623 - DNA, 25 bp, Homo sapien
ctgtctctgggttgtccgctctgga

SEQ ID NO: 2691624 - DNA, 25 bp, Homo sapien
gtaggtgtcagaccacctggtctca

SEQ ID NO: 2691625 - DNA, 25 bp, Homo sapien
gatctatggcaacagaatccacagg

SEQ ID NO: 2691626 - DNA, 25 bp, Homo sapien
tctgaagtggaggttcaaaataggg

SEQ ID NO: 2691627 - DNA, 25 bp, Homo sapien
actgctgtgcaccatacactcctga

SEQ ID NO: 2691628 - DNA, 25 bp, Homo sapien
catttcaaagcctaggactagtcta

SEQ ID NO: 2691629 - DNA, 25 bp, Homo sapien
tgagaacatcagaactatttctctg

SEQ ID NO: 2691630 - DNA, 25 bp, Homo sapien
aagctacatcatacaattgacttcc

SEQ ID NO: 2691631 - DNA, 25 bp, Homo sapien
gagtcacaagctacatcatacaatt

SEQ ID NO: 2691632 - DNA, 25 bp, Homo sapien
cctgggagtcacaagctacatcata

SEQ ID NO: 2691633 - DNA, 25 bp, Homo sapien
cacaagctacatcatacaattgact

SEQ ID NO: 2691634 - DNA, 25 bp, Homo sapien
ctctggtgtagtatgcagcacattg

SEQ ID NO: 2691635 - DNA, 25 bp, Homo sapien
gtgtgtacttgtccaactcctccat

SEQ ID NO: 2691636 - DNA, 25 bp, Homo sapien
tctggtgtagtatgcagcacattgt

SEQ ID NO: 2691637 - DNA, 25 bp, Homo sapien
cattgtgtgtgtacttgtccaactc

SEQ ID NO: 2691638 - DNA, 25 bp, Homo sapien
gtgtgttttcctccaataggctaca

SEQ ID NO: 2691639 - DNA, 25 bp, Homo sapien
tccaataggctacaaactctggcac

SEQ ID NO: 2691640 - DNA, 25 bp, Homo sapien
cctccaataggctacaaactctggc

SEQ ID NO: 2691641 - DNA, 25 bp, Homo sapien
ttcctccaataggctacaaactctg

SEQ ID NO: 2691642 - DNA, 25 bp, Homo sapien
tccaggaagtcaacgcaaagtctct

SEQ ID NO: 2691643 - DNA, 25 bp, Homo sapien
gaggctgctacattttcccaagtgc

SEQ ID NO: 2691644 - DNA, 25 bp, Homo sapien
gtgggcccacaaccaactggcttgg

SEQ ID NO: 2691645 - DNA, 25 bp, Homo sapien
ccaaggctacgttgggcagtcccaa

SEQ ID NO: 2691646 - DNA, 25 bp, Homo sapien
ccccacacagctggagacaaagaca

SEQ ID NO: 2691647 - DNA, 25 bp, Homo sapien
accctgccccacacagctggagaca

SEQ ID NO: 2691648 - DNA, 25 bp, Homo sapien
cctgccccacacagctggagacaaa

SEQ ID NO: 2691649 - DNA, 25 bp, Homo sapien
tgccccacacagctggagacaaaga

SEQ ID NO: 2691650 - DNA, 25 bp, Homo sapien
tcatgcttcaggaaaccggtggcca

SEQ ID NO: 2691651 - DNA, 25 bp, Homo sapien
aaaagcccttgcgtagcctagagaa

SEQ ID NO: 2691652 - DNA, 25 bp, Homo sapien
cagaggcggccacgaagaaaggttt

SEQ ID NO: 2691653 - DNA, 25 bp, Homo sapien
tgtattgatcacagtcccagcagga

SEQ ID NO: 2691654 - DNA, 25 bp, Homo sapien
cctctctgtgtggttagtggcagcc

SEQ ID NO: 2691655 - DNA, 25 bp, Homo sapien
tgtaatggcaacaaggtgggcccag

SEQ ID NO: 2691656 - DNA, 25 bp, Homo sapien
tgagcacagcttctacagggccatt

SEQ ID NO: 2691657 - DNA, 25 bp, Homo sapien
cacaggcagaggtattgcagcatgc

SEQ ID NO: 2691658 - DNA, 25 bp, Homo sapien
gttgtgccctaacccaaatatagta

SEQ ID NO: 2691659 - DNA, 25 bp, Homo sapien
gggaacagttatacccaagggctgc

SEQ ID NO: 2691660 - DNA, 25 bp, Homo sapien
aaggctgcatgattttacgttccca

SEQ ID NO: 2691661 - DNA, 25 bp, Homo sapien
aaagccgtgaattcttggaccccag

SEQ ID NO: 2691662 - DNA, 25 bp, Homo sapien
taggctataaaggtcctggctgcaa

SEQ ID NO: 2691663 - DNA, 25 bp, Homo sapien
ggtaaatgaacgtgctgtccctctc

SEQ ID NO: 2691664 - DNA, 25 bp, Homo sapien
gttgtgaccactgcagcatgctctg

SEQ ID NO: 2691665 - DNA, 25 bp, Homo sapien
tcagtcacttgcgtggctatggcct

SEQ ID NO: 2691666 - DNA, 25 bp, Homo sapien
ggtgggcaggtctccaggcctgcca

SEQ ID NO: 2691667 - DNA, 25 bp, Homo sapien
caggcctgccagatgtagacctttc

SEQ ID NO: 2691668 - DNA, 25 bp, Homo sapien
ccagatgtagacctttcctaatgtc

SEQ ID NO: 2691669 - DNA, 25 bp, Homo sapien
cctaatgtctacagcaaatttgttc

SEQ ID NO: 2691670 - DNA, 25 bp, Homo sapien
tgtgtgcgagtgcacgtgtaagagt

SEQ ID NO: 2691671 - DNA, 25 bp, Homo sapien
cgagtgcacgtgtaagagtgtgtag

SEQ ID NO: 2691672 - DNA, 25 bp, Homo sapien
ttatagcctaatccaagaggattta

SEQ ID NO: 2691673 - DNA, 25 bp, Homo sapien
taatccaagaggatttaaggacaat

SEQ ID NO: 2691674 - DNA, 25 bp, Homo sapien
cacagactttacttccctgagggag

SEQ ID NO: 2691675 - DNA, 25 bp, Homo sapien
gaaatctgccgcttccatgagagct

SEQ ID NO: 2691676 - DNA, 25 bp, Homo sapien
cacagccggtatgaaatggcccaga

SEQ ID NO: 2691677 - DNA, 25 bp, Homo sapien
catagctcctacgagagggtgcaac

SEQ ID NO: 2691678 - DNA, 25 bp, Homo sapien
tgagccttatttggtgacacagggc

SEQ ID NO: 2691679 - DNA, 25 bp, Homo sapien
caaagcttgttgctaaggtcactgt

SEQ ID NO: 2691680 - DNA, 25 bp, Homo sapien
caaggacggtgatttctgacagagg

SEQ ID NO: 2691681 - DNA, 25 bp, Homo sapien
gcagaagtttcagctcagcatcagt

SEQ ID NO: 2691682 - DNA, 25 bp, Homo sapien
tacacccagttgtttaggtagaaga

SEQ ID NO: 2691683 - DNA, 25 bp, Homo sapien
tctgcccttacagtgtgaccttccc

SEQ ID NO: 2691684 - DNA, 25 bp, Homo sapien
tctcagggaaacagtggtattacac

SEQ ID NO: 2691685 - DNA, 25 bp, Homo sapien
tcagtagcctccctaccttgcagtt

SEQ ID NO: 2691686 - DNA, 25 bp, Homo sapien
taattcactaccttcagatcagcca

SEQ ID NO: 2691687 - DNA, 25 bp, Homo sapien
actgtgaagtcaattgagataattc

SEQ ID NO: 2691688 - DNA, 25 bp, Homo sapien
tgtgaagtcaattgagataattcac

SEQ ID NO: 2691689 - DNA, 25 bp, Homo sapien
tgaagtcaattgagataattcacta

SEQ ID NO: 2691690 - DNA, 25 bp, Homo sapien
caggcagggtcatttgcaagggtcc

SEQ ID NO: 2691691 - DNA, 25 bp, Homo sapien
cccctggctgttatgaaatgtcaaa

SEQ ID NO: 2691692 - DNA, 25 bp, Homo sapien
tgaggctcctcaatctgcagtaaca

SEQ ID NO: 2691693 - DNA, 25 bp, Homo sapien
tgtggttcagcaagcagtgcggcac

SEQ ID NO: 2691694 - DNA, 25 bp, Homo sapien
gtatggagtgcctacaagccagcca

SEQ ID NO: 2691695 - DNA, 25 bp, Homo sapien
tgcctggtaagacaagatgctccct

SEQ ID NO: 2691696 - DNA, 25 bp, Homo sapien
tacgacttgcatatactgactgccg

SEQ ID NO: 2691697 - DNA, 25 bp, Homo sapien
tgtgatcctcctgtgccactgagag

SEQ ID NO: 2691698 - DNA, 25 bp, Homo sapien
gcagaagggtgtagcctggccaggg

SEQ ID NO: 2691699 - DNA, 25 bp, Homo sapien
accggatgtgcgacagagccaccat

SEQ ID NO: 2691700 - DNA, 25 bp, Homo sapien
cagctcacaccggatgtgcgacaga

SEQ ID NO: 2691701 - DNA, 25 bp, Homo sapien
caggggagaaaaggacccagccact

SEQ ID NO: 2691702 - DNA, 25 bp, Homo sapien
ggaatccaggacagaccgagctgaa

SEQ ID NO: 2691703 - DNA, 25 bp, Homo sapien
cattgtgaaaaacctgaccagccag

SEQ ID NO: 2691704 - DNA, 25 bp, Homo sapien
gacctctctgatagtggcgggaaca

SEQ ID NO: 2691705 - DNA, 25 bp, Homo sapien
caaaaggcttggagataggctgacc

SEQ ID NO: 2691706 - DNA, 25 bp, Homo sapien
gccatatacagacacagacgcggtg

SEQ ID NO: 2691707 - DNA, 25 bp, Homo sapien
ccttgtgcatatatctgggagctct

SEQ ID NO: 2691708 - DNA, 25 bp, Homo sapien
cactctagcatccaggagtccaaag

SEQ ID NO: 2691709 - DNA, 25 bp, Homo sapien
tgctgcaagcaggagtctatccttt

SEQ ID NO: 2691710 - DNA, 25 bp, Homo sapien
tccacaaccaagatgtagtcctcaa

SEQ ID NO: 2691711 - DNA, 25 bp, Homo sapien
agagagaggaattatgtccatcagc

SEQ ID NO: 2691712 - DNA, 25 bp, Homo sapien
ccacaaccaagatgtagtcctcaat

SEQ ID NO: 2691713 - DNA, 25 bp, Homo sapien
caaaaagagagaggaattatgtcca

SEQ ID NO: 2691714 - DNA, 25 bp, Homo sapien
ggactgacgggaggaaagtgatacc

SEQ ID NO: 2691715 - DNA, 25 bp, Homo sapien
tttttaagatttggattgaggtggc

SEQ ID NO: 2691716 - DNA, 25 bp, Homo sapien
cagagcaaggtagagtggactgacg

SEQ ID NO: 2691717 - DNA, 25 bp, Homo sapien
catctgggttctcctagtgggtgat

SEQ ID NO: 2691718 - DNA, 25 bp, Homo sapien
tccacttggatttctcaagaatagc

SEQ ID NO: 2691719 - DNA, 25 bp, Homo sapien
ttggaagctccacttggatttctca

SEQ ID NO: 2691720 - DNA, 25 bp, Homo sapien
ggaagctccacttggatttctcaag

SEQ ID NO: 2691721 - DNA, 25 bp, Homo sapien
aagctccacttggatttctcaagaa

SEQ ID NO: 2691722 - DNA, 25 bp, Homo sapien
cagtcccagaaaccatatgtactgt

SEQ ID NO: 2691723 - DNA, 25 bp, Homo sapien
tatgtactgtgaccccgctcactag

SEQ ID NO: 2691724 - DNA, 25 bp, Homo sapien
gggaagactgagtgagaaaatgatg

SEQ ID NO: 2691725 - DNA, 25 bp, Homo sapien
ccctcgggaagagtgtgggcccttg

SEQ ID NO: 2691726 - DNA, 25 bp, Homo sapien
gcataaacactacccagcagtaggt

SEQ ID NO: 2691727 - DNA, 25 bp, Homo sapien
gggcataaacactacccagcagtag

SEQ ID NO: 2691728 - DNA, 25 bp, Homo sapien
cagtaggtaggctggccaagagaag

SEQ ID NO: 2691729 - DNA, 25 bp, Homo sapien
gtggaaggtgtggatatgtgctttt

SEQ ID NO: 2691730 - DNA, 25 bp, Homo sapien
cacatgcattaggaaaacaccttca

SEQ ID NO: 2691731 - DNA, 25 bp, Homo sapien
tgtttctgaagaccgtagtttggga

SEQ ID NO: 2691732 - DNA, 25 bp, Homo sapien
caccttcatgaagcaggattctgcc

SEQ ID NO: 2691733 - DNA, 25 bp, Homo sapien
tgcagtgtagcatgagacaggtcca

SEQ ID NO: 2691734 - DNA, 25 bp, Homo sapien
aggagtttgagaccagcctggccaa

SEQ ID NO: 2691735 - DNA, 25 bp, Homo sapien
attagccgggcctagtggcgggtgc

SEQ ID NO: 2691736 - DNA, 25 bp, Homo sapien
aaaacctttcatttggccgggcatg

SEQ ID NO: 2691737 - DNA, 25 bp, Homo sapien
caaggtgggcagatcacctgaggtc

SEQ ID NO: 2691738 - DNA, 25 bp, Homo sapien
gaaaagcataacaccaatcccaggg

SEQ ID NO: 2691739 - DNA, 25 bp, Homo sapien
cagtgtatcaggtcagggacttgga

SEQ ID NO: 2691740 - DNA, 25 bp, Homo sapien
tttctgatcagaggtgtacactaac

SEQ ID NO: 2691741 - DNA, 25 bp, Homo sapien
gcactttttcgtgtggatcttgcca

SEQ ID NO: 2691742 - DNA, 25 bp, Homo sapien
taagaccttagacttcatatttgtc

SEQ ID NO: 2691743 - DNA, 25 bp, Homo sapien
ttcaccatccaagtctagcccagag

SEQ ID NO: 2691744 - DNA, 25 bp, Homo sapien
cagagctccctcagtggtatgacca

SEQ ID NO: 2691745 - DNA, 25 bp, Homo sapien
tctttactgttaaccataagtgata

SEQ ID NO: 2691746 - DNA, 25 bp, Homo sapien
tcctgctggtatcctgggaaccagg

SEQ ID NO: 2691747 - DNA, 25 bp, Homo sapien
cctgctggtatcctgggaaccaggt

SEQ ID NO: 2691748 - DNA, 25 bp, Homo sapien
ctatctggtagacagttttgcccat

SEQ ID NO: 2691749 - DNA, 25 bp, Homo sapien
tctatctggtagacagttttgccca

SEQ ID NO: 2691750 - DNA, 25 bp, Homo sapien
ctctatctggtagacagttttgccc

SEQ ID NO: 2691751 - DNA, 25 bp, Homo sapien
ttctgggcttcaggactaactgcag

SEQ ID NO: 2691752 - DNA, 25 bp, Homo sapien
ggtgacatgttgggagccatgcttc

SEQ ID NO: 2691753 - DNA, 25 bp, Homo sapien
tgggcttcaggactaactgcagccc

SEQ ID NO: 2691754 - DNA, 25 bp, Homo sapien
ttgggagccatgcttctgggcttca

SEQ ID NO: 2691755 - DNA, 25 bp, Homo sapien
ttagtgtggtccgtgtggccctgtg

SEQ ID NO: 2691756 - DNA, 25 bp, Homo sapien
cttagtgtggtccgtgtggccctgt

SEQ ID NO: 2691757 - DNA, 25 bp, Homo sapien
ggtagcaggtctcccagtcgaaaac

SEQ ID NO: 2691758 - DNA, 25 bp, Homo sapien
ctgggtagcaggctccacaggtagc

SEQ ID NO: 2691759 - DNA, 25 bp, Homo sapien
gtagcaggctccacaggtagcaggt

SEQ ID NO: 2691760 - DNA, 25 bp, Homo sapien
ccacaggtagcaggtctcccagtcg

SEQ ID NO: 2691761 - DNA, 25 bp, Homo sapien
cacatcacggtgaagtggaggtgct

SEQ ID NO: 2691762 - DNA, 25 bp, Homo sapien
ggagagtgctgatcccatcaagccc

SEQ ID NO: 2691763 - DNA, 25 bp, Homo sapien
tgggcgtgggccgttctgcagcacc

SEQ ID NO: 2691764 - DNA, 25 bp, Homo sapien
cgggcgaacggcagtgggcgtgggc

SEQ ID NO: 2691765 - DNA, 25 bp, Homo sapien
tggaagttggcccgaaaggactgtg

SEQ ID NO: 2691766 - DNA, 25 bp, Homo sapien
tgtggaagttggcccgaaaggactg

SEQ ID NO: 2691767 - DNA, 25 bp, Homo sapien
gaagttggcccgaaaggactgtgcc

SEQ ID NO: 2691768 - DNA, 25 bp, Homo sapien
gccggggctgtggagcgtgggtcac

SEQ ID NO: 2691769 - DNA, 25 bp, Homo sapien
cacttagtaaacagtcacaagcccc

SEQ ID NO: 2691770 - DNA, 25 bp, Homo sapien
ttttctcacttagtaaacagtcaca

SEQ ID NO: 2691771 - DNA, 25 bp, Homo sapien
tcacttagtaaacagtcacaagccc

SEQ ID NO: 2691772 - DNA, 25 bp, Homo sapien
tctcacttagtaaacagtcacaagc

SEQ ID NO: 2691773 - DNA, 25 bp, Homo sapien
tttaggaaacatgggcttgccagtg

SEQ ID NO: 2691774 - DNA, 25 bp, Homo sapien
catgggcttgccagtgacactgtcc

SEQ ID NO: 2691775 - DNA, 25 bp, Homo sapien
caccttgaccccaggtactgctgtg

SEQ ID NO: 2691776 - DNA, 25 bp, Homo sapien
agacttgtggtctcaaaggcatgca

SEQ ID NO: 2691777 - DNA, 25 bp, Homo sapien
aatggagcccaacacagacattctg

SEQ ID NO: 2691778 - DNA, 25 bp, Homo sapien
ttagagttggattccctggatcaaa

SEQ ID NO: 2691779 - DNA, 25 bp, Homo sapien
gccaggtcaaatttatgggctagga

SEQ ID NO: 2691780 - DNA, 25 bp, Homo sapien
aaaatactatttggaccgggcagag

SEQ ID NO: 2691781 - DNA, 25 bp, Homo sapien
tgaggagaacagtgctcaacagagg

SEQ ID NO: 2691782 - DNA, 25 bp, Homo sapien
ctgaggagaacagtgctcaacagag

SEQ ID NO: 2691783 - DNA, 25 bp, Homo sapien
gaggagaacagtgctcaacagagga

SEQ ID NO: 2691784 - DNA, 25 bp, Homo sapien
ggagaacagtgctcaacagaggatg

SEQ ID NO: 2691785 - DNA, 25 bp, Homo sapien
tccacaccattggcccgggagagaa

SEQ ID NO: 2691786 - DNA, 25 bp, Homo sapien
cacaccattggcccgggagagaagt

SEQ ID NO: 2691787 - DNA, 25 bp, Homo sapien
acaccattggcccgggagagaagtt

SEQ ID NO: 2691788 - DNA, 25 bp, Homo sapien
caccattggcccgggagagaagttt

SEQ ID NO: 2691789 - DNA, 25 bp, Homo sapien
tgtgtggagctcacattgtcctggt

SEQ ID NO: 2691790 - DNA, 25 bp, Homo sapien
agctcacattgtcctggtgaatcaa

SEQ ID NO: 2691791 - DNA, 25 bp, Homo sapien
tggagctcacattgtcctggtgaat

SEQ ID NO: 2691792 - DNA, 25 bp, Homo sapien
gtggtgtgtggagctcacattgtcc

SEQ ID NO: 2691793 - DNA, 25 bp, Homo sapien
tgagcatggcatctggggtgcgtgg

SEQ ID NO: 2691794 - DNA, 25 bp, Homo sapien
tggcagccaagccgcttttttctct

SEQ ID NO: 2691795 - DNA, 25 bp, Homo sapien
tttggcagccaagccgcttttttct

SEQ ID NO: 2691796 - DNA, 25 bp, Homo sapien
ttctctttgtggactctccgggagg

SEQ ID NO: 2691797 - DNA, 25 bp, Homo sapien
cacaatcctttgagagtaagttcca

SEQ ID NO: 2691798 - DNA, 25 bp, Homo sapien
tagcaattattttaggacgggtctg

SEQ ID NO: 2691799 - DNA, 25 bp, Homo sapien
tcagggaaccaacagacaggtcaaa

SEQ ID NO: 2691800 - DNA, 25 bp, Homo sapien
tgctccctcgaacactaagaaccta

SEQ ID NO: 2691801 - DNA, 25 bp, Homo sapien
taaggcacctgctacatcatcatgt

SEQ ID NO: 2691802 - DNA, 25 bp, Homo sapien
tggtgctgcagctaaaaaatctgtg

SEQ ID NO: 2691803 - DNA, 25 bp, Homo sapien
agtgatggcatacgactgtagtccc

SEQ ID NO: 2691804 - DNA, 25 bp, Homo sapien
gttctgaaacatccggcaaatatgg

SEQ ID NO: 2691805 - DNA, 25 bp, Homo sapien
gtagtggtataatttgcctctgcct

SEQ ID NO: 2691806 - DNA, 25 bp, Homo sapien
tagtggtataatttgcctctgcctg

SEQ ID NO: 2691807 - DNA, 25 bp, Homo sapien
aaaaatgtaggaaatgtttctccag

SEQ ID NO: 2691808 - DNA, 25 bp, Homo sapien
tgtagtggtataatttgcctctgcc

SEQ ID NO: 2691809 - DNA, 25 bp, Homo sapien
aagtaactgagaatattgctttctt

SEQ ID NO: 2691810 - DNA, 25 bp, Homo sapien
gaagtaactgagaatattgctttct

SEQ ID NO: 2691811 - DNA, 25 bp, Homo sapien
agaagtaactgagaatattgctttc

SEQ ID NO: 2691812 - DNA, 25 bp, Homo sapien
gacggatggcgcttcccaaagcttg

SEQ ID NO: 2691813 - DNA, 25 bp, Homo sapien
ggcacgccgggaaatcagagtcccg

SEQ ID NO: 2691814 - DNA, 25 bp, Homo sapien
gcagctccgacttccgggtgcggta

SEQ ID NO: 2691815 - DNA, 25 bp, Homo sapien
agcggacttccggatctttgctggg

SEQ ID NO: 2691816 - DNA, 25 bp, Homo sapien
gacgcaaagccgtagccacaatgcg

SEQ ID NO: 2691817 - DNA, 25 bp, Homo sapien
gccctgcggatcacgtgggcctcta

SEQ ID NO: 2691818 - DNA, 25 bp, Homo sapien
caggactgccaaaagatcctgccag

SEQ ID NO: 2691819 - DNA, 25 bp, Homo sapien
tgcacgggacgtgagacccgcgaat

SEQ ID NO: 2691820 - DNA, 25 bp, Homo sapien
caaacgtttctaatctcaccaggga

SEQ ID NO: 2691821 - DNA, 25 bp, Homo sapien
gtttgcaaacgtttctaatctcacc

SEQ ID NO: 2691822 - DNA, 25 bp, Homo sapien
cgtttctaatctcaccagggacctg

SEQ ID NO: 2691823 - DNA, 25 bp, Homo sapien
tgcaaacgtttctaatctcaccagg

SEQ ID NO: 2691824 - DNA, 25 bp, Homo sapien
ttgtcctctattccaaaactccgca

SEQ ID NO: 2691825 - DNA, 25 bp, Homo sapien
taatttgcttatctttgtcctctat

SEQ ID NO: 2691826 - DNA, 25 bp, Homo sapien
taagggggctgaagaaagtgataat

SEQ ID NO: 2691827 - DNA, 25 bp, Homo sapien
tgctcatcttttcgatccgggacat

SEQ ID NO: 2691828 - DNA, 25 bp, Homo sapien
gggaaatctccagtacaaatatatt

SEQ ID NO: 2691829 - DNA, 25 bp, Homo sapien
gagggaaatctccagtacaaatata

SEQ ID NO: 2691830 - DNA, 25 bp, Homo sapien
agggaaatctccagtacaaatatat

SEQ ID NO: 2691831 - DNA, 25 bp, Homo sapien
gcataagcaatcttacccaaaatga

SEQ ID NO: 2691832 - DNA, 25 bp, Homo sapien
aaaggcataagcaatcttacccaaa

SEQ ID NO: 2691833 - DNA, 25 bp, Homo sapien
agaaaaaggcataagcaatcttacc

SEQ ID NO: 2691834 - DNA, 25 bp, Homo sapien
tatttttacatgctatccaaaatat

SEQ ID NO: 2691835 - DNA, 25 bp, Homo sapien
ctttgcacagctataagttctccat

SEQ ID NO: 2691836 - DNA, 25 bp, Homo sapien
ctccattgacatcacgaaattgcag

SEQ ID NO: 2691837 - DNA, 25 bp, Homo sapien
tcacgaaattgcagacgaatctggg

SEQ ID NO: 2691838 - DNA, 25 bp, Homo sapien
cacagctataagttctccattgaca

SEQ ID NO: 2691839 - DNA, 25 bp, Homo sapien
tttgttctagtaatgactccttcca

SEQ ID NO: 2691840 - DNA, 25 bp, Homo sapien
ttgttctagtaatgactccttccag

SEQ ID NO: 2691841 - DNA, 25 bp, Homo sapien
tgttctagtaatgactccttccaga

SEQ ID NO: 2691842 - DNA, 25 bp, Homo sapien
gcacacttagagctcagactgacct

SEQ ID NO: 2691843 - DNA, 25 bp, Homo sapien
ctgcacacttagagctcagactgac

SEQ ID NO: 2691844 - DNA, 25 bp, Homo sapien
tctgcacacttagagctcagactga

SEQ ID NO: 2691845 - DNA, 25 bp, Homo sapien
tgcacacttagagctcagactgacc

SEQ ID NO: 2691846 - DNA, 25 bp, Homo sapien
ttggaaaccccaagagaactgatca

SEQ ID NO: 2691847 - DNA, 25 bp, Homo sapien
ttatttagcacagccttggaaaccc

SEQ ID NO: 2691848 - DNA, 25 bp, Homo sapien
cacagccttggaaaccccaagagaa

SEQ ID NO: 2691849 - DNA, 25 bp, Homo sapien
tttagcacagccttggaaaccccaa

SEQ ID NO: 2691850 - DNA, 25 bp, Homo sapien
tacagtgggatattatgctgtcact

SEQ ID NO: 2691851 - DNA, 25 bp, Homo sapien
ggtagtaactgatgacctttctgct

SEQ ID NO: 2691852 - DNA, 25 bp, Homo sapien
tgtaaaatgcctatgacataatggt

SEQ ID NO: 2691853 - DNA, 25 bp, Homo sapien
aatatgcccaatggttgctgctgga

SEQ ID NO: 2691854 - DNA, 25 bp, Homo sapien
tgtctgacgtacctgccgaagtgtt

SEQ ID NO: 2691855 - DNA, 25 bp, Homo sapien
ctttgaagatgttaactgggcttcc

SEQ ID NO: 2691856 - DNA, 25 bp, Homo sapien
ccgaagtgtttctaaggctttaatg

SEQ ID NO: 2691857 - DNA, 25 bp, Homo sapien
taatctgatcacgaatctcacaagc

SEQ ID NO: 2691858 - DNA, 25 bp, Homo sapien
ccagttcactattatctttctccat

SEQ ID NO: 2691859 - DNA, 25 bp, Homo sapien
ccatttgcttctttcggctatccaa

SEQ ID NO: 2691860 - DNA, 25 bp, Homo sapien
tcttccagttcactattatctttct

SEQ ID NO: 2691861 - DNA, 25 bp, Homo sapien
tctttcggctatccaaggctttaat

SEQ ID NO: 2691862 - DNA, 25 bp, Homo sapien
gttgctcatcagtcccttgaaaaac

SEQ ID NO: 2691863 - DNA, 25 bp, Homo sapien
tctctggtgattgtgatataagtca

SEQ ID NO: 2691864 - DNA, 25 bp, Homo sapien
agtcatttagttgctcatcagtccc

SEQ ID NO: 2691865 - DNA, 25 bp, Homo sapien
tgttctctggtgattgtgatataag

SEQ ID NO: 2691866 - DNA, 25 bp, Homo sapien
agtttttccagttcacgatgacagt

SEQ ID NO: 2691867 - DNA, 25 bp, Homo sapien
tttccagttcacgatgacagtctac

SEQ ID NO: 2691868 - DNA, 25 bp, Homo sapien
cagttcacgatgacagtctaccaat

SEQ ID NO: 2691869 - DNA, 25 bp, Homo sapien
gagaagcctagattctttatttagt

SEQ ID NO: 2691870 - DNA, 25 bp, Homo sapien
tcttgatggcgatctgcttgcagct

SEQ ID NO: 2691871 - DNA, 25 bp, Homo sapien
tggtccacgctcaaagccatccaat

SEQ ID NO: 2691872 - DNA, 25 bp, Homo sapien
gctgtgttgccaaagactgaattaa

SEQ ID NO: 2691873 - DNA, 25 bp, Homo sapien
gaattaatgaatctctagctcggat

SEQ ID NO: 2691874 - DNA, 25 bp, Homo sapien
catcagttggttggcagtttttgct

SEQ ID NO: 2691875 - DNA, 25 bp, Homo sapien
ttttgcttccccttcttgtctctct

SEQ ID NO: 2691876 - DNA, 25 bp, Homo sapien
ttgcttccccttcttgtctctctct

SEQ ID NO: 2691877 - DNA, 25 bp, Homo sapien
cagttggttggcagtttttgcttcc

SEQ ID NO: 2691878 - DNA, 25 bp, Homo sapien
ttttatgagctcctggtccagttca

SEQ ID NO: 2691879 - DNA, 25 bp, Homo sapien
aactgctgtaattcatacttcacat

SEQ ID NO: 2691880 - DNA, 25 bp, Homo sapien
agcttttatgagctcctggtccagt

SEQ ID NO: 2691881 - DNA, 25 bp, Homo sapien
aagaatcctgtctgaagatccttcc

SEQ ID NO: 2691882 - DNA, 25 bp, Homo sapien
tggtaatggagatgtgaagaaggag

SEQ ID NO: 2691883 - DNA, 25 bp, Homo sapien
atggagatgtgaagaaggaggacag

SEQ ID NO: 2691884 - DNA, 25 bp, Homo sapien
gtaatggagatgtgaagaaggagga

SEQ ID NO: 2691885 - DNA, 25 bp, Homo sapien
tttggtaatggagatgtgaagaagg

SEQ ID NO: 2691886 - DNA, 25 bp, Homo sapien
tctcagccttgcttaactcacgttc

SEQ ID NO: 2691887 - DNA, 25 bp, Homo sapien
gtatgatggtttaactgctccatct

SEQ ID NO: 2691888 - DNA, 25 bp, Homo sapien
tctccatttgggtacgtgttgttgt

SEQ ID NO: 2691889 - DNA, 25 bp, Homo sapien
tggtcaagtttacgcagggtcctgt

SEQ ID NO: 2691890 - DNA, 25 bp, Homo sapien
ttcaatttggcaagtctgtccctgg

SEQ ID NO: 2691891 - DNA, 25 bp, Homo sapien
ggaaaatatcccaacagtgaggtta

SEQ ID NO: 2691892 - DNA, 25 bp, Homo sapien
ggttaattcatcactgtgcctagat

SEQ ID NO: 2691893 - DNA, 25 bp, Homo sapien
tctgtccctggtctgattaatttct

SEQ ID NO: 2691894 - DNA, 25 bp, Homo sapien
gacaagaggcctaaattactatccg

SEQ ID NO: 2691895 - DNA, 25 bp, Homo sapien
caagtttatgagatcaatgccccaa

SEQ ID NO: 2691896 - DNA, 25 bp, Homo sapien
tgagacgatattaaagatgaagccc

SEQ ID NO: 2691897 - DNA, 25 bp, Homo sapien
tcctcaataagtgggatcaagttcc

SEQ ID NO: 2691898 - DNA, 25 bp, Homo sapien
cctcaatactcacacataacatggt

SEQ ID NO: 2691899 - DNA, 25 bp, Homo sapien
ggtttagatgcattagctaccatgt

SEQ ID NO: 2691900 - DNA, 25 bp, Homo sapien
ttaaacatcatcctagccaacctca

SEQ ID NO: 2691901 - DNA, 25 bp, Homo sapien
tgtcatccacttgcgtccagatcag

SEQ ID NO: 2691902 - DNA, 25 bp, Homo sapien
taggacactgactcacctgccagtc

SEQ ID NO: 2691903 - DNA, 25 bp, Homo sapien
ggtctttgatcccaggttaagcctc

SEQ ID NO: 2691904 - DNA, 25 bp, Homo sapien
ttttcagaagttgagggactagtcc

SEQ ID NO: 2691905 - DNA, 25 bp, Homo sapien
ggactagtccacttctgccttaact

SEQ ID NO: 2691906 - DNA, 25 bp, Homo sapien
gcttgtcttcgtaactggacaactg

SEQ ID NO: 2691907 - DNA, 25 bp, Homo sapien
caatttcctctttaagcctgtctaa

SEQ ID NO: 2691908 - DNA, 25 bp, Homo sapien
cactttcaaaatcctggctaccaca

SEQ ID NO: 2691909 - DNA, 25 bp, Homo sapien
tctgctcagatgaagctagttcctt

SEQ ID NO: 2691910 - DNA, 25 bp, Homo sapien
aagccattaggctccataaccaggt

SEQ ID NO: 2691911 - DNA, 25 bp, Homo sapien
aaggtgtcaaagtatcctgataata

SEQ ID NO: 2691912 - DNA, 25 bp, Homo sapien
aggactgaaatccaagccattaggc

SEQ ID NO: 2691913 - DNA, 25 bp, Homo sapien
cacagtgagtaagttgtagagccag

SEQ ID NO: 2691914 - DNA, 25 bp, Homo sapien
ctcagtaccacaggtggtagttgtg

SEQ ID NO: 2691915 - DNA, 25 bp, Homo sapien
cagtaccacaggtggtagttgtgtc

SEQ ID NO: 2691916 - DNA, 25 bp, Homo sapien
agtaccacaggtggtagttgtgtcc

SEQ ID NO: 2691917 - DNA, 25 bp, Homo sapien
gtaccacaggtggtagttgtgtcct

SEQ ID NO: 2691918 - DNA, 25 bp, Homo sapien
taatgaactgggagtaaactgctgt

SEQ ID NO: 2691919 - DNA, 25 bp, Homo sapien
tggagcaagtcgcagtttagactgc

SEQ ID NO: 2691920 - DNA, 25 bp, Homo sapien
gggcaacatgactggttttcgtctg

SEQ ID NO: 2691921 - DNA, 25 bp, Homo sapien
gcacaagtcccagcatttcatcacg

SEQ ID NO: 2691922 - DNA, 25 bp, Homo sapien
tcttccctttgcaccgtgttctgac

SEQ ID NO: 2691923 - DNA, 25 bp, Homo sapien
gactcaatccctataaataattccc

SEQ ID NO: 2691924 - DNA, 25 bp, Homo sapien
catacaggactcaatccctataaat

SEQ ID NO: 2691925 - DNA, 25 bp, Homo sapien
tgacttccgtctcctctcagttgag

SEQ ID NO: 2691926 - DNA, 25 bp, Homo sapien
tcatgatagtggtggcatcaagggc

SEQ ID NO: 2691927 - DNA, 25 bp, Homo sapien
ttctcatgatagtggtggcatcaag

SEQ ID NO: 2691928 - DNA, 25 bp, Homo sapien
gtagactgcctatattggttgcatg

SEQ ID NO: 2691929 - DNA, 25 bp, Homo sapien
tatattggttgcatgaatagacagt

SEQ ID NO: 2691930 - DNA, 25 bp, Homo sapien
taatttttctcacgattcacaaggt

SEQ ID NO: 2691931 - DNA, 25 bp, Homo sapien
catatccattaccttgcctgcctat

SEQ ID NO: 2691932 - DNA, 25 bp, Homo sapien
gggagaaataccaattgagtttgca

SEQ ID NO: 2691933 - DNA, 25 bp, Homo sapien
ggctcacacagatatggtactgaaa

SEQ ID NO: 2691934 - DNA, 25 bp, Homo sapien
taggcgctgtatgtctctattgaca

SEQ ID NO: 2691935 - DNA, 25 bp, Homo sapien
tctgtcaggcatactttggcacttt

SEQ ID NO: 2691936 - DNA, 25 bp, Homo sapien
tcttctatgtcgttctttaggcgct

SEQ ID NO: 2691937 - DNA, 25 bp, Homo sapien
tcttcttcaggcattattgtaccca

SEQ ID NO: 2691938 - DNA, 25 bp, Homo sapien
tcctggttgacttgttggacagttc

SEQ ID NO: 2691939 - DNA, 25 bp, Homo sapien
tagcttagctgcttgttgtgcaatt

SEQ ID NO: 2691940 - DNA, 25 bp, Homo sapien
gttggacagttcgatctaagtctat

SEQ ID NO: 2691941 - DNA, 25 bp, Homo sapien
ctaagtctattccttgtagcttagc

SEQ ID NO: 2691942 - DNA, 25 bp, Homo sapien
gctgacgacgttgcaaattagtgga

SEQ ID NO: 2691943 - DNA, 25 bp, Homo sapien
ctctctgtacaaagactgaacttca

SEQ ID NO: 2691944 - DNA, 25 bp, Homo sapien
tgctggtcctgtataagcttacgat

SEQ ID NO: 2691945 - DNA, 25 bp, Homo sapien
gatgttgaatctgttcctgctggtc

SEQ ID NO: 2691946 - DNA, 25 bp, Homo sapien
tttatcctgtgctattttgttgctt

SEQ ID NO: 2691947 - DNA, 25 bp, Homo sapien
cttcttatagtcgtctttcccatct

SEQ ID NO: 2691948 - DNA, 25 bp, Homo sapien
catcttgaatataattctcaatgtc

SEQ ID NO: 2691949 - DNA, 25 bp, Homo sapien
tatagtcgtctttcccatcttgaat

SEQ ID NO: 2691950 - DNA, 25 bp, Homo sapien
aatgtctttcatatagccatgaata

SEQ ID NO: 2691951 - DNA, 25 bp, Homo sapien
caatatcttgtctcatgagtctcat

SEQ ID NO: 2691952 - DNA, 25 bp, Homo sapien
tctcgcattcacttagttgagctat

SEQ ID NO: 2691953 - DNA, 25 bp, Homo sapien
gtctcatgagtctcatatcttcatt

SEQ ID NO: 2691954 - DNA, 25 bp, Homo sapien
tcgcattcacttagttgagctatta

SEQ ID NO: 2691955 - DNA, 25 bp, Homo sapien
cccagagataccgagacaactgaat

SEQ ID NO: 2691956 - DNA, 25 bp, Homo sapien
cacagggtccacatctacggattca

SEQ ID NO: 2691957 - DNA, 25 bp, Homo sapien
tggataggctatatgtaaacactag

SEQ ID NO: 2691958 - DNA, 25 bp, Homo sapien
agatttcggtatctgttttatcggg

SEQ ID NO: 2691959 - DNA, 25 bp, Homo sapien
caaaacctgcatttgacccatttcc

SEQ ID NO: 2691960 - DNA, 25 bp, Homo sapien
taaggttatcttgtagccacctttc

SEQ ID NO: 2691961 - DNA, 25 bp, Homo sapien
tcttaaagtaaggttatcttgtagc

SEQ ID NO: 2691962 - DNA, 25 bp, Homo sapien
tgcaaaacctgcatttgacccattt

SEQ ID NO: 2691963 - DNA, 25 bp, Homo sapien
aaatatccagatccttgttcacaag

SEQ ID NO: 2691964 - DNA, 25 bp, Homo sapien
atcccgaaattgtggttctcgaagt

SEQ ID NO: 2691965 - DNA, 25 bp, Homo sapien
tgtcgccctaatgccaaattatgat

SEQ ID NO: 2691966 - DNA, 25 bp, Homo sapien
tcataacctttctgtcgccctaatg

SEQ ID NO: 2691967 - DNA, 25 bp, Homo sapien
agttctcatttggtgcaggcatata

SEQ ID NO: 2691968 - DNA, 25 bp, Homo sapien
tgttaacgtacccactcacaatgaa

SEQ ID NO: 2691969 - DNA, 25 bp, Homo sapien
gtatatgccaaaaatatgcctaggc

SEQ ID NO: 2691970 - DNA, 25 bp, Homo sapien
gagccattttggacccagggaacat

SEQ ID NO: 2691971 - DNA, 25 bp, Homo sapien
ctcctattccttaatgctcaatgaa

SEQ ID NO: 2691972 - DNA, 25 bp, Homo sapien
attgcaacccgccacgggcttctga

SEQ ID NO: 2691973 - DNA, 25 bp, Homo sapien
tactggatctcctattccttaatgc

SEQ ID NO: 2691974 - DNA, 25 bp, Homo sapien
ccttgctagaagttactggatctcc

SEQ ID NO: 2691975 - DNA, 25 bp, Homo sapien
acgataggtacttcgccacaggtca

SEQ ID NO: 2691976 - DNA, 25 bp, Homo sapien
cttgtccacgataggtacttcgcca

SEQ ID NO: 2691977 - DNA, 25 bp, Homo sapien
cgccacaggtcacgtataattttat

SEQ ID NO: 2691978 - DNA, 25 bp, Homo sapien
ggtacttcgccacaggtcacgtata

SEQ ID NO: 2691979 - DNA, 25 bp, Homo sapien
taattccgccttttatcagaagctg

SEQ ID NO: 2691980 - DNA, 25 bp, Homo sapien
gatacattttcatcggcatcagacc

SEQ ID NO: 2691981 - DNA, 25 bp, Homo sapien
tcgtcctcgcatatccaaggctgtg

SEQ ID NO: 2691982 - DNA, 25 bp, Homo sapien
tttgtccagcactgcatcgtcctcg

SEQ ID NO: 2691983 - DNA, 25 bp, Homo sapien
agtaactggaactgttaggcatttt

SEQ ID NO: 2691984 - DNA, 25 bp, Homo sapien
taggcattttcgtggttactagaaa

SEQ ID NO: 2691985 - DNA, 25 bp, Homo sapien
ctggaactgttaggcattttcgtgg

SEQ ID NO: 2691986 - DNA, 25 bp, Homo sapien
gaactgttaggcattttcgtggtta

SEQ ID NO: 2691987 - DNA, 25 bp, Homo sapien
aggcagaacgtttcagccagggcca

SEQ ID NO: 2691988 - DNA, 25 bp, Homo sapien
tgcaagagattcaatgttttctcgg

SEQ ID NO: 2691989 - DNA, 25 bp, Homo sapien
ccaggcgaatgatgagtgaggctaa

SEQ ID NO: 2691990 - DNA, 25 bp, Homo sapien
tttgttgttggctcatccaaggcaa

SEQ ID NO: 2691991 - DNA, 25 bp, Homo sapien
cctctctgccagaaagggactgtct

SEQ ID NO: 2691992 - DNA, 25 bp, Homo sapien
catagtccttatgcaagagctgctt

SEQ ID NO: 2691993 - DNA, 25 bp, Homo sapien
tatgcaagagctgcttgacaacctt

SEQ ID NO: 2691994 - DNA, 25 bp, Homo sapien
tcctttgacctcagggaaactgcct

SEQ ID NO: 2691995 - DNA, 25 bp, Homo sapien
tggcctgactcctcacttaggtctg

SEQ ID NO: 2691996 - DNA, 25 bp, Homo sapien
cagaacatattattagtaaagagca

SEQ ID NO: 2691997 - DNA, 25 bp, Homo sapien
gaaaagtcaccgcaaaccttgtcag

SEQ ID NO: 2691998 - DNA, 25 bp, Homo sapien
tattagtaaagagcataaccccttc

SEQ ID NO: 2691999 - DNA, 25 bp, Homo sapien
taccagaagctggaagttacgctgc

SEQ ID NO: 2692000 - DNA, 25 bp, Homo sapien
gcatttcacaatctctgagcactga

SEQ ID NO: 2692001 - DNA, 25 bp, Homo sapien
tgaatcccagggagctaacactgca

SEQ ID NO: 2692002 - DNA, 25 bp, Homo sapien
tattcagaacgtcctaaaagctcca

SEQ ID NO: 2692003 - DNA, 25 bp, Homo sapien
tcggctgtactgctgaaccctgaag

SEQ ID NO: 2692004 - DNA, 25 bp, Homo sapien
tcacgatgggcagatcaggcctcaa

SEQ ID NO: 2692005 - DNA, 25 bp, Homo sapien
catggcaatgcccacttagagagga

SEQ ID NO: 2692006 - DNA, 25 bp, Homo sapien
tagacgcagaggagtgttacaggct

SEQ ID NO: 2692007 - DNA, 25 bp, Homo sapien
gctaaagctaggagatgttgaattt

SEQ ID NO: 2692008 - DNA, 25 bp, Homo sapien
tttgcagttaagatgactgtttaat

SEQ ID NO: 2692009 - DNA, 25 bp, Homo sapien
gatttagcaacagataacattaaga

SEQ ID NO: 2692010 - DNA, 25 bp, Homo sapien
actgtgagtttgctaaagctaggag

SEQ ID NO: 2692011 - DNA, 25 bp, Homo sapien
tgtcggtacacatggcaagccagta

SEQ ID NO: 2692012 - DNA, 25 bp, Homo sapien
gatagatgcccagttatccacaggc

SEQ ID NO: 2692013 - DNA, 25 bp, Homo sapien
cactgaaccgggagctaaactcttc

SEQ ID NO: 2692014 - DNA, 25 bp, Homo sapien
taattgcccacttaccgtagctggc

SEQ ID NO: 2692015 - DNA, 25 bp, Homo sapien
tgttagctccacctggtaacgctgc

SEQ ID NO: 2692016 - DNA, 25 bp, Homo sapien
gagcttttcagtgagttgccagaca

SEQ ID NO: 2692017 - DNA, 25 bp, Homo sapien
cagccacagggttaatcagttgcca

SEQ ID NO: 2692018 - DNA, 25 bp, Homo sapien
gattttcacagatactaagagggct

SEQ ID NO: 2692019 - DNA, 25 bp, Homo sapien
catgatgcatctaaatgtgaatccc

SEQ ID NO: 2692020 - DNA, 25 bp, Homo sapien
gagtttgttcaatttcttggatacg

SEQ ID NO: 2692021 - DNA, 25 bp, Homo sapien
aatatgtcatctcactgctttcagg

SEQ ID NO: 2692022 - DNA, 25 bp, Homo sapien
tgtgaatccctttgagtttacccta

SEQ ID NO: 2692023 - DNA, 25 bp, Homo sapien
cgcagaccggccagtctggaagctg

SEQ ID NO: 2692024 - DNA, 25 bp, Homo sapien
cccgataagcgggatctgcgcggcc

SEQ ID NO: 2692025 - DNA, 25 bp, Homo sapien
gggcggcaaaggtggcggtccgagc

SEQ ID NO: 2692026 - DNA, 25 bp, Homo sapien
ttatgtaacgggagatgggcccgat

SEQ ID NO: 2692027 - DNA, 25 bp, Homo sapien
gtctgtgcaactcccggagccccgc

SEQ ID NO: 2692028 - DNA, 25 bp, Homo sapien
gtgagtcaacgccccttatccccca

SEQ ID NO: 2692029 - DNA, 25 bp, Homo sapien
gtcaacgccccttatcccccatggc

SEQ ID NO: 2692030 - DNA, 25 bp, Homo sapien
tggtctgtgcaactcccggagcccc

SEQ ID NO: 2692031 - DNA, 25 bp, Homo sapien
ggggcctcaaatttcccttctgcag

SEQ ID NO: 2692032 - DNA, 25 bp, Homo sapien
tgcaggatcaacccctgccgtctgg

SEQ ID NO: 2692033 - DNA, 25 bp, Homo sapien
tcgttttcctagaagtcctccagaa

SEQ ID NO: 2692034 - DNA, 25 bp, Homo sapien
agccatgtcgccttttcctgctctt

SEQ ID NO: 2692035 - DNA, 25 bp, Homo sapien
ttgtggcagcttttataggcccaag

SEQ ID NO: 2692036 - DNA, 25 bp, Homo sapien
ttttataggcccaagtggtgacgcc

SEQ ID NO: 2692037 - DNA, 25 bp, Homo sapien
cttgtggccttggcgtcttgtggca

SEQ ID NO: 2692038 - DNA, 25 bp, Homo sapien
gcccaagtggtgacgcctgacacca

SEQ ID NO: 2692039 - DNA, 25 bp, Homo sapien
cccagtgccaacaggagaggattga

SEQ ID NO: 2692040 - DNA, 25 bp, Homo sapien
aggcaaagccgccaaggcaagtgag

SEQ ID NO: 2692041 - DNA, 25 bp, Homo sapien
tgaccgtggtcaacaaaagcgccat

SEQ ID NO: 2692042 - DNA, 25 bp, Homo sapien
gcaagtgagagcaatgaccgtggtc

SEQ ID NO: 2692043 - DNA, 25 bp, Homo sapien
ggcaaagccgccaaggcaagtgaga

SEQ ID NO: 2692044 - DNA, 25 bp, Homo sapien
gttctgggtgatgttgaccagctcc

SEQ ID NO: 2692045 - DNA, 25 bp, Homo sapien
tgaccagctcctcaatgagctccct

SEQ ID NO: 2692046 - DNA, 25 bp, Homo sapien
ggttctgggtgatgttgaccagctc

SEQ ID NO: 2692047 - DNA, 25 bp, Homo sapien
gttgaccagctcctcaatgagctcc

SEQ ID NO: 2692048 - DNA, 25 bp, Homo sapien
gctgtcaggttgatgctccatacca

SEQ ID NO: 2692049 - DNA, 25 bp, Homo sapien
catgccagctgtcaggttgatgctc

SEQ ID NO: 2692050 - DNA, 25 bp, Homo sapien
tgccagctgtcaggttgatgctcca

SEQ ID NO: 2692051 - DNA, 25 bp, Homo sapien
cagctgtcaggttgatgctccatac

SEQ ID NO: 2692052 - DNA, 25 bp, Homo sapien
ggtcttctcgatggcactgcagcct

SEQ ID NO: 2692053 - DNA, 25 bp, Homo sapien
ctgacacgttgatcagggattccag

SEQ ID NO: 2692054 - DNA, 25 bp, Homo sapien
gctgagaccttgtgcgggcagaatc

SEQ ID NO: 2692055 - DNA, 25 bp, Homo sapien
gggcagaatccgctcagcatcctct

SEQ ID NO: 2692056 - DNA, 25 bp, Homo sapien
tgggccacctcgattttggtgtctc

SEQ ID NO: 2692057 - DNA, 25 bp, Homo sapien
gattttggtgtctcggacatgcaag

SEQ ID NO: 2692058 - DNA, 25 bp, Homo sapien
gtgtctcggacatgcaagctggaaa

SEQ ID NO: 2692059 - DNA, 25 bp, Homo sapien
cctcgattttggtgtctcggacatg

SEQ ID NO: 2692060 - DNA, 25 bp, Homo sapien
taaattactcgttggctgagagctg

SEQ ID NO: 2692061 - DNA, 25 bp, Homo sapien
ccccagtgaggtagcagaattctgt

SEQ ID NO: 2692062 - DNA, 25 bp, Homo sapien
taagaccaagaagaagtgtgcctga

SEQ ID NO: 2692063 - DNA, 25 bp, Homo sapien
taatgctacagtgtgctctagggca

SEQ ID NO: 2692064 - DNA, 25 bp, Homo sapien
ggatgggccatcctcgcctgcaggg

SEQ ID NO: 2692065 - DNA, 25 bp, Homo sapien
gggatgggccatcctcgcctgcagg

SEQ ID NO: 2692066 - DNA, 25 bp, Homo sapien
tttagattaatcttatcagcttggg

SEQ ID NO: 2692067 - DNA, 25 bp, Homo sapien
tgctttgcatagaagggagaggcca

SEQ ID NO: 2692068 - DNA, 25 bp, Homo sapien
ccataatttgctctttagattaatc

SEQ ID NO: 2692069 - DNA, 25 bp, Homo sapien
gagaggccacaggtgtccgaatttg

SEQ ID NO: 2692070 - DNA, 25 bp, Homo sapien
tcaggagaagctaacgatgcaatgc

SEQ ID NO: 2692071 - DNA, 25 bp, Homo sapien
tttcgttacaccagattgtcagtca

SEQ ID NO: 2692072 - DNA, 25 bp, Homo sapien
gaaaaaatgcctcacaaacaggtaa

SEQ ID NO: 2692073 - DNA, 25 bp, Homo sapien
gttcctgtgaaatcagaccaatagg

SEQ ID NO: 2692074 - DNA, 25 bp, Homo sapien
cagagggggaagcagttgggaggtg

SEQ ID NO: 2692075 - DNA, 25 bp, Homo sapien
gggaagcagttgggaggtgagaccc

SEQ ID NO: 2692076 - DNA, 25 bp, Homo sapien
gaagcagttgggaggtgagacccat

SEQ ID NO: 2692077 - DNA, 25 bp, Homo sapien
gggggaagcagttgggaggtgagac

SEQ ID NO: 2692078 - DNA, 25 bp, Homo sapien
gatatcgcacttgtgtccgtggaca

SEQ ID NO: 2692079 - DNA, 25 bp, Homo sapien
tctgtgaggctgttcaaagttttga

SEQ ID NO: 2692080 - DNA, 25 bp, Homo sapien
gatctcctgtaaggtgatatcgcac

SEQ ID NO: 2692081 - DNA, 25 bp, Homo sapien
ccgtggacaaagttgccggcacatg

SEQ ID NO: 2692082 - DNA, 25 bp, Homo sapien
cagcaaagatgtctgttacggtcaa

SEQ ID NO: 2692083 - DNA, 25 bp, Homo sapien
aagatgtctgttacggtcaactcgg

SEQ ID NO: 2692084 - DNA, 25 bp, Homo sapien
ttacggtcaactcggtgcacagagt

SEQ ID NO: 2692085 - DNA, 25 bp, Homo sapien
tctgttacggtcaactcggtgcaca

SEQ ID NO: 2692086 - DNA, 25 bp, Homo sapien
caggcagcgagtgtccttctcatgg

SEQ ID NO: 2692087 - DNA, 25 bp, Homo sapien
gtagaactgccggagcacagtcgca

SEQ ID NO: 2692088 - DNA, 25 bp, Homo sapien
cagaggttcctgtcgagccgtttca

SEQ ID NO: 2692089 - DNA, 25 bp, Homo sapien
gccgtttcaggaatcggatcagctg

SEQ ID NO: 2692090 - DNA, 25 bp, Homo sapien
tccaacgtactctggttggcttcct

SEQ ID NO: 2692091 - DNA, 25 bp, Homo sapien
ccaacgtactctggttggcttcctt

SEQ ID NO: 2692092 - DNA, 25 bp, Homo sapien
tttccaacgtactctggttggcttc

SEQ ID NO: 2692093 - DNA, 25 bp, Homo sapien
caacgtactctggttggcttccttc

SEQ ID NO: 2692094 - DNA, 25 bp, Homo sapien
tactttattttatgatgagttataa

SEQ ID NO: 2692095 - DNA, 25 bp, Homo sapien
gattctatatatactttattttatg

SEQ ID NO: 2692096 - DNA, 25 bp, Homo sapien
aaaaataaagctatcaaaaactcat

SEQ ID NO: 2692097 - DNA, 25 bp, Homo sapien
ataaagctatcaaaaactcataaat

SEQ ID NO: 2692098 - DNA, 25 bp, Homo sapien
gtatttctcagagtcgatactaatc

SEQ ID NO: 2692099 - DNA, 25 bp, Homo sapien
tctcagagtcgatactaatcttagc

SEQ ID NO: 2692100 - DNA, 25 bp, Homo sapien
cagagtcgatactaatcttagcaag

SEQ ID NO: 2692101 - DNA, 25 bp, Homo sapien
ttctcagagtcgatactaatcttag

SEQ ID NO: 2692102 - DNA, 25 bp, Homo sapien
gccctggcatgtacaagataataaa

SEQ ID NO: 2692103 - DNA, 25 bp, Homo sapien
tacaaacgcgtctgttactgcctgt

SEQ ID NO: 2692104 - DNA, 25 bp, Homo sapien
gacaaaattaaaggcctgccctggc

SEQ ID NO: 2692105 - DNA, 25 bp, Homo sapien
tttcatcaagcgataccactgagcc

SEQ ID NO: 2692106 - DNA, 25 bp, Homo sapien
gtagcgtttacatttaagtacacca

SEQ ID NO: 2692107 - DNA, 25 bp, Homo sapien
aatactgtatgctggccaaaattac

SEQ ID NO: 2692108 - DNA, 25 bp, Homo sapien
ttgttgcatcagtttcaaaagccat

SEQ ID NO: 2692109 - DNA, 25 bp, Homo sapien
tgaattaaggaatgggtagcgttta

SEQ ID NO: 2692110 - DNA, 25 bp, Homo sapien
tatggagagttcctatctacccttc

SEQ ID NO: 2692111 - DNA, 25 bp, Homo sapien
agtgcctctttttcctggtccagga

SEQ ID NO: 2692112 - DNA, 25 bp, Homo sapien
ggctatatgcaacttgcaaacatga

SEQ ID NO: 2692113 - DNA, 25 bp, Homo sapien
taagcatacaacagttattgaaacc

SEQ ID NO: 2692114 - DNA, 25 bp, Homo sapien
tgtctatgaggtcttcctacccgtg

SEQ ID NO: 2692115 - DNA, 25 bp, Homo sapien
cagattttcatttgtcttcgatgtc

SEQ ID NO: 2692116 - DNA, 25 bp, Homo sapien
agagatgactctgagccttccaaag

SEQ ID NO: 2692117 - DNA, 25 bp, Homo sapien
gaggtcttcctacccgtggaatggc

SEQ ID NO: 2692118 - DNA, 25 bp, Homo sapien
ctctgagctcgacggctgcggcggg

SEQ ID NO: 2692119 - DNA, 25 bp, Homo sapien
gtctgcggttttcccggctggcgcc

SEQ ID NO: 2692120 - DNA, 25 bp, Homo sapien
agccggccgcggagcttgctctggg

SEQ ID NO: 2692121 - DNA, 25 bp, Homo sapien
agggcacctgctccggttgcttcgg

SEQ ID NO: 2692122 - DNA, 25 bp, Homo sapien
cgtccaggtcgccttccaggttgcg

SEQ ID NO: 2692123 - DNA, 25 bp, Homo sapien
cttcactgaaatcaggaggcggcca

SEQ ID NO: 2692124 - DNA, 25 bp, Homo sapien
aaaaggtgttctgaagccgcaggag

SEQ ID NO: 2692125 - DNA, 25 bp, Homo sapien
cctcgaaggcgtcgcagatttcatc

SEQ ID NO: 2692126 - DNA, 25 bp, Homo sapien
aggagccacagcacgacttcctcga

SEQ ID NO: 2692127 - DNA, 25 bp, Homo sapien
ggcgcaatgcaggtatttctctttt

SEQ ID NO: 2692128 - DNA, 25 bp, Homo sapien
cctcaaggaagtaattgtggcgcaa

SEQ ID NO: 2692129 - DNA, 25 bp, Homo sapien
tgcagcgagcctcaaggaagtaatt

SEQ ID NO: 2692130 - DNA, 25 bp, Homo sapien
tcttcattaacttttgcagcgagcc

SEQ ID NO: 2692131 - DNA, 25 bp, Homo sapien
ccagtgtggacttccaaggatgcat

SEQ ID NO: 2692132 - DNA, 25 bp, Homo sapien
tcaagtgcagcccagtgtggacttc

SEQ ID NO: 2692133 - DNA, 25 bp, Homo sapien
agtgtggacttccaaggatgcatac

SEQ ID NO: 2692134 - DNA, 25 bp, Homo sapien
gcccagtgtggacttccaaggatgc

SEQ ID NO: 2692135 - DNA, 25 bp, Homo sapien
aagtccagcggcgtcccaatataga

SEQ ID NO: 2692136 - DNA, 25 bp, Homo sapien
cccaatatagaggtcccagtgcagt

SEQ ID NO: 2692137 - DNA, 25 bp, Homo sapien
gggaatagtcagagccatagtgctt

SEQ ID NO: 2692138 - DNA, 25 bp, Homo sapien
tgcagtctgtccagaatagccagct

SEQ ID NO: 2692139 - DNA, 25 bp, Homo sapien
tagggtagactctgtaaacacctcc

SEQ ID NO: 2692140 - DNA, 25 bp, Homo sapien
caaacgagtttagggtagactctgt

SEQ ID NO: 2692141 - DNA, 25 bp, Homo sapien
gcacaaacgagtttagggtagactc

SEQ ID NO: 2692142 - DNA, 25 bp, Homo sapien
gagtttagggtagactctgtaaaca

SEQ ID NO: 2692143 - DNA, 25 bp, Homo sapien
tgcacgcctgtgctttgccatccca

SEQ ID NO: 2692144 - DNA, 25 bp, Homo sapien
tgtgcacgcctgtgctttgccatcc

SEQ ID NO: 2692145 - DNA, 25 bp, Homo sapien
gtgcacgcctgtgctttgccatccc

SEQ ID NO: 2692146 - DNA, 25 bp, Homo sapien
gcacgcctgtgctttgccatcccat

SEQ ID NO: 2692147 - DNA, 25 bp, Homo sapien
tatgtcatgagccttgtgcgtcacc

SEQ ID NO: 2692148 - DNA, 25 bp, Homo sapien
tcatgagccttgtgcgtcacctcac

SEQ ID NO: 2692149 - DNA, 25 bp, Homo sapien
ctcttccgtatgtcatgagccttgt

SEQ ID NO: 2692150 - DNA, 25 bp, Homo sapien
tccgtatgtcatgagccttgtgcgt

SEQ ID NO: 2692151 - DNA, 25 bp, Homo sapien
tagtgccgtctaaaaatctttgtaa

SEQ ID NO: 2692152 - DNA, 25 bp, Homo sapien
aagagaaactcaccataatagtgcc

SEQ ID NO: 2692153 - DNA, 25 bp, Homo sapien
ttaatgtcctttagaagtgggagtc

SEQ ID NO: 2692154 - DNA, 25 bp, Homo sapien
tggtggaactgtgttggatttaaga

SEQ ID NO: 2692155 - DNA, 25 bp, Homo sapien
tgtgtaaagtgtagcaaaagcagac

SEQ ID NO: 2692156 - DNA, 25 bp, Homo sapien
ggtggccagttttcgtaatgaaaca

SEQ ID NO: 2692157 - DNA, 25 bp, Homo sapien
gcttatcataagacgaaactctgca

SEQ ID NO: 2692158 - DNA, 25 bp, Homo sapien
actctgcaacttggcaacggtggcc

SEQ ID NO: 2692159 - DNA, 25 bp, Homo sapien
tttgtgacatcatcgttatgagcgg

SEQ ID NO: 2692160 - DNA, 25 bp, Homo sapien
taaatttccatcagggaacatcaaa

SEQ ID NO: 2692161 - DNA, 25 bp, Homo sapien
ctatccatggctccgtaaggggctt

SEQ ID NO: 2692162 - DNA, 25 bp, Homo sapien
gaacatcaaatgttgcccaaccctt

SEQ ID NO: 2692163 - DNA, 25 bp, Homo sapien
tgttagaacagaaaacgccatactt

SEQ ID NO: 2692164 - DNA, 25 bp, Homo sapien
tttaatgttagaacagaaaacgcca

SEQ ID NO: 2692165 - DNA, 25 bp, Homo sapien
ctggagaccatggtttttaatgtta

SEQ ID NO: 2692166 - DNA, 25 bp, Homo sapien
tagaacagaaaacgccatacttttc

SEQ ID NO: 2692167 - DNA, 25 bp, Homo sapien
tgatgatgaccaaggccagtgtgga

SEQ ID NO: 2692168 - DNA, 25 bp, Homo sapien
tgtggagcccttgaactgcagcagc

SEQ ID NO: 2692169 - DNA, 25 bp, Homo sapien
tctttagcagatcagatataggagc

SEQ ID NO: 2692170 - DNA, 25 bp, Homo sapien
tggtggcccgccatacagtgctgca

SEQ ID NO: 2692171 - DNA, 25 bp, Homo sapien
agagtgtgtcagctaaaggggcaaa

SEQ ID NO: 2692172 - DNA, 25 bp, Homo sapien
gcctggtctggggcaaagttgatgt

SEQ ID NO: 2692173 - DNA, 25 bp, Homo sapien
cctggtctggggcaaagttgatgtc

SEQ ID NO: 2692174 - DNA, 25 bp, Homo sapien
ggtctggggcaaagttgatgtctac

SEQ ID NO: 2692175 - DNA, 25 bp, Homo sapien
tgtgcaggaggatgactgaagactt

SEQ ID NO: 2692176 - DNA, 25 bp, Homo sapien
gaagacttctcagttgctgcattac

SEQ ID NO: 2692177 - DNA, 25 bp, Homo sapien
gcaggtgacacaaagttgtctgtgc

SEQ ID NO: 2692178 - DNA, 25 bp, Homo sapien
gctgcattacaagttccttgcagca

SEQ ID NO: 2692179 - DNA, 25 bp, Homo sapien
gccatagcatctgcctctgagcttt

SEQ ID NO: 2692180 - DNA, 25 bp, Homo sapien
cctctgagctttttccatctccatt

SEQ ID NO: 2692181 - DNA, 25 bp, Homo sapien
tttctttctgccatagcatctgcct

SEQ ID NO: 2692182 - DNA, 25 bp, Homo sapien
ttctgccatagcatctgcctctgag

SEQ ID NO: 2692183 - DNA, 25 bp, Homo sapien
tcatggatacgaggcctgaggaagt

SEQ ID NO: 2692184 - DNA, 25 bp, Homo sapien
tactgaaaggccatactcgtggctg

SEQ ID NO: 2692185 - DNA, 25 bp, Homo sapien
cattcgtccattgtggcctgcgggt

SEQ ID NO: 2692186 - DNA, 25 bp, Homo sapien
tcccaggccgatgtggaaatatgtt

SEQ ID NO: 2692187 - DNA, 25 bp, Homo sapien
tatttttcagttaacgcacgcacag

SEQ ID NO: 2692188 - DNA, 25 bp, Homo sapien
tagcctgggacaccacaaactgagg

SEQ ID NO: 2692189 - DNA, 25 bp, Homo sapien
tgctggaatccaaaactgacgaggt

SEQ ID NO: 2692190 - DNA, 25 bp, Homo sapien
ccataacatggtgtgaggacggact

SEQ ID NO: 2692191 - DNA, 25 bp, Homo sapien
tttgcactatggctgcccgtgggag

SEQ ID NO: 2692192 - DNA, 25 bp, Homo sapien
tcttatggctactgctgatgggtcc

SEQ ID NO: 2692193 - DNA, 25 bp, Homo sapien
tgggcatgtctatccatatcctggg

SEQ ID NO: 2692194 - DNA, 25 bp, Homo sapien
tgtaagaagcactgcagccaattgt

SEQ ID NO: 2692195 - DNA, 25 bp, Homo sapien
cagcccacccgcccggtgcggagct

SEQ ID NO: 2692196 - DNA, 25 bp, Homo sapien
cccacccgcccggtgcggagctcgc

SEQ ID NO: 2692197 - DNA, 25 bp, Homo sapien
ctgcccctgcgctcgtcccagccca

SEQ ID NO: 2692198 - DNA, 25 bp, Homo sapien
ccggctggtccctgtcgctgcccct

SEQ ID NO: 2692199 - DNA, 25 bp, Homo sapien
tggtggaaccattaagacgttgtcc

SEQ ID NO: 2692200 - DNA, 25 bp, Homo sapien
aacgtgcacgcactgggagtggtca

SEQ ID NO: 2692201 - DNA, 25 bp, Homo sapien
tgacattagcggagagaacgtgcac

SEQ ID NO: 2692202 - DNA, 25 bp, Homo sapien
tgatggacacttgcaatctgacgcc

SEQ ID NO: 2692203 - DNA, 25 bp, Homo sapien
cctacagagcagagtgaatatatcc

SEQ ID NO: 2692204 - DNA, 25 bp, Homo sapien
ttttataagttctgaccagcagcag

SEQ ID NO: 2692205 - DNA, 25 bp, Homo sapien
cccagttatttgacggtgagaccaa

SEQ ID NO: 2692206 - DNA, 25 bp, Homo sapien
gctgaggacttctacagaaccctgt

SEQ ID NO: 2692207 - DNA, 25 bp, Homo sapien
tcatggctgcagagatggagaccat

SEQ ID NO: 2692208 - DNA, 25 bp, Homo sapien
ttcatggctgcagagatggagacca

SEQ ID NO: 2692209 - DNA, 25 bp, Homo sapien
gttcatggctgcagagatggagacc

SEQ ID NO: 2692210 - DNA, 25 bp, Homo sapien
ttattgatccaatttaaagcgtaca

SEQ ID NO: 2692211 - DNA, 25 bp, Homo sapien
gatccaatttaaagcgtacagtgag

SEQ ID NO: 2692212 - DNA, 25 bp, Homo sapien
ttgatccaatttaaagcgtacagtg

SEQ ID NO: 2692213 - DNA, 25 bp, Homo sapien
ccaatttaaagcgtacagtgagaag

SEQ ID NO: 2692214 - DNA, 25 bp, Homo sapien
ctctttctgttcagtccccttctgc

SEQ ID NO: 2692215 - DNA, 25 bp, Homo sapien
tttctgttcagtccccttctgctgc

SEQ ID NO: 2692216 - DNA, 25 bp, Homo sapien
ttgatgaatggaagtaagcgtagca

SEQ ID NO: 2692217 - DNA, 25 bp, Homo sapien
tggaagtaagcgtagcacagttagc

SEQ ID NO: 2692218 - DNA, 25 bp, Homo sapien
tgaatggaagtaagcgtagcacagt

SEQ ID NO: 2692219 - DNA, 25 bp, Homo sapien
ggaagtaagcgtagcacagttagca

SEQ ID NO: 2692220 - DNA, 25 bp, Homo sapien
tcaggtgttgattgacaatctcctt

SEQ ID NO: 2692221 - DNA, 25 bp, Homo sapien
caggtgttgattgacaatctccttt

SEQ ID NO: 2692222 - DNA, 25 bp, Homo sapien
accgccgcctggctcaccccggcag

SEQ ID NO: 2692223 - DNA, 25 bp, Homo sapien
gccgcctggctcaccccggcagccg

SEQ ID NO: 2692224 - DNA, 25 bp, Homo sapien
agcagcggcttgaagcggctcagca

SEQ ID NO: 2692225 - DNA, 25 bp, Homo sapien
gcgggtcgccggcatcgagcagcgg

SEQ ID NO: 2692226 - DNA, 25 bp, Homo sapien
cttgaagcggtccctgcgggcggcg

SEQ ID NO: 2692227 - DNA, 25 bp, Homo sapien
catcgagcagcggcttgaagcggct

SEQ ID NO: 2692228 - DNA, 25 bp, Homo sapien
acgaacttgacgccgtcgagctcct

SEQ ID NO: 2692229 - DNA, 25 bp, Homo sapien
tcaccaccgccacgttgttgacgaa

SEQ ID NO: 2692230 - DNA, 25 bp, Homo sapien
cttcaccaccgccacgttgttgacg

SEQ ID NO: 2692231 - DNA, 25 bp, Homo sapien
aacttgacgccgtcgagctccttca

SEQ ID NO: 2692232 - DNA, 25 bp, Homo sapien
cctgggctagctcaagggctggaag

SEQ ID NO: 2692233 - DNA, 25 bp, Homo sapien
agagcagggcgatgccgcctcagaa

SEQ ID NO: 2692234 - DNA, 25 bp, Homo sapien
ctccgcggcaagaccgtcgaagtgg

SEQ ID NO: 2692235 - DNA, 25 bp, Homo sapien
cgcgtctgcggagggtctctcggtg

SEQ ID NO: 2692236 - DNA, 25 bp, Homo sapien
ttctgctgcggcggccctttcgctg

SEQ ID NO: 2692237 - DNA, 25 bp, Homo sapien
ggcttctgctgcggcggccctttcg

SEQ ID NO: 2692238 - DNA, 25 bp, Homo sapien
cagggcttctgctgcggcggccctt

SEQ ID NO: 2692239 - DNA, 25 bp, Homo sapien
ctgcggcggccctttcgctgccccg

SEQ ID NO: 2692240 - DNA, 25 bp, Homo sapien
cgggcaactcctcggcgtcagggct

SEQ ID NO: 2692241 - DNA, 25 bp, Homo sapien
gaagtcgcgcttggccgccaagccg

SEQ ID NO: 2692242 - DNA, 25 bp, Homo sapien
agaccggactcttccaccgagagcc

SEQ ID NO: 2692243 - DNA, 25 bp, Homo sapien
acgagccactcgtgctcggacggct

SEQ ID NO: 2692244 - DNA, 25 bp, Homo sapien
gagctcgacttcttcaagcctcggg

SEQ ID NO: 2692245 - DNA, 25 bp, Homo sapien
caggacgcccagaaatgcactggtg

SEQ ID NO: 2692246 - DNA, 25 bp, Homo sapien
tgggcgaggcgctcaagaacttgct

SEQ ID NO: 2692247 - DNA, 25 bp, Homo sapien
tgcgttcacgtcgactggtgcgcca

SEQ ID NO: 2692248 - DNA, 25 bp, Homo sapien
aggctggcagaccaccgcggatctt

SEQ ID NO: 2692249 - DNA, 25 bp, Homo sapien
ccccggagtaggtcgacgagagatt

SEQ ID NO: 2692250 - DNA, 25 bp, Homo sapien
tagaccagctaaaggccccggagta

SEQ ID NO: 2692251 - DNA, 25 bp, Homo sapien
ggaaaactgggcactagaccagcta

SEQ ID NO: 2692252 - DNA, 25 bp, Homo sapien
tcaagttccctctagagttcaggcc

SEQ ID NO: 2692253 - DNA, 25 bp, Homo sapien
tctgtcttgggattgtgtagctgca

SEQ ID NO: 2692254 - DNA, 25 bp, Homo sapien
tccaggcgttgattgggctgcagtc

SEQ ID NO: 2692255 - DNA, 25 bp, Homo sapien
gcaggccacgatagatcaaccaggt

SEQ ID NO: 2692256 - DNA, 25 bp, Homo sapien
gcgcccccatctcctttagccgccg

SEQ ID NO: 2692257 - DNA, 25 bp, Homo sapien
cccccatctcctttagccgccggca

SEQ ID NO: 2692258 - DNA, 25 bp, Homo sapien
tctgcgcccccatctcctttagccg

SEQ ID NO: 2692259 - DNA, 25 bp, Homo sapien
gtttctgcgcccccatctcctttag

SEQ ID NO: 2692260 - DNA, 25 bp, Homo sapien
cctaatacggattcgatcagtgcac

SEQ ID NO: 2692261 - DNA, 25 bp, Homo sapien
tcagtgcactttttgatttcgaaca

SEQ ID NO: 2692262 - DNA, 25 bp, Homo sapien
cggattcgatcagtgcactttttga

SEQ ID NO: 2692263 - DNA, 25 bp, Homo sapien
ctttttgatttcgaacataagtatc

SEQ ID NO: 2692264 - DNA, 25 bp, Homo sapien
ggactttgacttgccctgctgagca

SEQ ID NO: 2692265 - DNA, 25 bp, Homo sapien
catatcgttatttctccagagggca

SEQ ID NO: 2692266 - DNA, 25 bp, Homo sapien
taaactggacgttggttgtgcgctg

SEQ ID NO: 2692267 - DNA, 25 bp, Homo sapien
tcaaataaagcttccccagtccggc

SEQ ID NO: 2692268 - DNA, 25 bp, Homo sapien
aatttatggatcttaaaaactgcag

SEQ ID NO: 2692269 - DNA, 25 bp, Homo sapien
ggcctcacccaggtcttgtgtatta

SEQ ID NO: 2692270 - DNA, 25 bp, Homo sapien
aactgcagtattcccccattttgtg

SEQ ID NO: 2692271 - DNA, 25 bp, Homo sapien
gcacttaaggtgcaaagcagcctat

SEQ ID NO: 2692272 - DNA, 25 bp, Homo sapien
caggcctttctaagatactcctcca

SEQ ID NO: 2692273 - DNA, 25 bp, Homo sapien
aggcctttctaagatactcctccag

SEQ ID NO: 2692274 - DNA, 25 bp, Homo sapien
ggcctttctaagatactcctccagc

SEQ ID NO: 2692275 - DNA, 25 bp, Homo sapien
agaggtccccaaccctaagtgtgag

SEQ ID NO: 2692276 - DNA, 25 bp, Homo sapien
tagtgctcccaagctggactcagaa

SEQ ID NO: 2692277 - DNA, 25 bp, Homo sapien
tggtgatccccatctgtagctgcag

SEQ ID NO: 2692278 - DNA, 25 bp, Homo sapien
tccatagttcatagggagccccaaa

SEQ ID NO: 2692279 - DNA, 25 bp, Homo sapien
tatccaccggaaactgtcttcagct

SEQ ID NO: 2692280 - DNA, 25 bp, Homo sapien
agtctgacagggagacagcgcctac

SEQ ID NO: 2692281 - DNA, 25 bp, Homo sapien
ggagagccggtgaacttcccagaac

SEQ ID NO: 2692282 - DNA, 25 bp, Homo sapien
taaaccagtcgcacactcggagcgt

SEQ ID NO: 2692283 - DNA, 25 bp, Homo sapien
tcaggacagctaaggtgcacacaag

SEQ ID NO: 2692284 - DNA, 25 bp, Homo sapien
tctcaggaacggagcatttcttggc

SEQ ID NO: 2692285 - DNA, 25 bp, Homo sapien
tgatcaagggccgagttactcagcg

SEQ ID NO: 2692286 - DNA, 25 bp, Homo sapien
cagggatactaccatgggaggacac

SEQ ID NO: 2692287 - DNA, 25 bp, Homo sapien
tgagatcgggcgtgttcagggtagt

SEQ ID NO: 2692288 - DNA, 25 bp, Homo sapien
ccaggcccgactctgcttagtttct

SEQ ID NO: 2692289 - DNA, 25 bp, Homo sapien
caggcccgactctgcttagtttctg

SEQ ID NO: 2692290 - DNA, 25 bp, Homo sapien
agatcagatgagatcgggcgtgttc

SEQ ID NO: 2692291 - DNA, 25 bp, Homo sapien
tgaacacttactcaagtcagtcttg

SEQ ID NO: 2692292 - DNA, 25 bp, Homo sapien
ctggatcgcattactaccgttgaac

SEQ ID NO: 2692293 - DNA, 25 bp, Homo sapien
gcattactaccgttgaacacttact

SEQ ID NO: 2692294 - DNA, 25 bp, Homo sapien
tactaccgttgaacacttactcaag

SEQ ID NO: 2692295 - DNA, 25 bp, Homo sapien
gacagagcgcctctgagccccgagg

SEQ ID NO: 2692296 - DNA, 25 bp, Homo sapien
acagcagaggagcacgaggtttcat

SEQ ID NO: 2692297 - DNA, 25 bp, Homo sapien
tcccagctgtagacagagcgcctct

SEQ ID NO: 2692298 - DNA, 25 bp, Homo sapien
ggcctgcgagtcttcccagctgtag

SEQ ID NO: 2692299 - DNA, 25 bp, Homo sapien
tccggcaaggttggaagccgctctt

SEQ ID NO: 2692300 - DNA, 25 bp, Homo sapien
ccgctcttggaggtcgtgaggtaac

SEQ ID NO: 2692301 - DNA, 25 bp, Homo sapien
gactcgttcgtcatttccggcaagg

SEQ ID NO: 2692302 - DNA, 25 bp, Homo sapien
tccacagtcaccgatccggttgact

SEQ ID NO: 2692303 - DNA, 25 bp, Homo sapien
acaggcgcttggctcgctttcgcga

SEQ ID NO: 2692304 - DNA, 25 bp, Homo sapien
tccttatcctttcccagcccagcgg

SEQ ID NO: 2692305 - DNA, 25 bp, Homo sapien
ggtccacgaacactgcacaaccaga

SEQ ID NO: 2692306 - DNA, 25 bp, Homo sapien
gctcgctttcgcgaagcgccgcagt

SEQ ID NO: 2692307 - DNA, 25 bp, Homo sapien
ctttagtgaagacgtgcggataggc

SEQ ID NO: 2692308 - DNA, 25 bp, Homo sapien
cgaacggtgacaagctgtagctgat

SEQ ID NO: 2692309 - DNA, 25 bp, Homo sapien
gaaagaaagactcccgaatgcggcg

SEQ ID NO: 2692310 - DNA, 25 bp, Homo sapien
tgtagctgatcacatgccgcatccg

SEQ ID NO: 2692311 - DNA, 25 bp, Homo sapien
gataatatgaccagcttaagggcgg

SEQ ID NO: 2692312 - DNA, 25 bp, Homo sapien
taagggcggtcaggaatattcaatg

SEQ ID NO: 2692313 - DNA, 25 bp, Homo sapien
gtagttcttagcatatccaaggcca

SEQ ID NO: 2692314 - DNA, 25 bp, Homo sapien
tgtgtacggcaagttacagagcgcc

SEQ ID NO: 2692315 - DNA, 25 bp, Homo sapien
tagataagataaaacactacaaact

SEQ ID NO: 2692316 - DNA, 25 bp, Homo sapien
ccccatgtgtagataagataaaaca

SEQ ID NO: 2692317 - DNA, 25 bp, Homo sapien
gaactcttcagtcccccatgtgtag

SEQ ID NO: 2692318 - DNA, 25 bp, Homo sapien
cttggatctctcgaactcttcagtc

SEQ ID NO: 2692319 - DNA, 25 bp, Homo sapien
tttgtcattttcataggcagctgga

SEQ ID NO: 2692320 - DNA, 25 bp, Homo sapien
catttgtcattttcataggcagctg

SEQ ID NO: 2692321 - DNA, 25 bp, Homo sapien
gtcattttcataggcagctggattc

SEQ ID NO: 2692322 - DNA, 25 bp, Homo sapien
tcatttgtcattttcataggcagct

SEQ ID NO: 2692323 - DNA, 25 bp, Homo sapien
agacagggaaccgtcatccggatgc

SEQ ID NO: 2692324 - DNA, 25 bp, Homo sapien
ccaaatgaggatacgttaaaggtgc

SEQ ID NO: 2692325 - DNA, 25 bp, Homo sapien
tatttgaggcccagagcaccatggc

SEQ ID NO: 2692326 - DNA, 25 bp, Homo sapien
ggtcacacaggattctactcacaaa

SEQ ID NO: 2692327 - DNA, 25 bp, Homo sapien
tggacacccctgcaatagagcatag

SEQ ID NO: 2692328 - DNA, 25 bp, Homo sapien
tgaaagccacgtgaaaccattgagg

SEQ ID NO: 2692329 - DNA, 25 bp, Homo sapien
aacaaattctttctgccgggcatca

SEQ ID NO: 2692330 - DNA, 25 bp, Homo sapien
gaacaacgtgatgtcctagagccag

SEQ ID NO: 2692331 - DNA, 25 bp, Homo sapien
taccggaggaatgtgctcaagggcc

SEQ ID NO: 2692332 - DNA, 25 bp, Homo sapien
ctgcacaaagtttgaggtgccacat

SEQ ID NO: 2692333 - DNA, 25 bp, Homo sapien
tggcccaacagcaacaggaagatca

SEQ ID NO: 2692334 - DNA, 25 bp, Homo sapien
ggcccaacagcaacaggaagatcat

SEQ ID NO: 2692335 - DNA, 25 bp, Homo sapien
caacagcaacaggaagatcatgagg

SEQ ID NO: 2692336 - DNA, 25 bp, Homo sapien
cccaacagcaacaggaagatcatga

SEQ ID NO: 2692337 - DNA, 25 bp, Homo sapien
cattcctcaggactgaatctagctt

SEQ ID NO: 2692338 - DNA, 25 bp, Homo sapien
gtaagggcaaagacattcagatatg

SEQ ID NO: 2692339 - DNA, 25 bp, Homo sapien
cagatgctgtagactcagaacagag

SEQ ID NO: 2692340 - DNA, 25 bp, Homo sapien
accctgctgcacaccttggaagagt

SEQ ID NO: 2692341 - DNA, 25 bp, Homo sapien
tccgtggccttctctttgccgaact

SEQ ID NO: 2692342 - DNA, 25 bp, Homo sapien
gctccaataggcctgagggaaaccc

SEQ ID NO: 2692343 - DNA, 25 bp, Homo sapien
gatacactcagaatcatcccggcag

SEQ ID NO: 2692344 - DNA, 25 bp, Homo sapien
caaaatggggtcattctccgtggcc

SEQ ID NO: 2692345 - DNA, 25 bp, Homo sapien
tgttcttggctcctaactcctaagg

SEQ ID NO: 2692346 - DNA, 25 bp, Homo sapien
tcatggtacccacatagagctgttc

SEQ ID NO: 2692347 - DNA, 25 bp, Homo sapien
gaaaggcaccactctttcatggtac

SEQ ID NO: 2692348 - DNA, 25 bp, Homo sapien
ctaggaatgaccagggccacctatg

SEQ ID NO: 2692349 - DNA, 25 bp, Homo sapien
ctgggccacacttaaggaacagcgt

SEQ ID NO: 2692350 - DNA, 25 bp, Homo sapien
cacacttaaggaacagcgtcttttt

SEQ ID NO: 2692351 - DNA, 25 bp, Homo sapien
ggccacacttaaggaacagcgtctt

SEQ ID NO: 2692352 - DNA, 25 bp, Homo sapien
tcattcctgggccacacttaaggaa

SEQ ID NO: 2692353 - DNA, 25 bp, Homo sapien
attgtcggaggtgactgctgtcctt

SEQ ID NO: 2692354 - DNA, 25 bp, Homo sapien
tcaatattccatagaacggagcatt

SEQ ID NO: 2692355 - DNA, 25 bp, Homo sapien
caatattccatagaacggagcattg

SEQ ID NO: 2692356 - DNA, 25 bp, Homo sapien
cattgtcggaggtgactgctgtcct

SEQ ID NO: 2692357 - DNA, 25 bp, Homo sapien
ggtgtctccagccaaaatgcagtta

SEQ ID NO: 2692358 - DNA, 25 bp, Homo sapien
gtgtctccagccaaaatgcagttaa

SEQ ID NO: 2692359 - DNA, 25 bp, Homo sapien
ttgggtgtctccagccaaaatgcag

SEQ ID NO: 2692360 - DNA, 25 bp, Homo sapien
tgggtgtctccagccaaaatgcagt

SEQ ID NO: 2692361 - DNA, 25 bp, Homo sapien
aatttaaagcgtacatctgccttta

SEQ ID NO: 2692362 - DNA, 25 bp, Homo sapien
gcttatccatatatcaacattctaa

SEQ ID NO: 2692363 - DNA, 25 bp, Homo sapien
gagacatttaatagtatccatagaa

SEQ ID NO: 2692364 - DNA, 25 bp, Homo sapien
tctaaattgacaagtttagttatgc

SEQ ID NO: 2692365 - DNA, 25 bp, Homo sapien
tccagggccacagcttaggaacttg

SEQ ID NO: 2692366 - DNA, 25 bp, Homo sapien
ccagattgagaagttaacacattat

SEQ ID NO: 2692367 - DNA, 25 bp, Homo sapien
cgtagctattgattatgtagctctc

SEQ ID NO: 2692368 - DNA, 25 bp, Homo sapien
tgtagctctcactacactttccaga

SEQ ID NO: 2692369 - DNA, 25 bp, Homo sapien
ctgagcccttttcatgcaattcctg

SEQ ID NO: 2692370 - DNA, 25 bp, Homo sapien
taagtcagtatgtgcatttcacacg

SEQ ID NO: 2692371 - DNA, 25 bp, Homo sapien
cgataaagctgttaatggtgagcaa

SEQ ID NO: 2692372 - DNA, 25 bp, Homo sapien
tacaatgccaaaccatagttggaga

SEQ ID NO: 2692373 - DNA, 25 bp, Homo sapien
ggtttaatcagacagatcagacagc

SEQ ID NO: 2692374 - DNA, 25 bp, Homo sapien
cagagcagccagtgattgttccagt

SEQ ID NO: 2692375 - DNA, 25 bp, Homo sapien
gaaacgttggtacatttcttcatga

SEQ ID NO: 2692376 - DNA, 25 bp, Homo sapien
gaggccagtactctggagtttcaga

SEQ ID NO: 2692377 - DNA, 25 bp, Homo sapien
ggctagagagcatccagcccattcc

SEQ ID NO: 2692378 - DNA, 25 bp, Homo sapien
tccagtctggctagagagcatccag

SEQ ID NO: 2692379 - DNA, 25 bp, Homo sapien
tctggctagagagcatccagcccat

SEQ ID NO: 2692380 - DNA, 25 bp, Homo sapien
gctccagtctggctagagagcatcc

SEQ ID NO: 2692381 - DNA, 25 bp, Homo sapien
gaggcagcagcctatacaccattag

SEQ ID NO: 2692382 - DNA, 25 bp, Homo sapien
tatgactacacttgtatgccaggag

SEQ ID NO: 2692383 - DNA, 25 bp, Homo sapien
catagtgtgtggaaatactactccc

SEQ ID NO: 2692384 - DNA, 25 bp, Homo sapien
caattgcagtggttgcagttgtcac

SEQ ID NO: 2692385 - DNA, 25 bp, Homo sapien
ttgaagaccttagtggaaagtactg

SEQ ID NO: 2692386 - DNA, 25 bp, Homo sapien
ttaggcagatcctttacagagaaac

SEQ ID NO: 2692387 - DNA, 25 bp, Homo sapien
gacatggagaattataaagtctttg

SEQ ID NO: 2692388 - DNA, 25 bp, Homo sapien
cattagccaatcaagtgtcattttg

SEQ ID NO: 2692389 - DNA, 25 bp, Homo sapien
cataaaggccgagagaattcagact

SEQ ID NO: 2692390 - DNA, 25 bp, Homo sapien
tatactgtgatgaccctagcctggt

SEQ ID NO: 2692391 - DNA, 25 bp, Homo sapien
agtgccagctttctatgccatagtc

SEQ ID NO: 2692392 - DNA, 25 bp, Homo sapien
cctgagcagtctggtaaaagctttg

SEQ ID NO: 2692393 - DNA, 25 bp, Homo sapien
caaatgtctgggctttaccgtatac

SEQ ID NO: 2692394 - DNA, 25 bp, Homo sapien
gaagatagtcttatggtcccaagag

SEQ ID NO: 2692395 - DNA, 25 bp, Homo sapien
ttgagagtggtaagatcaggaacca

SEQ ID NO: 2692396 - DNA, 25 bp, Homo sapien
gaaaatagctaactataggccagag

SEQ ID NO: 2692397 - DNA, 25 bp, Homo sapien
gaaatgggctaagattcttactgcc

SEQ ID NO: 2692398 - DNA, 25 bp, Homo sapien
gccattatcatatatgtgatttgaa

SEQ ID NO: 2692399 - DNA, 25 bp, Homo sapien
cttactgccattatcatatatgtga

SEQ ID NO: 2692400 - DNA, 25 bp, Homo sapien
gcccggcctgaaatgggctaagatt

SEQ ID NO: 2692401 - DNA, 25 bp, Homo sapien
agactgactctctctgggggggaaa

SEQ ID NO: 2692402 - DNA, 25 bp, Homo sapien
ggtcacagagactgactctctctgg

SEQ ID NO: 2692403 - DNA, 25 bp, Homo sapien
cttgactgcagctggttgaggctgc

SEQ ID NO: 2692404 - DNA, 25 bp, Homo sapien
ttagaaaacaactgtcatgctgggc

SEQ ID NO: 2692405 - DNA, 25 bp, Homo sapien
caactcttagctcaaaatggtggaa

SEQ ID NO: 2692406 - DNA, 25 bp, Homo sapien
aatttggaaagtgacgtcagtagcc

SEQ ID NO: 2692407 - DNA, 25 bp, Homo sapien
gaatctgcgtaatgtaaaatgctgt

SEQ ID NO: 2692408 - DNA, 25 bp, Homo sapien
caaaaaattacaactcttagctcaa

SEQ ID NO: 2692409 - DNA, 25 bp, Homo sapien
atagtgcactggagcctcaaaatct

SEQ ID NO: 2692410 - DNA, 25 bp, Homo sapien
tggaattgagcaaacctgcctcagc

SEQ ID NO: 2692411 - DNA, 25 bp, Homo sapien
gtgcagttgctcttcacaggtgaaa

SEQ ID NO: 2692412 - DNA, 25 bp, Homo sapien
gcacctggcctttcaaaatactttg

SEQ ID NO: 2692413 - DNA, 25 bp, Homo sapien
ctggcctcaagtttccgcagggaac

SEQ ID NO: 2692414 - DNA, 25 bp, Homo sapien
tttccgcagggaactgtcatcagtg

SEQ ID NO: 2692415 - DNA, 25 bp, Homo sapien
ggcctcaagtttccgcagggaactg

SEQ ID NO: 2692416 - DNA, 25 bp, Homo sapien
caagtttccgcagggaactgtcatc

SEQ ID NO: 2692417 - DNA, 25 bp, Homo sapien
caactttcttattgtaagggctgac

SEQ ID NO: 2692418 - DNA, 25 bp, Homo sapien
tgtggccaactttcttattgtaagg

SEQ ID NO: 2692419 - DNA, 25 bp, Homo sapien
aactttcttattgtaagggctgact

SEQ ID NO: 2692420 - DNA, 25 bp, Homo sapien
actttcttattgtaagggctgactt

SEQ ID NO: 2692421 - DNA, 25 bp, Homo sapien
gccacagcatgttgccatcattcca

SEQ ID NO: 2692422 - DNA, 25 bp, Homo sapien
tacaggtgactttccatcccttgaa

SEQ ID NO: 2692423 - DNA, 25 bp, Homo sapien
ggcatttgccatctttacaggtgac

SEQ ID NO: 2692424 - DNA, 25 bp, Homo sapien
tcccttgaaccaaggcatgttagca

SEQ ID NO: 2692425 - DNA, 25 bp, Homo sapien
ctggcatttgccatctttacaggtg

SEQ ID NO: 2692426 - DNA, 25 bp, Homo sapien
caaattggtagtaggatgcaatcca

SEQ ID NO: 2692427 - DNA, 25 bp, Homo sapien
gcttcatggtatattgcaacagatt

SEQ ID NO: 2692428 - DNA, 25 bp, Homo sapien
gactggagccaaggtgacctctatg

SEQ ID NO: 2692429 - DNA, 25 bp, Homo sapien
tggcctacagagatagtaccaatac

SEQ ID NO: 2692430 - DNA, 25 bp, Homo sapien
catgatgaacatttttgacagatac

SEQ ID NO: 2692431 - DNA, 25 bp, Homo sapien
caacattgccatgatgaacattttt

SEQ ID NO: 2692432 - DNA, 25 bp, Homo sapien
cagcaacattgccatgatgaacatt

SEQ ID NO: 2692433 - DNA, 25 bp, Homo sapien
gccatgatgaacatttttgacagat

SEQ ID NO: 2692434 - DNA, 25 bp, Homo sapien
cattacaggagcatagccagcactg

SEQ ID NO: 2692435 - DNA, 25 bp, Homo sapien
atgtggcaatccattacaggagcat

SEQ ID NO: 2692436 - DNA, 25 bp, Homo sapien
tggcaatccgtctttcccttcagct

SEQ ID NO: 2692437 - DNA, 25 bp, Homo sapien
cagaatggcaatccgtctttccctt

SEQ ID NO: 2692438 - DNA, 25 bp, Homo sapien
aagatgggagcattaccagatttca

SEQ ID NO: 2692439 - DNA, 25 bp, Homo sapien
agatgggagcattaccagatttcaa

SEQ ID NO: 2692440 - DNA, 25 bp, Homo sapien
caacccaaagaaggatagtcagaag

SEQ ID NO: 2692441 - DNA, 25 bp, Homo sapien
acccaaagaaggatagtcagaagct

SEQ ID NO: 2692442 - DNA, 25 bp, Homo sapien
caaagaaggatagtcagaagctctc

SEQ ID NO: 2692443 - DNA, 25 bp, Homo sapien
aaacaacccaaagaaggatagtcag

SEQ ID NO: 2692444 - DNA, 25 bp, Homo sapien
atcctctgttttgatgacactcaca

SEQ ID NO: 2692445 - DNA, 25 bp, Homo sapien
tgacactcacagcaactgtttgtct

SEQ ID NO: 2692446 - DNA, 25 bp, Homo sapien
cactcacagcaactgtttgtcttac

SEQ ID NO: 2692447 - DNA, 25 bp, Homo sapien
tcctctgttttgatgacactcacag

SEQ ID NO: 2692448 - DNA, 25 bp, Homo sapien
tgggcagactcgatgatattgccag

SEQ ID NO: 2692449 - DNA, 25 bp, Homo sapien
gactcgatgatattgccaggtccag

SEQ ID NO: 2692450 - DNA, 25 bp, Homo sapien
gcagactcgatgatattgccaggtc

SEQ ID NO: 2692451 - DNA, 25 bp, Homo sapien
ctcgatgatattgccaggtccagga

SEQ ID NO: 2692452 - DNA, 25 bp, Homo sapien
tcaaagactagagcaaggggttcag

SEQ ID NO: 2692453 - DNA, 25 bp, Homo sapien
caaggggttcagtctataacttgac

SEQ ID NO: 2692454 - DNA, 25 bp, Homo sapien
tgggagtgagaaggggtcaaagact

SEQ ID NO: 2692455 - DNA, 25 bp, Homo sapien
gaaggggtcaaagactagagcaagg

SEQ ID NO: 2692456 - DNA, 25 bp, Homo sapien
ggctttgatctgtaggtgtacaacc

SEQ ID NO: 2692457 - DNA, 25 bp, Homo sapien
taggaagtgacctcttcagactgtc

SEQ ID NO: 2692458 - DNA, 25 bp, Homo sapien
gcatagtgcattgtggtaaagttac

SEQ ID NO: 2692459 - DNA, 25 bp, Homo sapien
atgaggccaagagggatttatgtac

SEQ ID NO: 2692460 - DNA, 25 bp, Homo sapien
gcatggtagtgcctagccctgattt

SEQ ID NO: 2692461 - DNA, 25 bp, Homo sapien
tggtagtgcctagccctgatttaga

SEQ ID NO: 2692462 - DNA, 25 bp, Homo sapien
gcctagccctgatttagatttctta

SEQ ID NO: 2692463 - DNA, 25 bp, Homo sapien
tagtgcctagccctgatttagattt

SEQ ID NO: 2692464 - DNA, 25 bp, Homo sapien
tgagaaggtaaggtaaatgccgtag

SEQ ID NO: 2692465 - DNA, 25 bp, Homo sapien
taaagaagtgttggcaagtggccac

SEQ ID NO: 2692466 - DNA, 25 bp, Homo sapien
tcatacgtgcataaagaagtgttgg

SEQ ID NO: 2692467 - DNA, 25 bp, Homo sapien
aatttctcagattcgttttccttat

SEQ ID NO: 2692468 - DNA, 25 bp, Homo sapien
ggcaagtggccacttggttttcaac

SEQ ID NO: 2692469 - DNA, 25 bp, Homo sapien
tgttccgtgtgaggcgcatcgctgc

SEQ ID NO: 2692470 - DNA, 25 bp, Homo sapien
ggcctacgcctgttccgtgtgaggc

SEQ ID NO: 2692471 - DNA, 25 bp, Homo sapien
cgacgccgccttcgtttgtcgaggc

SEQ ID NO: 2692472 - DNA, 25 bp, Homo sapien
ggcccgaccgtcatggagcggtgcg

SEQ ID NO: 2692473 - DNA, 25 bp, Homo sapien
cattctgcacagtagtcttacactg

SEQ ID NO: 2692474 - DNA, 25 bp, Homo sapien
ccattctgcacagtagtcttacact

SEQ ID NO: 2692475 - DNA, 25 bp, Homo sapien
attctgcacagtagtcttacactgt

SEQ ID NO: 2692476 - DNA, 25 bp, Homo sapien
ttctgcacagtagtcttacactgtt

SEQ ID NO: 2692477 - DNA, 25 bp, Homo sapien
tggcctagttgctctattgtttgga

SEQ ID NO: 2692478 - DNA, 25 bp, Homo sapien
tcttaggtattttctagataaatga

SEQ ID NO: 2692479 - DNA, 25 bp, Homo sapien
cctggcctagttgctctattgtttg

SEQ ID NO: 2692480 - DNA, 25 bp, Homo sapien
cctagttgctctattgtttggattc

SEQ ID NO: 2692481 - DNA, 25 bp, Homo sapien
catgcaggccataactggatctctc

SEQ ID NO: 2692482 - DNA, 25 bp, Homo sapien
tgtgttaatggttattacaaaagag

SEQ ID NO: 2692483 - DNA, 25 bp, Homo sapien
tatattaattctatggttgtcccat

SEQ ID NO: 2692484 - DNA, 25 bp, Homo sapien
ttgcctagtgacatcttgatgatcc

SEQ ID NO: 2692485 - DNA, 25 bp, Homo sapien
gagcttctggtcttgttgggaagca

SEQ ID NO: 2692486 - DNA, 25 bp, Homo sapien
ctttaaggagcttctggtcttgttg

SEQ ID NO: 2692487 - DNA, 25 bp, Homo sapien
cttctggtcttgttgggaagcaaac

SEQ ID NO: 2692488 - DNA, 25 bp, Homo sapien
ttaaggagcttctggtcttgttggg

SEQ ID NO: 2692489 - DNA, 25 bp, Homo sapien
tgcggcacgggacagagcggggttt

SEQ ID NO: 2692490 - DNA, 25 bp, Homo sapien
cagagcggggtttgaagacaactgt

SEQ ID NO: 2692491 - DNA, 25 bp, Homo sapien
ttgaagacaactgtcgcgtttggtt

SEQ ID NO: 2692492 - DNA, 25 bp, Homo sapien
gaagacaactgtcgcgtttggtttc

SEQ ID NO: 2692493 - DNA, 25 bp, Homo sapien
ggttagcgatttcgcggaagacagc

SEQ ID NO: 2692494 - DNA, 25 bp, Homo sapien
tcgggcccgggcgataagtctggtg

SEQ ID NO: 2692495 - DNA, 25 bp, Homo sapien
tcaaacactcttctggctcccgggg

SEQ ID NO: 2692496 - DNA, 25 bp, Homo sapien
ttcgcggaagacagccgcgtaaagt

SEQ ID NO: 2692497 - DNA, 25 bp, Homo sapien
tggtaggccctaacaaggaacacag

SEQ ID NO: 2692498 - DNA, 25 bp, Homo sapien
cattccaagcacctacccggtggta

SEQ ID NO: 2692499 - DNA, 25 bp, Homo sapien
tcatgtccttagatcagattgaggg

SEQ ID NO: 2692500 - DNA, 25 bp, Homo sapien
tgcgccgttctctaagccactcatg

SEQ ID NO: 2692501 - DNA, 25 bp, Homo sapien
gatctcgaaagatctcgttgcgacg

SEQ ID NO: 2692502 - DNA, 25 bp, Homo sapien
gagcgcctaagtccttccagtgggt

SEQ ID NO: 2692503 - DNA, 25 bp, Homo sapien
tccagtgggtactgcaaccgagagc

SEQ ID NO: 2692504 - DNA, 25 bp, Homo sapien
gctagcgagtggaaagcaggcctct

SEQ ID NO: 2692505 - DNA, 25 bp, Homo sapien
ttagcgatagtctcgatgccgccgg

SEQ ID NO: 2692506 - DNA, 25 bp, Homo sapien
ccacagcgacgtagcagctctggaa

SEQ ID NO: 2692507 - DNA, 25 bp, Homo sapien
tgcagcggtcgctatactcattagc

SEQ ID NO: 2692508 - DNA, 25 bp, Homo sapien
gcgggccacagcgacgtagcagctc

SEQ ID NO: 2692509 - DNA, 25 bp, Homo sapien
tatctcctaaccccagtgcacgcgg

SEQ ID NO: 2692510 - DNA, 25 bp, Homo sapien
gcgatccgtttacatcctaggcctg

SEQ ID NO: 2692511 - DNA, 25 bp, Homo sapien
tctctgccctcaagaaaaggaccgc

SEQ ID NO: 2692512 - DNA, 25 bp, Homo sapien
tcaaaagactcagtacgacctgggc

SEQ ID NO: 2692513 - DNA, 25 bp, Homo sapien
cagaagcctttcttcggccgacggg

SEQ ID NO: 2692514 - DNA, 25 bp, Homo sapien
ttagctgctgctccaattgaacgat

SEQ ID NO: 2692515 - DNA, 25 bp, Homo sapien
tccaattgaacgattcttaggacca

SEQ ID NO: 2692516 - DNA, 25 bp, Homo sapien
caattgaacgattcttaggaccaaa

SEQ ID NO: 2692517 - DNA, 25 bp, Homo sapien
gctgctccaattgaacgattcttag

SEQ ID NO: 2692518 - DNA, 25 bp, Homo sapien
gcacaatatcatatgcaaggttaga

SEQ ID NO: 2692519 - DNA, 25 bp, Homo sapien
tcagagaatgctcggccatggaatc

SEQ ID NO: 2692520 - DNA, 25 bp, Homo sapien
tatacctgttaatcctgtaggcaac

SEQ ID NO: 2692521 - DNA, 25 bp, Homo sapien
gaatcttttaaatccttggactgtg

SEQ ID NO: 2692522 - DNA, 25 bp, Homo sapien
gaacactttcggctgtctccttcag

SEQ ID NO: 2692523 - DNA, 25 bp, Homo sapien
cacagtcaactacaggcttcttaag

SEQ ID NO: 2692524 - DNA, 25 bp, Homo sapien
gtttggacaaaagcatggcagtcac

SEQ ID NO: 2692525 - DNA, 25 bp, Homo sapien
gcttcttaagaacactttcggctgt

SEQ ID NO: 2692526 - DNA, 25 bp, Homo sapien
aatgaggagattcggtggcaaagcc

SEQ ID NO: 2692527 - DNA, 25 bp, Homo sapien
tggcaaagccaatgtaaccacacat

SEQ ID NO: 2692528 - DNA, 25 bp, Homo sapien
ccaggcttccatcttaacagggata

SEQ ID NO: 2692529 - DNA, 25 bp, Homo sapien
taaccaaggaccaagaaatccgcca

SEQ ID NO: 2692530 - DNA, 25 bp, Homo sapien
cagcaatctgtgttgcatccatcac

SEQ ID NO: 2692531 - DNA, 25 bp, Homo sapien
catcactgatcgtctttctgcatca

SEQ ID NO: 2692532 - DNA, 25 bp, Homo sapien
tttcattcattaatcgcaagcaatt

SEQ ID NO: 2692533 - DNA, 25 bp, Homo sapien
tcattaatcgcaagcaattaagacc

SEQ ID NO: 2692534 - DNA, 25 bp, Homo sapien
tctattaaatgcacatacagaaact

SEQ ID NO: 2692535 - DNA, 25 bp, Homo sapien
cagttttcctctattaaatgcacat

SEQ ID NO: 2692536 - DNA, 25 bp, Homo sapien
aacttgataagcagagtggcccatg

SEQ ID NO: 2692537 - DNA, 25 bp, Homo sapien
ttatagattccatatgcaagagcaa

SEQ ID NO: 2692538 - DNA, 25 bp, Homo sapien
aaaacattcaatgctcaaagggaga

SEQ ID NO: 2692539 - DNA, 25 bp, Homo sapien
aaagggagatctgaagcatttgcac

SEQ ID NO: 2692540 - DNA, 25 bp, Homo sapien
tcctgagagagtcgtaataatgcac

SEQ ID NO: 2692541 - DNA, 25 bp, Homo sapien
caatgtcgtgtcaaatgcagtggcc

SEQ ID NO: 2692542 - DNA, 25 bp, Homo sapien
gtatctacttagctcttacaaacac

SEQ ID NO: 2692543 - DNA, 25 bp, Homo sapien
tacaaacacgtaacatttcactaac

SEQ ID NO: 2692544 - DNA, 25 bp, Homo sapien
gctcttacaaacacgtaacatttca

SEQ ID NO: 2692545 - DNA, 25 bp, Homo sapien
tacttagctcttacaaacacgtaac

SEQ ID NO: 2692546 - DNA, 25 bp, Homo sapien
gatacagaatgtggatgaacctcaa

SEQ ID NO: 2692547 - DNA, 25 bp, Homo sapien
gccagacgcatattacatgattaca

SEQ ID NO: 2692548 - DNA, 25 bp, Homo sapien
cgaaagaagccagacgcatattaca

SEQ ID NO: 2692549 - DNA, 25 bp, Homo sapien
tacaagaaaataatatctgcccaaa

SEQ ID NO: 2692550 - DNA, 25 bp, Homo sapien
tgaaaaggcacactgcgtacctgga

SEQ ID NO: 2692551 - DNA, 25 bp, Homo sapien
tagccggtactacaagcgaacacca

SEQ ID NO: 2692552 - DNA, 25 bp, Homo sapien
taagataggcaaggaagatccaaca

SEQ ID NO: 2692553 - DNA, 25 bp, Homo sapien
cacagcactacaacagaatactaga

SEQ ID NO: 2692554 - DNA, 25 bp, Homo sapien
gtggtggctccactctagctaagag

SEQ ID NO: 2692555 - DNA, 25 bp, Homo sapien
tgttccaaaacactacgaagtggtg

SEQ ID NO: 2692556 - DNA, 25 bp, Homo sapien
tctagctaagagatcattgcacatc

SEQ ID NO: 2692557 - DNA, 25 bp, Homo sapien
aaaacactacgaagtggtggctcca

SEQ ID NO: 2692558 - DNA, 25 bp, Homo sapien
aggcataaacatagtccacgttaaa

SEQ ID NO: 2692559 - DNA, 25 bp, Homo sapien
gcataaacatagtccacgttaaaac

SEQ ID NO: 2692560 - DNA, 25 bp, Homo sapien
tccaaggcataaacatagtccacgt

SEQ ID NO: 2692561 - DNA, 25 bp, Homo sapien
caaggcataaacatagtccacgtta

SEQ ID NO: 2692562 - DNA, 25 bp, Homo sapien
tgtactgcagtgtacaggtcctgaa

SEQ ID NO: 2692563 - DNA, 25 bp, Homo sapien
aggtcctgaatttctcacacaatct

SEQ ID NO: 2692564 - DNA, 25 bp, Homo sapien
tgagggccaggaatcctcaaatgta

SEQ ID NO: 2692565 - DNA, 25 bp, Homo sapien
gaagggtagctagtgggatttagga

SEQ ID NO: 2692566 - DNA, 25 bp, Homo sapien
taccgcagggattcgtgtagcacca

SEQ ID NO: 2692567 - DNA, 25 bp, Homo sapien
gctgatcttctcttttaccgcaggg

SEQ ID NO: 2692568 - DNA, 25 bp, Homo sapien
gcacagcctcgagtgacagcttcat

SEQ ID NO: 2692569 - DNA, 25 bp, Homo sapien
tctttaccgaaaaatttgctgatct

SEQ ID NO: 2692570 - DNA, 25 bp, Homo sapien
tggaatctcaacaccctgaagtcac

SEQ ID NO: 2692571 - DNA, 25 bp, Homo sapien
gaagtcaccctgagctaatcccagg

SEQ ID NO: 2692572 - DNA, 25 bp, Homo sapien
aaccactgccatcttgttacaatga

SEQ ID NO: 2692573 - DNA, 25 bp, Homo sapien
taatcccaggttattagatacataa

SEQ ID NO: 2692574 - DNA, 25 bp, Homo sapien
tattggatatggtactacatcagtg

SEQ ID NO: 2692575 - DNA, 25 bp, Homo sapien
tgaaagcaggcgataagatggcaca

SEQ ID NO: 2692576 - DNA, 25 bp, Homo sapien
tacatcagtgatagaaaattctctg

SEQ ID NO: 2692577 - DNA, 25 bp, Homo sapien
ctctgactttgaaagcaggcgataa

SEQ ID NO: 2692578 - DNA, 25 bp, Homo sapien
ccagattataagagttcccaagaat

SEQ ID NO: 2692579 - DNA, 25 bp, Homo sapien
cccatgtgttctaggtttgtaatta

SEQ ID NO: 2692580 - DNA, 25 bp, Homo sapien
tcagcagaatcaagtgtgagaaact

SEQ ID NO: 2692581 - DNA, 25 bp, Homo sapien
aaaggaatatacgtcaatctgcaca

SEQ ID NO: 2692582 - DNA, 25 bp, Homo sapien
gaaaggagcagcatgatttttggaa

SEQ ID NO: 2692583 - DNA, 25 bp, Homo sapien
ctttagagaaaggagcagcatgatt

SEQ ID NO: 2692584 - DNA, 25 bp, Homo sapien
tgatttttggaaaagacttcacagt

SEQ ID NO: 2692585 - DNA, 25 bp, Homo sapien
gatttttggaaaagacttcacagtc

SEQ ID NO: 2692586 - DNA, 25 bp, Homo sapien
gagagctgtagtaggcctcaagagt

SEQ ID NO: 2692587 - DNA, 25 bp, Homo sapien
ggagagctgtagtaggcctcaagag

SEQ ID NO: 2692588 - DNA, 25 bp, Homo sapien
ggatagggcaaatcctgaggagagc

SEQ ID NO: 2692589 - DNA, 25 bp, Homo sapien
gagctgtagtaggcctcaagagtga

SEQ ID NO: 2692590 - DNA, 25 bp, Homo sapien
taattacaatgtgcgctaaccaaga

SEQ ID NO: 2692591 - DNA, 25 bp, Homo sapien
tgcgaactctccaagtagataagct

SEQ ID NO: 2692592 - DNA, 25 bp, Homo sapien
ggttctaaacctgctaacgagactg

SEQ ID NO: 2692593 - DNA, 25 bp, Homo sapien
aaactgccgatacaatgggagatcc

SEQ ID NO: 2692594 - DNA, 25 bp, Homo sapien
gccatggacatttactcgaactttg

SEQ ID NO: 2692595 - DNA, 25 bp, Homo sapien
actaaagatgcactggacacactga

SEQ ID NO: 2692596 - DNA, 25 bp, Homo sapien
ccactaaagatgcactggacacact

SEQ ID NO: 2692597 - DNA, 25 bp, Homo sapien
catggacatttactcgaactttgac

SEQ ID NO: 2692598 - DNA, 25 bp, Homo sapien
tgttgctcttcaacatgtggttcct

SEQ ID NO: 2692599 - DNA, 25 bp, Homo sapien
ttcaacatgtggttcctcctggtcc

SEQ ID NO: 2692600 - DNA, 25 bp, Homo sapien
gttgctcttcaacatgtggttcctc

SEQ ID NO: 2692601 - DNA, 25 bp, Homo sapien
ttgctcttcaacatgtggttcctcc

SEQ ID NO: 2692602 - DNA, 25 bp, Homo sapien
tatccttggatccagcttgagaggt

SEQ ID NO: 2692603 - DNA, 25 bp, Homo sapien
catctctctgtctatctgccataat

SEQ ID NO: 2692604 - DNA, 25 bp, Homo sapien
tatctgccataatagctgattctcg

SEQ ID NO: 2692605 - DNA, 25 bp, Homo sapien
ttggcaggtccacagtactggtctt

SEQ ID NO: 2692606 - DNA, 25 bp, Homo sapien
tattcaccactaagcttgtctctca

SEQ ID NO: 2692607 - DNA, 25 bp, Homo sapien
gttcttagcatcattccgctccttc

SEQ ID NO: 2692608 - DNA, 25 bp, Homo sapien
ttcactcacaaacttctcatattca

SEQ ID NO: 2692609 - DNA, 25 bp, Homo sapien
atattcctccactgcgttcttagca

SEQ ID NO: 2692610 - DNA, 25 bp, Homo sapien
taattcagccaacttatcaacataa

SEQ ID NO: 2692611 - DNA, 25 bp, Homo sapien
tcagccaacttatcaacataaactt

SEQ ID NO: 2692612 - DNA, 25 bp, Homo sapien
gccaacttatcaacataaacttgct

SEQ ID NO: 2692613 - DNA, 25 bp, Homo sapien
ttttaattcagccaacttatcaaca

SEQ ID NO: 2692614 - DNA, 25 bp, Homo sapien
tggcccagttccacaagaaaccaag

SEQ ID NO: 2692615 - DNA, 25 bp, Homo sapien
aatgttaaataccaccagggaggtg

SEQ ID NO: 2692616 - DNA, 25 bp, Homo sapien
gaatcgcttcaatttgtcacctgag

SEQ ID NO: 2692617 - DNA, 25 bp, Homo sapien
tctatgagccctatacggatactga

SEQ ID NO: 2692618 - DNA, 25 bp, Homo sapien
tcttcatacggcagttcaacgatcc

SEQ ID NO: 2692619 - DNA, 25 bp, Homo sapien
cggcagttcaacgatccagagtact

SEQ ID NO: 2692620 - DNA, 25 bp, Homo sapien
tcaacgatccagagtactgattcca

SEQ ID NO: 2692621 - DNA, 25 bp, Homo sapien
tacacagtcttcatacggcagttca

SEQ ID NO: 2692622 - DNA, 25 bp, Homo sapien
aacgtatcttaataggttgacctag

SEQ ID NO: 2692623 - DNA, 25 bp, Homo sapien
tggaaacgtatcttaataggttgac

SEQ ID NO: 2692624 - DNA, 25 bp, Homo sapien
ctggaaacgtatcttaataggttga

SEQ ID NO: 2692625 - DNA, 25 bp, Homo sapien
gtatcttaataggttgacctagatt

SEQ ID NO: 2692626 - DNA, 25 bp, Homo sapien
caaataattttggtcgttcttcaga

SEQ ID NO: 2692627 - DNA, 25 bp, Homo sapien
actgttggatctgtttccctagttc

SEQ ID NO: 2692628 - DNA, 25 bp, Homo sapien
atatactgttggatctgtttcccta

SEQ ID NO: 2692629 - DNA, 25 bp, Homo sapien
ataattttggtcgttcttcagattc

SEQ ID NO: 2692630 - DNA, 25 bp, Homo sapien
gacagttctcccaatttagtgaccc

SEQ ID NO: 2692631 - DNA, 25 bp, Homo sapien
tgtgtggataattactggcctcagg

SEQ ID NO: 2692632 - DNA, 25 bp, Homo sapien
tagtgaccctgaatgttgcttaagg

SEQ ID NO: 2692633 - DNA, 25 bp, Homo sapien
tgttagaaagaccaggatagtgcat

SEQ ID NO: 2692634 - DNA, 25 bp, Homo sapien
caggagacagtcaaacaagtgctaa

SEQ ID NO: 2692635 - DNA, 25 bp, Homo sapien
ttcagcatgctagttcggaaccaaa

SEQ ID NO: 2692636 - DNA, 25 bp, Homo sapien
gtgctaaaagtgtgataccctccct

SEQ ID NO: 2692637 - DNA, 25 bp, Homo sapien
tatttagcctcacaatctgaacaga

SEQ ID NO: 2692638 - DNA, 25 bp, Homo sapien
gcagcatccaaatgatcatactggt

SEQ ID NO: 2692639 - DNA, 25 bp, Homo sapien
tggatccatggtcaaactctgcttg

SEQ ID NO: 2692640 - DNA, 25 bp, Homo sapien
agcttgttattcatccactccattg

SEQ ID NO: 2692641 - DNA, 25 bp, Homo sapien
tgcttgttctgcagatttagcttgt

SEQ ID NO: 2692642 - DNA, 25 bp, Homo sapien
tggaatgggtaagacagaaaactgg

SEQ ID NO: 2692643 - DNA, 25 bp, Homo sapien
ctggaatgggtaagacagaaaactg

SEQ ID NO: 2692644 - DNA, 25 bp, Homo sapien
tagggctacaagtacttgtcagctc

SEQ ID NO: 2692645 - DNA, 25 bp, Homo sapien
tatagggctacaagtacttgtcagc

SEQ ID NO: 2692646 - DNA, 25 bp, Homo sapien
aattatagggctacaagtacttgtc

SEQ ID NO: 2692647 - DNA, 25 bp, Homo sapien
tttgaaattatagggctacaagtac

SEQ ID NO: 2692648 - DNA, 25 bp, Homo sapien
agctgtgtctgtaccctgctcagca

SEQ ID NO: 2692649 - DNA, 25 bp, Homo sapien
tgtccatccactggtccattctgct

SEQ ID NO: 2692650 - DNA, 25 bp, Homo sapien
cctgggggcctgggttgtctccttg

SEQ ID NO: 2692651 - DNA, 25 bp, Homo sapien
cctgggttgtctccttgtccatcca

SEQ ID NO: 2692652 - DNA, 25 bp, Homo sapien
tcaggaagcttcttgtctgaatccg

SEQ ID NO: 2692653 - DNA, 25 bp, Homo sapien
agcttcttgtctgaatccgaaggca

SEQ ID NO: 2692654 - DNA, 25 bp, Homo sapien
caatcaatgtccatttcaggaagct

SEQ ID NO: 2692655 - DNA, 25 bp, Homo sapien
gaagcttcttgtctgaatccgaagg

SEQ ID NO: 2692656 - DNA, 25 bp, Homo sapien
agagcctccaggtttaaagccctca

SEQ ID NO: 2692657 - DNA, 25 bp, Homo sapien
tctgccgtgttaatccatgccgtgc

SEQ ID NO: 2692658 - DNA, 25 bp, Homo sapien
taatgggagcccttttattgggaga

SEQ ID NO: 2692659 - DNA, 25 bp, Homo sapien
catgaacatactttcaggaagagcc

SEQ ID NO: 2692660 - DNA, 25 bp, Homo sapien
tagtgtaagaacgtgacctggagct

SEQ ID NO: 2692661 - DNA, 25 bp, Homo sapien
gagagcaagcagaccacatcatcgt

SEQ ID NO: 2692662 - DNA, 25 bp, Homo sapien
taaagggttggcttaatcctgcagc

SEQ ID NO: 2692663 - DNA, 25 bp, Homo sapien
tcttaaagcaggtaccaactctggc

SEQ ID NO: 2692664 - DNA, 25 bp, Homo sapien
tggtcatagttatatggatactccc

SEQ ID NO: 2692665 - DNA, 25 bp, Homo sapien
gtcatagttatatggatactccctc

SEQ ID NO: 2692666 - DNA, 25 bp, Homo sapien
atggtcatagttatatggatactcc

SEQ ID NO: 2692667 - DNA, 25 bp, Homo sapien
catagttatatggatactccctcat

SEQ ID NO: 2692668 - DNA, 25 bp, Homo sapien
tgtgtctaaaaaagcatagctgccc

SEQ ID NO: 2692669 - DNA, 25 bp, Homo sapien
gcatttcctggagacggcaggctta

SEQ ID NO: 2692670 - DNA, 25 bp, Homo sapien
taggtctcactgacagcatgccaga

SEQ ID NO: 2692671 - DNA, 25 bp, Homo sapien
gacacaactgaatcgaagcaggcct

SEQ ID NO: 2692672 - DNA, 25 bp, Homo sapien
cagactttgccctgacggagtggcc

SEQ ID NO: 2692673 - DNA, 25 bp, Homo sapien
cttgctgtaagcctgagggagagcc

SEQ ID NO: 2692674 - DNA, 25 bp, Homo sapien
taaagggatcatttctgtgccaagc

SEQ ID NO: 2692675 - DNA, 25 bp, Homo sapien
cctagtataaggtatgcgctgctac

SEQ ID NO: 2692676 - DNA, 25 bp, Homo sapien
gtgggtgggtgaggtatgaagggcc

SEQ ID NO: 2692677 - DNA, 25 bp, Homo sapien
gcggtgtgaggtgtcaggtataaag

SEQ ID NO: 2692678 - DNA, 25 bp, Homo sapien
gaccacagtggtgtgggtgggtgag

SEQ ID NO: 2692679 - DNA, 25 bp, Homo sapien
tgtgaggtgtcaggtataaaggggg

SEQ ID NO: 2692680 - DNA, 25 bp, Homo sapien
caggtcagggccgtctctttctcac

SEQ ID NO: 2692681 - DNA, 25 bp, Homo sapien
tagagcttgcgttgctggacaggat

SEQ ID NO: 2692682 - DNA, 25 bp, Homo sapien
acagaactccagtcacctacttggg

SEQ ID NO: 2692683 - DNA, 25 bp, Homo sapien
catccgtgtctatccagagagccag

SEQ ID NO: 2692684 - DNA, 25 bp, Homo sapien
caggagggctctaaacgtggaatct

SEQ ID NO: 2692685 - DNA, 25 bp, Homo sapien
catgcgctaagagataagggcctcc

SEQ ID NO: 2692686 - DNA, 25 bp, Homo sapien
gagattgcctccctgtagccaaaga

SEQ ID NO: 2692687 - DNA, 25 bp, Homo sapien
tcagccaagtgatgaagcccaaagg

SEQ ID NO: 2692688 - DNA, 25 bp, Homo sapien
ttatggacgaatggtgtaaggcccc

SEQ ID NO: 2692689 - DNA, 25 bp, Homo sapien
tctctggattatgacgccgccttct

SEQ ID NO: 2692690 - DNA, 25 bp, Homo sapien
gctgactgtgggtttcgttactgaa

SEQ ID NO: 2692691 - DNA, 25 bp, Homo sapien
cttaaggttgtcaggaagttcagcc

SEQ ID NO: 2692692 - DNA, 25 bp, Homo sapien
tgcaaccagagatgaatggcccctc

SEQ ID NO: 2692693 - DNA, 25 bp, Homo sapien
gttgagtcagtagcccgcaaatagg

SEQ ID NO: 2692694 - DNA, 25 bp, Homo sapien
cctgagttggactagcacaaggtgc

SEQ ID NO: 2692695 - DNA, 25 bp, Homo sapien
tcaatgcagcacaatcctggtgggt

SEQ ID NO: 2692696 - DNA, 25 bp, Homo sapien
cgtattatgcaagaggatcaagtca

SEQ ID NO: 2692697 - DNA, 25 bp, Homo sapien
cgggagtcattcctgacacctcttt

SEQ ID NO: 2692698 - DNA, 25 bp, Homo sapien
caagacaaagatgggacctcaatgt

SEQ ID NO: 2692699 - DNA, 25 bp, Homo sapien
gatcaagtcaggaacacgggagtca

SEQ ID NO: 2692700 - DNA, 25 bp, Homo sapien
tctcaatacatcattaaagcatcct

SEQ ID NO: 2692701 - DNA, 25 bp, Homo sapien
ttctcaatacatcattaaagcatcc

SEQ ID NO: 2692702 - DNA, 25 bp, Homo sapien
tgaaactaaatcagcgctcacggct

SEQ ID NO: 2692703 - DNA, 25 bp, Homo sapien
ttgccgtgtgctgcatgatgactca

SEQ ID NO: 2692704 - DNA, 25 bp, Homo sapien
tccattcagaccacttcgaaacctt

SEQ ID NO: 2692705 - DNA, 25 bp, Homo sapien
cacagtctccttagctctttaagcc

SEQ ID NO: 2692706 - DNA, 25 bp, Homo sapien
gcaaggatctaccaggaagactcct

SEQ ID NO: 2692707 - DNA, 25 bp, Homo sapien
caaggatctaccaggaagactcctc

SEQ ID NO: 2692708 - DNA, 25 bp, Homo sapien
tgcaaggatctaccaggaagactcc

SEQ ID NO: 2692709 - DNA, 25 bp, Homo sapien
ttcagatgcatagtggagggtcccc

SEQ ID NO: 2692710 - DNA, 25 bp, Homo sapien
cttcagatgcatagtggagggtccc

SEQ ID NO: 2692711 - DNA, 25 bp, Homo sapien
gaggccttttccttcagcatggatc

SEQ ID NO: 2692712 - DNA, 25 bp, Homo sapien
agaggccttttccttcagcatggat

SEQ ID NO: 2692713 - DNA, 25 bp, Homo sapien
ttagaggccttttccttcagcatgg

SEQ ID NO: 2692714 - DNA, 25 bp, Homo sapien
tagaggccttttccttcagcatgga

SEQ ID NO: 2692715 - DNA, 25 bp, Homo sapien
gaagcagcccacattgcaggcgagg

SEQ ID NO: 2692716 - DNA, 25 bp, Homo sapien
tggccagcattcagctgtattgtca

SEQ ID NO: 2692717 - DNA, 25 bp, Homo sapien
ggccagcattcagctgtattgtcat

SEQ ID NO: 2692718 - DNA, 25 bp, Homo sapien
agcccacattgcaggcgagggaccg

SEQ ID NO: 2692719 - DNA, 25 bp, Homo sapien
cttttgtaatcggattgttaagtgc

SEQ ID NO: 2692720 - DNA, 25 bp, Homo sapien
tccaagtgggcggttgagtctttga

SEQ ID NO: 2692721 - DNA, 25 bp, Homo sapien
taagtgcttccaagtgggcggttga

SEQ ID NO: 2692722 - DNA, 25 bp, Homo sapien
gattgttaagtgcttccaagtgggc

SEQ ID NO: 2692723 - DNA, 25 bp, Homo sapien
tggtagctgcttctaattggaaagg

SEQ ID NO: 2692724 - DNA, 25 bp, Homo sapien
gcttctaattggaaaggaatgccag

SEQ ID NO: 2692725 - DNA, 25 bp, Homo sapien
ttggaaaggaatgccagtgggcttc

SEQ ID NO: 2692726 - DNA, 25 bp, Homo sapien
cagttggtagctgcttctaattgga

SEQ ID NO: 2692727 - DNA, 25 bp, Homo sapien
cacacagtggtctgtgagctgatgg

SEQ ID NO: 2692728 - DNA, 25 bp, Homo sapien
ccacacagtggtctgtgagctgatg

SEQ ID NO: 2692729 - DNA, 25 bp, Homo sapien
tccacacagtggtctgtgagctgat

SEQ ID NO: 2692730 - DNA, 25 bp, Homo sapien
tcttcggagcctgattgtccaccgg

SEQ ID NO: 2692731 - DNA, 25 bp, Homo sapien
gagcctgattgtccaccggtgtttc

SEQ ID NO: 2692732 - DNA, 25 bp, Homo sapien
gcagcatgttcttcggagcctgatt

SEQ ID NO: 2692733 - DNA, 25 bp, Homo sapien
gattgtccaccggtgtttctgagta

SEQ ID NO: 2692734 - DNA, 25 bp, Homo sapien
gcagccagaagtctgcgctcacagg

SEQ ID NO: 2692735 - DNA, 25 bp, Homo sapien
cttcctgaccagaaggtgtctgttg

SEQ ID NO: 2692736 - DNA, 25 bp, Homo sapien
cagttgccagggtgaagcagccaga

SEQ ID NO: 2692737 - DNA, 25 bp, Homo sapien
ctgaccagaaggtgtctgttgggca

SEQ ID NO: 2692738 - DNA, 25 bp, Homo sapien
ggcatgtgcactggcggtcaggagg

SEQ ID NO: 2692739 - DNA, 25 bp, Homo sapien
gtttagccatgagcactgatttagt

SEQ ID NO: 2692740 - DNA, 25 bp, Homo sapien
ccccagatggggcatgtgcactggc

SEQ ID NO: 2692741 - DNA, 25 bp, Homo sapien
gggagaggatcaggacatcttctgt

SEQ ID NO: 2692742 - DNA, 25 bp, Homo sapien
gtgtgggaaccagtgttgctaatgt

SEQ ID NO: 2692743 - DNA, 25 bp, Homo sapien
gaaagtgtgggaaccagtgttgcta

SEQ ID NO: 2692744 - DNA, 25 bp, Homo sapien
aagtgtgggaaccagtgttgctaat

SEQ ID NO: 2692745 - DNA, 25 bp, Homo sapien
gggaaagtgtgggaaccagtgttgc

SEQ ID NO: 2692746 - DNA, 25 bp, Homo sapien
taccgtgaaggtcaggatcgctagg

SEQ ID NO: 2692747 - DNA, 25 bp, Homo sapien
gcactgcccttgttgagaccgttta

SEQ ID NO: 2692748 - DNA, 25 bp, Homo sapien
tatagagactccttgcatgtgcgat

SEQ ID NO: 2692749 - DNA, 25 bp, Homo sapien
ttaagtgctaccaaggccctccaat

SEQ ID NO: 2692750 - DNA, 25 bp, Homo sapien
ctgtgatagggcaaatcattcatca

SEQ ID NO: 2692751 - DNA, 25 bp, Homo sapien
ccagttgccagaggtgtcccgttcc

SEQ ID NO: 2692752 - DNA, 25 bp, Homo sapien
tagtggtcacaggtcttgagcacat

SEQ ID NO: 2692753 - DNA, 25 bp, Homo sapien
gagaggacgatatcccaaatcgagc

SEQ ID NO: 2692754 - DNA, 25 bp, Homo sapien
ctgagaacaccagggtgggaagatg

SEQ ID NO: 2692755 - DNA, 25 bp, Homo sapien
agttccatggccactcttgtgttct

SEQ ID NO: 2692756 - DNA, 25 bp, Homo sapien
ataaatgggtcagcacaccccacca

SEQ ID NO: 2692757 - DNA, 25 bp, Homo sapien
agtgtgcactggcataaatgggtca

SEQ ID NO: 2692758 - DNA, 25 bp, Homo sapien
tgccactcgtctgcctgattccctg

SEQ ID NO: 2692759 - DNA, 25 bp, Homo sapien
cctttcctgccactcgtctgcctga

SEQ ID NO: 2692760 - DNA, 25 bp, Homo sapien
ctttcctgccactcgtctgcctgat

SEQ ID NO: 2692761 - DNA, 25 bp, Homo sapien
tttcctgccactcgtctgcctgatt

SEQ ID NO: 2692762 - DNA, 25 bp, Homo sapien
gggtccagcgcctgtttccctcctg

SEQ ID NO: 2692763 - DNA, 25 bp, Homo sapien
ggtccagcgcctgtttccctcctgc

SEQ ID NO: 2692764 - DNA, 25 bp, Homo sapien
tgggggtccagcgcctgtttccctc

SEQ ID NO: 2692765 - DNA, 25 bp, Homo sapien
acatgggggtccagcgcctgtttcc

SEQ ID NO: 2692766 - DNA, 25 bp, Homo sapien
ggcagaggccgactccaaatgttcc

SEQ ID NO: 2692767 - DNA, 25 bp, Homo sapien
tctgattcaggctggacgtccatag

SEQ ID NO: 2692768 - DNA, 25 bp, Homo sapien
tggacgtccatagtaggccctccag

SEQ ID NO: 2692769 - DNA, 25 bp, Homo sapien
gggtaaaagcgctgtggatgagcag

SEQ ID NO: 2692770 - DNA, 25 bp, Homo sapien
ctgagcccttgtgatgatgcacaat

SEQ ID NO: 2692771 - DNA, 25 bp, Homo sapien
tgatgatgcacaataatcacccgtg

SEQ ID NO: 2692772 - DNA, 25 bp, Homo sapien
acccgtgcgacaagagcatccttca

SEQ ID NO: 2692773 - DNA, 25 bp, Homo sapien
tttccaggacaagtggcctgagccc

SEQ ID NO: 2692774 - DNA, 25 bp, Homo sapien
gctgtctccacacccgtgctgagtg

SEQ ID NO: 2692775 - DNA, 25 bp, Homo sapien
cagcccagccaaggtatgtctgctt

SEQ ID NO: 2692776 - DNA, 25 bp, Homo sapien
ctttctgttggcaccgctagtggcc

SEQ ID NO: 2692777 - DNA, 25 bp, Homo sapien
ggaacagagaggtggccgtgggcca

SEQ ID NO: 2692778 - DNA, 25 bp, Homo sapien
atgcagctataacatacctggctca

SEQ ID NO: 2692779 - DNA, 25 bp, Homo sapien
cctcaagggattgaaagtcaaggct

SEQ ID NO: 2692780 - DNA, 25 bp, Homo sapien
caggttcttcctggctatgatgcag

SEQ ID NO: 2692781 - DNA, 25 bp, Homo sapien
catctctaaagtggaaactaggtct

SEQ ID NO: 2692782 - DNA, 25 bp, Homo sapien
cagttctcgatccatcttcccatgg

SEQ ID NO: 2692783 - DNA, 25 bp, Homo sapien
agacagttctcgatccatcttccca

SEQ ID NO: 2692784 - DNA, 25 bp, Homo sapien
gagtcagacagttctcgatccatct

SEQ ID NO: 2692785 - DNA, 25 bp, Homo sapien
taagagtcagacagttctcgatcca

SEQ ID NO: 2692786 - DNA, 25 bp, Homo sapien
ctccagagttactgcaacctttagt

SEQ ID NO: 2692787 - DNA, 25 bp, Homo sapien
gcaacctttagttgggtgctgggcc

SEQ ID NO: 2692788 - DNA, 25 bp, Homo sapien
tccacacttgtgcccaatggacttc

SEQ ID NO: 2692789 - DNA, 25 bp, Homo sapien
agcaggctatattggtccctgcccg

SEQ ID NO: 2692790 - DNA, 25 bp, Homo sapien
cacttgccagggatctgatctagcc

SEQ ID NO: 2692791 - DNA, 25 bp, Homo sapien
agggatctgatctagccacactgac

SEQ ID NO: 2692792 - DNA, 25 bp, Homo sapien
cttgccagggatctgatctagccac

SEQ ID NO: 2692793 - DNA, 25 bp, Homo sapien
gccagggatctgatctagccacact

SEQ ID NO: 2692794 - DNA, 25 bp, Homo sapien
caaggccagctgaggtgaatcacac

SEQ ID NO: 2692795 - DNA, 25 bp, Homo sapien
gtgtgttcccatgaaggccccagcc

SEQ ID NO: 2692796 - DNA, 25 bp, Homo sapien
gacagggtgtgttcccatgaaggcc

SEQ ID NO: 2692797 - DNA, 25 bp, Homo sapien
gagagggacagggtgtgttcccatg

SEQ ID NO: 2692798 - DNA, 25 bp, Homo sapien
gggtgtgttcccatgaaggccccag

SEQ ID NO: 2692799 - DNA, 25 bp, Homo sapien
tcctattttgagtaaacgttgagaa

SEQ ID NO: 2692800 - DNA, 25 bp, Homo sapien
gaggaaaatcgccagaatttctctt

SEQ ID NO: 2692801 - DNA, 25 bp, Homo sapien
tacttggagtgtactttataggtac

SEQ ID NO: 2692802 - DNA, 25 bp, Homo sapien
ctggtgggaggaaaatcgccagaat

SEQ ID NO: 2692803 - DNA, 25 bp, Homo sapien
caaatcagcagcgcctcactggcac

SEQ ID NO: 2692804 - DNA, 25 bp, Homo sapien
cccactcgatgaccccaacctgcct

SEQ ID NO: 2692805 - DNA, 25 bp, Homo sapien
gcacccactcgatgaccccaacctg

SEQ ID NO: 2692806 - DNA, 25 bp, Homo sapien
cactcgatgaccccaacctgccttt

SEQ ID NO: 2692807 - DNA, 25 bp, Homo sapien
ccccagcacccactcgatgacccca

SEQ ID NO: 2692808 - DNA, 25 bp, Homo sapien
ctgggaacccagtttgcagccagtc

SEQ ID NO: 2692809 - DNA, 25 bp, Homo sapien
tgggaacccagtttgcagccagtca

SEQ ID NO: 2692810 - DNA, 25 bp, Homo sapien
gggaacccagtttgcagccagtcat

SEQ ID NO: 2692811 - DNA, 25 bp, Homo sapien
ggaccgttggccctctgtgcgctgt

SEQ ID NO: 2692812 - DNA, 25 bp, Homo sapien
aagtcccagagctggccggtcttga

SEQ ID NO: 2692813 - DNA, 25 bp, Homo sapien
cagaactacccaggcattcagagaa

SEQ ID NO: 2692814 - DNA, 25 bp, Homo sapien
acaggcctgatgtccaagctcacgt

SEQ ID NO: 2692815 - DNA, 25 bp, Homo sapien
tcttgatgctgcacacactgcctct

SEQ ID NO: 2692816 - DNA, 25 bp, Homo sapien
agatgaggttcttgaggttcttgat

SEQ ID NO: 2692817 - DNA, 25 bp, Homo sapien
tgtactgggccagggttcgtggcag

SEQ ID NO: 2692818 - DNA, 25 bp, Homo sapien
acacactgcctctggtcttctgcat

SEQ ID NO: 2692819 - DNA, 25 bp, Homo sapien
caaccatgaccccaggcgagggctg

SEQ ID NO: 2692820 - DNA, 25 bp, Homo sapien
ctacatgtacatggctcttccgcag

SEQ ID NO: 2692821 - DNA, 25 bp, Homo sapien
gaaacccaaccatgaccccaggcga

SEQ ID NO: 2692822 - DNA, 25 bp, Homo sapien
cttccgcaggcaaagcctcgctctg

SEQ ID NO: 2692823 - DNA, 25 bp, Homo sapien
caatgagagagtcgacactgacagg

SEQ ID NO: 2692824 - DNA, 25 bp, Homo sapien
gagtcgacactgacaggcactctct

SEQ ID NO: 2692825 - DNA, 25 bp, Homo sapien
tttctgcaatgagagagtcgacact

SEQ ID NO: 2692826 - DNA, 25 bp, Homo sapien
gtccctggaccaccttgccacgtgt

SEQ ID NO: 2692827 - DNA, 25 bp, Homo sapien
atggcacgggactggagcgtcgggc

SEQ ID NO: 2692828 - DNA, 25 bp, Homo sapien
cacgggactggagcgtcgggcctct

SEQ ID NO: 2692829 - DNA, 25 bp, Homo sapien
ttagggtagacatggcacgggactg

SEQ ID NO: 2692830 - DNA, 25 bp, Homo sapien
ggactggagcgtcgggcctctgcct

SEQ ID NO: 2692831 - DNA, 25 bp, Homo sapien
catgactcgggtctgaggtgtcccc

SEQ ID NO: 2692832 - DNA, 25 bp, Homo sapien
tgcactgactttgaacggctagaaa

SEQ ID NO: 2692833 - DNA, 25 bp, Homo sapien
tgcacacagcgacacctggtggtaa

SEQ ID NO: 2692834 - DNA, 25 bp, Homo sapien
gcaaacgcttggatgtgcactgact

SEQ ID NO: 2692835 - DNA, 25 bp, Homo sapien
tcatgataacttccgaactggcctc

SEQ ID NO: 2692836 - DNA, 25 bp, Homo sapien
tgataacttccgaactggcctcctg

SEQ ID NO: 2692837 - DNA, 25 bp, Homo sapien
cactgttcacgggtctgggtggtta

SEQ ID NO: 2692838 - DNA, 25 bp, Homo sapien
tggcctcctgcactgttcacgggtc

SEQ ID NO: 2692839 - DNA, 25 bp, Homo sapien
gtgtgaccacttggtgctcagggcc

SEQ ID NO: 2692840 - DNA, 25 bp, Homo sapien
tgtgtgaccacttggtgctcagggc

SEQ ID NO: 2692841 - DNA, 25 bp, Homo sapien
tgggcgtcctacgagcagatttctg

SEQ ID NO: 2692842 - DNA, 25 bp, Homo sapien
attccatgggctgtgggcgtcctac

SEQ ID NO: 2692843 - DNA, 25 bp, Homo sapien
tccatgggctgtgggcgtcctacga

SEQ ID NO: 2692844 - DNA, 25 bp, Homo sapien
gctgtgggcgtcctacgagcagatt

SEQ ID NO: 2692845 - DNA, 25 bp, Homo sapien
gagtgagcttaaagtcagcccccat

SEQ ID NO: 2692846 - DNA, 25 bp, Homo sapien
gagagtgagcttaaagtcagccccc

SEQ ID NO: 2692847 - DNA, 25 bp, Homo sapien
agtgagcttaaagtcagcccccatt

SEQ ID NO: 2692848 - DNA, 25 bp, Homo sapien
gggagagtgagcttaaagtcagccc

SEQ ID NO: 2692849 - DNA, 25 bp, Homo sapien
ggagtccagcaacccatagtacggt

SEQ ID NO: 2692850 - DNA, 25 bp, Homo sapien
tagtacggtgcatccaagagtccag

SEQ ID NO: 2692851 - DNA, 25 bp, Homo sapien
tcacaatcaagaggacaggcctact

SEQ ID NO: 2692852 - DNA, 25 bp, Homo sapien
tgttcttcttgtagacaacccaggg

SEQ ID NO: 2692853 - DNA, 25 bp, Homo sapien
caatagagatgcgaaaacaagaata

SEQ ID NO: 2692854 - DNA, 25 bp, Homo sapien
ttaatcaatagagatgcgaaaacaa

SEQ ID NO: 2692855 - DNA, 25 bp, Homo sapien
atcaatagagatgcgaaaacaagaa

SEQ ID NO: 2692856 - DNA, 25 bp, Homo sapien
atagagatgcgaaaacaagaatatg

SEQ ID NO: 2692857 - DNA, 25 bp, Homo sapien
gagcctgcacgctgtcaggcacagc

SEQ ID NO: 2692858 - DNA, 25 bp, Homo sapien
tctcccatgtgcatctggagcctgc

SEQ ID NO: 2692859 - DNA, 25 bp, Homo sapien
atctggagcctgcacgctgtcaggc

SEQ ID NO: 2692860 - DNA, 25 bp, Homo sapien
ctggagcctgcacgctgtcaggcac

SEQ ID NO: 2692861 - DNA, 25 bp, Homo sapien
caggtgtatttagaggtaacaattt

SEQ ID NO: 2692862 - DNA, 25 bp, Homo sapien
tgtatttagaggtaacaattttctg

SEQ ID NO: 2692863 - DNA, 25 bp, Homo sapien
tgcaggtgtatttagaggtaacaat

SEQ ID NO: 2692864 - DNA, 25 bp, Homo sapien
ctgcaggtgtatttagaggtaacaa

SEQ ID NO: 2692865 - DNA, 25 bp, Homo sapien
ttgaggatgcgcagaaataaaggtg

SEQ ID NO: 2692866 - DNA, 25 bp, Homo sapien
caaggtgtcgtgcagaagacattct

SEQ ID NO: 2692867 - DNA, 25 bp, Homo sapien
cttatgaacacaaggtgtcgtgcag

SEQ ID NO: 2692868 - DNA, 25 bp, Homo sapien
taaaggtggtccatatggaacaaga

SEQ ID NO: 2692869 - DNA, 25 bp, Homo sapien
acggctgcctgaaagaggaccggct

SEQ ID NO: 2692870 - DNA, 25 bp, Homo sapien
gctgtgggaatacggctgcctgaaa

SEQ ID NO: 2692871 - DNA, 25 bp, Homo sapien
gggcctgtgctgaaacaggaacctt

SEQ ID NO: 2692872 - DNA, 25 bp, Homo sapien
gaacctttgctgtagactttgggag

SEQ ID NO: 2692873 - DNA, 25 bp, Homo sapien
ctgtgccactggcagcatacggggg

SEQ ID NO: 2692874 - DNA, 25 bp, Homo sapien
tgccactggcagcatacgggggccc

SEQ ID NO: 2692875 - DNA, 25 bp, Homo sapien
tctctccttcagacggtgtgggtgc

SEQ ID NO: 2692876 - DNA, 25 bp, Homo sapien
ttctctccttcagacggtgtgggtg

SEQ ID NO: 2692877 - DNA, 25 bp, Homo sapien
tttcagcaagttcctgtactgtgta

SEQ ID NO: 2692878 - DNA, 25 bp, Homo sapien
caggccattttgcaaccgagttaaa

SEQ ID NO: 2692879 - DNA, 25 bp, Homo sapien
ggcatgtggcatcttgcacaaccag

SEQ ID NO: 2692880 - DNA, 25 bp, Homo sapien
ggttaacgtgcgcatgctgtttgca

SEQ ID NO: 2692881 - DNA, 25 bp, Homo sapien
gctgtttgcagttccatggcatgtg

SEQ ID NO: 2692882 - DNA, 25 bp, Homo sapien
ggtgacatttgacattaaccccttc

SEQ ID NO: 2692883 - DNA, 25 bp, Homo sapien
ccggactcggtcttgtgcactaatt

SEQ ID NO: 2692884 - DNA, 25 bp, Homo sapien
catttacatgcagagaccattgatt

SEQ ID NO: 2692885 - DNA, 25 bp, Homo sapien
ctcagctgtaggaattggctgctcc

SEQ ID NO: 2692886 - DNA, 25 bp, Homo sapien
tctgtgggcggaatgtgtaatctgc

SEQ ID NO: 2692887 - DNA, 25 bp, Homo sapien
tgactgttcactgcgcagaatggga

SEQ ID NO: 2692888 - DNA, 25 bp, Homo sapien
tctgctggaagacaatatcatcctt

SEQ ID NO: 2692889 - DNA, 25 bp, Homo sapien
tagatagatgcttgtcggaggccag

SEQ ID NO: 2692890 - DNA, 25 bp, Homo sapien
cttgtgtttggtgataatactccca

SEQ ID NO: 2692891 - DNA, 25 bp, Homo sapien
aaacagttgcccatcatctgggggc

SEQ ID NO: 2692892 - DNA, 25 bp, Homo sapien
tggtgataatactcccacagacaac

SEQ ID NO: 2692893 - DNA, 25 bp, Homo sapien
gtgtttggtgataatactcccacag

SEQ ID NO: 2692894 - DNA, 25 bp, Homo sapien
actgctcccttaccaggacagtgag

SEQ ID NO: 2692895 - DNA, 25 bp, Homo sapien
aggacagtgagcactggcccaaccc

SEQ ID NO: 2692896 - DNA, 25 bp, Homo sapien
caaagtctgagaggaactgctccct

SEQ ID NO: 2692897 - DNA, 25 bp, Homo sapien
tggcccaaccccactgtgctcctcc

SEQ ID NO: 2692898 - DNA, 25 bp, Homo sapien
ctggtgcctggtacaccttcccctt

SEQ ID NO: 2692899 - DNA, 25 bp, Homo sapien
cttccccttgctgagaggctcctgc

SEQ ID NO: 2692900 - DNA, 25 bp, Homo sapien
caccttccccttgctgagaggctcc

SEQ ID NO: 2692901 - DNA, 25 bp, Homo sapien
tggtgcctggtacaccttccccttg

SEQ ID NO: 2692902 - DNA, 25 bp, Homo sapien
tgtcagaagtcccttggcagaggtt

SEQ ID NO: 2692903 - DNA, 25 bp, Homo sapien
tgagcagctgacctgcggcctgaat

SEQ ID NO: 2692904 - DNA, 25 bp, Homo sapien
tctgcatgttggttgggtagccgtc

SEQ ID NO: 2692905 - DNA, 25 bp, Homo sapien
tgagcttggtcatagctggcctgcc

SEQ ID NO: 2692906 - DNA, 25 bp, Homo sapien
ccagtttatgttatcacaggagctc

SEQ ID NO: 2692907 - DNA, 25 bp, Homo sapien
gattatgcagaccactccaaattca

SEQ ID NO: 2692908 - DNA, 25 bp, Homo sapien
tccaaattcaatctcccagtttatg

SEQ ID NO: 2692909 - DNA, 25 bp, Homo sapien
gggagggctgattatgcagaccact

SEQ ID NO: 2692910 - DNA, 25 bp, Homo sapien
cgtaaatgtgatgtgcggcacctgc

SEQ ID NO: 2692911 - DNA, 25 bp, Homo sapien
tccttggtaaacagcgcagtgcaca

SEQ ID NO: 2692912 - DNA, 25 bp, Homo sapien
tactcggaccgctgctatgtcatgg

SEQ ID NO: 2692913 - DNA, 25 bp, Homo sapien
ggcttattaggccaacagccacggt

SEQ ID NO: 2692914 - DNA, 25 bp, Homo sapien
tgtgctgtgggtggcctggctagtt

SEQ ID NO: 2692915 - DNA, 25 bp, Homo sapien
tggggcccctggcgtctgtttctgc

SEQ ID NO: 2692916 - DNA, 25 bp, Homo sapien
gggcccctggcgtctgtttctgctg

SEQ ID NO: 2692917 - DNA, 25 bp, Homo sapien
gcccctggcgtctgtttctgctgtg

SEQ ID NO: 2692918 - DNA, 25 bp, Homo sapien
tcatcgtcaaagttctgtgtgagaa

SEQ ID NO: 2692919 - DNA, 25 bp, Homo sapien
agaagcctttcaatgaaatgctgct

SEQ ID NO: 2692920 - DNA, 25 bp, Homo sapien
ttataagtagcctctcccagtgtca

SEQ ID NO: 2692921 - DNA, 25 bp, Homo sapien
tctcccagtgtcatcgtcaaagttc

SEQ ID NO: 2692922 - DNA, 25 bp, Homo sapien
agcagcggctgctgaagtgtcctct

SEQ ID NO: 2692923 - DNA, 25 bp, Homo sapien
agtgtcctctttgtggccattgaaa

SEQ ID NO: 2692924 - DNA, 25 bp, Homo sapien
tgtgaatgtgaactctgcctccttg

SEQ ID NO: 2692925 - DNA, 25 bp, Homo sapien
ggttgttcagaagcacatgcttaag

SEQ ID NO: 2692926 - DNA, 25 bp, Homo sapien
gatgccagagagtaggattagttat

SEQ ID NO: 2692927 - DNA, 25 bp, Homo sapien
cctctgtccaatggggggttgacaa

SEQ ID NO: 2692928 - DNA, 25 bp, Homo sapien
gataggtcctacagcaggagctttg

SEQ ID NO: 2692929 - DNA, 25 bp, Homo sapien
tgtgaatctctcacgggcagtctcc

SEQ ID NO: 2692930 - DNA, 25 bp, Homo sapien
ggtccccggagcagagcatgggctc

SEQ ID NO: 2692931 - DNA, 25 bp, Homo sapien
cactgtgatgatcctaacttcccca

SEQ ID NO: 2692932 - DNA, 25 bp, Homo sapien
tgtgatgatcctaacttccccatca

SEQ ID NO: 2692933 - DNA, 25 bp, Homo sapien
gatgatcctaacttccccatcaagc

SEQ ID NO: 2692934 - DNA, 25 bp, Homo sapien
ctgaattgtccaggttggccgacaa

SEQ ID NO: 2692935 - DNA, 25 bp, Homo sapien
actcccatgtggtcaaagtcctcat

SEQ ID NO: 2692936 - DNA, 25 bp, Homo sapien
ccaggttggccgacaagttctgctc

SEQ ID NO: 2692937 - DNA, 25 bp, Homo sapien
ttctcctgtttcgcattcatcccat

SEQ ID NO: 2692938 - DNA, 25 bp, Homo sapien
aactggcagcttgctgccagttgcc

SEQ ID NO: 2692939 - DNA, 25 bp, Homo sapien
acaactggcagcttgctgccagttg

SEQ ID NO: 2692940 - DNA, 25 bp, Homo sapien
tggcagcttgctgccagttgccgct

SEQ ID NO: 2692941 - DNA, 25 bp, Homo sapien
actggcagcttgctgccagttgccg

SEQ ID NO: 2692942 - DNA, 25 bp, Homo sapien
ataagacaggaccaaagttgatgag

SEQ ID NO: 2692943 - DNA, 25 bp, Homo sapien
gacaggaccaaagttgatgagttaa

SEQ ID NO: 2692944 - DNA, 25 bp, Homo sapien
tgatgagttaaacatctccacctca

SEQ ID NO: 2692945 - DNA, 25 bp, Homo sapien
gatgagttaaacatctccacctcac

SEQ ID NO: 2692946 - DNA, 25 bp, Homo sapien
gcgcggtttgattctcgtaccgcat

SEQ ID NO: 2692947 - DNA, 25 bp, Homo sapien
cttgggtgaatctagcagcgcggtt

SEQ ID NO: 2692948 - DNA, 25 bp, Homo sapien
cagagggtgcttgggtgaatctagc

SEQ ID NO: 2692949 - DNA, 25 bp, Homo sapien
cctgccgtcaatatgcagagggtgc

SEQ ID NO: 2692950 - DNA, 25 bp, Homo sapien
agaagttaagcttgacatttgtcat

SEQ ID NO: 2692951 - DNA, 25 bp, Homo sapien
gatcccagcagaagttaagcttgac

SEQ ID NO: 2692952 - DNA, 25 bp, Homo sapien
cagatcccagcagaagttaagcttg

SEQ ID NO: 2692953 - DNA, 25 bp, Homo sapien
ccagcagaagttaagcttgacattt

SEQ ID NO: 2692954 - DNA, 25 bp, Homo sapien
gatgtccgtgattgtgctgtgatta

SEQ ID NO: 2692955 - DNA, 25 bp, Homo sapien
ctctgaggagcataggacgatctgt

SEQ ID NO: 2692956 - DNA, 25 bp, Homo sapien
taggacgatctgtaagctattccag

SEQ ID NO: 2692957 - DNA, 25 bp, Homo sapien
tctgtaagctattccagatgtccgt

SEQ ID NO: 2692958 - DNA, 25 bp, Homo sapien
gactacgagactgatagggtgtcct

SEQ ID NO: 2692959 - DNA, 25 bp, Homo sapien
tgtttccaagttagatttgtgggac

SEQ ID NO: 2692960 - DNA, 25 bp, Homo sapien
gggacttgaaggtagacacagtagc

SEQ ID NO: 2692961 - DNA, 25 bp, Homo sapien
acagtagcaaagattgtggcaggac

SEQ ID NO: 2692962 - DNA, 25 bp, Homo sapien
ttgccattatcttcggcttcggact

SEQ ID NO: 2692963 - DNA, 25 bp, Homo sapien
acattcccatttgccattatcttcg

SEQ ID NO: 2692964 - DNA, 25 bp, Homo sapien
ggcttcggactcgatgtcctctgaa

SEQ ID NO: 2692965 - DNA, 25 bp, Homo sapien
tgaactttctggcttacattcccat

SEQ ID NO: 2692966 - DNA, 25 bp, Homo sapien
caggccgggccccttgtacagcgga

SEQ ID NO: 2692967 - DNA, 25 bp, Homo sapien
ctttgtctacgaagatctggtcaca

SEQ ID NO: 2692968 - DNA, 25 bp, Homo sapien
aagatctggccacgttgagctccac

SEQ ID NO: 2692969 - DNA, 25 bp, Homo sapien
tacgaagatctggtcacatggagct

SEQ ID NO: 2692970 - DNA, 25 bp, Homo sapien
cacccataaccctgactgtgctctt

SEQ ID NO: 2692971 - DNA, 25 bp, Homo sapien
tcgtctgtagggcttgagatctgcc

SEQ ID NO: 2692972 - DNA, 25 bp, Homo sapien
atctgcccgttggtgtttgtactca

SEQ ID NO: 2692973 - DNA, 25 bp, Homo sapien
tgctctttgactgattactggggaa

SEQ ID NO: 2692974 - DNA, 25 bp, Homo sapien
ccattgtcttccttgatgcctgccg

SEQ ID NO: 2692975 - DNA, 25 bp, Homo sapien
tgaatactaattcctaataggcagc

SEQ ID NO: 2692976 - DNA, 25 bp, Homo sapien
gatgcctgccgttctctttttcttt

SEQ ID NO: 2692977 - DNA, 25 bp, Homo sapien
actaattcctaataggcagctttcc

SEQ ID NO: 2692978 - DNA, 25 bp, Homo sapien
taggtggtgaagtaactgccagcca

SEQ ID NO: 2692979 - DNA, 25 bp, Homo sapien
tcaataggtggtgaagtaactgcca

SEQ ID NO: 2692980 - DNA, 25 bp, Homo sapien
gtggtgaagtaactgccagccaaaa

SEQ ID NO: 2692981 - DNA, 25 bp, Homo sapien
aatgttcaccgggaatgggcctgtg

SEQ ID NO: 2692982 - DNA, 25 bp, Homo sapien
gctccgaaatcctgcaggcgccgtt

SEQ ID NO: 2692983 - DNA, 25 bp, Homo sapien
ccggctccgaaatcctgcaggcgcc

SEQ ID NO: 2692984 - DNA, 25 bp, Homo sapien
gcgcccggctccgaaatcctgcagg

SEQ ID NO: 2692985 - DNA, 25 bp, Homo sapien
gcccggctccgaaatcctgcaggcg

SEQ ID NO: 2692986 - DNA, 25 bp, Homo sapien
ctcccgcccaagtccggccacctgg

SEQ ID NO: 2692987 - DNA, 25 bp, Homo sapien
cccgagaaaccagccgaaggacgcg

SEQ ID NO: 2692988 - DNA, 25 bp, Homo sapien
ccgtctcaggtacgcgggcgcagct

SEQ ID NO: 2692989 - DNA, 25 bp, Homo sapien
cgacagcccgagaaaccagccgaag

SEQ ID NO: 2692990 - DNA, 25 bp, Homo sapien
tcccggcggcagaaatagggcagcc

SEQ ID NO: 2692991 - DNA, 25 bp, Homo sapien
ggcgcgcacaggtggcggcgattgg

SEQ ID NO: 2692992 - DNA, 25 bp, Homo sapien
tgacgtcacgggctccggtcccggc

SEQ ID NO: 2692993 - DNA, 25 bp, Homo sapien
acaggtggcggcgattgggcaggcg

SEQ ID NO: 2692994 - DNA, 25 bp, Homo sapien
tccctgatcaccactggaaaagagc

SEQ ID NO: 2692995 - DNA, 25 bp, Homo sapien
ccctgatcaccactggaaaagagct

SEQ ID NO: 2692996 - DNA, 25 bp, Homo sapien
ggctccctgatcaccactggaaaag

SEQ ID NO: 2692997 - DNA, 25 bp, Homo sapien
actgggctccctgatcaccactgga

SEQ ID NO: 2692998 - DNA, 25 bp, Homo sapien
ttaagcatgtaagtgcagtgctctc

SEQ ID NO: 2692999 - DNA, 25 bp, Homo sapien
tgtgttctctgaccacagtagtcat

SEQ ID NO: 2693000 - DNA, 25 bp, Homo sapien
gctctctggaggctaccttgtgttc

SEQ ID NO: 2693001 - DNA, 25 bp, Homo sapien
tgttattaagcatgtaagtgcagtg

SEQ ID NO: 2693002 - DNA, 25 bp, Homo sapien
ctgggcttaagttgaactgggttgg

SEQ ID NO: 2693003 - DNA, 25 bp, Homo sapien
tgggcttaagttgaactgggttgga

SEQ ID NO: 2693004 - DNA, 25 bp, Homo sapien
actgggcttaagttgaactgggttg

SEQ ID NO: 2693005 - DNA, 25 bp, Homo sapien
cactgggcttaagttgaactgggtt

SEQ ID NO: 2693006 - DNA, 25 bp, Homo sapien
catactcatggtcattcgtgcccac

SEQ ID NO: 2693007 - DNA, 25 bp, Homo sapien
atactcatggtcattcgtgcccacg

SEQ ID NO: 2693008 - DNA, 25 bp, Homo sapien
tcatactcatggtcattcgtgccca

SEQ ID NO: 2693009 - DNA, 25 bp, Homo sapien
tactcatggtcattcgtgcccacgg

SEQ ID NO: 2693010 - DNA, 25 bp, Homo sapien
ggaggttctgctgtcctagaaacca

SEQ ID NO: 2693011 - DNA, 25 bp, Homo sapien
cttgctttgaagctaggtacacggt

SEQ ID NO: 2693012 - DNA, 25 bp, Homo sapien
taggtacacggtgtcccagagagca

SEQ ID NO: 2693013 - DNA, 25 bp, Homo sapien
gagcaggaggttctgctgtcctaga

SEQ ID NO: 2693014 - DNA, 25 bp, Homo sapien
tacgtatggggtaatactggcttca

SEQ ID NO: 2693015 - DNA, 25 bp, Homo sapien
tctgtggcctatgcccccttcaggg

SEQ ID NO: 2693016 - DNA, 25 bp, Homo sapien
tctgatcattgtgagctctgtggcc

SEQ ID NO: 2693017 - DNA, 25 bp, Homo sapien
tcctccttgtacgtatggggtaata

SEQ ID NO: 2693018 - DNA, 25 bp, Homo sapien
agggacaaacgctatgtgaactaca

SEQ ID NO: 2693019 - DNA, 25 bp, Homo sapien
ccagggacaaacgctatgtgaacta

SEQ ID NO: 2693020 - DNA, 25 bp, Homo sapien
gtgccttgtgggttgtacttcacct

SEQ ID NO: 2693021 - DNA, 25 bp, Homo sapien
ctccaattggctggggtgccttgtg

SEQ ID NO: 2693022 - DNA, 25 bp, Homo sapien
ccctgggagtccttgaaggccaagc

SEQ ID NO: 2693023 - DNA, 25 bp, Homo sapien
ggagtccttgaaggccaagctagga

SEQ ID NO: 2693024 - DNA, 25 bp, Homo sapien
gccaagctaggacaagtcccttcca

SEQ ID NO: 2693025 - DNA, 25 bp, Homo sapien
cttgaaggccaagctaggacaagtc

SEQ ID NO: 2693026 - DNA, 25 bp, Homo sapien
ctgtgttactcttgcagttaggatc

SEQ ID NO: 2693027 - DNA, 25 bp, Homo sapien
tgttactcttgcagttaggatctgg

SEQ ID NO: 2693028 - DNA, 25 bp, Homo sapien
ttgcagttaggatctggccagtagg

SEQ ID NO: 2693029 - DNA, 25 bp, Homo sapien
tactcttgcagttaggatctggcca

SEQ ID NO: 2693030 - DNA, 25 bp, Homo sapien
agagctgggtctccgtagctgaccc

SEQ ID NO: 2693031 - DNA, 25 bp, Homo sapien
aagagctgggtctccgtagctgacc

SEQ ID NO: 2693032 - DNA, 25 bp, Homo sapien
gctgaccccttggggaatgtggatt

SEQ ID NO: 2693033 - DNA, 25 bp, Homo sapien
ctgaccccttggggaatgtggattt

SEQ ID NO: 2693034 - DNA, 25 bp, Homo sapien
gagaagttaattctggcacttagag

SEQ ID NO: 2693035 - DNA, 25 bp, Homo sapien
taggctctagataagcatgtgttga

SEQ ID NO: 2693036 - DNA, 25 bp, Homo sapien
aaatgctgctttgaattgcggtttc

SEQ ID NO: 2693037 - DNA, 25 bp, Homo sapien
ggccagagctctgtgcatataatag

SEQ ID NO: 2693038 - DNA, 25 bp, Homo sapien
acaagaggcccagccgtgcagaccc

SEQ ID NO: 2693039 - DNA, 25 bp, Homo sapien
tgacggccacgggaacaagaggccc

SEQ ID NO: 2693040 - DNA, 25 bp, Homo sapien
ctgacggccacgggaacaagaggcc

SEQ ID NO: 2693041 - DNA, 25 bp, Homo sapien
gacggccacgggaacaagaggccca

SEQ ID NO: 2693042 - DNA, 25 bp, Homo sapien
gcattggcaccagcactaacgttga

SEQ ID NO: 2693043 - DNA, 25 bp, Homo sapien
tgtgacccagtccagcaggtactca

SEQ ID NO: 2693044 - DNA, 25 bp, Homo sapien
gactgcaccacgctaggcattggca

SEQ ID NO: 2693045 - DNA, 25 bp, Homo sapien
tgacacagcggattctctcattgga

SEQ ID NO: 2693046 - DNA, 25 bp, Homo sapien
ccagttctgaagcaggtgccttgcc

SEQ ID NO: 2693047 - DNA, 25 bp, Homo sapien
agtccagttctgaagcaggtgcctt

SEQ ID NO: 2693048 - DNA, 25 bp, Homo sapien
tgcggcaccatccagcagcccaagt

SEQ ID NO: 2693049 - DNA, 25 bp, Homo sapien
tgccttgcctttctgcatttgaggt

SEQ ID NO: 2693050 - DNA, 25 bp, Homo sapien
tgatggtcactgctatatggacgga

SEQ ID NO: 2693051 - DNA, 25 bp, Homo sapien
tctgtagacacagcgtgtgctaggc

SEQ ID NO: 2693052 - DNA, 25 bp, Homo sapien
tcttgtttcatcactacattctgca

SEQ ID NO: 2693053 - DNA, 25 bp, Homo sapien
tggccaaggaccgtgcctcaatgtc

SEQ ID NO: 2693054 - DNA, 25 bp, Homo sapien
gatgatgacgatcatgaggaagcag

SEQ ID NO: 2693055 - DNA, 25 bp, Homo sapien
gagttgagtctggtacaaccgagcc

SEQ ID NO: 2693056 - DNA, 25 bp, Homo sapien
caaatgtgaatctgacaagaagtct

SEQ ID NO: 2693057 - DNA, 25 bp, Homo sapien
tgaatgaagaccgcgggcaaatgtg

SEQ ID NO: 2693058 - DNA, 25 bp, Homo sapien
caaccgagcccaggctagattagct

SEQ ID NO: 2693059 - DNA, 25 bp, Homo sapien
cttgcctgttggaggatgagcagac

SEQ ID NO: 2693060 - DNA, 25 bp, Homo sapien
tctcgcagccataaaaggtttttac

SEQ ID NO: 2693061 - DNA, 25 bp, Homo sapien
ctctgaattctctcgcagccataaa

SEQ ID NO: 2693062 - DNA, 25 bp, Homo sapien
aattctctcgcagccataaaaggtt

SEQ ID NO: 2693063 - DNA, 25 bp, Homo sapien
tgaattctctcgcagccataaaagg

SEQ ID NO: 2693064 - DNA, 25 bp, Homo sapien
ggggcctgaacccttgggtcactga

SEQ ID NO: 2693065 - DNA, 25 bp, Homo sapien
ctagttcaatctgagctgaatgttt

SEQ ID NO: 2693066 - DNA, 25 bp, Homo sapien
tgaacccttgggtcactgaccccag

SEQ ID NO: 2693067 - DNA, 25 bp, Homo sapien
gctgaatgtttgtgggtctgctttc

SEQ ID NO: 2693068 - DNA, 25 bp, Homo sapien
aggatgtaggatttaggactggcat

SEQ ID NO: 2693069 - DNA, 25 bp, Homo sapien
ggatttaggactggcattccatttc

SEQ ID NO: 2693070 - DNA, 25 bp, Homo sapien
gaacaatggcaacccggtgcctttg

SEQ ID NO: 2693071 - DNA, 25 bp, Homo sapien
cggtgcctttgagcccctttgatga

SEQ ID NO: 2693072 - DNA, 25 bp, Homo sapien
gtggcctcccgagagcccagtggag

SEQ ID NO: 2693073 - DNA, 25 bp, Homo sapien
tgtggcctcccgagagcccagtgga

SEQ ID NO: 2693074 - DNA, 25 bp, Homo sapien
cctcccgagagcccagtggagacat

SEQ ID NO: 2693075 - DNA, 25 bp, Homo sapien
ggcctcccgagagcccagtggagac

SEQ ID NO: 2693076 - DNA, 25 bp, Homo sapien
gagccaaatacaagcaagccacctc

SEQ ID NO: 2693077 - DNA, 25 bp, Homo sapien
cagagccaaatacaagcaagccacc

SEQ ID NO: 2693078 - DNA, 25 bp, Homo sapien
gccaaatacaagcaagccacctcat

SEQ ID NO: 2693079 - DNA, 25 bp, Homo sapien
ccaaatacaagcaagccacctcatt

SEQ ID NO: 2693080 - DNA, 25 bp, Homo sapien
attctctgactgagaacacgaccag

SEQ ID NO: 2693081 - DNA, 25 bp, Homo sapien
ttttccagcactgggacccaacagg

SEQ ID NO: 2693082 - DNA, 25 bp, Homo sapien
agaacacgaccaggtgcacatccaa

SEQ ID NO: 2693083 - DNA, 25 bp, Homo sapien
tactgctctttggtacttaaattct

SEQ ID NO: 2693084 - DNA, 25 bp, Homo sapien
tccttctggttgtcacatagcccct

SEQ ID NO: 2693085 - DNA, 25 bp, Homo sapien
cacatagccccttgtatggcacttg

SEQ ID NO: 2693086 - DNA, 25 bp, Homo sapien
tcagtggactttaactgcctgctcc

SEQ ID NO: 2693087 - DNA, 25 bp, Homo sapien
gaataggatagctcatccttctggt

SEQ ID NO: 2693088 - DNA, 25 bp, Homo sapien
gctcccagtcctcattgagcaaaat

SEQ ID NO: 2693089 - DNA, 25 bp, Homo sapien
ccagtcctcattgagcaaaatcaaa

SEQ ID NO: 2693090 - DNA, 25 bp, Homo sapien
cagctcccagtcctcattgagcaaa

SEQ ID NO: 2693091 - DNA, 25 bp, Homo sapien
cctcattgagcaaaatcaaacaggg

SEQ ID NO: 2693092 - DNA, 25 bp, Homo sapien
ctctgaaagccactctataaagttt

SEQ ID NO: 2693093 - DNA, 25 bp, Homo sapien
tggctgggtctggatattactctga

SEQ ID NO: 2693094 - DNA, 25 bp, Homo sapien
agtcaaagccggcagcatccatctc

SEQ ID NO: 2693095 - DNA, 25 bp, Homo sapien
tctcaattcactgctgccggagggc

SEQ ID NO: 2693096 - DNA, 25 bp, Homo sapien
attactctgagccacctcaggtggc

SEQ ID NO: 2693097 - DNA, 25 bp, Homo sapien
ggctgtacgtcctcagcttgtctca

SEQ ID NO: 2693098 - DNA, 25 bp, Homo sapien
agtgcctttggctgtacgtcctcag

SEQ ID NO: 2693099 - DNA, 25 bp, Homo sapien
gggagccatgctgcaggttggacac

SEQ ID NO: 2693100 - DNA, 25 bp, Homo sapien
caatgcagttgaggggctgctcagc

SEQ ID NO: 2693101 - DNA, 25 bp, Homo sapien
ctgactccttgtgccattctgtgtt

SEQ ID NO: 2693102 - DNA, 25 bp, Homo sapien
cattctgtgttagcttttgagtgca

SEQ ID NO: 2693103 - DNA, 25 bp, Homo sapien
ctgtgttagcttttgagtgcatggc

SEQ ID NO: 2693104 - DNA, 25 bp, Homo sapien
gagaggccccactgactccttgtgc

SEQ ID NO: 2693105 - DNA, 25 bp, Homo sapien
ccttcatgatggagggctgtttgtc

SEQ ID NO: 2693106 - DNA, 25 bp, Homo sapien
tgtagtgaccccatgcaagaaagcc

SEQ ID NO: 2693107 - DNA, 25 bp, Homo sapien
cctctagtgggtgaagagtcatgca

SEQ ID NO: 2693108 - DNA, 25 bp, Homo sapien
cagttcatgcaatgttggtccttca

SEQ ID NO: 2693109 - DNA, 25 bp, Homo sapien
cctgcaggggtaatgttgtcactca

SEQ ID NO: 2693110 - DNA, 25 bp, Homo sapien
ctggaatcgatctaacctcagaaat

SEQ ID NO: 2693111 - DNA, 25 bp, Homo sapien
actttgttctggaatcgatctaacc

SEQ ID NO: 2693112 - DNA, 25 bp, Homo sapien
agcaaaagctcctggaacccctgca

SEQ ID NO: 2693113 - DNA, 25 bp, Homo sapien
atagaaacaacaggcggggtggcat

SEQ ID NO: 2693114 - DNA, 25 bp, Homo sapien
caggcggggtggcatgaggccatca

SEQ ID NO: 2693115 - DNA, 25 bp, Homo sapien
gcggggtggcatgaggccatcagcc

SEQ ID NO: 2693116 - DNA, 25 bp, Homo sapien
gcaatagaaacaacaggcggggtgg

SEQ ID NO: 2693117 - DNA, 25 bp, Homo sapien
tccccggttcccagtgccacttctc

SEQ ID NO: 2693118 - DNA, 25 bp, Homo sapien
ctgtccccggttcccagtgccactt

SEQ ID NO: 2693119 - DNA, 25 bp, Homo sapien
cccggttcccagtgccacttctctg

SEQ ID NO: 2693120 - DNA, 25 bp, Homo sapien
ggttcccagtgccacttctctgatg

SEQ ID NO: 2693121 - DNA, 25 bp, Homo sapien
tggtcccaatcctctggttgtcact

SEQ ID NO: 2693122 - DNA, 25 bp, Homo sapien
ggtcccaatcctctggttgtcactt

SEQ ID NO: 2693123 - DNA, 25 bp, Homo sapien
gaagcatggagtgagaactcttgct

SEQ ID NO: 2693124 - DNA, 25 bp, Homo sapien
gacaggcatgactggcaggtagggc

SEQ ID NO: 2693125 - DNA, 25 bp, Homo sapien
tcttggagtcgaagaagcatggagt

SEQ ID NO: 2693126 - DNA, 25 bp, Homo sapien
gggtcttcttggagtcgaagaagca

SEQ ID NO: 2693127 - DNA, 25 bp, Homo sapien
ttagcccgaaaggcctgccaaactc

SEQ ID NO: 2693128 - DNA, 25 bp, Homo sapien
taatgactggccatggcaatcttgg

SEQ ID NO: 2693129 - DNA, 25 bp, Homo sapien
tgtttttgattatccgtgctccctc

SEQ ID NO: 2693130 - DNA, 25 bp, Homo sapien
catctgctaccggaatttgcgcctc

SEQ ID NO: 2693131 - DNA, 25 bp, Homo sapien
aaagccagatttgacaactcttcca

SEQ ID NO: 2693132 - DNA, 25 bp, Homo sapien
caaacatgtagcatgacgccaaatc

SEQ ID NO: 2693133 - DNA, 25 bp, Homo sapien
agcaaacatgtagcatgacgccaaa

SEQ ID NO: 2693134 - DNA, 25 bp, Homo sapien
acatgtagcatgacgccaaatccat

SEQ ID NO: 2693135 - DNA, 25 bp, Homo sapien
aacatgtagcatgacgccaaatcca

SEQ ID NO: 2693136 - DNA, 25 bp, Homo sapien
gtcacgacagggctgatgctctcag

SEQ ID NO: 2693137 - DNA, 25 bp, Homo sapien
gcaagccctgtacaatctccaggga

SEQ ID NO: 2693138 - DNA, 25 bp, Homo sapien
gccctgtctcttactgtcctcatag

SEQ ID NO: 2693139 - DNA, 25 bp, Homo sapien
cagggacttgcagtcaaggctggcc

SEQ ID NO: 2693140 - DNA, 25 bp, Homo sapien
cttctggtttgctaacacaccaagc

SEQ ID NO: 2693141 - DNA, 25 bp, Homo sapien
ttctggtttgctaacacaccaagcc

SEQ ID NO: 2693142 - DNA, 25 bp, Homo sapien
tcttctggtttgctaacacaccaag

SEQ ID NO: 2693143 - DNA, 25 bp, Homo sapien
tataacaagaattggcctaccctgt

SEQ ID NO: 2693144 - DNA, 25 bp, Homo sapien
ttaaaacaagcaatttttcacagta

SEQ ID NO: 2693145 - DNA, 25 bp, Homo sapien
gagattttatttaccgagaatgtta

SEQ ID NO: 2693146 - DNA, 25 bp, Homo sapien
caatgtaggcttctttatggagtct

SEQ ID NO: 2693147 - DNA, 25 bp, Homo sapien
cttcatgctttgggtggacctgatt

SEQ ID NO: 2693148 - DNA, 25 bp, Homo sapien
tcatgctttgggtggacctgattgg

SEQ ID NO: 2693149 - DNA, 25 bp, Homo sapien
caagtgagtcagggaaatcccactt

SEQ ID NO: 2693150 - DNA, 25 bp, Homo sapien
atgctttgggtggacctgattggtc

SEQ ID NO: 2693151 - DNA, 25 bp, Homo sapien
ctctggtgaattgagcacgggcccg

SEQ ID NO: 2693152 - DNA, 25 bp, Homo sapien
acttctgaagcgactctctgtagca

SEQ ID NO: 2693153 - DNA, 25 bp, Homo sapien
gtgaattgagcacgggcccgtctgc

SEQ ID NO: 2693154 - DNA, 25 bp, Homo sapien
aaagcacttctgaagcgactctctg

SEQ ID NO: 2693155 - DNA, 25 bp, Homo sapien
gaagattcggatcgaatgtgtctat

SEQ ID NO: 2693156 - DNA, 25 bp, Homo sapien
ggatcgaatgtgtctatgatccatg

SEQ ID NO: 2693157 - DNA, 25 bp, Homo sapien
tgtgtctatgatccatggaaggaat

SEQ ID NO: 2693158 - DNA, 25 bp, Homo sapien
tgatccatggaaggaatttgacaga

SEQ ID NO: 2693159 - DNA, 25 bp, Homo sapien
tgatagccagacttcttccattgct

SEQ ID NO: 2693160 - DNA, 25 bp, Homo sapien
atagccagacttcttccattgctga

SEQ ID NO: 2693161 - DNA, 25 bp, Homo sapien
actgatagccagacttcttccattg

SEQ ID NO: 2693162 - DNA, 25 bp, Homo sapien
ggactctctcacactgatagccaga

SEQ ID NO: 2693163 - DNA, 25 bp, Homo sapien
caaagctgaaggcaacatattgtct

SEQ ID NO: 2693164 - DNA, 25 bp, Homo sapien
tccaccgactcaatgcaacccctat

SEQ ID NO: 2693165 - DNA, 25 bp, Homo sapien
gctgaaggcaacatattgtctgact

SEQ ID NO: 2693166 - DNA, 25 bp, Homo sapien
gcaacccctatcaaattatgaatgt

SEQ ID NO: 2693167 - DNA, 25 bp, Homo sapien
gctgcaattgggttgagttggagtc

SEQ ID NO: 2693168 - DNA, 25 bp, Homo sapien
tggctgcaattgggttgagttggag

SEQ ID NO: 2693169 - DNA, 25 bp, Homo sapien
tgcaattgggttgagttggagtcca

SEQ ID NO: 2693170 - DNA, 25 bp, Homo sapien
attgggttgagttggagtccacttt

SEQ ID NO: 2693171 - DNA, 25 bp, Homo sapien
agcatgtcctcagtgggtaagccca

SEQ ID NO: 2693172 - DNA, 25 bp, Homo sapien
gggtaagcccagcatgatttgtaag

SEQ ID NO: 2693173 - DNA, 25 bp, Homo sapien
acttcgtgtgctttgagggctgaga

SEQ ID NO: 2693174 - DNA, 25 bp, Homo sapien
tgcacatgaccatcaggaaggaaca

SEQ ID NO: 2693175 - DNA, 25 bp, Homo sapien
cctgcagacattgtctatgtgcctt

SEQ ID NO: 2693176 - DNA, 25 bp, Homo sapien
cctgcatgctgctggtgactagggc

SEQ ID NO: 2693177 - DNA, 25 bp, Homo sapien
ctgcatgctgctggtgactagggca

SEQ ID NO: 2693178 - DNA, 25 bp, Homo sapien
agaacgggcaggtgattgtgaccct

SEQ ID NO: 2693179 - DNA, 25 bp, Homo sapien
tggatctcctccgacacgccctctg

SEQ ID NO: 2693180 - DNA, 25 bp, Homo sapien
atatggagacatatcagtgttcctc

SEQ ID NO: 2693181 - DNA, 25 bp, Homo sapien
tccgacacgccctctgttccaacct

SEQ ID NO: 2693182 - DNA, 25 bp, Homo sapien
gcgctggggatatggagacatatca

SEQ ID NO: 2693183 - DNA, 25 bp, Homo sapien
gtgattagcttccttgtagagtcca

SEQ ID NO: 2693184 - DNA, 25 bp, Homo sapien
atctagtgattagcttccttgtaga

SEQ ID NO: 2693185 - DNA, 25 bp, Homo sapien
agtgattagcttccttgtagagtcc

SEQ ID NO: 2693186 - DNA, 25 bp, Homo sapien
ttatctagtgattagcttccttgta

SEQ ID NO: 2693187 - DNA, 25 bp, Homo sapien
ctgagctgtggcttgggaactggag

SEQ ID NO: 2693188 - DNA, 25 bp, Homo sapien
tggaggagtcattgaagtttttgag

SEQ ID NO: 2693189 - DNA, 25 bp, Homo sapien
attatatgcatgatggaggagtcat

SEQ ID NO: 2693190 - DNA, 25 bp, Homo sapien
tctgagctgtggcttgggaactgga

SEQ ID NO: 2693191 - DNA, 25 bp, Homo sapien
taaatctttctggaacagctgaggt

SEQ ID NO: 2693192 - DNA, 25 bp, Homo sapien
tgtgcctggaaccacgggtgagatt

SEQ ID NO: 2693193 - DNA, 25 bp, Homo sapien
ggagcaaaatgcgatcagtgggaat

SEQ ID NO: 2693194 - DNA, 25 bp, Homo sapien
tgtaggacaggccataacccatgct

SEQ ID NO: 2693195 - DNA, 25 bp, Homo sapien
catcgctgtctgtaaccgtggtggg

SEQ ID NO: 2693196 - DNA, 25 bp, Homo sapien
ctgatggatatgcttgtagtgttat

SEQ ID NO: 2693197 - DNA, 25 bp, Homo sapien
ttatgtctgcatcgctgtctgtaac

SEQ ID NO: 2693198 - DNA, 25 bp, Homo sapien
cttgtagtgttatgtctgcatcgct

SEQ ID NO: 2693199 - DNA, 25 bp, Homo sapien
tcagccacactaatgagctgatttc

SEQ ID NO: 2693200 - DNA, 25 bp, Homo sapien
tggccttggtcagccacactaatga

SEQ ID NO: 2693201 - DNA, 25 bp, Homo sapien
agcatggccttggtcagccacacta

SEQ ID NO: 2693202 - DNA, 25 bp, Homo sapien
taagggccagcatggccttggtcag

SEQ ID NO: 2693203 - DNA, 25 bp, Homo sapien
tgagtgtggtctgctgtgggttgaa

SEQ ID NO: 2693204 - DNA, 25 bp, Homo sapien
ttgaacagaacccaggctttcctgc

SEQ ID NO: 2693205 - DNA, 25 bp, Homo sapien
tcctgcccatagagttgctgctgga

SEQ ID NO: 2693206 - DNA, 25 bp, Homo sapien
tctgctgtgggttgaacagaaccca

SEQ ID NO: 2693207 - DNA, 25 bp, Homo sapien
actgccttgttttgcatataatgat

SEQ ID NO: 2693208 - DNA, 25 bp, Homo sapien
cctgcagctgcttaggccccgggct

SEQ ID NO: 2693209 - DNA, 25 bp, Homo sapien
gacaggatgtgtgcagaaactctcc

SEQ ID NO: 2693210 - DNA, 25 bp, Homo sapien
gccttgttttgcatataatgatgaa

SEQ ID NO: 2693211 - DNA, 25 bp, Homo sapien
tcaatcggagcatttggccccatag

SEQ ID NO: 2693212 - DNA, 25 bp, Homo sapien
catagccagcctgtacattcagctt

SEQ ID NO: 2693213 - DNA, 25 bp, Homo sapien
cattcagcttcacggccaaataaag

SEQ ID NO: 2693214 - DNA, 25 bp, Homo sapien
gcatttggccccatagccagcctgt

SEQ ID NO: 2693215 - DNA, 25 bp, Homo sapien
tgatgtttcgtgcaggtccctggct

SEQ ID NO: 2693216 - DNA, 25 bp, Homo sapien
atgacaactgcatgggctgggacgc

SEQ ID NO: 2693217 - DNA, 25 bp, Homo sapien
gcccatatggtctacatgccccaca

SEQ ID NO: 2693218 - DNA, 25 bp, Homo sapien
ctgggacgccgcgtgctgatgtttc

SEQ ID NO: 2693219 - DNA, 25 bp, Homo sapien
gttgggatagctcaagggactcttg

SEQ ID NO: 2693220 - DNA, 25 bp, Homo sapien
ctggctggagcatggcacaaacctt

SEQ ID NO: 2693221 - DNA, 25 bp, Homo sapien
gcatacaccaagttgggatagctca

SEQ ID NO: 2693222 - DNA, 25 bp, Homo sapien
tcatatgcacatgtggtagcttgag

SEQ ID NO: 2693223 - DNA, 25 bp, Homo sapien
gcatcgccctgactaggtgggctct

SEQ ID NO: 2693224 - DNA, 25 bp, Homo sapien
gcatttgcctggaggatcatctggg

SEQ ID NO: 2693225 - DNA, 25 bp, Homo sapien
tcagtcatgattatgggcatcgccc

SEQ ID NO: 2693226 - DNA, 25 bp, Homo sapien
tctttccatttatgcggagcagggt

SEQ ID NO: 2693227 - DNA, 25 bp, Homo sapien
tcacactggtccttactccttcctt

SEQ ID NO: 2693228 - DNA, 25 bp, Homo sapien
tgtgaactagtctcatctggccaca

SEQ ID NO: 2693229 - DNA, 25 bp, Homo sapien
gcttcaggtatagtcctcacactgg

SEQ ID NO: 2693230 - DNA, 25 bp, Homo sapien
taacagctgtgggacgcatggcatt

SEQ ID NO: 2693231 - DNA, 25 bp, Homo sapien
aggtccttaggtgtcattcccaggc

SEQ ID NO: 2693232 - DNA, 25 bp, Homo sapien
ccaggagtcagatcctcaaaagcca

SEQ ID NO: 2693233 - DNA, 25 bp, Homo sapien
gatgtgccatccttcaggcttctgt

SEQ ID NO: 2693234 - DNA, 25 bp, Homo sapien
gagccgatcgatgtgccatccttca

SEQ ID NO: 2693235 - DNA, 25 bp, Homo sapien
gatcgatgtgccatccttcaggctt

SEQ ID NO: 2693236 - DNA, 25 bp, Homo sapien
gcctgggagccgatcgatgtgccat

SEQ ID NO: 2693237 - DNA, 25 bp, Homo sapien
aaagccaaacttggttgctttggca

SEQ ID NO: 2693238 - DNA, 25 bp, Homo sapien
gatgcctgcgtgctttgggcaggaa

SEQ ID NO: 2693239 - DNA, 25 bp, Homo sapien
aagccaaacttggttgctttggcaa

SEQ ID NO: 2693240 - DNA, 25 bp, Homo sapien
gctcaaggatgcctgcgtgctttgg

SEQ ID NO: 2693241 - DNA, 25 bp, Homo sapien
ccatggctttgtaggtcttttcagc

SEQ ID NO: 2693242 - DNA, 25 bp, Homo sapien
cagccttgtgtgcaatgtacagaat

SEQ ID NO: 2693243 - DNA, 25 bp, Homo sapien
gaatttggggtgagatagtgtggaa

SEQ ID NO: 2693244 - DNA, 25 bp, Homo sapien
caatgtacagaatttggggtgagat

SEQ ID NO: 2693245 - DNA, 25 bp, Homo sapien
tcagggctatgactatctcattagc

SEQ ID NO: 2693246 - DNA, 25 bp, Homo sapien
gactatctcattagcccatttgtcc

SEQ ID NO: 2693247 - DNA, 25 bp, Homo sapien
tgaggacatgcttgttgatcttgtc

SEQ ID NO: 2693248 - DNA, 25 bp, Homo sapien
tctgggtcagggctatgactatctc

SEQ ID NO: 2693249 - DNA, 25 bp, Homo sapien
tcagaggttaattgtgcagagacca

SEQ ID NO: 2693250 - DNA, 25 bp, Homo sapien
cttcagaggttaattgtgcagagac

SEQ ID NO: 2693251 - DNA, 25 bp, Homo sapien
cagaggttaattgtgcagagaccag

SEQ ID NO: 2693252 - DNA, 25 bp, Homo sapien
agaggttaattgtgcagagaccagc

SEQ ID NO: 2693253 - DNA, 25 bp, Homo sapien
acagcaagtgcttagcagagaaaca

SEQ ID NO: 2693254 - DNA, 25 bp, Homo sapien
caagtgcttagcagagaaacaagca

SEQ ID NO: 2693255 - DNA, 25 bp, Homo sapien
agcaatcacctttggaaaatctttg

SEQ ID NO: 2693256 - DNA, 25 bp, Homo sapien
agaaacaagcaatcacctttggaaa

SEQ ID NO: 2693257 - DNA, 25 bp, Homo sapien
gaggaggtctccatccccttcccaa

SEQ ID NO: 2693258 - DNA, 25 bp, Homo sapien
tccccttcccaaccatgcagttcct

SEQ ID NO: 2693259 - DNA, 25 bp, Homo sapien
tccatccccttcccaaccatgcagt

SEQ ID NO: 2693260 - DNA, 25 bp, Homo sapien
catccccttcccaaccatgcagttc

SEQ ID NO: 2693261 - DNA, 25 bp, Homo sapien
gccaaagaagccttgaagatgcccc

SEQ ID NO: 2693262 - DNA, 25 bp, Homo sapien
acaatgcagatgtccttagccagtg

SEQ ID NO: 2693263 - DNA, 25 bp, Homo sapien
ggtgtcagtggtaccttgtagacat

SEQ ID NO: 2693264 - DNA, 25 bp, Homo sapien
tcttccatagtctgatactgttgtg

SEQ ID NO: 2693265 - DNA, 25 bp, Homo sapien
tcaaggactcaggagtgaaattctt

SEQ ID NO: 2693266 - DNA, 25 bp, Homo sapien
aggactcaggagtgaaattcttttt

SEQ ID NO: 2693267 - DNA, 25 bp, Homo sapien
gtgaaattctttttgcaccttccac

SEQ ID NO: 2693268 - DNA, 25 bp, Homo sapien
tgaaattctttttgcaccttccacc

SEQ ID NO: 2693269 - DNA, 25 bp, Homo sapien
tggagatgagcaacttgaagtttgt

SEQ ID NO: 2693270 - DNA, 25 bp, Homo sapien
agatgagcaacttgaagtttgtgca

SEQ ID NO: 2693271 - DNA, 25 bp, Homo sapien
tttggagatgagcaacttgaagttt

SEQ ID NO: 2693272 - DNA, 25 bp, Homo sapien
gagatgagcaacttgaagtttgtgc

SEQ ID NO: 2693273 - DNA, 25 bp, Homo sapien
ctgcgggcagatccagggaagctga

SEQ ID NO: 2693274 - DNA, 25 bp, Homo sapien
cagatccagggaagctgatatgaca

SEQ ID NO: 2693275 - DNA, 25 bp, Homo sapien
gaagctgatatgacagagtgagtcc

SEQ ID NO: 2693276 - DNA, 25 bp, Homo sapien
tgatatgacagagtgagtccctcac

SEQ ID NO: 2693277 - DNA, 25 bp, Homo sapien
ttggagagttgcaaatgtggacact

SEQ ID NO: 2693278 - DNA, 25 bp, Homo sapien
agttggagagttgcaaatgtggaca

SEQ ID NO: 2693279 - DNA, 25 bp, Homo sapien
gagagttgcaaatgtggacactttc

SEQ ID NO: 2693280 - DNA, 25 bp, Homo sapien
gagttgcaaatgtggacactttctc

SEQ ID NO: 2693281 - DNA, 25 bp, Homo sapien
cccttggaagtcagggcctgcaggg

SEQ ID NO: 2693282 - DNA, 25 bp, Homo sapien
ttctggtggtgtctgggcccttgga

SEQ ID NO: 2693283 - DNA, 25 bp, Homo sapien
tctgggcccttggaagtcagggcct

SEQ ID NO: 2693284 - DNA, 25 bp, Homo sapien
tctggtggtgtctgggcccttggaa

SEQ ID NO: 2693285 - DNA, 25 bp, Homo sapien
ttcttctctgtttggccagtggtgg

SEQ ID NO: 2693286 - DNA, 25 bp, Homo sapien
tttcttctctgtttggccagtggtg

SEQ ID NO: 2693287 - DNA, 25 bp, Homo sapien
ctttcttctctgtttggccagtggt

SEQ ID NO: 2693288 - DNA, 25 bp, Homo sapien
caacctcgaggtttgcctcagcatg

SEQ ID NO: 2693289 - DNA, 25 bp, Homo sapien
tccccaaggtgtaattaatgacttg

SEQ ID NO: 2693290 - DNA, 25 bp, Homo sapien
tgtttgaacagtgtttgcccatcca

SEQ ID NO: 2693291 - DNA, 25 bp, Homo sapien
ccagcagtgtcaaacacaacctcga

SEQ ID NO: 2693292 - DNA, 25 bp, Homo sapien
cctggcttagggatttgctgggtta

SEQ ID NO: 2693293 - DNA, 25 bp, Homo sapien
aggttgtcacctagcctggctttac

SEQ ID NO: 2693294 - DNA, 25 bp, Homo sapien
cacaggaccaggaattggaaagctc

SEQ ID NO: 2693295 - DNA, 25 bp, Homo sapien
ctgggttaggttgtcacctagcctg

SEQ ID NO: 2693296 - DNA, 25 bp, Homo sapien
tgcctctgtttaacctaaaagctcc

SEQ ID NO: 2693297 - DNA, 25 bp, Homo sapien
ctaaaagctccgtccagtacctggg

SEQ ID NO: 2693298 - DNA, 25 bp, Homo sapien
tccctttccagctggtacggaagga

SEQ ID NO: 2693299 - DNA, 25 bp, Homo sapien
cagctggtacggaaggagtccacag

SEQ ID NO: 2693300 - DNA, 25 bp, Homo sapien
ccttgagaggaatgctatgagatat

SEQ ID NO: 2693301 - DNA, 25 bp, Homo sapien
gacacatgtggccagacccatggag

SEQ ID NO: 2693302 - DNA, 25 bp, Homo sapien
aagcatggggctccgggtctgccat

SEQ ID NO: 2693303 - DNA, 25 bp, Homo sapien
tccgggtctgccatgtgcaggcccg

SEQ ID NO: 2693304 - DNA, 25 bp, Homo sapien
tcttctgaggccatcgactcccact

SEQ ID NO: 2693305 - DNA, 25 bp, Homo sapien
agagtccaatgccaacaccacagga

SEQ ID NO: 2693306 - DNA, 25 bp, Homo sapien
tctgaggccatcgactcccactagg

SEQ ID NO: 2693307 - DNA, 25 bp, Homo sapien
aggtcccagagtccaatgccaacac

SEQ ID NO: 2693308 - DNA, 25 bp, Homo sapien
aagggacgatttgctcttctgctgt

SEQ ID NO: 2693309 - DNA, 25 bp, Homo sapien
gggcacagaagggacgatttgctct

SEQ ID NO: 2693310 - DNA, 25 bp, Homo sapien
cacagaagggacgatttgctcttct

SEQ ID NO: 2693311 - DNA, 25 bp, Homo sapien
cagaagggacgatttgctcttctgc

SEQ ID NO: 2693312 - DNA, 25 bp, Homo sapien
ctgagtggatgctgattactttgtt

SEQ ID NO: 2693313 - DNA, 25 bp, Homo sapien
tggatgctgattactttgttcccta

SEQ ID NO: 2693314 - DNA, 25 bp, Homo sapien
tgatgtggggacacgtggacagtcc

SEQ ID NO: 2693315 - DNA, 25 bp, Homo sapien
agtggtggtggcatgatttggagaa

SEQ ID NO: 2693316 - DNA, 25 bp, Homo sapien
caacttcgtagctactggaacagga

SEQ ID NO: 2693317 - DNA, 25 bp, Homo sapien
tgttgcggaatgtgtgagaaccaaa

SEQ ID NO: 2693318 - DNA, 25 bp, Homo sapien
ggaagtaggaattttcatgctgcta

SEQ ID NO: 2693319 - DNA, 25 bp, Homo sapien
tttctcatgtgagcaacttcgtagc

SEQ ID NO: 2693320 - DNA, 25 bp, Homo sapien
ctttgagaggaatacattgatgaat

SEQ ID NO: 2693321 - DNA, 25 bp, Homo sapien
ggtcatttctcttgcagattgaaca

SEQ ID NO: 2693322 - DNA, 25 bp, Homo sapien
gatgcgttttgtcttgtctgttccc

SEQ ID NO: 2693323 - DNA, 25 bp, Homo sapien
ttatcccatggtggatgtcacccca

SEQ ID NO: 2693324 - DNA, 25 bp, Homo sapien
cagattgaacatctcggagcaggga

SEQ ID NO: 2693325 - DNA, 25 bp, Homo sapien
ccctggggctgttgagctgtgagtc

SEQ ID NO: 2693326 - DNA, 25 bp, Homo sapien
ggggctgttgagctgtgagtcctta

SEQ ID NO: 2693327 - DNA, 25 bp, Homo sapien
ggctgttgagctgtgagtccttatc

SEQ ID NO: 2693328 - DNA, 25 bp, Homo sapien
ggcccctggggctgttgagctgtga

SEQ ID NO: 2693329 - DNA, 25 bp, Homo sapien
agagcaagggctccgctcatctcca

SEQ ID NO: 2693330 - DNA, 25 bp, Homo sapien
cagaggccagagcaagggctccgct

SEQ ID NO: 2693331 - DNA, 25 bp, Homo sapien
cagagcaagggctccgctcatctcc

SEQ ID NO: 2693332 - DNA, 25 bp, Homo sapien
aggccagagcaagggctccgctcat

SEQ ID NO: 2693333 - DNA, 25 bp, Homo sapien
agcatcgaagttcatcagggtccat

SEQ ID NO: 2693334 - DNA, 25 bp, Homo sapien
tcttgcatccgcaggagatctctgg

SEQ ID NO: 2693335 - DNA, 25 bp, Homo sapien
ccctcatttatggagcagtcactca

SEQ ID NO: 2693336 - DNA, 25 bp, Homo sapien
tccgtctcttgcatccgcaggagat

SEQ ID NO: 2693337 - DNA, 25 bp, Homo sapien
gtcactcaccatggcccggcacctg

SEQ ID NO: 2693338 - DNA, 25 bp, Homo sapien
agcactcctggccagatgaaggtaa

SEQ ID NO: 2693339 - DNA, 25 bp, Homo sapien
atggagcactcctggccagatgaag

SEQ ID NO: 2693340 - DNA, 25 bp, Homo sapien
gatggagcactcctggccagatgaa

SEQ ID NO: 2693341 - DNA, 25 bp, Homo sapien
gcagatggagcactcctggccagat

SEQ ID NO: 2693342 - DNA, 25 bp, Homo sapien
gatgtgaagtcagctcgttcatgac

SEQ ID NO: 2693343 - DNA, 25 bp, Homo sapien
gtgatgtgaagtcagctcgttcatg

SEQ ID NO: 2693344 - DNA, 25 bp, Homo sapien
ctctgtgatgtgaagtcagctcgtt

SEQ ID NO: 2693345 - DNA, 25 bp, Homo sapien
tgatgtgaagtcagctcgttcatga

SEQ ID NO: 2693346 - DNA, 25 bp, Homo sapien
ttgtggcctctaatacttgataagc

SEQ ID NO: 2693347 - DNA, 25 bp, Homo sapien
taatacttgataagcccagcttgct

SEQ ID NO: 2693348 - DNA, 25 bp, Homo sapien
atcctttgtggcctctaatacttga

SEQ ID NO: 2693349 - DNA, 25 bp, Homo sapien
ttgcttctcgagccaatgaaggccc

SEQ ID NO: 2693350 - DNA, 25 bp, Homo sapien
gagaagggggcgctaattcccaggc

SEQ ID NO: 2693351 - DNA, 25 bp, Homo sapien
attcccaggcctctgaatgtgggca

SEQ ID NO: 2693352 - DNA, 25 bp, Homo sapien
tttagtgtcttattcatcaactggt

SEQ ID NO: 2693353 - DNA, 25 bp, Homo sapien
tcaactggtttagattccaggtgga

SEQ ID NO: 2693354 - DNA, 25 bp, Homo sapien
gcatcaagctggtacaaactgccct

SEQ ID NO: 2693355 - DNA, 25 bp, Homo sapien
gggcctcattgagaccaggtgcaag

SEQ ID NO: 2693356 - DNA, 25 bp, Homo sapien
aagtcatcaatctcgctgttatcaa

SEQ ID NO: 2693357 - DNA, 25 bp, Homo sapien
taaacaatgcatcaagctggtacaa

SEQ ID NO: 2693358 - DNA, 25 bp, Homo sapien
ccaccaggagcagtgacgctgtagt

SEQ ID NO: 2693359 - DNA, 25 bp, Homo sapien
tgtagtgtcctgacatccttcacca

SEQ ID NO: 2693360 - DNA, 25 bp, Homo sapien
gcagtgacgctgtagtgtcctgaca

SEQ ID NO: 2693361 - DNA, 25 bp, Homo sapien
tcaccaggtccagggcccgtctggc

SEQ ID NO: 2693362 - DNA, 25 bp, Homo sapien
tggtctaggcatcatccatcaccaa

SEQ ID NO: 2693363 - DNA, 25 bp, Homo sapien
gagcttaggcttgggagggtgtctg

SEQ ID NO: 2693364 - DNA, 25 bp, Homo sapien
ggggctggtctaggcatcatccatc

SEQ ID NO: 2693365 - DNA, 25 bp, Homo sapien
caagaagaatcccaaacgtagatct

SEQ ID NO: 2693366 - DNA, 25 bp, Homo sapien
tagaggtcactcaggctatactaaa

SEQ ID NO: 2693367 - DNA, 25 bp, Homo sapien
gagttagctcaggtccaaggactcc

SEQ ID NO: 2693368 - DNA, 25 bp, Homo sapien
cttagtggctggcatataaccaaca

SEQ ID NO: 2693369 - DNA, 25 bp, Homo sapien
ggcacgatggccacaagcttgggtt

SEQ ID NO: 2693370 - DNA, 25 bp, Homo sapien
catcagggaccaagctttgcatttg

SEQ ID NO: 2693371 - DNA, 25 bp, Homo sapien
tcagtgactcctctagtcctgtggg

SEQ ID NO: 2693372 - DNA, 25 bp, Homo sapien
gttgttgcccatgaccatcggagga

SEQ ID NO: 2693373 - DNA, 25 bp, Homo sapien
aaaaggttcttcagactggtgtcca

SEQ ID NO: 2693374 - DNA, 25 bp, Homo sapien
actctgggaacacagtggcgcacag

SEQ ID NO: 2693375 - DNA, 25 bp, Homo sapien
ttcagtgagcacctaggtgggccag

SEQ ID NO: 2693376 - DNA, 25 bp, Homo sapien
gtcccaccagctggccttacattca

SEQ ID NO: 2693377 - DNA, 25 bp, Homo sapien
caggctgctgccgttaggatgcgca

SEQ ID NO: 2693378 - DNA, 25 bp, Homo sapien
gaaccatagcgtgttgctgctttca

SEQ ID NO: 2693379 - DNA, 25 bp, Homo sapien
acatggaggggaaccatagcgtgtt

SEQ ID NO: 2693380 - DNA, 25 bp, Homo sapien
aggggaaccatagcgtgttgctgct

SEQ ID NO: 2693381 - DNA, 25 bp, Homo sapien
agacatggaggggaaccatagcgtg

SEQ ID NO: 2693382 - DNA, 25 bp, Homo sapien
cccccagtcaatgtcagggaagtcc

SEQ ID NO: 2693383 - DNA, 25 bp, Homo sapien
ttcccccagtcaatgtcagggaagt

SEQ ID NO: 2693384 - DNA, 25 bp, Homo sapien
tcccccagtcaatgtcagggaagtc

SEQ ID NO: 2693385 - DNA, 25 bp, Homo sapien
tcacttgctgtacaaccagactcag

SEQ ID NO: 2693386 - DNA, 25 bp, Homo sapien
gggcatagagcacgtacctacctag

SEQ ID NO: 2693387 - DNA, 25 bp, Homo sapien
cccctttctgttggcacatgtgtct

SEQ ID NO: 2693388 - DNA, 25 bp, Homo sapien
catgtgtcttttagacatgactccc

SEQ ID NO: 2693389 - DNA, 25 bp, Homo sapien
gagccaggagaagacgtgctgcggg

SEQ ID NO: 2693390 - DNA, 25 bp, Homo sapien
tgtcactcttgacacagacctcaca

SEQ ID NO: 2693391 - DNA, 25 bp, Homo sapien
aaggagccgaggtgaggtcttccct

SEQ ID NO: 2693392 - DNA, 25 bp, Homo sapien
cactgcctgcacctgagcttttcag

SEQ ID NO: 2693393 - DNA, 25 bp, Homo sapien
tacagccgactacctgcatttgtac

SEQ ID NO: 2693394 - DNA, 25 bp, Homo sapien
ctacagccgactacctgcatttgta

SEQ ID NO: 2693395 - DNA, 25 bp, Homo sapien
tgagataggatctcgctccattgcc

SEQ ID NO: 2693396 - DNA, 25 bp, Homo sapien
ccattgcccagcctccaggctggag

SEQ ID NO: 2693397 - DNA, 25 bp, Homo sapien
ccagactggccttgttctttttgag

SEQ ID NO: 2693398 - DNA, 25 bp, Homo sapien
tgtgttacccagactggccttgttc

SEQ ID NO: 2693399 - DNA, 25 bp, Homo sapien
ggaaaaagcatcttcgagtttctgc

SEQ ID NO: 2693400 - DNA, 25 bp, Homo sapien
aaagcatcttcgagtttctgctgga

SEQ ID NO: 2693401 - DNA, 25 bp, Homo sapien
tccaaatctccgacagtgagggcaa

SEQ ID NO: 2693402 - DNA, 25 bp, Homo sapien
ggatgcttctggcagtaagtccaaa

SEQ ID NO: 2693403 - DNA, 25 bp, Homo sapien
aaatatccatggatgctgggcactg

SEQ ID NO: 2693404 - DNA, 25 bp, Homo sapien
ctaataccttgcccacgacacttgg

SEQ ID NO: 2693405 - DNA, 25 bp, Homo sapien
aataccttgcccacgacacttggca

SEQ ID NO: 2693406 - DNA, 25 bp, Homo sapien
tgtctaataccttgcccacgacact

SEQ ID NO: 2693407 - DNA, 25 bp, Homo sapien
ttcttcccctcaagagctctgcgta

SEQ ID NO: 2693408 - DNA, 25 bp, Homo sapien
tgatgatggcccataagcagcttct

SEQ ID NO: 2693409 - DNA, 25 bp, Homo sapien
gcagagcccagaaggcgatagcgac

SEQ ID NO: 2693410 - DNA, 25 bp, Homo sapien
tctcccctgggatagacagccagag

SEQ ID NO: 2693411 - DNA, 25 bp, Homo sapien
tatgtagagctggaagaaggccgtc

SEQ ID NO: 2693412 - DNA, 25 bp, Homo sapien
gaagcacaatggaaatacccctgaa

SEQ ID NO: 2693413 - DNA, 25 bp, Homo sapien
caattgattgtagcatgggttcctc

SEQ ID NO: 2693414 - DNA, 25 bp, Homo sapien
taatatatgttaagcaggacccggg

SEQ ID NO: 2693415 - DNA, 25 bp, Homo sapien
tagacaatggcgattatggagaacc

SEQ ID NO: 2693416 - DNA, 25 bp, Homo sapien
cagggacgacgacgagtctgatgac

SEQ ID NO: 2693417 - DNA, 25 bp, Homo sapien
cacgacgagtaccaagaaaagtgga

SEQ ID NO: 2693418 - DNA, 25 bp, Homo sapien
gaaccagactatgactggaccacgg

SEQ ID NO: 2693419 - DNA, 25 bp, Homo sapien
ttagtgtagtagaggtccttgaagt

SEQ ID NO: 2693420 - DNA, 25 bp, Homo sapien
tagtgtagtagaggtccttgaagtt

SEQ ID NO: 2693421 - DNA, 25 bp, Homo sapien
tttagtgtagtagaggtccttgaag

SEQ ID NO: 2693422 - DNA, 25 bp, Homo sapien
tgtgaaagcactagaatgacttggt

SEQ ID NO: 2693423 - DNA, 25 bp, Homo sapien
tcaactgtggtacacaaaccagagt

SEQ ID NO: 2693424 - DNA, 25 bp, Homo sapien
gtattcacatgaagaaagggttgtc

SEQ ID NO: 2693425 - DNA, 25 bp, Homo sapien
gttcattctaattgacaccagctat

SEQ ID NO: 2693426 - DNA, 25 bp, Homo sapien
tatagtacccaatcatgcaggcggc

SEQ ID NO: 2693427 - DNA, 25 bp, Homo sapien
cactagggccggtccataatatctt

SEQ ID NO: 2693428 - DNA, 25 bp, Homo sapien
tataatcccatcaccgaaataggac

SEQ ID NO: 2693429 - DNA, 25 bp, Homo sapien
gcagttacttcgctttcgtgatcag

SEQ ID NO: 2693430 - DNA, 25 bp, Homo sapien
gggataacagcaatcttcgcaggga

SEQ ID NO: 2693431 - DNA, 25 bp, Homo sapien
cacaggccctttagagagacagctc

SEQ ID NO: 2693432 - DNA, 25 bp, Homo sapien
gattcaggagtagaacacaggccct

SEQ ID NO: 2693433 - DNA, 25 bp, Homo sapien
ttcgcagggaatcatagagaccaga

SEQ ID NO: 2693434 - DNA, 25 bp, Homo sapien
agtggttgctgggtacatctagtca

SEQ ID NO: 2693435 - DNA, 25 bp, Homo sapien
catctagtcagatgtcaggtacagt

SEQ ID NO: 2693436 - DNA, 25 bp, Homo sapien
gcattttatgcaactgatcacccaa

SEQ ID NO: 2693437 - DNA, 25 bp, Homo sapien
cagactgaagtgcactgtcatcatc

SEQ ID NO: 2693438 - DNA, 25 bp, Homo sapien
tttacaccaaaaggtctgcagggtg

SEQ ID NO: 2693439 - DNA, 25 bp, Homo sapien
taaccctaattgatgagaggctcgc

SEQ ID NO: 2693440 - DNA, 25 bp, Homo sapien
attgtgatttcctgagaatcgaacc

SEQ ID NO: 2693441 - DNA, 25 bp, Homo sapien
gaatgggacttttttagacagatct

SEQ ID NO: 2693442 - DNA, 25 bp, Homo sapien
aaaagttgaccagtgggctcctcag

SEQ ID NO: 2693443 - DNA, 25 bp, Homo sapien
aatttcccgtggtgtagtgtcttcg

SEQ ID NO: 2693444 - DNA, 25 bp, Homo sapien
tccatggagtcctgtggtagccact

SEQ ID NO: 2693445 - DNA, 25 bp, Homo sapien
gatgctcctgaagcactgaagtcca

SEQ ID NO: 2693446 - DNA, 25 bp, Homo sapien
tgggctgaaggtttggcctcggaaa

SEQ ID NO: 2693447 - DNA, 25 bp, Homo sapien
acgcgccggccgagagtcgacttag

SEQ ID NO: 2693448 - DNA, 25 bp, Homo sapien
cttggtcttaggagtgattactggt

SEQ ID NO: 2693449 - DNA, 25 bp, Homo sapien
acttaggcggtagaggccggagctc

SEQ ID NO: 2693450 - DNA, 25 bp, Homo sapien
ccggcccacgcccgcagaagctggc

SEQ ID NO: 2693451 - DNA, 25 bp, Homo sapien
gaagctggcgcccggcaccgcccgc

SEQ ID NO: 2693452 - DNA, 25 bp, Homo sapien
ggcccacgcccgcagaagctggcgc

SEQ ID NO: 2693453 - DNA, 25 bp, Homo sapien
ggcaccgcccgcctgtgccagagcc

SEQ ID NO: 2693454 - DNA, 25 bp, Homo sapien
cgcctcggggatgagctcacgtgac

SEQ ID NO: 2693455 - DNA, 25 bp, Homo sapien
ccggaccaggccagcgggcgggtgc

SEQ ID NO: 2693456 - DNA, 25 bp, Homo sapien
ctggatcccaccagcgtgcatccgg

SEQ ID NO: 2693457 - DNA, 25 bp, Homo sapien
cacgtgacgaccgtggccccgagtc

SEQ ID NO: 2693458 - DNA, 25 bp, Homo sapien
cattgtatccggagcgcggagctcg

SEQ ID NO: 2693459 - DNA, 25 bp, Homo sapien
tctgagattgtctagacgccgcgcg

SEQ ID NO: 2693460 - DNA, 25 bp, Homo sapien
ggccactttgtccacccaggcgagg

SEQ ID NO: 2693461 - DNA, 25 bp, Homo sapien
ggtcggaggcgccagacacattgta

SEQ ID NO: 2693462 - DNA, 25 bp, Homo sapien
tgctagtagctttgctacaggagaa

SEQ ID NO: 2693463 - DNA, 25 bp, Homo sapien
ggagaaaatcgctaatctgtagtgc

SEQ ID NO: 2693464 - DNA, 25 bp, Homo sapien
tcaaatgcatggaaattggctgcta

SEQ ID NO: 2693465 - DNA, 25 bp, Homo sapien
taatctgtagtgcaaaatcggcgca

SEQ ID NO: 2693466 - DNA, 25 bp, Homo sapien
ctttagatagtgtcgcagctggctg

SEQ ID NO: 2693467 - DNA, 25 bp, Homo sapien
agtgtcctgattctgtaacccggca

SEQ ID NO: 2693468 - DNA, 25 bp, Homo sapien
gagaccactcgcttaggcctagcag

SEQ ID NO: 2693469 - DNA, 25 bp, Homo sapien
gaaacctgcttcgagtgggcctcgc

SEQ ID NO: 2693470 - DNA, 25 bp, Homo sapien
cattgcccatgtcagagagaaagtc

SEQ ID NO: 2693471 - DNA, 25 bp, Homo sapien
tcattgcccatgtcagagagaaagt

SEQ ID NO: 2693472 - DNA, 25 bp, Homo sapien
ctgtcattgcccatgtcagagagaa

SEQ ID NO: 2693473 - DNA, 25 bp, Homo sapien
tgtcattgcccatgtcagagagaaa

SEQ ID NO: 2693474 - DNA, 25 bp, Homo sapien
cagtggtttggctggccgcaaggtc

SEQ ID NO: 2693475 - DNA, 25 bp, Homo sapien
agtggtttggctggccgcaaggtcc

SEQ ID NO: 2693476 - DNA, 25 bp, Homo sapien
aatggcttcttccaaggttaatgat

SEQ ID NO: 2693477 - DNA, 25 bp, Homo sapien
acaccaggtggtcatccaggaccac

SEQ ID NO: 2693478 - DNA, 25 bp, Homo sapien
gctggaatggactgcaaatggcttc

SEQ ID NO: 2693479 - DNA, 25 bp, Homo sapien
aaggttaatgatccccacaccaggt

SEQ ID NO: 2693480 - DNA, 25 bp, Homo sapien
gatcttggaggaggcccagcttttg

SEQ ID NO: 2693481 - DNA, 25 bp, Homo sapien
tggatcttggaggaggcccagcttt

SEQ ID NO: 2693482 - DNA, 25 bp, Homo sapien
cttggatcttggaggaggcccagct

SEQ ID NO: 2693483 - DNA, 25 bp, Homo sapien
ttggaggaggcccagcttttggaca

SEQ ID NO: 2693484 - DNA, 25 bp, Homo sapien
agttctggcccttggtcaagcccat

SEQ ID NO: 2693485 - DNA, 25 bp, Homo sapien
cctgagttctggcccttggtcaagc

SEQ ID NO: 2693486 - DNA, 25 bp, Homo sapien
cgcctgagttctggcccttggtcaa

SEQ ID NO: 2693487 - DNA, 25 bp, Homo sapien
tgagttctggcccttggtcaagccc

SEQ ID NO: 2693488 - DNA, 25 bp, Homo sapien
gccaactcagcaaacacagatatgc

SEQ ID NO: 2693489 - DNA, 25 bp, Homo sapien
cagcaaacacagatatgcccagtga

SEQ ID NO: 2693490 - DNA, 25 bp, Homo sapien
acactcgcccaaagccaactcagca

SEQ ID NO: 2693491 - DNA, 25 bp, Homo sapien
aaacacagatatgcccagtgacacc

SEQ ID NO: 2693492 - DNA, 25 bp, Homo sapien
ccttgatggctgggtggagttgggc

SEQ ID NO: 2693493 - DNA, 25 bp, Homo sapien
gatggctgggtggagttgggctcag

SEQ ID NO: 2693494 - DNA, 25 bp, Homo sapien
ggctgggtggagttgggctcagctc

SEQ ID NO: 2693495 - DNA, 25 bp, Homo sapien
tgatggctgggtggagttgggctca

SEQ ID NO: 2693496 - DNA, 25 bp, Homo sapien
ggtgtgggagaggatctctgtggaa

SEQ ID NO: 2693497 - DNA, 25 bp, Homo sapien
cttgttccatgtacttgatgaggcc

SEQ ID NO: 2693498 - DNA, 25 bp, Homo sapien
ttccatgtacttgatgaggccagca

SEQ ID NO: 2693499 - DNA, 25 bp, Homo sapien
tggcttgttccatgtacttgatgag

SEQ ID NO: 2693500 - DNA, 25 bp, Homo sapien
tgtactttgatggtgcagataacgc

SEQ ID NO: 2693501 - DNA, 25 bp, Homo sapien
aaagctgtggttgctttgtcctggc

SEQ ID NO: 2693502 - DNA, 25 bp, Homo sapien
tgtgataaaagctgtggttgctttg

SEQ ID NO: 2693503 - DNA, 25 bp, Homo sapien
agtgtactttgatggtgcagataac

SEQ ID NO: 2693504 - DNA, 25 bp, Homo sapien
tccaactgcagcagattgctggtag

SEQ ID NO: 2693505 - DNA, 25 bp, Homo sapien
gcctttgctgcaggtgtctttggca

SEQ ID NO: 2693506 - DNA, 25 bp, Homo sapien
caaatcacctttatccccatggaag

SEQ ID NO: 2693507 - DNA, 25 bp, Homo sapien
ttgtgcattagcttgaaagaggcct

SEQ ID NO: 2693508 - DNA, 25 bp, Homo sapien
tggaaacaggatgtttgagactgtg

SEQ ID NO: 2693509 - DNA, 25 bp, Homo sapien
cagtgatgtgaagggtcctgacagc

SEQ ID NO: 2693510 - DNA, 25 bp, Homo sapien
tatttgttaatcaatccaacctggg

SEQ ID NO: 2693511 - DNA, 25 bp, Homo sapien
gggtcctgacagcactaatgctgat

SEQ ID NO: 2693512 - DNA, 25 bp, Homo sapien
aacctccgagctcggatcgcggcgg

SEQ ID NO: 2693513 - DNA, 25 bp, Homo sapien
ggctgcaggcgcgggctagggcgcg

SEQ ID NO: 2693514 - DNA, 25 bp, Homo sapien
ggagtccgaacctccgagctcggat

SEQ ID NO: 2693515 - DNA, 25 bp, Homo sapien
gcggcgagcccggagtccgaacctc

SEQ ID NO: 2693516 - DNA, 25 bp, Homo sapien
ccagcagctcgtccggcgcgccgag

SEQ ID NO: 2693517 - DNA, 25 bp, Homo sapien
agcagctcgtccggcgcgccgaggt

SEQ ID NO: 2693518 - DNA, 25 bp, Homo sapien
gccagcagctcgtccggcgcgccga

SEQ ID NO: 2693519 - DNA, 25 bp, Homo sapien
cagcagctcgtccggcgcgccgagg

SEQ ID NO: 2693520 - DNA, 25 bp, Homo sapien
gctcggccaggtcgcgctcgggacc

SEQ ID NO: 2693521 - DNA, 25 bp, Homo sapien
gccaggtcgcgctcgggaccggcgg

SEQ ID NO: 2693522 - DNA, 25 bp, Homo sapien
tcttgtcgtcctgctcctcgccttc

SEQ ID NO: 2693523 - DNA, 25 bp, Homo sapien
cggcggcgctgtcgcggctcttgtc

SEQ ID NO: 2693524 - DNA, 25 bp, Homo sapien
tccctgcgccgccggccgcgccctc

SEQ ID NO: 2693525 - DNA, 25 bp, Homo sapien
cccgggatccctgcgccgccggccg

SEQ ID NO: 2693526 - DNA, 25 bp, Homo sapien
tgcgccgccggccgcgccctcggac

SEQ ID NO: 2693527 - DNA, 25 bp, Homo sapien
cctgcgccgccggccgcgccctcgg

SEQ ID NO: 2693528 - DNA, 25 bp, Homo sapien
aagtttgtccgggaagagtctctgc

SEQ ID NO: 2693529 - DNA, 25 bp, Homo sapien
gtttgtccgggaagagtctctgcgc

SEQ ID NO: 2693530 - DNA, 25 bp, Homo sapien
agagtctctgcgcagcgtgttcccg

SEQ ID NO: 2693531 - DNA, 25 bp, Homo sapien
tccgggaagagtctctgcgcagcgt

SEQ ID NO: 2693532 - DNA, 25 bp, Homo sapien
tctgtctcctgaaggcggcggatta

SEQ ID NO: 2693533 - DNA, 25 bp, Homo sapien
ctgaaggcggcggattagtcagtca

SEQ ID NO: 2693534 - DNA, 25 bp, Homo sapien
aggcggcggattagtcagtcacctg

SEQ ID NO: 2693535 - DNA, 25 bp, Homo sapien
ctgtctcctgaaggcggcggattag

SEQ ID NO: 2693536 - DNA, 25 bp, Homo sapien
aacgggctgggagtatcggcagtgc

SEQ ID NO: 2693537 - DNA, 25 bp, Homo sapien
agtatcggcagtgccaagttttagg

SEQ ID NO: 2693538 - DNA, 25 bp, Homo sapien
ggaacgggctgggagtatcggcagt

SEQ ID NO: 2693539 - DNA, 25 bp, Homo sapien
gaaggaacgggctgggagtatcggc

SEQ ID NO: 2693540 - DNA, 25 bp, Homo sapien
tggaaaaaccacagctgggtcagac

SEQ ID NO: 2693541 - DNA, 25 bp, Homo sapien
agctgggtcagacacaccagccctg

SEQ ID NO: 2693542 - DNA, 25 bp, Homo sapien
ctggcagcggctgggactgaaggct

SEQ ID NO: 2693543 - DNA, 25 bp, Homo sapien
cggctgggactgaaggctgtctgct

SEQ ID NO: 2693544 - DNA, 25 bp, Homo sapien
ctggtgcactccggggccttcaggc

SEQ ID NO: 2693545 - DNA, 25 bp, Homo sapien
cgctggtgcactccggggccttcag

SEQ ID NO: 2693546 - DNA, 25 bp, Homo sapien
gccgctggtgcactccggggccttc

SEQ ID NO: 2693547 - DNA, 25 bp, Homo sapien
ccgctggtgcactccggggccttca

SEQ ID NO: 2693548 - DNA, 25 bp, Homo sapien
cggagtagacggtctctttgtacat

SEQ ID NO: 2693549 - DNA, 25 bp, Homo sapien
aaggcggagtagacggtctctttgt

SEQ ID NO: 2693550 - DNA, 25 bp, Homo sapien
catgagcagattgaaggcggagtag

SEQ ID NO: 2693551 - DNA, 25 bp, Homo sapien
attgaaggcggagtagacggtctct

SEQ ID NO: 2693552 - DNA, 25 bp, Homo sapien
tgcaagcacagggcggcactggctg

SEQ ID NO: 2693553 - DNA, 25 bp, Homo sapien
caagggtggtctcggctcaaaagtt

SEQ ID NO: 2693554 - DNA, 25 bp, Homo sapien
agttctctaagaagaccccaccctg

SEQ ID NO: 2693555 - DNA, 25 bp, Homo sapien
tggtctcggctcaaaagttctctaa

SEQ ID NO: 2693556 - DNA, 25 bp, Homo sapien
gagcaagggtggtctcggctcaaaa

SEQ ID NO: 2693557 - DNA, 25 bp, Homo sapien
caaaacactcagaataggctcttca

SEQ ID NO: 2693558 - DNA, 25 bp, Homo sapien
aataggctcttcacactttaggtca

SEQ ID NO: 2693559 - DNA, 25 bp, Homo sapien
tgaggagagtgtgaaacacgaatag

SEQ ID NO: 2693560 - DNA, 25 bp, Homo sapien
taaaagcgcagctgtactgctccaa

SEQ ID NO: 2693561 - DNA, 25 bp, Homo sapien
cacagtcctccaaaccttccacgta

SEQ ID NO: 2693562 - DNA, 25 bp, Homo sapien
tagagcctactcttgacccatgtgg

SEQ ID NO: 2693563 - DNA, 25 bp, Homo sapien
tgaaaaataaatgacccaggccagt

SEQ ID NO: 2693564 - DNA, 25 bp, Homo sapien
tgtggcccaaaggacaccaaatggt

SEQ ID NO: 2693565 - DNA, 25 bp, Homo sapien
tgttgaccacataggtgccctcaga

SEQ ID NO: 2693566 - DNA, 25 bp, Homo sapien
cttgggaagtgcttgacacatgaac

SEQ ID NO: 2693567 - DNA, 25 bp, Homo sapien
ctggcataggcctggcacttgggaa

SEQ ID NO: 2693568 - DNA, 25 bp, Homo sapien
ttgatatgagtaaaagcccctggca

SEQ ID NO: 2693569 - DNA, 25 bp, Homo sapien
gcactgtgccctaccgacttgtaca

SEQ ID NO: 2693570 - DNA, 25 bp, Homo sapien
gctgcccgagccctcacacccagtg

SEQ ID NO: 2693571 - DNA, 25 bp, Homo sapien
cacacccagtgtgagcagagggagg

SEQ ID NO: 2693572 - DNA, 25 bp, Homo sapien
gaggaggctgggcagtgccaactgc

SEQ ID NO: 2693573 - DNA, 25 bp, Homo sapien
ggaggctgggcagtgccaactgcat

SEQ ID NO: 2693574 - DNA, 25 bp, Homo sapien
aggctgttgccacagttgcacagag

SEQ ID NO: 2693575 - DNA, 25 bp, Homo sapien
gcacagagctctgctaggtgcgtgt

SEQ ID NO: 2693576 - DNA, 25 bp, Homo sapien
tctgctaggtgcgtgtggccagtcc

SEQ ID NO: 2693577 - DNA, 25 bp, Homo sapien
ctaggtgcgtgtggccagtccaccc

SEQ ID NO: 2693578 - DNA, 25 bp, Homo sapien
tgccttccctctgcaatgttccata

SEQ ID NO: 2693579 - DNA, 25 bp, Homo sapien
ctgggccagtctggcccactctcat

SEQ ID NO: 2693580 - DNA, 25 bp, Homo sapien
atgttccatacttcctcctgctctg

SEQ ID NO: 2693581 - DNA, 25 bp, Homo sapien
tgcaatgttccatacttcctcctgc

SEQ ID NO: 2693582 - DNA, 25 bp, Homo sapien
tgctcgcaggctgtgtgcacgctga

SEQ ID NO: 2693583 - DNA, 25 bp, Homo sapien
aaactccctcgcctctgacggttga

SEQ ID NO: 2693584 - DNA, 25 bp, Homo sapien
ctttcccagcgaagaaagttgctgt

SEQ ID NO: 2693585 - DNA, 25 bp, Homo sapien
gcattttccctgtagaccgcagcgg

SEQ ID NO: 2693586 - DNA, 25 bp, Homo sapien
tttgcgcccggtggtaggagccagg

SEQ ID NO: 2693587 - DNA, 25 bp, Homo sapien
catgcaggctgcctcttagcctcaa

SEQ ID NO: 2693588 - DNA, 25 bp, Homo sapien
ccagtggaacgtcccactccagggc

SEQ ID NO: 2693589 - DNA, 25 bp, Homo sapien
caggggaaaccgtctagcacagggc

SEQ ID NO: 2693590 - DNA, 25 bp, Homo sapien
gccttacataacagggcttcacagg

SEQ ID NO: 2693591 - DNA, 25 bp, Homo sapien
gacaggggctgatgtccctataggt

SEQ ID NO: 2693592 - DNA, 25 bp, Homo sapien
cgggaggagccttacataacagggc

SEQ ID NO: 2693593 - DNA, 25 bp, Homo sapien
ggcagacaggggctgatgtccctat

SEQ ID NO: 2693594 - DNA, 25 bp, Homo sapien
ggtgaatttagccagactccttaag

SEQ ID NO: 2693595 - DNA, 25 bp, Homo sapien
cttggttattggaagcccagggcaa

SEQ ID NO: 2693596 - DNA, 25 bp, Homo sapien
gaaaagcccgtttgcaaggatgctg

SEQ ID NO: 2693597 - DNA, 25 bp, Homo sapien
tctgtgagtgcaattcctgactggg

SEQ ID NO: 2693598 - DNA, 25 bp, Homo sapien
agaaggagggtgggtgagtgtggcg

SEQ ID NO: 2693599 - DNA, 25 bp, Homo sapien
ggagggtgggtgagtgtggcgagtc

SEQ ID NO: 2693600 - DNA, 25 bp, Homo sapien
ctgaaaaatgagaaggagggtgggt

SEQ ID NO: 2693601 - DNA, 25 bp, Homo sapien
aaggagggtgggtgagtgtggcgag

SEQ ID NO: 2693602 - DNA, 25 bp, Homo sapien
ttctggctgatgtccgcaggtgcag

SEQ ID NO: 2693603 - DNA, 25 bp, Homo sapien
tgggctgttgaaatgttcgtagaga

SEQ ID NO: 2693604 - DNA, 25 bp, Homo sapien
cttgcttctggctgatgtccgcagg

SEQ ID NO: 2693605 - DNA, 25 bp, Homo sapien
tgaaatgttcgtagagagagagttg

SEQ ID NO: 2693606 - DNA, 25 bp, Homo sapien
agctgccccatgctgcctgaggtca

SEQ ID NO: 2693607 - DNA, 25 bp, Homo sapien
ggagtagaagccagagaggtcaggg

SEQ ID NO: 2693608 - DNA, 25 bp, Homo sapien
agctcacagtgtgggggagctgccc

SEQ ID NO: 2693609 - DNA, 25 bp, Homo sapien
aggtcagggagtagaagccagagag

SEQ ID NO: 2693610 - DNA, 25 bp, Homo sapien
tcagttactcatatggccctggagg

SEQ ID NO: 2693611 - DNA, 25 bp, Homo sapien
caggttaggacagagttgctggcca

SEQ ID NO: 2693612 - DNA, 25 bp, Homo sapien
ggtacatgaggacccctagctcaga

SEQ ID NO: 2693613 - DNA, 25 bp, Homo sapien
catagtcaggcctactggcttaggg

SEQ ID NO: 2693614 - DNA, 25 bp, Homo sapien
cagggaagtgctgtctatatccgca

SEQ ID NO: 2693615 - DNA, 25 bp, Homo sapien
ggcagggaagtgctgtctatatccg

SEQ ID NO: 2693616 - DNA, 25 bp, Homo sapien
gtgctgtctatatccgcaggaaggg

SEQ ID NO: 2693617 - DNA, 25 bp, Homo sapien
gaagtgctgtctatatccgcaggaa

SEQ ID NO: 2693618 - DNA, 25 bp, Homo sapien
gagtaaccattagagacacctgaat

SEQ ID NO: 2693619 - DNA, 25 bp, Homo sapien
tccaaagaatagaacccaggctgct

SEQ ID NO: 2693620 - DNA, 25 bp, Homo sapien
taacactgagccaagaattatgggc

SEQ ID NO: 2693621 - DNA, 25 bp, Homo sapien
cagatggttactacataggtcccaa

SEQ ID NO: 2693622 - DNA, 25 bp, Homo sapien
accagaacctagcatcaaggatggg

SEQ ID NO: 2693623 - DNA, 25 bp, Homo sapien
caggtacaccagaacctagcatcaa

SEQ ID NO: 2693624 - DNA, 25 bp, Homo sapien
tacaccagaacctagcatcaaggat

SEQ ID NO: 2693625 - DNA, 25 bp, Homo sapien
gaccaggtacaccagaacctagcat

SEQ ID NO: 2693626 - DNA, 25 bp, Homo sapien
ttgatggcagcgctctccttaagtg

SEQ ID NO: 2693627 - DNA, 25 bp, Homo sapien
cagcgctctccttaagtgtgcactc

SEQ ID NO: 2693628 - DNA, 25 bp, Homo sapien
tggttgatggcagcgctctccttaa

SEQ ID NO: 2693629 - DNA, 25 bp, Homo sapien
gatctggttgatggcagcgctctcc

SEQ ID NO: 2693630 - DNA, 25 bp, Homo sapien
aggtggggtgcatcagggagtcagc

SEQ ID NO: 2693631 - DNA, 25 bp, Homo sapien
atggtcggggagcatccctgccagc

SEQ ID NO: 2693632 - DNA, 25 bp, Homo sapien
agggagtcagcaggctgcaccaggc

SEQ ID NO: 2693633 - DNA, 25 bp, Homo sapien
ggctgaagatggtcggggagcatcc

SEQ ID NO: 2693634 - DNA, 25 bp, Homo sapien
agttgtcccgcgctgaccagcctgg

SEQ ID NO: 2693635 - DNA, 25 bp, Homo sapien
gcctgggtatagctgcatgtgcagc

SEQ ID NO: 2693636 - DNA, 25 bp, Homo sapien
gctcttctcgcgacagcgcgtgcca

SEQ ID NO: 2693637 - DNA, 25 bp, Homo sapien
gctcatagtacttggcctgctcttc

SEQ ID NO: 2693638 - DNA, 25 bp, Homo sapien
tcatcggtgccttcaggacagtagt

SEQ ID NO: 2693639 - DNA, 25 bp, Homo sapien
tgcgttccttactgagattgtggcc

SEQ ID NO: 2693640 - DNA, 25 bp, Homo sapien
gcatggtatctcaaagggtcccctg

SEQ ID NO: 2693641 - DNA, 25 bp, Homo sapien
caatcaaatgttgggtaacagctca

SEQ ID NO: 2693642 - DNA, 25 bp, Homo sapien
cttggtgcttttccctcgaccgcct

SEQ ID NO: 2693643 - DNA, 25 bp, Homo sapien
tggtgcttttccctcgaccgcctct

SEQ ID NO: 2693644 - DNA, 25 bp, Homo sapien
tgcttttccctcgaccgcctcttct

SEQ ID NO: 2693645 - DNA, 25 bp, Homo sapien
tcttggtgcttttccctcgaccgcc

SEQ ID NO: 2693646 - DNA, 25 bp, Homo sapien
caggacattgtttgggctaagcatc

SEQ ID NO: 2693647 - DNA, 25 bp, Homo sapien
cacccaggtacgcagtagaggcagt

SEQ ID NO: 2693648 - DNA, 25 bp, Homo sapien
ttggaaaaagggctaggaactctgc

SEQ ID NO: 2693649 - DNA, 25 bp, Homo sapien
gaatttgacttgtgagatgcaggcc

SEQ ID NO: 2693650 - DNA, 25 bp, Homo sapien
cggcatttcttaggcgagccagggt

SEQ ID NO: 2693651 - DNA, 25 bp, Homo sapien
tgcacggaccacaccaatccgtctg

SEQ ID NO: 2693652 - DNA, 25 bp, Homo sapien
gaggccaaagcgagcacggcatttc

SEQ ID NO: 2693653 - DNA, 25 bp, Homo sapien
cacaccaatccgtctgctggttgag

SEQ ID NO: 2693654 - DNA, 25 bp, Homo sapien
tcaggatggtacaggcagggatccc

SEQ ID NO: 2693655 - DNA, 25 bp, Homo sapien
caatctgctgagtatgctagtgggc

SEQ ID NO: 2693656 - DNA, 25 bp, Homo sapien
tatttactactattctcaggaggcc

SEQ ID NO: 2693657 - DNA, 25 bp, Homo sapien
cataatgactttgaggcctggtaga

SEQ ID NO: 2693658 - DNA, 25 bp, Homo sapien
caagtgttccttagagccagtggcc

SEQ ID NO: 2693659 - DNA, 25 bp, Homo sapien
tggagtaccctctatcttagccctg

SEQ ID NO: 2693660 - DNA, 25 bp, Homo sapien
ggaatagaacttcccctgaagacag

SEQ ID NO: 2693661 - DNA, 25 bp, Homo sapien
cagccctttggtatcagtaggtaca

SEQ ID NO: 2693662 - DNA, 25 bp, Homo sapien
ggacagtgactcttgtccattacca

SEQ ID NO: 2693663 - DNA, 25 bp, Homo sapien
atggacagtgactcttgtccattac

SEQ ID NO: 2693664 - DNA, 25 bp, Homo sapien
acagtgactcttgtccattaccatc

SEQ ID NO: 2693665 - DNA, 25 bp, Homo sapien
gacagtgactcttgtccattaccat

SEQ ID NO: 2693666 - DNA, 25 bp, Homo sapien
tcttccaagggagtcatctctcctg

SEQ ID NO: 2693667 - DNA, 25 bp, Homo sapien
ggacttgggtggtaagtcagtgtcc

SEQ ID NO: 2693668 - DNA, 25 bp, Homo sapien
tggtctggcccagacctaggacagg

SEQ ID NO: 2693669 - DNA, 25 bp, Homo sapien
taggcctatgggctgtcatctgtct

SEQ ID NO: 2693670 - DNA, 25 bp, Homo sapien
atagtcatacaccacaaccaaaaaa

SEQ ID NO: 2693671 - DNA, 25 bp, Homo sapien
tgtaaacagagggtgaattcatagt

SEQ ID NO: 2693672 - DNA, 25 bp, Homo sapien
catagtcatacaccacaaccaaaaa

SEQ ID NO: 2693673 - DNA, 25 bp, Homo sapien
agagcactgtcatcggaaggaacgg

SEQ ID NO: 2693674 - DNA, 25 bp, Homo sapien
ctagagcactgtcatcggaaggaac

SEQ ID NO: 2693675 - DNA, 25 bp, Homo sapien
gcagcggccttctccgggtaagtac

SEQ ID NO: 2693676 - DNA, 25 bp, Homo sapien
ctggggcagcggccttctccgggta

SEQ ID NO: 2693677 - DNA, 25 bp, Homo sapien
agcagatggtatgagggtgagtcct

SEQ ID NO: 2693678 - DNA, 25 bp, Homo sapien
gcagatggtatgagggtgagtcctg

SEQ ID NO: 2693679 - DNA, 25 bp, Homo sapien
cagcagatggtatgagggtgagtcc

SEQ ID NO: 2693680 - DNA, 25 bp, Homo sapien
gcagcagatggtatgagggtgagtc

SEQ ID NO: 2693681 - DNA, 25 bp, Homo sapien
cctggggatgtaggtgccggctccg

SEQ ID NO: 2693682 - DNA, 25 bp, Homo sapien
tgccggctccgcagggctagtaagc

SEQ ID NO: 2693683 - DNA, 25 bp, Homo sapien
tgtaggtgccggctccgcagggcta

SEQ ID NO: 2693684 - DNA, 25 bp, Homo sapien
ggctccgcagggctagtaagcagtt

SEQ ID NO: 2693685 - DNA, 25 bp, Homo sapien
ctgtctctgagattcctgttgctgt

SEQ ID NO: 2693686 - DNA, 25 bp, Homo sapien
tgtctctgagattcctgttgctgta

SEQ ID NO: 2693687 - DNA, 25 bp, Homo sapien
gtctctgagattcctgttgctgtac

SEQ ID NO: 2693688 - DNA, 25 bp, Homo sapien
gttgtaatggtcctctgtcccgcag

SEQ ID NO: 2693689 - DNA, 25 bp, Homo sapien
tgagatgacgttaacaggacccctg

SEQ ID NO: 2693690 - DNA, 25 bp, Homo sapien
gctggactgccatagatgaactgga

SEQ ID NO: 2693691 - DNA, 25 bp, Homo sapien
cagtttgaatcgatgaccccaggtt

SEQ ID NO: 2693692 - DNA, 25 bp, Homo sapien
ttttctgagaaacggatgcaggaac

SEQ ID NO: 2693693 - DNA, 25 bp, Homo sapien
tgagaaacggatgcaggaactgatt

SEQ ID NO: 2693694 - DNA, 25 bp, Homo sapien
gagaaacggatgcaggaactgattc

SEQ ID NO: 2693695 - DNA, 25 bp, Homo sapien
tctgagaaacggatgcaggaactga

SEQ ID NO: 2693696 - DNA, 25 bp, Homo sapien
tagcagcctcttattgcacactgag

SEQ ID NO: 2693697 - DNA, 25 bp, Homo sapien
tccacatctgtagttcttgcgacct

SEQ ID NO: 2693698 - DNA, 25 bp, Homo sapien
tgcgaccttctgatatctgtcaact

SEQ ID NO: 2693699 - DNA, 25 bp, Homo sapien
tcaaattttcaacctgctatatagc

SEQ ID NO: 2693700 - DNA, 25 bp, Homo sapien
ccgaaaagtgttgtcgaaggtgctc

SEQ ID NO: 2693701 - DNA, 25 bp, Homo sapien
gacacacttccaatgcgggacatag

SEQ ID NO: 2693702 - DNA, 25 bp, Homo sapien
tgagccatttggacacctaagcagg

SEQ ID NO: 2693703 - DNA, 25 bp, Homo sapien
gagatgatcattagtggtggccgaa

SEQ ID NO: 2693704 - DNA, 25 bp, Homo sapien
atcagacccacattaggcagggcaa

SEQ ID NO: 2693705 - DNA, 25 bp, Homo sapien
cagggcaatttttgagtgagctaaa

SEQ ID NO: 2693706 - DNA, 25 bp, Homo sapien
ggcagggcaatttttgagtgagcta

SEQ ID NO: 2693707 - DNA, 25 bp, Homo sapien
cattaggcagggcaatttttgagtg

SEQ ID NO: 2693708 - DNA, 25 bp, Homo sapien
taaatatattgcctagagactcagt

SEQ ID NO: 2693709 - DNA, 25 bp, Homo sapien
gactcagttactacccagtttgtgg

SEQ ID NO: 2693710 - DNA, 25 bp, Homo sapien
aaagacacttaacccatgtgggatg

SEQ ID NO: 2693711 - DNA, 25 bp, Homo sapien
cattgcatctgaggacttgttttct

SEQ ID NO: 2693712 - DNA, 25 bp, Homo sapien
ccctgaccttgtgatacgtctgcct

SEQ ID NO: 2693713 - DNA, 25 bp, Homo sapien
gaacccctgaccttgtgatacgtct

SEQ ID NO: 2693714 - DNA, 25 bp, Homo sapien
tgaccttgtgatacgtctgcctctg

SEQ ID NO: 2693715 - DNA, 25 bp, Homo sapien
gaccttgtgatacgtctgcctctgc

SEQ ID NO: 2693716 - DNA, 25 bp, Homo sapien
tctggtttctactgtgcccacagat

SEQ ID NO: 2693717 - DNA, 25 bp, Homo sapien
ccacagatgtctgcattcgtgccat

SEQ ID NO: 2693718 - DNA, 25 bp, Homo sapien
ctgtgcccacagatgtctgcattcg

SEQ ID NO: 2693719 - DNA, 25 bp, Homo sapien
tctctggtttctactgtgcccacag

SEQ ID NO: 2693720 - DNA, 25 bp, Homo sapien
ttctctcaccgcagattcgttattg

SEQ ID NO: 2693721 - DNA, 25 bp, Homo sapien
gctgtttaatattccattaagtgaa

SEQ ID NO: 2693722 - DNA, 25 bp, Homo sapien
caatattcttgggtttagcttcttt

SEQ ID NO: 2693723 - DNA, 25 bp, Homo sapien
catccacattgtgtatatcagtagg

SEQ ID NO: 2693724 - DNA, 25 bp, Homo sapien
caaggcttcttaagtctcaaggcaa

SEQ ID NO: 2693725 - DNA, 25 bp, Homo sapien
ggtttgtgctacatgctctcgtttg

SEQ ID NO: 2693726 - DNA, 25 bp, Homo sapien
catgctctcgtttgtgaggactcca

SEQ ID NO: 2693727 - DNA, 25 bp, Homo sapien
ctccaaggcttcttaagtctcaagg

SEQ ID NO: 2693728 - DNA, 25 bp, Homo sapien
caatgggcaagactggtgctgttta

SEQ ID NO: 2693729 - DNA, 25 bp, Homo sapien
ttgtgaactaagaactgagaaggtc

SEQ ID NO: 2693730 - DNA, 25 bp, Homo sapien
caagggcactacataacctctctgg

SEQ ID NO: 2693731 - DNA, 25 bp, Homo sapien
ccttcctgtaagacgatgtgactgc

SEQ ID NO: 2693732 - DNA, 25 bp, Homo sapien
catgctgaagcgacattgttggtca

SEQ ID NO: 2693733 - DNA, 25 bp, Homo sapien
tagctttactcagcatgactgtaga

SEQ ID NO: 2693734 - DNA, 25 bp, Homo sapien
gatagcagcaaacaatcattggagc

SEQ ID NO: 2693735 - DNA, 25 bp, Homo sapien
ggcatagcgctatttgtagttactt

SEQ ID NO: 2693736 - DNA, 25 bp, Homo sapien
gcctcttgtcatcaacagccgtgac

SEQ ID NO: 2693737 - DNA, 25 bp, Homo sapien
gaccaaaagatgtgccatataaaaa

SEQ ID NO: 2693738 - DNA, 25 bp, Homo sapien
cagtaactccaaagtgtcagaaaat

SEQ ID NO: 2693739 - DNA, 25 bp, Homo sapien
ttcacatggaccaaaagatgtgcca

SEQ ID NO: 2693740 - DNA, 25 bp, Homo sapien
catggaggtcgtggaacataaacca

SEQ ID NO: 2693741 - DNA, 25 bp, Homo sapien
tcttgattgtcactacatggaggtc

SEQ ID NO: 2693742 - DNA, 25 bp, Homo sapien
tcgtagaggcgagccacatgttact

SEQ ID NO: 2693743 - DNA, 25 bp, Homo sapien
agtttgacccagcacctcgtagagg

SEQ ID NO: 2693744 - DNA, 25 bp, Homo sapien
tatctagatttgtgtaagaccactc

SEQ ID NO: 2693745 - DNA, 25 bp, Homo sapien
gaaagacaagtagtcatgcaccaca

SEQ ID NO: 2693746 - DNA, 25 bp, Homo sapien
gacatagggctttaaggatctttcc

SEQ ID NO: 2693747 - DNA, 25 bp, Homo sapien
tatccctgcgattaagcaacacatg

SEQ ID NO: 2693748 - DNA, 25 bp, Homo sapien
ctgcctcccgcgcagggattggttg

SEQ ID NO: 2693749 - DNA, 25 bp, Homo sapien
gccgcctaaaatggcgccgttcact

SEQ ID NO: 2693750 - DNA, 25 bp, Homo sapien
tcccgcgcagggattggttgccgcc

SEQ ID NO: 2693751 - DNA, 25 bp, Homo sapien
cgccgccgcctaaaatggcgccgtt

SEQ ID NO: 2693752 - DNA, 25 bp, Homo sapien
agccgccagaagtacacgaggaacc

SEQ ID NO: 2693753 - DNA, 25 bp, Homo sapien
ggcatcatggacgagaaggtgttca

SEQ ID NO: 2693754 - DNA, 25 bp, Homo sapien
ccgagtactgcggtgagagccagcg

SEQ ID NO: 2693755 - DNA, 25 bp, Homo sapien
cgtgtgcgtgtaggcccgtgtgcgg

SEQ ID NO: 2693756 - DNA, 25 bp, Homo sapien
tctcacacaggttcatggcaacggt

SEQ ID NO: 2693757 - DNA, 25 bp, Homo sapien
gacggaaacccacacgattacagag

SEQ ID NO: 2693758 - DNA, 25 bp, Homo sapien
gctgagttcatcaccagagcggcct

SEQ ID NO: 2693759 - DNA, 25 bp, Homo sapien
caatcctagggtatacgagctctct

SEQ ID NO: 2693760 - DNA, 25 bp, Homo sapien
acctcagtgttactggtaatgtcat

SEQ ID NO: 2693761 - DNA, 25 bp, Homo sapien
tggaacctcagtgttactggtaatg

SEQ ID NO: 2693762 - DNA, 25 bp, Homo sapien
gaacctcagtgttactggtaatgtc

SEQ ID NO: 2693763 - DNA, 25 bp, Homo sapien
ctggaacctcagtgttactggtaat

SEQ ID NO: 2693764 - DNA, 25 bp, Homo sapien
gtgcaacacatgtgcatctctcagg

SEQ ID NO: 2693765 - DNA, 25 bp, Homo sapien
ccttcatgtcatcaggtatcaactt

SEQ ID NO: 2693766 - DNA, 25 bp, Homo sapien
atcctgcagcgatagggcagagccc

SEQ ID NO: 2693767 - DNA, 25 bp, Homo sapien
catgtcatcaggtatcaacttcagc

SEQ ID NO: 2693768 - DNA, 25 bp, Homo sapien
tagcaactgctttcttgattgaatg

SEQ ID NO: 2693769 - DNA, 25 bp, Homo sapien
tgattgaatggtacagatcatcagg

SEQ ID NO: 2693770 - DNA, 25 bp, Homo sapien
tcttgattgaatggtacagatcatc

SEQ ID NO: 2693771 - DNA, 25 bp, Homo sapien
ttgaatggtacagatcatcagggag

SEQ ID NO: 2693772 - DNA, 25 bp, Homo sapien
ttttccctacctgtaacaagagtca

SEQ ID NO: 2693773 - DNA, 25 bp, Homo sapien
gaggaattctaatcgctctggaggt

SEQ ID NO: 2693774 - DNA, 25 bp, Homo sapien
tatgacttactttcaagggaggtgg

SEQ ID NO: 2693775 - DNA, 25 bp, Homo sapien
ctaatggtaataaacccagcaaggc

SEQ ID NO: 2693776 - DNA, 25 bp, Homo sapien
tatttgacaggaacatgacaggaag

SEQ ID NO: 2693777 - DNA, 25 bp, Homo sapien
tgtagggaccccatgcttgatggat

SEQ ID NO: 2693778 - DNA, 25 bp, Homo sapien
caggagtacccctaagttctggtga

SEQ ID NO: 2693779 - DNA, 25 bp, Homo sapien
ggcatgaccgagacagcaggagtac

SEQ ID NO: 2693780 - DNA, 25 bp, Homo sapien
cagactagaggttgtggattcaaag

SEQ ID NO: 2693781 - DNA, 25 bp, Homo sapien
ccgtcactagtttaggctcggcggg

SEQ ID NO: 2693782 - DNA, 25 bp, Homo sapien
ctccgccgctaccacagtgtgagtg

SEQ ID NO: 2693783 - DNA, 25 bp, Homo sapien
gacaaacaaccctgcaatgacgtct

SEQ ID NO: 2693784 - DNA, 25 bp, Homo sapien
ccggcgcggcggccgaatcactgtg

SEQ ID NO: 2693785 - DNA, 25 bp, Homo sapien
gaatcactgtggatcgccgccgccg

SEQ ID NO: 2693786 - DNA, 25 bp, Homo sapien
ggccgaatcactgtggatcgccgcc

SEQ ID NO: 2693787 - DNA, 25 bp, Homo sapien
cgcggcggccgaatcactgtggatc

SEQ ID NO: 2693788 - DNA, 25 bp, Homo sapien
gctccgcagctgccccgcggtcagt

SEQ ID NO: 2693789 - DNA, 25 bp, Homo sapien
cccgcatgagcctcctccgggccgg

SEQ ID NO: 2693790 - DNA, 25 bp, Homo sapien
tgagcctcctccgggccggggtcga

SEQ ID NO: 2693791 - DNA, 25 bp, Homo sapien
ccgcatgagcctcctccgggccggg

SEQ ID NO: 2693792 - DNA, 25 bp, Homo sapien
gcatgagcctcctccgggccggggt

SEQ ID NO: 2693793 - DNA, 25 bp, Homo sapien
gttgaacattaaggccactaaggag

SEQ ID NO: 2693794 - DNA, 25 bp, Homo sapien
cactaaggaggccacgtaaacacct

SEQ ID NO: 2693795 - DNA, 25 bp, Homo sapien
tcaagaattgatgcataggaacact

SEQ ID NO: 2693796 - DNA, 25 bp, Homo sapien
attgaaagggcttgagaatcatccc

SEQ ID NO: 2693797 - DNA, 25 bp, Homo sapien
tgttttcagatggtgcgccactgac

SEQ ID NO: 2693798 - DNA, 25 bp, Homo sapien
gcgccactgacacccacaggtgggt

SEQ ID NO: 2693799 - DNA, 25 bp, Homo sapien
gttgttttcagatggtgcgccactg

SEQ ID NO: 2693800 - DNA, 25 bp, Homo sapien
ttttcagatggtgcgccactgacac

SEQ ID NO: 2693801 - DNA, 25 bp, Homo sapien
ccaaatataactgcattccactgca

SEQ ID NO: 2693802 - DNA, 25 bp, Homo sapien
caaatataactgcattccactgcat

SEQ ID NO: 2693803 - DNA, 25 bp, Homo sapien
gcgatcctcccaggcgttgagctac

SEQ ID NO: 2693804 - DNA, 25 bp, Homo sapien
tgtgctgggccaaaactctaattga

SEQ ID NO: 2693805 - DNA, 25 bp, Homo sapien
tatcttgcagttttagtccttaaga

SEQ ID NO: 2693806 - DNA, 25 bp, Homo sapien
ttatataactgctgaaactttttcc

SEQ ID NO: 2693807 - DNA, 25 bp, Homo sapien
tgtagactcttgtagctgattctgt

SEQ ID NO: 2693808 - DNA, 25 bp, Homo sapien
aatatcctgaaggtgccatgtattc

SEQ ID NO: 2693809 - DNA, 25 bp, Homo sapien
cttgcaaggcatattcaggatctca

SEQ ID NO: 2693810 - DNA, 25 bp, Homo sapien
gccaggatggagcataaagtttaat

SEQ ID NO: 2693811 - DNA, 25 bp, Homo sapien
gtgctggctatacaggtgtgagcta

SEQ ID NO: 2693812 - DNA, 25 bp, Homo sapien
tttgtagagaagggctcccccaggc

SEQ ID NO: 2693813 - DNA, 25 bp, Homo sapien
tcaagtgatccatgatccacctgcc

SEQ ID NO: 2693814 - DNA, 25 bp, Homo sapien
gctcaagtgatccatgatccacctg

SEQ ID NO: 2693815 - DNA, 25 bp, Homo sapien
tgagccaagattgcgcctctgcact

SEQ ID NO: 2693816 - DNA, 25 bp, Homo sapien
tgaacctcggaggcggaggcttcag

SEQ ID NO: 2693817 - DNA, 25 bp, Homo sapien
ttgaacctcggaggcggaggcttca

SEQ ID NO: 2693818 - DNA, 25 bp, Homo sapien
caagattgcgcctctgcactccagc

SEQ ID NO: 2693819 - DNA, 25 bp, Homo sapien
actgcacccagcaaaaaaagtagta

SEQ ID NO: 2693820 - DNA, 25 bp, Homo sapien
cacccagcaaaaaaagtagtatttg

SEQ ID NO: 2693821 - DNA, 25 bp, Homo sapien
cacgtgccatcccgcctggctcatt

SEQ ID NO: 2693822 - DNA, 25 bp, Homo sapien
cgtgccatcccgcctggctcatttt

SEQ ID NO: 2693823 - DNA, 25 bp, Homo sapien
ttggaaggcaactaggccctagcta

SEQ ID NO: 2693824 - DNA, 25 bp, Homo sapien
ttagtatgtcaacgttggttcggca

SEQ ID NO: 2693825 - DNA, 25 bp, Homo sapien
gagggtctgactaccacatggcaaa

SEQ ID NO: 2693826 - DNA, 25 bp, Homo sapien
tggtaacacgcagcattggcaagcg

SEQ ID NO: 2693827 - DNA, 25 bp, Homo sapien
aattatagtaaagacaagcacgact

SEQ ID NO: 2693828 - DNA, 25 bp, Homo sapien
attatagtaaagacaagcacgactt

SEQ ID NO: 2693829 - DNA, 25 bp, Homo sapien
taattatagtaaagacaagcacgac

SEQ ID NO: 2693830 - DNA, 25 bp, Homo sapien
ttatagtaaagacaagcacgacttt

SEQ ID NO: 2693831 - DNA, 25 bp, Homo sapien
tcttcagaaaattctattactagtt

SEQ ID NO: 2693832 - DNA, 25 bp, Homo sapien
cagttggtggtttatttggatattc

SEQ ID NO: 2693833 - DNA, 25 bp, Homo sapien
aacagttggtggtttatttggatat

SEQ ID NO: 2693834 - DNA, 25 bp, Homo sapien
ctaacagttggtggtttatttggat

SEQ ID NO: 2693835 - DNA, 25 bp, Homo sapien
ggaagctttgtaagagtctagctac

SEQ ID NO: 2693836 - DNA, 25 bp, Homo sapien
ccatgtattacttttaattcaggag

SEQ ID NO: 2693837 - DNA, 25 bp, Homo sapien
atagctaaaggctggaaaaaatggc

SEQ ID NO: 2693838 - DNA, 25 bp, Homo sapien
gagtctagctacagaaacatagcta

SEQ ID NO: 2693839 - DNA, 25 bp, Homo sapien
tgtgcctggcttacatattaccttt

SEQ ID NO: 2693840 - DNA, 25 bp, Homo sapien
tgcctggcttacatattacctttgt

SEQ ID NO: 2693841 - DNA, 25 bp, Homo sapien
tatagggatgggacctcgctatgtt

SEQ ID NO: 2693842 - DNA, 25 bp, Homo sapien
ttatagggatgggacctcgctatgt

SEQ ID NO: 2693843 - DNA, 25 bp, Homo sapien
acttagtctagttgttatgcagcaa

SEQ ID NO: 2693844 - DNA, 25 bp, Homo sapien
tacaaaggaattagccatcgtttag

SEQ ID NO: 2693845 - DNA, 25 bp, Homo sapien
taaacagcaagatgtcaaggaagac

SEQ ID NO: 2693846 - DNA, 25 bp, Homo sapien
tttggagaagtctttcacatggtaa

SEQ ID NO: 2693847 - DNA, 25 bp, Homo sapien
ttagctgcccaaagcaaaaattagt

SEQ ID NO: 2693848 - DNA, 25 bp, Homo sapien
ttggccttagcctagatctatctct

SEQ ID NO: 2693849 - DNA, 25 bp, Homo sapien
tgtgctcagtattcccaatcattgg

SEQ ID NO: 2693850 - DNA, 25 bp, Homo sapien
tgtggcctcagttaccatccatgtg

SEQ ID NO: 2693851 - DNA, 25 bp, Homo sapien
gaccttgcttaggtgctggcgccat

SEQ ID NO: 2693852 - DNA, 25 bp, Homo sapien
tgctcagggcaggagtgtactccag

SEQ ID NO: 2693853 - DNA, 25 bp, Homo sapien
tccaccatgggatgtcacagcacca

SEQ ID NO: 2693854 - DNA, 25 bp, Homo sapien
tcacgccagtcctgaacactttggg

SEQ ID NO: 2693855 - DNA, 25 bp, Homo sapien
ctaaaattagttacacactctgcca

SEQ ID NO: 2693856 - DNA, 25 bp, Homo sapien
aaaattagttacacactctgccata

SEQ ID NO: 2693857 - DNA, 25 bp, Homo sapien
aaattagttacacactctgccatat

SEQ ID NO: 2693858 - DNA, 25 bp, Homo sapien
taaaattagttacacactctgccat

SEQ ID NO: 2693859 - DNA, 25 bp, Homo sapien
catcgattctgaaggatatctaaac

SEQ ID NO: 2693860 - DNA, 25 bp, Homo sapien
gatgttaagatagaagatacatcat

SEQ ID NO: 2693861 - DNA, 25 bp, Homo sapien
atatctaaacatatgctaccatcag

SEQ ID NO: 2693862 - DNA, 25 bp, Homo sapien
agatacatcatatgttggactccat

SEQ ID NO: 2693863 - DNA, 25 bp, Homo sapien
tgtaacttacacaatcaggaaaggg

SEQ ID NO: 2693864 - DNA, 25 bp, Homo sapien
gaaagggactgcagactggatccca

SEQ ID NO: 2693865 - DNA, 25 bp, Homo sapien
aacccttggctatgcttcatggaca

SEQ ID NO: 2693866 - DNA, 25 bp, Homo sapien
caaattaggtttgacctgtgagaac

SEQ ID NO: 2693867 - DNA, 25 bp, Homo sapien
tgaaaaacaacgcttgtaagatgac

SEQ ID NO: 2693868 - DNA, 25 bp, Homo sapien
gcttgtaagatgaccagaactggcc

SEQ ID NO: 2693869 - DNA, 25 bp, Homo sapien
tgtaagatgaccagaactggcctgg

SEQ ID NO: 2693870 - DNA, 25 bp, Homo sapien
aacaacgcttgtaagatgaccagaa

SEQ ID NO: 2693871 - DNA, 25 bp, Homo sapien
taaagttctcaattgccttaagacc

SEQ ID NO: 2693872 - DNA, 25 bp, Homo sapien
tgctgctaaggaacttaagcttctg

SEQ ID NO: 2693873 - DNA, 25 bp, Homo sapien
caacaaattacttcagagattaaca

SEQ ID NO: 2693874 - DNA, 25 bp, Homo sapien
ttaacatgtcatataattttgggtc

SEQ ID NO: 2693875 - DNA, 25 bp, Homo sapien
tattggctggactgttaggattcgg

SEQ ID NO: 2693876 - DNA, 25 bp, Homo sapien
gctttgttcaacaatggccgaaact

SEQ ID NO: 2693877 - DNA, 25 bp, Homo sapien
taggattcggttcatccagcagaga

SEQ ID NO: 2693878 - DNA, 25 bp, Homo sapien
ttctcgtttgttttcctgataaagc

SEQ ID NO: 2693879 - DNA, 25 bp, Homo sapien
ctaaatacagagttggacagagtca

SEQ ID NO: 2693880 - DNA, 25 bp, Homo sapien
aaaacaagtcgcatcagttctctgc

SEQ ID NO: 2693881 - DNA, 25 bp, Homo sapien
tctccacaagaagaagcaactcagc

SEQ ID NO: 2693882 - DNA, 25 bp, Homo sapien
ccaactgtgaaatcgcaaaaggtac

SEQ ID NO: 2693883 - DNA, 25 bp, Homo sapien
tcaaagttccctaagatcatacact

SEQ ID NO: 2693884 - DNA, 25 bp, Homo sapien
tctaggagttactggagtgaatgtc

SEQ ID NO: 2693885 - DNA, 25 bp, Homo sapien
ttgggagccacgattccagtgagtg

SEQ ID NO: 2693886 - DNA, 25 bp, Homo sapien
gggcagaccctcatagctactgtat

SEQ ID NO: 2693887 - DNA, 25 bp, Homo sapien
gagttagaactcactgacctccctg

SEQ ID NO: 2693888 - DNA, 25 bp, Homo sapien
cagggaattgtatcacacatgcatt

SEQ ID NO: 2693889 - DNA, 25 bp, Homo sapien
taaatcgaaggtttatatctggtac

SEQ ID NO: 2693890 - DNA, 25 bp, Homo sapien
taaacactttttgtatgactcaacc

SEQ ID NO: 2693891 - DNA, 25 bp, Homo sapien
ggagcagtcagataaccaacaaggt

SEQ ID NO: 2693892 - DNA, 25 bp, Homo sapien
ggagcagtcagataaccaacagggt

SEQ ID NO: 2693893 - DNA, 25 bp, Homo sapien
tatgcaagtttctcacacaagtctg

SEQ ID NO: 2693894 - DNA, 25 bp, Homo sapien
gataatttcatttaccgcgaacagc

SEQ ID NO: 2693895 - DNA, 25 bp, Homo sapien
cccagtatggtcattaggccaagca

SEQ ID NO: 2693896 - DNA, 25 bp, Homo sapien
tgctcacagcctatgaatgcatggc

SEQ ID NO: 2693897 - DNA, 25 bp, Homo sapien
gattgtagtctcaagctgccctgtg

SEQ ID NO: 2693898 - DNA, 25 bp, Homo sapien
ccatttaaaatgtgcccagaagctc

SEQ ID NO: 2693899 - DNA, 25 bp, Homo sapien
tgccttggagaatgttgctgttagg

SEQ ID NO: 2693900 - DNA, 25 bp, Homo sapien
aatgttgctgttaggggtctgagac

SEQ ID NO: 2693901 - DNA, 25 bp, Homo sapien
tcatttgccttggagaatgttgctg

SEQ ID NO: 2693902 - DNA, 25 bp, Homo sapien
ggtctgagacaggtcttggtcctca

SEQ ID NO: 2693903 - DNA, 25 bp, Homo sapien
gactgcagtagggtcagagtcctct

SEQ ID NO: 2693904 - DNA, 25 bp, Homo sapien
gatgtgggtctgaagccctgctcat

SEQ ID NO: 2693905 - DNA, 25 bp, Homo sapien
acacacactgaaccaaatgaggagg

SEQ ID NO: 2693906 - DNA, 25 bp, Homo sapien
tgcatgctgcgcacagctcactctg

SEQ ID NO: 2693907 - DNA, 25 bp, Homo sapien
gatccatttggatcggtggcctacc

SEQ ID NO: 2693908 - DNA, 25 bp, Homo sapien
ctacctatgggcaatgagaggaatc

SEQ ID NO: 2693909 - DNA, 25 bp, Homo sapien
cagcttctggtatctgagacctgtg

SEQ ID NO: 2693910 - DNA, 25 bp, Homo sapien
taaagaatctctgctgggtatccct

SEQ ID NO: 2693911 - DNA, 25 bp, Homo sapien
gaaaggagtgattgactaggaagct

SEQ ID NO: 2693912 - DNA, 25 bp, Homo sapien
gcagcctttgtggttgctcacctta

SEQ ID NO: 2693913 - DNA, 25 bp, Homo sapien
tgagcgataattaacaaagagcagc

SEQ ID NO: 2693914 - DNA, 25 bp, Homo sapien
taactgccatcctaggctactgctg

SEQ ID NO: 2693915 - DNA, 25 bp, Homo sapien
cattctgagaacgagtcatctgatc

SEQ ID NO: 2693916 - DNA, 25 bp, Homo sapien
gcagttagctatgtggaagaagcct

SEQ ID NO: 2693917 - DNA, 25 bp, Homo sapien
tgagtctacagagaagagtcctcag

SEQ ID NO: 2693918 - DNA, 25 bp, Homo sapien
tcttgaaaccagtgccgccatctta

SEQ ID NO: 2693919 - DNA, 25 bp, Homo sapien
cactcaagcagtcttgtggagagat

SEQ ID NO: 2693920 - DNA, 25 bp, Homo sapien
tgtagtaatgaactgagatctgctg

SEQ ID NO: 2693921 - DNA, 25 bp, Homo sapien
tggagagatccatgtagtaatgaac

SEQ ID NO: 2693922 - DNA, 25 bp, Homo sapien
ggtagatcctccagcgccaaacttt

SEQ ID NO: 2693923 - DNA, 25 bp, Homo sapien
taaatggcaatccagttcttcttag

SEQ ID NO: 2693924 - DNA, 25 bp, Homo sapien
ttcataaatggcaatccagttcttc

SEQ ID NO: 2693925 - DNA, 25 bp, Homo sapien
aaggagttcataaatggcaatccag

SEQ ID NO: 2693926 - DNA, 25 bp, Homo sapien
aggagttcataaatggcaatccagt

SEQ ID NO: 2693927 - DNA, 25 bp, Homo sapien
catagccccgggacttggaagactg

SEQ ID NO: 2693928 - DNA, 25 bp, Homo sapien
cacatagccccgggacttggaagac

SEQ ID NO: 2693929 - DNA, 25 bp, Homo sapien
atagccccgggacttggaagactgc

SEQ ID NO: 2693930 - DNA, 25 bp, Homo sapien
ttcacatagccccgggacttggaag

SEQ ID NO: 2693931 - DNA, 25 bp, Homo sapien
aggcacaatttccaggagcagatga

SEQ ID NO: 2693932 - DNA, 25 bp, Homo sapien
ggatggctgtggcatagggtggcag

SEQ ID NO: 2693933 - DNA, 25 bp, Homo sapien
ctggatggctgtggcatagggtggc

SEQ ID NO: 2693934 - DNA, 25 bp, Homo sapien
tggcaggcacaatttccaggagcag

SEQ ID NO: 2693935 - DNA, 25 bp, Homo sapien
caccagggggcaaaacactttgtct

SEQ ID NO: 2693936 - DNA, 25 bp, Homo sapien
aaacactttgtctgtgggtatctct

SEQ ID NO: 2693937 - DNA, 25 bp, Homo sapien
acatccaccatcaaatccgcctcta

SEQ ID NO: 2693938 - DNA, 25 bp, Homo sapien
actgaggtggctgaacacatccacc

SEQ ID NO: 2693939 - DNA, 25 bp, Homo sapien
ccactgcgccctgcctaatttttgt

SEQ ID NO: 2693940 - DNA, 25 bp, Homo sapien
tgagccactgcgccctgcctaattt

SEQ ID NO: 2693941 - DNA, 25 bp, Homo sapien
gcagacgttcttggagtgctcccag

SEQ ID NO: 2693942 - DNA, 25 bp, Homo sapien
cagactaggatgcagcaggctagca

SEQ ID NO: 2693943 - DNA, 25 bp, Homo sapien
tgctcaacacgcctccaaatgggtg

SEQ ID NO: 2693944 - DNA, 25 bp, Homo sapien
tccttgtcagggtagaaccggcctg

SEQ ID NO: 2693945 - DNA, 25 bp, Homo sapien
gcagaacaagcgtcatcagaaagct

SEQ ID NO: 2693946 - DNA, 25 bp, Homo sapien
ttttgtatgttcagcagaacaagcg

SEQ ID NO: 2693947 - DNA, 25 bp, Homo sapien
caagcgtcatcagaaagctgctctg

SEQ ID NO: 2693948 - DNA, 25 bp, Homo sapien
tgttcagcagaacaagcgtcatcag

SEQ ID NO: 2693949 - DNA, 25 bp, Homo sapien
tggcagcccaactcagggaacactt

SEQ ID NO: 2693950 - DNA, 25 bp, Homo sapien
acatgctgcctaccctcagggaaga

SEQ ID NO: 2693951 - DNA, 25 bp, Homo sapien
ccagaagtggttatgacatgctgcc

SEQ ID NO: 2693952 - DNA, 25 bp, Homo sapien
gacagaagattctgccagactggga

SEQ ID NO: 2693953 - DNA, 25 bp, Homo sapien
gcttatctttcaagtgtaagtttag

SEQ ID NO: 2693954 - DNA, 25 bp, Homo sapien
aagtttagatactgacatcttggga

SEQ ID NO: 2693955 - DNA, 25 bp, Homo sapien
ttgggagagccttccatcacatctc

SEQ ID NO: 2693956 - DNA, 25 bp, Homo sapien
caacttggagcactccagtctcttc

SEQ ID NO: 2693957 - DNA, 25 bp, Homo sapien
gctggcttgcccgttgactcaccct

SEQ ID NO: 2693958 - DNA, 25 bp, Homo sapien
gcttgcccgttgactcaccctcagg

SEQ ID NO: 2693959 - DNA, 25 bp, Homo sapien
aggatggcgtaagggagggacagtg

SEQ ID NO: 2693960 - DNA, 25 bp, Homo sapien
tcaccctcaggagtctgctgctctt

SEQ ID NO: 2693961 - DNA, 25 bp, Homo sapien
ccatggcaatggcactctgggcaga

SEQ ID NO: 2693962 - DNA, 25 bp, Homo sapien
cttgctctgttttccccggagtgga

SEQ ID NO: 2693963 - DNA, 25 bp, Homo sapien
cagagtccctatcttgatacggaag

SEQ ID NO: 2693964 - DNA, 25 bp, Homo sapien
cctggccagagtccctatcttgata

SEQ ID NO: 2693965 - DNA, 25 bp, Homo sapien
gccatgtctataaggatgctgctgg

SEQ ID NO: 2693966 - DNA, 25 bp, Homo sapien
aggccatgtctataaggatgctgct

SEQ ID NO: 2693967 - DNA, 25 bp, Homo sapien
ctggcgaggaaccccaaggccatgt

SEQ ID NO: 2693968 - DNA, 25 bp, Homo sapien
tggcgaggaaccccaaggccatgtc

SEQ ID NO: 2693969 - DNA, 25 bp, Homo sapien
cagcaaaggaagaccgggagggtct

SEQ ID NO: 2693970 - DNA, 25 bp, Homo sapien
agacaggatgtaggaaaggccctgt

SEQ ID NO: 2693971 - DNA, 25 bp, Homo sapien
gctggtgctgtatcttgcacagcaa

SEQ ID NO: 2693972 - DNA, 25 bp, Homo sapien
gagggtctgttaccctgttacctga

SEQ ID NO: 2693973 - DNA, 25 bp, Homo sapien
gaaacctgcggacttgacaagtgag

SEQ ID NO: 2693974 - DNA, 25 bp, Homo sapien
gcttgctcacaagttagcccctgaa

SEQ ID NO: 2693975 - DNA, 25 bp, Homo sapien
tcttgggcacaaggatggccccctg

SEQ ID NO: 2693976 - DNA, 25 bp, Homo sapien
ccctgcccataggtcagtgccagga

SEQ ID NO: 2693977 - DNA, 25 bp, Homo sapien
cctatagtgacggatcaggaggcac

SEQ ID NO: 2693978 - DNA, 25 bp, Homo sapien
gactatttgcaccagagttccccgc

SEQ ID NO: 2693979 - DNA, 25 bp, Homo sapien
tctagtatccaacgaaagcaagtga

SEQ ID NO: 2693980 - DNA, 25 bp, Homo sapien
tccagttgtagagggtgtgatcagc

SEQ ID NO: 2693981 - DNA, 25 bp, Homo sapien
tcctggaatgcgttactgtgccact

SEQ ID NO: 2693982 - DNA, 25 bp, Homo sapien
atgtcctcctggaatgcgttactgt

SEQ ID NO: 2693983 - DNA, 25 bp, Homo sapien
aattggggccctcagcgatgtcctc

SEQ ID NO: 2693984 - DNA, 25 bp, Homo sapien
ggaatgcgttactgtgccacttcac

SEQ ID NO: 2693985 - DNA, 25 bp, Homo sapien
ccaggtgggtcgcttaggtcagcta

SEQ ID NO: 2693986 - DNA, 25 bp, Homo sapien
tccaagattgatgggcaatgtcctc

SEQ ID NO: 2693987 - DNA, 25 bp, Homo sapien
tggctgcggcatatagcactcctgg

SEQ ID NO: 2693988 - DNA, 25 bp, Homo sapien
ccagtgcggtctcagaaggctatga

SEQ ID NO: 2693989 - DNA, 25 bp, Homo sapien
taataattcaatttagactcagcca

SEQ ID NO: 2693990 - DNA, 25 bp, Homo sapien
taattcaatttagactcagccagac

SEQ ID NO: 2693991 - DNA, 25 bp, Homo sapien
cacacaggagtagattaataattca

SEQ ID NO: 2693992 - DNA, 25 bp, Homo sapien
acacgggcacacaggagtagattaa

SEQ ID NO: 2693993 - DNA, 25 bp, Homo sapien
gatagtgggcgagtcatgaataaac

SEQ ID NO: 2693994 - DNA, 25 bp, Homo sapien
ggcgagtcatgaataaactggttgt

SEQ ID NO: 2693995 - DNA, 25 bp, Homo sapien
gcatgttgaaattgatagtgggcga

SEQ ID NO: 2693996 - DNA, 25 bp, Homo sapien
aatttcattgcaaattgcatgttga

SEQ ID NO: 2693997 - DNA, 25 bp, Homo sapien
catccacccctgataaggacagacg

SEQ ID NO: 2693998 - DNA, 25 bp, Homo sapien
cttcaggaaacttgcaccccaaagg

SEQ ID NO: 2693999 - DNA, 25 bp, Homo sapien
gttgcttggtgacatctcactcaag

SEQ ID NO: 2694000 - DNA, 25 bp, Homo sapien
tcgctgggccagtacttgctgccaa

SEQ ID NO: 2694001 - DNA, 25 bp, Homo sapien
ctgtgcttggatgtccccatgacca

SEQ ID NO: 2694002 - DNA, 25 bp, Homo sapien
gcatctgggccacactgtgtctccc

SEQ ID NO: 2694003 - DNA, 25 bp, Homo sapien
ggatgtccccatgaccagggcatct

SEQ ID NO: 2694004 - DNA, 25 bp, Homo sapien
atctgggccacactgtgtctcccag

SEQ ID NO: 2694005 - DNA, 25 bp, Homo sapien
gctgttccggaaaatagacatccca

SEQ ID NO: 2694006 - DNA, 25 bp, Homo sapien
tagcacaggttaggcctgccctgaa

SEQ ID NO: 2694007 - DNA, 25 bp, Homo sapien
aattgaggtgctgctaaagccatgc

SEQ ID NO: 2694008 - DNA, 25 bp, Homo sapien
tacagcagcagacacttattcccgc

SEQ ID NO: 2694009 - DNA, 25 bp, Homo sapien
taccctgccacatgtatccagtggg

SEQ ID NO: 2694010 - DNA, 25 bp, Homo sapien
ccttagggttcctggagaattcctg

SEQ ID NO: 2694011 - DNA, 25 bp, Homo sapien
cagatccaagtaaggtttgctcaca

SEQ ID NO: 2694012 - DNA, 25 bp, Homo sapien
gtcacaatacctgccctgtaacctt

SEQ ID NO: 2694013 - DNA, 25 bp, Homo sapien
cccaggatatttattgcctgctatg

SEQ ID NO: 2694014 - DNA, 25 bp, Homo sapien
aatgaactaccacacagaactcctg

SEQ ID NO: 2694015 - DNA, 25 bp, Homo sapien
gcctgctatgttccgacctgggtca

SEQ ID NO: 2694016 - DNA, 25 bp, Homo sapien
cacataatgaactaccacacagaac

SEQ ID NO: 2694017 - DNA, 25 bp, Homo sapien
cttataggagaaataaatctaataa

SEQ ID NO: 2694018 - DNA, 25 bp, Homo sapien
ggagaaataaatctaataataaaca

SEQ ID NO: 2694019 - DNA, 25 bp, Homo sapien
ataaatctaataataaacaaactca

SEQ ID NO: 2694020 - DNA, 25 bp, Homo sapien
taaatctaataataaacaaactcat

SEQ ID NO: 2694021 - DNA, 25 bp, Homo sapien
ctccaagactgaagattgtttattc

SEQ ID NO: 2694022 - DNA, 25 bp, Homo sapien
tgtgaatggacaccggagtcgcctt

SEQ ID NO: 2694023 - DNA, 25 bp, Homo sapien
tccccgatggaatgttgtgaacaca

SEQ ID NO: 2694024 - DNA, 25 bp, Homo sapien
tatgtgacaattaagaagattcccc

SEQ ID NO: 2694025 - DNA, 25 bp, Homo sapien
tccaacctcctcggaatgcctctag

SEQ ID NO: 2694026 - DNA, 25 bp, Homo sapien
gctccaacctcctcggaatgcctct

SEQ ID NO: 2694027 - DNA, 25 bp, Homo sapien
ctccaacctcctcggaatgcctcta

SEQ ID NO: 2694028 - DNA, 25 bp, Homo sapien
agctccaacctcctcggaatgcctc

SEQ ID NO: 2694029 - DNA, 25 bp, Homo sapien
tctcgaggaaggagaaggactggcc

SEQ ID NO: 2694030 - DNA, 25 bp, Homo sapien
tcgaggaaggagaaggactggcctc

SEQ ID NO: 2694031 - DNA, 25 bp, Homo sapien
tctctcgaggaaggagaaggactgg

SEQ ID NO: 2694032 - DNA, 25 bp, Homo sapien
cttctctcgaggaaggagaaggact

SEQ ID NO: 2694033 - DNA, 25 bp, Homo sapien
ctcggatcctcgcagtttctggaag

SEQ ID NO: 2694034 - DNA, 25 bp, Homo sapien
cgggcgggctgtcgggctgctagcc

SEQ ID NO: 2694035 - DNA, 25 bp, Homo sapien
gaccttgtggtgcacaaacagtacg

SEQ ID NO: 2694036 - DNA, 25 bp, Homo sapien
gctccacttcccgacttgaccttgt

SEQ ID NO: 2694037 - DNA, 25 bp, Homo sapien
ccaaaaaatagcctccaactgcgat

SEQ ID NO: 2694038 - DNA, 25 bp, Homo sapien
gatggccgcggtcggcaccattcac

SEQ ID NO: 2694039 - DNA, 25 bp, Homo sapien
tttaaaccaagacttccttgtgatc

SEQ ID NO: 2694040 - DNA, 25 bp, Homo sapien
atagcctccaactgcgatggccgcg

SEQ ID NO: 2694041 - DNA, 25 bp, Homo sapien
tcggcccgcaggacctaagccggtg

SEQ ID NO: 2694042 - DNA, 25 bp, Homo sapien
taggagtgggcgcaaagtaactcca

SEQ ID NO: 2694043 - DNA, 25 bp, Homo sapien
gacctaagccggtgccgctaggagt

SEQ ID NO: 2694044 - DNA, 25 bp, Homo sapien
aagtaactccatggacgctactcac

SEQ ID NO: 2694045 - DNA, 25 bp, Homo sapien
ccggcgcgggaaggatgctcccgaa

SEQ ID NO: 2694046 - DNA, 25 bp, Homo sapien
gggaaggatgctcccgaagccggga

SEQ ID NO: 2694047 - DNA, 25 bp, Homo sapien
tgcagggaccggcgcgggaaggatg

SEQ ID NO: 2694048 - DNA, 25 bp, Homo sapien
gatgctcccgaagccgggagctcct

SEQ ID NO: 2694049 - DNA, 25 bp, Homo sapien
cttgctccgcggtgcccccctgacg

SEQ ID NO: 2694050 - DNA, 25 bp, Homo sapien
cgggcgctgccctcggctacgcgcc

SEQ ID NO: 2694051 - DNA, 25 bp, Homo sapien
gtgcccccctgacgggcgctgccct

SEQ ID NO: 2694052 - DNA, 25 bp, Homo sapien
cgcggtgcccccctgacgggcgctg

SEQ ID NO: 2694053 - DNA, 25 bp, Homo sapien
agagagggagcgagcgagcaagaga

SEQ ID NO: 2694054 - DNA, 25 bp, Homo sapien
gagagagagggagcgagcgagcaag

SEQ ID NO: 2694055 - DNA, 25 bp, Homo sapien
ctagaacaggcagccagcaggagag

SEQ ID NO: 2694056 - DNA, 25 bp, Homo sapien
gcaggagagagagggagcgagcgag

SEQ ID NO: 2694057 - DNA, 25 bp, Homo sapien
ttgttgttgcatgcgcccctctcag

SEQ ID NO: 2694058 - DNA, 25 bp, Homo sapien
gactgaccaacatgcgcaatctctc

SEQ ID NO: 2694059 - DNA, 25 bp, Homo sapien
agttgttgttgcatgcgcccctctc

SEQ ID NO: 2694060 - DNA, 25 bp, Homo sapien
tccccgcactgtactctttaaaaca

SEQ ID NO: 2694061 - DNA, 25 bp, Homo sapien
ccaaccccaggagccgagcatgctg

SEQ ID NO: 2694062 - DNA, 25 bp, Homo sapien
aaactgtctaatttgtgcagagcct

SEQ ID NO: 2694063 - DNA, 25 bp, Homo sapien
accccaggagccgagcatgctgccc

SEQ ID NO: 2694064 - DNA, 25 bp, Homo sapien
tgtctaatttgtgcagagcctccaa

SEQ ID NO: 2694065 - DNA, 25 bp, Homo sapien
tcatgagcataagacaactgccttc

SEQ ID NO: 2694066 - DNA, 25 bp, Homo sapien
tgtcatgagcataagacaactgcct

SEQ ID NO: 2694067 - DNA, 25 bp, Homo sapien
tgtgtcatgagcataagacaactgc

SEQ ID NO: 2694068 - DNA, 25 bp, Homo sapien
ctgtgtcatgagcataagacaactg

SEQ ID NO: 2694069 - DNA, 25 bp, Homo sapien
accagcaggaccaggatggcaggaa

SEQ ID NO: 2694070 - DNA, 25 bp, Homo sapien
caccagcaggaccaggatggcagga

SEQ ID NO: 2694071 - DNA, 25 bp, Homo sapien
agcaggaccaggatggcaggaaggc

SEQ ID NO: 2694072 - DNA, 25 bp, Homo sapien
ggaccaggatggcaggaaggctcat

SEQ ID NO: 2694073 - DNA, 25 bp, Homo sapien
ctgctgatggagtattttcgcctct

SEQ ID NO: 2694074 - DNA, 25 bp, Homo sapien
gctgatggagtattttcgcctcttc

SEQ ID NO: 2694075 - DNA, 25 bp, Homo sapien
tgatggagtattttcgcctcttctc

SEQ ID NO: 2694076 - DNA, 25 bp, Homo sapien
actgctgatggagtattttcgcctc

SEQ ID NO: 2694077 - DNA, 25 bp, Homo sapien
ggtttttggttccactgagccaggc

SEQ ID NO: 2694078 - DNA, 25 bp, Homo sapien
gccacaaaaggccagatgctgtgat

SEQ ID NO: 2694079 - DNA, 25 bp, Homo sapien
ccacaaaaggccagatgctgtgatc

SEQ ID NO: 2694080 - DNA, 25 bp, Homo sapien
tggaggatgtggtttttggttccac

SEQ ID NO: 2694081 - DNA, 25 bp, Homo sapien
ctggctctctcaaagggctcctctg

SEQ ID NO: 2694082 - DNA, 25 bp, Homo sapien
tggctctctcaaagggctcctctgc

SEQ ID NO: 2694083 - DNA, 25 bp, Homo sapien
gatgcggatgtagatgtcgcatgac

SEQ ID NO: 2694084 - DNA, 25 bp, Homo sapien
ctgggcagtttggagcatcttgatg

SEQ ID NO: 2694085 - DNA, 25 bp, Homo sapien
tcttttcgttctgtcggggccagcc

SEQ ID NO: 2694086 - DNA, 25 bp, Homo sapien
tggagcatcttgatgcggatgtaga

SEQ ID NO: 2694087 - DNA, 25 bp, Homo sapien
taggcccactaggtactcttaagca

SEQ ID NO: 2694088 - DNA, 25 bp, Homo sapien
cacttgctgattttgatcagcatca

SEQ ID NO: 2694089 - DNA, 25 bp, Homo sapien
ccataacagacaccttcctgtgtag

SEQ ID NO: 2694090 - DNA, 25 bp, Homo sapien
ctgagctaggcccactaggtactct

SEQ ID NO: 2694091 - DNA, 25 bp, Homo sapien
ccagggctccatgagtctcgggaag

SEQ ID NO: 2694092 - DNA, 25 bp, Homo sapien
tctcgggaaggagtcacatctacag

SEQ ID NO: 2694093 - DNA, 25 bp, Homo sapien
ctccatgagtctcgggaaggagtca

SEQ ID NO: 2694094 - DNA, 25 bp, Homo sapien
gtcacatctacagatcatcaactcc

SEQ ID NO: 2694095 - DNA, 25 bp, Homo sapien
tgtagtagtcatccgggctgagctg

SEQ ID NO: 2694096 - DNA, 25 bp, Homo sapien
ctgagctggtatgagtccgggatct

SEQ ID NO: 2694097 - DNA, 25 bp, Homo sapien
tgccaggatgtagtagtcatccggg

SEQ ID NO: 2694098 - DNA, 25 bp, Homo sapien
attcctgtcgccatgggtctgccag

SEQ ID NO: 2694099 - DNA, 25 bp, Homo sapien
gctggctgggatctatgggagggga

SEQ ID NO: 2694100 - DNA, 25 bp, Homo sapien
ggtcgggggcaaggctgccagaagc

SEQ ID NO: 2694101 - DNA, 25 bp, Homo sapien
aggctgccagaagctgtgactcagc

SEQ ID NO: 2694102 - DNA, 25 bp, Homo sapien
cctggggtcgggggcaaggctgcca

SEQ ID NO: 2694103 - DNA, 25 bp, Homo sapien
ggctgccagaagctgtgactcagcg

SEQ ID NO: 2694104 - DNA, 25 bp, Homo sapien
atggacaagtgtgctttgacaccac

SEQ ID NO: 2694105 - DNA, 25 bp, Homo sapien
gatggacaagtgtgctttgacacca

SEQ ID NO: 2694106 - DNA, 25 bp, Homo sapien
tgatggacaagtgtgctttgacacc

SEQ ID NO: 2694107 - DNA, 25 bp, Homo sapien
gctgatggacaagtgtgctttgaca

SEQ ID NO: 2694108 - DNA, 25 bp, Homo sapien
aaatcaagacaggatgtcatgaagg

SEQ ID NO: 2694109 - DNA, 25 bp, Homo sapien
tcaagacaggatgtcatgaagggag

SEQ ID NO: 2694110 - DNA, 25 bp, Homo sapien
ggatgtcatgaagggaggggccctc

SEQ ID NO: 2694111 - DNA, 25 bp, Homo sapien
aggatgtcatgaagggaggggccct

SEQ ID NO: 2694112 - DNA, 25 bp, Homo sapien
gccagtaggcatcaatctcgtccaa

SEQ ID NO: 2694113 - DNA, 25 bp, Homo sapien
tctcgtccaagtcatagcggctgcc

SEQ ID NO: 2694114 - DNA, 25 bp, Homo sapien
taagctccgagttgatgagctccag

SEQ ID NO: 2694115 - DNA, 25 bp, Homo sapien
cctggccaatcaggctgggagccct

SEQ ID NO: 2694116 - DNA, 25 bp, Homo sapien
tcaggagagcgacacacgtcgcaga

SEQ ID NO: 2694117 - DNA, 25 bp, Homo sapien
agaagaccatctcgttgccatcctc

SEQ ID NO: 2694118 - DNA, 25 bp, Homo sapien
gccatattctggtggcacagggtct

SEQ ID NO: 2694119 - DNA, 25 bp, Homo sapien
gacaacatcctcgtcgtactcgatg

SEQ ID NO: 2694120 - DNA, 25 bp, Homo sapien
ggcacagctgacatgcacccacttg

SEQ ID NO: 2694121 - DNA, 25 bp, Homo sapien
gcttcaaggctcctcctcgcttggg

SEQ ID NO: 2694122 - DNA, 25 bp, Homo sapien
acagctgacatgcacccacttggtc

SEQ ID NO: 2694123 - DNA, 25 bp, Homo sapien
cacttggtcccacttctagtgggct

SEQ ID NO: 2694124 - DNA, 25 bp, Homo sapien
ccatgcagacccacttccccacggg

SEQ ID NO: 2694125 - DNA, 25 bp, Homo sapien
ttgggctgcctcacctccacgctca

SEQ ID NO: 2694126 - DNA, 25 bp, Homo sapien
cacttccccacgggctattccttgg

SEQ ID NO: 2694127 - DNA, 25 bp, Homo sapien
cacgggctattccttgggctgcctc

SEQ ID NO: 2694128 - DNA, 25 bp, Homo sapien
ggccgatctcagtgttttagtgcga

SEQ ID NO: 2694129 - DNA, 25 bp, Homo sapien
cgcccggccgatctcagtgttttag

SEQ ID NO: 2694130 - DNA, 25 bp, Homo sapien
cagtgttttagtgcgagtccatcac

SEQ ID NO: 2694131 - DNA, 25 bp, Homo sapien
gatctcagtgttttagtgcgagtcc

SEQ ID NO: 2694132 - DNA, 25 bp, Homo sapien
tctcccaagctcaccactggatgag

SEQ ID NO: 2694133 - DNA, 25 bp, Homo sapien
ccaaacaagcatggctcaaaggccg

SEQ ID NO: 2694134 - DNA, 25 bp, Homo sapien
tgccgtcagtgtgtgtagttgactg

SEQ ID NO: 2694135 - DNA, 25 bp, Homo sapien
tagtgtgtgctcatctgagactaat

SEQ ID NO: 2694136 - DNA, 25 bp, Homo sapien
cggctggctgggatatgcgagatct

SEQ ID NO: 2694137 - DNA, 25 bp, Homo sapien
cagcggctggctgggatatgcgaga

SEQ ID NO: 2694138 - DNA, 25 bp, Homo sapien
ctgggatatgcgagatcttggtgat

SEQ ID NO: 2694139 - DNA, 25 bp, Homo sapien
aggacagagcccagcggctggctgg

SEQ ID NO: 2694140 - DNA, 25 bp, Homo sapien
gatgcaggtgcctgtgcattccttg

SEQ ID NO: 2694141 - DNA, 25 bp, Homo sapien
gcaggtgcctgtgcattccttgcag

SEQ ID NO: 2694142 - DNA, 25 bp, Homo sapien
ggtgcctgtgcattccttgcagagg

SEQ ID NO: 2694143 - DNA, 25 bp, Homo sapien
ggatgcaggtgcctgtgcattcctt

SEQ ID NO: 2694144 - DNA, 25 bp, Homo sapien
tagatgaagtcgaccagtgcctcag

SEQ ID NO: 2694145 - DNA, 25 bp, Homo sapien
ttccgtgggctcagatgtgggctca

SEQ ID NO: 2694146 - DNA, 25 bp, Homo sapien
tcctgccgcagatgggtgaagagct

SEQ ID NO: 2694147 - DNA, 25 bp, Homo sapien
gacatggaacgctgtgacgcaggaa

SEQ ID NO: 2694148 - DNA, 25 bp, Homo sapien
gaggcaagggcactaatgggttggg

SEQ ID NO: 2694149 - DNA, 25 bp, Homo sapien
ggtgaggcaagggcactaatgggtt

SEQ ID NO: 2694150 - DNA, 25 bp, Homo sapien
tgaggcaagggcactaatgggttgg

SEQ ID NO: 2694151 - DNA, 25 bp, Homo sapien
ttgggtgaggcaagggcactaatgg

SEQ ID NO: 2694152 - DNA, 25 bp, Homo sapien
tcctggagtttgcagatggcgtgtt

SEQ ID NO: 2694153 - DNA, 25 bp, Homo sapien
gttctctcgcgccttgtcaccatgt

SEQ ID NO: 2694154 - DNA, 25 bp, Homo sapien
gttcaataagtttcatctgcaggtg

SEQ ID NO: 2694155 - DNA, 25 bp, Homo sapien
tcaccatgtagcacagatttctaac

SEQ ID NO: 2694156 - DNA, 25 bp, Homo sapien
tgctgcatgtaaacgcaacactggg

SEQ ID NO: 2694157 - DNA, 25 bp, Homo sapien
cagtctttgggtacacggtgagctc

SEQ ID NO: 2694158 - DNA, 25 bp, Homo sapien
catgactagcacctgaacttggcaa

SEQ ID NO: 2694159 - DNA, 25 bp, Homo sapien
acatgtatacgctccaagaagggcc

SEQ ID NO: 2694160 - DNA, 25 bp, Homo sapien
tcttcgagtcactcttcttgccctt

SEQ ID NO: 2694161 - DNA, 25 bp, Homo sapien
agctgccccaggactgagtcaggcc

SEQ ID NO: 2694162 - DNA, 25 bp, Homo sapien
tcaggccccgccttcactttctctt

SEQ ID NO: 2694163 - DNA, 25 bp, Homo sapien
agtgctgcccttggagccctcgcag

SEQ ID NO: 2694164 - DNA, 25 bp, Homo sapien
gatggtcaagcctgccgtgtctgca

SEQ ID NO: 2694165 - DNA, 25 bp, Homo sapien
tggttaccgctcttgagcctcagtc

SEQ ID NO: 2694166 - DNA, 25 bp, Homo sapien
aagcaagggcctggttaccgctctt

SEQ ID NO: 2694167 - DNA, 25 bp, Homo sapien
cagacagagctgcaagcgtggtgat

SEQ ID NO: 2694168 - DNA, 25 bp, Homo sapien
caggttgctacccacgaagttggac

SEQ ID NO: 2694169 - DNA, 25 bp, Homo sapien
gattttaccagaaagcctgccatgg

SEQ ID NO: 2694170 - DNA, 25 bp, Homo sapien
tctttataagcgttgcctcccagcg

SEQ ID NO: 2694171 - DNA, 25 bp, Homo sapien
ttctctccagaaggacgtgctgccc

SEQ ID NO: 2694172 - DNA, 25 bp, Homo sapien
ttctctgctgtgatctgcaccgact

SEQ ID NO: 2694173 - DNA, 25 bp, Homo sapien
gatctgcaccgactgtgccagccag

SEQ ID NO: 2694174 - DNA, 25 bp, Homo sapien
ctctgctgtgatctgcaccgactgt

SEQ ID NO: 2694175 - DNA, 25 bp, Homo sapien
ctgtgatctgcaccgactgtgccag

SEQ ID NO: 2694176 - DNA, 25 bp, Homo sapien
ggccttcctagcagggtcaccaggt

SEQ ID NO: 2694177 - DNA, 25 bp, Homo sapien
tgttcagtggccactcgctcatggc

SEQ ID NO: 2694178 - DNA, 25 bp, Homo sapien
gggtcctcgcggtgcccattgttca

SEQ ID NO: 2694179 - DNA, 25 bp, Homo sapien
agtgtctcctcgtcctgcagcagtt

SEQ ID NO: 2694180 - DNA, 25 bp, Homo sapien
ggctttgtctggagtcgtccgtgaa

SEQ ID NO: 2694181 - DNA, 25 bp, Homo sapien
gcttcctggtaggtggcccttgacc

SEQ ID NO: 2694182 - DNA, 25 bp, Homo sapien
caagtgagaagatgtccgacgtggt

SEQ ID NO: 2694183 - DNA, 25 bp, Homo sapien
tggagtcgtccgtgaaccaggcccg

SEQ ID NO: 2694184 - DNA, 25 bp, Homo sapien
cagggccaggcacttggacatctga

SEQ ID NO: 2694185 - DNA, 25 bp, Homo sapien
ggacatctgagtcagcagctactga

SEQ ID NO: 2694186 - DNA, 25 bp, Homo sapien
ttaggaggccagtacgcccatgcgg

SEQ ID NO: 2694187 - DNA, 25 bp, Homo sapien
aatctccgggttaccttgctctcgc

SEQ ID NO: 2694188 - DNA, 25 bp, Homo sapien
gccggagccgtggaaggaatcctaa

SEQ ID NO: 2694189 - DNA, 25 bp, Homo sapien
ttgcttgcatctagccaggagccca

SEQ ID NO: 2694190 - DNA, 25 bp, Homo sapien
aaaaccacgacggagtggcagcctc

SEQ ID NO: 2694191 - DNA, 25 bp, Homo sapien
gaaataatgcccaaacgacagtctg

SEQ ID NO: 2694192 - DNA, 25 bp, Homo sapien
tgaaaaggcaaacggtctggtctgg

SEQ ID NO: 2694193 - DNA, 25 bp, Homo sapien
tgggagtcccctgagtaaatggcac

SEQ ID NO: 2694194 - DNA, 25 bp, Homo sapien
catttgtccgatcctctgaactgag

SEQ ID NO: 2694195 - DNA, 25 bp, Homo sapien
tttaccagtggtggaagtgacccag

SEQ ID NO: 2694196 - DNA, 25 bp, Homo sapien
aatccagaggccaacaatgtgagca

SEQ ID NO: 2694197 - DNA, 25 bp, Homo sapien
tggtcactactaccaaggcgggcag

SEQ ID NO: 2694198 - DNA, 25 bp, Homo sapien
aaactctacagggtagctcatgcca

SEQ ID NO: 2694199 - DNA, 25 bp, Homo sapien
caacagccaatgaagaagggccaga

SEQ ID NO: 2694200 - DNA, 25 bp, Homo sapien
gacagtagaccggaaaaagacagaa

SEQ ID NO: 2694201 - DNA, 25 bp, Homo sapien
ggacagtagaccggaaaaagacaga

SEQ ID NO: 2694202 - DNA, 25 bp, Homo sapien
acagtagaccggaaaaagacagaag

SEQ ID NO: 2694203 - DNA, 25 bp, Homo sapien
aggtggtgggcggtcaggtcagtga

SEQ ID NO: 2694204 - DNA, 25 bp, Homo sapien
ccagaatgagttacagagcagcttc

SEQ ID NO: 2694205 - DNA, 25 bp, Homo sapien
gggacgatagccagaatgagttaca

SEQ ID NO: 2694206 - DNA, 25 bp, Homo sapien
cattatcctttgtcatgtgatgagg

SEQ ID NO: 2694207 - DNA, 25 bp, Homo sapien
ggcccttacattgcaaatgctcaca

SEQ ID NO: 2694208 - DNA, 25 bp, Homo sapien
gctgaggcccttacattgcaaatgc

SEQ ID NO: 2694209 - DNA, 25 bp, Homo sapien
cattgcaaatgctcacacactgtca

SEQ ID NO: 2694210 - DNA, 25 bp, Homo sapien
gaagctgaggcccttacattgcaaa

SEQ ID NO: 2694211 - DNA, 25 bp, Homo sapien
cccacaaacaattcaacatctatgt

SEQ ID NO: 2694212 - DNA, 25 bp, Homo sapien
caaacaattcaacatctatgtctgg

SEQ ID NO: 2694213 - DNA, 25 bp, Homo sapien
ttcaacatctatgtctggaaacctg

SEQ ID NO: 2694214 - DNA, 25 bp, Homo sapien
caattcaacatctatgtctggaaac

SEQ ID NO: 2694215 - DNA, 25 bp, Homo sapien
tgcatacggacacacgagacgtggc

SEQ ID NO: 2694216 - DNA, 25 bp, Homo sapien
gaattgtcccagctagtcccagtgt

SEQ ID NO: 2694217 - DNA, 25 bp, Homo sapien
tgcatatggacaaaggttggccaca

SEQ ID NO: 2694218 - DNA, 25 bp, Homo sapien
gccacatctggcagttagcaaggaa

SEQ ID NO: 2694219 - DNA, 25 bp, Homo sapien
gctatagaaatccagatcatttttc

SEQ ID NO: 2694220 - DNA, 25 bp, Homo sapien
gaacaaccaaaggtctcagactcca

SEQ ID NO: 2694221 - DNA, 25 bp, Homo sapien
ccaagggcatgggagagtgccctcc

SEQ ID NO: 2694222 - DNA, 25 bp, Homo sapien
cccaagggccttgctatagaaatcc

SEQ ID NO: 2694223 - DNA, 25 bp, Homo sapien
ctgggaactatgcagcagcggcaac

SEQ ID NO: 2694224 - DNA, 25 bp, Homo sapien
caacacagaatcatgcagggcacag

SEQ ID NO: 2694225 - DNA, 25 bp, Homo sapien
tcgttaagggttgcgcacatggaca

SEQ ID NO: 2694226 - DNA, 25 bp, Homo sapien
tgcgtttgccaacacacgaggagtg

SEQ ID NO: 2694227 - DNA, 25 bp, Homo sapien
gtgccaatcccatgccctttcttga

SEQ ID NO: 2694228 - DNA, 25 bp, Homo sapien
gcaagttagtgccaatcccatgccc

SEQ ID NO: 2694229 - DNA, 25 bp, Homo sapien
gagggccatgaaggagttaaaattg

SEQ ID NO: 2694230 - DNA, 25 bp, Homo sapien
aaattgacggggcaagttagtgcca

SEQ ID NO: 2694231 - DNA, 25 bp, Homo sapien
gggtgaacatagtcaagttacttta

SEQ ID NO: 2694232 - DNA, 25 bp, Homo sapien
ggtgaaaccttcagtatttggctga

SEQ ID NO: 2694233 - DNA, 25 bp, Homo sapien
tgtttgcacttttgtacaccactgc

SEQ ID NO: 2694234 - DNA, 25 bp, Homo sapien
gcttgcactaggatcttggtgtgaa

SEQ ID NO: 2694235 - DNA, 25 bp, Homo sapien
aagtaagcgaagttatccaaagcca

SEQ ID NO: 2694236 - DNA, 25 bp, Homo sapien
tgtcccctgccccaaatagatttta

SEQ ID NO: 2694237 - DNA, 25 bp, Homo sapien
ccacagagtctattaaagaggcagt

SEQ ID NO: 2694238 - DNA, 25 bp, Homo sapien
aatggcactaattgttgttcacggc

SEQ ID NO: 2694239 - DNA, 25 bp, Homo sapien
aaaagtagaacatgacattgcagcc

SEQ ID NO: 2694240 - DNA, 25 bp, Homo sapien
catgttatctgtaccttcagggacc

SEQ ID NO: 2694241 - DNA, 25 bp, Homo sapien
tggaaacctcagtaacactatggga

SEQ ID NO: 2694242 - DNA, 25 bp, Homo sapien
tctgactaaatagaactaagcctta

SEQ ID NO: 2694243 - DNA, 25 bp, Homo sapien
gatgaaaggtaagtgccaaaaatgt

SEQ ID NO: 2694244 - DNA, 25 bp, Homo sapien
tttagatattatgcttgccatgtga

SEQ ID NO: 2694245 - DNA, 25 bp, Homo sapien
ctcattgctaggcttactaagaaaa

SEQ ID NO: 2694246 - DNA, 25 bp, Homo sapien
tgccatgtgatagggcctgcaagcc

SEQ ID NO: 2694247 - DNA, 25 bp, Homo sapien
tcaccccagcgccatttgtaaagag

SEQ ID NO: 2694248 - DNA, 25 bp, Homo sapien
ggttccaggtctcaacgttcaggct

SEQ ID NO: 2694249 - DNA, 25 bp, Homo sapien
taatgtttggcatccttgttgggca

SEQ ID NO: 2694250 - DNA, 25 bp, Homo sapien
caaggttacggagaaggcttccgct

SEQ ID NO: 2694251 - DNA, 25 bp, Homo sapien
taaggttatgtaacgaatttgagaa

SEQ ID NO: 2694252 - DNA, 25 bp, Homo sapien
aattatgaaatagtaagtgtagcct

SEQ ID NO: 2694253 - DNA, 25 bp, Homo sapien
tcagatagacacagagtttaaagac

SEQ ID NO: 2694254 - DNA, 25 bp, Homo sapien
caaagaatgaggatagaacaaaaca

SEQ ID NO: 2694255 - DNA, 25 bp, Homo sapien
cacagtctgtatcagtgccctccag

SEQ ID NO: 2694256 - DNA, 25 bp, Homo sapien
tcttcagtgaggactttgccacttg

SEQ ID NO: 2694257 - DNA, 25 bp, Homo sapien
tgtggacagtgtaccctctagcctg

SEQ ID NO: 2694258 - DNA, 25 bp, Homo sapien
gattacactgcctgtcaatgtggac

SEQ ID NO: 2694259 - DNA, 25 bp, Homo sapien
tggtgtacggccaacgccaagtagg

SEQ ID NO: 2694260 - DNA, 25 bp, Homo sapien
cgcgctttgcagttcggtctcctgg

SEQ ID NO: 2694261 - DNA, 25 bp, Homo sapien
tccctccagtcgcaggtgagtgaca

SEQ ID NO: 2694262 - DNA, 25 bp, Homo sapien
ggattgcgttccctccagtcgcagg

SEQ ID NO: 2694263 - DNA, 25 bp, Homo sapien
cgacgcggtcctgcggactgtcgct

SEQ ID NO: 2694264 - DNA, 25 bp, Homo sapien
tgccaggaggcggaacctagggcgc

SEQ ID NO: 2694265 - DNA, 25 bp, Homo sapien
tgcggactgtcgctagtgaggcacc

SEQ ID NO: 2694266 - DNA, 25 bp, Homo sapien
tgtcgctagtgaggcacccgccggc

SEQ ID NO: 2694267 - DNA, 25 bp, Homo sapien
gggttgcgagcagcctcgctcaact

SEQ ID NO: 2694268 - DNA, 25 bp, Homo sapien
cctcgctcaactggggaattggcgg

SEQ ID NO: 2694269 - DNA, 25 bp, Homo sapien
ttgcgagcagcctcgctcaactggg

SEQ ID NO: 2694270 - DNA, 25 bp, Homo sapien
ttaggggttgcgagcagcctcgctc

SEQ ID NO: 2694271 - DNA, 25 bp, Homo sapien
caaccttcataaggccattatatga

SEQ ID NO: 2694272 - DNA, 25 bp, Homo sapien
tcagagccttcaaccctagttaaga

SEQ ID NO: 2694273 - DNA, 25 bp, Homo sapien
taagaaaattgtaggcccagggcag

SEQ ID NO: 2694274 - DNA, 25 bp, Homo sapien
tcaattacctgtatgtacactacac

SEQ ID NO: 2694275 - DNA, 25 bp, Homo sapien
gccgcaatcaggacacgtggcactt

SEQ ID NO: 2694276 - DNA, 25 bp, Homo sapien
gaagagagctgaaagaccactgctg

SEQ ID NO: 2694277 - DNA, 25 bp, Homo sapien
tcgacaacagcgcacaagaagagag

SEQ ID NO: 2694278 - DNA, 25 bp, Homo sapien
aaggcggcagccaaacctagagaga

SEQ ID NO: 2694279 - DNA, 25 bp, Homo sapien
cgccggaggccggtattcccggctg

SEQ ID NO: 2694280 - DNA, 25 bp, Homo sapien
aggccggtattcccggctgggacat

SEQ ID NO: 2694281 - DNA, 25 bp, Homo sapien
gccaaggcggctccgttctgggcct

SEQ ID NO: 2694282 - DNA, 25 bp, Homo sapien
gcggctccgttctgggcctggaggc

SEQ ID NO: 2694283 - DNA, 25 bp, Homo sapien
ggagcaggaccactatgaagcgaag

SEQ ID NO: 2694284 - DNA, 25 bp, Homo sapien
ggtctattaagagtctgcccagatc

SEQ ID NO: 2694285 - DNA, 25 bp, Homo sapien
gacagcaatgcattttggacaggac

SEQ ID NO: 2694286 - DNA, 25 bp, Homo sapien
gaaccaccatagttagactgtccag

SEQ ID NO: 2694287 - DNA, 25 bp, Homo sapien
tgaaaagttgtaggcagaggtggat

SEQ ID NO: 2694288 - DNA, 25 bp, Homo sapien
gttgaaaagttgtaggcagaggtgg

SEQ ID NO: 2694289 - DNA, 25 bp, Homo sapien
aaaagttgtaggcagaggtggattc

SEQ ID NO: 2694290 - DNA, 25 bp, Homo sapien
ctggttgaaaagttgtaggcagagg

SEQ ID NO: 2694291 - DNA, 25 bp, Homo sapien
ttaaataagggctggggtacatctc

SEQ ID NO: 2694292 - DNA, 25 bp, Homo sapien
gacagctgaattaaataagggctgg

SEQ ID NO: 2694293 - DNA, 25 bp, Homo sapien
gatgatgtcaggggcgtgagggccc

SEQ ID NO: 2694294 - DNA, 25 bp, Homo sapien
agggctggggtacatctctatatga

SEQ ID NO: 2694295 - DNA, 25 bp, Homo sapien
gccacctgactttatagccatgatt

SEQ ID NO: 2694296 - DNA, 25 bp, Homo sapien
caaaatacgtcttgaatgaaaaagg

SEQ ID NO: 2694297 - DNA, 25 bp, Homo sapien
ggatattcctaacattctaacatca

SEQ ID NO: 2694298 - DNA, 25 bp, Homo sapien
gctgtgactactacagtcgcttgcc

SEQ ID NO: 2694299 - DNA, 25 bp, Homo sapien
tggaccaccatagatccgttattgg

SEQ ID NO: 2694300 - DNA, 25 bp, Homo sapien
gatccgttattggtatttgatgtaa

SEQ ID NO: 2694301 - DNA, 25 bp, Homo sapien
tcgtcgtaactactgtggaccacca

SEQ ID NO: 2694302 - DNA, 25 bp, Homo sapien
aataagccacctccttcaatctcgt

SEQ ID NO: 2694303 - DNA, 25 bp, Homo sapien
ttcttgttagtaagctgtggtgttg

SEQ ID NO: 2694304 - DNA, 25 bp, Homo sapien
gtggtaaggagggatatgaatatcc

SEQ ID NO: 2694305 - DNA, 25 bp, Homo sapien
gaatatccaacacttcggctcattt

SEQ ID NO: 2694306 - DNA, 25 bp, Homo sapien
atgaatatccaacacttcggctcat

SEQ ID NO: 2694307 - DNA, 25 bp, Homo sapien
tggcccacttgggtaattcaaggaa

SEQ ID NO: 2694308 - DNA, 25 bp, Homo sapien
gtggcccacttgggtaattcaagga

SEQ ID NO: 2694309 - DNA, 25 bp, Homo sapien
gagggtggtactccagttgcaccag

SEQ ID NO: 2694310 - DNA, 25 bp, Homo sapien
gaagagggtggtactccagttgcac

SEQ ID NO: 2694311 - DNA, 25 bp, Homo sapien
tcatgcaaatttggaactggaggct

SEQ ID NO: 2694312 - DNA, 25 bp, Homo sapien
cttcaaaggtgttgacggaagcatg

SEQ ID NO: 2694313 - DNA, 25 bp, Homo sapien
tgtagacttaatccactcatgcttg

SEQ ID NO: 2694314 - DNA, 25 bp, Homo sapien
cttagaccctctggttgtagactta

SEQ ID NO: 2694315 - DNA, 25 bp, Homo sapien
tttggctttattcaataaggcctgc

SEQ ID NO: 2694316 - DNA, 25 bp, Homo sapien
gcctgcgtctgaggaatgctagtca

SEQ ID NO: 2694317 - DNA, 25 bp, Homo sapien
ctttattcaataaggcctgcgtctg

SEQ ID NO: 2694318 - DNA, 25 bp, Homo sapien
gctagtcagcgtgcatcgaaataac

SEQ ID NO: 2694319 - DNA, 25 bp, Homo sapien
catctcctttgatcaagaaagctga

SEQ ID NO: 2694320 - DNA, 25 bp, Homo sapien
aattgtactggaggtaaccacaggc

SEQ ID NO: 2694321 - DNA, 25 bp, Homo sapien
tgatgtacgtcctgcatgaacggca

SEQ ID NO: 2694322 - DNA, 25 bp, Homo sapien
tgaacggcatctcacaattgtactg

SEQ ID NO: 2694323 - DNA, 25 bp, Homo sapien
ctggtcaaagggttgtacaagaatt

SEQ ID NO: 2694324 - DNA, 25 bp, Homo sapien
ggagccataaactcaatagtagcat

SEQ ID NO: 2694325 - DNA, 25 bp, Homo sapien
gggttgtacaagaattcttcaggaa

SEQ ID NO: 2694326 - DNA, 25 bp, Homo sapien
ccataaactcaatagtagcattttg

SEQ ID NO: 2694327 - DNA, 25 bp, Homo sapien
tgcctcctgggttcaagagattctc

SEQ ID NO: 2694328 - DNA, 25 bp, Homo sapien
tggtgtgatctcagctcactgcaac

SEQ ID NO: 2694329 - DNA, 25 bp, Homo sapien
ctctgcctcctgggttcaagagatt

SEQ ID NO: 2694330 - DNA, 25 bp, Homo sapien
ctgtgtcccccatgctggagagcag

SEQ ID NO: 2694331 - DNA, 25 bp, Homo sapien
catcaaatacaaagagatacactgg

SEQ ID NO: 2694332 - DNA, 25 bp, Homo sapien
cgactgcattgtgagacacatcaaa

SEQ ID NO: 2694333 - DNA, 25 bp, Homo sapien
tacaaagagatacactggaggctga

SEQ ID NO: 2694334 - DNA, 25 bp, Homo sapien
aattcaagtatccagtttcgactgc

SEQ ID NO: 2694335 - DNA, 25 bp, Homo sapien
caatttttgttctagtgttgccagg

SEQ ID NO: 2694336 - DNA, 25 bp, Homo sapien
tcaaatgttatgaagccaatttttg

SEQ ID NO: 2694337 - DNA, 25 bp, Homo sapien
actttcctgaagaccgtagaaatgg

SEQ ID NO: 2694338 - DNA, 25 bp, Homo sapien
ccgtagaaatggattgtactgtcaa

SEQ ID NO: 2694339 - DNA, 25 bp, Homo sapien
acaaggtcaggagcaatgtggtgaa

SEQ ID NO: 2694340 - DNA, 25 bp, Homo sapien
gctcaccaatagctctgtcattcac

SEQ ID NO: 2694341 - DNA, 25 bp, Homo sapien
ctttctcataaagaaggtcggccgg

SEQ ID NO: 2694342 - DNA, 25 bp, Homo sapien
taaggaagcaatacagctcaccaat

SEQ ID NO: 2694343 - DNA, 25 bp, Homo sapien
gtttactaataagttctctggcata

SEQ ID NO: 2694344 - DNA, 25 bp, Homo sapien
taagttctctggcataggtataaaa

SEQ ID NO: 2694345 - DNA, 25 bp, Homo sapien
ttctctggcataggtataaaaacat

SEQ ID NO: 2694346 - DNA, 25 bp, Homo sapien
ctaataagttctctggcataggtat

SEQ ID NO: 2694347 - DNA, 25 bp, Homo sapien
gagtttcttctgaactgaccccaat

SEQ ID NO: 2694348 - DNA, 25 bp, Homo sapien
tttccaggcaggtaataagagtttc

SEQ ID NO: 2694349 - DNA, 25 bp, Homo sapien
cttctgaactgaccccaatgacact

SEQ ID NO: 2694350 - DNA, 25 bp, Homo sapien
atggcaatttccaggcaggtaataa

SEQ ID NO: 2694351 - DNA, 25 bp, Homo sapien
aaaaatacttcgcactatggcacag

SEQ ID NO: 2694352 - DNA, 25 bp, Homo sapien
tgtaagttccaaagcgagtttagct

SEQ ID NO: 2694353 - DNA, 25 bp, Homo sapien
cggcatatatgcatgtacagggtag

SEQ ID NO: 2694354 - DNA, 25 bp, Homo sapien
aaagttgggccttacagttcttgca

SEQ ID NO: 2694355 - DNA, 25 bp, Homo sapien
ttgtggcaaagttttcagtaaatct

SEQ ID NO: 2694356 - DNA, 25 bp, Homo sapien
ggcaaagttttcagtaaatcttgca

SEQ ID NO: 2694357 - DNA, 25 bp, Homo sapien
aagttttcagtaaatcttgcacgag

SEQ ID NO: 2694358 - DNA, 25 bp, Homo sapien
tgcagtgcaggacccaaggcactct

SEQ ID NO: 2694359 - DNA, 25 bp, Homo sapien
ttcgaccaccagttggagacatcag

SEQ ID NO: 2694360 - DNA, 25 bp, Homo sapien
gttcctctcgtggtttcagggctcc

SEQ ID NO: 2694361 - DNA, 25 bp, Homo sapien
ttggagacatcagcttaaaggcagc

SEQ ID NO: 2694362 - DNA, 25 bp, Homo sapien
tgaaagacagacattcgaccaccag

SEQ ID NO: 2694363 - DNA, 25 bp, Homo sapien
actataggctctcagcatcacacct

SEQ ID NO: 2694364 - DNA, 25 bp, Homo sapien
ggactataggctctcagcatcacac

SEQ ID NO: 2694365 - DNA, 25 bp, Homo sapien
gctaggactataggctctcagcatc

SEQ ID NO: 2694366 - DNA, 25 bp, Homo sapien
taggactataggctctcagcatcac

SEQ ID NO: 2694367 - DNA, 25 bp, Homo sapien
tatagaagtcagtggatggtgtcat

SEQ ID NO: 2694368 - DNA, 25 bp, Homo sapien
tgagaaggaataagtcaacagcaac

SEQ ID NO: 2694369 - DNA, 25 bp, Homo sapien
cagtccaaggctaatttcttataga

SEQ ID NO: 2694370 - DNA, 25 bp, Homo sapien
agtcaacagcaacttgctgaccaga

SEQ ID NO: 2694371 - DNA, 25 bp, Homo sapien
cagagaagccaaatcagaatactgt

SEQ ID NO: 2694372 - DNA, 25 bp, Homo sapien
gagaagccaaatcagaatactgtcc

SEQ ID NO: 2694373 - DNA, 25 bp, Homo sapien
agaagccaaatcagaatactgtcca

SEQ ID NO: 2694374 - DNA, 25 bp, Homo sapien
ccagagaagccaaatcagaatactg

SEQ ID NO: 2694375 - DNA, 25 bp, Homo sapien
tacctgctgaataccgagaaataca

SEQ ID NO: 2694376 - DNA, 25 bp, Homo sapien
aatagacactacctgctgaataccg

SEQ ID NO: 2694377 - DNA, 25 bp, Homo sapien
ctgatgatggtaagagggatagtaa

SEQ ID NO: 2694378 - DNA, 25 bp, Homo sapien
ggatagtaatagacactacctgctg

SEQ ID NO: 2694379 - DNA, 25 bp, Homo sapien
cgagtaaggtatctctgtagttcct

SEQ ID NO: 2694380 - DNA, 25 bp, Homo sapien
aaagccaatcttccgagtaaggtat

SEQ ID NO: 2694381 - DNA, 25 bp, Homo sapien
ctttggtgcaccgaatcctcatgac

SEQ ID NO: 2694382 - DNA, 25 bp, Homo sapien
tggtgcaccgaatcctcatgactgc

SEQ ID NO: 2694383 - DNA, 25 bp, Homo sapien
tttttcgtagagacatcattttgca

SEQ ID NO: 2694384 - DNA, 25 bp, Homo sapien
aggccaggccccaacaatcctccca

SEQ ID NO: 2694385 - DNA, 25 bp, Homo sapien
caacctgactcccaggccaggcccc

SEQ ID NO: 2694386 - DNA, 25 bp, Homo sapien
aatgttgtccaggctcgtctctaat

SEQ ID NO: 2694387 - DNA, 25 bp, Homo sapien
tctgtactgcatacccagcgtctgg

SEQ ID NO: 2694388 - DNA, 25 bp, Homo sapien
cgttaggcaaagacagtaagtcggt

SEQ ID NO: 2694389 - DNA, 25 bp, Homo sapien
gctggatgtatacaagagtgctgac

SEQ ID NO: 2694390 - DNA, 25 bp, Homo sapien
cagcgtctgggttgacgttaggcaa

SEQ ID NO: 2694391 - DNA, 25 bp, Homo sapien
gtcgaaactactggcaaacacaaag

SEQ ID NO: 2694392 - DNA, 25 bp, Homo sapien
tgaaattgcttgaacatcagctcca

SEQ ID NO: 2694393 - DNA, 25 bp, Homo sapien
ccaagaaagacatcattcagagtcg

SEQ ID NO: 2694394 - DNA, 25 bp, Homo sapien
catattggccaataaccctgaaatt

SEQ ID NO: 2694395 - DNA, 25 bp, Homo sapien
cccaataggaaattcaagaaagtgg

SEQ ID NO: 2694396 - DNA, 25 bp, Homo sapien
catttttcccaataggaaattcaag

SEQ ID NO: 2694397 - DNA, 25 bp, Homo sapien
caataggaaattcaagaaagtgggt

SEQ ID NO: 2694398 - DNA, 25 bp, Homo sapien
tcccaataggaaattcaagaaagtg

SEQ ID NO: 2694399 - DNA, 25 bp, Homo sapien
gggagtcaatgactgcattcactag

SEQ ID NO: 2694400 - DNA, 25 bp, Homo sapien
agcatcccgagcgtcactcagactg

SEQ ID NO: 2694401 - DNA, 25 bp, Homo sapien
agaacggtaagctgaaagggagtca

SEQ ID NO: 2694402 - DNA, 25 bp, Homo sapien
ctgaagaacggtaagctgaaaggga

SEQ ID NO: 2694403 - DNA, 25 bp, Homo sapien
gagagccaacacaaaaagtgggaaa

SEQ ID NO: 2694404 - DNA, 25 bp, Homo sapien
ggagagccaacacaaaaagtgggaa

SEQ ID NO: 2694405 - DNA, 25 bp, Homo sapien
ttaaggagagccaacacaaaaagtg

SEQ ID NO: 2694406 - DNA, 25 bp, Homo sapien
aaggagagccaacacaaaaagtggg

SEQ ID NO: 2694407 - DNA, 25 bp, Homo sapien
ttgacacatagcaaaaatgcgttca

SEQ ID NO: 2694408 - DNA, 25 bp, Homo sapien
ctcatctgagagattgtcaactcta

SEQ ID NO: 2694409 - DNA, 25 bp, Homo sapien
ttcatctagacgtgcatttgtccca

SEQ ID NO: 2694410 - DNA, 25 bp, Homo sapien
gagttgtgagcataaggtaaaccaa

SEQ ID NO: 2694411 - DNA, 25 bp, Homo sapien
gtgtgtcatccttgtacaaggggca

SEQ ID NO: 2694412 - DNA, 25 bp, Homo sapien
ctaatcttctctgtatcattccaat

SEQ ID NO: 2694413 - DNA, 25 bp, Homo sapien
tttagtatatttgctgctgaagcga

SEQ ID NO: 2694414 - DNA, 25 bp, Homo sapien
gtatatttgctgctgaagcgagcaa

SEQ ID NO: 2694415 - DNA, 25 bp, Homo sapien
ggcacccgccaccagagctggccaa

SEQ ID NO: 2694416 - DNA, 25 bp, Homo sapien
acccgccaccagagctggccaattt

SEQ ID NO: 2694417 - DNA, 25 bp, Homo sapien
agtcttgaactctggacctcctgat

SEQ ID NO: 2694418 - DNA, 25 bp, Homo sapien
ttattagaggcagggtatcaccatc

SEQ ID NO: 2694419 - DNA, 25 bp, Homo sapien
gggctgaggtatggttctatcactg

SEQ ID NO: 2694420 - DNA, 25 bp, Homo sapien
ttgtctcattagaaggtctccaggg

SEQ ID NO: 2694421 - DNA, 25 bp, Homo sapien
ttagcccaggcctatacagcgtcaa

SEQ ID NO: 2694422 - DNA, 25 bp, Homo sapien
taaatgatacgaattcttcagctcc

SEQ ID NO: 2694423 - DNA, 25 bp, Homo sapien
ttagaatacctcctcaaggacccgc

SEQ ID NO: 2694424 - DNA, 25 bp, Homo sapien
ttgatgcatagttttgaactcctag

SEQ ID NO: 2694425 - DNA, 25 bp, Homo sapien
cataggctgtggaattgatgcatag

SEQ ID NO: 2694426 - DNA, 25 bp, Homo sapien
tcctagaacttggctgagaaaattc

SEQ ID NO: 2694427 - DNA, 25 bp, Homo sapien
ctgtggaattgatgcatagttttga

SEQ ID NO: 2694428 - DNA, 25 bp, Homo sapien
aattacatatctaatgtatggtcta

SEQ ID NO: 2694429 - DNA, 25 bp, Homo sapien
taattacatatctaatgtatggtct

SEQ ID NO: 2694430 - DNA, 25 bp, Homo sapien
agctattattctggcagattctggt

SEQ ID NO: 2694431 - DNA, 25 bp, Homo sapien
tctgctctctaagccaagagatgaa

SEQ ID NO: 2694432 - DNA, 25 bp, Homo sapien
ctctaagccaagagatgaaagctat

SEQ ID NO: 2694433 - DNA, 25 bp, Homo sapien
tgctctctaagccaagagatgaaag

SEQ ID NO: 2694434 - DNA, 25 bp, Homo sapien
tgttttactactagcaaatggaaaa

SEQ ID NO: 2694435 - DNA, 25 bp, Homo sapien
acaaattgttttactactagcaaat

SEQ ID NO: 2694436 - DNA, 25 bp, Homo sapien
aattgttttactactagcaaatgga

SEQ ID NO: 2694437 - DNA, 25 bp, Homo sapien
aaattgttttactactagcaaatgg

SEQ ID NO: 2694438 - DNA, 25 bp, Homo sapien
tcaataaattagtgtaccccataaa

SEQ ID NO: 2694439 - DNA, 25 bp, Homo sapien
cacagtatgatgactatggttaata

SEQ ID NO: 2694440 - DNA, 25 bp, Homo sapien
gatcttacttatgtgtggaacctaa

SEQ ID NO: 2694441 - DNA, 25 bp, Homo sapien
tggattctggtgatctattacacag

SEQ ID NO: 2694442 - DNA, 25 bp, Homo sapien
ggaattcataatatgataatgcaga

SEQ ID NO: 2694443 - DNA, 25 bp, Homo sapien
tgataatgcagattctgttctgtct

SEQ ID NO: 2694444 - DNA, 25 bp, Homo sapien
taatatgataatgcagattctgttc

SEQ ID NO: 2694445 - DNA, 25 bp, Homo sapien
tcataatatgataatgcagattctg

SEQ ID NO: 2694446 - DNA, 25 bp, Homo sapien
aaagaaggtattacacatttccagg

SEQ ID NO: 2694447 - DNA, 25 bp, Homo sapien
aggttgttgaaatcacagtgagaac

SEQ ID NO: 2694448 - DNA, 25 bp, Homo sapien
gaaaaaagtatccaatcatacgtag

SEQ ID NO: 2694449 - DNA, 25 bp, Homo sapien
ccaggtattctgcactatcgtgaca

SEQ ID NO: 2694450 - DNA, 25 bp, Homo sapien
tagtgaggcacaaggaagattatcc

SEQ ID NO: 2694451 - DNA, 25 bp, Homo sapien
gaaatcacatttggtggtcccctag

SEQ ID NO: 2694452 - DNA, 25 bp, Homo sapien
taacaagagtcatacccacttaggg

SEQ ID NO: 2694453 - DNA, 25 bp, Homo sapien
caaacaatggtctgcatgggttaca

SEQ ID NO: 2694454 - DNA, 25 bp, Homo sapien
tgttcactcggaggtgaagaaaacc

SEQ ID NO: 2694455 - DNA, 25 bp, Homo sapien
cgaggtcacgatttcgagagtagcc

SEQ ID NO: 2694456 - DNA, 25 bp, Homo sapien
tcgtgcctccccaactcttctggcc

SEQ ID NO: 2694457 - DNA, 25 bp, Homo sapien
ctgctgttcactcggaggtgaagaa

SEQ ID NO: 2694458 - DNA, 25 bp, Homo sapien
gcgaccaagcgcgaggctctggccg

SEQ ID NO: 2694459 - DNA, 25 bp, Homo sapien
ccccacgcgaccaagcgcgaggctc

SEQ ID NO: 2694460 - DNA, 25 bp, Homo sapien
acgcgaccaagcgcgaggctctggc

SEQ ID NO: 2694461 - DNA, 25 bp, Homo sapien
gaccaagcgcgaggctctggccgcc

SEQ ID NO: 2694462 - DNA, 25 bp, Homo sapien
ggtcccggagcctgtgagctaagca

SEQ ID NO: 2694463 - DNA, 25 bp, Homo sapien
cggtcccggagcctgtgagctaagc

SEQ ID NO: 2694464 - DNA, 25 bp, Homo sapien
ccggagcctgtgagctaagcactca

SEQ ID NO: 2694465 - DNA, 25 bp, Homo sapien
tcccggagcctgtgagctaagcact

SEQ ID NO: 2694466 - DNA, 25 bp, Homo sapien
ggcgatgactagaggccgggccgca

SEQ ID NO: 2694467 - DNA, 25 bp, Homo sapien
agggcgatgactagaggccgggccg

SEQ ID NO: 2694468 - DNA, 25 bp, Homo sapien
ctgcgagggcgatgactagaggccg

SEQ ID NO: 2694469 - DNA, 25 bp, Homo sapien
cgagggcgatgactagaggccgggc

SEQ ID NO: 2694470 - DNA, 25 bp, Homo sapien
gcagtggcggtgatgttggccgccg

SEQ ID NO: 2694471 - DNA, 25 bp, Homo sapien
ccgcccgccgggtccggtcgctgcg

SEQ ID NO: 2694472 - DNA, 25 bp, Homo sapien
cgcagcgaccggacccggcgggcgg

SEQ ID NO: 2694473 - DNA, 25 bp, Homo sapien
gatccggttgatgcgctgttccgag

SEQ ID NO: 2694474 - DNA, 25 bp, Homo sapien
tcatgagcagctttctccgacgcag

SEQ ID NO: 2694475 - DNA, 25 bp, Homo sapien
tgggaagccgacagacctgagcccg

SEQ ID NO: 2694476 - DNA, 25 bp, Homo sapien
cctgtgaaagcccatgatccggttg

SEQ ID NO: 2694477 - DNA, 25 bp, Homo sapien
gaacacaaacactaggatatgagca

SEQ ID NO: 2694478 - DNA, 25 bp, Homo sapien
taggtgacagtgttgacggcactga

SEQ ID NO: 2694479 - DNA, 25 bp, Homo sapien
agagtccctgatacacgtaggatga

SEQ ID NO: 2694480 - DNA, 25 bp, Homo sapien
tctagccggcccgtaggtgacagtg

SEQ ID NO: 2694481 - DNA, 25 bp, Homo sapien
gagtccaatttgtctcccagttggg

SEQ ID NO: 2694482 - DNA, 25 bp, Homo sapien
ctcgctttgaaacggaaggaacgct

SEQ ID NO: 2694483 - DNA, 25 bp, Homo sapien
cgctgccggagctcaaggttgacat

SEQ ID NO: 2694484 - DNA, 25 bp, Homo sapien
ctcaggtggtttaatgaacgagtcc

SEQ ID NO: 2694485 - DNA, 25 bp, Homo sapien
aacaaaagctctgactccaagagca

SEQ ID NO: 2694486 - DNA, 25 bp, Homo sapien
caagagcaagaagagcacatcccac

SEQ ID NO: 2694487 - DNA, 25 bp, Homo sapien
aaaagctctgactccaagagcaaga

SEQ ID NO: 2694488 - DNA, 25 bp, Homo sapien
tttgcaaacaaaagctctgactcca

SEQ ID NO: 2694489 - DNA, 25 bp, Homo sapien
tgaatccacatagggtgcagaacca

SEQ ID NO: 2694490 - DNA, 25 bp, Homo sapien
aaacagccacatggatctggtagat

SEQ ID NO: 2694491 - DNA, 25 bp, Homo sapien
cagaaccaactgatatggagggcca

SEQ ID NO: 2694492 - DNA, 25 bp, Homo sapien
tgacttctatgatcaaaagcactca

SEQ ID NO: 2694493 - DNA, 25 bp, Homo sapien
tattcaggaccagaggaactgcatt

SEQ ID NO: 2694494 - DNA, 25 bp, Homo sapien
taggaagattacctcatattcagga

SEQ ID NO: 2694495 - DNA, 25 bp, Homo sapien
tacatcatggtacaaccaaaatgga

SEQ ID NO: 2694496 - DNA, 25 bp, Homo sapien
tttaatcctagcaccgcttagtagc

SEQ ID NO: 2694497 - DNA, 25 bp, Homo sapien
ataaaatatgtttctcaagtcatac

SEQ ID NO: 2694498 - DNA, 25 bp, Homo sapien
aaatatgtttctcaagtcatacaat

SEQ ID NO: 2694499 - DNA, 25 bp, Homo sapien
taaaatatgtttctcaagtcataca

SEQ ID NO: 2694500 - DNA, 25 bp, Homo sapien
tatgtttctcaagtcatacaattct

SEQ ID NO: 2694501 - DNA, 25 bp, Homo sapien
aaatcacaataaatcaaacagcagc

SEQ ID NO: 2694502 - DNA, 25 bp, Homo sapien
atcattcaaatcacaataaatcaaa

SEQ ID NO: 2694503 - DNA, 25 bp, Homo sapien
ttcaaatcacaataaatcaaacagc

SEQ ID NO: 2694504 - DNA, 25 bp, Homo sapien
cattcaaatcacaataaatcaaaca

SEQ ID NO: 2694505 - DNA, 25 bp, Homo sapien
caagttgtaaagtaagaaatggagc

SEQ ID NO: 2694506 - DNA, 25 bp, Homo sapien
tgtataatcccatgtacgcaagttg

SEQ ID NO: 2694507 - DNA, 25 bp, Homo sapien
cccatgtacgcaagttgtaaagtaa

SEQ ID NO: 2694508 - DNA, 25 bp, Homo sapien
aatatttgtataatcccatgtacgc

SEQ ID NO: 2694509 - DNA, 25 bp, Homo sapien
tcagaccgtaagcaggactaacatt

SEQ ID NO: 2694510 - DNA, 25 bp, Homo sapien
tttttcatgaaggacctcaatccac

SEQ ID NO: 2694511 - DNA, 25 bp, Homo sapien
tttggagataagtgggcaaaccaca

SEQ ID NO: 2694512 - DNA, 25 bp, Homo sapien
caattagctagtcataaatcaatcc

SEQ ID NO: 2694513 - DNA, 25 bp, Homo sapien
gaagacttcgcccattttgctatag

SEQ ID NO: 2694514 - DNA, 25 bp, Homo sapien
ttcagagccccaataatcaagcagt

SEQ ID NO: 2694515 - DNA, 25 bp, Homo sapien
gaattcccgacaatagaagtgcagc

SEQ ID NO: 2694516 - DNA, 25 bp, Homo sapien
gatcgatttatcacttcggcaggaa

SEQ ID NO: 2694517 - DNA, 25 bp, Homo sapien
tgttctcctaaaagcactagctcag

SEQ ID NO: 2694518 - DNA, 25 bp, Homo sapien
caagaagcagtctctagggctggct

SEQ ID NO: 2694519 - DNA, 25 bp, Homo sapien
tgaaggtgtaaaccaatttgcctcc

SEQ ID NO: 2694520 - DNA, 25 bp, Homo sapien
taatgacattggtactctattcttc

SEQ ID NO: 2694521 - DNA, 25 bp, Homo sapien
ataactcatctagaccatatttggg

SEQ ID NO: 2694522 - DNA, 25 bp, Homo sapien
ctttgattaaatacttgtgctggag

SEQ ID NO: 2694523 - DNA, 25 bp, Homo sapien
gacaacccaacaaaatatggcagtt

SEQ ID NO: 2694524 - DNA, 25 bp, Homo sapien
tatgctattgggttgcatgcctcaa

SEQ ID NO: 2694525 - DNA, 25 bp, Homo sapien
ctgcgagaagcattgaagagggata

SEQ ID NO: 2694526 - DNA, 25 bp, Homo sapien
tgtggtagctgcgagaagcattgaa

SEQ ID NO: 2694527 - DNA, 25 bp, Homo sapien
gaagagggatagagactggaggttc

SEQ ID NO: 2694528 - DNA, 25 bp, Homo sapien
gaagcattgaagagggatagagact

SEQ ID NO: 2694529 - DNA, 25 bp, Homo sapien
aatgcggcaactttctccgtacacg

SEQ ID NO: 2694530 - DNA, 25 bp, Homo sapien
cagagccaaagaggcgtcctgggca

SEQ ID NO: 2694531 - DNA, 25 bp, Homo sapien
tgattagtgcgatggagcgcagcgc

SEQ ID NO: 2694532 - DNA, 25 bp, Homo sapien
ttaatttgcgctaaataatgcggca

SEQ ID NO: 2694533 - DNA, 25 bp, Homo sapien
aacgaaaacaggacgtgctggcgcc

SEQ ID NO: 2694534 - DNA, 25 bp, Homo sapien
taaacactagcagcacctacagctg

SEQ ID NO: 2694535 - DNA, 25 bp, Homo sapien
aacgcccggcaaagaccagcgctaa

SEQ ID NO: 2694536 - DNA, 25 bp, Homo sapien
cagcacctacagctgtggcggccat

SEQ ID NO: 2694537 - DNA, 25 bp, Homo sapien
accggacaaacaaggaggctgagct

SEQ ID NO: 2694538 - DNA, 25 bp, Homo sapien
gcgaaccggacaaacaaggaggctg

SEQ ID NO: 2694539 - DNA, 25 bp, Homo sapien
acgcacaggcgaaccggacaaacaa

SEQ ID NO: 2694540 - DNA, 25 bp, Homo sapien
ttgagtaccacgcacaggcgaaccg

SEQ ID NO: 2694541 - DNA, 25 bp, Homo sapien
tgccgaccgcgggaatactggtgcc

SEQ ID NO: 2694542 - DNA, 25 bp, Homo sapien
ctgccgaccgcgggaatactggtgc

SEQ ID NO: 2694543 - DNA, 25 bp, Homo sapien
tcaggattgtcttaacctcccggcc

SEQ ID NO: 2694544 - DNA, 25 bp, Homo sapien
gaccagcactatagcaatcatccag

SEQ ID NO: 2694545 - DNA, 25 bp, Homo sapien
tctggatatcttgaagctagcaccg

SEQ ID NO: 2694546 - DNA, 25 bp, Homo sapien
gaataggcaggattagcaaagacca

SEQ ID NO: 2694547 - DNA, 25 bp, Homo sapien
ttttatccctgctacgagacctctc

SEQ ID NO: 2694548 - DNA, 25 bp, Homo sapien
cccgggatgccgatcgttttcgata

SEQ ID NO: 2694549 - DNA, 25 bp, Homo sapien
gagggtgagcgacttctagaccgac

SEQ ID NO: 2694550 - DNA, 25 bp, Homo sapien
agacgcttcctgtcccttgaccgag

SEQ ID NO: 2694551 - DNA, 25 bp, Homo sapien
tccaggactggaggatcgggatcgc

SEQ ID NO: 2694552 - DNA, 25 bp, Homo sapien
gcttctactccttgagcgtctcctg

SEQ ID NO: 2694553 - DNA, 25 bp, Homo sapien
gtctctacttcgagatcttcttcgc

SEQ ID NO: 2694554 - DNA, 25 bp, Homo sapien
tcttcttcgctctcggcttctgtct

SEQ ID NO: 2694555 - DNA, 25 bp, Homo sapien
gccagggcaacagaacgagactttg

SEQ ID NO: 2694556 - DNA, 25 bp, Homo sapien
agccagggcaacagaacgagacttt

SEQ ID NO: 2694557 - DNA, 25 bp, Homo sapien
ccagggcaacagaacgagactttgg

SEQ ID NO: 2694558 - DNA, 25 bp, Homo sapien
ctttagaactttccccaccatcagt

SEQ ID NO: 2694559 - DNA, 25 bp, Homo sapien
cccaccatcagttttctctttggac

SEQ ID NO: 2694560 - DNA, 25 bp, Homo sapien
tctctttagaactttccccaccatc

SEQ ID NO: 2694561 - DNA, 25 bp, Homo sapien
catcctccttgtcatctttgtcttt

SEQ ID NO: 2694562 - DNA, 25 bp, Homo sapien
tgggcatggttccccattcctgtag

SEQ ID NO: 2694563 - DNA, 25 bp, Homo sapien
catggttccccattcctgtagttcc

SEQ ID NO: 2694564 - DNA, 25 bp, Homo sapien
tggttccccattcctgtagttcctc

SEQ ID NO: 2694565 - DNA, 25 bp, Homo sapien
gcatggttccccattcctgtagttc

SEQ ID NO: 2694566 - DNA, 25 bp, Homo sapien
tcttccagcttattctggtcaaagt

SEQ ID NO: 2694567 - DNA, 25 bp, Homo sapien
tcatcgtcctctaaactccactttt

SEQ ID NO: 2694568 - DNA, 25 bp, Homo sapien
tctactctttcttttcgctttctca

SEQ ID NO: 2694569 - DNA, 25 bp, Homo sapien
tttccatagcctttttacgttgctc

SEQ ID NO: 2694570 - DNA, 25 bp, Homo sapien
gacatcatgactacttatagataga

SEQ ID NO: 2694571 - DNA, 25 bp, Homo sapien
acggcactgcactcaagcgtaggca

SEQ ID NO: 2694572 - DNA, 25 bp, Homo sapien
tcccaacactgagaaaggtcaaagc

SEQ ID NO: 2694573 - DNA, 25 bp, Homo sapien
taaaatctcgaaagtcaaaatcaga

SEQ ID NO: 2694574 - DNA, 25 bp, Homo sapien
cttcttccatgtaagcatctaatgg

SEQ ID NO: 2694575 - DNA, 25 bp, Homo sapien
gtaagcatctaatggatctaactcc

SEQ ID NO: 2694576 - DNA, 25 bp, Homo sapien
tctaatggatctaactcctcaccct

SEQ ID NO: 2694577 - DNA, 25 bp, Homo sapien
ccaccttttacacttctcatgttaa

SEQ ID NO: 2694578 - DNA, 25 bp, Homo sapien
aaaataaaataggacaggtgcagtg

SEQ ID NO: 2694579 - DNA, 25 bp, Homo sapien
gctaatgcctataatcccagcacgt

SEQ ID NO: 2694580 - DNA, 25 bp, Homo sapien
tcccagcacgttgggaggccaaggc

SEQ ID NO: 2694581 - DNA, 25 bp, Homo sapien
aggtggatcacctgaggtcaggagt

SEQ ID NO: 2694582 - DNA, 25 bp, Homo sapien
ggtcccagggcgacgggccagggcg

SEQ ID NO: 2694583 - DNA, 25 bp, Homo sapien
cgccctggcccgtcgccctgggacc

SEQ ID NO: 2694584 - DNA, 25 bp, Homo sapien
tcaaggattcgtcccatcagtcctc

SEQ ID NO: 2694585 - DNA, 25 bp, Homo sapien
aaggattcgtcccatcagtcctcct

SEQ ID NO: 2694586 - DNA, 25 bp, Homo sapien
gctcaaggattcgtcccatcagtcc

SEQ ID NO: 2694587 - DNA, 25 bp, Homo sapien
tgggctcaaggattcgtcccatcag

SEQ ID NO: 2694588 - DNA, 25 bp, Homo sapien
tgacaacttttgtgaccgttggccc

SEQ ID NO: 2694589 - DNA, 25 bp, Homo sapien
tatcagaatccacaactgctttttt

SEQ ID NO: 2694590 - DNA, 25 bp, Homo sapien
cttttgtgaccgttggcccagactt

SEQ ID NO: 2694591 - DNA, 25 bp, Homo sapien
tcttatcagaatccacaactgcttt

SEQ ID NO: 2694592 - DNA, 25 bp, Homo sapien
tgtaagggctgtctgaagatcaact

SEQ ID NO: 2694593 - DNA, 25 bp, Homo sapien
gatcaactggttctagaagctttcg

SEQ ID NO: 2694594 - DNA, 25 bp, Homo sapien
tactcaatttttccatgatcaactg

SEQ ID NO: 2694595 - DNA, 25 bp, Homo sapien
ttcgctgttttgtttgataccctgt

SEQ ID NO: 2694596 - DNA, 25 bp, Homo sapien
tcttcatggaaattccacactggac

SEQ ID NO: 2694597 - DNA, 25 bp, Homo sapien
tcctttaactgtaatgccctccatt

SEQ ID NO: 2694598 - DNA, 25 bp, Homo sapien
ttccacactggacccaggatttaat

SEQ ID NO: 2694599 - DNA, 25 bp, Homo sapien
catttccaatcgaaacacatttacc

SEQ ID NO: 2694600 - DNA, 25 bp, Homo sapien
tctgatccatgatgtgtctaaacat

SEQ ID NO: 2694601 - DNA, 25 bp, Homo sapien
gatgggcgtgggcttttcatagcca

SEQ ID NO: 2694602 - DNA, 25 bp, Homo sapien
aatctcgtccagacattatagcagg

SEQ ID NO: 2694603 - DNA, 25 bp, Homo sapien
taaacatgggcaacagaaaagcaat

SEQ ID NO: 2694604 - DNA, 25 bp, Homo sapien
ttctgtttgacaacaaagctgttat

SEQ ID NO: 2694605 - DNA, 25 bp, Homo sapien
cattataaactataaggtctttctg

SEQ ID NO: 2694606 - DNA, 25 bp, Homo sapien
caacttcattgtcataattaagaac

SEQ ID NO: 2694607 - DNA, 25 bp, Homo sapien
tgtacataaagacaacttcattgtc

SEQ ID NO: 2694608 - DNA, 25 bp, Homo sapien
tgctgcttccagaaacaaccttggt

SEQ ID NO: 2694609 - DNA, 25 bp, Homo sapien
tgccacagaagccatactgctgctt

SEQ ID NO: 2694610 - DNA, 25 bp, Homo sapien
cacagaagccatactgctgcttcca

SEQ ID NO: 2694611 - DNA, 25 bp, Homo sapien
tgtgccacagaagccatactgctgc

SEQ ID NO: 2694612 - DNA, 25 bp, Homo sapien
gattcctgttcctccgtaaacacag

SEQ ID NO: 2694613 - DNA, 25 bp, Homo sapien
tcttacactctttagtaatctgtaa

SEQ ID NO: 2694614 - DNA, 25 bp, Homo sapien
taaagccagttctcgagttggagtc

SEQ ID NO: 2694615 - DNA, 25 bp, Homo sapien
tgttcctccgtaaacacagaccact

SEQ ID NO: 2694616 - DNA, 25 bp, Homo sapien
tgtgcaaacaataatttcagcacct

SEQ ID NO: 2694617 - DNA, 25 bp, Homo sapien
tcaatcattcgaccaggtgtgcaaa

SEQ ID NO: 2694618 - DNA, 25 bp, Homo sapien
gctaacatgtcaatcattcgaccag

SEQ ID NO: 2694619 - DNA, 25 bp, Homo sapien
cactgttagcggctaacatgtcaat

SEQ ID NO: 2694620 - DNA, 25 bp, Homo sapien
aaattttaagatactgcagctttaa

SEQ ID NO: 2694621 - DNA, 25 bp, Homo sapien
aattttaagatactgcagctttaag

SEQ ID NO: 2694622 - DNA, 25 bp, Homo sapien
attttaagatactgcagctttaaga

SEQ ID NO: 2694623 - DNA, 25 bp, Homo sapien
tattgcaatggaaacctctgagagc

SEQ ID NO: 2694624 - DNA, 25 bp, Homo sapien
caggaggagacttaatcaatgcagc

SEQ ID NO: 2694625 - DNA, 25 bp, Homo sapien
gatggtttaagtctcggaagcccag

SEQ ID NO: 2694626 - DNA, 25 bp, Homo sapien
tagttttgcaaggtcgggaacagca

SEQ ID NO: 2694627 - DNA, 25 bp, Homo sapien
catcatagggcctgaagaacctgta

SEQ ID NO: 2694628 - DNA, 25 bp, Homo sapien
gaaaacagccctctccaaaacacat

SEQ ID NO: 2694629 - DNA, 25 bp, Homo sapien
aacacatcataaaactaagactgag

SEQ ID NO: 2694630 - DNA, 25 bp, Homo sapien
gcatcgagccacatcagccattatc

SEQ ID NO: 2694631 - DNA, 25 bp, Homo sapien
tacaatgtcttaatctagtggcaaa

SEQ ID NO: 2694632 - DNA, 25 bp, Homo sapien
tctgacaatgggtatatgaggccct

SEQ ID NO: 2694633 - DNA, 25 bp, Homo sapien
tttattttgtcaaactcgtctcttg

SEQ ID NO: 2694634 - DNA, 25 bp, Homo sapien
aaaagaaattttgatctacaatgtc

SEQ ID NO: 2694635 - DNA, 25 bp, Homo sapien
tgcttcatctaaaacaacatatgtc

SEQ ID NO: 2694636 - DNA, 25 bp, Homo sapien
actcttcgaagatttgtgacccgac

SEQ ID NO: 2694637 - DNA, 25 bp, Homo sapien
tatgtcactcttcgaagatttgtga

SEQ ID NO: 2694638 - DNA, 25 bp, Homo sapien
aaacaacatatgtcactcttcgaag

SEQ ID NO: 2694639 - DNA, 25 bp, Homo sapien
aaaacataaccgtctgtcgatcagg

SEQ ID NO: 2694640 - DNA, 25 bp, Homo sapien
aggatcctgcgagccaaagcctcca

SEQ ID NO: 2694641 - DNA, 25 bp, Homo sapien
cttcaataggtttactgaggatcct

SEQ ID NO: 2694642 - DNA, 25 bp, Homo sapien
tgcctccaacttgtacttcaatagg

SEQ ID NO: 2694643 - DNA, 25 bp, Homo sapien
ctgccctggacagaatatcccattc

SEQ ID NO: 2694644 - DNA, 25 bp, Homo sapien
tatcccattctttaggcaatctggt

SEQ ID NO: 2694645 - DNA, 25 bp, Homo sapien
gactgcaaagctgcgacttcaggca

SEQ ID NO: 2694646 - DNA, 25 bp, Homo sapien
cagatgtgctccaactacaatcagc

SEQ ID NO: 2694647 - DNA, 25 bp, Homo sapien
tggcctagaagctcaagtaacttca

SEQ ID NO: 2694648 - DNA, 25 bp, Homo sapien
acaaatataatgacagatcctgact

SEQ ID NO: 2694649 - DNA, 25 bp, Homo sapien
tgactcttgataatggcctagaagc

SEQ ID NO: 2694650 - DNA, 25 bp, Homo sapien
tataatgacagatcctgactcttga

SEQ ID NO: 2694651 - DNA, 25 bp, Homo sapien
tgacatgaaatgtgataacctgatc

SEQ ID NO: 2694652 - DNA, 25 bp, Homo sapien
gaaaaactgatgtgtgggtagacaa

SEQ ID NO: 2694653 - DNA, 25 bp, Homo sapien
tgaactagtgttaatgatatgcaca

SEQ ID NO: 2694654 - DNA, 25 bp, Homo sapien
tagtcatcgctcagtatcctcaggg

SEQ ID NO: 2694655 - DNA, 25 bp, Homo sapien
ggtgcaatctctgcttatggcaacc

SEQ ID NO: 2694656 - DNA, 25 bp, Homo sapien
gtcccaaactcatgagctcaagtga

SEQ ID NO: 2694657 - DNA, 25 bp, Homo sapien
tccacctcccaggattaagcgattc

SEQ ID NO: 2694658 - DNA, 25 bp, Homo sapien
ttgtcgcccacaccagagtgcaatg

SEQ ID NO: 2694659 - DNA, 25 bp, Homo sapien
cacaagaagtttgcaggtcccattc

SEQ ID NO: 2694660 - DNA, 25 bp, Homo sapien
tgtacataatcctcataatggttgg

SEQ ID NO: 2694661 - DNA, 25 bp, Homo sapien
gcagcaacagaggtagccacaagaa

SEQ ID NO: 2694662 - DNA, 25 bp, Homo sapien
gtccgccctgctctgtgtacataat

SEQ ID NO: 2694663 - DNA, 25 bp, Homo sapien
taattatgtcaccagcatagcgagc

SEQ ID NO: 2694664 - DNA, 25 bp, Homo sapien
ctgtgataaaagtataagcataacc

SEQ ID NO: 2694665 - DNA, 25 bp, Homo sapien
gctgatctttgaaatcactccacag

SEQ ID NO: 2694666 - DNA, 25 bp, Homo sapien
gaggtactgcagtccctgacaattc

SEQ ID NO: 2694667 - DNA, 25 bp, Homo sapien
aaaacacttcatctagcatgtaaga

SEQ ID NO: 2694668 - DNA, 25 bp, Homo sapien
taagagctctacatagacaccacaa

SEQ ID NO: 2694669 - DNA, 25 bp, Homo sapien
gcatgtaagataaactaagagctct

SEQ ID NO: 2694670 - DNA, 25 bp, Homo sapien
gatttctagaagagtaacatgggtt

SEQ ID NO: 2694671 - DNA, 25 bp, Homo sapien
cattagccaaagcttgttctgtttc

SEQ ID NO: 2694672 - DNA, 25 bp, Homo sapien
aacttcttcctctcattagccaaag

SEQ ID NO: 2694673 - DNA, 25 bp, Homo sapien
tgaatcccttaccagagaacccact

SEQ ID NO: 2694674 - DNA, 25 bp, Homo sapien
tcatcaaacttgaatcccttaccag

SEQ ID NO: 2694675 - DNA, 25 bp, Homo sapien
gcagttggagcaggaacacttgatg

SEQ ID NO: 2694676 - DNA, 25 bp, Homo sapien
gactcgatgcccaaattcttctggg

SEQ ID NO: 2694677 - DNA, 25 bp, Homo sapien
ggagcagccatatcctttactctct

SEQ ID NO: 2694678 - DNA, 25 bp, Homo sapien
cttagcaatttctaatttctcagca

SEQ ID NO: 2694679 - DNA, 25 bp, Homo sapien
gctaactcttgatgtcagacacagt

SEQ ID NO: 2694680 - DNA, 25 bp, Homo sapien
aattccagaataggcccaaagtcct

SEQ ID NO: 2694681 - DNA, 25 bp, Homo sapien
gagtagggaccacaccacaaattat

SEQ ID NO: 2694682 - DNA, 25 bp, Homo sapien
cctcctagtggataagaaaactgga

SEQ ID NO: 2694683 - DNA, 25 bp, Homo sapien
tgggaagtcattgatctctaattct

SEQ ID NO: 2694684 - DNA, 25 bp, Homo sapien
cacataattgagcttggcattgatc

SEQ ID NO: 2694685 - DNA, 25 bp, Homo sapien
cttcttgtttctctaacggcacata

SEQ ID NO: 2694686 - DNA, 25 bp, Homo sapien
agtgggagccagaatggtgccaccc

SEQ ID NO: 2694687 - DNA, 25 bp, Homo sapien
caggagggaagtaggttcctctgat

SEQ ID NO: 2694688 - DNA, 25 bp, Homo sapien
gcggcttcagagtattcactgattc

SEQ ID NO: 2694689 - DNA, 25 bp, Homo sapien
aattgccaagtaaatcttccgctcg

SEQ ID NO: 2694690 - DNA, 25 bp, Homo sapien
tcctctgattgtaattgcggcttca

SEQ ID NO: 2694691 - DNA, 25 bp, Homo sapien
gaagctacagtaaactataatctca

SEQ ID NO: 2694692 - DNA, 25 bp, Homo sapien
gaaaaacatatacaggaattttgtg

SEQ ID NO: 2694693 - DNA, 25 bp, Homo sapien
gcttgcttgagctgtgactgggtca

SEQ ID NO: 2694694 - DNA, 25 bp, Homo sapien
ggactgtataggagcaaaatttttg

SEQ ID NO: 2694695 - DNA, 25 bp, Homo sapien
gggtccctccaattacagaactaga

SEQ ID NO: 2694696 - DNA, 25 bp, Homo sapien
tcattggtcctaaaacaactgtggc

SEQ ID NO: 2694697 - DNA, 25 bp, Homo sapien
tataaattatacaggctgactaggc

SEQ ID NO: 2694698 - DNA, 25 bp, Homo sapien
aaagagagggtcacagaacaggcta

SEQ ID NO: 2694699 - DNA, 25 bp, Homo sapien
tatgaaagaacaccgcaagatagct

SEQ ID NO: 2694700 - DNA, 25 bp, Homo sapien
tttacccatatcacggaggtccagg

SEQ ID NO: 2694701 - DNA, 25 bp, Homo sapien
taatgcctggtggaacattacccac

SEQ ID NO: 2694702 - DNA, 25 bp, Homo sapien
gaagggtctcgtctgaacaaaatct

SEQ ID NO: 2694703 - DNA, 25 bp, Homo sapien
cagccggatcagctcttcttttatg

SEQ ID NO: 2694704 - DNA, 25 bp, Homo sapien
tcttttatgagcctggtgatttctg

SEQ ID NO: 2694705 - DNA, 25 bp, Homo sapien
gctttctgcacagccagttcattgg

SEQ ID NO: 2694706 - DNA, 25 bp, Homo sapien
tttctgcacagccagttcattggca

SEQ ID NO: 2694707 - DNA, 25 bp, Homo sapien
tcctttatttgttggttggtatgaa

SEQ ID NO: 2694708 - DNA, 25 bp, Homo sapien
tatttgttggttggtatgaattttg

SEQ ID NO: 2694709 - DNA, 25 bp, Homo sapien
ttcctttatttgttggttggtatga

SEQ ID NO: 2694710 - DNA, 25 bp, Homo sapien
ctttatttgttggttggtatgaatt

SEQ ID NO: 2694711 - DNA, 25 bp, Homo sapien
aaacctctagaatattatccggaca

SEQ ID NO: 2694712 - DNA, 25 bp, Homo sapien
ccacatacatcatagaccagcacag

SEQ ID NO: 2694713 - DNA, 25 bp, Homo sapien
tacttacggacagatttctttacca

SEQ ID NO: 2694714 - DNA, 25 bp, Homo sapien
tcatactctgaaaacaggctggctt

SEQ ID NO: 2694715 - DNA, 25 bp, Homo sapien
agccagaagttgtgagggaaacctc

SEQ ID NO: 2694716 - DNA, 25 bp, Homo sapien
tataggctacactctttcttttaag

SEQ ID NO: 2694717 - DNA, 25 bp, Homo sapien
cacaacctactcaataatcctgaag

SEQ ID NO: 2694718 - DNA, 25 bp, Homo sapien
tccagagtcatgtaacatcaaggtg

SEQ ID NO: 2694719 - DNA, 25 bp, Homo sapien
tcaggaactgtatcttgaaggctca

SEQ ID NO: 2694720 - DNA, 25 bp, Homo sapien
gaatattaggtaatccaattataac

SEQ ID NO: 2694721 - DNA, 25 bp, Homo sapien
tctgtgggtttgaaacccttggata

SEQ ID NO: 2694722 - DNA, 25 bp, Homo sapien
taatacatcaggagtcttgaaaaga

SEQ ID NO: 2694723 - DNA, 25 bp, Homo sapien
cctcttatatgaaatggcttgctat

SEQ ID NO: 2694724 - DNA, 25 bp, Homo sapien
ggactgattgcaggacaccccttaa

SEQ ID NO: 2694725 - DNA, 25 bp, Homo sapien
gctatatgcatataaccgatgcaca

SEQ ID NO: 2694726 - DNA, 25 bp, Homo sapien
tactttaaccgcctgtatactgtaa

SEQ ID NO: 2694727 - DNA, 25 bp, Homo sapien
tcaaagtgatccagttggatgaagg

SEQ ID NO: 2694728 - DNA, 25 bp, Homo sapien
agggagcaccaattatcatcgatgt

SEQ ID NO: 2694729 - DNA, 25 bp, Homo sapien
caattatcatcgatgtgggactgcc

SEQ ID NO: 2694730 - DNA, 25 bp, Homo sapien
tccagttggatgaagggagcaccaa

SEQ ID NO: 2694731 - DNA, 25 bp, Homo sapien
aagtctatatatcattcaaatttta

SEQ ID NO: 2694732 - DNA, 25 bp, Homo sapien
aacatgagcaaatattcatattgca

SEQ ID NO: 2694733 - DNA, 25 bp, Homo sapien
tgtactaacaaagtaatatgtttca

SEQ ID NO: 2694734 - DNA, 25 bp, Homo sapien
agtggctcatcacaactgatataca

SEQ ID NO: 2694735 - DNA, 25 bp, Homo sapien
tatgggacatcctatgatccacgca

SEQ ID NO: 2694736 - DNA, 25 bp, Homo sapien
gaggatccagaattagggcagctac

SEQ ID NO: 2694737 - DNA, 25 bp, Homo sapien
taaaaactctggacagcctgggtgc

SEQ ID NO: 2694738 - DNA, 25 bp, Homo sapien
tgagttctaccataagcacagccct

SEQ ID NO: 2694739 - DNA, 25 bp, Homo sapien
gagatgctggaactcctgctgaccc

SEQ ID NO: 2694740 - DNA, 25 bp, Homo sapien
ggttttcaccacaattctgagatgc

SEQ ID NO: 2694741 - DNA, 25 bp, Homo sapien
cacaattctgagatgctggaactcc

SEQ ID NO: 2694742 - DNA, 25 bp, Homo sapien
ggaactcctgctgaccccatttctt

SEQ ID NO: 2694743 - DNA, 25 bp, Homo sapien
gccgcctctgcacggtgcggagaac

SEQ ID NO: 2694744 - DNA, 25 bp, Homo sapien
gaggccgctaccaccctgtagtgtt

SEQ ID NO: 2694745 - DNA, 25 bp, Homo sapien
cccagcggctgggaacctcgtgctg

SEQ ID NO: 2694746 - DNA, 25 bp, Homo sapien
cggacgcagtacgaagaggccgcta

SEQ ID NO: 2694747 - DNA, 25 bp, Homo sapien
gccccacggtgcacaaataaggact

SEQ ID NO: 2694748 - DNA, 25 bp, Homo sapien
ggactgcggattctgacctctcaaa

SEQ ID NO: 2694749 - DNA, 25 bp, Homo sapien
gttccgcaagcgtagaagtccacgg

SEQ ID NO: 2694750 - DNA, 25 bp, Homo sapien
tatttaaaggcgaagggcggactgc

SEQ ID NO: 2694751 - DNA, 25 bp, Homo sapien
aagttctgtgacttaccaggagggt

SEQ ID NO: 2694752 - DNA, 25 bp, Homo sapien
ttctgtgacttaccaggagggtaac

SEQ ID NO: 2694753 - DNA, 25 bp, Homo sapien
aagcaaatgccagaattagtaaaga

SEQ ID NO: 2694754 - DNA, 25 bp, Homo sapien
tgtgacttaccaggagggtaacaaa

SEQ ID NO: 2694755 - DNA, 25 bp, Homo sapien
tgatcagcagctctcatggcatctt

SEQ ID NO: 2694756 - DNA, 25 bp, Homo sapien
gctgggaggaatatatgtcaaactg

SEQ ID NO: 2694757 - DNA, 25 bp, Homo sapien
ttcattgaggcaggaaggcttgcca

SEQ ID NO: 2694758 - DNA, 25 bp, Homo sapien
gaaagctggattactgctggcaaca

SEQ ID NO: 2694759 - DNA, 25 bp, Homo sapien
tctgcctgtgctggtccggtatcct

SEQ ID NO: 2694760 - DNA, 25 bp, Homo sapien
tagttgtccccaaaggtctgcctgg

SEQ ID NO: 2694761 - DNA, 25 bp, Homo sapien
tgggctgactttgtatcccgcagct

SEQ ID NO: 2694762 - DNA, 25 bp, Homo sapien
gctgatttggtggttcccgaaggcc

SEQ ID NO: 2694763 - DNA, 25 bp, Homo sapien
caagacgggatagagctttaatgct

SEQ ID NO: 2694764 - DNA, 25 bp, Homo sapien
catgaactgctctgccatgcatcat

SEQ ID NO: 2694765 - DNA, 25 bp, Homo sapien
gccataaccaagatcggcaagacgg

SEQ ID NO: 2694766 - DNA, 25 bp, Homo sapien
ttcctctaccccatgaactgctctg

SEQ ID NO: 2694767 - DNA, 25 bp, Homo sapien
tgtacaaatacaatgccgctgctca

SEQ ID NO: 2694768 - DNA, 25 bp, Homo sapien
tagaacagccccaaagtagtaatga

SEQ ID NO: 2694769 - DNA, 25 bp, Homo sapien
tcatgccctgagtgcatctgtcagc

SEQ ID NO: 2694770 - DNA, 25 bp, Homo sapien
ccaagaagctttgggattattcaca

SEQ ID NO: 2694771 - DNA, 25 bp, Homo sapien
gatgagatggtctcactggacccac

SEQ ID NO: 2694772 - DNA, 25 bp, Homo sapien
tagctacatgcaaacctagagaatg

SEQ ID NO: 2694773 - DNA, 25 bp, Homo sapien
gaagaaagatttccctctgtcccta

SEQ ID NO: 2694774 - DNA, 25 bp, Homo sapien
tctgatggtcgggaaactgcattct

SEQ ID NO: 2694775 - DNA, 25 bp, Homo sapien
taaagtccagctcaattgtgtcagg

SEQ ID NO: 2694776 - DNA, 25 bp, Homo sapien
tgttgaggtcactgtcttagacgcc

SEQ ID NO: 2694777 - DNA, 25 bp, Homo sapien
ttagacgccagtgcacatagtcccc

SEQ ID NO: 2694778 - DNA, 25 bp, Homo sapien
tcgttctctatggtttgtgcaaagc

SEQ ID NO: 2694779 - DNA, 25 bp, Homo sapien
taaaacacaataatcaaatctttga

SEQ ID NO: 2694780 - DNA, 25 bp, Homo sapien
tctcttcagcatggcaccggtaaac

SEQ ID NO: 2694781 - DNA, 25 bp, Homo sapien
tccaggtaaccgctcagatgaacag

SEQ ID NO: 2694782 - DNA, 25 bp, Homo sapien
tagagacaatgaccgacagagtagc

SEQ ID NO: 2694783 - DNA, 25 bp, Homo sapien
tttcaagaaacaatcatacagtggg

SEQ ID NO: 2694784 - DNA, 25 bp, Homo sapien
gaggacagcgtgcttattatcagtt

SEQ ID NO: 2694785 - DNA, 25 bp, Homo sapien
ctattcagactttttacagcagagg

SEQ ID NO: 2694786 - DNA, 25 bp, Homo sapien
tattcagactttttacagcagagga

SEQ ID NO: 2694787 - DNA, 25 bp, Homo sapien
cgtgcttattatcagttaattggta

SEQ ID NO: 2694788 - DNA, 25 bp, Homo sapien
gatgatgtagatacaaatcatgaac

SEQ ID NO: 2694789 - DNA, 25 bp, Homo sapien
cacataattgcacacgagtagctca

SEQ ID NO: 2694790 - DNA, 25 bp, Homo sapien
gtagctcaagttcatggacataaaa

SEQ ID NO: 2694791 - DNA, 25 bp, Homo sapien
aatcatgaacactactccattccca

SEQ ID NO: 2694792 - DNA, 25 bp, Homo sapien
gacaaaccagcttcttaagtgatca

SEQ ID NO: 2694793 - DNA, 25 bp, Homo sapien
cagcttcttaagtgatcataaacca

SEQ ID NO: 2694794 - DNA, 25 bp, Homo sapien
ctggccaatgacaaaccagcttctt

SEQ ID NO: 2694795 - DNA, 25 bp, Homo sapien
taagtgatcataaaccagcaccagg

SEQ ID NO: 2694796 - DNA, 25 bp, Homo sapien
ctcaggcactcgagatctggaggag

SEQ ID NO: 2694797 - DNA, 25 bp, Homo sapien
cccctcaggcactcgagatctggag

SEQ ID NO: 2694798 - DNA, 25 bp, Homo sapien
caggcactcgagatctggaggagat

SEQ ID NO: 2694799 - DNA, 25 bp, Homo sapien
gcactcgagatctggaggagatggg

SEQ ID NO: 2694800 - DNA, 25 bp, Homo sapien
cggcgctggactggagacctcttta

SEQ ID NO: 2694801 - DNA, 25 bp, Homo sapien
tagtgtcccatcgaggtgcagaaac

SEQ ID NO: 2694802 - DNA, 25 bp, Homo sapien
gacctctttaggagctaagcgccag

SEQ ID NO: 2694803 - DNA, 25 bp, Homo sapien
ggttttccacgcttcattcccagag

SEQ ID NO: 2694804 - DNA, 25 bp, Homo sapien
acgcggggcggtcgtcgaccggcag

SEQ ID NO: 2694805 - DNA, 25 bp, Homo sapien
gcggggcggtcgtcgaccggcagcc

SEQ ID NO: 2694806 - DNA, 25 bp, Homo sapien
gacgcggggcggtcgtcgaccggca

SEQ ID NO: 2694807 - DNA, 25 bp, Homo sapien
cgcggggcggtcgtcgaccggcagc

SEQ ID NO: 2694808 - DNA, 25 bp, Homo sapien
tccacgccgcggacgggaagtccca

SEQ ID NO: 2694809 - DNA, 25 bp, Homo sapien
gccgcggacgggaagtcccagcacc

SEQ ID NO: 2694810 - DNA, 25 bp, Homo sapien
acgccgcggacgggaagtcccagca

SEQ ID NO: 2694811 - DNA, 25 bp, Homo sapien
cgcggacgggaagtcccagcaccca

SEQ ID NO: 2694812 - DNA, 25 bp, Homo sapien
ctcagctcgccccatcatctcatgc

SEQ ID NO: 2694813 - DNA, 25 bp, Homo sapien
agcgtcgcccgggtggacctcagct

SEQ ID NO: 2694814 - DNA, 25 bp, Homo sapien
cgcaggtccagagcgtcgcccgggt

SEQ ID NO: 2694815 - DNA, 25 bp, Homo sapien
cgccggccttcgcgcaggtccagag

SEQ ID NO: 2694816 - DNA, 25 bp, Homo sapien
agcgcttaccgcactgtccctcctg

SEQ ID NO: 2694817 - DNA, 25 bp, Homo sapien
tggctaccagccacgggctgagggc

SEQ ID NO: 2694818 - DNA, 25 bp, Homo sapien
agagaagtcggggagacgcgcccgg

SEQ ID NO: 2694819 - DNA, 25 bp, Homo sapien
caccagcgggcggtgcgcggggaga

SEQ ID NO: 2694820 - DNA, 25 bp, Homo sapien
gagtctcccgtgtttctcgtctgtt

SEQ ID NO: 2694821 - DNA, 25 bp, Homo sapien
ggagtctcccgtgtttctcgtctgt

SEQ ID NO: 2694822 - DNA, 25 bp, Homo sapien
cgggagtctcccgtgtttctcgtct

SEQ ID NO: 2694823 - DNA, 25 bp, Homo sapien
gggagtctcccgtgtttctcgtctg

SEQ ID NO: 2694824 - DNA, 25 bp, Homo sapien
ctgaggccagcataatctgccagtg

SEQ ID NO: 2694825 - DNA, 25 bp, Homo sapien
aggccagcataatctgccagtggca

SEQ ID NO: 2694826 - DNA, 25 bp, Homo sapien
tgaggccagcataatctgccagtgg

SEQ ID NO: 2694827 - DNA, 25 bp, Homo sapien
ccagcataatctgccagtggcatcc

SEQ ID NO: 2694828 - DNA, 25 bp, Homo sapien
tccagcttttctcagaaggctcttt

SEQ ID NO: 2694829 - DNA, 25 bp, Homo sapien
ccagcttttctcagaaggctcttta

SEQ ID NO: 2694830 - DNA, 25 bp, Homo sapien
cagcttttctcagaaggctctttac

SEQ ID NO: 2694831 - DNA, 25 bp, Homo sapien
tcacaagcaggtactattaataaat

SEQ ID NO: 2694832 - DNA, 25 bp, Homo sapien
ggtcacaagcaggtactattaataa

SEQ ID NO: 2694833 - DNA, 25 bp, Homo sapien
gaaggtcacaagcaggtactattaa

SEQ ID NO: 2694834 - DNA, 25 bp, Homo sapien
gaagaaggtcacaagcaggtactat

SEQ ID NO: 2694835 - DNA, 25 bp, Homo sapien
tcattaaactatcagagagctactc

SEQ ID NO: 2694836 - DNA, 25 bp, Homo sapien
agaattacagttcccctctaacacg

SEQ ID NO: 2694837 - DNA, 25 bp, Homo sapien
ctctaacacgaaattttcccctctg

SEQ ID NO: 2694838 - DNA, 25 bp, Homo sapien
cacattcagagtcatatttgacttc

SEQ ID NO: 2694839 - DNA, 25 bp, Homo sapien
ctggagagggtgagcaggctgctcc

SEQ ID NO: 2694840 - DNA, 25 bp, Homo sapien
tggagagggtgagcaggctgctcct

SEQ ID NO: 2694841 - DNA, 25 bp, Homo sapien
ggagagggtgagcaggctgctcctc

SEQ ID NO: 2694842 - DNA, 25 bp, Homo sapien
gacgttgcaccttgagtcctccgct

SEQ ID NO: 2694843 - DNA, 25 bp, Homo sapien
gaaaaggctctctcggacgttgcac

SEQ ID NO: 2694844 - DNA, 25 bp, Homo sapien
tgtcagggaagtgtgctccagcgcc

SEQ ID NO: 2694845 - DNA, 25 bp, Homo sapien
tgtcctggcccatcgggtcatgcag

SEQ ID NO: 2694846 - DNA, 25 bp, Homo sapien
gaagccatgccgaatgccaacatag

SEQ ID NO: 2694847 - DNA, 25 bp, Homo sapien
gttgtacatctctcgtgaaaggaag

SEQ ID NO: 2694848 - DNA, 25 bp, Homo sapien
tccaggaaccagcaaaaaagtatga

SEQ ID NO: 2694849 - DNA, 25 bp, Homo sapien
taatgtgctactccatccagtgtgg

SEQ ID NO: 2694850 - DNA, 25 bp, Homo sapien
cagaaaagcggcaccacggggtgta

SEQ ID NO: 2694851 - DNA, 25 bp, Homo sapien
cagtcactaccgtttgggttcagaa

SEQ ID NO: 2694852 - DNA, 25 bp, Homo sapien
aagagctggaaatgcccggggcaga

SEQ ID NO: 2694853 - DNA, 25 bp, Homo sapien
gggtgtaaaacaggactagagtaca

SEQ ID NO: 2694854 - DNA, 25 bp, Homo sapien
gagggctttctcatacaattaccat

SEQ ID NO: 2694855 - DNA, 25 bp, Homo sapien
ggatctaccaatggcacaattattc

SEQ ID NO: 2694856 - DNA, 25 bp, Homo sapien
gaagttgcgtgtgacctacggagat

SEQ ID NO: 2694857 - DNA, 25 bp, Homo sapien
caattaccatctcagaatagacaga

SEQ ID NO: 2694858 - DNA, 25 bp, Homo sapien
tggccattggtttagctccttgaaa

SEQ ID NO: 2694859 - DNA, 25 bp, Homo sapien
tctgtatgattaaatctggccattg

SEQ ID NO: 2694860 - DNA, 25 bp, Homo sapien
taaatctggccattggtttagctcc

SEQ ID NO: 2694861 - DNA, 25 bp, Homo sapien
gtttccagtgttcgatctgtatgat

SEQ ID NO: 2694862 - DNA, 25 bp, Homo sapien
caccacattcttcttggcttctata

SEQ ID NO: 2694863 - DNA, 25 bp, Homo sapien
accacattcttcttggcttctatac

SEQ ID NO: 2694864 - DNA, 25 bp, Homo sapien
ggaaaatacaagcaaccagtccaca

SEQ ID NO: 2694865 - DNA, 25 bp, Homo sapien
gaattagccaccgaatactctcagt

SEQ ID NO: 2694866 - DNA, 25 bp, Homo sapien
aagagggcctatttggtcggcttga

SEQ ID NO: 2694867 - DNA, 25 bp, Homo sapien
tcagttcgaatggtagcatacataa

SEQ ID NO: 2694868 - DNA, 25 bp, Homo sapien
ttctgaaacgaaggattgaagttcc

SEQ ID NO: 2694869 - DNA, 25 bp, Homo sapien
tgtatgaaactgtagcactaatttc

SEQ ID NO: 2694870 - DNA, 25 bp, Homo sapien
gtttcaagtcaacacgtcactggag

SEQ ID NO: 2694871 - DNA, 25 bp, Homo sapien
tgcctgaagtttcaagtcaacacgt

SEQ ID NO: 2694872 - DNA, 25 bp, Homo sapien
ggttacatactttcctgctatggac

SEQ ID NO: 2694873 - DNA, 25 bp, Homo sapien
caaatactggattacgttcatgcag

SEQ ID NO: 2694874 - DNA, 25 bp, Homo sapien
tattacctgagagtcctatttttgc

SEQ ID NO: 2694875 - DNA, 25 bp, Homo sapien
gccttctgtatagtaagcatgtcat

SEQ ID NO: 2694876 - DNA, 25 bp, Homo sapien
tgtatacgttagcatagaactgata

SEQ ID NO: 2694877 - DNA, 25 bp, Homo sapien
gataataattgagctttagttacag

SEQ ID NO: 2694878 - DNA, 25 bp, Homo sapien
catcacttgctacttgagggggtca

SEQ ID NO: 2694879 - DNA, 25 bp, Homo sapien
agttacagcatttcctttctcctaa

SEQ ID NO: 2694880 - DNA, 25 bp, Homo sapien
catgtgtcttgaactagactagaat

SEQ ID NO: 2694881 - DNA, 25 bp, Homo sapien
cagtgttttacacttcaatacttct

SEQ ID NO: 2694882 - DNA, 25 bp, Homo sapien
ctagaatcaacttgtgggcaagaac

SEQ ID NO: 2694883 - DNA, 25 bp, Homo sapien
gttgtctctttactaaacatgtgtc

SEQ ID NO: 2694884 - DNA, 25 bp, Homo sapien
gggcaagttatctaactctctatgc

SEQ ID NO: 2694885 - DNA, 25 bp, Homo sapien
cattcattgtaacactctaagaagg

SEQ ID NO: 2694886 - DNA, 25 bp, Homo sapien
cattctgagatacggtcccctcctg

SEQ ID NO: 2694887 - DNA, 25 bp, Homo sapien
gaggtaattagctgtcatatctgaa

SEQ ID NO: 2694888 - DNA, 25 bp, Homo sapien
catgtagctccccaattaataggat

SEQ ID NO: 2694889 - DNA, 25 bp, Homo sapien
caaaaaagcagcgaacggcagatgc

SEQ ID NO: 2694890 - DNA, 25 bp, Homo sapien
cacatgctctgtagtggaaccatgc

SEQ ID NO: 2694891 - DNA, 25 bp, Homo sapien
gaattgtctgcccacacatgtagct

SEQ ID NO: 2694892 - DNA, 25 bp, Homo sapien
tcctcgctgcgctaggaggaacttc

SEQ ID NO: 2694893 - DNA, 25 bp, Homo sapien
tccatgcgggcaggaggatgtcgta

SEQ ID NO: 2694894 - DNA, 25 bp, Homo sapien
cttcgcgggcgctagcaccgagctg

SEQ ID NO: 2694895 - DNA, 25 bp, Homo sapien
taggaggaacttcgcccagcctcgg

SEQ ID NO: 2694896 - DNA, 25 bp, Homo sapien
tcgcagcgccgccaacaagcgccgc

SEQ ID NO: 2694897 - DNA, 25 bp, Homo sapien
cgagcgccccgagcaccgccgccat

SEQ ID NO: 2694898 - DNA, 25 bp, Homo sapien
agcgccgccaacaagcgccgcgtcg

SEQ ID NO: 2694899 - DNA, 25 bp, Homo sapien
ccctaggctctggcctcgcagcgcc

SEQ ID NO: 2694900 - DNA, 25 bp, Homo sapien
caagttcgtaggcttcggcggaagt

SEQ ID NO: 2694901 - DNA, 25 bp, Homo sapien
ttccccttggagtgaagcgcgagca

SEQ ID NO: 2694902 - DNA, 25 bp, Homo sapien
gttcgtcctcagcacaacgagcggc

SEQ ID NO: 2694903 - DNA, 25 bp, Homo sapien
cagcgggcaccgaattgttctgcaa

SEQ ID NO: 2694904 - DNA, 25 bp, Homo sapien
gatgaacattagtgaaggctcctca

SEQ ID NO: 2694905 - DNA, 25 bp, Homo sapien
ctcatcaaagggcaactgtgggcta

SEQ ID NO: 2694906 - DNA, 25 bp, Homo sapien
cttgcagagttactgtaggctcagg

SEQ ID NO: 2694907 - DNA, 25 bp, Homo sapien
tgtgggctaagctgcattccctgga

SEQ ID NO: 2694908 - DNA, 25 bp, Homo sapien
gtagatggcatctctctcacttaat

SEQ ID NO: 2694909 - DNA, 25 bp, Homo sapien
caagtatagcttggttcctctcctc

SEQ ID NO: 2694910 - DNA, 25 bp, Homo sapien
tcacttaattccgaccatcctgctg

SEQ ID NO: 2694911 - DNA, 25 bp, Homo sapien
catcctgctgctttaaggtcaagta

SEQ ID NO: 2694912 - DNA, 25 bp, Homo sapien
ttttcttgtcatctgcctctttttc

SEQ ID NO: 2694913 - DNA, 25 bp, Homo sapien
agctgattttcttgtcatctgcctc

SEQ ID NO: 2694914 - DNA, 25 bp, Homo sapien
tcagctgattttcttgtcatctgcc

SEQ ID NO: 2694915 - DNA, 25 bp, Homo sapien
gattttcttgtcatctgcctctttt

SEQ ID NO: 2694916 - DNA, 25 bp, Homo sapien
cattacaggccatggtacacgcaga

SEQ ID NO: 2694917 - DNA, 25 bp, Homo sapien
tcgctggagggcactgacaactgtc

SEQ ID NO: 2694918 - DNA, 25 bp, Homo sapien
taggagcctagtgggaaaactgacc

SEQ ID NO: 2694919 - DNA, 25 bp, Homo sapien
tgggcgctggcctggtactatcaac

SEQ ID NO: 2694920 - DNA, 25 bp, Homo sapien
gagtcttgcatctggtaactgtgac

SEQ ID NO: 2694921 - DNA, 25 bp, Homo sapien
taaatgagtcagaatgccccactct

SEQ ID NO: 2694922 - DNA, 25 bp, Homo sapien
acaacctttctatgtcacagtagga

SEQ ID NO: 2694923 - DNA, 25 bp, Homo sapien
gacatgacccagtatgaccacaagt

SEQ ID NO: 2694924 - DNA, 25 bp, Homo sapien
gacctctcatgaacattgcagttct

SEQ ID NO: 2694925 - DNA, 25 bp, Homo sapien
tctaatctctgagcaaagaggcttc

SEQ ID NO: 2694926 - DNA, 25 bp, Homo sapien
tgaaagggatgagtaggtgacctct

SEQ ID NO: 2694927 - DNA, 25 bp, Homo sapien
tcttgcagagtaatgcgaggtaggc

SEQ ID NO: 2694928 - DNA, 25 bp, Homo sapien
tattcttgcacgggctacaaccacg

SEQ ID NO: 2694929 - DNA, 25 bp, Homo sapien
ttcttgcacgggctacaaccacgac

SEQ ID NO: 2694930 - DNA, 25 bp, Homo sapien
ttgcacgggctacaaccacgaccaa

SEQ ID NO: 2694931 - DNA, 25 bp, Homo sapien
cgaccaatgatatgaaaaaccatca

SEQ ID NO: 2694932 - DNA, 25 bp, Homo sapien
aactttgctacggtcactgatgtcc

SEQ ID NO: 2694933 - DNA, 25 bp, Homo sapien
tactcaaggctagatgacagaggaa

SEQ ID NO: 2694934 - DNA, 25 bp, Homo sapien
catcttacttggtgtctcagcagaa

SEQ ID NO: 2694935 - DNA, 25 bp, Homo sapien
tccaatgggcatcccctggtactca

SEQ ID NO: 2694936 - DNA, 25 bp, Homo sapien
gaaaaatggaagagactcacccaca

SEQ ID NO: 2694937 - DNA, 25 bp, Homo sapien
gagactcacccacaagcttacataa

SEQ ID NO: 2694938 - DNA, 25 bp, Homo sapien
aagaaactccgaattggccaggtgt

SEQ ID NO: 2694939 - DNA, 25 bp, Homo sapien
tctataatccctgcctgagaaggca

SEQ ID NO: 2694940 - DNA, 25 bp, Homo sapien
tcgaaagccatcatttgccacagaa

SEQ ID NO: 2694941 - DNA, 25 bp, Homo sapien
catgtcccttacttatccaattcaa

SEQ ID NO: 2694942 - DNA, 25 bp, Homo sapien
tgccacagaactagcaagtgtggaa

SEQ ID NO: 2694943 - DNA, 25 bp, Homo sapien
gagtttgagaaccagcaatatcacc

SEQ ID NO: 2694944 - DNA, 25 bp, Homo sapien
tctggcaccaaagtcgatggcaaca

SEQ ID NO: 2694945 - DNA, 25 bp, Homo sapien
gctaaaacgtttcctcgtgtgagaa

SEQ ID NO: 2694946 - DNA, 25 bp, Homo sapien
cagcgacatcgtaggcatggcagct

SEQ ID NO: 2694947 - DNA, 25 bp, Homo sapien
caatgacggatctggagacatgcct

SEQ ID NO: 2694948 - DNA, 25 bp, Homo sapien
tgccccttgtaactttatgagttag

SEQ ID NO: 2694949 - DNA, 25 bp, Homo sapien
tcacaaatctgacaatatgaaggct

SEQ ID NO: 2694950 - DNA, 25 bp, Homo sapien
atataaccagtacttacattatccc

SEQ ID NO: 2694951 - DNA, 25 bp, Homo sapien
gaaatagtttgagttttaatgcaat

SEQ ID NO: 2694952 - DNA, 25 bp, Homo sapien
gccggcagggacggcagcagttact

SEQ ID NO: 2694953 - DNA, 25 bp, Homo sapien
gagaccaacagggttggagccggca

SEQ ID NO: 2694954 - DNA, 25 bp, Homo sapien
cttggaaaatcatgccttacaattg

SEQ ID NO: 2694955 - DNA, 25 bp, Homo sapien
tcagaaataaactggggtggttcta

SEQ ID NO: 2694956 - DNA, 25 bp, Homo sapien
aaaagagggccactcaccaagggat

SEQ ID NO: 2694957 - DNA, 25 bp, Homo sapien
cagcccctgcacttgtccaaaagag

SEQ ID NO: 2694958 - DNA, 25 bp, Homo sapien
tctgtggacatgacactcaacctcc

SEQ ID NO: 2694959 - DNA, 25 bp, Homo sapien
gccaggaaccaagttcttatgctca

SEQ ID NO: 2694960 - DNA, 25 bp, Homo sapien
caacctggagccttttgattcagga

SEQ ID NO: 2694961 - DNA, 25 bp, Homo sapien
cattctgagtgctatcaacagtgac

SEQ ID NO: 2694962 - DNA, 25 bp, Homo sapien
tgaactttacaccatgagcatttgt

SEQ ID NO: 2694963 - DNA, 25 bp, Homo sapien
gaagtatccttttcaggcaacagac

SEQ ID NO: 2694964 - DNA, 25 bp, Homo sapien
agaaggcacagaacccaagacaact

SEQ ID NO: 2694965 - DNA, 25 bp, Homo sapien
aggcacagaacccaagacaacttga

SEQ ID NO: 2694966 - DNA, 25 bp, Homo sapien
cacagaacccaagacaacttgacca

SEQ ID NO: 2694967 - DNA, 25 bp, Homo sapien
gaacccaagacaacttgaccaacac

SEQ ID NO: 2694968 - DNA, 25 bp, Homo sapien
actgcagtccacactgcattcctac

SEQ ID NO: 2694969 - DNA, 25 bp, Homo sapien
cactgcagtccacactgcattccta

SEQ ID NO: 2694970 - DNA, 25 bp, Homo sapien
ctatattaaccaacgtctcctaggg

SEQ ID NO: 2694971 - DNA, 25 bp, Homo sapien
tgctcacgggcactcatgatcagat

SEQ ID NO: 2694972 - DNA, 25 bp, Homo sapien
catttctggtgtacaactgcatagg

SEQ ID NO: 2694973 - DNA, 25 bp, Homo sapien
tcagattaaccaaaccgaaatgcct

SEQ ID NO: 2694974 - DNA, 25 bp, Homo sapien
aaataacttgtgatgctttgcaatt

SEQ ID NO: 2694975 - DNA, 25 bp, Homo sapien
ccctggtgtcaaaataacttgtgat

SEQ ID NO: 2694976 - DNA, 25 bp, Homo sapien
acttgtgatgctttgcaattcactg

SEQ ID NO: 2694977 - DNA, 25 bp, Homo sapien
ttccctggtgtcaaaataacttgtg

SEQ ID NO: 2694978 - DNA, 25 bp, Homo sapien
cacgggaagatttccttgcggaact

SEQ ID NO: 2694979 - DNA, 25 bp, Homo sapien
tgggtgtcggcacgggaagatttcc

SEQ ID NO: 2694980 - DNA, 25 bp, Homo sapien
tcggcacgggaagatttccttgcgg

SEQ ID NO: 2694981 - DNA, 25 bp, Homo sapien
cgggaagatttccttgcggaactgg

SEQ ID NO: 2694982 - DNA, 25 bp, Homo sapien
caagactttcacgtggaacactgtt

SEQ ID NO: 2694983 - DNA, 25 bp, Homo sapien
ggaacactgttaactgttctagccg

SEQ ID NO: 2694984 - DNA, 25 bp, Homo sapien
aagactttcacgtggaacactgtta

SEQ ID NO: 2694985 - DNA, 25 bp, Homo sapien
gactttcacgtggaacactgttaac

SEQ ID NO: 2694986 - DNA, 25 bp, Homo sapien
ttctctgcttgtagggcaactcggg

SEQ ID NO: 2694987 - DNA, 25 bp, Homo sapien
gcaactcgggacataaagccaaatg

SEQ ID NO: 2694988 - DNA, 25 bp, Homo sapien
agggcaactcgggacataaagccaa

SEQ ID NO: 2694989 - DNA, 25 bp, Homo sapien
caactcgggacataaagccaaatgc

SEQ ID NO: 2694990 - DNA, 25 bp, Homo sapien
catgtgaggtgagagttatctggac

SEQ ID NO: 2694991 - DNA, 25 bp, Homo sapien
gtcatgtgaggtgagagttatctgg

SEQ ID NO: 2694992 - DNA, 25 bp, Homo sapien
agtcatgtgaggtgagagttatctg

SEQ ID NO: 2694993 - DNA, 25 bp, Homo sapien
tcatgtgaggtgagagttatctgga

SEQ ID NO: 2694994 - DNA, 25 bp, Homo sapien
tctagatatgatgccttaagaacaa

SEQ ID NO: 2694995 - DNA, 25 bp, Homo sapien
taagaacaattcaacagccaggcat

SEQ ID NO: 2694996 - DNA, 25 bp, Homo sapien
aatttccttcaacatacattgcagc

SEQ ID NO: 2694997 - DNA, 25 bp, Homo sapien
cattgcagctaagatgtgtacaaga

SEQ ID NO: 2694998 - DNA, 25 bp, Homo sapien
gaatgagaccccgtgtcaaacacac

SEQ ID NO: 2694999 - DNA, 25 bp, Homo sapien
taaaatgtgtgaatactccccatcc

SEQ ID NO: 2695000 - DNA, 25 bp, Homo sapien
ttaaggctgcaataaaccgtgatcc

SEQ ID NO: 2695001 - DNA, 25 bp, Homo sapien
cacacaaactgttatactggctggg

SEQ ID NO: 2695002 - DNA, 25 bp, Homo sapien
cagaaggccctcagtaagtgtgtgc

SEQ ID NO: 2695003 - DNA, 25 bp, Homo sapien
catagctagggacaacaggatttca

SEQ ID NO: 2695004 - DNA, 25 bp, Homo sapien
taaaaatcagcgacgaggcatagcg

SEQ ID NO: 2695005 - DNA, 25 bp, Homo sapien
tttcagggcaaatcaggacagtggg

SEQ ID NO: 2695006 - DNA, 25 bp, Homo sapien
tgaactagaaatgactctcgagtgg

SEQ ID NO: 2695007 - DNA, 25 bp, Homo sapien
ccgatgtagtgtcaactggtgaact

SEQ ID NO: 2695008 - DNA, 25 bp, Homo sapien
tgggcaaaatcccaccgatgtagtg

SEQ ID NO: 2695009 - DNA, 25 bp, Homo sapien
atgactctcgagtggcgctggtgac

SEQ ID NO: 2695010 - DNA, 25 bp, Homo sapien
tgccagcctcaccaatcatagaaac

SEQ ID NO: 2695011 - DNA, 25 bp, Homo sapien
caacttattttggtaagcagacgag

SEQ ID NO: 2695012 - DNA, 25 bp, Homo sapien
tggtcattcaagtctacagggcaca

SEQ ID NO: 2695013 - DNA, 25 bp, Homo sapien
cataaaggtaatagcatgccagcct

SEQ ID NO: 2695014 - DNA, 25 bp, Homo sapien
tgataagatctaatgctggcaacag

SEQ ID NO: 2695015 - DNA, 25 bp, Homo sapien
tacagcaataccaatcagggagatg

SEQ ID NO: 2695016 - DNA, 25 bp, Homo sapien
caatctagtaggcactgggaacaca

SEQ ID NO: 2695017 - DNA, 25 bp, Homo sapien
tgagcactctcaaaaactgccagag

SEQ ID NO: 2695018 - DNA, 25 bp, Homo sapien
tcttcacaaatgcccgacattcatc

SEQ ID NO: 2695019 - DNA, 25 bp, Homo sapien
ttcacaaatgcccgacattcatcat

SEQ ID NO: 2695020 - DNA, 25 bp, Homo sapien
caaatgcccgacattcatcatcgtt

SEQ ID NO: 2695021 - DNA, 25 bp, Homo sapien
cacaaatgcccgacattcatcatcg

SEQ ID NO: 2695022 - DNA, 25 bp, Homo sapien
caagcggtaccttatgtcataactg

SEQ ID NO: 2695023 - DNA, 25 bp, Homo sapien
tccacaaggccataaaaaacgcatt

SEQ ID NO: 2695024 - DNA, 25 bp, Homo sapien
tgacagtgctaatcataattatctt

SEQ ID NO: 2695025 - DNA, 25 bp, Homo sapien
tcaagaagtctgaacaagcggtacc

SEQ ID NO: 2695026 - DNA, 25 bp, Homo sapien
ggagcccgacgcaggcagctcactt

SEQ ID NO: 2695027 - DNA, 25 bp, Homo sapien
aaaaagagagataggagtcccactt

SEQ ID NO: 2695028 - DNA, 25 bp, Homo sapien
cagtttttgagaggagattcaagga

SEQ ID NO: 2695029 - DNA, 25 bp, Homo sapien
gattcaaggagacttaaaaaccatg

SEQ ID NO: 2695030 - DNA, 25 bp, Homo sapien
ctaacgtctgtaatacctgcactct

SEQ ID NO: 2695031 - DNA, 25 bp, Homo sapien
gctaacgtctgtaatacctgcactc

SEQ ID NO: 2695032 - DNA, 25 bp, Homo sapien
tgctacctagttgctctggtttttt

SEQ ID NO: 2695033 - DNA, 25 bp, Homo sapien
agttttgttgtaaatgctgcctgtg

SEQ ID NO: 2695034 - DNA, 25 bp, Homo sapien
cttggctttgctacctagttgctct

SEQ ID NO: 2695035 - DNA, 25 bp, Homo sapien
gttggttgtttaggacaaggtctca

SEQ ID NO: 2695036 - DNA, 25 bp, Homo sapien
tgatttttgaggtatcctggttcct

SEQ ID NO: 2695037 - DNA, 25 bp, Homo sapien
tttgaggtatcctggttcctcctcc

SEQ ID NO: 2695038 - DNA, 25 bp, Homo sapien
taaaaacgcagtagcttgatttttg

SEQ ID NO: 2695039 - DNA, 25 bp, Homo sapien
aacgcagtagcttgatttttgaggt

SEQ ID NO: 2695040 - DNA, 25 bp, Homo sapien
tctttggccagtagtaaaacctcac

SEQ ID NO: 2695041 - DNA, 25 bp, Homo sapien
gatgctcagtgcctagatcaataac

SEQ ID NO: 2695042 - DNA, 25 bp, Homo sapien
gagtgcacgctcatggtacagttca

SEQ ID NO: 2695043 - DNA, 25 bp, Homo sapien
cagtattgcagttcacataaggtca

SEQ ID NO: 2695044 - DNA, 25 bp, Homo sapien
tggagttcccagaagtgttaataat

SEQ ID NO: 2695045 - DNA, 25 bp, Homo sapien
tgcacagagcctcaaggttagccag

SEQ ID NO: 2695046 - DNA, 25 bp, Homo sapien
catctttcccggcaccttcagtgga

SEQ ID NO: 2695047 - DNA, 25 bp, Homo sapien
tcatacatgttattttcaatggctg

SEQ ID NO: 2695048 - DNA, 25 bp, Homo sapien
tatcatcaccctattgcacagaaca

SEQ ID NO: 2695049 - DNA, 25 bp, Homo sapien
taatacggtttggatgttcgtctcc

SEQ ID NO: 2695050 - DNA, 25 bp, Homo sapien
tcccagcctttagcaaccactattg

SEQ ID NO: 2695051 - DNA, 25 bp, Homo sapien
cccagcaggagttgactggatcgtg

SEQ ID NO: 2695052 - DNA, 25 bp, Homo sapien
cagcaggttgtagccgttcttccag

SEQ ID NO: 2695053 - DNA, 25 bp, Homo sapien
agtgaactgtttgcccatgagctgg

SEQ ID NO: 2695054 - DNA, 25 bp, Homo sapien
tgcatgccatcagcgatatacaggt

SEQ ID NO: 2695055 - DNA, 25 bp, Homo sapien
gataatgatcacatccagcaggttg

SEQ ID NO: 2695056 - DNA, 25 bp, Homo sapien
tcctgaatgactacataacctgctc

SEQ ID NO: 2695057 - DNA, 25 bp, Homo sapien
tcctgaatgactacataacgaaatg

SEQ ID NO: 2695058 - DNA, 25 bp, Homo sapien
accatggtacgagaactacgcgatg

SEQ ID NO: 2695059 - DNA, 25 bp, Homo sapien
gtacgagaactacgcgatgcatgca

SEQ ID NO: 2695060 - DNA, 25 bp, Homo sapien
tggtacgagaactacgcgatgcatg

SEQ ID NO: 2695061 - DNA, 25 bp, Homo sapien
catggtacgagaactacgcgatgca

SEQ ID NO: 2695062 - DNA, 25 bp, Homo sapien
gccctcttagggtgcagtccagaaa

SEQ ID NO: 2695063 - DNA, 25 bp, Homo sapien
gacccatgacagctagagttggcca

SEQ ID NO: 2695064 - DNA, 25 bp, Homo sapien
gttctttaagcacaatccacgcagg

SEQ ID NO: 2695065 - DNA, 25 bp, Homo sapien
tgagcaacctttagagcagcagtgg

SEQ ID NO: 2695066 - DNA, 25 bp, Homo sapien
gaggccacggtgtagactgtctgcc

SEQ ID NO: 2695067 - DNA, 25 bp, Homo sapien
tagcgaagatgtacatgaggaggaa

SEQ ID NO: 2695068 - DNA, 25 bp, Homo sapien
ccccagttatcatggtcaccattgt

SEQ ID NO: 2695069 - DNA, 25 bp, Homo sapien
caggcagaagcccaagatagcgaag

SEQ ID NO: 2695070 - DNA, 25 bp, Homo sapien
gatcatcacacccacgaacatgttg

SEQ ID NO: 2695071 - DNA, 25 bp, Homo sapien
gaatgcccggctcaaagcaaattcc

SEQ ID NO: 2695072 - DNA, 25 bp, Homo sapien
ttcccgattgtccaactgcttctgc

SEQ ID NO: 2695073 - DNA, 25 bp, Homo sapien
tgaagatgatggtgaatgcccggct

SEQ ID NO: 2695074 - DNA, 25 bp, Homo sapien
tgctccaacatcagctctcgctcaa

SEQ ID NO: 2695075 - DNA, 25 bp, Homo sapien
ctgctgccgctgcagaatcacctgc

SEQ ID NO: 2695076 - DNA, 25 bp, Homo sapien
catcagctctcgctcaaactttctg

SEQ ID NO: 2695077 - DNA, 25 bp, Homo sapien
ctcgctcaaactttctgatggagtc

SEQ ID NO: 2695078 - DNA, 25 bp, Homo sapien
cactgaaacttgtgcagtcagcatt

SEQ ID NO: 2695079 - DNA, 25 bp, Homo sapien
cctggtagtccagagtggaaaagta

SEQ ID NO: 2695080 - DNA, 25 bp, Homo sapien
gatgaagggtaagctagtgccaaaa

SEQ ID NO: 2695081 - DNA, 25 bp, Homo sapien
tggaaaagtagatatcgatgaaggg

SEQ ID NO: 2695082 - DNA, 25 bp, Homo sapien
aaatcatccaagaccattgggtcag

SEQ ID NO: 2695083 - DNA, 25 bp, Homo sapien
gatctcatagtacagctcttgaagc

SEQ ID NO: 2695084 - DNA, 25 bp, Homo sapien
aagtcttccagcattaggctcagca

SEQ ID NO: 2695085 - DNA, 25 bp, Homo sapien
cttccagcattaggctcagcacatg

SEQ ID NO: 2695086 - DNA, 25 bp, Homo sapien
ctcagcacatgcacgatctcatagt

SEQ ID NO: 2695087 - DNA, 25 bp, Homo sapien
atggtctgcaaggctctcggcacat

SEQ ID NO: 2695088 - DNA, 25 bp, Homo sapien
tgtttaatagggacctgtcatggtc

SEQ ID NO: 2695089 - DNA, 25 bp, Homo sapien
gtgtttaatagggacctgtcatggt

SEQ ID NO: 2695090 - DNA, 25 bp, Homo sapien
tggtctgcaaggctctcggcacatg

SEQ ID NO: 2695091 - DNA, 25 bp, Homo sapien
gaaagtgtccgtcacacaggactca

SEQ ID NO: 2695092 - DNA, 25 bp, Homo sapien
tatcagagtatagcgagggcctccc

SEQ ID NO: 2695093 - DNA, 25 bp, Homo sapien
cttgcctgccaggagcgttcgggca

SEQ ID NO: 2695094 - DNA, 25 bp, Homo sapien
gaccagcctgtaaactgcctgtaaa

SEQ ID NO: 2695095 - DNA, 25 bp, Homo sapien
aaagacgtcggagaaaagtgccgcg

SEQ ID NO: 2695096 - DNA, 25 bp, Homo sapien
gagccctatattaaggccacggagc

SEQ ID NO: 2695097 - DNA, 25 bp, Homo sapien
tgcaatttctctcgggatggcgcgg

SEQ ID NO: 2695098 - DNA, 25 bp, Homo sapien
gccttagctcgagtcggatccgtgt

SEQ ID NO: 2695099 - DNA, 25 bp, Homo sapien
cgagagaacgcactcagagagacag

SEQ ID NO: 2695100 - DNA, 25 bp, Homo sapien
tgcacgagcctacagctggagggtt

SEQ ID NO: 2695101 - DNA, 25 bp, Homo sapien
cagagagggaggttaacaccgtgac

SEQ ID NO: 2695102 - DNA, 25 bp, Homo sapien
agaatttgatttgcgcaactgggcg

SEQ ID NO: 2695103 - DNA, 25 bp, Homo sapien
gcctagagccagcagaaacgtttcg

SEQ ID NO: 2695104 - DNA, 25 bp, Homo sapien
cccggaaaattgactgcggtgcaga

SEQ ID NO: 2695105 - DNA, 25 bp, Homo sapien
gagtaatgtctttgcctgtgcccag

SEQ ID NO: 2695106 - DNA, 25 bp, Homo sapien
ttcacctacgtgcaaggactcgagg

SEQ ID NO: 2695107 - DNA, 25 bp, Homo sapien
tccttgaaaggagggatcttctact

SEQ ID NO: 2695108 - DNA, 25 bp, Homo sapien
tggccaagaaacatggcaacggtgg

SEQ ID NO: 2695109 - DNA, 25 bp, Homo sapien
gactcgtggtaaaggtggccaagaa

SEQ ID NO: 2695110 - DNA, 25 bp, Homo sapien
tcttctactgcaggagactcgtggt

SEQ ID NO: 2695111 - DNA, 25 bp, Homo sapien
tggcggcagtcctgctcaaatacat

SEQ ID NO: 2695112 - DNA, 25 bp, Homo sapien
tctgtgcctcactggcggcagtcct

SEQ ID NO: 2695113 - DNA, 25 bp, Homo sapien
actcccatctgtgcctcactggcgg

SEQ ID NO: 2695114 - DNA, 25 bp, Homo sapien
tcactggcggcagtcctgctcaaat

SEQ ID NO: 2695115 - DNA, 25 bp, Homo sapien
cacggcacagagtcctgagttccat

SEQ ID NO: 2695116 - DNA, 25 bp, Homo sapien
gactgagcggcccacggcacagagt

SEQ ID NO: 2695117 - DNA, 25 bp, Homo sapien
ccacggcacagagtcctgagttcca

SEQ ID NO: 2695118 - DNA, 25 bp, Homo sapien
cagccgctgactgagcggcccacgg

SEQ ID NO: 2695119 - DNA, 25 bp, Homo sapien
caataaagacattcccgcggcttct

SEQ ID NO: 2695120 - DNA, 25 bp, Homo sapien
ggagcacgcagtcgcttctcaagaa

SEQ ID NO: 2695121 - DNA, 25 bp, Homo sapien
tcgccggcacaggtcgggctttttc

SEQ ID NO: 2695122 - DNA, 25 bp, Homo sapien
ttgacgcagggtcccggagcacgca

SEQ ID NO: 2695123 - DNA, 25 bp, Homo sapien
ggtccgcgccctggctctcttcgcc

SEQ ID NO: 2695124 - DNA, 25 bp, Homo sapien
cggtccgcgccctggctctcttcgc

SEQ ID NO: 2695125 - DNA, 25 bp, Homo sapien
gtcggtccgcgccctggctctcttc

SEQ ID NO: 2695126 - DNA, 25 bp, Homo sapien
tcggtccgcgccctggctctcttcg

SEQ ID NO: 2695127 - DNA, 25 bp, Homo sapien
taccaggagtaggttcggccaactg

SEQ ID NO: 2695128 - DNA, 25 bp, Homo sapien
ctgtggtcccatcccataatcccaa

SEQ ID NO: 2695129 - DNA, 25 bp, Homo sapien
gaggcttcgcgcacagggttatctg

SEQ ID NO: 2695130 - DNA, 25 bp, Homo sapien
aggctcccagttcccttgcgtccag

SEQ ID NO: 2695131 - DNA, 25 bp, Homo sapien
tcatgaaagattcaggcccggctgc

SEQ ID NO: 2695132 - DNA, 25 bp, Homo sapien
cgcagcagctgtcggcgagaaccag

SEQ ID NO: 2695133 - DNA, 25 bp, Homo sapien
cggaaacggtcgctctggagcccgt

SEQ ID NO: 2695134 - DNA, 25 bp, Homo sapien
gcgggcaggcttagccgctccagtc

SEQ ID NO: 2695135 - DNA, 25 bp, Homo sapien
ttatgaccacctttacggccctgtg

SEQ ID NO: 2695136 - DNA, 25 bp, Homo sapien
cggccctgtgtttgggactctttat

SEQ ID NO: 2695137 - DNA, 25 bp, Homo sapien
gctttgataagccagctgcgccagc

SEQ ID NO: 2695138 - DNA, 25 bp, Homo sapien
acctggcgggcgtcgcgatacgctt

SEQ ID NO: 2695139 - DNA, 25 bp, Homo sapien
ggagcctcacgcctctctgggatgc

SEQ ID NO: 2695140 - DNA, 25 bp, Homo sapien
cgcctctctgggatgccggacccct

SEQ ID NO: 2695141 - DNA, 25 bp, Homo sapien
gcctctctgggatgccggacccctc

SEQ ID NO: 2695142 - DNA, 25 bp, Homo sapien
gtttgggagcctcacgcctctctgg

SEQ ID NO: 2695143 - DNA, 25 bp, Homo sapien
tctctgtgccaagcatgcgacttaa

SEQ ID NO: 2695144 - DNA, 25 bp, Homo sapien
gtgcattaaaaccaggtctctgtgc

SEQ ID NO: 2695145 - DNA, 25 bp, Homo sapien
accagtgacgacacaaaggagggat

SEQ ID NO: 2695146 - DNA, 25 bp, Homo sapien
gacttaattacatagcccgcgtact

SEQ ID NO: 2695147 - DNA, 25 bp, Homo sapien
taattagtccataggcccgggctag

SEQ ID NO: 2695148 - DNA, 25 bp, Homo sapien
cttgtaattagtccataggcccggg

SEQ ID NO: 2695149 - DNA, 25 bp, Homo sapien
ataggcccgggctagggacaatggc

SEQ ID NO: 2695150 - DNA, 25 bp, Homo sapien
tgtaattagtccataggcccgggct

SEQ ID NO: 2695151 - DNA, 25 bp, Homo sapien
tcagctagttaccacctcattcatc

SEQ ID NO: 2695152 - DNA, 25 bp, Homo sapien
catttcataattgctgcctatttgc

SEQ ID NO: 2695153 - DNA, 25 bp, Homo sapien
taatcactctctgattcagcgccca

SEQ ID NO: 2695154 - DNA, 25 bp, Homo sapien
ggaagcccagcagattttgctcaga

SEQ ID NO: 2695155 - DNA, 25 bp, Homo sapien
catagcctgcaccatgaccatgtcc

SEQ ID NO: 2695156 - DNA, 25 bp, Homo sapien
tagcctgcaccatgaccatgtccat

SEQ ID NO: 2695157 - DNA, 25 bp, Homo sapien
ctgcacaggcttcaccatgaccctg

SEQ ID NO: 2695158 - DNA, 25 bp, Homo sapien
acaggcttcaccatgaccctgcata

SEQ ID NO: 2695159 - DNA, 25 bp, Homo sapien
gcactggccatgcctgacatcttca

SEQ ID NO: 2695160 - DNA, 25 bp, Homo sapien
tgggatccaccactgacaaaggaca

SEQ ID NO: 2695161 - DNA, 25 bp, Homo sapien
tccaggctttggcttgggatccacc

SEQ ID NO: 2695162 - DNA, 25 bp, Homo sapien
tcttcaggtcacctgaatccaggct

SEQ ID NO: 2695163 - DNA, 25 bp, Homo sapien
taatctaaactcgagcagcccaggt

SEQ ID NO: 2695164 - DNA, 25 bp, Homo sapien
gcttgttagaagagcctggatcccg

SEQ ID NO: 2695165 - DNA, 25 bp, Homo sapien
aaagcggaggcgtgtgcccacgtaa

SEQ ID NO: 2695166 - DNA, 25 bp, Homo sapien
ctcaacccagaaatgagcttgttag

SEQ ID NO: 2695167 - DNA, 25 bp, Homo sapien
tgaaaatggggggataggagccaag

SEQ ID NO: 2695168 - DNA, 25 bp, Homo sapien
caacatggtaaagcttgactttcag

SEQ ID NO: 2695169 - DNA, 25 bp, Homo sapien
agcacagttctcagggtgtggccac

SEQ ID NO: 2695170 - DNA, 25 bp, Homo sapien
gccaccatccgccaaacgagccaca

SEQ ID NO: 2695171 - DNA, 25 bp, Homo sapien
ggcctgtttagcaccaaggatgact

SEQ ID NO: 2695172 - DNA, 25 bp, Homo sapien
caaggatgactacacgtggtcccat

SEQ ID NO: 2695173 - DNA, 25 bp, Homo sapien
ccaaacagatccgttctgggcctgt

SEQ ID NO: 2695174 - DNA, 25 bp, Homo sapien
caattcccttgcaaaggtgggcctc

SEQ ID NO: 2695175 - DNA, 25 bp, Homo sapien
tgcagggaacggcagcaaatcccag

SEQ ID NO: 2695176 - DNA, 25 bp, Homo sapien
taaaaatgattggtatctgccctca

SEQ ID NO: 2695177 - DNA, 25 bp, Homo sapien
tgccctcagtgtagaacccgtctgc

SEQ ID NO: 2695178 - DNA, 25 bp, Homo sapien
acagagcagccggattgcagggaac

SEQ ID NO: 2695179 - DNA, 25 bp, Homo sapien
cgggaatggcctctgttgactaatt

SEQ ID NO: 2695180 - DNA, 25 bp, Homo sapien
gaagcccatgctctgtgtccgaaaa

SEQ ID NO: 2695181 - DNA, 25 bp, Homo sapien
aggcacggcgcctgcgcaatgcctg

SEQ ID NO: 2695182 - DNA, 25 bp, Homo sapien
tgtccgaaaagacactcccagcagg

SEQ ID NO: 2695183 - DNA, 25 bp, Homo sapien
ttggcaatgaggtacttggaaaggg

SEQ ID NO: 2695184 - DNA, 25 bp, Homo sapien
tgtcccacccaggttctatgagact

SEQ ID NO: 2695185 - DNA, 25 bp, Homo sapien
gctattttccccgaatcctcagttc

SEQ ID NO: 2695186 - DNA, 25 bp, Homo sapien
caggttctatgagactaggcatggg

SEQ ID NO: 2695187 - DNA, 25 bp, Homo sapien
accacctctactagttccaggaact

SEQ ID NO: 2695188 - DNA, 25 bp, Homo sapien
ccacctctactagttccaggaactg

SEQ ID NO: 2695189 - DNA, 25 bp, Homo sapien
caccacctctactagttccaggaac

SEQ ID NO: 2695190 - DNA, 25 bp, Homo sapien
cacctctactagttccaggaactgt

SEQ ID NO: 2695191 - DNA, 25 bp, Homo sapien
tccaccatatgggaggagcttccaa

SEQ ID NO: 2695192 - DNA, 25 bp, Homo sapien
tagacagactaaacaactttccatg

SEQ ID NO: 2695193 - DNA, 25 bp, Homo sapien
catcatcatattagacagactaaac

SEQ ID NO: 2695194 - DNA, 25 bp, Homo sapien
gatgctcatggtaatcggcatcatc

SEQ ID NO: 2695195 - DNA, 25 bp, Homo sapien
tttgtcagcatgacttctaccatca

SEQ ID NO: 2695196 - DNA, 25 bp, Homo sapien
tgtcctttgtcagcatgacttctac

SEQ ID NO: 2695197 - DNA, 25 bp, Homo sapien
gcttctattagctaagcactcccca

SEQ ID NO: 2695198 - DNA, 25 bp, Homo sapien
gactgcaggctaggctctgtacaca

SEQ ID NO: 2695199 - DNA, 25 bp, Homo sapien
ggctttgaacctggtgactggggtc

SEQ ID NO: 2695200 - DNA, 25 bp, Homo sapien
tttgaacctggtgactggggtcctg

SEQ ID NO: 2695201 - DNA, 25 bp, Homo sapien
ctgtgcggctttgaacctggtgact

SEQ ID NO: 2695202 - DNA, 25 bp, Homo sapien
tgtgcggctttgaacctggtgactg

SEQ ID NO: 2695203 - DNA, 25 bp, Homo sapien
ctgggcagcgctgctggacacacta

SEQ ID NO: 2695204 - DNA, 25 bp, Homo sapien
cactgggcagcgctgctggacacac

SEQ ID NO: 2695205 - DNA, 25 bp, Homo sapien
tgggcagcgctgctggacacactac

SEQ ID NO: 2695206 - DNA, 25 bp, Homo sapien
actgggcagcgctgctggacacact

SEQ ID NO: 2695207 - DNA, 25 bp, Homo sapien
ctgaccctgagtggacagactggcc

SEQ ID NO: 2695208 - DNA, 25 bp, Homo sapien
tcctagatcaacatcacagggtcgc

SEQ ID NO: 2695209 - DNA, 25 bp, Homo sapien
gatggcgattgtgccttcatttggc

SEQ ID NO: 2695210 - DNA, 25 bp, Homo sapien
ggctgagcagcatgacgggcctggg

SEQ ID NO: 2695211 - DNA, 25 bp, Homo sapien
gcacgtaagtgatgaaatcggccac

SEQ ID NO: 2695212 - DNA, 25 bp, Homo sapien
gatccagctctcaacaggcacatgt

SEQ ID NO: 2695213 - DNA, 25 bp, Homo sapien
tggatccttagatggaagagccacc

SEQ ID NO: 2695214 - DNA, 25 bp, Homo sapien
aagaagtctcatctggctttcgcag

SEQ ID NO: 2695215 - DNA, 25 bp, Homo sapien
aaaccgatatggtgctctgagttca

SEQ ID NO: 2695216 - DNA, 25 bp, Homo sapien
tctgagttcacgtgaatgactggaa

SEQ ID NO: 2695217 - DNA, 25 bp, Homo sapien
tgctctgagttcacgtgaatgactg

SEQ ID NO: 2695218 - DNA, 25 bp, Homo sapien
ttaaggtggaaaaccgatatggtgc

SEQ ID NO: 2695219 - DNA, 25 bp, Homo sapien
gatgacaaatcccaaccgagtgaaa

SEQ ID NO: 2695220 - DNA, 25 bp, Homo sapien
gctgactcggccaggtatggcagat

SEQ ID NO: 2695221 - DNA, 25 bp, Homo sapien
gcatgggaaggaggagtccacatcc

SEQ ID NO: 2695222 - DNA, 25 bp, Homo sapien
gatacttcatcatgcggattggcca

SEQ ID NO: 2695223 - DNA, 25 bp, Homo sapien
actgagttattaaaaccactgccat

SEQ ID NO: 2695224 - DNA, 25 bp, Homo sapien
ctgcatggagtagccctggtttact

SEQ ID NO: 2695225 - DNA, 25 bp, Homo sapien
tgagttattaaaaccactgccatca

SEQ ID NO: 2695226 - DNA, 25 bp, Homo sapien
tgcatggagtagccctggtttactg

SEQ ID NO: 2695227 - DNA, 25 bp, Homo sapien
gcccccagacagtgtggcaactttc

SEQ ID NO: 2695228 - DNA, 25 bp, Homo sapien
ctgcccccagacagtgtggcaactt

SEQ ID NO: 2695229 - DNA, 25 bp, Homo sapien
agacagtgtggcaactttctccaag

SEQ ID NO: 2695230 - DNA, 25 bp, Homo sapien
cccagacagtgtggcaactttctcc

SEQ ID NO: 2695231 - DNA, 25 bp, Homo sapien
aggagaactgcaggcgcatgcacag

SEQ ID NO: 2695232 - DNA, 25 bp, Homo sapien
aactgcaggcgcatgcacagcaaac

SEQ ID NO: 2695233 - DNA, 25 bp, Homo sapien
ctctcaaagtgaccccctcgaagga

SEQ ID NO: 2695234 - DNA, 25 bp, Homo sapien
tgaccccctcgaaggagaactgcag

SEQ ID NO: 2695235 - DNA, 25 bp, Homo sapien
gctgatgttattagggtggacctga

SEQ ID NO: 2695236 - DNA, 25 bp, Homo sapien
ccttggctgatgttattagggtgga

SEQ ID NO: 2695237 - DNA, 25 bp, Homo sapien
tggctgatgttattagggtggacct

SEQ ID NO: 2695238 - DNA, 25 bp, Homo sapien
gatgttattagggtggacctgagca

SEQ ID NO: 2695239 - DNA, 25 bp, Homo sapien
tgcgggtcacctggttccatcacag

SEQ ID NO: 2695240 - DNA, 25 bp, Homo sapien
ctggcccggaggctgcgggtcacct

SEQ ID NO: 2695241 - DNA, 25 bp, Homo sapien
gcgggtcacctggttccatcacagc

SEQ ID NO: 2695242 - DNA, 25 bp, Homo sapien
cctggcccatggagagaagctccat

SEQ ID NO: 2695243 - DNA, 25 bp, Homo sapien
gcctggcccatggagagaagctcca

SEQ ID NO: 2695244 - DNA, 25 bp, Homo sapien
gctgcccctgccggaaacacgcagg

SEQ ID NO: 2695245 - DNA, 25 bp, Homo sapien
gccttggccacaggaagtcctgtct

SEQ ID NO: 2695246 - DNA, 25 bp, Homo sapien
gcggccccaggtgcagaagtggcct

SEQ ID NO: 2695247 - DNA, 25 bp, Homo sapien
gtctcccgcctacggctaattgcca

SEQ ID NO: 2695248 - DNA, 25 bp, Homo sapien
aattcaaatgacgttcccatttctg

SEQ ID NO: 2695249 - DNA, 25 bp, Homo sapien
ctctgcatgaatgctcaggctccta

SEQ ID NO: 2695250 - DNA, 25 bp, Homo sapien
tctactggggaattcatatacatcc

SEQ ID NO: 2695251 - DNA, 25 bp, Homo sapien
gaatgctcaggctcctaactccaca

SEQ ID NO: 2695252 - DNA, 25 bp, Homo sapien
cagacgcctgggcaggagactctgc

SEQ ID NO: 2695253 - DNA, 25 bp, Homo sapien
caaatggcattccccctgcttggca

SEQ ID NO: 2695254 - DNA, 25 bp, Homo sapien
ctgcccagacgcctgggcaggagac

SEQ ID NO: 2695255 - DNA, 25 bp, Homo sapien
cgcctgggcaggagactctgccaag

SEQ ID NO: 2695256 - DNA, 25 bp, Homo sapien
caagactaaactctaagcatggtag

SEQ ID NO: 2695257 - DNA, 25 bp, Homo sapien
gactaaactctaagcatggtaggta

SEQ ID NO: 2695258 - DNA, 25 bp, Homo sapien
taaactctaagcatggtaggtagaa

SEQ ID NO: 2695259 - DNA, 25 bp, Homo sapien
tctccaagactaaactctaagcatg

SEQ ID NO: 2695260 - DNA, 25 bp, Homo sapien
cttgagatacgagtcactgacacca

SEQ ID NO: 2695261 - DNA, 25 bp, Homo sapien
cgggcagcagccttgagatacgagt

SEQ ID NO: 2695262 - DNA, 25 bp, Homo sapien
cagccttgagatacgagtcactgac

SEQ ID NO: 2695263 - DNA, 25 bp, Homo sapien
cagcagccttgagatacgagtcact

SEQ ID NO: 2695264 - DNA, 25 bp, Homo sapien
tattaattgcatgccctttgatgtc

SEQ ID NO: 2695265 - DNA, 25 bp, Homo sapien
gaaacatgtgatcggccctccagat

SEQ ID NO: 2695266 - DNA, 25 bp, Homo sapien
cctttgatgtctgaacatcgatgga

SEQ ID NO: 2695267 - DNA, 25 bp, Homo sapien
gtcgttcaccactttaacatcggaa

SEQ ID NO: 2695268 - DNA, 25 bp, Homo sapien
tttgtatgggaaggcttgcgtttct

SEQ ID NO: 2695269 - DNA, 25 bp, Homo sapien
gaaaagcatctatgggacccttttg

SEQ ID NO: 2695270 - DNA, 25 bp, Homo sapien
tctatgggacccttttgtatgggaa

SEQ ID NO: 2695271 - DNA, 25 bp, Homo sapien
gttgttggttaaaaatgattacagc

SEQ ID NO: 2695272 - DNA, 25 bp, Homo sapien
acgcgcagcatggagcacggatgcc

SEQ ID NO: 2695273 - DNA, 25 bp, Homo sapien
tgctgcacccagacgccaagtatca

SEQ ID NO: 2695274 - DNA, 25 bp, Homo sapien
atgctggacgcgcagcatggagcac

SEQ ID NO: 2695275 - DNA, 25 bp, Homo sapien
cagcatggagcacggatgccctgct

SEQ ID NO: 2695276 - DNA, 25 bp, Homo sapien
gtgggaaggtgtattcagccagtaa

SEQ ID NO: 2695277 - DNA, 25 bp, Homo sapien
aacacgccgggcggaatcactcggg

SEQ ID NO: 2695278 - DNA, 25 bp, Homo sapien
ccttggaagacctgttctatttgct

SEQ ID NO: 2695279 - DNA, 25 bp, Homo sapien
ctagagggacagcatcagcaacacg

SEQ ID NO: 2695280 - DNA, 25 bp, Homo sapien
ggccttggaagacctgttctatttg

SEQ ID NO: 2695281 - DNA, 25 bp, Homo sapien
ttctcttccaaagaatccacaagta

SEQ ID NO: 2695282 - DNA, 25 bp, Homo sapien
cttctcttccaaagaatccacaagt

SEQ ID NO: 2695283 - DNA, 25 bp, Homo sapien
ccagtcataggcaaggttgagagct

SEQ ID NO: 2695284 - DNA, 25 bp, Homo sapien
tcaggagtcattctccctccagaca

SEQ ID NO: 2695285 - DNA, 25 bp, Homo sapien
tccctccagacagggtaatttccta

SEQ ID NO: 2695286 - DNA, 25 bp, Homo sapien
aggagtcattctccctccagacagg

SEQ ID NO: 2695287 - DNA, 25 bp, Homo sapien
cattctccctccagacagggtaatt

SEQ ID NO: 2695288 - DNA, 25 bp, Homo sapien
caggcgttccaagaagggcaaccag

SEQ ID NO: 2695289 - DNA, 25 bp, Homo sapien
cccagtgaatatgcaggcgttccaa

SEQ ID NO: 2695290 - DNA, 25 bp, Homo sapien
agctatgtcacactgcccttcccca

SEQ ID NO: 2695291 - DNA, 25 bp, Homo sapien
tctagacttggcaaatgccccagca

SEQ ID NO: 2695292 - DNA, 25 bp, Homo sapien
taatagttgtaaacactctatcact

SEQ ID NO: 2695293 - DNA, 25 bp, Homo sapien
agggctaaacagaggcgagtgtggg

SEQ ID NO: 2695294 - DNA, 25 bp, Homo sapien
gcgagtgtgggtaatagttgtaaac

SEQ ID NO: 2695295 - DNA, 25 bp, Homo sapien
ctaaacagaggcgagtgtgggtaat

SEQ ID NO: 2695296 - DNA, 25 bp, Homo sapien
gccggaagacccctcgcactgtgga

SEQ ID NO: 2695297 - DNA, 25 bp, Homo sapien
cggaagacccctcgcactgtggaca

SEQ ID NO: 2695298 - DNA, 25 bp, Homo sapien
ttccagccggaagacccctcgcact

SEQ ID NO: 2695299 - DNA, 25 bp, Homo sapien
gccttccagccggaagacccctcgc

SEQ ID NO: 2695300 - DNA, 25 bp, Homo sapien
aagggatatggccactaatctgctc

SEQ ID NO: 2695301 - DNA, 25 bp, Homo sapien
cagggactggcaagattcttgttgg

SEQ ID NO: 2695302 - DNA, 25 bp, Homo sapien
tcccgaccccagaaagggatatggc

SEQ ID NO: 2695303 - DNA, 25 bp, Homo sapien
tggccactaatctgctcctgcaggg

SEQ ID NO: 2695304 - DNA, 25 bp, Homo sapien
cattattttccgaatgtattccaga

SEQ ID NO: 2695305 - DNA, 25 bp, Homo sapien
aaaagacaaggcgagatgaccaaag

SEQ ID NO: 2695306 - DNA, 25 bp, Homo sapien
aatttggtcatacatttggatttca

SEQ ID NO: 2695307 - DNA, 25 bp, Homo sapien
ctttgtcgcagataaaattgttctc

SEQ ID NO: 2695308 - DNA, 25 bp, Homo sapien
aaatatccagcttggaacagtctgc

SEQ ID NO: 2695309 - DNA, 25 bp, Homo sapien
cttggaacagtctgcaaggtatgca

SEQ ID NO: 2695310 - DNA, 25 bp, Homo sapien
acaggaaaatatccagcttggaaca

SEQ ID NO: 2695311 - DNA, 25 bp, Homo sapien
ccagcttggaacagtctgcaaggta

SEQ ID NO: 2695312 - DNA, 25 bp, Homo sapien
aagagagtggaaatcttagtggcca

SEQ ID NO: 2695313 - DNA, 25 bp, Homo sapien
ataagaccctggtctttcccacgag

SEQ ID NO: 2695314 - DNA, 25 bp, Homo sapien
caacatggtgaagattgagtgttcc

SEQ ID NO: 2695315 - DNA, 25 bp, Homo sapien
tgttccgaataatgtgagggcctgg

SEQ ID NO: 2695316 - DNA, 25 bp, Homo sapien
ggtggctccacagttccaggggttc

SEQ ID NO: 2695317 - DNA, 25 bp, Homo sapien
cagaggtggctccacagttccaggg

SEQ ID NO: 2695318 - DNA, 25 bp, Homo sapien
tggctccacagttccaggggttcgg

SEQ ID NO: 2695319 - DNA, 25 bp, Homo sapien
ctccacagttccaggggttcggcgt

SEQ ID NO: 2695320 - DNA, 25 bp, Homo sapien
taaatgtgcgaagaggctaaccaga

SEQ ID NO: 2695321 - DNA, 25 bp, Homo sapien
cgagaagtaaatgtgcgaagaggct

SEQ ID NO: 2695322 - DNA, 25 bp, Homo sapien
tgaatgggtccgtgggaaactgcga

SEQ ID NO: 2695323 - DNA, 25 bp, Homo sapien
tccgtgggaaactgcgagaagtaaa

SEQ ID NO: 2695324 - DNA, 25 bp, Homo sapien
ccaggggcccgaaatagcctgagcg

SEQ ID NO: 2695325 - DNA, 25 bp, Homo sapien
gaaatagcctgagcgtcattaaggc

SEQ ID NO: 2695326 - DNA, 25 bp, Homo sapien
gcccgaaatagcctgagcgtcatta

SEQ ID NO: 2695327 - DNA, 25 bp, Homo sapien
gggcccgaaatagcctgagcgtcat

SEQ ID NO: 2695328 - DNA, 25 bp, Homo sapien
cttttcccaagactcgataaccctg

SEQ ID NO: 2695329 - DNA, 25 bp, Homo sapien
caaacaaaggcttgacaatgtcaac

SEQ ID NO: 2695330 - DNA, 25 bp, Homo sapien
ccaagactcgataaccctgagagtt

SEQ ID NO: 2695331 - DNA, 25 bp, Homo sapien
tcctcctattacctctctgctgttt

SEQ ID NO: 2695332 - DNA, 25 bp, Homo sapien
gccctcagggaagcttccgtgctct

SEQ ID NO: 2695333 - DNA, 25 bp, Homo sapien
tcagggaagcttccgtgctcttcca

SEQ ID NO: 2695334 - DNA, 25 bp, Homo sapien
cctcagggaagcttccgtgctcttc

SEQ ID NO: 2695335 - DNA, 25 bp, Homo sapien
ctgccctcagggaagcttccgtgct

SEQ ID NO: 2695336 - DNA, 25 bp, Homo sapien
tatttcccctgccagtgtggacaag

SEQ ID NO: 2695337 - DNA, 25 bp, Homo sapien
caacttctaagtcccgagcctcgca

SEQ ID NO: 2695338 - DNA, 25 bp, Homo sapien
cctgccagtgtggacaagagtgcca

SEQ ID NO: 2695339 - DNA, 25 bp, Homo sapien
caagagtgccatgattctgtttcat

SEQ ID NO: 2695340 - DNA, 25 bp, Homo sapien
catggacctttgagttgggccaatc

SEQ ID NO: 2695341 - DNA, 25 bp, Homo sapien
tgctacctgtggcaccaatctatgg

SEQ ID NO: 2695342 - DNA, 25 bp, Homo sapien
gacatctgtattgatcatggccacc

SEQ ID NO: 2695343 - DNA, 25 bp, Homo sapien
catcatgatgcttccaaaagctggc

SEQ ID NO: 2695344 - DNA, 25 bp, Homo sapien
gcacgctcgagcctagatgatttgc

SEQ ID NO: 2695345 - DNA, 25 bp, Homo sapien
gctcgagcctagatgatttgcgaaa

SEQ ID NO: 2695346 - DNA, 25 bp, Homo sapien
cacgctcgagcctagatgatttgcg

SEQ ID NO: 2695347 - DNA, 25 bp, Homo sapien
cgagcctagatgatttgcgaaatgt

SEQ ID NO: 2695348 - DNA, 25 bp, Homo sapien
ccaccttcacaacagagaacccttt

SEQ ID NO: 2695349 - DNA, 25 bp, Homo sapien
tttggggctgaccaaacacttgccc

SEQ ID NO: 2695350 - DNA, 25 bp, Homo sapien
ccctttggggctgaccaaacacttg

SEQ ID NO: 2695351 - DNA, 25 bp, Homo sapien
ccttcacaacagagaaccctttggg

SEQ ID NO: 2695352 - DNA, 25 bp, Homo sapien
tcttccagagtctataagcaagctg

SEQ ID NO: 2695353 - DNA, 25 bp, Homo sapien
aaatcacagatagctcaccaggttg

SEQ ID NO: 2695354 - DNA, 25 bp, Homo sapien
gatgaccctggcctgatcatggaag

SEQ ID NO: 2695355 - DNA, 25 bp, Homo sapien
gtaatgaaattctggcctgcctccc

SEQ ID NO: 2695356 - DNA, 25 bp, Homo sapien
gtctggaccagaataagcaactgaa

SEQ ID NO: 2695357 - DNA, 25 bp, Homo sapien
tgcaaagaagggctcaagtcacaag

SEQ ID NO: 2695358 - DNA, 25 bp, Homo sapien
agtcacaagcgggtctgctcgagcc

SEQ ID NO: 2695359 - DNA, 25 bp, Homo sapien
cattgagctaatgagaatccatcac

SEQ ID NO: 2695360 - DNA, 25 bp, Homo sapien
gttacagatagtttgaaacattcca

SEQ ID NO: 2695361 - DNA, 25 bp, Homo sapien
gtctgttacagatagtttgaaacat

SEQ ID NO: 2695362 - DNA, 25 bp, Homo sapien
caagaaaaagtaggtcctttgtctg

SEQ ID NO: 2695363 - DNA, 25 bp, Homo sapien
cctttgtctgttacagatagtttga

SEQ ID NO: 2695364 - DNA, 25 bp, Homo sapien
ggtctcttgtgggaaagttcatgag

SEQ ID NO: 2695365 - DNA, 25 bp, Homo sapien
cttgtgggaaagttcatgagactgg

SEQ ID NO: 2695366 - DNA, 25 bp, Homo sapien
cagcaagaggaatgaagcaggtgcc

SEQ ID NO: 2695367 - DNA, 25 bp, Homo sapien
tctcttgtgggaaagttcatgagac

SEQ ID NO: 2695368 - DNA, 25 bp, Homo sapien
aatgcaattcccaatctcacaataa

SEQ ID NO: 2695369 - DNA, 25 bp, Homo sapien
tgcaattcccaatctcacaataatt

SEQ ID NO: 2695370 - DNA, 25 bp, Homo sapien
aattcccaatctcacaataattgtt

SEQ ID NO: 2695371 - DNA, 25 bp, Homo sapien
aaatgcaattcccaatctcacaata

SEQ ID NO: 2695372 - DNA, 25 bp, Homo sapien
ctgggtttgctgcctcagaccaact

SEQ ID NO: 2695373 - DNA, 25 bp, Homo sapien
tgcctgggtttgctgcctcagacca

SEQ ID NO: 2695374 - DNA, 25 bp, Homo sapien
ctgcctgggtttgctgcctcagacc

SEQ ID NO: 2695375 - DNA, 25 bp, Homo sapien
gcctgggtttgctgcctcagaccaa

SEQ ID NO: 2695376 - DNA, 25 bp, Homo sapien
gcagtcctcaataccaccataggtg

SEQ ID NO: 2695377 - DNA, 25 bp, Homo sapien
tggtcagtgtgacacaagccctggc

SEQ ID NO: 2695378 - DNA, 25 bp, Homo sapien
aagccctggccattgttccagatga

SEQ ID NO: 2695379 - DNA, 25 bp, Homo sapien
gaccctccaatatccgtcagcaaag

SEQ ID NO: 2695380 - DNA, 25 bp, Homo sapien
caaatgtcccagtttgggccaacgg

SEQ ID NO: 2695381 - DNA, 25 bp, Homo sapien
taggcctgcctgctctgtcgaaaga

SEQ ID NO: 2695382 - DNA, 25 bp, Homo sapien
tctggcataatgcagtgctcctggc

SEQ ID NO: 2695383 - DNA, 25 bp, Homo sapien
gaaagagctcagaagtatgcgcgcg

SEQ ID NO: 2695384 - DNA, 25 bp, Homo sapien
ttcctctagcaagcgggtgcagaca

SEQ ID NO: 2695385 - DNA, 25 bp, Homo sapien
caggagcagcggtgagaaggtgagc

SEQ ID NO: 2695386 - DNA, 25 bp, Homo sapien
cacctccgtgagagccagtgatgct

SEQ ID NO: 2695387 - DNA, 25 bp, Homo sapien
ctcttcctcacaagacacctccgtg

SEQ ID NO: 2695388 - DNA, 25 bp, Homo sapien
acatagcctggcccagcccgttatg

SEQ ID NO: 2695389 - DNA, 25 bp, Homo sapien
gtcgttctgtctgcgctgccagcca

SEQ ID NO: 2695390 - DNA, 25 bp, Homo sapien
tgccacactcagagccgtggctgtg

SEQ ID NO: 2695391 - DNA, 25 bp, Homo sapien
ggttgtctgcctgtccaagggtcgt

SEQ ID NO: 2695392 - DNA, 25 bp, Homo sapien
acactctagtcaccagaggctccag

SEQ ID NO: 2695393 - DNA, 25 bp, Homo sapien
tcaatgtcttgcatccacactctag

SEQ ID NO: 2695394 - DNA, 25 bp, Homo sapien
tgtcttgcatccacactctagtcac

SEQ ID NO: 2695395 - DNA, 25 bp, Homo sapien
gcatccacactctagtcaccagagg

SEQ ID NO: 2695396 - DNA, 25 bp, Homo sapien
cctctgccacgaacattgctggagc

SEQ ID NO: 2695397 - DNA, 25 bp, Homo sapien
ttcctcctctgccacgaacattgct

SEQ ID NO: 2695398 - DNA, 25 bp, Homo sapien
cctcctctgccacgaacattgctgg

SEQ ID NO: 2695399 - DNA, 25 bp, Homo sapien
tcctctgccacgaacattgctggag

SEQ ID NO: 2695400 - DNA, 25 bp, Homo sapien
gaaggaaatccagtagatgaggctc

SEQ ID NO: 2695401 - DNA, 25 bp, Homo sapien
gaaggagcatcctgtgccctcagga

SEQ ID NO: 2695402 - DNA, 25 bp, Homo sapien
gaaaggtaatgggatctatgcactc

SEQ ID NO: 2695403 - DNA, 25 bp, Homo sapien
cagcattgtccacccttggaaggag

SEQ ID NO: 2695404 - DNA, 25 bp, Homo sapien
ggagctggccttggtgccgccttcc

SEQ ID NO: 2695405 - DNA, 25 bp, Homo sapien
ttggtgccgccttccagtgatccac

SEQ ID NO: 2695406 - DNA, 25 bp, Homo sapien
cgggcactcctggccgatgttatct

SEQ ID NO: 2695407 - DNA, 25 bp, Homo sapien
cactcctggccgatgttatcttggg

SEQ ID NO: 2695408 - DNA, 25 bp, Homo sapien
ggctccaactggtactgaactgaca

SEQ ID NO: 2695409 - DNA, 25 bp, Homo sapien
tctgagatctaacgcaatgctgtgg

SEQ ID NO: 2695410 - DNA, 25 bp, Homo sapien
tagagaggttaagtgttgcagccca

SEQ ID NO: 2695411 - DNA, 25 bp, Homo sapien
taaaatcctgcaggttctagagagg

SEQ ID NO: 2695412 - DNA, 25 bp, Homo sapien
cagaagggtgcgtggagctttccaa

SEQ ID NO: 2695413 - DNA, 25 bp, Homo sapien
agctttccaaggagaagccgccaca

SEQ ID NO: 2695414 - DNA, 25 bp, Homo sapien
cattccccgttccacagatgaagga

SEQ ID NO: 2695415 - DNA, 25 bp, Homo sapien
gagtgtatccaaagccgtgcaggtg

SEQ ID NO: 2695416 - DNA, 25 bp, Homo sapien
taatgaaaccctgattgacgcacag

SEQ ID NO: 2695417 - DNA, 25 bp, Homo sapien
ctttattgtacatcctccagtggcg

SEQ ID NO: 2695418 - DNA, 25 bp, Homo sapien
caggaagccccgtttgtaagcgtgt

SEQ ID NO: 2695419 - DNA, 25 bp, Homo sapien
gaatcatgaatttgcaacagaccta

SEQ ID NO: 2695420 - DNA, 25 bp, Homo sapien
tgtcctcttccatcaaaacggtgta

SEQ ID NO: 2695421 - DNA, 25 bp, Homo sapien
gaaggccatctccagttacttcgtg

SEQ ID NO: 2695422 - DNA, 25 bp, Homo sapien
tataggcatctatgtgcaggaaatg

SEQ ID NO: 2695423 - DNA, 25 bp, Homo sapien
ttttgacagcgagagtataggcatc

SEQ ID NO: 2695424 - DNA, 25 bp, Homo sapien
ttcctggcagcctgcgcagtccaga

SEQ ID NO: 2695425 - DNA, 25 bp, Homo sapien
tcctggcagcctgcgcagtccagag

SEQ ID NO: 2695426 - DNA, 25 bp, Homo sapien
gagaggcttactacgaacttggtca

SEQ ID NO: 2695427 - DNA, 25 bp, Homo sapien
gctctgggagacatggtactttgca

SEQ ID NO: 2695428 - DNA, 25 bp, Homo sapien
ttggaatcacaacgcagcagacagc

SEQ ID NO: 2695429 - DNA, 25 bp, Homo sapien
tataggtcagcccagagttctcaag

SEQ ID NO: 2695430 - DNA, 25 bp, Homo sapien
gagtttggtacatctaagagctgag

SEQ ID NO: 2695431 - DNA, 25 bp, Homo sapien
caaaactgctggtgagagatacaaa

SEQ ID NO: 2695432 - DNA, 25 bp, Homo sapien
tttgccaattacaccttccctggta

SEQ ID NO: 2695433 - DNA, 25 bp, Homo sapien
ggagaattattgctaagacctggag

SEQ ID NO: 2695434 - DNA, 25 bp, Homo sapien
gacattgcctcgatcgacagtgatg

SEQ ID NO: 2695435 - DNA, 25 bp, Homo sapien
gacagtgatgctgtcgttcacccga

SEQ ID NO: 2695436 - DNA, 25 bp, Homo sapien
tcctttgacagctatgcagggctgc

SEQ ID NO: 2695437 - DNA, 25 bp, Homo sapien
tagttgcaagttgtacaggctgaca

SEQ ID NO: 2695438 - DNA, 25 bp, Homo sapien
tcttcgatgtagaggcttgccaggg

SEQ ID NO: 2695439 - DNA, 25 bp, Homo sapien
tcaagatggcagatggttcagggca

SEQ ID NO: 2695440 - DNA, 25 bp, Homo sapien
gaagacaggccacatcagtatgcta

SEQ ID NO: 2695441 - DNA, 25 bp, Homo sapien
tcaatggcacgacagggctgctctg

SEQ ID NO: 2695442 - DNA, 25 bp, Homo sapien
caatgctgagtagtagtggctccct

SEQ ID NO: 2695443 - DNA, 25 bp, Homo sapien
tcccattcccctagacagagcaggt

SEQ ID NO: 2695444 - DNA, 25 bp, Homo sapien
tcccgcgaagagagtcagatacagg

SEQ ID NO: 2695445 - DNA, 25 bp, Homo sapien
gcagagcccgccaaaatagcttctt

SEQ ID NO: 2695446 - DNA, 25 bp, Homo sapien
gaagtctcaggagtcatcatagcca

SEQ ID NO: 2695447 - DNA, 25 bp, Homo sapien
taaggcatggttgctaagctactca

SEQ ID NO: 2695448 - DNA, 25 bp, Homo sapien
ggtaccctgtgtcctatgaatctca

SEQ ID NO: 2695449 - DNA, 25 bp, Homo sapien
ctactcaggaagcatggcccaggct

SEQ ID NO: 2695450 - DNA, 25 bp, Homo sapien
acttgtgaaagtctgttatgcagcc

SEQ ID NO: 2695451 - DNA, 25 bp, Homo sapien
ggaaatcaacactggtccattactg

SEQ ID NO: 2695452 - DNA, 25 bp, Homo sapien
cacataaccgtggtacacatggtca

SEQ ID NO: 2695453 - DNA, 25 bp, Homo sapien
caggattaaaaacacctgacttgtg

SEQ ID NO: 2695454 - DNA, 25 bp, Homo sapien
tgaacatgtgtagcccgattgcaga

SEQ ID NO: 2695455 - DNA, 25 bp, Homo sapien
tcgctttgagtccatctgggaaacc

SEQ ID NO: 2695456 - DNA, 25 bp, Homo sapien
ggcgaagctgctcccctgtcttgat

SEQ ID NO: 2695457 - DNA, 25 bp, Homo sapien
gaaaccgtaccatgacagggctcct

SEQ ID NO: 2695458 - DNA, 25 bp, Homo sapien
gaaggtgcagcatagcttgataaca

SEQ ID NO: 2695459 - DNA, 25 bp, Homo sapien
gacgtgaaggtgcagcatagcttga

SEQ ID NO: 2695460 - DNA, 25 bp, Homo sapien
ccaagacgtgaaggtgcagcatagc

SEQ ID NO: 2695461 - DNA, 25 bp, Homo sapien
ggtgcagcatagcttgataacatgc

SEQ ID NO: 2695462 - DNA, 25 bp, Homo sapien
aagtgttttgttccaaagctccctg

SEQ ID NO: 2695463 - DNA, 25 bp, Homo sapien
ctccctgctccagggagtcgggcat

SEQ ID NO: 2695464 - DNA, 25 bp, Homo sapien
aagctccctgctccagggagtcggg

SEQ ID NO: 2695465 - DNA, 25 bp, Homo sapien
agtgttttgttccaaagctccctgc

SEQ ID NO: 2695466 - DNA, 25 bp, Homo sapien
ggcacaataagtcgggcccgagccc

SEQ ID NO: 2695467 - DNA, 25 bp, Homo sapien
cccggcacaataagtcgggcccgag

SEQ ID NO: 2695468 - DNA, 25 bp, Homo sapien
ctgtgagcagagttgtacttggtga

SEQ ID NO: 2695469 - DNA, 25 bp, Homo sapien
gcccgcgagttgccggccccggcac

SEQ ID NO: 2695470 - DNA, 25 bp, Homo sapien
gcggcgctggctaggcagtctgggc

SEQ ID NO: 2695471 - DNA, 25 bp, Homo sapien
cccgcggcgctggctaggcagtctg

SEQ ID NO: 2695472 - DNA, 25 bp, Homo sapien
cgcggcgctggctaggcagtctggg

SEQ ID NO: 2695473 - DNA, 25 bp, Homo sapien
cggcgctggctaggcagtctgggcc

SEQ ID NO: 2695474 - DNA, 25 bp, Homo sapien
tcaggccgagacaccttgcagctgc

SEQ ID NO: 2695475 - DNA, 25 bp, Homo sapien
gcgcctgggcgcttttgtgggaaaa

SEQ ID NO: 2695476 - DNA, 25 bp, Homo sapien
ggaaaaaagcggtgctggcgcctac

SEQ ID NO: 2695477 - DNA, 25 bp, Homo sapien
gaaaccaacttctcttcgaaacgca

SEQ ID NO: 2695478 - DNA, 25 bp, Homo sapien
tcatgggtcagacctcgcgtccggg

SEQ ID NO: 2695479 - DNA, 25 bp, Homo sapien
tccccggggtcatgggtcagacctc

SEQ ID NO: 2695480 - DNA, 25 bp, Homo sapien
tgggacgcgccctgaagaagctcct

SEQ ID NO: 2695481 - DNA, 25 bp, Homo sapien
cgcagagtctgggacgcgccctgaa

SEQ ID NO: 2695482 - DNA, 25 bp, Homo sapien
tgtgcaaggcaggttccagacttcg

SEQ ID NO: 2695483 - DNA, 25 bp, Homo sapien
tggtggtccctacagaacggagagt

SEQ ID NO: 2695484 - DNA, 25 bp, Homo sapien
gaaggttcctaaagatgccgtggca

SEQ ID NO: 2695485 - DNA, 25 bp, Homo sapien
tagctaaccgcttccatgtgcaagg

SEQ ID NO: 2695486 - DNA, 25 bp, Homo sapien
caggaggaggcatgaaaccagctat

SEQ ID NO: 2695487 - DNA, 25 bp, Homo sapien
accagacattcaagagccgtgcaaa

SEQ ID NO: 2695488 - DNA, 25 bp, Homo sapien
gttattgtagaacaactacccagta

SEQ ID NO: 2695489 - DNA, 25 bp, Homo sapien
tatagtgaccgactgaatgcaggag

SEQ ID NO: 2695490 - DNA, 25 bp, Homo sapien
ccagtcatgtattagagagacagcc

SEQ ID NO: 2695491 - DNA, 25 bp, Homo sapien
ttccctccatagatttgaagcagtt

SEQ ID NO: 2695492 - DNA, 25 bp, Homo sapien
acagctttgccagtataggttcaag

SEQ ID NO: 2695493 - DNA, 25 bp, Homo sapien
gaagcagtttgtatttctaccagtc

SEQ ID NO: 2695494 - DNA, 25 bp, Homo sapien
cagttgggtggaaactgtttgtggc

SEQ ID NO: 2695495 - DNA, 25 bp, Homo sapien
caaaaaggctgaccaccagttgggt

SEQ ID NO: 2695496 - DNA, 25 bp, Homo sapien
gggtggaaactgtttgtggcagagc

SEQ ID NO: 2695497 - DNA, 25 bp, Homo sapien
aacctggactagtccaaaaaggctg

SEQ ID NO: 2695498 - DNA, 25 bp, Homo sapien
ctggggtggttctggccaagggcgc

SEQ ID NO: 2695499 - DNA, 25 bp, Homo sapien
ccaagggcgctgtgtgatctcgtgt

SEQ ID NO: 2695500 - DNA, 25 bp, Homo sapien
aagggcgctgtgtgatctcgtgtcc

SEQ ID NO: 2695501 - DNA, 25 bp, Homo sapien
gggcgctgtgtgatctcgtgtccat

SEQ ID NO: 2695502 - DNA, 25 bp, Homo sapien
cagggcgatgctaatctccaggtca

SEQ ID NO: 2695503 - DNA, 25 bp, Homo sapien
gggcgatgctaatctccaggtcagg

SEQ ID NO: 2695504 - DNA, 25 bp, Homo sapien
tcagggcgatgctaatctccaggtc

SEQ ID NO: 2695505 - DNA, 25 bp, Homo sapien
ctcagggcgatgctaatctccaggt

SEQ ID NO: 2695506 - DNA, 25 bp, Homo sapien
actgctgccattccaaccgttattt

SEQ ID NO: 2695507 - DNA, 25 bp, Homo sapien
gaggaattgaaattcacaagccact

SEQ ID NO: 2695508 - DNA, 25 bp, Homo sapien
tcatccacggcaattcagtcgcaat

SEQ ID NO: 2695509 - DNA, 25 bp, Homo sapien
tgtaccgagattcatcctgagagcc

SEQ ID NO: 2695510 - DNA, 25 bp, Homo sapien
caagaggagccgcaaatgcaaaagg

SEQ ID NO: 2695511 - DNA, 25 bp, Homo sapien
tgcaaaaggagtgtgcgttactgtc

SEQ ID NO: 2695512 - DNA, 25 bp, Homo sapien
gaagtgagtcacagcaggctcagtc

SEQ ID NO: 2695513 - DNA, 25 bp, Homo sapien
gaaccataccgatggccacaagagg

SEQ ID NO: 2695514 - DNA, 25 bp, Homo sapien
tgctggtggacatagcagagtttgt

SEQ ID NO: 2695515 - DNA, 25 bp, Homo sapien
agggtgctggtggacatagcagagt

SEQ ID NO: 2695516 - DNA, 25 bp, Homo sapien
ggtggacatagcagagtttgtgttc

SEQ ID NO: 2695517 - DNA, 25 bp, Homo sapien
catagcagagtttgtgttcctcaaa

SEQ ID NO: 2695518 - DNA, 25 bp, Homo sapien
gctacccatggtgatggcagcttcc

SEQ ID NO: 2695519 - DNA, 25 bp, Homo sapien
ggttcttctgaggaagcctccagct

SEQ ID NO: 2695520 - DNA, 25 bp, Homo sapien
cagtgttcctgtgggtattagccag

SEQ ID NO: 2695521 - DNA, 25 bp, Homo sapien
tcatgatgactattccagattcagg

SEQ ID NO: 2695522 - DNA, 25 bp, Homo sapien
agctcgttgctagggcccctcttcg

SEQ ID NO: 2695523 - DNA, 25 bp, Homo sapien
ttatagggccgcgtggagcagccca

SEQ ID NO: 2695524 - DNA, 25 bp, Homo sapien
ctaggccagctcgttgctagggccc

SEQ ID NO: 2695525 - DNA, 25 bp, Homo sapien
ttcggaggcatcaggttatagggcc

SEQ ID NO: 2695526 - DNA, 25 bp, Homo sapien
tagtacagtcttgcactgcacaaca

SEQ ID NO: 2695527 - DNA, 25 bp, Homo sapien
tgtcaatcagtcaagtccaaactcc

SEQ ID NO: 2695528 - DNA, 25 bp, Homo sapien
gaccctaggaggcagtgacttgcat

SEQ ID NO: 2695529 - DNA, 25 bp, Homo sapien
tctataccgggaggatggtgtttcc

SEQ ID NO: 2695530 - DNA, 25 bp, Homo sapien
catggtggaacaatctcgaggtgct

SEQ ID NO: 2695531 - DNA, 25 bp, Homo sapien
taataatcgcatcagctgctgtgac

SEQ ID NO: 2695532 - DNA, 25 bp, Homo sapien
taacagaattgccttcagctgcagg

SEQ ID NO: 2695533 - DNA, 25 bp, Homo sapien
catgagttggtattagacggtgacc

SEQ ID NO: 2695534 - DNA, 25 bp, Homo sapien
caaaggtgctctagcagatggctgc

SEQ ID NO: 2695535 - DNA, 25 bp, Homo sapien
gctgaaagacaccactaggatagga

SEQ ID NO: 2695536 - DNA, 25 bp, Homo sapien
gaaatgtgggatccttgcaccctgg

SEQ ID NO: 2695537 - DNA, 25 bp, Homo sapien
cagaaagcttcactgcaggatgcag

SEQ ID NO: 2695538 - DNA, 25 bp, Homo sapien
cagggctccaagagacggtgtgcaa

SEQ ID NO: 2695539 - DNA, 25 bp, Homo sapien
gggctccaagagacggtgtgcaacg

SEQ ID NO: 2695540 - DNA, 25 bp, Homo sapien
agcagggctccaagagacggtgtgc

SEQ ID NO: 2695541 - DNA, 25 bp, Homo sapien
gacggtgtgcaacggatttctccgg

SEQ ID NO: 2695542 - DNA, 25 bp, Homo sapien
cttcatcagtgtgtcgatgccagaa

SEQ ID NO: 2695543 - DNA, 25 bp, Homo sapien
tgtcgatgccagaaaggccttcttg

SEQ ID NO: 2695544 - DNA, 25 bp, Homo sapien
tggaacaggtatgcccttagagctc

SEQ ID NO: 2695545 - DNA, 25 bp, Homo sapien
gagctcatcttagctgtcacataaa

SEQ ID NO: 2695546 - DNA, 25 bp, Homo sapien
tgcggccgaagtcgctttctttgcc

SEQ ID NO: 2695547 - DNA, 25 bp, Homo sapien
ggcatagaaaatgaggcgctttcct

SEQ ID NO: 2695548 - DNA, 25 bp, Homo sapien
gggagtactaataattcatgtatgt

SEQ ID NO: 2695549 - DNA, 25 bp, Homo sapien
tatggtaaaacttaagatgcggccg

SEQ ID NO: 2695550 - DNA, 25 bp, Homo sapien
tgtgccaaaccctaagagagccacc

SEQ ID NO: 2695551 - DNA, 25 bp, Homo sapien
aacaaagttttctgcgtagccctca

SEQ ID NO: 2695552 - DNA, 25 bp, Homo sapien
gactgacactggcactcctggtgct

SEQ ID NO: 2695553 - DNA, 25 bp, Homo sapien
tccacatactgagggcttagctgag

SEQ ID NO: 2695554 - DNA, 25 bp, Homo sapien
gtgaggcccaggggagctgtaaatc

SEQ ID NO: 2695555 - DNA, 25 bp, Homo sapien
ggcccaggggagctgtaaatcatga

SEQ ID NO: 2695556 - DNA, 25 bp, Homo sapien
gaggcccaggggagctgtaaatcat

SEQ ID NO: 2695557 - DNA, 25 bp, Homo sapien
ccgtgaggcccaggggagctgtaaa

SEQ ID NO: 2695558 - DNA, 25 bp, Homo sapien
taaggagaaaggtcgaaagcgccat

SEQ ID NO: 2695559 - DNA, 25 bp, Homo sapien
taactgcttttgaactctgggcccc

SEQ ID NO: 2695560 - DNA, 25 bp, Homo sapien
aaagctacagggctacagggcaacc

SEQ ID NO: 2695561 - DNA, 25 bp, Homo sapien
gacgttgacgtccagagaagctcgg

SEQ ID NO: 2695562 - DNA, 25 bp, Homo sapien
cacagggaactagagggtcacgatc

SEQ ID NO: 2695563 - DNA, 25 bp, Homo sapien
tgtcattacagtcaggaagccaaga

SEQ ID NO: 2695564 - DNA, 25 bp, Homo sapien
taaggacggcaacaatagaggactg

SEQ ID NO: 2695565 - DNA, 25 bp, Homo sapien
tcacctctgtggaacgtgtggagct

SEQ ID NO: 2695566 - DNA, 25 bp, Homo sapien
ttcgaaagctaagatgaccatgcgc

SEQ ID NO: 2695567 - DNA, 25 bp, Homo sapien
gacacacattctgttgacaagggaa

SEQ ID NO: 2695568 - DNA, 25 bp, Homo sapien
tacatgcgcaatacacagctacaga

SEQ ID NO: 2695569 - DNA, 25 bp, Homo sapien
acagtgcagtcctctttcgaaagct

SEQ ID NO: 2695570 - DNA, 25 bp, Homo sapien
cagattttgcacttccaggatttat

SEQ ID NO: 2695571 - DNA, 25 bp, Homo sapien
cacaagtttcacaatggacagattt

SEQ ID NO: 2695572 - DNA, 25 bp, Homo sapien
tccaggatttatggttcctgctgcc

SEQ ID NO: 2695573 - DNA, 25 bp, Homo sapien
ccctccttgcttttgatatgattcc

SEQ ID NO: 2695574 - DNA, 25 bp, Homo sapien
tgcagggagttaattaccttcatac

SEQ ID NO: 2695575 - DNA, 25 bp, Homo sapien
gtggagtttcatctctatggttacc

SEQ ID NO: 2695576 - DNA, 25 bp, Homo sapien
tatggttaccaattgagtataaaca

SEQ ID NO: 2695577 - DNA, 25 bp, Homo sapien
tcaacaactataatttgcagggagt

SEQ ID NO: 2695578 - DNA, 25 bp, Homo sapien
gggtgacctcagcagtcggaacttc

SEQ ID NO: 2695579 - DNA, 25 bp, Homo sapien
gcagtcggaacttccctagtcactt

SEQ ID NO: 2695580 - DNA, 25 bp, Homo sapien
tcacggatggggtgacctcagcagt

SEQ ID NO: 2695581 - DNA, 25 bp, Homo sapien
gttttttgacttcccacttatgtga

SEQ ID NO: 2695582 - DNA, 25 bp, Homo sapien
gcatgtgccctgtaactgcagagcc

SEQ ID NO: 2695583 - DNA, 25 bp, Homo sapien
cagcatgtgccctgtaactgcagag

SEQ ID NO: 2695584 - DNA, 25 bp, Homo sapien
catgtgccctgtaactgcagagcca

SEQ ID NO: 2695585 - DNA, 25 bp, Homo sapien
ctccagcatgtgccctgtaactgca

SEQ ID NO: 2695586 - DNA, 25 bp, Homo sapien
aatatctgatgaaattattgctgtc

SEQ ID NO: 2695587 - DNA, 25 bp, Homo sapien
taatatctgatgaaattattgctgt

SEQ ID NO: 2695588 - DNA, 25 bp, Homo sapien
ctaatatctgatgaaattattgctg

SEQ ID NO: 2695589 - DNA, 25 bp, Homo sapien
ctggcattccatgcctgttttctgc

SEQ ID NO: 2695590 - DNA, 25 bp, Homo sapien
ggctgtacatccaacgtccagcagg

SEQ ID NO: 2695591 - DNA, 25 bp, Homo sapien
gtgctgcgttcctggcattccatgc

SEQ ID NO: 2695592 - DNA, 25 bp, Homo sapien
tgtgagaccacaacttagccacagg

SEQ ID NO: 2695593 - DNA, 25 bp, Homo sapien
caatgtggctatggctacttggttt

SEQ ID NO: 2695594 - DNA, 25 bp, Homo sapien
tggcatgcagcagattcttaaaaag

SEQ ID NO: 2695595 - DNA, 25 bp, Homo sapien
aacacggtggcacagcgcaggcctg

SEQ ID NO: 2695596 - DNA, 25 bp, Homo sapien
gtttcttcttaacacggtggcacag

SEQ ID NO: 2695597 - DNA, 25 bp, Homo sapien
tgagtcgcatggctccaacaagaat

SEQ ID NO: 2695598 - DNA, 25 bp, Homo sapien
caggctgctggtttgccccagttct

SEQ ID NO: 2695599 - DNA, 25 bp, Homo sapien
gaactggtaccataaccggtgtcca

SEQ ID NO: 2695600 - DNA, 25 bp, Homo sapien
tccaaagctggcaacaggaactctg

SEQ ID NO: 2695601 - DNA, 25 bp, Homo sapien
ctagtaacccgtactcacaattttg

SEQ ID NO: 2695602 - DNA, 25 bp, Homo sapien
gcactccttttccctagacggttgc

SEQ ID NO: 2695603 - DNA, 25 bp, Homo sapien
gctttgtctcccaacaacctattca

SEQ ID NO: 2695604 - DNA, 25 bp, Homo sapien
tatagatctcggattcgcttcccgc

SEQ ID NO: 2695605 - DNA, 25 bp, Homo sapien
agcaagcactcttagcaaagccggg

SEQ ID NO: 2695606 - DNA, 25 bp, Homo sapien
tctggagtgcttcccgcttaatgtc

SEQ ID NO: 2695607 - DNA, 25 bp, Homo sapien
cccgcatctgcctatccggtgaagg

SEQ ID NO: 2695608 - DNA, 25 bp, Homo sapien
gcatctgcctatccggtgaaggaag

SEQ ID NO: 2695609 - DNA, 25 bp, Homo sapien
tctgcctatccggtgaaggaagaga

SEQ ID NO: 2695610 - DNA, 25 bp, Homo sapien
aaactgctgtctctccccgcatctg

SEQ ID NO: 2695611 - DNA, 25 bp, Homo sapien
tggcaatttagagctgctcccagct

SEQ ID NO: 2695612 - DNA, 25 bp, Homo sapien
tttggcaatttagagctgctcccag

SEQ ID NO: 2695613 - DNA, 25 bp, Homo sapien
ctttggcaatttagagctgctccca

SEQ ID NO: 2695614 - DNA, 25 bp, Homo sapien
gcaatttagagctgctcccagctac

SEQ ID NO: 2695615 - DNA, 25 bp, Homo sapien
actgatgtaataagagcaggccaac

SEQ ID NO: 2695616 - DNA, 25 bp, Homo sapien
cactgatgtaataagagcaggccaa

SEQ ID NO: 2695617 - DNA, 25 bp, Homo sapien
tcactgatgtaataagagcaggcca

SEQ ID NO: 2695618 - DNA, 25 bp, Homo sapien
gagattgtgacaccctgaggcttcc

SEQ ID NO: 2695619 - DNA, 25 bp, Homo sapien
catgggttcctatctaagtggcaaa

SEQ ID NO: 2695620 - DNA, 25 bp, Homo sapien
tgcagacatgtttgggctagagagc

SEQ ID NO: 2695621 - DNA, 25 bp, Homo sapien
gaaggtccattctagatcggtccat

SEQ ID NO: 2695622 - DNA, 25 bp, Homo sapien
tcataacctttaatatccctcggaa

SEQ ID NO: 2695623 - DNA, 25 bp, Homo sapien
ctttcataacctttaatatccctcg

SEQ ID NO: 2695624 - DNA, 25 bp, Homo sapien
ttcataacctttaatatccctcgga

SEQ ID NO: 2695625 - DNA, 25 bp, Homo sapien
agctgtgaccttgactgttgaagac

SEQ ID NO: 2695626 - DNA, 25 bp, Homo sapien
tgtgaccttgactgttgaagactgg

SEQ ID NO: 2695627 - DNA, 25 bp, Homo sapien
ttagcagctagagctgtgaccttga

SEQ ID NO: 2695628 - DNA, 25 bp, Homo sapien
ttactgattagcagctagagctgtg

SEQ ID NO: 2695629 - DNA, 25 bp, Homo sapien
gggctgtgcccattgcaacctgcca

SEQ ID NO: 2695630 - DNA, 25 bp, Homo sapien
ctgtgcccattgcaacctgccacct

SEQ ID NO: 2695631 - DNA, 25 bp, Homo sapien
ggggctgtgcccattgcaacctgcc

SEQ ID NO: 2695632 - DNA, 25 bp, Homo sapien
ggctgtgcccattgcaacctgccac

SEQ ID NO: 2695633 - DNA, 25 bp, Homo sapien
gtctgtgtggctggggaatcttcac

SEQ ID NO: 2695634 - DNA, 25 bp, Homo sapien
ctgtgtggctggggaatcttcacaa

SEQ ID NO: 2695635 - DNA, 25 bp, Homo sapien
catggcagaaggcaaggaggaacaa

SEQ ID NO: 2695636 - DNA, 25 bp, Homo sapien
ggtctgtgtggctggggaatcttca

SEQ ID NO: 2695637 - DNA, 25 bp, Homo sapien
caatgatgtcgctctgctgagctcc

SEQ ID NO: 2695638 - DNA, 25 bp, Homo sapien
tgagctcctcggatggtcctgtaga

SEQ ID NO: 2695639 - DNA, 25 bp, Homo sapien
tcccaagtatcaaggtcctgagaga

SEQ ID NO: 2695640 - DNA, 25 bp, Homo sapien
gtcctgtagaaggtgcccgaggcca

SEQ ID NO: 2695641 - DNA, 25 bp, Homo sapien
ctcaagctatcctccactccttggt

SEQ ID NO: 2695642 - DNA, 25 bp, Homo sapien
caaagtgttggaattacaggaatga

SEQ ID NO: 2695643 - DNA, 25 bp, Homo sapien
agctatcctccactccttggtctcc

SEQ ID NO: 2695644 - DNA, 25 bp, Homo sapien
ttggaattacaggaatgagccacca

SEQ ID NO: 2695645 - DNA, 25 bp, Homo sapien
tgttagggagaaagacatcgcagat

SEQ ID NO: 2695646 - DNA, 25 bp, Homo sapien
gcagataagccacacttagggcaaa

SEQ ID NO: 2695647 - DNA, 25 bp, Homo sapien
gcaaatataacaggagggatgatag

SEQ ID NO: 2695648 - DNA, 25 bp, Homo sapien
gcaaaaagcttggtcagggccagac

SEQ ID NO: 2695649 - DNA, 25 bp, Homo sapien
caactgcagcgcagattccatttca

SEQ ID NO: 2695650 - DNA, 25 bp, Homo sapien
gctcaactgcagcgcagattccatt

SEQ ID NO: 2695651 - DNA, 25 bp, Homo sapien
tggctcaactgcagcgcagattcca

SEQ ID NO: 2695652 - DNA, 25 bp, Homo sapien
tcaactgcagcgcagattccatttc

SEQ ID NO: 2695653 - DNA, 25 bp, Homo sapien
ggaggtaacaaaaggcccacagctc

SEQ ID NO: 2695654 - DNA, 25 bp, Homo sapien
gagcagctggcaagagaacattacc

SEQ ID NO: 2695655 - DNA, 25 bp, Homo sapien
gaccgctgctttagagtacatccac

SEQ ID NO: 2695656 - DNA, 25 bp, Homo sapien
atagcaggccctcagttatcccagc

SEQ ID NO: 2695657 - DNA, 25 bp, Homo sapien
tctactcactgccttattgtggatc

SEQ ID NO: 2695658 - DNA, 25 bp, Homo sapien
tttgcctaccataagattgtgaaca

SEQ ID NO: 2695659 - DNA, 25 bp, Homo sapien
catgtggattcatacctggattgtc

SEQ ID NO: 2695660 - DNA, 25 bp, Homo sapien
tccctcattgatatacactggcata

SEQ ID NO: 2695661 - DNA, 25 bp, Homo sapien
cagaaactatcaccatggtcaggat

SEQ ID NO: 2695662 - DNA, 25 bp, Homo sapien
taatgtttttccatggatccctgag

SEQ ID NO: 2695663 - DNA, 25 bp, Homo sapien
ccactgcatggatatatccctgttg

SEQ ID NO: 2695664 - DNA, 25 bp, Homo sapien
tgtctaggcatggttttcattgacc

SEQ ID NO: 2695665 - DNA, 25 bp, Homo sapien
gtccaagtcaggagtgacccagccg

SEQ ID NO: 2695666 - DNA, 25 bp, Homo sapien
ggtgtccaagtcaggagtgacccag

SEQ ID NO: 2695667 - DNA, 25 bp, Homo sapien
gctggtgtccaagtcaggagtgacc

SEQ ID NO: 2695668 - DNA, 25 bp, Homo sapien
gggctggtgtccaagtcaggagtga

SEQ ID NO: 2695669 - DNA, 25 bp, Homo sapien
caccacttccggcgttgtgttttgg

SEQ ID NO: 2695670 - DNA, 25 bp, Homo sapien
agtgagcaccacttccggcgttgtg

SEQ ID NO: 2695671 - DNA, 25 bp, Homo sapien
ttttggggtcagcagtagcaccgca

SEQ ID NO: 2695672 - DNA, 25 bp, Homo sapien
tttggggtcagcagtagcaccgcat

SEQ ID NO: 2695673 - DNA, 25 bp, Homo sapien
ggcttcttgtcccttgaactggtgg

SEQ ID NO: 2695674 - DNA, 25 bp, Homo sapien
gggctccggattcagcgtcacagtt

SEQ ID NO: 2695675 - DNA, 25 bp, Homo sapien
tggtggcctgctgttgggaggacaa

SEQ ID NO: 2695676 - DNA, 25 bp, Homo sapien
catcctcctctaggaggctaggaga

SEQ ID NO: 2695677 - DNA, 25 bp, Homo sapien
gaagaaaggcaggtactccaaggcc

SEQ ID NO: 2695678 - DNA, 25 bp, Homo sapien
actgagcagttctgagtcctcctgg

SEQ ID NO: 2695679 - DNA, 25 bp, Homo sapien
tgagtcctcctggagcggtgtcttg

SEQ ID NO: 2695680 - DNA, 25 bp, Homo sapien
tccctgactgttgtcctgcagaagc

SEQ ID NO: 2695681 - DNA, 25 bp, Homo sapien
tttgaaggatgcgggggcctagtgc

SEQ ID NO: 2695682 - DNA, 25 bp, Homo sapien
ttgaaggatgcgggggcctagtgct

SEQ ID NO: 2695683 - DNA, 25 bp, Homo sapien
gaaggatgcgggggcctagtgctgc

SEQ ID NO: 2695684 - DNA, 25 bp, Homo sapien
gtttgaaggatgcgggggcctagtg

SEQ ID NO: 2695685 - DNA, 25 bp, Homo sapien
gtctgtgctcccaaccagtgacacc

SEQ ID NO: 2695686 - DNA, 25 bp, Homo sapien
tcctagcaggtggtcaagctgggct

SEQ ID NO: 2695687 - DNA, 25 bp, Homo sapien
ccaggccgctctcctagcaggtggt

SEQ ID NO: 2695688 - DNA, 25 bp, Homo sapien
tgggcttgaacaggacagtcttcct

SEQ ID NO: 2695689 - DNA, 25 bp, Homo sapien
catttgtctgagagcctagcaagtc

SEQ ID NO: 2695690 - DNA, 25 bp, Homo sapien
tatgaaggaacaggaaggtcagccc

SEQ ID NO: 2695691 - DNA, 25 bp, Homo sapien
tgtgcctgcaacaccacagtggcag

SEQ ID NO: 2695692 - DNA, 25 bp, Homo sapien
aatgttatagaccacaagcttcggg

SEQ ID NO: 2695693 - DNA, 25 bp, Homo sapien
gtcagctccggcttccccgtggtgt

SEQ ID NO: 2695694 - DNA, 25 bp, Homo sapien
tctgtagtaatgcacaaatcctgag

SEQ ID NO: 2695695 - DNA, 25 bp, Homo sapien
tcctgaggcataaagaccatggtcc

SEQ ID NO: 2695696 - DNA, 25 bp, Homo sapien
gaggcccagggctagtgtgtaaccc

SEQ ID NO: 2695697 - DNA, 25 bp, Homo sapien
gggtcaggctacaaaaggaatggtc

SEQ ID NO: 2695698 - DNA, 25 bp, Homo sapien
tgtggcagtttttccagctaggaga

SEQ ID NO: 2695699 - DNA, 25 bp, Homo sapien
gaaaggcaaaccctaggcctgcgga

SEQ ID NO: 2695700 - DNA, 25 bp, Homo sapien
tcagagtgctggacaagatggacac

SEQ ID NO: 2695701 - DNA, 25 bp, Homo sapien
cataggagtgccttggaaatagtaa

SEQ ID NO: 2695702 - DNA, 25 bp, Homo sapien
acaagcagccatcgggtggaggagc

SEQ ID NO: 2695703 - DNA, 25 bp, Homo sapien
cccaaacccaatgggaagtcatagg

SEQ ID NO: 2695704 - DNA, 25 bp, Homo sapien
ctagtgtgaccgattgatttctctc

SEQ ID NO: 2695705 - DNA, 25 bp, Homo sapien
aacccagtcccccagtcaccggctg

SEQ ID NO: 2695706 - DNA, 25 bp, Homo sapien
agtcccccagtcaccggctgcgcgg

SEQ ID NO: 2695707 - DNA, 25 bp, Homo sapien
gtcccccagtcaccggctgcgcggg

SEQ ID NO: 2695708 - DNA, 25 bp, Homo sapien
ccagtcccccagtcaccggctgcgc

SEQ ID NO: 2695709 - DNA, 25 bp, Homo sapien
gcgagcgcgccgcaagaccgaagtc

SEQ ID NO: 2695710 - DNA, 25 bp, Homo sapien
acttagagtcagtggggcatggccc

SEQ ID NO: 2695711 - DNA, 25 bp, Homo sapien
cggggcagtgcccacttagagtcag

SEQ ID NO: 2695712 - DNA, 25 bp, Homo sapien
gagtctcgagcacgccgcaggtcct

SEQ ID NO: 2695713 - DNA, 25 bp, Homo sapien
tccagcccgccgcaaagtcttccag

SEQ ID NO: 2695714 - DNA, 25 bp, Homo sapien
cagcccgccgcaaagtcttccagct

SEQ ID NO: 2695715 - DNA, 25 bp, Homo sapien
cgatccagcccgccgcaaagtcttc

SEQ ID NO: 2695716 - DNA, 25 bp, Homo sapien
tccgatccagcccgccgcaaagtct

SEQ ID NO: 2695717 - DNA, 25 bp, Homo sapien
tcatcaagtcccacggatcctaact

SEQ ID NO: 2695718 - DNA, 25 bp, Homo sapien
catcaagtcccacggatcctaactt

SEQ ID NO: 2695719 - DNA, 25 bp, Homo sapien
ctcatcaagtcccacggatcctaac

SEQ ID NO: 2695720 - DNA, 25 bp, Homo sapien
gcagagaggtgatggcagtaattaa

SEQ ID NO: 2695721 - DNA, 25 bp, Homo sapien
cagtaattaacccttcccagtagtg

SEQ ID NO: 2695722 - DNA, 25 bp, Homo sapien
ggaggtgcgctggtcctcaggctcc

SEQ ID NO: 2695723 - DNA, 25 bp, Homo sapien
tagtggggggaggtgcgctggtcct

SEQ ID NO: 2695724 - DNA, 25 bp, Homo sapien
cagagggtggccaacgatgacactg

SEQ ID NO: 2695725 - DNA, 25 bp, Homo sapien
ccagagggtggccaacgatgacact

SEQ ID NO: 2695726 - DNA, 25 bp, Homo sapien
gtggccaacgatgacactggctgca

SEQ ID NO: 2695727 - DNA, 25 bp, Homo sapien
agggtggccaacgatgacactggct

SEQ ID NO: 2695728 - DNA, 25 bp, Homo sapien
ctcggagtgggatgtccacaaccag

SEQ ID NO: 2695729 - DNA, 25 bp, Homo sapien
tgtccacaaccaggacaatgacttg

SEQ ID NO: 2695730 - DNA, 25 bp, Homo sapien
gctgtcatgaggtccaacactctcc

SEQ ID NO: 2695731 - DNA, 25 bp, Homo sapien
aaggctgtcatgaggtccaacactc

SEQ ID NO: 2695732 - DNA, 25 bp, Homo sapien
gggtgtttccgtagccaacgccagc

SEQ ID NO: 2695733 - DNA, 25 bp, Homo sapien
tagccaacgccagcctgcaggcgag

SEQ ID NO: 2695734 - DNA, 25 bp, Homo sapien
acaccacgcggatgcagctgagggt

SEQ ID NO: 2695735 - DNA, 25 bp, Homo sapien
tcctgtacaccacgcggatgcagct

SEQ ID NO: 2695736 - DNA, 25 bp, Homo sapien
tgcaggccgggttcggtcccttcca

SEQ ID NO: 2695737 - DNA, 25 bp, Homo sapien
gctgcaggccgggttcggtcccttc

SEQ ID NO: 2695738 - DNA, 25 bp, Homo sapien
tcggtcccttccacacggcattctt

SEQ ID NO: 2695739 - DNA, 25 bp, Homo sapien
gttcggtcccttccacacggcattc

SEQ ID NO: 2695740 - DNA, 25 bp, Homo sapien
gtctgcatctgcaaccggatcttga

SEQ ID NO: 2695741 - DNA, 25 bp, Homo sapien
gaaccgctgcgtgttactgaagacc

SEQ ID NO: 2695742 - DNA, 25 bp, Homo sapien
tcccgaaacggttgtgtctgcatct

SEQ ID NO: 2695743 - DNA, 25 bp, Homo sapien
ttgatgaggtccacgggccctccca

SEQ ID NO: 2695744 - DNA, 25 bp, Homo sapien
agacaccagcctccgctcccctggc

SEQ ID NO: 2695745 - DNA, 25 bp, Homo sapien
cagacaccagcctccgctcccctgg

SEQ ID NO: 2695746 - DNA, 25 bp, Homo sapien
agcctccgctcccctggcctcttac

SEQ ID NO: 2695747 - DNA, 25 bp, Homo sapien
ggccacaagtcccagacaccagcct

SEQ ID NO: 2695748 - DNA, 25 bp, Homo sapien
tggttgtaatgcagtgcactggccc

SEQ ID NO: 2695749 - DNA, 25 bp, Homo sapien
tgaagtagaggcaatagcctgggac

SEQ ID NO: 2695750 - DNA, 25 bp, Homo sapien
aatgcagtgcactggcccctggtat

SEQ ID NO: 2695751 - DNA, 25 bp, Homo sapien
tccactcactcaggaacacgtaggg

SEQ ID NO: 2695752 - DNA, 25 bp, Homo sapien
gcctgaaagtcaaatgggaactgcc

SEQ ID NO: 2695753 - DNA, 25 bp, Homo sapien
gcagagtcctgctatactgtcagct

SEQ ID NO: 2695754 - DNA, 25 bp, Homo sapien
caaagcttagtaatgcctgacacag

SEQ ID NO: 2695755 - DNA, 25 bp, Homo sapien
cactgagggcctggaaaaccattgc

SEQ ID NO: 2695756 - DNA, 25 bp, Homo sapien
acgacatccataggagtcgctgtcc

SEQ ID NO: 2695757 - DNA, 25 bp, Homo sapien
ggagtcgacttttcacgacatccat

SEQ ID NO: 2695758 - DNA, 25 bp, Homo sapien
ccccatcagcttggagtcgactttt

SEQ ID NO: 2695759 - DNA, 25 bp, Homo sapien
cgacttttcacgacatccataggag

SEQ ID NO: 2695760 - DNA, 25 bp, Homo sapien
cactcctcacactgttctccaagtg

SEQ ID NO: 2695761 - DNA, 25 bp, Homo sapien
actcctcacactgttctccaagtgt

SEQ ID NO: 2695762 - DNA, 25 bp, Homo sapien
ctcacactgttctccaagtgtcact

SEQ ID NO: 2695763 - DNA, 25 bp, Homo sapien
tcctcacactgttctccaagtgtca

SEQ ID NO: 2695764 - DNA, 25 bp, Homo sapien
cctccagcagctgtggcctgctctg

SEQ ID NO: 2695765 - DNA, 25 bp, Homo sapien
ttccatgccggtgcccacagaggtt

SEQ ID NO: 2695766 - DNA, 25 bp, Homo sapien
aattccatgccggtgcccacagagg

SEQ ID NO: 2695767 - DNA, 25 bp, Homo sapien
ctgagaggaaaattccatgccggtg

SEQ ID NO: 2695768 - DNA, 25 bp, Homo sapien
aggaaaattccatgccggtgcccac

SEQ ID NO: 2695769 - DNA, 25 bp, Homo sapien
gtatttgtcttccatccctagggag

SEQ ID NO: 2695770 - DNA, 25 bp, Homo sapien
tactataggtaagctgttgggccag

SEQ ID NO: 2695771 - DNA, 25 bp, Homo sapien
taatagggagtaggactcaacctcc

SEQ ID NO: 2695772 - DNA, 25 bp, Homo sapien
tagaagccctgagtagacagagcac

SEQ ID NO: 2695773 - DNA, 25 bp, Homo sapien
cagagaatagctagtggtgctgcct

SEQ ID NO: 2695774 - DNA, 25 bp, Homo sapien
gagaatagctagtggtgctgcctac

SEQ ID NO: 2695775 - DNA, 25 bp, Homo sapien
gggcagagaatagctagtggtgctg

SEQ ID NO: 2695776 - DNA, 25 bp, Homo sapien
gcagagaatagctagtggtgctgcc

SEQ ID NO: 2695777 - DNA, 25 bp, Homo sapien
gtggtccccgcggatagcctgcagc

SEQ ID NO: 2695778 - DNA, 25 bp, Homo sapien
ccgcaccgcgttcacagtgatgcct

SEQ ID NO: 2695779 - DNA, 25 bp, Homo sapien
cccaaggaacatggccgcactcatg

SEQ ID NO: 2695780 - DNA, 25 bp, Homo sapien
tgcagcgacagctcgtacccaagga

SEQ ID NO: 2695781 - DNA, 25 bp, Homo sapien
agccaaggacaagtaggaaaggagc

SEQ ID NO: 2695782 - DNA, 25 bp, Homo sapien
gagcgagaagaggatgtcaggcaga

SEQ ID NO: 2695783 - DNA, 25 bp, Homo sapien
aaagagctggtgaagccaaggacaa

SEQ ID NO: 2695784 - DNA, 25 bp, Homo sapien
agctgagaaagcaagccggcatcct

SEQ ID NO: 2695785 - DNA, 25 bp, Homo sapien
tggatcttggggtcaaacaacccat

SEQ ID NO: 2695786 - DNA, 25 bp, Homo sapien
aacgggagtcttgaaatcttggatc

SEQ ID NO: 2695787 - DNA, 25 bp, Homo sapien
gacaagaacatcttctaacgggagt

SEQ ID NO: 2695788 - DNA, 25 bp, Homo sapien
catttggagactgggtttgtgaagc

SEQ ID NO: 2695789 - DNA, 25 bp, Homo sapien
aatggtcagttgaatccctccaagg

SEQ ID NO: 2695790 - DNA, 25 bp, Homo sapien
ttttgaaacttagagccaactccag

SEQ ID NO: 2695791 - DNA, 25 bp, Homo sapien
cattgacctgttaatgggatgagac

SEQ ID NO: 2695792 - DNA, 25 bp, Homo sapien
gcccacctggtggagagtctttctc

SEQ ID NO: 2695793 - DNA, 25 bp, Homo sapien
gctaggcagaggcatctgacagaga

SEQ ID NO: 2695794 - DNA, 25 bp, Homo sapien
taggcagaggcatctgacagagaaa

SEQ ID NO: 2695795 - DNA, 25 bp, Homo sapien
gcctcttggaagctaggcagaggca

SEQ ID NO: 2695796 - DNA, 25 bp, Homo sapien
tggccaggtgcctcttggaagctag

SEQ ID NO: 2695797 - DNA, 25 bp, Homo sapien
cctctgggcctgcaacacccacaga

SEQ ID NO: 2695798 - DNA, 25 bp, Homo sapien
ctgtgtggaggggttttccctctgg

SEQ ID NO: 2695799 - DNA, 25 bp, Homo sapien
gggttttccctctgggcctgcaaca

SEQ ID NO: 2695800 - DNA, 25 bp, Homo sapien
tctgggcctgcaacacccacagagg

SEQ ID NO: 2695801 - DNA, 25 bp, Homo sapien
tagaaggtttctgtccctcatcacc

SEQ ID NO: 2695802 - DNA, 25 bp, Homo sapien
gaccttaggcatctgggaaaaaaga

SEQ ID NO: 2695803 - DNA, 25 bp, Homo sapien
ccaaactctctgaagcaagtcacca

SEQ ID NO: 2695804 - DNA, 25 bp, Homo sapien
accaacgtgtgccactgctcagggt

SEQ ID NO: 2695805 - DNA, 25 bp, Homo sapien
gcccagggaacactgtagtcatcct

SEQ ID NO: 2695806 - DNA, 25 bp, Homo sapien
ggcccagggaacactgtagtcatcc

SEQ ID NO: 2695807 - DNA, 25 bp, Homo sapien
aggacttctcagctggaccaaacat

SEQ ID NO: 2695808 - DNA, 25 bp, Homo sapien
gcccacgcttgctaattgatgtcca

SEQ ID NO: 2695809 - DNA, 25 bp, Homo sapien
tgatgtccacttggaggtccaaagg

SEQ ID NO: 2695810 - DNA, 25 bp, Homo sapien
accttggagggcttgaatcagtgac

SEQ ID NO: 2695811 - DNA, 25 bp, Homo sapien
gacactattgagttccctggagaag

SEQ ID NO: 2695812 - DNA, 25 bp, Homo sapien
gatgcttatacagaagccaccctgg

SEQ ID NO: 2695813 - DNA, 25 bp, Homo sapien
tagtacattggcaggttgcacaacc

SEQ ID NO: 2695814 - DNA, 25 bp, Homo sapien
taaaaacatggctttagctaggcac

SEQ ID NO: 2695815 - DNA, 25 bp, Homo sapien
ggcaacgcgctgacatttctgaaga

SEQ ID NO: 2695816 - DNA, 25 bp, Homo sapien
gaatacagaccctcaggctcatagg

SEQ ID NO: 2695817 - DNA, 25 bp, Homo sapien
tgaggaccatctgagggttgccact

SEQ ID NO: 2695818 - DNA, 25 bp, Homo sapien
acaacatgagctggtctcttggcaa

SEQ ID NO: 2695819 - DNA, 25 bp, Homo sapien
tgctcctgtgctccgtggcaggcca

SEQ ID NO: 2695820 - DNA, 25 bp, Homo sapien
ttggcggggatcctggacatcaact

SEQ ID NO: 2695821 - DNA, 25 bp, Homo sapien
tggacatcaacttcctcatcaacaa

SEQ ID NO: 2695822 - DNA, 25 bp, Homo sapien
ctcctgtgctccgtggcaggccagg

SEQ ID NO: 2695823 - DNA, 25 bp, Homo sapien
ggaacactgacgagccatcatcact

SEQ ID NO: 2695824 - DNA, 25 bp, Homo sapien
tcccttccccatagtgcagtggaac

SEQ ID NO: 2695825 - DNA, 25 bp, Homo sapien
gcagtggaacactgacgagccatca

SEQ ID NO: 2695826 - DNA, 25 bp, Homo sapien
ttccccatagtgcagtggaacactg

SEQ ID NO: 2695827 - DNA, 25 bp, Homo sapien
gaaaaaggcatacatccagtgcttt

SEQ ID NO: 2695828 - DNA, 25 bp, Homo sapien
ggctggatacattggtaccccaaac

SEQ ID NO: 2695829 - DNA, 25 bp, Homo sapien
cattgatcgaaacatgctgcatggc

SEQ ID NO: 2695830 - DNA, 25 bp, Homo sapien
gccacttttgtctcctattaccagg

SEQ ID NO: 2695831 - DNA, 25 bp, Homo sapien
tatgccctgggaatagtgatgagca

SEQ ID NO: 2695832 - DNA, 25 bp, Homo sapien
ttgctatggtcagagaaggtcttgc

SEQ ID NO: 2695833 - DNA, 25 bp, Homo sapien
gagtccgttgtagtgtccattgtca

SEQ ID NO: 2695834 - DNA, 25 bp, Homo sapien
tgagcactctgtatagactatgccc

SEQ ID NO: 2695835 - DNA, 25 bp, Homo sapien
gtgcctggacgaccttgagggccat

SEQ ID NO: 2695836 - DNA, 25 bp, Homo sapien
agaatggtgcctggacgaccttgag

SEQ ID NO: 2695837 - DNA, 25 bp, Homo sapien
cctggagcactaaagagaatggtgc

SEQ ID NO: 2695838 - DNA, 25 bp, Homo sapien
ctgagtcatcacctggagcactaaa

SEQ ID NO: 2695839 - DNA, 25 bp, Homo sapien
ccaagtcacgcacggcgatctgaga

SEQ ID NO: 2695840 - DNA, 25 bp, Homo sapien
gcgatctgagaccccagccgctcct

SEQ ID NO: 2695841 - DNA, 25 bp, Homo sapien
caccaagtcacgcacggcgatctga

SEQ ID NO: 2695842 - DNA, 25 bp, Homo sapien
agtcacgcacggcgatctgagaccc

SEQ ID NO: 2695843 - DNA, 25 bp, Homo sapien
aggtgctggagtccggccgtccggt

SEQ ID NO: 2695844 - DNA, 25 bp, Homo sapien
tcggcgcaggaacacgcccgagcga

SEQ ID NO: 2695845 - DNA, 25 bp, Homo sapien
gcgggccgggccaaggtgctggagt

SEQ ID NO: 2695846 - DNA, 25 bp, Homo sapien
tttaaagggtttccgcgcgtgctca

SEQ ID NO: 2695847 - DNA, 25 bp, Homo sapien
cacagaggagttaaacatggcaacc

SEQ ID NO: 2695848 - DNA, 25 bp, Homo sapien
tagtaatataggtctacagcaggat

SEQ ID NO: 2695849 - DNA, 25 bp, Homo sapien
taaaccaaactcaactacacagagg

SEQ ID NO: 2695850 - DNA, 25 bp, Homo sapien
aaatgacttgtcagagctagcagga

SEQ ID NO: 2695851 - DNA, 25 bp, Homo sapien
caacctccatttgatttcacttcct

SEQ ID NO: 2695852 - DNA, 25 bp, Homo sapien
aacctccatttgatttcacttccta

SEQ ID NO: 2695853 - DNA, 25 bp, Homo sapien
acctccatttgatttcacttcctat

SEQ ID NO: 2695854 - DNA, 25 bp, Homo sapien
gaaggcttccagattagagttcact

SEQ ID NO: 2695855 - DNA, 25 bp, Homo sapien
cactctgaaccatgaaacgaagcaa

SEQ ID NO: 2695856 - DNA, 25 bp, Homo sapien
tgaaacgaagcaatggttgccgtgg

SEQ ID NO: 2695857 - DNA, 25 bp, Homo sapien
gattagagttcactctgaaccatga

SEQ ID NO: 2695858 - DNA, 25 bp, Homo sapien
cttgtgattcactctgtctgatgtg

SEQ ID NO: 2695859 - DNA, 25 bp, Homo sapien
acatagagttggatcccagaagcag

SEQ ID NO: 2695860 - DNA, 25 bp, Homo sapien
ttcactctgtctgatgtgacacatt

SEQ ID NO: 2695861 - DNA, 25 bp, Homo sapien
tatttatgtgataggtaaatatctc

SEQ ID NO: 2695862 - DNA, 25 bp, Homo sapien
tgagagaagagtagaacccaacttt

SEQ ID NO: 2695863 - DNA, 25 bp, Homo sapien
ccccagtctagaagaaccgtgtgtg

SEQ ID NO: 2695864 - DNA, 25 bp, Homo sapien
caacttttggctgtttcgctgctcc

SEQ ID NO: 2695865 - DNA, 25 bp, Homo sapien
tactacatggtgaggcaaactcccc

SEQ ID NO: 2695866 - DNA, 25 bp, Homo sapien
catacagaagatgcacaggcccgat

SEQ ID NO: 2695867 - DNA, 25 bp, Homo sapien
acatacagaagatgcacaggcccga

SEQ ID NO: 2695868 - DNA, 25 bp, Homo sapien
ctacatacagaagatgcacaggccc

SEQ ID NO: 2695869 - DNA, 25 bp, Homo sapien
tacatacagaagatgcacaggcccg

SEQ ID NO: 2695870 - DNA, 25 bp, Homo sapien
ttttaatgatctgctgaatgagatc

SEQ ID NO: 2695871 - DNA, 25 bp, Homo sapien
gagatcaggatgagtggacttaaaa

SEQ ID NO: 2695872 - DNA, 25 bp, Homo sapien
aagtagctgactggttcagttcaaa

SEQ ID NO: 2695873 - DNA, 25 bp, Homo sapien
agatgaagtagctgactggttcagt

SEQ ID NO: 2695874 - DNA, 25 bp, Homo sapien
tctgctgactcagcgctactgtcaa

SEQ ID NO: 2695875 - DNA, 25 bp, Homo sapien
gagagagtatatcacaggcagcttc

SEQ ID NO: 2695876 - DNA, 25 bp, Homo sapien
tggaacaatttaccagctgagagag

SEQ ID NO: 2695877 - DNA, 25 bp, Homo sapien
cagctgagagagtatatcacaggca

SEQ ID NO: 2695878 - DNA, 25 bp, Homo sapien
tggctgttgaaatcaagcccaaggt

SEQ ID NO: 2695879 - DNA, 25 bp, Homo sapien
taaacatcatgctaacaagcgtagt

SEQ ID NO: 2695880 - DNA, 25 bp, Homo sapien
tggctggaagaaacctaggttccta

SEQ ID NO: 2695881 - DNA, 25 bp, Homo sapien
cataccagctatggactgtctcacc

SEQ ID NO: 2695882 - DNA, 25 bp, Homo sapien
tggtcagagctcagatggtcatctt

SEQ ID NO: 2695883 - DNA, 25 bp, Homo sapien
tattattggccacaagaatcttcaa

SEQ ID NO: 2695884 - DNA, 25 bp, Homo sapien
gaaggatcatccactggtgtatctt

SEQ ID NO: 2695885 - DNA, 25 bp, Homo sapien
tgggagtcttagagtgtcactatta

SEQ ID NO: 2695886 - DNA, 25 bp, Homo sapien
tccactggtgtatcttcaattttga

SEQ ID NO: 2695887 - DNA, 25 bp, Homo sapien
acttactataactatacctaccttg

SEQ ID NO: 2695888 - DNA, 25 bp, Homo sapien
aaatatcatatcattctagctttaa

SEQ ID NO: 2695889 - DNA, 25 bp, Homo sapien
tactataactatacctaccttgcag

SEQ ID NO: 2695890 - DNA, 25 bp, Homo sapien
tatgcttcataggtatataattttc

SEQ ID NO: 2695891 - DNA, 25 bp, Homo sapien
ttgacaacggtcagctacacaaaga

SEQ ID NO: 2695892 - DNA, 25 bp, Homo sapien
caacgccagttctctaaggccttga

SEQ ID NO: 2695893 - DNA, 25 bp, Homo sapien
gctgactgaacgaccaaaataaagg

SEQ ID NO: 2695894 - DNA, 25 bp, Homo sapien
taacatgagtctcgcttgagagtgc

SEQ ID NO: 2695895 - DNA, 25 bp, Homo sapien
taggctataatcctcatcagggatc

SEQ ID NO: 2695896 - DNA, 25 bp, Homo sapien
taccagagaggcatcacatcaggga

SEQ ID NO: 2695897 - DNA, 25 bp, Homo sapien
caatcagtcgaggacagttgagacc

SEQ ID NO: 2695898 - DNA, 25 bp, Homo sapien
tcccaggtatttggagacttcagtg

SEQ ID NO: 2695899 - DNA, 25 bp, Homo sapien
gcagctaatcatactgattaaaaaa

SEQ ID NO: 2695900 - DNA, 25 bp, Homo sapien
gcttagatagaaagcagctaatcat

SEQ ID NO: 2695901 - DNA, 25 bp, Homo sapien
catttgcttagatagaaagcagcta

SEQ ID NO: 2695902 - DNA, 25 bp, Homo sapien
aatttacatttgcttagatagaaag

SEQ ID NO: 2695903 - DNA, 25 bp, Homo sapien
gggcttgtgccctatttacagcaat

SEQ ID NO: 2695904 - DNA, 25 bp, Homo sapien
tcgaccatctaatccatatacaggg

SEQ ID NO: 2695905 - DNA, 25 bp, Homo sapien
gcaagctacaatatgcctccaagga

SEQ ID NO: 2695906 - DNA, 25 bp, Homo sapien
aatccatcacgacagtttgcaaaca

SEQ ID NO: 2695907 - DNA, 25 bp, Homo sapien
tccaagttcaatattacacacttac

SEQ ID NO: 2695908 - DNA, 25 bp, Homo sapien
gaatccaagttcaatattacacact

SEQ ID NO: 2695909 - DNA, 25 bp, Homo sapien
atccaagttcaatattacacactta

SEQ ID NO: 2695910 - DNA, 25 bp, Homo sapien
cctgtaaatcgaaggccaatggtca

SEQ ID NO: 2695911 - DNA, 25 bp, Homo sapien
catgtgaactggttgcttcgggctc

SEQ ID NO: 2695912 - DNA, 25 bp, Homo sapien
tcttaaaaacctggatgcataccct

SEQ ID NO: 2695913 - DNA, 25 bp, Homo sapien
gagtgaccctactgcatacctgtaa

SEQ ID NO: 2695914 - DNA, 25 bp, Homo sapien
taaacagcatgcactctttgggtct

SEQ ID NO: 2695915 - DNA, 25 bp, Homo sapien
taggtaaagctagatctcctggtac

SEQ ID NO: 2695916 - DNA, 25 bp, Homo sapien
cacaaatcataaatgctggcacttc

SEQ ID NO: 2695917 - DNA, 25 bp, Homo sapien
aacacatccatgtatagctccgtga

SEQ ID NO: 2695918 - DNA, 25 bp, Homo sapien
acttcacgaaaccccacagctgatt

SEQ ID NO: 2695919 - DNA, 25 bp, Homo sapien
ggcactttcaaggacgtttcaccat

SEQ ID NO: 2695920 - DNA, 25 bp, Homo sapien
cactttcaaggacgtttcaccattt

SEQ ID NO: 2695921 - DNA, 25 bp, Homo sapien
atgcacacacttcacgaaaccccac

SEQ ID NO: 2695922 - DNA, 25 bp, Homo sapien
tactgtgtacgcaccattcactgga

SEQ ID NO: 2695923 - DNA, 25 bp, Homo sapien
ggcagtaaagctcccctaaggcagt

SEQ ID NO: 2695924 - DNA, 25 bp, Homo sapien
tgggacatcccaacatgttctggca

SEQ ID NO: 2695925 - DNA, 25 bp, Homo sapien
tatttacatcctagaagtcagaggc

SEQ ID NO: 2695926 - DNA, 25 bp, Homo sapien
tgatgggtatacaacatagaaagat

SEQ ID NO: 2695927 - DNA, 25 bp, Homo sapien
gggagaaggaatgaagctatgtagg

SEQ ID NO: 2695928 - DNA, 25 bp, Homo sapien
aaggaatgaagctatgtagggacaa

SEQ ID NO: 2695929 - DNA, 25 bp, Homo sapien
gagaaggaatgaagctatgtaggga

SEQ ID NO: 2695930 - DNA, 25 bp, Homo sapien
taccacccactcttcgcttttctct

SEQ ID NO: 2695931 - DNA, 25 bp, Homo sapien
tgctccagcataccacccactcttc

SEQ ID NO: 2695932 - DNA, 25 bp, Homo sapien
agcataccacccactcttcgctttt

SEQ ID NO: 2695933 - DNA, 25 bp, Homo sapien
tccagcataccacccactcttcgct

SEQ ID NO: 2695934 - DNA, 25 bp, Homo sapien
atggtcaagcttgctgaacatgtgc

SEQ ID NO: 2695935 - DNA, 25 bp, Homo sapien
ttagcgaccttgctacctccttgtg

SEQ ID NO: 2695936 - DNA, 25 bp, Homo sapien
tgaacatgtgctttagcgaccttgc

SEQ ID NO: 2695937 - DNA, 25 bp, Homo sapien
ccttgctacctccttgtgctgtggc

SEQ ID NO: 2695938 - DNA, 25 bp, Homo sapien
gttgaagtcactggtcctcgggctg

SEQ ID NO: 2695939 - DNA, 25 bp, Homo sapien
tcctcgggctgagtaaagggacttc

SEQ ID NO: 2695940 - DNA, 25 bp, Homo sapien
gtgtgtagagtaaagcctatgatct

SEQ ID NO: 2695941 - DNA, 25 bp, Homo sapien
tctcttggttgaagtcactggtcct

SEQ ID NO: 2695942 - DNA, 25 bp, Homo sapien
tggaggcctctttgggaactgacaa

SEQ ID NO: 2695943 - DNA, 25 bp, Homo sapien
tgaattgtgcgtttggctgctgaga

SEQ ID NO: 2695944 - DNA, 25 bp, Homo sapien
tgtcaggactccagatatctgtctg

SEQ ID NO: 2695945 - DNA, 25 bp, Homo sapien
tccagatatctgtctgatgctccct

SEQ ID NO: 2695946 - DNA, 25 bp, Homo sapien
tctcaaagctaccacgtatgacact

SEQ ID NO: 2695947 - DNA, 25 bp, Homo sapien
tgtcatttgttctcagcgcggatgg

SEQ ID NO: 2695948 - DNA, 25 bp, Homo sapien
atgggaaatccggagaaaaggctgc

SEQ ID NO: 2695949 - DNA, 25 bp, Homo sapien
gctaccacgtatgacactgattgaa

SEQ ID NO: 2695950 - DNA, 25 bp, Homo sapien
gacgtagaactagagtgttcattgt

SEQ ID NO: 2695951 - DNA, 25 bp, Homo sapien
cttggaaaatgaagacgtagaacta

SEQ ID NO: 2695952 - DNA, 25 bp, Homo sapien
tttcatgttaccaagtagagcttca

SEQ ID NO: 2695953 - DNA, 25 bp, Homo sapien
tagagcttcaagagccgtagtccag

SEQ ID NO: 2695954 - DNA, 25 bp, Homo sapien
catggaccaccttagagcctatcat

SEQ ID NO: 2695955 - DNA, 25 bp, Homo sapien
ctatgtatgcgatggtatcatggac

SEQ ID NO: 2695956 - DNA, 25 bp, Homo sapien
tatcatggaccaccttagagcctat

SEQ ID NO: 2695957 - DNA, 25 bp, Homo sapien
gtatgcgatggtatcatggaccacc

SEQ ID NO: 2695958 - DNA, 25 bp, Homo sapien
tcctttcagaggtctcacgtggctg

SEQ ID NO: 2695959 - DNA, 25 bp, Homo sapien
gctgaaagcatttgcctcttgctga

SEQ ID NO: 2695960 - DNA, 25 bp, Homo sapien
gttccggcagaaggcctgcttgtgt

SEQ ID NO: 2695961 - DNA, 25 bp, Homo sapien
tttacctggcatacgctaggaacag

SEQ ID NO: 2695962 - DNA, 25 bp, Homo sapien
gcgaccgacgggcaagcgggcggct

SEQ ID NO: 2695963 - DNA, 25 bp, Homo sapien
acgacgcgcaccgagcgagctagcg

SEQ ID NO: 2695964 - DNA, 25 bp, Homo sapien
gctccagggaagtgagagcgcctcc

SEQ ID NO: 2695965 - DNA, 25 bp, Homo sapien
cgggcggctccagggaagtgagagc

SEQ ID NO: 2695966 - DNA, 25 bp, Homo sapien
gggcgagagccagcagccgcacgaa

SEQ ID NO: 2695967 - DNA, 25 bp, Homo sapien
cagagccagggcgagagccagcagc

SEQ ID NO: 2695968 - DNA, 25 bp, Homo sapien
agccagggcgagagccagcagccgc

SEQ ID NO: 2695969 - DNA, 25 bp, Homo sapien
cgagagccagcagccgcacgaagag

SEQ ID NO: 2695970 - DNA, 25 bp, Homo sapien
cttggcgggacccgccagggtcgcg

SEQ ID NO: 2695971 - DNA, 25 bp, Homo sapien
tggcgggacccgccagggtcgcggc

SEQ ID NO: 2695972 - DNA, 25 bp, Homo sapien
ggccccggagcctgctgtgctgcag

SEQ ID NO: 2695973 - DNA, 25 bp, Homo sapien
cccggagcctgctgtgctgcagcac

SEQ ID NO: 2695974 - DNA, 25 bp, Homo sapien
gctggcggccccggagcctgctgtg

SEQ ID NO: 2695975 - DNA, 25 bp, Homo sapien
tggcggccccggagcctgctgtgct

SEQ ID NO: 2695976 - DNA, 25 bp, Homo sapien
gaagtacttcctattagtgccaata

SEQ ID NO: 2695977 - DNA, 25 bp, Homo sapien
attttcctttggtaccactgcttgc

SEQ ID NO: 2695978 - DNA, 25 bp, Homo sapien
actgcttgcagttggtgaagtactt

SEQ ID NO: 2695979 - DNA, 25 bp, Homo sapien
tattagtgccaataaccttctgcac

SEQ ID NO: 2695980 - DNA, 25 bp, Homo sapien
taggcaacctgaccttctagaaggc

SEQ ID NO: 2695981 - DNA, 25 bp, Homo sapien
tccagagtcacatgctggtggcttc

SEQ ID NO: 2695982 - DNA, 25 bp, Homo sapien
tagggatggcattctttagtacaga

SEQ ID NO: 2695983 - DNA, 25 bp, Homo sapien
ttagtacagattcaccaatgggctt

SEQ ID NO: 2695984 - DNA, 25 bp, Homo sapien
tcatagcagcaagaatatcgctggg

SEQ ID NO: 2695985 - DNA, 25 bp, Homo sapien
tgctaattgcctaacataatcaggg

SEQ ID NO: 2695986 - DNA, 25 bp, Homo sapien
tgtcaatcaggcatggagcaagctg

SEQ ID NO: 2695987 - DNA, 25 bp, Homo sapien
tcaacttttagcttgcaggctgggc

SEQ ID NO: 2695988 - DNA, 25 bp, Homo sapien
cttcacgtcagctgtccccagtgcc

SEQ ID NO: 2695989 - DNA, 25 bp, Homo sapien
ctcctaagtcgctgacactaactgc

SEQ ID NO: 2695990 - DNA, 25 bp, Homo sapien
cctaagtcgctgacactaactgcca

SEQ ID NO: 2695991 - DNA, 25 bp, Homo sapien
acactaactgccaggcttgataccc

SEQ ID NO: 2695992 - DNA, 25 bp, Homo sapien
cactaactgccaggcttgatacccc

SEQ ID NO: 2695993 - DNA, 25 bp, Homo sapien
ggaggctgactgtgtctcctcagtt

SEQ ID NO: 2695994 - DNA, 25 bp, Homo sapien
aatctgtatgcagcatgtgagggca

SEQ ID NO: 2695995 - DNA, 25 bp, Homo sapien
cagagtcttcagaatgtggatgtac

SEQ ID NO: 2695996 - DNA, 25 bp, Homo sapien
tccttgtctgatgagcggtcttggg

SEQ ID NO: 2695997 - DNA, 25 bp, Homo sapien
ctagcagggtgaacttgaaagtcca

SEQ ID NO: 2695998 - DNA, 25 bp, Homo sapien
tataagggctaaacaggctattgtc

SEQ ID NO: 2695999 - DNA, 25 bp, Homo sapien
tgtgatccatcagtaactagcaggg

SEQ ID NO: 2696000 - DNA, 25 bp, Homo sapien
gccttgaacccataggactagggat

SEQ ID NO: 2696001 - DNA, 25 bp, Homo sapien
caggacagcactcgtagctgatgac

SEQ ID NO: 2696002 - DNA, 25 bp, Homo sapien
tcatatccaggacagcactcgtagc

SEQ ID NO: 2696003 - DNA, 25 bp, Homo sapien
tccccagggaccttttcatatccag

SEQ ID NO: 2696004 - DNA, 25 bp, Homo sapien
cagggaccttttcatatccaggaca

SEQ ID NO: 2696005 - DNA, 25 bp, Homo sapien
ggtggtggatccaacgactcccagg

SEQ ID NO: 2696006 - DNA, 25 bp, Homo sapien
tctcgtaaaggtttgagagtggtag

SEQ ID NO: 2696007 - DNA, 25 bp, Homo sapien
gagtggtggtggatccaacgactcc

SEQ ID NO: 2696008 - DNA, 25 bp, Homo sapien
caacgactcccagggtctcgtaaag

SEQ ID NO: 2696009 - DNA, 25 bp, Homo sapien
ggcccaggcctcgttgctaggggcg

SEQ ID NO: 2696010 - DNA, 25 bp, Homo sapien
tgctaggggcgaagatggtgaagct

SEQ ID NO: 2696011 - DNA, 25 bp, Homo sapien
cccaggcctcgttgctaggggcgaa

SEQ ID NO: 2696012 - DNA, 25 bp, Homo sapien
agatggtgaagctgccgggcccctc

SEQ ID NO: 2696013 - DNA, 25 bp, Homo sapien
agtcccccgggcagacggaggtcat

SEQ ID NO: 2696014 - DNA, 25 bp, Homo sapien
ccaagtctttctgcccagtagggaa

SEQ ID NO: 2696015 - DNA, 25 bp, Homo sapien
gggcattagacgcaacctggtaaga

SEQ ID NO: 2696016 - DNA, 25 bp, Homo sapien
gcaactctgggaaacatgttctcag

SEQ ID NO: 2696017 - DNA, 25 bp, Homo sapien
ggctgcagactctgtgtttaagaga

SEQ ID NO: 2696018 - DNA, 25 bp, Homo sapien
tacatagaggtgagggtcatgccgt

SEQ ID NO: 2696019 - DNA, 25 bp, Homo sapien
ccgtgtttcagctcatcagtcagga

SEQ ID NO: 2696020 - DNA, 25 bp, Homo sapien
ccaccatatggtagcggagggcatt

SEQ ID NO: 2696021 - DNA, 25 bp, Homo sapien
ttgagcagctcaatgttgacattgc

SEQ ID NO: 2696022 - DNA, 25 bp, Homo sapien
caaaggtgtcctcgatctcaatgat

SEQ ID NO: 2696023 - DNA, 25 bp, Homo sapien
tgcaccaccccgttggttgcatggt

SEQ ID NO: 2696024 - DNA, 25 bp, Homo sapien
gttgcatggtggtcggctttcagca

SEQ ID NO: 2696025 - DNA, 25 bp, Homo sapien
gatgaccttatcgatgaggtgcacc

SEQ ID NO: 2696026 - DNA, 25 bp, Homo sapien
cacaggttaggtcaagctgaatgtc

SEQ ID NO: 2696027 - DNA, 25 bp, Homo sapien
gatggagaatttcacaggttaggtc

SEQ ID NO: 2696028 - DNA, 25 bp, Homo sapien
tgtgggaactgccacctctggaagc

SEQ ID NO: 2696029 - DNA, 25 bp, Homo sapien
catttattctagtaccccatgtggg

SEQ ID NO: 2696030 - DNA, 25 bp, Homo sapien
caattgctgttcacgtgctgccaac

SEQ ID NO: 2696031 - DNA, 25 bp, Homo sapien
caactatgtgggaacatcattttct

SEQ ID NO: 2696032 - DNA, 25 bp, Homo sapien
gggatcaattgctgttcacgtgctg

SEQ ID NO: 2696033 - DNA, 25 bp, Homo sapien
gctgccaactatgtgggaacatcat

SEQ ID NO: 2696034 - DNA, 25 bp, Homo sapien
tcaagcatcgtgttgagccctgatg

SEQ ID NO: 2696035 - DNA, 25 bp, Homo sapien
caaaagcgtgtactggccgttacct

SEQ ID NO: 2696036 - DNA, 25 bp, Homo sapien
tctgggtcgcccaggatacggttca

SEQ ID NO: 2696037 - DNA, 25 bp, Homo sapien
tctcactagggatcttctcgaaggc

SEQ ID NO: 2696038 - DNA, 25 bp, Homo sapien
tagagacacggttagctgaagcaac

SEQ ID NO: 2696039 - DNA, 25 bp, Homo sapien
tcaatctagctgcacaaatgaggca

SEQ ID NO: 2696040 - DNA, 25 bp, Homo sapien
tgcagtggatatcctgagggtcacc

SEQ ID NO: 2696041 - DNA, 25 bp, Homo sapien
ccctcagagtagtgtggctgctaga

SEQ ID NO: 2696042 - DNA, 25 bp, Homo sapien
cataaatcccctagccacagagaag

SEQ ID NO: 2696043 - DNA, 25 bp, Homo sapien
cccacacctgtaagctgttgctcta

SEQ ID NO: 2696044 - DNA, 25 bp, Homo sapien
ggcatgaggaatccatttcaagggt

SEQ ID NO: 2696045 - DNA, 25 bp, Homo sapien
cagagaagaatagtgaagcgtgggc

SEQ ID NO: 2696046 - DNA, 25 bp, Homo sapien
taatcacctggacacggaacaaatc

SEQ ID NO: 2696047 - DNA, 25 bp, Homo sapien
tatatagcacattgacacggtgggt

SEQ ID NO: 2696048 - DNA, 25 bp, Homo sapien
taacttagcagctcattgaggaggg

SEQ ID NO: 2696049 - DNA, 25 bp, Homo sapien
cggccaggcgcatagaggtaccata

SEQ ID NO: 2696050 - DNA, 25 bp, Homo sapien
gccagggctggaaactagtcttcaa

SEQ ID NO: 2696051 - DNA, 25 bp, Homo sapien
cacgatgtggtagaggaacctgcca

SEQ ID NO: 2696052 - DNA, 25 bp, Homo sapien
gagtgtccttgctctgaaccagctg

SEQ ID NO: 2696053 - DNA, 25 bp, Homo sapien
gcgatggcaccaaacagagtgtcct

SEQ ID NO: 2696054 - DNA, 25 bp, Homo sapien
tgctgcagacgagttgatggccttg

SEQ ID NO: 2696055 - DNA, 25 bp, Homo sapien
tcaccaaggtcaccgaggctctatg

SEQ ID NO: 2696056 - DNA, 25 bp, Homo sapien
tatgtcccatattctcaccacggag

SEQ ID NO: 2696057 - DNA, 25 bp, Homo sapien
caccacggaggcgagtttcaatctg

SEQ ID NO: 2696058 - DNA, 25 bp, Homo sapien
ttgatagtgagcatgtccccgctgc

SEQ ID NO: 2696059 - DNA, 25 bp, Homo sapien
caccccgttggtggctaggatgtct

SEQ ID NO: 2696060 - DNA, 25 bp, Homo sapien
gagatgatcgccttcccgttgatag

SEQ ID NO: 2696061 - DNA, 25 bp, Homo sapien
tcatcaatgtagtggatcaccccgt

SEQ ID NO: 2696062 - DNA, 25 bp, Homo sapien
tccagagagatgattgccgaggccg

SEQ ID NO: 2696063 - DNA, 25 bp, Homo sapien
ccgaggccggcttgtctgaaaaggt

SEQ ID NO: 2696064 - DNA, 25 bp, Homo sapien
ggtcaaccgctcacttccagagaga

SEQ ID NO: 2696065 - DNA, 25 bp, Homo sapien
caatggctgtggacacatcagactc

SEQ ID NO: 2696066 - DNA, 25 bp, Homo sapien
aagggtgatggttaggtccagagag

SEQ ID NO: 2696067 - DNA, 25 bp, Homo sapien
gggtgatggttaggtccagagagat

SEQ ID NO: 2696068 - DNA, 25 bp, Homo sapien
agggtgatggttaggtccagagaga

SEQ ID NO: 2696069 - DNA, 25 bp, Homo sapien
gagtttccagggtctgtccatggta

SEQ ID NO: 2696070 - DNA, 25 bp, Homo sapien
aactctcagttttttgccgcccaga

SEQ ID NO: 2696071 - DNA, 25 bp, Homo sapien
tgtggttccgaagcaaattccttgt

SEQ ID NO: 2696072 - DNA, 25 bp, Homo sapien
ggtacagatacttagaggccagctg

SEQ ID NO: 2696073 - DNA, 25 bp, Homo sapien
cactaatacaagtcccacagtaagg

SEQ ID NO: 2696074 - DNA, 25 bp, Homo sapien
aggagcatgatttaggacccagaac

SEQ ID NO: 2696075 - DNA, 25 bp, Homo sapien
ttttacactaatacaagtcccacag

SEQ ID NO: 2696076 - DNA, 25 bp, Homo sapien
gcaaactcctgcttattgaggacat

SEQ ID NO: 2696077 - DNA, 25 bp, Homo sapien
ttagccaaatggtgctggttggtcc

SEQ ID NO: 2696078 - DNA, 25 bp, Homo sapien
tggttggtcccaggcaagagctatg

SEQ ID NO: 2696079 - DNA, 25 bp, Homo sapien
gcaagagctatgttgagttgtactt

SEQ ID NO: 2696080 - DNA, 25 bp, Homo sapien
ccaaatggtgctggttggtcccagg

SEQ ID NO: 2696081 - DNA, 25 bp, Homo sapien
ttgttcagagcatgtagcagggtca

SEQ ID NO: 2696082 - DNA, 25 bp, Homo sapien
acactgggatgggttattaaggctg

SEQ ID NO: 2696083 - DNA, 25 bp, Homo sapien
tggttatacttccacgaggggcctc

SEQ ID NO: 2696084 - DNA, 25 bp, Homo sapien
tccacgaggggcctcctgatttgtt

SEQ ID NO: 2696085 - DNA, 25 bp, Homo sapien
gtccatcgtgaacagggtcccgtac

SEQ ID NO: 2696086 - DNA, 25 bp, Homo sapien
tcgtgggccgcgatgcagctgttct

SEQ ID NO: 2696087 - DNA, 25 bp, Homo sapien
taaagcgattgtctcccttcaggac

SEQ ID NO: 2696088 - DNA, 25 bp, Homo sapien
tgtctcccttcaggacatccatgac

SEQ ID NO: 2696089 - DNA, 25 bp, Homo sapien
tctctccacccagcaaaaatgctaa

SEQ ID NO: 2696090 - DNA, 25 bp, Homo sapien
tcatgccctccgtatgcacaaagag

SEQ ID NO: 2696091 - DNA, 25 bp, Homo sapien
ggttttcatgccctccgtatgcaca

SEQ ID NO: 2696092 - DNA, 25 bp, Homo sapien
cttggttttcatgccctccgtatgc

SEQ ID NO: 2696093 - DNA, 25 bp, Homo sapien
tgtgtagactccttcccggttgagg

SEQ ID NO: 2696094 - DNA, 25 bp, Homo sapien
tggcagggctcggaaggcttcattt

SEQ ID NO: 2696095 - DNA, 25 bp, Homo sapien
ttgagggtctccgtcagtcctgcag

SEQ ID NO: 2696096 - DNA, 25 bp, Homo sapien
tgcagactggatggcagctaccagc

SEQ ID NO: 2696097 - DNA, 25 bp, Homo sapien
aatctgtctaatggtcagaggacac

SEQ ID NO: 2696098 - DNA, 25 bp, Homo sapien
ggacacaaagcacatgttcatgacc

SEQ ID NO: 2696099 - DNA, 25 bp, Homo sapien
tctgtctaatggtcagaggacacaa

SEQ ID NO: 2696100 - DNA, 25 bp, Homo sapien
agcacatgttcatgaccacaaatct

SEQ ID NO: 2696101 - DNA, 25 bp, Homo sapien
agcttgtcaccttggagagacttta

SEQ ID NO: 2696102 - DNA, 25 bp, Homo sapien
ttggagagactttagccgcaccagg

SEQ ID NO: 2696103 - DNA, 25 bp, Homo sapien
gatgcctccgctaaccaggatttca

SEQ ID NO: 2696104 - DNA, 25 bp, Homo sapien
gatgttggcaagttccttggcatct

SEQ ID NO: 2696105 - DNA, 25 bp, Homo sapien
cttcctatgctcctcgtgagaaact

SEQ ID NO: 2696106 - DNA, 25 bp, Homo sapien
tatgctcctcgtgagaaactggtga

SEQ ID NO: 2696107 - DNA, 25 bp, Homo sapien
tcctcgtgagaaactggtgagcaat

SEQ ID NO: 2696108 - DNA, 25 bp, Homo sapien
ctccctacatgcatatcttcctatg

SEQ ID NO: 2696109 - DNA, 25 bp, Homo sapien
gccatgatgtcaggctcggcaacag

SEQ ID NO: 2696110 - DNA, 25 bp, Homo sapien
gaggctgcagaacattggtgatgac

SEQ ID NO: 2696111 - DNA, 25 bp, Homo sapien
tggtgatgacatggaccacgccatt

SEQ ID NO: 2696112 - DNA, 25 bp, Homo sapien
tcggcaacaggctccttgttgacac

SEQ ID NO: 2696113 - DNA, 25 bp, Homo sapien
gagtcagtggggatgcgacacttac

SEQ ID NO: 2696114 - DNA, 25 bp, Homo sapien
acataggcacagtttaactatcaca

SEQ ID NO: 2696115 - DNA, 25 bp, Homo sapien
taggcacagtttaactatcacaatt

SEQ ID NO: 2696116 - DNA, 25 bp, Homo sapien
acagtttaactatcacaattacatg

SEQ ID NO: 2696117 - DNA, 25 bp, Homo sapien
aaaggcaggtttgaccagagtgaaa

SEQ ID NO: 2696118 - DNA, 25 bp, Homo sapien
agcatgtcattcataacaaccgtga

SEQ ID NO: 2696119 - DNA, 25 bp, Homo sapien
taactcatggtagaacttggcccat

SEQ ID NO: 2696120 - DNA, 25 bp, Homo sapien
gtgaatgcacacatgaggagaggca

SEQ ID NO: 2696121 - DNA, 25 bp, Homo sapien
catcccctctttcctgaggtctgtt

SEQ ID NO: 2696122 - DNA, 25 bp, Homo sapien
ttcatcccctctttcctgaggtctg

SEQ ID NO: 2696123 - DNA, 25 bp, Homo sapien
agtctgcaagttcatcccctctttc

SEQ ID NO: 2696124 - DNA, 25 bp, Homo sapien
tcccctctttcctgaggtctgttgg

SEQ ID NO: 2696125 - DNA, 25 bp, Homo sapien
tggaactagatcctcaccatgggtt

SEQ ID NO: 2696126 - DNA, 25 bp, Homo sapien
aggccaggcttcttttactgcacca

SEQ ID NO: 2696127 - DNA, 25 bp, Homo sapien
tactcaaggcccgatgttctggttt

SEQ ID NO: 2696128 - DNA, 25 bp, Homo sapien
gacttcctaagctgaaaactcacct

SEQ ID NO: 2696129 - DNA, 25 bp, Homo sapien
aagagaagttggtaacgtcaaatag

SEQ ID NO: 2696130 - DNA, 25 bp, Homo sapien
agttggtaacgtcaaataggtgcag

SEQ ID NO: 2696131 - DNA, 25 bp, Homo sapien
gaagttggtaacgtcaaataggtgc

SEQ ID NO: 2696132 - DNA, 25 bp, Homo sapien
ttggtaacgtcaaataggtgcagat

SEQ ID NO: 2696133 - DNA, 25 bp, Homo sapien
gagagctgccgtggtgcattcctcc

SEQ ID NO: 2696134 - DNA, 25 bp, Homo sapien
catgcagtgggttaacagccatgtt

SEQ ID NO: 2696135 - DNA, 25 bp, Homo sapien
gcggcccatgtacattaaagtgtga

SEQ ID NO: 2696136 - DNA, 25 bp, Homo sapien
acatctcattatggtgcggcccatg

SEQ ID NO: 2696137 - DNA, 25 bp, Homo sapien
ccagggacttggcataggcagtcaa

SEQ ID NO: 2696138 - DNA, 25 bp, Homo sapien
tcatgttttatgagccccacaatac

SEQ ID NO: 2696139 - DNA, 25 bp, Homo sapien
acttggcataggcagtcaattccac

SEQ ID NO: 2696140 - DNA, 25 bp, Homo sapien
catttgggataggtcctctctggaa

SEQ ID NO: 2696141 - DNA, 25 bp, Homo sapien
caactcatagcttataatgatgcca

SEQ ID NO: 2696142 - DNA, 25 bp, Homo sapien
taaaagcctccaagccacgtgtaga

SEQ ID NO: 2696143 - DNA, 25 bp, Homo sapien
ccagctgtgcaagggctttacaaaa

SEQ ID NO: 2696144 - DNA, 25 bp, Homo sapien
atgtgagacacatttgacagaacat

SEQ ID NO: 2696145 - DNA, 25 bp, Homo sapien
agggaaatctaagctctacatacca

SEQ ID NO: 2696146 - DNA, 25 bp, Homo sapien
tttggagcatagagtggagcccaca

SEQ ID NO: 2696147 - DNA, 25 bp, Homo sapien
tgcgccttgtcctcaaccacaggga

SEQ ID NO: 2696148 - DNA, 25 bp, Homo sapien
ctcaaccacagggaggatttctctc

SEQ ID NO: 2696149 - DNA, 25 bp, Homo sapien
tctctccagggagagtttggagcat

SEQ ID NO: 2696150 - DNA, 25 bp, Homo sapien
caaagtgagtggtatatatatgcaa

SEQ ID NO: 2696151 - DNA, 25 bp, Homo sapien
gaaggtagaaacaagcctaatgtac

SEQ ID NO: 2696152 - DNA, 25 bp, Homo sapien
atcaattcgacttctgggtataacc

SEQ ID NO: 2696153 - DNA, 25 bp, Homo sapien
tcaatagaatggttattaccaaaaa

SEQ ID NO: 2696154 - DNA, 25 bp, Homo sapien
tggaaacacaccttgttgactgaag

SEQ ID NO: 2696155 - DNA, 25 bp, Homo sapien
tttgttctctggaaacacaccttgt

SEQ ID NO: 2696156 - DNA, 25 bp, Homo sapien
tgttctctggaaacacaccttgttg

SEQ ID NO: 2696157 - DNA, 25 bp, Homo sapien
tctctggaaacacaccttgttgact

SEQ ID NO: 2696158 - DNA, 25 bp, Homo sapien
tgcctgtggagtaaatgtcgtctac

SEQ ID NO: 2696159 - DNA, 25 bp, Homo sapien
cagggtttcccagcccatggattct

SEQ ID NO: 2696160 - DNA, 25 bp, Homo sapien
tctcttgctgttaggctgccactgc

SEQ ID NO: 2696161 - DNA, 25 bp, Homo sapien
tactaagcgaatcagtgccgtgagc

SEQ ID NO: 2696162 - DNA, 25 bp, Homo sapien
caattttttagtgcggaggtcatcc

SEQ ID NO: 2696163 - DNA, 25 bp, Homo sapien
gagacttatgtgatctccccagagt

SEQ ID NO: 2696164 - DNA, 25 bp, Homo sapien
ggccattttccgagaaagcagaagg

SEQ ID NO: 2696165 - DNA, 25 bp, Homo sapien
tcaaagggaactctaactagctgcc

SEQ ID NO: 2696166 - DNA, 25 bp, Homo sapien
atcgtgtccagacattttatgcaat

SEQ ID NO: 2696167 - DNA, 25 bp, Homo sapien
tcgtgtccagacattttatgcaatt

SEQ ID NO: 2696168 - DNA, 25 bp, Homo sapien
agccagggctggatcagatcagcag

SEQ ID NO: 2696169 - DNA, 25 bp, Homo sapien
cattactaaatccaggctccaggca

SEQ ID NO: 2696170 - DNA, 25 bp, Homo sapien
ggctccaggcaacgaagccagggct

SEQ ID NO: 2696171 - DNA, 25 bp, Homo sapien
ccagttttcattactaaatccaggc

SEQ ID NO: 2696172 - DNA, 25 bp, Homo sapien
tctggtggttggattttgtgggaag

SEQ ID NO: 2696173 - DNA, 25 bp, Homo sapien
tttgtgggaagtgaagaggagtatc

SEQ ID NO: 2696174 - DNA, 25 bp, Homo sapien
gaagaggagtatcccatgggatgaa

SEQ ID NO: 2696175 - DNA, 25 bp, Homo sapien
tgaagggggaggacaaggttggcca

SEQ ID NO: 2696176 - DNA, 25 bp, Homo sapien
cagtctgatccacttggtttgggta

SEQ ID NO: 2696177 - DNA, 25 bp, Homo sapien
tgggtaggactgatccagagccacc

SEQ ID NO: 2696178 - DNA, 25 bp, Homo sapien
ggatccaagccagacactcagaatt

SEQ ID NO: 2696179 - DNA, 25 bp, Homo sapien
tcaaggacgggcataggatccaagc

SEQ ID NO: 2696180 - DNA, 25 bp, Homo sapien
atttatggtggcagtagccaagttc

SEQ ID NO: 2696181 - DNA, 25 bp, Homo sapien
ctatttatggtggcagtagccaagt

SEQ ID NO: 2696182 - DNA, 25 bp, Homo sapien
tatttatggtggcagtagccaagtt

SEQ ID NO: 2696183 - DNA, 25 bp, Homo sapien
ttgggaattttcaagatgttgtttc

SEQ ID NO: 2696184 - DNA, 25 bp, Homo sapien
aaagctatgtttattgaaagtgtcg

SEQ ID NO: 2696185 - DNA, 25 bp, Homo sapien
ttcactgtgatgctcttcttgggaa

SEQ ID NO: 2696186 - DNA, 25 bp, Homo sapien
tgttccttgtcaggattcccctgct

SEQ ID NO: 2696187 - DNA, 25 bp, Homo sapien
aaaatcgaagccccttgcactagcc

SEQ ID NO: 2696188 - DNA, 25 bp, Homo sapien
tcgaagccccttgcactagcccata

SEQ ID NO: 2696189 - DNA, 25 bp, Homo sapien
agccccttgcactagcccataccat

SEQ ID NO: 2696190 - DNA, 25 bp, Homo sapien
aatcgaagccccttgcactagccca

SEQ ID NO: 2696191 - DNA, 25 bp, Homo sapien
tctggagggttttcatgcatctgag

SEQ ID NO: 2696192 - DNA, 25 bp, Homo sapien
gtttctcttctggagggttttcatg

SEQ ID NO: 2696193 - DNA, 25 bp, Homo sapien
ttctcttctggagggttttcatgca

SEQ ID NO: 2696194 - DNA, 25 bp, Homo sapien
cttctggagggttttcatgcatctg

SEQ ID NO: 2696195 - DNA, 25 bp, Homo sapien
gctgggtagagcatataaatactat

SEQ ID NO: 2696196 - DNA, 25 bp, Homo sapien
aatactatgcacgtttgcggcactt

SEQ ID NO: 2696197 - DNA, 25 bp, Homo sapien
gacatccaccgacaaccaatttgct

SEQ ID NO: 2696198 - DNA, 25 bp, Homo sapien
cacgtttgcggcactttgcaggcta

SEQ ID NO: 2696199 - DNA, 25 bp, Homo sapien
gaggccccttataaacatccagtct

SEQ ID NO: 2696200 - DNA, 25 bp, Homo sapien
caggaggccccttataaacatccag

SEQ ID NO: 2696201 - DNA, 25 bp, Homo sapien
agcaggaggccccttataaacatcc

SEQ ID NO: 2696202 - DNA, 25 bp, Homo sapien
ggccccttataaacatccagtctca

SEQ ID NO: 2696203 - DNA, 25 bp, Homo sapien
tagcagctgctaccgtctgacatat

SEQ ID NO: 2696204 - DNA, 25 bp, Homo sapien
ctggatagcagctgctaccgtctga

SEQ ID NO: 2696205 - DNA, 25 bp, Homo sapien
accgtctgacatatttgcctctctg

SEQ ID NO: 2696206 - DNA, 25 bp, Homo sapien
tgctaccgtctgacatatttgcctc

SEQ ID NO: 2696207 - DNA, 25 bp, Homo sapien
gattgcagctgccttgtaagccact

SEQ ID NO: 2696208 - DNA, 25 bp, Homo sapien
ttggatgaggacagcaaaccctggg

SEQ ID NO: 2696209 - DNA, 25 bp, Homo sapien
tcctgttagggaaaaagggatctca

SEQ ID NO: 2696210 - DNA, 25 bp, Homo sapien
tatgacaagctcactcagggaagag

SEQ ID NO: 2696211 - DNA, 25 bp, Homo sapien
agactgtgagcttagagctctttgg

SEQ ID NO: 2696212 - DNA, 25 bp, Homo sapien
gcccatgggcaatgacctagatttc

SEQ ID NO: 2696213 - DNA, 25 bp, Homo sapien
ccagactgtgagcttagagctcttt

SEQ ID NO: 2696214 - DNA, 25 bp, Homo sapien
tgagcccatgggcaatgacctagat

SEQ ID NO: 2696215 - DNA, 25 bp, Homo sapien
actttattagcagctcggccgcggg

SEQ ID NO: 2696216 - DNA, 25 bp, Homo sapien
cttctcctcgctgcaactttattag

SEQ ID NO: 2696217 - DNA, 25 bp, Homo sapien
gcgcgctctcccgacgccgtcgctg

SEQ ID NO: 2696218 - DNA, 25 bp, Homo sapien
tcgcgagccggctaggcgcgctctc

SEQ ID NO: 2696219 - DNA, 25 bp, Homo sapien
cccagttcccctcgcccgcgcgcgc

SEQ ID NO: 2696220 - DNA, 25 bp, Homo sapien
gacaggccctgggtcgtttccgctc

SEQ ID NO: 2696221 - DNA, 25 bp, Homo sapien
caggccctgggtcgtttccgctccg

SEQ ID NO: 2696222 - DNA, 25 bp, Homo sapien
cgacaggccctgggtcgtttccgct

SEQ ID NO: 2696223 - DNA, 25 bp, Homo sapien
tccagggcgtcccagacgcctccct

SEQ ID NO: 2696224 - DNA, 25 bp, Homo sapien
cctccaaagtctgggcggtaacagc

SEQ ID NO: 2696225 - DNA, 25 bp, Homo sapien
agccagcgaggcctccgcagccgct

SEQ ID NO: 2696226 - DNA, 25 bp, Homo sapien
cgctgggccgcaccgtgtccgccag

SEQ ID NO: 2696227 - DNA, 25 bp, Homo sapien
tttgaaacacaaagcgacggcggca

SEQ ID NO: 2696228 - DNA, 25 bp, Homo sapien
taagcgcggatccttatctttgaaa

SEQ ID NO: 2696229 - DNA, 25 bp, Homo sapien
cattggacagcttcgcagtgcagca

SEQ ID NO: 2696230 - DNA, 25 bp, Homo sapien
gacggcggcacggattcatcaagcc

SEQ ID NO: 2696231 - DNA, 25 bp, Homo sapien
gcagtagccggtcacaactgcccag

SEQ ID NO: 2696232 - DNA, 25 bp, Homo sapien
ggtctaactaccagctgattgcagt

SEQ ID NO: 2696233 - DNA, 25 bp, Homo sapien
taccagctgattgcagtagccggtc

SEQ ID NO: 2696234 - DNA, 25 bp, Homo sapien
tggcagaaaccaggtctaactacca

SEQ ID NO: 2696235 - DNA, 25 bp, Homo sapien
ggctccaaactccacgtagtaacag

SEQ ID NO: 2696236 - DNA, 25 bp, Homo sapien
taggctccaaactccacgtagtaac

SEQ ID NO: 2696237 - DNA, 25 bp, Homo sapien
tccaaactccacgtagtaacagcag

SEQ ID NO: 2696238 - DNA, 25 bp, Homo sapien
ttaggctccaaactccacgtagtaa

SEQ ID NO: 2696239 - DNA, 25 bp, Homo sapien
ctcgcccgagttctgcaaccaaaaa

SEQ ID NO: 2696240 - DNA, 25 bp, Homo sapien
gctcagacttaagacgggcgcgcca

SEQ ID NO: 2696241 - DNA, 25 bp, Homo sapien
cgcgccacatgggagttttcaaagc

SEQ ID NO: 2696242 - DNA, 25 bp, Homo sapien
caagtatcctcgcccgagttctgca

SEQ ID NO: 2696243 - DNA, 25 bp, Homo sapien
cagagaaagggcatgtaatccaggt

SEQ ID NO: 2696244 - DNA, 25 bp, Homo sapien
gttactacaaatgagctgttgctcc

SEQ ID NO: 2696245 - DNA, 25 bp, Homo sapien
tccaggtatctagcacttttcacag

SEQ ID NO: 2696246 - DNA, 25 bp, Homo sapien
taagatagcattttaggagctggga

SEQ ID NO: 2696247 - DNA, 25 bp, Homo sapien
acctatcctaaagtacaccagtggg

SEQ ID NO: 2696248 - DNA, 25 bp, Homo sapien
tctctagtaagtcaagggaagatgc

SEQ ID NO: 2696249 - DNA, 25 bp, Homo sapien
tgaaataatgccctagacaatctgg

SEQ ID NO: 2696250 - DNA, 25 bp, Homo sapien
tccttggtactttcaggtgctccag

SEQ ID NO: 2696251 - DNA, 25 bp, Homo sapien
tagcaacaggtacttcaataacttc

SEQ ID NO: 2696252 - DNA, 25 bp, Homo sapien
caacaggtacttcaataacttcaac

SEQ ID NO: 2696253 - DNA, 25 bp, Homo sapien
ggtacttcaataacttcaacagctt

SEQ ID NO: 2696254 - DNA, 25 bp, Homo sapien
atatagcaacaggtacttcaataac

SEQ ID NO: 2696255 - DNA, 25 bp, Homo sapien
gagttcaatcacgtccagtctgagc

SEQ ID NO: 2696256 - DNA, 25 bp, Homo sapien
ttcaatcacgtccagtctgagcaac

SEQ ID NO: 2696257 - DNA, 25 bp, Homo sapien
ccagttattcgggagactcacttga

SEQ ID NO: 2696258 - DNA, 25 bp, Homo sapien
aggagttcaatcacgtccagtctga

SEQ ID NO: 2696259 - DNA, 25 bp, Homo sapien
tcacaagtgccatatgcttctttca

SEQ ID NO: 2696260 - DNA, 25 bp, Homo sapien
tcacaggtgaaacgtcatacacagg

SEQ ID NO: 2696261 - DNA, 25 bp, Homo sapien
caggtcctaagcagaagttccaatt

SEQ ID NO: 2696262 - DNA, 25 bp, Homo sapien
taccgaaagaacagatcacaggtga

SEQ ID NO: 2696263 - DNA, 25 bp, Homo sapien
tgacacaaatcttcggagaccttcc

SEQ ID NO: 2696264 - DNA, 25 bp, Homo sapien
ttgacacaaatcttcggagaccttc

SEQ ID NO: 2696265 - DNA, 25 bp, Homo sapien
ccttcctgtaactcaaagtcagtgg

SEQ ID NO: 2696266 - DNA, 25 bp, Homo sapien
gagaccttcctgtaactcaaagtca

SEQ ID NO: 2696267 - DNA, 25 bp, Homo sapien
ctagtaaaagaaaacaagctggcca

SEQ ID NO: 2696268 - DNA, 25 bp, Homo sapien
tagtaaaagaaaacaagctggccat

SEQ ID NO: 2696269 - DNA, 25 bp, Homo sapien
gacacatttactcggctgtcctgga

SEQ ID NO: 2696270 - DNA, 25 bp, Homo sapien
taaagatctgggaatagtgacacat

SEQ ID NO: 2696271 - DNA, 25 bp, Homo sapien
caacggctttagctcatgatgactc

SEQ ID NO: 2696272 - DNA, 25 bp, Homo sapien
ggccagcgccaaacacgacaatata

SEQ ID NO: 2696273 - DNA, 25 bp, Homo sapien
aaaagctaaactcaaaatccaatag

SEQ ID NO: 2696274 - DNA, 25 bp, Homo sapien
gaataatgaattagagtaagccacc

SEQ ID NO: 2696275 - DNA, 25 bp, Homo sapien
gcccttccaagattagaatatttaa

SEQ ID NO: 2696276 - DNA, 25 bp, Homo sapien
tatgggtgcttacagtgaataatga

SEQ ID NO: 2696277 - DNA, 25 bp, Homo sapien
gatgactaatgcactcagctagcag

SEQ ID NO: 2696278 - DNA, 25 bp, Homo sapien
gagcttctgataagaccttggccct

SEQ ID NO: 2696279 - DNA, 25 bp, Homo sapien
gaagctgtcatgaatgtgaactacc

SEQ ID NO: 2696280 - DNA, 25 bp, Homo sapien
ggaagactctgctcatgtcagtcaa

SEQ ID NO: 2696281 - DNA, 25 bp, Homo sapien
gatccattctgcgtcatagctgctt

SEQ ID NO: 2696282 - DNA, 25 bp, Homo sapien
cagggcgaaacatgaggtctctata

SEQ ID NO: 2696283 - DNA, 25 bp, Homo sapien
taatctagctgggtaatctgcccct

SEQ ID NO: 2696284 - DNA, 25 bp, Homo sapien
taaaagtatcagagctatgccccag

SEQ ID NO: 2696285 - DNA, 25 bp, Homo sapien
tattcactctacgttttcccttgga

SEQ ID NO: 2696286 - DNA, 25 bp, Homo sapien
tatttgtagacttgctcttagggca

SEQ ID NO: 2696287 - DNA, 25 bp, Homo sapien
tcttagggcaaatgaggcagcattc

SEQ ID NO: 2696288 - DNA, 25 bp, Homo sapien
caacagatctgttaaacgcctatca

SEQ ID NO: 2696289 - DNA, 25 bp, Homo sapien
gacttcctggtccagaacttgctgg

SEQ ID NO: 2696290 - DNA, 25 bp, Homo sapien
gattgaattcattatgacgaggcac

SEQ ID NO: 2696291 - DNA, 25 bp, Homo sapien
gaaagaatctggaaacgtggcattt

SEQ ID NO: 2696292 - DNA, 25 bp, Homo sapien
ccagaaggctgtgttgtggattgaa

SEQ ID NO: 2696293 - DNA, 25 bp, Homo sapien
gcttgtgcaacatccaaatatggct

SEQ ID NO: 2696294 - DNA, 25 bp, Homo sapien
taggatactatcctagggcaaggga

SEQ ID NO: 2696295 - DNA, 25 bp, Homo sapien
cagcaattgtctaacgcttgtgcaa

SEQ ID NO: 2696296 - DNA, 25 bp, Homo sapien
gggtatatatctactacagagacac

SEQ ID NO: 2696297 - DNA, 25 bp, Homo sapien
gctggatatactgggcataatctga

SEQ ID NO: 2696298 - DNA, 25 bp, Homo sapien
taatctgaggaatcatattattgct

SEQ ID NO: 2696299 - DNA, 25 bp, Homo sapien
ggctgggaattatcttgacccatct

SEQ ID NO: 2696300 - DNA, 25 bp, Homo sapien
gaattatcttgacccatctgatcat

SEQ ID NO: 2696301 - DNA, 25 bp, Homo sapien
ccaggccttggttcaaaacatgaat

SEQ ID NO: 2696302 - DNA, 25 bp, Homo sapien
tcctggaactagtaagcattatagc

SEQ ID NO: 2696303 - DNA, 25 bp, Homo sapien
tggaagtccttgctaatgccataaa

SEQ ID NO: 2696304 - DNA, 25 bp, Homo sapien
tgggacgacacaattcagaacatag

SEQ ID NO: 2696305 - DNA, 25 bp, Homo sapien
taacacactagtagaagatgcatga

SEQ ID NO: 2696306 - DNA, 25 bp, Homo sapien
catagtagactattgaacaccaatg

SEQ ID NO: 2696307 - DNA, 25 bp, Homo sapien
caatgtttaggctcttcataggcaa

SEQ ID NO: 2696308 - DNA, 25 bp, Homo sapien
tgtcgcctagtgttttcaattgtcg

SEQ ID NO: 2696309 - DNA, 25 bp, Homo sapien
catggttcatggcaagtacaacaaa

SEQ ID NO: 2696310 - DNA, 25 bp, Homo sapien
gaggccacgtgtcaaacttctttgt

SEQ ID NO: 2696311 - DNA, 25 bp, Homo sapien
tagcacctttcacaatgcatggttc

SEQ ID NO: 2696312 - DNA, 25 bp, Homo sapien
cttcaatatcggcaacttaaggcag

SEQ ID NO: 2696313 - DNA, 25 bp, Homo sapien
tatactgcctcaaacccatggttga

SEQ ID NO: 2696314 - DNA, 25 bp, Homo sapien
aaagccatgatgaaagttgcagttc

SEQ ID NO: 2696315 - DNA, 25 bp, Homo sapien
tgctgggaatcttacagacagtggt

SEQ ID NO: 2696316 - DNA, 25 bp, Homo sapien
gacaaaactcatccgaatggtacac

SEQ ID NO: 2696317 - DNA, 25 bp, Homo sapien
ctcacagtagtgaataaagtctcat

SEQ ID NO: 2696318 - DNA, 25 bp, Homo sapien
tttggaatgtcaatacagtcaggtg

SEQ ID NO: 2696319 - DNA, 25 bp, Homo sapien
gaattctgccaagtcaccctaatga

SEQ ID NO: 2696320 - DNA, 25 bp, Homo sapien
taacagtacttagctaggaatgaaa

SEQ ID NO: 2696321 - DNA, 25 bp, Homo sapien
ggtttactgcttatggtagtcttgg

SEQ ID NO: 2696322 - DNA, 25 bp, Homo sapien
gtttactgcttatggtagtcttggc

SEQ ID NO: 2696323 - DNA, 25 bp, Homo sapien
tctggtttactgcttatggtagtct

SEQ ID NO: 2696324 - DNA, 25 bp, Homo sapien
gttctctggtttactgcttatggta

SEQ ID NO: 2696325 - DNA, 25 bp, Homo sapien
ggttacatcctgccggtgatattct

SEQ ID NO: 2696326 - DNA, 25 bp, Homo sapien
tacatcctgccggtgatattctgct

SEQ ID NO: 2696327 - DNA, 25 bp, Homo sapien
ctggttacatcctgccggtgatatt

SEQ ID NO: 2696328 - DNA, 25 bp, Homo sapien
ttacatcctgccggtgatattctgc

SEQ ID NO: 2696329 - DNA, 25 bp, Homo sapien
ggagcccatctgagtaaggacttta

SEQ ID NO: 2696330 - DNA, 25 bp, Homo sapien
gggagcccatctgagtaaggacttt

SEQ ID NO: 2696331 - DNA, 25 bp, Homo sapien
gcccatctgagtaaggactttatcc

SEQ ID NO: 2696332 - DNA, 25 bp, Homo sapien
gagcccatctgagtaaggactttat

SEQ ID NO: 2696333 - DNA, 25 bp, Homo sapien
taccaaggacgtaaggataagcatc

SEQ ID NO: 2696334 - DNA, 25 bp, Homo sapien
caaatattctctttcgtgtggcaga

SEQ ID NO: 2696335 - DNA, 25 bp, Homo sapien
tacggctccagtgcataggtccttg

SEQ ID NO: 2696336 - DNA, 25 bp, Homo sapien
taagcagcagacctacagtgcagcc

SEQ ID NO: 2696337 - DNA, 25 bp, Homo sapien
taaacgctatgcagaatgaaaggct

SEQ ID NO: 2696338 - DNA, 25 bp, Homo sapien
cagaacaggttagaagggcacactc

SEQ ID NO: 2696339 - DNA, 25 bp, Homo sapien
gaactgttctagcagtggcaacaca

SEQ ID NO: 2696340 - DNA, 25 bp, Homo sapien
gaaagccaaggatcaatgtacagtg

SEQ ID NO: 2696341 - DNA, 25 bp, Homo sapien
tagcaactaacgtttcccgtctcca

SEQ ID NO: 2696342 - DNA, 25 bp, Homo sapien
tcctagcggtggtaatccaaagttc

SEQ ID NO: 2696343 - DNA, 25 bp, Homo sapien
tccaagtggctggtttcctagcggt

SEQ ID NO: 2696344 - DNA, 25 bp, Homo sapien
acactcctttattgattggtcttcc

SEQ ID NO: 2696345 - DNA, 25 bp, Homo sapien
tgagcttgatcatccactccatgcc

SEQ ID NO: 2696346 - DNA, 25 bp, Homo sapien
ctgcagatgctaggagtcaaggaga

SEQ ID NO: 2696347 - DNA, 25 bp, Homo sapien
tgtatttctgatagcccgtttcatc

SEQ ID NO: 2696348 - DNA, 25 bp, Homo sapien
tctggagccaatgacctgagcttga

SEQ ID NO: 2696349 - DNA, 25 bp, Homo sapien
taattgagcctgcatagacctggaa

SEQ ID NO: 2696350 - DNA, 25 bp, Homo sapien
aagtttctgggtaattgagcctgca

SEQ ID NO: 2696351 - DNA, 25 bp, Homo sapien
aatgaatagacactttgggaataag

SEQ ID NO: 2696352 - DNA, 25 bp, Homo sapien
caaaggcttggccacttcaaatgaa

SEQ ID NO: 2696353 - DNA, 25 bp, Homo sapien
tggcgtgtggctctgttcataggtc

SEQ ID NO: 2696354 - DNA, 25 bp, Homo sapien
gtttgtccctgtttggcgtgtggct

SEQ ID NO: 2696355 - DNA, 25 bp, Homo sapien
cataggtctgtaactgtgtctttgc

SEQ ID NO: 2696356 - DNA, 25 bp, Homo sapien
gtaactgtgtctttgcccgtcagtc

SEQ ID NO: 2696357 - DNA, 25 bp, Homo sapien
gccccaacctcagcagaggaaagac

SEQ ID NO: 2696358 - DNA, 25 bp, Homo sapien
gcagaggaaagacgactccatgctt

SEQ ID NO: 2696359 - DNA, 25 bp, Homo sapien
aagacgactccatgcttggctagca

SEQ ID NO: 2696360 - DNA, 25 bp, Homo sapien
catgcttggctagcaagggcaacag

SEQ ID NO: 2696361 - DNA, 25 bp, Homo sapien
aggggccagatgactccaagccatc

SEQ ID NO: 2696362 - DNA, 25 bp, Homo sapien
gccagatgactccaagccatccagt

SEQ ID NO: 2696363 - DNA, 25 bp, Homo sapien
agaaggggccagatgactccaagcc

SEQ ID NO: 2696364 - DNA, 25 bp, Homo sapien
gggccagatgactccaagccatcca

SEQ ID NO: 2696365 - DNA, 25 bp, Homo sapien
gctgccattagagccccagagtggg

SEQ ID NO: 2696366 - DNA, 25 bp, Homo sapien
ctgatgtcagacagcagagcgctga

SEQ ID NO: 2696367 - DNA, 25 bp, Homo sapien
tgagggggaaaacctgcctaggaca

SEQ ID NO: 2696368 - DNA, 25 bp, Homo sapien
ttccagggtgcgctgccattagagc

SEQ ID NO: 2696369 - DNA, 25 bp, Homo sapien
tgtatcgtaatgtgcgatgagctgg

SEQ ID NO: 2696370 - DNA, 25 bp, Homo sapien
atcgtaatgtgcgatgagctggaag

SEQ ID NO: 2696371 - DNA, 25 bp, Homo sapien
tcatgtatcgtaatgtgcgatgagc

SEQ ID NO: 2696372 - DNA, 25 bp, Homo sapien
gatccagtggactccaactcaggag

SEQ ID NO: 2696373 - DNA, 25 bp, Homo sapien
caaagaggcctgagtgtcccgtgga

SEQ ID NO: 2696374 - DNA, 25 bp, Homo sapien
gaccccacacccctaaggtcagcag

SEQ ID NO: 2696375 - DNA, 25 bp, Homo sapien
ggaggctgacgtgcggaggctgctg

SEQ ID NO: 2696376 - DNA, 25 bp, Homo sapien
tcccgtggaggctgacgtgcggagg

SEQ ID NO: 2696377 - DNA, 25 bp, Homo sapien
gagcccctttttggtggagagctgt

SEQ ID NO: 2696378 - DNA, 25 bp, Homo sapien
agagcccctttttggtggagagctg

SEQ ID NO: 2696379 - DNA, 25 bp, Homo sapien
taagaaacagccgatcagatgaggc

SEQ ID NO: 2696380 - DNA, 25 bp, Homo sapien
tgacgagggacgatgacagactgca

SEQ ID NO: 2696381 - DNA, 25 bp, Homo sapien
aatagaagtgaggttggtgccagca

SEQ ID NO: 2696382 - DNA, 25 bp, Homo sapien
ccataaggaatataagtcctgtttt

SEQ ID NO: 2696383 - DNA, 25 bp, Homo sapien
taacttctgtggatacgctaccagg

SEQ ID NO: 2696384 - DNA, 25 bp, Homo sapien
tattcagcttttgccgtgtaccagg

SEQ ID NO: 2696385 - DNA, 25 bp, Homo sapien
ccaaacaatgcctgttcggagcagg

SEQ ID NO: 2696386 - DNA, 25 bp, Homo sapien
caggtgtgcgaagatgccattcatc

SEQ ID NO: 2696387 - DNA, 25 bp, Homo sapien
cattgacgaagctcctgtcagcgag

SEQ ID NO: 2696388 - DNA, 25 bp, Homo sapien
taggtggtccctcgttatggaagga

SEQ ID NO: 2696389 - DNA, 25 bp, Homo sapien
gacccattggacttctaaccacaag

SEQ ID NO: 2696390 - DNA, 25 bp, Homo sapien
aataaaagtgaaagtccctgctagg

SEQ ID NO: 2696391 - DNA, 25 bp, Homo sapien
tacccagcggatctcttcatgaagg

SEQ ID NO: 2696392 - DNA, 25 bp, Homo sapien
ggtacagtggacttgtcctccaagc

SEQ ID NO: 2696393 - DNA, 25 bp, Homo sapien
catcccaggttcagttgcacattgc

SEQ ID NO: 2696394 - DNA, 25 bp, Homo sapien
gaagtattcctgttacatcccaggt

SEQ ID NO: 2696395 - DNA, 25 bp, Homo sapien
ccatgagaaattcagcgctgcagtt

SEQ ID NO: 2696396 - DNA, 25 bp, Homo sapien
gctagtaggataagacccaggcttc

SEQ ID NO: 2696397 - DNA, 25 bp, Homo sapien
cgctgcagtttaaccgctagtagga

SEQ ID NO: 2696398 - DNA, 25 bp, Homo sapien
cagcaggaaggcaactgccaattaa

SEQ ID NO: 2696399 - DNA, 25 bp, Homo sapien
aatgtgtttttcagtctgggctctg

SEQ ID NO: 2696400 - DNA, 25 bp, Homo sapien
cccaatgggttagggccaaatctct

SEQ ID NO: 2696401 - DNA, 25 bp, Homo sapien
caaatctctcctaggttttgagcag

SEQ ID NO: 2696402 - DNA, 25 bp, Homo sapien
tgagcagaattagctcctgagataa

SEQ ID NO: 2696403 - DNA, 25 bp, Homo sapien
tcagcttttcagagagaagtataga

SEQ ID NO: 2696404 - DNA, 25 bp, Homo sapien
atctttttggctcacaatgtatttc

SEQ ID NO: 2696405 - DNA, 25 bp, Homo sapien
gatccctgtgtattaacttgctagg

SEQ ID NO: 2696406 - DNA, 25 bp, Homo sapien
gggaatctaatctatgtaacagtac

SEQ ID NO: 2696407 - DNA, 25 bp, Homo sapien
gctacagggcttttgaccgggcgtc

SEQ ID NO: 2696408 - DNA, 25 bp, Homo sapien
gaagatctgaaatgggactttcaca

SEQ ID NO: 2696409 - DNA, 25 bp, Homo sapien
ggtcacagaccaaccataatgaata

SEQ ID NO: 2696410 - DNA, 25 bp, Homo sapien
gaaatacagggcaagcaacaaccat

SEQ ID NO: 2696411 - DNA, 25 bp, Homo sapien
tagagaccaaaagtgagcacgttat

SEQ ID NO: 2696412 - DNA, 25 bp, Homo sapien
gactttcccaacacaaggttgccac

SEQ ID NO: 2696413 - DNA, 25 bp, Homo sapien
ccttttctcgccatagcctattgga

SEQ ID NO: 2696414 - DNA, 25 bp, Homo sapien
gtcaacagtctatcgctgtgaaatt

SEQ ID NO: 2696415 - DNA, 25 bp, Homo sapien
gattgctccgtgcagcaaggtacag

SEQ ID NO: 2696416 - DNA, 25 bp, Homo sapien
acagtctatcgctgtgaaattcctg

SEQ ID NO: 2696417 - DNA, 25 bp, Homo sapien
acatcagttactgaggcttgcgcat

SEQ ID NO: 2696418 - DNA, 25 bp, Homo sapien
gatcacatcagttactgaggcttgc

SEQ ID NO: 2696419 - DNA, 25 bp, Homo sapien
atcagttactgaggcttgcgcattt

SEQ ID NO: 2696420 - DNA, 25 bp, Homo sapien
tcacatcagttactgaggcttgcgc

SEQ ID NO: 2696421 - DNA, 25 bp, Homo sapien
agagttacccgaagctcggcatccg

SEQ ID NO: 2696422 - DNA, 25 bp, Homo sapien
gttacccgaagctcggcatccgtga

SEQ ID NO: 2696423 - DNA, 25 bp, Homo sapien
gagttacccgaagctcggcatccgt

SEQ ID NO: 2696424 - DNA, 25 bp, Homo sapien
tgagagttacccgaagctcggcatc

SEQ ID NO: 2696425 - DNA, 25 bp, Homo sapien
agccagattgaagtccgggccaaga

SEQ ID NO: 2696426 - DNA, 25 bp, Homo sapien
tatgggaagccagattgaagtccgg

SEQ ID NO: 2696427 - DNA, 25 bp, Homo sapien
caggaataatatgggaagccagatt

SEQ ID NO: 2696428 - DNA, 25 bp, Homo sapien
aatatgggaagccagattgaagtcc

SEQ ID NO: 2696429 - DNA, 25 bp, Homo sapien
cctaggacatatgattagagagtgc

SEQ ID NO: 2696430 - DNA, 25 bp, Homo sapien
ggacctaggacatatgattagagag

SEQ ID NO: 2696431 - DNA, 25 bp, Homo sapien
gaggacctaggacatatgattagag

SEQ ID NO: 2696432 - DNA, 25 bp, Homo sapien
ctaggacatatgattagagagtgcc

SEQ ID NO: 2696433 - DNA, 25 bp, Homo sapien
tagcttaaaccaagagctcgctggg

SEQ ID NO: 2696434 - DNA, 25 bp, Homo sapien
aaaatgagctggagttcccagaact

SEQ ID NO: 2696435 - DNA, 25 bp, Homo sapien
tcctgaagccagattatcctcctgc

SEQ ID NO: 2696436 - DNA, 25 bp, Homo sapien
ggcttttcaccaaagtacgcagtca

SEQ ID NO: 2696437 - DNA, 25 bp, Homo sapien
gctttttgctcatgtctattttatg

SEQ ID NO: 2696438 - DNA, 25 bp, Homo sapien
tgctttttgctcatgtctattttat

SEQ ID NO: 2696439 - DNA, 25 bp, Homo sapien
tgctgatcgacactgctatgctggg

SEQ ID NO: 2696440 - DNA, 25 bp, Homo sapien
aatctgcgggcctccatgtgacata

SEQ ID NO: 2696441 - DNA, 25 bp, Homo sapien
tatgctgggcaagccaatctgcggg

SEQ ID NO: 2696442 - DNA, 25 bp, Homo sapien
tcacgtgtcaagagaaattgccccg

SEQ ID NO: 2696443 - DNA, 25 bp, Homo sapien
tctctaatgcaaagtgacattttga

SEQ ID NO: 2696444 - DNA, 25 bp, Homo sapien
ttctctaatgcaaagtgacattttg

SEQ ID NO: 2696445 - DNA, 25 bp, Homo sapien
ctttctctaatgcaaagtgacattt

SEQ ID NO: 2696446 - DNA, 25 bp, Homo sapien
ctctttctctaatgcaaagtgacat

SEQ ID NO: 2696447 - DNA, 25 bp, Homo sapien
caactgcagacagcagaacgcttat

SEQ ID NO: 2696448 - DNA, 25 bp, Homo sapien
tcgcaggcctgggttctctctatcc

SEQ ID NO: 2696449 - DNA, 25 bp, Homo sapien
cctctagccaactgcagacagcaga

SEQ ID NO: 2696450 - DNA, 25 bp, Homo sapien
tctctatcccctctagccaactgca

SEQ ID NO: 2696451 - DNA, 25 bp, Homo sapien
tgctgacttagctccactagtattt

SEQ ID NO: 2696452 - DNA, 25 bp, Homo sapien
tcccaggtttacagctgtacacatc

SEQ ID NO: 2696453 - DNA, 25 bp, Homo sapien
gcagaaatatctcccaggtttacag

SEQ ID NO: 2696454 - DNA, 25 bp, Homo sapien
tttcaattggagctttccataaaca

SEQ ID NO: 2696455 - DNA, 25 bp, Homo sapien
gatggggattaggtctttgcctgtt

SEQ ID NO: 2696456 - DNA, 25 bp, Homo sapien
ctttgcctgttgagttaatagctct

SEQ ID NO: 2696457 - DNA, 25 bp, Homo sapien
tgttgagttaatagctctcccagct

SEQ ID NO: 2696458 - DNA, 25 bp, Homo sapien
cagtggtttgggcctttttccatct

SEQ ID NO: 2696459 - DNA, 25 bp, Homo sapien
ttcttgggacaggagcatgcagctg

SEQ ID NO: 2696460 - DNA, 25 bp, Homo sapien
tcttgggacaggagcatgcagctgc

SEQ ID NO: 2696461 - DNA, 25 bp, Homo sapien
gcattcttgggacaggagcatgcag

SEQ ID NO: 2696462 - DNA, 25 bp, Homo sapien
cattcttgggacaggagcatgcagc

SEQ ID NO: 2696463 - DNA, 25 bp, Homo sapien
ataatctgagatcccatgttgctgc

SEQ ID NO: 2696464 - DNA, 25 bp, Homo sapien
atctgagatcccatgttgctgctgg

SEQ ID NO: 2696465 - DNA, 25 bp, Homo sapien
ctaataatctgagatcccatgttgc

SEQ ID NO: 2696466 - DNA, 25 bp, Homo sapien
attcattgtcagaagcaggagctaa

SEQ ID NO: 2696467 - DNA, 25 bp, Homo sapien
gggggaccatgcaggacccaggcag

SEQ ID NO: 2696468 - DNA, 25 bp, Homo sapien
gcaaaggattgtcccttggtgaaag

SEQ ID NO: 2696469 - DNA, 25 bp, Homo sapien
aaagagtaagctcaagagacagaga

SEQ ID NO: 2696470 - DNA, 25 bp, Homo sapien
aaaggcaaaagagtaagctcaagag

SEQ ID NO: 2696471 - DNA, 25 bp, Homo sapien
ggcaaaagagtaagctcaagagaca

SEQ ID NO: 2696472 - DNA, 25 bp, Homo sapien
tgcaggtaatttaagtagtgcagcc

SEQ ID NO: 2696473 - DNA, 25 bp, Homo sapien
caacaaggccttgtgcaggtaattt

SEQ ID NO: 2696474 - DNA, 25 bp, Homo sapien
ctgcgagcaagaagcaacaaggcct

SEQ ID NO: 2696475 - DNA, 25 bp, Homo sapien
aggtaatttaagtagtgcagccagc

SEQ ID NO: 2696476 - DNA, 25 bp, Homo sapien
aaagcccaactctttgatggagagc

SEQ ID NO: 2696477 - DNA, 25 bp, Homo sapien
aagcccaactctttgatggagagct

SEQ ID NO: 2696478 - DNA, 25 bp, Homo sapien
caaagcccaactctttgatggagag

SEQ ID NO: 2696479 - DNA, 25 bp, Homo sapien
tcaaagcccaactctttgatggaga

SEQ ID NO: 2696480 - DNA, 25 bp, Homo sapien
atccactcctcttccgcagtggcat

SEQ ID NO: 2696481 - DNA, 25 bp, Homo sapien
gtcttctttaaagccaccagcaagt

SEQ ID NO: 2696482 - DNA, 25 bp, Homo sapien
tggttccgtgtttcttccatccacc

SEQ ID NO: 2696483 - DNA, 25 bp, Homo sapien
agccaccagcaagtatcttttttac

SEQ ID NO: 2696484 - DNA, 25 bp, Homo sapien
accccttttattgccactgcttctg

SEQ ID NO: 2696485 - DNA, 25 bp, Homo sapien
aatcacttcaatttccccatactgt

SEQ ID NO: 2696486 - DNA, 25 bp, Homo sapien
tttcaatcacttcaatttccccata

SEQ ID NO: 2696487 - DNA, 25 bp, Homo sapien
caaaaccccttttattgccactgct

SEQ ID NO: 2696488 - DNA, 25 bp, Homo sapien
cctctttggctggataaagcactag

SEQ ID NO: 2696489 - DNA, 25 bp, Homo sapien
tttggctggataaagcactagccat

SEQ ID NO: 2696490 - DNA, 25 bp, Homo sapien
ttccagatccactttgacctctttg

SEQ ID NO: 2696491 - DNA, 25 bp, Homo sapien
aagtttccagatccactttgacctc

SEQ ID NO: 2696492 - DNA, 25 bp, Homo sapien
caaagttgtcattcctgccaaaacc

SEQ ID NO: 2696493 - DNA, 25 bp, Homo sapien
aattgcttgcatcattaccatatcc

SEQ ID NO: 2696494 - DNA, 25 bp, Homo sapien
gttgtcattcctgccaaaaccacct

SEQ ID NO: 2696495 - DNA, 25 bp, Homo sapien
ccatgaccactgaagttccctccat

SEQ ID NO: 2696496 - DNA, 25 bp, Homo sapien
accacaggggccagaccttcttcct

SEQ ID NO: 2696497 - DNA, 25 bp, Homo sapien
tcctctctttatgcgtccaaaattt

SEQ ID NO: 2696498 - DNA, 25 bp, Homo sapien
tattggcatctaccaccacaggggc

SEQ ID NO: 2696499 - DNA, 25 bp, Homo sapien
aaagtttcctctctttatgcgtcca

SEQ ID NO: 2696500 - DNA, 25 bp, Homo sapien
ggcagtaatgaaaatcctcggacac

SEQ ID NO: 2696501 - DNA, 25 bp, Homo sapien
tcctggcagtaatgaaaatcctcgg

SEQ ID NO: 2696502 - DNA, 25 bp, Homo sapien
ttcctggcagtaatgaaaatcctcg

SEQ ID NO: 2696503 - DNA, 25 bp, Homo sapien
ctggcagtaatgaaaatcctcggac

SEQ ID NO: 2696504 - DNA, 25 bp, Homo sapien
tgggaggccgaggcgggcggatcac

SEQ ID NO: 2696505 - DNA, 25 bp, Homo sapien
ttaaaatttgctgccgggcgcggtg

SEQ ID NO: 2696506 - DNA, 25 bp, Homo sapien
gaggtcagaagatcgagaccatcct

SEQ ID NO: 2696507 - DNA, 25 bp, Homo sapien
gctcacgcctgtaatcctagcactt

SEQ ID NO: 2696508 - DNA, 25 bp, Homo sapien
tttattagtgtgaatatccagaaac

SEQ ID NO: 2696509 - DNA, 25 bp, Homo sapien
tattagtgtgaatatccagaaactt

SEQ ID NO: 2696510 - DNA, 25 bp, Homo sapien
ttattagtgtgaatatccagaaact

SEQ ID NO: 2696511 - DNA, 25 bp, Homo sapien
cttagctggcaaaccatggtcccag

SEQ ID NO: 2696512 - DNA, 25 bp, Homo sapien
gctggcaaaccatggtcccagtatt

SEQ ID NO: 2696513 - DNA, 25 bp, Homo sapien
ccatggtcccagtattgaatccatc

SEQ ID NO: 2696514 - DNA, 25 bp, Homo sapien
ggcaaaccatggtcccagtattgaa

SEQ ID NO: 2696515 - DNA, 25 bp, Homo sapien
aagtggtcatatgggaagaggctgg

SEQ ID NO: 2696516 - DNA, 25 bp, Homo sapien
tccaatcaagtatatgatcttacag

SEQ ID NO: 2696517 - DNA, 25 bp, Homo sapien
cattatttgaggcatgaggcctaca

SEQ ID NO: 2696518 - DNA, 25 bp, Homo sapien
tgttcactttgttgtacgcttgatg

SEQ ID NO: 2696519 - DNA, 25 bp, Homo sapien
ctacagatctggtttgcagtcactg

SEQ ID NO: 2696520 - DNA, 25 bp, Homo sapien
tgctggtggccaagaagccctgttc

SEQ ID NO: 2696521 - DNA, 25 bp, Homo sapien
ttctctggtgtttgagctctttagc

SEQ ID NO: 2696522 - DNA, 25 bp, Homo sapien
tctggtgtttgagctctttagccat

SEQ ID NO: 2696523 - DNA, 25 bp, Homo sapien
ctggtggccaagaagccctgttctc

SEQ ID NO: 2696524 - DNA, 25 bp, Homo sapien
catactggagtccatgtcacccaac

SEQ ID NO: 2696525 - DNA, 25 bp, Homo sapien
gacagcttcatcttcgtatccttca

SEQ ID NO: 2696526 - DNA, 25 bp, Homo sapien
tatccttcatggcacatactggagt

SEQ ID NO: 2696527 - DNA, 25 bp, Homo sapien
gtagcttctcgagagcagagttcat

SEQ ID NO: 2696528 - DNA, 25 bp, Homo sapien
aggtgggatctcaaggtgattgcaa

SEQ ID NO: 2696529 - DNA, 25 bp, Homo sapien
cactggatacagtaaggcccaggta

SEQ ID NO: 2696530 - DNA, 25 bp, Homo sapien
ccaggtatacagtcttgagtgtgtg

SEQ ID NO: 2696531 - DNA, 25 bp, Homo sapien
tgtggggctttcgatggctggagag

SEQ ID NO: 2696532 - DNA, 25 bp, Homo sapien
ttctcaactactcatacatgccctg

SEQ ID NO: 2696533 - DNA, 25 bp, Homo sapien
tgatatctcctggtgctatccccaa

SEQ ID NO: 2696534 - DNA, 25 bp, Homo sapien
cagctgatatctcctggtgctatcc

SEQ ID NO: 2696535 - DNA, 25 bp, Homo sapien
cacagctgatatctcctggtgctat

SEQ ID NO: 2696536 - DNA, 25 bp, Homo sapien
atgggtgtcagcattgagatctgga

SEQ ID NO: 2696537 - DNA, 25 bp, Homo sapien
attgagatctggaagctagctgtcc

SEQ ID NO: 2696538 - DNA, 25 bp, Homo sapien
tgggtgtcagcattgagatctggaa

SEQ ID NO: 2696539 - DNA, 25 bp, Homo sapien
tcagcattgagatctggaagctagc

SEQ ID NO: 2696540 - DNA, 25 bp, Homo sapien
aggctccaagccttctagtacaggg

SEQ ID NO: 2696541 - DNA, 25 bp, Homo sapien
tggcacagttatactaacaggctcc

SEQ ID NO: 2696542 - DNA, 25 bp, Homo sapien
gatggaaccaaatgaactggcacag

SEQ ID NO: 2696543 - DNA, 25 bp, Homo sapien
gtggctggttaattcagtaaagggc

SEQ ID NO: 2696544 - DNA, 25 bp, Homo sapien
tgttctcagcgggttcaacatcaaa

SEQ ID NO: 2696545 - DNA, 25 bp, Homo sapien
tcttttgccaaagagcctgcttcct

SEQ ID NO: 2696546 - DNA, 25 bp, Homo sapien
tcctcgtgtactgttcagcttttgc

SEQ ID NO: 2696547 - DNA, 25 bp, Homo sapien
tctcttctcattgttctcagcgggt

SEQ ID NO: 2696548 - DNA, 25 bp, Homo sapien
cctctgagccttgacaaagaacata

SEQ ID NO: 2696549 - DNA, 25 bp, Homo sapien
gaggagtacagagtccatcagtgat

SEQ ID NO: 2696550 - DNA, 25 bp, Homo sapien
acatactaaggcaacagtaagagga

SEQ ID NO: 2696551 - DNA, 25 bp, Homo sapien
tcttttgtgctttgcaaagggtaaa

SEQ ID NO: 2696552 - DNA, 25 bp, Homo sapien
ctaagaacacataagtaatttgggc

SEQ ID NO: 2696553 - DNA, 25 bp, Homo sapien
agaacacataagtaatttgggctgc

SEQ ID NO: 2696554 - DNA, 25 bp, Homo sapien
tcatggcacgtctaagaacacataa

SEQ ID NO: 2696555 - DNA, 25 bp, Homo sapien
gaacacataagtaatttgggctgct

SEQ ID NO: 2696556 - DNA, 25 bp, Homo sapien
actgatacattttgtgctggcttgt

SEQ ID NO: 2696557 - DNA, 25 bp, Homo sapien
cactttggatggatctaaactgata

SEQ ID NO: 2696558 - DNA, 25 bp, Homo sapien
ctaaactgatacattttgtgctggc

SEQ ID NO: 2696559 - DNA, 25 bp, Homo sapien
ctttggatggatctaaactgataca

SEQ ID NO: 2696560 - DNA, 25 bp, Homo sapien
actcttctttaactctttctcatct

SEQ ID NO: 2696561 - DNA, 25 bp, Homo sapien
catctctgaatgcaaacgtggccat

SEQ ID NO: 2696562 - DNA, 25 bp, Homo sapien
ttctcatctctgaatgcaaacgtgg

SEQ ID NO: 2696563 - DNA, 25 bp, Homo sapien
tcatctctgaatgcaaacgtggcca

SEQ ID NO: 2696564 - DNA, 25 bp, Homo sapien
ctgacctactgctaaacttccagtg

SEQ ID NO: 2696565 - DNA, 25 bp, Homo sapien
gacctactgctaaacttccagtgtt

SEQ ID NO: 2696566 - DNA, 25 bp, Homo sapien
cctactgctaaacttccagtgttat

SEQ ID NO: 2696567 - DNA, 25 bp, Homo sapien
ctctgacctactgctaaacttccag

SEQ ID NO: 2696568 - DNA, 25 bp, Homo sapien
tctgacagcagaaagattctatccc

SEQ ID NO: 2696569 - DNA, 25 bp, Homo sapien
tagaaacggtttgtctcaatagcat

SEQ ID NO: 2696570 - DNA, 25 bp, Homo sapien
caaaactctttgtgtagggcagtag

SEQ ID NO: 2696571 - DNA, 25 bp, Homo sapien
tcactatcatctattatcgtcttcc

SEQ ID NO: 2696572 - DNA, 25 bp, Homo sapien
tcagtacaccacctggatggcaatg

SEQ ID NO: 2696573 - DNA, 25 bp, Homo sapien
agtacaccacctggatggcaatgag

SEQ ID NO: 2696574 - DNA, 25 bp, Homo sapien
caccacctggatggcaatgagggtc

SEQ ID NO: 2696575 - DNA, 25 bp, Homo sapien
tacaccacctggatggcaatgaggg

SEQ ID NO: 2696576 - DNA, 25 bp, Homo sapien
ggactctggctgcatagtgtgatca

SEQ ID NO: 2696577 - DNA, 25 bp, Homo sapien
gaccatttgtgagctcaagtaacta

SEQ ID NO: 2696578 - DNA, 25 bp, Homo sapien
cctggaactaagcacatcctttgag

SEQ ID NO: 2696579 - DNA, 25 bp, Homo sapien
gaacgatgggatatactctcttggg

SEQ ID NO: 2696580 - DNA, 25 bp, Homo sapien
tcctggcccttgtcaagaggactaa

SEQ ID NO: 2696581 - DNA, 25 bp, Homo sapien
tctttggcagggtcaggcattgctg

SEQ ID NO: 2696582 - DNA, 25 bp, Homo sapien
tatacctgccagtgatgctctggga

SEQ ID NO: 2696583 - DNA, 25 bp, Homo sapien
tttaacagctcacagaaccacgtcc

SEQ ID NO: 2696584 - DNA, 25 bp, Homo sapien
tcctcaaagtttagaaggtctcgga

SEQ ID NO: 2696585 - DNA, 25 bp, Homo sapien
tgtcccatctatgcttagggccagg

SEQ ID NO: 2696586 - DNA, 25 bp, Homo sapien
ggccctaggtatttgctctccaaaa

SEQ ID NO: 2696587 - DNA, 25 bp, Homo sapien
cctcagtgacagttgggccttgtgc

SEQ ID NO: 2696588 - DNA, 25 bp, Homo sapien
tcagaggtaagtggcagtcatattg

SEQ ID NO: 2696589 - DNA, 25 bp, Homo sapien
gaggtaagtggcagtcatattgaaa

SEQ ID NO: 2696590 - DNA, 25 bp, Homo sapien
aggtaagtggcagtcatattgaaac

SEQ ID NO: 2696591 - DNA, 25 bp, Homo sapien
agaggtaagtggcagtcatattgaa

SEQ ID NO: 2696592 - DNA, 25 bp, Homo sapien
ggcagccggattaaccctggcacag

SEQ ID NO: 2696593 - DNA, 25 bp, Homo sapien
tcagggcagccggattaaccctggc

SEQ ID NO: 2696594 - DNA, 25 bp, Homo sapien
gggcagccggattaaccctggcaca

SEQ ID NO: 2696595 - DNA, 25 bp, Homo sapien
cttcagggcagccggattaaccctg

SEQ ID NO: 2696596 - DNA, 25 bp, Homo sapien
attatccgtattttctgtgctgttg

SEQ ID NO: 2696597 - DNA, 25 bp, Homo sapien
ttaggattatccgtattttctgtgc

SEQ ID NO: 2696598 - DNA, 25 bp, Homo sapien
ggattatccgtattttctgtgctgt

SEQ ID NO: 2696599 - DNA, 25 bp, Homo sapien
aggattatccgtattttctgtgctg

SEQ ID NO: 2696600 - DNA, 25 bp, Homo sapien
ctctggaaccaaaaggcttcagtga

SEQ ID NO: 2696601 - DNA, 25 bp, Homo sapien
ctgtgtagccatagccttcagcttt

SEQ ID NO: 2696602 - DNA, 25 bp, Homo sapien
caacaaaaggcaaaatcgacaattg

SEQ ID NO: 2696603 - DNA, 25 bp, Homo sapien
ggcaaaatcgacaattgggatctaa

SEQ ID NO: 2696604 - DNA, 25 bp, Homo sapien
caaaaggcaaaatcgacaattggga

SEQ ID NO: 2696605 - DNA, 25 bp, Homo sapien
aaaggcaaaatcgacaattgggatc

SEQ ID NO: 2696606 - DNA, 25 bp, Homo sapien
ggtattccatcatcatttccttttt

SEQ ID NO: 2696607 - DNA, 25 bp, Homo sapien
gtattccatcatcatttcctttttc

SEQ ID NO: 2696608 - DNA, 25 bp, Homo sapien
tcatcatttcctttttctttttcca

SEQ ID NO: 2696609 - DNA, 25 bp, Homo sapien
catcatttcctttttctttttccat

SEQ ID NO: 2696610 - DNA, 25 bp, Homo sapien
cagtaggaataaggtgtccatgtgt

SEQ ID NO: 2696611 - DNA, 25 bp, Homo sapien
tactcatcttcatccctagtgttca

SEQ ID NO: 2696612 - DNA, 25 bp, Homo sapien
gatgaagaggggtatactcatcttc

SEQ ID NO: 2696613 - DNA, 25 bp, Homo sapien
gaattgcctacccaaagactttgag

SEQ ID NO: 2696614 - DNA, 25 bp, Homo sapien
gtgcaggggcgtccagccatccaca

SEQ ID NO: 2696615 - DNA, 25 bp, Homo sapien
ctgtgcaggggcgtccagccatcca

SEQ ID NO: 2696616 - DNA, 25 bp, Homo sapien
gcaggggcgtccagccatccacagt

SEQ ID NO: 2696617 - DNA, 25 bp, Homo sapien
gcactgtgcaggggcgtccagccat

SEQ ID NO: 2696618 - DNA, 25 bp, Homo sapien
gatgtaacagttcaccaggaggagt

SEQ ID NO: 2696619 - DNA, 25 bp, Homo sapien
atgtaacagttcaccaggaggagtt

SEQ ID NO: 2696620 - DNA, 25 bp, Homo sapien
tgtaacagttcaccaggaggagttc

SEQ ID NO: 2696621 - DNA, 25 bp, Homo sapien
tcccagggggccatatctatataat

SEQ ID NO: 2696622 - DNA, 25 bp, Homo sapien
gctcccagggggccatatctatata

SEQ ID NO: 2696623 - DNA, 25 bp, Homo sapien
tggctcccagggggccatatctata

SEQ ID NO: 2696624 - DNA, 25 bp, Homo sapien
ggatggctcccagggggccatatct

SEQ ID NO: 2696625 - DNA, 25 bp, Homo sapien
cttctaccaattgctcaatctggct

SEQ ID NO: 2696626 - DNA, 25 bp, Homo sapien
tggccacaggtattattaactctgg

SEQ ID NO: 2696627 - DNA, 25 bp, Homo sapien
tatcctggccacaggtattattaac

SEQ ID NO: 2696628 - DNA, 25 bp, Homo sapien
cctggccacaggtattattaactct

SEQ ID NO: 2696629 - DNA, 25 bp, Homo sapien
tcagtagccaaagggccatgtccta

SEQ ID NO: 2696630 - DNA, 25 bp, Homo sapien
tagccaaagggccatgtcctaatct

SEQ ID NO: 2696631 - DNA, 25 bp, Homo sapien
caaagggccatgtcctaatctcatc

SEQ ID NO: 2696632 - DNA, 25 bp, Homo sapien
gccatgtcctaatctcatcttgtag

SEQ ID NO: 2696633 - DNA, 25 bp, Homo sapien
catattgaccaggaattgtctcttc

SEQ ID NO: 2696634 - DNA, 25 bp, Homo sapien
tgcatattgaccaggaattgtctct

SEQ ID NO: 2696635 - DNA, 25 bp, Homo sapien
tgctgcatattgaccaggaattgtc

SEQ ID NO: 2696636 - DNA, 25 bp, Homo sapien
gctgcatattgaccaggaattgtct

SEQ ID NO: 2696637 - DNA, 25 bp, Homo sapien
ctgaggcacagcatcttggcctcac

SEQ ID NO: 2696638 - DNA, 25 bp, Homo sapien
ggtcttcttgaccaccaagactttg

SEQ ID NO: 2696639 - DNA, 25 bp, Homo sapien
accatggtcttcttgaccaccaaga

SEQ ID NO: 2696640 - DNA, 25 bp, Homo sapien
aaaccatggtcttcttgaccaccaa

SEQ ID NO: 2696641 - DNA, 25 bp, Homo sapien
catggtcttcttgaccaccaagact

SEQ ID NO: 2696642 - DNA, 25 bp, Homo sapien
actcagttcatggtaatatccaaag

SEQ ID NO: 2696643 - DNA, 25 bp, Homo sapien
taatatccaaagatattaccacgaa

SEQ ID NO: 2696644 - DNA, 25 bp, Homo sapien
tgaactcggttcatggtaatatctc

SEQ ID NO: 2696645 - DNA, 25 bp, Homo sapien
ggtaatatctcgtttctccaatgaa

SEQ ID NO: 2696646 - DNA, 25 bp, Homo sapien
gatatattggcttggcactgggtct

SEQ ID NO: 2696647 - DNA, 25 bp, Homo sapien
gtctgctcccccgttggctttggat

SEQ ID NO: 2696648 - DNA, 25 bp, Homo sapien
caggatgtaggataatctgctgtag

SEQ ID NO: 2696649 - DNA, 25 bp, Homo sapien
tcctgtgcttctcgtatcttattcc

SEQ ID NO: 2696650 - DNA, 25 bp, Homo sapien
gagtatgggtagtgataagaacctg

SEQ ID NO: 2696651 - DNA, 25 bp, Homo sapien
gggtagtgataagaacctgaggtca

SEQ ID NO: 2696652 - DNA, 25 bp, Homo sapien
caatcactaggtccaggatattcaa

SEQ ID NO: 2696653 - DNA, 25 bp, Homo sapien
gatattcaatgaggagtatgggtag

SEQ ID NO: 2696654 - DNA, 25 bp, Homo sapien
atgaaatagtgatgtagcaaaaacc

SEQ ID NO: 2696655 - DNA, 25 bp, Homo sapien
gaatgcttttccacgtagacttatc

SEQ ID NO: 2696656 - DNA, 25 bp, Homo sapien
cctgagtgtcagtttgttgtcccta

SEQ ID NO: 2696657 - DNA, 25 bp, Homo sapien
aatgagagcccatcaaatcctgagt

SEQ ID NO: 2696658 - DNA, 25 bp, Homo sapien
tttacgtggaattctgacagtgcag

SEQ ID NO: 2696659 - DNA, 25 bp, Homo sapien
taaaaattggtgtctggatacttcc

SEQ ID NO: 2696660 - DNA, 25 bp, Homo sapien
cctttttgattacccacactggtgg

SEQ ID NO: 2696661 - DNA, 25 bp, Homo sapien
taattcagtcaagactccctttggg

SEQ ID NO: 2696662 - DNA, 25 bp, Homo sapien
aagagtcaatgctaccacccttcca

SEQ ID NO: 2696663 - DNA, 25 bp, Homo sapien
gttgcaagaaagagtcaatgctacc

SEQ ID NO: 2696664 - DNA, 25 bp, Homo sapien
tgctggacctttgttgcaagaaaga

SEQ ID NO: 2696665 - DNA, 25 bp, Homo sapien
tgctgctggacctttgttgcaagaa

SEQ ID NO: 2696666 - DNA, 25 bp, Homo sapien
ctctgaagtgcgaagtctatataat

SEQ ID NO: 2696667 - DNA, 25 bp, Homo sapien
atgctctgaagtgcgaagtctatat

SEQ ID NO: 2696668 - DNA, 25 bp, Homo sapien
ctgaagtgcgaagtctatataattt

SEQ ID NO: 2696669 - DNA, 25 bp, Homo sapien
gctctgaagtgcgaagtctatataa

SEQ ID NO: 2696670 - DNA, 25 bp, Homo sapien
atgctggcagcaagctcaaggaact

SEQ ID NO: 2696671 - DNA, 25 bp, Homo sapien
cttaagcagtgatctggaatatgaa

SEQ ID NO: 2696672 - DNA, 25 bp, Homo sapien
aggtcacatgaagcaagttctcaaa

SEQ ID NO: 2696673 - DNA, 25 bp, Homo sapien
tgaggtcacatgaagcaagttctca

SEQ ID NO: 2696674 - DNA, 25 bp, Homo sapien
cacatgaagcaagttctcaaaagac

SEQ ID NO: 2696675 - DNA, 25 bp, Homo sapien
catgaagcaagttctcaaaagactg

SEQ ID NO: 2696676 - DNA, 25 bp, Homo sapien
ccccactgggctctcattcagctgc

SEQ ID NO: 2696677 - DNA, 25 bp, Homo sapien
acccccactgggctctcattcagct

SEQ ID NO: 2696678 - DNA, 25 bp, Homo sapien
cccctgacccccactgggctctcat

SEQ ID NO: 2696679 - DNA, 25 bp, Homo sapien
cctgacccccactgggctctcattc

SEQ ID NO: 2696680 - DNA, 25 bp, Homo sapien
gccttcggccgccacgagggagttc

SEQ ID NO: 2696681 - DNA, 25 bp, Homo sapien
aggccttcggccgccacgagggagt

SEQ ID NO: 2696682 - DNA, 25 bp, Homo sapien
ccaggccttcggccgccacgaggga

SEQ ID NO: 2696683 - DNA, 25 bp, Homo sapien
cttcggccgccacgagggagttcat

SEQ ID NO: 2696684 - DNA, 25 bp, Homo sapien
ctccagtctcctcttgcagatcgcc

SEQ ID NO: 2696685 - DNA, 25 bp, Homo sapien
gtctcctcttgcagatcgccagctg

SEQ ID NO: 2696686 - DNA, 25 bp, Homo sapien
cagtctcctcttgcagatcgccagc

SEQ ID NO: 2696687 - DNA, 25 bp, Homo sapien
tccagtctcctcttgcagatcgcca

SEQ ID NO: 2696688 - DNA, 25 bp, Homo sapien
gtggctccatagcatccaggcttcc

SEQ ID NO: 2696689 - DNA, 25 bp, Homo sapien
gctccatagcatccaggcttccatg

SEQ ID NO: 2696690 - DNA, 25 bp, Homo sapien
atagcatccaggcttccatgcttcc

SEQ ID NO: 2696691 - DNA, 25 bp, Homo sapien
tccatagcatccaggcttccatgct

SEQ ID NO: 2696692 - DNA, 25 bp, Homo sapien
ttgccttgcaaatcggagtctctgc

SEQ ID NO: 2696693 - DNA, 25 bp, Homo sapien
agtgaagaccctgtatcttccccag

SEQ ID NO: 2696694 - DNA, 25 bp, Homo sapien
gtcctgatacggctggctgtgctcc

SEQ ID NO: 2696695 - DNA, 25 bp, Homo sapien
agactgacagctgccatccgctggg

SEQ ID NO: 2696696 - DNA, 25 bp, Homo sapien
gggtagagggagtgctcagaggtct

SEQ ID NO: 2696697 - DNA, 25 bp, Homo sapien
tgaaggggtagagggagtgctcaga

SEQ ID NO: 2696698 - DNA, 25 bp, Homo sapien
tggggtgaaggggtagagggagtgc

SEQ ID NO: 2696699 - DNA, 25 bp, Homo sapien
ggtgaaggggtagagggagtgctca

SEQ ID NO: 2696700 - DNA, 25 bp, Homo sapien
ccagcatcctgtatgcagggaagct

SEQ ID NO: 2696701 - DNA, 25 bp, Homo sapien
gataccagcatcctgtatgcaggga

SEQ ID NO: 2696702 - DNA, 25 bp, Homo sapien
gcatcctgtatgcagggaagcttca

SEQ ID NO: 2696703 - DNA, 25 bp, Homo sapien
cagataccagcatcctgtatgcagg

SEQ ID NO: 2696704 - DNA, 25 bp, Homo sapien
catcatcatctacactgttattagc

SEQ ID NO: 2696705 - DNA, 25 bp, Homo sapien
accacgatcatcatcatctacactg

SEQ ID NO: 2696706 - DNA, 25 bp, Homo sapien
tctgtgtaacaacattctttccacc

SEQ ID NO: 2696707 - DNA, 25 bp, Homo sapien
ctacactgttattagcaataggaag

SEQ ID NO: 2696708 - DNA, 25 bp, Homo sapien
atttgcatcttccaacttgagtctt

SEQ ID NO: 2696709 - DNA, 25 bp, Homo sapien
taggccatcattagcaaagcctttc

SEQ ID NO: 2696710 - DNA, 25 bp, Homo sapien
catggatgatctggtttgtaggaga

SEQ ID NO: 2696711 - DNA, 25 bp, Homo sapien
tagcaggtgaggtagcttgtaatct

SEQ ID NO: 2696712 - DNA, 25 bp, Homo sapien
tctgcgggcatcaccacctagtggg

SEQ ID NO: 2696713 - DNA, 25 bp, Homo sapien
tctctgcgggcatcaccacctagtg

SEQ ID NO: 2696714 - DNA, 25 bp, Homo sapien
gggcatcaccacctagtgggcactg

SEQ ID NO: 2696715 - DNA, 25 bp, Homo sapien
tgcgggcatcaccacctagtgggca

SEQ ID NO: 2696716 - DNA, 25 bp, Homo sapien
tcctggtcctctgaagtctatttga

SEQ ID NO: 2696717 - DNA, 25 bp, Homo sapien
tgagttcaactctgggaaagtgcac

SEQ ID NO: 2696718 - DNA, 25 bp, Homo sapien
gagaattaaattggcaactgcatca

SEQ ID NO: 2696719 - DNA, 25 bp, Homo sapien
aaaattcatttgtcaggactctgag

SEQ ID NO: 2696720 - DNA, 25 bp, Homo sapien
tgtgggtacatcctcagtcacagtc

SEQ ID NO: 2696721 - DNA, 25 bp, Homo sapien
cctatcacgtgtgggtacatcctca

SEQ ID NO: 2696722 - DNA, 25 bp, Homo sapien
ccctgggtctagtgagtttgttcct

SEQ ID NO: 2696723 - DNA, 25 bp, Homo sapien
agtttgttcctatcacgtgtgggta

SEQ ID NO: 2696724 - DNA, 25 bp, Homo sapien
tgaagagatggtggaaggtgggacc

SEQ ID NO: 2696725 - DNA, 25 bp, Homo sapien
gaagagatggtggaaggtgggacca

SEQ ID NO: 2696726 - DNA, 25 bp, Homo sapien
ctgaagagatggtggaaggtgggac

SEQ ID NO: 2696727 - DNA, 25 bp, Homo sapien
aagagatggtggaaggtgggaccat

SEQ ID NO: 2696728 - DNA, 25 bp, Homo sapien
tcctttggcatgtcccctgaagaga

SEQ ID NO: 2696729 - DNA, 25 bp, Homo sapien
atgtcccctgaagagatggtggaac

SEQ ID NO: 2696730 - DNA, 25 bp, Homo sapien
tctcctttggcatgtcccctgaaga

SEQ ID NO: 2696731 - DNA, 25 bp, Homo sapien
ctctcctttggcatgtcccctgaag

SEQ ID NO: 2696732 - DNA, 25 bp, Homo sapien
cacctcttcccaacctagggtccag

SEQ ID NO: 2696733 - DNA, 25 bp, Homo sapien
tcacctcttcccaacctagggtcca

SEQ ID NO: 2696734 - DNA, 25 bp, Homo sapien
gatatgcattaggttcttttagagg

SEQ ID NO: 2696735 - DNA, 25 bp, Homo sapien
ctgttagaccaagatatgcattagg

SEQ ID NO: 2696736 - DNA, 25 bp, Homo sapien
ttcttttagaggtgcctggcaaccg

SEQ ID NO: 2696737 - DNA, 25 bp, Homo sapien
tcttttagaggtgcctggcaaccgt

SEQ ID NO: 2696738 - DNA, 25 bp, Homo sapien
tgtagtgaggttgctatcccaagcc

SEQ ID NO: 2696739 - DNA, 25 bp, Homo sapien
tacagtattggtgggaggcttttcc

SEQ ID NO: 2696740 - DNA, 25 bp, Homo sapien
tgtccactaaggtcacggtgaatcc

SEQ ID NO: 2696741 - DNA, 25 bp, Homo sapien
ggctgagggcttatgagctacagta

SEQ ID NO: 2696742 - DNA, 25 bp, Homo sapien
cccaggtcaattctgttaatgcagg

SEQ ID NO: 2696743 - DNA, 25 bp, Homo sapien
actcccaggtcaattctgttaatgc

SEQ ID NO: 2696744 - DNA, 25 bp, Homo sapien
tcactcccaggtcaattctgttaat

SEQ ID NO: 2696745 - DNA, 25 bp, Homo sapien
tcccaggtcaattctgttaatgcag

SEQ ID NO: 2696746 - DNA, 25 bp, Homo sapien
ggcctctgagacacattgtggctct

SEQ ID NO: 2696747 - DNA, 25 bp, Homo sapien
tggcctctgagacacattgtggctc

SEQ ID NO: 2696748 - DNA, 25 bp, Homo sapien
catacctgaggtcctctttcgtgcc

SEQ ID NO: 2696749 - DNA, 25 bp, Homo sapien
cagtccacgtgctctctgtagcaca

SEQ ID NO: 2696750 - DNA, 25 bp, Homo sapien
cttcagtccacgtgctctctgtagc

SEQ ID NO: 2696751 - DNA, 25 bp, Homo sapien
atcccatacctgaggtcctctttcg

SEQ ID NO: 2696752 - DNA, 25 bp, Homo sapien
tgctgccttcccggcgttccactcg

SEQ ID NO: 2696753 - DNA, 25 bp, Homo sapien
gccttcccggcgttccactcggctc

SEQ ID NO: 2696754 - DNA, 25 bp, Homo sapien
cttcccggcgttccactcggctcac

SEQ ID NO: 2696755 - DNA, 25 bp, Homo sapien
tgccttcccggcgttccactcggct

SEQ ID NO: 2696756 - DNA, 25 bp, Homo sapien
taaacagataagcactgtccagtgg

SEQ ID NO: 2696757 - DNA, 25 bp, Homo sapien
acggtgccggccactcttggttgca

SEQ ID NO: 2696758 - DNA, 25 bp, Homo sapien
catccaggccttgcatggtgaggct

SEQ ID NO: 2696759 - DNA, 25 bp, Homo sapien
tcactgagagcccttcgggtctggg

SEQ ID NO: 2696760 - DNA, 25 bp, Homo sapien
gaggaggcttagtgtgggctgggtc

SEQ ID NO: 2696761 - DNA, 25 bp, Homo sapien
catgatagaatcaggtgccacctca

SEQ ID NO: 2696762 - DNA, 25 bp, Homo sapien
cacctccggtgaattctgtctgtgg

SEQ ID NO: 2696763 - DNA, 25 bp, Homo sapien
tgtggagtaaactgcccgagccagt

SEQ ID NO: 2696764 - DNA, 25 bp, Homo sapien
agtggtcagggtcatgtccagagga

SEQ ID NO: 2696765 - DNA, 25 bp, Homo sapien
ggagtggtcagggtcatgtccagag

SEQ ID NO: 2696766 - DNA, 25 bp, Homo sapien
gagtggtcagggtcatgtccagagg

SEQ ID NO: 2696767 - DNA, 25 bp, Homo sapien
caggagccgttctattttgttcaca

SEQ ID NO: 2696768 - DNA, 25 bp, Homo sapien
tattgcaacaggcaccatgagacag

SEQ ID NO: 2696769 - DNA, 25 bp, Homo sapien
tgaaatcagcggaagagaaggctcg

SEQ ID NO: 2696770 - DNA, 25 bp, Homo sapien
gattaacacaggattcggactgaca

SEQ ID NO: 2696771 - DNA, 25 bp, Homo sapien
ggaatttactgcatctttgtgggca

SEQ ID NO: 2696772 - DNA, 25 bp, Homo sapien
taatcctggtaacacaaagaggcag

SEQ ID NO: 2696773 - DNA, 25 bp, Homo sapien
aatgactgaggtactctgggcacag

SEQ ID NO: 2696774 - DNA, 25 bp, Homo sapien
cagggatacccttagcaagcagaag

SEQ ID NO: 2696775 - DNA, 25 bp, Homo sapien
ggacactggtctctttctctaaagc

SEQ ID NO: 2696776 - DNA, 25 bp, Homo sapien
cccttgcaaaaggtgagtgttcttc

SEQ ID NO: 2696777 - DNA, 25 bp, Homo sapien
tgtggagacccaaactgttctgtgt

SEQ ID NO: 2696778 - DNA, 25 bp, Homo sapien
tagacctggcttgatcttccttcat

SEQ ID NO: 2696779 - DNA, 25 bp, Homo sapien
tgtatcctgcacaccaaggtcctgg

SEQ ID NO: 2696780 - DNA, 25 bp, Homo sapien
cagtgtatcctgcacaccaaggtcc

SEQ ID NO: 2696781 - DNA, 25 bp, Homo sapien
gtgtatcctgcacaccaaggtcctg

SEQ ID NO: 2696782 - DNA, 25 bp, Homo sapien
ctcagtgtatcctgcacaccaaggt

SEQ ID NO: 2696783 - DNA, 25 bp, Homo sapien
ggaggaggaggagggtggccacttc

SEQ ID NO: 2696784 - DNA, 25 bp, Homo sapien
caaggccctctgctatcatgttgta

SEQ ID NO: 2696785 - DNA, 25 bp, Homo sapien
aaggccctctgctatcatgttgtag

SEQ ID NO: 2696786 - DNA, 25 bp, Homo sapien
agtcatctaacacacccaccctttg

SEQ ID NO: 2696787 - DNA, 25 bp, Homo sapien
tcatctaacacacccaccctttgcc

SEQ ID NO: 2696788 - DNA, 25 bp, Homo sapien
tctaacacacccaccctttgccagg

SEQ ID NO: 2696789 - DNA, 25 bp, Homo sapien
aagtcatctaacacacccacccttt

SEQ ID NO: 2696790 - DNA, 25 bp, Homo sapien
tggatgaggtcacagacttttctgg

SEQ ID NO: 2696791 - DNA, 25 bp, Homo sapien
gtccatagagttggatgaggtcaca

SEQ ID NO: 2696792 - DNA, 25 bp, Homo sapien
gatgaggtcacagacttttctggca

SEQ ID NO: 2696793 - DNA, 25 bp, Homo sapien
ctttagtccatagagttggatgagg

SEQ ID NO: 2696794 - DNA, 25 bp, Homo sapien
ctgaagctcagatgtcagggctgac

SEQ ID NO: 2696795 - DNA, 25 bp, Homo sapien
cactgtgagtcttgagagccagcac

SEQ ID NO: 2696796 - DNA, 25 bp, Homo sapien
aggcaaacacccgtctgctgtcact

SEQ ID NO: 2696797 - DNA, 25 bp, Homo sapien
tggtaatcggcgaccaagcaggcaa

SEQ ID NO: 2696798 - DNA, 25 bp, Homo sapien
gggacttgcaagtcctcctgcctgc

SEQ ID NO: 2696799 - DNA, 25 bp, Homo sapien
tgcctgccgctttgtggttttgtcc

SEQ ID NO: 2696800 - DNA, 25 bp, Homo sapien
gccgctttgtggttttgtcctggac

SEQ ID NO: 2696801 - DNA, 25 bp, Homo sapien
caccgtcttcagcttggcgggactt

SEQ ID NO: 2696802 - DNA, 25 bp, Homo sapien
tcttcatctccactgaacttttgag

SEQ ID NO: 2696803 - DNA, 25 bp, Homo sapien
atctccactgaacttttgaggactg

SEQ ID NO: 2696804 - DNA, 25 bp, Homo sapien
caggaagattttatctaggtaactc

SEQ ID NO: 2696805 - DNA, 25 bp, Homo sapien
tttctctgactgtgacaactttggt

SEQ ID NO: 2696806 - DNA, 25 bp, Homo sapien
gtgttcagcctaagctcctcacatg

SEQ ID NO: 2696807 - DNA, 25 bp, Homo sapien
tgttcagcctaagctcctcacatgc

SEQ ID NO: 2696808 - DNA, 25 bp, Homo sapien
gataagtaatggtgcggatctggct

SEQ ID NO: 2696809 - DNA, 25 bp, Homo sapien
ggatctggctgtaccagcctcctgt

SEQ ID NO: 2696810 - DNA, 25 bp, Homo sapien
gcttttgtgaatgacccaccactaa

SEQ ID NO: 2696811 - DNA, 25 bp, Homo sapien
gccacataggagagaaggagcttct

SEQ ID NO: 2696812 - DNA, 25 bp, Homo sapien
gaacggatggggcataccagcagaa

SEQ ID NO: 2696813 - DNA, 25 bp, Homo sapien
cggatggggcataccagcagaagac

SEQ ID NO: 2696814 - DNA, 25 bp, Homo sapien
ctttgggaacggatggggcatacca

SEQ ID NO: 2696815 - DNA, 25 bp, Homo sapien
gatggggcataccagcagaagacaa

SEQ ID NO: 2696816 - DNA, 25 bp, Homo sapien
ctttgcatcagagcggttctcagag

SEQ ID NO: 2696817 - DNA, 25 bp, Homo sapien
atcagagcggttctcagagcaatac

SEQ ID NO: 2696818 - DNA, 25 bp, Homo sapien
tgcatcagagcggttctcagagcaa

SEQ ID NO: 2696819 - DNA, 25 bp, Homo sapien
aatcctttgcatcagagcggttctc

SEQ ID NO: 2696820 - DNA, 25 bp, Homo sapien
ctctccccttggtccacaggattca

SEQ ID NO: 2696821 - DNA, 25 bp, Homo sapien
tggtccacaggattcacccatgttg

SEQ ID NO: 2696822 - DNA, 25 bp, Homo sapien
cagccatgaggcttgtaggctccag

SEQ ID NO: 2696823 - DNA, 25 bp, Homo sapien
gccatgaggcttgtaggctccagaa

SEQ ID NO: 2696824 - DNA, 25 bp, Homo sapien
ggaggctcgaaaatccaaggtcagg

SEQ ID NO: 2696825 - DNA, 25 bp, Homo sapien
aatccaaggtcagggtactggcaga

SEQ ID NO: 2696826 - DNA, 25 bp, Homo sapien
gaggtgctgtggtgtcatgcttccc

SEQ ID NO: 2696827 - DNA, 25 bp, Homo sapien
tcagcctggcttgtccatgatgcgt

SEQ ID NO: 2696828 - DNA, 25 bp, Homo sapien
caagtctagcttcggaacagtgaca

SEQ ID NO: 2696829 - DNA, 25 bp, Homo sapien
catgatgcgtccacagctggaggtg

SEQ ID NO: 2696830 - DNA, 25 bp, Homo sapien
tccaaccaatgaaccgtgaaagaca

SEQ ID NO: 2696831 - DNA, 25 bp, Homo sapien
taagccaccatagtagggcccatcg

SEQ ID NO: 2696832 - DNA, 25 bp, Homo sapien
aatggacttaggatgatttagatgg

SEQ ID NO: 2696833 - DNA, 25 bp, Homo sapien
cgttcaaggctatctttagaaggac

SEQ ID NO: 2696834 - DNA, 25 bp, Homo sapien
ctgcaggtttggtgatagaagaggt

SEQ ID NO: 2696835 - DNA, 25 bp, Homo sapien
agacacagggctttgtcatcctctg

SEQ ID NO: 2696836 - DNA, 25 bp, Homo sapien
tgcaggtttggtgatagaagaggta

SEQ ID NO: 2696837 - DNA, 25 bp, Homo sapien
cccggaatcctgtgtggcttggtgt

SEQ ID NO: 2696838 - DNA, 25 bp, Homo sapien
ctgctgttttagattaatcttttgc

SEQ ID NO: 2696839 - DNA, 25 bp, Homo sapien
ttttgcttactggtctcaacaggta

SEQ ID NO: 2696840 - DNA, 25 bp, Homo sapien
aacaggtatcttgtgcctcccggaa

SEQ ID NO: 2696841 - DNA, 25 bp, Homo sapien
taactggtggactttttgcaaatcg

SEQ ID NO: 2696842 - DNA, 25 bp, Homo sapien
ctttttgcaaatcgagtggcctctg

SEQ ID NO: 2696843 - DNA, 25 bp, Homo sapien
ttgcaaatcgagtggcctctggcct

SEQ ID NO: 2696844 - DNA, 25 bp, Homo sapien
tggactttttgcaaatcgagtggcc

SEQ ID NO: 2696845 - DNA, 25 bp, Homo sapien
agtgctccactgaagctgtgttcca

SEQ ID NO: 2696846 - DNA, 25 bp, Homo sapien
ttgttgagagatgacctcaccagag

SEQ ID NO: 2696847 - DNA, 25 bp, Homo sapien
gaagctgtgttccataggctgccat

SEQ ID NO: 2696848 - DNA, 25 bp, Homo sapien
cttgttgagagatgacctcaccaga

SEQ ID NO: 2696849 - DNA, 25 bp, Homo sapien
tattagatccatccagagatgcccc

SEQ ID NO: 2696850 - DNA, 25 bp, Homo sapien
tagtgagcaaaacttggcccctggc

SEQ ID NO: 2696851 - DNA, 25 bp, Homo sapien
gctctgaatttttgtgacctggaaa

SEQ ID NO: 2696852 - DNA, 25 bp, Homo sapien
agtggttaagcccatggacctgggc

SEQ ID NO: 2696853 - DNA, 25 bp, Homo sapien
ggggactgctatggatagcagggcc

SEQ ID NO: 2696854 - DNA, 25 bp, Homo sapien
gggacgggggactgctatggatagc

SEQ ID NO: 2696855 - DNA, 25 bp, Homo sapien
gacgggggactgctatggatagcag

SEQ ID NO: 2696856 - DNA, 25 bp, Homo sapien
caggggacgggggactgctatggat

SEQ ID NO: 2696857 - DNA, 25 bp, Homo sapien
tatctggtgatgctatgtggttttg

SEQ ID NO: 2696858 - DNA, 25 bp, Homo sapien
tgtggttttgtcttactccatccct

SEQ ID NO: 2696859 - DNA, 25 bp, Homo sapien
ctgaggagccaggaatgcaccccag

SEQ ID NO: 2696860 - DNA, 25 bp, Homo sapien
gggccccttacattgtggtgctacc

SEQ ID NO: 2696861 - DNA, 25 bp, Homo sapien
ggcagccatatttcccctgtggagc

SEQ ID NO: 2696862 - DNA, 25 bp, Homo sapien
taaggttcagtgtgataacttgccc

SEQ ID NO: 2696863 - DNA, 25 bp, Homo sapien
taacttgcccaggtgttggctgcat

SEQ ID NO: 2696864 - DNA, 25 bp, Homo sapien
tgttgaggagaatcggctcacccca

SEQ ID NO: 2696865 - DNA, 25 bp, Homo sapien
tccagtgatgagcatgtagtctcgg

SEQ ID NO: 2696866 - DNA, 25 bp, Homo sapien
gagaagagcagattgtcaggacaca

SEQ ID NO: 2696867 - DNA, 25 bp, Homo sapien
tctcgggtgcattgaggatgcttgc

SEQ ID NO: 2696868 - DNA, 25 bp, Homo sapien
gggacagtctctcacctggttaact

SEQ ID NO: 2696869 - DNA, 25 bp, Homo sapien
aatgtgagaagtaccacaataatgt

SEQ ID NO: 2696870 - DNA, 25 bp, Homo sapien
gatttaaatgtgagaagtaccacaa

SEQ ID NO: 2696871 - DNA, 25 bp, Homo sapien
gaagtaccacaataatgtatgtgag

SEQ ID NO: 2696872 - DNA, 25 bp, Homo sapien
tgagaagtaccacaataatgtatgt

SEQ ID NO: 2696873 - DNA, 25 bp, Homo sapien
tctgatcaagacaaatgctcccttt

SEQ ID NO: 2696874 - DNA, 25 bp, Homo sapien
gggttcttgggcctgccagtgaact

SEQ ID NO: 2696875 - DNA, 25 bp, Homo sapien
ccagtgaactggctttggaacaaaa

SEQ ID NO: 2696876 - DNA, 25 bp, Homo sapien
tatctctgccccacggatgcagaca

SEQ ID NO: 2696877 - DNA, 25 bp, Homo sapien
cctggtgcaggtagtaatttctccc

SEQ ID NO: 2696878 - DNA, 25 bp, Homo sapien
cagtgcttcaatggtggcctctggt

SEQ ID NO: 2696879 - DNA, 25 bp, Homo sapien
ggcctctggtcctttgatcacatgg

SEQ ID NO: 2696880 - DNA, 25 bp, Homo sapien
gatcacatggttttactacccacag

SEQ ID NO: 2696881 - DNA, 25 bp, Homo sapien
tcaacatgtggtccttgaggtcctt

SEQ ID NO: 2696882 - DNA, 25 bp, Homo sapien
tttcctctcaacatgtggtccttga

SEQ ID NO: 2696883 - DNA, 25 bp, Homo sapien
catgtggtccttgaggtccttccat

SEQ ID NO: 2696884 - DNA, 25 bp, Homo sapien
aacatgtggtccttgaggtccttcc

SEQ ID NO: 2696885 - DNA, 25 bp, Homo sapien
tgaaggaagccggtgtcaggcacat

SEQ ID NO: 2696886 - DNA, 25 bp, Homo sapien
ttcctgaaggaagccggtgtcaggc

SEQ ID NO: 2696887 - DNA, 25 bp, Homo sapien
agatttcctgaaggaagccggtgtc

SEQ ID NO: 2696888 - DNA, 25 bp, Homo sapien
atttcctgaaggaagccggtgtcag

SEQ ID NO: 2696889 - DNA, 25 bp, Homo sapien
ccatggagattggtgacctggaact

SEQ ID NO: 2696890 - DNA, 25 bp, Homo sapien
tggagattggtgacctggaactgaa

SEQ ID NO: 2696891 - DNA, 25 bp, Homo sapien
ctccatggagattggtgacctggaa

SEQ ID NO: 2696892 - DNA, 25 bp, Homo sapien
gagattggtgacctggaactgaaag

SEQ ID NO: 2696893 - DNA, 25 bp, Homo sapien
taatgaacacactaggagttgtttt

SEQ ID NO: 2696894 - DNA, 25 bp, Homo sapien
atgaacacactaggagttgtttttc

SEQ ID NO: 2696895 - DNA, 25 bp, Homo sapien
tgaacacactaggagttgtttttca

SEQ ID NO: 2696896 - DNA, 25 bp, Homo sapien
ctaatgaacacactaggagttgttt

SEQ ID NO: 2696897 - DNA, 25 bp, Homo sapien
tcaggagtaacatgtgtgggcccag

SEQ ID NO: 2696898 - DNA, 25 bp, Homo sapien
acattctggggcgaggacagaccca

SEQ ID NO: 2696899 - DNA, 25 bp, Homo sapien
aaggcttcctgtggctggatgctag

SEQ ID NO: 2696900 - DNA, 25 bp, Homo sapien
tggaaaagctttgcccgtgctgggc

SEQ ID NO: 2696901 - DNA, 25 bp, Homo sapien
aggctttgtgcttgtgaggacagga

SEQ ID NO: 2696902 - DNA, 25 bp, Homo sapien
ctccagatcaggattttcagaaggc

SEQ ID NO: 2696903 - DNA, 25 bp, Homo sapien
aaggctttgtgcttgtgaggacagg

SEQ ID NO: 2696904 - DNA, 25 bp, Homo sapien
cattatctcaatgatcagcagtact

SEQ ID NO: 2696905 - DNA, 25 bp, Homo sapien
acattatctcaatgatcagcagtac

SEQ ID NO: 2696906 - DNA, 25 bp, Homo sapien
agcagtactacttctccaccaactc

SEQ ID NO: 2696907 - DNA, 25 bp, Homo sapien
tatctcaatgatcagcagtactact

SEQ ID NO: 2696908 - DNA, 25 bp, Homo sapien
tattaccgctaatgtaacttctctg

SEQ ID NO: 2696909 - DNA, 25 bp, Homo sapien
gccctccatgttattaccgctaatg

SEQ ID NO: 2696910 - DNA, 25 bp, Homo sapien
tagccctccatgttattaccgctaa

SEQ ID NO: 2696911 - DNA, 25 bp, Homo sapien
ctatagccctccatgttattaccgc

SEQ ID NO: 2696912 - DNA, 25 bp, Homo sapien
ccattctaatttccacactattaaa

SEQ ID NO: 2696913 - DNA, 25 bp, Homo sapien
tgcctttcctaacatatccttaaag

SEQ ID NO: 2696914 - DNA, 25 bp, Homo sapien
aatctgcctttcctaacatatcctt

SEQ ID NO: 2696915 - DNA, 25 bp, Homo sapien
aatttccacactattaaatctgcct

SEQ ID NO: 2696916 - DNA, 25 bp, Homo sapien
agggtggagccacggggtgatcact

SEQ ID NO: 2696917 - DNA, 25 bp, Homo sapien
agagggtggagccacggggtgatca

SEQ ID NO: 2696918 - DNA, 25 bp, Homo sapien
gagggtggagccacggggtgatcac

SEQ ID NO: 2696919 - DNA, 25 bp, Homo sapien
tcactgagtcttcgtggacctggag

SEQ ID NO: 2696920 - DNA, 25 bp, Homo sapien
actgagtcttcgtggacctggagag

SEQ ID NO: 2696921 - DNA, 25 bp, Homo sapien
ctgagtcttcgtggacctggagagg

SEQ ID NO: 2696922 - DNA, 25 bp, Homo sapien
cactgagtcttcgtggacctggaga

SEQ ID NO: 2696923 - DNA, 25 bp, Homo sapien
tccatggagcccctagatgggcagc

SEQ ID NO: 2696924 - DNA, 25 bp, Homo sapien
tgttaacgttggcattggtaccagg

SEQ ID NO: 2696925 - DNA, 25 bp, Homo sapien
caggtaggtagagcagtccttctcc

SEQ ID NO: 2696926 - DNA, 25 bp, Homo sapien
gtaccagggcttggattacatccca

SEQ ID NO: 2696927 - DNA, 25 bp, Homo sapien
ctgccaagagcagagcctttttcat

SEQ ID NO: 2696928 - DNA, 25 bp, Homo sapien
cactgccaagagcagagcctttttc

SEQ ID NO: 2696929 - DNA, 25 bp, Homo sapien
actgccaagagcagagcctttttca

SEQ ID NO: 2696930 - DNA, 25 bp, Homo sapien
catgtttcaggatccgaggtcacag

SEQ ID NO: 2696931 - DNA, 25 bp, Homo sapien
tcagtggtggctgtgacttgatcat

SEQ ID NO: 2696932 - DNA, 25 bp, Homo sapien
gcatcccaagtgcatagttccactg

SEQ ID NO: 2696933 - DNA, 25 bp, Homo sapien
tgatcatgcatcttctctaaaactg

SEQ ID NO: 2696934 - DNA, 25 bp, Homo sapien
agagtgatagcagtgccggctggtg

SEQ ID NO: 2696935 - DNA, 25 bp, Homo sapien
ttgtcagtgaccttggcagagtgat

SEQ ID NO: 2696936 - DNA, 25 bp, Homo sapien
tgaaaaggctccctgctggtgggcc

SEQ ID NO: 2696937 - DNA, 25 bp, Homo sapien
aggaactcatcagacaggctgctcg

SEQ ID NO: 2696938 - DNA, 25 bp, Homo sapien
aatcaagagaatgcaggtgcttgtg

SEQ ID NO: 2696939 - DNA, 25 bp, Homo sapien
taaatcaagagaatgcaggtgcttg

SEQ ID NO: 2696940 - DNA, 25 bp, Homo sapien
caagagaatgcaggtgcttgtgtgt

SEQ ID NO: 2696941 - DNA, 25 bp, Homo sapien
ctaaatcaagagaatgcaggtgctt

SEQ ID NO: 2696942 - DNA, 25 bp, Homo sapien
aaaggatccacagtgatttgcagag

SEQ ID NO: 2696943 - DNA, 25 bp, Homo sapien
cttgacctcccctagacctggctga

SEQ ID NO: 2696944 - DNA, 25 bp, Homo sapien
gaaaggatccacagtgatttgcaga

SEQ ID NO: 2696945 - DNA, 25 bp, Homo sapien
ctcccctagacctggctgagcacct

SEQ ID NO: 2696946 - DNA, 25 bp, Homo sapien
aaactcagagcttcaccaaaacttt

SEQ ID NO: 2696947 - DNA, 25 bp, Homo sapien
aactcagagcttcaccaaaactttc

SEQ ID NO: 2696948 - DNA, 25 bp, Homo sapien
tgtggttcctgaatctacaaaaatt

SEQ ID NO: 2696949 - DNA, 25 bp, Homo sapien
tggttcctgaatctacaaaaattga

SEQ ID NO: 2696950 - DNA, 25 bp, Homo sapien
gggaccacctgtgcttgttgtacac

SEQ ID NO: 2696951 - DNA, 25 bp, Homo sapien
ccttgggcaggtttgggaccacctg

SEQ ID NO: 2696952 - DNA, 25 bp, Homo sapien
ggtctgatgagaaggagctcctcct

SEQ ID NO: 2696953 - DNA, 25 bp, Homo sapien
ggtattgtctggtatggtggtctga

SEQ ID NO: 2696954 - DNA, 25 bp, Homo sapien
gctgacacagcctcttagtgaccat

SEQ ID NO: 2696955 - DNA, 25 bp, Homo sapien
ctattcgctgacacagcctcttagt

SEQ ID NO: 2696956 - DNA, 25 bp, Homo sapien
ttcgctgacacagcctcttagtgac

SEQ ID NO: 2696957 - DNA, 25 bp, Homo sapien
tattcgctgacacagcctcttagtg

SEQ ID NO: 2696958 - DNA, 25 bp, Homo sapien
gatggccgatttcaggatcacctgg

SEQ ID NO: 2696959 - DNA, 25 bp, Homo sapien
cacctgggtttcctgtgtgcggctc

SEQ ID NO: 2696960 - DNA, 25 bp, Homo sapien
gctggcttggtggacgtgtttcaat

SEQ ID NO: 2696961 - DNA, 25 bp, Homo sapien
tgtcattctctgcttgtatactggc

SEQ ID NO: 2696962 - DNA, 25 bp, Homo sapien
tgccatccaacaggtcagaggactt

SEQ ID NO: 2696963 - DNA, 25 bp, Homo sapien
aggtttacacttgccatccaacagg

SEQ ID NO: 2696964 - DNA, 25 bp, Homo sapien
gaaggtttacacttgccatccaaca

SEQ ID NO: 2696965 - DNA, 25 bp, Homo sapien
tacacttgccatccaacaggtcaga

SEQ ID NO: 2696966 - DNA, 25 bp, Homo sapien
tcagcgtgcttttccccaggtatta

SEQ ID NO: 2696967 - DNA, 25 bp, Homo sapien
cagcgtgcttttccccaggtattag

SEQ ID NO: 2696968 - DNA, 25 bp, Homo sapien
tccagctctcggtgcaagaactgag

SEQ ID NO: 2696969 - DNA, 25 bp, Homo sapien
tcaagggggagtctaaacctggcat

SEQ ID NO: 2696970 - DNA, 25 bp, Homo sapien
ggcatgtttgccactgacctgcacc

SEQ ID NO: 2696971 - DNA, 25 bp, Homo sapien
gacctgcaccagaactgagtgacct

SEQ ID NO: 2696972 - DNA, 25 bp, Homo sapien
tctggtcaacaatgagctggcctgc

SEQ ID NO: 2696973 - DNA, 25 bp, Homo sapien
tatctggtcaacaatgagctggcct

SEQ ID NO: 2696974 - DNA, 25 bp, Homo sapien
ttatatctggtcaacaatgagctgg

SEQ ID NO: 2696975 - DNA, 25 bp, Homo sapien
ctggtcaacaatgagctggcctgcc

SEQ ID NO: 2696976 - DNA, 25 bp, Homo sapien
caggaggaaccgcttagcagaggat

SEQ ID NO: 2696977 - DNA, 25 bp, Homo sapien
gtgggtaattccatgggcactggca

SEQ ID NO: 2696978 - DNA, 25 bp, Homo sapien
ggaacccatgtgatctcaagagtga

SEQ ID NO: 2696979 - DNA, 25 bp, Homo sapien
tgtacagtagatggccctgcactgc

SEQ ID NO: 2696980 - DNA, 25 bp, Homo sapien
cagagccaagagacacacacgaaat

SEQ ID NO: 2696981 - DNA, 25 bp, Homo sapien
gagccaagagacacacacgaaataa

SEQ ID NO: 2696982 - DNA, 25 bp, Homo sapien
ctacagagccaagagacacacacga

SEQ ID NO: 2696983 - DNA, 25 bp, Homo sapien
acagagccaagagacacacacgaaa

SEQ ID NO: 2696984 - DNA, 25 bp, Homo sapien
gtgctctcctcagggggcttgtggt

SEQ ID NO: 2696985 - DNA, 25 bp, Homo sapien
ggggagtgtgacagtgctctcctca

SEQ ID NO: 2696986 - DNA, 25 bp, Homo sapien
tgtggaggggagtgtgacagtgctc

SEQ ID NO: 2696987 - DNA, 25 bp, Homo sapien
gacagtgctctcctcagggggcttg

SEQ ID NO: 2696988 - DNA, 25 bp, Homo sapien
gtatcttttgcctttaagtgagatg

SEQ ID NO: 2696989 - DNA, 25 bp, Homo sapien
ggtattgtcacaaagattgtatctt

SEQ ID NO: 2696990 - DNA, 25 bp, Homo sapien
ataataaaggtattgtcacaaagat

SEQ ID NO: 2696991 - DNA, 25 bp, Homo sapien
tgtatcttttgcctttaagtgagat

SEQ ID NO: 2696992 - DNA, 25 bp, Homo sapien
ctggataatagggacaacactaagg

SEQ ID NO: 2696993 - DNA, 25 bp, Homo sapien
aacactaaggaagacgtctcttggg

SEQ ID NO: 2696994 - DNA, 25 bp, Homo sapien
gacactcccagttatcagtcctcag

SEQ ID NO: 2696995 - DNA, 25 bp, Homo sapien
ccaaatgcctgatgtttaaatgcac

SEQ ID NO: 2696996 - DNA, 25 bp, Homo sapien
tggttgatccctctgagaccttcca

SEQ ID NO: 2696997 - DNA, 25 bp, Homo sapien
gagcctggttgatccctctgagacc

SEQ ID NO: 2696998 - DNA, 25 bp, Homo sapien
tcctcctatggagcctggttgatcc

SEQ ID NO: 2696999 - DNA, 25 bp, Homo sapien
tatggagcctggttgatccctctga

SEQ ID NO: 2697000 - DNA, 25 bp, Homo sapien
gatgtttcactttgcacagggccac

SEQ ID NO: 2697001 - DNA, 25 bp, Homo sapien
cacaaaggcaggagactcctgtgca

SEQ ID NO: 2697002 - DNA, 25 bp, Homo sapien
ctaaagccactacatcctcagcatg

SEQ ID NO: 2697003 - DNA, 25 bp, Homo sapien
tggatgttggtgttggatgtttcac

SEQ ID NO: 2697004 - DNA, 25 bp, Homo sapien
gagcgtctgctgtgtaagtggatcc

SEQ ID NO: 2697005 - DNA, 25 bp, Homo sapien
taagtggatccaaaggctggagcct

SEQ ID NO: 2697006 - DNA, 25 bp, Homo sapien
gatccaaaggctggagcctcaggat

SEQ ID NO: 2697007 - DNA, 25 bp, Homo sapien
tctgctgtgtaagtggatccaaagg

SEQ ID NO: 2697008 - DNA, 25 bp, Homo sapien
agttgggctccatctaatttgtccc

SEQ ID NO: 2697009 - DNA, 25 bp, Homo sapien
tagtcttcgctggtgtccttggttt

SEQ ID NO: 2697010 - DNA, 25 bp, Homo sapien
cctctggctagaccatgggtttcaa

SEQ ID NO: 2697011 - DNA, 25 bp, Homo sapien
agggtagttgttagtcttcgctggt

SEQ ID NO: 2697012 - DNA, 25 bp, Homo sapien
ggcacacttcaaactgataaacttg

SEQ ID NO: 2697013 - DNA, 25 bp, Homo sapien
gcacacttcaaactgataaacttgg

SEQ ID NO: 2697014 - DNA, 25 bp, Homo sapien
tggcacacttcaaactgataaactt

SEQ ID NO: 2697015 - DNA, 25 bp, Homo sapien
ctgaaagagcacacattccaaccta

SEQ ID NO: 2697016 - DNA, 25 bp, Homo sapien
agagcacacattccaacctaaacca

SEQ ID NO: 2697017 - DNA, 25 bp, Homo sapien
cattggcacttcttggaataatata

SEQ ID NO: 2697018 - DNA, 25 bp, Homo sapien
aataatataattcgtaacccagcat

SEQ ID NO: 2697019 - DNA, 25 bp, Homo sapien
tgccagtaggaaaatgggcctgtcc

SEQ ID NO: 2697020 - DNA, 25 bp, Homo sapien
tccctggttgactgtggcctgatgg

SEQ ID NO: 2697021 - DNA, 25 bp, Homo sapien
gcattcctcctccagtagcatttag

SEQ ID NO: 2697022 - DNA, 25 bp, Homo sapien
ttcagagaagtcctcctaacacaaa

SEQ ID NO: 2697023 - DNA, 25 bp, Homo sapien
gaaggttggagaccaccagatctca

SEQ ID NO: 2697024 - DNA, 25 bp, Homo sapien
actacccttactccatggccaggag

SEQ ID NO: 2697025 - DNA, 25 bp, Homo sapien
ttccagcaatttcactgtaggacct

SEQ ID NO: 2697026 - DNA, 25 bp, Homo sapien
cactgtaggacctaaaagcagaggc

SEQ ID NO: 2697027 - DNA, 25 bp, Homo sapien
aacggcagtaatataggtcagggac

SEQ ID NO: 2697028 - DNA, 25 bp, Homo sapien
tataggtcagggacgaatcccctga

SEQ ID NO: 2697029 - DNA, 25 bp, Homo sapien
cctgcattgcaccaaaacggcagta

SEQ ID NO: 2697030 - DNA, 25 bp, Homo sapien
gtcagggacgaatcccctgaagtcc

SEQ ID NO: 2697031 - DNA, 25 bp, Homo sapien
catcagcactctgaatcaggcagga

SEQ ID NO: 2697032 - DNA, 25 bp, Homo sapien
tcagcccagctagagattccaagcg

SEQ ID NO: 2697033 - DNA, 25 bp, Homo sapien
tctgtcagcactctaagtcaggcaa

SEQ ID NO: 2697034 - DNA, 25 bp, Homo sapien
gcatccaaggtatgtcagtttccca

SEQ ID NO: 2697035 - DNA, 25 bp, Homo sapien
ttaattccgcagtgtgatcttaaga

SEQ ID NO: 2697036 - DNA, 25 bp, Homo sapien
ttccgcagtgtgatcttaagaatct

SEQ ID NO: 2697037 - DNA, 25 bp, Homo sapien
cgcagtgtgatcttaagaatctgag

SEQ ID NO: 2697038 - DNA, 25 bp, Homo sapien
cagtgtgatcttaagaatctgaggg

SEQ ID NO: 2697039 - DNA, 25 bp, Homo sapien
cagggaggctacttcatgtccccga

SEQ ID NO: 2697040 - DNA, 25 bp, Homo sapien
gctacttcatgtccccgattggtcc

SEQ ID NO: 2697041 - DNA, 25 bp, Homo sapien
gaggctacttcatgtccccgattgg

SEQ ID NO: 2697042 - DNA, 25 bp, Homo sapien
tgagaccagggaggctacttcatgt

SEQ ID NO: 2697043 - DNA, 25 bp, Homo sapien
tcaaaacatcctcaggcccggactt

SEQ ID NO: 2697044 - DNA, 25 bp, Homo sapien
tatcaggaagaccagagcagatgtc

SEQ ID NO: 2697045 - DNA, 25 bp, Homo sapien
cagataagagtttctcacttgtgcc

SEQ ID NO: 2697046 - DNA, 25 bp, Homo sapien
ggatctcttactgtcttggcctgca

SEQ ID NO: 2697047 - DNA, 25 bp, Homo sapien
catcggtcagtaccacctgttttca

SEQ ID NO: 2697048 - DNA, 25 bp, Homo sapien
tcctcttgaggcaatcaaggaaact

SEQ ID NO: 2697049 - DNA, 25 bp, Homo sapien
ctcaatcttaacaccaaggatggag

SEQ ID NO: 2697050 - DNA, 25 bp, Homo sapien
agcaaactgcaggattggcctcagc

SEQ ID NO: 2697051 - DNA, 25 bp, Homo sapien
caatcaaggaaacttgccgtctgct

SEQ ID NO: 2697052 - DNA, 25 bp, Homo sapien
agaaaaatgctgatgagctaaggat

SEQ ID NO: 2697053 - DNA, 25 bp, Homo sapien
cttgcacttgattgaaggccttctg

SEQ ID NO: 2697054 - DNA, 25 bp, Homo sapien
ggccttctgctcaaagacagtcacc

SEQ ID NO: 2697055 - DNA, 25 bp, Homo sapien
tgacacctgtgggagtggataagtg

SEQ ID NO: 2697056 - DNA, 25 bp, Homo sapien
tttggtttaacacttgatctggcat

SEQ ID NO: 2697057 - DNA, 25 bp, Homo sapien
agccctggggaagcgtctgcccttc

SEQ ID NO: 2697058 - DNA, 25 bp, Homo sapien
ctgtgatggttgctagagttgaggc

SEQ ID NO: 2697059 - DNA, 25 bp, Homo sapien
atgggagtgttgagcttggacatct

SEQ ID NO: 2697060 - DNA, 25 bp, Homo sapien
caggtcctctgtacagccctgggga

SEQ ID NO: 2697061 - DNA, 25 bp, Homo sapien
aggaatagccaaacaccagggaaca

SEQ ID NO: 2697062 - DNA, 25 bp, Homo sapien
ttgggtattgtagaagggattgact

SEQ ID NO: 2697063 - DNA, 25 bp, Homo sapien
gggaacatgttgcaggatgaatcct

SEQ ID NO: 2697064 - DNA, 25 bp, Homo sapien
ggatgaatccttgggtattgtagaa

SEQ ID NO: 2697065 - DNA, 25 bp, Homo sapien
agaagtcgagtatgcaggtgacgca

SEQ ID NO: 2697066 - DNA, 25 bp, Homo sapien
tcgagtatgcaggtgacgcaggaca

SEQ ID NO: 2697067 - DNA, 25 bp, Homo sapien
ggtggcagagagaagtcgagtatgc

SEQ ID NO: 2697068 - DNA, 25 bp, Homo sapien
cagagagaagtcgagtatgcaggtg

SEQ ID NO: 2697069 - DNA, 25 bp, Homo sapien
cctcagtcctgagttcaaggagctc

SEQ ID NO: 2697070 - DNA, 25 bp, Homo sapien
ctcagtcctgagttcaaggagctca

SEQ ID NO: 2697071 - DNA, 25 bp, Homo sapien
tcagtcctgagttcaaggagctcac

SEQ ID NO: 2697072 - DNA, 25 bp, Homo sapien
agaactgagcctctccccgagtctg

SEQ ID NO: 2697073 - DNA, 25 bp, Homo sapien
aggagcgggttctcctccagcagga

SEQ ID NO: 2697074 - DNA, 25 bp, Homo sapien
tagtggaagtgacggctggaagaac

SEQ ID NO: 2697075 - DNA, 25 bp, Homo sapien
ttccttccaacaggagggtagtgga

SEQ ID NO: 2697076 - DNA, 25 bp, Homo sapien
aactgattgcatgttggatcttgca

SEQ ID NO: 2697077 - DNA, 25 bp, Homo sapien
gtttcccatgaggaatgacacaggg

SEQ ID NO: 2697078 - DNA, 25 bp, Homo sapien
ctggtgtggcaaactgattgcatgt

SEQ ID NO: 2697079 - DNA, 25 bp, Homo sapien
tggctggtgtggcaaactgattgca

SEQ ID NO: 2697080 - DNA, 25 bp, Homo sapien
gaaggtcttagtggagatccctgga

SEQ ID NO: 2697081 - DNA, 25 bp, Homo sapien
aggtcttagtggagatccctggact

SEQ ID NO: 2697082 - DNA, 25 bp, Homo sapien
ctttcaggaaggtcttagtggagat

SEQ ID NO: 2697083 - DNA, 25 bp, Homo sapien
caggaaggtcttagtggagatccct

SEQ ID NO: 2697084 - DNA, 25 bp, Homo sapien
gaaagaacgagttaaagcctgcaag

SEQ ID NO: 2697085 - DNA, 25 bp, Homo sapien
caccaccatggtaggagtccaaacc

SEQ ID NO: 2697086 - DNA, 25 bp, Homo sapien
caccaggccggatgggaaagaacga

SEQ ID NO: 2697087 - DNA, 25 bp, Homo sapien
gtctgttgtacagagcagcatctag

SEQ ID NO: 2697088 - DNA, 25 bp, Homo sapien
tcggtcggcgtgtgactgtctgatc

SEQ ID NO: 2697089 - DNA, 25 bp, Homo sapien
actcggtcggcgtgtgactgtctga

SEQ ID NO: 2697090 - DNA, 25 bp, Homo sapien
gactcggtcggcgtgtgactgtctg

SEQ ID NO: 2697091 - DNA, 25 bp, Homo sapien
cggactcggtcggcgtgtgactgtc

SEQ ID NO: 2697092 - DNA, 25 bp, Homo sapien
agaggacttggcgatggacttccat

SEQ ID NO: 2697093 - DNA, 25 bp, Homo sapien
ctgcaggcattgggcagatattcct

SEQ ID NO: 2697094 - DNA, 25 bp, Homo sapien
cttggcccttcaccaggattctgca

SEQ ID NO: 2697095 - DNA, 25 bp, Homo sapien
gcataggtccaggtcttggctgccc

SEQ ID NO: 2697096 - DNA, 25 bp, Homo sapien
tgtccctccagtccgtgaagatgtg

SEQ ID NO: 2697097 - DNA, 25 bp, Homo sapien
gattcatggcagtagcagaatcaca

SEQ ID NO: 2697098 - DNA, 25 bp, Homo sapien
catcagaaagccatggattcatggc

SEQ ID NO: 2697099 - DNA, 25 bp, Homo sapien
tgccacagcgtgttggagtgcctct

SEQ ID NO: 2697100 - DNA, 25 bp, Homo sapien
tctgagaatcaagctgtggatctcc

SEQ ID NO: 2697101 - DNA, 25 bp, Homo sapien
tcttctaagcccctttgaagtggca

SEQ ID NO: 2697102 - DNA, 25 bp, Homo sapien
cagaggaagggagcattcttctaag

SEQ ID NO: 2697103 - DNA, 25 bp, Homo sapien
atcaagctgtggatctccccagcag

SEQ ID NO: 2697104 - DNA, 25 bp, Homo sapien
catggtgccttcttaaaaggcctga

SEQ ID NO: 2697105 - DNA, 25 bp, Homo sapien
tgcggttgtctactgtgtggtgaaa

SEQ ID NO: 2697106 - DNA, 25 bp, Homo sapien
catgtacttggttgttgagatagcc

SEQ ID NO: 2697107 - DNA, 25 bp, Homo sapien
taattagaggcaagcatgcctgcgg

SEQ ID NO: 2697108 - DNA, 25 bp, Homo sapien
attcaagtcagatgctgatttcatg

SEQ ID NO: 2697109 - DNA, 25 bp, Homo sapien
gcttctattgtcacatcaagccctg

SEQ ID NO: 2697110 - DNA, 25 bp, Homo sapien
tctattgtcacatcaagccctggct

SEQ ID NO: 2697111 - DNA, 25 bp, Homo sapien
cattcaagtcagatgctgatttcat

SEQ ID NO: 2697112 - DNA, 25 bp, Homo sapien
ggctcttctacgtggagattgtgga

SEQ ID NO: 2697113 - DNA, 25 bp, Homo sapien
tcttctacgtggagattgtggaaag

SEQ ID NO: 2697114 - DNA, 25 bp, Homo sapien
ttggtgctggctcttctacgtggag

SEQ ID NO: 2697115 - DNA, 25 bp, Homo sapien
gggctgcttggtgctggctcttcta

SEQ ID NO: 2697116 - DNA, 25 bp, Homo sapien
ttgctgagcagttgcggtgttttgc

SEQ ID NO: 2697117 - DNA, 25 bp, Homo sapien
cggtgttttgcagaacagaatctgg

SEQ ID NO: 2697118 - DNA, 25 bp, Homo sapien
cttctagttcggtgtgatgtgtgaa

SEQ ID NO: 2697119 - DNA, 25 bp, Homo sapien
ctggcagaggcgctaaaagcttcta

SEQ ID NO: 2697120 - DNA, 25 bp, Homo sapien
ctgacaccatgccttgctggcagta

SEQ ID NO: 2697121 - DNA, 25 bp, Homo sapien
ggccctgacaccatgccttgctggc

SEQ ID NO: 2697122 - DNA, 25 bp, Homo sapien
acaccatgccttgctggcagtaggg

SEQ ID NO: 2697123 - DNA, 25 bp, Homo sapien
gccctgacaccatgccttgctggca

SEQ ID NO: 2697124 - DNA, 25 bp, Homo sapien
tgtctatggactgtgggtgcaagca

SEQ ID NO: 2697125 - DNA, 25 bp, Homo sapien
taaaagtcaagttgtgggctggcgt

SEQ ID NO: 2697126 - DNA, 25 bp, Homo sapien
cattgggcggttggatgtctatgga

SEQ ID NO: 2697127 - DNA, 25 bp, Homo sapien
taaagttgctgaggttggatatgca

SEQ ID NO: 2697128 - DNA, 25 bp, Homo sapien
atgatccaaggccagatacattgct

SEQ ID NO: 2697129 - DNA, 25 bp, Homo sapien
ccaaggccagatacattgcttaatg

SEQ ID NO: 2697130 - DNA, 25 bp, Homo sapien
cgtgaaccatataagttaatgatcc

SEQ ID NO: 2697131 - DNA, 25 bp, Homo sapien
tgttactatattttcgtgaaccata

SEQ ID NO: 2697132 - DNA, 25 bp, Homo sapien
ccccttctctgcgaagactcctata

SEQ ID NO: 2697133 - DNA, 25 bp, Homo sapien
gaagactcctatagtctttctttaa

SEQ ID NO: 2697134 - DNA, 25 bp, Homo sapien
cagagtctgcataggctggcttggt

SEQ ID NO: 2697135 - DNA, 25 bp, Homo sapien
gtctgcataggctggcttggtacag

SEQ ID NO: 2697136 - DNA, 25 bp, Homo sapien
tgacccctggtttctcgcctctggt

SEQ ID NO: 2697137 - DNA, 25 bp, Homo sapien
gcttgatagcccctgttgagagaca

SEQ ID NO: 2697138 - DNA, 25 bp, Homo sapien
ggtgtacacctctcttgatgactta

SEQ ID NO: 2697139 - DNA, 25 bp, Homo sapien
cattattactcgacctgctggaacc

SEQ ID NO: 2697140 - DNA, 25 bp, Homo sapien
ccagttgaagtgtttccatgagtgg

SEQ ID NO: 2697141 - DNA, 25 bp, Homo sapien
ttttcctccagttgaagtgtttcca

SEQ ID NO: 2697142 - DNA, 25 bp, Homo sapien
gttgaagtgtttccatgagtgggac

SEQ ID NO: 2697143 - DNA, 25 bp, Homo sapien
tttcctccagttgaagtgtttccat

SEQ ID NO: 2697144 - DNA, 25 bp, Homo sapien
gaaacctaacagcttctactgaagc

SEQ ID NO: 2697145 - DNA, 25 bp, Homo sapien
tttgcacttgtaacctgtcttccct

SEQ ID NO: 2697146 - DNA, 25 bp, Homo sapien
gaactagagtatctacaatggttgt

SEQ ID NO: 2697147 - DNA, 25 bp, Homo sapien
tttcttcaagacacgacaggtttgc

SEQ ID NO: 2697148 - DNA, 25 bp, Homo sapien
aatatgacgtgatttcaaagagctg

SEQ ID NO: 2697149 - DNA, 25 bp, Homo sapien
atatgacgtgatttcaaagagctgt

SEQ ID NO: 2697150 - DNA, 25 bp, Homo sapien
tcactcagtgaaatatgacgtgatt

SEQ ID NO: 2697151 - DNA, 25 bp, Homo sapien
cagtgaaatatgacgtgatttcaaa

SEQ ID NO: 2697152 - DNA, 25 bp, Homo sapien
ttccgtagtggtctcctagctcttt

SEQ ID NO: 2697153 - DNA, 25 bp, Homo sapien
tccttgatcatcttccgtagtggtc

SEQ ID NO: 2697154 - DNA, 25 bp, Homo sapien
agttttccttgatcatcttccgtag

SEQ ID NO: 2697155 - DNA, 25 bp, Homo sapien
tcatcttccgtagtggtctcctagc

SEQ ID NO: 2697156 - DNA, 25 bp, Homo sapien
cccgcaggaggaccctcgtttctga

SEQ ID NO: 2697157 - DNA, 25 bp, Homo sapien
tatggcccagtagggatctgtctgc

SEQ ID NO: 2697158 - DNA, 25 bp, Homo sapien
gttcttggcttattcacggtgacag

SEQ ID NO: 2697159 - DNA, 25 bp, Homo sapien
acggtgaagttggtgcctggcattc

SEQ ID NO: 2697160 - DNA, 25 bp, Homo sapien
gaatgggtttggattagagacaaag

SEQ ID NO: 2697161 - DNA, 25 bp, Homo sapien
tctcaagaatgggtttggattagag

SEQ ID NO: 2697162 - DNA, 25 bp, Homo sapien
ttttctcaagaatgggtttggatta

SEQ ID NO: 2697163 - DNA, 25 bp, Homo sapien
caagaatgggtttggattagagaca

SEQ ID NO: 2697164 - DNA, 25 bp, Homo sapien
gggctaggaaatgcagtggaaaaac

SEQ ID NO: 2697165 - DNA, 25 bp, Homo sapien
agccacgcggaccttttctttactg

SEQ ID NO: 2697166 - DNA, 25 bp, Homo sapien
tgctgtgatagccacgcggaccttt

SEQ ID NO: 2697167 - DNA, 25 bp, Homo sapien
taggaaatgcagtggaaaaacagtc

SEQ ID NO: 2697168 - DNA, 25 bp, Homo sapien
catttgtggattcaggccaaattca

SEQ ID NO: 2697169 - DNA, 25 bp, Homo sapien
gctttgatcagcaaagatatagcac

SEQ ID NO: 2697170 - DNA, 25 bp, Homo sapien
cagattcagggaggtctttgatgga

SEQ ID NO: 2697171 - DNA, 25 bp, Homo sapien
gaatgcttccctagtcctaattgaa

SEQ ID NO: 2697172 - DNA, 25 bp, Homo sapien
aggacttagaaatactatcttgtat

SEQ ID NO: 2697173 - DNA, 25 bp, Homo sapien
ccaaatggcttgtatcctttaagta

SEQ ID NO: 2697174 - DNA, 25 bp, Homo sapien
aatcccccaaatggcttgtatcctt

SEQ ID NO: 2697175 - DNA, 25 bp, Homo sapien
gacttagaaatactatcttgtatct

SEQ ID NO: 2697176 - DNA, 25 bp, Homo sapien
gcttcagttctttgtagtgctgtgt

SEQ ID NO: 2697177 - DNA, 25 bp, Homo sapien
tagatgtgtgatcagcatccagaca

SEQ ID NO: 2697178 - DNA, 25 bp, Homo sapien
gatatatagtttgctaaaccagagg

SEQ ID NO: 2697179 - DNA, 25 bp, Homo sapien
cactgatagaggtaagcaggtccca

SEQ ID NO: 2697180 - DNA, 25 bp, Homo sapien
gtgtgcgttcacattgggtgtccag

SEQ ID NO: 2697181 - DNA, 25 bp, Homo sapien
tgtgcgttcacattgggtgtccaga

SEQ ID NO: 2697182 - DNA, 25 bp, Homo sapien
cagttggtatccaaagagtataccg

SEQ ID NO: 2697183 - DNA, 25 bp, Homo sapien
ctgcccttgttagaaatatgtcgaa

SEQ ID NO: 2697184 - DNA, 25 bp, Homo sapien
tcaggtaatttgtcaaagctcagcc

SEQ ID NO: 2697185 - DNA, 25 bp, Homo sapien
cgaacatcaagattgcttcaggtaa

SEQ ID NO: 2697186 - DNA, 25 bp, Homo sapien
ggcagagatgtcagcactctcaggg

SEQ ID NO: 2697187 - DNA, 25 bp, Homo sapien
ttatggaagtccgttggcatctgtg

SEQ ID NO: 2697188 - DNA, 25 bp, Homo sapien
attccttgtgaactcttgtttttgc

SEQ ID NO: 2697189 - DNA, 25 bp, Homo sapien
tctcagggtgttgtgcgggtaggac

SEQ ID NO: 2697190 - DNA, 25 bp, Homo sapien
tagaacagccacgtctctggagaga

SEQ ID NO: 2697191 - DNA, 25 bp, Homo sapien
tatgaaatgctctcctgccttccca

SEQ ID NO: 2697192 - DNA, 25 bp, Homo sapien
caagtacttgctattctggcctgga

SEQ ID NO: 2697193 - DNA, 25 bp, Homo sapien
ctggattgaggtggacacacaggaa

SEQ ID NO: 2697194 - DNA, 25 bp, Homo sapien
aaatgcttccaaggctggtcctatt

SEQ ID NO: 2697195 - DNA, 25 bp, Homo sapien
ggcaaatgcttccaaggctggtcct

SEQ ID NO: 2697196 - DNA, 25 bp, Homo sapien
atgcttccaaggctggtcctattgc

SEQ ID NO: 2697197 - DNA, 25 bp, Homo sapien
gcaaatgcttccaaggctggtccta

SEQ ID NO: 2697198 - DNA, 25 bp, Homo sapien
tctgctaccacttcagatgtctcca

SEQ ID NO: 2697199 - DNA, 25 bp, Homo sapien
cctggtgatttttctctgctaccac

SEQ ID NO: 2697200 - DNA, 25 bp, Homo sapien
ctgctaccacttcagatgtctccat

SEQ ID NO: 2697201 - DNA, 25 bp, Homo sapien
atttttctctgctaccacttcagat

SEQ ID NO: 2697202 - DNA, 25 bp, Homo sapien
gggttggatgtaggcaactgcctgg

SEQ ID NO: 2697203 - DNA, 25 bp, Homo sapien
ggttggatgtaggcaactgcctggt

SEQ ID NO: 2697204 - DNA, 25 bp, Homo sapien
gttggatgtaggcaactgcctggtg

SEQ ID NO: 2697205 - DNA, 25 bp, Homo sapien
tttgaattccatttagtggctatac

SEQ ID NO: 2697206 - DNA, 25 bp, Homo sapien
tatttgaattccatttagtggctat

SEQ ID NO: 2697207 - DNA, 25 bp, Homo sapien
ctgtatttgaattccatttagtggc

SEQ ID NO: 2697208 - DNA, 25 bp, Homo sapien
tgtatttgaattccatttagtggct

SEQ ID NO: 2697209 - DNA, 25 bp, Homo sapien
cagttctgatgccttgaagcagggc

SEQ ID NO: 2697210 - DNA, 25 bp, Homo sapien
gggctgaagccaagcatctccttcc

SEQ ID NO: 2697211 - DNA, 25 bp, Homo sapien
ctggtcctgcaactgtcctgggggc

SEQ ID NO: 2697212 - DNA, 25 bp, Homo sapien
cctggcttcttagcagttctgatgc

SEQ ID NO: 2697213 - DNA, 25 bp, Homo sapien
gtgaaaactcagagcagatttgcat

SEQ ID NO: 2697214 - DNA, 25 bp, Homo sapien
tttggaatgctcaagtgaaaactca

SEQ ID NO: 2697215 - DNA, 25 bp, Homo sapien
tgcccccatttttggaatgctcaag

SEQ ID NO: 2697216 - DNA, 25 bp, Homo sapien
aactcagagcagatttgcatgcact

SEQ ID NO: 2697217 - DNA, 25 bp, Homo sapien
tgttgttgagctcattaatacccat

SEQ ID NO: 2697218 - DNA, 25 bp, Homo sapien
cagtgatcctccgaatgtgtttccc

SEQ ID NO: 2697219 - DNA, 25 bp, Homo sapien
agttgacttataacccaccctgtgg

SEQ ID NO: 2697220 - DNA, 25 bp, Homo sapien
tttgggggagatccttgcagttgac

SEQ ID NO: 2697221 - DNA, 25 bp, Homo sapien
taaaagacacctcaacattccttta

SEQ ID NO: 2697222 - DNA, 25 bp, Homo sapien
tgatgttgtcgtccataaagaaacc

SEQ ID NO: 2697223 - DNA, 25 bp, Homo sapien
ggaatgatgatgttgtcgtccataa

SEQ ID NO: 2697224 - DNA, 25 bp, Homo sapien
aagacacctcaacattcctttaagt

SEQ ID NO: 2697225 - DNA, 25 bp, Homo sapien
tggtgttccggtcagctcttcagat

SEQ ID NO: 2697226 - DNA, 25 bp, Homo sapien
ggtcagggtgggagtatattcccca

SEQ ID NO: 2697227 - DNA, 25 bp, Homo sapien
ttcagatagtttccaaaagaagtcc

SEQ ID NO: 2697228 - DNA, 25 bp, Homo sapien
aatagtccggaaagatggagtagca

SEQ ID NO: 2697229 - DNA, 25 bp, Homo sapien
ctccctggaggcgtcatatcctaag

SEQ ID NO: 2697230 - DNA, 25 bp, Homo sapien
gaggcgtcatatcctaagggcttac

SEQ ID NO: 2697231 - DNA, 25 bp, Homo sapien
cgtcatatcctaagggcttactccc

SEQ ID NO: 2697232 - DNA, 25 bp, Homo sapien
cctggaggcgtcatatcctaagggc

SEQ ID NO: 2697233 - DNA, 25 bp, Homo sapien
agcggctgctgagctttactccttg

SEQ ID NO: 2697234 - DNA, 25 bp, Homo sapien
gggagcggctgctgagctttactcc

SEQ ID NO: 2697235 - DNA, 25 bp, Homo sapien
tgctgagctttactccttggctctt

SEQ ID NO: 2697236 - DNA, 25 bp, Homo sapien
gctgagctttactccttggctcttc

SEQ ID NO: 2697237 - DNA, 25 bp, Homo sapien
ctgctggaccagcttacttcaatgt

SEQ ID NO: 2697238 - DNA, 25 bp, Homo sapien
tctgtccaatattcatcctggagcc

SEQ ID NO: 2697239 - DNA, 25 bp, Homo sapien
gctggaccagcttacttcaatgtct

SEQ ID NO: 2697240 - DNA, 25 bp, Homo sapien
tctgtctgtccaatattcatcctgg

SEQ ID NO: 2697241 - DNA, 25 bp, Homo sapien
gactgagtagtgtccacagcttcca

SEQ ID NO: 2697242 - DNA, 25 bp, Homo sapien
ctcatagcagcatagtcaatagtgg

SEQ ID NO: 2697243 - DNA, 25 bp, Homo sapien
tccacccatgaaatagcctcttggg

SEQ ID NO: 2697244 - DNA, 25 bp, Homo sapien
tgcagtagctcatccatatcaccag

SEQ ID NO: 2697245 - DNA, 25 bp, Homo sapien
tgaccccaaaggctggtgaccaccg

SEQ ID NO: 2697246 - DNA, 25 bp, Homo sapien
gggaaaacctggtgaaccttgcatg

SEQ ID NO: 2697247 - DNA, 25 bp, Homo sapien
caaaggctggtgaccaccgccttct

SEQ ID NO: 2697248 - DNA, 25 bp, Homo sapien
tggtgaaccttgcatgaccccaaag

SEQ ID NO: 2697249 - DNA, 25 bp, Homo sapien
tgaaatgcatgtaagactgaccagc

SEQ ID NO: 2697250 - DNA, 25 bp, Homo sapien
tgcagctgacgttgctactccgtga

SEQ ID NO: 2697251 - DNA, 25 bp, Homo sapien
caagagaccttgacactccagggaa

SEQ ID NO: 2697252 - DNA, 25 bp, Homo sapien
gacgccatcctttgaggtgctcaca

SEQ ID NO: 2697253 - DNA, 25 bp, Homo sapien
ccgtttggtcggtttgaggcacact

SEQ ID NO: 2697254 - DNA, 25 bp, Homo sapien
taatgacccggtcccctgaattctg

SEQ ID NO: 2697255 - DNA, 25 bp, Homo sapien
gatggatgggctgggtattctccct

SEQ ID NO: 2697256 - DNA, 25 bp, Homo sapien
cctgaggagtaggaaaatgcagcat

SEQ ID NO: 2697257 - DNA, 25 bp, Homo sapien
agtgaaattgctgctgatggatgcc

SEQ ID NO: 2697258 - DNA, 25 bp, Homo sapien
tagatgttttaatgcccttgtggtg

SEQ ID NO: 2697259 - DNA, 25 bp, Homo sapien
ctgctcctggtgcaatgtatagatg

SEQ ID NO: 2697260 - DNA, 25 bp, Homo sapien
cattcccaccacagcggtaaagtgg

SEQ ID NO: 2697261 - DNA, 25 bp, Homo sapien
tccatcccagcttgaaagctgtttg

SEQ ID NO: 2697262 - DNA, 25 bp, Homo sapien
gggaccctcgtcctgtgggctcact

SEQ ID NO: 2697263 - DNA, 25 bp, Homo sapien
ttggagcgcttgttcctcaaggaac

SEQ ID NO: 2697264 - DNA, 25 bp, Homo sapien
ttcgggaccctcgtcctgtgggctc

SEQ ID NO: 2697265 - DNA, 25 bp, Homo sapien
tcctgagctggcctcccatcatccc

SEQ ID NO: 2697266 - DNA, 25 bp, Homo sapien
ctgagctggcctcccatcatccctg

SEQ ID NO: 2697267 - DNA, 25 bp, Homo sapien
cctgagctggcctcccatcatccct

SEQ ID NO: 2697268 - DNA, 25 bp, Homo sapien
ttgaatttgcctccatcatccctgc

SEQ ID NO: 2697269 - DNA, 25 bp, Homo sapien
gcccctcctcttgaatttgcctcca

SEQ ID NO: 2697270 - DNA, 25 bp, Homo sapien
gcccctcctcctgaatttgcctcca

SEQ ID NO: 2697271 - DNA, 25 bp, Homo sapien
ctgcccctcctcctgaatttgcctc

SEQ ID NO: 2697272 - DNA, 25 bp, Homo sapien
tgaaagtagaagaagtaggagtggg

SEQ ID NO: 2697273 - DNA, 25 bp, Homo sapien
caggggtatggtgtgaaggcctggc

SEQ ID NO: 2697274 - DNA, 25 bp, Homo sapien
tggggcaggggtatggtgtgaaggc

SEQ ID NO: 2697275 - DNA, 25 bp, Homo sapien
ctgaaagtagaagaagtaggagtgg

SEQ ID NO: 2697276 - DNA, 25 bp, Homo sapien
tgtttttggttgaacttgactgaag

SEQ ID NO: 2697277 - DNA, 25 bp, Homo sapien
ttggttgaacttgactgaagggatc

SEQ ID NO: 2697278 - DNA, 25 bp, Homo sapien
tgctgtttttggttgaacttgactg

SEQ ID NO: 2697279 - DNA, 25 bp, Homo sapien
ttgaacttgactgaagggatcttga

SEQ ID NO: 2697280 - DNA, 25 bp, Homo sapien
agtttttgccctttaacatcacctg

SEQ ID NO: 2697281 - DNA, 25 bp, Homo sapien
cctgagagtgggtgaaaaagatatt

SEQ ID NO: 2697282 - DNA, 25 bp, Homo sapien
ctttttcagttatgaaggagcatct

SEQ ID NO: 2697283 - DNA, 25 bp, Homo sapien
ttctttccaaatgggaatgtcttta

SEQ ID NO: 2697284 - DNA, 25 bp, Homo sapien
cagttatgaaggagcatcttattga

SEQ ID NO: 2697285 - DNA, 25 bp, Homo sapien
gaggatgcttgatcccctgtaataa

SEQ ID NO: 2697286 - DNA, 25 bp, Homo sapien
caatgggaaccacacctttcaaggt

SEQ ID NO: 2697287 - DNA, 25 bp, Homo sapien
gtgtgcttgaggatgcttgatcccc

SEQ ID NO: 2697288 - DNA, 25 bp, Homo sapien
tcaggtttgggaacccacaatggga

SEQ ID NO: 2697289 - DNA, 25 bp, Homo sapien
cccttcttctgtttatagtcttcca

SEQ ID NO: 2697290 - DNA, 25 bp, Homo sapien
ttcttctgtttatagtcttccagac

SEQ ID NO: 2697291 - DNA, 25 bp, Homo sapien
ccttcttctgtttatagtcttccag

SEQ ID NO: 2697292 - DNA, 25 bp, Homo sapien
cttcttctgtttatagtcttccaga

SEQ ID NO: 2697293 - DNA, 25 bp, Homo sapien
gaaacttgggctcagtcattcttga

SEQ ID NO: 2697294 - DNA, 25 bp, Homo sapien
gtcattcttgagtactgcctctcct

SEQ ID NO: 2697295 - DNA, 25 bp, Homo sapien
ttcttgagtactgcctctcctcagg

SEQ ID NO: 2697296 - DNA, 25 bp, Homo sapien
gccattggccactgagctgccgtct

SEQ ID NO: 2697297 - DNA, 25 bp, Homo sapien
tgggaatgccagctcagctggactg

SEQ ID NO: 2697298 - DNA, 25 bp, Homo sapien
tgggctgcgaaaggcacttgggctc

SEQ ID NO: 2697299 - DNA, 25 bp, Homo sapien
tgcgaaaggcacttgggctctgtcc

SEQ ID NO: 2697300 - DNA, 25 bp, Homo sapien
gagtgcaggagttgggtggtgatgg

SEQ ID NO: 2697301 - DNA, 25 bp, Homo sapien
cctgggaatggcatgggagggccgt

SEQ ID NO: 2697302 - DNA, 25 bp, Homo sapien
ccgtgggctgaaaggtcgatgggta

SEQ ID NO: 2697303 - DNA, 25 bp, Homo sapien
tactggagaccgctgttcagtccag

SEQ ID NO: 2697304 - DNA, 25 bp, Homo sapien
ggaatagcaatagaggagcccaggt

SEQ ID NO: 2697305 - DNA, 25 bp, Homo sapien
tggaggattttgaataaaggaggga

SEQ ID NO: 2697306 - DNA, 25 bp, Homo sapien
tgctgatgttgttatttcccttgag

SEQ ID NO: 2697307 - DNA, 25 bp, Homo sapien
ggatggtcctgctgatgttgttatt

SEQ ID NO: 2697308 - DNA, 25 bp, Homo sapien
ttggcttgtgaggatggtcctgctg

SEQ ID NO: 2697309 - DNA, 25 bp, Homo sapien
ggtcctgctgatgttgttatttccc

SEQ ID NO: 2697310 - DNA, 25 bp, Homo sapien
cctctaggaaacttggtgtagatca

SEQ ID NO: 2697311 - DNA, 25 bp, Homo sapien
ctctaggaaacttggtgtagatcag

SEQ ID NO: 2697312 - DNA, 25 bp, Homo sapien
gcaacccactagctcgagctccttt

SEQ ID NO: 2697313 - DNA, 25 bp, Homo sapien
acccactagctcgagctcctttcat

SEQ ID NO: 2697314 - DNA, 25 bp, Homo sapien
tccagcaacccactagctcgagctc

SEQ ID NO: 2697315 - DNA, 25 bp, Homo sapien
cagcaacccactagctcgagctcct

SEQ ID NO: 2697316 - DNA, 25 bp, Homo sapien
gacttggtcctcagcattaagccag

SEQ ID NO: 2697317 - DNA, 25 bp, Homo sapien
gaagagcaagctggcaccagtaact

SEQ ID NO: 2697318 - DNA, 25 bp, Homo sapien
aggtattggtagaggacttggtcct

SEQ ID NO: 2697319 - DNA, 25 bp, Homo sapien
tcagcattaagccagaagagcaagc

SEQ ID NO: 2697320 - DNA, 25 bp, Homo sapien
cagtttcatcggtaagaggagtgag

SEQ ID NO: 2697321 - DNA, 25 bp, Homo sapien
aggagtgagataggaccagaatttg

SEQ ID NO: 2697322 - DNA, 25 bp, Homo sapien
aagagagaggctccgggatctgact

SEQ ID NO: 2697323 - DNA, 25 bp, Homo sapien
cccacccagtttcatcggtaagagg

SEQ ID NO: 2697324 - DNA, 25 bp, Homo sapien
aaaatagtgcttagagtgatgtctt

SEQ ID NO: 2697325 - DNA, 25 bp, Homo sapien
agaagcctgggcgagtttaggtctc

SEQ ID NO: 2697326 - DNA, 25 bp, Homo sapien
cgagtttaggtctctggagcaaagc

SEQ ID NO: 2697327 - DNA, 25 bp, Homo sapien
aatagtgcttagagtgatgtcttcc

SEQ ID NO: 2697328 - DNA, 25 bp, Homo sapien
ttaaggaacacagaccattggtctg

SEQ ID NO: 2697329 - DNA, 25 bp, Homo sapien
taaggaacacagaccattggtctgg

SEQ ID NO: 2697330 - DNA, 25 bp, Homo sapien
aagaggtacctttttggagtgtgct

SEQ ID NO: 2697331 - DNA, 25 bp, Homo sapien
gaggtacctttttggagtgtgctta

SEQ ID NO: 2697332 - DNA, 25 bp, Homo sapien
cagatttatcccctttagggatggg

SEQ ID NO: 2697333 - DNA, 25 bp, Homo sapien
tggagtgtgcttacagatttatccc

SEQ ID NO: 2697334 - DNA, 25 bp, Homo sapien
ccattgacagtggtccgggtggcac

SEQ ID NO: 2697335 - DNA, 25 bp, Homo sapien
ttagtgctgacatgtaataggctgc

SEQ ID NO: 2697336 - DNA, 25 bp, Homo sapien
taaatctgatggtcagcagttggct

SEQ ID NO: 2697337 - DNA, 25 bp, Homo sapien
tcaaaggctgagaacgtaaatggct

SEQ ID NO: 2697338 - DNA, 25 bp, Homo sapien
tccgatcctgattcacaagactcag

SEQ ID NO: 2697339 - DNA, 25 bp, Homo sapien
gatcctgattcacaagactcagggt

SEQ ID NO: 2697340 - DNA, 25 bp, Homo sapien
gagagcattacaatccgatcctgat

SEQ ID NO: 2697341 - DNA, 25 bp, Homo sapien
gatgagagcattacaatccgatcct

SEQ ID NO: 2697342 - DNA, 25 bp, Homo sapien
aaaccctgtgctgacaattccagca

SEQ ID NO: 2697343 - DNA, 25 bp, Homo sapien
cacactgtctatgggactggcagcg

SEQ ID NO: 2697344 - DNA, 25 bp, Homo sapien
tctgccttactatctgcctctcgta

SEQ ID NO: 2697345 - DNA, 25 bp, Homo sapien
ggcccatgtgttccatcccgttgga

SEQ ID NO: 2697346 - DNA, 25 bp, Homo sapien
cacgatgggaaagcttcaaatgtca

SEQ ID NO: 2697347 - DNA, 25 bp, Homo sapien
tccacgatgggaaagcttcaaatgt

SEQ ID NO: 2697348 - DNA, 25 bp, Homo sapien
ccacgatgggaaagcttcaaatgtc

SEQ ID NO: 2697349 - DNA, 25 bp, Homo sapien
acgatgggaaagcttcaaatgtcat

SEQ ID NO: 2697350 - DNA, 25 bp, Homo sapien
cagtgcccactctgtttcgcttcaa

SEQ ID NO: 2697351 - DNA, 25 bp, Homo sapien
cacagtctacaccaggaacacgggc

SEQ ID NO: 2697352 - DNA, 25 bp, Homo sapien
acgggcactccacaaatcctcagtg

SEQ ID NO: 2697353 - DNA, 25 bp, Homo sapien
ctttgccacagtctacaccaggaac

SEQ ID NO: 2697354 - DNA, 25 bp, Homo sapien
tcctgcttttagagtagggcctctt

SEQ ID NO: 2697355 - DNA, 25 bp, Homo sapien
ctatttggcacagtgtgatgaaatc

SEQ ID NO: 2697356 - DNA, 25 bp, Homo sapien
cacttggctgctctctatttggcac

SEQ ID NO: 2697357 - DNA, 25 bp, Homo sapien
gcatgagttgcaggagcttacttcc

SEQ ID NO: 2697358 - DNA, 25 bp, Homo sapien
cagcttcaaaggttgctccaggctc

SEQ ID NO: 2697359 - DNA, 25 bp, Homo sapien
gcttcaaaggttgctccaggctccc

SEQ ID NO: 2697360 - DNA, 25 bp, Homo sapien
aactctccttagcaggtgtcagggc

SEQ ID NO: 2697361 - DNA, 25 bp, Homo sapien
catgaccctcggggtggaacagaga

SEQ ID NO: 2697362 - DNA, 25 bp, Homo sapien
gccccacttagggtggccacggctg

SEQ ID NO: 2697363 - DNA, 25 bp, Homo sapien
ccccacttagggtggccacggctgc

SEQ ID NO: 2697364 - DNA, 25 bp, Homo sapien
tgccccacttagggtggccacggct

SEQ ID NO: 2697365 - DNA, 25 bp, Homo sapien
gaacactggtacgtcatcaccaaag

SEQ ID NO: 2697366 - DNA, 25 bp, Homo sapien
tctagctgcccacagatgccaccaa

SEQ ID NO: 2697367 - DNA, 25 bp, Homo sapien
accagaacactggtacgtcatcacc

SEQ ID NO: 2697368 - DNA, 25 bp, Homo sapien
acactggtacgtcatcaccaaagcc

SEQ ID NO: 2697369 - DNA, 25 bp, Homo sapien
ttcccttattctggcctctaattcc

SEQ ID NO: 2697370 - DNA, 25 bp, Homo sapien
taaagagcctttgtgtgctcactgg

SEQ ID NO: 2697371 - DNA, 25 bp, Homo sapien
gacaggttggcccttcctgaacgtg

SEQ ID NO: 2697372 - DNA, 25 bp, Homo sapien
ggtgctgggtctgctgtcatttgcc

SEQ ID NO: 2697373 - DNA, 25 bp, Homo sapien
ggcacacggcctcaattaaagaaat

SEQ ID NO: 2697374 - DNA, 25 bp, Homo sapien
gttagctcctctacgcaactgtagg

SEQ ID NO: 2697375 - DNA, 25 bp, Homo sapien
gggcttatcagcattcatacctgcg

SEQ ID NO: 2697376 - DNA, 25 bp, Homo sapien
cagaagattactgagtagcccaggc

SEQ ID NO: 2697377 - DNA, 25 bp, Homo sapien
tcccttctccggctgtcagcttttt

SEQ ID NO: 2697378 - DNA, 25 bp, Homo sapien
ttttggtcagccaacgatacatgtg

SEQ ID NO: 2697379 - DNA, 25 bp, Homo sapien
gactctcctgagaaccgtgtggtcc

SEQ ID NO: 2697380 - DNA, 25 bp, Homo sapien
ttcttttcccttctccggctgtcag

SEQ ID NO: 2697381 - DNA, 25 bp, Homo sapien
tcctgggaggatttctgaatgggat

SEQ ID NO: 2697382 - DNA, 25 bp, Homo sapien
tctgaatgggatttcagtggaaggt

SEQ ID NO: 2697383 - DNA, 25 bp, Homo sapien
ggatttctgaatgggatttcagtgg

SEQ ID NO: 2697384 - DNA, 25 bp, Homo sapien
atgggatttcagtggaaggttccag

SEQ ID NO: 2697385 - DNA, 25 bp, Homo sapien
ccaaggctctttactacattctcca

SEQ ID NO: 2697386 - DNA, 25 bp, Homo sapien
ggctctttactacattctccattaa

SEQ ID NO: 2697387 - DNA, 25 bp, Homo sapien
agttagctggagcatcctgttcctg

SEQ ID NO: 2697388 - DNA, 25 bp, Homo sapien
aatggagttagctggagcatcctgt

SEQ ID NO: 2697389 - DNA, 25 bp, Homo sapien
atgccacgcgttcaagtcttctgaa

SEQ ID NO: 2697390 - DNA, 25 bp, Homo sapien
cactcatatacctactgagaattct

SEQ ID NO: 2697391 - DNA, 25 bp, Homo sapien
catgccacgcgttcaagtcttctga

SEQ ID NO: 2697392 - DNA, 25 bp, Homo sapien
tgttcccatttccactgctcactca

SEQ ID NO: 2697393 - DNA, 25 bp, Homo sapien
tgcgagtaagtcagaggaaggagga

SEQ ID NO: 2697394 - DNA, 25 bp, Homo sapien
gaggcttcacttgcagccatgctga

SEQ ID NO: 2697395 - DNA, 25 bp, Homo sapien
attgagaagggaggaggcttcactt

SEQ ID NO: 2697396 - DNA, 25 bp, Homo sapien
tgctgaatcactgttgctgatcaga

SEQ ID NO: 2697397 - DNA, 25 bp, Homo sapien
cgccgttcctaggagaccaaggagc

SEQ ID NO: 2697398 - DNA, 25 bp, Homo sapien
caagtgggttgctgcttttagcagc

SEQ ID NO: 2697399 - DNA, 25 bp, Homo sapien
ggagctgccgccgttcctaggagac

SEQ ID NO: 2697400 - DNA, 25 bp, Homo sapien
gagcaagtgggttgctgcttttagc

SEQ ID NO: 2697401 - DNA, 25 bp, Homo sapien
gtatttctcgggctagtgacgaact

SEQ ID NO: 2697402 - DNA, 25 bp, Homo sapien
gacagactcatagcctatgggagca

SEQ ID NO: 2697403 - DNA, 25 bp, Homo sapien
gctagtgacgaactgcctgattctt

SEQ ID NO: 2697404 - DNA, 25 bp, Homo sapien
ggctgacagactcatagcctatggg

SEQ ID NO: 2697405 - DNA, 25 bp, Homo sapien
tggtatttagtcacttctgggttcc

SEQ ID NO: 2697406 - DNA, 25 bp, Homo sapien
cattgtcatgtgtctacccttaaaa

SEQ ID NO: 2697407 - DNA, 25 bp, Homo sapien
tctgggtcaattggaatagtacacc

SEQ ID NO: 2697408 - DNA, 25 bp, Homo sapien
caacatgggaatatagtggcttcta

SEQ ID NO: 2697409 - DNA, 25 bp, Homo sapien
tatgcatagcttgggcaatagccct

SEQ ID NO: 2697410 - DNA, 25 bp, Homo sapien
gcatccatctcttgtactaagcgaa

SEQ ID NO: 2697411 - DNA, 25 bp, Homo sapien
tatccgaactgttggcctcatggaa

SEQ ID NO: 2697412 - DNA, 25 bp, Homo sapien
tcctgttgccctgctagttgcgtgt

SEQ ID NO: 2697413 - DNA, 25 bp, Homo sapien
gcttcgtgacctactccaatgtgga

SEQ ID NO: 2697414 - DNA, 25 bp, Homo sapien
tatttccagaatcacgacgcggcag

SEQ ID NO: 2697415 - DNA, 25 bp, Homo sapien
cctttgggactctgacggactgcgt

SEQ ID NO: 2697416 - DNA, 25 bp, Homo sapien
tgtgtaagctgttcatcggcggcct

SEQ ID NO: 2697417 - DNA, 25 bp, Homo sapien
gataggtagctttttagtcctcacc

SEQ ID NO: 2697418 - DNA, 25 bp, Homo sapien
catttcatagtaccaaagaccctca

SEQ ID NO: 2697419 - DNA, 25 bp, Homo sapien
tagatcagactagtttaccctcaaa

SEQ ID NO: 2697420 - DNA, 25 bp, Homo sapien
gatactaactagtctttggctctga

SEQ ID NO: 2697421 - DNA, 25 bp, Homo sapien
gatggtcgtccctttatgcacttgt

SEQ ID NO: 2697422 - DNA, 25 bp, Homo sapien
tatggttacatttggaggtactggg

SEQ ID NO: 2697423 - DNA, 25 bp, Homo sapien
cagacatattgaagtagggccccac

SEQ ID NO: 2697424 - DNA, 25 bp, Homo sapien
ggtgcacaatttagtccatagcaga

SEQ ID NO: 2697425 - DNA, 25 bp, Homo sapien
agcgcagtgtatgagagtctgagca

SEQ ID NO: 2697426 - DNA, 25 bp, Homo sapien
gcagtgatgggccagcgcagtgtat

SEQ ID NO: 2697427 - DNA, 25 bp, Homo sapien
gccagcgcagtgtatgagagtctga

SEQ ID NO: 2697428 - DNA, 25 bp, Homo sapien
tgggccagcgcagtgtatgagagtc

SEQ ID NO: 2697429 - DNA, 25 bp, Homo sapien
ccttcaagagggctggacttctcca

SEQ ID NO: 2697430 - DNA, 25 bp, Homo sapien
tgcctaacaattctgagctccatta

SEQ ID NO: 2697431 - DNA, 25 bp, Homo sapien
taggctgtgctttagtgaagtatat

SEQ ID NO: 2697432 - DNA, 25 bp, Homo sapien
agctaaagtgattcttagctctttc

SEQ ID NO: 2697433 - DNA, 25 bp, Homo sapien
gaccaaggaggataattgaaaagga

SEQ ID NO: 2697434 - DNA, 25 bp, Homo sapien
agtgccttcttcagcacgaccaagg

SEQ ID NO: 2697435 - DNA, 25 bp, Homo sapien
ttcttcagcacgaccaaggaggata

SEQ ID NO: 2697436 - DNA, 25 bp, Homo sapien
tcagcacgaccaaggaggataattg

SEQ ID NO: 2697437 - DNA, 25 bp, Homo sapien
taggaaggaagcataaaaagaaagc

SEQ ID NO: 2697438 - DNA, 25 bp, Homo sapien
ggaaggaagcataaaaagaaagctg

SEQ ID NO: 2697439 - DNA, 25 bp, Homo sapien
gaaggaagcataaaaagaaagctgc

SEQ ID NO: 2697440 - DNA, 25 bp, Homo sapien
ctataggaaggaagcataaaaagaa

SEQ ID NO: 2697441 - DNA, 25 bp, Homo sapien
ctgagcaatggtgactgcacatggg

SEQ ID NO: 2697442 - DNA, 25 bp, Homo sapien
gagcaatggtgactgcacatgggca

SEQ ID NO: 2697443 - DNA, 25 bp, Homo sapien
agcaatggtgactgcacatgggcag

SEQ ID NO: 2697444 - DNA, 25 bp, Homo sapien
tgagcaatggtgactgcacatgggc

SEQ ID NO: 2697445 - DNA, 25 bp, Homo sapien
tgcaggtagagtaggagtgggatgt

SEQ ID NO: 2697446 - DNA, 25 bp, Homo sapien
tactatggacgtgaagccaatctcc

SEQ ID NO: 2697447 - DNA, 25 bp, Homo sapien
ggatgtgtactatggacgtgaagcc

SEQ ID NO: 2697448 - DNA, 25 bp, Homo sapien
cagtcaacaacattgacattgtgtg

SEQ ID NO: 2697449 - DNA, 25 bp, Homo sapien
tggaatccagtgggcactgaaggtc

SEQ ID NO: 2697450 - DNA, 25 bp, Homo sapien
gctttggaatccagtgggcactgaa

SEQ ID NO: 2697451 - DNA, 25 bp, Homo sapien
ctttggaatccagtgggcactgaag

SEQ ID NO: 2697452 - DNA, 25 bp, Homo sapien
tttggaatccagtgggcactgaagg

SEQ ID NO: 2697453 - DNA, 25 bp, Homo sapien
gccttctctcaaaaagtcataacat

SEQ ID NO: 2697454 - DNA, 25 bp, Homo sapien
tgtcggaaatgtctagctcttttgc

SEQ ID NO: 2697455 - DNA, 25 bp, Homo sapien
ttatttatccaccagacaatctgta

SEQ ID NO: 2697456 - DNA, 25 bp, Homo sapien
tctgtcaaggatgacatgttagcct

SEQ ID NO: 2697457 - DNA, 25 bp, Homo sapien
tgtcccgctagtatagtcttcagag

SEQ ID NO: 2697458 - DNA, 25 bp, Homo sapien
aattctctagtggtagcaaagcccc

SEQ ID NO: 2697459 - DNA, 25 bp, Homo sapien
gcccctgagaggacatagaacaaat

SEQ ID NO: 2697460 - DNA, 25 bp, Homo sapien
tgttaactatagaagcagccaaatg

SEQ ID NO: 2697461 - DNA, 25 bp, Homo sapien
aatgacttgagcgtgctcttgagac

SEQ ID NO: 2697462 - DNA, 25 bp, Homo sapien
catccgacgagaaattagtagggtt

SEQ ID NO: 2697463 - DNA, 25 bp, Homo sapien
caccttgttgtgaggcatccgacga

SEQ ID NO: 2697464 - DNA, 25 bp, Homo sapien
tgtgtcaggattgtaagaagagatt

SEQ ID NO: 2697465 - DNA, 25 bp, Homo sapien
tagatgctgggtggtttagggaaac

SEQ ID NO: 2697466 - DNA, 25 bp, Homo sapien
cataataggagtaaagctggagaag

SEQ ID NO: 2697467 - DNA, 25 bp, Homo sapien
ctttgtgctggttgtattagatgct

SEQ ID NO: 2697468 - DNA, 25 bp, Homo sapien
ccacagtataggctatgcataatag

SEQ ID NO: 2697469 - DNA, 25 bp, Homo sapien
gacacacaccaaggtatcagagagg

SEQ ID NO: 2697470 - DNA, 25 bp, Homo sapien
gagattgagacactctgcacatagg

SEQ ID NO: 2697471 - DNA, 25 bp, Homo sapien
tccagtggtccatcagagtgtagat

SEQ ID NO: 2697472 - DNA, 25 bp, Homo sapien
gtgagtctgcacatggtatccccaa

SEQ ID NO: 2697473 - DNA, 25 bp, Homo sapien
tggtgaagagcagccggtccttttt

SEQ ID NO: 2697474 - DNA, 25 bp, Homo sapien
aaatcagtgtgatgccccagtaggc

SEQ ID NO: 2697475 - DNA, 25 bp, Homo sapien
cctgcggaggcagataacaatcttc

SEQ ID NO: 2697476 - DNA, 25 bp, Homo sapien
gcctagaggaacaaaatactgcagc

SEQ ID NO: 2697477 - DNA, 25 bp, Homo sapien
ccaaaggtcaccacgatggaaatca

SEQ ID NO: 2697478 - DNA, 25 bp, Homo sapien
cagcaggctccaaaggtcaccacga

SEQ ID NO: 2697479 - DNA, 25 bp, Homo sapien
caggctccaaaggtcaccacgatgg

SEQ ID NO: 2697480 - DNA, 25 bp, Homo sapien
aggtcaccacgatggaaatcaacat

SEQ ID NO: 2697481 - DNA, 25 bp, Homo sapien
gatgacattgaagatattcggggca

SEQ ID NO: 2697482 - DNA, 25 bp, Homo sapien
atgacattgaagatattcggggcag

SEQ ID NO: 2697483 - DNA, 25 bp, Homo sapien
agatgacattgaagatattcggggc

SEQ ID NO: 2697484 - DNA, 25 bp, Homo sapien
aagatgacattgaagatattcgggg

SEQ ID NO: 2697485 - DNA, 25 bp, Homo sapien
ctacaaataccaggtcgtggtggca

SEQ ID NO: 2697486 - DNA, 25 bp, Homo sapien
caaataccaggtcgtggtggcagct

SEQ ID NO: 2697487 - DNA, 25 bp, Homo sapien
tacaaataccaggtcgtggtggcag

SEQ ID NO: 2697488 - DNA, 25 bp, Homo sapien
acaaataccaggtcgtggtggcagc

SEQ ID NO: 2697489 - DNA, 25 bp, Homo sapien
tatacatgtggaaaccatagcaacc

SEQ ID NO: 2697490 - DNA, 25 bp, Homo sapien
catctttcctgaggtgtgaagcacc

SEQ ID NO: 2697491 - DNA, 25 bp, Homo sapien
caccagcagtggtgaataagcacta

SEQ ID NO: 2697492 - DNA, 25 bp, Homo sapien
taagcactaccaggtccttttggaa

SEQ ID NO: 2697493 - DNA, 25 bp, Homo sapien
gcttcagcattatcaattttcatat

SEQ ID NO: 2697494 - DNA, 25 bp, Homo sapien
acctgtccagctcccattcaagaag

SEQ ID NO: 2697495 - DNA, 25 bp, Homo sapien
tcaagaagagcttcagcattatcaa

SEQ ID NO: 2697496 - DNA, 25 bp, Homo sapien
gaagagcttcagcattatcaatttt

SEQ ID NO: 2697497 - DNA, 25 bp, Homo sapien
gagaacagtctagttgattcccctg

SEQ ID NO: 2697498 - DNA, 25 bp, Homo sapien
gattcccctgtgtaagcaactctgt

SEQ ID NO: 2697499 - DNA, 25 bp, Homo sapien
gacttgcttcagtgctaaggaggta

SEQ ID NO: 2697500 - DNA, 25 bp, Homo sapien
tggatagacatatgagacaggcagt

SEQ ID NO: 2697501 - DNA, 25 bp, Homo sapien
tttcgtttgtgtgttctgcagtgct

SEQ ID NO: 2697502 - DNA, 25 bp, Homo sapien
cagctactgccatgagatggttaga

SEQ ID NO: 2697503 - DNA, 25 bp, Homo sapien
gaaaatgtgaaagctaatgtgcaag

SEQ ID NO: 2697504 - DNA, 25 bp, Homo sapien
cctggcctagaatcggtatttcttt

SEQ ID NO: 2697505 - DNA, 25 bp, Homo sapien
gatatgaattatccacaaacactgc

SEQ ID NO: 2697506 - DNA, 25 bp, Homo sapien
tataccttcttctcgaagtagctac

SEQ ID NO: 2697507 - DNA, 25 bp, Homo sapien
gcttgttcaacaatagaccaaattg

SEQ ID NO: 2697508 - DNA, 25 bp, Homo sapien
ccttcccaatgctcgctagatgacg

SEQ ID NO: 2697509 - DNA, 25 bp, Homo sapien
gtccagtctccacccaaaggactat

SEQ ID NO: 2697510 - DNA, 25 bp, Homo sapien
cattcagctctggtttactggacag

SEQ ID NO: 2697511 - DNA, 25 bp, Homo sapien
gctgatgaactatgctgttcaggca

SEQ ID NO: 2697512 - DNA, 25 bp, Homo sapien
tactggacagacatattcaggatag

SEQ ID NO: 2697513 - DNA, 25 bp, Homo sapien
tttaaaaggccatccagagatttgc

SEQ ID NO: 2697514 - DNA, 25 bp, Homo sapien
tctctagtggtaccgtgagtcacat

SEQ ID NO: 2697515 - DNA, 25 bp, Homo sapien
ccaagtgctcctggctaacctaagg

SEQ ID NO: 2697516 - DNA, 25 bp, Homo sapien
gaagccctgtacctgtttcctgagc

SEQ ID NO: 2697517 - DNA, 25 bp, Homo sapien
tacacttccactctctattataaat

SEQ ID NO: 2697518 - DNA, 25 bp, Homo sapien
tagcaggctttgattgagggtctct

SEQ ID NO: 2697519 - DNA, 25 bp, Homo sapien
ttaaatagcaggctttgattgaggg

SEQ ID NO: 2697520 - DNA, 25 bp, Homo sapien
gggtctcttgtactgcccggtactg

SEQ ID NO: 2697521 - DNA, 25 bp, Homo sapien
gtactgatctgtgcgagagactgag

SEQ ID NO: 2697522 - DNA, 25 bp, Homo sapien
cttggcagtactgatctgtgcgaga

SEQ ID NO: 2697523 - DNA, 25 bp, Homo sapien
ctgatctgtgcgagagactgagaag

SEQ ID NO: 2697524 - DNA, 25 bp, Homo sapien
gcagtactgatctgtgcgagagact

SEQ ID NO: 2697525 - DNA, 25 bp, Homo sapien
tgttgtcaaagtccacattgttcat

SEQ ID NO: 2697526 - DNA, 25 bp, Homo sapien
ccatgcttggtgaatttttttgtat

SEQ ID NO: 2697527 - DNA, 25 bp, Homo sapien
tttcattttcaaagaacagatagta

SEQ ID NO: 2697528 - DNA, 25 bp, Homo sapien
ccttggttcaagctattttcctgct

SEQ ID NO: 2697529 - DNA, 25 bp, Homo sapien
caccaagttgattgggctggtcttg

SEQ ID NO: 2697530 - DNA, 25 bp, Homo sapien
taaaacttccttacttccctgagca

SEQ ID NO: 2697531 - DNA, 25 bp, Homo sapien
aatttctgtagcacatttcaaccac

SEQ ID NO: 2697532 - DNA, 25 bp, Homo sapien
gaaatttctgtagcacatttcaacc

SEQ ID NO: 2697533 - DNA, 25 bp, Homo sapien
tgaaatttctgtagcacatttcaac

SEQ ID NO: 2697534 - DNA, 25 bp, Homo sapien
ctggttgtagggatgtcttgaagat

SEQ ID NO: 2697535 - DNA, 25 bp, Homo sapien
ctctggttgtagggatgtcttgaag

SEQ ID NO: 2697536 - DNA, 25 bp, Homo sapien
tctggttgtagggatgtcttgaaga

SEQ ID NO: 2697537 - DNA, 25 bp, Homo sapien
tggttgtagggatgtcttgaagatg

SEQ ID NO: 2697538 - DNA, 25 bp, Homo sapien
tctgagttggctatctgcacgttct

SEQ ID NO: 2697539 - DNA, 25 bp, Homo sapien
ggctgtggcctggattccgcattca

SEQ ID NO: 2697540 - DNA, 25 bp, Homo sapien
tgtaccagtgaacttgaactgtggc

SEQ ID NO: 2697541 - DNA, 25 bp, Homo sapien
tccgcattcaaacatgaccaactga

SEQ ID NO: 2697542 - DNA, 25 bp, Homo sapien
tctgtgataatcaaggtgcagactt

SEQ ID NO: 2697543 - DNA, 25 bp, Homo sapien
ttctgtgataatcaaggtgcagact

SEQ ID NO: 2697544 - DNA, 25 bp, Homo sapien
ctgtgataatcaaggtgcagacttc

SEQ ID NO: 2697545 - DNA, 25 bp, Homo sapien
gctgcagtgccagcctcattttctg

SEQ ID NO: 2697546 - DNA, 25 bp, Homo sapien
aagctgcagtgccagcctcattttc

SEQ ID NO: 2697547 - DNA, 25 bp, Homo sapien
taagagtttgttgcagaagctgcag

SEQ ID NO: 2697548 - DNA, 25 bp, Homo sapien
tgcagtgccagcctcattttctgca

SEQ ID NO: 2697549 - DNA, 25 bp, Homo sapien
agtattatagcaccactgactttta

SEQ ID NO: 2697550 - DNA, 25 bp, Homo sapien
ccctcacagactaatctagtggctc

SEQ ID NO: 2697551 - DNA, 25 bp, Homo sapien
tccttccctcacagactaatctagt

SEQ ID NO: 2697552 - DNA, 25 bp, Homo sapien
ttttatcagctgccaaacagtgaca

SEQ ID NO: 2697553 - DNA, 25 bp, Homo sapien
ccagagggtgccagctgggtttaac

SEQ ID NO: 2697554 - DNA, 25 bp, Homo sapien
gagggtgccagctgggtttaaccca

SEQ ID NO: 2697555 - DNA, 25 bp, Homo sapien
cagagggtgccagctgggtttaacc

SEQ ID NO: 2697556 - DNA, 25 bp, Homo sapien
gagatcctgagaatactgtgctcct

SEQ ID NO: 2697557 - DNA, 25 bp, Homo sapien
tggctttggtagagtgaccttctct

SEQ ID NO: 2697558 - DNA, 25 bp, Homo sapien
gttgagatcctgagaatactgtgct

SEQ ID NO: 2697559 - DNA, 25 bp, Homo sapien
tgctcctggctttggtagagtgacc

SEQ ID NO: 2697560 - DNA, 25 bp, Homo sapien
gaaggttgtaaggaatcagaagcaa

SEQ ID NO: 2697561 - DNA, 25 bp, Homo sapien
gccacaagcctggaattacggaagg

SEQ ID NO: 2697562 - DNA, 25 bp, Homo sapien
actataatgatttgttcctggaagg

SEQ ID NO: 2697563 - DNA, 25 bp, Homo sapien
caagcctggaattacggaaggttgt

SEQ ID NO: 2697564 - DNA, 25 bp, Homo sapien
actggatgaagtgttttggacgttc

SEQ ID NO: 2697565 - DNA, 25 bp, Homo sapien
gaggctgcaatctggagccacatgg

SEQ ID NO: 2697566 - DNA, 25 bp, Homo sapien
tctggctagagaagctggaggtttc

SEQ ID NO: 2697567 - DNA, 25 bp, Homo sapien
tggaagactgtttggtctggctaga

SEQ ID NO: 2697568 - DNA, 25 bp, Homo sapien
gatggtaatatggagctgaggaagc

SEQ ID NO: 2697569 - DNA, 25 bp, Homo sapien
ctattgtaatcaggctgtgatggta

SEQ ID NO: 2697570 - DNA, 25 bp, Homo sapien
tactgctattgtaatcaggctgtga

SEQ ID NO: 2697571 - DNA, 25 bp, Homo sapien
tagcggaagggattttactgctatt

SEQ ID NO: 2697572 - DNA, 25 bp, Homo sapien
aactaatagtacgtttgcacactgc

SEQ ID NO: 2697573 - DNA, 25 bp, Homo sapien
gaatcactgatgtatatgtaacctc

SEQ ID NO: 2697574 - DNA, 25 bp, Homo sapien
tgttacgacttgataaatgctccca

SEQ ID NO: 2697575 - DNA, 25 bp, Homo sapien
tgaatatatctgagaagtcctgaag

SEQ ID NO: 2697576 - DNA, 25 bp, Homo sapien
tccattatgaagaagggtgtccttg

SEQ ID NO: 2697577 - DNA, 25 bp, Homo sapien
tgtatttcatgatcaggagttcttg

SEQ ID NO: 2697578 - DNA, 25 bp, Homo sapien
gggatggctttgcatttataggttg

SEQ ID NO: 2697579 - DNA, 25 bp, Homo sapien
ggagttcttggtatgggcttagcat

SEQ ID NO: 2697580 - DNA, 25 bp, Homo sapien
taattggccttttgtacaaaataga

SEQ ID NO: 2697581 - DNA, 25 bp, Homo sapien
tatatggacctagatctgtgagcta

SEQ ID NO: 2697582 - DNA, 25 bp, Homo sapien
gagagaaatggaatagggcccaaat

SEQ ID NO: 2697583 - DNA, 25 bp, Homo sapien
gatctgtgagctagaacttccttat

SEQ ID NO: 2697584 - DNA, 25 bp, Homo sapien
cttattccttgttgatatatggacc

SEQ ID NO: 2697585 - DNA, 25 bp, Homo sapien
tccgttgttctgcatgttccagtca

SEQ ID NO: 2697586 - DNA, 25 bp, Homo sapien
tctttttgctcctatgacaggcaag

SEQ ID NO: 2697587 - DNA, 25 bp, Homo sapien
gacaggcaagcataatcactcttaa

SEQ ID NO: 2697588 - DNA, 25 bp, Homo sapien
gcagtaaaggttcacttaggctttc

SEQ ID NO: 2697589 - DNA, 25 bp, Homo sapien
ttctgtggtcctagcaatctgcgag

SEQ ID NO: 2697590 - DNA, 25 bp, Homo sapien
agctgcattctgtggtcctagcaat

SEQ ID NO: 2697591 - DNA, 25 bp, Homo sapien
tgcattctgtggtcctagcaatctg

SEQ ID NO: 2697592 - DNA, 25 bp, Homo sapien
tgtggtcctagcaatctgcgagcca

SEQ ID NO: 2697593 - DNA, 25 bp, Homo sapien
tattatgcctgctgctcaaaagtgg

SEQ ID NO: 2697594 - DNA, 25 bp, Homo sapien
tgatggactccacgaaaggtatgtg

SEQ ID NO: 2697595 - DNA, 25 bp, Homo sapien
gtcacttgtattggcagtagctgca

SEQ ID NO: 2697596 - DNA, 25 bp, Homo sapien
tttaagcccttaaagtacagtgcac

SEQ ID NO: 2697597 - DNA, 25 bp, Homo sapien
aaacaaagtaagaatgtttacatgc

SEQ ID NO: 2697598 - DNA, 25 bp, Homo sapien
aaagtaagaatgtttacatgcaatt

SEQ ID NO: 2697599 - DNA, 25 bp, Homo sapien
gtaagaatgtttacatgcaattgtt

SEQ ID NO: 2697600 - DNA, 25 bp, Homo sapien
aagaatgtttacatgcaattgttag

SEQ ID NO: 2697601 - DNA, 25 bp, Homo sapien
ggaacttgcagtcgcgcatgttctg

SEQ ID NO: 2697602 - DNA, 25 bp, Homo sapien
gtcgcgcatgttctgagttgtgttg

SEQ ID NO: 2697603 - DNA, 25 bp, Homo sapien
tgcagtcgcgcatgttctgagttgt

SEQ ID NO: 2697604 - DNA, 25 bp, Homo sapien
taggaacttgcagtcgcgcatgttc

SEQ ID NO: 2697605 - DNA, 25 bp, Homo sapien
tctctggcacttgaatgaaacgtgg

SEQ ID NO: 2697606 - DNA, 25 bp, Homo sapien
atctccccttgaggttgatctactt

SEQ ID NO: 2697607 - DNA, 25 bp, Homo sapien
ggattgcatcctgatcattcacatc

SEQ ID NO: 2697608 - DNA, 25 bp, Homo sapien
catcaatcgacatgttctctggcac

SEQ ID NO: 2697609 - DNA, 25 bp, Homo sapien
atgacacatcaggagctggcagtcc

SEQ ID NO: 2697610 - DNA, 25 bp, Homo sapien
tggcaacacatgcataagcccctgc

SEQ ID NO: 2697611 - DNA, 25 bp, Homo sapien
caaggacatccagctgcacagtgaa

SEQ ID NO: 2697612 - DNA, 25 bp, Homo sapien
gaagacccttctcagacactatcat

SEQ ID NO: 2697613 - DNA, 25 bp, Homo sapien
gctctgactacttcaaagatgagtg

SEQ ID NO: 2697614 - DNA, 25 bp, Homo sapien
tttggtggaggtatagccgagatct

SEQ ID NO: 2697615 - DNA, 25 bp, Homo sapien
ttattcggtcagtgttgaattgtac

SEQ ID NO: 2697616 - DNA, 25 bp, Homo sapien
tttgtagataaacattggtgctctt

SEQ ID NO: 2697617 - DNA, 25 bp, Homo sapien
gagatctggcattctagtttcactg

SEQ ID NO: 2697618 - DNA, 25 bp, Homo sapien
tagacaaattgagataaatgcatgc

SEQ ID NO: 2697619 - DNA, 25 bp, Homo sapien
gacctgttccgttatctgtctccta

SEQ ID NO: 2697620 - DNA, 25 bp, Homo sapien
tctgattagtggaatctggcttact

SEQ ID NO: 2697621 - DNA, 25 bp, Homo sapien
tggattcacccaaataaactatagt

SEQ ID NO: 2697622 - DNA, 25 bp, Homo sapien
tccaaagctgtatctatttattgcc

SEQ ID NO: 2697623 - DNA, 25 bp, Homo sapien
attatttctgtgaagtggatgtctc

SEQ ID NO: 2697624 - DNA, 25 bp, Homo sapien
aaagctgtatctatttattgccaaa

SEQ ID NO: 2697625 - DNA, 25 bp, Homo sapien
tatttctgtgaagtggatgtctctg

SEQ ID NO: 2697626 - DNA, 25 bp, Homo sapien
ccagcttcattaactgctgacacag

SEQ ID NO: 2697627 - DNA, 25 bp, Homo sapien
tgttacatgtagtcactccagcttc

SEQ ID NO: 2697628 - DNA, 25 bp, Homo sapien
ttcattaactgctgacacagtatac

SEQ ID NO: 2697629 - DNA, 25 bp, Homo sapien
ccgtaacgtctaatcttgtgttaca

SEQ ID NO: 2697630 - DNA, 25 bp, Homo sapien
tatttgctgaatgttggtcgaaccc

SEQ ID NO: 2697631 - DNA, 25 bp, Homo sapien
catagagtccagattgagctgccaa

SEQ ID NO: 2697632 - DNA, 25 bp, Homo sapien
tggtcgaacccgtaactgcttagga

SEQ ID NO: 2697633 - DNA, 25 bp, Homo sapien
cattcaaacctttcccattaagtgc

SEQ ID NO: 2697634 - DNA, 25 bp, Homo sapien
gcagttacaaatccatatacccaga

SEQ ID NO: 2697635 - DNA, 25 bp, Homo sapien
catagaatgtgcaagagtcaaagga

SEQ ID NO: 2697636 - DNA, 25 bp, Homo sapien
tcctgtaggcttcacaaatcggagg

SEQ ID NO: 2697637 - DNA, 25 bp, Homo sapien
gacatacaactgtggaacactcaga

SEQ ID NO: 2697638 - DNA, 25 bp, Homo sapien
ggtaaaccagctatagaaaaggcca

SEQ ID NO: 2697639 - DNA, 25 bp, Homo sapien
gaagtgcaaaccatggcaagtctag

SEQ ID NO: 2697640 - DNA, 25 bp, Homo sapien
gccagtgaactagaagcccgagagg

SEQ ID NO: 2697641 - DNA, 25 bp, Homo sapien
tagtgagggtcaaaaactaccatcg

SEQ ID NO: 2697642 - DNA, 25 bp, Homo sapien
actacaccgcccgttcgttcgcctg

SEQ ID NO: 2697643 - DNA, 25 bp, Homo sapien
acctgcactacaccgcccgttcgtt

SEQ ID NO: 2697644 - DNA, 25 bp, Homo sapien
ggcggacctgcactacaccgcccgt

SEQ ID NO: 2697645 - DNA, 25 bp, Homo sapien
cgcccgttcgttcgcctgaggccgc

SEQ ID NO: 2697646 - DNA, 25 bp, Homo sapien
ctcggtgccaccgtgacgcctcagc

SEQ ID NO: 2697647 - DNA, 25 bp, Homo sapien
gcctcggtgccaccgtgacgcctca

SEQ ID NO: 2697648 - DNA, 25 bp, Homo sapien
tcggtgccaccgtgacgcctcagcc

SEQ ID NO: 2697649 - DNA, 25 bp, Homo sapien
ggtgccaccgtgacgcctcagccat

SEQ ID NO: 2697650 - DNA, 25 bp, Homo sapien
tcccactccttaagaggacccctca

SEQ ID NO: 2697651 - DNA, 25 bp, Homo sapien
gtcacatctctcaaacgaatttggg

SEQ ID NO: 2697652 - DNA, 25 bp, Homo sapien
tctggaactgccaaatcgcccctgt

SEQ ID NO: 2697653 - DNA, 25 bp, Homo sapien
ggctaaaggtgtcggcagtcacatc

SEQ ID NO: 2697654 - DNA, 25 bp, Homo sapien
ttttcccgtctgtgcaatgggacca

SEQ ID NO: 2697655 - DNA, 25 bp, Homo sapien
gccacctcgctcagggcttcagttt

SEQ ID NO: 2697656 - DNA, 25 bp, Homo sapien
tcactcgacaggtgacaacgcccag

SEQ ID NO: 2697657 - DNA, 25 bp, Homo sapien
tcaaccaaggactttagagaccggc

SEQ ID NO: 2697658 - DNA, 25 bp, Homo sapien
tgaattctgtcaaggtcacgactcc

SEQ ID NO: 2697659 - DNA, 25 bp, Homo sapien
taaaacctctcatctgtcctaaccg

SEQ ID NO: 2697660 - DNA, 25 bp, Homo sapien
tatatcatgatgtcttctcgccagt

SEQ ID NO: 2697661 - DNA, 25 bp, Homo sapien
caattcttagttttacgaggcaggg

SEQ ID NO: 2697662 - DNA, 25 bp, Homo sapien
taaagtagagtaacaattcctgaag

SEQ ID NO: 2697663 - DNA, 25 bp, Homo sapien
aaagtagagtaacaattcctgaagt

SEQ ID NO: 2697664 - DNA, 25 bp, Homo sapien
ctgaagtgtggttgtaatttctact

SEQ ID NO: 2697665 - DNA, 25 bp, Homo sapien
agtaatacatatgtgggtttaccat

SEQ ID NO: 2697666 - DNA, 25 bp, Homo sapien
atatgtgggtttaccatcccaaaag

SEQ ID NO: 2697667 - DNA, 25 bp, Homo sapien
aatacatatgtgggtttaccatccc

SEQ ID NO: 2697668 - DNA, 25 bp, Homo sapien
catatgtgggtttaccatcccaaaa

SEQ ID NO: 2697669 - DNA, 25 bp, Homo sapien
cttcaccaggcacagaagtgtccaa

SEQ ID NO: 2697670 - DNA, 25 bp, Homo sapien
ttcaccaggcacagaagtgtccaaa

SEQ ID NO: 2697671 - DNA, 25 bp, Homo sapien
cacagaagtgtccaaaaatagagat

SEQ ID NO: 2697672 - DNA, 25 bp, Homo sapien
aggcacagaagtgtccaaaaataga

SEQ ID NO: 2697673 - DNA, 25 bp, Homo sapien
aatcagttatgctgcgaatggactt

SEQ ID NO: 2697674 - DNA, 25 bp, Homo sapien
tatgctgcgaatggacttaaagttg

SEQ ID NO: 2697675 - DNA, 25 bp, Homo sapien
cagttatgctgcgaatggacttaaa

SEQ ID NO: 2697676 - DNA, 25 bp, Homo sapien
tgcgaatggacttaaagttggttct

SEQ ID NO: 2697677 - DNA, 25 bp, Homo sapien
acagcattcatgatatgaactctgt

SEQ ID NO: 2697678 - DNA, 25 bp, Homo sapien
gtctccttgataagtttcaaattcc

SEQ ID NO: 2697679 - DNA, 25 bp, Homo sapien
ttccaggaaatgaccgtgtctcctt

SEQ ID NO: 2697680 - DNA, 25 bp, Homo sapien
gaccgtgtctccttgataagtttca

SEQ ID NO: 2697681 - DNA, 25 bp, Homo sapien
tgtaccatgaatcccagtacagacc

SEQ ID NO: 2697682 - DNA, 25 bp, Homo sapien
taaattatacagctgctggttattg

SEQ ID NO: 2697683 - DNA, 25 bp, Homo sapien
ctttaaattatacagctgctggtta

SEQ ID NO: 2697684 - DNA, 25 bp, Homo sapien
ggttattgtaccatgaatcccagta

SEQ ID NO: 2697685 - DNA, 25 bp, Homo sapien
tattttcatagtagatgcgactgct

SEQ ID NO: 2697686 - DNA, 25 bp, Homo sapien
tgcatgtgttgttgcggacttttag

SEQ ID NO: 2697687 - DNA, 25 bp, Homo sapien
tgcagaagtatatttgccataacat

SEQ ID NO: 2697688 - DNA, 25 bp, Homo sapien
gttgacgaactctgggaactcctag

SEQ ID NO: 2697689 - DNA, 25 bp, Homo sapien
ttccaggacccagctggtgttactt

SEQ ID NO: 2697690 - DNA, 25 bp, Homo sapien
gacccagctggtgttacttggaaga

SEQ ID NO: 2697691 - DNA, 25 bp, Homo sapien
cccagctggtgttacttggaagaca

SEQ ID NO: 2697692 - DNA, 25 bp, Homo sapien
ctggtgttacttggaagacacatat

SEQ ID NO: 2697693 - DNA, 25 bp, Homo sapien
ggtattagaagtagaatatctccat

SEQ ID NO: 2697694 - DNA, 25 bp, Homo sapien
tcagatttcgattttgataaagtga

SEQ ID NO: 2697695 - DNA, 25 bp, Homo sapien
tgatccagctgttcagtcgaaggtc

SEQ ID NO: 2697696 - DNA, 25 bp, Homo sapien
aataactctagtccctcttgtgatc

SEQ ID NO: 2697697 - DNA, 25 bp, Homo sapien
catagtagctaacatatctgaggag

SEQ ID NO: 2697698 - DNA, 25 bp, Homo sapien
gctaacatatctgaggagcttcaca

SEQ ID NO: 2697699 - DNA, 25 bp, Homo sapien
agtagcaattctagccagttccaaa

SEQ ID NO: 2697700 - DNA, 25 bp, Homo sapien
actgccatgaagtaagtattcctcc

SEQ ID NO: 2697701 - DNA, 25 bp, Homo sapien
tatagtatgtgttgaaggaaacagc

SEQ ID NO: 2697702 - DNA, 25 bp, Homo sapien
ctttatccatgcaaaaaagatggta

SEQ ID NO: 2697703 - DNA, 25 bp, Homo sapien
ttttcaacagctgtccaagtaagag

SEQ ID NO: 2697704 - DNA, 25 bp, Homo sapien
tgtaataaatgtgccagcatgcaag

SEQ ID NO: 2697705 - DNA, 25 bp, Homo sapien
cttgttaaagcttatgaatttgaat

SEQ ID NO: 2697706 - DNA, 25 bp, Homo sapien
tgttaaagcttatgaatttgaatat

SEQ ID NO: 2697707 - DNA, 25 bp, Homo sapien
tgtcttgttaaagcttatgaatttg

SEQ ID NO: 2697708 - DNA, 25 bp, Homo sapien
tcttgttaaagcttatgaatttgaa

SEQ ID NO: 2697709 - DNA, 25 bp, Homo sapien
atgtctttaacacaacgggacaagg

SEQ ID NO: 2697710 - DNA, 25 bp, Homo sapien
taaaaaacatgatggcaaatcctac

SEQ ID NO: 2697711 - DNA, 25 bp, Homo sapien
acgggacaaggttgatgacagctga

SEQ ID NO: 2697712 - DNA, 25 bp, Homo sapien
agtcatcaacttgtgatccaaaaac

SEQ ID NO: 2697713 - DNA, 25 bp, Homo sapien
ccaagaacaattcgaaattgtgcaa

SEQ ID NO: 2697714 - DNA, 25 bp, Homo sapien
taggattggcttgctgaataccagc

SEQ ID NO: 2697715 - DNA, 25 bp, Homo sapien
aatctccaagaacaattcgaaattg

SEQ ID NO: 2697716 - DNA, 25 bp, Homo sapien
tgatgaagtaaatgggtcccaagat

SEQ ID NO: 2697717 - DNA, 25 bp, Homo sapien
tttgccaagttcaaaatctagcctt

SEQ ID NO: 2697718 - DNA, 25 bp, Homo sapien
agctttcacttcagaataggtatca

SEQ ID NO: 2697719 - DNA, 25 bp, Homo sapien
gcctattgaatagtcagctttcact

SEQ ID NO: 2697720 - DNA, 25 bp, Homo sapien
taggtatcattaataattgccaaga

SEQ ID NO: 2697721 - DNA, 25 bp, Homo sapien
tcagtctgaatttctcgagaacatt

SEQ ID NO: 2697722 - DNA, 25 bp, Homo sapien
gaatttctcgagaacatttttgtaa

SEQ ID NO: 2697723 - DNA, 25 bp, Homo sapien
tctgaatttctcgagaacatttttg

SEQ ID NO: 2697724 - DNA, 25 bp, Homo sapien
cagtctgaatttctcgagaacattt

SEQ ID NO: 2697725 - DNA, 25 bp, Homo sapien
tctggcttgttcagccaaatctccg

SEQ ID NO: 2697726 - DNA, 25 bp, Homo sapien
tcttctggcttgttcagccaaatct

SEQ ID NO: 2697727 - DNA, 25 bp, Homo sapien
ggcttgttcagccaaatctccgctg

SEQ ID NO: 2697728 - DNA, 25 bp, Homo sapien
ttcagccaaatctccgctgcctttg

SEQ ID NO: 2697729 - DNA, 25 bp, Homo sapien
tcatctgctctgcgttttgaatctc

SEQ ID NO: 2697730 - DNA, 25 bp, Homo sapien
tttcatctgctctgcgttttgaatc

SEQ ID NO: 2697731 - DNA, 25 bp, Homo sapien
ttttcatctgctctgcgttttgaat

SEQ ID NO: 2697732 - DNA, 25 bp, Homo sapien
ttcatctgctctgcgttttgaatct

SEQ ID NO: 2697733 - DNA, 25 bp, Homo sapien
aattgatgtagtgtaattccttctc

SEQ ID NO: 2697734 - DNA, 25 bp, Homo sapien
cacttgatttagcttcaaattgatg

SEQ ID NO: 2697735 - DNA, 25 bp, Homo sapien
tatagagctgaaacctttctcacca

SEQ ID NO: 2697736 - DNA, 25 bp, Homo sapien
gctgaaacctttctcaccacttgat

SEQ ID NO: 2697737 - DNA, 25 bp, Homo sapien
ccctttggtcaatcataacatgctg

SEQ ID NO: 2697738 - DNA, 25 bp, Homo sapien
tacaggatgtgtagtggtatgcccc

SEQ ID NO: 2697739 - DNA, 25 bp, Homo sapien
tacaacagcagatttgggtcaggct

SEQ ID NO: 2697740 - DNA, 25 bp, Homo sapien
gaagcatgaacctcagacttctggc

SEQ ID NO: 2697741 - DNA, 25 bp, Homo sapien
gtactacagatacatccttttagca

SEQ ID NO: 2697742 - DNA, 25 bp, Homo sapien
acctttagcaaacatatggtttact

SEQ ID NO: 2697743 - DNA, 25 bp, Homo sapien
tgggagagtaagtaggccctctcaa

SEQ ID NO: 2697744 - DNA, 25 bp, Homo sapien
cctctcaagggagcgtaagtgatgt

SEQ ID NO: 2697745 - DNA, 25 bp, Homo sapien
gaatctcattttgtacttggttgtg

SEQ ID NO: 2697746 - DNA, 25 bp, Homo sapien
cattttgtacttggttgtggtgcca

SEQ ID NO: 2697747 - DNA, 25 bp, Homo sapien
atctcattttgtacttggttgtggt

SEQ ID NO: 2697748 - DNA, 25 bp, Homo sapien
ctcattttgtacttggttgtggtgc

SEQ ID NO: 2697749 - DNA, 25 bp, Homo sapien
cagaaagaggatcgtgttccagtgc

SEQ ID NO: 2697750 - DNA, 25 bp, Homo sapien
tcaaaatccatataagatacgttcc

SEQ ID NO: 2697751 - DNA, 25 bp, Homo sapien
ccagtgcttgaggagtacagagagt

SEQ ID NO: 2697752 - DNA, 25 bp, Homo sapien
ctatcatcgtgtgtacttggctggt

SEQ ID NO: 2697753 - DNA, 25 bp, Homo sapien
cagtatgtctcatattaagacaact

SEQ ID NO: 2697754 - DNA, 25 bp, Homo sapien
taacagtatgtctcatattaagaca

SEQ ID NO: 2697755 - DNA, 25 bp, Homo sapien
tttagtaacagtatgtctcatatta

SEQ ID NO: 2697756 - DNA, 25 bp, Homo sapien
tatttgaacttatgtttagtaacag

SEQ ID NO: 2697757 - DNA, 25 bp, Homo sapien
tttggaggatgttgaggccactgtc

SEQ ID NO: 2697758 - DNA, 25 bp, Homo sapien
ggatgttgaggccactgtcgcaccg

SEQ ID NO: 2697759 - DNA, 25 bp, Homo sapien
atgttgaggccactgtcgcaccgct

SEQ ID NO: 2697760 - DNA, 25 bp, Homo sapien
ttgaggccactgtcgcaccgctgtt

SEQ ID NO: 2697761 - DNA, 25 bp, Homo sapien
tcatttgagggcatacaggataact

SEQ ID NO: 2697762 - DNA, 25 bp, Homo sapien
tcctgtagcagaagataaccatcac

SEQ ID NO: 2697763 - DNA, 25 bp, Homo sapien
cacagtttaatgttagaggccaggt

SEQ ID NO: 2697764 - DNA, 25 bp, Homo sapien
tgctgtcaggtgaattagctcctcc

SEQ ID NO: 2697765 - DNA, 25 bp, Homo sapien
ccatgatgggtctcgtcttttctgt

SEQ ID NO: 2697766 - DNA, 25 bp, Homo sapien
tgagccaccatgatgggtctcgtct

SEQ ID NO: 2697767 - DNA, 25 bp, Homo sapien
gagccaccatgatgggtctcgtctt

SEQ ID NO: 2697768 - DNA, 25 bp, Homo sapien
ccaccatgatgggtctcgtcttttc

SEQ ID NO: 2697769 - DNA, 25 bp, Homo sapien
ccctctgctgattgctcttcctctt

SEQ ID NO: 2697770 - DNA, 25 bp, Homo sapien
cccctctgctgattgctcttcctct

SEQ ID NO: 2697771 - DNA, 25 bp, Homo sapien
gaatctcttaaatttggaatggccc

SEQ ID NO: 2697772 - DNA, 25 bp, Homo sapien
gaaatagcttttgcaagtcaccagt

SEQ ID NO: 2697773 - DNA, 25 bp, Homo sapien
caagttcagaaaaaaccctctctcg

SEQ ID NO: 2697774 - DNA, 25 bp, Homo sapien
tgttttacttgacctaacagcaagg

SEQ ID NO: 2697775 - DNA, 25 bp, Homo sapien
cagacttgggtgtattagatgaaca

SEQ ID NO: 2697776 - DNA, 25 bp, Homo sapien
ttacctttcatgtttagatctacaa

SEQ ID NO: 2697777 - DNA, 25 bp, Homo sapien
tacccagaattgattttatctctca

SEQ ID NO: 2697778 - DNA, 25 bp, Homo sapien
gatctacaatctacccagaattgat

SEQ ID NO: 2697779 - DNA, 25 bp, Homo sapien
tttatctctcatgtgtgaggttggg

SEQ ID NO: 2697780 - DNA, 25 bp, Homo sapien
ttagcccctcaaattgcatctctgc

SEQ ID NO: 2697781 - DNA, 25 bp, Homo sapien
ggtatcactgatactattagcccct

SEQ ID NO: 2697782 - DNA, 25 bp, Homo sapien
tgacttcttatagttggcactagtg

SEQ ID NO: 2697783 - DNA, 25 bp, Homo sapien
aaaacagacgagaaatgaaagacct

SEQ ID NO: 2697784 - DNA, 25 bp, Homo sapien
atgtgtgtgccagtacactcagcta

SEQ ID NO: 2697785 - DNA, 25 bp, Homo sapien
acatgtgtgtgccagtacactcagc

SEQ ID NO: 2697786 - DNA, 25 bp, Homo sapien
gagcacatgtgtgtgccagtacact

SEQ ID NO: 2697787 - DNA, 25 bp, Homo sapien
gcacatgtgtgtgccagtacactca

SEQ ID NO: 2697788 - DNA, 25 bp, Homo sapien
tcaagtcaatggaaatgctgagaca

SEQ ID NO: 2697789 - DNA, 25 bp, Homo sapien
cagagatacgacagcggagaagagg

SEQ ID NO: 2697790 - DNA, 25 bp, Homo sapien
ggtggatttggttaaggaagcagat

SEQ ID NO: 2697791 - DNA, 25 bp, Homo sapien
agacagtggagtggcttcggcagag

SEQ ID NO: 2697792 - DNA, 25 bp, Homo sapien
gaatggatgttgcttgtctgagact

SEQ ID NO: 2697793 - DNA, 25 bp, Homo sapien
tgggtatacacttgatccagtggac

SEQ ID NO: 2697794 - DNA, 25 bp, Homo sapien
gacaaaagaatgcttgctcagtgag

SEQ ID NO: 2697795 - DNA, 25 bp, Homo sapien
catagagattttggaacttgcccct

SEQ ID NO: 2697796 - DNA, 25 bp, Homo sapien
tgcccgctggcgctgcgcctcttcc

SEQ ID NO: 2697797 - DNA, 25 bp, Homo sapien
ctctcctgcccgctggcgctgcgcc

SEQ ID NO: 2697798 - DNA, 25 bp, Homo sapien
ctcctgcccgctggcgctgcgcctc

SEQ ID NO: 2697799 - DNA, 25 bp, Homo sapien
cctgcccgctggcgctgcgcctctt

SEQ ID NO: 2697800 - DNA, 25 bp, Homo sapien
gcgacaccccacgtttctttgctga

SEQ ID NO: 2697801 - DNA, 25 bp, Homo sapien
tccagagtagatggcgcgacacccc

SEQ ID NO: 2697802 - DNA, 25 bp, Homo sapien
gatggcgcgacaccccacgtttctt

SEQ ID NO: 2697803 - DNA, 25 bp, Homo sapien
agtagatggcgcgacaccccacgtt

SEQ ID NO: 2697804 - DNA, 25 bp, Homo sapien
ctgcagtgcagttgagcgggcgtgc

SEQ ID NO: 2697805 - DNA, 25 bp, Homo sapien
gcagttgagcgggcgtgcccctcac

SEQ ID NO: 2697806 - DNA, 25 bp, Homo sapien
tgcagttgagcgggcgtgcccctca

SEQ ID NO: 2697807 - DNA, 25 bp, Homo sapien
cagtgcagttgagcgggcgtgcccc

SEQ ID NO: 2697808 - DNA, 25 bp, Homo sapien
aggaagatgaagccgtgtccctggc

SEQ ID NO: 2697809 - DNA, 25 bp, Homo sapien
ggaagatgaagccgtgtccctggct

SEQ ID NO: 2697810 - DNA, 25 bp, Homo sapien
agaggaagatgaagccgtgtccctg

SEQ ID NO: 2697811 - DNA, 25 bp, Homo sapien
aagaggaagatgaagccgtgtccct

SEQ ID NO: 2697812 - DNA, 25 bp, Homo sapien
gcgcatgcgcgggttgcaggtcgcc

SEQ ID NO: 2697813 - DNA, 25 bp, Homo sapien
tttcgggatgtggaggactctagca

SEQ ID NO: 2697814 - DNA, 25 bp, Homo sapien
cgcgcctgctctcgggcgttgcgtt

SEQ ID NO: 2697815 - DNA, 25 bp, Homo sapien
gcaggtggggcgttccgtggagagg

SEQ ID NO: 2697816 - DNA, 25 bp, Homo sapien
cggggcatcgcggttccaacggtag

SEQ ID NO: 2697817 - DNA, 25 bp, Homo sapien
ggcatcgcggttccaacggtaggta

SEQ ID NO: 2697818 - DNA, 25 bp, Homo sapien
gcatcgcggttccaacggtaggtaa

SEQ ID NO: 2697819 - DNA, 25 bp, Homo sapien
gaggcttctcggccgcggagccact

SEQ ID NO: 2697820 - DNA, 25 bp, Homo sapien
caggaagaggcttctcggccgcgga

SEQ ID NO: 2697821 - DNA, 25 bp, Homo sapien
agttctcgccctcttgccgtcgccg

SEQ ID NO: 2697822 - DNA, 25 bp, Homo sapien
tcagttctcgccctcttgccgtcgc

SEQ ID NO: 2697823 - DNA, 25 bp, Homo sapien
cccgcgccacagccgtagctttaac

SEQ ID NO: 2697824 - DNA, 25 bp, Homo sapien
ccccgcgccacagccgtagctttaa

SEQ ID NO: 2697825 - DNA, 25 bp, Homo sapien
gccccgcgccacagccgtagcttta

SEQ ID NO: 2697826 - DNA, 25 bp, Homo sapien
ctgttccgcgtctgcgtcgccacca

SEQ ID NO: 2697827 - DNA, 25 bp, Homo sapien
cccctgttccgcgtctgcgtcgcca

SEQ ID NO: 2697828 - DNA, 25 bp, Homo sapien
ttccgcgtctgcgtcgccaccaccg

SEQ ID NO: 2697829 - DNA, 25 bp, Homo sapien
tgttccgcgtctgcgtcgccaccac

SEQ ID NO: 2697830 - DNA, 25 bp, Homo sapien
tctccttcgtccagacgctttgctt

SEQ ID NO: 2697831 - DNA, 25 bp, Homo sapien
tgtcactaggctaacacagcagcac

SEQ ID NO: 2697832 - DNA, 25 bp, Homo sapien
ctgtggaccaggtgtgggccataca

SEQ ID NO: 2697833 - DNA, 25 bp, Homo sapien
tctattgggaagcagtcgttgtaat

SEQ ID NO: 2697834 - DNA, 25 bp, Homo sapien
tctgcactgggattagcctgtactc

SEQ ID NO: 2697835 - DNA, 25 bp, Homo sapien
cccaagtttgttcgggcaagaggtg

SEQ ID NO: 2697836 - DNA, 25 bp, Homo sapien
caggctggcggctgttttggcagca

SEQ ID NO: 2697837 - DNA, 25 bp, Homo sapien
tagaggaatgttgaatctgcactgg

SEQ ID NO: 2697838 - DNA, 25 bp, Homo sapien
ccttttacttcaagtcgagggagtg

SEQ ID NO: 2697839 - DNA, 25 bp, Homo sapien
gccttcaatggatctgctcagagca

SEQ ID NO: 2697840 - DNA, 25 bp, Homo sapien
tctgctcagagcacttgacttgtac

SEQ ID NO: 2697841 - DNA, 25 bp, Homo sapien
caagtcgagggagtgggccttcaat

SEQ ID NO: 2697842 - DNA, 25 bp, Homo sapien
ccactgttttaactgaagcaacaag

SEQ ID NO: 2697843 - DNA, 25 bp, Homo sapien
tattataaaagaaaccatcttcttc

SEQ ID NO: 2697844 - DNA, 25 bp, Homo sapien
tggtcccccaaaattgtcgcagttg

SEQ ID NO: 2697845 - DNA, 25 bp, Homo sapien
aaaggccaaaccagaattattgagg

SEQ ID NO: 2697846 - DNA, 25 bp, Homo sapien
gtgcctgacccataatagctgccca

SEQ ID NO: 2697847 - DNA, 25 bp, Homo sapien
taaatggcacaaaggttattctggg

SEQ ID NO: 2697848 - DNA, 25 bp, Homo sapien
gcaaagtggcacagaaagatttcca

SEQ ID NO: 2697849 - DNA, 25 bp, Homo sapien
tgggatttgtacaccctggaacagt

SEQ ID NO: 2697850 - DNA, 25 bp, Homo sapien
ctccaaactggatgtgactggcacc

SEQ ID NO: 2697851 - DNA, 25 bp, Homo sapien
aactggatgtgactggcaccagtgg

SEQ ID NO: 2697852 - DNA, 25 bp, Homo sapien
caaactggatgtgactggcaccagt

SEQ ID NO: 2697853 - DNA, 25 bp, Homo sapien
tccaaactggatgtgactggcacca

SEQ ID NO: 2697854 - DNA, 25 bp, Homo sapien
caaaagcctagagcctgtaaggaac

SEQ ID NO: 2697855 - DNA, 25 bp, Homo sapien
ttctttcccctatatggatacaggc

SEQ ID NO: 2697856 - DNA, 25 bp, Homo sapien
caacttggctggtcaaatgatagga

SEQ ID NO: 2697857 - DNA, 25 bp, Homo sapien
agaccctcctgcctagatttctggt

SEQ ID NO: 2697858 - DNA, 25 bp, Homo sapien
gatgtacaccttcatgttttggagc

SEQ ID NO: 2697859 - DNA, 25 bp, Homo sapien
ggcgttgtcagtttgccacagaaaa

SEQ ID NO: 2697860 - DNA, 25 bp, Homo sapien
ccacagaaaatgtggtctgaatgga

SEQ ID NO: 2697861 - DNA, 25 bp, Homo sapien
cagctgtagttaaactgcaaactgc

SEQ ID NO: 2697862 - DNA, 25 bp, Homo sapien
gaagggtgggaagagcttatattta

SEQ ID NO: 2697863 - DNA, 25 bp, Homo sapien
tctagactcaacatcatagttgggt

SEQ ID NO: 2697864 - DNA, 25 bp, Homo sapien
gtagagacagttcttgggtctggaa

SEQ ID NO: 2697865 - DNA, 25 bp, Homo sapien
aaaactttcacttcatggtctgggg

SEQ ID NO: 2697866 - DNA, 25 bp, Homo sapien
tcgacgctggttctttatctctaag

SEQ ID NO: 2697867 - DNA, 25 bp, Homo sapien
gcagccaagtttgcctgaacagact

SEQ ID NO: 2697868 - DNA, 25 bp, Homo sapien
catcagcctgctgccttgactgcga

SEQ ID NO: 2697869 - DNA, 25 bp, Homo sapien
ccttgactgcgatactggatggaat

SEQ ID NO: 2697870 - DNA, 25 bp, Homo sapien
caaacaactgtttactatgtctctg

SEQ ID NO: 2697871 - DNA, 25 bp, Homo sapien
aattgtgttgtctgcactgtagtgg

SEQ ID NO: 2697872 - DNA, 25 bp, Homo sapien
tataggtcctttgacaagcaaacaa

SEQ ID NO: 2697873 - DNA, 25 bp, Homo sapien
tttttgccctgcttttacatcaaga

SEQ ID NO: 2697874 - DNA, 25 bp, Homo sapien
ttctcattacttggcgttctctcag

SEQ ID NO: 2697875 - DNA, 25 bp, Homo sapien
tagggctaataggagctttttcctc

SEQ ID NO: 2697876 - DNA, 25 bp, Homo sapien
gagagggctagttttagggctaata

SEQ ID NO: 2697877 - DNA, 25 bp, Homo sapien
ggagctttttcctcgtgacaggtac

SEQ ID NO: 2697878 - DNA, 25 bp, Homo sapien
gtctaatatcctgaaaaagtggtgg

SEQ ID NO: 2697879 - DNA, 25 bp, Homo sapien
cagctctgacggtctgtgagtctaa

SEQ ID NO: 2697880 - DNA, 25 bp, Homo sapien
ccagctcttactaggtgtgtgaact

SEQ ID NO: 2697881 - DNA, 25 bp, Homo sapien
tggctaccaaaaggagcatgtgggt

SEQ ID NO: 2697882 - DNA, 25 bp, Homo sapien
tggcttacactgagagaatgtggag

SEQ ID NO: 2697883 - DNA, 25 bp, Homo sapien
ccaatatttgtcagaacttctcatg

SEQ ID NO: 2697884 - DNA, 25 bp, Homo sapien
tgtagtaaactcagcttgcatttga

SEQ ID NO: 2697885 - DNA, 25 bp, Homo sapien
tggatgccatggtatctgaagggac

SEQ ID NO: 2697886 - DNA, 25 bp, Homo sapien
gtgagggatactgcttcactctctg

SEQ ID NO: 2697887 - DNA, 25 bp, Homo sapien
agggatactgcttcactctctggac

SEQ ID NO: 2697888 - DNA, 25 bp, Homo sapien
cttccatgtgatgtgagggatactg

SEQ ID NO: 2697889 - DNA, 25 bp, Homo sapien
ttcactctctggacatcattttctc

SEQ ID NO: 2697890 - DNA, 25 bp, Homo sapien
ccaagttccccaacaatatgctctg

SEQ ID NO: 2697891 - DNA, 25 bp, Homo sapien
aaatgaggtcctcctgtgtgaaaat

SEQ ID NO: 2697892 - DNA, 25 bp, Homo sapien
tgaaaatggcatcagttggtggtct

SEQ ID NO: 2697893 - DNA, 25 bp, Homo sapien
tccccaacaatatgctctgggaaaa

SEQ ID NO: 2697894 - DNA, 25 bp, Homo sapien
tgcctaccccagtggaccaggtcca

SEQ ID NO: 2697895 - DNA, 25 bp, Homo sapien
cctgcctaccccagtggaccaggtc

SEQ ID NO: 2697896 - DNA, 25 bp, Homo sapien
ccctgcctaccccagtggaccaggt

SEQ ID NO: 2697897 - DNA, 25 bp, Homo sapien
cctaccccagtggaccaggtccagc

SEQ ID NO: 2697898 - DNA, 25 bp, Homo sapien
cccagagcataaacaggttccccat

SEQ ID NO: 2697899 - DNA, 25 bp, Homo sapien
tgcccagagcataaacaggttcccc

SEQ ID NO: 2697900 - DNA, 25 bp, Homo sapien
ctgcccagagcataaacaggttccc

SEQ ID NO: 2697901 - DNA, 25 bp, Homo sapien
gcccagagcataaacaggttcccca

SEQ ID NO: 2697902 - DNA, 25 bp, Homo sapien
ctgaatgcagcacagcatatgccca

SEQ ID NO: 2697903 - DNA, 25 bp, Homo sapien
aatgcagcacagcatatgcccagag

SEQ ID NO: 2697904 - DNA, 25 bp, Homo sapien
aggcagaggcactgaatgcagcaca

SEQ ID NO: 2697905 - DNA, 25 bp, Homo sapien
caggcagaggcactgaatgcagcac

SEQ ID NO: 2697906 - DNA, 25 bp, Homo sapien
gggacctgttatcaggaaattgttc

SEQ ID NO: 2697907 - DNA, 25 bp, Homo sapien
tgggacctgttatcaggaaattgtt

SEQ ID NO: 2697908 - DNA, 25 bp, Homo sapien
cttgggacctgttatcaggaaattg

SEQ ID NO: 2697909 - DNA, 25 bp, Homo sapien
ttgggacctgttatcaggaaattgt

SEQ ID NO: 2697910 - DNA, 25 bp, Homo sapien
aagagcattttcagggcagttccag

SEQ ID NO: 2697911 - DNA, 25 bp, Homo sapien
cactagtcgtgtaggtcagataggc

SEQ ID NO: 2697912 - DNA, 25 bp, Homo sapien
aactggaacttgcactcctcgatgc

SEQ ID NO: 2697913 - DNA, 25 bp, Homo sapien
tccagcgttcccaagcaaactggaa

SEQ ID NO: 2697914 - DNA, 25 bp, Homo sapien
ttcgaagtcacccatgctacagttc

SEQ ID NO: 2697915 - DNA, 25 bp, Homo sapien
gtttttccattgtttgacccatcac

SEQ ID NO: 2697916 - DNA, 25 bp, Homo sapien
acagccacagttttcgaagtcaccc

SEQ ID NO: 2697917 - DNA, 25 bp, Homo sapien
cccatgctacagttcttggtgatga

SEQ ID NO: 2697918 - DNA, 25 bp, Homo sapien
tcttcccacccccattagaaagctc

SEQ ID NO: 2697919 - DNA, 25 bp, Homo sapien
tttccccaaattccacattgtcgct

SEQ ID NO: 2697920 - DNA, 25 bp, Homo sapien
ccaaattccacattgtcgctgcagc

SEQ ID NO: 2697921 - DNA, 25 bp, Homo sapien
ccccaaattccacattgtcgctgca

SEQ ID NO: 2697922 - DNA, 25 bp, Homo sapien
tctgccggccctgttgttgtgaaga

SEQ ID NO: 2697923 - DNA, 25 bp, Homo sapien
gcatgtctgtatgctgcagctccca

SEQ ID NO: 2697924 - DNA, 25 bp, Homo sapien
acttgaccgtacagcaccactggaa

SEQ ID NO: 2697925 - DNA, 25 bp, Homo sapien
cctctgcgctaggaaggaaggcctc

SEQ ID NO: 2697926 - DNA, 25 bp, Homo sapien
taaaaagatcagttccgcctctgcg

SEQ ID NO: 2697927 - DNA, 25 bp, Homo sapien
gagcgtgcgcagtaatacttgctca

SEQ ID NO: 2697928 - DNA, 25 bp, Homo sapien
tgcctggggagcgtgcgcagtaata

SEQ ID NO: 2697929 - DNA, 25 bp, Homo sapien
gggagcgtgcgcagtaatacttgct

SEQ ID NO: 2697930 - DNA, 25 bp, Homo sapien
cctggggagcgtgcgcagtaatact

SEQ ID NO: 2697931 - DNA, 25 bp, Homo sapien
ctctctaagagagaagctatgtccc

SEQ ID NO: 2697932 - DNA, 25 bp, Homo sapien
ggtctgccaaagtcaggaggcccag

SEQ ID NO: 2697933 - DNA, 25 bp, Homo sapien
tgcataagtacaggcacaaagatgg

SEQ ID NO: 2697934 - DNA, 25 bp, Homo sapien
gctatgtccccttccactgatgcaa

SEQ ID NO: 2697935 - DNA, 25 bp, Homo sapien
gatatagaccccaaaccaaactctc

SEQ ID NO: 2697936 - DNA, 25 bp, Homo sapien
tagatatagaccccaaaccaaactc

SEQ ID NO: 2697937 - DNA, 25 bp, Homo sapien
agatatagaccccaaaccaaactct

SEQ ID NO: 2697938 - DNA, 25 bp, Homo sapien
ctagatatagaccccaaaccaaact

SEQ ID NO: 2697939 - DNA, 25 bp, Homo sapien
tgaacagaactctttcgttttttgc

SEQ ID NO: 2697940 - DNA, 25 bp, Homo sapien
ttgcttctattctcctgattcccag

SEQ ID NO: 2697941 - DNA, 25 bp, Homo sapien
tatcagcatagatttgtagccacag

SEQ ID NO: 2697942 - DNA, 25 bp, Homo sapien
ttctattctcctgattcccagcagc

SEQ ID NO: 2697943 - DNA, 25 bp, Homo sapien
ccagagacggtttatgagctgcaaa

SEQ ID NO: 2697944 - DNA, 25 bp, Homo sapien
cttgtctgggtaggtcatagtcacc

SEQ ID NO: 2697945 - DNA, 25 bp, Homo sapien
ccaggttatactgggtgctggtttc

SEQ ID NO: 2697946 - DNA, 25 bp, Homo sapien
ggagcatcgctcttgtgggaccttg

SEQ ID NO: 2697947 - DNA, 25 bp, Homo sapien
tactccccaagttacctaggttgca

SEQ ID NO: 2697948 - DNA, 25 bp, Homo sapien
caaatgcaggtaggtagaatccaca

SEQ ID NO: 2697949 - DNA, 25 bp, Homo sapien
cccaggatgcccaagttaagagggc

SEQ ID NO: 2697950 - DNA, 25 bp, Homo sapien
caaagggagtaatagaagtcccagc

SEQ ID NO: 2697951 - DNA, 25 bp, Homo sapien
tattcagatttaggaaaccagcggc

SEQ ID NO: 2697952 - DNA, 25 bp, Homo sapien
catgcgtgctttccatattactaag

SEQ ID NO: 2697953 - DNA, 25 bp, Homo sapien
aaaattggattcatcctgaacatgc

SEQ ID NO: 2697954 - DNA, 25 bp, Homo sapien
aaccagcggctaagctcccagggct

SEQ ID NO: 2697955 - DNA, 25 bp, Homo sapien
ccttggcaggaaggcgatggatgta

SEQ ID NO: 2697956 - DNA, 25 bp, Homo sapien
gaagggatatagggctgtaactgac

SEQ ID NO: 2697957 - DNA, 25 bp, Homo sapien
gccagcttgttaaggatgaaccaaa

SEQ ID NO: 2697958 - DNA, 25 bp, Homo sapien
tgttgtttctggcacagggtccatg

SEQ ID NO: 2697959 - DNA, 25 bp, Homo sapien
gctagaaacgttcgtttttctctga

SEQ ID NO: 2697960 - DNA, 25 bp, Homo sapien
caataggattatgagtagtttgtga

SEQ ID NO: 2697961 - DNA, 25 bp, Homo sapien
aataaacagccctcctttgacattc

SEQ ID NO: 2697962 - DNA, 25 bp, Homo sapien
gccttttgtcatcaataggattatg

SEQ ID NO: 2697963 - DNA, 25 bp, Homo sapien
tcaagatcactgagtcccatcacag

SEQ ID NO: 2697964 - DNA, 25 bp, Homo sapien
tagactgcaagaagccgatggcaat

SEQ ID NO: 2697965 - DNA, 25 bp, Homo sapien
tgacaagggaccttctcaagatcac

SEQ ID NO: 2697966 - DNA, 25 bp, Homo sapien
gcaggtggctgaattaagtgatctc

SEQ ID NO: 2697967 - DNA, 25 bp, Homo sapien
caatgatgtaacactaggtaatgga

SEQ ID NO: 2697968 - DNA, 25 bp, Homo sapien
tgttacagcatcatcacattacctg

SEQ ID NO: 2697969 - DNA, 25 bp, Homo sapien
tacattttcccaagcacatatccta

SEQ ID NO: 2697970 - DNA, 25 bp, Homo sapien
catgtgtcagatatgcttccctcaa

SEQ ID NO: 2697971 - DNA, 25 bp, Homo sapien
tatgaaatgcttaataaattgtgca

SEQ ID NO: 2697972 - DNA, 25 bp, Homo sapien
aggagccatgctaataatctctctg

SEQ ID NO: 2697973 - DNA, 25 bp, Homo sapien
gcttaataaattgtgcatcatcctt

SEQ ID NO: 2697974 - DNA, 25 bp, Homo sapien
aaatgcttaataaattgtgcatcat

SEQ ID NO: 2697975 - DNA, 25 bp, Homo sapien
tgatccagcagttctgctcttggaa

SEQ ID NO: 2697976 - DNA, 25 bp, Homo sapien
ttactacctgtcatgcgcagagccc

SEQ ID NO: 2697977 - DNA, 25 bp, Homo sapien
cgcagagccctgtttagtcccatca

SEQ ID NO: 2697978 - DNA, 25 bp, Homo sapien
ctgtcctatagaattccttgtgctc

SEQ ID NO: 2697979 - DNA, 25 bp, Homo sapien
gcagaacagatggatggtcacagaa

SEQ ID NO: 2697980 - DNA, 25 bp, Homo sapien
tgcaactcatagacaaagggcttgt

SEQ ID NO: 2697981 - DNA, 25 bp, Homo sapien
gatgctcaatctttaggtgggaaaa

SEQ ID NO: 2697982 - DNA, 25 bp, Homo sapien
gtaaatggcacaacccctatcaaag

SEQ ID NO: 2697983 - DNA, 25 bp, Homo sapien
taccatatggctgtggagatgcggc

SEQ ID NO: 2697984 - DNA, 25 bp, Homo sapien
gacccatggacttaactagcctgaa

SEQ ID NO: 2697985 - DNA, 25 bp, Homo sapien
caattcctgcgagacctgatgctga

SEQ ID NO: 2697986 - DNA, 25 bp, Homo sapien
tctctctaagggtcggattcgcacc

SEQ ID NO: 2697987 - DNA, 25 bp, Homo sapien
aaaaaagtgaccactgcatcaatag

SEQ ID NO: 2697988 - DNA, 25 bp, Homo sapien
acagataagcttaggagagctagcc

SEQ ID NO: 2697989 - DNA, 25 bp, Homo sapien
ctgcatcaatagtggctgctggaat

SEQ ID NO: 2697990 - DNA, 25 bp, Homo sapien
gataagcttaggagagctagcctaa

SEQ ID NO: 2697991 - DNA, 25 bp, Homo sapien
aaaaaccctactagctgtgcagcgg

SEQ ID NO: 2697992 - DNA, 25 bp, Homo sapien
tgtggtccctaactacaagctactc

SEQ ID NO: 2697993 - DNA, 25 bp, Homo sapien
gctaaagaactcagtataggctggg

SEQ ID NO: 2697994 - DNA, 25 bp, Homo sapien
cataatggcagtactcagcaaatag

SEQ ID NO: 2697995 - DNA, 25 bp, Homo sapien
aagaaagccatcatgcttgtatgga

SEQ ID NO: 2697996 - DNA, 25 bp, Homo sapien
catcatgcttgtatggagagctgca

SEQ ID NO: 2697997 - DNA, 25 bp, Homo sapien
aggatcaggaagctattcaggcaca

SEQ ID NO: 2697998 - DNA, 25 bp, Homo sapien
tgtctgtagtgaggatcaggaagct

SEQ ID NO: 2697999 - DNA, 25 bp, Homo sapien
ggataatgaacctcctgtgagcgag

SEQ ID NO: 2698000 - DNA, 25 bp, Homo sapien
tcaaggagaaggctacttgtcagaa

SEQ ID NO: 2698001 - DNA, 25 bp, Homo sapien
gcctaaggaagaggatcaaggagaa

SEQ ID NO: 2698002 - DNA, 25 bp, Homo sapien
atgatggcttcagcatacacaatgc

SEQ ID NO: 2698003 - DNA, 25 bp, Homo sapien
ggttcattcctaacttggaggaaga

SEQ ID NO: 2698004 - DNA, 25 bp, Homo sapien
tatgttgtgtgttctagtgctttgg

SEQ ID NO: 2698005 - DNA, 25 bp, Homo sapien
gaggaagatcttaagtaaggttaga

SEQ ID NO: 2698006 - DNA, 25 bp, Homo sapien
gatgatgaacttattcaatgcagga

SEQ ID NO: 2698007 - DNA, 25 bp, Homo sapien
gaagcgacagatttattcataccag

SEQ ID NO: 2698008 - DNA, 25 bp, Homo sapien
tagccctgattgaccacagcatgga

SEQ ID NO: 2698009 - DNA, 25 bp, Homo sapien
gaattgggcttgaatctcaggcctg

SEQ ID NO: 2698010 - DNA, 25 bp, Homo sapien
tgaactgctttcttagggcttgcaa

SEQ ID NO: 2698011 - DNA, 25 bp, Homo sapien
gccccagactggtatggagacttct

SEQ ID NO: 2698012 - DNA, 25 bp, Homo sapien
gggactttgccgagtaccccagtca

SEQ ID NO: 2698013 - DNA, 25 bp, Homo sapien
gatttagtacttggaagggagtgcc

SEQ ID NO: 2698014 - DNA, 25 bp, Homo sapien
cagtaacagatgattcaccccagaa

SEQ ID NO: 2698015 - DNA, 25 bp, Homo sapien
tagggtgcttgctttgtcttaaggg

SEQ ID NO: 2698016 - DNA, 25 bp, Homo sapien
ttgaggcttcagcagccaactcctg

SEQ ID NO: 2698017 - DNA, 25 bp, Homo sapien
acaatcttaacaggagtgcacaggg

SEQ ID NO: 2698018 - DNA, 25 bp, Homo sapien
cttagcaacaatcttaacaggagtg

SEQ ID NO: 2698019 - DNA, 25 bp, Homo sapien
gttaccaactgtcgtggattcgcac

SEQ ID NO: 2698020 - DNA, 25 bp, Homo sapien
ggattcgcacttattttgcctggga

SEQ ID NO: 2698021 - DNA, 25 bp, Homo sapien
tgagttctaatgtgggtccgggtta

SEQ ID NO: 2698022 - DNA, 25 bp, Homo sapien
gacctctgagttctaatgtgggtcc

SEQ ID NO: 2698023 - DNA, 25 bp, Homo sapien
taaattacgcgctgcgttcgttcgg

SEQ ID NO: 2698024 - DNA, 25 bp, Homo sapien
gaagctggactttcgcagccgcaga

SEQ ID NO: 2698025 - DNA, 25 bp, Homo sapien
gggatactggcttactcacacctag

SEQ ID NO: 2698026 - DNA, 25 bp, Homo sapien
tcagatagggaagcctgcagctacc

SEQ ID NO: 2698027 - DNA, 25 bp, Homo sapien
caaggaccaccgtgagaacagagat

SEQ ID NO: 2698028 - DNA, 25 bp, Homo sapien
ttaaagcctattccgcgcgggcaag

SEQ ID NO: 2698029 - DNA, 25 bp, Homo sapien
gatggctgcagctccgatttcttaa

SEQ ID NO: 2698030 - DNA, 25 bp, Homo sapien
cattaagagaaaaacagatggctgc

SEQ ID NO: 2698031 - DNA, 25 bp, Homo sapien
cctcgcccgccggtgctgtggaggt

SEQ ID NO: 2698032 - DNA, 25 bp, Homo sapien
tggtgtcaggatccctcggctcctt

SEQ ID NO: 2698033 - DNA, 25 bp, Homo sapien
aaagcagaaggctacgcctaaagta

SEQ ID NO: 2698034 - DNA, 25 bp, Homo sapien
aagtagggcacctcgcccgccggtg

SEQ ID NO: 2698035 - DNA, 25 bp, Homo sapien
gaccaaaaagtgggcagggagaaga

SEQ ID NO: 2698036 - DNA, 25 bp, Homo sapien
agagaccaaaaagtgggcagggaga

SEQ ID NO: 2698037 - DNA, 25 bp, Homo sapien
gagaccaaaaagtgggcagggagaa

SEQ ID NO: 2698038 - DNA, 25 bp, Homo sapien
aagagaccaaaaagtgggcagggag

SEQ ID NO: 2698039 - DNA, 25 bp, Homo sapien
ccgctggcggagaaaggatcccttg

SEQ ID NO: 2698040 - DNA, 25 bp, Homo sapien
tacgacatcgtcatcggacagcaag

SEQ ID NO: 2698041 - DNA, 25 bp, Homo sapien
tagcaggttcttgcgtaccacagac

SEQ ID NO: 2698042 - DNA, 25 bp, Homo sapien
tctgcagctgtggactcaaacatgg

SEQ ID NO: 2698043 - DNA, 25 bp, Homo sapien
tgaggatatcactttccgccccagc

SEQ ID NO: 2698044 - DNA, 25 bp, Homo sapien
taccctgtatggacaattattggcc

SEQ ID NO: 2698045 - DNA, 25 bp, Homo sapien
tgaattgatctcagacctttaggat

SEQ ID NO: 2698046 - DNA, 25 bp, Homo sapien
ttaggattgctagtctttgacctca

SEQ ID NO: 2698047 - DNA, 25 bp, Homo sapien
tggcttgccacaccgatgatctgag

SEQ ID NO: 2698048 - DNA, 25 bp, Homo sapien
taggaactatgataacactacccca

SEQ ID NO: 2698049 - DNA, 25 bp, Homo sapien
tcattatcctgcaaatgtggcttgc

SEQ ID NO: 2698050 - DNA, 25 bp, Homo sapien
gcagttacctctgagcaaatgggca

SEQ ID NO: 2698051 - DNA, 25 bp, Homo sapien
ggcctaaccctcaagtatactttca

SEQ ID NO: 2698052 - DNA, 25 bp, Homo sapien
caactctgaaggtaacaagggccta

SEQ ID NO: 2698053 - DNA, 25 bp, Homo sapien
cctgtcgttccaactctgaaggtaa

SEQ ID NO: 2698054 - DNA, 25 bp, Homo sapien
tgatcttcctgtcgttccaactctg

SEQ ID NO: 2698055 - DNA, 25 bp, Homo sapien
gagtccttgggtgcttgtagaacaa

SEQ ID NO: 2698056 - DNA, 25 bp, Homo sapien
aaaaggtgaacctgtgtgtggcttg

SEQ ID NO: 2698057 - DNA, 25 bp, Homo sapien
tgtagaacaagggtctccacattct

SEQ ID NO: 2698058 - DNA, 25 bp, Homo sapien
tccacattctcaatacggacacaac

SEQ ID NO: 2698059 - DNA, 25 bp, Homo sapien
catatgtatagatgagccagttctg

SEQ ID NO: 2698060 - DNA, 25 bp, Homo sapien
cacagttaggttgaagaaggatgcc

SEQ ID NO: 2698061 - DNA, 25 bp, Homo sapien
agttctgccctttgagtacatcctt

SEQ ID NO: 2698062 - DNA, 25 bp, Homo sapien
tccctgagttagtgactccatatgt

SEQ ID NO: 2698063 - DNA, 25 bp, Homo sapien
gggagaatccctccatccttgatgg

SEQ ID NO: 2698064 - DNA, 25 bp, Homo sapien
ctattgaagatcagcgccagggacc

SEQ ID NO: 2698065 - DNA, 25 bp, Homo sapien
ttggaggcctccatttagcagggac

SEQ ID NO: 2698066 - DNA, 25 bp, Homo sapien
tagccagattacctcattggagagc

SEQ ID NO: 2698067 - DNA, 25 bp, Homo sapien
cactgtcgaagctggtgctggtacc

SEQ ID NO: 2698068 - DNA, 25 bp, Homo sapien
tacactgactgatagaagagagccc

SEQ ID NO: 2698069 - DNA, 25 bp, Homo sapien
gactttcgatgtagacactcctctt

SEQ ID NO: 2698070 - DNA, 25 bp, Homo sapien
gctggtacctatccgactttcgatg

SEQ ID NO: 2698071 - DNA, 25 bp, Homo sapien
ccttggaaggcagaccttagattgc

SEQ ID NO: 2698072 - DNA, 25 bp, Homo sapien
ggcatcaacctagagcagttcacct

SEQ ID NO: 2698073 - DNA, 25 bp, Homo sapien
gaagccaatgtatagggcatcaacc

SEQ ID NO: 2698074 - DNA, 25 bp, Homo sapien
tgcaacctctggtctgtactcctgg

SEQ ID NO: 2698075 - DNA, 25 bp, Homo sapien
cacatagggattgccattttgatcc

SEQ ID NO: 2698076 - DNA, 25 bp, Homo sapien
gcatagccgcaaagtctgcctcttg

SEQ ID NO: 2698077 - DNA, 25 bp, Homo sapien
cctcttgcgctgttggctaggcggt

SEQ ID NO: 2698078 - DNA, 25 bp, Homo sapien
gctaggcggttctaataggtcataa

SEQ ID NO: 2698079 - DNA, 25 bp, Homo sapien
aagctctggttcttacgacccactt

SEQ ID NO: 2698080 - DNA, 25 bp, Homo sapien
tcttgcacatgaatccagttgagat

SEQ ID NO: 2698081 - DNA, 25 bp, Homo sapien
ctcctcagcatcttgcacatgaatc

SEQ ID NO: 2698082 - DNA, 25 bp, Homo sapien
tcagcatcttgcacatgaatccagt

SEQ ID NO: 2698083 - DNA, 25 bp, Homo sapien
tcgctgatcttggggactatatctc

SEQ ID NO: 2698084 - DNA, 25 bp, Homo sapien
tgtaggatcctgattgagaagatgc

SEQ ID NO: 2698085 - DNA, 25 bp, Homo sapien
taggatcctgattgagaagatgctg

SEQ ID NO: 2698086 - DNA, 25 bp, Homo sapien
gatcttggggactatatctccttcc

SEQ ID NO: 2698087 - DNA, 25 bp, Homo sapien
tgtgtagagaggtgttaatgtttcc

SEQ ID NO: 2698088 - DNA, 25 bp, Homo sapien
ttgacgaagggcagcaatacagcgg

SEQ ID NO: 2698089 - DNA, 25 bp, Homo sapien
tctgatctttgcagcgctctgagcc

SEQ ID NO: 2698090 - DNA, 25 bp, Homo sapien
aatacagcggcccagggtgtgtaga

SEQ ID NO: 2698091 - DNA, 25 bp, Homo sapien
gaaaccttggaacactcgagtcaac

SEQ ID NO: 2698092 - DNA, 25 bp, Homo sapien
tgtcacggaagggaaccaggttctg

SEQ ID NO: 2698093 - DNA, 25 bp, Homo sapien
cataggtagatgcacagggattcac

SEQ ID NO: 2698094 - DNA, 25 bp, Homo sapien
cattgacaatcatgcaggaacggcc

SEQ ID NO: 2698095 - DNA, 25 bp, Homo sapien
tccttgatgaacgagtgcagggatg

SEQ ID NO: 2698096 - DNA, 25 bp, Homo sapien
tgtctgccttagcccctttctctaa

SEQ ID NO: 2698097 - DNA, 25 bp, Homo sapien
gatacctgaagactatgttccttga

SEQ ID NO: 2698098 - DNA, 25 bp, Homo sapien
tctttgccatacatggagatgtcag

SEQ ID NO: 2698099 - DNA, 25 bp, Homo sapien
agctgtagcttttcctgtcgttcct

SEQ ID NO: 2698100 - DNA, 25 bp, Homo sapien
ccactgttcccgctgttgcatctgt

SEQ ID NO: 2698101 - DNA, 25 bp, Homo sapien
gctgttgcatctgttctaccatctc

SEQ ID NO: 2698102 - DNA, 25 bp, Homo sapien
tcatctcggagatgcatctccagct

SEQ ID NO: 2698103 - DNA, 25 bp, Homo sapien
gtcagtgactccttgaggatattta

SEQ ID NO: 2698104 - DNA, 25 bp, Homo sapien
gtgactccttgaggatatttagttt

SEQ ID NO: 2698105 - DNA, 25 bp, Homo sapien
cagtgactccttgaggatatttagt

SEQ ID NO: 2698106 - DNA, 25 bp, Homo sapien
tcagtgactccttgaggatatttag

SEQ ID NO: 2698107 - DNA, 25 bp, Homo sapien
gccgtagggccaattcagaccctga

SEQ ID NO: 2698108 - DNA, 25 bp, Homo sapien
gatgggccactgactgttgtctggc

SEQ ID NO: 2698109 - DNA, 25 bp, Homo sapien
tcagaccctgattgctgatgggcca

SEQ ID NO: 2698110 - DNA, 25 bp, Homo sapien
tgccaacctttgtgaccgccgtagg

SEQ ID NO: 2698111 - DNA, 25 bp, Homo sapien
ttgtccacatcaatggtgaagggct

SEQ ID NO: 2698112 - DNA, 25 bp, Homo sapien
tctaacattttctgatacttatgca

SEQ ID NO: 2698113 - DNA, 25 bp, Homo sapien
cttgtccacatcaatggtgaagggc

SEQ ID NO: 2698114 - DNA, 25 bp, Homo sapien
taacattttctgatacttatgcaac

SEQ ID NO: 2698115 - DNA, 25 bp, Homo sapien
gactcaccaagtttctgaagctctg

SEQ ID NO: 2698116 - DNA, 25 bp, Homo sapien
gcttgacgaagttttcctgccccag

SEQ ID NO: 2698117 - DNA, 25 bp, Homo sapien
cacaagtggtcaaggcttgacgaag

SEQ ID NO: 2698118 - DNA, 25 bp, Homo sapien
ctgtttgattaagatgtcatcacaa

SEQ ID NO: 2698119 - DNA, 25 bp, Homo sapien
cgaaggtccagtttcactagcacca

SEQ ID NO: 2698120 - DNA, 25 bp, Homo sapien
ggtaccaaggcgctttttggcagaa

SEQ ID NO: 2698121 - DNA, 25 bp, Homo sapien
gccttggagtttcaacacagtatga

SEQ ID NO: 2698122 - DNA, 25 bp, Homo sapien
gatccgggcataagggctgcagtct

SEQ ID NO: 2698123 - DNA, 25 bp, Homo sapien
tatatggtaaagcataaaagagacc

SEQ ID NO: 2698124 - DNA, 25 bp, Homo sapien
catgagattacataggtggttataa

SEQ ID NO: 2698125 - DNA, 25 bp, Homo sapien
aaagtgagaaaaaagctagtgtctg

SEQ ID NO: 2698126 - DNA, 25 bp, Homo sapien
gtctgagtattgcatcctggatata

SEQ ID NO: 2698127 - DNA, 25 bp, Homo sapien
attttgctacatttggaattcaata

SEQ ID NO: 2698128 - DNA, 25 bp, Homo sapien
tgattttgctacatttggaattcaa

SEQ ID NO: 2698129 - DNA, 25 bp, Homo sapien
aatgattttgctacatttggaattc

SEQ ID NO: 2698130 - DNA, 25 bp, Homo sapien
ttaatgattttgctacatttggaat

SEQ ID NO: 2698131 - DNA, 25 bp, Homo sapien
taatctcacagagcttggaactgct

SEQ ID NO: 2698132 - DNA, 25 bp, Homo sapien
tactagttactggtctccactgcca

SEQ ID NO: 2698133 - DNA, 25 bp, Homo sapien
gaactgctgatagcccttactgagg

SEQ ID NO: 2698134 - DNA, 25 bp, Homo sapien
tatactcctaccaaagcaagcaagg

SEQ ID NO: 2698135 - DNA, 25 bp, Homo sapien
catgagccactttactctgggtatt

SEQ ID NO: 2698136 - DNA, 25 bp, Homo sapien
gcaaggatggtttatctagcttaga

SEQ ID NO: 2698137 - DNA, 25 bp, Homo sapien
gcagagtaatgattctaagctttga

SEQ ID NO: 2698138 - DNA, 25 bp, Homo sapien
ttactgactctccttccatcattag

SEQ ID NO: 2698139 - DNA, 25 bp, Homo sapien
ttattattatagacgggcccaccag

SEQ ID NO: 2698140 - DNA, 25 bp, Homo sapien
taaatcctcggtatcttggtgcctg

SEQ ID NO: 2698141 - DNA, 25 bp, Homo sapien
caacaaacgggactacagagcttgg

SEQ ID NO: 2698142 - DNA, 25 bp, Homo sapien
tggcctcgggcagacctatgaaatc

SEQ ID NO: 2698143 - DNA, 25 bp, Homo sapien
taggttgatcaactattagcatagc

SEQ ID NO: 2698144 - DNA, 25 bp, Homo sapien
ggagcaatgcagatttcagatctta

SEQ ID NO: 2698145 - DNA, 25 bp, Homo sapien
tgtcaagcgtggtaaattcttgcag

SEQ ID NO: 2698146 - DNA, 25 bp, Homo sapien
cagtgagtgtcattggtgctttgag

SEQ ID NO: 2698147 - DNA, 25 bp, Homo sapien
ctctaaatggatgggtgacccataa

SEQ ID NO: 2698148 - DNA, 25 bp, Homo sapien
aatggatgggtgacccataaaccat

SEQ ID NO: 2698149 - DNA, 25 bp, Homo sapien
taaatggatgggtgacccataaacc

SEQ ID NO: 2698150 - DNA, 25 bp, Homo sapien
ctaaatggatgggtgacccataaac

SEQ ID NO: 2698151 - DNA, 25 bp, Homo sapien
tgtctggtcccacatcgctcttgag

SEQ ID NO: 2698152 - DNA, 25 bp, Homo sapien
taagtcaagaaaccttgctgggaac

SEQ ID NO: 2698153 - DNA, 25 bp, Homo sapien
gttctttcagttctcatcgggctta

SEQ ID NO: 2698154 - DNA, 25 bp, Homo sapien
agcctctctctactttggtctctgg

SEQ ID NO: 2698155 - DNA, 25 bp, Homo sapien
tccaggaagaagggaagcgtgtgag

SEQ ID NO: 2698156 - DNA, 25 bp, Homo sapien
ttgtggttacataaagctttctgga

SEQ ID NO: 2698157 - DNA, 25 bp, Homo sapien
aggaagaagggaagcgtgtgaggtc

SEQ ID NO: 2698158 - DNA, 25 bp, Homo sapien
gtaaaagccaacatccaagataagg

SEQ ID NO: 2698159 - DNA, 25 bp, Homo sapien
tggagaaagccatcagtcttgaggt

SEQ ID NO: 2698160 - DNA, 25 bp, Homo sapien
ccttctgacgagtaaagactgatct

SEQ ID NO: 2698161 - DNA, 25 bp, Homo sapien
taatccctgatgttagagacaaaga

SEQ ID NO: 2698162 - DNA, 25 bp, Homo sapien
tctgtccagatgtccctagaactcc

SEQ ID NO: 2698163 - DNA, 25 bp, Homo sapien
tgtccctagaactccagtgggcaaa

SEQ ID NO: 2698164 - DNA, 25 bp, Homo sapien
cagatgtccctagaactccagtggg

SEQ ID NO: 2698165 - DNA, 25 bp, Homo sapien
cctagaactccagtgggcaaatttc

SEQ ID NO: 2698166 - DNA, 25 bp, Homo sapien
ttagatgacgttttcctcctagcta

SEQ ID NO: 2698167 - DNA, 25 bp, Homo sapien
ctcctggtgagaattcgaagaccat

SEQ ID NO: 2698168 - DNA, 25 bp, Homo sapien
gtttttctcctggtgagaattcgaa

SEQ ID NO: 2698169 - DNA, 25 bp, Homo sapien
gatgacgttttcctcctagctaggt

SEQ ID NO: 2698170 - DNA, 25 bp, Homo sapien
tctgcgagcccaacgataggccatg

SEQ ID NO: 2698171 - DNA, 25 bp, Homo sapien
tttgaatggtcaacgcctgcggctg

SEQ ID NO: 2698172 - DNA, 25 bp, Homo sapien
tgctcagaggccgtaactttggcct

SEQ ID NO: 2698173 - DNA, 25 bp, Homo sapien
cgcggagattggctgacgcagctta

SEQ ID NO: 2698174 - DNA, 25 bp, Homo sapien
gatgatttaattcctccactttccc

SEQ ID NO: 2698175 - DNA, 25 bp, Homo sapien
gaggtcctctggattgcgataagga

SEQ ID NO: 2698176 - DNA, 25 bp, Homo sapien
gcgataaggattataccaagatgat

SEQ ID NO: 2698177 - DNA, 25 bp, Homo sapien
tgagctagagtctctgagatgctgc

SEQ ID NO: 2698178 - DNA, 25 bp, Homo sapien
ctgtctgtatcctagaggacaaaga

SEQ ID NO: 2698179 - DNA, 25 bp, Homo sapien
cactgtctgtatcctagaggacaaa

SEQ ID NO: 2698180 - DNA, 25 bp, Homo sapien
ctgtatcctagaggacaaagaatct

SEQ ID NO: 2698181 - DNA, 25 bp, Homo sapien
tctgtatcctagaggacaaagaatc

SEQ ID NO: 2698182 - DNA, 25 bp, Homo sapien
aagtatacaatttcccacaaagtgt

SEQ ID NO: 2698183 - DNA, 25 bp, Homo sapien
ctctacttcccacctgcagggaagt

SEQ ID NO: 2698184 - DNA, 25 bp, Homo sapien
ctacttcccacctgcagggaagtat

SEQ ID NO: 2698185 - DNA, 25 bp, Homo sapien
cagggaagtatacaatttcccacaa

SEQ ID NO: 2698186 - DNA, 25 bp, Homo sapien
cagaaagcactggtagccaggtgtg

SEQ ID NO: 2698187 - DNA, 25 bp, Homo sapien
aaagcactggtagccaggtgtgcac

SEQ ID NO: 2698188 - DNA, 25 bp, Homo sapien
gtgtgcacttgccataatctatctg

SEQ ID NO: 2698189 - DNA, 25 bp, Homo sapien
gtgcagaaagcactggtagccaggt

SEQ ID NO: 2698190 - DNA, 25 bp, Homo sapien
gagccagtcatccaggaggtcatcc

SEQ ID NO: 2698191 - DNA, 25 bp, Homo sapien
tggaatccattggttctaagactct

SEQ ID NO: 2698192 - DNA, 25 bp, Homo sapien
ggagtggaatccattggttctaaga

SEQ ID NO: 2698193 - DNA, 25 bp, Homo sapien
gcctggagccagtcatccaggaggt

SEQ ID NO: 2698194 - DNA, 25 bp, Homo sapien
tttgtgccttactcaagactgggac

SEQ ID NO: 2698195 - DNA, 25 bp, Homo sapien
gagtctcagctagcatcacagatgg

SEQ ID NO: 2698196 - DNA, 25 bp, Homo sapien
tcacagatggtttagggagacaagc

SEQ ID NO: 2698197 - DNA, 25 bp, Homo sapien
ggcgctatatttccacttcaggaag

SEQ ID NO: 2698198 - DNA, 25 bp, Homo sapien
atggttgcggggacgtttccacttg

SEQ ID NO: 2698199 - DNA, 25 bp, Homo sapien
aaacccaggacttataatggttgcg

SEQ ID NO: 2698200 - DNA, 25 bp, Homo sapien
atagcccagggctgttcactccctc

SEQ ID NO: 2698201 - DNA, 25 bp, Homo sapien
tagcccagggctgttcactccctct

SEQ ID NO: 2698202 - DNA, 25 bp, Homo sapien
tgctgggaagtgtggtccaagcgcg

SEQ ID NO: 2698203 - DNA, 25 bp, Homo sapien
acccgtccgcggcgtgaaggctgct

SEQ ID NO: 2698204 - DNA, 25 bp, Homo sapien
gtccaagcgcggattagggcctgct

SEQ ID NO: 2698205 - DNA, 25 bp, Homo sapien
tccacgaccacctcttcgaaggaat

SEQ ID NO: 2698206 - DNA, 25 bp, Homo sapien
ggttcgggccgcgtcacgcaattag

SEQ ID NO: 2698207 - DNA, 25 bp, Homo sapien
ccgcgtcacgcaattagccacagtg

SEQ ID NO: 2698208 - DNA, 25 bp, Homo sapien
tcggttcgggccgcgtcacgcaatt

SEQ ID NO: 2698209 - DNA, 25 bp, Homo sapien
tcgggccgcgtcacgcaattagcca

SEQ ID NO: 2698210 - DNA, 25 bp, Homo sapien
ccctccaacggcccaactgcagcct

SEQ ID NO: 2698211 - DNA, 25 bp, Homo sapien
ctccctccaacggcccaactgcagc

SEQ ID NO: 2698212 - DNA, 25 bp, Homo sapien
ccctccctccaacggcccaactgca

SEQ ID NO: 2698213 - DNA, 25 bp, Homo sapien
cctccaacggcccaactgcagcctc

SEQ ID NO: 2698214 - DNA, 25 bp, Homo sapien
cccgcgggggaggccatgtcggaag

SEQ ID NO: 2698215 - DNA, 25 bp, Homo sapien
ggccatgtcggaagaaggtaaacaa

SEQ ID NO: 2698216 - DNA, 25 bp, Homo sapien
cttgaaacccgcgggggaggccatg

SEQ ID NO: 2698217 - DNA, 25 bp, Homo sapien
catgtcggaagaaggtaaacaaagg

SEQ ID NO: 2698218 - DNA, 25 bp, Homo sapien
aaaatatcgcagaaagtggacggcc

SEQ ID NO: 2698219 - DNA, 25 bp, Homo sapien
cccctccaaaatatcgcagaaagtg

SEQ ID NO: 2698220 - DNA, 25 bp, Homo sapien
tccaaaatatcgcagaaagtggacg

SEQ ID NO: 2698221 - DNA, 25 bp, Homo sapien
tggacggccccagttggaggcacat

SEQ ID NO: 2698222 - DNA, 25 bp, Homo sapien
ttaaaaggcgctggcgcgaaccaac

SEQ ID NO: 2698223 - DNA, 25 bp, Homo sapien
tgagcgctcggttcgccccacggtg

SEQ ID NO: 2698224 - DNA, 25 bp, Homo sapien
cgaaccaacgagtccctgaggagag

SEQ ID NO: 2698225 - DNA, 25 bp, Homo sapien
gctccgtgtcgtgtctctctcaaag

SEQ ID NO: 2698226 - DNA, 25 bp, Homo sapien
cggccagcgaggcccggccgcgcgg

SEQ ID NO: 2698227 - DNA, 25 bp, Homo sapien
ccagcgaggcccggccgcgcgggcg

SEQ ID NO: 2698228 - DNA, 25 bp, Homo sapien
ggccagcgaggcccggccgcgcggg

SEQ ID NO: 2698229 - DNA, 25 bp, Homo sapien
gccagcgaggcccggccgcgcgggc

SEQ ID NO: 2698230 - DNA, 25 bp, Homo sapien
atctggccgcgggaagcgaactcag

SEQ ID NO: 2698231 - DNA, 25 bp, Homo sapien
ccgcgggaagcgaactcaggacgca

SEQ ID NO: 2698232 - DNA, 25 bp, Homo sapien
tggccgcgggaagcgaactcaggac

SEQ ID NO: 2698233 - DNA, 25 bp, Homo sapien
catctggccgcgggaagcgaactca

SEQ ID NO: 2698234 - DNA, 25 bp, Homo sapien
gggcatggggcgtccgctggtcccc

SEQ ID NO: 2698235 - DNA, 25 bp, Homo sapien
gggggctgtcgttcgcctcttccca

SEQ ID NO: 2698236 - DNA, 25 bp, Homo sapien
tgcgccagggctcgctcaggggggc

SEQ ID NO: 2698237 - DNA, 25 bp, Homo sapien
gggggggtgcgccagggctcgctca

SEQ ID NO: 2698238 - DNA, 25 bp, Homo sapien
tgaaaaaagtgtaagaagccctctc

SEQ ID NO: 2698239 - DNA, 25 bp, Homo sapien
cagagagggaacctaagtgcaggat

SEQ ID NO: 2698240 - DNA, 25 bp, Homo sapien
tcaggctaaccagctatgaggagca

SEQ ID NO: 2698241 - DNA, 25 bp, Homo sapien
ggaagccataaggaatcaaaccagg

SEQ ID NO: 2698242 - DNA, 25 bp, Homo sapien
cacaccttagaaggagggcacaagg

SEQ ID NO: 2698243 - DNA, 25 bp, Homo sapien
acagttaactatcattttcatgcat

SEQ ID NO: 2698244 - DNA, 25 bp, Homo sapien
aaacctggatgtacctggagttctc

SEQ ID NO: 2698245 - DNA, 25 bp, Homo sapien
ggcagatcactctacaaaaaagagg

SEQ ID NO: 2698246 - DNA, 25 bp, Homo sapien
taagaaaagcccaagagggctcttc

SEQ ID NO: 2698247 - DNA, 25 bp, Homo sapien
ctgcacactaagaaaagcccaagag

SEQ ID NO: 2698248 - DNA, 25 bp, Homo sapien
ccaagagggctcttccttctgtgac

SEQ ID NO: 2698249 - DNA, 25 bp, Homo sapien
agcccaagagggctcttccttctgt

SEQ ID NO: 2698250 - DNA, 25 bp, Homo sapien
tgtgaatcttcaaggcctcagaatg

SEQ ID NO: 2698251 - DNA, 25 bp, Homo sapien
gaataatcttaacctgtcacaggaa

SEQ ID NO: 2698252 - DNA, 25 bp, Homo sapien
taaaaatcaggagtccacacagact

SEQ ID NO: 2698253 - DNA, 25 bp, Homo sapien
gtttacccatatgtaaagtgggcag

SEQ ID NO: 2698254 - DNA, 25 bp, Homo sapien
tctagcaccattgggacttccctct

SEQ ID NO: 2698255 - DNA, 25 bp, Homo sapien
accattctagcaccattgggacttc

SEQ ID NO: 2698256 - DNA, 25 bp, Homo sapien
acctcacttgtgagccgtcttctgc

SEQ ID NO: 2698257 - DNA, 25 bp, Homo sapien
tgttcttccagacctcacttgtgag

SEQ ID NO: 2698258 - DNA, 25 bp, Homo sapien
gattctccccaggatttgacttgca

SEQ ID NO: 2698259 - DNA, 25 bp, Homo sapien
ttctccccaggatttgacttgcaca

SEQ ID NO: 2698260 - DNA, 25 bp, Homo sapien
gctgctcagtgatcagggttatcat

SEQ ID NO: 2698261 - DNA, 25 bp, Homo sapien
ttctgtagctgctcagtgatcaggg

SEQ ID NO: 2698262 - DNA, 25 bp, Homo sapien
cagactgatgctgaagcgtgtgcat

SEQ ID NO: 2698263 - DNA, 25 bp, Homo sapien
tcagctcatccagagtctgcttctg

SEQ ID NO: 2698264 - DNA, 25 bp, Homo sapien
ccatcatgatttggattcaggacac

SEQ ID NO: 2698265 - DNA, 25 bp, Homo sapien
tctatcggtggaaaaatccctgccc

SEQ ID NO: 2698266 - DNA, 25 bp, Homo sapien
cctctgcgattcatgagctacaggg

SEQ ID NO: 2698267 - DNA, 25 bp, Homo sapien
cactgacagatttctaggaagccct

SEQ ID NO: 2698268 - DNA, 25 bp, Homo sapien
agttggagatgtctgcatgatcagg

SEQ ID NO: 2698269 - DNA, 25 bp, Homo sapien
tggagatgtctgcatgatcaggcaa

SEQ ID NO: 2698270 - DNA, 25 bp, Homo sapien
agatgtctgcatgatcaggcaaagg

SEQ ID NO: 2698271 - DNA, 25 bp, Homo sapien
cagacacaagctggaaagagttccc

SEQ ID NO: 2698272 - DNA, 25 bp, Homo sapien
gaagttgaccctggcaagaaggttc

SEQ ID NO: 2698273 - DNA, 25 bp, Homo sapien
aagaaggttctagaggtaggctcgc

SEQ ID NO: 2698274 - DNA, 25 bp, Homo sapien
aaatagatgcagctaaccaccatgg

SEQ ID NO: 2698275 - DNA, 25 bp, Homo sapien
agtccccacaaagctagaataagag

SEQ ID NO: 2698276 - DNA, 25 bp, Homo sapien
tggaactcagcacaggaacagtggg

SEQ ID NO: 2698277 - DNA, 25 bp, Homo sapien
gaactcagcacaggaacagtggggc

SEQ ID NO: 2698278 - DNA, 25 bp, Homo sapien
ggaactcagcacaggaacagtgggg

SEQ ID NO: 2698279 - DNA, 25 bp, Homo sapien
agggatggtagctgaagttgaggct

SEQ ID NO: 2698280 - DNA, 25 bp, Homo sapien
ggatggtagctgaagttgaggctgt

SEQ ID NO: 2698281 - DNA, 25 bp, Homo sapien
gagggatggtagctgaagttgaggc

SEQ ID NO: 2698282 - DNA, 25 bp, Homo sapien
ctgagggatggtagctgaagttgag

SEQ ID NO: 2698283 - DNA, 25 bp, Homo sapien
gctcaggtcttaggacttgggagaa

SEQ ID NO: 2698284 - DNA, 25 bp, Homo sapien
gagtttccccgactgggtggtctga

SEQ ID NO: 2698285 - DNA, 25 bp, Homo sapien
agcgagacaggtccacgggcactga

SEQ ID NO: 2698286 - DNA, 25 bp, Homo sapien
cggctgccagcgagacaggtccacg

SEQ ID NO: 2698287 - DNA, 25 bp, Homo sapien
tttatgggagtccacagcttggagg

SEQ ID NO: 2698288 - DNA, 25 bp, Homo sapien
cagggtcgagaggaatcttgggcca

SEQ ID NO: 2698289 - DNA, 25 bp, Homo sapien
gcaaggtgacaaggactcagcatca

SEQ ID NO: 2698290 - DNA, 25 bp, Homo sapien
accactgccccggtgctttatggga

SEQ ID NO: 2698291 - DNA, 25 bp, Homo sapien
aagaagcggcttgcctgcgggccca

SEQ ID NO: 2698292 - DNA, 25 bp, Homo sapien
ggaggatgcgggagagctccgggca

SEQ ID NO: 2698293 - DNA, 25 bp, Homo sapien
gggaggatgcgggagagctccgggc

SEQ ID NO: 2698294 - DNA, 25 bp, Homo sapien
gcagagggcaagaagcggcttgcct

SEQ ID NO: 2698295 - DNA, 25 bp, Homo sapien
ttgcgggcatccagatcacaaggct

SEQ ID NO: 2698296 - DNA, 25 bp, Homo sapien
ggagacctcgaggtcgccagggcag

SEQ ID NO: 2698297 - DNA, 25 bp, Homo sapien
gtggcgccgcttgaccccagttttg

SEQ ID NO: 2698298 - DNA, 25 bp, Homo sapien
ttgtcaaagtccaacgaaggccgca

SEQ ID NO: 2698299 - DNA, 25 bp, Homo sapien
acaggccatgaaccatggtggagag

SEQ ID NO: 2698300 - DNA, 25 bp, Homo sapien
caggccatgaaccatggtggagaga

SEQ ID NO: 2698301 - DNA, 25 bp, Homo sapien
ctgccttcccgggctgtttcttgga

SEQ ID NO: 2698302 - DNA, 25 bp, Homo sapien
ggccatgaaccatggtggagagatg

SEQ ID NO: 2698303 - DNA, 25 bp, Homo sapien
ctcctcctcctcttcgctttcactc

SEQ ID NO: 2698304 - DNA, 25 bp, Homo sapien
cctcctcctcttcgctttcactcag

SEQ ID NO: 2698305 - DNA, 25 bp, Homo sapien
cctcctcttcgctttcactcagcac

SEQ ID NO: 2698306 - DNA, 25 bp, Homo sapien
tcctcctcttcgctttcactcagca

SEQ ID NO: 2698307 - DNA, 25 bp, Homo sapien
gtcccgctggcacagtgtccgcttg

SEQ ID NO: 2698308 - DNA, 25 bp, Homo sapien
aagtcccgctggcacagtgtccgct

SEQ ID NO: 2698309 - DNA, 25 bp, Homo sapien
gtccgcttgctcagcgcctgccgac

SEQ ID NO: 2698310 - DNA, 25 bp, Homo sapien
cccaaagtcccgctggcacagtgtc

SEQ ID NO: 2698311 - DNA, 25 bp, Homo sapien
tagtagccatgagagagtcagtctg

SEQ ID NO: 2698312 - DNA, 25 bp, Homo sapien
tgtggccccaggaagtagcctctca

SEQ ID NO: 2698313 - DNA, 25 bp, Homo sapien
ggccccaggaagtagcctctcagtt

SEQ ID NO: 2698314 - DNA, 25 bp, Homo sapien
gggactcgacacttgttagtagcca

SEQ ID NO: 2698315 - DNA, 25 bp, Homo sapien
ctcagggccgccataggaagggtct

SEQ ID NO: 2698316 - DNA, 25 bp, Homo sapien
ccagtctcttggcatggtcgagctt

SEQ ID NO: 2698317 - DNA, 25 bp, Homo sapien
ggctagtgaaattccccgagctggg

SEQ ID NO: 2698318 - DNA, 25 bp, Homo sapien
tgcccattgctctcttggtggcagg

SEQ ID NO: 2698319 - DNA, 25 bp, Homo sapien
tcctgtaaaaaactcaagatcctgg

SEQ ID NO: 2698320 - DNA, 25 bp, Homo sapien
tctgctgttaaggagcaattgcctt

SEQ ID NO: 2698321 - DNA, 25 bp, Homo sapien
tatcatgatactctgctgttaagga

SEQ ID NO: 2698322 - DNA, 25 bp, Homo sapien
attgccttccttccctaaggctacg

SEQ ID NO: 2698323 - DNA, 25 bp, Homo sapien
cagagtcggtgatgctatggattac

SEQ ID NO: 2698324 - DNA, 25 bp, Homo sapien
tatagcctggacaatctgatgagaa

SEQ ID NO: 2698325 - DNA, 25 bp, Homo sapien
gcttaagaagacatagccacctcct

SEQ ID NO: 2698326 - DNA, 25 bp, Homo sapien
caaatttggtcatgcagggtctaac

SEQ ID NO: 2698327 - DNA, 25 bp, Homo sapien
gccagtaacctgttggaagctggca

SEQ ID NO: 2698328 - DNA, 25 bp, Homo sapien
agctggcacagccaatctacagcag

SEQ ID NO: 2698329 - DNA, 25 bp, Homo sapien
cagccaatctacagcagagagccct

SEQ ID NO: 2698330 - DNA, 25 bp, Homo sapien
tggcattgccagtaacctgttggaa

SEQ ID NO: 2698331 - DNA, 25 bp, Homo sapien
tggaggcagaatcactgcctcactt

SEQ ID NO: 2698332 - DNA, 25 bp, Homo sapien
ttcttcagcttagggcctacagaaa

SEQ ID NO: 2698333 - DNA, 25 bp, Homo sapien
aggatggaggcagaatcactgcctc

SEQ ID NO: 2698334 - DNA, 25 bp, Homo sapien
gatggaggcagaatcactgcctcac

SEQ ID NO: 2698335 - DNA, 25 bp, Homo sapien
tgttccagggccacaggttcttaga

SEQ ID NO: 2698336 - DNA, 25 bp, Homo sapien
cacaggttcttagattgggaagcaa

SEQ ID NO: 2698337 - DNA, 25 bp, Homo sapien
tggaacagatctactgtgtaaagca

SEQ ID NO: 2698338 - DNA, 25 bp, Homo sapien
gttctgactagcttagttttccaga

SEQ ID NO: 2698339 - DNA, 25 bp, Homo sapien
acagggatactcacctactggccaa

SEQ ID NO: 2698340 - DNA, 25 bp, Homo sapien
tgcagacattgacccagtgtcagcc

SEQ ID NO: 2698341 - DNA, 25 bp, Homo sapien
caaaacagctaaagtggagggaggt

SEQ ID NO: 2698342 - DNA, 25 bp, Homo sapien
cattagcacagggactttggcagca

SEQ ID NO: 2698343 - DNA, 25 bp, Homo sapien
gaacctcatgtttaacacacacaga

SEQ ID NO: 2698344 - DNA, 25 bp, Homo sapien
ggttgacccacatcttagatgaagg

SEQ ID NO: 2698345 - DNA, 25 bp, Homo sapien
ataaccaaggccttagcagaagcct

SEQ ID NO: 2698346 - DNA, 25 bp, Homo sapien
gttaggtggccttctaccctgcttc

SEQ ID NO: 2698347 - DNA, 25 bp, Homo sapien
agtataacatcctgccatggccggc

SEQ ID NO: 2698348 - DNA, 25 bp, Homo sapien
gtaggaaatgttctccccattggtc

SEQ ID NO: 2698349 - DNA, 25 bp, Homo sapien
atgtcttccttctcaatggcccata

SEQ ID NO: 2698350 - DNA, 25 bp, Homo sapien
ttgtaggaaatgttctccccattgg

SEQ ID NO: 2698351 - DNA, 25 bp, Homo sapien
ttccttctcaatggcccataacagc

SEQ ID NO: 2698352 - DNA, 25 bp, Homo sapien
caccaccaaccaccggcgcagcgca

SEQ ID NO: 2698353 - DNA, 25 bp, Homo sapien
caccacctccgccgccaagcgcccg

SEQ ID NO: 2698354 - DNA, 25 bp, Homo sapien
cacctccgccgccaagcgcccgatc

SEQ ID NO: 2698355 - DNA, 25 bp, Homo sapien
cctccgccgccaagcgcccgatccg

SEQ ID NO: 2698356 - DNA, 25 bp, Homo sapien
aggccccggatctccgctcgccgct

SEQ ID NO: 2698357 - DNA, 25 bp, Homo sapien
aggccgcagtgtccgcgaacagcag

SEQ ID NO: 2698358 - DNA, 25 bp, Homo sapien
gccaggctcgagtgcgcagcgcagg

SEQ ID NO: 2698359 - DNA, 25 bp, Homo sapien
gctgaggccgcagtgtccgcgaaca

SEQ ID NO: 2698360 - DNA, 25 bp, Homo sapien
ggctcccgggagctcaagattcgag

SEQ ID NO: 2698361 - DNA, 25 bp, Homo sapien
acaggtccgcgtcttcgagagggca

SEQ ID NO: 2698362 - DNA, 25 bp, Homo sapien
agggcagcggcaacactggccgaac

SEQ ID NO: 2698363 - DNA, 25 bp, Homo sapien
agaaaaggaacagggcgcaggtctc

SEQ ID NO: 2698364 - DNA, 25 bp, Homo sapien
taactgccagataaaaaagccccga

SEQ ID NO: 2698365 - DNA, 25 bp, Homo sapien
gcctcccataactgcccacattccc

SEQ ID NO: 2698366 - DNA, 25 bp, Homo sapien
ggaagtaactgccagataaaaaagc

SEQ ID NO: 2698367 - DNA, 25 bp, Homo sapien
ccagataaaaaagccccgaccagct

SEQ ID NO: 2698368 - DNA, 25 bp, Homo sapien
taagtatcaaggtatcactcagagt

SEQ ID NO: 2698369 - DNA, 25 bp, Homo sapien
tagggcggatatgctttcacttctc

SEQ ID NO: 2698370 - DNA, 25 bp, Homo sapien
tgaccataggtagcgaattgtacac

SEQ ID NO: 2698371 - DNA, 25 bp, Homo sapien
taccccaccctgagacagaggaaag

SEQ ID NO: 2698372 - DNA, 25 bp, Homo sapien
aaaagatgatgctttcgcaccaggg

SEQ ID NO: 2698373 - DNA, 25 bp, Homo sapien
ggatcaccaaaatcaaggctgcttg

SEQ ID NO: 2698374 - DNA, 25 bp, Homo sapien
gttttacccacctagagatcaagag

SEQ ID NO: 2698375 - DNA, 25 bp, Homo sapien
caccaacctgtcaaaggcagtggaa

SEQ ID NO: 2698376 - DNA, 25 bp, Homo sapien
cttttggggtcaggttggaagatat

SEQ ID NO: 2698377 - DNA, 25 bp, Homo sapien
gaagatatggatggaagaaactgga

SEQ ID NO: 2698378 - DNA, 25 bp, Homo sapien
taagccaataagaatactgtatagg

SEQ ID NO: 2698379 - DNA, 25 bp, Homo sapien
cagggagaccaattatgaagcagta

SEQ ID NO: 2698380 - DNA, 25 bp, Homo sapien
cagcatgaacttttacccaggagtg

SEQ ID NO: 2698381 - DNA, 25 bp, Homo sapien
caggagtgttgcttccagttacagc

SEQ ID NO: 2698382 - DNA, 25 bp, Homo sapien
aagagacccttccagcagaagcacg

SEQ ID NO: 2698383 - DNA, 25 bp, Homo sapien
gactcgaatgccctggagaaggact

SEQ ID NO: 2698384 - DNA, 25 bp, Homo sapien
cagatgcaacccattggcatctgac

SEQ ID NO: 2698385 - DNA, 25 bp, Homo sapien
gatccagaagatattccactggaac

SEQ ID NO: 2698386 - DNA, 25 bp, Homo sapien
tgacaggaaccgaagctctcgatcc

SEQ ID NO: 2698387 - DNA, 25 bp, Homo sapien
ctgaaacagatgcaacccattggca

SEQ ID NO: 2698388 - DNA, 25 bp, Homo sapien
tcagtgcagcatgttccaaaagaat

SEQ ID NO: 2698389 - DNA, 25 bp, Homo sapien
cactgatcaaagcattaactgtttc

SEQ ID NO: 2698390 - DNA, 25 bp, Homo sapien
tgtagcttttggtcactgatcaaag

SEQ ID NO: 2698391 - DNA, 25 bp, Homo sapien
tctggttttggctatctgttcccat

SEQ ID NO: 2698392 - DNA, 25 bp, Homo sapien
caacaccatagagccacccttcttc

SEQ ID NO: 2698393 - DNA, 25 bp, Homo sapien
acaacaccatagagccacccttctt

SEQ ID NO: 2698394 - DNA, 25 bp, Homo sapien
ctgtgaccttgaacactgtagggac

SEQ ID NO: 2698395 - DNA, 25 bp, Homo sapien
ctcacaacaccatagagccaccctt

SEQ ID NO: 2698396 - DNA, 25 bp, Homo sapien
cagttacagacacctccataagacg

SEQ ID NO: 2698397 - DNA, 25 bp, Homo sapien
gttacagacacctccataagacgag

SEQ ID NO: 2698398 - DNA, 25 bp, Homo sapien
agttacagacacctccataagacga

SEQ ID NO: 2698399 - DNA, 25 bp, Homo sapien
ctcagttacagacacctccataaga

SEQ ID NO: 2698400 - DNA, 25 bp, Homo sapien
tgtagtggaaaagaacgcatctatt

SEQ ID NO: 2698401 - DNA, 25 bp, Homo sapien
tcttatttgttactaaagtgtgact

SEQ ID NO: 2698402 - DNA, 25 bp, Homo sapien
gtcatgatatatccatgtagtggaa

SEQ ID NO: 2698403 - DNA, 25 bp, Homo sapien
tacaaaaatgctcactatatacaat

SEQ ID NO: 2698404 - DNA, 25 bp, Homo sapien
gctttgaggcgctgaattatccatc

SEQ ID NO: 2698405 - DNA, 25 bp, Homo sapien
ggatctaccgacttgatctcaccac

SEQ ID NO: 2698406 - DNA, 25 bp, Homo sapien
ttgaggcgctgaattatccatcagc

SEQ ID NO: 2698407 - DNA, 25 bp, Homo sapien
agcatcacatggattagtctgggat

SEQ ID NO: 2698408 - DNA, 25 bp, Homo sapien
tataagggatctacacacagcaaga

SEQ ID NO: 2698409 - DNA, 25 bp, Homo sapien
cacacagcaagataatgcaagctca

SEQ ID NO: 2698410 - DNA, 25 bp, Homo sapien
gataatgcaagctcatgagtctgct

SEQ ID NO: 2698411 - DNA, 25 bp, Homo sapien
gaaaacacatatataagggatctac

SEQ ID NO: 2698412 - DNA, 25 bp, Homo sapien
ttgatgcagggtcacacccagagtc

SEQ ID NO: 2698413 - DNA, 25 bp, Homo sapien
tactgtctacttcacccctgtctcc

SEQ ID NO: 2698414 - DNA, 25 bp, Homo sapien
agggtcacacccagagtccgaagca

SEQ ID NO: 2698415 - DNA, 25 bp, Homo sapien
cacacccagagtccgaagcactttt

SEQ ID NO: 2698416 - DNA, 25 bp, Homo sapien
aatgtagacggtggctgcttggctc

SEQ ID NO: 2698417 - DNA, 25 bp, Homo sapien
caaatgtagacggtggctgcttggc

SEQ ID NO: 2698418 - DNA, 25 bp, Homo sapien
tgatccagccctggctctccactgg

SEQ ID NO: 2698419 - DNA, 25 bp, Homo sapien
ggacaaatgtagacggtggctgctt

SEQ ID NO: 2698420 - DNA, 25 bp, Homo sapien
cctggccaacttgttccagtgtttt

SEQ ID NO: 2698421 - DNA, 25 bp, Homo sapien
tagaatatggagtgaaagatgcagg

SEQ ID NO: 2698422 - DNA, 25 bp, Homo sapien
tctgacctgtggctgtagaatatgg

SEQ ID NO: 2698423 - DNA, 25 bp, Homo sapien
tgtaagtggcaaagcgaatgttgcg

SEQ ID NO: 2698424 - DNA, 25 bp, Homo sapien
ctcacctggttatcttgggaatgct

SEQ ID NO: 2698425 - DNA, 25 bp, Homo sapien
tcctcgtctgtgtggacatttcctc

SEQ ID NO: 2698426 - DNA, 25 bp, Homo sapien
cacactagggattaacaatctgcac

SEQ ID NO: 2698427 - DNA, 25 bp, Homo sapien
tgctggtcaaccaacaggacaaacc

SEQ ID NO: 2698428 - DNA, 25 bp, Homo sapien
cacagcaacatgactgtcatagtca

SEQ ID NO: 2698429 - DNA, 25 bp, Homo sapien
tttagcaaggtgaaccagagatagc

SEQ ID NO: 2698430 - DNA, 25 bp, Homo sapien
cagactacactgagggcatctttag

SEQ ID NO: 2698431 - DNA, 25 bp, Homo sapien
gctggcttctcatgacaatctaatg

SEQ ID NO: 2698432 - DNA, 25 bp, Homo sapien
gatagcctgaattagtgatgctggc

SEQ ID NO: 2698433 - DNA, 25 bp, Homo sapien
taaagatgccgaatctgcagaggag

SEQ ID NO: 2698434 - DNA, 25 bp, Homo sapien
gaagaggagctacctgatgcctgag

SEQ ID NO: 2698435 - DNA, 25 bp, Homo sapien
tgtggctagaacaccattggactgg

SEQ ID NO: 2698436 - DNA, 25 bp, Homo sapien
aagccaagcttcgttcatccagtga

SEQ ID NO: 2698437 - DNA, 25 bp, Homo sapien
gagaagaaaagtttgtcatgaggtg

SEQ ID NO: 2698438 - DNA, 25 bp, Homo sapien
gggagagaagaaaagtttgtcatga

SEQ ID NO: 2698439 - DNA, 25 bp, Homo sapien
tgtggcaagggggagagaagaaaag

SEQ ID NO: 2698440 - DNA, 25 bp, Homo sapien
gagagaagaaaagtttgtcatgagg

SEQ ID NO: 2698441 - DNA, 25 bp, Homo sapien
tccaggcggcattcacgacacttgt

SEQ ID NO: 2698442 - DNA, 25 bp, Homo sapien
gaggtgccacattgatgcatgaccc

SEQ ID NO: 2698443 - DNA, 25 bp, Homo sapien
gaaagaaacggcaggctacagtaga

SEQ ID NO: 2698444 - DNA, 25 bp, Homo sapien
aggctacagtagaatcatcttgctc

SEQ ID NO: 2698445 - DNA, 25 bp, Homo sapien
agcaaaggaggaaaacaggagtttg

SEQ ID NO: 2698446 - DNA, 25 bp, Homo sapien
tgaaaactagcaaaggaggaaaaca

SEQ ID NO: 2698447 - DNA, 25 bp, Homo sapien
aactagcaaaggaggaaaacaggag

SEQ ID NO: 2698448 - DNA, 25 bp, Homo sapien
taatgaaaactagcaaaggaggaaa

SEQ ID NO: 2698449 - DNA, 25 bp, Homo sapien
aaaaattgatttgtgcagggtgcag

SEQ ID NO: 2698450 - DNA, 25 bp, Homo sapien
gagttgtctatactcattgccatag

SEQ ID NO: 2698451 - DNA, 25 bp, Homo sapien
ggcaattcccctaccaatctagcaa

SEQ ID NO: 2698452 - DNA, 25 bp, Homo sapien
cagtcacttctagtccatatgtaac

SEQ ID NO: 2698453 - DNA, 25 bp, Homo sapien
ctcccggctaacacagagccacttt

SEQ ID NO: 2698454 - DNA, 25 bp, Homo sapien
ccactcccggctaacacagagccac

SEQ ID NO: 2698455 - DNA, 25 bp, Homo sapien
tttggagacaaagttgcgttctgtt

SEQ ID NO: 2698456 - DNA, 25 bp, Homo sapien
agacaaagttgcgttctgttaccca

SEQ ID NO: 2698457 - DNA, 25 bp, Homo sapien
caggttcatggcatcagggtcactt

SEQ ID NO: 2698458 - DNA, 25 bp, Homo sapien
gagtaccccttttcgagtgaagatc

SEQ ID NO: 2698459 - DNA, 25 bp, Homo sapien
attggccaggatgtattttgaggtc

SEQ ID NO: 2698460 - DNA, 25 bp, Homo sapien
ctatcccttctgctagggaggaaga

SEQ ID NO: 2698461 - DNA, 25 bp, Homo sapien
atcatcatggcctccttctcagaca

SEQ ID NO: 2698462 - DNA, 25 bp, Homo sapien
catcatcatggcctccttctcagac

SEQ ID NO: 2698463 - DNA, 25 bp, Homo sapien
tcatcatggcctccttctcagacat

SEQ ID NO: 2698464 - DNA, 25 bp, Homo sapien
gaaagaggaaacagaattggcattg

SEQ ID NO: 2698465 - DNA, 25 bp, Homo sapien
agaggaaacagaattggcattgatc

SEQ ID NO: 2698466 - DNA, 25 bp, Homo sapien
ggaaacagaattggcattgatcatc

SEQ ID NO: 2698467 - DNA, 25 bp, Homo sapien
ctggtggaaagaggaaacagaattg

SEQ ID NO: 2698468 - DNA, 25 bp, Homo sapien
gcacagctcgcttccatgccacttt

SEQ ID NO: 2698469 - DNA, 25 bp, Homo sapien
gatgttgaagagagttgtttcacac

SEQ ID NO: 2698470 - DNA, 25 bp, Homo sapien
ttgcgacaaacccagtggatgttga

SEQ ID NO: 2698471 - DNA, 25 bp, Homo sapien
atctcccgtacaccacgcacagctc

SEQ ID NO: 2698472 - DNA, 25 bp, Homo sapien
gccggcttttcctgagccggtaaca

SEQ ID NO: 2698473 - DNA, 25 bp, Homo sapien
cctgagccggtaacagtcaaggcag

SEQ ID NO: 2698474 - DNA, 25 bp, Homo sapien
ggcttttcctgagccggtaacagtc

SEQ ID NO: 2698475 - DNA, 25 bp, Homo sapien
tttcctgagccggtaacagtcaagg

SEQ ID NO: 2698476 - DNA, 25 bp, Homo sapien
tgctgtagcctagaaactgtgccta

SEQ ID NO: 2698477 - DNA, 25 bp, Homo sapien
ttctcttagagataacagtcccatg

SEQ ID NO: 2698478 - DNA, 25 bp, Homo sapien
ggcaactgtagggatcaccttggtt

SEQ ID NO: 2698479 - DNA, 25 bp, Homo sapien
tgtctctagtcagtaaggttgccag

SEQ ID NO: 2698480 - DNA, 25 bp, Homo sapien
tttttgcacactcgataattactga

SEQ ID NO: 2698481 - DNA, 25 bp, Homo sapien
tattctattatcaccgtcattctgg

SEQ ID NO: 2698482 - DNA, 25 bp, Homo sapien
tatttggtgttagtgtggtgcacaa

SEQ ID NO: 2698483 - DNA, 25 bp, Homo sapien
tactgattaaatgcaaggttgtgac

SEQ ID NO: 2698484 - DNA, 25 bp, Homo sapien
tctcaaatagatgagagtataggca

SEQ ID NO: 2698485 - DNA, 25 bp, Homo sapien
ctcccacctaagattctcaaataga

SEQ ID NO: 2698486 - DNA, 25 bp, Homo sapien
cagatgtgctggattttactcaggc

SEQ ID NO: 2698487 - DNA, 25 bp, Homo sapien
taatttactagtaaggccaccatct

SEQ ID NO: 2698488 - DNA, 25 bp, Homo sapien
gactcccagaccagttggtggcaga

SEQ ID NO: 2698489 - DNA, 25 bp, Homo sapien
taaaacgagctggtaagtgcttcct

SEQ ID NO: 2698490 - DNA, 25 bp, Homo sapien
tgcattgtgttctatctaagaaata

SEQ ID NO: 2698491 - DNA, 25 bp, Homo sapien
gtaaagacagaggtttgtgggcggc

SEQ ID NO: 2698492 - DNA, 25 bp, Homo sapien
gcctatggtccacttagagttagta

SEQ ID NO: 2698493 - DNA, 25 bp, Homo sapien
tctttagtgcaaggatacaaatatt

SEQ ID NO: 2698494 - DNA, 25 bp, Homo sapien
tgtgcctgggctattttcattttct

SEQ ID NO: 2698495 - DNA, 25 bp, Homo sapien
cactgccttggcctccgtaactgtt

SEQ ID NO: 2698496 - DNA, 25 bp, Homo sapien
ccactgccttggcctccgtaactgt

SEQ ID NO: 2698497 - DNA, 25 bp, Homo sapien
cactgtgcctgggctattttcattt

SEQ ID NO: 2698498 - DNA, 25 bp, Homo sapien
ttcttcatcacccatctcttctgtc

SEQ ID NO: 2698499 - DNA, 25 bp, Homo sapien
aacttcttcatcacccatctcttct

SEQ ID NO: 2698500 - DNA, 25 bp, Homo sapien
acttcttcatcacccatctcttctg

SEQ ID NO: 2698501 - DNA, 25 bp, Homo sapien
aaaacttcttcatcacccatctctt

SEQ ID NO: 2698502 - DNA, 25 bp, Homo sapien
tttgtgtgggcatgagattctctgg

SEQ ID NO: 2698503 - DNA, 25 bp, Homo sapien
tgtgggcatgagattctctggttcg

SEQ ID NO: 2698504 - DNA, 25 bp, Homo sapien
tgtgtgggcatgagattctctggtt

SEQ ID NO: 2698505 - DNA, 25 bp, Homo sapien
tgggcatgagattctctggttcgtg

SEQ ID NO: 2698506 - DNA, 25 bp, Homo sapien
ctgtgacatcccattggtgacggca

SEQ ID NO: 2698507 - DNA, 25 bp, Homo sapien
tcgactgatacaagggcagtttgct

SEQ ID NO: 2698508 - DNA, 25 bp, Homo sapien
gacggcaggtctcaatacagatttg

SEQ ID NO: 2698509 - DNA, 25 bp, Homo sapien
gcatgtaccatgtctccaatattgt

SEQ ID NO: 2698510 - DNA, 25 bp, Homo sapien
tcgtttccagaagaggcactagggt

SEQ ID NO: 2698511 - DNA, 25 bp, Homo sapien
gctgtcggctttgggaacatggtcc

SEQ ID NO: 2698512 - DNA, 25 bp, Homo sapien
gagttgttactggtgccggtcctcc

SEQ ID NO: 2698513 - DNA, 25 bp, Homo sapien
catggtccggctctggagttgttac

SEQ ID NO: 2698514 - DNA, 25 bp, Homo sapien
tataattataggaggtctcacagcc

SEQ ID NO: 2698515 - DNA, 25 bp, Homo sapien
taaaaatcagtcacatgggaaggag

SEQ ID NO: 2698516 - DNA, 25 bp, Homo sapien
ggatacctgtactgaagtcacttgg

SEQ ID NO: 2698517 - DNA, 25 bp, Homo sapien
gatttcatagttctgggcgggacac

SEQ ID NO: 2698518 - DNA, 25 bp, Homo sapien
ttgaacgagtccagcccaaagggtg

SEQ ID NO: 2698519 - DNA, 25 bp, Homo sapien
ttggagtcagcggagagacctttgc

SEQ ID NO: 2698520 - DNA, 25 bp, Homo sapien
agtgggacccagcaacagactgtta

SEQ ID NO: 2698521 - DNA, 25 bp, Homo sapien
gaatgagactctttattgagcaccg

SEQ ID NO: 2698522 - DNA, 25 bp, Homo sapien
taagatttctggtgcaagcaatcac

SEQ ID NO: 2698523 - DNA, 25 bp, Homo sapien
caggagttcaggcttaggcgcatta

SEQ ID NO: 2698524 - DNA, 25 bp, Homo sapien
tacactgtagactgtaaagggcaga

SEQ ID NO: 2698525 - DNA, 25 bp, Homo sapien
caggcgagtcccaaatgattctaag

SEQ ID NO: 2698526 - DNA, 25 bp, Homo sapien
ctgaggcaatgatgtggtcaagaaa

SEQ ID NO: 2698527 - DNA, 25 bp, Homo sapien
ttgggtaggctggccttgctcttca

SEQ ID NO: 2698528 - DNA, 25 bp, Homo sapien
gtggtcaagaaagttgggtaggctg

SEQ ID NO: 2698529 - DNA, 25 bp, Homo sapien
tgggtaggctggccttgctcttcac

SEQ ID NO: 2698530 - DNA, 25 bp, Homo sapien
tctgaggttttcttattttctacca

SEQ ID NO: 2698531 - DNA, 25 bp, Homo sapien
catctgaggttttcttattttctac

SEQ ID NO: 2698532 - DNA, 25 bp, Homo sapien
tgaagcatctgaggttttcttattt

SEQ ID NO: 2698533 - DNA, 25 bp, Homo sapien
ctttgaagcatctgaggttttctta

SEQ ID NO: 2698534 - DNA, 25 bp, Homo sapien
tgcttccaacactcccggaagatct

SEQ ID NO: 2698535 - DNA, 25 bp, Homo sapien
gggtatcagtcaagttgcaggcccg

SEQ ID NO: 2698536 - DNA, 25 bp, Homo sapien
gagaagtatggggatctagcacatt

SEQ ID NO: 2698537 - DNA, 25 bp, Homo sapien
ggatctagcacatttaaccccatca

SEQ ID NO: 2698538 - DNA, 25 bp, Homo sapien
ggaaatcacttctgttgccctaata

SEQ ID NO: 2698539 - DNA, 25 bp, Homo sapien
gctgagacagaataggagggtttcc

SEQ ID NO: 2698540 - DNA, 25 bp, Homo sapien
ggatttccacatgtcaactaaagtg

SEQ ID NO: 2698541 - DNA, 25 bp, Homo sapien
tcagagcaatctaggaaaaacttcc

SEQ ID NO: 2698542 - DNA, 25 bp, Homo sapien
cggaaattatagcacagttcctgca

SEQ ID NO: 2698543 - DNA, 25 bp, Homo sapien
ccagaaatcccgaactttcacatcg

SEQ ID NO: 2698544 - DNA, 25 bp, Homo sapien
ttatgtacccccgaaaccagcactg

SEQ ID NO: 2698545 - DNA, 25 bp, Homo sapien
agttcaccaagtctacatcctggtc

SEQ ID NO: 2698546 - DNA, 25 bp, Homo sapien
tattttccagtctgctatcactgaa

SEQ ID NO: 2698547 - DNA, 25 bp, Homo sapien
gcagagctgggcgtatagatgctta

SEQ ID NO: 2698548 - DNA, 25 bp, Homo sapien
cagtctgctatcactgaactagata

SEQ ID NO: 2698549 - DNA, 25 bp, Homo sapien
gggcgtatagatgcttattttccag

SEQ ID NO: 2698550 - DNA, 25 bp, Homo sapien
ccagcctaggagactaatctttttt

SEQ ID NO: 2698551 - DNA, 25 bp, Homo sapien
cagcctaggagactaatcttttttt

SEQ ID NO: 2698552 - DNA, 25 bp, Homo sapien
gcatgatcttggcctcccgggttca

SEQ ID NO: 2698553 - DNA, 25 bp, Homo sapien
tggcatgatcttggcctcccgggtt

SEQ ID NO: 2698554 - DNA, 25 bp, Homo sapien
aagcgattctccctgagtagctggg

SEQ ID NO: 2698555 - DNA, 25 bp, Homo sapien
ttcaagcgattctccctgagtagct

SEQ ID NO: 2698556 - DNA, 25 bp, Homo sapien
gctggtgtccgattttcaacagtaa

SEQ ID NO: 2698557 - DNA, 25 bp, Homo sapien
tggctggtgtccgattttcaacagt

SEQ ID NO: 2698558 - DNA, 25 bp, Homo sapien
tttggctggtgtccgattttcaaca

SEQ ID NO: 2698559 - DNA, 25 bp, Homo sapien
ggtttggctggtgtccgattttcaa

SEQ ID NO: 2698560 - DNA, 25 bp, Homo sapien
gctgcccatcttctgaccgtagtcg

SEQ ID NO: 2698561 - DNA, 25 bp, Homo sapien
tgcccatcttctgaccgtagtcgtt

SEQ ID NO: 2698562 - DNA, 25 bp, Homo sapien
ctgcccatcttctgaccgtagtcgt

SEQ ID NO: 2698563 - DNA, 25 bp, Homo sapien
tggttggcatcatgtctcgaaaatc

SEQ ID NO: 2698564 - DNA, 25 bp, Homo sapien
atcatgtctcgaaaatcttccccag

SEQ ID NO: 2698565 - DNA, 25 bp, Homo sapien
gccagtccttgagtttgagcaccat

SEQ ID NO: 2698566 - DNA, 25 bp, Homo sapien
aggaggccagtccttgagtttgagc

SEQ ID NO: 2698567 - DNA, 25 bp, Homo sapien
ccagatcaggccttacaaagtagct

SEQ ID NO: 2698568 - DNA, 25 bp, Homo sapien
tagcctagaggccagattgagcctg

SEQ ID NO: 2698569 - DNA, 25 bp, Homo sapien
tgccatctcgtttggtatattctgg

SEQ ID NO: 2698570 - DNA, 25 bp, Homo sapien
tatattctggcagaggaaggttctc

SEQ ID NO: 2698571 - DNA, 25 bp, Homo sapien
ccttctatagttgaaataagaacaa

SEQ ID NO: 2698572 - DNA, 25 bp, Homo sapien
atagttgaaataagaacaacagtcc

SEQ ID NO: 2698573 - DNA, 25 bp, Homo sapien
gaccacagatatccttctatagttg

SEQ ID NO: 2698574 - DNA, 25 bp, Homo sapien
aaaagagcaattttagcctctccct

SEQ ID NO: 2698575 - DNA, 25 bp, Homo sapien
agcaccctccccgatgggaatccca

SEQ ID NO: 2698576 - DNA, 25 bp, Homo sapien
tgggaatcccaacatacaccatcac

SEQ ID NO: 2698577 - DNA, 25 bp, Homo sapien
ttaacagcatcagacacatctaagt

SEQ ID NO: 2698578 - DNA, 25 bp, Homo sapien
tcacattaacagcatcagacacatc

SEQ ID NO: 2698579 - DNA, 25 bp, Homo sapien
ccactgggcacccacttcccatcag

SEQ ID NO: 2698580 - DNA, 25 bp, Homo sapien
actgggcacccacttcccatcagac

SEQ ID NO: 2698581 - DNA, 25 bp, Homo sapien
ttatctagcaacatccactgggcac

SEQ ID NO: 2698582 - DNA, 25 bp, Homo sapien
catccactgggcacccacttcccat

SEQ ID NO: 2698583 - DNA, 25 bp, Homo sapien
tgacactttcaatgtagtcagccat

SEQ ID NO: 2698584 - DNA, 25 bp, Homo sapien
tcatcggcatctccctcgtcaattg

SEQ ID NO: 2698585 - DNA, 25 bp, Homo sapien
ccctcgtcaattgtcttgagtacct

SEQ ID NO: 2698586 - DNA, 25 bp, Homo sapien
catcatgaatcctctgcttcgtcac

SEQ ID NO: 2698587 - DNA, 25 bp, Homo sapien
tggctgcatagatgtgccataaagc

SEQ ID NO: 2698588 - DNA, 25 bp, Homo sapien
gtcatgaattgggtcatgatcaggg

SEQ ID NO: 2698589 - DNA, 25 bp, Homo sapien
ctttggtcatgaattgggtcatgat

SEQ ID NO: 2698590 - DNA, 25 bp, Homo sapien
tcatgatcaggggggttctcttggc

SEQ ID NO: 2698591 - DNA, 25 bp, Homo sapien
tggtcatgaattgggtcatgatcag

SEQ ID NO: 2698592 - DNA, 25 bp, Homo sapien
gaaaacagcatcacctaggaactgc

SEQ ID NO: 2698593 - DNA, 25 bp, Homo sapien
cttgcacgccatactcctcatagag

SEQ ID NO: 2698594 - DNA, 25 bp, Homo sapien
tcctcatagagtcgcttacggaggg

SEQ ID NO: 2698595 - DNA, 25 bp, Homo sapien
acctaggaactgcacaatagcccag

SEQ ID NO: 2698596 - DNA, 25 bp, Homo sapien
tttgtatgagtgttagagagatgcc

SEQ ID NO: 2698597 - DNA, 25 bp, Homo sapien
tgagtcaggcggaaacagtgcttta

SEQ ID NO: 2698598 - DNA, 25 bp, Homo sapien
agtttatcctcatgatttgtatgag

SEQ ID NO: 2698599 - DNA, 25 bp, Homo sapien
catgttctggagatacaaagtcttc

SEQ ID NO: 2698600 - DNA, 25 bp, Homo sapien
ctaagaaattgagtctgcatagaaa

SEQ ID NO: 2698601 - DNA, 25 bp, Homo sapien
gaaatctgctatgagaagcagcttc

SEQ ID NO: 2698602 - DNA, 25 bp, Homo sapien
gaagcagcttcagcgcaatatttct

SEQ ID NO: 2698603 - DNA, 25 bp, Homo sapien
cacactgccatagtgctttttccac

SEQ ID NO: 2698604 - DNA, 25 bp, Homo sapien
tgcgttcctgtatcaatccccacag

SEQ ID NO: 2698605 - DNA, 25 bp, Homo sapien
gcaaatgtacgttctaccttgactg

SEQ ID NO: 2698606 - DNA, 25 bp, Homo sapien
tttacaaatcacatagggcatgagg

SEQ ID NO: 2698607 - DNA, 25 bp, Homo sapien
tcccaaaaaggactgtgcgttcctg

SEQ ID NO: 2698608 - DNA, 25 bp, Homo sapien
agccttgagggtgccaaccgcatct

SEQ ID NO: 2698609 - DNA, 25 bp, Homo sapien
gggtgccaaccgcatctttcactgc

SEQ ID NO: 2698610 - DNA, 25 bp, Homo sapien
gccagtttggattcatgagccttga

SEQ ID NO: 2698611 - DNA, 25 bp, Homo sapien
ttggattcatgagccttgagggtgc

SEQ ID NO: 2698612 - DNA, 25 bp, Homo sapien
taagtgttgtgagtgaaagacctgc

SEQ ID NO: 2698613 - DNA, 25 bp, Homo sapien
ctttgtcagaggtcacgtgcagaga

SEQ ID NO: 2698614 - DNA, 25 bp, Homo sapien
ggtgtgcccgtgaatctcaaatcag

SEQ ID NO: 2698615 - DNA, 25 bp, Homo sapien
gctatcagacttccaccaggcatgt

SEQ ID NO: 2698616 - DNA, 25 bp, Homo sapien
gaaatcccaatcagcccttcaacaa

SEQ ID NO: 2698617 - DNA, 25 bp, Homo sapien
acatggaaatcccaatcagcccttc

SEQ ID NO: 2698618 - DNA, 25 bp, Homo sapien
tggaaatcccaatcagcccttcaac

SEQ ID NO: 2698619 - DNA, 25 bp, Homo sapien
tcccaatcagcccttcaacaaaatt

SEQ ID NO: 2698620 - DNA, 25 bp, Homo sapien
tgccttcctcgaatcgcttgttcat

SEQ ID NO: 2698621 - DNA, 25 bp, Homo sapien
tgtggccgggcatgcgcctccgacc

SEQ ID NO: 2698622 - DNA, 25 bp, Homo sapien
ccgggcatgcgcctccgaccctcag

SEQ ID NO: 2698623 - DNA, 25 bp, Homo sapien
tgctgtggccgggcatgcgcctccg

SEQ ID NO: 2698624 - DNA, 25 bp, Homo sapien
ccggccgaggatgcagctgcctgag

SEQ ID NO: 2698625 - DNA, 25 bp, Homo sapien
gcccggccgaggatgcagctgcctg

SEQ ID NO: 2698626 - DNA, 25 bp, Homo sapien
cggcccggccgaggatgcagctgcc

SEQ ID NO: 2698627 - DNA, 25 bp, Homo sapien
ggagcgcccagcgccgccgttaaag

SEQ ID NO: 2698628 - DNA, 25 bp, Homo sapien
ggcgagagatgatccaggacaccat

SEQ ID NO: 2698629 - DNA, 25 bp, Homo sapien
caggcgagagatgatccaggacacc

SEQ ID NO: 2698630 - DNA, 25 bp, Homo sapien
aggcgagagatgatccaggacacca

SEQ ID NO: 2698631 - DNA, 25 bp, Homo sapien
ggggcctaagggcatatgccctcgt

SEQ ID NO: 2698632 - DNA, 25 bp, Homo sapien
aagggcatatgccctcgtccccagt

SEQ ID NO: 2698633 - DNA, 25 bp, Homo sapien
ccgatacccagacttcctccctagg

SEQ ID NO: 2698634 - DNA, 25 bp, Homo sapien
ctgcttcccgatacccagacttcct

SEQ ID NO: 2698635 - DNA, 25 bp, Homo sapien
tggcaggcagaggtaccactgtggc

SEQ ID NO: 2698636 - DNA, 25 bp, Homo sapien
aggcagaggtaccactgtggccctg

SEQ ID NO: 2698637 - DNA, 25 bp, Homo sapien
gcaggcagaggtaccactgtggccc

SEQ ID NO: 2698638 - DNA, 25 bp, Homo sapien
ctggcaggcagaggtaccactgtgg

SEQ ID NO: 2698639 - DNA, 25 bp, Homo sapien
agggaacctgacaccacctaacagg

SEQ ID NO: 2698640 - DNA, 25 bp, Homo sapien
tgcgagggaacctgacaccacctaa

SEQ ID NO: 2698641 - DNA, 25 bp, Homo sapien
gctctgcgagggaacctgacaccac

SEQ ID NO: 2698642 - DNA, 25 bp, Homo sapien
gaacctgacaccacctaacagggca

SEQ ID NO: 2698643 - DNA, 25 bp, Homo sapien
atggttactgggcctctcagccaag

SEQ ID NO: 2698644 - DNA, 25 bp, Homo sapien
tgggtacagggtgccaaagatgagc

SEQ ID NO: 2698645 - DNA, 25 bp, Homo sapien
ctgggtacagggtgccaaagatgag

SEQ ID NO: 2698646 - DNA, 25 bp, Homo sapien
cacgttttttgtcttcacggccttg

SEQ ID NO: 2698647 - DNA, 25 bp, Homo sapien
tattccttcacgttttttgtcttca

SEQ ID NO: 2698648 - DNA, 25 bp, Homo sapien
tttttgtcttcacggccttgtagga

SEQ ID NO: 2698649 - DNA, 25 bp, Homo sapien
ttcacggccttgtaggaagaatagg

SEQ ID NO: 2698650 - DNA, 25 bp, Homo sapien
actatatccgtgagcgtctcggccg

SEQ ID NO: 2698651 - DNA, 25 bp, Homo sapien
agcactatatccgtgagcgtctcgg

SEQ ID NO: 2698652 - DNA, 25 bp, Homo sapien
caggagagcactatatccgtgagcg

SEQ ID NO: 2698653 - DNA, 25 bp, Homo sapien
atatccgtgagcgtctcggccgtgg

SEQ ID NO: 2698654 - DNA, 25 bp, Homo sapien
gttgggacaggggcaagcgcagagt

SEQ ID NO: 2698655 - DNA, 25 bp, Homo sapien
tgggacaggggcaagcgcagagtac

SEQ ID NO: 2698656 - DNA, 25 bp, Homo sapien
gacaggggcaagcgcagagtacagg

SEQ ID NO: 2698657 - DNA, 25 bp, Homo sapien
ttgggacaggggcaagcgcagagta

SEQ ID NO: 2698658 - DNA, 25 bp, Homo sapien
cttctccttgttggacagcgttggg

SEQ ID NO: 2698659 - DNA, 25 bp, Homo sapien
tcacgaaggcgatcttcagttcaaa

SEQ ID NO: 2698660 - DNA, 25 bp, Homo sapien
acagcagccatatcacgaaggcgat

SEQ ID NO: 2698661 - DNA, 25 bp, Homo sapien
ggtgcacgaacttgcggtagagcac

SEQ ID NO: 2698662 - DNA, 25 bp, Homo sapien
ccaagtcactttgggctctgggccc

SEQ ID NO: 2698663 - DNA, 25 bp, Homo sapien
agaggtcctgccctacccttgttca

SEQ ID NO: 2698664 - DNA, 25 bp, Homo sapien
ctgcaggctctggactgccttggct

SEQ ID NO: 2698665 - DNA, 25 bp, Homo sapien
tacccttgttcacccctggacagag

SEQ ID NO: 2698666 - DNA, 25 bp, Homo sapien
gcggcaaggttcaggcccctcttgc

SEQ ID NO: 2698667 - DNA, 25 bp, Homo sapien
cgggcctgcgtgatgtactcgtcga

SEQ ID NO: 2698668 - DNA, 25 bp, Homo sapien
gctgtgactgcagcattggcggcaa

SEQ ID NO: 2698669 - DNA, 25 bp, Homo sapien
tggtctcatagctcttgtctcgggc

SEQ ID NO: 2698670 - DNA, 25 bp, Homo sapien
tctacagccccgagtacagggtgga

SEQ ID NO: 2698671 - DNA, 25 bp, Homo sapien
tagcagtagagcctggactggagcc

SEQ ID NO: 2698672 - DNA, 25 bp, Homo sapien
gggaaatggccggacaatcaaagtg

SEQ ID NO: 2698673 - DNA, 25 bp, Homo sapien
gactcggccagatagcagtagagcc

SEQ ID NO: 2698674 - DNA, 25 bp, Homo sapien
gatcagggtcaggtcctgcatgctg

SEQ ID NO: 2698675 - DNA, 25 bp, Homo sapien
gtcctcgtcccggatcagggtcagg

SEQ ID NO: 2698676 - DNA, 25 bp, Homo sapien
tcccggatcagggtcaggtcctgca

SEQ ID NO: 2698677 - DNA, 25 bp, Homo sapien
ggctgggtcggaggcggccgtcagg

SEQ ID NO: 2698678 - DNA, 25 bp, Homo sapien
agctttgggcgcttttttgatgggt

SEQ ID NO: 2698679 - DNA, 25 bp, Homo sapien
tgctggaccttagactcagggcagg

SEQ ID NO: 2698680 - DNA, 25 bp, Homo sapien
gaatctgccgggtttgtgctggacc

SEQ ID NO: 2698681 - DNA, 25 bp, Homo sapien
atcctcagaagcctctgtccgggaa

SEQ ID NO: 2698682 - DNA, 25 bp, Homo sapien
agtcgcccccgccagaggtcttctt

SEQ ID NO: 2698683 - DNA, 25 bp, Homo sapien
ttcttgggccgggtcttcagtgtct

SEQ ID NO: 2698684 - DNA, 25 bp, Homo sapien
ggtcttcagtgtcttggaagccagt

SEQ ID NO: 2698685 - DNA, 25 bp, Homo sapien
cccgccagaggtcttcttcttgggc

SEQ ID NO: 2698686 - DNA, 25 bp, Homo sapien
ctgcagcggaacagcggtggaggcc

SEQ ID NO: 2698687 - DNA, 25 bp, Homo sapien
gggcaggcaccggaaatggccatct

SEQ ID NO: 2698688 - DNA, 25 bp, Homo sapien
ccaggggcctgagacacctaggcta

SEQ ID NO: 2698689 - DNA, 25 bp, Homo sapien
tggaggccgagcagtccccacctcc

SEQ ID NO: 2698690 - DNA, 25 bp, Homo sapien
ggaaacacgacaggacctctgagaa

SEQ ID NO: 2698691 - DNA, 25 bp, Homo sapien
tgctcccaaaccaaggcgagcagtg

SEQ ID NO: 2698692 - DNA, 25 bp, Homo sapien
tctgagaagcggattgctatgggct

SEQ ID NO: 2698693 - DNA, 25 bp, Homo sapien
ggtccatctgggctaggacttcccc

SEQ ID NO: 2698694 - DNA, 25 bp, Homo sapien
atcctggtcgctgaagcacaggcca

SEQ ID NO: 2698695 - DNA, 25 bp, Homo sapien
ctggccatcctggtcgctgaagcac

SEQ ID NO: 2698696 - DNA, 25 bp, Homo sapien
gcacaggccaatccctgtcttccat

SEQ ID NO: 2698697 - DNA, 25 bp, Homo sapien
ggccatcctggtcgctgaagcacag

SEQ ID NO: 2698698 - DNA, 25 bp, Homo sapien
gggaacatgtggcactcagccccac

SEQ ID NO: 2698699 - DNA, 25 bp, Homo sapien
tgtgggaacatgtggcactcagccc

SEQ ID NO: 2698700 - DNA, 25 bp, Homo sapien
cccctttttaatgtgggaacatgtg

SEQ ID NO: 2698701 - DNA, 25 bp, Homo sapien
cctttttaatgtgggaacatgtggc

SEQ ID NO: 2698702 - DNA, 25 bp, Homo sapien
gatccccgttctctcatgggctggg

SEQ ID NO: 2698703 - DNA, 25 bp, Homo sapien
ccccagatccccgttctctcatggg

SEQ ID NO: 2698704 - DNA, 25 bp, Homo sapien
gcaaggtcataggagcaggtgagag

SEQ ID NO: 2698705 - DNA, 25 bp, Homo sapien
ctaaaagggagcaaggtcataggag

SEQ ID NO: 2698706 - DNA, 25 bp, Homo sapien
cctgaggagcacgggagtccagccc

SEQ ID NO: 2698707 - DNA, 25 bp, Homo sapien
tgaggagcacgggagtccagcccag

SEQ ID NO: 2698708 - DNA, 25 bp, Homo sapien
gaggagcacgggagtccagcccagg

SEQ ID NO: 2698709 - DNA, 25 bp, Homo sapien
ctgaggagcacgggagtccagccca

SEQ ID NO: 2698710 - DNA, 25 bp, Homo sapien
ggagaggggcccactcagcaggggc

SEQ ID NO: 2698711 - DNA, 25 bp, Homo sapien
ctgggcaagaggggatggaccccag

SEQ ID NO: 2698712 - DNA, 25 bp, Homo sapien
tgggcaagaggggatggaccccagg

SEQ ID NO: 2698713 - DNA, 25 bp, Homo sapien
gcagaggagaggggcccactcagca

SEQ ID NO: 2698714 - DNA, 25 bp, Homo sapien
gggtcttagggcccagtctgcttgg

SEQ ID NO: 2698715 - DNA, 25 bp, Homo sapien
ggcgggtgtgagcagaggctgggtt

SEQ ID NO: 2698716 - DNA, 25 bp, Homo sapien
cgggtgtgagcagaggctgggttct

SEQ ID NO: 2698717 - DNA, 25 bp, Homo sapien
gcgggtgtgagcagaggctgggttc

SEQ ID NO: 2698718 - DNA, 25 bp, Homo sapien
caaaggtccaatgggcaccctcttc

SEQ ID NO: 2698719 - DNA, 25 bp, Homo sapien
tcctcctggccctgactgaagccgt

SEQ ID NO: 2698720 - DNA, 25 bp, Homo sapien
tttattggctcatccagtgccaaag

SEQ ID NO: 2698721 - DNA, 25 bp, Homo sapien
aggtgccagagtttggtttattggc

SEQ ID NO: 2698722 - DNA, 25 bp, Homo sapien
agctggtgtggcaagaacaaagcac

SEQ ID NO: 2698723 - DNA, 25 bp, Homo sapien
cagctggtgtggcaagaacaaagca

SEQ ID NO: 2698724 - DNA, 25 bp, Homo sapien
ctttctgttggataccagaaggtcc

SEQ ID NO: 2698725 - DNA, 25 bp, Homo sapien
ggataccagaaggtccactcaagac

SEQ ID NO: 2698726 - DNA, 25 bp, Homo sapien
ccagagcctacacctagcactttct

SEQ ID NO: 2698727 - DNA, 25 bp, Homo sapien
tccactcaagacttggggtaagatt

SEQ ID NO: 2698728 - DNA, 25 bp, Homo sapien
gcttttccatcctcgcaggcatccc

SEQ ID NO: 2698729 - DNA, 25 bp, Homo sapien
gcctccagcctggatatggcaccgt

SEQ ID NO: 2698730 - DNA, 25 bp, Homo sapien
atatggcaccgtttcaggcaggaca

SEQ ID NO: 2698731 - DNA, 25 bp, Homo sapien
caaaagccgctgtccggtaaggaca

SEQ ID NO: 2698732 - DNA, 25 bp, Homo sapien
agaccctctattggccaagacagga

SEQ ID NO: 2698733 - DNA, 25 bp, Homo sapien
cttcctgggttggaggtgctaactg

SEQ ID NO: 2698734 - DNA, 25 bp, Homo sapien
ttttcttagttgatgggactgaatc

SEQ ID NO: 2698735 - DNA, 25 bp, Homo sapien
tgaatcatgattctggctgagatgg

SEQ ID NO: 2698736 - DNA, 25 bp, Homo sapien
aaatcgaggtatcaggaaggcttct

SEQ ID NO: 2698737 - DNA, 25 bp, Homo sapien
atcgaggtatcaggaaggcttctac

SEQ ID NO: 2698738 - DNA, 25 bp, Homo sapien
ggaaatcgaggtatcaggaaggctt

SEQ ID NO: 2698739 - DNA, 25 bp, Homo sapien
cgtgggaaatcgaggtatcaggaag

SEQ ID NO: 2698740 - DNA, 25 bp, Homo sapien
tctgcttagactccaaataatccag

SEQ ID NO: 2698741 - DNA, 25 bp, Homo sapien
gtcctctgcttagactccaaataat

SEQ ID NO: 2698742 - DNA, 25 bp, Homo sapien
ctctgcttagactccaaataatcca

SEQ ID NO: 2698743 - DNA, 25 bp, Homo sapien
cctctgcttagactccaaataatcc

SEQ ID NO: 2698744 - DNA, 25 bp, Homo sapien
tcttcccagtggttgccctgtttgc

SEQ ID NO: 2698745 - DNA, 25 bp, Homo sapien
ggtcacagaccctaacaggaaagtc

SEQ ID NO: 2698746 - DNA, 25 bp, Homo sapien
tggttgccctgtttgccaggcaccc

SEQ ID NO: 2698747 - DNA, 25 bp, Homo sapien
gaaagtcagtccatgtcttcccagt

SEQ ID NO: 2698748 - DNA, 25 bp, Homo sapien
cagcaaacctcccgctgaggtcccg

SEQ ID NO: 2698749 - DNA, 25 bp, Homo sapien
cctggcatgcagagtttgttcccgg

SEQ ID NO: 2698750 - DNA, 25 bp, Homo sapien
catgcagagtttgttcccggctgct

SEQ ID NO: 2698751 - DNA, 25 bp, Homo sapien
gcagagtttgttcccggctgctgtg

SEQ ID NO: 2698752 - DNA, 25 bp, Homo sapien
tggcatgcagagtttgttcccggct

SEQ ID NO: 2698753 - DNA, 25 bp, Homo sapien
gcatttgaattaaagcgagaactga

SEQ ID NO: 2698754 - DNA, 25 bp, Homo sapien
ggctaaatcgagagtgtgaagctgc

SEQ ID NO: 2698755 - DNA, 25 bp, Homo sapien
ttctctcccaggctaaatcgagagt

SEQ ID NO: 2698756 - DNA, 25 bp, Homo sapien
taaagcgagaactgaatgtggctgg

SEQ ID NO: 2698757 - DNA, 25 bp, Homo sapien
gcatccatctccccgggtacagtgg

SEQ ID NO: 2698758 - DNA, 25 bp, Homo sapien
tatcaactccctccatatgggaacc

SEQ ID NO: 2698759 - DNA, 25 bp, Homo sapien
gaggctgatggaagggccctgtcat

SEQ ID NO: 2698760 - DNA, 25 bp, Homo sapien
caacatgcgtgagtgagaaggaagc

SEQ ID NO: 2698761 - DNA, 25 bp, Homo sapien
tccgactgactttccagccgaaggc

SEQ ID NO: 2698762 - DNA, 25 bp, Homo sapien
actttccgactgactttccagccga

SEQ ID NO: 2698763 - DNA, 25 bp, Homo sapien
gctttgaatgggtctggggcagttc

SEQ ID NO: 2698764 - DNA, 25 bp, Homo sapien
gactgactttccagccgaaggctga

SEQ ID NO: 2698765 - DNA, 25 bp, Homo sapien
cctgctctagctctgaatccagagg

SEQ ID NO: 2698766 - DNA, 25 bp, Homo sapien
tcctgctctagctctgaatccagag

SEQ ID NO: 2698767 - DNA, 25 bp, Homo sapien
ctgctctagctctgaatccagagga

SEQ ID NO: 2698768 - DNA, 25 bp, Homo sapien
gcacgaactgagcaggcgctgcagc

SEQ ID NO: 2698769 - DNA, 25 bp, Homo sapien
cagtgagcacgaactgagcaggcgc

SEQ ID NO: 2698770 - DNA, 25 bp, Homo sapien
agaggaccggcttggcggctcggtg

SEQ ID NO: 2698771 - DNA, 25 bp, Homo sapien
gagccttcgacgcagtgagcacgaa

SEQ ID NO: 2698772 - DNA, 25 bp, Homo sapien
cacactgcgggaatccgaaagaggg

SEQ ID NO: 2698773 - DNA, 25 bp, Homo sapien
agaggggcttccctatgggctgtct

SEQ ID NO: 2698774 - DNA, 25 bp, Homo sapien
gtccttgtggtgaggggtcactttc

SEQ ID NO: 2698775 - DNA, 25 bp, Homo sapien
caggagataatggtccttgtggtga

SEQ ID NO: 2698776 - DNA, 25 bp, Homo sapien
cccaagagaggcctgattcttgttc

SEQ ID NO: 2698777 - DNA, 25 bp, Homo sapien
tgattgccccaagagaggcctgatt

SEQ ID NO: 2698778 - DNA, 25 bp, Homo sapien
ttgccccaagagaggcctgattctt

SEQ ID NO: 2698779 - DNA, 25 bp, Homo sapien
agctgattgccccaagagaggcctg

SEQ ID NO: 2698780 - DNA, 25 bp, Homo sapien
tctatggcacggtgtctttccgggt

SEQ ID NO: 2698781 - DNA, 25 bp, Homo sapien
cttggttcttgggacactgtatagc

SEQ ID NO: 2698782 - DNA, 25 bp, Homo sapien
ttgaccccgggcctcgatctatggc

SEQ ID NO: 2698783 - DNA, 25 bp, Homo sapien
ttgaggataggaagtcacggccact

SEQ ID NO: 2698784 - DNA, 25 bp, Homo sapien
ctcagggaccgtgagagcgaaccgg

SEQ ID NO: 2698785 - DNA, 25 bp, Homo sapien
gaccgtgagagcgaaccgggagtgc

SEQ ID NO: 2698786 - DNA, 25 bp, Homo sapien
cgtgagagcgaaccgggagtgcggg

SEQ ID NO: 2698787 - DNA, 25 bp, Homo sapien
agggaccgtgagagcgaaccgggag

SEQ ID NO: 2698788 - DNA, 25 bp, Homo sapien
cgagtcgggccggggttctatcgct

SEQ ID NO: 2698789 - DNA, 25 bp, Homo sapien
gagtcgggccggggttctatcgctg

SEQ ID NO: 2698790 - DNA, 25 bp, Homo sapien
ggttctatcgctgtcatccagggcc

SEQ ID NO: 2698791 - DNA, 25 bp, Homo sapien
tctatcgctgtcatccagggcccgc

SEQ ID NO: 2698792 - DNA, 25 bp, Homo sapien
cgtcgtgacgtacatggccatatat

SEQ ID NO: 2698793 - DNA, 25 bp, Homo sapien
catatcgggccactccaaataaggt

SEQ ID NO: 2698794 - DNA, 25 bp, Homo sapien
aagttctgcgcgctgggatctctcg

SEQ ID NO: 2698795 - DNA, 25 bp, Homo sapien
tatatggcatttccgggtcgcagct

SEQ ID NO: 2698796 - DNA, 25 bp, Homo sapien
tggtgggcgagtgaggaaaggatcc

SEQ ID NO: 2698797 - DNA, 25 bp, Homo sapien
tcctccagcttagggtagttgtcca

SEQ ID NO: 2698798 - DNA, 25 bp, Homo sapien
gatccgaacgggtcagagatctgca

SEQ ID NO: 2698799 - DNA, 25 bp, Homo sapien
gggagccccgttgctcagcagcatc

SEQ ID NO: 2698800 - DNA, 25 bp, Homo sapien
tctggggccccggcggcgccgagga

SEQ ID NO: 2698801 - DNA, 25 bp, Homo sapien
gctgccctctggggccccggcggcg

SEQ ID NO: 2698802 - DNA, 25 bp, Homo sapien
cctctggggccccggcggcgccgag

SEQ ID NO: 2698803 - DNA, 25 bp, Homo sapien
tgttgctgccgctgccctctggggc

SEQ ID NO: 2698804 - DNA, 25 bp, Homo sapien
cgcctccaccgcccccgctgctgct

SEQ ID NO: 2698805 - DNA, 25 bp, Homo sapien
cgccgcctccaccgcccccgctgct

SEQ ID NO: 2698806 - DNA, 25 bp, Homo sapien
tgctgctgttgctgccgcccccgcc

SEQ ID NO: 2698807 - DNA, 25 bp, Homo sapien
ctgagggttgaaggtgctgctgctg

SEQ ID NO: 2698808 - DNA, 25 bp, Homo sapien
caggtgctcgtagggctgctcgccc

SEQ ID NO: 2698809 - DNA, 25 bp, Homo sapien
gtcaggtgctcgtagggctgctcgc

SEQ ID NO: 2698810 - DNA, 25 bp, Homo sapien
ctgcggtcaggtgctcgtagggctg

SEQ ID NO: 2698811 - DNA, 25 bp, Homo sapien
cggtcaggtgctcgtagggctgctc

SEQ ID NO: 2698812 - DNA, 25 bp, Homo sapien
ccacgcagctccagagctctccatc

SEQ ID NO: 2698813 - DNA, 25 bp, Homo sapien
aaaacaaaagctcggtcctctgcgc

SEQ ID NO: 2698814 - DNA, 25 bp, Homo sapien
caaaagctcggtcctctgcgctccg

SEQ ID NO: 2698815 - DNA, 25 bp, Homo sapien
aacaaaagctcggtcctctgcgctc

SEQ ID NO: 2698816 - DNA, 25 bp, Homo sapien
gcagagcccatttcaacaacagctg

SEQ ID NO: 2698817 - DNA, 25 bp, Homo sapien
gctgacgcaaatacggagaatcccc

SEQ ID NO: 2698818 - DNA, 25 bp, Homo sapien
tccacggccaaggatcacggtcctt

SEQ ID NO: 2698819 - DNA, 25 bp, Homo sapien
ctgtgcgggcgagggattcccgcca

SEQ ID NO: 2698820 - DNA, 25 bp, Homo sapien
cttctcgttgttcagagagatgtca

SEQ ID NO: 2698821 - DNA, 25 bp, Homo sapien
cagcaccttctcgttgttcagagag

SEQ ID NO: 2698822 - DNA, 25 bp, Homo sapien
agcaccttctcgttgttcagagaga

SEQ ID NO: 2698823 - DNA, 25 bp, Homo sapien
caccttctcgttgttcagagagatg

SEQ ID NO: 2698824 - DNA, 25 bp, Homo sapien
ggctcgggccacaaggtgttgccac

SEQ ID NO: 2698825 - DNA, 25 bp, Homo sapien
tgttgccactgttgggtgcaggctc

SEQ ID NO: 2698826 - DNA, 25 bp, Homo sapien
ctccagggaaaagcggccagtatag

SEQ ID NO: 2698827 - DNA, 25 bp, Homo sapien
gctccagggaaaagcggccagtata

SEQ ID NO: 2698828 - DNA, 25 bp, Homo sapien
ggaggaggccgctggagatggtgct

SEQ ID NO: 2698829 - DNA, 25 bp, Homo sapien
aggccggtgggttggtcatgctcac

SEQ ID NO: 2698830 - DNA, 25 bp, Homo sapien
gacgaggaggccggtgggttggtca

SEQ ID NO: 2698831 - DNA, 25 bp, Homo sapien
ggaggccggtgggttggtcatgctc

SEQ ID NO: 2698832 - DNA, 25 bp, Homo sapien
aggtgggtgccgctgagtaaatggg

SEQ ID NO: 2698833 - DNA, 25 bp, Homo sapien
gtgccgctgagtaaatgggactgct

SEQ ID NO: 2698834 - DNA, 25 bp, Homo sapien
taaatgggactgctgtcgttggatg

SEQ ID NO: 2698835 - DNA, 25 bp, Homo sapien
ctgctgtcgttggatggcactgcgc

SEQ ID NO: 2698836 - DNA, 25 bp, Homo sapien
aggcgggtactggagcgctgtccct

SEQ ID NO: 2698837 - DNA, 25 bp, Homo sapien
cgggtactggagcgctgtccctgcc

SEQ ID NO: 2698838 - DNA, 25 bp, Homo sapien
tactggagcgctgtccctgccgagc

SEQ ID NO: 2698839 - DNA, 25 bp, Homo sapien
ggtactggagcgctgtccctgccga

SEQ ID NO: 2698840 - DNA, 25 bp, Homo sapien
ggatcatgggaacctggaagccacc

SEQ ID NO: 2698841 - DNA, 25 bp, Homo sapien
tccactgggcaagcgtaagggcgtt

SEQ ID NO: 2698842 - DNA, 25 bp, Homo sapien
actggtagctggtattgagggcctt

SEQ ID NO: 2698843 - DNA, 25 bp, Homo sapien
tcctgggagcccgactgagtggcaa

SEQ ID NO: 2698844 - DNA, 25 bp, Homo sapien
ctcttgcgttcatcgctcctggcaa

SEQ ID NO: 2698845 - DNA, 25 bp, Homo sapien
cgcaagtggatcttggtatgcctct

SEQ ID NO: 2698846 - DNA, 25 bp, Homo sapien
tcttgcgttcatcgctcctggcaaa

SEQ ID NO: 2698847 - DNA, 25 bp, Homo sapien
ggatcttggtatgcctcttgcgttc

SEQ ID NO: 2698848 - DNA, 25 bp, Homo sapien
tggtggccggggatggataagaggt

SEQ ID NO: 2698849 - DNA, 25 bp, Homo sapien
gccggggatggataagaggtagtaa

SEQ ID NO: 2698850 - DNA, 25 bp, Homo sapien
tgggtaggtcgaggagccgggagag

SEQ ID NO: 2698851 - DNA, 25 bp, Homo sapien
caggggatgggtaggtcgaggagcc

SEQ ID NO: 2698852 - DNA, 25 bp, Homo sapien
tcatgtccgaaagccctgtggaggc

SEQ ID NO: 2698853 - DNA, 25 bp, Homo sapien
tggaggcgctgaaggagttggtgac

SEQ ID NO: 2698854 - DNA, 25 bp, Homo sapien
aacagaggagtacgtggtggccacc

SEQ ID NO: 2698855 - DNA, 25 bp, Homo sapien
tagcaaatttcaattgtcctgggag

SEQ ID NO: 2698856 - DNA, 25 bp, Homo sapien
taacggaacaacactctgacacatg

SEQ ID NO: 2698857 - DNA, 25 bp, Homo sapien
ccacatgtgagagtacggtcaagca

SEQ ID NO: 2698858 - DNA, 25 bp, Homo sapien
tgagaacctccatctgacctaagag

SEQ ID NO: 2698859 - DNA, 25 bp, Homo sapien
ggattgttggccaatagaccttcca

SEQ ID NO: 2698860 - DNA, 25 bp, Homo sapien
atcagcaaggcgcatcacacaaaag

SEQ ID NO: 2698861 - DNA, 25 bp, Homo sapien
cacatgtcaagccatcagcaaggcg

SEQ ID NO: 2698862 - DNA, 25 bp, Homo sapien
aattgcacatgtcaagccatcagca

SEQ ID NO: 2698863 - DNA, 25 bp, Homo sapien
gcaaggcgcatcacacaaaaggcac

SEQ ID NO: 2698864 - DNA, 25 bp, Homo sapien
tatcccatgggcaataaagcgcatt

SEQ ID NO: 2698865 - DNA, 25 bp, Homo sapien
aaaaatcgccgcctactcagtaggt

SEQ ID NO: 2698866 - DNA, 25 bp, Homo sapien
ttaaggctagaggtgagcatgtccc

SEQ ID NO: 2698867 - DNA, 25 bp, Homo sapien
caatgtgtttataagccaaacagtc

SEQ ID NO: 2698868 - DNA, 25 bp, Homo sapien
ggcttctttgatgccctcaagttgc

SEQ ID NO: 2698869 - DNA, 25 bp, Homo sapien
tttgatgccctcaagttgctgggga

SEQ ID NO: 2698870 - DNA, 25 bp, Homo sapien
ctaggcttctttgatgccctcaagt

SEQ ID NO: 2698871 - DNA, 25 bp, Homo sapien
ttgatgccctcaagttgctggggac

SEQ ID NO: 2698872 - DNA, 25 bp, Homo sapien
ggcttgagaactggcctttacctcg

SEQ ID NO: 2698873 - DNA, 25 bp, Homo sapien
ttcttggcttgagaactggccttta

SEQ ID NO: 2698874 - DNA, 25 bp, Homo sapien
tatcctttgtcccacgaagctgcca

SEQ ID NO: 2698875 - DNA, 25 bp, Homo sapien
tcccacgaagctgccaaggatggca

SEQ ID NO: 2698876 - DNA, 25 bp, Homo sapien
caaccttaacctttataatgatgag

SEQ ID NO: 2698877 - DNA, 25 bp, Homo sapien
gcactgtctcgtgcccttggttttc

SEQ ID NO: 2698878 - DNA, 25 bp, Homo sapien
atgatgagatctcttatcagcactg

SEQ ID NO: 2698879 - DNA, 25 bp, Homo sapien
ctgaagccctagacaatttccccag

SEQ ID NO: 2698880 - DNA, 25 bp, Homo sapien
cacactgaaaactccagcgtgctgc

SEQ ID NO: 2698881 - DNA, 25 bp, Homo sapien
cgtgctgcaaatcccgggccaagct

SEQ ID NO: 2698882 - DNA, 25 bp, Homo sapien
aactccagcgtgctgcaaatcccgg

SEQ ID NO: 2698883 - DNA, 25 bp, Homo sapien
gaaaactccagcgtgctgcaaatcc

SEQ ID NO: 2698884 - DNA, 25 bp, Homo sapien
cctccagttccatacctgggggata

SEQ ID NO: 2698885 - DNA, 25 bp, Homo sapien
ctgcctccagttccatacctggggg

SEQ ID NO: 2698886 - DNA, 25 bp, Homo sapien
tccagttccatacctgggggatagg

SEQ ID NO: 2698887 - DNA, 25 bp, Homo sapien
tgcctccagttccatacctggggga

SEQ ID NO: 2698888 - DNA, 25 bp, Homo sapien
acctaagaggtcatctgaagtaagc

SEQ ID NO: 2698889 - DNA, 25 bp, Homo sapien
tgaagtaagcttagccacagaggct

SEQ ID NO: 2698890 - DNA, 25 bp, Homo sapien
agttgctgggccaccgatctgacct

SEQ ID NO: 2698891 - DNA, 25 bp, Homo sapien
tgggccaccgatctgacctaagagg

SEQ ID NO: 2698892 - DNA, 25 bp, Homo sapien
cttgatggagagaactccctggaaa

SEQ ID NO: 2698893 - DNA, 25 bp, Homo sapien
gtgctaaggagaatgggcttgatgg

SEQ ID NO: 2698894 - DNA, 25 bp, Homo sapien
gaatgggcttgatggagagaactcc

SEQ ID NO: 2698895 - DNA, 25 bp, Homo sapien
aagtgctaaggagaatgggcttgat

SEQ ID NO: 2698896 - DNA, 25 bp, Homo sapien
tgatagtgcttttctttttcacaga

SEQ ID NO: 2698897 - DNA, 25 bp, Homo sapien
gatagtgcttttctttttcacagat

SEQ ID NO: 2698898 - DNA, 25 bp, Homo sapien
cttttctttttcacagataagcttc

SEQ ID NO: 2698899 - DNA, 25 bp, Homo sapien
gtgcttttctttttcacagataagc

SEQ ID NO: 2698900 - DNA, 25 bp, Homo sapien
cattgatgcctctgatcctgatgac

SEQ ID NO: 2698901 - DNA, 25 bp, Homo sapien
accattgatgcctctgatcctgatg

SEQ ID NO: 2698902 - DNA, 25 bp, Homo sapien
ccattgatgcctctgatcctgatga

SEQ ID NO: 2698903 - DNA, 25 bp, Homo sapien
gtgttatgtatcaaagcaattcgct

SEQ ID NO: 2698904 - DNA, 25 bp, Homo sapien
tgttaactgaagcctgttgagcttc

SEQ ID NO: 2698905 - DNA, 25 bp, Homo sapien
cagcatgttaactgaagcctgttga

SEQ ID NO: 2698906 - DNA, 25 bp, Homo sapien
caatcaaagtgttatgtatcaaagc

SEQ ID NO: 2698907 - DNA, 25 bp, Homo sapien
gctttcagggcacaaggaaaacacc

SEQ ID NO: 2698908 - DNA, 25 bp, Homo sapien
gagcccatcccagtagctttcaggg

SEQ ID NO: 2698909 - DNA, 25 bp, Homo sapien
acttcttccagttgcgggtctcagg

SEQ ID NO: 2698910 - DNA, 25 bp, Homo sapien
caagatgccattccacggcagggca

SEQ ID NO: 2698911 - DNA, 25 bp, Homo sapien
cccctgtgagaagagtccattattt

SEQ ID NO: 2698912 - DNA, 25 bp, Homo sapien
caacgtgggagacttcaccggaaca

SEQ ID NO: 2698913 - DNA, 25 bp, Homo sapien
ggtgaaaaccgtagcctttgcattc

SEQ ID NO: 2698914 - DNA, 25 bp, Homo sapien
tactctgaggtccaaatactgtctg

SEQ ID NO: 2698915 - DNA, 25 bp, Homo sapien
tctcagcttagactgcgtaagaaga

SEQ ID NO: 2698916 - DNA, 25 bp, Homo sapien
tactttaactgctgtaaaccttcaa

SEQ ID NO: 2698917 - DNA, 25 bp, Homo sapien
aaattgctgcatttcgcagtgaccc

SEQ ID NO: 2698918 - DNA, 25 bp, Homo sapien
tagaagtgagatcatactggtttgt

SEQ ID NO: 2698919 - DNA, 25 bp, Homo sapien
tactaccttatttggcaggagccag

SEQ ID NO: 2698920 - DNA, 25 bp, Homo sapien
cctctactaccttatttggcaggag

SEQ ID NO: 2698921 - DNA, 25 bp, Homo sapien
tctactaccttatttggcaggagcc

SEQ ID NO: 2698922 - DNA, 25 bp, Homo sapien
ttaacctctactaccttatttggca

SEQ ID NO: 2698923 - DNA, 25 bp, Homo sapien
gaacttgagattgaggatcggccca

SEQ ID NO: 2698924 - DNA, 25 bp, Homo sapien
gatctgttcaactaagaggctggac

SEQ ID NO: 2698925 - DNA, 25 bp, Homo sapien
cagcagcctactatcttagtgaggg

SEQ ID NO: 2698926 - DNA, 25 bp, Homo sapien
gcagcagggctataaatggtcttcg

SEQ ID NO: 2698927 - DNA, 25 bp, Homo sapien
ttgatgcaggcactaccatccgtgc

SEQ ID NO: 2698928 - DNA, 25 bp, Homo sapien
gaaaacagcaatcctacttgggatg

SEQ ID NO: 2698929 - DNA, 25 bp, Homo sapien
gaagaaagccttcaagcatggacct

SEQ ID NO: 2698930 - DNA, 25 bp, Homo sapien
gggatgtcgtcatgcttacttcagc

SEQ ID NO: 2698931 - DNA, 25 bp, Homo sapien
gcatttttggttggcccttgcccac

SEQ ID NO: 2698932 - DNA, 25 bp, Homo sapien
caagattcatccttgggatcagaga

SEQ ID NO: 2698933 - DNA, 25 bp, Homo sapien
aattctaggctcaggtttccaacca

SEQ ID NO: 2698934 - DNA, 25 bp, Homo sapien
tccaaccacatgaacactcaatggg

SEQ ID NO: 2698935 - DNA, 25 bp, Homo sapien
tcagctccaagtagaaataaccaga

SEQ ID NO: 2698936 - DNA, 25 bp, Homo sapien
gagcagtatcagcatgtgcaaatct

SEQ ID NO: 2698937 - DNA, 25 bp, Homo sapien
ggaaatacaggatttgctaacactg

SEQ ID NO: 2698938 - DNA, 25 bp, Homo sapien
gcttcaagaatatgccatggctcat

SEQ ID NO: 2698939 - DNA, 25 bp, Homo sapien
ggtgaaaccatctcgcacacagcaa

SEQ ID NO: 2698940 - DNA, 25 bp, Homo sapien
cttgcaagtcaagctggctgtgcca

SEQ ID NO: 2698941 - DNA, 25 bp, Homo sapien
gatgagatccttctagttagcctag

SEQ ID NO: 2698942 - DNA, 25 bp, Homo sapien
gtgtctggcacctacatccttgatg

SEQ ID NO: 2698943 - DNA, 25 bp, Homo sapien
ggacatcagtagtctcctccacagg

SEQ ID NO: 2698944 - DNA, 25 bp, Homo sapien
cagggctacttggacatggcttgtt

SEQ ID NO: 2698945 - DNA, 25 bp, Homo sapien
gctaaaagggatctcagtcatttga

SEQ ID NO: 2698946 - DNA, 25 bp, Homo sapien
tatgagggtgccgagataccaagca

SEQ ID NO: 2698947 - DNA, 25 bp, Homo sapien
tgctgtatatgatttaggtggtgga

SEQ ID NO: 2698948 - DNA, 25 bp, Homo sapien
tatatgatttaggtggtggaacttt

SEQ ID NO: 2698949 - DNA, 25 bp, Homo sapien
ggtggaacttttgatatttctatcc

SEQ ID NO: 2698950 - DNA, 25 bp, Homo sapien
ggaaattcagaaaggagtatttgag

SEQ ID NO: 2698951 - DNA, 25 bp, Homo sapien
ctcttgcctatggtctagacaaatc

SEQ ID NO: 2698952 - DNA, 25 bp, Homo sapien
gctgctcttgcctatggtctagaca

SEQ ID NO: 2698953 - DNA, 25 bp, Homo sapien
tgctgctcttgcctatggtctagac

SEQ ID NO: 2698954 - DNA, 25 bp, Homo sapien
tgctcttgcctatggtctagacaaa

SEQ ID NO: 2698955 - DNA, 25 bp, Homo sapien
tgcctggccggccgatcttgggttt

SEQ ID NO: 2698956 - DNA, 25 bp, Homo sapien
ctggccggccgatcttgggtttgtt

SEQ ID NO: 2698957 - DNA, 25 bp, Homo sapien
gacaaatcaggtgattcatccgcct

SEQ ID NO: 2698958 - DNA, 25 bp, Homo sapien
cccgacaaatcaggtgattcatccg

SEQ ID NO: 2698959 - DNA, 25 bp, Homo sapien
cagggctgaccgggcataatggctc

SEQ ID NO: 2698960 - DNA, 25 bp, Homo sapien
agggctgaccgggcataatggctca

SEQ ID NO: 2698961 - DNA, 25 bp, Homo sapien
ggctgaccgggcataatggctcacg

SEQ ID NO: 2698962 - DNA, 25 bp, Homo sapien
gggctgaccgggcataatggctcac

SEQ ID NO: 2698963 - DNA, 25 bp, Homo sapien
cgcttgtttgctgcctcgtactcct

SEQ ID NO: 2698964 - DNA, 25 bp, Homo sapien
gcgcagctctttgccgtcggagcgc

SEQ ID NO: 2698965 - DNA, 25 bp, Homo sapien
aggtttccagaagcgctgccgccac

SEQ ID NO: 2698966 - DNA, 25 bp, Homo sapien
gttggaggtttccagaagcgctgcc

SEQ ID NO: 2698967 - DNA, 25 bp, Homo sapien
tagctggatgtctgttgcgccaaca

SEQ ID NO: 2698968 - DNA, 25 bp, Homo sapien
ggctgtccgagatacggccttcata

SEQ ID NO: 2698969 - DNA, 25 bp, Homo sapien
aatttatcccgtgtgaccttgagtc

SEQ ID NO: 2698970 - DNA, 25 bp, Homo sapien
caagaagactgtaatcggttcgcaa

SEQ ID NO: 2698971 - DNA, 25 bp, Homo sapien
cacaaagccacaagacaagatggcg

SEQ ID NO: 2698972 - DNA, 25 bp, Homo sapien
ttcacaaagccacaagacaagatgg

SEQ ID NO: 2698973 - DNA, 25 bp, Homo sapien
ccacaagacaagatggcgccgtcct

SEQ ID NO: 2698974 - DNA, 25 bp, Homo sapien
agccacaagacaagatggcgccgtc

SEQ ID NO: 2698975 - DNA, 25 bp, Homo sapien
ggttcatttccttgagccttcaggc

SEQ ID NO: 2698976 - DNA, 25 bp, Homo sapien
tttccttgagccttcaggctgtagc

SEQ ID NO: 2698977 - DNA, 25 bp, Homo sapien
tcaggttcatttccttgagccttca

SEQ ID NO: 2698978 - DNA, 25 bp, Homo sapien
cttgagccttcaggctgtagcccat

SEQ ID NO: 2698979 - DNA, 25 bp, Homo sapien
tagggtcatcctgtatttctctttt

SEQ ID NO: 2698980 - DNA, 25 bp, Homo sapien
ttagggtcatcctgtatttctcttt

SEQ ID NO: 2698981 - DNA, 25 bp, Homo sapien
tttagggtcatcctgtatttctctt

SEQ ID NO: 2698982 - DNA, 25 bp, Homo sapien
agggtcatcctgtatttctcttttc

SEQ ID NO: 2698983 - DNA, 25 bp, Homo sapien
atgttctgttggctgcctttaatcc

SEQ ID NO: 2698984 - DNA, 25 bp, Homo sapien
aagtgacttccccagttcaggccag

SEQ ID NO: 2698985 - DNA, 25 bp, Homo sapien
ttaatcctgaaagtgacttccccag

SEQ ID NO: 2698986 - DNA, 25 bp, Homo sapien
tgatgttctgttggctgcctttaat

SEQ ID NO: 2698987 - DNA, 25 bp, Homo sapien
ctaaagtgaagaagatcacatgttg

SEQ ID NO: 2698988 - DNA, 25 bp, Homo sapien
tgtgtctaatggcttcctgcatata

SEQ ID NO: 2698989 - DNA, 25 bp, Homo sapien
ctggttgtgtctaatggcttcctgc

SEQ ID NO: 2698990 - DNA, 25 bp, Homo sapien
ggttgtgtctaatggcttcctgcat

SEQ ID NO: 2698991 - DNA, 25 bp, Homo sapien
gtctaatggcttcctgcatataccc

SEQ ID NO: 2698992 - DNA, 25 bp, Homo sapien
aggggtagctgttcacatattcacc

SEQ ID NO: 2698993 - DNA, 25 bp, Homo sapien
aaggggtagctgttcacatattcac

SEQ ID NO: 2698994 - DNA, 25 bp, Homo sapien
ttcacatattcaccaccaatggact

SEQ ID NO: 2698995 - DNA, 25 bp, Homo sapien
tcacatattcaccaccaatggactt

SEQ ID NO: 2698996 - DNA, 25 bp, Homo sapien
acagttctccttggcttaacaatgt

SEQ ID NO: 2698997 - DNA, 25 bp, Homo sapien
aacaatgtttcagtgtccttgtgga

SEQ ID NO: 2698998 - DNA, 25 bp, Homo sapien
taagaagaggagctattgtcagagc

SEQ ID NO: 2698999 - DNA, 25 bp, Homo sapien
ttggcttaacaatgtttcagtgtcc

SEQ ID NO: 2699000 - DNA, 25 bp, Homo sapien
agcctttgaattccttgcaaggcag

SEQ ID NO: 2699001 - DNA, 25 bp, Homo sapien
cagcacacagaggactgtgactcca

SEQ ID NO: 2699002 - DNA, 25 bp, Homo sapien
gataaagtaaagatattcagccatt

SEQ ID NO: 2699003 - DNA, 25 bp, Homo sapien
tcaaaggcgatgacatctacccctc

SEQ ID NO: 2699004 - DNA, 25 bp, Homo sapien
tcctgcaatggccagtatcttgtca

SEQ ID NO: 2699005 - DNA, 25 bp, Homo sapien
ttctcctgcaatggccagtatcttg

SEQ ID NO: 2699006 - DNA, 25 bp, Homo sapien
cttctcctgcaatggccagtatctt

SEQ ID NO: 2699007 - DNA, 25 bp, Homo sapien
tgcaatggccagtatcttgtcactc

SEQ ID NO: 2699008 - DNA, 25 bp, Homo sapien
aggtcagcagaattagcctgagatt

SEQ ID NO: 2699009 - DNA, 25 bp, Homo sapien
ggtcagcagaattagcctgagattc

SEQ ID NO: 2699010 - DNA, 25 bp, Homo sapien
gcaggtcagcagaattagcctgaga

SEQ ID NO: 2699011 - DNA, 25 bp, Homo sapien
caggtcagcagaattagcctgagat

SEQ ID NO: 2699012 - DNA, 25 bp, Homo sapien
atggactccgataccaccggcactt

SEQ ID NO: 2699013 - DNA, 25 bp, Homo sapien
gtgctgggccttgggtgcatggact

SEQ ID NO: 2699014 - DNA, 25 bp, Homo sapien
tgctgggccagagaatgttgctggg

SEQ ID NO: 2699015 - DNA, 25 bp, Homo sapien
ataccaccggcacttcaagcacagg

SEQ ID NO: 2699016 - DNA, 25 bp, Homo sapien
gttttgcagttaaatctactggtaa

SEQ ID NO: 2699017 - DNA, 25 bp, Homo sapien
aaatctactggtaattgtgaaatag

SEQ ID NO: 2699018 - DNA, 25 bp, Homo sapien
cagttaaatctactggtaattgtga

SEQ ID NO: 2699019 - DNA, 25 bp, Homo sapien
tgcagttaaatctactggtaattgt

SEQ ID NO: 2699020 - DNA, 25 bp, Homo sapien
aacccattcaccctcgccttgaagc

SEQ ID NO: 2699021 - DNA, 25 bp, Homo sapien
ctgggcaaggaaaattcaagtgtcc

SEQ ID NO: 2699022 - DNA, 25 bp, Homo sapien
cacaaagtcactaacacaaacccat

SEQ ID NO: 2699023 - DNA, 25 bp, Homo sapien
aaaattcaagtgtcctttcatccac

SEQ ID NO: 2699024 - DNA, 25 bp, Homo sapien
aacaccagcgcagatttcatagcct

SEQ ID NO: 2699025 - DNA, 25 bp, Homo sapien
aaacaccagcgcagatttcatagcc

SEQ ID NO: 2699026 - DNA, 25 bp, Homo sapien
caaaacaccagcgcagatttcatag

SEQ ID NO: 2699027 - DNA, 25 bp, Homo sapien
caccagcgcagatttcatagccttt

SEQ ID NO: 2699028 - DNA, 25 bp, Homo sapien
gatctgtagctccactgttcccaaa

SEQ ID NO: 2699029 - DNA, 25 bp, Homo sapien
tctgtagctccactgttcccaaaag

SEQ ID NO: 2699030 - DNA, 25 bp, Homo sapien
atccttctgagggtcagagttcttc

SEQ ID NO: 2699031 - DNA, 25 bp, Homo sapien
tcagatgacagtgcccaagaagcgt

SEQ ID NO: 2699032 - DNA, 25 bp, Homo sapien
ggcttggcctcaaccctgtgctgct

SEQ ID NO: 2699033 - DNA, 25 bp, Homo sapien
ggcatcatacttgttgagcagcttc

SEQ ID NO: 2699034 - DNA, 25 bp, Homo sapien
gatgtccacgtaggagatacccaca

SEQ ID NO: 2699035 - DNA, 25 bp, Homo sapien
gaccctgaggccagaaaggcatcat

SEQ ID NO: 2699036 - DNA, 25 bp, Homo sapien
aacttgattgtggacttcccctcat

SEQ ID NO: 2699037 - DNA, 25 bp, Homo sapien
tgattgtggacttcccctcatcaac

SEQ ID NO: 2699038 - DNA, 25 bp, Homo sapien
cttgattgtggacttcccctcatca

SEQ ID NO: 2699039 - DNA, 25 bp, Homo sapien
ctggaacttgattgtggacttcccc

SEQ ID NO: 2699040 - DNA, 25 bp, Homo sapien
cttgacacgaccaagagccatgcca

SEQ ID NO: 2699041 - DNA, 25 bp, Homo sapien
gccagatggacgttgtacacaagct

SEQ ID NO: 2699042 - DNA, 25 bp, Homo sapien
gtgttcttgatgtgtaaagcccaga

SEQ ID NO: 2699043 - DNA, 25 bp, Homo sapien
gttctgccaattcttcctgagcaat

SEQ ID NO: 2699044 - DNA, 25 bp, Homo sapien
cctgagcaatgataccaggaagttg

SEQ ID NO: 2699045 - DNA, 25 bp, Homo sapien
cacacacaagcatgaaaacccaatc

SEQ ID NO: 2699046 - DNA, 25 bp, Homo sapien
gagggaagcacatctcacacacaag

SEQ ID NO: 2699047 - DNA, 25 bp, Homo sapien
tgtgccaccatcataacaaggtttg

SEQ ID NO: 2699048 - DNA, 25 bp, Homo sapien
atgggtaatgtgccaccatcataac

SEQ ID NO: 2699049 - DNA, 25 bp, Homo sapien
agctgggaggtttggacatcttggg

SEQ ID NO: 2699050 - DNA, 25 bp, Homo sapien
gctgggaggtttggacatcttgggg

SEQ ID NO: 2699051 - DNA, 25 bp, Homo sapien
cagctgggaggtttggacatcttgg

SEQ ID NO: 2699052 - DNA, 25 bp, Homo sapien
tgcggggatgtgtccgtctatttcc

SEQ ID NO: 2699053 - DNA, 25 bp, Homo sapien
gggatgtgtccgtctatttcctatc

SEQ ID NO: 2699054 - DNA, 25 bp, Homo sapien
gactgcggggatgtgtccgtctatt

SEQ ID NO: 2699055 - DNA, 25 bp, Homo sapien
tgtgtccgtctatttcctatccact

SEQ ID NO: 2699056 - DNA, 25 bp, Homo sapien
tcactgccactgacagctgcaaaat

SEQ ID NO: 2699057 - DNA, 25 bp, Homo sapien
tgccactgacagctgcaaaatcagc

SEQ ID NO: 2699058 - DNA, 25 bp, Homo sapien
tccacctctttcatcactgccactg

SEQ ID NO: 2699059 - DNA, 25 bp, Homo sapien
actgacagctgcaaaatcagccctc

SEQ ID NO: 2699060 - DNA, 25 bp, Homo sapien
tctgcccggtggagaacagcttctg

SEQ ID NO: 2699061 - DNA, 25 bp, Homo sapien
catctgcccggtggagaacagcttc

SEQ ID NO: 2699062 - DNA, 25 bp, Homo sapien
gcccggtggagaacagcttctgcat

SEQ ID NO: 2699063 - DNA, 25 bp, Homo sapien
ggagccatctgcccggtggagaaca

SEQ ID NO: 2699064 - DNA, 25 bp, Homo sapien
aaaagtcatggtctgtgtagaaaga

SEQ ID NO: 2699065 - DNA, 25 bp, Homo sapien
cctctgggcacatgcctagagctct

SEQ ID NO: 2699066 - DNA, 25 bp, Homo sapien
tgggcacatgcctagagctctggag

SEQ ID NO: 2699067 - DNA, 25 bp, Homo sapien
tgtagaaagaccaggctcttcctct

SEQ ID NO: 2699068 - DNA, 25 bp, Homo sapien
cagggagagataccagttacggaaa

SEQ ID NO: 2699069 - DNA, 25 bp, Homo sapien
aaataggccatatttcgaactgaga

SEQ ID NO: 2699070 - DNA, 25 bp, Homo sapien
gacatagacatagggaagaaatagg

SEQ ID NO: 2699071 - DNA, 25 bp, Homo sapien
gttacggaaactgacatagacatag

SEQ ID NO: 2699072 - DNA, 25 bp, Homo sapien
ctgccgcggtcttcctgaccaggag

SEQ ID NO: 2699073 - DNA, 25 bp, Homo sapien
ccgcggtcttcctgaccaggaggat

SEQ ID NO: 2699074 - DNA, 25 bp, Homo sapien
atcggaggggagccatccagtgtca

SEQ ID NO: 2699075 - DNA, 25 bp, Homo sapien
tcttcctgaccaggaggatcggagg

SEQ ID NO: 2699076 - DNA, 25 bp, Homo sapien
aatatgtccctctgaaccaggaact

SEQ ID NO: 2699077 - DNA, 25 bp, Homo sapien
tcatcaccactaagcactaatatgt

SEQ ID NO: 2699078 - DNA, 25 bp, Homo sapien
cactaagcactaatatgtccctctg

SEQ ID NO: 2699079 - DNA, 25 bp, Homo sapien
tgacccgtttctcatcaccactaag

SEQ ID NO: 2699080 - DNA, 25 bp, Homo sapien
gcctggaaacggtgtctggtgggaa

SEQ ID NO: 2699081 - DNA, 25 bp, Homo sapien
aagtggctctgggacggcctgaaag

SEQ ID NO: 2699082 - DNA, 25 bp, Homo sapien
tgtagttccagaacatgcccttggc

SEQ ID NO: 2699083 - DNA, 25 bp, Homo sapien
tgagggatatctggtctgtagagtc

SEQ ID NO: 2699084 - DNA, 25 bp, Homo sapien
tttgccaacagccagaggcaacgac

SEQ ID NO: 2699085 - DNA, 25 bp, Homo sapien
tctcaagaagtttaattttgccaac

SEQ ID NO: 2699086 - DNA, 25 bp, Homo sapien
gctctggaaatttggctgctggttc

SEQ ID NO: 2699087 - DNA, 25 bp, Homo sapien
agccagaggcaacgacagcagctct

SEQ ID NO: 2699088 - DNA, 25 bp, Homo sapien
tggcactgccagatcacgcatgaac

SEQ ID NO: 2699089 - DNA, 25 bp, Homo sapien
gatcacgcatgaacaggttgaagcc

SEQ ID NO: 2699090 - DNA, 25 bp, Homo sapien
ggctgcccaagcaggaaagccaggc

SEQ ID NO: 2699091 - DNA, 25 bp, Homo sapien
acaggttgaagccagcgtggagctg

SEQ ID NO: 2699092 - DNA, 25 bp, Homo sapien
tcagtccagaaagtcgataggatca

SEQ ID NO: 2699093 - DNA, 25 bp, Homo sapien
tgcaaaagatctttactgtgctttg

SEQ ID NO: 2699094 - DNA, 25 bp, Homo sapien
cattgccatctttgctcccacagtt

SEQ ID NO: 2699095 - DNA, 25 bp, Homo sapien
gtttgggtctctaagtgcgaagtcc

SEQ ID NO: 2699096 - DNA, 25 bp, Homo sapien
cattggctgccacagaagggccgcc

SEQ ID NO: 2699097 - DNA, 25 bp, Homo sapien
tgctccctcattggctgccacagaa

SEQ ID NO: 2699098 - DNA, 25 bp, Homo sapien
ccctcattggctgccacagaagggc

SEQ ID NO: 2699099 - DNA, 25 bp, Homo sapien
ttggctgccacagaagggccgccat

SEQ ID NO: 2699100 - DNA, 25 bp, Homo sapien
tccaaggacatctgtgatgcaaagc

SEQ ID NO: 2699101 - DNA, 25 bp, Homo sapien
tgtttccaaggacatctgtgatgca

SEQ ID NO: 2699102 - DNA, 25 bp, Homo sapien
ttccaaggacatctgtgatgcaaag

SEQ ID NO: 2699103 - DNA, 25 bp, Homo sapien
gtttccaaggacatctgtgatgcaa

SEQ ID NO: 2699104 - DNA, 25 bp, Homo sapien
catttcccctgacgcaggacttaga

SEQ ID NO: 2699105 - DNA, 25 bp, Homo sapien
ggatgctaaaggtcgatctccctgc

SEQ ID NO: 2699106 - DNA, 25 bp, Homo sapien
caacgaggcttgttcaggcttgttc

SEQ ID NO: 2699107 - DNA, 25 bp, Homo sapien
gacttagatgggctacaacgaggct

SEQ ID NO: 2699108 - DNA, 25 bp, Homo sapien
gcagacacgctcacacacttcaatt

SEQ ID NO: 2699109 - DNA, 25 bp, Homo sapien
tggcaaagatcggtccagcttccct

SEQ ID NO: 2699110 - DNA, 25 bp, Homo sapien
gggacattggcaaagatcggtccag

SEQ ID NO: 2699111 - DNA, 25 bp, Homo sapien
gcttccctgactggttgatgtctga

SEQ ID NO: 2699112 - DNA, 25 bp, Homo sapien
agcttcgtgctgacgctgggctttg

SEQ ID NO: 2699113 - DNA, 25 bp, Homo sapien
tccatgcgaggcctgaagactgaca

SEQ ID NO: 2699114 - DNA, 25 bp, Homo sapien
tcatcttctccatgcgaggcctgaa

SEQ ID NO: 2699115 - DNA, 25 bp, Homo sapien
aaatcatctcgtggaagcttcgtgc

SEQ ID NO: 2699116 - DNA, 25 bp, Homo sapien
ggtccagctcccctgactggaggat

SEQ ID NO: 2699117 - DNA, 25 bp, Homo sapien
tccagctcccctgactggaggattc

SEQ ID NO: 2699118 - DNA, 25 bp, Homo sapien
tttttcctcaggtccagctcccctg

SEQ ID NO: 2699119 - DNA, 25 bp, Homo sapien
ctcaggtccagctcccctgactgga

SEQ ID NO: 2699120 - DNA, 25 bp, Homo sapien
tgggcgagcgctaaattccagaggc

SEQ ID NO: 2699121 - DNA, 25 bp, Homo sapien
cagacgggcgctgctttgtctccct

SEQ ID NO: 2699122 - DNA, 25 bp, Homo sapien
ttccagaggcccgaagcagacgggc

SEQ ID NO: 2699123 - DNA, 25 bp, Homo sapien
ggctagctgggcgagcgctaaattc

SEQ ID NO: 2699124 - DNA, 25 bp, Homo sapien
tcaaaagtccagattggtaaataat

SEQ ID NO: 2699125 - DNA, 25 bp, Homo sapien
cactgtgagctcttaggtggattaa

SEQ ID NO: 2699126 - DNA, 25 bp, Homo sapien
tattctttcgctgaataaatatcca

SEQ ID NO: 2699127 - DNA, 25 bp, Homo sapien
ttaggcagaaactataggtaactcc

SEQ ID NO: 2699128 - DNA, 25 bp, Homo sapien
catccctgacaaggaacgttcctga

SEQ ID NO: 2699129 - DNA, 25 bp, Homo sapien
gcttcaagagctaagtgggcatcaa

SEQ ID NO: 2699130 - DNA, 25 bp, Homo sapien
ggaaaataccctgatgtaccacagg

SEQ ID NO: 2699131 - DNA, 25 bp, Homo sapien
ctgaagaggctgacgaaggactaca

SEQ ID NO: 2699132 - DNA, 25 bp, Homo sapien
gacaaggcaagtcacgctggactaa

SEQ ID NO: 2699133 - DNA, 25 bp, Homo sapien
gaagcaggcatactggtacccaggc

SEQ ID NO: 2699134 - DNA, 25 bp, Homo sapien
tttaggacttcaaagtgggccaggc

SEQ ID NO: 2699135 - DNA, 25 bp, Homo sapien
tctcacaagtgagcaaacagcatga

SEQ ID NO: 2699136 - DNA, 25 bp, Homo sapien
gagaatggtaacaatgcatctttgc

SEQ ID NO: 2699137 - DNA, 25 bp, Homo sapien
gagagaatggtaacaatgcatcttt

SEQ ID NO: 2699138 - DNA, 25 bp, Homo sapien
catgagagaatggtaacaatgcatc

SEQ ID NO: 2699139 - DNA, 25 bp, Homo sapien
tgagagaatggtaacaatgcatctt

SEQ ID NO: 2699140 - DNA, 25 bp, Homo sapien
gcaaagctgagttcctcaaactcca

SEQ ID NO: 2699141 - DNA, 25 bp, Homo sapien
acgagacatgccttcaccagagctg

SEQ ID NO: 2699142 - DNA, 25 bp, Homo sapien
ggcttctccctgcacttaactgcaa

SEQ ID NO: 2699143 - DNA, 25 bp, Homo sapien
ttttcacaagtatagggcttctccc

SEQ ID NO: 2699144 - DNA, 25 bp, Homo sapien
gtaacaagaggctccaacagtctct

SEQ ID NO: 2699145 - DNA, 25 bp, Homo sapien
cttgaagtttatgttgcctgcatgg

SEQ ID NO: 2699146 - DNA, 25 bp, Homo sapien
taacaagaggctccaacagtctctc

SEQ ID NO: 2699147 - DNA, 25 bp, Homo sapien
tgtaacaagaggctccaacagtctc

SEQ ID NO: 2699148 - DNA, 25 bp, Homo sapien
gagtgagagaccttaacaatcaagg

SEQ ID NO: 2699149 - DNA, 25 bp, Homo sapien
agcagagtgagagaccttaacaatc

SEQ ID NO: 2699150 - DNA, 25 bp, Homo sapien
ctgctaattaatcccacacaatgaa

SEQ ID NO: 2699151 - DNA, 25 bp, Homo sapien
caatgaaaggtgtgttaagcagagt

SEQ ID NO: 2699152 - DNA, 25 bp, Homo sapien
ggtcccaataaacgaatgattgccc

SEQ ID NO: 2699153 - DNA, 25 bp, Homo sapien
ccaaagaagcctacagtgatgacgc

SEQ ID NO: 2699154 - DNA, 25 bp, Homo sapien
tctcagcaattagtaaaggtcccaa

SEQ ID NO: 2699155 - DNA, 25 bp, Homo sapien
gaacttagctttatctggagatcac

SEQ ID NO: 2699156 - DNA, 25 bp, Homo sapien
tgcagccaaaacatgggccttctta

SEQ ID NO: 2699157 - DNA, 25 bp, Homo sapien
ttagaacgacctctcttcttattag

SEQ ID NO: 2699158 - DNA, 25 bp, Homo sapien
atgggccttcttagaacgacctctc

SEQ ID NO: 2699159 - DNA, 25 bp, Homo sapien
attagagggccctttactattggtg

SEQ ID NO: 2699160 - DNA, 25 bp, Homo sapien
atcttctacagcagccacaagctcc

SEQ ID NO: 2699161 - DNA, 25 bp, Homo sapien
catcttctacagcagccacaagctc

SEQ ID NO: 2699162 - DNA, 25 bp, Homo sapien
acatcttctacagcagccacaagct

SEQ ID NO: 2699163 - DNA, 25 bp, Homo sapien
tttacgtaaatgctcaggaccactg

SEQ ID NO: 2699164 - DNA, 25 bp, Homo sapien
aaaagtggagtggatacggccccat

SEQ ID NO: 2699165 - DNA, 25 bp, Homo sapien
tgagtgcactcaagacatagcagcc

SEQ ID NO: 2699166 - DNA, 25 bp, Homo sapien
gctgcctaagaaattccaagaggtg

SEQ ID NO: 2699167 - DNA, 25 bp, Homo sapien
tggttattatgattgcacgggaagc

SEQ ID NO: 2699168 - DNA, 25 bp, Homo sapien
gatcacagagatttggaagccatgc

SEQ ID NO: 2699169 - DNA, 25 bp, Homo sapien
ccatgcaattggtgactggctccta

SEQ ID NO: 2699170 - DNA, 25 bp, Homo sapien
taaggtagctactcaaaaacgaagc

SEQ ID NO: 2699171 - DNA, 25 bp, Homo sapien
tcgtattcatgtatcattataagct

SEQ ID NO: 2699172 - DNA, 25 bp, Homo sapien
ttatttttcgtattcatgtatcatt

SEQ ID NO: 2699173 - DNA, 25 bp, Homo sapien
tttcgtattcatgtatcattataag

SEQ ID NO: 2699174 - DNA, 25 bp, Homo sapien
tttttcgtattcatgtatcattata

SEQ ID NO: 2699175 - DNA, 25 bp, Homo sapien
ttgctctgtctccagactggagcac

SEQ ID NO: 2699176 - DNA, 25 bp, Homo sapien
tgtctccagactggagcacagcggt

SEQ ID NO: 2699177 - DNA, 25 bp, Homo sapien
tgctctgtctccagactggagcaca

SEQ ID NO: 2699178 - DNA, 25 bp, Homo sapien
tctgtctccagactggagcacagcg

SEQ ID NO: 2699179 - DNA, 25 bp, Homo sapien
tacccagggagtagaactagaggaa

SEQ ID NO: 2699180 - DNA, 25 bp, Homo sapien
gaaagtaaccaacatcacaggcaag

SEQ ID NO: 2699181 - DNA, 25 bp, Homo sapien
gattaagggatctcaccaacaagtg

SEQ ID NO: 2699182 - DNA, 25 bp, Homo sapien
tccagccctggatttaatgaatgcc

SEQ ID NO: 2699183 - DNA, 25 bp, Homo sapien
tcccaaccacaacgtaatggctcag

SEQ ID NO: 2699184 - DNA, 25 bp, Homo sapien
taaagaagttctcaagtcaagctgg

SEQ ID NO: 2699185 - DNA, 25 bp, Homo sapien
gctatggaaacatctctactgcctg

SEQ ID NO: 2699186 - DNA, 25 bp, Homo sapien
gcccagtagagaaacacagcttatc

SEQ ID NO: 2699187 - DNA, 25 bp, Homo sapien
gaggttcaagaccagaactactaaa

SEQ ID NO: 2699188 - DNA, 25 bp, Homo sapien
aaaacaaaatgtggcagaaggctgg

SEQ ID NO: 2699189 - DNA, 25 bp, Homo sapien
acaaaatgtggcagaaggctgggca

SEQ ID NO: 2699190 - DNA, 25 bp, Homo sapien
gctgagggtaggggattacttgaga

SEQ ID NO: 2699191 - DNA, 25 bp, Homo sapien
tagaactctcataccccaatgctgg

SEQ ID NO: 2699192 - DNA, 25 bp, Homo sapien
caggtgcctgtctgaagatttagaa

SEQ ID NO: 2699193 - DNA, 25 bp, Homo sapien
tgggttagtaccaacctcttggtgc

SEQ ID NO: 2699194 - DNA, 25 bp, Homo sapien
agaagttagcatctagcctgggcaa

SEQ ID NO: 2699195 - DNA, 25 bp, Homo sapien
gaatgaactcaaataactgatctac

SEQ ID NO: 2699196 - DNA, 25 bp, Homo sapien
ctcagcaagaatgaactcaaataac

SEQ ID NO: 2699197 - DNA, 25 bp, Homo sapien
gcaagaatgaactcaaataactgat

SEQ ID NO: 2699198 - DNA, 25 bp, Homo sapien
aaactcagcaagaatgaactcaaat

SEQ ID NO: 2699199 - DNA, 25 bp, Homo sapien
gatcatctgcgaactctcctgcagc

SEQ ID NO: 2699200 - DNA, 25 bp, Homo sapien
ttgcctcgcttcacagaagagcagg

SEQ ID NO: 2699201 - DNA, 25 bp, Homo sapien
tgcctcgcttcacagaagagcaggg

SEQ ID NO: 2699202 - DNA, 25 bp, Homo sapien
ggatcatctgcgaactctcctgcag

SEQ ID NO: 2699203 - DNA, 25 bp, Homo sapien
atttgtagacatctgccatgtcagc

SEQ ID NO: 2699204 - DNA, 25 bp, Homo sapien
agagagcaaagctcgagctgcccga

SEQ ID NO: 2699205 - DNA, 25 bp, Homo sapien
gcaaagctcgagctgcccgaaccat

SEQ ID NO: 2699206 - DNA, 25 bp, Homo sapien
acatctgccatgtcagccaaaatca

SEQ ID NO: 2699207 - DNA, 25 bp, Homo sapien
ctaaggaaggccagtagcaatcttc

SEQ ID NO: 2699208 - DNA, 25 bp, Homo sapien
tagaacaaattacagacataggcct

SEQ ID NO: 2699209 - DNA, 25 bp, Homo sapien
aattacagacataggcctgtatact

SEQ ID NO: 2699210 - DNA, 25 bp, Homo sapien
gcaatcttcctgtgatagaacaaat

SEQ ID NO: 2699211 - DNA, 25 bp, Homo sapien
cgagtttgcgcatggtcttctaaca

SEQ ID NO: 2699212 - DNA, 25 bp, Homo sapien
atgtaggtctgtaaagaagatggca

SEQ ID NO: 2699213 - DNA, 25 bp, Homo sapien
taggtctgtaaagaagatggcatcc

SEQ ID NO: 2699214 - DNA, 25 bp, Homo sapien
aagcaacccaaacttagctctcgag

SEQ ID NO: 2699215 - DNA, 25 bp, Homo sapien
ttcctcaacttcaagataccatctt

SEQ ID NO: 2699216 - DNA, 25 bp, Homo sapien
tgttcattgccagcattcctcaact

SEQ ID NO: 2699217 - DNA, 25 bp, Homo sapien
taatgttcagcttatccacttcagg

SEQ ID NO: 2699218 - DNA, 25 bp, Homo sapien
tagggctttatactggattcctaag

SEQ ID NO: 2699219 - DNA, 25 bp, Homo sapien
gatgcagtatagaggatcggaacgt

SEQ ID NO: 2699220 - DNA, 25 bp, Homo sapien
cagtatagaggatcggaacgttctt

SEQ ID NO: 2699221 - DNA, 25 bp, Homo sapien
tagaggatcggaacgttcttctgca

SEQ ID NO: 2699222 - DNA, 25 bp, Homo sapien
ctgggatgcagtatagaggatcgga

SEQ ID NO: 2699223 - DNA, 25 bp, Homo sapien
agcgctcctcgctgaagctcaaggg

SEQ ID NO: 2699224 - DNA, 25 bp, Homo sapien
taaagcgctcctcgctgaagctcaa

SEQ ID NO: 2699225 - DNA, 25 bp, Homo sapien
ccagggaaggcctaaagcgctcctc

SEQ ID NO: 2699226 - DNA, 25 bp, Homo sapien
aggcctaaagcgctcctcgctgaag

SEQ ID NO: 2699227 - DNA, 25 bp, Homo sapien
cctggcggacagcattacactctgc

SEQ ID NO: 2699228 - DNA, 25 bp, Homo sapien
atcacgcgtgcaggacgagtcggcc

SEQ ID NO: 2699229 - DNA, 25 bp, Homo sapien
tcgctcacgacggtcatcacgcgtg

SEQ ID NO: 2699230 - DNA, 25 bp, Homo sapien
cggccatcaaggcagccccactaat

SEQ ID NO: 2699231 - DNA, 25 bp, Homo sapien
gaggaaagagccacttagccattta

SEQ ID NO: 2699232 - DNA, 25 bp, Homo sapien
tcctcatccataaatatcttacttc

SEQ ID NO: 2699233 - DNA, 25 bp, Homo sapien
gatccaacatgttatagaaaactcc

SEQ ID NO: 2699234 - DNA, 25 bp, Homo sapien
tgacctactcccaaaaatcaaggag

SEQ ID NO: 2699235 - DNA, 25 bp, Homo sapien
tttataagttgaaaatttctcaata

SEQ ID NO: 2699236 - DNA, 25 bp, Homo sapien
tataagttgaaaatttctcaataag

SEQ ID NO: 2699237 - DNA, 25 bp, Homo sapien
ctaggtattcactgtatgattttta

SEQ ID NO: 2699238 - DNA, 25 bp, Homo sapien
taggtattcactgtatgatttttat

SEQ ID NO: 2699239 - DNA, 25 bp, Homo sapien
gaagcatcacaatgtctacaacttt

SEQ ID NO: 2699240 - DNA, 25 bp, Homo sapien
tctacatgttaattgatgaatacag

SEQ ID NO: 2699241 - DNA, 25 bp, Homo sapien
caaaattagccacctacttgggata

SEQ ID NO: 2699242 - DNA, 25 bp, Homo sapien
taaaatattagaggtgaagcatcac

SEQ ID NO: 2699243 - DNA, 25 bp, Homo sapien
ggtccaaggtctaaatgacaggaac

SEQ ID NO: 2699244 - DNA, 25 bp, Homo sapien
cctaagctagcattaaataaccaga

SEQ ID NO: 2699245 - DNA, 25 bp, Homo sapien
gctaattagctacagtaaaatattg

SEQ ID NO: 2699246 - DNA, 25 bp, Homo sapien
ttaatttattgctaattagctacag

SEQ ID NO: 2699247 - DNA, 25 bp, Homo sapien
gaaatggccttcagcaaagagatga

SEQ ID NO: 2699248 - DNA, 25 bp, Homo sapien
aataatgtaagatgatgtagtttga

SEQ ID NO: 2699249 - DNA, 25 bp, Homo sapien
tgatgtagtttgaaatggccttcag

SEQ ID NO: 2699250 - DNA, 25 bp, Homo sapien
tcaagcaccaaagaaataatgtaag

SEQ ID NO: 2699251 - DNA, 25 bp, Homo sapien
attctactattggaaaaacacatgc

SEQ ID NO: 2699252 - DNA, 25 bp, Homo sapien
ttatttgttcattgaggagtcaggg

SEQ ID NO: 2699253 - DNA, 25 bp, Homo sapien
agagacaagtttagttccaataaat

SEQ ID NO: 2699254 - DNA, 25 bp, Homo sapien
tgaaggggggtatggtaacagagac

SEQ ID NO: 2699255 - DNA, 25 bp, Homo sapien
tccttaatgtgtcactgtctagagg

SEQ ID NO: 2699256 - DNA, 25 bp, Homo sapien
gccaaagaaagtagactagcttagt

SEQ ID NO: 2699257 - DNA, 25 bp, Homo sapien
ttggcagtcattagtccttaatgtg

SEQ ID NO: 2699258 - DNA, 25 bp, Homo sapien
gaaagtagactagcttagtgtttga

SEQ ID NO: 2699259 - DNA, 25 bp, Homo sapien
cacaggatgacattattacataagc

SEQ ID NO: 2699260 - DNA, 25 bp, Homo sapien
cataagccatcattaccctttttaa

SEQ ID NO: 2699261 - DNA, 25 bp, Homo sapien
tcaaagtgtatgtcccgtggagtat

SEQ ID NO: 2699262 - DNA, 25 bp, Homo sapien
agtacactggatgtgcatccacagg

SEQ ID NO: 2699263 - DNA, 25 bp, Homo sapien
aaatggagccagctgtaggaacaac

SEQ ID NO: 2699264 - DNA, 25 bp, Homo sapien
taaggagcctacacaagcatgctgc

SEQ ID NO: 2699265 - DNA, 25 bp, Homo sapien
taggaacaacgttggactgtccctc

SEQ ID NO: 2699266 - DNA, 25 bp, Homo sapien
ctctgtgatgacctaaactttgccg

SEQ ID NO: 2699267 - DNA, 25 bp, Homo sapien
aatacattgtgttcaatcaccttca

SEQ ID NO: 2699268 - DNA, 25 bp, Homo sapien
gagggtaacataaagagcagtgtac

SEQ ID NO: 2699269 - DNA, 25 bp, Homo sapien
agtccaaatacattgtgttcaatca

SEQ ID NO: 2699270 - DNA, 25 bp, Homo sapien
aatactattatgcagggtgttttgg

SEQ ID NO: 2699271 - DNA, 25 bp, Homo sapien
tagcatgacagggatttcaatcacc

SEQ ID NO: 2699272 - DNA, 25 bp, Homo sapien
taccaactggctagaacggaacagc

SEQ ID NO: 2699273 - DNA, 25 bp, Homo sapien
caacgctgcggatcttggttacaca

SEQ ID NO: 2699274 - DNA, 25 bp, Homo sapien
taatgctagtcaccaagagctagac

SEQ ID NO: 2699275 - DNA, 25 bp, Homo sapien
tattacaaataagagcaccacgagc

SEQ ID NO: 2699276 - DNA, 25 bp, Homo sapien
cacaagattccatcagccctgaagg

SEQ ID NO: 2699277 - DNA, 25 bp, Homo sapien
gaaggacagcagaggagtattttcc

SEQ ID NO: 2699278 - DNA, 25 bp, Homo sapien
caaggctagcgaggcatactttcca

SEQ ID NO: 2699279 - DNA, 25 bp, Homo sapien
tatggacagtgcaagtgtcagcagc

SEQ ID NO: 2699280 - DNA, 25 bp, Homo sapien
gaaggacccttcatcatcattaatg

SEQ ID NO: 2699281 - DNA, 25 bp, Homo sapien
taggcagtgctcaatggttcagaac

SEQ ID NO: 2699282 - DNA, 25 bp, Homo sapien
aaacatgtcagaccaaggaccgtat

SEQ ID NO: 2699283 - DNA, 25 bp, Homo sapien
ccggtgacgtcagcctatatacagt

SEQ ID NO: 2699284 - DNA, 25 bp, Homo sapien
aacaaaagacacgtcatccggtgac

SEQ ID NO: 2699285 - DNA, 25 bp, Homo sapien
tctgtgtggtcgcagcacataagca

SEQ ID NO: 2699286 - DNA, 25 bp, Homo sapien
aacgaccccgatgctgttacaaagc

SEQ ID NO: 2699287 - DNA, 25 bp, Homo sapien
tgatctctctatgcagaatcggcag

SEQ ID NO: 2699288 - DNA, 25 bp, Homo sapien
caggcttctgcccatttagatgatc

SEQ ID NO: 2699289 - DNA, 25 bp, Homo sapien
cataggctggtgttaaatcagcact

SEQ ID NO: 2699290 - DNA, 25 bp, Homo sapien
gaatcggcagtctaacactggctct

SEQ ID NO: 2699291 - DNA, 25 bp, Homo sapien
tgtcaggcctgaaaatataacatct

SEQ ID NO: 2699292 - DNA, 25 bp, Homo sapien
tcaggcctgaaaatataacatctag

SEQ ID NO: 2699293 - DNA, 25 bp, Homo sapien
ctttgtcaggcctgaaaatataaca

SEQ ID NO: 2699294 - DNA, 25 bp, Homo sapien
ttgtcaggcctgaaaatataacatc

SEQ ID NO: 2699295 - DNA, 25 bp, Homo sapien
caggaagcccctttcagcaatgtgc

SEQ ID NO: 2699296 - DNA, 25 bp, Homo sapien
caactgcagacggaatgctgacatg

SEQ ID NO: 2699297 - DNA, 25 bp, Homo sapien
tacaaggaggaatcaacatctcaac

SEQ ID NO: 2699298 - DNA, 25 bp, Homo sapien
cagcaatgtgcaatacaaggaggaa

SEQ ID NO: 2699299 - DNA, 25 bp, Homo sapien
gaattgagtgcatcacttctttctt

SEQ ID NO: 2699300 - DNA, 25 bp, Homo sapien
ttgcagaattgagtgcatcacttct

SEQ ID NO: 2699301 - DNA, 25 bp, Homo sapien
agaattgagtgcatcacttctttct

SEQ ID NO: 2699302 - DNA, 25 bp, Homo sapien
ctattgcagaattgagtgcatcact

SEQ ID NO: 2699303 - DNA, 25 bp, Homo sapien
gtctacgcaagtccctggtcttctt

SEQ ID NO: 2699304 - DNA, 25 bp, Homo sapien
tgtctacgcaagtccctggtcttct

SEQ ID NO: 2699305 - DNA, 25 bp, Homo sapien
ttgggcatactccttaacttctttc

SEQ ID NO: 2699306 - DNA, 25 bp, Homo sapien
caagtcaatgaaactgctaattcac

SEQ ID NO: 2699307 - DNA, 25 bp, Homo sapien
atgttgtatgttaagcgagccctta

SEQ ID NO: 2699308 - DNA, 25 bp, Homo sapien
gttgtatgttaagcgagcccttaca

SEQ ID NO: 2699309 - DNA, 25 bp, Homo sapien
tcaccaagttgcctacaagtcaatg

SEQ ID NO: 2699310 - DNA, 25 bp, Homo sapien
tcacatatgcatttatccccacagc

SEQ ID NO: 2699311 - DNA, 25 bp, Homo sapien
atatgcatttatccccacagcagag

SEQ ID NO: 2699312 - DNA, 25 bp, Homo sapien
tatgtaagtatgtgttaacccaaaa

SEQ ID NO: 2699313 - DNA, 25 bp, Homo sapien
taaaaggctggacaactcgaaggag

SEQ ID NO: 2699314 - DNA, 25 bp, Homo sapien
ccacatccacgctgataggaacgaa

SEQ ID NO: 2699315 - DNA, 25 bp, Homo sapien
gataggaacgaacatgatgacactg

SEQ ID NO: 2699316 - DNA, 25 bp, Homo sapien
cacgctgataggaacgaacatgatg

SEQ ID NO: 2699317 - DNA, 25 bp, Homo sapien
catccacgctgataggaacgaacat

SEQ ID NO: 2699318 - DNA, 25 bp, Homo sapien
gaagctctggaatgttactgcgtag

SEQ ID NO: 2699319 - DNA, 25 bp, Homo sapien
tactgcgtagtgactgctaaggctg

SEQ ID NO: 2699320 - DNA, 25 bp, Homo sapien
aacaggcttgccaattccattagca

SEQ ID NO: 2699321 - DNA, 25 bp, Homo sapien
ggttgtgtcatacttcctttgctga

SEQ ID NO: 2699322 - DNA, 25 bp, Homo sapien
agggcttctaactggcttgcagaca

SEQ ID NO: 2699323 - DNA, 25 bp, Homo sapien
cagagggcttctaactggcttgcag

SEQ ID NO: 2699324 - DNA, 25 bp, Homo sapien
ggacagagggcttctaactggcttg

SEQ ID NO: 2699325 - DNA, 25 bp, Homo sapien
acagagggcttctaactggcttgca

SEQ ID NO: 2699326 - DNA, 25 bp, Homo sapien
gagtaacatgtaatctcccgtgcaa

SEQ ID NO: 2699327 - DNA, 25 bp, Homo sapien
gctcaactgacccatccactttggg

SEQ ID NO: 2699328 - DNA, 25 bp, Homo sapien
tcccgtgcaaatgtcacttaatgtt

SEQ ID NO: 2699329 - DNA, 25 bp, Homo sapien
ggttctgtgtcagtgatctgtcccc

SEQ ID NO: 2699330 - DNA, 25 bp, Homo sapien
tgcctaaacccaggatgccaaggct

SEQ ID NO: 2699331 - DNA, 25 bp, Homo sapien
tggaatagaaagaggtgtcctggct

SEQ ID NO: 2699332 - DNA, 25 bp, Homo sapien
catgggcagggaattaatcacacgt

SEQ ID NO: 2699333 - DNA, 25 bp, Homo sapien
aatgtttccgaagagagccaagtaa

SEQ ID NO: 2699334 - DNA, 25 bp, Homo sapien
taatcatgcaacttgggaaggaagc

SEQ ID NO: 2699335 - DNA, 25 bp, Homo sapien
gaagtgaccaccatcctgatagctg

SEQ ID NO: 2699336 - DNA, 25 bp, Homo sapien
catgctagtggatctgaagtgacca

SEQ ID NO: 2699337 - DNA, 25 bp, Homo sapien
gacaagaggaaactgctggacctgg

SEQ ID NO: 2699338 - DNA, 25 bp, Homo sapien
catgtaacatgtggacttttgtaac

SEQ ID NO: 2699339 - DNA, 25 bp, Homo sapien
aacatgtggacttttgtaacttgct

SEQ ID NO: 2699340 - DNA, 25 bp, Homo sapien
aatggaatcatgtaacatgtggact

SEQ ID NO: 2699341 - DNA, 25 bp, Homo sapien
gaatcatgtaacatgtggacttttg

SEQ ID NO: 2699342 - DNA, 25 bp, Homo sapien
gttttgctgctaaagccagtgcagc

SEQ ID NO: 2699343 - DNA, 25 bp, Homo sapien
ggttttgctgctaaagccagtgcag

SEQ ID NO: 2699344 - DNA, 25 bp, Homo sapien
ttttgctgctaaagccagtgcagca

SEQ ID NO: 2699345 - DNA, 25 bp, Homo sapien
gaagtaatgtcatcgacagcatctg

SEQ ID NO: 2699346 - DNA, 25 bp, Homo sapien
atggaagtaatgtcatcgacagcat

SEQ ID NO: 2699347 - DNA, 25 bp, Homo sapien
aagtaatgtcatcgacagcatctgt

SEQ ID NO: 2699348 - DNA, 25 bp, Homo sapien
tggaagtaatgtcatcgacagcatc

SEQ ID NO: 2699349 - DNA, 25 bp, Homo sapien
ctacgtgaatgacccgggctgcccg

SEQ ID NO: 2699350 - DNA, 25 bp, Homo sapien
ctgaggtgactacgtgaatgacccg

SEQ ID NO: 2699351 - DNA, 25 bp, Homo sapien
gggctgcccggcctcgaattgcacc

SEQ ID NO: 2699352 - DNA, 25 bp, Homo sapien
ccggcctcgaattgcaccagctgtg

SEQ ID NO: 2699353 - DNA, 25 bp, Homo sapien
gatgccatcatataccaggcgggaa

SEQ ID NO: 2699354 - DNA, 25 bp, Homo sapien
cccggatgccatcatataccaggcg

SEQ ID NO: 2699355 - DNA, 25 bp, Homo sapien
catcatataccaggcgggaagcatc

SEQ ID NO: 2699356 - DNA, 25 bp, Homo sapien
tataccaggcgggaagcatcgataa

SEQ ID NO: 2699357 - DNA, 25 bp, Homo sapien
aatgacgcattgctcaagtttagca

SEQ ID NO: 2699358 - DNA, 25 bp, Homo sapien
gctcaagtttagcaaatgataagaa

SEQ ID NO: 2699359 - DNA, 25 bp, Homo sapien
agaagctgttaagacgtctgaaatg

SEQ ID NO: 2699360 - DNA, 25 bp, Homo sapien
gctgttaagacgtctgaaatgcagt

SEQ ID NO: 2699361 - DNA, 25 bp, Homo sapien
tcctgcttctgacatcaaaatcttc

SEQ ID NO: 2699362 - DNA, 25 bp, Homo sapien
gatcgtcttctgtctggacgctcgt

SEQ ID NO: 2699363 - DNA, 25 bp, Homo sapien
tctgtctggacgctcgtcctgcttc

SEQ ID NO: 2699364 - DNA, 25 bp, Homo sapien
tcagctgatcgtcttctgtctggac

SEQ ID NO: 2699365 - DNA, 25 bp, Homo sapien
tctccatcataatcatgcacatctg

SEQ ID NO: 2699366 - DNA, 25 bp, Homo sapien
gtcgtcccatttggacacttcagca

SEQ ID NO: 2699367 - DNA, 25 bp, Homo sapien
gcaatcttcgctttttgctcctggg

SEQ ID NO: 2699368 - DNA, 25 bp, Homo sapien
ggaagctggccacctgttccgcaat

SEQ ID NO: 2699369 - DNA, 25 bp, Homo sapien
gaacaaggattattgtatgtgaagc

SEQ ID NO: 2699370 - DNA, 25 bp, Homo sapien
caaggattattgtatgtgaagcccc

SEQ ID NO: 2699371 - DNA, 25 bp, Homo sapien
agagaacaaggattattgtatgtga

SEQ ID NO: 2699372 - DNA, 25 bp, Homo sapien
gattattgtatgtgaagcccctcac

SEQ ID NO: 2699373 - DNA, 25 bp, Homo sapien
atgacatccgatgtatttttgagtg

SEQ ID NO: 2699374 - DNA, 25 bp, Homo sapien
atggtctgcaatggtgcggccaagc

SEQ ID NO: 2699375 - DNA, 25 bp, Homo sapien
gtctgcaatggtgcggccaagcttg

SEQ ID NO: 2699376 - DNA, 25 bp, Homo sapien
agcactgatgacatccgatgtattt

SEQ ID NO: 2699377 - DNA, 25 bp, Homo sapien
tgtggcccatgaaacttaccctgaa

SEQ ID NO: 2699378 - DNA, 25 bp, Homo sapien
gctaccaagcgatggaagattccag

SEQ ID NO: 2699379 - DNA, 25 bp, Homo sapien
tccaggacatacacatccgctctag

SEQ ID NO: 2699380 - DNA, 25 bp, Homo sapien
tgagtggcaaaagtgctgtggccca

SEQ ID NO: 2699381 - DNA, 25 bp, Homo sapien
cctattaccgattgtgtgggagtca

SEQ ID NO: 2699382 - DNA, 25 bp, Homo sapien
ttctaagtagtcatggaagcagggc

SEQ ID NO: 2699383 - DNA, 25 bp, Homo sapien
caatctttggcttgtgtaaggaggc

SEQ ID NO: 2699384 - DNA, 25 bp, Homo sapien
tgtattgtacaatttccaggcggta

SEQ ID NO: 2699385 - DNA, 25 bp, Homo sapien
ggagcaaaatcacccaattacctga

SEQ ID NO: 2699386 - DNA, 25 bp, Homo sapien
catgcccctcgaggtgagaacaagc

SEQ ID NO: 2699387 - DNA, 25 bp, Homo sapien
tgactgcgccgcatggcactggttg

SEQ ID NO: 2699388 - DNA, 25 bp, Homo sapien
gagtggtatgaactgagaccccgca

SEQ ID NO: 2699389 - DNA, 25 bp, Homo sapien
cagagacaacaagctccccgccgag

SEQ ID NO: 2699390 - DNA, 25 bp, Homo sapien
cccagagacaacaagctccccgccg

SEQ ID NO: 2699391 - DNA, 25 bp, Homo sapien
agctccccgccgagattctgcacct

SEQ ID NO: 2699392 - DNA, 25 bp, Homo sapien
agacaacaagctccccgccgagatt

SEQ ID NO: 2699393 - DNA, 25 bp, Homo sapien
tttatgcggataggaggtgactttc

SEQ ID NO: 2699394 - DNA, 25 bp, Homo sapien
actttcccagggcaggtgtttatgc

SEQ ID NO: 2699395 - DNA, 25 bp, Homo sapien
acaagggtcagcacgttcccactgg

SEQ ID NO: 2699396 - DNA, 25 bp, Homo sapien
ggacaggacttggagtttctgcaca

SEQ ID NO: 2699397 - DNA, 25 bp, Homo sapien
agcccttgcagtgccccgcaggtgt

SEQ ID NO: 2699398 - DNA, 25 bp, Homo sapien
gcctttcagcccttgcagtgccccg

SEQ ID NO: 2699399 - DNA, 25 bp, Homo sapien
agcctttcagcccttgcagtgcccc

SEQ ID NO: 2699400 - DNA, 25 bp, Homo sapien
tttcagcccttgcagtgccccgcag

SEQ ID NO: 2699401 - DNA, 25 bp, Homo sapien
caggctcaagtaattattgtgtctc

SEQ ID NO: 2699402 - DNA, 25 bp, Homo sapien
aggctcaagtaattattgtgtctca

SEQ ID NO: 2699403 - DNA, 25 bp, Homo sapien
caccacgcccggtcccaaggaagat

SEQ ID NO: 2699404 - DNA, 25 bp, Homo sapien
tggatcagggacatggcgctgtcca

SEQ ID NO: 2699405 - DNA, 25 bp, Homo sapien
ggatcagggacatggcgctgtccac

SEQ ID NO: 2699406 - DNA, 25 bp, Homo sapien
ctggatcagggacatggcgctgtcc

SEQ ID NO: 2699407 - DNA, 25 bp, Homo sapien
taatcttggtctgtgtctcatcctg

SEQ ID NO: 2699408 - DNA, 25 bp, Homo sapien
ccgtttaatcttggtctgtgtctca

SEQ ID NO: 2699409 - DNA, 25 bp, Homo sapien
gatgcccgtttaatcttggtctgtg

SEQ ID NO: 2699410 - DNA, 25 bp, Homo sapien
ctgagatgcccgtttaatcttggtc

SEQ ID NO: 2699411 - DNA, 25 bp, Homo sapien
tgactgatattcaggagccccgagg

SEQ ID NO: 2699412 - DNA, 25 bp, Homo sapien
agtaggctcctgcattctaaaagca

SEQ ID NO: 2699413 - DNA, 25 bp, Homo sapien
tccctgtggaatctagtatcagtgt

SEQ ID NO: 2699414 - DNA, 25 bp, Homo sapien
catttgagtgacgaacagtgactga

SEQ ID NO: 2699415 - DNA, 25 bp, Homo sapien
taaaagcagtcaagctgtctggact

SEQ ID NO: 2699416 - DNA, 25 bp, Homo sapien
tactgagtgagtttgtccctccaga

SEQ ID NO: 2699417 - DNA, 25 bp, Homo sapien
gactgcaccctctcaactgaagttg

SEQ ID NO: 2699418 - DNA, 25 bp, Homo sapien
gaatgggcatctcggcttggtcaga

SEQ ID NO: 2699419 - DNA, 25 bp, Homo sapien
agcaactttattaatgtcctgcagc

SEQ ID NO: 2699420 - DNA, 25 bp, Homo sapien
tgttctgattatggcatcgagacac

SEQ ID NO: 2699421 - DNA, 25 bp, Homo sapien
tttctgctgcaagcccaaggcggga

SEQ ID NO: 2699422 - DNA, 25 bp, Homo sapien
tgaatttgcatttgaagctgggaga

SEQ ID NO: 2699423 - DNA, 25 bp, Homo sapien
gttattagaagtgagcccaatgatg

SEQ ID NO: 2699424 - DNA, 25 bp, Homo sapien
tgaagacagggatgcctccgaggtt

SEQ ID NO: 2699425 - DNA, 25 bp, Homo sapien
tactgcgggcaaatctatgacttga

SEQ ID NO: 2699426 - DNA, 25 bp, Homo sapien
cactcaataggacaacgggcatggc

SEQ ID NO: 2699427 - DNA, 25 bp, Homo sapien
gatatgctgacagaaggacgcagga

SEQ ID NO: 2699428 - DNA, 25 bp, Homo sapien
ctcggaatgacctgagctgacctgt

SEQ ID NO: 2699429 - DNA, 25 bp, Homo sapien
ccaggaagcatacgaggcaggatgt

SEQ ID NO: 2699430 - DNA, 25 bp, Homo sapien
tgctcggcatgttcaagacttcagg

SEQ ID NO: 2699431 - DNA, 25 bp, Homo sapien
cttttactgagggacatggacgccg

SEQ ID NO: 2699432 - DNA, 25 bp, Homo sapien
ggactacaggcatcgaatctttttg

SEQ ID NO: 2699433 - DNA, 25 bp, Homo sapien
tactgtaaataggtcaaggctcatt

SEQ ID NO: 2699434 - DNA, 25 bp, Homo sapien
gaatggtgactttgatgttgtctct

SEQ ID NO: 2699435 - DNA, 25 bp, Homo sapien
gatgtgaggtactgtaaataggtca

SEQ ID NO: 2699436 - DNA, 25 bp, Homo sapien
gcctgggaacctcacacaagggagc

SEQ ID NO: 2699437 - DNA, 25 bp, Homo sapien
ctaaatgatgcaagtgtacaattaa

SEQ ID NO: 2699438 - DNA, 25 bp, Homo sapien
taaatgatgcaagtgtacaattaag

SEQ ID NO: 2699439 - DNA, 25 bp, Homo sapien
gggaacctcacacaagggagccgca

SEQ ID NO: 2699440 - DNA, 25 bp, Homo sapien
ctctgctggcgggatgcagggtgtg

SEQ ID NO: 2699441 - DNA, 25 bp, Homo sapien
gaccctgttgatgtttatatggaga

SEQ ID NO: 2699442 - DNA, 25 bp, Homo sapien
ccggcctcaccttttcttactgttg

SEQ ID NO: 2699443 - DNA, 25 bp, Homo sapien
tgtgagaagtgtgcagactccagat

SEQ ID NO: 2699444 - DNA, 25 bp, Homo sapien
tggtttcaggaaataaactgcccag

SEQ ID NO: 2699445 - DNA, 25 bp, Homo sapien
tttaaagcactagtctgaaatggtt

SEQ ID NO: 2699446 - DNA, 25 bp, Homo sapien
gaccctcaggaaggtgatttgctgc

SEQ ID NO: 2699447 - DNA, 25 bp, Homo sapien
caggaaataaactgcccaggtgatt

SEQ ID NO: 2699448 - DNA, 25 bp, Homo sapien
gctcctgttaattgcatgctgggca

SEQ ID NO: 2699449 - DNA, 25 bp, Homo sapien
ggcacagtccaggtccttgagagag

SEQ ID NO: 2699450 - DNA, 25 bp, Homo sapien
aactcagggcagtcgcggagtctga

SEQ ID NO: 2699451 - DNA, 25 bp, Homo sapien
tgggcattgggctctaccatctaga

SEQ ID NO: 2699452 - DNA, 25 bp, Homo sapien
cagagtgaacaacataggacagcaa

SEQ ID NO: 2699453 - DNA, 25 bp, Homo sapien
gacagtcagtcacctcatggaccct

SEQ ID NO: 2699454 - DNA, 25 bp, Homo sapien
ggcctagccttagaattcgacatca

SEQ ID NO: 2699455 - DNA, 25 bp, Homo sapien
caacacaaaggctgggatcgctggt

SEQ ID NO: 2699456 - DNA, 25 bp, Homo sapien
gaatagtgcttgatgccaccctcca

SEQ ID NO: 2699457 - DNA, 25 bp, Homo sapien
gagtggtcatgtctaagggcttccc

SEQ ID NO: 2699458 - DNA, 25 bp, Homo sapien
ggactaataggtgcaagccgccatg

SEQ ID NO: 2699459 - DNA, 25 bp, Homo sapien
gggcttcccgccaagaggatgcttt

SEQ ID NO: 2699460 - DNA, 25 bp, Homo sapien
ccctcagatatgtgtagtgaccact

SEQ ID NO: 2699461 - DNA, 25 bp, Homo sapien
taatcttgatggtgttcgtgaagtc

SEQ ID NO: 2699462 - DNA, 25 bp, Homo sapien
tccagattactgtctatgagatgac

SEQ ID NO: 2699463 - DNA, 25 bp, Homo sapien
ttttccctgtggaacatggtctgac

SEQ ID NO: 2699464 - DNA, 25 bp, Homo sapien
cgaatattgcgcttttcagaccggc

SEQ ID NO: 2699465 - DNA, 25 bp, Homo sapien
tattgcgcttttcagaccggcttaa

SEQ ID NO: 2699466 - DNA, 25 bp, Homo sapien
ttgcgcttttcagaccggcttaaaa

SEQ ID NO: 2699467 - DNA, 25 bp, Homo sapien
cccgaatattgcgcttttcagaccg

SEQ ID NO: 2699468 - DNA, 25 bp, Homo sapien
cattcagggtagcatggtcatagat

SEQ ID NO: 2699469 - DNA, 25 bp, Homo sapien
gtttacatcttgaccaaatcagcaa

SEQ ID NO: 2699470 - DNA, 25 bp, Homo sapien
ccatgctggagctctacgatatgtt

SEQ ID NO: 2699471 - DNA, 25 bp, Homo sapien
gctggagctctacgatatgtttaca

SEQ ID NO: 2699472 - DNA, 25 bp, Homo sapien
atgtttacatcttgaccaaatcagc

SEQ ID NO: 2699473 - DNA, 25 bp, Homo sapien
tttgttgcccaggttgatcttaaac

SEQ ID NO: 2699474 - DNA, 25 bp, Homo sapien
ttgttgcccaggttgatcttaaact

SEQ ID NO: 2699475 - DNA, 25 bp, Homo sapien
aactcctgggcttgagtgattctcc

SEQ ID NO: 2699476 - DNA, 25 bp, Homo sapien
tcctgggcttgagtgattctcccac

SEQ ID NO: 2699477 - DNA, 25 bp, Homo sapien
ttgctgtatcacccaagcctagagt

SEQ ID NO: 2699478 - DNA, 25 bp, Homo sapien
tgctgtatcacccaagcctagagtg

SEQ ID NO: 2699479 - DNA, 25 bp, Homo sapien
cacagcaccttatagagggtaagtt

SEQ ID NO: 2699480 - DNA, 25 bp, Homo sapien
gcttaattcagccaacaagaaactg

SEQ ID NO: 2699481 - DNA, 25 bp, Homo sapien
taaatagtgagtgatgaaacaaagc

SEQ ID NO: 2699482 - DNA, 25 bp, Homo sapien
ggagacttctcaatctatcaaatag

SEQ ID NO: 2699483 - DNA, 25 bp, Homo sapien
tcctgctgagggtttaccaattaat

SEQ ID NO: 2699484 - DNA, 25 bp, Homo sapien
aatttccttagttgtgctcttcctg

SEQ ID NO: 2699485 - DNA, 25 bp, Homo sapien
ctcttaatttccttagttgtgctct

SEQ ID NO: 2699486 - DNA, 25 bp, Homo sapien
ctcatgctttgttggctctcttaat

SEQ ID NO: 2699487 - DNA, 25 bp, Homo sapien
tgaaggagtatgctgcgtttgtgct

SEQ ID NO: 2699488 - DNA, 25 bp, Homo sapien
caggtgagcagtataatggacgtcc

SEQ ID NO: 2699489 - DNA, 25 bp, Homo sapien
caagtggtgatcaatgggctgaaca

SEQ ID NO: 2699490 - DNA, 25 bp, Homo sapien
gcacagagcccctcgtgaaggagta

SEQ ID NO: 2699491 - DNA, 25 bp, Homo sapien
gatacatagccactagccagtagca

SEQ ID NO: 2699492 - DNA, 25 bp, Homo sapien
taaactgtgggtaatgagatccgct

SEQ ID NO: 2699493 - DNA, 25 bp, Homo sapien
caggatccagtgacctttctgagga

SEQ ID NO: 2699494 - DNA, 25 bp, Homo sapien
agcgagttgtcttgttccagggtac

SEQ ID NO: 2699495 - DNA, 25 bp, Homo sapien
gaaaccaggaatatcattacagatc

SEQ ID NO: 2699496 - DNA, 25 bp, Homo sapien
ctgtatcaagaatgaaaccaggaat

SEQ ID NO: 2699497 - DNA, 25 bp, Homo sapien
caagaatgaaaccaggaatatcatt

SEQ ID NO: 2699498 - DNA, 25 bp, Homo sapien
aatgaaaccaggaatatcattacag

SEQ ID NO: 2699499 - DNA, 25 bp, Homo sapien
ttggtttgtcacaggaaggtgagaa

SEQ ID NO: 2699500 - DNA, 25 bp, Homo sapien
tggtttgtcacaggaaggtgagaaa

SEQ ID NO: 2699501 - DNA, 25 bp, Homo sapien
tttgtcacaggaaggtgagaaatgg

SEQ ID NO: 2699502 - DNA, 25 bp, Homo sapien
tttgaccccagcgacatcaaagttg

SEQ ID NO: 2699503 - DNA, 25 bp, Homo sapien
gaagtttgaccccagcgacatcaaa

SEQ ID NO: 2699504 - DNA, 25 bp, Homo sapien
actgctgaagtttgaccccagcgac

SEQ ID NO: 2699505 - DNA, 25 bp, Homo sapien
accccagcgacatcaaagttgtatg

SEQ ID NO: 2699506 - DNA, 25 bp, Homo sapien
caaagtggtgtcagtagaggcccag

SEQ ID NO: 2699507 - DNA, 25 bp, Homo sapien
caacttggaggcagtgagacagtgt

SEQ ID NO: 2699508 - DNA, 25 bp, Homo sapien
tgaaacagtgctcgattctcccgcc

SEQ ID NO: 2699509 - DNA, 25 bp, Homo sapien
tctgcctggtagcaccaacatggtt

SEQ ID NO: 2699510 - DNA, 25 bp, Homo sapien
ctgcaggatcccacgtacggctgaa

SEQ ID NO: 2699511 - DNA, 25 bp, Homo sapien
gctgagtcgtgtcttcatgaactag

SEQ ID NO: 2699512 - DNA, 25 bp, Homo sapien
tcttggcttttagggcaggctgtcc

SEQ ID NO: 2699513 - DNA, 25 bp, Homo sapien
caaagaccttgtacctcatgagcct

SEQ ID NO: 2699514 - DNA, 25 bp, Homo sapien
gccagggttcctcttgtcctggtgc

SEQ ID NO: 2699515 - DNA, 25 bp, Homo sapien
ccttctgccagggttcctcttgtcc

SEQ ID NO: 2699516 - DNA, 25 bp, Homo sapien
ggttcctcttgtcctggtgcttcat

SEQ ID NO: 2699517 - DNA, 25 bp, Homo sapien
ttctgccagggttcctcttgtcctg

SEQ ID NO: 2699518 - DNA, 25 bp, Homo sapien
tctgtgtagaatggttggtcaccag

SEQ ID NO: 2699519 - DNA, 25 bp, Homo sapien
ccagctgtagtttgtcctccttgag

SEQ ID NO: 2699520 - DNA, 25 bp, Homo sapien
ctcttgtgaattctgtgtagaatgg

SEQ ID NO: 2699521 - DNA, 25 bp, Homo sapien
tagaatggttggtcaccagctgtag

SEQ ID NO: 2699522 - DNA, 25 bp, Homo sapien
ccactagggaaattgtagaagtcag

SEQ ID NO: 2699523 - DNA, 25 bp, Homo sapien
cagtagtagctgatactggtctgaa

SEQ ID NO: 2699524 - DNA, 25 bp, Homo sapien
gctgatactggtctgaaataattca

SEQ ID NO: 2699525 - DNA, 25 bp, Homo sapien
ttgctgggagtatccaaactgaggg

SEQ ID NO: 2699526 - DNA, 25 bp, Homo sapien
ccttgagggtcagattggctggtca

SEQ ID NO: 2699527 - DNA, 25 bp, Homo sapien
gcttcactgtgcgatccttgagggt

SEQ ID NO: 2699528 - DNA, 25 bp, Homo sapien
gaggttgaactcagcatcttgttcg

SEQ ID NO: 2699529 - DNA, 25 bp, Homo sapien
aaactacggccaatgtgggagcaaa

SEQ ID NO: 2699530 - DNA, 25 bp, Homo sapien
tttatcacgtggatcaacattgacg

SEQ ID NO: 2699531 - DNA, 25 bp, Homo sapien
tcacgtggatcaacattgacgccat

SEQ ID NO: 2699532 - DNA, 25 bp, Homo sapien
caggaatttatcacgtggatcaaca

SEQ ID NO: 2699533 - DNA, 25 bp, Homo sapien
gtcgtaggacaggaatttatcacgt

SEQ ID NO: 2699534 - DNA, 25 bp, Homo sapien
cattattcttgagtgactctgtgtc

SEQ ID NO: 2699535 - DNA, 25 bp, Homo sapien
ttcttttatatccattgcaatggaa

SEQ ID NO: 2699536 - DNA, 25 bp, Homo sapien
gagatgggattgtagcaggatgttg

SEQ ID NO: 2699537 - DNA, 25 bp, Homo sapien
ggatgttggattaggaatgaagtaa

SEQ ID NO: 2699538 - DNA, 25 bp, Homo sapien
catatgggaaagagatgggattgta

SEQ ID NO: 2699539 - DNA, 25 bp, Homo sapien
cctgttgtcatatgggaaagagatg

SEQ ID NO: 2699540 - DNA, 25 bp, Homo sapien
agtctgagtgtccaagaaagaaggg

SEQ ID NO: 2699541 - DNA, 25 bp, Homo sapien
aaggtcatccagtttaaagtctgag

SEQ ID NO: 2699542 - DNA, 25 bp, Homo sapien
catccagtttaaagtctgagtgtcc

SEQ ID NO: 2699543 - DNA, 25 bp, Homo sapien
cagtttaaagtctgagtgtccaaga

SEQ ID NO: 2699544 - DNA, 25 bp, Homo sapien
gcagggtatcttgcatccccttcca

SEQ ID NO: 2699545 - DNA, 25 bp, Homo sapien
ataagcagggtatcttgcatcccct

SEQ ID NO: 2699546 - DNA, 25 bp, Homo sapien
aagcagggtatcttgcatccccttc

SEQ ID NO: 2699547 - DNA, 25 bp, Homo sapien
gataaataagcagggtatcttgcat

SEQ ID NO: 2699548 - DNA, 25 bp, Homo sapien
tcatgttcccgttgtcttgagccca

SEQ ID NO: 2699549 - DNA, 25 bp, Homo sapien
ccgttgtcttgagcccaaagatgta

SEQ ID NO: 2699550 - DNA, 25 bp, Homo sapien
tgtcttgagcccaaagatgtagcgg

SEQ ID NO: 2699551 - DNA, 25 bp, Homo sapien
gcccaaagatgtagcggttctgctt

SEQ ID NO: 2699552 - DNA, 25 bp, Homo sapien
atgcttatgctgactcccacacaca

SEQ ID NO: 2699553 - DNA, 25 bp, Homo sapien
catggtccataagtgcctcctggga

SEQ ID NO: 2699554 - DNA, 25 bp, Homo sapien
gaacttcatgcttatgctgactccc

SEQ ID NO: 2699555 - DNA, 25 bp, Homo sapien
aactttcccatggtccataagtgcc

SEQ ID NO: 2699556 - DNA, 25 bp, Homo sapien
cccaggcctgcagcaaatagggctt

SEQ ID NO: 2699557 - DNA, 25 bp, Homo sapien
caggcctgcagcaaatagggcttgg

SEQ ID NO: 2699558 - DNA, 25 bp, Homo sapien
cctgcagcaaatagggcttggcaat

SEQ ID NO: 2699559 - DNA, 25 bp, Homo sapien
ggcctgcagcaaatagggcttggca

SEQ ID NO: 2699560 - DNA, 25 bp, Homo sapien
gaagcacttgttgtaggaaccctca

SEQ ID NO: 2699561 - DNA, 25 bp, Homo sapien
gcacttgttgtaggaaccctcaccc

SEQ ID NO: 2699562 - DNA, 25 bp, Homo sapien
aggaagcacttgttgtaggaaccct

SEQ ID NO: 2699563 - DNA, 25 bp, Homo sapien
cttgttgtaggaaccctcaccccag

SEQ ID NO: 2699564 - DNA, 25 bp, Homo sapien
tactgttgaaagtgagttactggta

SEQ ID NO: 2699565 - DNA, 25 bp, Homo sapien
tgaaagtgagttactggtaacgttg

SEQ ID NO: 2699566 - DNA, 25 bp, Homo sapien
tgttgaaagtgagttactggtaacg

SEQ ID NO: 2699567 - DNA, 25 bp, Homo sapien
gctggtgatgctgtgatactgttga

SEQ ID NO: 2699568 - DNA, 25 bp, Homo sapien
gcagtcttactaacccactcaagga

SEQ ID NO: 2699569 - DNA, 25 bp, Homo sapien
ccttgtgtctgtcattatgttgata

SEQ ID NO: 2699570 - DNA, 25 bp, Homo sapien
gatctggatatacaggtgtccttgt

SEQ ID NO: 2699571 - DNA, 25 bp, Homo sapien
tatgtcagggtcgttgaggcctcca

SEQ ID NO: 2699572 - DNA, 25 bp, Homo sapien
atattcatcaccatgtcctcactgc

SEQ ID NO: 2699573 - DNA, 25 bp, Homo sapien
cagcttcttgctgatattcatcacc

SEQ ID NO: 2699574 - DNA, 25 bp, Homo sapien
tgctgctgtgctggcagggcagcat

SEQ ID NO: 2699575 - DNA, 25 bp, Homo sapien
cactgcccccactgctgctgtgctg

SEQ ID NO: 2699576 - DNA, 25 bp, Homo sapien
caaactgcatatgtcctttgtcccc

SEQ ID NO: 2699577 - DNA, 25 bp, Homo sapien
attcaaactgcatatgtcctttgtc

SEQ ID NO: 2699578 - DNA, 25 bp, Homo sapien
tcaaactgcatatgtcctttgtccc

SEQ ID NO: 2699579 - DNA, 25 bp, Homo sapien
aaactgcatatgtcctttgtcccca

SEQ ID NO: 2699580 - DNA, 25 bp, Homo sapien
tgtcccaaaacgttgccctggcagt

SEQ ID NO: 2699581 - DNA, 25 bp, Homo sapien
tcttattcggatacaagcgcaagga

SEQ ID NO: 2699582 - DNA, 25 bp, Homo sapien
taaagcacctggcattgaaactggc

SEQ ID NO: 2699583 - DNA, 25 bp, Homo sapien
ttaatttgggctgtgtcaagcaggc

SEQ ID NO: 2699584 - DNA, 25 bp, Homo sapien
ggctgcagatgtccttagggaaagt

SEQ ID NO: 2699585 - DNA, 25 bp, Homo sapien
gctgcagatgtccttagggaaagtt

SEQ ID NO: 2699586 - DNA, 25 bp, Homo sapien
tgcagatgtccttagggaaagtttc

SEQ ID NO: 2699587 - DNA, 25 bp, Homo sapien
ctgcagatgtccttagggaaagttt

SEQ ID NO: 2699588 - DNA, 25 bp, Homo sapien
tttttgcacagtggcggtccagcag

SEQ ID NO: 2699589 - DNA, 25 bp, Homo sapien
tttccatttggctgtgcttttttgc

SEQ ID NO: 2699590 - DNA, 25 bp, Homo sapien
gcttttttgcacagtggcggtccag

SEQ ID NO: 2699591 - DNA, 25 bp, Homo sapien
ccatttggctgtgcttttttgcaca

SEQ ID NO: 2699592 - DNA, 25 bp, Homo sapien
aagctctcgtggcactcagccgttc

SEQ ID NO: 2699593 - DNA, 25 bp, Homo sapien
ctttcagtgtgattggtgccccagg

SEQ ID NO: 2699594 - DNA, 25 bp, Homo sapien
ggtgtggtgctgtgaactcaatccc

SEQ ID NO: 2699595 - DNA, 25 bp, Homo sapien
cagccgttccattttgtcggcaaaa

SEQ ID NO: 2699596 - DNA, 25 bp, Homo sapien
tcttctttgcccttgactatttcct

SEQ ID NO: 2699597 - DNA, 25 bp, Homo sapien
ttccttctcatttagctcttcctcc

SEQ ID NO: 2699598 - DNA, 25 bp, Homo sapien
gtcttctttgcccttgactatttcc

SEQ ID NO: 2699599 - DNA, 25 bp, Homo sapien
aattaattttcctctgggatgccca

SEQ ID NO: 2699600 - DNA, 25 bp, Homo sapien
catgaactctggcacgttacttaac

SEQ ID NO: 2699601 - DNA, 25 bp, Homo sapien
aattctgactctactgctctgtggc

SEQ ID NO: 2699602 - DNA, 25 bp, Homo sapien
cacctcagagggttgtcgtgaagag

SEQ ID NO: 2699603 - DNA, 25 bp, Homo sapien
tgggccaggtgaacttttccatact

SEQ ID NO: 2699604 - DNA, 25 bp, Homo sapien
agttgggccaggtgaacttttccat

SEQ ID NO: 2699605 - DNA, 25 bp, Homo sapien
ctttggctttgaagttgggccaggt

SEQ ID NO: 2699606 - DNA, 25 bp, Homo sapien
ttttggagctttggctttgaagttg

SEQ ID NO: 2699607 - DNA, 25 bp, Homo sapien
tgcagttgcgggagctcatcacagt

SEQ ID NO: 2699608 - DNA, 25 bp, Homo sapien
gcaagttctccctgtgaatctgtgt

SEQ ID NO: 2699609 - DNA, 25 bp, Homo sapien
tcctgttgctgggcaagttctccct

SEQ ID NO: 2699610 - DNA, 25 bp, Homo sapien
tggtgggttgggacccaactgtgca

SEQ ID NO: 2699611 - DNA, 25 bp, Homo sapien
gtaggattgagaaataaagacttct

SEQ ID NO: 2699612 - DNA, 25 bp, Homo sapien
tgttgtatcaattggaaaagttttg

SEQ ID NO: 2699613 - DNA, 25 bp, Homo sapien
ggaaagtaggattgagaaataaaga

SEQ ID NO: 2699614 - DNA, 25 bp, Homo sapien
tgtatcaattggaaaagttttggaa

SEQ ID NO: 2699615 - DNA, 25 bp, Homo sapien
taaaattcctcagccactgcacctt

SEQ ID NO: 2699616 - DNA, 25 bp, Homo sapien
tcagagcctctttgcagcagcttaa

SEQ ID NO: 2699617 - DNA, 25 bp, Homo sapien
cctctttgcagcagcttaaaattcc

SEQ ID NO: 2699618 - DNA, 25 bp, Homo sapien
ctttgcagcagcttaaaattcctca

SEQ ID NO: 2699619 - DNA, 25 bp, Homo sapien
tgaagaattgtgtggagagcgtggc

SEQ ID NO: 2699620 - DNA, 25 bp, Homo sapien
cattgccgagcctgcggtgttcagg

SEQ ID NO: 2699621 - DNA, 25 bp, Homo sapien
tggtgtttgatcttagacgcacggc

SEQ ID NO: 2699622 - DNA, 25 bp, Homo sapien
agacgcacggcccaaggcaccattg

SEQ ID NO: 2699623 - DNA, 25 bp, Homo sapien
ttactccaaatcactgtctgagcat

SEQ ID NO: 2699624 - DNA, 25 bp, Homo sapien
actccaaatcactgtctgagcatag

SEQ ID NO: 2699625 - DNA, 25 bp, Homo sapien
ctccaaatcactgtctgagcatagg

SEQ ID NO: 2699626 - DNA, 25 bp, Homo sapien
tccaaatcactgtctgagcatagga

SEQ ID NO: 2699627 - DNA, 25 bp, Homo sapien
tctgcctaccatactgggttacctt

SEQ ID NO: 2699628 - DNA, 25 bp, Homo sapien
accatactgggttaccttgggcaag

SEQ ID NO: 2699629 - DNA, 25 bp, Homo sapien
tgggccaggtatgtagttgatgcct

SEQ ID NO: 2699630 - DNA, 25 bp, Homo sapien
tgaaatcttgcctgctaagcacttg

SEQ ID NO: 2699631 - DNA, 25 bp, Homo sapien
gtttattagcttgcttgttaattcc

SEQ ID NO: 2699632 - DNA, 25 bp, Homo sapien
ttagcttgcttgttaattccagaat

SEQ ID NO: 2699633 - DNA, 25 bp, Homo sapien
ttgtcctgacaatgtgtttattagc

SEQ ID NO: 2699634 - DNA, 25 bp, Homo sapien
tggttaacttgaggtacctctgggc

SEQ ID NO: 2699635 - DNA, 25 bp, Homo sapien
tccttttccttttctcaaagcacat

SEQ ID NO: 2699636 - DNA, 25 bp, Homo sapien
ctgaagctggcttctccttttcctt

SEQ ID NO: 2699637 - DNA, 25 bp, Homo sapien
agctggcttctccttttccttttct

SEQ ID NO: 2699638 - DNA, 25 bp, Homo sapien
ttctccttttccttttctcaaagca

SEQ ID NO: 2699639 - DNA, 25 bp, Homo sapien
gtctggagggccagaaatgggctgg

SEQ ID NO: 2699640 - DNA, 25 bp, Homo sapien
tctcttggcagcaaccaatgtctgg

SEQ ID NO: 2699641 - DNA, 25 bp, Homo sapien
cagcaaccaatgtctggagggccag

SEQ ID NO: 2699642 - DNA, 25 bp, Homo sapien
gttctctcttggcagcaaccaatgt

SEQ ID NO: 2699643 - DNA, 25 bp, Homo sapien
cttctaggtctgagagtgttgccac

SEQ ID NO: 2699644 - DNA, 25 bp, Homo sapien
ccttctaggtctgagagtgttgcca

SEQ ID NO: 2699645 - DNA, 25 bp, Homo sapien
cagggggttctcattcaggtggtcc

SEQ ID NO: 2699646 - DNA, 25 bp, Homo sapien
caggtggtcccggaatcctggcttt

SEQ ID NO: 2699647 - DNA, 25 bp, Homo sapien
tcccggaatcctggctttgaaaatc

SEQ ID NO: 2699648 - DNA, 25 bp, Homo sapien
cccagggggttctcattcaggtggt

SEQ ID NO: 2699649 - DNA, 25 bp, Homo sapien
tttccgataagatggtgcgtgggca

SEQ ID NO: 2699650 - DNA, 25 bp, Homo sapien
agtgttatctctcggatcgtctagg

SEQ ID NO: 2699651 - DNA, 25 bp, Homo sapien
ctttgtgcataagccttgggctcca

SEQ ID NO: 2699652 - DNA, 25 bp, Homo sapien
tgggatttccgataagatggtgcgt

SEQ ID NO: 2699653 - DNA, 25 bp, Homo sapien
tgtcctggaaaatttgcctttagag

SEQ ID NO: 2699654 - DNA, 25 bp, Homo sapien
tgcttgtttttctttgtcctggaaa

SEQ ID NO: 2699655 - DNA, 25 bp, Homo sapien
ttgtcctggaaaatttgcctttaga

SEQ ID NO: 2699656 - DNA, 25 bp, Homo sapien
tcctcactagtgtctccaaagcggg

SEQ ID NO: 2699657 - DNA, 25 bp, Homo sapien
gagattggctttggctccgcacctg

SEQ ID NO: 2699658 - DNA, 25 bp, Homo sapien
agtttccgtatctgtccgaagaagg

SEQ ID NO: 2699659 - DNA, 25 bp, Homo sapien
gtttggtgttgatctccgagacccg

SEQ ID NO: 2699660 - DNA, 25 bp, Homo sapien
gccgccgcgtttgcgcagggggagc

SEQ ID NO: 2699661 - DNA, 25 bp, Homo sapien
cggctcagacggtcgccgccgcgtt

SEQ ID NO: 2699662 - DNA, 25 bp, Homo sapien
gccgcggccgcctggaattgtggga

SEQ ID NO: 2699663 - DNA, 25 bp, Homo sapien
gcggccgcctggaattgtgggagtt

SEQ ID NO: 2699664 - DNA, 25 bp, Homo sapien
tggtgtggtcagttaccacactcat

SEQ ID NO: 2699665 - DNA, 25 bp, Homo sapien
tgtcccatccatctcacatcattgg

SEQ ID NO: 2699666 - DNA, 25 bp, Homo sapien
catctcacatcattggggttctggt

SEQ ID NO: 2699667 - DNA, 25 bp, Homo sapien
tagagagtagggagtcagagatccc

SEQ ID NO: 2699668 - DNA, 25 bp, Homo sapien
gggagtcagagatccctagccccag

SEQ ID NO: 2699669 - DNA, 25 bp, Homo sapien
gctaatctctctgtacctttctaat

SEQ ID NO: 2699670 - DNA, 25 bp, Homo sapien
atctctctgtacctttctaattttc

SEQ ID NO: 2699671 - DNA, 25 bp, Homo sapien
catgctaatctctctgtacctttct

SEQ ID NO: 2699672 - DNA, 25 bp, Homo sapien
taatctctctgtacctttctaattt

SEQ ID NO: 2699673 - DNA, 25 bp, Homo sapien
ttacaggcgcacatcaccatgatca

SEQ ID NO: 2699674 - DNA, 25 bp, Homo sapien
aggcgcacatcaccatgatcagcta

SEQ ID NO: 2699675 - DNA, 25 bp, Homo sapien
tacaggcgcacatcaccatgatcag

SEQ ID NO: 2699676 - DNA, 25 bp, Homo sapien
cgcacatcaccatgatcagctagtt

SEQ ID NO: 2699677 - DNA, 25 bp, Homo sapien
aagatagtatactgagtttctatag

SEQ ID NO: 2699678 - DNA, 25 bp, Homo sapien
ccagctttcctctaatgttaatatc

SEQ ID NO: 2699679 - DNA, 25 bp, Homo sapien
tagtcccatgtacatttcacccagc

SEQ ID NO: 2699680 - DNA, 25 bp, Homo sapien
gagtttctatagtcccatgtacatt

SEQ ID NO: 2699681 - DNA, 25 bp, Homo sapien
tgtttttagagtctttgtctgactt

SEQ ID NO: 2699682 - DNA, 25 bp, Homo sapien
ttttagagtctttgtctgacttcat

SEQ ID NO: 2699683 - DNA, 25 bp, Homo sapien
gtttttagagtctttgtctgacttc

SEQ ID NO: 2699684 - DNA, 25 bp, Homo sapien
cttgtttttagagtctttgtctgac

SEQ ID NO: 2699685 - DNA, 25 bp, Homo sapien
tttctctgctagacttgccctgcac

SEQ ID NO: 2699686 - DNA, 25 bp, Homo sapien
ctgcagtgggattcttcgccgagct

SEQ ID NO: 2699687 - DNA, 25 bp, Homo sapien
agtgggattcttcgccgagctgcag

SEQ ID NO: 2699688 - DNA, 25 bp, Homo sapien
ttcttcgccgagctgcagtaactga

SEQ ID NO: 2699689 - DNA, 25 bp, Homo sapien
cggtcttcgggatctttccaggagg

SEQ ID NO: 2699690 - DNA, 25 bp, Homo sapien
cacgcaggtcaccttggtccacggt

SEQ ID NO: 2699691 - DNA, 25 bp, Homo sapien
taagccagtcactcctactgctgac

SEQ ID NO: 2699692 - DNA, 25 bp, Homo sapien
tccaggaggttttcgaatagattaa

SEQ ID NO: 2699693 - DNA, 25 bp, Homo sapien
ttttctggctttctgcggcagcgct

SEQ ID NO: 2699694 - DNA, 25 bp, Homo sapien
gcttcccacgcatatcctttttctg

SEQ ID NO: 2699695 - DNA, 25 bp, Homo sapien
gtcattcggctaatggatcgctcac

SEQ ID NO: 2699696 - DNA, 25 bp, Homo sapien
agcgtggcgcctttccgttgctgca

SEQ ID NO: 2699697 - DNA, 25 bp, Homo sapien
acgtgttcggagctccgcagggcgc

SEQ ID NO: 2699698 - DNA, 25 bp, Homo sapien
gcacgtgttcggagctccgcagggc

SEQ ID NO: 2699699 - DNA, 25 bp, Homo sapien
gcgcacgtgttcggagctccgcagg

SEQ ID NO: 2699700 - DNA, 25 bp, Homo sapien
cgtgttcggagctccgcagggcgca

SEQ ID NO: 2699701 - DNA, 25 bp, Homo sapien
gctctcggagtcaggctctatggga

SEQ ID NO: 2699702 - DNA, 25 bp, Homo sapien
ctctcggagtcaggctctatgggac

SEQ ID NO: 2699703 - DNA, 25 bp, Homo sapien
tcggagtcaggctctatgggactcc

SEQ ID NO: 2699704 - DNA, 25 bp, Homo sapien
aggctctcggagtcaggctctatgg

SEQ ID NO: 2699705 - DNA, 25 bp, Homo sapien
gcagttgcatctgccacagccagcc

SEQ ID NO: 2699706 - DNA, 25 bp, Homo sapien
ctgcagttgcatctgccacagccag

SEQ ID NO: 2699707 - DNA, 25 bp, Homo sapien
gttgcatctgccacagccagcctct

SEQ ID NO: 2699708 - DNA, 25 bp, Homo sapien
agttgcatctgccacagccagcctc

SEQ ID NO: 2699709 - DNA, 25 bp, Homo sapien
ctgaaaactgcacatgcagactgtc

SEQ ID NO: 2699710 - DNA, 25 bp, Homo sapien
tgggtgaaggatgccctactttcaa

SEQ ID NO: 2699711 - DNA, 25 bp, Homo sapien
actgcacatgcagactgtcacctgc

SEQ ID NO: 2699712 - DNA, 25 bp, Homo sapien
tgtcacctgccactatttcctccct

SEQ ID NO: 2699713 - DNA, 25 bp, Homo sapien
ttgtttcctgatagataccaactag

SEQ ID NO: 2699714 - DNA, 25 bp, Homo sapien
gcacagaggaggtagtcaatgttgg

SEQ ID NO: 2699715 - DNA, 25 bp, Homo sapien
tcaatgttggaatgaatagggatat

SEQ ID NO: 2699716 - DNA, 25 bp, Homo sapien
agataccaactagcccacaggcctg

SEQ ID NO: 2699717 - DNA, 25 bp, Homo sapien
tgcacccagactaggatcaactcca

SEQ ID NO: 2699718 - DNA, 25 bp, Homo sapien
taaagacagtgtttgctcttccaac

SEQ ID NO: 2699719 - DNA, 25 bp, Homo sapien
acaggcaccacatgagcctggatag

SEQ ID NO: 2699720 - DNA, 25 bp, Homo sapien
cctggatagctgacaaccgctggat

SEQ ID NO: 2699721 - DNA, 25 bp, Homo sapien
aggtagatgtcattcaggtgaaggc

SEQ ID NO: 2699722 - DNA, 25 bp, Homo sapien
ctgatggaggtagatgtcattcagg

SEQ ID NO: 2699723 - DNA, 25 bp, Homo sapien
gtagatgtcattcaggtgaaggcat

SEQ ID NO: 2699724 - DNA, 25 bp, Homo sapien
tggaggtagatgtcattcaggtgaa

SEQ ID NO: 2699725 - DNA, 25 bp, Homo sapien
cacagggctgtcagacatctggggt

SEQ ID NO: 2699726 - DNA, 25 bp, Homo sapien
acacagggctgtcagacatctgggg

SEQ ID NO: 2699727 - DNA, 25 bp, Homo sapien
tcacacagggctgtcagacatctgg

SEQ ID NO: 2699728 - DNA, 25 bp, Homo sapien
cacacagggctgtcagacatctggg

SEQ ID NO: 2699729 - DNA, 25 bp, Homo sapien
ccccatctgagctatagtaatttaa

SEQ ID NO: 2699730 - DNA, 25 bp, Homo sapien
tagtaatttaattgggacctacatg

SEQ ID NO: 2699731 - DNA, 25 bp, Homo sapien
agtctgatactctacataatttttc

SEQ ID NO: 2699732 - DNA, 25 bp, Homo sapien
cctacatgacaagaagactacatac

SEQ ID NO: 2699733 - DNA, 25 bp, Homo sapien
ccaatagggtagtcagcagccagat

SEQ ID NO: 2699734 - DNA, 25 bp, Homo sapien
tagaacagcagtgcataataaactt

SEQ ID NO: 2699735 - DNA, 25 bp, Homo sapien
acagcagtgcataataaactttctg

SEQ ID NO: 2699736 - DNA, 25 bp, Homo sapien
gttctctaatattggagttgtccaa

SEQ ID NO: 2699737 - DNA, 25 bp, Homo sapien
aatataggaacgtctctgcacatgg

SEQ ID NO: 2699738 - DNA, 25 bp, Homo sapien
tactgtagtcaggaagacaacctgt

SEQ ID NO: 2699739 - DNA, 25 bp, Homo sapien
tgcacatggatagcgctactgtagt

SEQ ID NO: 2699740 - DNA, 25 bp, Homo sapien
tgcagtcaccttagtgccctaaaag

SEQ ID NO: 2699741 - DNA, 25 bp, Homo sapien
tttacagaccagtaaccctgccagt

SEQ ID NO: 2699742 - DNA, 25 bp, Homo sapien
tttactgctacctatggcagctggc

SEQ ID NO: 2699743 - DNA, 25 bp, Homo sapien
cagcctggctgaaatggcatggcaa

SEQ ID NO: 2699744 - DNA, 25 bp, Homo sapien
tcaagttttcattgcagcatgggaa

SEQ ID NO: 2699745 - DNA, 25 bp, Homo sapien
taactggagctgtgttcataaagcc

SEQ ID NO: 2699746 - DNA, 25 bp, Homo sapien
caagtgaaatcatggacaggtgcca

SEQ ID NO: 2699747 - DNA, 25 bp, Homo sapien
gggtctcctctgaacaagccttagg

SEQ ID NO: 2699748 - DNA, 25 bp, Homo sapien
gacactagtttgtttcaacccagca

SEQ ID NO: 2699749 - DNA, 25 bp, Homo sapien
cagccttggagggagtacacaaatc

SEQ ID NO: 2699750 - DNA, 25 bp, Homo sapien
tggccaacaagggaatctacgggtg

SEQ ID NO: 2699751 - DNA, 25 bp, Homo sapien
taaaccctttgagtcttctggcaag

SEQ ID NO: 2699752 - DNA, 25 bp, Homo sapien
gggaaattaaatgacggcacctgga

SEQ ID NO: 2699753 - DNA, 25 bp, Homo sapien
tgccgtgagcctagtgcaccactgc

SEQ ID NO: 2699754 - DNA, 25 bp, Homo sapien
aggttgccgtgagcctagtgcacca

SEQ ID NO: 2699755 - DNA, 25 bp, Homo sapien
cagacgtggcttacgagttcgagtc

SEQ ID NO: 2699756 - DNA, 25 bp, Homo sapien
cagctgaggcgggaaatggaggaac

SEQ ID NO: 2699757 - DNA, 25 bp, Homo sapien
tcgttgttctttaatcccggagatc

SEQ ID NO: 2699758 - DNA, 25 bp, Homo sapien
tcgagtcccattcccgaaaaggctg

SEQ ID NO: 2699759 - DNA, 25 bp, Homo sapien
acaatcccccgcagcaacggcgctg

SEQ ID NO: 2699760 - DNA, 25 bp, Homo sapien
tctctcccagcgagcgggacgcgga

SEQ ID NO: 2699761 - DNA, 25 bp, Homo sapien
gaacaaacccactctcgcgagagag

SEQ ID NO: 2699762 - DNA, 25 bp, Homo sapien
caacggcgctggcgagaagcggcgg

SEQ ID NO: 2699763 - DNA, 25 bp, Homo sapien
aggcggctcacatacgcaacgcgga

SEQ ID NO: 2699764 - DNA, 25 bp, Homo sapien
taacatggcggccgccgatcaggcg

SEQ ID NO: 2699765 - DNA, 25 bp, Homo sapien
gagcgagcaagaaaggcgcgccgcc

SEQ ID NO: 2699766 - DNA, 25 bp, Homo sapien
tccgccgccctagaaggctggttgc

SEQ ID NO: 2699767 - DNA, 25 bp, Homo sapien
tgacttgactaaacaagtgcaaatc

SEQ ID NO: 2699768 - DNA, 25 bp, Homo sapien
aagtgcaaatcacccgcctcgcact

SEQ ID NO: 2699769 - DNA, 25 bp, Homo sapien
cttgactaaacaagtgcaaatcacc

SEQ ID NO: 2699770 - DNA, 25 bp, Homo sapien
ggtgacttgactaaacaagtgcaaa

SEQ ID NO: 2699771 - DNA, 25 bp, Homo sapien
cacgatcctctctggaggaacctgg

SEQ ID NO: 2699772 - DNA, 25 bp, Homo sapien
tgtctggaaaccggaaggtcccaca

SEQ ID NO: 2699773 - DNA, 25 bp, Homo sapien
acaccacacgatcctctctggagga

SEQ ID NO: 2699774 - DNA, 25 bp, Homo sapien
aaggtcccacaccacacgatcctct

SEQ ID NO: 2699775 - DNA, 25 bp, Homo sapien
tcgaaatgcaaagaacgatgcggcg

SEQ ID NO: 2699776 - DNA, 25 bp, Homo sapien
cacagaacatggcacagagctcgaa

SEQ ID NO: 2699777 - DNA, 25 bp, Homo sapien
gggatattcatccacggtaaatgcc

SEQ ID NO: 2699778 - DNA, 25 bp, Homo sapien
agagctcgaaatgcaaagaacgatg

SEQ ID NO: 2699779 - DNA, 25 bp, Homo sapien
agcgcgcccgaaagactagccattt

SEQ ID NO: 2699780 - DNA, 25 bp, Homo sapien
tagactgcgtagatgactgagccat

SEQ ID NO: 2699781 - DNA, 25 bp, Homo sapien
gattcttcacattattccagcgcgc

SEQ ID NO: 2699782 - DNA, 25 bp, Homo sapien
tgtgaaaaacgtcgatagactgcgt

SEQ ID NO: 2699783 - DNA, 25 bp, Homo sapien
tgagaacacgtctctacagacgatc

SEQ ID NO: 2699784 - DNA, 25 bp, Homo sapien
gataaattcctgtacgcacagtctt

SEQ ID NO: 2699785 - DNA, 25 bp, Homo sapien
aagagctccgagagttcaacaccag

SEQ ID NO: 2699786 - DNA, 25 bp, Homo sapien
cctacgatactgttttaagtggctg

SEQ ID NO: 2699787 - DNA, 25 bp, Homo sapien
tcttggacagcgttgtgccttagaa

SEQ ID NO: 2699788 - DNA, 25 bp, Homo sapien
tctaaaactcaacccataggcttgt

SEQ ID NO: 2699789 - DNA, 25 bp, Homo sapien
cattagggcttgatgtacaactgga

SEQ ID NO: 2699790 - DNA, 25 bp, Homo sapien
gagccttgagctttatctatacaga

SEQ ID NO: 2699791 - DNA, 25 bp, Homo sapien
ttccccaactactgcttaagttgag

SEQ ID NO: 2699792 - DNA, 25 bp, Homo sapien
ctactgcttaagttgagtgctcaaa

SEQ ID NO: 2699793 - DNA, 25 bp, Homo sapien
aacgcgccatcacgacccgctaatt

SEQ ID NO: 2699794 - DNA, 25 bp, Homo sapien
ttcagcgtctccaacagctggaatt

SEQ ID NO: 2699795 - DNA, 25 bp, Homo sapien
ccctgcatccttaacctgtttccca

SEQ ID NO: 2699796 - DNA, 25 bp, Homo sapien
tcatctcatttggtataatctgatc

SEQ ID NO: 2699797 - DNA, 25 bp, Homo sapien
acacacagcaccgtagtaatcatct

SEQ ID NO: 2699798 - DNA, 25 bp, Homo sapien
gcaccgtagtaatcatctcatttgg

SEQ ID NO: 2699799 - DNA, 25 bp, Homo sapien
catttggtataatctgatcctcata

SEQ ID NO: 2699800 - DNA, 25 bp, Homo sapien
agtcataaatccctttaagcagatg

SEQ ID NO: 2699801 - DNA, 25 bp, Homo sapien
gaaaaataagcaattttagtcataa

SEQ ID NO: 2699802 - DNA, 25 bp, Homo sapien
taagcagatgccgtttttttaagaa

SEQ ID NO: 2699803 - DNA, 25 bp, Homo sapien
gcaattttagtcataaatcccttta

SEQ ID NO: 2699804 - DNA, 25 bp, Homo sapien
tgcttcaaaaatggtaacgccaaga

SEQ ID NO: 2699805 - DNA, 25 bp, Homo sapien
gatcaataaggactgcagaatcttc

SEQ ID NO: 2699806 - DNA, 25 bp, Homo sapien
gccaaaaagaaagctcaaactagaa

SEQ ID NO: 2699807 - DNA, 25 bp, Homo sapien
tcaagctgagaaccagcagacaact

SEQ ID NO: 2699808 - DNA, 25 bp, Homo sapien
gaaggcctattcctgccgcagacag

SEQ ID NO: 2699809 - DNA, 25 bp, Homo sapien
caggtcacgcccatgaccctgtgag

SEQ ID NO: 2699810 - DNA, 25 bp, Homo sapien
tattcctgccgcagacaggtcacgc

SEQ ID NO: 2699811 - DNA, 25 bp, Homo sapien
tgtgagtccctactgagagatgact

SEQ ID NO: 2699812 - DNA, 25 bp, Homo sapien
caaggcgtgcagtaccctggttcat

SEQ ID NO: 2699813 - DNA, 25 bp, Homo sapien
gcaaggcgtgcagtaccctggttca

SEQ ID NO: 2699814 - DNA, 25 bp, Homo sapien
aactagcaaggcgtgcagtaccctg

SEQ ID NO: 2699815 - DNA, 25 bp, Homo sapien
tagcaaggcgtgcagtaccctggtt

SEQ ID NO: 2699816 - DNA, 25 bp, Homo sapien
aattatgggaagaagtactagcaga

SEQ ID NO: 2699817 - DNA, 25 bp, Homo sapien
cagaagacagtgcactatgagctcc

SEQ ID NO: 2699818 - DNA, 25 bp, Homo sapien
tactagcagaagacagtgcactatg

SEQ ID NO: 2699819 - DNA, 25 bp, Homo sapien
gggaagaagtactagcagaagacag

SEQ ID NO: 2699820 - DNA, 25 bp, Homo sapien
tggtcataatcaagcactgggttga

SEQ ID NO: 2699821 - DNA, 25 bp, Homo sapien
accagattcttgagaacgacttcca

SEQ ID NO: 2699822 - DNA, 25 bp, Homo sapien
ggtggctcccgtgtagcagatctgc

SEQ ID NO: 2699823 - DNA, 25 bp, Homo sapien
ccatctctaccataactcaaggtag

SEQ ID NO: 2699824 - DNA, 25 bp, Homo sapien
ccttcggtaagagtccatggaagtc

SEQ ID NO: 2699825 - DNA, 25 bp, Homo sapien
gcacagatggggataacccttcggt

SEQ ID NO: 2699826 - DNA, 25 bp, Homo sapien
tgtaaggggccaggaccacgtccca

SEQ ID NO: 2699827 - DNA, 25 bp, Homo sapien
gggccaggaccacgtcccattctct

SEQ ID NO: 2699828 - DNA, 25 bp, Homo sapien
taagtcaactgcaccatatattggg

SEQ ID NO: 2699829 - DNA, 25 bp, Homo sapien
catcaggaaaaaatggacggtcaca

SEQ ID NO: 2699830 - DNA, 25 bp, Homo sapien
aaaatgacccttccagatgttactg

SEQ ID NO: 2699831 - DNA, 25 bp, Homo sapien
ccagttaagtagagcacatcaggaa

SEQ ID NO: 2699832 - DNA, 25 bp, Homo sapien
gagtgcaatgagctgcgaacaccta

SEQ ID NO: 2699833 - DNA, 25 bp, Homo sapien
tatatccctggactctacactgagg

SEQ ID NO: 2699834 - DNA, 25 bp, Homo sapien
tataaactcaagtgacaagacagcc

SEQ ID NO: 2699835 - DNA, 25 bp, Homo sapien
tatagcggttatagagggtccactg

SEQ ID NO: 2699836 - DNA, 25 bp, Homo sapien
gaagaagctggcatcgacgactgtg

SEQ ID NO: 2699837 - DNA, 25 bp, Homo sapien
ttccaactccagtgaacaatgggca

SEQ ID NO: 2699838 - DNA, 25 bp, Homo sapien
gaagtgccgcacaaagaattagaaa

SEQ ID NO: 2699839 - DNA, 25 bp, Homo sapien
cactgtgtgctgcttaagcagggag

SEQ ID NO: 2699840 - DNA, 25 bp, Homo sapien
aaagaatagccccaacagagttagg

SEQ ID NO: 2699841 - DNA, 25 bp, Homo sapien
attgtcaggattccattctgggtag

SEQ ID NO: 2699842 - DNA, 25 bp, Homo sapien
tgtgtgtcctgtatcattgtcagga

SEQ ID NO: 2699843 - DNA, 25 bp, Homo sapien
tatcattgtcaggattccattctgg

SEQ ID NO: 2699844 - DNA, 25 bp, Homo sapien
attgtgtgtcctgtatcattgtcag

SEQ ID NO: 2699845 - DNA, 25 bp, Homo sapien
taaagcaccccaatatatgaccaca

SEQ ID NO: 2699846 - DNA, 25 bp, Homo sapien
gaaacctgaattccttacattgatc

SEQ ID NO: 2699847 - DNA, 25 bp, Homo sapien
tcagagtatctgtgaagtaactagg

SEQ ID NO: 2699848 - DNA, 25 bp, Homo sapien
tcataataaagaggtccattggaaa

SEQ ID NO: 2699849 - DNA, 25 bp, Homo sapien
aggtggaggtcccagaattcctggt

SEQ ID NO: 2699850 - DNA, 25 bp, Homo sapien
ctgctgcaacatgaatggatcaccc

SEQ ID NO: 2699851 - DNA, 25 bp, Homo sapien
aattcctggtgctggatttgtagac

SEQ ID NO: 2699852 - DNA, 25 bp, Homo sapien
gatttcctcttggtccaactgctgg

SEQ ID NO: 2699853 - DNA, 25 bp, Homo sapien
catgtgtctaggtccttgcaggttt

SEQ ID NO: 2699854 - DNA, 25 bp, Homo sapien
tctgcatgtgtctaggtccttgcag

SEQ ID NO: 2699855 - DNA, 25 bp, Homo sapien
tgcatgtgtctaggtccttgcaggt

SEQ ID NO: 2699856 - DNA, 25 bp, Homo sapien
ttctgcatgtgtctaggtccttgca

SEQ ID NO: 2699857 - DNA, 25 bp, Homo sapien
tgaaaatccatgatgtgaacaactc

SEQ ID NO: 2699858 - DNA, 25 bp, Homo sapien
ttagaatcagatgatttgaaatgac

SEQ ID NO: 2699859 - DNA, 25 bp, Homo sapien
ctccaaatggttctaccagctgtaa

SEQ ID NO: 2699860 - DNA, 25 bp, Homo sapien
tttgaaatgactccaaatggttcta

SEQ ID NO: 2699861 - DNA, 25 bp, Homo sapien
cttctgggataaatgaactctcact

SEQ ID NO: 2699862 - DNA, 25 bp, Homo sapien
tatacttctgggataaatgaactct

SEQ ID NO: 2699863 - DNA, 25 bp, Homo sapien
tcttttatacttctgggataaatga

SEQ ID NO: 2699864 - DNA, 25 bp, Homo sapien
ctgggataaatgaactctcactggc

SEQ ID NO: 2699865 - DNA, 25 bp, Homo sapien
tcctcatcaatatgtaattctttat

SEQ ID NO: 2699866 - DNA, 25 bp, Homo sapien
ttattttcccataaggctcagcaag

SEQ ID NO: 2699867 - DNA, 25 bp, Homo sapien
gcttgagaacagcactatcagaata

SEQ ID NO: 2699868 - DNA, 25 bp, Homo sapien
gatcaaacttctgatctggctttcc

SEQ ID NO: 2699869 - DNA, 25 bp, Homo sapien
aagaaaccacaaagcacattatatt

SEQ ID NO: 2699870 - DNA, 25 bp, Homo sapien
aaagaaaccacaaagcacattatat

SEQ ID NO: 2699871 - DNA, 25 bp, Homo sapien
aacaatggtcaaccattgccattgc

SEQ ID NO: 2699872 - DNA, 25 bp, Homo sapien
tttcaaacaatggtcaaccattgcc

SEQ ID NO: 2699873 - DNA, 25 bp, Homo sapien
tcaaccattgccattgcatcttctc

SEQ ID NO: 2699874 - DNA, 25 bp, Homo sapien
tggtcaaccattgccattgcatctt

SEQ ID NO: 2699875 - DNA, 25 bp, Homo sapien
tcagtaaatcaatgcctctgtttgg

SEQ ID NO: 2699876 - DNA, 25 bp, Homo sapien
cttttttcagtaaatcaatgcctct

SEQ ID NO: 2699877 - DNA, 25 bp, Homo sapien
ttatcttttttcagtaaatcaatgc

SEQ ID NO: 2699878 - DNA, 25 bp, Homo sapien
tttttcagtaaatcaatgcctctgt

SEQ ID NO: 2699879 - DNA, 25 bp, Homo sapien
gttttggatttcttatcacttggag

SEQ ID NO: 2699880 - DNA, 25 bp, Homo sapien
gacaaaaccttccatactccctgga

SEQ ID NO: 2699881 - DNA, 25 bp, Homo sapien
ctagagtgacaaaaccttccatact

SEQ ID NO: 2699882 - DNA, 25 bp, Homo sapien
agtgacaaaaccttccatactccct

SEQ ID NO: 2699883 - DNA, 25 bp, Homo sapien
cttccatactccctggaaaacgacg

SEQ ID NO: 2699884 - DNA, 25 bp, Homo sapien
tctgaagttccgaatcttcctcatc

SEQ ID NO: 2699885 - DNA, 25 bp, Homo sapien
agtttctgaagttccgaatcttcct

SEQ ID NO: 2699886 - DNA, 25 bp, Homo sapien
gtttctgaagttccgaatcttcctc

SEQ ID NO: 2699887 - DNA, 25 bp, Homo sapien
ttctgaagttccgaatcttcctcat

SEQ ID NO: 2699888 - DNA, 25 bp, Homo sapien
atcagcgttctcagaagattcagca

SEQ ID NO: 2699889 - DNA, 25 bp, Homo sapien
catcagcgttctcagaagattcagc

SEQ ID NO: 2699890 - DNA, 25 bp, Homo sapien
gatcaagttcctcgatcttgtccac

SEQ ID NO: 2699891 - DNA, 25 bp, Homo sapien
tttcttgatcaagttcctcgatctt

SEQ ID NO: 2699892 - DNA, 25 bp, Homo sapien
caaaatcagagacatgcatgagagg

SEQ ID NO: 2699893 - DNA, 25 bp, Homo sapien
gaggtctcacctaactgtattctta

SEQ ID NO: 2699894 - DNA, 25 bp, Homo sapien
tgagaagtccaatacagcctaagat

SEQ ID NO: 2699895 - DNA, 25 bp, Homo sapien
aacaaaagcgtgtaacttgcaagaa

SEQ ID NO: 2699896 - DNA, 25 bp, Homo sapien
gctgctgcaatgagtattctttgca

SEQ ID NO: 2699897 - DNA, 25 bp, Homo sapien
tcatttgtataaaagagtgaacaca

SEQ ID NO: 2699898 - DNA, 25 bp, Homo sapien
gaacacagcttacagtaaaaccctg

SEQ ID NO: 2699899 - DNA, 25 bp, Homo sapien
gttttaggtatcacatagtctatac

SEQ ID NO: 2699900 - DNA, 25 bp, Homo sapien
aacagcttaaaatcaaagcagataa

SEQ ID NO: 2699901 - DNA, 25 bp, Homo sapien
aaatatttgtaccagggcgggcact

SEQ ID NO: 2699902 - DNA, 25 bp, Homo sapien
tattcttctcgacaatacatatagt

SEQ ID NO: 2699903 - DNA, 25 bp, Homo sapien
agccacaagaagcacctagcaatct

SEQ ID NO: 2699904 - DNA, 25 bp, Homo sapien
aattagttaatcctcattagcacac

SEQ ID NO: 2699905 - DNA, 25 bp, Homo sapien
tcacctaagagaaatgcagcaaaat

SEQ ID NO: 2699906 - DNA, 25 bp, Homo sapien
gaattacagccattaagtcacctaa

SEQ ID NO: 2699907 - DNA, 25 bp, Homo sapien
tcaggacattacaataaggcacggg

SEQ ID NO: 2699908 - DNA, 25 bp, Homo sapien
ttccttcttctgtctgcgttcttct

SEQ ID NO: 2699909 - DNA, 25 bp, Homo sapien
ctgcgttcttctgccaatttattca

SEQ ID NO: 2699910 - DNA, 25 bp, Homo sapien
gcgttcttctgccaatttattcaga

SEQ ID NO: 2699911 - DNA, 25 bp, Homo sapien
ttctgtctgcgttcttctgccaatt

SEQ ID NO: 2699912 - DNA, 25 bp, Homo sapien
tcttagtggtgcaagttgtcttaag

SEQ ID NO: 2699913 - DNA, 25 bp, Homo sapien
tagtggtgcaagttgtcttaagtag

SEQ ID NO: 2699914 - DNA, 25 bp, Homo sapien
tgtcttaagtagcttaggaagtcaa

SEQ ID NO: 2699915 - DNA, 25 bp, Homo sapien
taagtagcttaggaagtcaatctct

SEQ ID NO: 2699916 - DNA, 25 bp, Homo sapien
ccaaatgaaagtctgcaaggctcag

SEQ ID NO: 2699917 - DNA, 25 bp, Homo sapien
tattacctaaacaacagcatgacat

SEQ ID NO: 2699918 - DNA, 25 bp, Homo sapien
ccagagatgtatgacaatcacggga

SEQ ID NO: 2699919 - DNA, 25 bp, Homo sapien
tacgaaatctagcaggaactcaggg

SEQ ID NO: 2699920 - DNA, 25 bp, Homo sapien
tcacctacttttcaacgggagagat

SEQ ID NO: 2699921 - DNA, 25 bp, Homo sapien
gcaaacatgagtggaaacattccta

SEQ ID NO: 2699922 - DNA, 25 bp, Homo sapien
taaactaagggctgacatagccgta

SEQ ID NO: 2699923 - DNA, 25 bp, Homo sapien
aaaactcagatctttagcggcagtc

SEQ ID NO: 2699924 - DNA, 25 bp, Homo sapien
cctccatagggagttattttgacaa

SEQ ID NO: 2699925 - DNA, 25 bp, Homo sapien
ctgaggccacgatcgcctgaggtca

SEQ ID NO: 2699926 - DNA, 25 bp, Homo sapien
ctccatagggagttattttgacaaa

SEQ ID NO: 2699927 - DNA, 25 bp, Homo sapien
gcgaccccgaagtctgtctccaagg

SEQ ID NO: 2699928 - DNA, 25 bp, Homo sapien
acggcagccaacgaatcctgtcggc

SEQ ID NO: 2699929 - DNA, 25 bp, Homo sapien
gaagtgacttcacttccgtcgccgc

SEQ ID NO: 2699930 - DNA, 25 bp, Homo sapien
gtgtagcaggaacgctgtcgcacgt

SEQ ID NO: 2699931 - DNA, 25 bp, Homo sapien
aaagacgatcttctgatcaggcccg

SEQ ID NO: 2699932 - DNA, 25 bp, Homo sapien
actgaggacccggatagagagctgc

SEQ ID NO: 2699933 - DNA, 25 bp, Homo sapien
gaggcaatgaacaacggaggccgca

SEQ ID NO: 2699934 - DNA, 25 bp, Homo sapien
aaagcgacggccatgtctcggagaa

SEQ ID NO: 2699935 - DNA, 25 bp, Homo sapien
tatttatttctggtggcgatggtgg

SEQ ID NO: 2699936 - DNA, 25 bp, Homo sapien
tctaactcaacgccctcctagggta

SEQ ID NO: 2699937 - DNA, 25 bp, Homo sapien
gaggagagtaagcacagaaaattat

SEQ ID NO: 2699938 - DNA, 25 bp, Homo sapien
gaggaccttaaagttcatctaactc

SEQ ID NO: 2699939 - DNA, 25 bp, Homo sapien
taaaccaacacctgatctaactgtg

SEQ ID NO: 2699940 - DNA, 25 bp, Homo sapien
tattgcaaacacaacctacgccaga

SEQ ID NO: 2699941 - DNA, 25 bp, Homo sapien
gatacgggtgccaaatcagggaaaa

SEQ ID NO: 2699942 - DNA, 25 bp, Homo sapien
gtttcaacattagccagcacaccca

SEQ ID NO: 2699943 - DNA, 25 bp, Homo sapien
tagaggaaatctccattccctaacc

SEQ ID NO: 2699944 - DNA, 25 bp, Homo sapien
gttcctaaggagcaacgtgcacagc

SEQ ID NO: 2699945 - DNA, 25 bp, Homo sapien
tcattagaggaaatctccattccct

SEQ ID NO: 2699946 - DNA, 25 bp, Homo sapien
tgcacagccttgaatcattagagga

SEQ ID NO: 2699947 - DNA, 25 bp, Homo sapien
tatgtgaaggatctatatttctcca

SEQ ID NO: 2699948 - DNA, 25 bp, Homo sapien
actgtttgggtgcatccattttgct

SEQ ID NO: 2699949 - DNA, 25 bp, Homo sapien
agtgggaataactgtgtcaagggcc

SEQ ID NO: 2699950 - DNA, 25 bp, Homo sapien
ggcaatacgcattcctattatactg

SEQ ID NO: 2699951 - DNA, 25 bp, Homo sapien
tcaagatcagtgtgggaaacatacc

SEQ ID NO: 2699952 - DNA, 25 bp, Homo sapien
caagcattgaagtgtaggccgatgc

SEQ ID NO: 2699953 - DNA, 25 bp, Homo sapien
caaaaagttctggactttggaacag

SEQ ID NO: 2699954 - DNA, 25 bp, Homo sapien
ggatgctcaacctgtcataaacagt

SEQ ID NO: 2699955 - DNA, 25 bp, Homo sapien
taatgagcatctgcagtcgtttcca

SEQ ID NO: 2699956 - DNA, 25 bp, Homo sapien
ttatatgagcacgttttcagttctc

SEQ ID NO: 2699957 - DNA, 25 bp, Homo sapien
atacccaatgtgttcaatgctagtc

SEQ ID NO: 2699958 - DNA, 25 bp, Homo sapien
aaaatatgtgtcctcttctcatgtc

SEQ ID NO: 2699959 - DNA, 25 bp, Homo sapien
tgtatatagctctggatctctcctt

SEQ ID NO: 2699960 - DNA, 25 bp, Homo sapien
tctaggtccatgtcaagttcttcca

SEQ ID NO: 2699961 - DNA, 25 bp, Homo sapien
ggatctctccttgatagcccatatt

SEQ ID NO: 2699962 - DNA, 25 bp, Homo sapien
taataacttcttaggttcttcatgt

SEQ ID NO: 2699963 - DNA, 25 bp, Homo sapien
gctgatgttggttgtcgtttttaac

SEQ ID NO: 2699964 - DNA, 25 bp, Homo sapien
ggctgatgttggttgtcgtttttaa

SEQ ID NO: 2699965 - DNA, 25 bp, Homo sapien
gtactctgcaaatggattgtcatct

SEQ ID NO: 2699966 - DNA, 25 bp, Homo sapien
gggctagtactgctgcgacttggat

SEQ ID NO: 2699967 - DNA, 25 bp, Homo sapien
tcatgagaatgaccgttaataatca

SEQ ID NO: 2699968 - DNA, 25 bp, Homo sapien
catcttcattgatgatgcttgggct

SEQ ID NO: 2699969 - DNA, 25 bp, Homo sapien
gggccagaatggactataaaaacat

SEQ ID NO: 2699970 - DNA, 25 bp, Homo sapien
gccagaatggactataaaaacatgt

SEQ ID NO: 2699971 - DNA, 25 bp, Homo sapien
gagggccagaatggactataaaaac

SEQ ID NO: 2699972 - DNA, 25 bp, Homo sapien
ggccagaatggactataaaaacatg

SEQ ID NO: 2699973 - DNA, 25 bp, Homo sapien
ggagatctcgagctggaataaacca

SEQ ID NO: 2699974 - DNA, 25 bp, Homo sapien
cattaaactggtcttggatttggtc

SEQ ID NO: 2699975 - DNA, 25 bp, Homo sapien
tccatagtttgtgggagatctcgag

SEQ ID NO: 2699976 - DNA, 25 bp, Homo sapien
ccagcatttcttggaaacagcgttc

SEQ ID NO: 2699977 - DNA, 25 bp, Homo sapien
gagaagagccatcactgataacaag

SEQ ID NO: 2699978 - DNA, 25 bp, Homo sapien
gcaaaagatgcactaggttttaaaa

SEQ ID NO: 2699979 - DNA, 25 bp, Homo sapien
gctggcttttccacttatgcaaaag

SEQ ID NO: 2699980 - DNA, 25 bp, Homo sapien
tcttaaatagatgggagctggcttt

SEQ ID NO: 2699981 - DNA, 25 bp, Homo sapien
aagagatgtagaattcttaaataga

SEQ ID NO: 2699982 - DNA, 25 bp, Homo sapien
tttaagtaccctagggcaacatcag

SEQ ID NO: 2699983 - DNA, 25 bp, Homo sapien
gactagctctacagtgttgccggaa

SEQ ID NO: 2699984 - DNA, 25 bp, Homo sapien
tagaagtccgtctaagactagctct

SEQ ID NO: 2699985 - DNA, 25 bp, Homo sapien
tgattccatgtcgtgagactctgct

SEQ ID NO: 2699986 - DNA, 25 bp, Homo sapien
tgttactctgcagggcaactggatt

SEQ ID NO: 2699987 - DNA, 25 bp, Homo sapien
gaacaaaccagcttctgtactatgg

SEQ ID NO: 2699988 - DNA, 25 bp, Homo sapien
taccatcacttactgcaacaaaggc

SEQ ID NO: 2699989 - DNA, 25 bp, Homo sapien
tatgctcagccaagagtgttactct

SEQ ID NO: 2699990 - DNA, 25 bp, Homo sapien
tgaaatgtaggtatgctgcaaggct

SEQ ID NO: 2699991 - DNA, 25 bp, Homo sapien
tctaattcccacaggaagcatggta

SEQ ID NO: 2699992 - DNA, 25 bp, Homo sapien
tacatagcagtttctttggacagga

SEQ ID NO: 2699993 - DNA, 25 bp, Homo sapien
tagactggagggcagcggaacaatc

SEQ ID NO: 2699994 - DNA, 25 bp, Homo sapien
tcaaatatttccgtacttcacccca

SEQ ID NO: 2699995 - DNA, 25 bp, Homo sapien
caaatatttccgtacttcaccccag

SEQ ID NO: 2699996 - DNA, 25 bp, Homo sapien
ttggcaatgcataagtgtaacacag

SEQ ID NO: 2699997 - DNA, 25 bp, Homo sapien
ccttcacagtgtggaaattgtgcta

SEQ ID NO: 2699998 - DNA, 25 bp, Homo sapien
tgtgctacatccaccaaaagagggc

SEQ ID NO: 2699999 - DNA, 25 bp, Homo sapien
tgtaacacagtgacaagagagcttt

SEQ ID NO: 2700000 - DNA, 25 bp, Homo sapien
tcacatcaagccatggggccaattc

SEQ ID NO: 2700001 - DNA, 25 bp, Homo sapien
tgtcttcacatcaagccatggggcc

SEQ ID NO: 2700002 - DNA, 25 bp, Homo sapien
tcttcacatcaagccatggggccaa

SEQ ID NO: 2700003 - DNA, 25 bp, Homo sapien
acatcaagccatggggccaattcta

SEQ ID NO: 2700004 - DNA, 25 bp, Homo sapien
ggactggcactcatctgctgactaa

SEQ ID NO: 2700005 - DNA, 25 bp, Homo sapien
tgttagactccatacaggcatagct

SEQ ID NO: 2700006 - DNA, 25 bp, Homo sapien
catagctatgatgcagtgaatccct

SEQ ID NO: 2700007 - DNA, 25 bp, Homo sapien
tattcacactgaacacgtatggcag

SEQ ID NO: 2700008 - DNA, 25 bp, Homo sapien
tctgctctccagattgggccatgac

SEQ ID NO: 2700009 - DNA, 25 bp, Homo sapien
gaaagacagagataggtttgagaca

SEQ ID NO: 2700010 - DNA, 25 bp, Homo sapien
tggcccttggcctattccacaggca

SEQ ID NO: 2700011 - DNA, 25 bp, Homo sapien
ctcagtgatttgtcccaggtgaaca

SEQ ID NO: 2700012 - DNA, 25 bp, Homo sapien
tccttgttccagatgtggcaaaatc

SEQ ID NO: 2700013 - DNA, 25 bp, Homo sapien
catgcaacagcctcacaggtgcttc

SEQ ID NO: 2700014 - DNA, 25 bp, Homo sapien
ggcagagaccaaacttcatacctca

SEQ ID NO: 2700015 - DNA, 25 bp, Homo sapien
gcttcctgctcaaacggctctcttg

SEQ ID NO: 2700016 - DNA, 25 bp, Homo sapien
tgctcttcgaccctgagagtgggca

SEQ ID NO: 2700017 - DNA, 25 bp, Homo sapien
cggctgcgggtgctcttcgaccctg

SEQ ID NO: 2700018 - DNA, 25 bp, Homo sapien
ggaggtgttgctgccgccctcgtct

SEQ ID NO: 2700019 - DNA, 25 bp, Homo sapien
acgggacctactacctgccggtgag

SEQ ID NO: 2700020 - DNA, 25 bp, Homo sapien
gggccgggctcatcgatagcattta

SEQ ID NO: 2700021 - DNA, 25 bp, Homo sapien
gggaggctccagatcgtcctattgg

SEQ ID NO: 2700022 - DNA, 25 bp, Homo sapien
gagattccacattcggcagtcgcgg

SEQ ID NO: 2700023 - DNA, 25 bp, Homo sapien
gccgtcgaggaaactgtcagcagga

SEQ ID NO: 2700024 - DNA, 25 bp, Homo sapien
tggaagtcatcttcggcgtcggacc

SEQ ID NO: 2700025 - DNA, 25 bp, Homo sapien
gcgaaaggcccagcgaattggccct

SEQ ID NO: 2700026 - DNA, 25 bp, Homo sapien
actacacggctccaggttctccgga

SEQ ID NO: 2700027 - DNA, 25 bp, Homo sapien
ggttcgtcaggctcctactacacgg

SEQ ID NO: 2700028 - DNA, 25 bp, Homo sapien
cctgtcctgggtcggtttgaggcca

SEQ ID NO: 2700029 - DNA, 25 bp, Homo sapien
gagtcatagcaggaccttgaagcca

SEQ ID NO: 2700030 - DNA, 25 bp, Homo sapien
tggagaaacaatctgggaagggacc

SEQ ID NO: 2700031 - DNA, 25 bp, Homo sapien
caatgacaggtggtggttgcctccc

SEQ ID NO: 2700032 - DNA, 25 bp, Homo sapien
taagaaagcctcagggacacgtcag

SEQ ID NO: 2700033 - DNA, 25 bp, Homo sapien
gccggctccgttgcaggaatcacat

SEQ ID NO: 2700034 - DNA, 25 bp, Homo sapien
tggccgccgctttcctgttctctgg

SEQ ID NO: 2700035 - DNA, 25 bp, Homo sapien
gcagcaagttatcagccagcagaaa

SEQ ID NO: 2700036 - DNA, 25 bp, Homo sapien
gacagcaagaactgaggacccaaac

SEQ ID NO: 2700037 - DNA, 25 bp, Homo sapien
tttgtgttaccccagatgatgggca

SEQ ID NO: 2700038 - DNA, 25 bp, Homo sapien
taattcaagttgagccatttgtgtt

SEQ ID NO: 2700039 - DNA, 25 bp, Homo sapien
gcagaaatgtgctgccccaccaagt

SEQ ID NO: 2700040 - DNA, 25 bp, Homo sapien
aaactctccacaggaatctttagta

SEQ ID NO: 2700041 - DNA, 25 bp, Homo sapien
aaaactctccacaggaatctttagt

SEQ ID NO: 2700042 - DNA, 25 bp, Homo sapien
ctgacatgggcaccgcaggagccat

SEQ ID NO: 2700043 - DNA, 25 bp, Homo sapien
tcctgttccgaggtaagaggtgcct

SEQ ID NO: 2700044 - DNA, 25 bp, Homo sapien
tgggcttcctcctgttccgaggtaa

SEQ ID NO: 2700045 - DNA, 25 bp, Homo sapien
taagaggtgcctgccgctttcccat

SEQ ID NO: 2700046 - DNA, 25 bp, Homo sapien
gctctgatgaactgttcacagctgg

SEQ ID NO: 2700047 - DNA, 25 bp, Homo sapien
tgatgaactgttcacagctggagaa

SEQ ID NO: 2700048 - DNA, 25 bp, Homo sapien
ctgctctgatgaactgttcacagct

SEQ ID NO: 2700049 - DNA, 25 bp, Homo sapien
ctgatgaactgttcacagctggaga

SEQ ID NO: 2700050 - DNA, 25 bp, Homo sapien
tggactgccactatgatgcagactg

SEQ ID NO: 2700051 - DNA, 25 bp, Homo sapien
ggcagcccgtcaactcgaggttgtt

SEQ ID NO: 2700052 - DNA, 25 bp, Homo sapien
cccgccagtggatgaggtagatgcc

SEQ ID NO: 2700053 - DNA, 25 bp, Homo sapien
acagcgacaatgacggtgaccacag

SEQ ID NO: 2700054 - DNA, 25 bp, Homo sapien
tctcatcagccggaaagatctggga

SEQ ID NO: 2700055 - DNA, 25 bp, Homo sapien
taagaccagtgagcctaagggaagg

SEQ ID NO: 2700056 - DNA, 25 bp, Homo sapien
aggcttgttccaacaggcccaggca

SEQ ID NO: 2700057 - DNA, 25 bp, Homo sapien
gcttgtcaacaaggtctgggcccta

SEQ ID NO: 2700058 - DNA, 25 bp, Homo sapien
gatgccaaacaacacgatgacatca

SEQ ID NO: 2700059 - DNA, 25 bp, Homo sapien
ataagtcaggttaaccacataatgc

SEQ ID NO: 2700060 - DNA, 25 bp, Homo sapien
tagggagcgccaactgctcaaaata

SEQ ID NO: 2700061 - DNA, 25 bp, Homo sapien
gaatctgcattcctcaagataggga

SEQ ID NO: 2700062 - DNA, 25 bp, Homo sapien
gggactgggattgtgccagcgatta

SEQ ID NO: 2700063 - DNA, 25 bp, Homo sapien
tagggactgggattgtgccagcgat

SEQ ID NO: 2700064 - DNA, 25 bp, Homo sapien
ggactgggattgtgccagcgattat

SEQ ID NO: 2700065 - DNA, 25 bp, Homo sapien
gactgggattgtgccagcgattata

SEQ ID NO: 2700066 - DNA, 25 bp, Homo sapien
atcacaatatcttgcagaaggtggt

SEQ ID NO: 2700067 - DNA, 25 bp, Homo sapien
agcccacaagctatcataaccccaa

SEQ ID NO: 2700068 - DNA, 25 bp, Homo sapien
ctatcataaccccaaaggcatacag

SEQ ID NO: 2700069 - DNA, 25 bp, Homo sapien
acaagctatcataaccccaaaggca

SEQ ID NO: 2700070 - DNA, 25 bp, Homo sapien
aagctatcataaccccaaaggcata

SEQ ID NO: 2700071 - DNA, 25 bp, Homo sapien
gagtgcctctctgagcgatccgagg

SEQ ID NO: 2700072 - DNA, 25 bp, Homo sapien
agtgcctctctgagcgatccgaggg

SEQ ID NO: 2700073 - DNA, 25 bp, Homo sapien
gtccgagtgcctctctgagcgatcc

SEQ ID NO: 2700074 - DNA, 25 bp, Homo sapien
tagccacacctcacaacttctaaga

SEQ ID NO: 2700075 - DNA, 25 bp, Homo sapien
atatagccacacctcacaacttcta

SEQ ID NO: 2700076 - DNA, 25 bp, Homo sapien
ttcatatagccacacctcacaactt

SEQ ID NO: 2700077 - DNA, 25 bp, Homo sapien
tgttcatatagccacacctcacaac

SEQ ID NO: 2700078 - DNA, 25 bp, Homo sapien
cttcaggcacgcagacttgattggc

SEQ ID NO: 2700079 - DNA, 25 bp, Homo sapien
tcaggcacgcagacttgattggcta

SEQ ID NO: 2700080 - DNA, 25 bp, Homo sapien
actggcccaataaccactagagcta

SEQ ID NO: 2700081 - DNA, 25 bp, Homo sapien
ggcccaataaccactagagctactg

SEQ ID NO: 2700082 - DNA, 25 bp, Homo sapien
ttcaaagagcgagatagttgaatct

SEQ ID NO: 2700083 - DNA, 25 bp, Homo sapien
gggttatagcttctcttgtccagga

SEQ ID NO: 2700084 - DNA, 25 bp, Homo sapien
cactggcaggttggctcccaagcag

SEQ ID NO: 2700085 - DNA, 25 bp, Homo sapien
tcagcttcaaagagcgagatagttg

SEQ ID NO: 2700086 - DNA, 25 bp, Homo sapien
caggttttcaatccccacagtttgg

SEQ ID NO: 2700087 - DNA, 25 bp, Homo sapien
ccaggttttcaatccccacagtttg

SEQ ID NO: 2700088 - DNA, 25 bp, Homo sapien
gtgctaggcccttccttgggacttc

SEQ ID NO: 2700089 - DNA, 25 bp, Homo sapien
cagtgctaggcccttccttgggact

SEQ ID NO: 2700090 - DNA, 25 bp, Homo sapien
caggaagtgctcatatgggcctttt

SEQ ID NO: 2700091 - DNA, 25 bp, Homo sapien
aagtgctcatatgggccttttaagc

SEQ ID NO: 2700092 - DNA, 25 bp, Homo sapien
ccaggaagtgctcatatgggccttt

SEQ ID NO: 2700093 - DNA, 25 bp, Homo sapien
ggaagtgctcatatgggccttttaa

SEQ ID NO: 2700094 - DNA, 25 bp, Homo sapien
cacatctgtagaggagtttgatata

SEQ ID NO: 2700095 - DNA, 25 bp, Homo sapien
actcttgtccaatccttcacatctg

SEQ ID NO: 2700096 - DNA, 25 bp, Homo sapien
tcaactttaagctacatacaggcaa

SEQ ID NO: 2700097 - DNA, 25 bp, Homo sapien
tgcagggaggtggtaatggtctcgg

SEQ ID NO: 2700098 - DNA, 25 bp, Homo sapien
gatattgtatccctagcgccctgga

SEQ ID NO: 2700099 - DNA, 25 bp, Homo sapien
ggctttaaaggccagaccattgtca

SEQ ID NO: 2700100 - DNA, 25 bp, Homo sapien
gagaaaaggtcgtccctacagcatt

SEQ ID NO: 2700101 - DNA, 25 bp, Homo sapien
cagacaagcaagtatcgaaatccct

SEQ ID NO: 2700102 - DNA, 25 bp, Homo sapien
gcaatgatcgctgtggctacttcct

SEQ ID NO: 2700103 - DNA, 25 bp, Homo sapien
gaattgggcaatgatcgctgtggct

SEQ ID NO: 2700104 - DNA, 25 bp, Homo sapien
ttgggcaatgatcgctgtggctact

SEQ ID NO: 2700105 - DNA, 25 bp, Homo sapien
gggcaatgatcgctgtggctacttc

SEQ ID NO: 2700106 - DNA, 25 bp, Homo sapien
catttggctagacggagcgcttatt

SEQ ID NO: 2700107 - DNA, 25 bp, Homo sapien
acaaacatttggctagacggagcgc

SEQ ID NO: 2700108 - DNA, 25 bp, Homo sapien
ctagacggagcgcttattggtgcgt

SEQ ID NO: 2700109 - DNA, 25 bp, Homo sapien
gacggagcgcttattggtgcgtttt

SEQ ID NO: 2700110 - DNA, 25 bp, Homo sapien
ttggccccgggccggatgaagtcac

SEQ ID NO: 2700111 - DNA, 25 bp, Homo sapien
ctggcgcgagtccatccgggcggcg

SEQ ID NO: 2700112 - DNA, 25 bp, Homo sapien
cggatgaagtcaccggccggaggca

SEQ ID NO: 2700113 - DNA, 25 bp, Homo sapien
gagagcagcgccctctagcggaggc

SEQ ID NO: 2700114 - DNA, 25 bp, Homo sapien
tgccgcccgagaggcgtgggagccg

SEQ ID NO: 2700115 - DNA, 25 bp, Homo sapien
agaggcgtgggagccgcacggagca

SEQ ID NO: 2700116 - DNA, 25 bp, Homo sapien
cgcccgagaggcgtgggagccgcac

SEQ ID NO: 2700117 - DNA, 25 bp, Homo sapien
cgagaggcgtgggagccgcacggag

SEQ ID NO: 2700118 - DNA, 25 bp, Homo sapien
cgatgagaagacaggacggacaacc

SEQ ID NO: 2700119 - DNA, 25 bp, Homo sapien
accagacgccatgcccgtctggttg

SEQ ID NO: 2700120 - DNA, 25 bp, Homo sapien
aagggctctgagacgatgagaagac

SEQ ID NO: 2700121 - DNA, 25 bp, Homo sapien
gcgctctcgagggtgaagcacaggt

SEQ ID NO: 2700122 - DNA, 25 bp, Homo sapien
tatagggatggccagagattctgct

SEQ ID NO: 2700123 - DNA, 25 bp, Homo sapien
ttgtgggaggctctaaatcggaccc

SEQ ID NO: 2700124 - DNA, 25 bp, Homo sapien
tctgaagatgtgtgtttaagaggca

SEQ ID NO: 2700125 - DNA, 25 bp, Homo sapien
tggtaactcattggaagccctcagc

SEQ ID NO: 2700126 - DNA, 25 bp, Homo sapien
tggcttcctttttgaagaggtcttc

SEQ ID NO: 2700127 - DNA, 25 bp, Homo sapien
cccctgtgagtgatagtctcatgca

SEQ ID NO: 2700128 - DNA, 25 bp, Homo sapien
tgagtgatagtctcatgcattttgg

SEQ ID NO: 2700129 - DNA, 25 bp, Homo sapien
cctgtgagtgatagtctcatgcatt

SEQ ID NO: 2700130 - DNA, 25 bp, Homo sapien
tcttgttcagagacttgcatgcctg

SEQ ID NO: 2700131 - DNA, 25 bp, Homo sapien
caagaatgaatttcaaagcttgtgc

SEQ ID NO: 2700132 - DNA, 25 bp, Homo sapien
taagcatgagaattagaaggtcaag

SEQ ID NO: 2700133 - DNA, 25 bp, Homo sapien
gactcctggtaatcctaagcatgag

SEQ ID NO: 2700134 - DNA, 25 bp, Homo sapien
gacgagccatagataaaacctctca

SEQ ID NO: 2700135 - DNA, 25 bp, Homo sapien
agcaggacgagccatagataaaacc

SEQ ID NO: 2700136 - DNA, 25 bp, Homo sapien
aggacgagccatagataaaacctct

SEQ ID NO: 2700137 - DNA, 25 bp, Homo sapien
gagccatagataaaacctctcagac

SEQ ID NO: 2700138 - DNA, 25 bp, Homo sapien
tgccaatgcaggcacaccgtgggtg

SEQ ID NO: 2700139 - DNA, 25 bp, Homo sapien
aaagtgccaatgcaggcacaccgtg

SEQ ID NO: 2700140 - DNA, 25 bp, Homo sapien
tcttaccaagtcaagccaagtcaaa

SEQ ID NO: 2700141 - DNA, 25 bp, Homo sapien
ctagtcttaccaagtcaagccaagt

SEQ ID NO: 2700142 - DNA, 25 bp, Homo sapien
agaatttatcatataactcttttta

SEQ ID NO: 2700143 - DNA, 25 bp, Homo sapien
atactaagtttcctctctgccgtga

SEQ ID NO: 2700144 - DNA, 25 bp, Homo sapien
aaggaatactaagtttcctctctgc

SEQ ID NO: 2700145 - DNA, 25 bp, Homo sapien
ggaatactaagtttcctctctgccg

SEQ ID NO: 2700146 - DNA, 25 bp, Homo sapien
aatactaagtttcctctctgccgtg

SEQ ID NO: 2700147 - DNA, 25 bp, Homo sapien
ctggccttggtcagggccctacatt

SEQ ID NO: 2700148 - DNA, 25 bp, Homo sapien
tcagggccctacattctgggttaaa

SEQ ID NO: 2700149 - DNA, 25 bp, Homo sapien
cattagctaatggtttcctttgtta

SEQ ID NO: 2700150 - DNA, 25 bp, Homo sapien
ccttgctgccaggacccttggacat

SEQ ID NO: 2700151 - DNA, 25 bp, Homo sapien
tacactaagatccagcccttttcca

SEQ ID NO: 2700152 - DNA, 25 bp, Homo sapien
aggatgcttacactaagatccagcc

SEQ ID NO: 2700153 - DNA, 25 bp, Homo sapien
gcctggattacctactttatactga

SEQ ID NO: 2700154 - DNA, 25 bp, Homo sapien
tctttttaagtagctcaaatgacac

SEQ ID NO: 2700155 - DNA, 25 bp, Homo sapien
atgcaatctcagcttgtagcaggac

SEQ ID NO: 2700156 - DNA, 25 bp, Homo sapien
tgcaatctcagcttgtagcaggaca

SEQ ID NO: 2700157 - DNA, 25 bp, Homo sapien
gcaatctcagcttgtagcaggacaa

SEQ ID NO: 2700158 - DNA, 25 bp, Homo sapien
gatgcaatctcagcttgtagcagga

SEQ ID NO: 2700159 - DNA, 25 bp, Homo sapien
tcaatttcattcattttaggtgtac

SEQ ID NO: 2700160 - DNA, 25 bp, Homo sapien
ttttttcaacacagaggttgtagtg

SEQ ID NO: 2700161 - DNA, 25 bp, Homo sapien
gtataatttacatgccatcaatttc

SEQ ID NO: 2700162 - DNA, 25 bp, Homo sapien
tttttagtagacaggaacttgccat

SEQ ID NO: 2700163 - DNA, 25 bp, Homo sapien
ccagaagtgaagatgccaggtcaaa

SEQ ID NO: 2700164 - DNA, 25 bp, Homo sapien
tggcctgtaataaatttccagaagt

SEQ ID NO: 2700165 - DNA, 25 bp, Homo sapien
ccaggtcaaagaatgtgcaggttaa

SEQ ID NO: 2700166 - DNA, 25 bp, Homo sapien
ggtcaaagaatgtgcaggttaaaaa

SEQ ID NO: 2700167 - DNA, 25 bp, Homo sapien
ggagcgccgtggcatgagatcttgg

SEQ ID NO: 2700168 - DNA, 25 bp, Homo sapien
gcgccgtggcatgagatcttggttc

SEQ ID NO: 2700169 - DNA, 25 bp, Homo sapien
gctggagcgccgtggcatgagatct

SEQ ID NO: 2700170 - DNA, 25 bp, Homo sapien
ctggagcgccgtggcatgagatctt

SEQ ID NO: 2700171 - DNA, 25 bp, Homo sapien
atataaaaggtaagcaagtgggccg

SEQ ID NO: 2700172 - DNA, 25 bp, Homo sapien
tatttatagattcactggaactagc

SEQ ID NO: 2700173 - DNA, 25 bp, Homo sapien
gattcactggaactagcaaaaatag

SEQ ID NO: 2700174 - DNA, 25 bp, Homo sapien
taattatagtatagcccggcgtggt

SEQ ID NO: 2700175 - DNA, 25 bp, Homo sapien
cacatagaaggttatgtcgatgtac

SEQ ID NO: 2700176 - DNA, 25 bp, Homo sapien
actccattgacattcctgctgcctt

SEQ ID NO: 2700177 - DNA, 25 bp, Homo sapien
gacattcctgctgccttcaatggct

SEQ ID NO: 2700178 - DNA, 25 bp, Homo sapien
tcactccattgacattcctgctgcc

SEQ ID NO: 2700179 - DNA, 25 bp, Homo sapien
cattcctgctgccttcaatggctct

SEQ ID NO: 2700180 - DNA, 25 bp, Homo sapien
tacagtctacactcagtgcaaaggg

SEQ ID NO: 2700181 - DNA, 25 bp, Homo sapien
gctttttcccataccaaggtcagtg

SEQ ID NO: 2700182 - DNA, 25 bp, Homo sapien
tagactgtcagtttctggagggcag

SEQ ID NO: 2700183 - DNA, 25 bp, Homo sapien
aaccagtcaccccagattaggcaca

SEQ ID NO: 2700184 - DNA, 25 bp, Homo sapien
catgtggatcatacaggccctggtt

SEQ ID NO: 2700185 - DNA, 25 bp, Homo sapien
tccggatctcagcaaccctataggg

SEQ ID NO: 2700186 - DNA, 25 bp, Homo sapien
tggttgttaacctagtgctgcaaac

SEQ ID NO: 2700187 - DNA, 25 bp, Homo sapien
gaatagagagtacagcccaagcagt

SEQ ID NO: 2700188 - DNA, 25 bp, Homo sapien
gcctctcttggtcggacagccggag

SEQ ID NO: 2700189 - DNA, 25 bp, Homo sapien
cagccggagggattgcctgtcttcc

SEQ ID NO: 2700190 - DNA, 25 bp, Homo sapien
agatccctccgccagaaagcaaaag

SEQ ID NO: 2700191 - DNA, 25 bp, Homo sapien
ctgtgagtaagctacgcaccgccgt

SEQ ID NO: 2700192 - DNA, 25 bp, Homo sapien
agcgggtccggcgggacgggctgag

SEQ ID NO: 2700193 - DNA, 25 bp, Homo sapien
gatctcggtcggcaggagaagatgg

SEQ ID NO: 2700194 - DNA, 25 bp, Homo sapien
gcctgaggccgcctcggcgatctcg

SEQ ID NO: 2700195 - DNA, 25 bp, Homo sapien
agagttgaggaaagcgggtccggcg

SEQ ID NO: 2700196 - DNA, 25 bp, Homo sapien
acttccaactcttaacagtttctgg

SEQ ID NO: 2700197 - DNA, 25 bp, Homo sapien
gaactcaggatatacttgtggatcg

SEQ ID NO: 2700198 - DNA, 25 bp, Homo sapien
gatcgggcaaaacggcttcctctgt

SEQ ID NO: 2700199 - DNA, 25 bp, Homo sapien
tttctggacaagcagggtggaccga

SEQ ID NO: 2700200 - DNA, 25 bp, Homo sapien
caccggaggtcaggaactagaaatc

SEQ ID NO: 2700201 - DNA, 25 bp, Homo sapien
gccaggccagatgacgtggctcaca

SEQ ID NO: 2700202 - DNA, 25 bp, Homo sapien
taagaaactatattaccagagcaag

SEQ ID NO: 2700203 - DNA, 25 bp, Homo sapien
aaacgtatgttttgtgtcaaagaga

SEQ ID NO: 2700204 - DNA, 25 bp, Homo sapien
tcctggcattactttgtttgaaagc

SEQ ID NO: 2700205 - DNA, 25 bp, Homo sapien
tgaaagctatgtatgccaaacgtta

SEQ ID NO: 2700206 - DNA, 25 bp, Homo sapien
tgcaactagtaggacaccattaaaa

SEQ ID NO: 2700207 - DNA, 25 bp, Homo sapien
tagatcaagtgataatcctggcatt

SEQ ID NO: 2700208 - DNA, 25 bp, Homo sapien
caatagcaacatttgcagggagctg

SEQ ID NO: 2700209 - DNA, 25 bp, Homo sapien
tgcctggcttttatagacatcagag

SEQ ID NO: 2700210 - DNA, 25 bp, Homo sapien
tctgctcactttggtacctgcctgg

SEQ ID NO: 2700211 - DNA, 25 bp, Homo sapien
tggaagatattgcaacactgggccc

SEQ ID NO: 2700212 - DNA, 25 bp, Homo sapien
ccacagcgcccagcccggcctacag

SEQ ID NO: 2700213 - DNA, 25 bp, Homo sapien
acagcgcccagcccggcctacagta

SEQ ID NO: 2700214 - DNA, 25 bp, Homo sapien
cgcccagcccggcctacagtatttt

SEQ ID NO: 2700215 - DNA, 25 bp, Homo sapien
agcgcccagcccggcctacagtatt

SEQ ID NO: 2700216 - DNA, 25 bp, Homo sapien
tccactcacctcggcatcccaaaat

SEQ ID NO: 2700217 - DNA, 25 bp, Homo sapien
tcaccatcttgactaggctggtatt

SEQ ID NO: 2700218 - DNA, 25 bp, Homo sapien
accatcttgactaggctggtattga

SEQ ID NO: 2700219 - DNA, 25 bp, Homo sapien
cactcacctcggcatcccaaaatgc

SEQ ID NO: 2700220 - DNA, 25 bp, Homo sapien
taaagatgaggaaggaagtagctct

SEQ ID NO: 2700221 - DNA, 25 bp, Homo sapien
gctcttatggaagagggaagtttaa

SEQ ID NO: 2700222 - DNA, 25 bp, Homo sapien
gtagctcttatggaagagggaagtt

SEQ ID NO: 2700223 - DNA, 25 bp, Homo sapien
ggaaggaagtagctcttatggaaga

SEQ ID NO: 2700224 - DNA, 25 bp, Homo sapien
tactattcttaaaactgatagcaaa

SEQ ID NO: 2700225 - DNA, 25 bp, Homo sapien
gatgaggatgacttttattatgtaa

SEQ ID NO: 2700226 - DNA, 25 bp, Homo sapien
gatgtttcatcttgatagtactttt

SEQ ID NO: 2700227 - DNA, 25 bp, Homo sapien
caatatacagtaagacatttaaagg

SEQ ID NO: 2700228 - DNA, 25 bp, Homo sapien
gcactgaacaaagaccggagaacat

SEQ ID NO: 2700229 - DNA, 25 bp, Homo sapien
gaagccatttctgctgggtccccaa

SEQ ID NO: 2700230 - DNA, 25 bp, Homo sapien
gattctctgtataagcaaaggcact

SEQ ID NO: 2700231 - DNA, 25 bp, Homo sapien
tctaggaaggaccaactacaagcgt

SEQ ID NO: 2700232 - DNA, 25 bp, Homo sapien
gagattataccaattccgtaggtca

SEQ ID NO: 2700233 - DNA, 25 bp, Homo sapien
cacaggcttgcagggtacaattccc

SEQ ID NO: 2700234 - DNA, 25 bp, Homo sapien
tattggtgggtaatgctccatccag

SEQ ID NO: 2700235 - DNA, 25 bp, Homo sapien
ttagtcaaagcagagcaagtacggg

SEQ ID NO: 2700236 - DNA, 25 bp, Homo sapien
aacctttcatggatactgaggcagg

SEQ ID NO: 2700237 - DNA, 25 bp, Homo sapien
tgtctatgagttccaccaattgtgg

SEQ ID NO: 2700238 - DNA, 25 bp, Homo sapien
tagtgagacaacatcgtgctactgc

SEQ ID NO: 2700239 - DNA, 25 bp, Homo sapien
gatctagtcggaacatgtgggcaga

SEQ ID NO: 2700240 - DNA, 25 bp, Homo sapien
gagattggacaactatatttgtcaa

SEQ ID NO: 2700241 - DNA, 25 bp, Homo sapien
agagattggacaactatatttgtca

SEQ ID NO: 2700242 - DNA, 25 bp, Homo sapien
ctggagggtcccgtgccagatcatt

SEQ ID NO: 2700243 - DNA, 25 bp, Homo sapien
tggagggtcccgtgccagatcattc

SEQ ID NO: 2700244 - DNA, 25 bp, Homo sapien
gagtgagcccctgcctttaaagaag

SEQ ID NO: 2700245 - DNA, 25 bp, Homo sapien
ctgcctttaaagaagaccagaggag

SEQ ID NO: 2700246 - DNA, 25 bp, Homo sapien
gagcccctgcctttaaagaagacca

SEQ ID NO: 2700247 - DNA, 25 bp, Homo sapien
cctgcctttaaagaagaccagagga

SEQ ID NO: 2700248 - DNA, 25 bp, Homo sapien
aataagttcccagcactatgttggt

SEQ ID NO: 2700249 - DNA, 25 bp, Homo sapien
agagaaatagctcaagaattactag

SEQ ID NO: 2700250 - DNA, 25 bp, Homo sapien
catcttaggattgatcaaaattgac

SEQ ID NO: 2700251 - DNA, 25 bp, Homo sapien
tagttactgaatgaaatactggacc

SEQ ID NO: 2700252 - DNA, 25 bp, Homo sapien
cccattattgtagcttgccaatgga

SEQ ID NO: 2700253 - DNA, 25 bp, Homo sapien
gccccattattgtagcttgccaatg

SEQ ID NO: 2700254 - DNA, 25 bp, Homo sapien
ccccattattgtagcttgccaatgg

SEQ ID NO: 2700255 - DNA, 25 bp, Homo sapien
ccattattgtagcttgccaatggaa

SEQ ID NO: 2700256 - DNA, 25 bp, Homo sapien
taaattacataaactgtttattctg

SEQ ID NO: 2700257 - DNA, 25 bp, Homo sapien
ttattctgaaattaatctgaatact

SEQ ID NO: 2700258 - DNA, 25 bp, Homo sapien
ttacataaactgtttattctgaaat

SEQ ID NO: 2700259 - DNA, 25 bp, Homo sapien
ttctgaaattaatctgaatacttac

SEQ ID NO: 2700260 - DNA, 25 bp, Homo sapien
aatactccaccctgatagggactgt

SEQ ID NO: 2700261 - DNA, 25 bp, Homo sapien
tactccaccctgatagggactgtca

SEQ ID NO: 2700262 - DNA, 25 bp, Homo sapien
actccaccctgatagggactgtcat

SEQ ID NO: 2700263 - DNA, 25 bp, Homo sapien
aaatactccaccctgatagggactg

SEQ ID NO: 2700264 - DNA, 25 bp, Homo sapien
aaactgccacattccaattaattac

SEQ ID NO: 2700265 - DNA, 25 bp, Homo sapien
taaaaactgccacattccaattaat

SEQ ID NO: 2700266 - DNA, 25 bp, Homo sapien
aaaactgccacattccaattaatta

SEQ ID NO: 2700267 - DNA, 25 bp, Homo sapien
attaaaaactgccacattccaatta

SEQ ID NO: 2700268 - DNA, 25 bp, Homo sapien
tggagaccactgtgatcgtagaata

SEQ ID NO: 2700269 - DNA, 25 bp, Homo sapien
gcagggaaaggattcgctcatattc

SEQ ID NO: 2700270 - DNA, 25 bp, Homo sapien
ctaataggtgttctgtaccaagaga

SEQ ID NO: 2700271 - DNA, 25 bp, Homo sapien
tctatcctatagagatcaagggctt

SEQ ID NO: 2700272 - DNA, 25 bp, Homo sapien
tactaatgctaatagagctcagcca

SEQ ID NO: 2700273 - DNA, 25 bp, Homo sapien
gattgggatcacacaacagagaaca

SEQ ID NO: 2700274 - DNA, 25 bp, Homo sapien
tggattgggatcacacaacagagaa

SEQ ID NO: 2700275 - DNA, 25 bp, Homo sapien
ctggattgggatcacacaacagaga

SEQ ID NO: 2700276 - DNA, 25 bp, Homo sapien
ggattgggatcacacaacagagaac

SEQ ID NO: 2700277 - DNA, 25 bp, Homo sapien
tctctatctgttttgtagatccgag

SEQ ID NO: 2700278 - DNA, 25 bp, Homo sapien
gtagatccgagcaatctcaggcact

SEQ ID NO: 2700279 - DNA, 25 bp, Homo sapien
gcaatctcaggcactaaaggatcat

SEQ ID NO: 2700280 - DNA, 25 bp, Homo sapien
tgttttgtagatccgagcaatctca

SEQ ID NO: 2700281 - DNA, 25 bp, Homo sapien
attgcaatactgtaccatagcctgg

SEQ ID NO: 2700282 - DNA, 25 bp, Homo sapien
tctggtagaactaatttcaacaatt

SEQ ID NO: 2700283 - DNA, 25 bp, Homo sapien
taaagtaagcagagcaaatgattct

SEQ ID NO: 2700284 - DNA, 25 bp, Homo sapien
actaatttcaacaatttggttgaca

SEQ ID NO: 2700285 - DNA, 25 bp, Homo sapien
gagtagcttataggacattcaagga

SEQ ID NO: 2700286 - DNA, 25 bp, Homo sapien
taattgctacttatagagggttctg

SEQ ID NO: 2700287 - DNA, 25 bp, Homo sapien
gaagcttggcttaacataggtgtgg

SEQ ID NO: 2700288 - DNA, 25 bp, Homo sapien
tcaagtaacttgaagagagtagctt

SEQ ID NO: 2700289 - DNA, 25 bp, Homo sapien
ccattcccgagctattctgttgtac

SEQ ID NO: 2700290 - DNA, 25 bp, Homo sapien
gagtccattcccgagctattctgtt

SEQ ID NO: 2700291 - DNA, 25 bp, Homo sapien
ttacatcgcatacttctgagtccat

SEQ ID NO: 2700292 - DNA, 25 bp, Homo sapien
acttctgagtccattcccgagctat

SEQ ID NO: 2700293 - DNA, 25 bp, Homo sapien
cagagttcccctatctttatttgta

SEQ ID NO: 2700294 - DNA, 25 bp, Homo sapien
cacctaagacgtagctccttcggaa

SEQ ID NO: 2700295 - DNA, 25 bp, Homo sapien
tagtctcacacctaggtaatgcctg

SEQ ID NO: 2700296 - DNA, 25 bp, Homo sapien
cacacttctctgctaggaggcaatg

SEQ ID NO: 2700297 - DNA, 25 bp, Homo sapien
gcagcactgctgtatcaggtaaaca

SEQ ID NO: 2700298 - DNA, 25 bp, Homo sapien
tattacacagattaatcattcttga

SEQ ID NO: 2700299 - DNA, 25 bp, Homo sapien
tcttgaaagtacaagctccagagga

SEQ ID NO: 2700300 - DNA, 25 bp, Homo sapien
cttgaaagtacaagctccagaggag

SEQ ID NO: 2700301 - DNA, 25 bp, Homo sapien
gtagtaaccagtttattacacagat

SEQ ID NO: 2700302 - DNA, 25 bp, Homo sapien
tcccaggtttggtcaatgttgctct

SEQ ID NO: 2700303 - DNA, 25 bp, Homo sapien
catcagccatggctttcaggttggc

SEQ ID NO: 2700304 - DNA, 25 bp, Homo sapien
tgtcctatgtaccaagggaatgtca

SEQ ID NO: 2700305 - DNA, 25 bp, Homo sapien
tgtagactctccaaacaagactgtg

SEQ ID NO: 2700306 - DNA, 25 bp, Homo sapien
gctctagcacttgcgggtagccaca

SEQ ID NO: 2700307 - DNA, 25 bp, Homo sapien
ttgagcaggaacagtgtgcccggca

SEQ ID NO: 2700308 - DNA, 25 bp, Homo sapien
gaccttgggccgagcttctatgaac

SEQ ID NO: 2700309 - DNA, 25 bp, Homo sapien
gatggttttcagagggtgacccact

SEQ ID NO: 2700310 - DNA, 25 bp, Homo sapien
gctgtccagggcctggtcccagttg

SEQ ID NO: 2700311 - DNA, 25 bp, Homo sapien
tgtccagggcctggtcccagttggt

SEQ ID NO: 2700312 - DNA, 25 bp, Homo sapien
atgctgtccagggcctggtcccagt

SEQ ID NO: 2700313 - DNA, 25 bp, Homo sapien
ccatctccatgctgtccagggcctg

SEQ ID NO: 2700314 - DNA, 25 bp, Homo sapien
ccggggaaatctgctatctttctgc

SEQ ID NO: 2700315 - DNA, 25 bp, Homo sapien
gggaaatctgctatctttctgcccc

SEQ ID NO: 2700316 - DNA, 25 bp, Homo sapien
ctccggggaaatctgctatctttct

SEQ ID NO: 2700317 - DNA, 25 bp, Homo sapien
cggggaaatctgctatctttctgcc

SEQ ID NO: 2700318 - DNA, 25 bp, Homo sapien
gcttcaggggataaggctctgccgc

SEQ ID NO: 2700319 - DNA, 25 bp, Homo sapien
tcggctcgggcgtctgctcttgccg

SEQ ID NO: 2700320 - DNA, 25 bp, Homo sapien
aaagcaactaatcacccccgagctg

SEQ ID NO: 2700321 - DNA, 25 bp, Homo sapien
gcaggagctatgaacgctgcccggg

SEQ ID NO: 2700322 - DNA, 25 bp, Homo sapien
tgaacttcgggggaacccgcgcagc

SEQ ID NO: 2700323 - DNA, 25 bp, Homo sapien
actttccgccgacttgcagcgaact

SEQ ID NO: 2700324 - DNA, 25 bp, Homo sapien
agccaaactttccgccgacttgcag

SEQ ID NO: 2700325 - DNA, 25 bp, Homo sapien
gcgcagccaaactttccgccgactt

SEQ ID NO: 2700326 - DNA, 25 bp, Homo sapien
agacccagctactgcgaggatgagg

SEQ ID NO: 2700327 - DNA, 25 bp, Homo sapien
ccaaggctgactaggggcgtccctg

SEQ ID NO: 2700328 - DNA, 25 bp, Homo sapien
ctgggagagacccagctactgcgag

SEQ ID NO: 2700329 - DNA, 25 bp, Homo sapien
ggagagacccagctactgcgaggat

SEQ ID NO: 2700330 - DNA, 25 bp, Homo sapien
tgaaacagcatctgccacccccgca

SEQ ID NO: 2700331 - DNA, 25 bp, Homo sapien
ctcgaccgatgaaacagcatctgcc

SEQ ID NO: 2700332 - DNA, 25 bp, Homo sapien
gaccgatgaaacagcatctgccacc

SEQ ID NO: 2700333 - DNA, 25 bp, Homo sapien
atgaaacagcatctgccacccccgc

SEQ ID NO: 2700334 - DNA, 25 bp, Homo sapien
cggaagctgcacgtctccagtgggt

SEQ ID NO: 2700335 - DNA, 25 bp, Homo sapien
tccagtgggtcagcactgacgtcag

SEQ ID NO: 2700336 - DNA, 25 bp, Homo sapien
actgacgtcagcaagactggccggg

SEQ ID NO: 2700337 - DNA, 25 bp, Homo sapien
ttcccaagcaaaattccataattac

SEQ ID NO: 2700338 - DNA, 25 bp, Homo sapien
cctctccgtggttgggggcaagctg

SEQ ID NO: 2700339 - DNA, 25 bp, Homo sapien
cgtggttgggggcaagctgtcacag

SEQ ID NO: 2700340 - DNA, 25 bp, Homo sapien
ttgggggcaagctgtcacagacccc

SEQ ID NO: 2700341 - DNA, 25 bp, Homo sapien
tccgtggttgggggcaagctgtcac

SEQ ID NO: 2700342 - DNA, 25 bp, Homo sapien
tccaaatcggccctgatacctggct

SEQ ID NO: 2700343 - DNA, 25 bp, Homo sapien
atgaacatctggtcctcaagcttgt

SEQ ID NO: 2700344 - DNA, 25 bp, Homo sapien
tctggtcctcaagcttgttccaaat

SEQ ID NO: 2700345 - DNA, 25 bp, Homo sapien
tgttccaaatcggccctgatacctg

SEQ ID NO: 2700346 - DNA, 25 bp, Homo sapien
gagctcaggagttttgagaccaccc

SEQ ID NO: 2700347 - DNA, 25 bp, Homo sapien
ggagttttgagaccaccctggacaa

SEQ ID NO: 2700348 - DNA, 25 bp, Homo sapien
tggacaacatggtgaaactctatct

SEQ ID NO: 2700349 - DNA, 25 bp, Homo sapien
gggaagcagaggcaggcagatcgct

SEQ ID NO: 2700350 - DNA, 25 bp, Homo sapien
atgcctggtgggcctcgctgctcag

SEQ ID NO: 2700351 - DNA, 25 bp, Homo sapien
gctgcccacaacagagatgcctggt

SEQ ID NO: 2700352 - DNA, 25 bp, Homo sapien
cagagggagcctgccaactgccgag

SEQ ID NO: 2700353 - DNA, 25 bp, Homo sapien
aactgccgagggtccacagaccagg

SEQ ID NO: 2700354 - DNA, 25 bp, Homo sapien
tgctactgccgccggcatcctggga

SEQ ID NO: 2700355 - DNA, 25 bp, Homo sapien
gctactgccgccggcatcctgggag

SEQ ID NO: 2700356 - DNA, 25 bp, Homo sapien
ctgctactgccgccggcatcctggg

SEQ ID NO: 2700357 - DNA, 25 bp, Homo sapien
ctactgccgccggcatcctgggagc

SEQ ID NO: 2700358 - DNA, 25 bp, Homo sapien
tggtgcggcggcagccaccactgca

SEQ ID NO: 2700359 - DNA, 25 bp, Homo sapien
actgcactcttgtctgctgctcctg

SEQ ID NO: 2700360 - DNA, 25 bp, Homo sapien
accactgcactcttgtctgctgctc

SEQ ID NO: 2700361 - DNA, 25 bp, Homo sapien
ctggtgcggcggcagccaccactgc

SEQ ID NO: 2700362 - DNA, 25 bp, Homo sapien
gggctcactgatgataccgctcttg

SEQ ID NO: 2700363 - DNA, 25 bp, Homo sapien
gcgggagcggcgcaggctcttgttg

SEQ ID NO: 2700364 - DNA, 25 bp, Homo sapien
gcaggctcttgttgaggggctcact

SEQ ID NO: 2700365 - DNA, 25 bp, Homo sapien
taccgctcttgttccgacgctcggg

SEQ ID NO: 2700366 - DNA, 25 bp, Homo sapien
tgtggactgcgcaaactgctgcagc

SEQ ID NO: 2700367 - DNA, 25 bp, Homo sapien
gggttgcttttgtccaccgccatgg

SEQ ID NO: 2700368 - DNA, 25 bp, Homo sapien
tcttcttgccggagctgatggcaga

SEQ ID NO: 2700369 - DNA, 25 bp, Homo sapien
tcatcagcgggagatgctcctgcac

SEQ ID NO: 2700370 - DNA, 25 bp, Homo sapien
tccagagcagcggaaggcttctttt

SEQ ID NO: 2700371 - DNA, 25 bp, Homo sapien
ctttttgagttcctcacattttctg

SEQ ID NO: 2700372 - DNA, 25 bp, Homo sapien
ccagagcagcggaaggcttcttttt

SEQ ID NO: 2700373 - DNA, 25 bp, Homo sapien
ttttgagttcctcacattttctgaa

SEQ ID NO: 2700374 - DNA, 25 bp, Homo sapien
gcagagatagcagcatgggaacccc

SEQ ID NO: 2700375 - DNA, 25 bp, Homo sapien
tctacactggactaaagtgggtgcc

SEQ ID NO: 2700376 - DNA, 25 bp, Homo sapien
gtaggcctggagcaaagacgttccc

SEQ ID NO: 2700377 - DNA, 25 bp, Homo sapien
gagctatttctcaagcggccgtgtc

SEQ ID NO: 2700378 - DNA, 25 bp, Homo sapien
aggcggctcccgtcggaagcatcac

SEQ ID NO: 2700379 - DNA, 25 bp, Homo sapien
cggaaggcggctcccgtcggaagca

SEQ ID NO: 2700380 - DNA, 25 bp, Homo sapien
gaaggcggctcccgtcggaagcatc

SEQ ID NO: 2700381 - DNA, 25 bp, Homo sapien
tcactgaaaccaccggaaggcggct

SEQ ID NO: 2700382 - DNA, 25 bp, Homo sapien
tggagaccacacgagcagtgacatt

SEQ ID NO: 2700383 - DNA, 25 bp, Homo sapien
ttggttctaaagacgggtgcatccg

SEQ ID NO: 2700384 - DNA, 25 bp, Homo sapien
ctttttatgctagggacgtggagat

SEQ ID NO: 2700385 - DNA, 25 bp, Homo sapien
ggtgcatccgtttgtcttcgcccga

SEQ ID NO: 2700386 - DNA, 25 bp, Homo sapien
tcctgcacagacaacatcgacatcg

SEQ ID NO: 2700387 - DNA, 25 bp, Homo sapien
ctatttcatggtcggaaagaatcaa

SEQ ID NO: 2700388 - DNA, 25 bp, Homo sapien
tacattctctacacaaaaactgcat

SEQ ID NO: 2700389 - DNA, 25 bp, Homo sapien
caggaagtctcggtactttatagat

SEQ ID NO: 2700390 - DNA, 25 bp, Homo sapien
gatacagagcggcttctacacggcg

SEQ ID NO: 2700391 - DNA, 25 bp, Homo sapien
tatgaacgtgagtggattctccagg

SEQ ID NO: 2700392 - DNA, 25 bp, Homo sapien
tacacggcgccatcaacattctctt

SEQ ID NO: 2700393 - DNA, 25 bp, Homo sapien
gctctgcacgcgtggatggatacag

SEQ ID NO: 2700394 - DNA, 25 bp, Homo sapien
tgaaagggaatttttcccaggcaga

SEQ ID NO: 2700395 - DNA, 25 bp, Homo sapien
cagctgggtgagaagaacgctcccc

SEQ ID NO: 2700396 - DNA, 25 bp, Homo sapien
gagctgaagttgaaagctgcctccc

SEQ ID NO: 2700397 - DNA, 25 bp, Homo sapien
gcagagccgcctggagagatcacag

SEQ ID NO: 2700398 - DNA, 25 bp, Homo sapien
agctggaacaggtgaggagctctga

SEQ ID NO: 2700399 - DNA, 25 bp, Homo sapien
tgagtttcggccgtgtgctggggag

SEQ ID NO: 2700400 - DNA, 25 bp, Homo sapien
gctggaacaggtgaggagctctgag

SEQ ID NO: 2700401 - DNA, 25 bp, Homo sapien
ggagctctgagtttcggccgtgtgc

SEQ ID NO: 2700402 - DNA, 25 bp, Homo sapien
tgggtcaccaggaagtcagtttccc

SEQ ID NO: 2700403 - DNA, 25 bp, Homo sapien
ctggaggaaaggctcctgggtcacc

SEQ ID NO: 2700404 - DNA, 25 bp, Homo sapien
agtttcccaactgtagcagaggaga

SEQ ID NO: 2700405 - DNA, 25 bp, Homo sapien
aggaagtcagtttcccaactgtagc

SEQ ID NO: 2700406 - DNA, 25 bp, Homo sapien
ccatgtgttgggtgccagcgctgcc

SEQ ID NO: 2700407 - DNA, 25 bp, Homo sapien
cccttccatgtgttgggtgccagcg

SEQ ID NO: 2700408 - DNA, 25 bp, Homo sapien
tcaccaagaatgaccagtgttgtga

SEQ ID NO: 2700409 - DNA, 25 bp, Homo sapien
caagaatgaccagtgttgtgatggg

SEQ ID NO: 2700410 - DNA, 25 bp, Homo sapien
cctgaggcttccgtcgccttatcaa

SEQ ID NO: 2700411 - DNA, 25 bp, Homo sapien
cttatcaacggcagcggccactgct

SEQ ID NO: 2700412 - DNA, 25 bp, Homo sapien
cagccgtgtttccatggcttcactg

SEQ ID NO: 2700413 - DNA, 25 bp, Homo sapien
ttcactgcgtcctcgctcctgaggc

SEQ ID NO: 2700414 - DNA, 25 bp, Homo sapien
gcagcgggcatcagcttcgttttta

SEQ ID NO: 2700415 - DNA, 25 bp, Homo sapien
taccagagcatcctctaggtctgcc

SEQ ID NO: 2700416 - DNA, 25 bp, Homo sapien
ttttccccaacaacgtgatgcagtt

SEQ ID NO: 2700417 - DNA, 25 bp, Homo sapien
taataagaggtaatagcaccaagca

SEQ ID NO: 2700418 - DNA, 25 bp, Homo sapien
tgctccgccgcttgtccctatccgg

SEQ ID NO: 2700419 - DNA, 25 bp, Homo sapien
agaaggcgtaggatcggaggcggcc

SEQ ID NO: 2700420 - DNA, 25 bp, Homo sapien
agccaggcccagaggtcgggaagga

SEQ ID NO: 2700421 - DNA, 25 bp, Homo sapien
tccgacagccgcagcgcgagggaaa

SEQ ID NO: 2700422 - DNA, 25 bp, Homo sapien
catttaactctcattagcgcctctg

SEQ ID NO: 2700423 - DNA, 25 bp, Homo sapien
agcaaggtcagaactcatgccccac

SEQ ID NO: 2700424 - DNA, 25 bp, Homo sapien
gaggtgactcacgtcctacatttaa

SEQ ID NO: 2700425 - DNA, 25 bp, Homo sapien
taggaaaaagcctgagcgtctggac

SEQ ID NO: 2700426 - DNA, 25 bp, Homo sapien
cccaggtgttggtccatcccctaag

SEQ ID NO: 2700427 - DNA, 25 bp, Homo sapien
ccactgggcctatcccgggatttag

SEQ ID NO: 2700428 - DNA, 25 bp, Homo sapien
gcctatcccgggatttagagtctcc

SEQ ID NO: 2700429 - DNA, 25 bp, Homo sapien
tggtccatcccctaagtcctcaggg

SEQ ID NO: 2700430 - DNA, 25 bp, Homo sapien
caccatacccaactagtttttgtag

SEQ ID NO: 2700431 - DNA, 25 bp, Homo sapien
gctggagtatgcagtggtgcgacct

SEQ ID NO: 2700432 - DNA, 25 bp, Homo sapien
tggagtatgcagtggtgcgacctca

SEQ ID NO: 2700433 - DNA, 25 bp, Homo sapien
gagtatgcagtggtgcgacctcagc

SEQ ID NO: 2700434 - DNA, 25 bp, Homo sapien
agcctgagctcagctgagtggccat

SEQ ID NO: 2700435 - DNA, 25 bp, Homo sapien
cagcctgagctcagctgagtggcca

SEQ ID NO: 2700436 - DNA, 25 bp, Homo sapien
tctgccctggcaggcaaaatgccag

SEQ ID NO: 2700437 - DNA, 25 bp, Homo sapien
ctgccctggcaggcaaaatgccagg

SEQ ID NO: 2700438 - DNA, 25 bp, Homo sapien
tgccctggcaggcaaaatgccaggc

SEQ ID NO: 2700439 - DNA, 25 bp, Homo sapien
gtccccagcgcaccatcagctccat

SEQ ID NO: 2700440 - DNA, 25 bp, Homo sapien
catttaggctccacataagcttgtc

SEQ ID NO: 2700441 - DNA, 25 bp, Homo sapien
ttgggggacccatttaggctccaca

SEQ ID NO: 2700442 - DNA, 25 bp, Homo sapien
tccacataagcttgtctacttccag

SEQ ID NO: 2700443 - DNA, 25 bp, Homo sapien
gggacccatttaggctccacataag

SEQ ID NO: 2700444 - DNA, 25 bp, Homo sapien
ccccagcgccccgtcgagtgcacag

SEQ ID NO: 2700445 - DNA, 25 bp, Homo sapien
ccccagcgtgcacacttcctcccgg

SEQ ID NO: 2700446 - DNA, 25 bp, Homo sapien
agcgtgcacacttcctcccggaccc

SEQ ID NO: 2700447 - DNA, 25 bp, Homo sapien
cagcgccccgtcgagtgcacagagg

SEQ ID NO: 2700448 - DNA, 25 bp, Homo sapien
ggatgccctgggtaatcgacctata

SEQ ID NO: 2700449 - DNA, 25 bp, Homo sapien
ggcaccagtgcgctaggctatacct

SEQ ID NO: 2700450 - DNA, 25 bp, Homo sapien
tattggcgcacaactgcagagctct

SEQ ID NO: 2700451 - DNA, 25 bp, Homo sapien
cagagctcttgctaagacgcgacca

SEQ ID NO: 2700452 - DNA, 25 bp, Homo sapien
tgcaggcgccgggattgcggcctcc

SEQ ID NO: 2700453 - DNA, 25 bp, Homo sapien
ggcgccgggattgcggcctcccagg

SEQ ID NO: 2700454 - DNA, 25 bp, Homo sapien
gctgcaggcgccgggattgcggcct

SEQ ID NO: 2700455 - DNA, 25 bp, Homo sapien
caggcgccgggattgcggcctccca

SEQ ID NO: 2700456 - DNA, 25 bp, Homo sapien
ccacacaaaagaggcgggtcctggc

SEQ ID NO: 2700457 - DNA, 25 bp, Homo sapien
cggaggaggtcacggtagctgggcc

SEQ ID NO: 2700458 - DNA, 25 bp, Homo sapien
ggctgcgctaattagcttcctcagg

SEQ ID NO: 2700459 - DNA, 25 bp, Homo sapien
tatttatagtgcacggtctccatgg

SEQ ID NO: 2700460 - DNA, 25 bp, Homo sapien
cgtgcttaatgcagcggcagtgaca

SEQ ID NO: 2700461 - DNA, 25 bp, Homo sapien
gacatttctgccttcagaggcaaaa

SEQ ID NO: 2700462 - DNA, 25 bp, Homo sapien
cgagttcccgccgagcgtgcttaat

SEQ ID NO: 2700463 - DNA, 25 bp, Homo sapien
caggaacccggccattttgatgaac

SEQ ID NO: 2700464 - DNA, 25 bp, Homo sapien
ccggctggccagccagcccatcccc

SEQ ID NO: 2700465 - DNA, 25 bp, Homo sapien
cagccaggccggctggccagccagc

SEQ ID NO: 2700466 - DNA, 25 bp, Homo sapien
ggctggccagccagcccatccccac

SEQ ID NO: 2700467 - DNA, 25 bp, Homo sapien
cccagccaggccggctggccagcca

SEQ ID NO: 2700468 - DNA, 25 bp, Homo sapien
tgtaccaccatcacagaacctgatg

SEQ ID NO: 2700469 - DNA, 25 bp, Homo sapien
atatgggtctaggagaggcaagccc

SEQ ID NO: 2700470 - DNA, 25 bp, Homo sapien
ggcaagccctcaagtactagccagg

SEQ ID NO: 2700471 - DNA, 25 bp, Homo sapien
cagaacctgatgcttcatagagaag

SEQ ID NO: 2700472 - DNA, 25 bp, Homo sapien
aatcatatcaaccatgttgttcagg

SEQ ID NO: 2700473 - DNA, 25 bp, Homo sapien
gtatcagtccgttttcatactgttg

SEQ ID NO: 2700474 - DNA, 25 bp, Homo sapien
ctgtatcagtccgttttcatactgt

SEQ ID NO: 2700475 - DNA, 25 bp, Homo sapien
tcagtccgttttcatactgttgata

SEQ ID NO: 2700476 - DNA, 25 bp, Homo sapien
tcaggccacatccttggaaatgtaa

SEQ ID NO: 2700477 - DNA, 25 bp, Homo sapien
ggaaatgtaaatcaacctcaacttc

SEQ ID NO: 2700478 - DNA, 25 bp, Homo sapien
tccctgggtacctggggctatggga

SEQ ID NO: 2700479 - DNA, 25 bp, Homo sapien
atctgctctgccacttgctgcaagg

SEQ ID NO: 2700480 - DNA, 25 bp, Homo sapien
tctgctgtccctgggtacctggggc

SEQ ID NO: 2700481 - DNA, 25 bp, Homo sapien
cacttgctgcaaggcctctgctgtc

SEQ ID NO: 2700482 - DNA, 25 bp, Homo sapien
atgcccatgtactccgtggcacagg

SEQ ID NO: 2700483 - DNA, 25 bp, Homo sapien
tgcccatgtactccgtggcacaggc

SEQ ID NO: 2700484 - DNA, 25 bp, Homo sapien
catgtactccgtggcacaggctttc

SEQ ID NO: 2700485 - DNA, 25 bp, Homo sapien
cccatgtactccgtggcacaggctt

SEQ ID NO: 2700486 - DNA, 25 bp, Homo sapien
cttaaaattatcgtcaccacagcga

SEQ ID NO: 2700487 - DNA, 25 bp, Homo sapien
gggccttaaaattatcgtcaccaca

SEQ ID NO: 2700488 - DNA, 25 bp, Homo sapien
tatcgtcaccacagcgatgcagcag

SEQ ID NO: 2700489 - DNA, 25 bp, Homo sapien
aattatcgtcaccacagcgatgcag

SEQ ID NO: 2700490 - DNA, 25 bp, Homo sapien
atagatcactggcagaggcctagag

SEQ ID NO: 2700491 - DNA, 25 bp, Homo sapien
agaggcctagagtctggtgttgaca

SEQ ID NO: 2700492 - DNA, 25 bp, Homo sapien
tccatagatcactggcagaggccta

SEQ ID NO: 2700493 - DNA, 25 bp, Homo sapien
cctgaggtccatagatcactggcag

SEQ ID NO: 2700494 - DNA, 25 bp, Homo sapien
tcttgcccacaggggctcgcagctc

SEQ ID NO: 2700495 - DNA, 25 bp, Homo sapien
ctcttgcccacaggggctcgcagct

SEQ ID NO: 2700496 - DNA, 25 bp, Homo sapien
ttgcccacaggggctcgcagctctc

SEQ ID NO: 2700497 - DNA, 25 bp, Homo sapien
cttgcccacaggggctcgcagctct

SEQ ID NO: 2700498 - DNA, 25 bp, Homo sapien
ccccatcccccaagactttggagag

SEQ ID NO: 2700499 - DNA, 25 bp, Homo sapien
ccctccagcaaggtgctggtgagcc

SEQ ID NO: 2700500 - DNA, 25 bp, Homo sapien
acagatccaagagaacagtcctcac

SEQ ID NO: 2700501 - DNA, 25 bp, Homo sapien
gcaaggtgctggtgagcctccatac

SEQ ID NO: 2700502 - DNA, 25 bp, Homo sapien
acgaagcagtaaccctccagggtca

SEQ ID NO: 2700503 - DNA, 25 bp, Homo sapien
gtgggtaccagagagacgtctgctc

SEQ ID NO: 2700504 - DNA, 25 bp, Homo sapien
agagagacgtctgctctgtccttcc

SEQ ID NO: 2700505 - DNA, 25 bp, Homo sapien
cagtgcgttggtaggagtgggtacc

SEQ ID NO: 2700506 - DNA, 25 bp, Homo sapien
ttccaacctcccaggttctccatct

SEQ ID NO: 2700507 - DNA, 25 bp, Homo sapien
caacctcccaggttctccatcttac

SEQ ID NO: 2700508 - DNA, 25 bp, Homo sapien
cagcttccaacctcccaggttctcc

SEQ ID NO: 2700509 - DNA, 25 bp, Homo sapien
gcttccaacctcccaggttctccat

SEQ ID NO: 2700510 - DNA, 25 bp, Homo sapien
cgctgccaccatcgtgctctgagaa

SEQ ID NO: 2700511 - DNA, 25 bp, Homo sapien
gtgttgctaacccactcagccggac

SEQ ID NO: 2700512 - DNA, 25 bp, Homo sapien
taatccctcgccatctgtcttgtgt

SEQ ID NO: 2700513 - DNA, 25 bp, Homo sapien
tgagaagctgagataatccctcgcc

SEQ ID NO: 2700514 - DNA, 25 bp, Homo sapien
gagggtgtgagagccttccccccac

SEQ ID NO: 2700515 - DNA, 25 bp, Homo sapien
atggggagggtgtgagagccttccc

SEQ ID NO: 2700516 - DNA, 25 bp, Homo sapien
ggagggtgtgagagccttcccccca

SEQ ID NO: 2700517 - DNA, 25 bp, Homo sapien
tggggagggtgtgagagccttcccc

SEQ ID NO: 2700518 - DNA, 25 bp, Homo sapien
gcactaccgcatccagcagacactg

SEQ ID NO: 2700519 - DNA, 25 bp, Homo sapien
ggtttgctctgaagggagtggcact

SEQ ID NO: 2700520 - DNA, 25 bp, Homo sapien
gggagtggcactgggcaacccgcag

SEQ ID NO: 2700521 - DNA, 25 bp, Homo sapien
caagaagtgggtttgctctgaaggg

SEQ ID NO: 2700522 - DNA, 25 bp, Homo sapien
cagtccagcgggcagatatcgatcc

SEQ ID NO: 2700523 - DNA, 25 bp, Homo sapien
gcgggcagatatcgatcccgcccag

SEQ ID NO: 2700524 - DNA, 25 bp, Homo sapien
agccaagctctatactcgcggcctg

SEQ ID NO: 2700525 - DNA, 25 bp, Homo sapien
gcctgcagcccgttctgtggcggtc

SEQ ID NO: 2700526 - DNA, 25 bp, Homo sapien
gaagccgttccactcgagcagatgg

SEQ ID NO: 2700527 - DNA, 25 bp, Homo sapien
cggctcacagatgggcgggattctc

SEQ ID NO: 2700528 - DNA, 25 bp, Homo sapien
cagatggctgtgaaactttggcggc

SEQ ID NO: 2700529 - DNA, 25 bp, Homo sapien
ctttggcggcgagataaattgggtc

SEQ ID NO: 2700530 - DNA, 25 bp, Homo sapien
atgcagttaatcacaggcccagcca

SEQ ID NO: 2700531 - DNA, 25 bp, Homo sapien
cacgtgggatctgcagtcagggtcc

SEQ ID NO: 2700532 - DNA, 25 bp, Homo sapien
ggcaagtcccttctcgtgtccaaat

SEQ ID NO: 2700533 - DNA, 25 bp, Homo sapien
cgtttctcgcgctgcagctcaggaa

SEQ ID NO: 2700534 - DNA, 25 bp, Homo sapien
aggacgatttcgtcagggagcccag

SEQ ID NO: 2700535 - DNA, 25 bp, Homo sapien
cctcccggctgcagacatgatatac

SEQ ID NO: 2700536 - DNA, 25 bp, Homo sapien
catgatatacggtgcgtcccgacac

SEQ ID NO: 2700537 - DNA, 25 bp, Homo sapien
tgtcatccgccgcagaaaaggacga

SEQ ID NO: 2700538 - DNA, 25 bp, Homo sapien
gactgctcctggcaacggggtcccg

SEQ ID NO: 2700539 - DNA, 25 bp, Homo sapien
tcgagatgccgcgttgccatggaga

SEQ ID NO: 2700540 - DNA, 25 bp, Homo sapien
gcggcgcgcggctcgagatgccgcg

SEQ ID NO: 2700541 - DNA, 25 bp, Homo sapien
gagacgctgccgcatcctgactgct

SEQ ID NO: 2700542 - DNA, 25 bp, Homo sapien
gtgaaggtggggcatctatgactca

SEQ ID NO: 2700543 - DNA, 25 bp, Homo sapien
gaggtgaaggtggggcatctatgac

SEQ ID NO: 2700544 - DNA, 25 bp, Homo sapien
gaaggtggggcatctatgactcact

SEQ ID NO: 2700545 - DNA, 25 bp, Homo sapien
aggtggggcatctatgactcacttc

SEQ ID NO: 2700546 - DNA, 25 bp, Homo sapien
ttgagtccgaagtgcaatgactgac

SEQ ID NO: 2700547 - DNA, 25 bp, Homo sapien
cagtgtcttgagtccgaagtgcaat

SEQ ID NO: 2700548 - DNA, 25 bp, Homo sapien
tccgaagtgcaatgactgacccagc

SEQ ID NO: 2700549 - DNA, 25 bp, Homo sapien
aagtgcaatgactgacccagcctgg

SEQ ID NO: 2700550 - DNA, 25 bp, Homo sapien
tggtgggcgccagaagcaaccttgg

SEQ ID NO: 2700551 - DNA, 25 bp, Homo sapien
atccatcttgctgatcccagactgg

SEQ ID NO: 2700552 - DNA, 25 bp, Homo sapien
ggtggtgggcgccagaagcaacctt

SEQ ID NO: 2700553 - DNA, 25 bp, Homo sapien
agatccatcttgctgatcccagact

SEQ ID NO: 2700554 - DNA, 25 bp, Homo sapien
caaaccttcgaagtgttggctgttc

SEQ ID NO: 2700555 - DNA, 25 bp, Homo sapien
cgaagtgttggctgttcttcttgga

SEQ ID NO: 2700556 - DNA, 25 bp, Homo sapien
gccttgtctccaaaccttcgaagtg

SEQ ID NO: 2700557 - DNA, 25 bp, Homo sapien
tctccaaaccttcgaagtgttggct

SEQ ID NO: 2700558 - DNA, 25 bp, Homo sapien
tattttctcctcacacgcacagaca

SEQ ID NO: 2700559 - DNA, 25 bp, Homo sapien
gaaactgagccaaaccgagagtgcc

SEQ ID NO: 2700560 - DNA, 25 bp, Homo sapien
agtgccgcagatgggcgcccctgac

SEQ ID NO: 2700561 - DNA, 25 bp, Homo sapien
acacgcacagacacttgtaggcaga

SEQ ID NO: 2700562 - DNA, 25 bp, Homo sapien
ctggaggagagcaaggccacgggct

SEQ ID NO: 2700563 - DNA, 25 bp, Homo sapien
agggagactgcccaagctctacgac

SEQ ID NO: 2700564 - DNA, 25 bp, Homo sapien
cagggacttgcagtgccgagagcca

SEQ ID NO: 2700565 - DNA, 25 bp, Homo sapien
agcctggcccagaacggcatctaag

SEQ ID NO: 2700566 - DNA, 25 bp, Homo sapien
aggtgccggagccgcgatgtggaga

SEQ ID NO: 2700567 - DNA, 25 bp, Homo sapien
ccggagccgcgatgtggagaggctg

SEQ ID NO: 2700568 - DNA, 25 bp, Homo sapien
ggagccgcgatgtggagaggctgag

SEQ ID NO: 2700569 - DNA, 25 bp, Homo sapien
tgccggagccgcgatgtggagaggc

SEQ ID NO: 2700570 - DNA, 25 bp, Homo sapien
tccccgccgcgggtccggcctctca

SEQ ID NO: 2700571 - DNA, 25 bp, Homo sapien
cgctgctggtccccgccgcgggtcc

SEQ ID NO: 2700572 - DNA, 25 bp, Homo sapien
tgctggtccccgccgcgggtccggc

SEQ ID NO: 2700573 - DNA, 25 bp, Homo sapien
ctgctggtccccgccgcgggtccgg

SEQ ID NO: 2700574 - DNA, 25 bp, Homo sapien
ggtgcgcagattaccaggtagatga

SEQ ID NO: 2700575 - DNA, 25 bp, Homo sapien
gcagattaccaggtagatgaagctt

SEQ ID NO: 2700576 - DNA, 25 bp, Homo sapien
ctggtgcgcagattaccaggtagat

SEQ ID NO: 2700577 - DNA, 25 bp, Homo sapien
tgcgcagattaccaggtagatgaag

SEQ ID NO: 2700578 - DNA, 25 bp, Homo sapien
ggggtgggcagacaaggggcagcat

SEQ ID NO: 2700579 - DNA, 25 bp, Homo sapien
tgggggtgggcagacaaggggcagc

SEQ ID NO: 2700580 - DNA, 25 bp, Homo sapien
gggggtgggcagacaaggggcagca

SEQ ID NO: 2700581 - DNA, 25 bp, Homo sapien
ctgggggtgggcagacaaggggcag

SEQ ID NO: 2700582 - DNA, 25 bp, Homo sapien
gccctgctatgtcctcctttagctg

SEQ ID NO: 2700583 - DNA, 25 bp, Homo sapien
tgctgtgcccgccagagttcaccaa

SEQ ID NO: 2700584 - DNA, 25 bp, Homo sapien
ctgtgcccgccagagttcaccaaag

SEQ ID NO: 2700585 - DNA, 25 bp, Homo sapien
gctgtgcccgccagagttcaccaaa

SEQ ID NO: 2700586 - DNA, 25 bp, Homo sapien
ggctgctcctgggactcctctagac

SEQ ID NO: 2700587 - DNA, 25 bp, Homo sapien
cttccgcctgtcctggctgctcctg

SEQ ID NO: 2700588 - DNA, 25 bp, Homo sapien
ggcagccactgcttccgcctgtcct

SEQ ID NO: 2700589 - DNA, 25 bp, Homo sapien
tgcttccgcctgtcctggctgctcc

SEQ ID NO: 2700590 - DNA, 25 bp, Homo sapien
gtcacgggtggcatcgccttcctca

SEQ ID NO: 2700591 - DNA, 25 bp, Homo sapien
ggactccgctgaatcttccagaatg

SEQ ID NO: 2700592 - DNA, 25 bp, Homo sapien
acatctgggtccttcgtgggttcct

SEQ ID NO: 2700593 - DNA, 25 bp, Homo sapien
atgttcaagtctggccccagggcta

SEQ ID NO: 2700594 - DNA, 25 bp, Homo sapien
gaatcttctcaaacgtggcgctgaa

SEQ ID NO: 2700595 - DNA, 25 bp, Homo sapien
gcagctgtcgctctcatccgtgagg

SEQ ID NO: 2700596 - DNA, 25 bp, Homo sapien
ttcatggaatccattgggcatggcc

SEQ ID NO: 2700597 - DNA, 25 bp, Homo sapien
catggccatgagagacaggcggctc

SEQ ID NO: 2700598 - DNA, 25 bp, Homo sapien
cctggcacccgttggccagagggtc

SEQ ID NO: 2700599 - DNA, 25 bp, Homo sapien
agagggtctgcactaccaggctcca

SEQ ID NO: 2700600 - DNA, 25 bp, Homo sapien
ctgctgagctcagagtctgagtctg

SEQ ID NO: 2700601 - DNA, 25 bp, Homo sapien
gcgtgccagccgatgagcagcttca

SEQ ID NO: 2700602 - DNA, 25 bp, Homo sapien
ggtccagcccaaggatgacagaatc

SEQ ID NO: 2700603 - DNA, 25 bp, Homo sapien
ccaaggatgacagaatcacaggcat

SEQ ID NO: 2700604 - DNA, 25 bp, Homo sapien
gaagcagggtccagcccaaggatga

SEQ ID NO: 2700605 - DNA, 25 bp, Homo sapien
ctgttagaagcagggtccagcccaa

SEQ ID NO: 2700606 - DNA, 25 bp, Homo sapien
caagcccgagaagtcgaagaaactg

SEQ ID NO: 2700607 - DNA, 25 bp, Homo sapien
tccgtccagagtcaagcccgagaag

SEQ ID NO: 2700608 - DNA, 25 bp, Homo sapien
ctgagtgctccgtccagagtcaagc

SEQ ID NO: 2700609 - DNA, 25 bp, Homo sapien
gagtcaagcccgagaagtcgaagaa

SEQ ID NO: 2700610 - DNA, 25 bp, Homo sapien
tcagggttgcactggcagtaccggc

SEQ ID NO: 2700611 - DNA, 25 bp, Homo sapien
gctgtcatcagggttgcactggcag

SEQ ID NO: 2700612 - DNA, 25 bp, Homo sapien
tgtgtctcccccatcagcgggaagg

SEQ ID NO: 2700613 - DNA, 25 bp, Homo sapien
tgaggacccgctcacgctcttgtgt

SEQ ID NO: 2700614 - DNA, 25 bp, Homo sapien
gatggtggcactctcagtgcgagga

SEQ ID NO: 2700615 - DNA, 25 bp, Homo sapien
agtgcgaggatccaacctcttccca

SEQ ID NO: 2700616 - DNA, 25 bp, Homo sapien
tgtctcctgacggaacccgtcagga

SEQ ID NO: 2700617 - DNA, 25 bp, Homo sapien
tccctgtctcctgacggaacccgtc

SEQ ID NO: 2700618 - DNA, 25 bp, Homo sapien
gggcacaggtgagcgtgtggatccc

SEQ ID NO: 2700619 - DNA, 25 bp, Homo sapien
ggcacaggtgagcgtgtggatccca

SEQ ID NO: 2700620 - DNA, 25 bp, Homo sapien
gcacaggtgagcgtgtggatcccat

SEQ ID NO: 2700621 - DNA, 25 bp, Homo sapien
catcattcagctggtccaagttggc

SEQ ID NO: 2700622 - DNA, 25 bp, Homo sapien
tgacaggacatctttttgccaatgt

SEQ ID NO: 2700623 - DNA, 25 bp, Homo sapien
cttggccatcattcagctggtccaa

SEQ ID NO: 2700624 - DNA, 25 bp, Homo sapien
tccaagttggcaatgaattgctgac

SEQ ID NO: 2700625 - DNA, 25 bp, Homo sapien
atggcccattccagcttttcattct

SEQ ID NO: 2700626 - DNA, 25 bp, Homo sapien
ccattccagcttttcattcttgatg

SEQ ID NO: 2700627 - DNA, 25 bp, Homo sapien
ttcattcttgatggagttgtaaagg

SEQ ID NO: 2700628 - DNA, 25 bp, Homo sapien
cattcttgatggagttgtaaagggt

SEQ ID NO: 2700629 - DNA, 25 bp, Homo sapien
ggcactgagcgcctgtgggacatcc

SEQ ID NO: 2700630 - DNA, 25 bp, Homo sapien
tccgggtcaggacgccgtgcttgta

SEQ ID NO: 2700631 - DNA, 25 bp, Homo sapien
tccatgtcagcgtgagtcttccggg

SEQ ID NO: 2700632 - DNA, 25 bp, Homo sapien
gtgcctgtcccgaacttgtcatcca

SEQ ID NO: 2700633 - DNA, 25 bp, Homo sapien
tccacctgtatgttcgtccccaaag

SEQ ID NO: 2700634 - DNA, 25 bp, Homo sapien
gtccccaaagagtggcccgtggcgc

SEQ ID NO: 2700635 - DNA, 25 bp, Homo sapien
tatgttcgtccccaaagagtggccc

SEQ ID NO: 2700636 - DNA, 25 bp, Homo sapien
tcccactacgtgtccacctgtatgt

SEQ ID NO: 2700637 - DNA, 25 bp, Homo sapien
ctgcgtagaatttcttccagccacg

SEQ ID NO: 2700638 - DNA, 25 bp, Homo sapien
gatggtccctttgagcactgcgtag

SEQ ID NO: 2700639 - DNA, 25 bp, Homo sapien
tgcaggtacaggatggtccctttga

SEQ ID NO: 2700640 - DNA, 25 bp, Homo sapien
tgagcactgcgtagaatttcttcca

SEQ ID NO: 2700641 - DNA, 25 bp, Homo sapien
cgcgaatggcgttcttcaggtcacc

SEQ ID NO: 2700642 - DNA, 25 bp, Homo sapien
ttcttgctgtagtcagaggccctgg

SEQ ID NO: 2700643 - DNA, 25 bp, Homo sapien
ccgatagagctttgtcaggcctgta

SEQ ID NO: 2700644 - DNA, 25 bp, Homo sapien
gaggaataccctccagtcggctgtc

SEQ ID NO: 2700645 - DNA, 25 bp, Homo sapien
aggatccaggacagcatttcttcct

SEQ ID NO: 2700646 - DNA, 25 bp, Homo sapien
caccaggttgatcctgaggatccag

SEQ ID NO: 2700647 - DNA, 25 bp, Homo sapien
tcatggagctgacagcggctgggaa

SEQ ID NO: 2700648 - DNA, 25 bp, Homo sapien
agcaggggccgacagaacttcttca

SEQ ID NO: 2700649 - DNA, 25 bp, Homo sapien
ctcaacttattctcatgagaccgca

SEQ ID NO: 2700650 - DNA, 25 bp, Homo sapien
gagatagtgctccttcaaccggtac

SEQ ID NO: 2700651 - DNA, 25 bp, Homo sapien
gactgggtgacacctgtgttcggcc

SEQ ID NO: 2700652 - DNA, 25 bp, Homo sapien
tccttggacttgatgcccctctcga

SEQ ID NO: 2700653 - DNA, 25 bp, Homo sapien
tttatattacatgtcttactgcaat

SEQ ID NO: 2700654 - DNA, 25 bp, Homo sapien
aggaaagaattgtggagattggtta

SEQ ID NO: 2700655 - DNA, 25 bp, Homo sapien
aaattttatattacatgtcttactg

SEQ ID NO: 2700656 - DNA, 25 bp, Homo sapien
gaaagaattgtggagattggttaca

SEQ ID NO: 2700657 - DNA, 25 bp, Homo sapien
tggaaagctggtggtttatcgaaaa

SEQ ID NO: 2700658 - DNA, 25 bp, Homo sapien
tgggcaaacgacttgaatttacatt

SEQ ID NO: 2700659 - DNA, 25 bp, Homo sapien
tactatcgaaagagcagaaaataca

SEQ ID NO: 2700660 - DNA, 25 bp, Homo sapien
cacactcttactactatcgaaagag

SEQ ID NO: 2700661 - DNA, 25 bp, Homo sapien
gggtcatccccttccagagtggcca

SEQ ID NO: 2700662 - DNA, 25 bp, Homo sapien
tcaatccgctccagatcatctgagc

SEQ ID NO: 2700663 - DNA, 25 bp, Homo sapien
ttgaatgtgtcttccggagagaagg

SEQ ID NO: 2700664 - DNA, 25 bp, Homo sapien
tagccaggaggtggatataggtctc

SEQ ID NO: 2700665 - DNA, 25 bp, Homo sapien
tagcagtagatctgtccaagaggcc

SEQ ID NO: 2700666 - DNA, 25 bp, Homo sapien
actgaaagggcacaagcctgggtcc

SEQ ID NO: 2700667 - DNA, 25 bp, Homo sapien
gggttccagctgagacctagagtca

SEQ ID NO: 2700668 - DNA, 25 bp, Homo sapien
catcggtaagagcagtataagtcac

SEQ ID NO: 2700669 - DNA, 25 bp, Homo sapien
gctaatccgtgatcgtcaagtggca

SEQ ID NO: 2700670 - DNA, 25 bp, Homo sapien
ttttttactgatgggaggcacaacc

SEQ ID NO: 2700671 - DNA, 25 bp, Homo sapien
tgttaccactgacgccaaattcctg

SEQ ID NO: 2700672 - DNA, 25 bp, Homo sapien
cagagagctcttttgtggtgccaca

SEQ ID NO: 2700673 - DNA, 25 bp, Homo sapien
tgcccggcggccgacagcaggactt

SEQ ID NO: 2700674 - DNA, 25 bp, Homo sapien
gcgagggactcgctgtcgctgagca

SEQ ID NO: 2700675 - DNA, 25 bp, Homo sapien
tcagcctcggcgtcggacgacgacg

SEQ ID NO: 2700676 - DNA, 25 bp, Homo sapien
cgcccgccccactatctttaaggag

SEQ ID NO: 2700677 - DNA, 25 bp, Homo sapien
gaaaagctgtttccctagagagata

SEQ ID NO: 2700678 - DNA, 25 bp, Homo sapien
tagctagggaagttcatcgttggcg

SEQ ID NO: 2700679 - DNA, 25 bp, Homo sapien
ttgagtacagggacgagcagtagcc

SEQ ID NO: 2700680 - DNA, 25 bp, Homo sapien
gatcaccctgtcttatagatgagga

SEQ ID NO: 2700681 - DNA, 25 bp, Homo sapien
aatgcttcattggtgtggtctctgc

SEQ ID NO: 2700682 - DNA, 25 bp, Homo sapien
tatcaggaagtagatgagaggtcca

SEQ ID NO: 2700683 - DNA, 25 bp, Homo sapien
gacttcctgcggattgccacgtgct

SEQ ID NO: 2700684 - DNA, 25 bp, Homo sapien
ccagggatggataatgcgcaggact

SEQ ID NO: 2700685 - DNA, 25 bp, Homo sapien
ccacaggggcatagagacccctggg

SEQ ID NO: 2700686 - DNA, 25 bp, Homo sapien
tggcccagatggtcaactatcttaa

SEQ ID NO: 2700687 - DNA, 25 bp, Homo sapien
accccacaggggcatagagacccct

SEQ ID NO: 2700688 - DNA, 25 bp, Homo sapien
tcttaatagagtgtgggaggccaag

SEQ ID NO: 2700689 - DNA, 25 bp, Homo sapien
caatacaaatggtaacggtggcaag

SEQ ID NO: 2700690 - DNA, 25 bp, Homo sapien
cttgggtttaaagttcagggctgca

SEQ ID NO: 2700691 - DNA, 25 bp, Homo sapien
gggacaggtgtcagcagttcgcaat

SEQ ID NO: 2700692 - DNA, 25 bp, Homo sapien
ggcagagtggcaaggccaatacaaa

SEQ ID NO: 2700693 - DNA, 25 bp, Homo sapien
gaccctcaagatgttcagagcctgg

SEQ ID NO: 2700694 - DNA, 25 bp, Homo sapien
ccctcaagatgttcagagcctggcg

SEQ ID NO: 2700695 - DNA, 25 bp, Homo sapien
ctcaagatgttcagagcctggcgca

SEQ ID NO: 2700696 - DNA, 25 bp, Homo sapien
ctgaccctcaagatgttcagagcct

SEQ ID NO: 2700697 - DNA, 25 bp, Homo sapien
atttcctttatccctgtacttctca

SEQ ID NO: 2700698 - DNA, 25 bp, Homo sapien
tttgggcaatgatgtatgaagctgc

SEQ ID NO: 2700699 - DNA, 25 bp, Homo sapien
tgggcaatgatgtatgaagctgcta

SEQ ID NO: 2700700 - DNA, 25 bp, Homo sapien
gcaatgatgtatgaagctgctataa

SEQ ID NO: 2700701 - DNA, 25 bp, Homo sapien
caagtttgggcaatgatgtatgaag

SEQ ID NO: 2700702 - DNA, 25 bp, Homo sapien
gagtgtccagtaaacactgacgaag

SEQ ID NO: 2700703 - DNA, 25 bp, Homo sapien
cagtgtggaagttccttgaatgtag

SEQ ID NO: 2700704 - DNA, 25 bp, Homo sapien
ccagcaccgcgttttcaggcctcat

SEQ ID NO: 2700705 - DNA, 25 bp, Homo sapien
ccccagcaccgcgttttcaggcctc

SEQ ID NO: 2700706 - DNA, 25 bp, Homo sapien
aatgtagaggaaggtccccccagca

SEQ ID NO: 2700707 - DNA, 25 bp, Homo sapien
tgtagagtgtgcatcagtgaagaag

SEQ ID NO: 2700708 - DNA, 25 bp, Homo sapien
gtagagtgtgcatcagtgaagaaga

SEQ ID NO: 2700709 - DNA, 25 bp, Homo sapien
gtgtagagtgtgcatcagtgaagaa

SEQ ID NO: 2700710 - DNA, 25 bp, Homo sapien
tctgaggaatgcatagcctatacct

SEQ ID NO: 2700711 - DNA, 25 bp, Homo sapien
cttctgaggaatgcatagcctatac

SEQ ID NO: 2700712 - DNA, 25 bp, Homo sapien
catagcctatacctgatctcttcta

SEQ ID NO: 2700713 - DNA, 25 bp, Homo sapien
ggaatgcatagcctatacctgatct

SEQ ID NO: 2700714 - DNA, 25 bp, Homo sapien
caaggtaaagtcagaatcgattgaa

SEQ ID NO: 2700715 - DNA, 25 bp, Homo sapien
cacagcagccgatgggagggttgac

SEQ ID NO: 2700716 - DNA, 25 bp, Homo sapien
tctcactgacaaagtgacacagcag

SEQ ID NO: 2700717 - DNA, 25 bp, Homo sapien
ctccaaggtaaagtcagaatcgatt

SEQ ID NO: 2700718 - DNA, 25 bp, Homo sapien
tgtttacttgggtctgaaagacaat

SEQ ID NO: 2700719 - DNA, 25 bp, Homo sapien
gacaagttctgcattaggctggttg

SEQ ID NO: 2700720 - DNA, 25 bp, Homo sapien
gccccagggaaagtaggaaacagca

SEQ ID NO: 2700721 - DNA, 25 bp, Homo sapien
tctgaaagacaataaacctggtcct

SEQ ID NO: 2700722 - DNA, 25 bp, Homo sapien
gctgcactcagaacccctgcttggt

SEQ ID NO: 2700723 - DNA, 25 bp, Homo sapien
tcttcatcaggatccacccatgggc

SEQ ID NO: 2700724 - DNA, 25 bp, Homo sapien
gagccatgagttggaatagcaacag

SEQ ID NO: 2700725 - DNA, 25 bp, Homo sapien
catttttgccaagtggagccatgag

SEQ ID NO: 2700726 - DNA, 25 bp, Homo sapien
agcagttgtcttgccacgatcgtgc

SEQ ID NO: 2700727 - DNA, 25 bp, Homo sapien
tgtcttgccacgatcgtgcaggagg

SEQ ID NO: 2700728 - DNA, 25 bp, Homo sapien
acctggggctagacagccgctgcag

SEQ ID NO: 2700729 - DNA, 25 bp, Homo sapien
ttgccacgatcgtgcaggaggcaag

SEQ ID NO: 2700730 - DNA, 25 bp, Homo sapien
ttgcagggctttcacctacattctc

SEQ ID NO: 2700731 - DNA, 25 bp, Homo sapien
cattctcatgtgtggtaggcaggta

SEQ ID NO: 2700732 - DNA, 25 bp, Homo sapien
taggcaggtagacagatggcccgat

SEQ ID NO: 2700733 - DNA, 25 bp, Homo sapien
aggtagacagatggcccgatgctca

SEQ ID NO: 2700734 - DNA, 25 bp, Homo sapien
ctgactatccaggtgcccatattgt

SEQ ID NO: 2700735 - DNA, 25 bp, Homo sapien
gatgccacggattgttgacagtgat

SEQ ID NO: 2700736 - DNA, 25 bp, Homo sapien
tgtgttgggaaaggtgactggatgc

SEQ ID NO: 2700737 - DNA, 25 bp, Homo sapien
gactatccaggtgcccatattgtgc

SEQ ID NO: 2700738 - DNA, 25 bp, Homo sapien
acagggacagctcggagcctcctga

SEQ ID NO: 2700739 - DNA, 25 bp, Homo sapien
caggacagggacagctcggagcctc

SEQ ID NO: 2700740 - DNA, 25 bp, Homo sapien
ggacagggacagctcggagcctcct

SEQ ID NO: 2700741 - DNA, 25 bp, Homo sapien
tcaggacagggacagctcggagcct

SEQ ID NO: 2700742 - DNA, 25 bp, Homo sapien
acacttgtccttcagtacggagact

SEQ ID NO: 2700743 - DNA, 25 bp, Homo sapien
cttgtgcacggcagcagcgtcttca

SEQ ID NO: 2700744 - DNA, 25 bp, Homo sapien
tcatcagcttttgttgtctggtaca

SEQ ID NO: 2700745 - DNA, 25 bp, Homo sapien
cagcagcgtcttcatcagcttttgt

SEQ ID NO: 2700746 - DNA, 25 bp, Homo sapien
gtctggtacatttggccacctgtgg

SEQ ID NO: 2700747 - DNA, 25 bp, Homo sapien
ctggccaccaactgccctctcgtgg

SEQ ID NO: 2700748 - DNA, 25 bp, Homo sapien
tggccaccaactgccctctcgtggg

SEQ ID NO: 2700749 - DNA, 25 bp, Homo sapien
ggccaccaactgccctctcgtgggc

SEQ ID NO: 2700750 - DNA, 25 bp, Homo sapien
tctttcatgcacaggttgcatgcta

SEQ ID NO: 2700751 - DNA, 25 bp, Homo sapien
catgcacaggttgcatgctagagga

SEQ ID NO: 2700752 - DNA, 25 bp, Homo sapien
caggttgcatgctagaggagaagat

SEQ ID NO: 2700753 - DNA, 25 bp, Homo sapien
tgcatgctagaggagaagatggtcc

SEQ ID NO: 2700754 - DNA, 25 bp, Homo sapien
tgctgcctccaaggcatagcccttc

SEQ ID NO: 2700755 - DNA, 25 bp, Homo sapien
gccttttggggtaccctgctgcctc

SEQ ID NO: 2700756 - DNA, 25 bp, Homo sapien
ttttgccaaggacagaggtactccc

SEQ ID NO: 2700757 - DNA, 25 bp, Homo sapien
tcaaagtgactggtgtggcttgtgc

SEQ ID NO: 2700758 - DNA, 25 bp, Homo sapien
catgtgccacgttgcagagttgctg

SEQ ID NO: 2700759 - DNA, 25 bp, Homo sapien
taggagcaccccataggcatgtgcc

SEQ ID NO: 2700760 - DNA, 25 bp, Homo sapien
ccttggtgctgagaacagttggtcc

SEQ ID NO: 2700761 - DNA, 25 bp, Homo sapien
ggaggaccaggccatttctgaggcc

SEQ ID NO: 2700762 - DNA, 25 bp, Homo sapien
cagactaggtcagactggccacact

SEQ ID NO: 2700763 - DNA, 25 bp, Homo sapien
taagggtggcagactaggtcagact

SEQ ID NO: 2700764 - DNA, 25 bp, Homo sapien
tgcggggccggttcctgtagcagga

SEQ ID NO: 2700765 - DNA, 25 bp, Homo sapien
tcctggacaccaagctcagggaggg

SEQ ID NO: 2700766 - DNA, 25 bp, Homo sapien
ttcatgggctgtcatcaccaaaccc

SEQ ID NO: 2700767 - DNA, 25 bp, Homo sapien
ctttttgactcatctacatctccca

SEQ ID NO: 2700768 - DNA, 25 bp, Homo sapien
catatgcatgagtatggtatgctat

SEQ ID NO: 2700769 - DNA, 25 bp, Homo sapien
tggccctaagtgaggtcagtatctg

SEQ ID NO: 2700770 - DNA, 25 bp, Homo sapien
gtatgctatgcaagtatctgggctg

SEQ ID NO: 2700771 - DNA, 25 bp, Homo sapien
taagcaggattcacatgctggctgt

SEQ ID NO: 2700772 - DNA, 25 bp, Homo sapien
aagcaggattcacatgctggctgtt

SEQ ID NO: 2700773 - DNA, 25 bp, Homo sapien
cacaggaggagttcttatatatggg

SEQ ID NO: 2700774 - DNA, 25 bp, Homo sapien
tatcaggtcctttgatgttcacagg

SEQ ID NO: 2700775 - DNA, 25 bp, Homo sapien
cagtggaactgagagtagaggtctc

SEQ ID NO: 2700776 - DNA, 25 bp, Homo sapien
tagtccgtgaccacctttctctggc

SEQ ID NO: 2700777 - DNA, 25 bp, Homo sapien
catttgacctggttatgccgggcca

SEQ ID NO: 2700778 - DNA, 25 bp, Homo sapien
gcaggctggcactttgagacctctc

SEQ ID NO: 2700779 - DNA, 25 bp, Homo sapien
gctgttttcaatcacgtccccacat

SEQ ID NO: 2700780 - DNA, 25 bp, Homo sapien
caggctggcactttgagacctctct

SEQ ID NO: 2700781 - DNA, 25 bp, Homo sapien
attcaggtcaatgctgcttggtgcc

SEQ ID NO: 2700782 - DNA, 25 bp, Homo sapien
tctgtggcccctgcttccagtggct

SEQ ID NO: 2700783 - DNA, 25 bp, Homo sapien
ttccagtggcttctgattcaggtca

SEQ ID NO: 2700784 - DNA, 25 bp, Homo sapien
caggctctgattggcccttctgtgg

SEQ ID NO: 2700785 - DNA, 25 bp, Homo sapien
aaagcagtggcatggagaagggata

SEQ ID NO: 2700786 - DNA, 25 bp, Homo sapien
caaggaaagcagtggcatggagaag

SEQ ID NO: 2700787 - DNA, 25 bp, Homo sapien
catggagaagggataaagaattctg

SEQ ID NO: 2700788 - DNA, 25 bp, Homo sapien
aggctggccaaggaaagcagtggca

SEQ ID NO: 2700789 - DNA, 25 bp, Homo sapien
cagttttacgtctgtttgacctttg

SEQ ID NO: 2700790 - DNA, 25 bp, Homo sapien
ttgtccttggaggtcctgcgccttc

SEQ ID NO: 2700791 - DNA, 25 bp, Homo sapien
gatgagggcggaattttgcttcttg

SEQ ID NO: 2700792 - DNA, 25 bp, Homo sapien
ttttgatgagggcggaattttgctt

SEQ ID NO: 2700793 - DNA, 25 bp, Homo sapien
ttgatgagggcggaattttgcttct

SEQ ID NO: 2700794 - DNA, 25 bp, Homo sapien
atgagggcggaattttgcttcttgg

SEQ ID NO: 2700795 - DNA, 25 bp, Homo sapien
tgaatgctcattctgtggagatccc

SEQ ID NO: 2700796 - DNA, 25 bp, Homo sapien
tggagatcccaagtagcccacagat

SEQ ID NO: 2700797 - DNA, 25 bp, Homo sapien
cattgtggagacacccttgtgagtc

SEQ ID NO: 2700798 - DNA, 25 bp, Homo sapien
tgtgctcatgggtacgtgctggtca

SEQ ID NO: 2700799 - DNA, 25 bp, Homo sapien
caaaatggctaaacatctggtccag

SEQ ID NO: 2700800 - DNA, 25 bp, Homo sapien
cagaattgaatgagaggaaggtcac

SEQ ID NO: 2700801 - DNA, 25 bp, Homo sapien
gatattgatccaactaacagaagcc

SEQ ID NO: 2700802 - DNA, 25 bp, Homo sapien
gacagtgatgcaatttggtatccca

SEQ ID NO: 2700803 - DNA, 25 bp, Homo sapien
tttccagcgggctctgtttcccctc

SEQ ID NO: 2700804 - DNA, 25 bp, Homo sapien
ccgccactggagaagggtcggtgca

SEQ ID NO: 2700805 - DNA, 25 bp, Homo sapien
ctgagcggcggagccccccaaatgg

SEQ ID NO: 2700806 - DNA, 25 bp, Homo sapien
aggtttgctgctcagcgctgccgcc

SEQ ID NO: 2700807 - DNA, 25 bp, Homo sapien
tggctgccatacagctcccagcatt

SEQ ID NO: 2700808 - DNA, 25 bp, Homo sapien
cagagaacgtcatgtttgagaacgg

SEQ ID NO: 2700809 - DNA, 25 bp, Homo sapien
tgccaaggcaagtgaaggagctcaa

SEQ ID NO: 2700810 - DNA, 25 bp, Homo sapien
tccagaacctgcatataaaagtgag

SEQ ID NO: 2700811 - DNA, 25 bp, Homo sapien
caactgcattgttcttgaaaacctc

SEQ ID NO: 2700812 - DNA, 25 bp, Homo sapien
tcttgaaaacctccaagtattcttc

SEQ ID NO: 2700813 - DNA, 25 bp, Homo sapien
cttcccttttctcagtcttgggcat

SEQ ID NO: 2700814 - DNA, 25 bp, Homo sapien
gcattgttcttgaaaacctccaagt

SEQ ID NO: 2700815 - DNA, 25 bp, Homo sapien
agttttgagtatcagccctttccaa

SEQ ID NO: 2700816 - DNA, 25 bp, Homo sapien
gttttgagtatcagccctttccaag

SEQ ID NO: 2700817 - DNA, 25 bp, Homo sapien
aagttttgagtatcagccctttcca

SEQ ID NO: 2700818 - DNA, 25 bp, Homo sapien
ttttgagtatcagccctttccaaga

SEQ ID NO: 2700819 - DNA, 25 bp, Homo sapien
tctctgaagaggcaataggcctttc

SEQ ID NO: 2700820 - DNA, 25 bp, Homo sapien
ggtcggaaggacagaattagcatag

SEQ ID NO: 2700821 - DNA, 25 bp, Homo sapien
cccaggaatccttgacaggaagcgt

SEQ ID NO: 2700822 - DNA, 25 bp, Homo sapien
tagcatagagaagagtggctagagc

SEQ ID NO: 2700823 - DNA, 25 bp, Homo sapien
aacttagggccctgtgcgtcgttgc

SEQ ID NO: 2700824 - DNA, 25 bp, Homo sapien
gacctattactcgtttggcttctga

SEQ ID NO: 2700825 - DNA, 25 bp, Homo sapien
acagcgccccagaaggacctattac

SEQ ID NO: 2700826 - DNA, 25 bp, Homo sapien
gcgtcgttgcgacttctgctaccac

SEQ ID NO: 2700827 - DNA, 25 bp, Homo sapien
gtgagcgcgccctatcggctcctgg

SEQ ID NO: 2700828 - DNA, 25 bp, Homo sapien
ctatcggctcctggcgcgtcaacat

SEQ ID NO: 2700829 - DNA, 25 bp, Homo sapien
gcgcgtcaacattccgcgggccagg

SEQ ID NO: 2700830 - DNA, 25 bp, Homo sapien
cttctcgcgcgtgagcgcgccctat

SEQ ID NO: 2700831 - DNA, 25 bp, Homo sapien
cggctcacaccctgcttctcccgct

SEQ ID NO: 2700832 - DNA, 25 bp, Homo sapien
tcggatggctggctcggctctcgct

SEQ ID NO: 2700833 - DNA, 25 bp, Homo sapien
gaggaggcggctcggatggctggct

SEQ ID NO: 2700834 - DNA, 25 bp, Homo sapien
atgggcaagtccggctcacaccctg

SEQ ID NO: 2700835 - DNA, 25 bp, Homo sapien
gggttcattcgtttctcgctgcggg

SEQ ID NO: 2700836 - DNA, 25 bp, Homo sapien
ctgcggaggtaggatcgcctctttt

SEQ ID NO: 2700837 - DNA, 25 bp, Homo sapien
ggatgtctgcaatggtactataatt

SEQ ID NO: 2700838 - DNA, 25 bp, Homo sapien
gggagagaacgttgctgcaccgcct

SEQ ID NO: 2700839 - DNA, 25 bp, Homo sapien
tcagccacgtctagcgcacagtccc

SEQ ID NO: 2700840 - DNA, 25 bp, Homo sapien
ggctcagggattgctaagcaaacgc

SEQ ID NO: 2700841 - DNA, 25 bp, Homo sapien
gcctgggttatagaactctccttcc

SEQ ID NO: 2700842 - DNA, 25 bp, Homo sapien
tccttccagggttgccgtgcaggga

SEQ ID NO: 2700843 - DNA, 25 bp, Homo sapien
gaaaagctgtccaaaagcgcctggc

SEQ ID NO: 2700844 - DNA, 25 bp, Homo sapien
gacagaaatgtaaggagcccaggcc

SEQ ID NO: 2700845 - DNA, 25 bp, Homo sapien
gaacacaagcttagacaccgctgcg

SEQ ID NO: 2700846 - DNA, 25 bp, Homo sapien
caattcgcaaacgtcagttgggcgg

SEQ ID NO: 2700847 - DNA, 25 bp, Homo sapien
tactgtaaatgttcaaagtggagga

SEQ ID NO: 2700848 - DNA, 25 bp, Homo sapien
tcttaccaacaaaaaattgtgcgca

SEQ ID NO: 2700849 - DNA, 25 bp, Homo sapien
aagcgtattccttttccatagctca

SEQ ID NO: 2700850 - DNA, 25 bp, Homo sapien
cctctgggtagtaaacccttctgat

SEQ ID NO: 2700851 - DNA, 25 bp, Homo sapien
acctcctgaacaaacttgcctgcta

SEQ ID NO: 2700852 - DNA, 25 bp, Homo sapien
acttgcctgctaggtattcacagct

SEQ ID NO: 2700853 - DNA, 25 bp, Homo sapien
ctcctgaacaaacttgcctgctagg

SEQ ID NO: 2700854 - DNA, 25 bp, Homo sapien
cctgctaggtattcacagcttcctt

SEQ ID NO: 2700855 - DNA, 25 bp, Homo sapien
agccagtcagccactctcgcgagat

SEQ ID NO: 2700856 - DNA, 25 bp, Homo sapien
tgctcgctgccgctgtctcggtccg

SEQ ID NO: 2700857 - DNA, 25 bp, Homo sapien
caccctgctcgctgccgctgtctcg

SEQ ID NO: 2700858 - DNA, 25 bp, Homo sapien
gctcgctgccgctgtctcggtccgc

SEQ ID NO: 2700859 - DNA, 25 bp, Homo sapien
cgctgccgctgtctcggtccgccat

SEQ ID NO: 2700860 - DNA, 25 bp, Homo sapien
gagccgcccgaacccagcgccgcac

SEQ ID NO: 2700861 - DNA, 25 bp, Homo sapien
cagggagccgcccgaacccagcgcc

SEQ ID NO: 2700862 - DNA, 25 bp, Homo sapien
ccagggagccgcccgaacccagcgc

SEQ ID NO: 2700863 - DNA, 25 bp, Homo sapien
cccagggagccgcccgaacccagcg

SEQ ID NO: 2700864 - DNA, 25 bp, Homo sapien
gtagtcgtcgatgagcttggccaga

SEQ ID NO: 2700865 - DNA, 25 bp, Homo sapien
tcacgtccaggtagaagcgcttgtt

SEQ ID NO: 2700866 - DNA, 25 bp, Homo sapien
aacacgccgtacttgttggagccca

SEQ ID NO: 2700867 - DNA, 25 bp, Homo sapien
tgttgtccacagtcaaggaggtgcc

SEQ ID NO: 2700868 - DNA, 25 bp, Homo sapien
gcacggtgatggagttgcgataggt

SEQ ID NO: 2700869 - DNA, 25 bp, Homo sapien
tagggcacggtgatggagttgcgat

SEQ ID NO: 2700870 - DNA, 25 bp, Homo sapien
ttgtagggcacggtgatggagttgc

SEQ ID NO: 2700871 - DNA, 25 bp, Homo sapien
ggtgatggagttgcgataggtgggc

SEQ ID NO: 2700872 - DNA, 25 bp, Homo sapien
ttgcagaaggtgtgtccgaacttgg

SEQ ID NO: 2700873 - DNA, 25 bp, Homo sapien
cagaaggtgtgtccgaacttggccc

SEQ ID NO: 2700874 - DNA, 25 bp, Homo sapien
gcagaaggtgtgtccgaacttggcc

SEQ ID NO: 2700875 - DNA, 25 bp, Homo sapien
gaaggtgtgtccgaacttggcccac

SEQ ID NO: 2700876 - DNA, 25 bp, Homo sapien
ctgcttctcttgaatcttcttcatc

SEQ ID NO: 2700877 - DNA, 25 bp, Homo sapien
ccctctgcttctcttgaatcttctt

SEQ ID NO: 2700878 - DNA, 25 bp, Homo sapien
ctctgcttctcttgaatcttcttca

SEQ ID NO: 2700879 - DNA, 25 bp, Homo sapien
aggcagcccgcttctccctctgctt

SEQ ID NO: 2700880 - DNA, 25 bp, Homo sapien
caccctgcagtagcagggtggcagc

SEQ ID NO: 2700881 - DNA, 25 bp, Homo sapien
tggcagcggcggtctcctcctgctg

SEQ ID NO: 2700882 - DNA, 25 bp, Homo sapien
gtggcagcggcggtctcctcctgct

SEQ ID NO: 2700883 - DNA, 25 bp, Homo sapien
cttcctcaccctgcagtagcagggt

SEQ ID NO: 2700884 - DNA, 25 bp, Homo sapien
agcagctgcttactgttttatatgg

SEQ ID NO: 2700885 - DNA, 25 bp, Homo sapien
acatccagcgatgggtggcaagtca

SEQ ID NO: 2700886 - DNA, 25 bp, Homo sapien
tatatggtggataaagtggacaaca

SEQ ID NO: 2700887 - DNA, 25 bp, Homo sapien
tggtgctcccttggagttaacaggt

SEQ ID NO: 2700888 - DNA, 25 bp, Homo sapien
tctaatcacaggtatatagggtgtc

SEQ ID NO: 2700889 - DNA, 25 bp, Homo sapien
tataagtttaaggtccagatgcaat

SEQ ID NO: 2700890 - DNA, 25 bp, Homo sapien
ccttgcatgaattaaacctacgtac

SEQ ID NO: 2700891 - DNA, 25 bp, Homo sapien
tttagacaaagctcagacacacagc

SEQ ID NO: 2700892 - DNA, 25 bp, Homo sapien
tagccagtaataactagcaccacag

SEQ ID NO: 2700893 - DNA, 25 bp, Homo sapien
gcctactcagtcaaagcaaacagat

SEQ ID NO: 2700894 - DNA, 25 bp, Homo sapien
ccatggctcagtaggataactataa

SEQ ID NO: 2700895 - DNA, 25 bp, Homo sapien
gcttcagacctcttacaagtttagg

SEQ ID NO: 2700896 - DNA, 25 bp, Homo sapien
ccaaaatgtactgtttaaggcatct

SEQ ID NO: 2700897 - DNA, 25 bp, Homo sapien
tgtactgtttaaggcatctttttta

SEQ ID NO: 2700898 - DNA, 25 bp, Homo sapien
taccaaaatactttctacagaattc

SEQ ID NO: 2700899 - DNA, 25 bp, Homo sapien
tactttctacagaattccaaaccaa

SEQ ID NO: 2700900 - DNA, 25 bp, Homo sapien
tacaatataagaagcactgatacct

SEQ ID NO: 2700901 - DNA, 25 bp, Homo sapien
gataccttcccgctcctacaggtgg

SEQ ID NO: 2700902 - DNA, 25 bp, Homo sapien
ttagatctatatggctggatttgcc

SEQ ID NO: 2700903 - DNA, 25 bp, Homo sapien
tcaaaacccaaaggaccagcagaaa

SEQ ID NO: 2700904 - DNA, 25 bp, Homo sapien
acaatacatgtgcttcttgagccgg

SEQ ID NO: 2700905 - DNA, 25 bp, Homo sapien
tgaaacagtgatctaggagtactcc

SEQ ID NO: 2700906 - DNA, 25 bp, Homo sapien
gaactcgcatctcaaagaaaggaca

SEQ ID NO: 2700907 - DNA, 25 bp, Homo sapien
tgagccggtgggattccaagcagaa

SEQ ID NO: 2700908 - DNA, 25 bp, Homo sapien
tctctctagatgtgaaggcctgaaa

SEQ ID NO: 2700909 - DNA, 25 bp, Homo sapien
ctagtagaggaaaagccgacatggc

SEQ ID NO: 2700910 - DNA, 25 bp, Homo sapien
tcagcatgataaataggaggcacaa

SEQ ID NO: 2700911 - DNA, 25 bp, Homo sapien
ccctgcatgggacaactagaaagtg

SEQ ID NO: 2700912 - DNA, 25 bp, Homo sapien
aaacctaagttgctacagatgccct

SEQ ID NO: 2700913 - DNA, 25 bp, Homo sapien
gggtcaccaggtctagcagataacc

SEQ ID NO: 2700914 - DNA, 25 bp, Homo sapien
tataaagtgcttgggccatgatacc

SEQ ID NO: 2700915 - DNA, 25 bp, Homo sapien
tattgtagacaagaaggtgaaccat

SEQ ID NO: 2700916 - DNA, 25 bp, Homo sapien
gaagaagtaagcttgagtgccactg

SEQ ID NO: 2700917 - DNA, 25 bp, Homo sapien
taactgccacttcacgataaggaca

SEQ ID NO: 2700918 - DNA, 25 bp, Homo sapien
caaactgccagcttaagactatggg

SEQ ID NO: 2700919 - DNA, 25 bp, Homo sapien
tcaaaaaggacgtgtcaaatggcct

SEQ ID NO: 2700920 - DNA, 25 bp, Homo sapien
aatttgtgtgggccaaagtctcaaa

SEQ ID NO: 2700921 - DNA, 25 bp, Homo sapien
ttgtgtgggccaaagtctcaaaatt

SEQ ID NO: 2700922 - DNA, 25 bp, Homo sapien
agaaatttgtgtgggccaaagtctc

SEQ ID NO: 2700923 - DNA, 25 bp, Homo sapien
aagaaatttgtgtgggccaaagtct

SEQ ID NO: 2700924 - DNA, 25 bp, Homo sapien
aaagtaatctgtccaaatcaccagg

SEQ ID NO: 2700925 - DNA, 25 bp, Homo sapien
ttattgagggcctcataaggtctac

SEQ ID NO: 2700926 - DNA, 25 bp, Homo sapien
aaggttaaatggttgctacggatgc

SEQ ID NO: 2700927 - DNA, 25 bp, Homo sapien
cactatcagcttaccctacaaagga

SEQ ID NO: 2700928 - DNA, 25 bp, Homo sapien
gaagatgtgtgatgcccctgaagtt

SEQ ID NO: 2700929 - DNA, 25 bp, Homo sapien
tcttgggtagaggatccatcacact

SEQ ID NO: 2700930 - DNA, 25 bp, Homo sapien
taagataatggctaaccccttggca

SEQ ID NO: 2700931 - DNA, 25 bp, Homo sapien
tctcaggctggaagttaaaactcga

SEQ ID NO: 2700932 - DNA, 25 bp, Homo sapien
cagattaaagcagaactccggcctt

SEQ ID NO: 2700933 - DNA, 25 bp, Homo sapien
ggctgtctacggcacctgaggtcaa

SEQ ID NO: 2700934 - DNA, 25 bp, Homo sapien
taccgctagcgattaggatgtgtgc

SEQ ID NO: 2700935 - DNA, 25 bp, Homo sapien
cagtaatcaaagtgggagtcttccc

SEQ ID NO: 2700936 - DNA, 25 bp, Homo sapien
agccggctgatgcacaacacgtttg

SEQ ID NO: 2700937 - DNA, 25 bp, Homo sapien
gatattgaacaaactcaagccggct

SEQ ID NO: 2700938 - DNA, 25 bp, Homo sapien
gatgggagaacatgacagcaaatat

SEQ ID NO: 2700939 - DNA, 25 bp, Homo sapien
ggtttccacatggtgatttcccagc

SEQ ID NO: 2700940 - DNA, 25 bp, Homo sapien
gcagtacagcagacctcgctagttt

SEQ ID NO: 2700941 - DNA, 25 bp, Homo sapien
ttcaataagcagtacagcagacctc

SEQ ID NO: 2700942 - DNA, 25 bp, Homo sapien
tattttgtaagaatcaatgcctaaa

SEQ ID NO: 2700943 - DNA, 25 bp, Homo sapien
tatattttgtaagaatcaatgccta

SEQ ID NO: 2700944 - DNA, 25 bp, Homo sapien
aaaaaatccaagatcgcaaccagac

SEQ ID NO: 2700945 - DNA, 25 bp, Homo sapien
aaaatccaagatcgcaaccagaccc

SEQ ID NO: 2700946 - DNA, 25 bp, Homo sapien
cactgaaacaaaagactgatctgat

SEQ ID NO: 2700947 - DNA, 25 bp, Homo sapien
aagcactgaaacaaaagactgatct

SEQ ID NO: 2700948 - DNA, 25 bp, Homo sapien
tagagttctctagtatgagagcaca

SEQ ID NO: 2700949 - DNA, 25 bp, Homo sapien
gctactgagtcctaaaaagtttcca

SEQ ID NO: 2700950 - DNA, 25 bp, Homo sapien
tgcttgcagccaattcataagcata

SEQ ID NO: 2700951 - DNA, 25 bp, Homo sapien
gcataagtatacctgctactgagtc

SEQ ID NO: 2700952 - DNA, 25 bp, Homo sapien
tatgccaggatagggaggccattca

SEQ ID NO: 2700953 - DNA, 25 bp, Homo sapien
ttttaaatgacccagtatgccagga

SEQ ID NO: 2700954 - DNA, 25 bp, Homo sapien
ccttccatgagaatggagcatgatc

SEQ ID NO: 2700955 - DNA, 25 bp, Homo sapien
taggttcactgtcataccaccagag

SEQ ID NO: 2700956 - DNA, 25 bp, Homo sapien
tgctgtccaactgaccattgggcat

SEQ ID NO: 2700957 - DNA, 25 bp, Homo sapien
gggcctcttgctgtccaactgacca

SEQ ID NO: 2700958 - DNA, 25 bp, Homo sapien
tcttgctgtccaactgaccattggg

SEQ ID NO: 2700959 - DNA, 25 bp, Homo sapien
ctcggggcctcttgctgtccaactg

SEQ ID NO: 2700960 - DNA, 25 bp, Homo sapien
ctcctgtagcccttcagtaggacct

SEQ ID NO: 2700961 - DNA, 25 bp, Homo sapien
cagcattgccgtgtagttccgacct

SEQ ID NO: 2700962 - DNA, 25 bp, Homo sapien
gtagttccgacctggctgtctggga

SEQ ID NO: 2700963 - DNA, 25 bp, Homo sapien
ctgtagcccttcagtaggacctcac

SEQ ID NO: 2700964 - DNA, 25 bp, Homo sapien
tgcgacacctggtctgacagccaca

SEQ ID NO: 2700965 - DNA, 25 bp, Homo sapien
gccacacaactttagttctgaccct

SEQ ID NO: 2700966 - DNA, 25 bp, Homo sapien
tttctggcttctgcgacacctggtc

SEQ ID NO: 2700967 - DNA, 25 bp, Homo sapien
tgacagccacacaactttagttctg

SEQ ID NO: 2700968 - DNA, 25 bp, Homo sapien
ctggccttaaagcacattcagccct

SEQ ID NO: 2700969 - DNA, 25 bp, Homo sapien
gagaacttcaaccctgtgttgggct

SEQ ID NO: 2700970 - DNA, 25 bp, Homo sapien
ggagaacttcaaccctgtgttgggc

SEQ ID NO: 2700971 - DNA, 25 bp, Homo sapien
cagccccaaaagacctactgatatt

SEQ ID NO: 2700972 - DNA, 25 bp, Homo sapien
tcaaacctaaagctagatgtggccg

SEQ ID NO: 2700973 - DNA, 25 bp, Homo sapien
tgtatgcaactgtaaacccactttt

SEQ ID NO: 2700974 - DNA, 25 bp, Homo sapien
tcatcaagagctgacccagagagtc

SEQ ID NO: 2700975 - DNA, 25 bp, Homo sapien
tagggcacaggaagggacgttctca

SEQ ID NO: 2700976 - DNA, 25 bp, Homo sapien
tctcaagggtctagggtcatgtttc

SEQ ID NO: 2700977 - DNA, 25 bp, Homo sapien
tacacggtggcattctaaggatggc

SEQ ID NO: 2700978 - DNA, 25 bp, Homo sapien
agatgcccgggtatcctcagagagg

SEQ ID NO: 2700979 - DNA, 25 bp, Homo sapien
ctctccacaatgcggaagccatggg

SEQ ID NO: 2700980 - DNA, 25 bp, Homo sapien
ggtactctgggatttatgtccgtgg

SEQ ID NO: 2700981 - DNA, 25 bp, Homo sapien
tcctggaacaaatgagcggctgtgc

SEQ ID NO: 2700982 - DNA, 25 bp, Homo sapien
gagggcacctctggttttatgggtc

SEQ ID NO: 2700983 - DNA, 25 bp, Homo sapien
ccccccttgtcataacctgatgagg

SEQ ID NO: 2700984 - DNA, 25 bp, Homo sapien
cccccttgtcataacctgatgaggg

SEQ ID NO: 2700985 - DNA, 25 bp, Homo sapien
tccttccgctctgtggggcgcagga

SEQ ID NO: 2700986 - DNA, 25 bp, Homo sapien
tgggggctgttgtgcccatatcctg

SEQ ID NO: 2700987 - DNA, 25 bp, Homo sapien
tgtgtccttccgctctgtggggcgc

SEQ ID NO: 2700988 - DNA, 25 bp, Homo sapien
cttccgctctgtggggcgcaggaca

SEQ ID NO: 2700989 - DNA, 25 bp, Homo sapien
cagaatgcaaggtgtcctggctagc

SEQ ID NO: 2700990 - DNA, 25 bp, Homo sapien
gccagtttggagataaggaacctga

SEQ ID NO: 2700991 - DNA, 25 bp, Homo sapien
gaactaacttgcttagggtcccaca

SEQ ID NO: 2700992 - DNA, 25 bp, Homo sapien
taccgtgcccggactatatattctt

SEQ ID NO: 2700993 - DNA, 25 bp, Homo sapien
tttgtcacaggattctgccagtttg

SEQ ID NO: 2700994 - DNA, 25 bp, Homo sapien
catgcagaaaacaccggatgctctt

SEQ ID NO: 2700995 - DNA, 25 bp, Homo sapien
tagtagccccattgtacaagtgagg

SEQ ID NO: 2700996 - DNA, 25 bp, Homo sapien
tgctccacaggaggcctctttcaga

SEQ ID NO: 2700997 - DNA, 25 bp, Homo sapien
catctaggtcaaatatgggagggaa

SEQ ID NO: 2700998 - DNA, 25 bp, Homo sapien
cagtttgcagtactggagtccaggg

SEQ ID NO: 2700999 - DNA, 25 bp, Homo sapien
ggagatagccatcaaaaagccaagc

SEQ ID NO: 2701000 - DNA, 25 bp, Homo sapien
gagccatgtgtatacccagggcaag

SEQ ID NO: 2701001 - DNA, 25 bp, Homo sapien
actgtgttaagcactggagatagcc

SEQ ID NO: 2701002 - DNA, 25 bp, Homo sapien
caaggtcctggccaagcatatttgc

SEQ ID NO: 2701003 - DNA, 25 bp, Homo sapien
ccaaggactgtggaggcaacatggt

SEQ ID NO: 2701004 - DNA, 25 bp, Homo sapien
aacatggtgcagtcgttgggagcct

SEQ ID NO: 2701005 - DNA, 25 bp, Homo sapien
tgttcattcgggagaactgtccaag

SEQ ID NO: 2701006 - DNA, 25 bp, Homo sapien
tcaggtgtcttcacaacagcagtgt

SEQ ID NO: 2701007 - DNA, 25 bp, Homo sapien
tgagggcgtaaccatcgaaggaaaa

SEQ ID NO: 2701008 - DNA, 25 bp, Homo sapien
gacacattctcagtacgctccctga

SEQ ID NO: 2701009 - DNA, 25 bp, Homo sapien
taagattttgacctcaggtcccagg

SEQ ID NO: 2701010 - DNA, 25 bp, Homo sapien
agcacagaggcatggtcagaaggtt

SEQ ID NO: 2701011 - DNA, 25 bp, Homo sapien
tagacagagctgtactaataggaga

SEQ ID NO: 2701012 - DNA, 25 bp, Homo sapien
gacagctgtgaaaggtagagaagaa

SEQ ID NO: 2701013 - DNA, 25 bp, Homo sapien
actcatataagtgggaaagaagaca

SEQ ID NO: 2701014 - DNA, 25 bp, Homo sapien
taggcttcccagataagactatcag

SEQ ID NO: 2701015 - DNA, 25 bp, Homo sapien
tccctgcactgccaagaaggtttca

SEQ ID NO: 2701016 - DNA, 25 bp, Homo sapien
tcttttagtgtcaggcaatgggcca

SEQ ID NO: 2701017 - DNA, 25 bp, Homo sapien
tgtggttctcgaagatcaaacgtgt

SEQ ID NO: 2701018 - DNA, 25 bp, Homo sapien
ctcagagcaagtgaggagcagccgg

SEQ ID NO: 2701019 - DNA, 25 bp, Homo sapien
gccgcgaaccgggagtcacctgatc

SEQ ID NO: 2701020 - DNA, 25 bp, Homo sapien
cagccgggcgcctgacgtcacggcc

SEQ ID NO: 2701021 - DNA, 25 bp, Homo sapien
gggagtcacctgatcaccctggcaa

SEQ ID NO: 2701022 - DNA, 25 bp, Homo sapien
tcctctccacgaaccgactggataa

SEQ ID NO: 2701023 - DNA, 25 bp, Homo sapien
taacggtcgggtctgaacctgagga

SEQ ID NO: 2701024 - DNA, 25 bp, Homo sapien
ggaccagcccgcagtagacttgccg

SEQ ID NO: 2701025 - DNA, 25 bp, Homo sapien
gactggataacggtcgggtctgaac

SEQ ID NO: 2701026 - DNA, 25 bp, Homo sapien
gatttgcactcctttgagtgctgca

SEQ ID NO: 2701027 - DNA, 25 bp, Homo sapien
gcaccggtttctatatttacgcaca

SEQ ID NO: 2701028 - DNA, 25 bp, Homo sapien
tatttacgcacaaaccagctgcggc

SEQ ID NO: 2701029 - DNA, 25 bp, Homo sapien
gcctttcactgtacaggatccctgg

SEQ ID NO: 2701030 - DNA, 25 bp, Homo sapien
gccgtactgtgggtatccttggtag

SEQ ID NO: 2701031 - DNA, 25 bp, Homo sapien
cctggacccattggttgtggtggat

SEQ ID NO: 2701032 - DNA, 25 bp, Homo sapien
cctggatatggtggagggttctctt

SEQ ID NO: 2701033 - DNA, 25 bp, Homo sapien
gtccaccctgccagccgtactgtgg

SEQ ID NO: 2701034 - DNA, 25 bp, Homo sapien
caggcctgaataccaactactccga

SEQ ID NO: 2701035 - DNA, 25 bp, Homo sapien
tgccctcttccgagcatgcatgata

SEQ ID NO: 2701036 - DNA, 25 bp, Homo sapien
tatactggttatacttcctgccctc

SEQ ID NO: 2701037 - DNA, 25 bp, Homo sapien
cctcttccgagcatgcatgataaaa

SEQ ID NO: 2701038 - DNA, 25 bp, Homo sapien
tcaatcgtgattggtaacactgaac

SEQ ID NO: 2701039 - DNA, 25 bp, Homo sapien
catttgtgaaatcaatcgtgattgg

SEQ ID NO: 2701040 - DNA, 25 bp, Homo sapien
tggtaacactgaactaaggagcctt

SEQ ID NO: 2701041 - DNA, 25 bp, Homo sapien
tcaactgcatttgtgaaatcaatcg

SEQ ID NO: 2701042 - DNA, 25 bp, Homo sapien
aagcagcagctcaatactcccagga

SEQ ID NO: 2701043 - DNA, 25 bp, Homo sapien
agcagcagctcaatactcccaggat

SEQ ID NO: 2701044 - DNA, 25 bp, Homo sapien
gcagcagctcaatactcccaggatt

SEQ ID NO: 2701045 - DNA, 25 bp, Homo sapien
ggaagcagcagctcaatactcccag

SEQ ID NO: 2701046 - DNA, 25 bp, Homo sapien
cactgcaataagtaaggaggggtag

SEQ ID NO: 2701047 - DNA, 25 bp, Homo sapien
tgtaggccaacagaacactgcaata

SEQ ID NO: 2701048 - DNA, 25 bp, Homo sapien
gtacagtggcaaatcgtctacacca

SEQ ID NO: 2701049 - DNA, 25 bp, Homo sapien
gggtagtttccctccaagctgagga

SEQ ID NO: 2701050 - DNA, 25 bp, Homo sapien
ttcctttcccgttctatcacgtaca

SEQ ID NO: 2701051 - DNA, 25 bp, Homo sapien
tcttcctttcccgttctatcacgta

SEQ ID NO: 2701052 - DNA, 25 bp, Homo sapien
ccatcttcctttcccgttctatcac

SEQ ID NO: 2701053 - DNA, 25 bp, Homo sapien
tgtccatcttcctttcccgttctat

SEQ ID NO: 2701054 - DNA, 25 bp, Homo sapien
tgtagggaaatactcggatcttagc

SEQ ID NO: 2701055 - DNA, 25 bp, Homo sapien
ggctgtagggaaatactcggatctt

SEQ ID NO: 2701056 - DNA, 25 bp, Homo sapien
tagggaaatactcggatcttagctg

SEQ ID NO: 2701057 - DNA, 25 bp, Homo sapien
cctgtaacaggaggtagcagggctg

SEQ ID NO: 2701058 - DNA, 25 bp, Homo sapien
taattgagccttattaggtccttct

SEQ ID NO: 2701059 - DNA, 25 bp, Homo sapien
tcaggtgaaggctccaattctcagc

SEQ ID NO: 2701060 - DNA, 25 bp, Homo sapien
tgcatggctgggactttgtaaatga

SEQ ID NO: 2701061 - DNA, 25 bp, Homo sapien
gaatcgagtgccttgatgtggtaat

SEQ ID NO: 2701062 - DNA, 25 bp, Homo sapien
aggtggatggtcctagctcatctct

SEQ ID NO: 2701063 - DNA, 25 bp, Homo sapien
caggtggatggtcctagctcatctc

SEQ ID NO: 2701064 - DNA, 25 bp, Homo sapien
ggtggatggtcctagctcatctctt

SEQ ID NO: 2701065 - DNA, 25 bp, Homo sapien
agcagagctggcaggacaggacggc

SEQ ID NO: 2701066 - DNA, 25 bp, Homo sapien
gcagagctggcaggacaggacggct

SEQ ID NO: 2701067 - DNA, 25 bp, Homo sapien
gagctggcaggacaggacggctggg

SEQ ID NO: 2701068 - DNA, 25 bp, Homo sapien
tgtcagaggtggcagcagagctggc

SEQ ID NO: 2701069 - DNA, 25 bp, Homo sapien
cattaatctagaatcccatagtgct

SEQ ID NO: 2701070 - DNA, 25 bp, Homo sapien
tagaggtgtctgtgcaaagctagtc

SEQ ID NO: 2701071 - DNA, 25 bp, Homo sapien
ccatagtgctgaaggtagaggtgtc

SEQ ID NO: 2701072 - DNA, 25 bp, Homo sapien
gatgtgttacatttggccactacct

SEQ ID NO: 2701073 - DNA, 25 bp, Homo sapien
gctttggacaaatttattgaaacat

SEQ ID NO: 2701074 - DNA, 25 bp, Homo sapien
ttgaaacatacaggcggctgttagc

SEQ ID NO: 2701075 - DNA, 25 bp, Homo sapien
tttattgaaacatacaggcggctgt

SEQ ID NO: 2701076 - DNA, 25 bp, Homo sapien
agctttggacaaatttattgaaaca

SEQ ID NO: 2701077 - DNA, 25 bp, Homo sapien
tggccctcagaactggccgcctttg

SEQ ID NO: 2701078 - DNA, 25 bp, Homo sapien
cctggccctcagaactggccgcctt

SEQ ID NO: 2701079 - DNA, 25 bp, Homo sapien
tcagaactggccgcctttgtagcac

SEQ ID NO: 2701080 - DNA, 25 bp, Homo sapien
gccctcagaactggccgcctttgta

SEQ ID NO: 2701081 - DNA, 25 bp, Homo sapien
ctgtggccaaatatgagatgagtgg

SEQ ID NO: 2701082 - DNA, 25 bp, Homo sapien
ccaaatatgagatgagtggcacggc

SEQ ID NO: 2701083 - DNA, 25 bp, Homo sapien
atatgagatgagtggcacggctgac

SEQ ID NO: 2701084 - DNA, 25 bp, Homo sapien
tggccaaatatgagatgagtggcac

SEQ ID NO: 2701085 - DNA, 25 bp, Homo sapien
cactgcttcggagggaaggcagagt

SEQ ID NO: 2701086 - DNA, 25 bp, Homo sapien
cagctgatggaggaaaatcggactt

SEQ ID NO: 2701087 - DNA, 25 bp, Homo sapien
ctagctgtcagctgcggcttctcgg

SEQ ID NO: 2701088 - DNA, 25 bp, Homo sapien
gagagcaccggtaaacatttatcag

SEQ ID NO: 2701089 - DNA, 25 bp, Homo sapien
caacggtgtgatccagctggctcat

SEQ ID NO: 2701090 - DNA, 25 bp, Homo sapien
taagatggacgccataatcctgagg

SEQ ID NO: 2701091 - DNA, 25 bp, Homo sapien
tgcaagccagttgtcaaacacagcc

SEQ ID NO: 2701092 - DNA, 25 bp, Homo sapien
ctcagtgaacagaatagcagtccct

SEQ ID NO: 2701093 - DNA, 25 bp, Homo sapien
tcagtgcgatgcgagacagccccac

SEQ ID NO: 2701094 - DNA, 25 bp, Homo sapien
ccactcagtgcgatgcgagacagcc

SEQ ID NO: 2701095 - DNA, 25 bp, Homo sapien
actcagtgcgatgcgagacagcccc

SEQ ID NO: 2701096 - DNA, 25 bp, Homo sapien
gtgcgatgcgagacagccccacagc

SEQ ID NO: 2701097 - DNA, 25 bp, Homo sapien
gacagcgaaaagatggccattgcct

SEQ ID NO: 2701098 - DNA, 25 bp, Homo sapien
ccagtgagcgaacacgagaattagt

SEQ ID NO: 2701099 - DNA, 25 bp, Homo sapien
cattttacagatctgccagtgagcg

SEQ ID NO: 2701100 - DNA, 25 bp, Homo sapien
tgtgggcagttggtaccctctgacc

SEQ ID NO: 2701101 - DNA, 25 bp, Homo sapien
gcggctcagggcacatgtgccctca

SEQ ID NO: 2701102 - DNA, 25 bp, Homo sapien
cctgctgcagccgtggccatgctgt

SEQ ID NO: 2701103 - DNA, 25 bp, Homo sapien
gccgtggccatgctgtcccattttc

SEQ ID NO: 2701104 - DNA, 25 bp, Homo sapien
ctcagggcacatgtgccctcagggc

SEQ ID NO: 2701105 - DNA, 25 bp, Homo sapien
tcagtctgtcggcaggtaaaagcac

SEQ ID NO: 2701106 - DNA, 25 bp, Homo sapien
cagtctgtcggcaggtaaaagcaca

SEQ ID NO: 2701107 - DNA, 25 bp, Homo sapien
cagacatgatccctactctttggag

SEQ ID NO: 2701108 - DNA, 25 bp, Homo sapien
taatctccagggataagtgtgtgct

SEQ ID NO: 2701109 - DNA, 25 bp, Homo sapien
gaagcagacagccacctaaaagtat

SEQ ID NO: 2701110 - DNA, 25 bp, Homo sapien
gccagttcttggtgctagggttata

SEQ ID NO: 2701111 - DNA, 25 bp, Homo sapien
gagttccttgattccatcagatgtt

SEQ ID NO: 2701112 - DNA, 25 bp, Homo sapien
gagctgagttctcaagtccctctgt

SEQ ID NO: 2701113 - DNA, 25 bp, Homo sapien
aacttgccggactccatttatctgg

SEQ ID NO: 2701114 - DNA, 25 bp, Homo sapien
ttaatatggcttaagaccccacacg

SEQ ID NO: 2701115 - DNA, 25 bp, Homo sapien
caatatcctgggcacatctgttacc

SEQ ID NO: 2701116 - DNA, 25 bp, Homo sapien
tgttacccattcatgactcatagga

SEQ ID NO: 2701117 - DNA, 25 bp, Homo sapien
aagtggtcagttctgttagacctga

SEQ ID NO: 2701118 - DNA, 25 bp, Homo sapien
ctcccttggtggtaaggggactgct

SEQ ID NO: 2701119 - DNA, 25 bp, Homo sapien
tctgttagacctgagtcgcaagtgc

SEQ ID NO: 2701120 - DNA, 25 bp, Homo sapien
gacctgagtcgcaagtgctctgtat

SEQ ID NO: 2701121 - DNA, 25 bp, Homo sapien
gcgttgtcggactgaattgctaaaa

SEQ ID NO: 2701122 - DNA, 25 bp, Homo sapien
tctaggcctgtttagttgtcgggcg

SEQ ID NO: 2701123 - DNA, 25 bp, Homo sapien
caaataagcgggaggtggttctaag

SEQ ID NO: 2701124 - DNA, 25 bp, Homo sapien
ggccagccctggctactgtctgtaa

SEQ ID NO: 2701125 - DNA, 25 bp, Homo sapien
gattacctgccaattgctaccgaga

SEQ ID NO: 2701126 - DNA, 25 bp, Homo sapien
tcttctggtgctactccatgcaggg

SEQ ID NO: 2701127 - DNA, 25 bp, Homo sapien
taacagatatcagtgtctccccgtg

SEQ ID NO: 2701128 - DNA, 25 bp, Homo sapien
tggacttcagtcttgcctaggcgat

SEQ ID NO: 2701129 - DNA, 25 bp, Homo sapien
cagagccttcaagtgccaaacagag

SEQ ID NO: 2701130 - DNA, 25 bp, Homo sapien
tgaaataccacaagcctgagaactg

SEQ ID NO: 2701131 - DNA, 25 bp, Homo sapien
caaacagagtatgtccgatggtatc

SEQ ID NO: 2701132 - DNA, 25 bp, Homo sapien
tactcaagtaccaccaagggatctg

SEQ ID NO: 2701133 - DNA, 25 bp, Homo sapien
ctctcggtgcgggaccatgaagctg

SEQ ID NO: 2701134 - DNA, 25 bp, Homo sapien
ttcgaaagtgactggtgcctcgccg

SEQ ID NO: 2701135 - DNA, 25 bp, Homo sapien
gacactcaagaagagcgagctgcgc

SEQ ID NO: 2701136 - DNA, 25 bp, Homo sapien
ggtgcccggcggaatctcctgagct

SEQ ID NO: 2701137 - DNA, 25 bp, Homo sapien
aggcttgcacagaatctcagaacca

SEQ ID NO: 2701138 - DNA, 25 bp, Homo sapien
ggcttgcacagaatctcagaaccag

SEQ ID NO: 2701139 - DNA, 25 bp, Homo sapien
gaggcttgcacagaatctcagaacc

SEQ ID NO: 2701140 - DNA, 25 bp, Homo sapien
tgggtactcccagttccttgctctc

SEQ ID NO: 2701141 - DNA, 25 bp, Homo sapien
tccagctcccctgaaggaatatttc

SEQ ID NO: 2701142 - DNA, 25 bp, Homo sapien
tctttgggtactcccagttccttgc

SEQ ID NO: 2701143 - DNA, 25 bp, Homo sapien
ttctaggagcactggaggcttcaaa

SEQ ID NO: 2701144 - DNA, 25 bp, Homo sapien
tgcctgtctctctccactccagcgc

SEQ ID NO: 2701145 - DNA, 25 bp, Homo sapien
ctgcctgtctctctccactccagcg

SEQ ID NO: 2701146 - DNA, 25 bp, Homo sapien
tagacagtgttattgagggcatttc

SEQ ID NO: 2701147 - DNA, 25 bp, Homo sapien
atgaaggtgggtagacagtgttatt

SEQ ID NO: 2701148 - DNA, 25 bp, Homo sapien
tctcccatgtccaggagcagagatg

SEQ ID NO: 2701149 - DNA, 25 bp, Homo sapien
tgttattgagggcatttctcccatg

SEQ ID NO: 2701150 - DNA, 25 bp, Homo sapien
ggcagtccagcagtacaaggccctc

SEQ ID NO: 2701151 - DNA, 25 bp, Homo sapien
agtccagcagtacaaggccctcggc

SEQ ID NO: 2701152 - DNA, 25 bp, Homo sapien
agctgggcagtccagcagtacaagg

SEQ ID NO: 2701153 - DNA, 25 bp, Homo sapien
acgtggggggcactccaccggcctg

SEQ ID NO: 2701154 - DNA, 25 bp, Homo sapien
ctggttgtaatgctggggtctctgc

SEQ ID NO: 2701155 - DNA, 25 bp, Homo sapien
cctgtggtctggttgtaatgctggg

SEQ ID NO: 2701156 - DNA, 25 bp, Homo sapien
gctctgggctcagcgactccaccct

SEQ ID NO: 2701157 - DNA, 25 bp, Homo sapien
agcgactccaccctggtcacctgct

SEQ ID NO: 2701158 - DNA, 25 bp, Homo sapien
cctgggcccagggaggggctctcac

SEQ ID NO: 2701159 - DNA, 25 bp, Homo sapien
gtcctgggcccagggaggggctctc

SEQ ID NO: 2701160 - DNA, 25 bp, Homo sapien
tggtcctgggcccagggaggggctc

SEQ ID NO: 2701161 - DNA, 25 bp, Homo sapien
cagggtcttggtcctgggcccaggg

SEQ ID NO: 2701162 - DNA, 25 bp, Homo sapien
cttcctcattgtcagaagcctttct

SEQ ID NO: 2701163 - DNA, 25 bp, Homo sapien
ttcctcattgtcagaagcctttctt

SEQ ID NO: 2701164 - DNA, 25 bp, Homo sapien
gctcctggaggtagcttctgtctca

SEQ ID NO: 2701165 - DNA, 25 bp, Homo sapien
agctcctggaggtagcttctgtctc

SEQ ID NO: 2701166 - DNA, 25 bp, Homo sapien
cagctcctggaggtagcttctgtct

SEQ ID NO: 2701167 - DNA, 25 bp, Homo sapien
ctcctggaggtagcttctgtctcag

SEQ ID NO: 2701168 - DNA, 25 bp, Homo sapien
cgcagtcgaacaaaggctcccagtg

SEQ ID NO: 2701169 - DNA, 25 bp, Homo sapien
ggttccgcagtcgaacaaaggctcc

SEQ ID NO: 2701170 - DNA, 25 bp, Homo sapien
cagtaccacagggttccgcagtcga

SEQ ID NO: 2701171 - DNA, 25 bp, Homo sapien
gacacctcagtaagggaccccagta

SEQ ID NO: 2701172 - DNA, 25 bp, Homo sapien
tagccctttcccagcatacaggggc

SEQ ID NO: 2701173 - DNA, 25 bp, Homo sapien
tgctgcccgtcccatctcatggtag

SEQ ID NO: 2701174 - DNA, 25 bp, Homo sapien
tcccagcatacaggggcccaggaga

SEQ ID NO: 2701175 - DNA, 25 bp, Homo sapien
cagctgctgcccgtcccatctcatg

SEQ ID NO: 2701176 - DNA, 25 bp, Homo sapien
gcccgacgaactgaccactggaatt

SEQ ID NO: 2701177 - DNA, 25 bp, Homo sapien
ctgagatggcagacatttgggcggg

SEQ ID NO: 2701178 - DNA, 25 bp, Homo sapien
cactgtcacctcctctaggaatgca

SEQ ID NO: 2701179 - DNA, 25 bp, Homo sapien
tgccagaaggtcatgaaggttgctg

SEQ ID NO: 2701180 - DNA, 25 bp, Homo sapien
aggttggctgaggatctccaaccag

SEQ ID NO: 2701181 - DNA, 25 bp, Homo sapien
caggttggctgaggatctccaacca

SEQ ID NO: 2701182 - DNA, 25 bp, Homo sapien
tggcccatggcggtgcctgtcctca

SEQ ID NO: 2701183 - DNA, 25 bp, Homo sapien
gatctcccgctgttgcgagggaagc

SEQ ID NO: 2701184 - DNA, 25 bp, Homo sapien
cgggacggcgggacctctgatctcc

SEQ ID NO: 2701185 - DNA, 25 bp, Homo sapien
gctgtgtgcgtgtggcccatggcgg

SEQ ID NO: 2701186 - DNA, 25 bp, Homo sapien
ccttgtttcctcccagctcgcctca

SEQ ID NO: 2701187 - DNA, 25 bp, Homo sapien
cccttgtttcctcccagctcgcctc

SEQ ID NO: 2701188 - DNA, 25 bp, Homo sapien
acccttgtttcctcccagctcgcct

SEQ ID NO: 2701189 - DNA, 25 bp, Homo sapien
cttgtttcctcccagctcgcctcac

SEQ ID NO: 2701190 - DNA, 25 bp, Homo sapien
cgagggtcgtcagtgatccaggttt

SEQ ID NO: 2701191 - DNA, 25 bp, Homo sapien
cgcccgagggtcgtcagtgatccag

SEQ ID NO: 2701192 - DNA, 25 bp, Homo sapien
tcccgcccgagggtcgtcagtgatc

SEQ ID NO: 2701193 - DNA, 25 bp, Homo sapien
cccgagggtcgtcagtgatccaggt

SEQ ID NO: 2701194 - DNA, 25 bp, Homo sapien
aagtgatggcattagtgacagtggc

SEQ ID NO: 2701195 - DNA, 25 bp, Homo sapien
tgacagtggccaggtaaatgtagag

SEQ ID NO: 2701196 - DNA, 25 bp, Homo sapien
tagagtacggccgagaagcactgga

SEQ ID NO: 2701197 - DNA, 25 bp, Homo sapien
ccccaaaagtgatggcattagtgac

SEQ ID NO: 2701198 - DNA, 25 bp, Homo sapien
gaagctttgggagagcctccttaac

SEQ ID NO: 2701199 - DNA, 25 bp, Homo sapien
gagagcctccttaacttacccatag

SEQ ID NO: 2701200 - DNA, 25 bp, Homo sapien
tgaagtcctcggggtcctttgaagc

SEQ ID NO: 2701201 - DNA, 25 bp, Homo sapien
taggggacaccaacgcttgtgcctg

SEQ ID NO: 2701202 - DNA, 25 bp, Homo sapien
gctgtgcccaggaaactttccagca

SEQ ID NO: 2701203 - DNA, 25 bp, Homo sapien
tgctgtgcccaggaaactttccagc

SEQ ID NO: 2701204 - DNA, 25 bp, Homo sapien
caggcgctcaaagaccagcactggc

SEQ ID NO: 2701205 - DNA, 25 bp, Homo sapien
aagagcaggcgctcaaagaccagca

SEQ ID NO: 2701206 - DNA, 25 bp, Homo sapien
tcctattcacccagccaggagcagg

SEQ ID NO: 2701207 - DNA, 25 bp, Homo sapien
tctgcttcccactaaacccaggtca

SEQ ID NO: 2701208 - DNA, 25 bp, Homo sapien
aacccaaacagatagctcccactct

SEQ ID NO: 2701209 - DNA, 25 bp, Homo sapien
accatggcactagtgagggtccggt

SEQ ID NO: 2701210 - DNA, 25 bp, Homo sapien
acccataggcggaagggcaggtagt

SEQ ID NO: 2701211 - DNA, 25 bp, Homo sapien
ccacccataggcggaagggcaggta

SEQ ID NO: 2701212 - DNA, 25 bp, Homo sapien
ccagatgcccacccataggcggaag

SEQ ID NO: 2701213 - DNA, 25 bp, Homo sapien
agatgcccacccataggcggaaggg

SEQ ID NO: 2701214 - DNA, 25 bp, Homo sapien
tcctcagtgaagcgggtgaagtagc

SEQ ID NO: 2701215 - DNA, 25 bp, Homo sapien
cagaggcacccgtaggcagaggacc

SEQ ID NO: 2701216 - DNA, 25 bp, Homo sapien
tcctgggcctgggtattggcagagg

SEQ ID NO: 2701217 - DNA, 25 bp, Homo sapien
ccaggcttctggataggataggtat

SEQ ID NO: 2701218 - DNA, 25 bp, Homo sapien
ttggccttgtccttatccattgaga

SEQ ID NO: 2701219 - DNA, 25 bp, Homo sapien
tttggccttgtccttatccattgag

SEQ ID NO: 2701220 - DNA, 25 bp, Homo sapien
tggccttgtccttatccattgagac

SEQ ID NO: 2701221 - DNA, 25 bp, Homo sapien
ggccttgtccttatccattgagact

SEQ ID NO: 2701222 - DNA, 25 bp, Homo sapien
agctagaaaccaccgactgccttgg

SEQ ID NO: 2701223 - DNA, 25 bp, Homo sapien
agaaaccaccgactgccttggtctc

SEQ ID NO: 2701224 - DNA, 25 bp, Homo sapien
cttaacctatgggtaggaagagcta

SEQ ID NO: 2701225 - DNA, 25 bp, Homo sapien
tccttaacctatgggtaggaagagc

SEQ ID NO: 2701226 - DNA, 25 bp, Homo sapien
gttataggcaatggagtaaatgtcc

SEQ ID NO: 2701227 - DNA, 25 bp, Homo sapien
gcaatggagtaaatgtcctgctctc

SEQ ID NO: 2701228 - DNA, 25 bp, Homo sapien
gtaaatgtcctgctctcctggacca

SEQ ID NO: 2701229 - DNA, 25 bp, Homo sapien
agtggagttataggcaatggagtaa

SEQ ID NO: 2701230 - DNA, 25 bp, Homo sapien
aatgtctgggactgtatgacagcca

SEQ ID NO: 2701231 - DNA, 25 bp, Homo sapien
gaagaagcggctggtctttacacac

SEQ ID NO: 2701232 - DNA, 25 bp, Homo sapien
ttacacacttgagggccatagcaaa

SEQ ID NO: 2701233 - DNA, 25 bp, Homo sapien
ccgggtgcactcaggtggcggcagc

SEQ ID NO: 2701234 - DNA, 25 bp, Homo sapien
gactgaggagaagtcgctgagccct

SEQ ID NO: 2701235 - DNA, 25 bp, Homo sapien
gagaagtcgctgagccctttgcgca

SEQ ID NO: 2701236 - DNA, 25 bp, Homo sapien
ctttggtgtggctaggcccaggaaa

SEQ ID NO: 2701237 - DNA, 25 bp, Homo sapien
atcaaggccacagccgagcaggatg

SEQ ID NO: 2701238 - DNA, 25 bp, Homo sapien
gctccaaaaggtgacaccagccagc

SEQ ID NO: 2701239 - DNA, 25 bp, Homo sapien
caccaggggttggctccaaaaggtg

SEQ ID NO: 2701240 - DNA, 25 bp, Homo sapien
tattccatgcggttgaggatgactg

SEQ ID NO: 2701241 - DNA, 25 bp, Homo sapien
cagtctgtattccatgcggttgagg

SEQ ID NO: 2701242 - DNA, 25 bp, Homo sapien
caggtagtggtgggggcaatgagga

SEQ ID NO: 2701243 - DNA, 25 bp, Homo sapien
gtagtggtgggggcaatgaggatga

SEQ ID NO: 2701244 - DNA, 25 bp, Homo sapien
ctgcaggtagtggtgggggcaatga

SEQ ID NO: 2701245 - DNA, 25 bp, Homo sapien
tagtggtgggggcaatgaggatgaa

SEQ ID NO: 2701246 - DNA, 25 bp, Homo sapien
gctctctctccgaagactgtccatg

SEQ ID NO: 2701247 - DNA, 25 bp, Homo sapien
tgctctctctccgaagactgtccat

SEQ ID NO: 2701248 - DNA, 25 bp, Homo sapien
cagtggctgagacataccaaggcag

SEQ ID NO: 2701249 - DNA, 25 bp, Homo sapien
caaggcagtccaagcgctgatgtga

SEQ ID NO: 2701250 - DNA, 25 bp, Homo sapien
ggctcctgtaaggatgaacaccacc

SEQ ID NO: 2701251 - DNA, 25 bp, Homo sapien
tcctgtaaggatgaacaccaccagg

SEQ ID NO: 2701252 - DNA, 25 bp, Homo sapien
gaggctcctgtaaggatgaacacca

SEQ ID NO: 2701253 - DNA, 25 bp, Homo sapien
tggaggctcctgtaaggatgaacac

SEQ ID NO: 2701254 - DNA, 25 bp, Homo sapien
tgaatgctgctgagcgctgccaccc

SEQ ID NO: 2701255 - DNA, 25 bp, Homo sapien
tatacaggaagatgccatagagcac

SEQ ID NO: 2701256 - DNA, 25 bp, Homo sapien
ccccatatacaggaagatgccatag

SEQ ID NO: 2701257 - DNA, 25 bp, Homo sapien
ctgaatgctgctgagcgctgccacc

SEQ ID NO: 2701258 - DNA, 25 bp, Homo sapien
gctgcaggggtagacttgattatcc

SEQ ID NO: 2701259 - DNA, 25 bp, Homo sapien
cctggtcagaggcacatgccgcaag

SEQ ID NO: 2701260 - DNA, 25 bp, Homo sapien
gacttgattatccaaagcagcccca

SEQ ID NO: 2701261 - DNA, 25 bp, Homo sapien
tcagaggcacatgccgcaagagtag

SEQ ID NO: 2701262 - DNA, 25 bp, Homo sapien
gcaggaatagaaacatggcccaggc

SEQ ID NO: 2701263 - DNA, 25 bp, Homo sapien
ctgcaggaatagaaacatggcccag

SEQ ID NO: 2701264 - DNA, 25 bp, Homo sapien
tgcaggaatagaaacatggcccagg

SEQ ID NO: 2701265 - DNA, 25 bp, Homo sapien
gctcatccagccagaggagttcctg

SEQ ID NO: 2701266 - DNA, 25 bp, Homo sapien
ggagttcctgtggtgagaagaccct

SEQ ID NO: 2701267 - DNA, 25 bp, Homo sapien
actgaatgagtgttctggctccagc

SEQ ID NO: 2701268 - DNA, 25 bp, Homo sapien
tccagccccttctcagggatgcttc

SEQ ID NO: 2701269 - DNA, 25 bp, Homo sapien
tggagatattatttagggacagctc

SEQ ID NO: 2701270 - DNA, 25 bp, Homo sapien
agatattatttagggacagctcctg

SEQ ID NO: 2701271 - DNA, 25 bp, Homo sapien
tctcccaaaccctgacacattctcc

SEQ ID NO: 2701272 - DNA, 25 bp, Homo sapien
tcctggacaagaacgctctcccaaa

SEQ ID NO: 2701273 - DNA, 25 bp, Homo sapien
tttctggagcctttggctgatacat

SEQ ID NO: 2701274 - DNA, 25 bp, Homo sapien
ggggtctccactcccagactcctac

SEQ ID NO: 2701275 - DNA, 25 bp, Homo sapien
ctccactcccagactcctactccag

SEQ ID NO: 2701276 - DNA, 25 bp, Homo sapien
ggtctccactcccagactcctactc

SEQ ID NO: 2701277 - DNA, 25 bp, Homo sapien
cctggggtctccactcccagactcc

SEQ ID NO: 2701278 - DNA, 25 bp, Homo sapien
aggagcacttccctcacaccctcac

SEQ ID NO: 2701279 - DNA, 25 bp, Homo sapien
agggtgttctatggcctaaaagaga

SEQ ID NO: 2701280 - DNA, 25 bp, Homo sapien
gtgttctatggcctaaaagagagat

SEQ ID NO: 2701281 - DNA, 25 bp, Homo sapien
gaagatgagggtgttctatggccta

SEQ ID NO: 2701282 - DNA, 25 bp, Homo sapien
gatgagggtgttctatggcctaaaa

SEQ ID NO: 2701283 - DNA, 25 bp, Homo sapien
tggtgaggccaaagcaagtgctcag

SEQ ID NO: 2701284 - DNA, 25 bp, Homo sapien
ggccaaagcaagtgctcaggggaca

SEQ ID NO: 2701285 - DNA, 25 bp, Homo sapien
aatagaagacatggtgaggccaaag

SEQ ID NO: 2701286 - DNA, 25 bp, Homo sapien
ctaatagaagacatggtgaggccaa

SEQ ID NO: 2701287 - DNA, 25 bp, Homo sapien
tcctgacttcctgagtaagcacctg

SEQ ID NO: 2701288 - DNA, 25 bp, Homo sapien
aaaatgtcctgacttcctgagtaag

SEQ ID NO: 2701289 - DNA, 25 bp, Homo sapien
ggccaaaaatgtcctgacttcctga

SEQ ID NO: 2701290 - DNA, 25 bp, Homo sapien
gacttcctgagtaagcacctgtgaa

SEQ ID NO: 2701291 - DNA, 25 bp, Homo sapien
ctgcccttcagtccttccccaagcc

SEQ ID NO: 2701292 - DNA, 25 bp, Homo sapien
tgcccttcagtccttccccaagccg

SEQ ID NO: 2701293 - DNA, 25 bp, Homo sapien
gctgcccttcagtccttccccaagc

SEQ ID NO: 2701294 - DNA, 25 bp, Homo sapien
agtgaatggggcctgatcagtccct

SEQ ID NO: 2701295 - DNA, 25 bp, Homo sapien
ttcgtggctcaggaccttttaatga

SEQ ID NO: 2701296 - DNA, 25 bp, Homo sapien
ggctcaccagcctttcctaagtgca

SEQ ID NO: 2701297 - DNA, 25 bp, Homo sapien
aacatgcttgcttcctgccactctc

SEQ ID NO: 2701298 - DNA, 25 bp, Homo sapien
gacagaaagttcaaaatgggaagcg

SEQ ID NO: 2701299 - DNA, 25 bp, Homo sapien
ctgtgaggacagaaagttcaaaatg

SEQ ID NO: 2701300 - DNA, 25 bp, Homo sapien
tgaggacagaaagttcaaaatggga

SEQ ID NO: 2701301 - DNA, 25 bp, Homo sapien
acagaaagttcaaaatgggaagcgc

SEQ ID NO: 2701302 - DNA, 25 bp, Homo sapien
gaatatttattctggaaagactggc

SEQ ID NO: 2701303 - DNA, 25 bp, Homo sapien
aaacagatgaatatttattctggaa

SEQ ID NO: 2701304 - DNA, 25 bp, Homo sapien
gatgaaaagagttccctgatggccc

SEQ ID NO: 2701305 - DNA, 25 bp, Homo sapien
agatgaaaagagttccctgatggcc

SEQ ID NO: 2701306 - DNA, 25 bp, Homo sapien
ggtcttccctgaacacccatcttaa

SEQ ID NO: 2701307 - DNA, 25 bp, Homo sapien
tcaagtctcagcttaaaggcaatcc

SEQ ID NO: 2701308 - DNA, 25 bp, Homo sapien
tatgtgtcactccttgactgtaggc

SEQ ID NO: 2701309 - DNA, 25 bp, Homo sapien
tcactacaaggtaaactccatgaaa

SEQ ID NO: 2701310 - DNA, 25 bp, Homo sapien
agaagctctccttggctggtaccat

SEQ ID NO: 2701311 - DNA, 25 bp, Homo sapien
cttttgtagaagctctccttggctg

SEQ ID NO: 2701312 - DNA, 25 bp, Homo sapien
tagaagctctccttggctggtacca

SEQ ID NO: 2701313 - DNA, 25 bp, Homo sapien
ttgtagaagctctccttggctggta

SEQ ID NO: 2701314 - DNA, 25 bp, Homo sapien
gccaatccatctcagttcagcccat

SEQ ID NO: 2701315 - DNA, 25 bp, Homo sapien
ttcctatatgccaatccatctcagt

SEQ ID NO: 2701316 - DNA, 25 bp, Homo sapien
gcattttctccggacattttattcc

SEQ ID NO: 2701317 - DNA, 25 bp, Homo sapien
attttattcctatatgccaatccat

SEQ ID NO: 2701318 - DNA, 25 bp, Homo sapien
cctgccattgcctggttggaggagc

SEQ ID NO: 2701319 - DNA, 25 bp, Homo sapien
gaagatgtgtaacctatttgccggg

SEQ ID NO: 2701320 - DNA, 25 bp, Homo sapien
ttggaggagcgtagcgtcagtcact

SEQ ID NO: 2701321 - DNA, 25 bp, Homo sapien
caccacctctgggacaggtgaagat

SEQ ID NO: 2701322 - DNA, 25 bp, Homo sapien
aaagtgtcggtcactttgtcgcggg

SEQ ID NO: 2701323 - DNA, 25 bp, Homo sapien
tacaattggcctgtgggagtaccat

SEQ ID NO: 2701324 - DNA, 25 bp, Homo sapien
tcattggcgccataaagtgtcggtc

SEQ ID NO: 2701325 - DNA, 25 bp, Homo sapien
gatcccgccctcatctgaggtgacg

SEQ ID NO: 2701326 - DNA, 25 bp, Homo sapien
cgctggctcgcagccgccaagctgc

SEQ ID NO: 2701327 - DNA, 25 bp, Homo sapien
gccaagctgcgttgacccgcgcagg

SEQ ID NO: 2701328 - DNA, 25 bp, Homo sapien
cgccaagctgcgttgacccgcgcag

SEQ ID NO: 2701329 - DNA, 25 bp, Homo sapien
gctcgcagccgccaagctgcgttga

SEQ ID NO: 2701330 - DNA, 25 bp, Homo sapien
gatctcgggaacgagaagagcagca

SEQ ID NO: 2701331 - DNA, 25 bp, Homo sapien
caagaggaagaagcgtctcctttcc

SEQ ID NO: 2701332 - DNA, 25 bp, Homo sapien
agcaagaggaagaagcgtctccttt

SEQ ID NO: 2701333 - DNA, 25 bp, Homo sapien
cgccgccgctgatctcgggaacgag

SEQ ID NO: 2701334 - DNA, 25 bp, Homo sapien
tgttcgcacccggagccggagacgg

SEQ ID NO: 2701335 - DNA, 25 bp, Homo sapien
cacccggagccggagacggtgccga

SEQ ID NO: 2701336 - DNA, 25 bp, Homo sapien
ttcgcacccggagccggagacggtg

SEQ ID NO: 2701337 - DNA, 25 bp, Homo sapien
tcgcacccggagccggagacggtgc

SEQ ID NO: 2701338 - DNA, 25 bp, Homo sapien
cgccgcctccgctatcagtcagcat

SEQ ID NO: 2701339 - DNA, 25 bp, Homo sapien
gagcctcacggtgcggatccccaga

SEQ ID NO: 2701340 - DNA, 25 bp, Homo sapien
gcggatcgcggagccacagagtcca

SEQ ID NO: 2701341 - DNA, 25 bp, Homo sapien
cccaaagagcctcacggtgcggatc

SEQ ID NO: 2701342 - DNA, 25 bp, Homo sapien
ctccgcccgtaccgctgccgctgcc

SEQ ID NO: 2701343 - DNA, 25 bp, Homo sapien
tccgcccgtaccgctgccgctgccg

SEQ ID NO: 2701344 - DNA, 25 bp, Homo sapien
tgccgccgccgccgctgctgccgac

SEQ ID NO: 2701345 - DNA, 25 bp, Homo sapien
cgctgccgccgccgccgctgctgcc

SEQ ID NO: 2701346 - DNA, 25 bp, Homo sapien
tcggacacttcgtcctcgtcactgc

SEQ ID NO: 2701347 - DNA, 25 bp, Homo sapien
gcacggcagccgccaacttgaaatc

SEQ ID NO: 2701348 - DNA, 25 bp, Homo sapien
caacttgaaatccagcgccgcgtcc

SEQ ID NO: 2701349 - DNA, 25 bp, Homo sapien
ctcggacacttcgtcctcgtcactg

SEQ ID NO: 2701350 - DNA, 25 bp, Homo sapien
caaatatcttacctaacaaatctgc

SEQ ID NO: 2701351 - DNA, 25 bp, Homo sapien
gacaaaatatcccattatgcttatt

SEQ ID NO: 2701352 - DNA, 25 bp, Homo sapien
gctgaaacatattcttacaattcag

SEQ ID NO: 2701353 - DNA, 25 bp, Homo sapien
tacagataaatgatatgaatacatt

SEQ ID NO: 2701354 - DNA, 25 bp, Homo sapien
cttcttggtccaaaataaatgattc

SEQ ID NO: 2701355 - DNA, 25 bp, Homo sapien
gatccacagtgcgtaagtctgctcc

SEQ ID NO: 2701356 - DNA, 25 bp, Homo sapien
cactgggttatccagatcttcttgg

SEQ ID NO: 2701357 - DNA, 25 bp, Homo sapien
tagcaatgcttctagtcgtgcctgt

SEQ ID NO: 2701358 - DNA, 25 bp, Homo sapien
ccatcagcagttgacaatttgccaa

SEQ ID NO: 2701359 - DNA, 25 bp, Homo sapien
catcagcagttgacaatttgccaat

SEQ ID NO: 2701360 - DNA, 25 bp, Homo sapien
taccatcagcagttgacaatttgcc

SEQ ID NO: 2701361 - DNA, 25 bp, Homo sapien
ttaccatcagcagttgacaatttgc

SEQ ID NO: 2701362 - DNA, 25 bp, Homo sapien
tgtcagtctccggagtacctcagga

SEQ ID NO: 2701363 - DNA, 25 bp, Homo sapien
gcttcatccagtgcacaactaactg

SEQ ID NO: 2701364 - DNA, 25 bp, Homo sapien
gtgcacaactaactgaggatgtcag

SEQ ID NO: 2701365 - DNA, 25 bp, Homo sapien
tgaggatgtcagtctccggagtacc

SEQ ID NO: 2701366 - DNA, 25 bp, Homo sapien
acttgtcctgcattgtggctgtttt

SEQ ID NO: 2701367 - DNA, 25 bp, Homo sapien
cacttgtcctgcattgtggctgttt

SEQ ID NO: 2701368 - DNA, 25 bp, Homo sapien
cttgtcctgcattgtggctgttttc

SEQ ID NO: 2701369 - DNA, 25 bp, Homo sapien
ccacttgtcctgcattgtggctgtt

SEQ ID NO: 2701370 - DNA, 25 bp, Homo sapien
taccctgctgaacaagccaaacaca

SEQ ID NO: 2701371 - DNA, 25 bp, Homo sapien
tttacgaacagcattaacatcccca

SEQ ID NO: 2701372 - DNA, 25 bp, Homo sapien
ataataccctgctgaacaagccaaa

SEQ ID NO: 2701373 - DNA, 25 bp, Homo sapien
tctgccttcatctagcaatttacga

SEQ ID NO: 2701374 - DNA, 25 bp, Homo sapien
caatatctaagtaacctccactgga

SEQ ID NO: 2701375 - DNA, 25 bp, Homo sapien
cattagcatgcatagcaagcaatac

SEQ ID NO: 2701376 - DNA, 25 bp, Homo sapien
tgcagactgggagttgacatcagca

SEQ ID NO: 2701377 - DNA, 25 bp, Homo sapien
tattccctcgatcttcaacattagc

SEQ ID NO: 2701378 - DNA, 25 bp, Homo sapien
tgcactggctgcttccattaaggga

SEQ ID NO: 2701379 - DNA, 25 bp, Homo sapien
tatatttgcaccttcattaaggagc

SEQ ID NO: 2701380 - DNA, 25 bp, Homo sapien
catgcataagttagcgcagtgtttc

SEQ ID NO: 2701381 - DNA, 25 bp, Homo sapien
taaggagcactttaacaatgtcaac

SEQ ID NO: 2701382 - DNA, 25 bp, Homo sapien
ttgtagcaagcaagtgttagagcac

SEQ ID NO: 2701383 - DNA, 25 bp, Homo sapien
ctttgtagcaagcaagtgttagagc

SEQ ID NO: 2701384 - DNA, 25 bp, Homo sapien
ttgatgcctgcaccatgatctaaaa

SEQ ID NO: 2701385 - DNA, 25 bp, Homo sapien
tctttgaattcattagaatgagtgt

SEQ ID NO: 2701386 - DNA, 25 bp, Homo sapien
ggcagagactgctagttccctatct

SEQ ID NO: 2701387 - DNA, 25 bp, Homo sapien
tgtctgcacaaggatgtgatcagtg

SEQ ID NO: 2701388 - DNA, 25 bp, Homo sapien
gaatttaagtgtccaacaataggca

SEQ ID NO: 2701389 - DNA, 25 bp, Homo sapien
taatcagaggttatgcaaaaatgtc

SEQ ID NO: 2701390 - DNA, 25 bp, Homo sapien
ccattaaggcagtgtgcatctcatc

SEQ ID NO: 2701391 - DNA, 25 bp, Homo sapien
catgcaggcctccattaaggcagtg

SEQ ID NO: 2701392 - DNA, 25 bp, Homo sapien
tagaaagcgaaccatatccaaatgg

SEQ ID NO: 2701393 - DNA, 25 bp, Homo sapien
caccagcttcaagtagaaagcgaac

SEQ ID NO: 2701394 - DNA, 25 bp, Homo sapien
aatctcaagtgagtgtaatttaaaa

SEQ ID NO: 2701395 - DNA, 25 bp, Homo sapien
aacacatacgaccttttcttcccat

SEQ ID NO: 2701396 - DNA, 25 bp, Homo sapien
ataaaatctcaagtgagtgtaattt

SEQ ID NO: 2701397 - DNA, 25 bp, Homo sapien
cacatacgaccttttcttcccataa

SEQ ID NO: 2701398 - DNA, 25 bp, Homo sapien
tgacagcattaaaggtgattattct

SEQ ID NO: 2701399 - DNA, 25 bp, Homo sapien
agaaaaaggatttctggattgacag

SEQ ID NO: 2701400 - DNA, 25 bp, Homo sapien
agggcagagggactgcttcagcata

SEQ ID NO: 2701401 - DNA, 25 bp, Homo sapien
gaaagggtgaaaccatgttcctaca

SEQ ID NO: 2701402 - DNA, 25 bp, Homo sapien
ggactgcttcagcataggaggcaga

SEQ ID NO: 2701403 - DNA, 25 bp, Homo sapien
cagagggactgcttcagcataggag

SEQ ID NO: 2701404 - DNA, 25 bp, Homo sapien
tcacttgagcaccactatccaaaag

SEQ ID NO: 2701405 - DNA, 25 bp, Homo sapien
tatccaaaagcaaacgtgccacctc

SEQ ID NO: 2701406 - DNA, 25 bp, Homo sapien
aaacgtgccacctctacatgtccat

SEQ ID NO: 2701407 - DNA, 25 bp, Homo sapien
gagcaccactatccaaaagcaaacg

SEQ ID NO: 2701408 - DNA, 25 bp, Homo sapien
tcccctttcaataagtagagctgcc

SEQ ID NO: 2701409 - DNA, 25 bp, Homo sapien
aattcaacatgtcctccacaggcag

SEQ ID NO: 2701410 - DNA, 25 bp, Homo sapien
tcttcatgtccttcccgggcagctt

SEQ ID NO: 2701411 - DNA, 25 bp, Homo sapien
catcaagggagtgtatccttcatca

SEQ ID NO: 2701412 - DNA, 25 bp, Homo sapien
aagccaaagtaagagcagtttcttg

SEQ ID NO: 2701413 - DNA, 25 bp, Homo sapien
caaagtaagagcagtttcttgagtt

SEQ ID NO: 2701414 - DNA, 25 bp, Homo sapien
gagcagccaagttctatatcagccc

SEQ ID NO: 2701415 - DNA, 25 bp, Homo sapien
tatatcagcccctgccttaataaga

SEQ ID NO: 2701416 - DNA, 25 bp, Homo sapien
tccaggtgtccctcctgagatgcct

SEQ ID NO: 2701417 - DNA, 25 bp, Homo sapien
gcaaatatttaaccaattccaggtg

SEQ ID NO: 2701418 - DNA, 25 bp, Homo sapien
aattccaggtgtccctcctgagatg

SEQ ID NO: 2701419 - DNA, 25 bp, Homo sapien
ccaattccaggtgtccctcctgaga

SEQ ID NO: 2701420 - DNA, 25 bp, Homo sapien
gaaagactcttgaataggacacagt

SEQ ID NO: 2701421 - DNA, 25 bp, Homo sapien
cctgagatagtttctacgagctaca

SEQ ID NO: 2701422 - DNA, 25 bp, Homo sapien
tattagcttggttaccttcgacgga

SEQ ID NO: 2701423 - DNA, 25 bp, Homo sapien
tctgggaagcctaatggaaaaacat

SEQ ID NO: 2701424 - DNA, 25 bp, Homo sapien
aaaatcttgtggttctagccaggca

SEQ ID NO: 2701425 - DNA, 25 bp, Homo sapien
caaccttaggtgagatataagattc

SEQ ID NO: 2701426 - DNA, 25 bp, Homo sapien
taggtgagatataagattcttgaac

SEQ ID NO: 2701427 - DNA, 25 bp, Homo sapien
cgagtaggtggtatcacgggcacat

SEQ ID NO: 2701428 - DNA, 25 bp, Homo sapien
aaaaaagcatacatttactttgtga

SEQ ID NO: 2701429 - DNA, 25 bp, Homo sapien
gcaaacaaaaaagcatacatttact

SEQ ID NO: 2701430 - DNA, 25 bp, Homo sapien
aacaaaaaagcatacatttactttg

SEQ ID NO: 2701431 - DNA, 25 bp, Homo sapien
ctagcaaacaaaaaagcatacattt

SEQ ID NO: 2701432 - DNA, 25 bp, Homo sapien
tgttgctgttgtagcatgcacatta

SEQ ID NO: 2701433 - DNA, 25 bp, Homo sapien
gctgttgtagcatgcacattagcgc

SEQ ID NO: 2701434 - DNA, 25 bp, Homo sapien
cacaagcataggttaaggctgtgtc

SEQ ID NO: 2701435 - DNA, 25 bp, Homo sapien
tcacaagcataggttaaggctgtgt

SEQ ID NO: 2701436 - DNA, 25 bp, Homo sapien
ttctcagacaaaaaagcatacctcc

SEQ ID NO: 2701437 - DNA, 25 bp, Homo sapien
gattattacacatatgaacctgcca

SEQ ID NO: 2701438 - DNA, 25 bp, Homo sapien
ggaagcagtttaaagcactctcaca

SEQ ID NO: 2701439 - DNA, 25 bp, Homo sapien
caactagaacaggtagccaagcttt

SEQ ID NO: 2701440 - DNA, 25 bp, Homo sapien
gaacgagtatggttcatcaacttga

SEQ ID NO: 2701441 - DNA, 25 bp, Homo sapien
gcaaaagttccataattaatgaacg

SEQ ID NO: 2701442 - DNA, 25 bp, Homo sapien
tcaacttgatggaatatgatgcaag

SEQ ID NO: 2701443 - DNA, 25 bp, Homo sapien
tgatagaacacaagaacacatagtg

SEQ ID NO: 2701444 - DNA, 25 bp, Homo sapien
tactttatggttacagaggtaagtc

SEQ ID NO: 2701445 - DNA, 25 bp, Homo sapien
caatatagttcactcagtcagcaga

SEQ ID NO: 2701446 - DNA, 25 bp, Homo sapien
attacctagtttccaattgctcaac

SEQ ID NO: 2701447 - DNA, 25 bp, Homo sapien
gcaacaaaggtcagagggcttactt

SEQ ID NO: 2701448 - DNA, 25 bp, Homo sapien
caagaagatttttgtagataatgca

SEQ ID NO: 2701449 - DNA, 25 bp, Homo sapien
taatgcaaacataggggctgtgatc

SEQ ID NO: 2701450 - DNA, 25 bp, Homo sapien
ttttgtagataatgcaaacataggg

SEQ ID NO: 2701451 - DNA, 25 bp, Homo sapien
gaagatttttgtagataatgcaaac

SEQ ID NO: 2701452 - DNA, 25 bp, Homo sapien
gatggtgggctttgttaactcagga

SEQ ID NO: 2701453 - DNA, 25 bp, Homo sapien
ccatgaagaccttgtgaccgatact

SEQ ID NO: 2701454 - DNA, 25 bp, Homo sapien
tatagattcagcaagacagtatcct

SEQ ID NO: 2701455 - DNA, 25 bp, Homo sapien
gatgtgcttatcctaagaaagtgca

SEQ ID NO: 2701456 - DNA, 25 bp, Homo sapien
ggccggatctatgccctccaaaata

SEQ ID NO: 2701457 - DNA, 25 bp, Homo sapien
ttggccggatctatgccctccaaaa

SEQ ID NO: 2701458 - DNA, 25 bp, Homo sapien
tgcttggccggatctatgccctcca

SEQ ID NO: 2701459 - DNA, 25 bp, Homo sapien
ctgatgcttggccggatctatgccc

SEQ ID NO: 2701460 - DNA, 25 bp, Homo sapien
tccagagttctggttacctacaaca

SEQ ID NO: 2701461 - DNA, 25 bp, Homo sapien
ttggctggaattcagatatccagag

SEQ ID NO: 2701462 - DNA, 25 bp, Homo sapien
ccagagttctggttacctacaacat

SEQ ID NO: 2701463 - DNA, 25 bp, Homo sapien
ggctggaattcagatatccagagtt

SEQ ID NO: 2701464 - DNA, 25 bp, Homo sapien
tcaattgaagaggatttcctttgtc

SEQ ID NO: 2701465 - DNA, 25 bp, Homo sapien
caattgaagaggatttcctttgtca

SEQ ID NO: 2701466 - DNA, 25 bp, Homo sapien
atctctttttattgggacttcataa

SEQ ID NO: 2701467 - DNA, 25 bp, Homo sapien
tctttttattgggacttcataatct

SEQ ID NO: 2701468 - DNA, 25 bp, Homo sapien
ccattttggttcacaggtagggcaa

SEQ ID NO: 2701469 - DNA, 25 bp, Homo sapien
taaatcaagaaggttgtcctccaag

SEQ ID NO: 2701470 - DNA, 25 bp, Homo sapien
tcttgataaagattcgctctccagc

SEQ ID NO: 2701471 - DNA, 25 bp, Homo sapien
tattttgctggacacctaaggttct

SEQ ID NO: 2701472 - DNA, 25 bp, Homo sapien
gtattgcctcttaaccccatgaatt

SEQ ID NO: 2701473 - DNA, 25 bp, Homo sapien
tgcactggtaactcagtttctaccg

SEQ ID NO: 2701474 - DNA, 25 bp, Homo sapien
acccaagttttggtgtgcactggta

SEQ ID NO: 2701475 - DNA, 25 bp, Homo sapien
cagagaatgtagtccatgtgatgaa

SEQ ID NO: 2701476 - DNA, 25 bp, Homo sapien
taccacagaataccatatatgatag

SEQ ID NO: 2701477 - DNA, 25 bp, Homo sapien
gaatatcatgtaccacagaatacca

SEQ ID NO: 2701478 - DNA, 25 bp, Homo sapien
gaataccatatatgatagaacaagg

SEQ ID NO: 2701479 - DNA, 25 bp, Homo sapien
tctataccatagaatatcatgtacc

SEQ ID NO: 2701480 - DNA, 25 bp, Homo sapien
caacataattaggtcccgtgagtca

SEQ ID NO: 2701481 - DNA, 25 bp, Homo sapien
caacataattaggtcatatcaacat

SEQ ID NO: 2701482 - DNA, 25 bp, Homo sapien
taagcctggcagtgatcaacataat

SEQ ID NO: 2701483 - DNA, 25 bp, Homo sapien
catagttgggcaatattaatgtcac

SEQ ID NO: 2701484 - DNA, 25 bp, Homo sapien
agaaactgcacagtgcacaaatgac

SEQ ID NO: 2701485 - DNA, 25 bp, Homo sapien
gctaataagaaactgcacagtgcac

SEQ ID NO: 2701486 - DNA, 25 bp, Homo sapien
ctgcacagtgcacaaatgaccagct

SEQ ID NO: 2701487 - DNA, 25 bp, Homo sapien
gcacagtgcacaaatgaccagctct

SEQ ID NO: 2701488 - DNA, 25 bp, Homo sapien
tggtaaccactaccctgacttccaa

SEQ ID NO: 2701489 - DNA, 25 bp, Homo sapien
agaaaaataaatcgcaatcttagca

SEQ ID NO: 2701490 - DNA, 25 bp, Homo sapien
gcaatcttagcaaaggttgacatca

SEQ ID NO: 2701491 - DNA, 25 bp, Homo sapien
gacatcaagctagttcatagtcaat

SEQ ID NO: 2701492 - DNA, 25 bp, Homo sapien
tcagccccatgagccaagagaagct

SEQ ID NO: 2701493 - DNA, 25 bp, Homo sapien
gagaagctcaacaactgccaggtgg

SEQ ID NO: 2701494 - DNA, 25 bp, Homo sapien
catgccagcgacactactgtatgat

SEQ ID NO: 2701495 - DNA, 25 bp, Homo sapien
ggctgtagccctgttaacattggca

SEQ ID NO: 2701496 - DNA, 25 bp, Homo sapien
ctacattagtatggccaccctttgc

SEQ ID NO: 2701497 - DNA, 25 bp, Homo sapien
gataagaaactacattagtatggcc

SEQ ID NO: 2701498 - DNA, 25 bp, Homo sapien
gacagaacattatttggataatcca

SEQ ID NO: 2701499 - DNA, 25 bp, Homo sapien
gagggagctgagacacatctgtggt

SEQ ID NO: 2701500 - DNA, 25 bp, Homo sapien
tatattaacaaacaagctccatttt

SEQ ID NO: 2701501 - DNA, 25 bp, Homo sapien
tttatattaacaaacaagctccatt

SEQ ID NO: 2701502 - DNA, 25 bp, Homo sapien
atattaacaaacaagctccatttta

SEQ ID NO: 2701503 - DNA, 25 bp, Homo sapien
ttatattaacaaacaagctccattt

SEQ ID NO: 2701504 - DNA, 25 bp, Homo sapien
tacctatactttcatggttgacaaa

SEQ ID NO: 2701505 - DNA, 25 bp, Homo sapien
ggttgacaaaagtcactatctctag

SEQ ID NO: 2701506 - DNA, 25 bp, Homo sapien
gaacttctagcgcttatgttaccta

SEQ ID NO: 2701507 - DNA, 25 bp, Homo sapien
agaaaatgctttctcggccgggcat

SEQ ID NO: 2701508 - DNA, 25 bp, Homo sapien
accatggcaagtgtatgcgttggca

SEQ ID NO: 2701509 - DNA, 25 bp, Homo sapien
tggcaagtgtatgcgttggcacacg

SEQ ID NO: 2701510 - DNA, 25 bp, Homo sapien
ggggaggtacaaccatggcaagtgt

SEQ ID NO: 2701511 - DNA, 25 bp, Homo sapien
agtgtatgcgttggcacacgtggca

SEQ ID NO: 2701512 - DNA, 25 bp, Homo sapien
gcaggagagttctcctgtgaagttc

SEQ ID NO: 2701513 - DNA, 25 bp, Homo sapien
aaagggcaggagagttctcctgtga

SEQ ID NO: 2701514 - DNA, 25 bp, Homo sapien
aagggcaggagagttctcctgtgaa

SEQ ID NO: 2701515 - DNA, 25 bp, Homo sapien
gggcaggagagttctcctgtgaagt

SEQ ID NO: 2701516 - DNA, 25 bp, Homo sapien
tacaaagacttaactagatagcaaa

SEQ ID NO: 2701517 - DNA, 25 bp, Homo sapien
gataatctactatattcagcattgc

SEQ ID NO: 2701518 - DNA, 25 bp, Homo sapien
caactatcagtatgttaacaggaaa

SEQ ID NO: 2701519 - DNA, 25 bp, Homo sapien
ctcaattagccatgggtacacagta

SEQ ID NO: 2701520 - DNA, 25 bp, Homo sapien
gtgttccatgaaaaactgctagaat

SEQ ID NO: 2701521 - DNA, 25 bp, Homo sapien
tgctataacagtcaacccacaccaa

SEQ ID NO: 2701522 - DNA, 25 bp, Homo sapien
gctagaattagcttaaatcagagag

SEQ ID NO: 2701523 - DNA, 25 bp, Homo sapien
tctgaaattaatagtttagccctgg

SEQ ID NO: 2701524 - DNA, 25 bp, Homo sapien
tgattgacttgcttaagcctcccaa

SEQ ID NO: 2701525 - DNA, 25 bp, Homo sapien
agtgattgacttgcttaagcctccc

SEQ ID NO: 2701526 - DNA, 25 bp, Homo sapien
tgtactcaagtgattgacttgctta

SEQ ID NO: 2701527 - DNA, 25 bp, Homo sapien
tcaagtgattgacttgcttaagcct

SEQ ID NO: 2701528 - DNA, 25 bp, Homo sapien
cccactacagtctccctagcagcag

SEQ ID NO: 2701529 - DNA, 25 bp, Homo sapien
tcccactacagtctccctagcagca

SEQ ID NO: 2701530 - DNA, 25 bp, Homo sapien
gagttcaacactaaccagactggtt

SEQ ID NO: 2701531 - DNA, 25 bp, Homo sapien
taatatgcaagaagcgtggaacaca

SEQ ID NO: 2701532 - DNA, 25 bp, Homo sapien
tagacaaactataagcccagaacgt

SEQ ID NO: 2701533 - DNA, 25 bp, Homo sapien
taattatgttatgaccccactggac

SEQ ID NO: 2701534 - DNA, 25 bp, Homo sapien
gcacatgaaaaatgtttgaaagagt

SEQ ID NO: 2701535 - DNA, 25 bp, Homo sapien
catgaaaaatgtttgaaagagtgcc

SEQ ID NO: 2701536 - DNA, 25 bp, Homo sapien
tgaaaaatgtttgaaagagtgccat

SEQ ID NO: 2701537 - DNA, 25 bp, Homo sapien
ctaagcacatgaaaaatgtttgaaa

SEQ ID NO: 2701538 - DNA, 25 bp, Homo sapien
cctgatctgctacctggagggaact

SEQ ID NO: 2701539 - DNA, 25 bp, Homo sapien
cagtaggtcctgatctgctacctgg

SEQ ID NO: 2701540 - DNA, 25 bp, Homo sapien
gtgaaaagatggcagtaggtcctga

SEQ ID NO: 2701541 - DNA, 25 bp, Homo sapien
aagatggcagtaggtcctgatctgc

SEQ ID NO: 2701542 - DNA, 25 bp, Homo sapien
gttcagaggttcaccttgaattaac

SEQ ID NO: 2701543 - DNA, 25 bp, Homo sapien
cagtgacttaagctgtgctttttca

SEQ ID NO: 2701544 - DNA, 25 bp, Homo sapien
caagtattctttggtaaattgctgc

SEQ ID NO: 2701545 - DNA, 25 bp, Homo sapien
cccagttcattcagcttgccttcag

SEQ ID NO: 2701546 - DNA, 25 bp, Homo sapien
taaataagattgtgtcaacctgagg

SEQ ID NO: 2701547 - DNA, 25 bp, Homo sapien
gagagcactgttggtgtagagacac

SEQ ID NO: 2701548 - DNA, 25 bp, Homo sapien
tctgggaagactcctctatgagagc

SEQ ID NO: 2701549 - DNA, 25 bp, Homo sapien
gaaaagtgatcctctgggagactac

SEQ ID NO: 2701550 - DNA, 25 bp, Homo sapien
gctggactgggacaaaatcaatctg

SEQ ID NO: 2701551 - DNA, 25 bp, Homo sapien
gagttgcaaccattagtccatctgg

SEQ ID NO: 2701552 - DNA, 25 bp, Homo sapien
tgctatcaggtcatcaagagtgtcg

SEQ ID NO: 2701553 - DNA, 25 bp, Homo sapien
tcaatctgttctgccgatggtggag

SEQ ID NO: 2701554 - DNA, 25 bp, Homo sapien
ttctgaattgggctctcatggaggt

SEQ ID NO: 2701555 - DNA, 25 bp, Homo sapien
ccatctttaggaaggtaaatgatta

SEQ ID NO: 2701556 - DNA, 25 bp, Homo sapien
attcaccagccatctttaggaaggt

SEQ ID NO: 2701557 - DNA, 25 bp, Homo sapien
tctgaattgggctctcatggaggtg

SEQ ID NO: 2701558 - DNA, 25 bp, Homo sapien
ttcaggtgtaagacactctgtggtc

SEQ ID NO: 2701559 - DNA, 25 bp, Homo sapien
cacaggaggcatcgattgggaagcc

SEQ ID NO: 2701560 - DNA, 25 bp, Homo sapien
agccacattgcttgtagtctgcgaa

SEQ ID NO: 2701561 - DNA, 25 bp, Homo sapien
gaagaactgttggaaccagtgggca

SEQ ID NO: 2701562 - DNA, 25 bp, Homo sapien
ttttggcatcccgtgcaatgagcac

SEQ ID NO: 2701563 - DNA, 25 bp, Homo sapien
catcccgtgcaatgagcacagatac

SEQ ID NO: 2701564 - DNA, 25 bp, Homo sapien
catgaccacctgcacaagctagtgt

SEQ ID NO: 2701565 - DNA, 25 bp, Homo sapien
ttaatgctgtgtcatgattgctctc

SEQ ID NO: 2701566 - DNA, 25 bp, Homo sapien
tatccttagttcgttcagactgtgc

SEQ ID NO: 2701567 - DNA, 25 bp, Homo sapien
tcagactgtgcttctatatctccac

SEQ ID NO: 2701568 - DNA, 25 bp, Homo sapien
tgaaagcggagtatccttagttcgt

SEQ ID NO: 2701569 - DNA, 25 bp, Homo sapien
tctatatctccacctttatccaaaa

SEQ ID NO: 2701570 - DNA, 25 bp, Homo sapien
gttctttatttgcacctcgagccag

SEQ ID NO: 2701571 - DNA, 25 bp, Homo sapien
cagacgcagctagactcagtggtgt

SEQ ID NO: 2701572 - DNA, 25 bp, Homo sapien
tattaacatatcctccagacgcagc

SEQ ID NO: 2701573 - DNA, 25 bp, Homo sapien
tgccccagcattaagcagaatctta

SEQ ID NO: 2701574 - DNA, 25 bp, Homo sapien
tactaaacatgaacaataaaatgaa

SEQ ID NO: 2701575 - DNA, 25 bp, Homo sapien
ttactaaacatgaacaataaaatga

SEQ ID NO: 2701576 - DNA, 25 bp, Homo sapien
gaacaataaaatgaacaggcaatac

SEQ ID NO: 2701577 - DNA, 25 bp, Homo sapien
catgaacaataaaatgaacaggcaa

SEQ ID NO: 2701578 - DNA, 25 bp, Homo sapien
actacttctgctcggccctggaaac

SEQ ID NO: 2701579 - DNA, 25 bp, Homo sapien
aatgtctgaacccatatcgagcagc

SEQ ID NO: 2701580 - DNA, 25 bp, Homo sapien
gtgagagccgtgttccgattggtct

SEQ ID NO: 2701581 - DNA, 25 bp, Homo sapien
caacattggcttttcggtccagaag

SEQ ID NO: 2701582 - DNA, 25 bp, Homo sapien
tgcttccatcaagggggtaagaccc

SEQ ID NO: 2701583 - DNA, 25 bp, Homo sapien
gcagtatctcttgaggaaggcacag

SEQ ID NO: 2701584 - DNA, 25 bp, Homo sapien
ctatgaatcaggagttcacaaaatt

SEQ ID NO: 2701585 - DNA, 25 bp, Homo sapien
caacctctgcataccctccagaagc

SEQ ID NO: 2701586 - DNA, 25 bp, Homo sapien
aaatgacctccattggatgccagcc

SEQ ID NO: 2701587 - DNA, 25 bp, Homo sapien
tttgttacgaacatcaatgtgggct

SEQ ID NO: 2701588 - DNA, 25 bp, Homo sapien
cttgcgaaatgctgacataagaggt

SEQ ID NO: 2701589 - DNA, 25 bp, Homo sapien
tgtgattttccggttatctgctgca

SEQ ID NO: 2701590 - DNA, 25 bp, Homo sapien
gaaaatttagtgcattctaggccag

SEQ ID NO: 2701591 - DNA, 25 bp, Homo sapien
taaacagtgctgaaaaagatggtca

SEQ ID NO: 2701592 - DNA, 25 bp, Homo sapien
agaaaatcagtgagcaaaggccctg

SEQ ID NO: 2701593 - DNA, 25 bp, Homo sapien
taccagtctagttggcgagacaggc

SEQ ID NO: 2701594 - DNA, 25 bp, Homo sapien
gaaagatctgtaatcaattctaagc

SEQ ID NO: 2701595 - DNA, 25 bp, Homo sapien
ctaaatgccattatcaagggttgaa

SEQ ID NO: 2701596 - DNA, 25 bp, Homo sapien
gggttgaaagatctgtaatcaattc

SEQ ID NO: 2701597 - DNA, 25 bp, Homo sapien
agtgccacggcacgctcttgtctca

SEQ ID NO: 2701598 - DNA, 25 bp, Homo sapien
tgcattctatatcagaagggaactg

SEQ ID NO: 2701599 - DNA, 25 bp, Homo sapien
atgcattctatatcagaagggaact

SEQ ID NO: 2701600 - DNA, 25 bp, Homo sapien
catgcattctatatcagaagggaac

SEQ ID NO: 2701601 - DNA, 25 bp, Homo sapien
gtagtcactgtgactatggtccaca

SEQ ID NO: 2701602 - DNA, 25 bp, Homo sapien
caaacgcataaagagatcaggtgac

SEQ ID NO: 2701603 - DNA, 25 bp, Homo sapien
taaaaacctgcatgtccttaggaag

SEQ ID NO: 2701604 - DNA, 25 bp, Homo sapien
tgatgagcacattaaagtccagagg

SEQ ID NO: 2701605 - DNA, 25 bp, Homo sapien
gaatactcgcattcttatttgcttc

SEQ ID NO: 2701606 - DNA, 25 bp, Homo sapien
tctttagccttcacaatggtttcga

SEQ ID NO: 2701607 - DNA, 25 bp, Homo sapien
tccagatcaagttcctttaaaagaa

SEQ ID NO: 2701608 - DNA, 25 bp, Homo sapien
caatggtttcgacacattgatgaca

SEQ ID NO: 2701609 - DNA, 25 bp, Homo sapien
ggccttctgaagtgctgggatcata

SEQ ID NO: 2701610 - DNA, 25 bp, Homo sapien
ttctgaagtgctgggatcataggcg

SEQ ID NO: 2701611 - DNA, 25 bp, Homo sapien
tggccttctgaagtgctgggatcat

SEQ ID NO: 2701612 - DNA, 25 bp, Homo sapien
tgagccaccgtgcccggcccccacc

SEQ ID NO: 2701613 - DNA, 25 bp, Homo sapien
tttctggatagtctttaattgggaa

SEQ ID NO: 2701614 - DNA, 25 bp, Homo sapien
ttctggatagtctttaattgggaat

SEQ ID NO: 2701615 - DNA, 25 bp, Homo sapien
tggagcatttaatccgtttacattt

SEQ ID NO: 2701616 - DNA, 25 bp, Homo sapien
gagcatttaatccgtttacatttaa

SEQ ID NO: 2701617 - DNA, 25 bp, Homo sapien
ggagcatttaatccgtttacattta

SEQ ID NO: 2701618 - DNA, 25 bp, Homo sapien
cttttagcagcaagagcctgctttc

SEQ ID NO: 2701619 - DNA, 25 bp, Homo sapien
tctcttttagcagcaagagcctgct

SEQ ID NO: 2701620 - DNA, 25 bp, Homo sapien
ttctcttttagcagcaagagcctgc

SEQ ID NO: 2701621 - DNA, 25 bp, Homo sapien
ttagcagcaagagcctgctttctgc

SEQ ID NO: 2701622 - DNA, 25 bp, Homo sapien
tcatcctctggtagttccgaattct

SEQ ID NO: 2701623 - DNA, 25 bp, Homo sapien
atcttcatcctctggtagttccgaa

SEQ ID NO: 2701624 - DNA, 25 bp, Homo sapien
ctggtagttccgaattctccttagg

SEQ ID NO: 2701625 - DNA, 25 bp, Homo sapien
tcctctggtagttccgaattctcct

SEQ ID NO: 2701626 - DNA, 25 bp, Homo sapien
ggcctctatatccttgagcctgaat

SEQ ID NO: 2701627 - DNA, 25 bp, Homo sapien
tctagtctcatgaacccaaaccaca

SEQ ID NO: 2701628 - DNA, 25 bp, Homo sapien
tttgcctactacaagcactgccaga

SEQ ID NO: 2701629 - DNA, 25 bp, Homo sapien
tctttgagagtactaaacccatctc

SEQ ID NO: 2701630 - DNA, 25 bp, Homo sapien
ccttttgttgggctaaagacatatg

SEQ ID NO: 2701631 - DNA, 25 bp, Homo sapien
ttccgattggtgctgggagttgtca

SEQ ID NO: 2701632 - DNA, 25 bp, Homo sapien
gatgttgcagagattccaatcgtag

SEQ ID NO: 2701633 - DNA, 25 bp, Homo sapien
cactaggaggttctatgggaacttc

SEQ ID NO: 2701634 - DNA, 25 bp, Homo sapien
tctcactgttgcagtctgtgctgtc

SEQ ID NO: 2701635 - DNA, 25 bp, Homo sapien
cagtgaggggtatttagaggaattc

SEQ ID NO: 2701636 - DNA, 25 bp, Homo sapien
gagcagtgaggggtatttagaggaa

SEQ ID NO: 2701637 - DNA, 25 bp, Homo sapien
aggggtatttagaggaattcacatc

SEQ ID NO: 2701638 - DNA, 25 bp, Homo sapien
ggtatttagaggaattcacatccat

SEQ ID NO: 2701639 - DNA, 25 bp, Homo sapien
ggaagtagcagtacttgtcttttct

SEQ ID NO: 2701640 - DNA, 25 bp, Homo sapien
cgtgtctgagttttggaagtagcag

SEQ ID NO: 2701641 - DNA, 25 bp, Homo sapien
tctgagttttggaagtagcagtact

SEQ ID NO: 2701642 - DNA, 25 bp, Homo sapien
agttttggaagtagcagtacttgtc

SEQ ID NO: 2701643 - DNA, 25 bp, Homo sapien
gcttaatggcaatgacactgtcttg

SEQ ID NO: 2701644 - DNA, 25 bp, Homo sapien
tcagctttatgtttggagagcttaa

SEQ ID NO: 2701645 - DNA, 25 bp, Homo sapien
cccttttagggctagtgagattcag

SEQ ID NO: 2701646 - DNA, 25 bp, Homo sapien
caaggaattaggagtcacttcacct

SEQ ID NO: 2701647 - DNA, 25 bp, Homo sapien
tgcagtgatgttgcatcctcctctt

SEQ ID NO: 2701648 - DNA, 25 bp, Homo sapien
tttgtttatccacatcaatatgggc

SEQ ID NO: 2701649 - DNA, 25 bp, Homo sapien
tatgggcaccagtaacatcctgtat

SEQ ID NO: 2701650 - DNA, 25 bp, Homo sapien
tattgtgatcattctctcgccattc

SEQ ID NO: 2701651 - DNA, 25 bp, Homo sapien
tactccagatgagaagttagcatga

SEQ ID NO: 2701652 - DNA, 25 bp, Homo sapien
ttagttgaactgcatatcttgttga

SEQ ID NO: 2701653 - DNA, 25 bp, Homo sapien
tccttagcaggatcttgaatgagtg

SEQ ID NO: 2701654 - DNA, 25 bp, Homo sapien
gaatgagtgcattgattagttgaac

SEQ ID NO: 2701655 - DNA, 25 bp, Homo sapien
tgttgcctgtgaagttacaagagtt

SEQ ID NO: 2701656 - DNA, 25 bp, Homo sapien
ttagcgggctggaacgtagataacg

SEQ ID NO: 2701657 - DNA, 25 bp, Homo sapien
cttattaagtttattagcgggctgg

SEQ ID NO: 2701658 - DNA, 25 bp, Homo sapien
caagagttggagcacccaaaggaaa

SEQ ID NO: 2701659 - DNA, 25 bp, Homo sapien
catgggtaagcgaggatgccgaatc

SEQ ID NO: 2701660 - DNA, 25 bp, Homo sapien
gagtccgggtattagtgacacacag

SEQ ID NO: 2701661 - DNA, 25 bp, Homo sapien
cagaaggcagggaactacaagtgct

SEQ ID NO: 2701662 - DNA, 25 bp, Homo sapien
agactctgagggtaaaacagtcccg

SEQ ID NO: 2701663 - DNA, 25 bp, Homo sapien
aagctgtgcttgagaagtacttgca

SEQ ID NO: 2701664 - DNA, 25 bp, Homo sapien
gaagaaagctgtgcttgagaagtac

SEQ ID NO: 2701665 - DNA, 25 bp, Homo sapien
gaaagctgtgcttgagaagtacttg

SEQ ID NO: 2701666 - DNA, 25 bp, Homo sapien
aagaaagctgtgcttgagaagtact

SEQ ID NO: 2701667 - DNA, 25 bp, Homo sapien
tgctggcagagctactgcaactgtt

SEQ ID NO: 2701668 - DNA, 25 bp, Homo sapien
tgtcaaagtcaatggagcaggttct

SEQ ID NO: 2701669 - DNA, 25 bp, Homo sapien
taggacttaaatcagacacactgga

SEQ ID NO: 2701670 - DNA, 25 bp, Homo sapien
tgggctgcattcgatgagaaactcg

SEQ ID NO: 2701671 - DNA, 25 bp, Homo sapien
ctggactagtagaaactcgctggga

SEQ ID NO: 2701672 - DNA, 25 bp, Homo sapien
gagttacccaggaacgctgactgaa

SEQ ID NO: 2701673 - DNA, 25 bp, Homo sapien
tgactgaacagtgaaagaggcatct

SEQ ID NO: 2701674 - DNA, 25 bp, Homo sapien
caactcgtgaggacagtggaccatc

SEQ ID NO: 2701675 - DNA, 25 bp, Homo sapien
gaaatgctaagaggcaatagtgcca

SEQ ID NO: 2701676 - DNA, 25 bp, Homo sapien
tagggctacgccatattcataactc

SEQ ID NO: 2701677 - DNA, 25 bp, Homo sapien
ccatagatagtcatatgcaggcttc

SEQ ID NO: 2701678 - DNA, 25 bp, Homo sapien
aatagtgccatattctgggtcggcc

SEQ ID NO: 2701679 - DNA, 25 bp, Homo sapien
catgtgggtaacttaatgcatttcc

SEQ ID NO: 2701680 - DNA, 25 bp, Homo sapien
tagttaatatcaacatcgactgtca

SEQ ID NO: 2701681 - DNA, 25 bp, Homo sapien
tattgtggtaggcaacagtaggcaa

SEQ ID NO: 2701682 - DNA, 25 bp, Homo sapien
agatgttagcaaaacctagaggtag

SEQ ID NO: 2701683 - DNA, 25 bp, Homo sapien
tatgaaatgggagtatgctgtaact

SEQ ID NO: 2701684 - DNA, 25 bp, Homo sapien
gaggaaaagcctactactgaggata

SEQ ID NO: 2701685 - DNA, 25 bp, Homo sapien
aatctaccaatgtttccttcctcac

SEQ ID NO: 2701686 - DNA, 25 bp, Homo sapien
tgtaactaagtagcacccaacaata

SEQ ID NO: 2701687 - DNA, 25 bp, Homo sapien
tccagaagaatatcgccaaacagca

SEQ ID NO: 2701688 - DNA, 25 bp, Homo sapien
gtccagaagaatatcgccaaacagc

SEQ ID NO: 2701689 - DNA, 25 bp, Homo sapien
agtccagaagaatatcgccaaacag

SEQ ID NO: 2701690 - DNA, 25 bp, Homo sapien
ggtccaagacatccaattagctaaa

SEQ ID NO: 2701691 - DNA, 25 bp, Homo sapien
aattgaaagcccaagaagacttcca

SEQ ID NO: 2701692 - DNA, 25 bp, Homo sapien
aaagatagcatgtggctcattttca

SEQ ID NO: 2701693 - DNA, 25 bp, Homo sapien
catctatgtgatactgtatggccaa

SEQ ID NO: 2701694 - DNA, 25 bp, Homo sapien
gagctggcccttgcaggaaaaccct

SEQ ID NO: 2701695 - DNA, 25 bp, Homo sapien
ggtatgccggaaaaacttgccagag

SEQ ID NO: 2701696 - DNA, 25 bp, Homo sapien
cctgatgggtcaatggatggtaacc

SEQ ID NO: 2701697 - DNA, 25 bp, Homo sapien
ttgaaactaggagtcccaacaggag

SEQ ID NO: 2701698 - DNA, 25 bp, Homo sapien
ttactaaagttacaacatggtgttg

SEQ ID NO: 2701699 - DNA, 25 bp, Homo sapien
cagcctagtacctcttttcttgatc

SEQ ID NO: 2701700 - DNA, 25 bp, Homo sapien
ctctttgggaagagttcctccagga

SEQ ID NO: 2701701 - DNA, 25 bp, Homo sapien
tgaccacagaacaaaccttgggcat

SEQ ID NO: 2701702 - DNA, 25 bp, Homo sapien
cagaaggtggagtgaaccaagatcg

SEQ ID NO: 2701703 - DNA, 25 bp, Homo sapien
aatcaatcaatagaacaaaggaata

SEQ ID NO: 2701704 - DNA, 25 bp, Homo sapien
tataaaaggcaatagtttcataaaa

SEQ ID NO: 2701705 - DNA, 25 bp, Homo sapien
taacttataaaaggcaatagtttca

SEQ ID NO: 2701706 - DNA, 25 bp, Homo sapien
cagtacctagcatattttctagaaa

SEQ ID NO: 2701707 - DNA, 25 bp, Homo sapien
tgtcaaaaaagccaatactcactga

SEQ ID NO: 2701708 - DNA, 25 bp, Homo sapien
caaatgttagcaaagcattgtacga

SEQ ID NO: 2701709 - DNA, 25 bp, Homo sapien
tctggtgaccctctatacttgttag

SEQ ID NO: 2701710 - DNA, 25 bp, Homo sapien
tcccaattgaactaaacaatgctag

SEQ ID NO: 2701711 - DNA, 25 bp, Homo sapien
atttctatagacattatcctacacg

SEQ ID NO: 2701712 - DNA, 25 bp, Homo sapien
tgcctataataagtatacaacagtc

SEQ ID NO: 2701713 - DNA, 25 bp, Homo sapien
aggaagcaggccacatttgttttta

SEQ ID NO: 2701714 - DNA, 25 bp, Homo sapien
gaagatgatcccgaagaaacagatg

SEQ ID NO: 2701715 - DNA, 25 bp, Homo sapien
ggtgaagatgatcccgaagaaacag

SEQ ID NO: 2701716 - DNA, 25 bp, Homo sapien
gaggtgaagatgatcccgaagaaac

SEQ ID NO: 2701717 - DNA, 25 bp, Homo sapien
gaaacagatggaataggagagtcac

SEQ ID NO: 2701718 - DNA, 25 bp, Homo sapien
cttgactggcactgactccttttgg

SEQ ID NO: 2701719 - DNA, 25 bp, Homo sapien
tccaacgggagcgacaaaactggtc

SEQ ID NO: 2701720 - DNA, 25 bp, Homo sapien
acagaccctccttgccgaattcggg

SEQ ID NO: 2701721 - DNA, 25 bp, Homo sapien
gaggtatctttcgatcttgactggc

SEQ ID NO: 2701722 - DNA, 25 bp, Homo sapien
ccagagagagagcaaggcaattgta

SEQ ID NO: 2701723 - DNA, 25 bp, Homo sapien
ttaagatatccctccagagagagag

SEQ ID NO: 2701724 - DNA, 25 bp, Homo sapien
cagagagagagcaaggcaattgtac

SEQ ID NO: 2701725 - DNA, 25 bp, Homo sapien
agatatccctccagagagagagcaa

SEQ ID NO: 2701726 - DNA, 25 bp, Homo sapien
tccattggctgatgttgggagaatg

SEQ ID NO: 2701727 - DNA, 25 bp, Homo sapien
gatggttccccatcacagattgcga

SEQ ID NO: 2701728 - DNA, 25 bp, Homo sapien
cagattgcgaccaacctgataagcc

SEQ ID NO: 2701729 - DNA, 25 bp, Homo sapien
taggctgatgaaaaatgttagaggg

SEQ ID NO: 2701730 - DNA, 25 bp, Homo sapien
tagaaaaatccacaaaaccacttgc

SEQ ID NO: 2701731 - DNA, 25 bp, Homo sapien
tattcctcatttaaagaactccaaa

SEQ ID NO: 2701732 - DNA, 25 bp, Homo sapien
ccagcttagacttctctaatattcc

SEQ ID NO: 2701733 - DNA, 25 bp, Homo sapien
gatcctataagtacagtatggcagt

SEQ ID NO: 2701734 - DNA, 25 bp, Homo sapien
gaaaatgggaactctacataattga

SEQ ID NO: 2701735 - DNA, 25 bp, Homo sapien
gaggatgagagggtattatggtgcc

SEQ ID NO: 2701736 - DNA, 25 bp, Homo sapien
agagggtattatggtgcctccatac

SEQ ID NO: 2701737 - DNA, 25 bp, Homo sapien
gatgagagggtattatggtgcctcc

SEQ ID NO: 2701738 - DNA, 25 bp, Homo sapien
tgagagggtattatggtgcctccat

SEQ ID NO: 2701739 - DNA, 25 bp, Homo sapien
ggatctggattgtgaagtccattaa

SEQ ID NO: 2701740 - DNA, 25 bp, Homo sapien
ctgctgggcatcagtgcattcagtt

SEQ ID NO: 2701741 - DNA, 25 bp, Homo sapien
taacttttatcatagggttccaagc

SEQ ID NO: 2701742 - DNA, 25 bp, Homo sapien
gggcatcagtgcattcagttgaatt

SEQ ID NO: 2701743 - DNA, 25 bp, Homo sapien
ttaggaatctttagacagttacaaa

SEQ ID NO: 2701744 - DNA, 25 bp, Homo sapien
gcatcatcttgatattgaaaaagca

SEQ ID NO: 2701745 - DNA, 25 bp, Homo sapien
aaagcaatccagatcgaaatggtca

SEQ ID NO: 2701746 - DNA, 25 bp, Homo sapien
caaaagagcattaagcccattttac

SEQ ID NO: 2701747 - DNA, 25 bp, Homo sapien
catgtttccaatatgaggtgcccac

SEQ ID NO: 2701748 - DNA, 25 bp, Homo sapien
tgagatgcatgtttccaatatgagg

SEQ ID NO: 2701749 - DNA, 25 bp, Homo sapien
ttagttgacatatttgagatgcatg

SEQ ID NO: 2701750 - DNA, 25 bp, Homo sapien
gtttccaatatgaggtgcccacgtg

SEQ ID NO: 2701751 - DNA, 25 bp, Homo sapien
tgtttagccaaaagcactaaggtca

SEQ ID NO: 2701752 - DNA, 25 bp, Homo sapien
tacaggctacattacgtagagccac

SEQ ID NO: 2701753 - DNA, 25 bp, Homo sapien
aatttccattgctaaagcctcagag

SEQ ID NO: 2701754 - DNA, 25 bp, Homo sapien
aatccccatggttcttccaaggtca

SEQ ID NO: 2701755 - DNA, 25 bp, Homo sapien
tcagtggcctatctgctagctaaag

SEQ ID NO: 2701756 - DNA, 25 bp, Homo sapien
tcagataagacacattgccagagct

SEQ ID NO: 2701757 - DNA, 25 bp, Homo sapien
taatgtggattgagtggtacctgca

SEQ ID NO: 2701758 - DNA, 25 bp, Homo sapien
ttgactctccatgcttagggccatg

SEQ ID NO: 2701759 - DNA, 25 bp, Homo sapien
ctttgccttgatatgagttttggct

SEQ ID NO: 2701760 - DNA, 25 bp, Homo sapien
tggaaacagcaagatacacaggtga

SEQ ID NO: 2701761 - DNA, 25 bp, Homo sapien
caggctactgggatccaaatagtca

SEQ ID NO: 2701762 - DNA, 25 bp, Homo sapien
tggcataagcgtagaaaggtgctgc

SEQ ID NO: 2701763 - DNA, 25 bp, Homo sapien
tgcagaatatggacttaaggctcct

SEQ ID NO: 2701764 - DNA, 25 bp, Homo sapien
tcggccgtccaattctcttcttcgg

SEQ ID NO: 2701765 - DNA, 25 bp, Homo sapien
tctggttaggagaggccaccatcgg

SEQ ID NO: 2701766 - DNA, 25 bp, Homo sapien
cccctttgagagcagggactgaagg

SEQ ID NO: 2701767 - DNA, 25 bp, Homo sapien
tcttcggtctggttagctgaggtga

SEQ ID NO: 2701768 - DNA, 25 bp, Homo sapien
catgaagagagggaaaccgtagttc

SEQ ID NO: 2701769 - DNA, 25 bp, Homo sapien
taaactaaggatggtcctctcttgc

SEQ ID NO: 2701770 - DNA, 25 bp, Homo sapien
cctctcttgcactagttttcggatt

SEQ ID NO: 2701771 - DNA, 25 bp, Homo sapien
cttgcactagttttcggattgtggg

SEQ ID NO: 2701772 - DNA, 25 bp, Homo sapien
gaagcctgggcacatcaacatttat

SEQ ID NO: 2701773 - DNA, 25 bp, Homo sapien
agaagcctgggcacatcaacattta

SEQ ID NO: 2701774 - DNA, 25 bp, Homo sapien
gatgggctaggatcggtagctcaca

SEQ ID NO: 2701775 - DNA, 25 bp, Homo sapien
ttatgcaacgtgaggaagtgtctga

SEQ ID NO: 2701776 - DNA, 25 bp, Homo sapien
gagtccagtctagtgaaaccaggtg

SEQ ID NO: 2701777 - DNA, 25 bp, Homo sapien
cacacttcaggtatcaagggtatgt

SEQ ID NO: 2701778 - DNA, 25 bp, Homo sapien
gctcttgccgcccaaatggcatgat

SEQ ID NO: 2701779 - DNA, 25 bp, Homo sapien
ctcttgccgcccaaatggcatgatc

SEQ ID NO: 2701780 - DNA, 25 bp, Homo sapien
cgctcttgccgcccaaatggcatga

SEQ ID NO: 2701781 - DNA, 25 bp, Homo sapien
caggcatcctccgaaacaagaatta

SEQ ID NO: 2701782 - DNA, 25 bp, Homo sapien
gcatcctccgaaacaagaattacag

SEQ ID NO: 2701783 - DNA, 25 bp, Homo sapien
aacaggcatcctccgaaacaagaat

SEQ ID NO: 2701784 - DNA, 25 bp, Homo sapien
caaacaggcatcctccgaaacaaga

SEQ ID NO: 2701785 - DNA, 25 bp, Homo sapien
gtgggattggtgaagatgtatatat

SEQ ID NO: 2701786 - DNA, 25 bp, Homo sapien
tatcaatattaactcagctctggct

SEQ ID NO: 2701787 - DNA, 25 bp, Homo sapien
aattaagtatagaccacctgactgc

SEQ ID NO: 2701788 - DNA, 25 bp, Homo sapien
acagtgatatgacaggctggagcaa

SEQ ID NO: 2701789 - DNA, 25 bp, Homo sapien
gccaccggccgtcactcaacccgac

SEQ ID NO: 2701790 - DNA, 25 bp, Homo sapien
caccggccgtcactcaacccgacgg

SEQ ID NO: 2701791 - DNA, 25 bp, Homo sapien
ggccaccggccgtcactcaacccga

SEQ ID NO: 2701792 - DNA, 25 bp, Homo sapien
ccaccggccgtcactcaacccgacg

SEQ ID NO: 2701793 - DNA, 25 bp, Homo sapien
gaggcggactcagccgaccacgtgc

SEQ ID NO: 2701794 - DNA, 25 bp, Homo sapien
ggactcagccgaccacgtgcagctg

SEQ ID NO: 2701795 - DNA, 25 bp, Homo sapien
agccgaccacgtgcagctgctggca

SEQ ID NO: 2701796 - DNA, 25 bp, Homo sapien
ctgaggcggactcagccgaccacgt

SEQ ID NO: 2701797 - DNA, 25 bp, Homo sapien
ctggcgttgaggtcgaggagcgcag

SEQ ID NO: 2701798 - DNA, 25 bp, Homo sapien
gcgttgaggtcgaggagcgcagctc

SEQ ID NO: 2701799 - DNA, 25 bp, Homo sapien
tggcgttgaggtcgaggagcgcagc

SEQ ID NO: 2701800 - DNA, 25 bp, Homo sapien
ggcgttgaggtcgaggagcgcagct

SEQ ID NO: 2701801 - DNA, 25 bp, Homo sapien
agcgagcgggaggagcagcaaagta

SEQ ID NO: 2701802 - DNA, 25 bp, Homo sapien
cgagcgggaggagcagcaaagtaac

SEQ ID NO: 2701803 - DNA, 25 bp, Homo sapien
gagcgggaggagcagcaaagtaacc

SEQ ID NO: 2701804 - DNA, 25 bp, Homo sapien
gcgggaggagcagcaaagtaaccgc

SEQ ID NO: 2701805 - DNA, 25 bp, Homo sapien
gtagcagtcgggcagctggtcccgg

SEQ ID NO: 2701806 - DNA, 25 bp, Homo sapien
cgtggtgctgtagcagtcgggcagc

SEQ ID NO: 2701807 - DNA, 25 bp, Homo sapien
tgccccccggcgtggtgctgtagca

SEQ ID NO: 2701808 - DNA, 25 bp, Homo sapien
ggtagtggcgtatagcgtgcccccc

SEQ ID NO: 2701809 - DNA, 25 bp, Homo sapien
tcaggagcttgggtaccgaggtgac

SEQ ID NO: 2701810 - DNA, 25 bp, Homo sapien
ggttctcagcagacaagccttcata

SEQ ID NO: 2701811 - DNA, 25 bp, Homo sapien
gccttcatagtgcttaaaatcttcc

SEQ ID NO: 2701812 - DNA, 25 bp, Homo sapien
tgtatcaaaggacatcggctctgaa

SEQ ID NO: 2701813 - DNA, 25 bp, Homo sapien
gggtgagttcttgcactccagcagg

SEQ ID NO: 2701814 - DNA, 25 bp, Homo sapien
ccagcaggaactttcggtcgtagat

SEQ ID NO: 2701815 - DNA, 25 bp, Homo sapien
tccgggcaatgggtgagttcttgca

SEQ ID NO: 2701816 - DNA, 25 bp, Homo sapien
tggaggagttgtgaccccgggaatc

SEQ ID NO: 2701817 - DNA, 25 bp, Homo sapien
ttagatgtccatttcaaattgtgcg

SEQ ID NO: 2701818 - DNA, 25 bp, Homo sapien
ggtctagctgcctcagaactaaagg

SEQ ID NO: 2701819 - DNA, 25 bp, Homo sapien
cagttccagcccctgagcatagagg

SEQ ID NO: 2701820 - DNA, 25 bp, Homo sapien
tagggttaggaggagtaccacagac

SEQ ID NO: 2701821 - DNA, 25 bp, Homo sapien
aaggaggcctggaactaacaagtca

SEQ ID NO: 2701822 - DNA, 25 bp, Homo sapien
cacatagcaagtgagctcagataaa

SEQ ID NO: 2701823 - DNA, 25 bp, Homo sapien
gaggaacctaagctctagttgaaag

SEQ ID NO: 2701824 - DNA, 25 bp, Homo sapien
cacttagtctagataggttctccca

SEQ ID NO: 2701825 - DNA, 25 bp, Homo sapien
gcctgtacctgtattcctaatcttc

SEQ ID NO: 2701826 - DNA, 25 bp, Homo sapien
ccatctttacggagggcgaaggcac

SEQ ID NO: 2701827 - DNA, 25 bp, Homo sapien
ttcaggcgcctgatgagttcatagt

SEQ ID NO: 2701828 - DNA, 25 bp, Homo sapien
gcgaaggcacttccggagcattttt

SEQ ID NO: 2701829 - DNA, 25 bp, Homo sapien
catgttcggcgtgtcggtcttcagg

SEQ ID NO: 2701830 - DNA, 25 bp, Homo sapien
gagctccttgaaagtcgtgaccagt

SEQ ID NO: 2701831 - DNA, 25 bp, Homo sapien
caatggtgagtaatggaccgaggca

SEQ ID NO: 2701832 - DNA, 25 bp, Homo sapien
taatgctgagcttctagaccaatgg

SEQ ID NO: 2701833 - DNA, 25 bp, Homo sapien
tgacaggagccgcagaagaaacaag

SEQ ID NO: 2701834 - DNA, 25 bp, Homo sapien
tgttgacttcgtcttctacacgccg

SEQ ID NO: 2701835 - DNA, 25 bp, Homo sapien
ttcgtcttctacacgccgctgcagg

SEQ ID NO: 2701836 - DNA, 25 bp, Homo sapien
tgacttcgtcttctacacgccgctg

SEQ ID NO: 2701837 - DNA, 25 bp, Homo sapien
ggcccactccactgttgacttcgtc

SEQ ID NO: 2701838 - DNA, 25 bp, Homo sapien
gacaaccgtggtattttctccagat

SEQ ID NO: 2701839 - DNA, 25 bp, Homo sapien
acaaccgtggtattttctccagatt

SEQ ID NO: 2701840 - DNA, 25 bp, Homo sapien
ggacaaccgtggtattttctccaga

SEQ ID NO: 2701841 - DNA, 25 bp, Homo sapien
ctggacaaccgtggtattttctcca

SEQ ID NO: 2701842 - DNA, 25 bp, Homo sapien
gaaggaaacttagctaggctccttc

SEQ ID NO: 2701843 - DNA, 25 bp, Homo sapien
tgcagaaggaaacttagctaggctc

SEQ ID NO: 2701844 - DNA, 25 bp, Homo sapien
aaatgcagaaggaaacttagctagg

SEQ ID NO: 2701845 - DNA, 25 bp, Homo sapien
aagctgggattagagcattccacca

SEQ ID NO: 2701846 - DNA, 25 bp, Homo sapien
caaagcccaatactgctgatgccct

SEQ ID NO: 2701847 - DNA, 25 bp, Homo sapien
cacagcaaagcccaatactgctgat

SEQ ID NO: 2701848 - DNA, 25 bp, Homo sapien
atagatgccagtgcaggtgcccaca

SEQ ID NO: 2701849 - DNA, 25 bp, Homo sapien
acagcatatgcctgagccgcataga

SEQ ID NO: 2701850 - DNA, 25 bp, Homo sapien
aaatagtcccttaatgtcttctcca

SEQ ID NO: 2701851 - DNA, 25 bp, Homo sapien
tgcgtagcaactgcaaatagtccct

SEQ ID NO: 2701852 - DNA, 25 bp, Homo sapien
ctagtcgggccccttgcgtagcaac

SEQ ID NO: 2701853 - DNA, 25 bp, Homo sapien
gggccccttgcgtagcaactgcaaa

SEQ ID NO: 2701854 - DNA, 25 bp, Homo sapien
cctgcctcttccatggcacctagag

SEQ ID NO: 2701855 - DNA, 25 bp, Homo sapien
ctgaaggctgagctgctcatcctgc

SEQ ID NO: 2701856 - DNA, 25 bp, Homo sapien
gaaggctgagctgctcatcctgcct

SEQ ID NO: 2701857 - DNA, 25 bp, Homo sapien
ggctgagctgctcatcctgcctctt

SEQ ID NO: 2701858 - DNA, 25 bp, Homo sapien
caaatggatgacagctggggaatcc

SEQ ID NO: 2701859 - DNA, 25 bp, Homo sapien
gggaatccagataaagtgtctccac

SEQ ID NO: 2701860 - DNA, 25 bp, Homo sapien
aaagttggagatagcaaatggatga

SEQ ID NO: 2701861 - DNA, 25 bp, Homo sapien
aaggtggcaggaaagttggagatag

SEQ ID NO: 2701862 - DNA, 25 bp, Homo sapien
caggctgaggaactactgtccacaa

SEQ ID NO: 2701863 - DNA, 25 bp, Homo sapien
ccacagtcttggggcgagtcccatg

SEQ ID NO: 2701864 - DNA, 25 bp, Homo sapien
ccacagtcagggcttgaagagtaag

SEQ ID NO: 2701865 - DNA, 25 bp, Homo sapien
gggcgagtcccatggagctaggaag

SEQ ID NO: 2701866 - DNA, 25 bp, Homo sapien
tcccaggaaggagaagccgtggaac

SEQ ID NO: 2701867 - DNA, 25 bp, Homo sapien
gattgcaacacgtttggggaaaatc

SEQ ID NO: 2701868 - DNA, 25 bp, Homo sapien
attgcaacacgtttggggaaaatca

SEQ ID NO: 2701869 - DNA, 25 bp, Homo sapien
caggaaggagaagccgtggaacatt

SEQ ID NO: 2701870 - DNA, 25 bp, Homo sapien
ctgcctgggacggcccaggcctggc

SEQ ID NO: 2701871 - DNA, 25 bp, Homo sapien
gcctgggacggcccaggcctggcat

SEQ ID NO: 2701872 - DNA, 25 bp, Homo sapien
tgcctgggacggcccaggcctggca

SEQ ID NO: 2701873 - DNA, 25 bp, Homo sapien
gggtccatgtaacgctgaagataga

SEQ ID NO: 2701874 - DNA, 25 bp, Homo sapien
tgtgtacactgacgacaagcctgag

SEQ ID NO: 2701875 - DNA, 25 bp, Homo sapien
catgggcaccgtacatggcagtgga

SEQ ID NO: 2701876 - DNA, 25 bp, Homo sapien
caggttgttgttagcgccatagagc

SEQ ID NO: 2701877 - DNA, 25 bp, Homo sapien
gccagcatgcagacctagattcaga

SEQ ID NO: 2701878 - DNA, 25 bp, Homo sapien
gcagtccatttagtgcctggctcag

SEQ ID NO: 2701879 - DNA, 25 bp, Homo sapien
ccacaaagaggcgtgtgatgctgct

SEQ ID NO: 2701880 - DNA, 25 bp, Homo sapien
gctgccatgcttcatgacagcagac

SEQ ID NO: 2701881 - DNA, 25 bp, Homo sapien
ccagagtgggaagcatggtacctcc

SEQ ID NO: 2701882 - DNA, 25 bp, Homo sapien
caatctacagggtccggaatcaggg

SEQ ID NO: 2701883 - DNA, 25 bp, Homo sapien
tcccttatggaagagtcatgcacca

SEQ ID NO: 2701884 - DNA, 25 bp, Homo sapien
ttgtataatctgtggcaactgggcc

SEQ ID NO: 2701885 - DNA, 25 bp, Homo sapien
aatggcaactctaaggcgtggctcc

SEQ ID NO: 2701886 - DNA, 25 bp, Homo sapien
tctagtggcaggaagaatggcaact

SEQ ID NO: 2701887 - DNA, 25 bp, Homo sapien
tgcagagcccagctaatgtgcccct

SEQ ID NO: 2701888 - DNA, 25 bp, Homo sapien
tctcaggcaccctaaggaataggta

SEQ ID NO: 2701889 - DNA, 25 bp, Homo sapien
ctttagcagttttcagggaacatcc

SEQ ID NO: 2701890 - DNA, 25 bp, Homo sapien
gaacatcctctgtgtagctgctctg

SEQ ID NO: 2701891 - DNA, 25 bp, Homo sapien
gctgtcttcaagattagccctgtgc

SEQ ID NO: 2701892 - DNA, 25 bp, Homo sapien
tctttcagggtatcagttgtttgcc

SEQ ID NO: 2701893 - DNA, 25 bp, Homo sapien
tggagtcactcctaagcttagccag

SEQ ID NO: 2701894 - DNA, 25 bp, Homo sapien
tctgctctctctagtacacatggga

SEQ ID NO: 2701895 - DNA, 25 bp, Homo sapien
tgcttgtgctgagcccaaagaccag

SEQ ID NO: 2701896 - DNA, 25 bp, Homo sapien
tgcacatgagtcctaccctgggtgt

SEQ ID NO: 2701897 - DNA, 25 bp, Homo sapien
cctttgccccaattaatgagcaata

SEQ ID NO: 2701898 - DNA, 25 bp, Homo sapien
aagacacaaatccatttggcaaagt

SEQ ID NO: 2701899 - DNA, 25 bp, Homo sapien
ttcctttgccccaattaatgagcaa

SEQ ID NO: 2701900 - DNA, 25 bp, Homo sapien
aatccatttggcaaagtgaacaggg

SEQ ID NO: 2701901 - DNA, 25 bp, Homo sapien
accatgcagcaacctgcatttcttt

SEQ ID NO: 2701902 - DNA, 25 bp, Homo sapien
taaccatgcagcaacctgcatttct

SEQ ID NO: 2701903 - DNA, 25 bp, Homo sapien
catgcagcaacctgcatttctttct

SEQ ID NO: 2701904 - DNA, 25 bp, Homo sapien
tttaaccatgcagcaacctgcattt

SEQ ID NO: 2701905 - DNA, 25 bp, Homo sapien
gtgggttcacctcatactgtggaat

SEQ ID NO: 2701906 - DNA, 25 bp, Homo sapien
ggtccgtgggttcacctcatactgt

SEQ ID NO: 2701907 - DNA, 25 bp, Homo sapien
cgtgggttcacctcatactgtggaa

SEQ ID NO: 2701908 - DNA, 25 bp, Homo sapien
tccgtgggttcacctcatactgtgg

SEQ ID NO: 2701909 - DNA, 25 bp, Homo sapien
ttcaccgcaaggataaaactagcta

SEQ ID NO: 2701910 - DNA, 25 bp, Homo sapien
aaatcattcaccgcaaggataaaac

SEQ ID NO: 2701911 - DNA, 25 bp, Homo sapien
agatactataggcttctgactcata

SEQ ID NO: 2701912 - DNA, 25 bp, Homo sapien
taggcttctgactcatattcacttg

SEQ ID NO: 2701913 - DNA, 25 bp, Homo sapien
taatattaagttgcagttagatttt

SEQ ID NO: 2701914 - DNA, 25 bp, Homo sapien
ctaatattaagttgcagttagattt

SEQ ID NO: 2701915 - DNA, 25 bp, Homo sapien
gtttttccagttcaatcttgatttc

SEQ ID NO: 2701916 - DNA, 25 bp, Homo sapien
tttccagttcaatcttgatttcttc

SEQ ID NO: 2701917 - DNA, 25 bp, Homo sapien
tcttgagatcctcttgtagacattt

SEQ ID NO: 2701918 - DNA, 25 bp, Homo sapien
tgtagacagatccaactctgctttc

SEQ ID NO: 2701919 - DNA, 25 bp, Homo sapien
ctgtagacagatccaactctgcttt

SEQ ID NO: 2701920 - DNA, 25 bp, Homo sapien
actctgctttcttgagatcctcttg

SEQ ID NO: 2701921 - DNA, 25 bp, Homo sapien
tgcagccttgattccaaatctgaat

SEQ ID NO: 2701922 - DNA, 25 bp, Homo sapien
gcagccttgattccaaatctgaatt

SEQ ID NO: 2701923 - DNA, 25 bp, Homo sapien
aagaggggaatttggcattaagtct

SEQ ID NO: 2701924 - DNA, 25 bp, Homo sapien
aaagaactctataaagcactattca

SEQ ID NO: 2701925 - DNA, 25 bp, Homo sapien
gaactctataaagcactattcaatt

SEQ ID NO: 2701926 - DNA, 25 bp, Homo sapien
tctataaagcactattcaatttact

SEQ ID NO: 2701927 - DNA, 25 bp, Homo sapien
ctgggcccttgctgagaccccagtc

SEQ ID NO: 2701928 - DNA, 25 bp, Homo sapien
gcccttgctgagaccccagtcatgg

SEQ ID NO: 2701929 - DNA, 25 bp, Homo sapien
gagaccccagtcatggggtggcaca

SEQ ID NO: 2701930 - DNA, 25 bp, Homo sapien
gggcccttgctgagaccccagtcat

SEQ ID NO: 2701931 - DNA, 25 bp, Homo sapien
ctgcacaaactcagtgttcttggtg

SEQ ID NO: 2701932 - DNA, 25 bp, Homo sapien
tggtggtggcgactgagcctgggct

SEQ ID NO: 2701933 - DNA, 25 bp, Homo sapien
tcttggtgaggtgcccatggtggtg

SEQ ID NO: 2701934 - DNA, 25 bp, Homo sapien
ctttcaggccaggtctgcacaaact

SEQ ID NO: 2701935 - DNA, 25 bp, Homo sapien
cgctcgtttggggcaaagccatacc

SEQ ID NO: 2701936 - DNA, 25 bp, Homo sapien
catgccgctcgtttggggcaaagcc

SEQ ID NO: 2701937 - DNA, 25 bp, Homo sapien
ggcatgccgctcgtttggggcaaag

SEQ ID NO: 2701938 - DNA, 25 bp, Homo sapien
gctcgtttggggcaaagccataccc

SEQ ID NO: 2701939 - DNA, 25 bp, Homo sapien
cttgagggcccagttgtccttagaa

SEQ ID NO: 2701940 - DNA, 25 bp, Homo sapien
gtccttagaaacctcaagcaactcc

SEQ ID NO: 2701941 - DNA, 25 bp, Homo sapien
ttgtccttagaaacctcaagcaact

SEQ ID NO: 2701942 - DNA, 25 bp, Homo sapien
tgagggcccagttgtccttagaaac

SEQ ID NO: 2701943 - DNA, 25 bp, Homo sapien
cctcttggcggccaggatgttgctc

SEQ ID NO: 2701944 - DNA, 25 bp, Homo sapien
ccttgagaattcaaagcagaaagca

SEQ ID NO: 2701945 - DNA, 25 bp, Homo sapien
acccagctggtgtacaagcttctag

SEQ ID NO: 2701946 - DNA, 25 bp, Homo sapien
tcagtccctctagtcagatgcttgc

SEQ ID NO: 2701947 - DNA, 25 bp, Homo sapien
ttttttgtagctaaagccctggcag

SEQ ID NO: 2701948 - DNA, 25 bp, Homo sapien
tagccatagaaaaataggcagttag

SEQ ID NO: 2701949 - DNA, 25 bp, Homo sapien
tctgtacagggggaagcatgctaca

SEQ ID NO: 2701950 - DNA, 25 bp, Homo sapien
ccatagaaaaataggcagttagttt

SEQ ID NO: 2701951 - DNA, 25 bp, Homo sapien
gatctgtacagggggaagcatgcta

SEQ ID NO: 2701952 - DNA, 25 bp, Homo sapien
caatctgtcgttcgctgggctggaa

SEQ ID NO: 2701953 - DNA, 25 bp, Homo sapien
gaactgacgctcgaggacctaaaga

SEQ ID NO: 2701954 - DNA, 25 bp, Homo sapien
tagcgctccgagatgcatgtggtcc

SEQ ID NO: 2701955 - DNA, 25 bp, Homo sapien
gccgtttctaaagcgcgtcgatgcg

SEQ ID NO: 2701956 - DNA, 25 bp, Homo sapien
agactggctatctgactttgagtca

SEQ ID NO: 2701957 - DNA, 25 bp, Homo sapien
aagtctcataacctcagtcgtaaag

SEQ ID NO: 2701958 - DNA, 25 bp, Homo sapien
cacaaacaggtaatactatcatctc

SEQ ID NO: 2701959 - DNA, 25 bp, Homo sapien
tcagtcgtaaagctgggattccaag

SEQ ID NO: 2701960 - DNA, 25 bp, Homo sapien
catggcctgaaacggtcactcgggt

SEQ ID NO: 2701961 - DNA, 25 bp, Homo sapien
actagtctactaggcactgaggaaa

SEQ ID NO: 2701962 - DNA, 25 bp, Homo sapien
ggaattgtggccgacttagccctac

SEQ ID NO: 2701963 - DNA, 25 bp, Homo sapien
tataatgaggcacgttcaaccccta

SEQ ID NO: 2701964 - DNA, 25 bp, Homo sapien
caaaacaatcccgaactgcgggaag

SEQ ID NO: 2701965 - DNA, 25 bp, Homo sapien
ccacaatacgctctagatgaaagtt

SEQ ID NO: 2701966 - DNA, 25 bp, Homo sapien
caatacgctctagatgaaagttcaa

SEQ ID NO: 2701967 - DNA, 25 bp, Homo sapien
caatcccgaactgcgggaagcgcca

SEQ ID NO: 2701968 - DNA, 25 bp, Homo sapien
gaggaaagccgaaggaaacagcagc

SEQ ID NO: 2701969 - DNA, 25 bp, Homo sapien
aacgctcccaggggcgtagaagatg

SEQ ID NO: 2701970 - DNA, 25 bp, Homo sapien
tcccaggggcgtagaagatggcacc

SEQ ID NO: 2701971 - DNA, 25 bp, Homo sapien
gaggaggaaagccgaaggaaacagc

SEQ ID NO: 2701972 - DNA, 25 bp, Homo sapien
cctgaggcggccctgccgtcggctc

SEQ ID NO: 2701973 - DNA, 25 bp, Homo sapien
ggcggccctgccgtcggctccacat

SEQ ID NO: 2701974 - DNA, 25 bp, Homo sapien
cgcagaccgtgggcctgaggcggcc

SEQ ID NO: 2701975 - DNA, 25 bp, Homo sapien
gaccgtgggcctgaggcggccctgc

SEQ ID NO: 2701976 - DNA, 25 bp, Homo sapien
tcggtttccccgaggatcgcagcca

SEQ ID NO: 2701977 - DNA, 25 bp, Homo sapien
ggtttccccgaggatcgcagccaca

SEQ ID NO: 2701978 - DNA, 25 bp, Homo sapien
ccagcttcctctggggcgtcgtttc

SEQ ID NO: 2701979 - DNA, 25 bp, Homo sapien
tggggcgtcgtttctcagcagcctc

SEQ ID NO: 2701980 - DNA, 25 bp, Homo sapien
ttgagacacaaatccgatatatcgt

SEQ ID NO: 2701981 - DNA, 25 bp, Homo sapien
caaatccgatatatcgttgcaggaa

SEQ ID NO: 2701982 - DNA, 25 bp, Homo sapien
aatgccaagggcttgagacacaaat

SEQ ID NO: 2701983 - DNA, 25 bp, Homo sapien
ttagacgtagcgaatgccaagggct

SEQ ID NO: 2701984 - DNA, 25 bp, Homo sapien
tgagttctaataccatacctgccac

SEQ ID NO: 2701985 - DNA, 25 bp, Homo sapien
taacaacaaccagcctaacatgagc

SEQ ID NO: 2701986 - DNA, 25 bp, Homo sapien
catatgggacctgaacctaagtttc

SEQ ID NO: 2701987 - DNA, 25 bp, Homo sapien
tacctgccacttactccatatggga

SEQ ID NO: 2701988 - DNA, 25 bp, Homo sapien
cacactaatgcaactaataagcatc

SEQ ID NO: 2701989 - DNA, 25 bp, Homo sapien
cacaccttcagaacttgtcattcac

SEQ ID NO: 2701990 - DNA, 25 bp, Homo sapien
gaaaggagaacacacggttcacaga

SEQ ID NO: 2701991 - DNA, 25 bp, Homo sapien
aaagcaagtcctaagtctctctctg

SEQ ID NO: 2701992 - DNA, 25 bp, Homo sapien
aagcctcgacgaaggctgaccagag

SEQ ID NO: 2701993 - DNA, 25 bp, Homo sapien
cgctgggcttgccgcaggaactgct

SEQ ID NO: 2701994 - DNA, 25 bp, Homo sapien
tcagggtgctgcaagcctcgacgaa

SEQ ID NO: 2701995 - DNA, 25 bp, Homo sapien
ggtgctgcaagcctcgacgaaggct

SEQ ID NO: 2701996 - DNA, 25 bp, Homo sapien
gcttagcttgtggtccatccctcag

SEQ ID NO: 2701997 - DNA, 25 bp, Homo sapien
ctatgtgagtgagtaccagagccct

SEQ ID NO: 2701998 - DNA, 25 bp, Homo sapien
agtaccagagccctgcttagcttgt

SEQ ID NO: 2701999 - DNA, 25 bp, Homo sapien
cctgcttagcttgtggtccatccct

SEQ ID NO: 2702000 - DNA, 25 bp, Homo sapien
gaagtctgagctgtgactggagagg

SEQ ID NO: 2702001 - DNA, 25 bp, Homo sapien
tggttgctggtcaggagcccgacca

SEQ ID NO: 2702002 - DNA, 25 bp, Homo sapien
agagagctcatgcaggcaccgagcc

SEQ ID NO: 2702003 - DNA, 25 bp, Homo sapien
tgaggaggtaagaagtggctggcag

SEQ ID NO: 2702004 - DNA, 25 bp, Homo sapien
agcagctatccttgcggctcacaag

SEQ ID NO: 2702005 - DNA, 25 bp, Homo sapien
tcaaactggtcccaaaagcacaatt

SEQ ID NO: 2702006 - DNA, 25 bp, Homo sapien
tatccttgcggctcacaagagggtg

SEQ ID NO: 2702007 - DNA, 25 bp, Homo sapien
cctcctacctgccagctcaaactgg

SEQ ID NO: 2702008 - DNA, 25 bp, Homo sapien
actgggcttggcctgtttcatgcca

SEQ ID NO: 2702009 - DNA, 25 bp, Homo sapien
gaacaggcaacaaaagcactgggct

SEQ ID NO: 2702010 - DNA, 25 bp, Homo sapien
aggcaacaaaagcactgggcttggc

SEQ ID NO: 2702011 - DNA, 25 bp, Homo sapien
gagaacaggcaacaaaagcactggg

SEQ ID NO: 2702012 - DNA, 25 bp, Homo sapien
agcctcactctccacgatcaggtta

SEQ ID NO: 2702013 - DNA, 25 bp, Homo sapien
tacccagtgtatacagacacagctc

SEQ ID NO: 2702014 - DNA, 25 bp, Homo sapien
tctccacgatcaggttacccagtgt

SEQ ID NO: 2702015 - DNA, 25 bp, Homo sapien
gatcaggttacccagtgtatacaga

SEQ ID NO: 2702016 - DNA, 25 bp, Homo sapien
ctggaagtagacagggtaaggatct

SEQ ID NO: 2702017 - DNA, 25 bp, Homo sapien
tagacagggtaaggatctgactgga

SEQ ID NO: 2702018 - DNA, 25 bp, Homo sapien
catcaggtcttcagagactttcagc

SEQ ID NO: 2702019 - DNA, 25 bp, Homo sapien
aggtcttcagagactttcagcccct

SEQ ID NO: 2702020 - DNA, 25 bp, Homo sapien
tgggacaaggcatatccgagagctt

SEQ ID NO: 2702021 - DNA, 25 bp, Homo sapien
gctgggacaaggcatatccgagagc

SEQ ID NO: 2702022 - DNA, 25 bp, Homo sapien
gacaaggcatatccgagagcttcca

SEQ ID NO: 2702023 - DNA, 25 bp, Homo sapien
aaggcatatccgagagcttccagca

SEQ ID NO: 2702024 - DNA, 25 bp, Homo sapien
caggtgggagagtgtccaaacccaa

SEQ ID NO: 2702025 - DNA, 25 bp, Homo sapien
atagcaggtgggagagtgtccaaac

SEQ ID NO: 2702026 - DNA, 25 bp, Homo sapien
agcaggtgggagagtgtccaaaccc

SEQ ID NO: 2702027 - DNA, 25 bp, Homo sapien
tgggagagtgtccaaacccaaagcc

SEQ ID NO: 2702028 - DNA, 25 bp, Homo sapien
ctgtaagtaggaaccacgaagatgc

SEQ ID NO: 2702029 - DNA, 25 bp, Homo sapien
taggaaccacgaagatgccagtggt

SEQ ID NO: 2702030 - DNA, 25 bp, Homo sapien
taagtaggaaccacgaagatgccag

SEQ ID NO: 2702031 - DNA, 25 bp, Homo sapien
aaccacgaagatgccagtggttctt

SEQ ID NO: 2702032 - DNA, 25 bp, Homo sapien
ctgagggagagtggaggccaagatg

SEQ ID NO: 2702033 - DNA, 25 bp, Homo sapien
tgagggagagtggaggccaagatgg

SEQ ID NO: 2702034 - DNA, 25 bp, Homo sapien
gagggagagtggaggccaagatgga

SEQ ID NO: 2702035 - DNA, 25 bp, Homo sapien
agggagagtggaggccaagatggag

SEQ ID NO: 2702036 - DNA, 25 bp, Homo sapien
actccacagcgaccccagggttgag

SEQ ID NO: 2702037 - DNA, 25 bp, Homo sapien
aaggcaccaggcaaactccacagcg

SEQ ID NO: 2702038 - DNA, 25 bp, Homo sapien
gaccccagggttgagctttgggcca

SEQ ID NO: 2702039 - DNA, 25 bp, Homo sapien
ggccaggttgcaacatttgtagcat

SEQ ID NO: 2702040 - DNA, 25 bp, Homo sapien
tcaaagagttgaatgtcatggaagg

SEQ ID NO: 2702041 - DNA, 25 bp, Homo sapien
tatagcaattccagacacaagttca

SEQ ID NO: 2702042 - DNA, 25 bp, Homo sapien
tgaatgtcatggaagggagccccag

SEQ ID NO: 2702043 - DNA, 25 bp, Homo sapien
ccagggaagatctgtggtactttcc

SEQ ID NO: 2702044 - DNA, 25 bp, Homo sapien
ctttaagaagagaagcagttgccta

SEQ ID NO: 2702045 - DNA, 25 bp, Homo sapien
gagaagcagttgcctaggcgtggtg

SEQ ID NO: 2702046 - DNA, 25 bp, Homo sapien
taagaagagaagcagttgcctaggc

SEQ ID NO: 2702047 - DNA, 25 bp, Homo sapien
agaagagaagcagttgcctaggcgt

SEQ ID NO: 2702048 - DNA, 25 bp, Homo sapien
ctgggcaacaggaagcaagcagtcc

SEQ ID NO: 2702049 - DNA, 25 bp, Homo sapien
agcagcaaccccagagtagacagag

SEQ ID NO: 2702050 - DNA, 25 bp, Homo sapien
ggccaatgagcagaggattgctgac

SEQ ID NO: 2702051 - DNA, 25 bp, Homo sapien
agtcctgcatcctcggttttctgga

SEQ ID NO: 2702052 - DNA, 25 bp, Homo sapien
tcctcggttttctggacagccccag

SEQ ID NO: 2702053 - DNA, 25 bp, Homo sapien
gagtatcaagaaacatctcccagaa

SEQ ID NO: 2702054 - DNA, 25 bp, Homo sapien
tcaggtgtaagaaggaagaggttac

SEQ ID NO: 2702055 - DNA, 25 bp, Homo sapien
cagaatttcacctgacatcttcacc

SEQ ID NO: 2702056 - DNA, 25 bp, Homo sapien
ctgcaaagacaaattggggggtcag

SEQ ID NO: 2702057 - DNA, 25 bp, Homo sapien
gaactgcagaaggataaataaggct

SEQ ID NO: 2702058 - DNA, 25 bp, Homo sapien
aggttgttgaggagccaaaggccct

SEQ ID NO: 2702059 - DNA, 25 bp, Homo sapien
cactgctgcctcagttagcaggttg

SEQ ID NO: 2702060 - DNA, 25 bp, Homo sapien
tagcaggttgcttagacatcgaagc

SEQ ID NO: 2702061 - DNA, 25 bp, Homo sapien
cagctgtaagagaggctcaatcaga

SEQ ID NO: 2702062 - DNA, 25 bp, Homo sapien
ggagagcaaggaggtacagaaacta

SEQ ID NO: 2702063 - DNA, 25 bp, Homo sapien
ggctcaatcagatccagggagagca

SEQ ID NO: 2702064 - DNA, 25 bp, Homo sapien
cacgttagatactggcaacagctgt

SEQ ID NO: 2702065 - DNA, 25 bp, Homo sapien
caacattgcacagaactgtgagcac

SEQ ID NO: 2702066 - DNA, 25 bp, Homo sapien
tgcagcagctccaaactctggccta

SEQ ID NO: 2702067 - DNA, 25 bp, Homo sapien
aggacccttttctgcaacattgcac

SEQ ID NO: 2702068 - DNA, 25 bp, Homo sapien
tggccacagccgctggcagtaagca

SEQ ID NO: 2702069 - DNA, 25 bp, Homo sapien
cagagggtgcattccccaacaagag

SEQ ID NO: 2702070 - DNA, 25 bp, Homo sapien
gtgtcctaagactcaattcccacag

SEQ ID NO: 2702071 - DNA, 25 bp, Homo sapien
cctatataggttagccaggcccaga

SEQ ID NO: 2702072 - DNA, 25 bp, Homo sapien
aagaggatgaagtttctgacatgga

SEQ ID NO: 2702073 - DNA, 25 bp, Homo sapien
gcagccctgactgctgcaggaagac

SEQ ID NO: 2702074 - DNA, 25 bp, Homo sapien
actgctgcaggaagacctgaacagc

SEQ ID NO: 2702075 - DNA, 25 bp, Homo sapien
cttgcagccctgactgctgcaggaa

SEQ ID NO: 2702076 - DNA, 25 bp, Homo sapien
gactgctgcaggaagacctgaacag

SEQ ID NO: 2702077 - DNA, 25 bp, Homo sapien
tggagagcatacacacgatcctgga

SEQ ID NO: 2702078 - DNA, 25 bp, Homo sapien
ggagagcatacacacgatcctggag

SEQ ID NO: 2702079 - DNA, 25 bp, Homo sapien
gctggagagcatacacacgatcctg

SEQ ID NO: 2702080 - DNA, 25 bp, Homo sapien
tgctggagagcatacacacgatcct

SEQ ID NO: 2702081 - DNA, 25 bp, Homo sapien
gctgggacccaaaggtcttggctta

SEQ ID NO: 2702082 - DNA, 25 bp, Homo sapien
gagtaagtagaccacactgagtccc

SEQ ID NO: 2702083 - DNA, 25 bp, Homo sapien
ggtcctcctgcctggatagtgctga

SEQ ID NO: 2702084 - DNA, 25 bp, Homo sapien
ggctctactggacaaacaagcttga

SEQ ID NO: 2702085 - DNA, 25 bp, Homo sapien
gtggtaaagcctgaagcctccactg

SEQ ID NO: 2702086 - DNA, 25 bp, Homo sapien
tcagcatttggccaagagacgaatg

SEQ ID NO: 2702087 - DNA, 25 bp, Homo sapien
tcagtgctgatcaggtaaccagagc

SEQ ID NO: 2702088 - DNA, 25 bp, Homo sapien
tgcagaatagttaaagacacctccc

SEQ ID NO: 2702089 - DNA, 25 bp, Homo sapien
ctcttcctgtcttaacaagactaag

SEQ ID NO: 2702090 - DNA, 25 bp, Homo sapien
tcttcctgtcttaacaagactaaga

SEQ ID NO: 2702091 - DNA, 25 bp, Homo sapien
tactcttcctgtcttaacaagacta

SEQ ID NO: 2702092 - DNA, 25 bp, Homo sapien
actcttcctgtcttaacaagactaa

SEQ ID NO: 2702093 - DNA, 25 bp, Homo sapien
gagaaactagaactcggactttagc

SEQ ID NO: 2702094 - DNA, 25 bp, Homo sapien
ccaaggtcgtgcagaaacccgtgga

SEQ ID NO: 2702095 - DNA, 25 bp, Homo sapien
cggactttagccttgctgttgatct

SEQ ID NO: 2702096 - DNA, 25 bp, Homo sapien
aatgctccgatgtgcagcccaagct

SEQ ID NO: 2702097 - DNA, 25 bp, Homo sapien
tgggcctgcgtgagattcgcatcca

SEQ ID NO: 2702098 - DNA, 25 bp, Homo sapien
tgagaaacgctacgtggagctgaag

SEQ ID NO: 2702099 - DNA, 25 bp, Homo sapien
cccgcagggacttcattgagaaacg

SEQ ID NO: 2702100 - DNA, 25 bp, Homo sapien
gctgaagaaggcgaatcccgaccta

SEQ ID NO: 2702101 - DNA, 25 bp, Homo sapien
tgttggagactcgattgttggtgac

SEQ ID NO: 2702102 - DNA, 25 bp, Homo sapien
gttgattctgaggtgcactgtggga

SEQ ID NO: 2702103 - DNA, 25 bp, Homo sapien
ttggagactcgattgttggtgacag

SEQ ID NO: 2702104 - DNA, 25 bp, Homo sapien
agcttgtcgctgcggtgttgctgtt

SEQ ID NO: 2702105 - DNA, 25 bp, Homo sapien
actgtgggaaagagcttgtcgctgc

SEQ ID NO: 2702106 - DNA, 25 bp, Homo sapien
cggtgttgctgttggagactcgatt

SEQ ID NO: 2702107 - DNA, 25 bp, Homo sapien
aacagcaacaccgcagcgacaagct

SEQ ID NO: 2702108 - DNA, 25 bp, Homo sapien
caacaatcgagtctccaacagcaac

SEQ ID NO: 2702109 - DNA, 25 bp, Homo sapien
cagtgcacctcagaatcaacccaca

SEQ ID NO: 2702110 - DNA, 25 bp, Homo sapien
aatcgagtctccaacagcaacaccg

SEQ ID NO: 2702111 - DNA, 25 bp, Homo sapien
ctgtcaccaacaatcgagtctccaa

SEQ ID NO: 2702112 - DNA, 25 bp, Homo sapien
gcagcgacaagctctttcccacagt

SEQ ID NO: 2702113 - DNA, 25 bp, Homo sapien
ctgacacgtaagagactgattaaat

SEQ ID NO: 2702114 - DNA, 25 bp, Homo sapien
tgttcactactatatctcaaatttt

SEQ ID NO: 2702115 - DNA, 25 bp, Homo sapien
gacactgtcgctgttctaacttttg

SEQ ID NO: 2702116 - DNA, 25 bp, Homo sapien
cataggatctgacacgtaagagact

SEQ ID NO: 2702117 - DNA, 25 bp, Homo sapien
aatttttgcataggatctgacacgt

SEQ ID NO: 2702118 - DNA, 25 bp, Homo sapien
cgctgttctaacttttgttctgtat

SEQ ID NO: 2702119 - DNA, 25 bp, Homo sapien
tatagtagtgaacaatacagaacaa

SEQ ID NO: 2702120 - DNA, 25 bp, Homo sapien
taatcagtctcttacgtgtcagatc

SEQ ID NO: 2702121 - DNA, 25 bp, Homo sapien
tacagaacaaaagttagaacagcga

SEQ ID NO: 2702122 - DNA, 25 bp, Homo sapien
caaaagttagaacagcgacagtgtc

SEQ ID NO: 2702123 - DNA, 25 bp, Homo sapien
tacgtgtcagatcctatgcaaaaat

SEQ ID NO: 2702124 - DNA, 25 bp, Homo sapien
aaaaatttgagatatagtagtgaac

SEQ ID NO: 2702125 - DNA, 25 bp, Homo sapien
gatgtggatgatcctcactccttcc

SEQ ID NO: 2702126 - DNA, 25 bp, Homo sapien
cgatggccacgatgtggatgatcct

SEQ ID NO: 2702127 - DNA, 25 bp, Homo sapien
cccgatggccacgatgtggatgatc

SEQ ID NO: 2702128 - DNA, 25 bp, Homo sapien
ggccacgatgtggatgatcctcact

SEQ ID NO: 2702129 - DNA, 25 bp, Homo sapien
gatggccacgatgtggatgatcctc

SEQ ID NO: 2702130 - DNA, 25 bp, Homo sapien
ccccgatggccacgatgtggatgat

SEQ ID NO: 2702131 - DNA, 25 bp, Homo sapien
gatcatccacatcgtggccatcggg

SEQ ID NO: 2702132 - DNA, 25 bp, Homo sapien
agtgaggatcatccacatcgtggcc

SEQ ID NO: 2702133 - DNA, 25 bp, Homo sapien
gaggatcatccacatcgtggccatc

SEQ ID NO: 2702134 - DNA, 25 bp, Homo sapien
tggaaggagtgaggatcatccacat

SEQ ID NO: 2702135 - DNA, 25 bp, Homo sapien
aggatcatccacatcgtggccatcg

SEQ ID NO: 2702136 - DNA, 25 bp, Homo sapien
ggatcatccacatcgtggccatcgg

SEQ ID NO: 2702137 - DNA, 25 bp, Homo sapien
gcaccaccttctaagtcacgtcacc

SEQ ID NO: 2702138 - DNA, 25 bp, Homo sapien
gacttcaggaaacttctcatgaccc

SEQ ID NO: 2702139 - DNA, 25 bp, Homo sapien
acttcaggaaacttctcatgacccc

SEQ ID NO: 2702140 - DNA, 25 bp, Homo sapien
tctgcaccaccttctaagtcacgtc

SEQ ID NO: 2702141 - DNA, 25 bp, Homo sapien
aggaaacttctcatgacccccaggg

SEQ ID NO: 2702142 - DNA, 25 bp, Homo sapien
ccagggctgcacctacctctgcacc

SEQ ID NO: 2702143 - DNA, 25 bp, Homo sapien
gggtcatgagaagtttcctgaagtc

SEQ ID NO: 2702144 - DNA, 25 bp, Homo sapien
ccctgggggtcatgagaagtttcct

SEQ ID NO: 2702145 - DNA, 25 bp, Homo sapien
gacgtgacttagaaggtggtgcaga

SEQ ID NO: 2702146 - DNA, 25 bp, Homo sapien
ggtgacgtgacttagaaggtggtgc

SEQ ID NO: 2702147 - DNA, 25 bp, Homo sapien
aaggtggtgcagaggtaggtgcagc

SEQ ID NO: 2702148 - DNA, 25 bp, Homo sapien
ggtgcagaggtaggtgcagccctgg

SEQ ID NO: 2702149 - DNA, 25 bp, Homo sapien
aaatcctcaaggagacttcttgggg

SEQ ID NO: 2702150 - DNA, 25 bp, Homo sapien
ccccaagaagtctccttgaggattt

SEQ ID NO: 2702151 - DNA, 25 bp, Homo sapien
aaaatcctcaaggagacttcttggg

SEQ ID NO: 2702152 - DNA, 25 bp, Homo sapien
gtctttctaaaaatcctcaaggaga

SEQ ID NO: 2702153 - DNA, 25 bp, Homo sapien
ggcaatattttgctatcagtgaatt

SEQ ID NO: 2702154 - DNA, 25 bp, Homo sapien
tattttgctatcagtgaatttctcg

SEQ ID NO: 2702155 - DNA, 25 bp, Homo sapien
tcagtgaatttctcgtctcttctag

SEQ ID NO: 2702156 - DNA, 25 bp, Homo sapien
gggctgtggcaatattttgctatca

SEQ ID NO: 2702157 - DNA, 25 bp, Homo sapien
aattcactgatagcaaaatattgcc

SEQ ID NO: 2702158 - DNA, 25 bp, Homo sapien
agaaaccccaagaagtctccttgag

SEQ ID NO: 2702159 - DNA, 25 bp, Homo sapien
ctagaagagacgagaaattcactga

SEQ ID NO: 2702160 - DNA, 25 bp, Homo sapien
tagcaaaatattgccacagccccag

SEQ ID NO: 2702161 - DNA, 25 bp, Homo sapien
aaaatattgccacagccccagaaac

SEQ ID NO: 2702162 - DNA, 25 bp, Homo sapien
gagacgagaaattcactgatagcaa

SEQ ID NO: 2702163 - DNA, 25 bp, Homo sapien
atgccaagggagtacaatgaggatg

SEQ ID NO: 2702164 - DNA, 25 bp, Homo sapien
tgccaagggagtacaatgaggatga

SEQ ID NO: 2702165 - DNA, 25 bp, Homo sapien
agacccagctgcacgaaggaggaaa

SEQ ID NO: 2702166 - DNA, 25 bp, Homo sapien
gatgccaagggagtacaatgaggat

SEQ ID NO: 2702167 - DNA, 25 bp, Homo sapien
catcctcattgtactcccttggcat

SEQ ID NO: 2702168 - DNA, 25 bp, Homo sapien
atcctcattgtactcccttggcatc

SEQ ID NO: 2702169 - DNA, 25 bp, Homo sapien
tcatcctcattgtactcccttggca

SEQ ID NO: 2702170 - DNA, 25 bp, Homo sapien
tttcctccttcgtgcagctgggtct

SEQ ID NO: 2702171 - DNA, 25 bp, Homo sapien
gagagagctagcagagaagtaccgg

SEQ ID NO: 2702172 - DNA, 25 bp, Homo sapien
gagagatggagtgaacaaagattat

SEQ ID NO: 2702173 - DNA, 25 bp, Homo sapien
tcgtgccaaggaacggagagatgga

SEQ ID NO: 2702174 - DNA, 25 bp, Homo sapien
gctacgccaacaagaaattgagaga

SEQ ID NO: 2702175 - DNA, 25 bp, Homo sapien
aagctacgccaacaagaaattgaga

SEQ ID NO: 2702176 - DNA, 25 bp, Homo sapien
ctacgccaacaagaaattgagagag

SEQ ID NO: 2702177 - DNA, 25 bp, Homo sapien
ataatctttgttcactccatctctc

SEQ ID NO: 2702178 - DNA, 25 bp, Homo sapien
tccatctctccgttccttggcacga

SEQ ID NO: 2702179 - DNA, 25 bp, Homo sapien
tctctcaatttcttgttggcgtagc

SEQ ID NO: 2702180 - DNA, 25 bp, Homo sapien
ctctctcaatttcttgttggcgtag

SEQ ID NO: 2702181 - DNA, 25 bp, Homo sapien
tctcaatttcttgttggcgtagctt

SEQ ID NO: 2702182 - DNA, 25 bp, Homo sapien
cccggtacttctctgctagctctct

SEQ ID NO: 2702183 - DNA, 25 bp, Homo sapien
cttggattttgctctgcttcaaaag

SEQ ID NO: 2702184 - DNA, 25 bp, Homo sapien
aggagtccaaattcttgggtggtga

SEQ ID NO: 2702185 - DNA, 25 bp, Homo sapien
tccaggagtccaaattcttgggtgg

SEQ ID NO: 2702186 - DNA, 25 bp, Homo sapien
gaagacagttgatccaggagtccaa

SEQ ID NO: 2702187 - DNA, 25 bp, Homo sapien
ggtgaaaggcttggattttgctctg

SEQ ID NO: 2702188 - DNA, 25 bp, Homo sapien
aggcttggattttgctctgcttcaa

SEQ ID NO: 2702189 - DNA, 25 bp, Homo sapien
ccacccaagaatttggactcctgga

SEQ ID NO: 2702190 - DNA, 25 bp, Homo sapien
cttttgaagcagagcaaaatccaag

SEQ ID NO: 2702191 - DNA, 25 bp, Homo sapien
agagcaaaatccaagcctttcacca

SEQ ID NO: 2702192 - DNA, 25 bp, Homo sapien
tcaccacccaagaatttggactcct

SEQ ID NO: 2702193 - DNA, 25 bp, Homo sapien
ttgaagcagagcaaaatccaagcct

SEQ ID NO: 2702194 - DNA, 25 bp, Homo sapien
tggactcctggatcaactgtcttct

SEQ ID NO: 2702195 - DNA, 25 bp, Homo sapien
tactgtcgtgctgaatgctcttgta

SEQ ID NO: 2702196 - DNA, 25 bp, Homo sapien
tcttgtatgggtctggcaagatgag

SEQ ID NO: 2702197 - DNA, 25 bp, Homo sapien
gaatgctcttgtatgggtctggcaa

SEQ ID NO: 2702198 - DNA, 25 bp, Homo sapien
cctgagagttcagactgagtagaag

SEQ ID NO: 2702199 - DNA, 25 bp, Homo sapien
ggagtaatactgtcgtgctgaatgc

SEQ ID NO: 2702200 - DNA, 25 bp, Homo sapien
cgtgctgaatgctcttgtatgggtc

SEQ ID NO: 2702201 - DNA, 25 bp, Homo sapien
tcatcttgccagacccatacaagag

SEQ ID NO: 2702202 - DNA, 25 bp, Homo sapien
cattcagcacgacagtattactccc

SEQ ID NO: 2702203 - DNA, 25 bp, Homo sapien
gacccatacaagagcattcagcacg

SEQ ID NO: 2702204 - DNA, 25 bp, Homo sapien
gccagacccatacaagagcattcag

SEQ ID NO: 2702205 - DNA, 25 bp, Homo sapien
tacaagagcattcagcacgacagta

SEQ ID NO: 2702206 - DNA, 25 bp, Homo sapien
cttctactcagtctgaactctcagg

SEQ ID NO: 2702207 - DNA, 25 bp, Homo sapien
tccctgatcacccaggtgtggttaa

SEQ ID NO: 2702208 - DNA, 25 bp, Homo sapien
ttccttggagaaaccttccctgatc

SEQ ID NO: 2702209 - DNA, 25 bp, Homo sapien
cctgatcacccaggtgtggttaagc

SEQ ID NO: 2702210 - DNA, 25 bp, Homo sapien
cttccctgatcacccaggtgtggtt

SEQ ID NO: 2702211 - DNA, 25 bp, Homo sapien
ccctgatcacccaggtgtggttaag

SEQ ID NO: 2702212 - DNA, 25 bp, Homo sapien
ctgatcacccaggtgtggttaagca

SEQ ID NO: 2702213 - DNA, 25 bp, Homo sapien
aaccacacctgggtgatcagggaag

SEQ ID NO: 2702214 - DNA, 25 bp, Homo sapien
tgcttaaccacacctgggtgatcag

SEQ ID NO: 2702215 - DNA, 25 bp, Homo sapien
gatcagggaaggtttctccaaggaa

SEQ ID NO: 2702216 - DNA, 25 bp, Homo sapien
cttaaccacacctgggtgatcaggg

SEQ ID NO: 2702217 - DNA, 25 bp, Homo sapien
ttaaccacacctgggtgatcaggga

SEQ ID NO: 2702218 - DNA, 25 bp, Homo sapien
gcttaaccacacctgggtgatcagg

SEQ ID NO: 2702219 - DNA, 25 bp, Homo sapien
ctttgcatagcccttctgtttcatt

SEQ ID NO: 2702220 - DNA, 25 bp, Homo sapien
tacctttgcatagcccttctgtttc

SEQ ID NO: 2702221 - DNA, 25 bp, Homo sapien
tgtacctttgcatagcccttctgtt

SEQ ID NO: 2702222 - DNA, 25 bp, Homo sapien
acctttgcatagcccttctgtttca

SEQ ID NO: 2702223 - DNA, 25 bp, Homo sapien
cctttgcatagcccttctgtttcat

SEQ ID NO: 2702224 - DNA, 25 bp, Homo sapien
gtacctttgcatagcccttctgttt

SEQ ID NO: 2702225 - DNA, 25 bp, Homo sapien
aatgaaacagaagggctatgcaaag

SEQ ID NO: 2702226 - DNA, 25 bp, Homo sapien
gaaacagaagggctatgcaaaggta

SEQ ID NO: 2702227 - DNA, 25 bp, Homo sapien
aaacagaagggctatgcaaaggtac

SEQ ID NO: 2702228 - DNA, 25 bp, Homo sapien
atgaaacagaagggctatgcaaagg

SEQ ID NO: 2702229 - DNA, 25 bp, Homo sapien
tgaaacagaagggctatgcaaaggt

SEQ ID NO: 2702230 - DNA, 25 bp, Homo sapien
aacagaagggctatgcaaaggtaca

SEQ ID NO: 2702231 - DNA, 25 bp, Homo sapien
gcatagcccttctgtttcatttacc

SEQ ID NO: 2702232 - DNA, 25 bp, Homo sapien
gtttcatttaccacagcagttattg

SEQ ID NO: 2702233 - DNA, 25 bp, Homo sapien
ctttgcatagcccttctgtttcatt

SEQ ID NO: 2702234 - DNA, 25 bp, Homo sapien
catttaccacagcagttattgtact

SEQ ID NO: 2702235 - DNA, 25 bp, Homo sapien
tacctttgcatagcccttctgtttc

SEQ ID NO: 2702236 - DNA, 25 bp, Homo sapien
tgtacctttgcatagcccttctgtt

SEQ ID NO: 2702237 - DNA, 25 bp, Homo sapien
gtacgagctgagattgccagcaaag

SEQ ID NO: 2702238 - DNA, 25 bp, Homo sapien
ctttgctggcaatctcagctcgtac

SEQ ID NO: 2702239 - DNA, 25 bp, Homo sapien
aaagatgaggatcctgaaaataaaa

SEQ ID NO: 2702240 - DNA, 25 bp, Homo sapien
aggatcctgaaaataaaattgaatt

SEQ ID NO: 2702241 - DNA, 25 bp, Homo sapien
gaaagatgaggatcctgaaaataaa

SEQ ID NO: 2702242 - DNA, 25 bp, Homo sapien
gaggatcctgaaaataaaattgaat

SEQ ID NO: 2702243 - DNA, 25 bp, Homo sapien
gatgaggatcctgaaaataaaattg

SEQ ID NO: 2702244 - DNA, 25 bp, Homo sapien
gatcctgaaaataaaattgaattta

SEQ ID NO: 2702245 - DNA, 25 bp, Homo sapien
caattttattttcaggatcctcatc

SEQ ID NO: 2702246 - DNA, 25 bp, Homo sapien
tttattttcaggatcctcatctttc

SEQ ID NO: 2702247 - DNA, 25 bp, Homo sapien
attcaattttattttcaggatcctc

SEQ ID NO: 2702248 - DNA, 25 bp, Homo sapien
ttttattttcaggatcctcatcttt

SEQ ID NO: 2702249 - DNA, 25 bp, Homo sapien
aattcaattttattttcaggatcct

SEQ ID NO: 2702250 - DNA, 25 bp, Homo sapien
taaattcaattttattttcaggatc

SEQ ID NO: 2702251 - DNA, 25 bp, Homo sapien
tgcattctggatgaattgtacggaa

SEQ ID NO: 2702252 - DNA, 25 bp, Homo sapien
tgagtacagtttctatactagtgac

SEQ ID NO: 2702253 - DNA, 25 bp, Homo sapien
attgtacggaatttaatgctctggg

SEQ ID NO: 2702254 - DNA, 25 bp, Homo sapien
cagtttctatactagtgactatgca

SEQ ID NO: 2702255 - DNA, 25 bp, Homo sapien
gaattgtacggaatttaatgctctg

SEQ ID NO: 2702256 - DNA, 25 bp, Homo sapien
tactagtgactatgcattctggatg

SEQ ID NO: 2702257 - DNA, 25 bp, Homo sapien
tcactagtatagaaactgtactcac

SEQ ID NO: 2702258 - DNA, 25 bp, Homo sapien
tcatccagaatgcatagtcactagt

SEQ ID NO: 2702259 - DNA, 25 bp, Homo sapien
ttccgtacaattcatccagaatgca

SEQ ID NO: 2702260 - DNA, 25 bp, Homo sapien
tgcatagtcactagtatagaaactg

SEQ ID NO: 2702261 - DNA, 25 bp, Homo sapien
taaattccgtacaattcatccagaa

SEQ ID NO: 2702262 - DNA, 25 bp, Homo sapien
cccagagcattaaattccgtacaat

SEQ ID NO: 2702263 - DNA, 25 bp, Homo sapien
agagcaaagcatatgagcggaatga

SEQ ID NO: 2702264 - DNA, 25 bp, Homo sapien
ttttaagagcaaagcatatgagcgg

SEQ ID NO: 2702265 - DNA, 25 bp, Homo sapien
tttaagagcaaagcatatgagcgga

SEQ ID NO: 2702266 - DNA, 25 bp, Homo sapien
gagcaaagcatatgagcggaatgag

SEQ ID NO: 2702267 - DNA, 25 bp, Homo sapien
taagagcaaagcatatgagcggaat

SEQ ID NO: 2702268 - DNA, 25 bp, Homo sapien
tttttaagagcaaagcatatgagcg

SEQ ID NO: 2702269 - DNA, 25 bp, Homo sapien
atatccccaccactcttatccgcag

SEQ ID NO: 2702270 - DNA, 25 bp, Homo sapien
atccccaccactcttatccgcagca

SEQ ID NO: 2702271 - DNA, 25 bp, Homo sapien
tgttcctgccgggccgcatggccta

SEQ ID NO: 2702272 - DNA, 25 bp, Homo sapien
gatatccccaccactcttatccgca

SEQ ID NO: 2702273 - DNA, 25 bp, Homo sapien
tccccaccactcttatccgcagcaa

SEQ ID NO: 2702274 - DNA, 25 bp, Homo sapien
cccaccactcttatccgcagcaagg

SEQ ID NO: 2702275 - DNA, 25 bp, Homo sapien
taggccatgcggcccggcaggaaca

SEQ ID NO: 2702276 - DNA, 25 bp, Homo sapien
ccttgctgcggataagagtggtggg

SEQ ID NO: 2702277 - DNA, 25 bp, Homo sapien
tcattccgctcatatgctttgctct

SEQ ID NO: 2702278 - DNA, 25 bp, Homo sapien
gctcatatgctttgctcttaaaaag

SEQ ID NO: 2702279 - DNA, 25 bp, Homo sapien
ctcattccgctcatatgctttgctc

SEQ ID NO: 2702280 - DNA, 25 bp, Homo sapien
tccgctcatatgctttgctcttaaa

SEQ ID NO: 2702281 - DNA, 25 bp, Homo sapien
ccgctcatatgctttgctcttaaaa

SEQ ID NO: 2702282 - DNA, 25 bp, Homo sapien
attccgctcatatgctttgctctta

SEQ ID NO: 2702283 - DNA, 25 bp, Homo sapien
gctatcatgtagtaggccttattca

SEQ ID NO: 2702284 - DNA, 25 bp, Homo sapien
cctgttgtgctatcatgtagtaggc

SEQ ID NO: 2702285 - DNA, 25 bp, Homo sapien
tatcatgtagtaggccttattcatt

SEQ ID NO: 2702286 - DNA, 25 bp, Homo sapien
tgttgtgctatcatgtagtaggcct

SEQ ID NO: 2702287 - DNA, 25 bp, Homo sapien
gtatccatcccgttaaacatttatc

SEQ ID NO: 2702288 - DNA, 25 bp, Homo sapien
tgtgctatcatgtagtaggccttat

SEQ ID NO: 2702289 - DNA, 25 bp, Homo sapien
gataaatgtttaacgggatggatac

SEQ ID NO: 2702290 - DNA, 25 bp, Homo sapien
taaggcctactacatgatagcacaa

SEQ ID NO: 2702291 - DNA, 25 bp, Homo sapien
tgaataaggcctactacatgatagc

SEQ ID NO: 2702292 - DNA, 25 bp, Homo sapien
aatgaataaggcctactacatgata

SEQ ID NO: 2702293 - DNA, 25 bp, Homo sapien
gcctactacatgatagcacaacagg

SEQ ID NO: 2702294 - DNA, 25 bp, Homo sapien
aagataaatgtttaacgggatggat

SEQ ID NO: 2702295 - DNA, 25 bp, Homo sapien
catacctgaggcagggaacccgtaa

SEQ ID NO: 2702296 - DNA, 25 bp, Homo sapien
tacctgaggcagggaacccgtaaca

SEQ ID NO: 2702297 - DNA, 25 bp, Homo sapien
tgaggcagggaacccgtaacaagaa

SEQ ID NO: 2702298 - DNA, 25 bp, Homo sapien
ctgaggcagggaacccgtaacaaga

SEQ ID NO: 2702299 - DNA, 25 bp, Homo sapien
cctgaggcagggaacccgtaacaag

SEQ ID NO: 2702300 - DNA, 25 bp, Homo sapien
cttgttacgggttccctgcctcagg

SEQ ID NO: 2702301 - DNA, 25 bp, Homo sapien
ttacgggttccctgcctcaggtatg

SEQ ID NO: 2702302 - DNA, 25 bp, Homo sapien
ttcttgttacgggttccctgcctca

SEQ ID NO: 2702303 - DNA, 25 bp, Homo sapien
tcttgttacgggttccctgcctcag

SEQ ID NO: 2702304 - DNA, 25 bp, Homo sapien
tgttacgggttccctgcctcaggta

SEQ ID NO: 2702305 - DNA, 25 bp, Homo sapien
gtctccttaacctacctaagaagca

SEQ ID NO: 2702306 - DNA, 25 bp, Homo sapien
tctccttaacctacctaagaagcag

SEQ ID NO: 2702307 - DNA, 25 bp, Homo sapien
ctgcttcttaggtaggttaaggaga

SEQ ID NO: 2702308 - DNA, 25 bp, Homo sapien
tgcttcttaggtaggttaaggagac

SEQ ID NO: 2702309 - DNA, 25 bp, Homo sapien
gagaaaaatgggagtactggagcat

SEQ ID NO: 2702310 - DNA, 25 bp, Homo sapien
tattgagaggctcctgggaagcaga

SEQ ID NO: 2702311 - DNA, 25 bp, Homo sapien
tactggagcattggcaaggagacag

SEQ ID NO: 2702312 - DNA, 25 bp, Homo sapien
tctccttaacctacctaagaagcag

SEQ ID NO: 2702313 - DNA, 25 bp, Homo sapien
aacctacctaagaagcagtggtcag

SEQ ID NO: 2702314 - DNA, 25 bp, Homo sapien
caaggagacagttacagccagattc

SEQ ID NO: 2702315 - DNA, 25 bp, Homo sapien
tgtaactgtctccttgccaatgctc

SEQ ID NO: 2702316 - DNA, 25 bp, Homo sapien
tgccaatgctccagtactcccattt

SEQ ID NO: 2702317 - DNA, 25 bp, Homo sapien
tgcttcttaggtaggttaaggagac

SEQ ID NO: 2702318 - DNA, 25 bp, Homo sapien
taggttaaggagacagaatctggct

SEQ ID NO: 2702319 - DNA, 25 bp, Homo sapien
tctgcttcccaggagcctctcaata

SEQ ID NO: 2702320 - DNA, 25 bp, Homo sapien
gaatctggctgtaactgtctccttg

SEQ ID NO: 2702321 - DNA, 25 bp, Homo sapien
aagggcattaagagctggagaggat

SEQ ID NO: 2702322 - DNA, 25 bp, Homo sapien
atcctctccagctcttaatgccctt

SEQ ID NO: 2702323 - DNA, 25 bp, Homo sapien
taactgaggagtatgttcctgactc

SEQ ID NO: 2702324 - DNA, 25 bp, Homo sapien
cagtggaaattaactgaggagtatg

SEQ ID NO: 2702325 - DNA, 25 bp, Homo sapien
taaaagggcattaagagctggagag

SEQ ID NO: 2702326 - DNA, 25 bp, Homo sapien
ggatggtgaagttcagtggaaatta

SEQ ID NO: 2702327 - DNA, 25 bp, Homo sapien
aacagaagatgtttaaaagggcatt

SEQ ID NO: 2702328 - DNA, 25 bp, Homo sapien
gtatgttcctgactcctctctttaa

SEQ ID NO: 2702329 - DNA, 25 bp, Homo sapien
ttaaagagaggagtcaggaacatac

SEQ ID NO: 2702330 - DNA, 25 bp, Homo sapien
tgaaatttaaagagaggagtcagga

SEQ ID NO: 2702331 - DNA, 25 bp, Homo sapien
ctctccagctcttaatgccctttta

SEQ ID NO: 2702332 - DNA, 25 bp, Homo sapien
taatgcccttttaaacatcttctgt

SEQ ID NO: 2702333 - DNA, 25 bp, Homo sapien
gagtcaggaacatactcctcagtta

SEQ ID NO: 2702334 - DNA, 25 bp, Homo sapien
gttaatttccactgaacttcaccat

SEQ ID NO: 2702335 - DNA, 25 bp, Homo sapien
gagaagaaacctcctgaggctgaca

SEQ ID NO: 2702336 - DNA, 25 bp, Homo sapien
tggaagagaagaaacctcctgaggc

SEQ ID NO: 2702337 - DNA, 25 bp, Homo sapien
gaagaaacctcctgaggctgacatg

SEQ ID NO: 2702338 - DNA, 25 bp, Homo sapien
aagaaacctcctgaggctgacatga

SEQ ID NO: 2702339 - DNA, 25 bp, Homo sapien
agaaacctcctgaggctgacatgaa

SEQ ID NO: 2702340 - DNA, 25 bp, Homo sapien
agagaagaaacctcctgaggctgac

SEQ ID NO: 2702341 - DNA, 25 bp, Homo sapien
gtcagcctcaggaggtttcttctct

SEQ ID NO: 2702342 - DNA, 25 bp, Homo sapien
cctcaggaggtttcttctcttccag

SEQ ID NO: 2702343 - DNA, 25 bp, Homo sapien
tcatgtcagcctcaggaggtttctt

SEQ ID NO: 2702344 - DNA, 25 bp, Homo sapien
ttcatgtcagcctcaggaggtttct

SEQ ID NO: 2702345 - DNA, 25 bp, Homo sapien
catgtcagcctcaggaggtttcttc

SEQ ID NO: 2702346 - DNA, 25 bp, Homo sapien
tgtcagcctcaggaggtttcttctc

SEQ ID NO: 2702347 - DNA, 25 bp, Homo sapien
cgggagcgtgatcgggaaagagaca

SEQ ID NO: 2702348 - DNA, 25 bp, Homo sapien
acgggagcgtgatcgggaaagagac

SEQ ID NO: 2702349 - DNA, 25 bp, Homo sapien
ggagcgtgatcgggaaagagacaga

SEQ ID NO: 2702350 - DNA, 25 bp, Homo sapien
gagcgtgatcgggaaagagacagag

SEQ ID NO: 2702351 - DNA, 25 bp, Homo sapien
gggagcgtgatcgggaaagagacag

SEQ ID NO: 2702352 - DNA, 25 bp, Homo sapien
aacgggagcgtgatcgggaaagaga

SEQ ID NO: 2702353 - DNA, 25 bp, Homo sapien
gagatatcgggaacgggagcgtgat

SEQ ID NO: 2702354 - DNA, 25 bp, Homo sapien
ggacaaggagcgggagagatatcgg

SEQ ID NO: 2702355 - DNA, 25 bp, Homo sapien
agatatcgggaacgggagcgtgatc

SEQ ID NO: 2702356 - DNA, 25 bp, Homo sapien
agagatatcgggaacgggagcgtga

SEQ ID NO: 2702357 - DNA, 25 bp, Homo sapien
gagagatatcgggaacgggagcgtg

SEQ ID NO: 2702358 - DNA, 25 bp, Homo sapien
gatcacgctcccgttcccgatatct

SEQ ID NO: 2702359 - DNA, 25 bp, Homo sapien
tcacgctcccgttcccgatatctct

SEQ ID NO: 2702360 - DNA, 25 bp, Homo sapien
atcacgctcccgttcccgatatctc

SEQ ID NO: 2702361 - DNA, 25 bp, Homo sapien
cacgctcccgttcccgatatctctc

SEQ ID NO: 2702362 - DNA, 25 bp, Homo sapien
ccgatatctctcccgctccttgtcc

SEQ ID NO: 2702363 - DNA, 25 bp, Homo sapien
tgtctctttcccgatcacgctcccg

SEQ ID NO: 2702364 - DNA, 25 bp, Homo sapien
tctctttcccgatcacgctcccgtt

SEQ ID NO: 2702365 - DNA, 25 bp, Homo sapien
ctgtctctttcccgatcacgctccc

SEQ ID NO: 2702366 - DNA, 25 bp, Homo sapien
ctctgtctctttcccgatcacgctc

SEQ ID NO: 2702367 - DNA, 25 bp, Homo sapien
tctgtctctttcccgatcacgctcc

SEQ ID NO: 2702368 - DNA, 25 bp, Homo sapien
gtctctttcccgatcacgctcccgt

SEQ ID NO: 2702369 - DNA, 25 bp, Homo sapien
aaccaagacacctcgggacaaggag

SEQ ID NO: 2702370 - DNA, 25 bp, Homo sapien
aagagacagagaccgtgaccgagag

SEQ ID NO: 2702371 - DNA, 25 bp, Homo sapien
cgtgatcgggaaagagacagagacc

SEQ ID NO: 2702372 - DNA, 25 bp, Homo sapien
tgagaagccaaaagtagatgatgag

SEQ ID NO: 2702373 - DNA, 25 bp, Homo sapien
gagacacagctactttgagaagcca

SEQ ID NO: 2702374 - DNA, 25 bp, Homo sapien
gattacgtaccctccacaaccaaga

SEQ ID NO: 2702375 - DNA, 25 bp, Homo sapien
tcatcatctacttttggcttctcaa

SEQ ID NO: 2702376 - DNA, 25 bp, Homo sapien
tcttggttgtggagggtacgtaatc

SEQ ID NO: 2702377 - DNA, 25 bp, Homo sapien
ggcttctcaaagtagctgtgtctct

SEQ ID NO: 2702378 - DNA, 25 bp, Homo sapien
gctccttgtcccgaggtgtcttggt

SEQ ID NO: 2702379 - DNA, 25 bp, Homo sapien
gtacgtaatccccaatgtcttcaaa

SEQ ID NO: 2702380 - DNA, 25 bp, Homo sapien
ggtctctgtctctttcccgatcacg

SEQ ID NO: 2702381 - DNA, 25 bp, Homo sapien
caagtccatcaatgaaaagtttgct

SEQ ID NO: 2702382 - DNA, 25 bp, Homo sapien
agtccatcaatgaaaagtttgctgg

SEQ ID NO: 2702383 - DNA, 25 bp, Homo sapien
gttgatcaagtccatcaatgaaaag

SEQ ID NO: 2702384 - DNA, 25 bp, Homo sapien
tcaagtccatcaatgaaaagtttgc

SEQ ID NO: 2702385 - DNA, 25 bp, Homo sapien
tgatcaagtccatcaatgaaaagtt

SEQ ID NO: 2702386 - DNA, 25 bp, Homo sapien
gatcaagtccatcaatgaaaagttt

SEQ ID NO: 2702387 - DNA, 25 bp, Homo sapien
agcaaacttttcattgatggacttg

SEQ ID NO: 2702388 - DNA, 25 bp, Homo sapien
ccagcaaacttttcattgatggact

SEQ ID NO: 2702389 - DNA, 25 bp, Homo sapien
caaacttttcattgatggacttgat

SEQ ID NO: 2702390 - DNA, 25 bp, Homo sapien
gcaaacttttcattgatggacttga

SEQ ID NO: 2702391 - DNA, 25 bp, Homo sapien
cttttcattgatggacttgatcaac

SEQ ID NO: 2702392 - DNA, 25 bp, Homo sapien
aacttttcattgatggacttgatca

SEQ ID NO: 2702393 - DNA, 25 bp, Homo sapien
tgaagctttacagcaataggtagaa

SEQ ID NO: 2702394 - DNA, 25 bp, Homo sapien
tcctggctgaagctttacagcaata

SEQ ID NO: 2702395 - DNA, 25 bp, Homo sapien
ttacagcaataggtagaatcctgtg

SEQ ID NO: 2702396 - DNA, 25 bp, Homo sapien
gctttacagcaataggtagaatcct

SEQ ID NO: 2702397 - DNA, 25 bp, Homo sapien
catgttggggcttctagcccttggc

SEQ ID NO: 2702398 - DNA, 25 bp, Homo sapien
ggctgaagctttacagcaataggta

SEQ ID NO: 2702399 - DNA, 25 bp, Homo sapien
gggccaagggctagaagccccaaca

SEQ ID NO: 2702400 - DNA, 25 bp, Homo sapien
caagggctagaagccccaacatgaa

SEQ ID NO: 2702401 - DNA, 25 bp, Homo sapien
cacaggattctacctattgctgtaa

SEQ ID NO: 2702402 - DNA, 25 bp, Homo sapien
tacctattgctgtaaagcttcagcc

SEQ ID NO: 2702403 - DNA, 25 bp, Homo sapien
ggattctacctattgctgtaaagct

SEQ ID NO: 2702404 - DNA, 25 bp, Homo sapien
tattgctgtaaagcttcagccagga

SEQ ID NO: 2702405 - DNA, 25 bp, Homo sapien
ggagatttctttggcatgtccaaca

SEQ ID NO: 2702406 - DNA, 25 bp, Homo sapien
caacagttatgcagagtgctaccca

SEQ ID NO: 2702407 - DNA, 25 bp, Homo sapien
aagccagaagacaaaaagcagctgg

SEQ ID NO: 2702408 - DNA, 25 bp, Homo sapien
gtccaacagttatgcagagtgctac

SEQ ID NO: 2702409 - DNA, 25 bp, Homo sapien
gttatgcagagtgctacccagccac

SEQ ID NO: 2702410 - DNA, 25 bp, Homo sapien
aagcagctgggagatttctttggca

SEQ ID NO: 2702411 - DNA, 25 bp, Homo sapien
gtggctgggtagcactctgcataac

SEQ ID NO: 2702412 - DNA, 25 bp, Homo sapien
ccagctgctttttgtcttctggctt

SEQ ID NO: 2702413 - DNA, 25 bp, Homo sapien
tgccaaagaaatctcccagctgctt

SEQ ID NO: 2702414 - DNA, 25 bp, Homo sapien
tgcataactgttggacatgccaaag

SEQ ID NO: 2702415 - DNA, 25 bp, Homo sapien
gggtagcactctgcataactgttgg

SEQ ID NO: 2702416 - DNA, 25 bp, Homo sapien
tggacatgccaaagaaatctcccag

SEQ ID NO: 2702417 - DNA, 25 bp, Homo sapien
aaggctacttcttacttggatgaac

SEQ ID NO: 2702418 - DNA, 25 bp, Homo sapien
gggtggtcattcctatgcagataac

SEQ ID NO: 2702419 - DNA, 25 bp, Homo sapien
ttccagatgaagcatagggtcaggg

SEQ ID NO: 2702420 - DNA, 25 bp, Homo sapien
aatttgattcgctaagtcccagggc

SEQ ID NO: 2702421 - DNA, 25 bp, Homo sapien
catagggtcagggtatgcaacatct

SEQ ID NO: 2702422 - DNA, 25 bp, Homo sapien
gcagataacctcttagtcgggtagg

SEQ ID NO: 2702423 - DNA, 25 bp, Homo sapien
cccgactaagaggttatctgcatag

SEQ ID NO: 2702424 - DNA, 25 bp, Homo sapien
agatgttgcataccctgaccctatg

SEQ ID NO: 2702425 - DNA, 25 bp, Homo sapien
tcatctggaaacctacccgactaag

SEQ ID NO: 2702426 - DNA, 25 bp, Homo sapien
tagccctgggacttagcgaatcaaa

SEQ ID NO: 2702427 - DNA, 25 bp, Homo sapien
tagttcatccaagtaagaagtagcc

SEQ ID NO: 2702428 - DNA, 25 bp, Homo sapien
gttatctgcataggaatgaccaccc

SEQ ID NO: 2702429 - DNA, 25 bp, Homo sapien
gatgaggaggtggattatagcaaaa

SEQ ID NO: 2702430 - DNA, 25 bp, Homo sapien
tgatgaggaggtggattatagcaaa

SEQ ID NO: 2702431 - DNA, 25 bp, Homo sapien
ttttgctataatccacctcctcatc

SEQ ID NO: 2702432 - DNA, 25 bp, Homo sapien
tttgctataatccacctcctcatca

SEQ ID NO: 2702433 - DNA, 25 bp, Homo sapien
caggctttgattcccatggtaggca

SEQ ID NO: 2702434 - DNA, 25 bp, Homo sapien
catcaatgcataagtagaaagggca

SEQ ID NO: 2702435 - DNA, 25 bp, Homo sapien
cacaagatcaaatgacatagggtca

SEQ ID NO: 2702436 - DNA, 25 bp, Homo sapien
ggtaggcagtaagcaagcatcaatg

SEQ ID NO: 2702437 - DNA, 25 bp, Homo sapien
cattgagggtcatgagcagcttaac

SEQ ID NO: 2702438 - DNA, 25 bp, Homo sapien
gagtctggcttcaatcaagggctga

SEQ ID NO: 2702439 - DNA, 25 bp, Homo sapien
cattgatgcttgcttactgcctacc

SEQ ID NO: 2702440 - DNA, 25 bp, Homo sapien
gaaatagttaagctgctcatgaccc

SEQ ID NO: 2702441 - DNA, 25 bp, Homo sapien
caaataataactgcccaaaggcgcc

SEQ ID NO: 2702442 - DNA, 25 bp, Homo sapien
tcagcccttgattgaagccagactc

SEQ ID NO: 2702443 - DNA, 25 bp, Homo sapien
tgcctaccatgggaatcaaagcctg

SEQ ID NO: 2702444 - DNA, 25 bp, Homo sapien
ggcataaacagtgaaagaacttggc

SEQ ID NO: 2702445 - DNA, 25 bp, Homo sapien
tacagcgagtatatgaacaacaaag

SEQ ID NO: 2702446 - DNA, 25 bp, Homo sapien
cgttgggactttgatacccaggaag

SEQ ID NO: 2702447 - DNA, 25 bp, Homo sapien
acagcgagtatatgaacaacaaaga

SEQ ID NO: 2702448 - DNA, 25 bp, Homo sapien
gttgggactttgatacccaggaaga

SEQ ID NO: 2702449 - DNA, 25 bp, Homo sapien
cttcctgggtatcaaagtcccaacg

SEQ ID NO: 2702450 - DNA, 25 bp, Homo sapien
tctttgttgttcatatactcgctgt

SEQ ID NO: 2702451 - DNA, 25 bp, Homo sapien
ctttgttgttcatatactcgctgta

SEQ ID NO: 2702452 - DNA, 25 bp, Homo sapien
tcttcctgggtatcaaagtcccaac

SEQ ID NO: 2702453 - DNA, 25 bp, Homo sapien
ccaatgacaaagcagagcttgatcg

SEQ ID NO: 2702454 - DNA, 25 bp, Homo sapien
aagcagagcttgatcgccagtggaa

SEQ ID NO: 2702455 - DNA, 25 bp, Homo sapien
tgacaaagcagagcttgatcgccag

SEQ ID NO: 2702456 - DNA, 25 bp, Homo sapien
gagcttgatcgccagtggaagaaga

SEQ ID NO: 2702457 - DNA, 25 bp, Homo sapien
caaagcagagcttgatcgccagtgg

SEQ ID NO: 2702458 - DNA, 25 bp, Homo sapien
gcagagcttgatcgccagtggaaga

SEQ ID NO: 2702459 - DNA, 25 bp, Homo sapien
tcaaaatgtctgaagggcggaaaac

SEQ ID NO: 2702460 - DNA, 25 bp, Homo sapien
aaatgtctgaagggcggaaaaccag

SEQ ID NO: 2702461 - DNA, 25 bp, Homo sapien
atcaaaatgtctgaagggcggaaaa

SEQ ID NO: 2702462 - DNA, 25 bp, Homo sapien
gtatcaaaatgtctgaagggcggaa

SEQ ID NO: 2702463 - DNA, 25 bp, Homo sapien
tatcaaaatgtctgaagggcggaaa

SEQ ID NO: 2702464 - DNA, 25 bp, Homo sapien
tttccgcccttcagacattttgata

SEQ ID NO: 2702465 - DNA, 25 bp, Homo sapien
gttttccgcccttcagacattttga

SEQ ID NO: 2702466 - DNA, 25 bp, Homo sapien
ttccgcccttcagacattttgatac

SEQ ID NO: 2702467 - DNA, 25 bp, Homo sapien
ttttccgcccttcagacattttgat

SEQ ID NO: 2702468 - DNA, 25 bp, Homo sapien
ctggttttccgcccttcagacattt

SEQ ID NO: 2702469 - DNA, 25 bp, Homo sapien
ttccactggcgatcaagctctgctt

SEQ ID NO: 2702470 - DNA, 25 bp, Homo sapien
tcttccactggcgatcaagctctgc

SEQ ID NO: 2702471 - DNA, 25 bp, Homo sapien
cgatcaagctctgctttgtcattgg

SEQ ID NO: 2702472 - DNA, 25 bp, Homo sapien
ggcgatcaagctctgctttgtcatt

SEQ ID NO: 2702473 - DNA, 25 bp, Homo sapien
ccactggcgatcaagctctgctttg

SEQ ID NO: 2702474 - DNA, 25 bp, Homo sapien
tcttcttccactggcgatcaagctc

SEQ ID NO: 2702475 - DNA, 25 bp, Homo sapien
attgagaagaggaagaagatggaag

SEQ ID NO: 2702476 - DNA, 25 bp, Homo sapien
cattgagaagaggaagaagatggaa

SEQ ID NO: 2702477 - DNA, 25 bp, Homo sapien
agaggaagaagatggaagctgatgg

SEQ ID NO: 2702478 - DNA, 25 bp, Homo sapien
atcattgagaagaggaagaagatgg

SEQ ID NO: 2702479 - DNA, 25 bp, Homo sapien
tcattgagaagaggaagaagatgga

SEQ ID NO: 2702480 - DNA, 25 bp, Homo sapien
ttgagaagaggaagaagatggaagc

SEQ ID NO: 2702481 - DNA, 25 bp, Homo sapien
cttccatcttcttcctcttctcaat

SEQ ID NO: 2702482 - DNA, 25 bp, Homo sapien
gcttccatcttcttcctcttctcaa

SEQ ID NO: 2702483 - DNA, 25 bp, Homo sapien
ttccatcttcttcctcttctcaatg

SEQ ID NO: 2702484 - DNA, 25 bp, Homo sapien
ccatcagcttccatcttcttcctct

SEQ ID NO: 2702485 - DNA, 25 bp, Homo sapien
ccatcttcttcctcttctcaatgat

SEQ ID NO: 2702486 - DNA, 25 bp, Homo sapien
tccatcttcttcctcttctcaatga

SEQ ID NO: 2702487 - DNA, 25 bp, Homo sapien
gatcttatactgacccatttctcct

SEQ ID NO: 2702488 - DNA, 25 bp, Homo sapien
tgggaattgcttagtgtattgatct

SEQ ID NO: 2702489 - DNA, 25 bp, Homo sapien
aattgcttagtgtattgatcttata

SEQ ID NO: 2702490 - DNA, 25 bp, Homo sapien
tgatcttatactgacccatttctcc

SEQ ID NO: 2702491 - DNA, 25 bp, Homo sapien
ggaattgcttagtgtattgatctta

SEQ ID NO: 2702492 - DNA, 25 bp, Homo sapien
tggtgggaattgcttagtgtattga

SEQ ID NO: 2702493 - DNA, 25 bp, Homo sapien
taagatcaatacactaagcaattcc

SEQ ID NO: 2702494 - DNA, 25 bp, Homo sapien
tcaatacactaagcaattcccacca

SEQ ID NO: 2702495 - DNA, 25 bp, Homo sapien
gagaaatgggtcagtataagatcaa

SEQ ID NO: 2702496 - DNA, 25 bp, Homo sapien
tataagatcaatacactaagcaatt

SEQ ID NO: 2702497 - DNA, 25 bp, Homo sapien
aaggagaaatgggtcagtataagat

SEQ ID NO: 2702498 - DNA, 25 bp, Homo sapien
gatcaatacactaagcaattcccac

SEQ ID NO: 2702499 - DNA, 25 bp, Homo sapien
ttgaagtcaaaagaccaaaatacta

SEQ ID NO: 2702500 - DNA, 25 bp, Homo sapien
tgaagtcaaaagaccaaaatactaa

SEQ ID NO: 2702501 - DNA, 25 bp, Homo sapien
ttagtattttggtcttttgacttca

SEQ ID NO: 2702502 - DNA, 25 bp, Homo sapien
tagtattttggtcttttgacttcaa

SEQ ID NO: 2702503 - DNA, 25 bp, Homo sapien
tcactagttacaaccagagatgctc

SEQ ID NO: 2702504 - DNA, 25 bp, Homo sapien
cactagttacaaccagagatgctcc

SEQ ID NO: 2702505 - DNA, 25 bp, Homo sapien
ggagcatctctggttgtaactagtg

SEQ ID NO: 2702506 - DNA, 25 bp, Homo sapien
gagcatctctggttgtaactagtga

SEQ ID NO: 2702507 - DNA, 25 bp, Homo sapien
tcactagttacaaccagagatgctc

SEQ ID NO: 2702508 - DNA, 25 bp, Homo sapien
tacaatttccaaaggttgcaagatg

SEQ ID NO: 2702509 - DNA, 25 bp, Homo sapien
tttattgtgtaattacttggttcca

SEQ ID NO: 2702510 - DNA, 25 bp, Homo sapien
cactagttacaaccagagatgctcc

SEQ ID NO: 2702511 - DNA, 25 bp, Homo sapien
gagatgctccacaaggatatgctcc

SEQ ID NO: 2702512 - DNA, 25 bp, Homo sapien
ctagttacaaccagagatgctccac

SEQ ID NO: 2702513 - DNA, 25 bp, Homo sapien
tggaaccaagtaattacacaataaa

SEQ ID NO: 2702514 - DNA, 25 bp, Homo sapien
aaaacatcttgcaacctttggaaat

SEQ ID NO: 2702515 - DNA, 25 bp, Homo sapien
gtggagcatctctggttgtaactag

SEQ ID NO: 2702516 - DNA, 25 bp, Homo sapien
ggagcatatccttgtggagcatctc

SEQ ID NO: 2702517 - DNA, 25 bp, Homo sapien
gagcatctctggttgtaactagtga

SEQ ID NO: 2702518 - DNA, 25 bp, Homo sapien
tggaaattgtagaaagaaaacagtg

SEQ ID NO: 2702519 - DNA, 25 bp, Homo sapien
ggtgactttctagctttcttggatc

SEQ ID NO: 2702520 - DNA, 25 bp, Homo sapien
gccaggaagcagtagtgacacctaa

SEQ ID NO: 2702521 - DNA, 25 bp, Homo sapien
caaggtaatggctaaggtgactttc

SEQ ID NO: 2702522 - DNA, 25 bp, Homo sapien
gccacaaatcttgggctcagggtag

SEQ ID NO: 2702523 - DNA, 25 bp, Homo sapien
catgcacaatactggcttcctcaca

SEQ ID NO: 2702524 - DNA, 25 bp, Homo sapien
atgccatgcacaatactggcttcct

SEQ ID NO: 2702525 - DNA, 25 bp, Homo sapien
gccatgcacaatactggcttcctca

SEQ ID NO: 2702526 - DNA, 25 bp, Homo sapien
gcacaatactggcttcctcacaaaa

SEQ ID NO: 2702527 - DNA, 25 bp, Homo sapien
gcagggtagtcagcctcggaaccac

SEQ ID NO: 2702528 - DNA, 25 bp, Homo sapien
ccgccgcagggtagtcagcctcgga

SEQ ID NO: 2702529 - DNA, 25 bp, Homo sapien
cgcgccgccgcagggtagtcagcct

SEQ ID NO: 2702530 - DNA, 25 bp, Homo sapien
gggtagtcagcctcggaaccaccca

SEQ ID NO: 2702531 - DNA, 25 bp, Homo sapien
gcctctcctcacaagtgcggtccat

SEQ ID NO: 2702532 - DNA, 25 bp, Homo sapien
tgtcttccggagtgtcccggatccg

SEQ ID NO: 2702533 - DNA, 25 bp, Homo sapien
gggccggatggaacgccagcccact

SEQ ID NO: 2702534 - DNA, 25 bp, Homo sapien
gagcttccagcacgatgtcttccgg

SEQ ID NO: 2702535 - DNA, 25 bp, Homo sapien
taggtgctgtactgcaaacttgtcc

SEQ ID NO: 2702536 - DNA, 25 bp, Homo sapien
tgcttaattgccagtgagttccagg

SEQ ID NO: 2702537 - DNA, 25 bp, Homo sapien
tacagaagttaacacgctcaaggcc

SEQ ID NO: 2702538 - DNA, 25 bp, Homo sapien
gatgacagattacactccagaacag

SEQ ID NO: 2702539 - DNA, 25 bp, Homo sapien
tctccctcttggcaagagtaggaaa

SEQ ID NO: 2702540 - DNA, 25 bp, Homo sapien
cacagctcggcaggccttgagatgg

SEQ ID NO: 2702541 - DNA, 25 bp, Homo sapien
gccacagctcggcaggccttgagat

SEQ ID NO: 2702542 - DNA, 25 bp, Homo sapien
cttgagatggtgacctgatgaccag

SEQ ID NO: 2702543 - DNA, 25 bp, Homo sapien
tgctggttgtcttccccagtactca

SEQ ID NO: 2702544 - DNA, 25 bp, Homo sapien
ctggggaaaaggtgcccaggtcatg

SEQ ID NO: 2702545 - DNA, 25 bp, Homo sapien
tcccttccaccacattgctggttgt

SEQ ID NO: 2702546 - DNA, 25 bp, Homo sapien
caggtcatggtgctgctcactgctc

SEQ ID NO: 2702547 - DNA, 25 bp, Homo sapien
catctagaacatggatggctttgtc

SEQ ID NO: 2702548 - DNA, 25 bp, Homo sapien
ccttggaaacacgtctttccagttg

SEQ ID NO: 2702549 - DNA, 25 bp, Homo sapien
tggaaacacgtctttccagttggcc

SEQ ID NO: 2702550 - DNA, 25 bp, Homo sapien
ccctgctccacatctagaacatgga

SEQ ID NO: 2702551 - DNA, 25 bp, Homo sapien
cagcagaagactattgatgggggca

SEQ ID NO: 2702552 - DNA, 25 bp, Homo sapien
ctcatatccattaaggggccctcct

SEQ ID NO: 2702553 - DNA, 25 bp, Homo sapien
atccagagccatgtctgcgatgtac

SEQ ID NO: 2702554 - DNA, 25 bp, Homo sapien
gccatgtctgcgatgtactcttcat

SEQ ID NO: 2702555 - DNA, 25 bp, Homo sapien
tcaaaccgacgcctcttaatgttga

SEQ ID NO: 2702556 - DNA, 25 bp, Homo sapien
gcagctcaaaccgacgcctcttaat

SEQ ID NO: 2702557 - DNA, 25 bp, Homo sapien
agagcagctcaaaccgacgcctctt

SEQ ID NO: 2702558 - DNA, 25 bp, Homo sapien
ctgagagcagctcaaaccgacgcct

SEQ ID NO: 2702559 - DNA, 25 bp, Homo sapien
aatagagaaaacaatgtggaagctg

SEQ ID NO: 2702560 - DNA, 25 bp, Homo sapien
tgcctcagactaagcccccagcaca

SEQ ID NO: 2702561 - DNA, 25 bp, Homo sapien
tagagaaaacaatgtggaagctgcc

SEQ ID NO: 2702562 - DNA, 25 bp, Homo sapien
tgtggaagctgcctcagactaagcc

SEQ ID NO: 2702563 - DNA, 25 bp, Homo sapien
tctcggtgactggaaccatgcagtc

SEQ ID NO: 2702564 - DNA, 25 bp, Homo sapien
gattcagctctcagggcaaagcggt

SEQ ID NO: 2702565 - DNA, 25 bp, Homo sapien
aaagcggtcacttgtggccccaaag

SEQ ID NO: 2702566 - DNA, 25 bp, Homo sapien
gaaccatgcagtcgatagattcagc

SEQ ID NO: 2702567 - DNA, 25 bp, Homo sapien
tttttgcgccgacggtagtcatcca

SEQ ID NO: 2702568 - DNA, 25 bp, Homo sapien
cactcggttcggtaggatgttcaca

SEQ ID NO: 2702569 - DNA, 25 bp, Homo sapien
gaagtcatcggtgctccaagtcttg

SEQ ID NO: 2702570 - DNA, 25 bp, Homo sapien
catgtcccaaaacttgaggcgctgg

SEQ ID NO: 2702571 - DNA, 25 bp, Homo sapien
gaggacccgtctcaagattcaattc

SEQ ID NO: 2702572 - DNA, 25 bp, Homo sapien
ccgtctcaagattcaattcattcct

SEQ ID NO: 2702573 - DNA, 25 bp, Homo sapien
ggacccgtctcaagattcaattcat

SEQ ID NO: 2702574 - DNA, 25 bp, Homo sapien
ggtgaggacccgtctcaagattcaa

SEQ ID NO: 2702575 - DNA, 25 bp, Homo sapien
gatgcagcccaataagcaagactct

SEQ ID NO: 2702576 - DNA, 25 bp, Homo sapien
ctaaggtggaaggacaatctgagcc

SEQ ID NO: 2702577 - DNA, 25 bp, Homo sapien
ctgttaagtctcagctaccaggcag

SEQ ID NO: 2702578 - DNA, 25 bp, Homo sapien
cctgttaagtctcagctaccaggca

SEQ ID NO: 2702579 - DNA, 25 bp, Homo sapien
catcttcttgtgttgcactgtaggg

SEQ ID NO: 2702580 - DNA, 25 bp, Homo sapien
cactggtagagtgaatagctgctac

SEQ ID NO: 2702581 - DNA, 25 bp, Homo sapien
aacccctggttagtatatacttgtg

SEQ ID NO: 2702582 - DNA, 25 bp, Homo sapien
tattataaattcatatccaggccgg

SEQ ID NO: 2702583 - DNA, 25 bp, Homo sapien
ctgccacagcttagcatgaatcttc

SEQ ID NO: 2702584 - DNA, 25 bp, Homo sapien
cagtgatcttccatggccgttcctt

SEQ ID NO: 2702585 - DNA, 25 bp, Homo sapien
ctgggacagggacctatggcacctg

SEQ ID NO: 2702586 - DNA, 25 bp, Homo sapien
cagcttaggtttgggttaagttgtg

SEQ ID NO: 2702587 - DNA, 25 bp, Homo sapien
taccatggttaaacagtgactccat

SEQ ID NO: 2702588 - DNA, 25 bp, Homo sapien
ctgaggcaggtaccatggttaaaca

SEQ ID NO: 2702589 - DNA, 25 bp, Homo sapien
catggttaaacagtgactccattct

SEQ ID NO: 2702590 - DNA, 25 bp, Homo sapien
caggtaccatggttaaacagtgact

SEQ ID NO: 2702591 - DNA, 25 bp, Homo sapien
ccttcagcggcctcatctgggttgt

SEQ ID NO: 2702592 - DNA, 25 bp, Homo sapien
tgtgctgaccctagatggccgggat

SEQ ID NO: 2702593 - DNA, 25 bp, Homo sapien
tggcaccgcttctggtaccaggtgg

SEQ ID NO: 2702594 - DNA, 25 bp, Homo sapien
tgattcctgggcatccggtgccctt

SEQ ID NO: 2702595 - DNA, 25 bp, Homo sapien
catttttcctacagggcagtcacac

SEQ ID NO: 2702596 - DNA, 25 bp, Homo sapien
tgctgtgccaacgaatgaagctggg

SEQ ID NO: 2702597 - DNA, 25 bp, Homo sapien
taacaggactgtgtagctccaaagg

SEQ ID NO: 2702598 - DNA, 25 bp, Homo sapien
taaggtagcagtgtgttatactccc

SEQ ID NO: 2702599 - DNA, 25 bp, Homo sapien
taaaatgcctcaaccacggagtctg

SEQ ID NO: 2702600 - DNA, 25 bp, Homo sapien
taattatgccaaccacccagggtac

SEQ ID NO: 2702601 - DNA, 25 bp, Homo sapien
tcaggacgtgtacgagcaccagctt

SEQ ID NO: 2702602 - DNA, 25 bp, Homo sapien
gctcagaattcgaaagcgtcgcctg

SEQ ID NO: 2702603 - DNA, 25 bp, Homo sapien
tataatcaccccatccagtaggagg

SEQ ID NO: 2702604 - DNA, 25 bp, Homo sapien
taaaccacagtgataggatcacagc

SEQ ID NO: 2702605 - DNA, 25 bp, Homo sapien
agtagaaaatgaaggaatagcccag

SEQ ID NO: 2702606 - DNA, 25 bp, Homo sapien
ccagggcttctggatgaatagggaa

SEQ ID NO: 2702607 - DNA, 25 bp, Homo sapien
aaccaggtcattgaggaggatctga

SEQ ID NO: 2702608 - DNA, 25 bp, Homo sapien
cctaaaccaggtcattgaggaggat

SEQ ID NO: 2702609 - DNA, 25 bp, Homo sapien
gctggactggactctacctgagtca

SEQ ID NO: 2702610 - DNA, 25 bp, Homo sapien
ctccctaaaccaggtcattgaggag

SEQ ID NO: 2702611 - DNA, 25 bp, Homo sapien
tagtagccagcttcggcacttccgg

SEQ ID NO: 2702612 - DNA, 25 bp, Homo sapien
aagttcccttagtagccagcttcgg

SEQ ID NO: 2702613 - DNA, 25 bp, Homo sapien
ccttagtagccagcttcggcacttc

SEQ ID NO: 2702614 - DNA, 25 bp, Homo sapien
agcttcggcacttccgggaggagcc

SEQ ID NO: 2702615 - DNA, 25 bp, Homo sapien
ctgcaaaggcggaacccgcgcacca

SEQ ID NO: 2702616 - DNA, 25 bp, Homo sapien
ccgcgcaccagggaaaactcgggcg

SEQ ID NO: 2702617 - DNA, 25 bp, Homo sapien
cgcgcaccagggaaaactcgggcgt

SEQ ID NO: 2702618 - DNA, 25 bp, Homo sapien
agggcactgcaaaggcggaacccgc

SEQ ID NO: 2702619 - DNA, 25 bp, Homo sapien
caggacgccggctttccgggacagg

SEQ ID NO: 2702620 - DNA, 25 bp, Homo sapien
gcggcaggacgccggctttccggga

SEQ ID NO: 2702621 - DNA, 25 bp, Homo sapien
cgcgcggcaggacgccggctttccg

SEQ ID NO: 2702622 - DNA, 25 bp, Homo sapien
gcaggacgccggctttccgggacag

SEQ ID NO: 2702623 - DNA, 25 bp, Homo sapien
tttggcaacggaccgccccggtgca

SEQ ID NO: 2702624 - DNA, 25 bp, Homo sapien
gccctcctgggaagaagtccgagca

SEQ ID NO: 2702625 - DNA, 25 bp, Homo sapien
cccggtgcacgaagcgcagggcggt

SEQ ID NO: 2702626 - DNA, 25 bp, Homo sapien
tgcacgaagcgcagggcggtcgcag

SEQ ID NO: 2702627 - DNA, 25 bp, Homo sapien
gctccaaggattaaatgaccaggca

SEQ ID NO: 2702628 - DNA, 25 bp, Homo sapien
tgaccaggcatccaaatcgcttagt

SEQ ID NO: 2702629 - DNA, 25 bp, Homo sapien
tagtgggcactcgataaaaaccgat

SEQ ID NO: 2702630 - DNA, 25 bp, Homo sapien
taacactactggaatacaggccgcg

SEQ ID NO: 2702631 - DNA, 25 bp, Homo sapien
ggaaccagctcaaggacacagaaca

SEQ ID NO: 2702632 - DNA, 25 bp, Homo sapien
gctgtatgcccttccaaaaatagag

SEQ ID NO: 2702633 - DNA, 25 bp, Homo sapien
cagtgacattaccagcacgctgtat

SEQ ID NO: 2702634 - DNA, 25 bp, Homo sapien
taacttgaagacaagggaaccagct

SEQ ID NO: 2702635 - DNA, 25 bp, Homo sapien
ggtagggattatggtgatcttctcc

SEQ ID NO: 2702636 - DNA, 25 bp, Homo sapien
tatggtgatcttctccaggtcaccg

SEQ ID NO: 2702637 - DNA, 25 bp, Homo sapien
ttctccaggtcaccgttcctactga

SEQ ID NO: 2702638 - DNA, 25 bp, Homo sapien
gggtagggattatggtgatcttctc

SEQ ID NO: 2702639 - DNA, 25 bp, Homo sapien
aatgaaggcactgaacaacccacca

SEQ ID NO: 2702640 - DNA, 25 bp, Homo sapien
gaataatgaaggcactgaacaaccc

SEQ ID NO: 2702641 - DNA, 25 bp, Homo sapien
gagctcagccgcatttttaatattc

SEQ ID NO: 2702642 - DNA, 25 bp, Homo sapien
ccaccgagctcagccgcatttttaa

SEQ ID NO: 2702643 - DNA, 25 bp, Homo sapien
gcatctctgaccctgttgaccacca

SEQ ID NO: 2702644 - DNA, 25 bp, Homo sapien
atctctgaccctgttgaccaccaac

SEQ ID NO: 2702645 - DNA, 25 bp, Homo sapien
cactggccagacctgtggcatctct

SEQ ID NO: 2702646 - DNA, 25 bp, Homo sapien
tggacactggccagacctgtggcat

SEQ ID NO: 2702647 - DNA, 25 bp, Homo sapien
agttgggatgttaacactgcctctg

SEQ ID NO: 2702648 - DNA, 25 bp, Homo sapien
tcttgataataaaatttggtttctc

SEQ ID NO: 2702649 - DNA, 25 bp, Homo sapien
cttgataataaaatttggtttctct

SEQ ID NO: 2702650 - DNA, 25 bp, Homo sapien
ttcagttgggatgttaacactgcct

SEQ ID NO: 2702651 - DNA, 25 bp, Homo sapien
aaccaaaagcagccatagtgaaaac

SEQ ID NO: 2702652 - DNA, 25 bp, Homo sapien
aaaagcagccatagtgaaaacaaaa

SEQ ID NO: 2702653 - DNA, 25 bp, Homo sapien
ccaaaagcagccatagtgaaaacaa

SEQ ID NO: 2702654 - DNA, 25 bp, Homo sapien
ggaaaccaaaagcagccatagtgaa

SEQ ID NO: 2702655 - DNA, 25 bp, Homo sapien
ccatgacgtttaaagcagctgataa

SEQ ID NO: 2702656 - DNA, 25 bp, Homo sapien
gctgaggactaagatccctggtacc

SEQ ID NO: 2702657 - DNA, 25 bp, Homo sapien
gacgtttaaagcagctgataaccaa

SEQ ID NO: 2702658 - DNA, 25 bp, Homo sapien
atatgctgaggactaagatccctgg

SEQ ID NO: 2702659 - DNA, 25 bp, Homo sapien
agagtcctctccatacttctcagtc

SEQ ID NO: 2702660 - DNA, 25 bp, Homo sapien
agtaaggtcatagcggagggacaac

SEQ ID NO: 2702661 - DNA, 25 bp, Homo sapien
gagtcctctccatacttctcagtca

SEQ ID NO: 2702662 - DNA, 25 bp, Homo sapien
agggacaacagctctccaccttgat

SEQ ID NO: 2702663 - DNA, 25 bp, Homo sapien
tcacataaatgggttaaggaagagg

SEQ ID NO: 2702664 - DNA, 25 bp, Homo sapien
cataaatgggttaaggaagagggat

SEQ ID NO: 2702665 - DNA, 25 bp, Homo sapien
ctcacataaatgggttaaggaagag

SEQ ID NO: 2702666 - DNA, 25 bp, Homo sapien
cacataaatgggttaaggaagaggg

SEQ ID NO: 2702667 - DNA, 25 bp, Homo sapien
gcagaactccctataacggccttgg

SEQ ID NO: 2702668 - DNA, 25 bp, Homo sapien
acactggcagaactccctataacgg

SEQ ID NO: 2702669 - DNA, 25 bp, Homo sapien
taacggccttggactatggttgggc

SEQ ID NO: 2702670 - DNA, 25 bp, Homo sapien
atggttgggctctctcgccgccaca

SEQ ID NO: 2702671 - DNA, 25 bp, Homo sapien
tctgcatcggggatcatagggtcaa

SEQ ID NO: 2702672 - DNA, 25 bp, Homo sapien
tccacttaggatttcacacatgatc

SEQ ID NO: 2702673 - DNA, 25 bp, Homo sapien
tctcccaactgcaatccacttagga

SEQ ID NO: 2702674 - DNA, 25 bp, Homo sapien
catgatcttcaaacactctgcatcg

SEQ ID NO: 2702675 - DNA, 25 bp, Homo sapien
gcccttccactcaaaacaatggcag

SEQ ID NO: 2702676 - DNA, 25 bp, Homo sapien
tcaatgtcagtgacccaagtgcttg

SEQ ID NO: 2702677 - DNA, 25 bp, Homo sapien
gacttgcataaacagtattaggcca

SEQ ID NO: 2702678 - DNA, 25 bp, Homo sapien
tacagttgcaggcttaagggttgga

SEQ ID NO: 2702679 - DNA, 25 bp, Homo sapien
agatggcacggaacttgctttcagg

SEQ ID NO: 2702680 - DNA, 25 bp, Homo sapien
tcccatccacaatccgccggtcatt

SEQ ID NO: 2702681 - DNA, 25 bp, Homo sapien
ttgctttcaggaacaccacagacag

SEQ ID NO: 2702682 - DNA, 25 bp, Homo sapien
cacagacagcaaacatcccatccac

SEQ ID NO: 2702683 - DNA, 25 bp, Homo sapien
tcatgtctcacatctttccaagcca

SEQ ID NO: 2702684 - DNA, 25 bp, Homo sapien
aggagccaggcctttcttcaccacc

SEQ ID NO: 2702685 - DNA, 25 bp, Homo sapien
atgacactggacatagtccccaatt

SEQ ID NO: 2702686 - DNA, 25 bp, Homo sapien
acatagtccccaattcgatcagcca

SEQ ID NO: 2702687 - DNA, 25 bp, Homo sapien
cttgttctgggatagtctgggatcc

SEQ ID NO: 2702688 - DNA, 25 bp, Homo sapien
caattccaaataaagtcaggtattc

SEQ ID NO: 2702689 - DNA, 25 bp, Homo sapien
cctgcttgttctgggatagtctggg

SEQ ID NO: 2702690 - DNA, 25 bp, Homo sapien
tctgggatagtctgggatcctgaaa

SEQ ID NO: 2702691 - DNA, 25 bp, Homo sapien
actgcttcatagatcactcctgtat

SEQ ID NO: 2702692 - DNA, 25 bp, Homo sapien
tctaggccccgagccaggctgaggt

SEQ ID NO: 2702693 - DNA, 25 bp, Homo sapien
tctgctccacaatgtagaagattcg

SEQ ID NO: 2702694 - DNA, 25 bp, Homo sapien
tagaagattcgctcaaccccaatgc

SEQ ID NO: 2702695 - DNA, 25 bp, Homo sapien
ctctgcaataagcttcaaccgttct

SEQ ID NO: 2702696 - DNA, 25 bp, Homo sapien
gtggccacaaacacttgagtctctg

SEQ ID NO: 2702697 - DNA, 25 bp, Homo sapien
tcccaaagctctgcaataagcttca

SEQ ID NO: 2702698 - DNA, 25 bp, Homo sapien
gtgtggccacaaacacttgagtctc

SEQ ID NO: 2702699 - DNA, 25 bp, Homo sapien
gctggccactgaacggatcttgatg

SEQ ID NO: 2702700 - DNA, 25 bp, Homo sapien
tagtgcagctgggttaatagtttgg

SEQ ID NO: 2702701 - DNA, 25 bp, Homo sapien
tgctcaccaataatgaccaccagtg

SEQ ID NO: 2702702 - DNA, 25 bp, Homo sapien
ggaatgcctgtgctctcacaatagt

SEQ ID NO: 2702703 - DNA, 25 bp, Homo sapien
cagaaatacttcgtcccttctattt

SEQ ID NO: 2702704 - DNA, 25 bp, Homo sapien
ggcagaaatacttcgtcccttctat

SEQ ID NO: 2702705 - DNA, 25 bp, Homo sapien
aggcagaaatacttcgtcccttcta

SEQ ID NO: 2702706 - DNA, 25 bp, Homo sapien
aaggcagaaatacttcgtcccttct

SEQ ID NO: 2702707 - DNA, 25 bp, Homo sapien
tattaaccatgaagataatttctca

SEQ ID NO: 2702708 - DNA, 25 bp, Homo sapien
gactcagacagtcgcttctgaattt

SEQ ID NO: 2702709 - DNA, 25 bp, Homo sapien
aagactcagacagtcgcttctgaat

SEQ ID NO: 2702710 - DNA, 25 bp, Homo sapien
tcaagactcagacagtcgcttctga

SEQ ID NO: 2702711 - DNA, 25 bp, Homo sapien
actcagacagtcgcttctgaatttc

SEQ ID NO: 2702712 - DNA, 25 bp, Homo sapien
tgggtactgccatgcccttaggata

SEQ ID NO: 2702713 - DNA, 25 bp, Homo sapien
tacctcttgacaacgttccgtggca

SEQ ID NO: 2702714 - DNA, 25 bp, Homo sapien
tctactgtaagcaatggatgggcta

SEQ ID NO: 2702715 - DNA, 25 bp, Homo sapien
gaatctggttccgtagctacagtag

SEQ ID NO: 2702716 - DNA, 25 bp, Homo sapien
tctaaaacaggcttgttggccccgc

SEQ ID NO: 2702717 - DNA, 25 bp, Homo sapien
caggcgcaagaggagtatgaagcaa

SEQ ID NO: 2702718 - DNA, 25 bp, Homo sapien
tatgaagcaacacggaagtaagggc

SEQ ID NO: 2702719 - DNA, 25 bp, Homo sapien
tctgctccaaggagacagcgcaggc

SEQ ID NO: 2702720 - DNA, 25 bp, Homo sapien
taagcttggagtcttgtgttctaaa

SEQ ID NO: 2702721 - DNA, 25 bp, Homo sapien
aaaagcggcttggagccgtaaggca

SEQ ID NO: 2702722 - DNA, 25 bp, Homo sapien
aagatagccctccaataagcttgga

SEQ ID NO: 2702723 - DNA, 25 bp, Homo sapien
cttggagtcttgtgttctaaacgag

SEQ ID NO: 2702724 - DNA, 25 bp, Homo sapien
tctcgaggagatatcgggaagccag

SEQ ID NO: 2702725 - DNA, 25 bp, Homo sapien
gaaaaagcgtcaagatccgtcgccg

SEQ ID NO: 2702726 - DNA, 25 bp, Homo sapien
cagtcgggtgcaggagtttgtctct

SEQ ID NO: 2702727 - DNA, 25 bp, Homo sapien
tgaacctgaaccctgggatctcgag

SEQ ID NO: 2702728 - DNA, 25 bp, Homo sapien
tctcggcgagtttctcatattcatc

SEQ ID NO: 2702729 - DNA, 25 bp, Homo sapien
tgagcctcttctcggcgagtttctc

SEQ ID NO: 2702730 - DNA, 25 bp, Homo sapien
tcatctttgtcccactttcggcgaa

SEQ ID NO: 2702731 - DNA, 25 bp, Homo sapien
ttgtcccactttcggcgaaagtcca

SEQ ID NO: 2702732 - DNA, 25 bp, Homo sapien
agtccctatgccgtaaaagctctcg

SEQ ID NO: 2702733 - DNA, 25 bp, Homo sapien
ggttgtcttggtaatgacaattgtc

SEQ ID NO: 2702734 - DNA, 25 bp, Homo sapien
tcccatctcagattgaggggttgtc

SEQ ID NO: 2702735 - DNA, 25 bp, Homo sapien
aaagctctcgcttgacaggctgcac

SEQ ID NO: 2702736 - DNA, 25 bp, Homo sapien
aaagttgatggagtccttcaccaca

SEQ ID NO: 2702737 - DNA, 25 bp, Homo sapien
aagttgatggagtccttcaccacac

SEQ ID NO: 2702738 - DNA, 25 bp, Homo sapien
gaaagttgatggagtccttcaccac

SEQ ID NO: 2702739 - DNA, 25 bp, Homo sapien
ggtggaacgttccacacgcatagac

SEQ ID NO: 2702740 - DNA, 25 bp, Homo sapien
tgatccagggtggaacgttccacac

SEQ ID NO: 2702741 - DNA, 25 bp, Homo sapien
gttccacacgcatagacatgcccag

SEQ ID NO: 2702742 - DNA, 25 bp, Homo sapien
cacacgcatagacatgcccaggttt

SEQ ID NO: 2702743 - DNA, 25 bp, Homo sapien
ttctctttcttgtacgctttggcct

SEQ ID NO: 2702744 - DNA, 25 bp, Homo sapien
tctctttcttgtacgctttggcctt

SEQ ID NO: 2702745 - DNA, 25 bp, Homo sapien
tgccatctcatcgtcctcctcaaat

SEQ ID NO: 2702746 - DNA, 25 bp, Homo sapien
ccatctcatcgtcctcctcaaatgt

SEQ ID NO: 2702747 - DNA, 25 bp, Homo sapien
caggtggctagagaaccatagggca

SEQ ID NO: 2702748 - DNA, 25 bp, Homo sapien
gaaaaagggctgatcaaggatatgc

SEQ ID NO: 2702749 - DNA, 25 bp, Homo sapien
agggtcctgtgactccagtgataca

SEQ ID NO: 2702750 - DNA, 25 bp, Homo sapien
ccagcataggccaaagtcaggccaa

SEQ ID NO: 2702751 - DNA, 25 bp, Homo sapien
aacactcatcccatttaatttcctg

SEQ ID NO: 2702752 - DNA, 25 bp, Homo sapien
caatctacacctgaatgttaaaaaa

SEQ ID NO: 2702753 - DNA, 25 bp, Homo sapien
tgaaacaatctacacctgaatgtta

SEQ ID NO: 2702754 - DNA, 25 bp, Homo sapien
agaccgacgggctcccataataagg

SEQ ID NO: 2702755 - DNA, 25 bp, Homo sapien
tgtcaaacagcttctaagaccgacg

SEQ ID NO: 2702756 - DNA, 25 bp, Homo sapien
tatcagacgaaaacataactcatgc

SEQ ID NO: 2702757 - DNA, 25 bp, Homo sapien
gataggaatcgttttggttcagact

SEQ ID NO: 2702758 - DNA, 25 bp, Homo sapien
tatgttcaatcctgagctctgctgt

SEQ ID NO: 2702759 - DNA, 25 bp, Homo sapien
gaagattatggaatgttctcaccaa

SEQ ID NO: 2702760 - DNA, 25 bp, Homo sapien
attaagtaattctgtgtctagcaga

SEQ ID NO: 2702761 - DNA, 25 bp, Homo sapien
ttaagtaattctgtgtctagcagac

SEQ ID NO: 2702762 - DNA, 25 bp, Homo sapien
caaagggcatgtcttacagtaaggg

SEQ ID NO: 2702763 - DNA, 25 bp, Homo sapien
gaaaaccagctatatggtggcagcc

SEQ ID NO: 2702764 - DNA, 25 bp, Homo sapien
tgttcccagtggcaagattcagcat

SEQ ID NO: 2702765 - DNA, 25 bp, Homo sapien
ggtggcagccttgttaacccaaaca

SEQ ID NO: 2702766 - DNA, 25 bp, Homo sapien
tacttttccaagatgccaccctgag

SEQ ID NO: 2702767 - DNA, 25 bp, Homo sapien
gacttaggtccctttgagactcaaa

SEQ ID NO: 2702768 - DNA, 25 bp, Homo sapien
tcaaaaaagacctgaaagcagcttc

SEQ ID NO: 2702769 - DNA, 25 bp, Homo sapien
tgcaaccagaggtaagatcccactg

SEQ ID NO: 2702770 - DNA, 25 bp, Homo sapien
gaggttgctttcggattatatttta

SEQ ID NO: 2702771 - DNA, 25 bp, Homo sapien
aggttgctttcggattatattttat

SEQ ID NO: 2702772 - DNA, 25 bp, Homo sapien
ttgctttcggattatattttattga

SEQ ID NO: 2702773 - DNA, 25 bp, Homo sapien
tctcgaacaacccagacaggttgct

SEQ ID NO: 2702774 - DNA, 25 bp, Homo sapien
tgtttcaattaaagaactgtcgaag

SEQ ID NO: 2702775 - DNA, 25 bp, Homo sapien
caacccagacaggttgcttgtttca

SEQ ID NO: 2702776 - DNA, 25 bp, Homo sapien
ccagacaggttgcttgtttcaatta

SEQ ID NO: 2702777 - DNA, 25 bp, Homo sapien
tctatgagatgctccacgtccattt

SEQ ID NO: 2702778 - DNA, 25 bp, Homo sapien
cttcagcagtgaaaaggactggaga

SEQ ID NO: 2702779 - DNA, 25 bp, Homo sapien
ctgaacttcagcagtgaaaaggact

SEQ ID NO: 2702780 - DNA, 25 bp, Homo sapien
gaacttcagcagtgaaaaggactgg

SEQ ID NO: 2702781 - DNA, 25 bp, Homo sapien
tacaatgtactcgaagtaaccgctg

SEQ ID NO: 2702782 - DNA, 25 bp, Homo sapien
aaagagctggaaagcacccgcgggt

SEQ ID NO: 2702783 - DNA, 25 bp, Homo sapien
agctggaaagcacccgcgggtctcg

SEQ ID NO: 2702784 - DNA, 25 bp, Homo sapien
agagaggtggttacaatgtactcga

SEQ ID NO: 2702785 - DNA, 25 bp, Homo sapien
ccatggttccccatggaaaaggagc

SEQ ID NO: 2702786 - DNA, 25 bp, Homo sapien
catggttccccatggaaaaggagct

SEQ ID NO: 2702787 - DNA, 25 bp, Homo sapien
ctccatggttccccatggaaaagga

SEQ ID NO: 2702788 - DNA, 25 bp, Homo sapien
tccatggttccccatggaaaaggag

SEQ ID NO: 2702789 - DNA, 25 bp, Homo sapien
ctaaatttgaatctctccacacatc

SEQ ID NO: 2702790 - DNA, 25 bp, Homo sapien
tgatgacacgcgaagtaaccgctga

SEQ ID NO: 2702791 - DNA, 25 bp, Homo sapien
tcgaacaacccagagaggtggtttg

SEQ ID NO: 2702792 - DNA, 25 bp, Homo sapien
ggtggtttgatgacacgcgaagtaa

SEQ ID NO: 2702793 - DNA, 25 bp, Homo sapien
ccagagaggtggtttgatgacacgc

SEQ ID NO: 2702794 - DNA, 25 bp, Homo sapien
tttctagcactacgaggtgctccgt

SEQ ID NO: 2702795 - DNA, 25 bp, Homo sapien
tgctttctagcactacgaggtgctc

SEQ ID NO: 2702796 - DNA, 25 bp, Homo sapien
gctttctagcactacgaggtgctcc

SEQ ID NO: 2702797 - DNA, 25 bp, Homo sapien
tctagcactacgaggtgctccgtgt

SEQ ID NO: 2702798 - DNA, 25 bp, Homo sapien
ctaaatttgaatctctccacacatc

SEQ ID NO: 2702799 - DNA, 25 bp, Homo sapien
tattgagcaatgtgtccagacacaa

SEQ ID NO: 2702800 - DNA, 25 bp, Homo sapien
tgatattgagcaatgtgtccagaca

SEQ ID NO: 2702801 - DNA, 25 bp, Homo sapien
tctgatattgagcaatgtgtccaga

SEQ ID NO: 2702802 - DNA, 25 bp, Homo sapien
ttgagcaatgtgtccagacacaata

SEQ ID NO: 2702803 - DNA, 25 bp, Homo sapien
tctaatatgtagtaaggcagaatta

SEQ ID NO: 2702804 - DNA, 25 bp, Homo sapien
aatatgtagtaaggcagaattaact

SEQ ID NO: 2702805 - DNA, 25 bp, Homo sapien
tctctaatatgtagtaaggcagaat

SEQ ID NO: 2702806 - DNA, 25 bp, Homo sapien
ttctctaatatgtagtaaggcagaa

SEQ ID NO: 2702807 - DNA, 25 bp, Homo sapien
aagaagcagatcccgggctcccagg

SEQ ID NO: 2702808 - DNA, 25 bp, Homo sapien
aaagaagcagatcccgggctcccag

SEQ ID NO: 2702809 - DNA, 25 bp, Homo sapien
caaagaagcagatcccgggctccca

SEQ ID NO: 2702810 - DNA, 25 bp, Homo sapien
caagtggactctgtatacggcctgg

SEQ ID NO: 2702811 - DNA, 25 bp, Homo sapien
gaaataatcactcgggctgagcgtg

SEQ ID NO: 2702812 - DNA, 25 bp, Homo sapien
tggagcgtcctctctgataggcaaa

SEQ ID NO: 2702813 - DNA, 25 bp, Homo sapien
tacaatgaagtgaccgccagttctg

SEQ ID NO: 2702814 - DNA, 25 bp, Homo sapien
ccaatagtgccacccactcgaggcg

SEQ ID NO: 2702815 - DNA, 25 bp, Homo sapien
atgacccgcacccaccaatcgcggc

SEQ ID NO: 2702816 - DNA, 25 bp, Homo sapien
accaatcgcggcaccagctcactga

SEQ ID NO: 2702817 - DNA, 25 bp, Homo sapien
agctcactgactgcaccaatagtgc

SEQ ID NO: 2702818 - DNA, 25 bp, Homo sapien
tgttaagacttggagataggcctgg

SEQ ID NO: 2702819 - DNA, 25 bp, Homo sapien
tctccaccagagatacaagcacagt

SEQ ID NO: 2702820 - DNA, 25 bp, Homo sapien
accagaaggcggtagcgcgacaagt

SEQ ID NO: 2702821 - DNA, 25 bp, Homo sapien
cagagtgggcttgcccggcacatac

SEQ ID NO: 2702822 - DNA, 25 bp, Homo sapien
ggatatctacattcaatggtatgat

SEQ ID NO: 2702823 - DNA, 25 bp, Homo sapien
gatttatttcaacgttagtgaacac

SEQ ID NO: 2702824 - DNA, 25 bp, Homo sapien
tgatatttgaaaagatgattagaca

SEQ ID NO: 2702825 - DNA, 25 bp, Homo sapien
tcaagacaaaactgccattaatagg

SEQ ID NO: 2702826 - DNA, 25 bp, Homo sapien
gcaagaactttaactaccaatggga

SEQ ID NO: 2702827 - DNA, 25 bp, Homo sapien
ttagcttaatggcagtgggacctca

SEQ ID NO: 2702828 - DNA, 25 bp, Homo sapien
ggtgtctcagtatcaaccagtgctt

SEQ ID NO: 2702829 - DNA, 25 bp, Homo sapien
tgggacctcaatacatatgctgttg

SEQ ID NO: 2702830 - DNA, 25 bp, Homo sapien
tctaaccatgtcaccaattttgttt

SEQ ID NO: 2702831 - DNA, 25 bp, Homo sapien
cagttactctaaccatgtcaccaat

SEQ ID NO: 2702832 - DNA, 25 bp, Homo sapien
tactctaaccatgtcaccaattttg

SEQ ID NO: 2702833 - DNA, 25 bp, Homo sapien
cttcagttactctaaccatgtcacc

SEQ ID NO: 2702834 - DNA, 25 bp, Homo sapien
taccaatcctcaatgttttgatcaa

SEQ ID NO: 2702835 - DNA, 25 bp, Homo sapien
gttttgatcaaattagaagagcatg

SEQ ID NO: 2702836 - DNA, 25 bp, Homo sapien
tagtctctgttaaagtcctgctgct

SEQ ID NO: 2702837 - DNA, 25 bp, Homo sapien
taaatattctagtctctgttaaagt

SEQ ID NO: 2702838 - DNA, 25 bp, Homo sapien
cctcggccccttctgatagaagacg

SEQ ID NO: 2702839 - DNA, 25 bp, Homo sapien
cccctcggccccttctgatagaaga

SEQ ID NO: 2702840 - DNA, 25 bp, Homo sapien
ggccccttctgatagaagacgccat

SEQ ID NO: 2702841 - DNA, 25 bp, Homo sapien
agcagccgtgtccaggcccctcggc

SEQ ID NO: 2702842 - DNA, 25 bp, Homo sapien
caagcagccttgattcgggaaaccg

SEQ ID NO: 2702843 - DNA, 25 bp, Homo sapien
aataagtatttgaacggtgcccgtg

SEQ ID NO: 2702844 - DNA, 25 bp, Homo sapien
tccgacaccgtgatgagagcaatga

SEQ ID NO: 2702845 - DNA, 25 bp, Homo sapien
catgtccattcgtaccagagtcgcg

SEQ ID NO: 2702846 - DNA, 25 bp, Homo sapien
aataactagtagaaatcatatagaa

SEQ ID NO: 2702847 - DNA, 25 bp, Homo sapien
aaataactagtagaaatcatataga

SEQ ID NO: 2702848 - DNA, 25 bp, Homo sapien
taggatgatataaaataaatgaaga

SEQ ID NO: 2702849 - DNA, 25 bp, Homo sapien
gtaggatgatataaaataaatgaag

SEQ ID NO: 2702850 - DNA, 25 bp, Homo sapien
ggtaggatgatataaaataaatgaa

SEQ ID NO: 2702851 - DNA, 25 bp, Homo sapien
aggatgatataaaataaatgaagaa

SEQ ID NO: 2702852 - DNA, 25 bp, Homo sapien
tttgctgaatttttaaagatggtag

SEQ ID NO: 2702853 - DNA, 25 bp, Homo sapien
cactttgctgaatttttaaagatgg

SEQ ID NO: 2702854 - DNA, 25 bp, Homo sapien
ctttgctgaatttttaaagatggta

SEQ ID NO: 2702855 - DNA, 25 bp, Homo sapien
actttgctgaatttttaaagatggt

SEQ ID NO: 2702856 - DNA, 25 bp, Homo sapien
ttacagagaaattcaaacaggaaat

SEQ ID NO: 2702857 - DNA, 25 bp, Homo sapien
ctttacagagaaattcaaacaggaa

SEQ ID NO: 2702858 - DNA, 25 bp, Homo sapien
tacagagaaattcaaacaggaaatt

SEQ ID NO: 2702859 - DNA, 25 bp, Homo sapien
cagagaaattcaaacaggaaatttg

SEQ ID NO: 2702860 - DNA, 25 bp, Homo sapien
taattcgagttccttatcttcattt

SEQ ID NO: 2702861 - DNA, 25 bp, Homo sapien
ataattcgagttccttatcttcatt

SEQ ID NO: 2702862 - DNA, 25 bp, Homo sapien
aagtattttccaaatattagattgc

SEQ ID NO: 2702863 - DNA, 25 bp, Homo sapien
tgcaagtattttccaaatattagat

SEQ ID NO: 2702864 - DNA, 25 bp, Homo sapien
gcaagtattttccaaatattagatt

SEQ ID NO: 2702865 - DNA, 25 bp, Homo sapien
caagtattttccaaatattagattg

SEQ ID NO: 2702866 - DNA, 25 bp, Homo sapien
tccaggatcttctcgccaggagaac

SEQ ID NO: 2702867 - DNA, 25 bp, Homo sapien
aggatcttctcgccaggagaacaac

SEQ ID NO: 2702868 - DNA, 25 bp, Homo sapien
ggctccaggatcttctcgccaggag

SEQ ID NO: 2702869 - DNA, 25 bp, Homo sapien
gatcttctcgccaggagaacaacat

SEQ ID NO: 2702870 - DNA, 25 bp, Homo sapien
gagacggagtagtggagctggccgc

SEQ ID NO: 2702871 - DNA, 25 bp, Homo sapien
ggagtagtggagctggccgctcccc

SEQ ID NO: 2702872 - DNA, 25 bp, Homo sapien
gacggagtagtggagctggccgctc

SEQ ID NO: 2702873 - DNA, 25 bp, Homo sapien
acggagtagtggagctggccgctcc

SEQ ID NO: 2702874 - DNA, 25 bp, Homo sapien
aacaggcgcggcaccagctccgcca

SEQ ID NO: 2702875 - DNA, 25 bp, Homo sapien
caggtcctgcgcgatgcggcccacg

SEQ ID NO: 2702876 - DNA, 25 bp, Homo sapien
gacgccacccggaacaggcgcggca

SEQ ID NO: 2702877 - DNA, 25 bp, Homo sapien
caaaatgccattctgcagatttacc

SEQ ID NO: 2702878 - DNA, 25 bp, Homo sapien
ccaggctgtcgggattcggaaataa

SEQ ID NO: 2702879 - DNA, 25 bp, Homo sapien
ctttagttgagtcgtgccagtgagc

SEQ ID NO: 2702880 - DNA, 25 bp, Homo sapien
tcatccaaatcggtggcgttaacgg

SEQ ID NO: 2702881 - DNA, 25 bp, Homo sapien
tactcggactgcgagaatgccggcg

SEQ ID NO: 2702882 - DNA, 25 bp, Homo sapien
cgttgctgcccagaggcggcacgcc

SEQ ID NO: 2702883 - DNA, 25 bp, Homo sapien
gcccagaggcggcacgcccgcatcg

SEQ ID NO: 2702884 - DNA, 25 bp, Homo sapien
ttgctgcccagaggcggcacgcccg

SEQ ID NO: 2702885 - DNA, 25 bp, Homo sapien
ccagaggcggcacgcccgcatcgcg

SEQ ID NO: 2702886 - DNA, 25 bp, Homo sapien
tatcccggctaattggacaaggagg

SEQ ID NO: 2702887 - DNA, 25 bp, Homo sapien
ccatgaggtcggtcttgggcaaccc

SEQ ID NO: 2702888 - DNA, 25 bp, Homo sapien
ggagcaccgcagagcagtatatagc

SEQ ID NO: 2702889 - DNA, 25 bp, Homo sapien
gctgagagatcaacgtccacatcct

SEQ ID NO: 2702890 - DNA, 25 bp, Homo sapien
ttaatgtatttccagaggagtggaa

SEQ ID NO: 2702891 - DNA, 25 bp, Homo sapien
tatttccagaggagtggaaacattg

SEQ ID NO: 2702892 - DNA, 25 bp, Homo sapien
acattgaggaatgaaaaacaaagac

SEQ ID NO: 2702893 - DNA, 25 bp, Homo sapien
tccagaggagtggaaacattgagga

SEQ ID NO: 2702894 - DNA, 25 bp, Homo sapien
tctctccagtggtagggaaacttaa

SEQ ID NO: 2702895 - DNA, 25 bp, Homo sapien
ttctctccagtggtagggaaactta

SEQ ID NO: 2702896 - DNA, 25 bp, Homo sapien
acttaaatgggagtccaactaattg

SEQ ID NO: 2702897 - DNA, 25 bp, Homo sapien
ctccagtggtagggaaacttaaatg

SEQ ID NO: 2702898 - DNA, 25 bp, Homo sapien
tggatttgaagattgaagttccata

SEQ ID NO: 2702899 - DNA, 25 bp, Homo sapien
caagaggcaagctggatttgaagat

SEQ ID NO: 2702900 - DNA, 25 bp, Homo sapien
agctggatttgaagattgaagttcc

SEQ ID NO: 2702901 - DNA, 25 bp, Homo sapien
tcaagaggcaagctggatttgaaga

SEQ ID NO: 2702902 - DNA, 25 bp, Homo sapien
gtgaaaatagctttacgctccctct

SEQ ID NO: 2702903 - DNA, 25 bp, Homo sapien
tcaagcacattggaaaaaaggagga

SEQ ID NO: 2702904 - DNA, 25 bp, Homo sapien
gcatcagtacatctgtgaagtgaaa

SEQ ID NO: 2702905 - DNA, 25 bp, Homo sapien
aaccagagtactttcactatgtggg

SEQ ID NO: 2702906 - DNA, 25 bp, Homo sapien
tgcagaaaatgtttgcttccttcca

SEQ ID NO: 2702907 - DNA, 25 bp, Homo sapien
gcagaaaatgtttgcttccttccat

SEQ ID NO: 2702908 - DNA, 25 bp, Homo sapien
cctgcagaaaatgtttgcttccttc

SEQ ID NO: 2702909 - DNA, 25 bp, Homo sapien
agaaaatgtttgcttccttccattg

SEQ ID NO: 2702910 - DNA, 25 bp, Homo sapien
ctgattgattgagtgtggtccttag

SEQ ID NO: 2702911 - DNA, 25 bp, Homo sapien
tgagtgtggtccttagtttcgccat

SEQ ID NO: 2702912 - DNA, 25 bp, Homo sapien
attgagtgtggtccttagtttcgcc

SEQ ID NO: 2702913 - DNA, 25 bp, Homo sapien
cactgattgattgagtgtggtcctt

SEQ ID NO: 2702914 - DNA, 25 bp, Homo sapien
taatcggtcagtcaagtgcagctgc

SEQ ID NO: 2702915 - DNA, 25 bp, Homo sapien
cttttaatcggtcagtcaagtgcag

SEQ ID NO: 2702916 - DNA, 25 bp, Homo sapien
ggtcagtcaagtgcagctgcatcct

SEQ ID NO: 2702917 - DNA, 25 bp, Homo sapien
tcggtcagtcaagtgcagctgcatc

SEQ ID NO: 2702918 - DNA, 25 bp, Homo sapien
gttctgattaaatatcgtttctcaa

SEQ ID NO: 2702919 - DNA, 25 bp, Homo sapien
ttaaatatcgtttctcaaagtcaag

SEQ ID NO: 2702920 - DNA, 25 bp, Homo sapien
tctgattaaatatcgtttctcaaag

SEQ ID NO: 2702921 - DNA, 25 bp, Homo sapien
gattaaatatcgtttctcaaagtca

SEQ ID NO: 2702922 - DNA, 25 bp, Homo sapien
aagaagtaagagcagcagacgccgg

SEQ ID NO: 2702923 - DNA, 25 bp, Homo sapien
agcagacgccgggattcctggccgc

SEQ ID NO: 2702924 - DNA, 25 bp, Homo sapien
agacgccgggattcctggccgcttc

SEQ ID NO: 2702925 - DNA, 25 bp, Homo sapien
gagaagaagtaagagcagcagacgc

SEQ ID NO: 2702926 - DNA, 25 bp, Homo sapien
gagcgtcctctctaattggaagtga

SEQ ID NO: 2702927 - DNA, 25 bp, Homo sapien
aagatttccgtaatataagcccaag

SEQ ID NO: 2702928 - DNA, 25 bp, Homo sapien
gacacccatgtctttgtcggacacg

SEQ ID NO: 2702929 - DNA, 25 bp, Homo sapien
tgtccctagagtcaggtaaactggg

SEQ ID NO: 2702930 - DNA, 25 bp, Homo sapien
caaagcaaattaacactgggcacat

SEQ ID NO: 2702931 - DNA, 25 bp, Homo sapien
gattcaaggtcttagcgttgcctgg

SEQ ID NO: 2702932 - DNA, 25 bp, Homo sapien
caagatgctgttataggaatcccca

SEQ ID NO: 2702933 - DNA, 25 bp, Homo sapien
caattcccatggtgataagtgccga

SEQ ID NO: 2702934 - DNA, 25 bp, Homo sapien
attttttatattatcgcctttctga

SEQ ID NO: 2702935 - DNA, 25 bp, Homo sapien
tttatattatcgcctttctgagctt

SEQ ID NO: 2702936 - DNA, 25 bp, Homo sapien
tatattatcgcctttctgagcttct

SEQ ID NO: 2702937 - DNA, 25 bp, Homo sapien
tttttatattatcgcctttctgagc

SEQ ID NO: 2702938 - DNA, 25 bp, Homo sapien
ctcaatctcgttccaattatgagct

SEQ ID NO: 2702939 - DNA, 25 bp, Homo sapien
tcaatctcgttccaattatgagctt

SEQ ID NO: 2702940 - DNA, 25 bp, Homo sapien
agacttcctctccgggaatatacca

SEQ ID NO: 2702941 - DNA, 25 bp, Homo sapien
cagacttcctctccgggaatatacc

SEQ ID NO: 2702942 - DNA, 25 bp, Homo sapien
gacttcctctccgggaatataccat

SEQ ID NO: 2702943 - DNA, 25 bp, Homo sapien
ccagacttcctctccgggaatatac

SEQ ID NO: 2702944 - DNA, 25 bp, Homo sapien
tctggagaacctgggcggattgtca

SEQ ID NO: 2702945 - DNA, 25 bp, Homo sapien
gccaagcgttgtagcccgaatcagg

SEQ ID NO: 2702946 - DNA, 25 bp, Homo sapien
gcggtgcttcggtctcatccagaga

SEQ ID NO: 2702947 - DNA, 25 bp, Homo sapien
tgctccaatatccaaatccgacgcg

SEQ ID NO: 2702948 - DNA, 25 bp, Homo sapien
caaaaaaagtgggtgaatgtgacat

SEQ ID NO: 2702949 - DNA, 25 bp, Homo sapien
aaaaagtgggtgaatgtgacattta

SEQ ID NO: 2702950 - DNA, 25 bp, Homo sapien
aatacaaaaaaagtgggtgaatgtg

SEQ ID NO: 2702951 - DNA, 25 bp, Homo sapien
tacaaaaaaagtgggtgaatgtgac

SEQ ID NO: 2702952 - DNA, 25 bp, Homo sapien
taggcaaagttgaaataaaccatat

SEQ ID NO: 2702953 - DNA, 25 bp, Homo sapien
aggcaaagttgaaataaaccatatg

SEQ ID NO: 2702954 - DNA, 25 bp, Homo sapien
ttaggcaaagttgaaataaaccata

SEQ ID NO: 2702955 - DNA, 25 bp, Homo sapien
gtatgttccggaatttattaatcca

SEQ ID NO: 2702956 - DNA, 25 bp, Homo sapien
tagaagatcttccgcataaagataa

SEQ ID NO: 2702957 - DNA, 25 bp, Homo sapien
gcgtccgccatcattcaacagtcag

SEQ ID NO: 2702958 - DNA, 25 bp, Homo sapien
aatccatttcttctgcgtccgccat

SEQ ID NO: 2702959 - DNA, 25 bp, Homo sapien
caaatacctctggttttatttccat

SEQ ID NO: 2702960 - DNA, 25 bp, Homo sapien
tcaaatacctctggttttatttcca

SEQ ID NO: 2702961 - DNA, 25 bp, Homo sapien
aagcgggaggagcagacattgcttt

SEQ ID NO: 2702962 - DNA, 25 bp, Homo sapien
cgggaggagcagacattgctttccc

SEQ ID NO: 2702963 - DNA, 25 bp, Homo sapien
agcgggaggagcagacattgctttc

SEQ ID NO: 2702964 - DNA, 25 bp, Homo sapien
gcgggaggagcagacattgctttcc

SEQ ID NO: 2702965 - DNA, 25 bp, Homo sapien
aggcgtcagcgagcagttcacctgc

SEQ ID NO: 2702966 - DNA, 25 bp, Homo sapien
tttggaggccatcctgaacaggcgc

SEQ ID NO: 2702967 - DNA, 25 bp, Homo sapien
tctggcagcctagattcgtaaatca

SEQ ID NO: 2702968 - DNA, 25 bp, Homo sapien
taaccatggctgcaacaaggctatt

SEQ ID NO: 2702969 - DNA, 25 bp, Homo sapien
cataataggacaaggtgaaaggctg

SEQ ID NO: 2702970 - DNA, 25 bp, Homo sapien
tgtgtacagcagtagcgtgaggacc

SEQ ID NO: 2702971 - DNA, 25 bp, Homo sapien
tgatgacgcctttggagcctggcca

SEQ ID NO: 2702972 - DNA, 25 bp, Homo sapien
catgagatccatcttgggtgggccc

SEQ ID NO: 2702973 - DNA, 25 bp, Homo sapien
ttcatttaaatcctgattctccgcc

SEQ ID NO: 2702974 - DNA, 25 bp, Homo sapien
catttaaatcctgattctccgcctt

SEQ ID NO: 2702975 - DNA, 25 bp, Homo sapien
tttaaatcctgattctccgccttac

SEQ ID NO: 2702976 - DNA, 25 bp, Homo sapien
tttggcatcatgatcttcatttaaa

SEQ ID NO: 2702977 - DNA, 25 bp, Homo sapien
cataagtgatacactggtgctcaaa

SEQ ID NO: 2702978 - DNA, 25 bp, Homo sapien
tgatcagagttcttacacaaaatgg

SEQ ID NO: 2702979 - DNA, 25 bp, Homo sapien
tattgcctcccggaatcacaagtct

SEQ ID NO: 2702980 - DNA, 25 bp, Homo sapien
tcacaagtctgaaaagggaaccaca

SEQ ID NO: 2702981 - DNA, 25 bp, Homo sapien
cagcagtagatgtcggccccctggg

SEQ ID NO: 2702982 - DNA, 25 bp, Homo sapien
ggtcgtatccattcgggcacaccat

SEQ ID NO: 2702983 - DNA, 25 bp, Homo sapien
cccctgggtcgtatccattcgggca

SEQ ID NO: 2702984 - DNA, 25 bp, Homo sapien
taaacagcagtagatgtcggccccc

SEQ ID NO: 2702985 - DNA, 25 bp, Homo sapien
gggaccgagtagtggagctggcctc

SEQ ID NO: 2702986 - DNA, 25 bp, Homo sapien
gaccgagtagtggagctggcctctc

SEQ ID NO: 2702987 - DNA, 25 bp, Homo sapien
ccgagtagtggagctggcctctccc

SEQ ID NO: 2702988 - DNA, 25 bp, Homo sapien
ctcggggaccgagtagtggagctgg

SEQ ID NO: 2702989 - DNA, 25 bp, Homo sapien
ggaatttgcacaccgcccggaacag

SEQ ID NO: 2702990 - DNA, 25 bp, Homo sapien
ccacgaagttgccatgtttagcctc

SEQ ID NO: 2702991 - DNA, 25 bp, Homo sapien
ccagaagatccccacggaatttgca

SEQ ID NO: 2702992 - DNA, 25 bp, Homo sapien
gcggcccacgaagttgccatgttta

SEQ ID NO: 2702993 - DNA, 25 bp, Homo sapien
tggattccgcgatgaacagattcct

SEQ ID NO: 2702994 - DNA, 25 bp, Homo sapien
gccaccggttgcaactcatacgaaa

SEQ ID NO: 2702995 - DNA, 25 bp, Homo sapien
taatcaatgtgatgacggtacctgg

SEQ ID NO: 2702996 - DNA, 25 bp, Homo sapien
cggtgcgtccgtctcatctagggct

SEQ ID NO: 2702997 - DNA, 25 bp, Homo sapien
tacatgcgccctcagaggacggcgc

SEQ ID NO: 2702998 - DNA, 25 bp, Homo sapien
gagcacaccagagtgggctttacca

SEQ ID NO: 2702999 - DNA, 25 bp, Homo sapien
gagtgggctttaccaaactacatgc

SEQ ID NO: 2703000 - DNA, 25 bp, Homo sapien
tttaccaaactacatgcgccctcag

SEQ ID NO: 2703001 - DNA, 25 bp, Homo sapien
gatctatagtattacgcatcccaaa

SEQ ID NO: 2703002 - DNA, 25 bp, Homo sapien
tgctccagttagcaaagtcctcctc

SEQ ID NO: 2703003 - DNA, 25 bp, Homo sapien
ggagagtagccaacataaaccatag

SEQ ID NO: 2703004 - DNA, 25 bp, Homo sapien
gaagaaaggtgaatccattgctcca

SEQ ID NO: 2703005 - DNA, 25 bp, Homo sapien
agtttcagctagggatttcttcttc

SEQ ID NO: 2703006 - DNA, 25 bp, Homo sapien
tagtttcagctagggatttcttctt

SEQ ID NO: 2703007 - DNA, 25 bp, Homo sapien
tgaacgactgtactttcagagtctt

SEQ ID NO: 2703008 - DNA, 25 bp, Homo sapien
tttaatccaattccgctgcatctcc

SEQ ID NO: 2703009 - DNA, 25 bp, Homo sapien
gtcttttaatccaattccgctgcat

SEQ ID NO: 2703010 - DNA, 25 bp, Homo sapien
aatataaagatgaacgactgtactt

SEQ ID NO: 2703011 - DNA, 25 bp, Homo sapien
taaatagtcgtttcctatcagaaaa

SEQ ID NO: 2703012 - DNA, 25 bp, Homo sapien
aatagtcgtttcctatcagaaaata

SEQ ID NO: 2703013 - DNA, 25 bp, Homo sapien
tagtcgtttcctatcagaaaatatt

SEQ ID NO: 2703014 - DNA, 25 bp, Homo sapien
gttaaatagtcgtttcctatcagaa

SEQ ID NO: 2703015 - DNA, 25 bp, Homo sapien
agcaagagtagtagtcgccaggatc

SEQ ID NO: 2703016 - DNA, 25 bp, Homo sapien
agtagtagtcgccaggatcccagct

SEQ ID NO: 2703017 - DNA, 25 bp, Homo sapien
gtagtagtcgccaggatcccagctc

SEQ ID NO: 2703018 - DNA, 25 bp, Homo sapien
aagagtagtagtcgccaggatccca

SEQ ID NO: 2703019 - DNA, 25 bp, Homo sapien
gaatatgaaattgccccattggctc

SEQ ID NO: 2703020 - DNA, 25 bp, Homo sapien
ataagtggtgcgcaggagcgtcctc

SEQ ID NO: 2703021 - DNA, 25 bp, Homo sapien
ggaaaccgagagtctggcattctgg

SEQ ID NO: 2703022 - DNA, 25 bp, Homo sapien
gctaagcctgtaggttaacacggag

SEQ ID NO: 2703023 - DNA, 25 bp, Homo sapien
cagtgctatctcagggacgttatca

SEQ ID NO: 2703024 - DNA, 25 bp, Homo sapien
gcgatgacagtaccaaattgagcgt

SEQ ID NO: 2703025 - DNA, 25 bp, Homo sapien
ggataaggaagtcagtgctatctca

SEQ ID NO: 2703026 - DNA, 25 bp, Homo sapien
gcgtcttcacgtacaggcaaggata

SEQ ID NO: 2703027 - DNA, 25 bp, Homo sapien
taaatcttgctcttcgcctacatca

SEQ ID NO: 2703028 - DNA, 25 bp, Homo sapien
cgatgacgcttttggagcctggccg

SEQ ID NO: 2703029 - DNA, 25 bp, Homo sapien
gcggctgttgttgcgagtatgacca

SEQ ID NO: 2703030 - DNA, 25 bp, Homo sapien
cagccgactgcctcgatgacgcttt

SEQ ID NO: 2703031 - DNA, 25 bp, Homo sapien
tgagttctaaatttaaatggactta

SEQ ID NO: 2703032 - DNA, 25 bp, Homo sapien
atgagttctaaatttaaatggactt

SEQ ID NO: 2703033 - DNA, 25 bp, Homo sapien
cacaaatagaatttatgagttctaa

SEQ ID NO: 2703034 - DNA, 25 bp, Homo sapien
ttccacaaatagaatttatgagttc

SEQ ID NO: 2703035 - DNA, 25 bp, Homo sapien
cgtccttagagtattgttcagagaa

SEQ ID NO: 2703036 - DNA, 25 bp, Homo sapien
ttagagtattgttcagagaagacgg

SEQ ID NO: 2703037 - DNA, 25 bp, Homo sapien
ccctgaacgtccttagagtattgtt

SEQ ID NO: 2703038 - DNA, 25 bp, Homo sapien
gaacgtccttagagtattgttcaga

SEQ ID NO: 2703039 - DNA, 25 bp, Homo sapien
aattcagaatctcccatatggctcg

SEQ ID NO: 2703040 - DNA, 25 bp, Homo sapien
gagtgacatcacgtggcccaaagtg

SEQ ID NO: 2703041 - DNA, 25 bp, Homo sapien
tgttcgccatcgttcagcacagaga

SEQ ID NO: 2703042 - DNA, 25 bp, Homo sapien
tcagagagaacatcgcggcaaagag

SEQ ID NO: 2703043 - DNA, 25 bp, Homo sapien
gatctcctcgacttgagtataacat

SEQ ID NO: 2703044 - DNA, 25 bp, Homo sapien
ggatctcctcgacttgagtataaca

SEQ ID NO: 2703045 - DNA, 25 bp, Homo sapien
tggatctcctcgacttgagtataac

SEQ ID NO: 2703046 - DNA, 25 bp, Homo sapien
ctggatctcctcgacttgagtataa

SEQ ID NO: 2703047 - DNA, 25 bp, Homo sapien
atcagaagcgagagcagtagaggct

SEQ ID NO: 2703048 - DNA, 25 bp, Homo sapien
tgcgaggatcagaagcgagagcagt

SEQ ID NO: 2703049 - DNA, 25 bp, Homo sapien
agaagcgagagcagtagaggctgac

SEQ ID NO: 2703050 - DNA, 25 bp, Homo sapien
agcgagagcagtagaggctgaccct

SEQ ID NO: 2703051 - DNA, 25 bp, Homo sapien
ggagtagtggagctggccgctcccc

SEQ ID NO: 2703052 - DNA, 25 bp, Homo sapien
gacggagtagtggagctggccgctc

SEQ ID NO: 2703053 - DNA, 25 bp, Homo sapien
gggacggagtagtggagctggccgc

SEQ ID NO: 2703054 - DNA, 25 bp, Homo sapien
acggagtagtggagctggccgctcc

SEQ ID NO: 2703055 - DNA, 25 bp, Homo sapien
tagtggaaaccgagagtcaagcggc

SEQ ID NO: 2703056 - DNA, 25 bp, Homo sapien
cgtccacatggaaaacctgcagcgg

SEQ ID NO: 2703057 - DNA, 25 bp, Homo sapien
ggtgaatcaccagcgttccgataga

SEQ ID NO: 2703058 - DNA, 25 bp, Homo sapien
agtcagctcgggtttgcctccatcg

SEQ ID NO: 2703059 - DNA, 25 bp, Homo sapien
gcatctgcgtctaggtcgatcacac

SEQ ID NO: 2703060 - DNA, 25 bp, Homo sapien
tgacgcccgcgacgatgactttggc

SEQ ID NO: 2703061 - DNA, 25 bp, Homo sapien
gctagaacacaccagcgtcggcttg

SEQ ID NO: 2703062 - DNA, 25 bp, Homo sapien
tctggctgcagctcgtatgaaagcc

SEQ ID NO: 2703063 - DNA, 25 bp, Homo sapien
ctcccgttcgctctgtagatccagc

SEQ ID NO: 2703064 - DNA, 25 bp, Homo sapien
tctcccgttcgctctgtagatccag

SEQ ID NO: 2703065 - DNA, 25 bp, Homo sapien
cttcccagttgaatctgaggaagca

SEQ ID NO: 2703066 - DNA, 25 bp, Homo sapien
ccctgggagtaatcgataatatctt

SEQ ID NO: 2703067 - DNA, 25 bp, Homo sapien
acggcccctgggagtaatcgataat

SEQ ID NO: 2703068 - DNA, 25 bp, Homo sapien
ggcccctgggagtaatcgataatat

SEQ ID NO: 2703069 - DNA, 25 bp, Homo sapien
ttgaacggcccctgggagtaatcga

SEQ ID NO: 2703070 - DNA, 25 bp, Homo sapien
caaatagcttgcactaaaggtagag

SEQ ID NO: 2703071 - DNA, 25 bp, Homo sapien
gatactgaaggttgctgaacaatca

SEQ ID NO: 2703072 - DNA, 25 bp, Homo sapien
caagtgttatggcagcatagcatca

SEQ ID NO: 2703073 - DNA, 25 bp, Homo sapien
gacaaagtcggctccaatgttaagg

SEQ ID NO: 2703074 - DNA, 25 bp, Homo sapien
cttgtaaaatatctgacacaatatt

SEQ ID NO: 2703075 - DNA, 25 bp, Homo sapien
tctgacacaatattaaataaaatag

SEQ ID NO: 2703076 - DNA, 25 bp, Homo sapien
ttgtaaaatatctgacacaatatta

SEQ ID NO: 2703077 - DNA, 25 bp, Homo sapien
atatctgacacaatattaaataaaa

SEQ ID NO: 2703078 - DNA, 25 bp, Homo sapien
tggcagaaaacgactccgtctcaga

SEQ ID NO: 2703079 - DNA, 25 bp, Homo sapien
aacatgtaatattgtagcatattcc

SEQ ID NO: 2703080 - DNA, 25 bp, Homo sapien
ggctctattctcaaggccattctga

SEQ ID NO: 2703081 - DNA, 25 bp, Homo sapien
cagatatagataggtttaatgacag

SEQ ID NO: 2703082 - DNA, 25 bp, Homo sapien
taagtactagctctaaggagactgg

SEQ ID NO: 2703083 - DNA, 25 bp, Homo sapien
ttattactaaggtgttcacagccct

SEQ ID NO: 2703084 - DNA, 25 bp, Homo sapien
tacctgggtccaagtttaaatggca

SEQ ID NO: 2703085 - DNA, 25 bp, Homo sapien
cttagggcgggagacaaatgacatc

SEQ ID NO: 2703086 - DNA, 25 bp, Homo sapien
taactacagatgcatataaggagac

SEQ ID NO: 2703087 - DNA, 25 bp, Homo sapien
gaattgaggaatgttaactacagat

SEQ ID NO: 2703088 - DNA, 25 bp, Homo sapien
tgttaactacagatgcatataagga

SEQ ID NO: 2703089 - DNA, 25 bp, Homo sapien
tgaattgaggaatgttaactacaga

SEQ ID NO: 2703090 - DNA, 25 bp, Homo sapien
cattcaatgaggacttaggtgctgc

SEQ ID NO: 2703091 - DNA, 25 bp, Homo sapien
cccaatttgtctggaacaggctcaa

SEQ ID NO: 2703092 - DNA, 25 bp, Homo sapien
taaggataggttgaccataggcccc

SEQ ID NO: 2703093 - DNA, 25 bp, Homo sapien
cactgtcaagtatcaaatagggcta

SEQ ID NO: 2703094 - DNA, 25 bp, Homo sapien
aacgtttgttttagctatctggagc

SEQ ID NO: 2703095 - DNA, 25 bp, Homo sapien
tatctggagcgtaaaataagtttgc

SEQ ID NO: 2703096 - DNA, 25 bp, Homo sapien
tatacttctctactcctctggaatg

SEQ ID NO: 2703097 - DNA, 25 bp, Homo sapien
gaaatgggtgtcacttaatccatca

SEQ ID NO: 2703098 - DNA, 25 bp, Homo sapien
tagaacgcacatacgatctgacatt

SEQ ID NO: 2703099 - DNA, 25 bp, Homo sapien
ctagaacgcacatacgatctgacat

SEQ ID NO: 2703100 - DNA, 25 bp, Homo sapien
gaacgcacatacgatctgacatttt

SEQ ID NO: 2703101 - DNA, 25 bp, Homo sapien
aacgcacatacgatctgacattttc

SEQ ID NO: 2703102 - DNA, 25 bp, Homo sapien
cttgttttacaaatcgacgaatcag

SEQ ID NO: 2703103 - DNA, 25 bp, Homo sapien
tgttttacaaatcgacgaatcagcg

SEQ ID NO: 2703104 - DNA, 25 bp, Homo sapien
ttttacaaatcgacgaatcagcggt

SEQ ID NO: 2703105 - DNA, 25 bp, Homo sapien
ctcttgttttacaaatcgacgaatc

SEQ ID NO: 2703106 - DNA, 25 bp, Homo sapien
ggacccccaggcagctacatctgga

SEQ ID NO: 2703107 - DNA, 25 bp, Homo sapien
tgcgaggagaagaagcgagagcagc

SEQ ID NO: 2703108 - DNA, 25 bp, Homo sapien
ccaggcagctacatctggaaaccat

SEQ ID NO: 2703109 - DNA, 25 bp, Homo sapien
agaagaagcgagagcagcagacact

SEQ ID NO: 2703110 - DNA, 25 bp, Homo sapien
taacaccaggatcagcagagaaaca

SEQ ID NO: 2703111 - DNA, 25 bp, Homo sapien
tccgaatcagaagcgttgagccgta

SEQ ID NO: 2703112 - DNA, 25 bp, Homo sapien
tgcgccttctagtggaaatcgagag

SEQ ID NO: 2703113 - DNA, 25 bp, Homo sapien
cgtgcagtgaccaaccataggtggg

SEQ ID NO: 2703114 - DNA, 25 bp, Homo sapien
cagccacgcgttgtatccagagtca

SEQ ID NO: 2703115 - DNA, 25 bp, Homo sapien
agtcagtctcatccagagcgcgcgt

SEQ ID NO: 2703116 - DNA, 25 bp, Homo sapien
cgaacacctgcagcgtcaagttgct

SEQ ID NO: 2703117 - DNA, 25 bp, Homo sapien
acgcgaaacgggatgcgtgcaccaa

SEQ ID NO: 2703118 - DNA, 25 bp, Homo sapien
cctccaatagactgatcttccccgt

SEQ ID NO: 2703119 - DNA, 25 bp, Homo sapien
ggtcccctccaatagactgatcttc

SEQ ID NO: 2703120 - DNA, 25 bp, Homo sapien
caatagactgatcttccccgtccac

SEQ ID NO: 2703121 - DNA, 25 bp, Homo sapien
cttcctagagtggtcccctccaata

SEQ ID NO: 2703122 - DNA, 25 bp, Homo sapien
tattacaaaggtatcactagaaata

SEQ ID NO: 2703123 - DNA, 25 bp, Homo sapien
atttgagaaaatgcggtaagagaaa

SEQ ID NO: 2703124 - DNA, 25 bp, Homo sapien
attacaaaggtatcactagaaatat

SEQ ID NO: 2703125 - DNA, 25 bp, Homo sapien
tatttgagaaaatgcggtaagagaa

SEQ ID NO: 2703126 - DNA, 25 bp, Homo sapien
actgagtaacaaattcaatctccat

SEQ ID NO: 2703127 - DNA, 25 bp, Homo sapien
gtactgagtaacaaattcaatctcc

SEQ ID NO: 2703128 - DNA, 25 bp, Homo sapien
tactgagtaacaaattcaatctcca

SEQ ID NO: 2703129 - DNA, 25 bp, Homo sapien
ctgcgcaatagggaccgcgaagacg

SEQ ID NO: 2703130 - DNA, 25 bp, Homo sapien
cagtgctgtaggctccgggattcct

SEQ ID NO: 2703131 - DNA, 25 bp, Homo sapien
gaagacgctatgtgccgtccttggc

SEQ ID NO: 2703132 - DNA, 25 bp, Homo sapien
gaactggtcctttcccgcttcacaa

SEQ ID NO: 2703133 - DNA, 25 bp, Homo sapien
cacagctcctcgaggtctatcagag

SEQ ID NO: 2703134 - DNA, 25 bp, Homo sapien
gaaaacctgtagcagcttgtccacg

SEQ ID NO: 2703135 - DNA, 25 bp, Homo sapien
aatccaactgaaacaggcgcggtat

SEQ ID NO: 2703136 - DNA, 25 bp, Homo sapien
ggtttctgcggcttttggaatccaa

SEQ ID NO: 2703137 - DNA, 25 bp, Homo sapien
cgataatcaagagctctcgtttcag

SEQ ID NO: 2703138 - DNA, 25 bp, Homo sapien
ctagtgaaacacgataatcaagagc

SEQ ID NO: 2703139 - DNA, 25 bp, Homo sapien
tcaagagctctcgtttcagaaacag

SEQ ID NO: 2703140 - DNA, 25 bp, Homo sapien
aaacagattcttttgtgttgctgag

SEQ ID NO: 2703141 - DNA, 25 bp, Homo sapien
tgtctgaatctatgcgaaaaagggc

SEQ ID NO: 2703142 - DNA, 25 bp, Homo sapien
gaattgcctgtgtcaactgcctgta

SEQ ID NO: 2703143 - DNA, 25 bp, Homo sapien
tcattgcggcacagtatgtaagtca

SEQ ID NO: 2703144 - DNA, 25 bp, Homo sapien
catccagcgctgtgatatataatgc

SEQ ID NO: 2703145 - DNA, 25 bp, Homo sapien
actctggaacactatcattgatgtc

SEQ ID NO: 2703146 - DNA, 25 bp, Homo sapien
ttctatcaagtctgtgcagtgatca

SEQ ID NO: 2703147 - DNA, 25 bp, Homo sapien
aagacttctatcaagtctgtgcagt

SEQ ID NO: 2703148 - DNA, 25 bp, Homo sapien
gaacactatcattgatgtccaagac

SEQ ID NO: 2703149 - DNA, 25 bp, Homo sapien
ctgtacagggaatgatagtgactta

SEQ ID NO: 2703150 - DNA, 25 bp, Homo sapien
tgtacagggaatgatagtgacttac

SEQ ID NO: 2703151 - DNA, 25 bp, Homo sapien
tagggtcaattacactgattagggc

SEQ ID NO: 2703152 - DNA, 25 bp, Homo sapien
cactgattagggctatgacggtacc

SEQ ID NO: 2703153 - DNA, 25 bp, Homo sapien
ttagggctatgacggtacccagtgg

SEQ ID NO: 2703154 - DNA, 25 bp, Homo sapien
ctgaagttagggtcaattacactga

SEQ ID NO: 2703155 - DNA, 25 bp, Homo sapien
aggagtcagggtgcgggtcgtctgt

SEQ ID NO: 2703156 - DNA, 25 bp, Homo sapien
gtcagggtgcgggtcgtctgtccct

SEQ ID NO: 2703157 - DNA, 25 bp, Homo sapien
tcagggtgcgggtcgtctgtccctt

SEQ ID NO: 2703158 - DNA, 25 bp, Homo sapien
cgtgaggagtcagggtgcgggtcgt

SEQ ID NO: 2703159 - DNA, 25 bp, Homo sapien
ccgagcgattaccaacaatggatag

SEQ ID NO: 2703160 - DNA, 25 bp, Homo sapien
tgtggccaacaatgaaagcgagtcc

SEQ ID NO: 2703161 - DNA, 25 bp, Homo sapien
gggcgctgtggagtaccaacgaata

SEQ ID NO: 2703162 - DNA, 25 bp, Homo sapien
aagcgagtccccattccgagcgatt

SEQ ID NO: 2703163 - DNA, 25 bp, Homo sapien
tgctggaacgccagggcattgtggt

SEQ ID NO: 2703164 - DNA, 25 bp, Homo sapien
tcggccacttccacggacccgatgg

SEQ ID NO: 2703165 - DNA, 25 bp, Homo sapien
tggttcactgttcggccacttccac

SEQ ID NO: 2703166 - DNA, 25 bp, Homo sapien
ggcattgtggttcactgttcggcca

SEQ ID NO: 2703167 - DNA, 25 bp, Homo sapien
ggacactgtgaagtcgtggcagccc

SEQ ID NO: 2703168 - DNA, 25 bp, Homo sapien
tcaacgagtaggacaccagcacgtt

SEQ ID NO: 2703169 - DNA, 25 bp, Homo sapien
tgcacccacacatagctagacagcg

SEQ ID NO: 2703170 - DNA, 25 bp, Homo sapien
acccgctgttccatcaacgagtagg

SEQ ID NO: 2703171 - DNA, 25 bp, Homo sapien
cagctcctcgtagtccagtggctgc

SEQ ID NO: 2703172 - DNA, 25 bp, Homo sapien
tcctcgtagtccagtggctgcaacg

SEQ ID NO: 2703173 - DNA, 25 bp, Homo sapien
tcgtagtccagtggctgcaacgcgt

SEQ ID NO: 2703174 - DNA, 25 bp, Homo sapien
gtagtccagtggctgcaacgcgtac

SEQ ID NO: 2703175 - DNA, 25 bp, Homo sapien
tcagaggcggcatgcccgcgtcgcg

SEQ ID NO: 2703176 - DNA, 25 bp, Homo sapien
gctcagaggcggcatgcccgcgtcg

SEQ ID NO: 2703177 - DNA, 25 bp, Homo sapien
gcatgcccgcgtcgcgcgctctcac

SEQ ID NO: 2703178 - DNA, 25 bp, Homo sapien
ctgctcagaggcggcatgcccgcgt

SEQ ID NO: 2703179 - DNA, 25 bp, Homo sapien
aaggcgccagcagcgcagacaaagt

SEQ ID NO: 2703180 - DNA, 25 bp, Homo sapien
tgtcgttccagcactaatacctggc

SEQ ID NO: 2703181 - DNA, 25 bp, Homo sapien
cagcactaatacctggcagcgtcac

SEQ ID NO: 2703182 - DNA, 25 bp, Homo sapien
cagacaaagttgtcgttccagcact

SEQ ID NO: 2703183 - DNA, 25 bp, Homo sapien
ctgaataccgcaccagctcactcac

SEQ ID NO: 2703184 - DNA, 25 bp, Homo sapien
catagctggagtccaccgtgcgcac

SEQ ID NO: 2703185 - DNA, 25 bp, Homo sapien
tcatagctggagtccaccgtgcgca

SEQ ID NO: 2703186 - DNA, 25 bp, Homo sapien
cgcccgtgcagagccccacgtggaa

SEQ ID NO: 2703187 - DNA, 25 bp, Homo sapien
agccccacgtggaacgggtgctgcc

SEQ ID NO: 2703188 - DNA, 25 bp, Homo sapien
ctcgcccgtgcagagccccacgtgg

SEQ ID NO: 2703189 - DNA, 25 bp, Homo sapien
cagagccccacgtggaacgggtgct

SEQ ID NO: 2703190 - DNA, 25 bp, Homo sapien
gcagcgtcgtgtacagcagcaacgt

SEQ ID NO: 2703191 - DNA, 25 bp, Homo sapien
cgtagctttcgcctcgtccagggta

SEQ ID NO: 2703192 - DNA, 25 bp, Homo sapien
gatgggaccttcctcgcttggctgc

SEQ ID NO: 2703193 - DNA, 25 bp, Homo sapien
gagctctcggtgagctgcgccaagc

SEQ ID NO: 2703194 - DNA, 25 bp, Homo sapien
aaatctcctttgctgcgagtaagac

SEQ ID NO: 2703195 - DNA, 25 bp, Homo sapien
agtaaaatctcctttgctgcgagta

SEQ ID NO: 2703196 - DNA, 25 bp, Homo sapien
tgcgagtaagaccagatcccactac

SEQ ID NO: 2703197 - DNA, 25 bp, Homo sapien
tcctttgctgcgagtaagaccagat

SEQ ID NO: 2703198 - DNA, 25 bp, Homo sapien
gagaacactaggactaaaagccgta

SEQ ID NO: 2703199 - DNA, 25 bp, Homo sapien
aaccatgggagaacactaggactaa

SEQ ID NO: 2703200 - DNA, 25 bp, Homo sapien
ctaggactaaaagccgtaatgttga

SEQ ID NO: 2703201 - DNA, 25 bp, Homo sapien
tgggagaacactaggactaaaagcc

SEQ ID NO: 2703202 - DNA, 25 bp, Homo sapien
gatccttaaacggtggcatccggta

SEQ ID NO: 2703203 - DNA, 25 bp, Homo sapien
taaggtggcctcatgaaaaactagg

SEQ ID NO: 2703204 - DNA, 25 bp, Homo sapien
aagtaaagagcgacaccttgcgcct

SEQ ID NO: 2703205 - DNA, 25 bp, Homo sapien
ccttgcgcctaaaactgtgagtact

SEQ ID NO: 2703206 - DNA, 25 bp, Homo sapien
gagctgtagtcgtggggtgcccaat

SEQ ID NO: 2703207 - DNA, 25 bp, Homo sapien
tgtagtcgtggggtgcccaatcccc

SEQ ID NO: 2703208 - DNA, 25 bp, Homo sapien
ctcccagaattcgaggaggagaagc

SEQ ID NO: 2703209 - DNA, 25 bp, Homo sapien
tcccagaattcgaggaggagaagcc

SEQ ID NO: 2703210 - DNA, 25 bp, Homo sapien
cttggactaacagccgaacggtgcc

SEQ ID NO: 2703211 - DNA, 25 bp, Homo sapien
ggagtccccttatctgtagcctgta

SEQ ID NO: 2703212 - DNA, 25 bp, Homo sapien
ttctctgagcgagaacaccggcggg

SEQ ID NO: 2703213 - DNA, 25 bp, Homo sapien
cctctagtggaaaacgcgagtccga

SEQ ID NO: 2703214 - DNA, 25 bp, Homo sapien
gagtcgccagcagtgccggcgcgtt

SEQ ID NO: 2703215 - DNA, 25 bp, Homo sapien
ccagcagtgccggcgcgttgtcgtt

SEQ ID NO: 2703216 - DNA, 25 bp, Homo sapien
acgaacacctgcagcgtcacgttgc

SEQ ID NO: 2703217 - DNA, 25 bp, Homo sapien
ttgtcgttctcgtccagcacgaaca

SEQ ID NO: 2703218 - DNA, 25 bp, Homo sapien
tcgtccagggcacgcgttgtgctta

SEQ ID NO: 2703219 - DNA, 25 bp, Homo sapien
gccgtatacagcagcagcgtgagta

SEQ ID NO: 2703220 - DNA, 25 bp, Homo sapien
accagtactagaagtcggtggcgcg

SEQ ID NO: 2703221 - DNA, 25 bp, Homo sapien
actagcttgttaactgcgcctcccg

SEQ ID NO: 2703222 - DNA, 25 bp, Homo sapien
tgataggtggaatctgtagaaaact

SEQ ID NO: 2703223 - DNA, 25 bp, Homo sapien
ataggtggaatctgtagaaaactca

SEQ ID NO: 2703224 - DNA, 25 bp, Homo sapien
taggtggaatctgtagaaaactcac

SEQ ID NO: 2703225 - DNA, 25 bp, Homo sapien
gataggtggaatctgtagaaaactc

SEQ ID NO: 2703226 - DNA, 25 bp, Homo sapien
atttagtaaattttttccagcatca

SEQ ID NO: 2703227 - DNA, 25 bp, Homo sapien
taaattttttccagcatcacagtca

SEQ ID NO: 2703228 - DNA, 25 bp, Homo sapien
ctgtaagtacatatttagtaaattt

SEQ ID NO: 2703229 - DNA, 25 bp, Homo sapien
agtaaattttttccagcatcacagt

SEQ ID NO: 2703230 - DNA, 25 bp, Homo sapien
tgagttgggacaatcagttttaagg

SEQ ID NO: 2703231 - DNA, 25 bp, Homo sapien
taagggatcgcttgcctgaggtatt

SEQ ID NO: 2703232 - DNA, 25 bp, Homo sapien
gcttgcctgaggtattttatgagca

SEQ ID NO: 2703233 - DNA, 25 bp, Homo sapien
tcagttttaagggatcgcttgcctg

SEQ ID NO: 2703234 - DNA, 25 bp, Homo sapien
agcagacgctgggatcccgggcctc

SEQ ID NO: 2703235 - DNA, 25 bp, Homo sapien
gagcagcagacgctgggatcccggg

SEQ ID NO: 2703236 - DNA, 25 bp, Homo sapien
gggcctcttggtccgataatcacca

SEQ ID NO: 2703237 - DNA, 25 bp, Homo sapien
ggatcccgggcctcttggtccgata

SEQ ID NO: 2703238 - DNA, 25 bp, Homo sapien
tggaaaacctgcagcggcctgtcca

SEQ ID NO: 2703239 - DNA, 25 bp, Homo sapien
gtccacatggaaaacctgcagcggc

SEQ ID NO: 2703240 - DNA, 25 bp, Homo sapien
ctcgcggtcgatccgagaattcaca

SEQ ID NO: 2703241 - DNA, 25 bp, Homo sapien
cgcggtcgatccgagaattcacaaa

SEQ ID NO: 2703242 - DNA, 25 bp, Homo sapien
gagtttacgccgatatccgcatcag

SEQ ID NO: 2703243 - DNA, 25 bp, Homo sapien
tatagctgggcttatcaaacgccgg

SEQ ID NO: 2703244 - DNA, 25 bp, Homo sapien
tcacgatccgacacgctaatcaggg

SEQ ID NO: 2703245 - DNA, 25 bp, Homo sapien
gaaggaatccctttatcaatggcgt

SEQ ID NO: 2703246 - DNA, 25 bp, Homo sapien
caactcgtaggacagccaagcgtta

SEQ ID NO: 2703247 - DNA, 25 bp, Homo sapien
ccaagcgttatagccggagtcagcg

SEQ ID NO: 2703248 - DNA, 25 bp, Homo sapien
gttaatatccaccagagccgcttcg

SEQ ID NO: 2703249 - DNA, 25 bp, Homo sapien
caggatgcgtgtcgtgctgatctcg

SEQ ID NO: 2703250 - DNA, 25 bp, Homo sapien
gcgcgcaccggctcacggtgggcgg

SEQ ID NO: 2703251 - DNA, 25 bp, Homo sapien
ccatgaggtccgtcttgggcgggct

SEQ ID NO: 2703252 - DNA, 25 bp, Homo sapien
ggcggcgctgagcaacgcagcgcag

SEQ ID NO: 2703253 - DNA, 25 bp, Homo sapien
ggatttaaacaatcttctcgagaca

SEQ ID NO: 2703254 - DNA, 25 bp, Homo sapien
aagccacgcattgtagcccgaatcg

SEQ ID NO: 2703255 - DNA, 25 bp, Homo sapien
tcatacgaaagccacgcattgtagc

SEQ ID NO: 2703256 - DNA, 25 bp, Homo sapien
acgaaagccacgcattgtagcccga

SEQ ID NO: 2703257 - DNA, 25 bp, Homo sapien
gctgcaattcatacgaaagccacgc

SEQ ID NO: 2703258 - DNA, 25 bp, Homo sapien
ttttcaagacctcctcacacaacag

SEQ ID NO: 2703259 - DNA, 25 bp, Homo sapien
ttcgacactcgttttgggacaattg

SEQ ID NO: 2703260 - DNA, 25 bp, Homo sapien
gggacaattgatcggtagttctgca

SEQ ID NO: 2703261 - DNA, 25 bp, Homo sapien
taagaataaaatcggtgaaggtgaa

SEQ ID NO: 2703262 - DNA, 25 bp, Homo sapien
tacactccaaaaacctcagagctat

SEQ ID NO: 2703263 - DNA, 25 bp, Homo sapien
ggtacactccaaaaacctcagagct

SEQ ID NO: 2703264 - DNA, 25 bp, Homo sapien
gtacactccaaaaacctcagagcta

SEQ ID NO: 2703265 - DNA, 25 bp, Homo sapien
tagttgccgcggtcttgggcctcct

SEQ ID NO: 2703266 - DNA, 25 bp, Homo sapien
gtggagctggccactacccgtctcc

SEQ ID NO: 2703267 - DNA, 25 bp, Homo sapien
gtctcccaggctgcgaggatcagaa

SEQ ID NO: 2703268 - DNA, 25 bp, Homo sapien
agaagccagagcagtagttgccgcg

SEQ ID NO: 2703269 - DNA, 25 bp, Homo sapien
gaaatcgagtttccggaggtctaga

SEQ ID NO: 2703270 - DNA, 25 bp, Homo sapien
caataatggcgctaggctgagtgtc

SEQ ID NO: 2703271 - DNA, 25 bp, Homo sapien
catttgagccagagtcacgatcgga

SEQ ID NO: 2703272 - DNA, 25 bp, Homo sapien
cgatcggacacactgattagggcaa

SEQ ID NO: 2703273 - DNA, 25 bp, Homo sapien
ttgtcgttctcgtccagcacgaaca

SEQ ID NO: 2703274 - DNA, 25 bp, Homo sapien
ctgcaattcatacgaaagccacgca

SEQ ID NO: 2703275 - DNA, 25 bp, Homo sapien
catacgaaagccacgcattgtagcc

SEQ ID NO: 2703276 - DNA, 25 bp, Homo sapien
aagccacgcattgtagcccgaatcg

SEQ ID NO: 2703277 - DNA, 25 bp, Homo sapien
acaacagcaccgttgccgtggccgt

SEQ ID NO: 2703278 - DNA, 25 bp, Homo sapien
tgccgcgctggagcacactagagtg

SEQ ID NO: 2703279 - DNA, 25 bp, Homo sapien
acctcgtccagagggcgcgtcgtgc

SEQ ID NO: 2703280 - DNA, 25 bp, Homo sapien
gacgccctcgacgaagcctgtggcg

SEQ ID NO: 2703281 - DNA, 25 bp, Homo sapien
caatagctactatgtggaatcaacc

SEQ ID NO: 2703282 - DNA, 25 bp, Homo sapien
tattcatggcagtatggctgagcct

SEQ ID NO: 2703283 - DNA, 25 bp, Homo sapien
gaaaccagtatgtcaaagtgatacc

SEQ ID NO: 2703284 - DNA, 25 bp, Homo sapien
gttctcacttatacggcagctacaa

SEQ ID NO: 2703285 - DNA, 25 bp, Homo sapien
tttgaaacttctcatctgcaacacc

SEQ ID NO: 2703286 - DNA, 25 bp, Homo sapien
aagttatttgaaacttctcatctgc

SEQ ID NO: 2703287 - DNA, 25 bp, Homo sapien
ctgcaacaccaggagctagaagata

SEQ ID NO: 2703288 - DNA, 25 bp, Homo sapien
acttctcatctgcaacaccaggagc

SEQ ID NO: 2703289 - DNA, 25 bp, Homo sapien
ctgtaaagatgtaccgaacttttag

SEQ ID NO: 2703290 - DNA, 25 bp, Homo sapien
accaggtttaggaattctgagctgc

SEQ ID NO: 2703291 - DNA, 25 bp, Homo sapien
taaattaatgctgctaagcaagcta

SEQ ID NO: 2703292 - DNA, 25 bp, Homo sapien
gcagccatgcctccaattataccag

SEQ ID NO: 2703293 - DNA, 25 bp, Homo sapien
cgggttgaagtctgtcctgcaccct

SEQ ID NO: 2703294 - DNA, 25 bp, Homo sapien
tggatcctgctgcgggttgaagtct

SEQ ID NO: 2703295 - DNA, 25 bp, Homo sapien
tgctgcgggttgaagtctgtcctgc

SEQ ID NO: 2703296 - DNA, 25 bp, Homo sapien
atcctgctgcgggttgaagtctgtc

SEQ ID NO: 2703297 - DNA, 25 bp, Homo sapien
gagccgggcttgctaggctggaggc

SEQ ID NO: 2703298 - DNA, 25 bp, Homo sapien
gcagccgtctgggaaagcggagccg

SEQ ID NO: 2703299 - DNA, 25 bp, Homo sapien
cgggtgttgaggagcgcagcgccgc

SEQ ID NO: 2703300 - DNA, 25 bp, Homo sapien
cactgctgcgggctggatactcagc

SEQ ID NO: 2703301 - DNA, 25 bp, Homo sapien
cctctaggcgtccacgttccaccaa

SEQ ID NO: 2703302 - DNA, 25 bp, Homo sapien
cctccctctaggcgtccacgttcca

SEQ ID NO: 2703303 - DNA, 25 bp, Homo sapien
tccctctaggcgtccacgttccacc

SEQ ID NO: 2703304 - DNA, 25 bp, Homo sapien
ctctaggcgtccacgttccaccaac

SEQ ID NO: 2703305 - DNA, 25 bp, Homo sapien
acaaacataaaactgccaccccaca

SEQ ID NO: 2703306 - DNA, 25 bp, Homo sapien
gcagcgccgcaggaaacccacaaac

SEQ ID NO: 2703307 - DNA, 25 bp, Homo sapien
caaacataaaactgccaccccacag

SEQ ID NO: 2703308 - DNA, 25 bp, Homo sapien
agcgccgcaggaaacccacaaacat

SEQ ID NO: 2703309 - DNA, 25 bp, Homo sapien
taccccagtggcaagatttcgcagg

SEQ ID NO: 2703310 - DNA, 25 bp, Homo sapien
caaattgccgctgggtagatccacc

SEQ ID NO: 2703311 - DNA, 25 bp, Homo sapien
tatacggagcgctcaaatacaggcg

SEQ ID NO: 2703312 - DNA, 25 bp, Homo sapien
tccaagagcgtttcaggcggaccta

SEQ ID NO: 2703313 - DNA, 25 bp, Homo sapien
gaggcctagggcaatcttctaatac

SEQ ID NO: 2703314 - DNA, 25 bp, Homo sapien
taaatattagagtgccttacacatc

SEQ ID NO: 2703315 - DNA, 25 bp, Homo sapien
tacttccagatttcttggcacagga

SEQ ID NO: 2703316 - DNA, 25 bp, Homo sapien
tttcaaaacacagctagcagccatc

SEQ ID NO: 2703317 - DNA, 25 bp, Homo sapien
cagtggaacccagaagatattgagg

SEQ ID NO: 2703318 - DNA, 25 bp, Homo sapien
tacacccatgtaaaaatatctatca

SEQ ID NO: 2703319 - DNA, 25 bp, Homo sapien
tgaggaggtaactttaatgtaccaa

SEQ ID NO: 2703320 - DNA, 25 bp, Homo sapien
tagaggtaaataatacataacgcta

SEQ ID NO: 2703321 - DNA, 25 bp, Homo sapien
ttctgcctaaaaatacattatgcca

SEQ ID NO: 2703322 - DNA, 25 bp, Homo sapien
tttttattgacacagggccaaatcc

SEQ ID NO: 2703323 - DNA, 25 bp, Homo sapien
ggccaaatccaactagtttgtggaa

SEQ ID NO: 2703324 - DNA, 25 bp, Homo sapien
ggaaaaaagttgtcatgctaaagca

SEQ ID NO: 2703325 - DNA, 25 bp, Homo sapien
tgctgccgctacagctccaggggga

SEQ ID NO: 2703326 - DNA, 25 bp, Homo sapien
gatcccagcggaccgcaggaacacg

SEQ ID NO: 2703327 - DNA, 25 bp, Homo sapien
gctcacgctctagaaagcgcctggg

SEQ ID NO: 2703328 - DNA, 25 bp, Homo sapien
tgattccgcgccgaagtggcggaca

SEQ ID NO: 2703329 - DNA, 25 bp, Homo sapien
tggatgctctgtcgccgcaggtctg

SEQ ID NO: 2703330 - DNA, 25 bp, Homo sapien
ccgccggagccgtggatgctctgtc

SEQ ID NO: 2703331 - DNA, 25 bp, Homo sapien
gagccgtggatgctctgtcgccgca

SEQ ID NO: 2703332 - DNA, 25 bp, Homo sapien
tctgtcgccgcaggtctggtgcccg

SEQ ID NO: 2703333 - DNA, 25 bp, Homo sapien
ctgggaggccgcagggccaggtagc

SEQ ID NO: 2703334 - DNA, 25 bp, Homo sapien
gaggccgcagggccaggtagcagca

SEQ ID NO: 2703335 - DNA, 25 bp, Homo sapien
ggccgcagggccaggtagcagcagc

SEQ ID NO: 2703336 - DNA, 25 bp, Homo sapien
gcaggagaggcagtagcagcagcca

SEQ ID NO: 2703337 - DNA, 25 bp, Homo sapien
attcagtcggaaaggcagtgtggcc

SEQ ID NO: 2703338 - DNA, 25 bp, Homo sapien
cacccagatggttgatgcgcaagca

SEQ ID NO: 2703339 - DNA, 25 bp, Homo sapien
tgacactgagaacggccacaatggt

SEQ ID NO: 2703340 - DNA, 25 bp, Homo sapien
taaggtccagctcgaagtgctcgct

SEQ ID NO: 2703341 - DNA, 25 bp, Homo sapien
ttaatgactcaataaagccaaatca

SEQ ID NO: 2703342 - DNA, 25 bp, Homo sapien
ggatattgggggatgtgtaacaaat

SEQ ID NO: 2703343 - DNA, 25 bp, Homo sapien
taaagccaaatcacaggatattggg

SEQ ID NO: 2703344 - DNA, 25 bp, Homo sapien
aatgcatgagtttgtagaagacccc

SEQ ID NO: 2703345 - DNA, 25 bp, Homo sapien
ttctcaaacaattttatggacaagg

SEQ ID NO: 2703346 - DNA, 25 bp, Homo sapien
ctcaaacaattttatggacaaggct

SEQ ID NO: 2703347 - DNA, 25 bp, Homo sapien
caattttatggacaaggcttcatgc

SEQ ID NO: 2703348 - DNA, 25 bp, Homo sapien
attttatggacaaggcttcatgcct

SEQ ID NO: 2703349 - DNA, 25 bp, Homo sapien
tctgtttagttctggatgcatagcc

SEQ ID NO: 2703350 - DNA, 25 bp, Homo sapien
agttctggatgcatagcctgctagc

SEQ ID NO: 2703351 - DNA, 25 bp, Homo sapien
gcagctactctctcactcacagttg

SEQ ID NO: 2703352 - DNA, 25 bp, Homo sapien
tggatgcatagcctgctagcacagc

SEQ ID NO: 2703353 - DNA, 25 bp, Homo sapien
acatggctacacaagttctgctggc

SEQ ID NO: 2703354 - DNA, 25 bp, Homo sapien
gatgtgcccagtcataacaccagca

SEQ ID NO: 2703355 - DNA, 25 bp, Homo sapien
ttacagctataacagggcacatggc

SEQ ID NO: 2703356 - DNA, 25 bp, Homo sapien
gcagcatatttgacccagggcggat

SEQ ID NO: 2703357 - DNA, 25 bp, Homo sapien
cagggaggcagagtaacgccagtca

SEQ ID NO: 2703358 - DNA, 25 bp, Homo sapien
cagagtaacgccagtcagggttggg

SEQ ID NO: 2703359 - DNA, 25 bp, Homo sapien
gaggcagagtaacgccagtcagggt

SEQ ID NO: 2703360 - DNA, 25 bp, Homo sapien
tcagggaggcagagtaacgccagtc

SEQ ID NO: 2703361 - DNA, 25 bp, Homo sapien
tcctggaccagcccgtagaatgcca

SEQ ID NO: 2703362 - DNA, 25 bp, Homo sapien
ggaccagcccgtagaatgccagcct

SEQ ID NO: 2703363 - DNA, 25 bp, Homo sapien
ctggaccagcccgtagaatgccagc

SEQ ID NO: 2703364 - DNA, 25 bp, Homo sapien
accagcccgtagaatgccagcctcc

SEQ ID NO: 2703365 - DNA, 25 bp, Homo sapien
aacacttggcagtctaaaaccactt

SEQ ID NO: 2703366 - DNA, 25 bp, Homo sapien
cacttggcagtctaaaaccacttcc

SEQ ID NO: 2703367 - DNA, 25 bp, Homo sapien
ttggcagtctaaaaccacttcctcc

SEQ ID NO: 2703368 - DNA, 25 bp, Homo sapien
tgcaacacttggcagtctaaaacca

SEQ ID NO: 2703369 - DNA, 25 bp, Homo sapien
ctacaatgcctccataagagcaaga

SEQ ID NO: 2703370 - DNA, 25 bp, Homo sapien
caatgcctccataagagcaagaaaa

SEQ ID NO: 2703371 - DNA, 25 bp, Homo sapien
tacaatgcctccataagagcaagaa

SEQ ID NO: 2703372 - DNA, 25 bp, Homo sapien
atgcctccataagagcaagaaaaac

SEQ ID NO: 2703373 - DNA, 25 bp, Homo sapien
cttgatgacacacggagcccacagg

SEQ ID NO: 2703374 - DNA, 25 bp, Homo sapien
catcttgatgacacacggagcccac

SEQ ID NO: 2703375 - DNA, 25 bp, Homo sapien
cagttggattgacatcttgatgaca

SEQ ID NO: 2703376 - DNA, 25 bp, Homo sapien
gactgcaggaacagcagttggattg

SEQ ID NO: 2703377 - DNA, 25 bp, Homo sapien
taaatgattatagccgtttccggcc

SEQ ID NO: 2703378 - DNA, 25 bp, Homo sapien
cactctgctaagtcagtgcagccgg

SEQ ID NO: 2703379 - DNA, 25 bp, Homo sapien
tgctcgttctttggcgctggcggct

SEQ ID NO: 2703380 - DNA, 25 bp, Homo sapien
cagtgcagccggcaaaggctattaa

SEQ ID NO: 2703381 - DNA, 25 bp, Homo sapien
tccgtatttaaaggtccagctgttg

SEQ ID NO: 2703382 - DNA, 25 bp, Homo sapien
ccgtatttaaaggtccagctgttgc

SEQ ID NO: 2703383 - DNA, 25 bp, Homo sapien
cgcaccgactggaggggacacttct

SEQ ID NO: 2703384 - DNA, 25 bp, Homo sapien
cagctgttgctgttgacacccgcac

SEQ ID NO: 2703385 - DNA, 25 bp, Homo sapien
gataatgaatttgtcgggcaactca

SEQ ID NO: 2703386 - DNA, 25 bp, Homo sapien
tggctgttagtaggctcctgccgga

SEQ ID NO: 2703387 - DNA, 25 bp, Homo sapien
gatggagatgattgcaggagatcct

SEQ ID NO: 2703388 - DNA, 25 bp, Homo sapien
cctgggataatgaatttgtcgggca

SEQ ID NO: 2703389 - DNA, 25 bp, Homo sapien
tcactgttgtcagtcgtgctgttcc

SEQ ID NO: 2703390 - DNA, 25 bp, Homo sapien
tgtcagtcgtgctgttccctttctc

SEQ ID NO: 2703391 - DNA, 25 bp, Homo sapien
tggtcactgttgtcagtcgtgctgt

SEQ ID NO: 2703392 - DNA, 25 bp, Homo sapien
ctgttgtcagtcgtgctgttccctt

SEQ ID NO: 2703393 - DNA, 25 bp, Homo sapien
cagggaattgctacatgggagagat

SEQ ID NO: 2703394 - DNA, 25 bp, Homo sapien
taagagggctcatgtagataggaaa

SEQ ID NO: 2703395 - DNA, 25 bp, Homo sapien
tacaaaaactggctaagtggcttgt

SEQ ID NO: 2703396 - DNA, 25 bp, Homo sapien
gaaagagttaacaccagacttagta

SEQ ID NO: 2703397 - DNA, 25 bp, Homo sapien
agcctctcctttgcggcggaggaga

SEQ ID NO: 2703398 - DNA, 25 bp, Homo sapien
ctctcctttgcggcggaggagaaag

SEQ ID NO: 2703399 - DNA, 25 bp, Homo sapien
gaagcctctcctttgcggcggagga

SEQ ID NO: 2703400 - DNA, 25 bp, Homo sapien
ggaagcctctcctttgcggcggagg

SEQ ID NO: 2703401 - DNA, 25 bp, Homo sapien
cataagtattggaaaaggatctggc

SEQ ID NO: 2703402 - DNA, 25 bp, Homo sapien
gtgtcatcaagacaggatccccgga

SEQ ID NO: 2703403 - DNA, 25 bp, Homo sapien
tttgtctcctagagggtggctgcca

SEQ ID NO: 2703404 - DNA, 25 bp, Homo sapien
tagggtctcctaaagccttgtcagt

SEQ ID NO: 2703405 - DNA, 25 bp, Homo sapien
cagaagtcttggcacgagatggctc

SEQ ID NO: 2703406 - DNA, 25 bp, Homo sapien
tcaggagtcttagcatagcatacag

SEQ ID NO: 2703407 - DNA, 25 bp, Homo sapien
aagttttaccccatgcaatcctgca

SEQ ID NO: 2703408 - DNA, 25 bp, Homo sapien
tagttcaaaaggcacgtaaggtcag

SEQ ID NO: 2703409 - DNA, 25 bp, Homo sapien
cagggccaatactcagtgagctgga

SEQ ID NO: 2703410 - DNA, 25 bp, Homo sapien
agctggaacaataaccaaaagggag

SEQ ID NO: 2703411 - DNA, 25 bp, Homo sapien
gagctggaacaataaccaaaaggga

SEQ ID NO: 2703412 - DNA, 25 bp, Homo sapien
gtctcagggccaatactcagtgagc

SEQ ID NO: 2703413 - DNA, 25 bp, Homo sapien
tgtaaaggaaatctctctggccacg

SEQ ID NO: 2703414 - DNA, 25 bp, Homo sapien
tggatccacttttcggaacgcgacc

SEQ ID NO: 2703415 - DNA, 25 bp, Homo sapien
taccggaagctgtcatgtaaaggaa

SEQ ID NO: 2703416 - DNA, 25 bp, Homo sapien
agcaccatggccacggacagcgaca

SEQ ID NO: 2703417 - DNA, 25 bp, Homo sapien
caactgttgcggatatactttcact

SEQ ID NO: 2703418 - DNA, 25 bp, Homo sapien
gagccaactgttgcggatatacttt

SEQ ID NO: 2703419 - DNA, 25 bp, Homo sapien
tcacaagcgcgctctctgcaatcag

SEQ ID NO: 2703420 - DNA, 25 bp, Homo sapien
cagttctcacaagcgcgctctctgc

SEQ ID NO: 2703421 - DNA, 25 bp, Homo sapien
tctgcagaggaaaacgtgaacccaa

SEQ ID NO: 2703422 - DNA, 25 bp, Homo sapien
tctcggcagacaagctaggtggtcc

SEQ ID NO: 2703423 - DNA, 25 bp, Homo sapien
taatccatggttctcagcgcgtaga

SEQ ID NO: 2703424 - DNA, 25 bp, Homo sapien
tagttctggagaccgttaaggccca

SEQ ID NO: 2703425 - DNA, 25 bp, Homo sapien
cacatttcatatggacaaggccgag

SEQ ID NO: 2703426 - DNA, 25 bp, Homo sapien
cagtgccagtggctgaacacatttc

SEQ ID NO: 2703427 - DNA, 25 bp, Homo sapien
gaagttgggcataaaacgcttaaga

SEQ ID NO: 2703428 - DNA, 25 bp, Homo sapien
caaggccgagataaggatccattgc

SEQ ID NO: 2703429 - DNA, 25 bp, Homo sapien
taatagaggagatatccaggtatcc

SEQ ID NO: 2703430 - DNA, 25 bp, Homo sapien
tgataggattagtttgtaacccaaa

SEQ ID NO: 2703431 - DNA, 25 bp, Homo sapien
gaattacataatatcagacagacca

SEQ ID NO: 2703432 - DNA, 25 bp, Homo sapien
atgccacaatattaattgccacagg

SEQ ID NO: 2703433 - DNA, 25 bp, Homo sapien
tgcgtactgcactaactgagcgacc

SEQ ID NO: 2703434 - DNA, 25 bp, Homo sapien
agtgctagccacagcgacttcaggt

SEQ ID NO: 2703435 - DNA, 25 bp, Homo sapien
aaatgcgcttggcttccgacttccg

SEQ ID NO: 2703436 - DNA, 25 bp, Homo sapien
gaaatctattctgtaagagcctgag

SEQ ID NO: 2703437 - DNA, 25 bp, Homo sapien
ttcctcttccttctggtaggaccgc

SEQ ID NO: 2703438 - DNA, 25 bp, Homo sapien
tcctcttccttctggtaggaccgct

SEQ ID NO: 2703439 - DNA, 25 bp, Homo sapien
ctcttccttctggtaggaccgcttt

SEQ ID NO: 2703440 - DNA, 25 bp, Homo sapien
cctcttccttctggtaggaccgctt

SEQ ID NO: 2703441 - DNA, 25 bp, Homo sapien
tagtaaatgaagtcttcggaagtcc

SEQ ID NO: 2703442 - DNA, 25 bp, Homo sapien
caaacatttgtgtagtccccattcg

SEQ ID NO: 2703443 - DNA, 25 bp, Homo sapien
taaaatctgagctcgctgcggacgt

SEQ ID NO: 2703444 - DNA, 25 bp, Homo sapien
ttccaactcgtatctgttcccagca

SEQ ID NO: 2703445 - DNA, 25 bp, Homo sapien
gccagatttttttctcgcacaattt

SEQ ID NO: 2703446 - DNA, 25 bp, Homo sapien
tctcgcacaatttcctgtatatcct

SEQ ID NO: 2703447 - DNA, 25 bp, Homo sapien
tttctcgcacaatttcctgtatatc

SEQ ID NO: 2703448 - DNA, 25 bp, Homo sapien
ttttttctcgcacaatttcctgtat

SEQ ID NO: 2703449 - DNA, 25 bp, Homo sapien
tggtaattctcttgcagtggatgct

SEQ ID NO: 2703450 - DNA, 25 bp, Homo sapien
taattgcctgagtatttgccacgtg

SEQ ID NO: 2703451 - DNA, 25 bp, Homo sapien
gaggcagataagtgtcaacatgacc

SEQ ID NO: 2703452 - DNA, 25 bp, Homo sapien
gaagtcttcccagaagtgctccagg

SEQ ID NO: 2703453 - DNA, 25 bp, Homo sapien
gctaggacagtctactcaaagtttt

SEQ ID NO: 2703454 - DNA, 25 bp, Homo sapien
gatcaaaggaaactaggcatgagca

SEQ ID NO: 2703455 - DNA, 25 bp, Homo sapien
taaccaaaacattcagaacggtgct

SEQ ID NO: 2703456 - DNA, 25 bp, Homo sapien
ccaaaaggaagaacgccaaggatga

SEQ ID NO: 2703457 - DNA, 25 bp, Homo sapien
gccaccccgcgtctcttccgagtat

SEQ ID NO: 2703458 - DNA, 25 bp, Homo sapien
ctacttctaaggctgcagcgccacc

SEQ ID NO: 2703459 - DNA, 25 bp, Homo sapien
gcgtctcttccgagtatttattttc

SEQ ID NO: 2703460 - DNA, 25 bp, Homo sapien
tgggtaaggagcgtcggctgggtgc

SEQ ID NO: 2703461 - DNA, 25 bp, Homo sapien
gttgtcgctaactctatctccccgt

SEQ ID NO: 2703462 - DNA, 25 bp, Homo sapien
ctcgctgatactgggatgagtggac

SEQ ID NO: 2703463 - DNA, 25 bp, Homo sapien
gagcgaccgccttagaaagcctcct

SEQ ID NO: 2703464 - DNA, 25 bp, Homo sapien
tggacaatcctagggcccggatttc

SEQ ID NO: 2703465 - DNA, 25 bp, Homo sapien
caaacgtgctccagctctggctcac

SEQ ID NO: 2703466 - DNA, 25 bp, Homo sapien
gacttgcctttgtttcggaacgcgc

SEQ ID NO: 2703467 - DNA, 25 bp, Homo sapien
atatcaggacttgcctttgtttcgg

SEQ ID NO: 2703468 - DNA, 25 bp, Homo sapien
caggacttgcctttgtttcggaacg

SEQ ID NO: 2703469 - DNA, 25 bp, Homo sapien
ttgcctttgtttcggaacgcgctcc

SEQ ID NO: 2703470 - DNA, 25 bp, Homo sapien
aggagccactctccgtttcctcggc

SEQ ID NO: 2703471 - DNA, 25 bp, Homo sapien
tggcccccctcacagcaagttctcc

SEQ ID NO: 2703472 - DNA, 25 bp, Homo sapien
cgtttcctcggccactgaatagtgc

SEQ ID NO: 2703473 - DNA, 25 bp, Homo sapien
cccctcacagcaagttctcctatct

SEQ ID NO: 2703474 - DNA, 25 bp, Homo sapien
gtctgcctatcgaactgcaaatgca

SEQ ID NO: 2703475 - DNA, 25 bp, Homo sapien
aatccccggtctgcctatcgaactg

SEQ ID NO: 2703476 - DNA, 25 bp, Homo sapien
catttaacaacaaatccccggtctg

SEQ ID NO: 2703477 - DNA, 25 bp, Homo sapien
aacaaatccccggtctgcctatcga

SEQ ID NO: 2703478 - DNA, 25 bp, Homo sapien
cagagacgatggcaacctgggatcc

SEQ ID NO: 2703479 - DNA, 25 bp, Homo sapien
taatccgtagctccgcctgaaaaaa

SEQ ID NO: 2703480 - DNA, 25 bp, Homo sapien
tccagggccgtgcttatcaccagag

SEQ ID NO: 2703481 - DNA, 25 bp, Homo sapien
taagtgtcgacatagttagttccgg

SEQ ID NO: 2703482 - DNA, 25 bp, Homo sapien
tccagcgactggagagcgaacaggt

SEQ ID NO: 2703483 - DNA, 25 bp, Homo sapien
tgctcggttttcagcctgggtgtcc

SEQ ID NO: 2703484 - DNA, 25 bp, Homo sapien
tgtcattgacgtcggagaccagcac

SEQ ID NO: 2703485 - DNA, 25 bp, Homo sapien
ccgttgtccgcgttgatggagacca

SEQ ID NO: 2703486 - DNA, 25 bp, Homo sapien
gacagccaggcgttctggcccgagt

SEQ ID NO: 2703487 - DNA, 25 bp, Homo sapien
tggcggtgcgcacctcgccattgtg

SEQ ID NO: 2703488 - DNA, 25 bp, Homo sapien
gcggaggctcgccattgtccttgac

SEQ ID NO: 2703489 - DNA, 25 bp, Homo sapien
tccaccaggagcacgtgcagcgtgg

SEQ ID NO: 2703490 - DNA, 25 bp, Homo sapien
ggtagacggtgagcaagtcggcctg

SEQ ID NO: 2703491 - DNA, 25 bp, Homo sapien
tagacggtgagcaagtcggcctggg

SEQ ID NO: 2703492 - DNA, 25 bp, Homo sapien
agacggtgagcaagtcggcctgggc

SEQ ID NO: 2703493 - DNA, 25 bp, Homo sapien
gtagacggtgagcaagtcggcctgg

SEQ ID NO: 2703494 - DNA, 25 bp, Homo sapien
acgaacaggagcaccgagaagagga

SEQ ID NO: 2703495 - DNA, 25 bp, Homo sapien
tctgcaccctgagcaacgaagttgg

SEQ ID NO: 2703496 - DNA, 25 bp, Homo sapien
tgaactcatttgtcccggagcctcc

SEQ ID NO: 2703497 - DNA, 25 bp, Homo sapien
tcaggaacttgaactcatttgtccc

SEQ ID NO: 2703498 - DNA, 25 bp, Homo sapien
tgaaactgggatttgcctcgctaac

SEQ ID NO: 2703499 - DNA, 25 bp, Homo sapien
gtaacatgcatagaattggaataag

SEQ ID NO: 2703500 - DNA, 25 bp, Homo sapien
tttccacaaattaaacgagactagc

SEQ ID NO: 2703501 - DNA, 25 bp, Homo sapien
cgagactagcctcagtagatcctta

SEQ ID NO: 2703502 - DNA, 25 bp, Homo sapien
gacacctccaatgggcaaagcagta

SEQ ID NO: 2703503 - DNA, 25 bp, Homo sapien
attaaattgcaatgaaactaaccaa

SEQ ID NO: 2703504 - DNA, 25 bp, Homo sapien
aaatgcaattaaattgcaatgaaac

SEQ ID NO: 2703505 - DNA, 25 bp, Homo sapien
tacttttacactttaaatgcaatta

SEQ ID NO: 2703506 - DNA, 25 bp, Homo sapien
aaattgcaatgaaactaaccaacaa

SEQ ID NO: 2703507 - DNA, 25 bp, Homo sapien
gcaataccaagctatgtttgagggt

SEQ ID NO: 2703508 - DNA, 25 bp, Homo sapien
gggaaaaatagaagtagtcagtgca

SEQ ID NO: 2703509 - DNA, 25 bp, Homo sapien
ctataatattccagtgactgtgtga

SEQ ID NO: 2703510 - DNA, 25 bp, Homo sapien
ggacaaagacatgtactccctcaaa

SEQ ID NO: 2703511 - DNA, 25 bp, Homo sapien
tcgccaagctgaacctcagacagag

SEQ ID NO: 2703512 - DNA, 25 bp, Homo sapien
ctttccgtcacgctcttccagggaa

SEQ ID NO: 2703513 - DNA, 25 bp, Homo sapien
agggaatgtcgccaagctgaacctc

SEQ ID NO: 2703514 - DNA, 25 bp, Homo sapien
ttccgtcacgctcttccagggaatg

SEQ ID NO: 2703515 - DNA, 25 bp, Homo sapien
gactgtagactttccggataggcct

SEQ ID NO: 2703516 - DNA, 25 bp, Homo sapien
gaatagcgtcttgactcggacccag

SEQ ID NO: 2703517 - DNA, 25 bp, Homo sapien
gatcgagcgctttatccagtactag

SEQ ID NO: 2703518 - DNA, 25 bp, Homo sapien
tagaactgcaacctcatagagcggc

SEQ ID NO: 2703519 - DNA, 25 bp, Homo sapien
tgaactcatttgtcccggagcctcc

SEQ ID NO: 2703520 - DNA, 25 bp, Homo sapien
tcaggaacttgaactcatttgtccc

SEQ ID NO: 2703521 - DNA, 25 bp, Homo sapien
ctctctgcaccctgagcaacgaagt

SEQ ID NO: 2703522 - DNA, 25 bp, Homo sapien
tctgcaccctgagcaacgaagttgg

SEQ ID NO: 2703523 - DNA, 25 bp, Homo sapien
tgaaactgggatttgcctcgctaac

SEQ ID NO: 2703524 - DNA, 25 bp, Homo sapien
gctacttgccttgaaccagaccaaa

SEQ ID NO: 2703525 - DNA, 25 bp, Homo sapien
cacagattaactaagacgaggctca

SEQ ID NO: 2703526 - DNA, 25 bp, Homo sapien
aattaagactgcgttggcaagccag

SEQ ID NO: 2703527 - DNA, 25 bp, Homo sapien
tactgttaatgaaacctaagccatc

SEQ ID NO: 2703528 - DNA, 25 bp, Homo sapien
agaagcagctttgaaccaagagtaa

SEQ ID NO: 2703529 - DNA, 25 bp, Homo sapien
cacagttgagtacttccctggctct

SEQ ID NO: 2703530 - DNA, 25 bp, Homo sapien
catggaaaatcagctacgtatgcaa

SEQ ID NO: 2703531 - DNA, 25 bp, Homo sapien
gataccacctgggactaaggtaatc

SEQ ID NO: 2703532 - DNA, 25 bp, Homo sapien
tgacaaatggtttcatgaggagatt

SEQ ID NO: 2703533 - DNA, 25 bp, Homo sapien
tgagcattaccatgaatgctgtaac

SEQ ID NO: 2703534 - DNA, 25 bp, Homo sapien
tatcaccagagtcccaagctatttt

SEQ ID NO: 2703535 - DNA, 25 bp, Homo sapien
tgcccagtcccagaacactaatttt

SEQ ID NO: 2703536 - DNA, 25 bp, Homo sapien
taaaatataggcaagaaccttatcg

SEQ ID NO: 2703537 - DNA, 25 bp, Homo sapien
gagggatacgcaggaaactagttgc

SEQ ID NO: 2703538 - DNA, 25 bp, Homo sapien
agagggatacgcaggaaactagttg

SEQ ID NO: 2703539 - DNA, 25 bp, Homo sapien
caagaaccttatcgttgaagaaaga

SEQ ID NO: 2703540 - DNA, 25 bp, Homo sapien
tcctataagggatatatcaatggca

SEQ ID NO: 2703541 - DNA, 25 bp, Homo sapien
tataagcagattattgtcagatcat

SEQ ID NO: 2703542 - DNA, 25 bp, Homo sapien
tatattcagccttgaacatgtctga

SEQ ID NO: 2703543 - DNA, 25 bp, Homo sapien
gcaccacttatcttgccacatataa

SEQ ID NO: 2703544 - DNA, 25 bp, Homo sapien
tcttgcttggaggaatcgtcacaca

SEQ ID NO: 2703545 - DNA, 25 bp, Homo sapien
cgttggtaaacctgcactgcttgta

SEQ ID NO: 2703546 - DNA, 25 bp, Homo sapien
tcagcaaccgcaacgagacttgaga

SEQ ID NO: 2703547 - DNA, 25 bp, Homo sapien
tatcgctgccccaagccgttggtaa

SEQ ID NO: 2703548 - DNA, 25 bp, Homo sapien
tttggatgaattctccctagcttct

SEQ ID NO: 2703549 - DNA, 25 bp, Homo sapien
cctgtttggatgaattctccctagc

SEQ ID NO: 2703550 - DNA, 25 bp, Homo sapien
tgcctgtttggatgaattctcccta

SEQ ID NO: 2703551 - DNA, 25 bp, Homo sapien
acttgcctgtttggatgaattctcc

SEQ ID NO: 2703552 - DNA, 25 bp, Homo sapien
ctccaacacagaataacgaataggc

SEQ ID NO: 2703553 - DNA, 25 bp, Homo sapien
gaataacgaataggctcgaggcgaa

SEQ ID NO: 2703554 - DNA, 25 bp, Homo sapien
caacacagaataacgaataggctcg

SEQ ID NO: 2703555 - DNA, 25 bp, Homo sapien
cacagaataacgaataggctcgagg

SEQ ID NO: 2703556 - DNA, 25 bp, Homo sapien
tcgaattcggaagatagagactacc

SEQ ID NO: 2703557 - DNA, 25 bp, Homo sapien
ggattcgaaccatgaccgtgccaga

SEQ ID NO: 2703558 - DNA, 25 bp, Homo sapien
gctaagaccctaacaattggagagt

SEQ ID NO: 2703559 - DNA, 25 bp, Homo sapien
tacacacggttcaataggaccacag

SEQ ID NO: 2703560 - DNA, 25 bp, Homo sapien
gaggctcgccattgtccttgacaag

SEQ ID NO: 2703561 - DNA, 25 bp, Homo sapien
ttgacaagcaccacgagcctgtgct

SEQ ID NO: 2703562 - DNA, 25 bp, Homo sapien
gacagccaggcgttctggcccgagt

SEQ ID NO: 2703563 - DNA, 25 bp, Homo sapien
atccaccaggagcacgtgcagcgtg

SEQ ID NO: 2703564 - DNA, 25 bp, Homo sapien
accgccacgaacaggagcaccgaga

SEQ ID NO: 2703565 - DNA, 25 bp, Homo sapien
ccgagaagaggaagagcgacgacac

SEQ ID NO: 2703566 - DNA, 25 bp, Homo sapien
caggtagacggtgagagagtcggcc

SEQ ID NO: 2703567 - DNA, 25 bp, Homo sapien
gtcccggtgccgcttacgtccacca

SEQ ID NO: 2703568 - DNA, 25 bp, Homo sapien
gtcctgaaccaagagattaggaaat

SEQ ID NO: 2703569 - DNA, 25 bp, Homo sapien
tcactagacatgtggtggtcacaag

SEQ ID NO: 2703570 - DNA, 25 bp, Homo sapien
aactttcaaacactctggccttgca

SEQ ID NO: 2703571 - DNA, 25 bp, Homo sapien
taagttacatggtaaagacaggcac

SEQ ID NO: 2703572 - DNA, 25 bp, Homo sapien
gagggcttagcctagtatagtcaac

SEQ ID NO: 2703573 - DNA, 25 bp, Homo sapien
caagtgcaactttggcataattgag

SEQ ID NO: 2703574 - DNA, 25 bp, Homo sapien
tttatagggagtaaaaggtagcaca

SEQ ID NO: 2703575 - DNA, 25 bp, Homo sapien
tactgttccagtctatacaaggaca

SEQ ID NO: 2703576 - DNA, 25 bp, Homo sapien
gtaaaggctgtccatatctgcaaag

SEQ ID NO: 2703577 - DNA, 25 bp, Homo sapien
gggcttactgatcacagcataaaac

SEQ ID NO: 2703578 - DNA, 25 bp, Homo sapien
ctttacctagcttactgggcttact

SEQ ID NO: 2703579 - DNA, 25 bp, Homo sapien
tactgggcttactgatcacagcata

SEQ ID NO: 2703580 - DNA, 25 bp, Homo sapien
tagcttactgggcttactgatcaca

SEQ ID NO: 2703581 - DNA, 25 bp, Homo sapien
gcgtctgagttatccgcagagccca

SEQ ID NO: 2703582 - DNA, 25 bp, Homo sapien
gaaggcgcagtttaactccgtacac

SEQ ID NO: 2703583 - DNA, 25 bp, Homo sapien
tgttcagacccggtccagaaggcgc

SEQ ID NO: 2703584 - DNA, 25 bp, Homo sapien
tgactgatttccacaagaacgaagc

SEQ ID NO: 2703585 - DNA, 25 bp, Homo sapien
tcctttgtaatgcattcgcgcgccc

SEQ ID NO: 2703586 - DNA, 25 bp, Homo sapien
tatggaatacctaactgcctcagag

SEQ ID NO: 2703587 - DNA, 25 bp, Homo sapien
ggcgtttttgctagcgcagtctcca

SEQ ID NO: 2703588 - DNA, 25 bp, Homo sapien
aatatacagggttctgtcgccccgc

SEQ ID NO: 2703589 - DNA, 25 bp, Homo sapien
gagctgcagatcagtttgaaaaaac

SEQ ID NO: 2703590 - DNA, 25 bp, Homo sapien
agtgttgctacctatgtcaaagtcc

SEQ ID NO: 2703591 - DNA, 25 bp, Homo sapien
gctacctatgtcaaagtcctgggct

SEQ ID NO: 2703592 - DNA, 25 bp, Homo sapien
ggaactctggggcatggtcatttat

SEQ ID NO: 2703593 - DNA, 25 bp, Homo sapien
gaatagagcataggctacactccca

SEQ ID NO: 2703594 - DNA, 25 bp, Homo sapien
cgggcacctgtacctcatagaatga

SEQ ID NO: 2703595 - DNA, 25 bp, Homo sapien
aatgcgaattgtggtggtcccggac

SEQ ID NO: 2703596 - DNA, 25 bp, Homo sapien
tctcgagcggagacaacgacaacta

SEQ ID NO: 2703597 - DNA, 25 bp, Homo sapien
gcggaggctcgccattgtccttgac

SEQ ID NO: 2703598 - DNA, 25 bp, Homo sapien
gacagccaggcgttctggcccgagt

SEQ ID NO: 2703599 - DNA, 25 bp, Homo sapien
aagggcgagttgtcgttggcgtcca

SEQ ID NO: 2703600 - DNA, 25 bp, Homo sapien
tggcggtgcgcacctcgccattgtg

SEQ ID NO: 2703601 - DNA, 25 bp, Homo sapien
ggtagacagtgagcgagtcggcctg

SEQ ID NO: 2703602 - DNA, 25 bp, Homo sapien
caccgaaaagaggaagagcgacgac

SEQ ID NO: 2703603 - DNA, 25 bp, Homo sapien
aagagcgacgacaccgaggccaatg

SEQ ID NO: 2703604 - DNA, 25 bp, Homo sapien
gccacgaacaggagcaccgaaaaga

SEQ ID NO: 2703605 - DNA, 25 bp, Homo sapien
ggggccctcgggcaccgagcagcga

SEQ ID NO: 2703606 - DNA, 25 bp, Homo sapien
agctctgggatagggtcccggtgcc

SEQ ID NO: 2703607 - DNA, 25 bp, Homo sapien
ggccctcgggcaccgagcagcgacc

SEQ ID NO: 2703608 - DNA, 25 bp, Homo sapien
tggtagctctgggatagggtcccgg

SEQ ID NO: 2703609 - DNA, 25 bp, Homo sapien
gcccctgagtctccggtcaaacaca

SEQ ID NO: 2703610 - DNA, 25 bp, Homo sapien
aggaacttgaactcgccggcccctg

SEQ ID NO: 2703611 - DNA, 25 bp, Homo sapien
aaaggttaggaataatcggcttcag

SEQ ID NO: 2703612 - DNA, 25 bp, Homo sapien
ttcaggaacttgaactcgccggccc

SEQ ID NO: 2703613 - DNA, 25 bp, Homo sapien
taatttaatccaaagctattccgga

SEQ ID NO: 2703614 - DNA, 25 bp, Homo sapien
ctaatttaatccaaagctattccgg

SEQ ID NO: 2703615 - DNA, 25 bp, Homo sapien
atccaaagctattccggaaggcagc

SEQ ID NO: 2703616 - DNA, 25 bp, Homo sapien
ttaatccaaagctattccggaaggc

SEQ ID NO: 2703617 - DNA, 25 bp, Homo sapien
ggcagaaaacaacgcgtcatcacga

SEQ ID NO: 2703618 - DNA, 25 bp, Homo sapien
tcaacacttggacagcatgaagttc

SEQ ID NO: 2703619 - DNA, 25 bp, Homo sapien
gaaatttttgtccatgacactctcg

SEQ ID NO: 2703620 - DNA, 25 bp, Homo sapien
gacactctcgaattctagatctgaa

SEQ ID NO: 2703621 - DNA, 25 bp, Homo sapien
tcatgcctgaggagacaatgtctaa

SEQ ID NO: 2703622 - DNA, 25 bp, Homo sapien
ccttgctagtatgagtgaatgctgc

SEQ ID NO: 2703623 - DNA, 25 bp, Homo sapien
gagaagagaatcagcccaacaacgt

SEQ ID NO: 2703624 - DNA, 25 bp, Homo sapien
tataacccggttggagccagacttc

SEQ ID NO: 2703625 - DNA, 25 bp, Homo sapien
tcacctctatgtagccagaaaaaca

SEQ ID NO: 2703626 - DNA, 25 bp, Homo sapien
tgaaacaaggccattatttcctgct

SEQ ID NO: 2703627 - DNA, 25 bp, Homo sapien
tatgaatgtgaccagcctccagggt

SEQ ID NO: 2703628 - DNA, 25 bp, Homo sapien
taataaacatattggactggtgtca

SEQ ID NO: 2703629 - DNA, 25 bp, Homo sapien
cttgtaccgccaccacgcgttcaaa

SEQ ID NO: 2703630 - DNA, 25 bp, Homo sapien
gtccaccgagtctgcagagctttca

SEQ ID NO: 2703631 - DNA, 25 bp, Homo sapien
gcttctggatgaaacggagtccacc

SEQ ID NO: 2703632 - DNA, 25 bp, Homo sapien
tacaacttgtctggcgacgactgcc

SEQ ID NO: 2703633 - DNA, 25 bp, Homo sapien
cgaccctctcggatgtctttgcaga

SEQ ID NO: 2703634 - DNA, 25 bp, Homo sapien
tttcttgttctgtactttagtttgc

SEQ ID NO: 2703635 - DNA, 25 bp, Homo sapien
taaaatgaagaaagccacttgcctt

SEQ ID NO: 2703636 - DNA, 25 bp, Homo sapien
aatgaagaaagccacttgccttttc

SEQ ID NO: 2703637 - DNA, 25 bp, Homo sapien
tcttgttctgtactttagtttgcat

SEQ ID NO: 2703638 - DNA, 25 bp, Homo sapien
gaaaggtagcacacacggctcagtg

SEQ ID NO: 2703639 - DNA, 25 bp, Homo sapien
tggtgtccccaaatcagtgaccgtg

SEQ ID NO: 2703640 - DNA, 25 bp, Homo sapien
tatatctctgactcgcaaggaagcc

SEQ ID NO: 2703641 - DNA, 25 bp, Homo sapien
gacgtcatcgacttgaaacagggcg

SEQ ID NO: 2703642 - DNA, 25 bp, Homo sapien
actgaacgggaagctattccgagag

SEQ ID NO: 2703643 - DNA, 25 bp, Homo sapien
tgaacgggaagctattccgagaggt

SEQ ID NO: 2703644 - DNA, 25 bp, Homo sapien
ttaactgaacgggaagctattccga

SEQ ID NO: 2703645 - DNA, 25 bp, Homo sapien
taactgaacgggaagctattccgag

SEQ ID NO: 2703646 - DNA, 25 bp, Homo sapien
taaacagtcctacatagcaatagtg

SEQ ID NO: 2703647 - DNA, 25 bp, Homo sapien
tgaaacaactcttaccaatagctag

SEQ ID NO: 2703648 - DNA, 25 bp, Homo sapien
taagcacttataattggcacgactt

SEQ ID NO: 2703649 - DNA, 25 bp, Homo sapien
tattgtcaagtaccctcaagtgaag

SEQ ID NO: 2703650 - DNA, 25 bp, Homo sapien
taattgctttacagccaactcagct

SEQ ID NO: 2703651 - DNA, 25 bp, Homo sapien
tgaccgacatgggatggctgcctct

SEQ ID NO: 2703652 - DNA, 25 bp, Homo sapien
ctatccccagtagtgaaaaagtgtt

SEQ ID NO: 2703653 - DNA, 25 bp, Homo sapien
cctcagggtccaaaagatgcagtat

SEQ ID NO: 2703654 - DNA, 25 bp, Homo sapien
ctttggaaagaatccgggcgcctct

SEQ ID NO: 2703655 - DNA, 25 bp, Homo sapien
tgaactgtgttgctacctacgtcca

SEQ ID NO: 2703656 - DNA, 25 bp, Homo sapien
tgcccgcctcccacagtagtaataa

SEQ ID NO: 2703657 - DNA, 25 bp, Homo sapien
aatacttaatcgtagcgctgcccgc

SEQ ID NO: 2703658 - DNA, 25 bp, Homo sapien
agtcccagttctgggcggtgaccca

SEQ ID NO: 2703659 - DNA, 25 bp, Homo sapien
gaagtcccagttctgggcggtgacc

SEQ ID NO: 2703660 - DNA, 25 bp, Homo sapien
tgggaagtcccagttctgggcggtg

SEQ ID NO: 2703661 - DNA, 25 bp, Homo sapien
ctatgagaacctgggaagtcccagt

SEQ ID NO: 2703662 - DNA, 25 bp, Homo sapien
cgtagcgccgctgagcaaattcagg

SEQ ID NO: 2703663 - DNA, 25 bp, Homo sapien
gaataggagagctccccgtgggtcc

SEQ ID NO: 2703664 - DNA, 25 bp, Homo sapien
ctaaatccctggcagagacggtgat

SEQ ID NO: 2703665 - DNA, 25 bp, Homo sapien
gacggtgatgacaagggaacctata

SEQ ID NO: 2703666 - DNA, 25 bp, Homo sapien
tacggtgcattttcctgaaagaccc

SEQ ID NO: 2703667 - DNA, 25 bp, Homo sapien
ggtgcattttcctgaaagaccccca

SEQ ID NO: 2703668 - DNA, 25 bp, Homo sapien
gtgcattttcctgaaagacccccac

SEQ ID NO: 2703669 - DNA, 25 bp, Homo sapien
ctacggtgcattttcctgaaagacc

SEQ ID NO: 2703670 - DNA, 25 bp, Homo sapien
gaaattccgaaaacagcgaccactg

SEQ ID NO: 2703671 - DNA, 25 bp, Homo sapien
cattgttcccggagtccggatccga

SEQ ID NO: 2703672 - DNA, 25 bp, Homo sapien
tagcgctccttctgttaacaaagtg

SEQ ID NO: 2703673 - DNA, 25 bp, Homo sapien
taaggacatagtaagttccggtgcg

SEQ ID NO: 2703674 - DNA, 25 bp, Homo sapien
gagaaccgcggtctgaggcgcccac

SEQ ID NO: 2703675 - DNA, 25 bp, Homo sapien
caaagccggagaaccgcggtctgag

SEQ ID NO: 2703676 - DNA, 25 bp, Homo sapien
ctcaaagccggagaaccgcggtctg

SEQ ID NO: 2703677 - DNA, 25 bp, Homo sapien
tgctcaaagccggagaaccgcggtc

SEQ ID NO: 2703678 - DNA, 25 bp, Homo sapien
agcacgaagggcgagttgtcgttgg

SEQ ID NO: 2703679 - DNA, 25 bp, Homo sapien
cacgaagggcgagttgtcgttggcg

SEQ ID NO: 2703680 - DNA, 25 bp, Homo sapien
aagggcgagttgtcgttggcgtcca

SEQ ID NO: 2703681 - DNA, 25 bp, Homo sapien
gcagcgggtacagcacgaagggcga

SEQ ID NO: 2703682 - DNA, 25 bp, Homo sapien
ccgcccggggcaccagctcggtgca

SEQ ID NO: 2703683 - DNA, 25 bp, Homo sapien
tcaccaggtagcccggctcggccgc

SEQ ID NO: 2703684 - DNA, 25 bp, Homo sapien
gacagccaggcgttctggcccgagt

SEQ ID NO: 2703685 - DNA, 25 bp, Homo sapien
gcggaggctcgccattgtccttgac

SEQ ID NO: 2703686 - DNA, 25 bp, Homo sapien
tccaccaggagcacgtgcagcgtgg

SEQ ID NO: 2703687 - DNA, 25 bp, Homo sapien
acgaacaggagcaccgagaagagga

SEQ ID NO: 2703688 - DNA, 25 bp, Homo sapien
tctcagagctttctgccaggtaaac

SEQ ID NO: 2703689 - DNA, 25 bp, Homo sapien
tcctttagaataacagccgatggtc

SEQ ID NO: 2703690 - DNA, 25 bp, Homo sapien
gtgtgaatatgtgactctacgcgaa

SEQ ID NO: 2703691 - DNA, 25 bp, Homo sapien
tacgcgaatgagagaattgggaact

SEQ ID NO: 2703692 - DNA, 25 bp, Homo sapien
gagttggagtttgcctcgctgtccc

SEQ ID NO: 2703693 - DNA, 25 bp, Homo sapien
tggtggaataatgatgttaatttgc

SEQ ID NO: 2703694 - DNA, 25 bp, Homo sapien
gttgacttaatgaaattagttctga

SEQ ID NO: 2703695 - DNA, 25 bp, Homo sapien
aatgaaattagttctgatggtggaa

SEQ ID NO: 2703696 - DNA, 25 bp, Homo sapien
tagttctgatggtggaataatgatg

SEQ ID NO: 2703697 - DNA, 25 bp, Homo sapien
tatatagaacctaaaatatccttgg

SEQ ID NO: 2703698 - DNA, 25 bp, Homo sapien
gaaaggtgcatgtctcctacatcaa

SEQ ID NO: 2703699 - DNA, 25 bp, Homo sapien
gatctatgttctatatcaatttagc

SEQ ID NO: 2703700 - DNA, 25 bp, Homo sapien
gattcttgagtcatttactttgtcc

SEQ ID NO: 2703701 - DNA, 25 bp, Homo sapien
taggtaggttactcagtgactggaa

SEQ ID NO: 2703702 - DNA, 25 bp, Homo sapien
tttggcatgaggaactaggattgac

SEQ ID NO: 2703703 - DNA, 25 bp, Homo sapien
tagtcccacagtctgaacaggatcg

SEQ ID NO: 2703704 - DNA, 25 bp, Homo sapien
tccagacttatgttagggtcaaggg

SEQ ID NO: 2703705 - DNA, 25 bp, Homo sapien
atacttccgtgatcactgtagtggg

SEQ ID NO: 2703706 - DNA, 25 bp, Homo sapien
catatacttccgtgatcactgtagt

SEQ ID NO: 2703707 - DNA, 25 bp, Homo sapien
tccaaaaacttcagcccagaatgga

SEQ ID NO: 2703708 - DNA, 25 bp, Homo sapien
tatacttccgtgatcactgtagtgg

SEQ ID NO: 2703709 - DNA, 25 bp, Homo sapien
tggactagttgttcattatgctcag

SEQ ID NO: 2703710 - DNA, 25 bp, Homo sapien
gtcaaacagctccttactggactag

SEQ ID NO: 2703711 - DNA, 25 bp, Homo sapien
ggcattactagaacacatcctccaa

SEQ ID NO: 2703712 - DNA, 25 bp, Homo sapien
gtcatccttggatcatccttcagca

SEQ ID NO: 2703713 - DNA, 25 bp, Homo sapien
ttgtggatgttattcccgttatcaa

SEQ ID NO: 2703714 - DNA, 25 bp, Homo sapien
tgcgttttgtggatgttattcccgt

SEQ ID NO: 2703715 - DNA, 25 bp, Homo sapien
cttgcgttttgtggatgttattccc

SEQ ID NO: 2703716 - DNA, 25 bp, Homo sapien
gtggatgttattcccgttatcaaga

SEQ ID NO: 2703717 - DNA, 25 bp, Homo sapien
tctggaatctgtaacatcctttctt

SEQ ID NO: 2703718 - DNA, 25 bp, Homo sapien
ataatagcaatgtttgtggggaagg

SEQ ID NO: 2703719 - DNA, 25 bp, Homo sapien
agcaatgtttgtggggaaggatcct

SEQ ID NO: 2703720 - DNA, 25 bp, Homo sapien
ctccagcggctctcacaaatggcag

SEQ ID NO: 2703721 - DNA, 25 bp, Homo sapien
ggctctcacaaatggcagcagcgga

SEQ ID NO: 2703722 - DNA, 25 bp, Homo sapien
cacaaatggcagcagcggaatcctt

SEQ ID NO: 2703723 - DNA, 25 bp, Homo sapien
cagcggctctcacaaatggcagcag

SEQ ID NO: 2703724 - DNA, 25 bp, Homo sapien
cacaaagaaataagacttgcctttt

SEQ ID NO: 2703725 - DNA, 25 bp, Homo sapien
aataagacttgccttttctgcacag

SEQ ID NO: 2703726 - DNA, 25 bp, Homo sapien
aagaaataagacttgccttttctgc

SEQ ID NO: 2703727 - DNA, 25 bp, Homo sapien
ttttctgcacagcacgctccactct

SEQ ID NO: 2703728 - DNA, 25 bp, Homo sapien
cacttgattcagcaccaattcggga

SEQ ID NO: 2703729 - DNA, 25 bp, Homo sapien
ggctgacacggagacaaccatggaa

SEQ ID NO: 2703730 - DNA, 25 bp, Homo sapien
tacgtctagaaccagaatgcgcacg

SEQ ID NO: 2703731 - DNA, 25 bp, Homo sapien
tagtaagtgaagacaggagcagctc

SEQ ID NO: 2703732 - DNA, 25 bp, Homo sapien
caaattattctgaaatgggcgattt

SEQ ID NO: 2703733 - DNA, 25 bp, Homo sapien
cccaaattattctgaaatgggcgat

SEQ ID NO: 2703734 - DNA, 25 bp, Homo sapien
aattattctgaaatgggcgattttc

SEQ ID NO: 2703735 - DNA, 25 bp, Homo sapien
aacccaaattattctgaaatgggcg

SEQ ID NO: 2703736 - DNA, 25 bp, Homo sapien
tcagaaacgtattcacagacgcgga

SEQ ID NO: 2703737 - DNA, 25 bp, Homo sapien
aacttgccaggtgatatctaatgac

SEQ ID NO: 2703738 - DNA, 25 bp, Homo sapien
aacagtatggaatcggagcagggtc

SEQ ID NO: 2703739 - DNA, 25 bp, Homo sapien
gatgtaaagacactcccttaaggga

SEQ ID NO: 2703740 - DNA, 25 bp, Homo sapien
cctcagaaatatgccagtgagtagt

SEQ ID NO: 2703741 - DNA, 25 bp, Homo sapien
tcagaaatatgccagtgagtagtcc

SEQ ID NO: 2703742 - DNA, 25 bp, Homo sapien
gaaatatgccagtgagtagtcctct

SEQ ID NO: 2703743 - DNA, 25 bp, Homo sapien
atacctcagaaatatgccagtgagt

SEQ ID NO: 2703744 - DNA, 25 bp, Homo sapien
gttctgtgggactgtaaagtcccca

SEQ ID NO: 2703745 - DNA, 25 bp, Homo sapien
taaagtccccagtatctgaggctgt

SEQ ID NO: 2703746 - DNA, 25 bp, Homo sapien
tgtgggactgtaaagtccccagtat

SEQ ID NO: 2703747 - DNA, 25 bp, Homo sapien
ggactgtaaagtccccagtatctga

SEQ ID NO: 2703748 - DNA, 25 bp, Homo sapien
cacaaccaggaagcttattggactg

SEQ ID NO: 2703749 - DNA, 25 bp, Homo sapien
gactgtcctcagagatctgcaccct

SEQ ID NO: 2703750 - DNA, 25 bp, Homo sapien
aagtgcaaccacagtttcaggcgca

SEQ ID NO: 2703751 - DNA, 25 bp, Homo sapien
tctcctgtcaagaaatcgaccttaa

SEQ ID NO: 2703752 - DNA, 25 bp, Homo sapien
agccattcctaaagttagagttttg

SEQ ID NO: 2703753 - DNA, 25 bp, Homo sapien
accaaagccattcctaaagttagag

SEQ ID NO: 2703754 - DNA, 25 bp, Homo sapien
ggtaatactggtttcaggaactgga

SEQ ID NO: 2703755 - DNA, 25 bp, Homo sapien
aaaagaatggccctgaatattaggt

SEQ ID NO: 2703756 - DNA, 25 bp, Homo sapien
cagaagcttcatgtatccccaggat

SEQ ID NO: 2703757 - DNA, 25 bp, Homo sapien
gcagcccaacggtgtcttaaagagg

SEQ ID NO: 2703758 - DNA, 25 bp, Homo sapien
aatctcaaggttgggtctgctacac

SEQ ID NO: 2703759 - DNA, 25 bp, Homo sapien
tccagaatgtcagaaccaagcagcc

SEQ ID NO: 2703760 - DNA, 25 bp, Homo sapien
gaaaacaaggacttgcctttgtctc

SEQ ID NO: 2703761 - DNA, 25 bp, Homo sapien
cctttgtctccgattgtgcatccat

SEQ ID NO: 2703762 - DNA, 25 bp, Homo sapien
tttgtctccgattgtgcatccatcc

SEQ ID NO: 2703763 - DNA, 25 bp, Homo sapien
ctttgtctccgattgtgcatccatc

SEQ ID NO: 2703764 - DNA, 25 bp, Homo sapien
atttgccacaaaagagcctctctcc

SEQ ID NO: 2703765 - DNA, 25 bp, Homo sapien
gatttgccacaaaagagcctctctc

SEQ ID NO: 2703766 - DNA, 25 bp, Homo sapien
agatttgccacaaaagagcctctct

SEQ ID NO: 2703767 - DNA, 25 bp, Homo sapien
aaatgatcctggccttgcgggtgga

SEQ ID NO: 2703768 - DNA, 25 bp, Homo sapien
tgatcctggccttgcgggtggacat

SEQ ID NO: 2703769 - DNA, 25 bp, Homo sapien
tgggaaatgatcctggccttgcggg

SEQ ID NO: 2703770 - DNA, 25 bp, Homo sapien
ctgggaaatgatcctggccttgcgg

SEQ ID NO: 2703771 - DNA, 25 bp, Homo sapien
caaagcatgattcagagggaactca

SEQ ID NO: 2703772 - DNA, 25 bp, Homo sapien
aaatccccagtttgagccttgagct

SEQ ID NO: 2703773 - DNA, 25 bp, Homo sapien
ttagaacccggaaatgagagcttgg

SEQ ID NO: 2703774 - DNA, 25 bp, Homo sapien
tcaatacggacctgagcagttccag

SEQ ID NO: 2703775 - DNA, 25 bp, Homo sapien
tctgtggcgctgacgctgccgatgt

SEQ ID NO: 2703776 - DNA, 25 bp, Homo sapien
ccgttgtctgcgttgatggagacca

SEQ ID NO: 2703777 - DNA, 25 bp, Homo sapien
gcggaggctcgccattgtccttgac

SEQ ID NO: 2703778 - DNA, 25 bp, Homo sapien
caccgaaaagaggaagagcgacgac

SEQ ID NO: 2703779 - DNA, 25 bp, Homo sapien
tttctgagcctcctgtcagacacac

SEQ ID NO: 2703780 - DNA, 25 bp, Homo sapien
ttgtttctgagcctcctgtcagaca

SEQ ID NO: 2703781 - DNA, 25 bp, Homo sapien
tgtttctgagcctcctgtcagacac

SEQ ID NO: 2703782 - DNA, 25 bp, Homo sapien
gtttctgagcctcctgtcagacaca

SEQ ID NO: 2703783 - DNA, 25 bp, Homo sapien
aagttggggataatcggcttcagga

SEQ ID NO: 2703784 - DNA, 25 bp, Homo sapien
gaagttggggataatcggcttcagg

SEQ ID NO: 2703785 - DNA, 25 bp, Homo sapien
ggggataatcggcttcaggaacttg

SEQ ID NO: 2703786 - DNA, 25 bp, Homo sapien
gttggggataatcggcttcaggaac

SEQ ID NO: 2703787 - DNA, 25 bp, Homo sapien
gattctatatgcaacacctcttcgg

SEQ ID NO: 2703788 - DNA, 25 bp, Homo sapien
cagagaaagggctagataccgccaa

SEQ ID NO: 2703789 - DNA, 25 bp, Homo sapien
tgtagtccagaaccaagcattaggc

SEQ ID NO: 2703790 - DNA, 25 bp, Homo sapien
gatttagctgtgttaggcctttcgc

SEQ ID NO: 2703791 - DNA, 25 bp, Homo sapien
gcaaacccagacttatgtgtaccag

SEQ ID NO: 2703792 - DNA, 25 bp, Homo sapien
tgccccagcacaaatagcaatcgca

SEQ ID NO: 2703793 - DNA, 25 bp, Homo sapien
gacttatgtgtaccagagatctagg

SEQ ID NO: 2703794 - DNA, 25 bp, Homo sapien
tagcaatcgcaaacccagacttatg

SEQ ID NO: 2703795 - DNA, 25 bp, Homo sapien
tggaaagctgaaccccctggtcttc

SEQ ID NO: 2703796 - DNA, 25 bp, Homo sapien
ttgtcttggaaagctgaaccccctg

SEQ ID NO: 2703797 - DNA, 25 bp, Homo sapien
ggaaagctgaaccccctggtcttca

SEQ ID NO: 2703798 - DNA, 25 bp, Homo sapien
tcttggaaagctgaaccccctggtc

SEQ ID NO: 2703799 - DNA, 25 bp, Homo sapien
tgccaaggacactccccagaaaaga

SEQ ID NO: 2703800 - DNA, 25 bp, Homo sapien
gccaaggacactccccagaaaagaa

SEQ ID NO: 2703801 - DNA, 25 bp, Homo sapien
ctgccaaggacactccccagaaaag

SEQ ID NO: 2703802 - DNA, 25 bp, Homo sapien
tatcatgccttcatcactgccacta

SEQ ID NO: 2703803 - DNA, 25 bp, Homo sapien
cgaaacactggcgagtgatcattta

SEQ ID NO: 2703804 - DNA, 25 bp, Homo sapien
tggatatatcatgccttcatcactg

SEQ ID NO: 2703805 - DNA, 25 bp, Homo sapien
gaccatctctttgtgccgaaacact

SEQ ID NO: 2703806 - DNA, 25 bp, Homo sapien
catccagcgctgtgagggttaagct

SEQ ID NO: 2703807 - DNA, 25 bp, Homo sapien
tccagtgctttgtccaacactagct

SEQ ID NO: 2703808 - DNA, 25 bp, Homo sapien
tccagcgctgtgagggttaagctga

SEQ ID NO: 2703809 - DNA, 25 bp, Homo sapien
tgctcctcccgatccagtgctttgt

SEQ ID NO: 2703810 - DNA, 25 bp, Homo sapien
aatgcgtatagtggaggtcccagac

SEQ ID NO: 2703811 - DNA, 25 bp, Homo sapien
caagaccacaatgcgtatagtggag

SEQ ID NO: 2703812 - DNA, 25 bp, Homo sapien
ttgacatccaagaccacaatgcgta

SEQ ID NO: 2703813 - DNA, 25 bp, Homo sapien
gtcattgacatccaagaccacaatg

SEQ ID NO: 2703814 - DNA, 25 bp, Homo sapien
ggagcctgggtctcatacagagcct

SEQ ID NO: 2703815 - DNA, 25 bp, Homo sapien
gagcctgggtctcatacagagcctg

SEQ ID NO: 2703816 - DNA, 25 bp, Homo sapien
ataggatacttctgcattgactcct

SEQ ID NO: 2703817 - DNA, 25 bp, Homo sapien
ggatacttctgcattgactcctgag

SEQ ID NO: 2703818 - DNA, 25 bp, Homo sapien
gatacttctgcattgactcctgagt

SEQ ID NO: 2703819 - DNA, 25 bp, Homo sapien
acttctgcattgactcctgagtctg

SEQ ID NO: 2703820 - DNA, 25 bp, Homo sapien
tcataatcaagcaattctctgagaa

SEQ ID NO: 2703821 - DNA, 25 bp, Homo sapien
tccccagaaaaaggattgatttgaa

SEQ ID NO: 2703822 - DNA, 25 bp, Homo sapien
caagcaattctctgagaaagatttc

SEQ ID NO: 2703823 - DNA, 25 bp, Homo sapien
agatttccccagaaaaaggattgat

SEQ ID NO: 2703824 - DNA, 25 bp, Homo sapien
cagaaaggcctccgccgtccattgc

SEQ ID NO: 2703825 - DNA, 25 bp, Homo sapien
atcttgcagaaaggcctccgccgtc

SEQ ID NO: 2703826 - DNA, 25 bp, Homo sapien
cttgcagaaaggcctccgccgtcca

SEQ ID NO: 2703827 - DNA, 25 bp, Homo sapien
tgcagaaaggcctccgccgtccatt

SEQ ID NO: 2703828 - DNA, 25 bp, Homo sapien
aagtgatgatatgatcagttcagga

SEQ ID NO: 2703829 - DNA, 25 bp, Homo sapien
gaggattgtcattggaatctaatac

SEQ ID NO: 2703830 - DNA, 25 bp, Homo sapien
cagccaatactatcccaggagagtt

SEQ ID NO: 2703831 - DNA, 25 bp, Homo sapien
gttcaggaggattgtcattggaatc

SEQ ID NO: 2703832 - DNA, 25 bp, Homo sapien
aaaattgtcaacagacggtttcaga

SEQ ID NO: 2703833 - DNA, 25 bp, Homo sapien
attgtcaacagacggtttcagaaaa

SEQ ID NO: 2703834 - DNA, 25 bp, Homo sapien
tgtcaacagacggtttcagaaaaaa

SEQ ID NO: 2703835 - DNA, 25 bp, Homo sapien
aaattgtcaacagacggtttcagaa

SEQ ID NO: 2703836 - DNA, 25 bp, Homo sapien
tgcagggttatgctgtgctcggttt

SEQ ID NO: 2703837 - DNA, 25 bp, Homo sapien
aagaacttgaactcgccggtctctg

SEQ ID NO: 2703838 - DNA, 25 bp, Homo sapien
ttgaactcgccggtctctgaacctc

SEQ ID NO: 2703839 - DNA, 25 bp, Homo sapien
gccggtctctgaacctccagtcaga

SEQ ID NO: 2703840 - DNA, 25 bp, Homo sapien
ggtctctgaacctccagtcagacac

SEQ ID NO: 2703841 - DNA, 25 bp, Homo sapien
tccaaagctattggggagagtagaa

SEQ ID NO: 2703842 - DNA, 25 bp, Homo sapien
caataattaaatccaaagctattgg

SEQ ID NO: 2703843 - DNA, 25 bp, Homo sapien
tattggggagagtagaattttcctc

SEQ ID NO: 2703844 - DNA, 25 bp, Homo sapien
gagagtagaattttcctctatttct

SEQ ID NO: 2703845 - DNA, 25 bp, Homo sapien
aagaagtaaatgtctttattaagtg

SEQ ID NO: 2703846 - DNA, 25 bp, Homo sapien
agaagtaaatgtctttattaagtgg

SEQ ID NO: 2703847 - DNA, 25 bp, Homo sapien
tagggaactatcaatgccgggaaac

SEQ ID NO: 2703848 - DNA, 25 bp, Homo sapien
taccttctttgtggtgggcatacac

SEQ ID NO: 2703849 - DNA, 25 bp, Homo sapien
tagccgaacgtggtgacatgcaact

SEQ ID NO: 2703850 - DNA, 25 bp, Homo sapien
gatggcaaaccaataagaacaccgg

SEQ ID NO: 2703851 - DNA, 25 bp, Homo sapien
ttcagtagttgtacccatttgggtg

SEQ ID NO: 2703852 - DNA, 25 bp, Homo sapien
tgtggcctccaccagatttcagtag

SEQ ID NO: 2703853 - DNA, 25 bp, Homo sapien
caaaccgtctctttagcctgcagcg

SEQ ID NO: 2703854 - DNA, 25 bp, Homo sapien
tattcagacaatttcctttagtgcc

SEQ ID NO: 2703855 - DNA, 25 bp, Homo sapien
ctttcccaatctttggcagctaaag

SEQ ID NO: 2703856 - DNA, 25 bp, Homo sapien
ttcccaatctttggcagctaaagct

SEQ ID NO: 2703857 - DNA, 25 bp, Homo sapien
aggaaaccctgcacctacgccgtgt

SEQ ID NO: 2703858 - DNA, 25 bp, Homo sapien
gaaaccctgcacctacgccgtgtag

SEQ ID NO: 2703859 - DNA, 25 bp, Homo sapien
tgccaaggacactccccaaaaaaga

SEQ ID NO: 2703860 - DNA, 25 bp, Homo sapien
ggaagcacaactctctgacagccat

SEQ ID NO: 2703861 - DNA, 25 bp, Homo sapien
ctgccaaggacactccccaaaaaag

SEQ ID NO: 2703862 - DNA, 25 bp, Homo sapien
cttgggaagcacaactctctgacag

SEQ ID NO: 2703863 - DNA, 25 bp, Homo sapien
cattgacgtccaagacaacgatgcg

SEQ ID NO: 2703864 - DNA, 25 bp, Homo sapien
caacgatgcgtacagtagaggtccc

SEQ ID NO: 2703865 - DNA, 25 bp, Homo sapien
gatacttccgcgttgactccagagt

SEQ ID NO: 2703866 - DNA, 25 bp, Homo sapien
tttgtcctgaaatactggcgcgtga

SEQ ID NO: 2703867 - DNA, 25 bp, Homo sapien
tgggacagggtctcagcgcccctca

SEQ ID NO: 2703868 - DNA, 25 bp, Homo sapien
gattctcttgaatgtagcaaaccat

SEQ ID NO: 2703869 - DNA, 25 bp, Homo sapien
ctccacagaaggttttagtaggaat

SEQ ID NO: 2703870 - DNA, 25 bp, Homo sapien
gtccagcgcgccttctgtaattagg

SEQ ID NO: 2703871 - DNA, 25 bp, Homo sapien
gcctgaatatccgaaataactggtt

SEQ ID NO: 2703872 - DNA, 25 bp, Homo sapien
ccctgtgcctgaatatccgaaataa

SEQ ID NO: 2703873 - DNA, 25 bp, Homo sapien
tgtgcctgaatatccgaaataactg

SEQ ID NO: 2703874 - DNA, 25 bp, Homo sapien
tgaatatccgaaataactggtttca

SEQ ID NO: 2703875 - DNA, 25 bp, Homo sapien
aatccaaagctatttcggaaggtgg

SEQ ID NO: 2703876 - DNA, 25 bp, Homo sapien
aaatccaaagctatttcggaaggtg

SEQ ID NO: 2703877 - DNA, 25 bp, Homo sapien
gagcaagtacactatagacagaagt

SEQ ID NO: 2703878 - DNA, 25 bp, Homo sapien
gatatgccttcttaaatagagcaag

SEQ ID NO: 2703879 - DNA, 25 bp, Homo sapien
aaatattggccaagtaaaagtagca

SEQ ID NO: 2703880 - DNA, 25 bp, Homo sapien
gaaacatggctatgtaacacaccaa

SEQ ID NO: 2703881 - DNA, 25 bp, Homo sapien
gtctctgacttgtccaccaaatcct

SEQ ID NO: 2703882 - DNA, 25 bp, Homo sapien
tcagctctgcggaacgcgtctctga

SEQ ID NO: 2703883 - DNA, 25 bp, Homo sapien
tctgcggaacgcgtctctgacttgt

SEQ ID NO: 2703884 - DNA, 25 bp, Homo sapien
agaaaggcttcagctctgcggaacg

SEQ ID NO: 2703885 - DNA, 25 bp, Homo sapien
tgctgagtgcgtgtcccttggttct

SEQ ID NO: 2703886 - DNA, 25 bp, Homo sapien
cttatctgctgagtgcgtgtccctt

SEQ ID NO: 2703887 - DNA, 25 bp, Homo sapien
gagtgcgtgtcccttggttctccat

SEQ ID NO: 2703888 - DNA, 25 bp, Homo sapien
gagaagcaggacttgccttatctgc

SEQ ID NO: 2703889 - DNA, 25 bp, Homo sapien
aaagctccaggtttcagagcccgcc

SEQ ID NO: 2703890 - DNA, 25 bp, Homo sapien
cagaaaagctccaggtttcagagcc

SEQ ID NO: 2703891 - DNA, 25 bp, Homo sapien
gctccaggtttcagagcccgcctga

SEQ ID NO: 2703892 - DNA, 25 bp, Homo sapien
tccaggtttcagagcccgcctgaga

SEQ ID NO: 2703893 - DNA, 25 bp, Homo sapien
taaatccttcgcactttctagtaag

SEQ ID NO: 2703894 - DNA, 25 bp, Homo sapien
tgcaaatgtagcacgcaaggctcga

SEQ ID NO: 2703895 - DNA, 25 bp, Homo sapien
caaggctcgatggaaccgcagagct

SEQ ID NO: 2703896 - DNA, 25 bp, Homo sapien
gattgcctacaaaactcccgctctg

SEQ ID NO: 2703897 - DNA, 25 bp, Homo sapien
gacgtcagagaccaacacagttgtg

SEQ ID NO: 2703898 - DNA, 25 bp, Homo sapien
gcgccttgtccagaactaactcggg

SEQ ID NO: 2703899 - DNA, 25 bp, Homo sapien
gagccaaggatgctattctcccgaa

SEQ ID NO: 2703900 - DNA, 25 bp, Homo sapien
gacaatcaaaatcagcgagccaagg

SEQ ID NO: 2703901 - DNA, 25 bp, Homo sapien
tcgaaaggtggagttttcttcacta

SEQ ID NO: 2703902 - DNA, 25 bp, Homo sapien
tttcttcactattcttcccaagacc

SEQ ID NO: 2703903 - DNA, 25 bp, Homo sapien
tgcctggatattagggataaccggt

SEQ ID NO: 2703904 - DNA, 25 bp, Homo sapien
aaatccaaagctatttcgaaaggtg

SEQ ID NO: 2703905 - DNA, 25 bp, Homo sapien
gaaatatggtgacgatccgtctcta

SEQ ID NO: 2703906 - DNA, 25 bp, Homo sapien
taaaggccagcctaagaaatatggt

SEQ ID NO: 2703907 - DNA, 25 bp, Homo sapien
aaattgaaaataggcctggccgcct

SEQ ID NO: 2703908 - DNA, 25 bp, Homo sapien
tagtcgtattgcataataacgtaac

SEQ ID NO: 2703909 - DNA, 25 bp, Homo sapien
caagcacaaagttagtattgaagta

SEQ ID NO: 2703910 - DNA, 25 bp, Homo sapien
tacaatacacaggtggttaggatca

SEQ ID NO: 2703911 - DNA, 25 bp, Homo sapien
ttaggatcataggatgcagacagtg

SEQ ID NO: 2703912 - DNA, 25 bp, Homo sapien
ggcggatcactgatatcaagagtta

SEQ ID NO: 2703913 - DNA, 25 bp, Homo sapien
gcagaattgcctcagcgcctcttcg

SEQ ID NO: 2703914 - DNA, 25 bp, Homo sapien
gaaacgtgcctctgatctgtctacc

SEQ ID NO: 2703915 - DNA, 25 bp, Homo sapien
tcgcagttgtgggaaacgtgcctct

SEQ ID NO: 2703916 - DNA, 25 bp, Homo sapien
ccaaatcctcggaagcctgaagatt

SEQ ID NO: 2703917 - DNA, 25 bp, Homo sapien
aaagcaggacttgccttatctgcag

SEQ ID NO: 2703918 - DNA, 25 bp, Homo sapien
tgcagagtgcctgcccctccgtttt

SEQ ID NO: 2703919 - DNA, 25 bp, Homo sapien
tatctgcagagtgcctgcccctccg

SEQ ID NO: 2703920 - DNA, 25 bp, Homo sapien
gcaggacttgccttatctgcagagt

SEQ ID NO: 2703921 - DNA, 25 bp, Homo sapien
tctgcaattcctccatcaccaaaaa

SEQ ID NO: 2703922 - DNA, 25 bp, Homo sapien
catcaccaaaaagttcccagtttca

SEQ ID NO: 2703923 - DNA, 25 bp, Homo sapien
acaaagctcccgctctgcaattcct

SEQ ID NO: 2703924 - DNA, 25 bp, Homo sapien
gcaattcctccatcaccaaaaagtt

SEQ ID NO: 2703925 - DNA, 25 bp, Homo sapien
taaatcccaggctgagacggtcaca

SEQ ID NO: 2703926 - DNA, 25 bp, Homo sapien
tagcacgaatgggatgtcctccggg

SEQ ID NO: 2703927 - DNA, 25 bp, Homo sapien
cttgtccagaactaactcagggtat

SEQ ID NO: 2703928 - DNA, 25 bp, Homo sapien
tcaggagcgttgtcgtttacatcca

SEQ ID NO: 2703929 - DNA, 25 bp, Homo sapien
aatttgaacttatttgacctggagc

SEQ ID NO: 2703930 - DNA, 25 bp, Homo sapien
gtttcagaaatttgaacttatttga

SEQ ID NO: 2703931 - DNA, 25 bp, Homo sapien
tcagaaatttgaacttatttgacct

SEQ ID NO: 2703932 - DNA, 25 bp, Homo sapien
gaaatttgaacttatttgacctgga

SEQ ID NO: 2703933 - DNA, 25 bp, Homo sapien
cccaaattattctgaaatgggggat

SEQ ID NO: 2703934 - DNA, 25 bp, Homo sapien
caaattattctgaaatgggggattt

SEQ ID NO: 2703935 - DNA, 25 bp, Homo sapien
ccaaattattctgaaatgggggatt

SEQ ID NO: 2703936 - DNA, 25 bp, Homo sapien
caaaaacagtatggaatgggagcaa

SEQ ID NO: 2703937 - DNA, 25 bp, Homo sapien
cagaaacttgccaggtgatatccaa

SEQ ID NO: 2703938 - DNA, 25 bp, Homo sapien
gggtaggtatactcgaacagcattc

SEQ ID NO: 2703939 - DNA, 25 bp, Homo sapien
tacaggcacctcacgataagttcct

SEQ ID NO: 2703940 - DNA, 25 bp, Homo sapien
caaatgtaagcatgggtgactctgg

SEQ ID NO: 2703941 - DNA, 25 bp, Homo sapien
tcccaccagtgatatgcagtaatac

SEQ ID NO: 2703942 - DNA, 25 bp, Homo sapien
aattttaccctgagaccatgaaagc

SEQ ID NO: 2703943 - DNA, 25 bp, Homo sapien
cagcagtgcagtataggtaagaaaa

SEQ ID NO: 2703944 - DNA, 25 bp, Homo sapien
tatctgaggctgtggttattctaca

SEQ ID NO: 2703945 - DNA, 25 bp, Homo sapien
gtatctgaggctgtggttattctac

SEQ ID NO: 2703946 - DNA, 25 bp, Homo sapien
tcttgctggattcagcttcctggga

SEQ ID NO: 2703947 - DNA, 25 bp, Homo sapien
ctggattcagcttcctgggaggacg

SEQ ID NO: 2703948 - DNA, 25 bp, Homo sapien
tgttcttgctggattcagcttcctg

SEQ ID NO: 2703949 - DNA, 25 bp, Homo sapien
cttcctgggaggacggttctgtggg

SEQ ID NO: 2703950 - DNA, 25 bp, Homo sapien
cagaaaaggttccagcatctcttgc

SEQ ID NO: 2703951 - DNA, 25 bp, Homo sapien
gcgatcagcacggtcatattgagct

SEQ ID NO: 2703952 - DNA, 25 bp, Homo sapien
ggaagcctaccggactgtcctcaga

SEQ ID NO: 2703953 - DNA, 25 bp, Homo sapien
aagtgcaaccacagtttcaggcgcg

SEQ ID NO: 2703954 - DNA, 25 bp, Homo sapien
gacctgagggcgaacaggtggccgt

SEQ ID NO: 2703955 - DNA, 25 bp, Homo sapien
ccacgcggaactggaacccctgcag

SEQ ID NO: 2703956 - DNA, 25 bp, Homo sapien
aggtggccgttgtccgcgttgatgg

SEQ ID NO: 2703957 - DNA, 25 bp, Homo sapien
cgttgtccgcgttgatggagaccag

SEQ ID NO: 2703958 - DNA, 25 bp, Homo sapien
tggcggtgcgcacctcgccattgtg

SEQ ID NO: 2703959 - DNA, 25 bp, Homo sapien
cgaacagaccgagctccgtggcctt

SEQ ID NO: 2703960 - DNA, 25 bp, Homo sapien
gcggaggctcgccattgtccttgac

SEQ ID NO: 2703961 - DNA, 25 bp, Homo sapien
gacagccaggcgttctggcccgagt

SEQ ID NO: 2703962 - DNA, 25 bp, Homo sapien
accgccacgaacaggagcaccgaaa

SEQ ID NO: 2703963 - DNA, 25 bp, Homo sapien
gtagacggtgagcaagtcggcctgg

SEQ ID NO: 2703964 - DNA, 25 bp, Homo sapien
agcgaagacaccgaggccaacgcca

SEQ ID NO: 2703965 - DNA, 25 bp, Homo sapien
gagcaccgaaaagaggaagagcgaa

SEQ ID NO: 2703966 - DNA, 25 bp, Homo sapien
aagttggggataatcggcttcagga

SEQ ID NO: 2703967 - DNA, 25 bp, Homo sapien
ggaacttgaactcattggtccctga

SEQ ID NO: 2703968 - DNA, 25 bp, Homo sapien
gggataatcggcttcaggaacttga

SEQ ID NO: 2703969 - DNA, 25 bp, Homo sapien
tgtatttctttcccagggcactggg

SEQ ID NO: 2703970 - DNA, 25 bp, Homo sapien
tatggaatgtaaaagtcaactatgg

SEQ ID NO: 2703971 - DNA, 25 bp, Homo sapien
gaaaaatcaagagtaaatccgtaca

SEQ ID NO: 2703972 - DNA, 25 bp, Homo sapien
aatccgtacaatattacatacacac

SEQ ID NO: 2703973 - DNA, 25 bp, Homo sapien
aattacaaattaagaccatctgggt

SEQ ID NO: 2703974 - DNA, 25 bp, Homo sapien
ataagcataatagtgggtgaagttc

SEQ ID NO: 2703975 - DNA, 25 bp, Homo sapien
cataagcataatagtgggtgaagtt

SEQ ID NO: 2703976 - DNA, 25 bp, Homo sapien
aatgtgcctgcacaatcctctccag

SEQ ID NO: 2703977 - DNA, 25 bp, Homo sapien
ccctttcgaatcaagtgataacact

SEQ ID NO: 2703978 - DNA, 25 bp, Homo sapien
tagattgcactagagctttgtgaca

SEQ ID NO: 2703979 - DNA, 25 bp, Homo sapien
cacttagagttgtatcataggatat

SEQ ID NO: 2703980 - DNA, 25 bp, Homo sapien
cacagggaagctgctagaataactc

SEQ ID NO: 2703981 - DNA, 25 bp, Homo sapien
cactgttgcaccagcgagattttct

SEQ ID NO: 2703982 - DNA, 25 bp, Homo sapien
gaataactcccacctttggaggcca

SEQ ID NO: 2703983 - DNA, 25 bp, Homo sapien
aagcaactgagtctagtctgtggca

SEQ ID NO: 2703984 - DNA, 25 bp, Homo sapien
gataatgcaagtcccctagaaaggt

SEQ ID NO: 2703985 - DNA, 25 bp, Homo sapien
gatttagaccagtgggacggacctc

SEQ ID NO: 2703986 - DNA, 25 bp, Homo sapien
tgcagcaccccatgtgtaagagagg

SEQ ID NO: 2703987 - DNA, 25 bp, Homo sapien
taaggtatcaggcaagttcatcgga

SEQ ID NO: 2703988 - DNA, 25 bp, Homo sapien
gaatccagaaaagtccatacactgc

SEQ ID NO: 2703989 - DNA, 25 bp, Homo sapien
tcttatcctgtagcgccaccatgtg

SEQ ID NO: 2703990 - DNA, 25 bp, Homo sapien
ggaacattcgaaacaaatcccagac

SEQ ID NO: 2703991 - DNA, 25 bp, Homo sapien
ctgaatagcgaagctcaccgtgcca

SEQ ID NO: 2703992 - DNA, 25 bp, Homo sapien
ggttcctttaggcaatctcttgtgg

SEQ ID NO: 2703993 - DNA, 25 bp, Homo sapien
tgaagctcagccgtaattttggaag

SEQ ID NO: 2703994 - DNA, 25 bp, Homo sapien
tccagcagctctgtaggcgaagctc

SEQ ID NO: 2703995 - DNA, 25 bp, Homo sapien
ctgaagctctggtttttaacaggaa

SEQ ID NO: 2703996 - DNA, 25 bp, Homo sapien
tagaacttgcctttttcgcagatcg

SEQ ID NO: 2703997 - DNA, 25 bp, Homo sapien
tttcgcagatcgagtgcccctctga

SEQ ID NO: 2703998 - DNA, 25 bp, Homo sapien
tgcctttttcgcagatcgagtgccc

SEQ ID NO: 2703999 - DNA, 25 bp, Homo sapien
gatcgagtgcccctctgatctccat

SEQ ID NO: 2704000 - DNA, 25 bp, Homo sapien
caaagttgtcccagacttgggcggg

SEQ ID NO: 2704001 - DNA, 25 bp, Homo sapien
gctctatctaggaccagctctgggt

SEQ ID NO: 2704002 - DNA, 25 bp, Homo sapien
tattatcatcagacactacccgggc

SEQ ID NO: 2704003 - DNA, 25 bp, Homo sapien
tatctttctgtcactactgtcggga

SEQ ID NO: 2704004 - DNA, 25 bp, Homo sapien
tacagtacaaccaagaatccacaaa

SEQ ID NO: 2704005 - DNA, 25 bp, Homo sapien
tacatttccacgtcattatagccac

SEQ ID NO: 2704006 - DNA, 25 bp, Homo sapien
taatcatgcatgcaactacagtaca

SEQ ID NO: 2704007 - DNA, 25 bp, Homo sapien
caaaaagtaccatcagcttgccaag

SEQ ID NO: 2704008 - DNA, 25 bp, Homo sapien
tataagactcttcctccacaacagg

SEQ ID NO: 2704009 - DNA, 25 bp, Homo sapien
taaacgcactacattttcgacccag

SEQ ID NO: 2704010 - DNA, 25 bp, Homo sapien
aaactaataaggttctccagaactg

SEQ ID NO: 2704011 - DNA, 25 bp, Homo sapien
tggagggatagcatctttgttaccc

SEQ ID NO: 2704012 - DNA, 25 bp, Homo sapien
cagtgataattgcataaagtagagg

SEQ ID NO: 2704013 - DNA, 25 bp, Homo sapien
gaaaactaggccagacgtaatggct

SEQ ID NO: 2704014 - DNA, 25 bp, Homo sapien
gaaggctattttacccaggataaga

SEQ ID NO: 2704015 - DNA, 25 bp, Homo sapien
catgatgaggcaactataaaccata

SEQ ID NO: 2704016 - DNA, 25 bp, Homo sapien
tttcctctgctatggaatagctccc

SEQ ID NO: 2704017 - DNA, 25 bp, Homo sapien
aatagctcccggtctcagaacacac

SEQ ID NO: 2704018 - DNA, 25 bp, Homo sapien
tcaccacgttggctataaaggtacc

SEQ ID NO: 2704019 - DNA, 25 bp, Homo sapien
ggtctcagaacacaccaaagaccct

SEQ ID NO: 2704020 - DNA, 25 bp, Homo sapien
ggcccccccttgcagccaggtcttc

SEQ ID NO: 2704021 - DNA, 25 bp, Homo sapien
ccccttgcagccaggtcttccacat

SEQ ID NO: 2704022 - DNA, 25 bp, Homo sapien
ccccccttgcagccaggtcttccac

SEQ ID NO: 2704023 - DNA, 25 bp, Homo sapien
ctggcccccccttgcagccaggtct

SEQ ID NO: 2704024 - DNA, 25 bp, Homo sapien
cgatccagggattggtccagtacca

SEQ ID NO: 2704025 - DNA, 25 bp, Homo sapien
ttaatcagtgtagtcccagacctgg

SEQ ID NO: 2704026 - DNA, 25 bp, Homo sapien
tgtccaggaccacaacgttaatcag

SEQ ID NO: 2704027 - DNA, 25 bp, Homo sapien
ggttcctagagtagcaccttcggag

SEQ ID NO: 2704028 - DNA, 25 bp, Homo sapien
acaggagattgggaatcaccggctt

SEQ ID NO: 2704029 - DNA, 25 bp, Homo sapien
gattgggaatcaccggcttcaggaa

SEQ ID NO: 2704030 - DNA, 25 bp, Homo sapien
tcgcgggacaggagattgggaatca

SEQ ID NO: 2704031 - DNA, 25 bp, Homo sapien
tcgctgtcgcgggacaggagattgg

SEQ ID NO: 2704032 - DNA, 25 bp, Homo sapien
aatgactaagcaaattccggctctc

SEQ ID NO: 2704033 - DNA, 25 bp, Homo sapien
tcagatccctaattgcattccacgc

SEQ ID NO: 2704034 - DNA, 25 bp, Homo sapien
ggatagaggatccacagtcagaaca

SEQ ID NO: 2704035 - DNA, 25 bp, Homo sapien
tgagcccagtgtgcgattaaacttg

SEQ ID NO: 2704036 - DNA, 25 bp, Homo sapien
gcacagtatattccactccgcacaa

SEQ ID NO: 2704037 - DNA, 25 bp, Homo sapien
cctgggtcctttgttagattggcca

SEQ ID NO: 2704038 - DNA, 25 bp, Homo sapien
tccactccgcacaagtctgagacag

SEQ ID NO: 2704039 - DNA, 25 bp, Homo sapien
tacagtatattccactccgcacagt

SEQ ID NO: 2704040 - DNA, 25 bp, Homo sapien
gtctcatttacttgcaggtctccgg

SEQ ID NO: 2704041 - DNA, 25 bp, Homo sapien
ccaatgtctcatttacttgcaggtc

SEQ ID NO: 2704042 - DNA, 25 bp, Homo sapien
aattcttcccggtccaatgtctcat

SEQ ID NO: 2704043 - DNA, 25 bp, Homo sapien
tacttgcaggtctccggtctgaagt

SEQ ID NO: 2704044 - DNA, 25 bp, Homo sapien
cctgctcctcccgatccagggcttt

SEQ ID NO: 2704045 - DNA, 25 bp, Homo sapien
gtagttttggatgttattgatggcc

SEQ ID NO: 2704046 - DNA, 25 bp, Homo sapien
tgagagcgtggacatgggagtaggg

SEQ ID NO: 2704047 - DNA, 25 bp, Homo sapien
ttggatgttattgatggccacatcc

SEQ ID NO: 2704048 - DNA, 25 bp, Homo sapien
tcccagttctgggaggagtcccgcc

SEQ ID NO: 2704049 - DNA, 25 bp, Homo sapien
ccagttctgggaggagtcccgccat

SEQ ID NO: 2704050 - DNA, 25 bp, Homo sapien
ttctgggaggagtcccgccatctac

SEQ ID NO: 2704051 - DNA, 25 bp, Homo sapien
gttctgggaggagtcccgccatcta

SEQ ID NO: 2704052 - DNA, 25 bp, Homo sapien
attgtcattgatgtccaagatttca

SEQ ID NO: 2704053 - DNA, 25 bp, Homo sapien
ttgatgtccaagatttcaatgagga

SEQ ID NO: 2704054 - DNA, 25 bp, Homo sapien
tacacaaactcaggtgcattgtcat

SEQ ID NO: 2704055 - DNA, 25 bp, Homo sapien
ctacacaaactcaggtgcattgtca

SEQ ID NO: 2704056 - DNA, 25 bp, Homo sapien
tagcggaaacagtggcaacaaggga

SEQ ID NO: 2704057 - DNA, 25 bp, Homo sapien
gttttctgatatctgcacctgatag

SEQ ID NO: 2704058 - DNA, 25 bp, Homo sapien
ctgatatctgcacctgatagagtgg

SEQ ID NO: 2704059 - DNA, 25 bp, Homo sapien
caacaagggaatccagggggctgtt

SEQ ID NO: 2704060 - DNA, 25 bp, Homo sapien
ccccatcagaggctttaatatccac

SEQ ID NO: 2704061 - DNA, 25 bp, Homo sapien
gaatcgcggtcttgaatgctgaaaa

SEQ ID NO: 2704062 - DNA, 25 bp, Homo sapien
gagctgcaacggtctcaggagaatt

SEQ ID NO: 2704063 - DNA, 25 bp, Homo sapien
aatgaagccatggtcagttccggag

SEQ ID NO: 2704064 - DNA, 25 bp, Homo sapien
tccccaagtccgtggctgtgttggt

SEQ ID NO: 2704065 - DNA, 25 bp, Homo sapien
cctaggagtccccaagtccgtggct

SEQ ID NO: 2704066 - DNA, 25 bp, Homo sapien
cagtggtccttctgttaacagccag

SEQ ID NO: 2704067 - DNA, 25 bp, Homo sapien
ttggtgatgttgtactcggctctaa

SEQ ID NO: 2704068 - DNA, 25 bp, Homo sapien
ctgccaatatgcagggcggggctgt

SEQ ID NO: 2704069 - DNA, 25 bp, Homo sapien
tgccaatatgcagggcggggctgtt

SEQ ID NO: 2704070 - DNA, 25 bp, Homo sapien
caatatgcagggcggggctgttgtt

SEQ ID NO: 2704071 - DNA, 25 bp, Homo sapien
ccaatatgcagggcggggctgttgt

SEQ ID NO: 2704072 - DNA, 25 bp, Homo sapien
ttgatggagaccagggaggcgaggg

SEQ ID NO: 2704073 - DNA, 25 bp, Homo sapien
caggtgcgggttccggggcggcagc

SEQ ID NO: 2704074 - DNA, 25 bp, Homo sapien
cggcagcagcgagtaggtgacctgg

SEQ ID NO: 2704075 - DNA, 25 bp, Homo sapien
gtgacctggatgttggtgcccgagt

SEQ ID NO: 2704076 - DNA, 25 bp, Homo sapien
ctgagggcgaacaggtggccgttgt

SEQ ID NO: 2704077 - DNA, 25 bp, Homo sapien
gcgcccacgcggaactcgaactcct

SEQ ID NO: 2704078 - DNA, 25 bp, Homo sapien
ccagcgacctgagggcgaacaggtg

SEQ ID NO: 2704079 - DNA, 25 bp, Homo sapien
ccacgcggaactcgaactcctgcag

SEQ ID NO: 2704080 - DNA, 25 bp, Homo sapien
gaagagtgagctgtcgttggcgtcc

SEQ ID NO: 2704081 - DNA, 25 bp, Homo sapien
aagagtgagctgtcgttggcgtcca

SEQ ID NO: 2704082 - DNA, 25 bp, Homo sapien
gcatcagctcggtgcagggcgcgga

SEQ ID NO: 2704083 - DNA, 25 bp, Homo sapien
gcgcggagccgttctgcagcgggaa

SEQ ID NO: 2704084 - DNA, 25 bp, Homo sapien
gcccggggcatcagctcggtgcagg

SEQ ID NO: 2704085 - DNA, 25 bp, Homo sapien
agccgttctgcagcgggaacagcac

SEQ ID NO: 2704086 - DNA, 25 bp, Homo sapien
ctgtcagtgcattgtgcgcccacac

SEQ ID NO: 2704087 - DNA, 25 bp, Homo sapien
agcgcggaggctcgccattgtcctt

SEQ ID NO: 2704088 - DNA, 25 bp, Homo sapien
gcggaggctcgccattgtccttgac

SEQ ID NO: 2704089 - DNA, 25 bp, Homo sapien
cgcggaggctcgccattgtccttga

SEQ ID NO: 2704090 - DNA, 25 bp, Homo sapien
gcgcggaggctcgccattgtccttg

SEQ ID NO: 2704091 - DNA, 25 bp, Homo sapien
cgccacgaacaggagcaccgagaag

SEQ ID NO: 2704092 - DNA, 25 bp, Homo sapien
cgaacaggagcaccgagaagaggaa

SEQ ID NO: 2704093 - DNA, 25 bp, Homo sapien
agacggtgagcaagtcggcctgggc

SEQ ID NO: 2704094 - DNA, 25 bp, Homo sapien
ggtagacggtgagcaagtcggcctg

SEQ ID NO: 2704095 - DNA, 25 bp, Homo sapien
accagatgcctggaaaggggtcctc

SEQ ID NO: 2704096 - DNA, 25 bp, Homo sapien
cagatgcctggaaaggggtcctcgg

SEQ ID NO: 2704097 - DNA, 25 bp, Homo sapien
agatgcctggaaaggggtcctcggg

SEQ ID NO: 2704098 - DNA, 25 bp, Homo sapien
ccagatgcctggaaaggggtcctcg

SEQ ID NO: 2704099 - DNA, 25 bp, Homo sapien
ctctgggatagggtcctggtgtcgc

SEQ ID NO: 2704100 - DNA, 25 bp, Homo sapien
cccggatgcttagggataacagact

SEQ ID NO: 2704101 - DNA, 25 bp, Homo sapien
gaattcatttgtcccggagcctcgc

SEQ ID NO: 2704102 - DNA, 25 bp, Homo sapien
tcacagcgcccggatgcttagggat

SEQ ID NO: 2704103 - DNA, 25 bp, Homo sapien
gagcctcgcgtcagaaacacttcat

SEQ ID NO: 2704104 - DNA, 25 bp, Homo sapien
caaaaaacataacagagacttaata

SEQ ID NO: 2704105 - DNA, 25 bp, Homo sapien
tgctctgaaaaatctacagattctt

SEQ ID NO: 2704106 - DNA, 25 bp, Homo sapien
tatcctaaatgctctgaaaaatcta

SEQ ID NO: 2704107 - DNA, 25 bp, Homo sapien
tattgataaaggactaacctttatc

SEQ ID NO: 2704108 - DNA, 25 bp, Homo sapien
gattaggccagctaggatcatctta

SEQ ID NO: 2704109 - DNA, 25 bp, Homo sapien
cactaaagatgctcgtatggccggg

SEQ ID NO: 2704110 - DNA, 25 bp, Homo sapien
tcaggtgggctagatagacgctaca

SEQ ID NO: 2704111 - DNA, 25 bp, Homo sapien
gacgctacaaaagggagctatgatt

SEQ ID NO: 2704112 - DNA, 25 bp, Homo sapien
gaatagcattctccggagacactgg

SEQ ID NO: 2704113 - DNA, 25 bp, Homo sapien
cagaggcagtgatcgatctgtgcgt

SEQ ID NO: 2704114 - DNA, 25 bp, Homo sapien
gacactggtccgtgctctgctaaca

SEQ ID NO: 2704115 - DNA, 25 bp, Homo sapien
cgttgataacctgttcggaaatgta

SEQ ID NO: 2704116 - DNA, 25 bp, Homo sapien
tctgtacacgcccctttcaaggaac

SEQ ID NO: 2704117 - DNA, 25 bp, Homo sapien
ccctttcaaggaaccggagtcagag

SEQ ID NO: 2704118 - DNA, 25 bp, Homo sapien
cctttcaaggaaccggagtcagagc

SEQ ID NO: 2704119 - DNA, 25 bp, Homo sapien
tttacttctgtacacgcccctttca

SEQ ID NO: 2704120 - DNA, 25 bp, Homo sapien
ctttgttcgggaaagcgctcccctg

SEQ ID NO: 2704121 - DNA, 25 bp, Homo sapien
tttgttcgggaaagcgctcccctgc

SEQ ID NO: 2704122 - DNA, 25 bp, Homo sapien
cttgcctttgttcgggaaagcgctc

SEQ ID NO: 2704123 - DNA, 25 bp, Homo sapien
tgcctttgttcgggaaagcgctccc

SEQ ID NO: 2704124 - DNA, 25 bp, Homo sapien
gaccttgacaactagggagcctact

SEQ ID NO: 2704125 - DNA, 25 bp, Homo sapien
gcaagccttgttcgttatcctcaga

SEQ ID NO: 2704126 - DNA, 25 bp, Homo sapien
cattatacagggctcagtagggcca

SEQ ID NO: 2704127 - DNA, 25 bp, Homo sapien
tgtcaaggttaatctgagctcggcc

SEQ ID NO: 2704128 - DNA, 25 bp, Homo sapien
aggaagagcgaagacaccgaggcca

SEQ ID NO: 2704129 - DNA, 25 bp, Homo sapien
cacgaacaggaacaccgagaagagg

SEQ ID NO: 2704130 - DNA, 25 bp, Homo sapien
tgcacagccgcactgccacgaacag

SEQ ID NO: 2704131 - DNA, 25 bp, Homo sapien
agcgaagacaccgaggccaatgcca

SEQ ID NO: 2704132 - DNA, 25 bp, Homo sapien
tcattactttcagagcctcccgtca

SEQ ID NO: 2704133 - DNA, 25 bp, Homo sapien
ggcttcaagaacttgaaatcattac

SEQ ID NO: 2704134 - DNA, 25 bp, Homo sapien
tatttgggaatataggcttcaagaa

SEQ ID NO: 2704135 - DNA, 25 bp, Homo sapien
attactttcagagcctcccgtcaga

SEQ ID NO: 2704136 - DNA, 25 bp, Homo sapien
tctgatttcctcctagagtcctggc

SEQ ID NO: 2704137 - DNA, 25 bp, Homo sapien
atttcctcctagagtcctggcttac

SEQ ID NO: 2704138 - DNA, 25 bp, Homo sapien
aattctgatttcctcctagagtcct

SEQ ID NO: 2704139 - DNA, 25 bp, Homo sapien
gatttcctcctagagtcctggctta

SEQ ID NO: 2704140 - DNA, 25 bp, Homo sapien
gaaaactaacaatcagacaaaggaa

SEQ ID NO: 2704141 - DNA, 25 bp, Homo sapien
cagaaatatgaactttcctgatata

SEQ ID NO: 2704142 - DNA, 25 bp, Homo sapien
gagtaacattactaaagacaacagt

SEQ ID NO: 2704143 - DNA, 25 bp, Homo sapien
cagacggtcggaaagctacagatac

SEQ ID NO: 2704144 - DNA, 25 bp, Homo sapien
tatgaaatgattacaccccaaactt

SEQ ID NO: 2704145 - DNA, 25 bp, Homo sapien
gttaactttcatatcacccttcagg

SEQ ID NO: 2704146 - DNA, 25 bp, Homo sapien
gaagcttggaagaaattacacatgg

SEQ ID NO: 2704147 - DNA, 25 bp, Homo sapien
aaatctaatgcttacaagtgtgacc

SEQ ID NO: 2704148 - DNA, 25 bp, Homo sapien
cactgattgaaatagacccacccag

SEQ ID NO: 2704149 - DNA, 25 bp, Homo sapien
cccagattatctaggagagtctccc

SEQ ID NO: 2704150 - DNA, 25 bp, Homo sapien
tctcacggaagactcaactctgctt

SEQ ID NO: 2704151 - DNA, 25 bp, Homo sapien
ggcaggaacatcttggcggtcatta

SEQ ID NO: 2704152 - DNA, 25 bp, Homo sapien
tagttggagttcagccagagaaaca

SEQ ID NO: 2704153 - DNA, 25 bp, Homo sapien
tggagttcagccagagaaacaggca

SEQ ID NO: 2704154 - DNA, 25 bp, Homo sapien
tgttagttggagttcagccagagaa

SEQ ID NO: 2704155 - DNA, 25 bp, Homo sapien
aaatctgtgttagttggagttcagc

SEQ ID NO: 2704156 - DNA, 25 bp, Homo sapien
tccagatgtaaaagcgtgcctcgca

SEQ ID NO: 2704157 - DNA, 25 bp, Homo sapien
caagacggtcaatggccttagatta

SEQ ID NO: 2704158 - DNA, 25 bp, Homo sapien
cttgctcaggataccgttaagtcca

SEQ ID NO: 2704159 - DNA, 25 bp, Homo sapien
aaaaacacatggactgctgatctgc

SEQ ID NO: 2704160 - DNA, 25 bp, Homo sapien
gagcacatgacacaagagggttccc

SEQ ID NO: 2704161 - DNA, 25 bp, Homo sapien
ttacatttcccaggataaagcctgc

SEQ ID NO: 2704162 - DNA, 25 bp, Homo sapien
agagagacctctgctagtaccacca

SEQ ID NO: 2704163 - DNA, 25 bp, Homo sapien
ctgcagggttttgcccagattacat

SEQ ID NO: 2704164 - DNA, 25 bp, Homo sapien
tggtaacttacatgctgaataattt

SEQ ID NO: 2704165 - DNA, 25 bp, Homo sapien
cagagtatgctccaagaccaaaaaa

SEQ ID NO: 2704166 - DNA, 25 bp, Homo sapien
gaatactcaaccaacaactgtaggt

SEQ ID NO: 2704167 - DNA, 25 bp, Homo sapien
tctaaaaacattatcaagtgacttg

SEQ ID NO: 2704168 - DNA, 25 bp, Homo sapien
ggaatgaaaatggagggtatgaata

SEQ ID NO: 2704169 - DNA, 25 bp, Homo sapien
aaagcaaacatattaacactggata

SEQ ID NO: 2704170 - DNA, 25 bp, Homo sapien
gcaatagagacaatcatgttataaa

SEQ ID NO: 2704171 - DNA, 25 bp, Homo sapien
aatgaggaacaaaggatttcaaagg

SEQ ID NO: 2704172 - DNA, 25 bp, Homo sapien
ttacaattatagaggctgtcttcgg

SEQ ID NO: 2704173 - DNA, 25 bp, Homo sapien
tctattgaaagaagagggcaaactg

SEQ ID NO: 2704174 - DNA, 25 bp, Homo sapien
caagagatctggaagaaatcaagcc

SEQ ID NO: 2704175 - DNA, 25 bp, Homo sapien
tcacatatgccctaaaggattaggg

SEQ ID NO: 2704176 - DNA, 25 bp, Homo sapien
tcaaattgacccataaagttaacca

SEQ ID NO: 2704177 - DNA, 25 bp, Homo sapien
gatggctagtatcatagcctggacc

SEQ ID NO: 2704178 - DNA, 25 bp, Homo sapien
acagcattgttatccatcatgggca

SEQ ID NO: 2704179 - DNA, 25 bp, Homo sapien
cattactagcaacactggagtggct

SEQ ID NO: 2704180 - DNA, 25 bp, Homo sapien
tctaatagggctaaggagcatgata

SEQ ID NO: 2704181 - DNA, 25 bp, Homo sapien
acggagctggcttccagtagccatg

SEQ ID NO: 2704182 - DNA, 25 bp, Homo sapien
cacggagctggcttccagtagccat

SEQ ID NO: 2704183 - DNA, 25 bp, Homo sapien
cggagctggcttccagtagccatgt

SEQ ID NO: 2704184 - DNA, 25 bp, Homo sapien
gttgctgctttgtgatgacgtgaga

SEQ ID NO: 2704185 - DNA, 25 bp, Homo sapien
taagaagcaggattgtataggcaga

SEQ ID NO: 2704186 - DNA, 25 bp, Homo sapien
gacgtgagatcaataagaagaacct

SEQ ID NO: 2704187 - DNA, 25 bp, Homo sapien
gattagcggaatgtatggttcaacc

SEQ ID NO: 2704188 - DNA, 25 bp, Homo sapien
tctggagagacagctacaggacaag

SEQ ID NO: 2704189 - DNA, 25 bp, Homo sapien
gatattcaatgacctcagcagcagc

SEQ ID NO: 2704190 - DNA, 25 bp, Homo sapien
cattagaacatgatgagcttcggga

SEQ ID NO: 2704191 - DNA, 25 bp, Homo sapien
ctgaagctgttagtactcggtggga

SEQ ID NO: 2704192 - DNA, 25 bp, Homo sapien
tagtggatcactctgccaagcggca

SEQ ID NO: 2704193 - DNA, 25 bp, Homo sapien
cacttccgtttttgctgggtaggcg

SEQ ID NO: 2704194 - DNA, 25 bp, Homo sapien
taaggaaacgacaaggagacgctcg

SEQ ID NO: 2704195 - DNA, 25 bp, Homo sapien
cactggattgtaagtacccgaggcg

SEQ ID NO: 2704196 - DNA, 25 bp, Homo sapien
tctgataggactagatacccagctg

SEQ ID NO: 2704197 - DNA, 25 bp, Homo sapien
ttcaaccaggactctgaagtcggcc

SEQ ID NO: 2704198 - DNA, 25 bp, Homo sapien
gctggcattggcatccaaggcctgt

SEQ ID NO: 2704199 - DNA, 25 bp, Homo sapien
cattgctcaatatctgacggctggc

SEQ ID NO: 2704200 - DNA, 25 bp, Homo sapien
gcaagttgaaccctggtcactggcc

SEQ ID NO: 2704201 - DNA, 25 bp, Homo sapien
caagttgaaccctggtcactggcct

SEQ ID NO: 2704202 - DNA, 25 bp, Homo sapien
tgaccacggtgaccaacaaaccttg

SEQ ID NO: 2704203 - DNA, 25 bp, Homo sapien
agtgacacggcacgcatctagctcg

SEQ ID NO: 2704204 - DNA, 25 bp, Homo sapien
tgcacatccctagtttgaagagcca

SEQ ID NO: 2704205 - DNA, 25 bp, Homo sapien
gaagcacatgataggacagtcagcc

SEQ ID NO: 2704206 - DNA, 25 bp, Homo sapien
aaacaaagcttcattgctggcactg

SEQ ID NO: 2704207 - DNA, 25 bp, Homo sapien
ttcagcaaccaaaaacacgcaggag

SEQ ID NO: 2704208 - DNA, 25 bp, Homo sapien
tagtaagtaaacctgtagagctccc

SEQ ID NO: 2704209 - DNA, 25 bp, Homo sapien
tcaaagacaagtacatggagccaaa

SEQ ID NO: 2704210 - DNA, 25 bp, Homo sapien
aagtaggatttaggcagtcttggac

SEQ ID NO: 2704211 - DNA, 25 bp, Homo sapien
taggatttaggcagtcttggacagt

SEQ ID NO: 2704212 - DNA, 25 bp, Homo sapien
gatttaggcagtcttggacagtcag

SEQ ID NO: 2704213 - DNA, 25 bp, Homo sapien
tccagaagtaggatttaggcagtct

SEQ ID NO: 2704214 - DNA, 25 bp, Homo sapien
ggctctctcacttcgtagttttctt

SEQ ID NO: 2704215 - DNA, 25 bp, Homo sapien
caagggtatcgtttctgcttttctg

SEQ ID NO: 2704216 - DNA, 25 bp, Homo sapien
ctctcacttcgtagttttcttccag

SEQ ID NO: 2704217 - DNA, 25 bp, Homo sapien
ttcttccagtccagtaccaagggta

SEQ ID NO: 2704218 - DNA, 25 bp, Homo sapien
gcctgctgcagccagtcagcttttt

SEQ ID NO: 2704219 - DNA, 25 bp, Homo sapien
cacagaagcatcagcctgctgcagc

SEQ ID NO: 2704220 - DNA, 25 bp, Homo sapien
agagaaagacacagaagcatcagcc

SEQ ID NO: 2704221 - DNA, 25 bp, Homo sapien
gaagcatcagcctgctgcagccagt

SEQ ID NO: 2704222 - DNA, 25 bp, Homo sapien
gcgcgcggtgatcaagctgccactt

SEQ ID NO: 2704223 - DNA, 25 bp, Homo sapien
cacttctaggattcagagcgaaaag

SEQ ID NO: 2704224 - DNA, 25 bp, Homo sapien
gagacgatgcggactccgccatctg

SEQ ID NO: 2704225 - DNA, 25 bp, Homo sapien
agacacggcatgctctgagcgcaga

SEQ ID NO: 2704226 - DNA, 25 bp, Homo sapien
tctggatgttgaggcccatcggctc

SEQ ID NO: 2704227 - DNA, 25 bp, Homo sapien
gataagagcaattatggtcccagga

SEQ ID NO: 2704228 - DNA, 25 bp, Homo sapien
aataggctgagagacacgttgctgc

SEQ ID NO: 2704229 - DNA, 25 bp, Homo sapien
cactttcagttgcatgtcccggaac

SEQ ID NO: 2704230 - DNA, 25 bp, Homo sapien
atttttctctagatagctgatacat

SEQ ID NO: 2704231 - DNA, 25 bp, Homo sapien
ttatttttctctagatagctgatac

SEQ ID NO: 2704232 - DNA, 25 bp, Homo sapien
tatttttctctagatagctgataca

SEQ ID NO: 2704233 - DNA, 25 bp, Homo sapien
gtagactcaatcgtgattttgcagg

SEQ ID NO: 2704234 - DNA, 25 bp, Homo sapien
tagaagaactatctgtagcaaagag

SEQ ID NO: 2704235 - DNA, 25 bp, Homo sapien
cctgcatatgaacgtgtagactcaa

SEQ ID NO: 2704236 - DNA, 25 bp, Homo sapien
tataaatatacctgcatatgaacgt

SEQ ID NO: 2704237 - DNA, 25 bp, Homo sapien
tcaaaccttttagcccagaggcaag

SEQ ID NO: 2704238 - DNA, 25 bp, Homo sapien
gaaaatgttagaagctagatcgccg

SEQ ID NO: 2704239 - DNA, 25 bp, Homo sapien
cccagaggcaagtaagaaaatgtta

SEQ ID NO: 2704240 - DNA, 25 bp, Homo sapien
cgccgtttctaatgcagtgctcttt

SEQ ID NO: 2704241 - DNA, 25 bp, Homo sapien
tcctcagaactcttccatggttgca

SEQ ID NO: 2704242 - DNA, 25 bp, Homo sapien
tcctaacgttagacttgacagaatt

SEQ ID NO: 2704243 - DNA, 25 bp, Homo sapien
gctctcttacatgagtcctaacgtt

SEQ ID NO: 2704244 - DNA, 25 bp, Homo sapien
gattgggtcttgttatactgccccg

SEQ ID NO: 2704245 - DNA, 25 bp, Homo sapien
tgtcctgaagctttagggccaaacc

SEQ ID NO: 2704246 - DNA, 25 bp, Homo sapien
tccctatggagagaactggtgggct

SEQ ID NO: 2704247 - DNA, 25 bp, Homo sapien
tcctgtcgcaattttctccgagtca

SEQ ID NO: 2704248 - DNA, 25 bp, Homo sapien
acttccagcatccagtgcggattcc

SEQ ID NO: 2704249 - DNA, 25 bp, Homo sapien
gtgtggcaacttttgcagagccgcc

SEQ ID NO: 2704250 - DNA, 25 bp, Homo sapien
ctcccacagggtcgccaaaaggaag

SEQ ID NO: 2704251 - DNA, 25 bp, Homo sapien
ccacagggtcgccaaaaggaagcac

SEQ ID NO: 2704252 - DNA, 25 bp, Homo sapien
gtggcaacttttgcagagccgccat

SEQ ID NO: 2704253 - DNA, 25 bp, Homo sapien
caaaatgtgagcatccgtggacagg

SEQ ID NO: 2704254 - DNA, 25 bp, Homo sapien
tagtagccctcatctgcgtcagtgg

SEQ ID NO: 2704255 - DNA, 25 bp, Homo sapien
aaaaacaggcgcattgtcgttcgca

SEQ ID NO: 2704256 - DNA, 25 bp, Homo sapien
tgaacagtgtcctccgcgaaagagt

SEQ ID NO: 2704257 - DNA, 25 bp, Homo sapien
caaactagctagtacgtatgttgtg

SEQ ID NO: 2704258 - DNA, 25 bp, Homo sapien
actagctagtacgtatgttgtgaaa

SEQ ID NO: 2704259 - DNA, 25 bp, Homo sapien
ttacttcagcaaactagctagtacg

SEQ ID NO: 2704260 - DNA, 25 bp, Homo sapien
ttcagcaaactagctagtacgtatg

SEQ ID NO: 2704261 - DNA, 25 bp, Homo sapien
caaatgcaacggaaagaatcacagc

SEQ ID NO: 2704262 - DNA, 25 bp, Homo sapien
tatggttcccacgtatgagaaagat

SEQ ID NO: 2704263 - DNA, 25 bp, Homo sapien
tattgtgagtagaaaccttgagaag

SEQ ID NO: 2704264 - DNA, 25 bp, Homo sapien
tgagggattgggaacatttctagca

SEQ ID NO: 2704265 - DNA, 25 bp, Homo sapien
caaacacataattaggcatcagaca

SEQ ID NO: 2704266 - DNA, 25 bp, Homo sapien
tgcctaggtgtgagagagaaatcac

SEQ ID NO: 2704267 - DNA, 25 bp, Homo sapien
gagaacagcatgacaatgcctaggt

SEQ ID NO: 2704268 - DNA, 25 bp, Homo sapien
taatgttagcaaacgctttcccagg

SEQ ID NO: 2704269 - DNA, 25 bp, Homo sapien
aacagctggttgactaagaggtgag

SEQ ID NO: 2704270 - DNA, 25 bp, Homo sapien
gccgccccggatcttctgagtctga

SEQ ID NO: 2704271 - DNA, 25 bp, Homo sapien
ggatcttctgagtctgatttgctgg

SEQ ID NO: 2704272 - DNA, 25 bp, Homo sapien
ggtcaaacagctggttgactaagag

SEQ ID NO: 2704273 - DNA, 25 bp, Homo sapien
atcttattttctcaagaaacgaagt

SEQ ID NO: 2704274 - DNA, 25 bp, Homo sapien
cctacgacggactccaatcttattt

SEQ ID NO: 2704275 - DNA, 25 bp, Homo sapien
ggtgaatcgctttctctgaattcgg

SEQ ID NO: 2704276 - DNA, 25 bp, Homo sapien
tgaattcggttccagtttcctacga

SEQ ID NO: 2704277 - DNA, 25 bp, Homo sapien
tttcggaaactcaggcaattggtca

SEQ ID NO: 2704278 - DNA, 25 bp, Homo sapien
agacaccgagtagcggatctgaccg

SEQ ID NO: 2704279 - DNA, 25 bp, Homo sapien
tgaccggatcctgtttcgcacagcg

SEQ ID NO: 2704280 - DNA, 25 bp, Homo sapien
gttagcgatgttgcccacgaaggaa

SEQ ID NO: 2704281 - DNA, 25 bp, Homo sapien
gaaattaggagcattatcattaata

SEQ ID NO: 2704282 - DNA, 25 bp, Homo sapien
gggaaattaggagcattatcattaa

SEQ ID NO: 2704283 - DNA, 25 bp, Homo sapien
attttcaatttatcctcaaccagaa

SEQ ID NO: 2704284 - DNA, 25 bp, Homo sapien
tttcaatttatcctcaaccagaatg

SEQ ID NO: 2704285 - DNA, 25 bp, Homo sapien
gaatctcggtcatgcacgtcgataa

SEQ ID NO: 2704286 - DNA, 25 bp, Homo sapien
tctgatatttgttcgcggtccaggg

SEQ ID NO: 2704287 - DNA, 25 bp, Homo sapien
tgagcattgaatccctcgtcagggt

SEQ ID NO: 2704288 - DNA, 25 bp, Homo sapien
cgaaggatctcagcgcgtataggac

SEQ ID NO: 2704289 - DNA, 25 bp, Homo sapien
accacattctcatatttgttcttaa

SEQ ID NO: 2704290 - DNA, 25 bp, Homo sapien
ttaaagctttataataaccacattc

SEQ ID NO: 2704291 - DNA, 25 bp, Homo sapien
catatttgttcttaataatcaaaga

SEQ ID NO: 2704292 - DNA, 25 bp, Homo sapien
taaagctttataataaccacattct

SEQ ID NO: 2704293 - DNA, 25 bp, Homo sapien
gattcctctaggaagtgacacttta

SEQ ID NO: 2704294 - DNA, 25 bp, Homo sapien
ccaggtagaaggagcagtcacaatt

SEQ ID NO: 2704295 - DNA, 25 bp, Homo sapien
tatacaggttggaatgacaaactcc

SEQ ID NO: 2704296 - DNA, 25 bp, Homo sapien
tttatcacaggtatacaaaccagtg

SEQ ID NO: 2704297 - DNA, 25 bp, Homo sapien
gccactgcactccagacagagtaag

SEQ ID NO: 2704298 - DNA, 25 bp, Homo sapien
cactgcactccagacagagtaagac

SEQ ID NO: 2704299 - DNA, 25 bp, Homo sapien
agtaagaccctgtcaagaaagaaag

SEQ ID NO: 2704300 - DNA, 25 bp, Homo sapien
ctgcactccagacagagtaagaccc

SEQ ID NO: 2704301 - DNA, 25 bp, Homo sapien
gcagtggcccaattttggctctctg

SEQ ID NO: 2704302 - DNA, 25 bp, Homo sapien
agtggcccaattttggctctctgca

SEQ ID NO: 2704303 - DNA, 25 bp, Homo sapien
gcccaattttggctctctgcaactt

SEQ ID NO: 2704304 - DNA, 25 bp, Homo sapien
ctgcctcctgggtttaagcaattct

SEQ ID NO: 2704305 - DNA, 25 bp, Homo sapien
tgaacaggagcagcgtctgtgctca

SEQ ID NO: 2704306 - DNA, 25 bp, Homo sapien
ttagttaggcgctcgagggtgaaca

SEQ ID NO: 2704307 - DNA, 25 bp, Homo sapien
ctcagtgcaccggacaaagcaggaa

SEQ ID NO: 2704308 - DNA, 25 bp, Homo sapien
ccctggacttctgtgatttgagctt

SEQ ID NO: 2704309 - DNA, 25 bp, Homo sapien
caggaactctccgcggagcttcttt

SEQ ID NO: 2704310 - DNA, 25 bp, Homo sapien
gaactctccgcggagcttctttcct

SEQ ID NO: 2704311 - DNA, 25 bp, Homo sapien
ttcaggaactctccgcggagcttct

SEQ ID NO: 2704312 - DNA, 25 bp, Homo sapien
ggaactctccgcggagcttctttcc

SEQ ID NO: 2704313 - DNA, 25 bp, Homo sapien
catttcggcttctctggctctctgc

SEQ ID NO: 2704314 - DNA, 25 bp, Homo sapien
atttcggcttctctggctctctgca

SEQ ID NO: 2704315 - DNA, 25 bp, Homo sapien
tttcggcttctctggctctctgcat

SEQ ID NO: 2704316 - DNA, 25 bp, Homo sapien
caggaagggaaacagtacctgactt

SEQ ID NO: 2704317 - DNA, 25 bp, Homo sapien
agggaaacagtacctgacttttcat

SEQ ID NO: 2704318 - DNA, 25 bp, Homo sapien
agatggccccgcagaacaaagacag

SEQ ID NO: 2704319 - DNA, 25 bp, Homo sapien
gctgggagatggccccgcagaacaa

SEQ ID NO: 2704320 - DNA, 25 bp, Homo sapien
caggactttccttcgttgacagaga

SEQ ID NO: 2704321 - DNA, 25 bp, Homo sapien
aacattcattgggttttcagcgacc

SEQ ID NO: 2704322 - DNA, 25 bp, Homo sapien
gaccgtttcgaattctagtgcacac

SEQ ID NO: 2704323 - DNA, 25 bp, Homo sapien
taacccgcagttttcgagttggcaa

SEQ ID NO: 2704324 - DNA, 25 bp, Homo sapien
ctgtctagaggtttttccagcagta

SEQ ID NO: 2704325 - DNA, 25 bp, Homo sapien
tccagcagtaataccggatatttac

SEQ ID NO: 2704326 - DNA, 25 bp, Homo sapien
ttttccagcagtaataccggatatt

SEQ ID NO: 2704327 - DNA, 25 bp, Homo sapien
ttccagcagtaataccggatattta

SEQ ID NO: 2704328 - DNA, 25 bp, Homo sapien
gcttacttgtgcaatggaggcgcca

SEQ ID NO: 2704329 - DNA, 25 bp, Homo sapien
gcgccaggtgggttgttctcagaca

SEQ ID NO: 2704330 - DNA, 25 bp, Homo sapien
gagactctgccgttgggtcccaaat

SEQ ID NO: 2704331 - DNA, 25 bp, Homo sapien
tgtatacctcctggctaaacacggg

SEQ ID NO: 2704332 - DNA, 25 bp, Homo sapien
ccaaaataaagtgcattcacagcca

SEQ ID NO: 2704333 - DNA, 25 bp, Homo sapien
aaataaagtgcattcacagccagag

SEQ ID NO: 2704334 - DNA, 25 bp, Homo sapien
gctctcagggcttccgcttgaagct

SEQ ID NO: 2704335 - DNA, 25 bp, Homo sapien
tttcataaagctccagagccagtgc

SEQ ID NO: 2704336 - DNA, 25 bp, Homo sapien
gcttcggttttccctctgtcgaggc

SEQ ID NO: 2704337 - DNA, 25 bp, Homo sapien
gtgcttcggttttccctctgtcgag

SEQ ID NO: 2704338 - DNA, 25 bp, Homo sapien
tgcttcggttttccctctgtcgagg

SEQ ID NO: 2704339 - DNA, 25 bp, Homo sapien
aacacttacgtggtactcgggctga

SEQ ID NO: 2704340 - DNA, 25 bp, Homo sapien
tagccgagtgcctacaggaacgttc

SEQ ID NO: 2704341 - DNA, 25 bp, Homo sapien
gagtagagaatctgttcggccctga

SEQ ID NO: 2704342 - DNA, 25 bp, Homo sapien
taccttgcttctagctcggagacca

SEQ ID NO: 2704343 - DNA, 25 bp, Homo sapien
tgtggtatgatctattataagattg

SEQ ID NO: 2704344 - DNA, 25 bp, Homo sapien
tcagtgtggtatgatctattataag

SEQ ID NO: 2704345 - DNA, 25 bp, Homo sapien
agtgtggtatgatctattataagat

SEQ ID NO: 2704346 - DNA, 25 bp, Homo sapien
cagtgtggtatgatctattataaga

SEQ ID NO: 2704347 - DNA, 25 bp, Homo sapien
gaaagaggctcacatgatgacaaga

SEQ ID NO: 2704348 - DNA, 25 bp, Homo sapien
cataatcacaggagtgcaccagagg

SEQ ID NO: 2704349 - DNA, 25 bp, Homo sapien
taagcagcgtaaatcatatcagtcc

SEQ ID NO: 2704350 - DNA, 25 bp, Homo sapien
tgtagcaatagggatgaggccacct

SEQ ID NO: 2704351 - DNA, 25 bp, Homo sapien
ttttctgtttccgaatctatactgg

SEQ ID NO: 2704352 - DNA, 25 bp, Homo sapien
tccgaatctatactggccttctctg

SEQ ID NO: 2704353 - DNA, 25 bp, Homo sapien
cagaatccgggctaaggtcactttt

SEQ ID NO: 2704354 - DNA, 25 bp, Homo sapien
gatggcagaatccgggctaaggtca

SEQ ID NO: 2704355 - DNA, 25 bp, Homo sapien
ttgctcctttgcccataggaggaat

SEQ ID NO: 2704356 - DNA, 25 bp, Homo sapien
acaggaagggcaacagtacctgcag

SEQ ID NO: 2704357 - DNA, 25 bp, Homo sapien
caacaggaagggcaacagtacctgc

SEQ ID NO: 2704358 - DNA, 25 bp, Homo sapien
agggcaacagtacctgcagccaccg

SEQ ID NO: 2704359 - DNA, 25 bp, Homo sapien
aggaagggcaacagtacctgcagcc

SEQ ID NO: 2704360 - DNA, 25 bp, Homo sapien
gattgccagaatcaccgcgaggaag

SEQ ID NO: 2704361 - DNA, 25 bp, Homo sapien
tctctgccacgtgaaccatgtagga

SEQ ID NO: 2704362 - DNA, 25 bp, Homo sapien
tacacgtcctggctgaacactggag

SEQ ID NO: 2704363 - DNA, 25 bp, Homo sapien
acttgaagcacaaagaagcccggcg

SEQ ID NO: 2704364 - DNA, 25 bp, Homo sapien
ttcccaagaggcattgtcacagacg

SEQ ID NO: 2704365 - DNA, 25 bp, Homo sapien
tatgttcagaaaattgaactctgtc

SEQ ID NO: 2704366 - DNA, 25 bp, Homo sapien
ccccagcggctccatgatttgtatt

SEQ ID NO: 2704367 - DNA, 25 bp, Homo sapien
gatcttgcgcgggaaccaattccgg

SEQ ID NO: 2704368 - DNA, 25 bp, Homo sapien
gaaatacgcagtggaacttcctacc

SEQ ID NO: 2704369 - DNA, 25 bp, Homo sapien
gcaatcatgggtaaataaatctcac

SEQ ID NO: 2704370 - DNA, 25 bp, Homo sapien
gacaattaaggcacaacattggcca

SEQ ID NO: 2704371 - DNA, 25 bp, Homo sapien
taaatctcacacttcagagagaaaa

SEQ ID NO: 2704372 - DNA, 25 bp, Homo sapien
gatgggtacatattccctgacgaaa

SEQ ID NO: 2704373 - DNA, 25 bp, Homo sapien
tccctgacgaaaatgggcgtggagc

SEQ ID NO: 2704374 - DNA, 25 bp, Homo sapien
tctctgcccaattttctcttagttc

SEQ ID NO: 2704375 - DNA, 25 bp, Homo sapien
tccttatttatctaaagccgatggg

SEQ ID NO: 2704376 - DNA, 25 bp, Homo sapien
cccagcccctaggtggactcgccat

SEQ ID NO: 2704377 - DNA, 25 bp, Homo sapien
gccccagcccctaggtggactcgcc

SEQ ID NO: 2704378 - DNA, 25 bp, Homo sapien
ccccagcccctaggtggactcgcca

SEQ ID NO: 2704379 - DNA, 25 bp, Homo sapien
agccccagcccctaggtggactcgc

SEQ ID NO: 2704380 - DNA, 25 bp, Homo sapien
taggtgactcgagcgttgtcgccgc

SEQ ID NO: 2704381 - DNA, 25 bp, Homo sapien
tatgttgccgacgaaggagcctttg

SEQ ID NO: 2704382 - DNA, 25 bp, Homo sapien
ggatctcagagcatacaggacaccg

SEQ ID NO: 2704383 - DNA, 25 bp, Homo sapien
taaacagcgcgattacagttccggg

SEQ ID NO: 2704384 - DNA, 25 bp, Homo sapien
ggaagagaaatagcattcgcctctg

SEQ ID NO: 2704385 - DNA, 25 bp, Homo sapien
gagaaatagcattcgcctctgccct

SEQ ID NO: 2704386 - DNA, 25 bp, Homo sapien
ccctccatccggagctatttcccat

SEQ ID NO: 2704387 - DNA, 25 bp, Homo sapien
agcaggaagagaaatagcattcgcc

SEQ ID NO: 2704388 - DNA, 25 bp, Homo sapien
acttttaatacggaggagccagcgg

SEQ ID NO: 2704389 - DNA, 25 bp, Homo sapien
ttttgatcagggcaacggcagtccc

SEQ ID NO: 2704390 - DNA, 25 bp, Homo sapien
cacgatgtagtaggagacaaggcca

SEQ ID NO: 2704391 - DNA, 25 bp, Homo sapien
tctgacatgcgcaatggaggctcca

SEQ ID NO: 2704392 - DNA, 25 bp, Homo sapien
tagcggtgaaggtccttcaacaagc

SEQ ID NO: 2704393 - DNA, 25 bp, Homo sapien
tcaacaagcagagaccggatgcgaa

SEQ ID NO: 2704394 - DNA, 25 bp, Homo sapien
cagagaccggatgcgaagcgtttca

SEQ ID NO: 2704395 - DNA, 25 bp, Homo sapien
ttctcagaaatagcggtgaaggtcc

SEQ ID NO: 2704396 - DNA, 25 bp, Homo sapien
gaacaggttaccaggccattcaggc

SEQ ID NO: 2704397 - DNA, 25 bp, Homo sapien
cacgtcagggtccagtgcattcaca

SEQ ID NO: 2704398 - DNA, 25 bp, Homo sapien
caattcaaatgggagacttctcggg

SEQ ID NO: 2704399 - DNA, 25 bp, Homo sapien
tgtgcaggcccactgagaaaagtcc

SEQ ID NO: 2704400 - DNA, 25 bp, Homo sapien
tcatagctctcctggttgataagcg

SEQ ID NO: 2704401 - DNA, 25 bp, Homo sapien
ttgataagcgtgtcggcatagttgg

SEQ ID NO: 2704402 - DNA, 25 bp, Homo sapien
aaatcagatgactcttacgcgagtc

SEQ ID NO: 2704403 - DNA, 25 bp, Homo sapien
tgactcttacgcgagtctgcagtga

SEQ ID NO: 2704404 - DNA, 25 bp, Homo sapien
tactcttcccgcttaggcggaaaga

SEQ ID NO: 2704405 - DNA, 25 bp, Homo sapien
tcccgcttaggcggaaagaaactca

SEQ ID NO: 2704406 - DNA, 25 bp, Homo sapien
caaaatcacgaatcttcctgtacca

SEQ ID NO: 2704407 - DNA, 25 bp, Homo sapien
tccactttacaaaatcacgaatctt

SEQ ID NO: 2704408 - DNA, 25 bp, Homo sapien
atcacgaatcttcctgtaccaaaag

SEQ ID NO: 2704409 - DNA, 25 bp, Homo sapien
tttacaaaatcacgaatcttcctgt

SEQ ID NO: 2704410 - DNA, 25 bp, Homo sapien
gatgtactcaatccaagacacaaat

SEQ ID NO: 2704411 - DNA, 25 bp, Homo sapien
aaacctaagaaacgagatgtactca

SEQ ID NO: 2704412 - DNA, 25 bp, Homo sapien
ccaagatcttgatctttaacactga

SEQ ID NO: 2704413 - DNA, 25 bp, Homo sapien
agatcttgatctttaacactgacct

SEQ ID NO: 2704414 - DNA, 25 bp, Homo sapien
ctaagtagtaaaggtgaaagatctc

SEQ ID NO: 2704415 - DNA, 25 bp, Homo sapien
ctgtcgtttatagttatcaagtaac

SEQ ID NO: 2704416 - DNA, 25 bp, Homo sapien
gaacgtctgtcgtttatagttatca

SEQ ID NO: 2704417 - DNA, 25 bp, Homo sapien
gaaagatctcttgtatgaacgtctg

SEQ ID NO: 2704418 - DNA, 25 bp, Homo sapien
caatgattcttatcttttcaaaaat

SEQ ID NO: 2704419 - DNA, 25 bp, Homo sapien
tgattcttatcttttcaaaaataat

SEQ ID NO: 2704420 - DNA, 25 bp, Homo sapien
atgattcttatcttttcaaaaataa

SEQ ID NO: 2704421 - DNA, 25 bp, Homo sapien
aatgattcttatcttttcaaaaata

SEQ ID NO: 2704422 - DNA, 25 bp, Homo sapien
acaaattcagatgcacaagtggcca

SEQ ID NO: 2704423 - DNA, 25 bp, Homo sapien
cagggccatcaacttacttttgaag

SEQ ID NO: 2704424 - DNA, 25 bp, Homo sapien
gtcatcaaattagagaatcccctgt

SEQ ID NO: 2704425 - DNA, 25 bp, Homo sapien
tgtagaatcttccaactcatgactg

SEQ ID NO: 2704426 - DNA, 25 bp, Homo sapien
taaaccagcctgatctccatgaaaa

SEQ ID NO: 2704427 - DNA, 25 bp, Homo sapien
tgagctttccctataacaacaaatg

SEQ ID NO: 2704428 - DNA, 25 bp, Homo sapien
aaaaacacatattactcttagcagc

SEQ ID NO: 2704429 - DNA, 25 bp, Homo sapien
taacagcccatctaactcatgagac

SEQ ID NO: 2704430 - DNA, 25 bp, Homo sapien
tagctctcaatgtcttgatccattt

SEQ ID NO: 2704431 - DNA, 25 bp, Homo sapien
acctgatgcctcaaaattcatagtt

SEQ ID NO: 2704432 - DNA, 25 bp, Homo sapien
tatagctctcaatgtcttgatccat

SEQ ID NO: 2704433 - DNA, 25 bp, Homo sapien
ggttatagctctcaatgtcttgatc

SEQ ID NO: 2704434 - DNA, 25 bp, Homo sapien
gtgtatccgggtggacccctctgtc

SEQ ID NO: 2704435 - DNA, 25 bp, Homo sapien
gtgcttcagaatgcgggtgtatccg

SEQ ID NO: 2704436 - DNA, 25 bp, Homo sapien
ctcgggaagtgcttcagaatgcggg

SEQ ID NO: 2704437 - DNA, 25 bp, Homo sapien
tgtatccgggtggacccctctgtct

SEQ ID NO: 2704438 - DNA, 25 bp, Homo sapien
ctgcttctcttgcttaggcgccgat

SEQ ID NO: 2704439 - DNA, 25 bp, Homo sapien
ctccgacacggagtagagaatacgt

SEQ ID NO: 2704440 - DNA, 25 bp, Homo sapien
acggagtagagaatacgtcctgccc

SEQ ID NO: 2704441 - DNA, 25 bp, Homo sapien
atcctctgtagtccccgcccctcgg

SEQ ID NO: 2704442 - DNA, 25 bp, Homo sapien
tagagaatacgtcctgcccaggctt

SEQ ID NO: 2704443 - DNA, 25 bp, Homo sapien
gttaaagtttaccagacaccgcgca

SEQ ID NO: 2704444 - DNA, 25 bp, Homo sapien
taactctggagggagttcgtgccca

SEQ ID NO: 2704445 - DNA, 25 bp, Homo sapien
tcatagttgtaaggaccgtcggagg

SEQ ID NO: 2704446 - DNA, 25 bp, Homo sapien
caaaggattgcagcgcgtacaggac

SEQ ID NO: 2704447 - DNA, 25 bp, Homo sapien
ctgaatacttggcaggttttcttta

SEQ ID NO: 2704448 - DNA, 25 bp, Homo sapien
tgaatacttggcaggttttctttac

SEQ ID NO: 2704449 - DNA, 25 bp, Homo sapien
gaaataaaggaagggctgggctcac

SEQ ID NO: 2704450 - DNA, 25 bp, Homo sapien
tggaaataaaggaagggctgggctc

SEQ ID NO: 2704451 - DNA, 25 bp, Homo sapien
tcatggaaataaaggaagggctggg

SEQ ID NO: 2704452 - DNA, 25 bp, Homo sapien
catggaaataaaggaagggctgggc

SEQ ID NO: 2704453 - DNA, 25 bp, Homo sapien
gttctatattaaagtgtcaccactg

SEQ ID NO: 2704454 - DNA, 25 bp, Homo sapien
gaacatagattggaaagtaggtgga

SEQ ID NO: 2704455 - DNA, 25 bp, Homo sapien
ccactgaaggaaactggtaaactca

SEQ ID NO: 2704456 - DNA, 25 bp, Homo sapien
tgtccataggctttcactaaagaaa

SEQ ID NO: 2704457 - DNA, 25 bp, Homo sapien
aggaggaagcggtgtaaaggctggc

SEQ ID NO: 2704458 - DNA, 25 bp, Homo sapien
tagttgcagttccagttcaagaaaa

SEQ ID NO: 2704459 - DNA, 25 bp, Homo sapien
gaagcggtgtaaaggctggcgctgg

SEQ ID NO: 2704460 - DNA, 25 bp, Homo sapien
cggactttagttgcagttccagttc

SEQ ID NO: 2704461 - DNA, 25 bp, Homo sapien
tcacagagcgccgggcagaacaaag

SEQ ID NO: 2704462 - DNA, 25 bp, Homo sapien
cagagcgccgggcagaacaaagaca

SEQ ID NO: 2704463 - DNA, 25 bp, Homo sapien
agaaagagcactggcagcctctcag

SEQ ID NO: 2704464 - DNA, 25 bp, Homo sapien
tgctcacagagcgccgggcagaaca

SEQ ID NO: 2704465 - DNA, 25 bp, Homo sapien
cagtaagagacttggccgttgggcc

SEQ ID NO: 2704466 - DNA, 25 bp, Homo sapien
caaattgggtgatctggctagcttc

SEQ ID NO: 2704467 - DNA, 25 bp, Homo sapien
tccccggtgttagagttcaggtcaa

SEQ ID NO: 2704468 - DNA, 25 bp, Homo sapien
tattgtactctggattctgctcgcg

SEQ ID NO: 2704469 - DNA, 25 bp, Homo sapien
aaaacagtggactactatggagacc

SEQ ID NO: 2704470 - DNA, 25 bp, Homo sapien
gcggcgcttacagtcctaaatagtt

SEQ ID NO: 2704471 - DNA, 25 bp, Homo sapien
gacctactggagatgactgactcag

SEQ ID NO: 2704472 - DNA, 25 bp, Homo sapien
ttccagtaggtgaacagcggcgctt

SEQ ID NO: 2704473 - DNA, 25 bp, Homo sapien
gaaacctggagtgcctccaaacagg

SEQ ID NO: 2704474 - DNA, 25 bp, Homo sapien
gatgacaatcctccggaaacctgga

SEQ ID NO: 2704475 - DNA, 25 bp, Homo sapien
tcttgccgcagctatggagatgaca

SEQ ID NO: 2704476 - DNA, 25 bp, Homo sapien
tcgggtttcgctgcagtccagcagt

SEQ ID NO: 2704477 - DNA, 25 bp, Homo sapien
tgttgttttgctgcagaatcctctc

SEQ ID NO: 2704478 - DNA, 25 bp, Homo sapien
tgttttgctgcagaatcctctcaga

SEQ ID NO: 2704479 - DNA, 25 bp, Homo sapien
ttgttttgctgcagaatcctctcag

SEQ ID NO: 2704480 - DNA, 25 bp, Homo sapien
ttttgctgcagaatcctctcagaat

SEQ ID NO: 2704481 - DNA, 25 bp, Homo sapien
gatattacccacgaaggagcctttg

SEQ ID NO: 2704482 - DNA, 25 bp, Homo sapien
tggcacagagtagcgaatctgtccc

SEQ ID NO: 2704483 - DNA, 25 bp, Homo sapien
cagcaggatcagctcgccgcgtctg

SEQ ID NO: 2704484 - DNA, 25 bp, Homo sapien
gagcctttgtccgtctcttctggca

SEQ ID NO: 2704485 - DNA, 25 bp, Homo sapien
gagaattttctaacactgggctaaa

SEQ ID NO: 2704486 - DNA, 25 bp, Homo sapien
gactttcactcggtaaatcgggtga

SEQ ID NO: 2704487 - DNA, 25 bp, Homo sapien
cgaaatgagcaatttggtcctcccc

SEQ ID NO: 2704488 - DNA, 25 bp, Homo sapien
tcaagaaggcaattactgtcccggg

SEQ ID NO: 2704489 - DNA, 25 bp, Homo sapien
tatttccttgtcactaatctataat

SEQ ID NO: 2704490 - DNA, 25 bp, Homo sapien
ccttgtcactaatctataataatta

SEQ ID NO: 2704491 - DNA, 25 bp, Homo sapien
atagagacattttctcggtccaaat

SEQ ID NO: 2704492 - DNA, 25 bp, Homo sapien
gagacattttctcggtccaaatatt

SEQ ID NO: 2704493 - DNA, 25 bp, Homo sapien
gagggttgtcgttaatgtctgccac

SEQ ID NO: 2704494 - DNA, 25 bp, Homo sapien
tgcagcgtgtcctcggtcacagagt

SEQ ID NO: 2704495 - DNA, 25 bp, Homo sapien
taaggctcgaatcgttcgggtcgac

SEQ ID NO: 2704496 - DNA, 25 bp, Homo sapien
agattgcagcgcatacaggacaccg

SEQ ID NO: 2704497 - DNA, 25 bp, Homo sapien
ctggaaattaaaagcaagcaaagaa

SEQ ID NO: 2704498 - DNA, 25 bp, Homo sapien
gaaattaaaagcaagcaaagaacta

SEQ ID NO: 2704499 - DNA, 25 bp, Homo sapien
aaagcaagcaaagaactaaactcac

SEQ ID NO: 2704500 - DNA, 25 bp, Homo sapien
taaaagcaagcaaagaactaaactc

SEQ ID NO: 2704501 - DNA, 25 bp, Homo sapien
ttttcaaaacataatttatgccaaa

SEQ ID NO: 2704502 - DNA, 25 bp, Homo sapien
tttttcaaaacataatttatgccaa

SEQ ID NO: 2704503 - DNA, 25 bp, Homo sapien
tcaactatcttcacaatgtttttca

SEQ ID NO: 2704504 - DNA, 25 bp, Homo sapien
tcaaaacataatttatgccaaataa

SEQ ID NO: 2704505 - DNA, 25 bp, Homo sapien
tatggacgggtagctacttcttaag

SEQ ID NO: 2704506 - DNA, 25 bp, Homo sapien
tagcaaaattaccagtatggacggg

SEQ ID NO: 2704507 - DNA, 25 bp, Homo sapien
cttttgctaagctaataacaaggct

SEQ ID NO: 2704508 - DNA, 25 bp, Homo sapien
tctacaagagcctagttacaggttc

SEQ ID NO: 2704509 - DNA, 25 bp, Homo sapien
tatttagtaaccagtctcatctccc

SEQ ID NO: 2704510 - DNA, 25 bp, Homo sapien
ggagcaatggacattctaggcttta

SEQ ID NO: 2704511 - DNA, 25 bp, Homo sapien
tcatgtctccatgggcatggagccc

SEQ ID NO: 2704512 - DNA, 25 bp, Homo sapien
tcccaccaagatccatctttaaagt

SEQ ID NO: 2704513 - DNA, 25 bp, Homo sapien
tcacatcaatgcacaaccgaaacag

SEQ ID NO: 2704514 - DNA, 25 bp, Homo sapien
ctttaattgaattgatcagcttatt

SEQ ID NO: 2704515 - DNA, 25 bp, Homo sapien
aactttaattgaattgatcagctta

SEQ ID NO: 2704516 - DNA, 25 bp, Homo sapien
acttgtgtacctgaaacattggttc

SEQ ID NO: 2704517 - DNA, 25 bp, Homo sapien
aattgaattgatcagcttatttaga

SEQ ID NO: 2704518 - DNA, 25 bp, Homo sapien
tacaaataacctctgtattgtagat

SEQ ID NO: 2704519 - DNA, 25 bp, Homo sapien
ctggagacgccaggttacaaataac

SEQ ID NO: 2704520 - DNA, 25 bp, Homo sapien
tgtagatttttggatctccgaacgg

SEQ ID NO: 2704521 - DNA, 25 bp, Homo sapien
cagttccagtttaggaaacgattct

SEQ ID NO: 2704522 - DNA, 25 bp, Homo sapien
ccctcttgctctcctcagcttgctc

SEQ ID NO: 2704523 - DNA, 25 bp, Homo sapien
ttgctctcctcagcttgctcaccag

SEQ ID NO: 2704524 - DNA, 25 bp, Homo sapien
tcttgctctcctcagcttgctcacc

SEQ ID NO: 2704525 - DNA, 25 bp, Homo sapien
tgctctcctcagcttgctcaccagc

SEQ ID NO: 2704526 - DNA, 25 bp, Homo sapien
tgctcacagagcgccgggcagaaca

SEQ ID NO: 2704527 - DNA, 25 bp, Homo sapien
cagagcgccgggcagaacaaagaca

SEQ ID NO: 2704528 - DNA, 25 bp, Homo sapien
agaaagagcactggcagcctctcag

SEQ ID NO: 2704529 - DNA, 25 bp, Homo sapien
tcacagagcgccgggcagaacaaag

SEQ ID NO: 2704530 - DNA, 25 bp, Homo sapien
tacactgactaagtaggacgcctgg

SEQ ID NO: 2704531 - DNA, 25 bp, Homo sapien
tggtggcacgttttcccgaaggctg

SEQ ID NO: 2704532 - DNA, 25 bp, Homo sapien
cactttgcgcgctcatggacacgta

SEQ ID NO: 2704533 - DNA, 25 bp, Homo sapien
aaagcaattagtgttccaggcaccg

SEQ ID NO: 2704534 - DNA, 25 bp, Homo sapien
tttcctgtatgtgcaacacataggt

SEQ ID NO: 2704535 - DNA, 25 bp, Homo sapien
ctttcctgtatgtgcaacacatagg

SEQ ID NO: 2704536 - DNA, 25 bp, Homo sapien
ggccccagatgaatcaccacaaagt

SEQ ID NO: 2704537 - DNA, 25 bp, Homo sapien
gtcttgtcctgaactcaattgctca

SEQ ID NO: 2704538 - DNA, 25 bp, Homo sapien
aagtcgactcgctggaattacaaag

SEQ ID NO: 2704539 - DNA, 25 bp, Homo sapien
actcaggatgggaagtcgactcgct

SEQ ID NO: 2704540 - DNA, 25 bp, Homo sapien
tcatgtaaatacagaaaattgggtg

SEQ ID NO: 2704541 - DNA, 25 bp, Homo sapien
ggtgggtaatgaaaaagaatagaca

SEQ ID NO: 2704542 - DNA, 25 bp, Homo sapien
aagaatagacataaatgaaactcac

SEQ ID NO: 2704543 - DNA, 25 bp, Homo sapien
atacagaaaattgggtgggtaatga

SEQ ID NO: 2704544 - DNA, 25 bp, Homo sapien
tgcaaagtatggtgatcttttcctt

SEQ ID NO: 2704545 - DNA, 25 bp, Homo sapien
gcaaagtatggtgatcttttcctta

SEQ ID NO: 2704546 - DNA, 25 bp, Homo sapien
aaaaggatctctgtgcgcgctgctt

SEQ ID NO: 2704547 - DNA, 25 bp, Homo sapien
tctctgtgcgcgctgcttcatcagg

SEQ ID NO: 2704548 - DNA, 25 bp, Homo sapien
tctgtgcgcgctgcttcatcaggtt

SEQ ID NO: 2704549 - DNA, 25 bp, Homo sapien
aaggatctctgtgcgcgctgcttca

SEQ ID NO: 2704550 - DNA, 25 bp, Homo sapien
ccaggagcgagcatagcaggactaa

SEQ ID NO: 2704551 - DNA, 25 bp, Homo sapien
taatcttccgcggagctggcatttg

SEQ ID NO: 2704552 - DNA, 25 bp, Homo sapien
gcatagcaggactaatcttccgcgg

SEQ ID NO: 2704553 - DNA, 25 bp, Homo sapien
ccccaggagcgagcatagcaggact

SEQ ID NO: 2704554 - DNA, 25 bp, Homo sapien
cagggtcataggcaatcacggagaa

SEQ ID NO: 2704555 - DNA, 25 bp, Homo sapien
tgttgcagtaagcagccaggtgcct

SEQ ID NO: 2704556 - DNA, 25 bp, Homo sapien
gaatttgggccgtcaacaatctgta

SEQ ID NO: 2704557 - DNA, 25 bp, Homo sapien
gaatcaacagagacgcacaaaggct

SEQ ID NO: 2704558 - DNA, 25 bp, Homo sapien
gaagtatggtttacgttgacagcag

SEQ ID NO: 2704559 - DNA, 25 bp, Homo sapien
tcagtgttggagcaacaattaggcc

SEQ ID NO: 2704560 - DNA, 25 bp, Homo sapien
aaaagcccacatcaatgcaggctga

SEQ ID NO: 2704561 - DNA, 25 bp, Homo sapien
tgagagctaccccatgaagtatggt

SEQ ID NO: 2704562 - DNA, 25 bp, Homo sapien
tatgacctgaataaatgatcgtagg

SEQ ID NO: 2704563 - DNA, 25 bp, Homo sapien
gaataaatgatcgtaggagtaagaa

SEQ ID NO: 2704564 - DNA, 25 bp, Homo sapien
tacacacttgtgatctgaaaaatat

SEQ ID NO: 2704565 - DNA, 25 bp, Homo sapien
ttacaaacatagtatgacctgaata

SEQ ID NO: 2704566 - DNA, 25 bp, Homo sapien
tggaagtggataactgaagtttgaa

SEQ ID NO: 2704567 - DNA, 25 bp, Homo sapien
gaagtttgaatcttcgtcagaaaat

SEQ ID NO: 2704568 - DNA, 25 bp, Homo sapien
tttggaagtggataactgaagtttg

SEQ ID NO: 2704569 - DNA, 25 bp, Homo sapien
actagggtttggaagtggataactg

SEQ ID NO: 2704570 - DNA, 25 bp, Homo sapien
gaaacttctcttgagcaagcatata

SEQ ID NO: 2704571 - DNA, 25 bp, Homo sapien
tctcttgagcaagcatatactatag

SEQ ID NO: 2704572 - DNA, 25 bp, Homo sapien
gaagaatgtcctactattctccata

SEQ ID NO: 2704573 - DNA, 25 bp, Homo sapien
agtcttagaaacttctcttgagcaa

SEQ ID NO: 2704574 - DNA, 25 bp, Homo sapien
gttggagaattgagccagaaataat

SEQ ID NO: 2704575 - DNA, 25 bp, Homo sapien
ttcccagcagttcctgagaatattt

SEQ ID NO: 2704576 - DNA, 25 bp, Homo sapien
tcatttctagactcaaaagttggag

SEQ ID NO: 2704577 - DNA, 25 bp, Homo sapien
tatctgatatgcaagttcatttcta

SEQ ID NO: 2704578 - DNA, 25 bp, Homo sapien
ctaaaagagcattcggcccaggaca

SEQ ID NO: 2704579 - DNA, 25 bp, Homo sapien
gaaagtgcactctaccgcgctaaaa

SEQ ID NO: 2704580 - DNA, 25 bp, Homo sapien
cgttcgctcgggttctcgctgggtc

SEQ ID NO: 2704581 - DNA, 25 bp, Homo sapien
ttcgctcgggttctcgctgggtccc

SEQ ID NO: 2704582 - DNA, 25 bp, Homo sapien
gcctctgcgcgcagctccctcccat

SEQ ID NO: 2704583 - DNA, 25 bp, Homo sapien
cggcccggcgcctctgcgcgcagct

SEQ ID NO: 2704584 - DNA, 25 bp, Homo sapien
gccggcccggcgcctctgcgcgcag

SEQ ID NO: 2704585 - DNA, 25 bp, Homo sapien
cggcgcctctgcgcgcagctccctc

SEQ ID NO: 2704586 - DNA, 25 bp, Homo sapien
atcgagtagcggatcggctcactca

SEQ ID NO: 2704587 - DNA, 25 bp, Homo sapien
aatcgagtagcggatcggctcactc

SEQ ID NO: 2704588 - DNA, 25 bp, Homo sapien
tcgagtagcggatcggctcactcag

SEQ ID NO: 2704589 - DNA, 25 bp, Homo sapien
gaatcgagtagcggatcggctcact

SEQ ID NO: 2704590 - DNA, 25 bp, Homo sapien
tccgtggcagggtcaagcgatagtc

SEQ ID NO: 2704591 - DNA, 25 bp, Homo sapien
gaagagggcaacaaccattcctgga

SEQ ID NO: 2704592 - DNA, 25 bp, Homo sapien
taccatatcgaagaacgcggagccg

SEQ ID NO: 2704593 - DNA, 25 bp, Homo sapien
cgatagtcgtgtaccagcggatgca

SEQ ID NO: 2704594 - DNA, 25 bp, Homo sapien
gactattagataaatcacacacaaa

SEQ ID NO: 2704595 - DNA, 25 bp, Homo sapien
ctagtagactattagataaatcaca

SEQ ID NO: 2704596 - DNA, 25 bp, Homo sapien
agtagactattagataaatcacaca

SEQ ID NO: 2704597 - DNA, 25 bp, Homo sapien
tagactattagataaatcacacaca

SEQ ID NO: 2704598 - DNA, 25 bp, Homo sapien
actttaaattctggagtgagcttcc

SEQ ID NO: 2704599 - DNA, 25 bp, Homo sapien
ttgaagccctgagaatccggattga

SEQ ID NO: 2704600 - DNA, 25 bp, Homo sapien
taaattctggagtgagcttccctgc

SEQ ID NO: 2704601 - DNA, 25 bp, Homo sapien
tgagaatccggattgagctctggct

SEQ ID NO: 2704602 - DNA, 25 bp, Homo sapien
ctggttacagaattctgcaaagtcc

SEQ ID NO: 2704603 - DNA, 25 bp, Homo sapien
tggttacagaattctgcaaagtcct

SEQ ID NO: 2704604 - DNA, 25 bp, Homo sapien
ggttacagaattctgcaaagtcctc

SEQ ID NO: 2704605 - DNA, 25 bp, Homo sapien
tttgagcgattcctttgagcggcca

SEQ ID NO: 2704606 - DNA, 25 bp, Homo sapien
ctttgagcgattcctttgagcggcc

SEQ ID NO: 2704607 - DNA, 25 bp, Homo sapien
ttgagcgattcctttgagcggccat

SEQ ID NO: 2704608 - DNA, 25 bp, Homo sapien
atggaatcccgaagaaaaggcagag

SEQ ID NO: 2704609 - DNA, 25 bp, Homo sapien
ctcccatggaatcccgaagaaaagg

SEQ ID NO: 2704610 - DNA, 25 bp, Homo sapien
ccatggaatcccgaagaaaaggcag

SEQ ID NO: 2704611 - DNA, 25 bp, Homo sapien
cccatggaatcccgaagaaaaggca

SEQ ID NO: 2704612 - DNA, 25 bp, Homo sapien
gttgcccacgaaagagcctttctct

SEQ ID NO: 2704613 - DNA, 25 bp, Homo sapien
gggcgccagacccaagtccttggag

SEQ ID NO: 2704614 - DNA, 25 bp, Homo sapien
tcaggaattgagtaggagatctgcc

SEQ ID NO: 2704615 - DNA, 25 bp, Homo sapien
tgagtaggagatctgccgggctcca

SEQ ID NO: 2704616 - DNA, 25 bp, Homo sapien
ccggcgcgttgtcatttgcatcgaa

SEQ ID NO: 2704617 - DNA, 25 bp, Homo sapien
aacactcactcggtattctggcaag

SEQ ID NO: 2704618 - DNA, 25 bp, Homo sapien
cattggcacggctctgaactcttag

SEQ ID NO: 2704619 - DNA, 25 bp, Homo sapien
ggctacgactgttcccagaggtgaa

SEQ ID NO: 2704620 - DNA, 25 bp, Homo sapien
gatacgccaaaatggaacaggttac

SEQ ID NO: 2704621 - DNA, 25 bp, Homo sapien
tttaaatggtagatacgccaaaatg

SEQ ID NO: 2704622 - DNA, 25 bp, Homo sapien
taaatggtagatacgccaaaatgga

SEQ ID NO: 2704623 - DNA, 25 bp, Homo sapien
tggtagatacgccaaaatggaacag

SEQ ID NO: 2704624 - DNA, 25 bp, Homo sapien
tgtcaagggctctgtgtatcaccaa

SEQ ID NO: 2704625 - DNA, 25 bp, Homo sapien
tccgttgatagaggaggacttcccc

SEQ ID NO: 2704626 - DNA, 25 bp, Homo sapien
atatgtatgaggacagaggtacccc

SEQ ID NO: 2704627 - DNA, 25 bp, Homo sapien
tgagtgcatacaggacgccagtgtc

SEQ ID NO: 2704628 - DNA, 25 bp, Homo sapien
accatcatgccgcaaacttcaaagt

SEQ ID NO: 2704629 - DNA, 25 bp, Homo sapien
catcatgccgcaaacttcaaagtaa

SEQ ID NO: 2704630 - DNA, 25 bp, Homo sapien
tttagcatttacactttccaccatc

SEQ ID NO: 2704631 - DNA, 25 bp, Homo sapien
caaattctactcatcagtgttttag

SEQ ID NO: 2704632 - DNA, 25 bp, Homo sapien
tcagttataaatagggctggaaaaa

SEQ ID NO: 2704633 - DNA, 25 bp, Homo sapien
actatcaccacaaagtatagattga

SEQ ID NO: 2704634 - DNA, 25 bp, Homo sapien
ctggaaaaatctaagcatacattgt

SEQ ID NO: 2704635 - DNA, 25 bp, Homo sapien
ttgaaaaaggcctattgcccttctc

SEQ ID NO: 2704636 - DNA, 25 bp, Homo sapien
aatgaactcatcagtacctccaatg

SEQ ID NO: 2704637 - DNA, 25 bp, Homo sapien
gggtcttgagaaacttcggaatgct

SEQ ID NO: 2704638 - DNA, 25 bp, Homo sapien
caatttcagagttttcagagtttca

SEQ ID NO: 2704639 - DNA, 25 bp, Homo sapien
taagagatctacctaatacgtcact

SEQ ID NO: 2704640 - DNA, 25 bp, Homo sapien
tccacagacctatcattcaacaaat

SEQ ID NO: 2704641 - DNA, 25 bp, Homo sapien
cttccacagacctatcattcaacaa

SEQ ID NO: 2704642 - DNA, 25 bp, Homo sapien
cacagacctatcattcaacaaatgt

SEQ ID NO: 2704643 - DNA, 25 bp, Homo sapien
tccttccacagacctatcattcaac

SEQ ID NO: 2704644 - DNA, 25 bp, Homo sapien
ctgtattgcttttaaataattataa

SEQ ID NO: 2704645 - DNA, 25 bp, Homo sapien
gtattgcttttaaataattataatc

SEQ ID NO: 2704646 - DNA, 25 bp, Homo sapien
tattgcttttaaataattataatca

SEQ ID NO: 2704647 - DNA, 25 bp, Homo sapien
agtcattaccatcatccagggtgtc

SEQ ID NO: 2704648 - DNA, 25 bp, Homo sapien
ctagtcattaccatcatccagggtg

SEQ ID NO: 2704649 - DNA, 25 bp, Homo sapien
tagtcattaccatcatccagggtgt

SEQ ID NO: 2704650 - DNA, 25 bp, Homo sapien
aaaaggcacaaaataatatagcatg

SEQ ID NO: 2704651 - DNA, 25 bp, Homo sapien
tatctatgaagctggaagtactgaa

SEQ ID NO: 2704652 - DNA, 25 bp, Homo sapien
tttataggtctcctatcccacggcc

SEQ ID NO: 2704653 - DNA, 25 bp, Homo sapien
taagtactggaatgcaaccattgcc

SEQ ID NO: 2704654 - DNA, 25 bp, Homo sapien
ctaaaagagcattcggcccaggaca

SEQ ID NO: 2704655 - DNA, 25 bp, Homo sapien
gaaagtgcactctaccgcgctaaaa

SEQ ID NO: 2704656 - DNA, 25 bp, Homo sapien
cgttcgctcgggttctcgctgggtc

SEQ ID NO: 2704657 - DNA, 25 bp, Homo sapien
ttcgctcgggttctcgctgggtccc

SEQ ID NO: 2704658 - DNA, 25 bp, Homo sapien
cggcccggcgcctctgcgcgcagct

SEQ ID NO: 2704659 - DNA, 25 bp, Homo sapien
gccggcccggcgcctctgcgcgcag

SEQ ID NO: 2704660 - DNA, 25 bp, Homo sapien
gcctctgcgcgcagctccctcccat

SEQ ID NO: 2704661 - DNA, 25 bp, Homo sapien
cggcgcctctgcgcgcagctccctc

SEQ ID NO: 2704662 - DNA, 25 bp, Homo sapien
aaggcagcagcaaaggaaatagtac

SEQ ID NO: 2704663 - DNA, 25 bp, Homo sapien
ctcacacagcgtggggtagaacaaa

SEQ ID NO: 2704664 - DNA, 25 bp, Homo sapien
gtagaacaaaggcagcagcaaagga

SEQ ID NO: 2704665 - DNA, 25 bp, Homo sapien
aacaaaggcagcagcaaaggaaata

SEQ ID NO: 2704666 - DNA, 25 bp, Homo sapien
tcttatctgagcagtaccgcttcgg

SEQ ID NO: 2704667 - DNA, 25 bp, Homo sapien
ggtccccaccatctaaggcggtcag

SEQ ID NO: 2704668 - DNA, 25 bp, Homo sapien
tgtaatccagagagaacacgtgctg

SEQ ID NO: 2704669 - DNA, 25 bp, Homo sapien
tatttgctcacggtctattcggtcc

SEQ ID NO: 2704670 - DNA, 25 bp, Homo sapien
caatgagagagtaggagacacggcc

SEQ ID NO: 2704671 - DNA, 25 bp, Homo sapien
tgcaagctatctgcgaacaccaggt

SEQ ID NO: 2704672 - DNA, 25 bp, Homo sapien
cactgacttgcgctatggaggcacc

SEQ ID NO: 2704673 - DNA, 25 bp, Homo sapien
taggctgactgtccgaaaaccggcg

SEQ ID NO: 2704674 - DNA, 25 bp, Homo sapien
ttcttatctgcttcaacgctgggag

SEQ ID NO: 2704675 - DNA, 25 bp, Homo sapien
aattataggcatagggcaacgttcc

SEQ ID NO: 2704676 - DNA, 25 bp, Homo sapien
ccacaggtccggacttggagcagag

SEQ ID NO: 2704677 - DNA, 25 bp, Homo sapien
gattcatttgatccccaggcacaca

SEQ ID NO: 2704678 - DNA, 25 bp, Homo sapien
aatttgacctatattttgcgaactc

SEQ ID NO: 2704679 - DNA, 25 bp, Homo sapien
gcgaactctatgaagaagttatcta

SEQ ID NO: 2704680 - DNA, 25 bp, Homo sapien
aataataccactatattggaatata

SEQ ID NO: 2704681 - DNA, 25 bp, Homo sapien
taatgataaccataaatttgaccta

SEQ ID NO: 2704682 - DNA, 25 bp, Homo sapien
tgtatctatgaagtcctaggccgac

SEQ ID NO: 2704683 - DNA, 25 bp, Homo sapien
ttcccattccctgattggtgagcag

SEQ ID NO: 2704684 - DNA, 25 bp, Homo sapien
tcattccgctttgtgtggtagaggc

SEQ ID NO: 2704685 - DNA, 25 bp, Homo sapien
ccagtgtcaggatctgtgagtatcc

SEQ ID NO: 2704686 - DNA, 25 bp, Homo sapien
taagccgatattccgcggtttctcg

SEQ ID NO: 2704687 - DNA, 25 bp, Homo sapien
aggctctaagccgatattccgcggt

SEQ ID NO: 2704688 - DNA, 25 bp, Homo sapien
gctctaagccgatattccgcggttt

SEQ ID NO: 2704689 - DNA, 25 bp, Homo sapien
ggcaggctctaagccgatattccgc

SEQ ID NO: 2704690 - DNA, 25 bp, Homo sapien
agcagcagcagccgactgcggtccc

SEQ ID NO: 2704691 - DNA, 25 bp, Homo sapien
cagcagcagccgactgcggtccccg

SEQ ID NO: 2704692 - DNA, 25 bp, Homo sapien
ccccgcagcgtccccaggaaaatgc

SEQ ID NO: 2704693 - DNA, 25 bp, Homo sapien
gcagcagccgactgcggtccccgcg

SEQ ID NO: 2704694 - DNA, 25 bp, Homo sapien
gaagagcaatcactgtacctggagg

SEQ ID NO: 2704695 - DNA, 25 bp, Homo sapien
gcattaggaagagcaaatcgcgccc

SEQ ID NO: 2704696 - DNA, 25 bp, Homo sapien
gatattgcccacgaaggagcccttt

SEQ ID NO: 2704697 - DNA, 25 bp, Homo sapien
tttctgcagacaaaggcgggcttcc

SEQ ID NO: 2704698 - DNA, 25 bp, Homo sapien
caagtacagcgagaggtctgaggtt

SEQ ID NO: 2704699 - DNA, 25 bp, Homo sapien
caccaccaagtacagcgagaggtct

SEQ ID NO: 2704700 - DNA, 25 bp, Homo sapien
ccaccaagtacagcgagaggtctga

SEQ ID NO: 2704701 - DNA, 25 bp, Homo sapien
gctgccgaggtccgccaggacttcg

SEQ ID NO: 2704702 - DNA, 25 bp, Homo sapien
ctgcgagtccgcaatgagagagacc

SEQ ID NO: 2704703 - DNA, 25 bp, Homo sapien
tatcaagagtggctcgcttttctca

SEQ ID NO: 2704704 - DNA, 25 bp, Homo sapien
ctgattacttgtcgggtcacatttg

SEQ ID NO: 2704705 - DNA, 25 bp, Homo sapien
tagctgagtcttcagctatcaagag

SEQ ID NO: 2704706 - DNA, 25 bp, Homo sapien
caccaacaattaggaggcagagaaa

SEQ ID NO: 2704707 - DNA, 25 bp, Homo sapien
acaggctcaaaaaacatctccttaa

SEQ ID NO: 2704708 - DNA, 25 bp, Homo sapien
taacaggctcaaaaaacatctcctt

SEQ ID NO: 2704709 - DNA, 25 bp, Homo sapien
acttgtgccaagacaccaacaatta

SEQ ID NO: 2704710 - DNA, 25 bp, Homo sapien
caaaccagcatagttgaatggcccc

SEQ ID NO: 2704711 - DNA, 25 bp, Homo sapien
tgagagcctcatacactgataatag

SEQ ID NO: 2704712 - DNA, 25 bp, Homo sapien
tatgaactaaatatatgccgcccca

SEQ ID NO: 2704713 - DNA, 25 bp, Homo sapien
gattatcgtaatctcatgaaaggca

SEQ ID NO: 2704714 - DNA, 25 bp, Homo sapien
atatccaagtaatttggggcaaata

SEQ ID NO: 2704715 - DNA, 25 bp, Homo sapien
tatccaagtaatttggggcaaatac

SEQ ID NO: 2704716 - DNA, 25 bp, Homo sapien
aatatccaagtaatttggggcaaat

SEQ ID NO: 2704717 - DNA, 25 bp, Homo sapien
ctccgaatcaacataaccctcttaa

SEQ ID NO: 2704718 - DNA, 25 bp, Homo sapien
tcaacataaccctcttaatatcaca

SEQ ID NO: 2704719 - DNA, 25 bp, Homo sapien
cataaccctcttaatatcacatttc

SEQ ID NO: 2704720 - DNA, 25 bp, Homo sapien
gaatcaacataaccctcttaatatc

SEQ ID NO: 2704721 - DNA, 25 bp, Homo sapien
tgagggcaccccaatccgtatggaa

SEQ ID NO: 2704722 - DNA, 25 bp, Homo sapien
actcaatgctcccagtttgagggca

SEQ ID NO: 2704723 - DNA, 25 bp, Homo sapien
cagaatatcgtcctggtagatccca

SEQ ID NO: 2704724 - DNA, 25 bp, Homo sapien
tcttgcagcacattggccaacagca

SEQ ID NO: 2704725 - DNA, 25 bp, Homo sapien
cgggtcctgcttctctgcttcaccc

SEQ ID NO: 2704726 - DNA, 25 bp, Homo sapien
gccgggtcctgcttctctgcttcac

SEQ ID NO: 2704727 - DNA, 25 bp, Homo sapien
tgccactgccgggtcctgcttctct

SEQ ID NO: 2704728 - DNA, 25 bp, Homo sapien
cttgccactgccgggtcctgcttct

SEQ ID NO: 2704729 - DNA, 25 bp, Homo sapien
agccgcatgtcctccgcaaggttcc

SEQ ID NO: 2704730 - DNA, 25 bp, Homo sapien
gccctggaccgtttcttctggaata

SEQ ID NO: 2704731 - DNA, 25 bp, Homo sapien
cacggagccctggaccgtttcttct

SEQ ID NO: 2704732 - DNA, 25 bp, Homo sapien
tggaatagagtagcggatctgctcc

SEQ ID NO: 2704733 - DNA, 25 bp, Homo sapien
taaggtttcaggtcaataaatcctg

SEQ ID NO: 2704734 - DNA, 25 bp, Homo sapien
ctaaggtttcaggtcaataaatcct

SEQ ID NO: 2704735 - DNA, 25 bp, Homo sapien
aaggtttcaggtcaataaatcctga

SEQ ID NO: 2704736 - DNA, 25 bp, Homo sapien
ggtttcaggtcaataaatcctgaac

SEQ ID NO: 2704737 - DNA, 25 bp, Homo sapien
tcccattctccgtgttcacggtaaa

SEQ ID NO: 2704738 - DNA, 25 bp, Homo sapien
cacaagtatgttcccattctccgtg

SEQ ID NO: 2704739 - DNA, 25 bp, Homo sapien
tctccgtgttcacggtaaagtattg

SEQ ID NO: 2704740 - DNA, 25 bp, Homo sapien
ctgtcactcacaagtatgttcccat

SEQ ID NO: 2704741 - DNA, 25 bp, Homo sapien
gacacagaggattttgaagacagtg

SEQ ID NO: 2704742 - DNA, 25 bp, Homo sapien
aagggtatgacacagaggattttga

SEQ ID NO: 2704743 - DNA, 25 bp, Homo sapien
atgacacagaggattttgaagacag

SEQ ID NO: 2704744 - DNA, 25 bp, Homo sapien
ctaagggtatgacacagaggatttt

SEQ ID NO: 2704745 - DNA, 25 bp, Homo sapien
aaacatttagaggattctctgctac

SEQ ID NO: 2704746 - DNA, 25 bp, Homo sapien
acatttagaggattctctgctacaa

SEQ ID NO: 2704747 - DNA, 25 bp, Homo sapien
aacatttagaggattctctgctaca

SEQ ID NO: 2704748 - DNA, 25 bp, Homo sapien
catttagaggattctctgctacaat

SEQ ID NO: 2704749 - DNA, 25 bp, Homo sapien
ttggggaaaatgaggtgggttatca

SEQ ID NO: 2704750 - DNA, 25 bp, Homo sapien
aaaatgaggtgggttatcatttata

SEQ ID NO: 2704751 - DNA, 25 bp, Homo sapien
ggaaaatgaggtgggttatcattta

SEQ ID NO: 2704752 - DNA, 25 bp, Homo sapien
atgaggtgggttatcatttatatct

SEQ ID NO: 2704753 - DNA, 25 bp, Homo sapien
tatatcgaagagtgcggagccatcg

SEQ ID NO: 2704754 - DNA, 25 bp, Homo sapien
gaacagagtgatcaccgtccagggt

SEQ ID NO: 2704755 - DNA, 25 bp, Homo sapien
cactgaagtaaaaaccacgtctggg

SEQ ID NO: 2704756 - DNA, 25 bp, Homo sapien
gagtgaggccctacatctgcatcta

SEQ ID NO: 2704757 - DNA, 25 bp, Homo sapien
gcgttgtgtcccgaatctgcgtcca

SEQ ID NO: 2704758 - DNA, 25 bp, Homo sapien
ccaagcgttgtgtcccgaatctgcg

SEQ ID NO: 2704759 - DNA, 25 bp, Homo sapien
caagcgttgtgtcccgaatctgcgt

SEQ ID NO: 2704760 - DNA, 25 bp, Homo sapien
ttgtgtcccgaatctgcgtccaccg

SEQ ID NO: 2704761 - DNA, 25 bp, Homo sapien
agcaggttcccgtgtgcagccccag

SEQ ID NO: 2704762 - DNA, 25 bp, Homo sapien
gcaggttcccgtgtgcagccccagg

SEQ ID NO: 2704763 - DNA, 25 bp, Homo sapien
ccagcaggttcccgtgtgcagcccc

SEQ ID NO: 2704764 - DNA, 25 bp, Homo sapien
actaggtgaagcgtagcggcgcaga

SEQ ID NO: 2704765 - DNA, 25 bp, Homo sapien
ctgcgaagactaggtgaagcgtagc

SEQ ID NO: 2704766 - DNA, 25 bp, Homo sapien
aggtgaagcgtagcggcgcagagag

SEQ ID NO: 2704767 - DNA, 25 bp, Homo sapien
ctgtctgcgaagactaggtgaagcg

SEQ ID NO: 2704768 - DNA, 25 bp, Homo sapien
tgaagtctggcagtgcctcctgcag

SEQ ID NO: 2704769 - DNA, 25 bp, Homo sapien
actgaagtctggcagtgcctcctgc

SEQ ID NO: 2704770 - DNA, 25 bp, Homo sapien
gaagtctggcagtgcctcctgcagg

SEQ ID NO: 2704771 - DNA, 25 bp, Homo sapien
tcactgaagtctggcagtgcctcct

SEQ ID NO: 2704772 - DNA, 25 bp, Homo sapien
gaacagagaccagggtgaaagcaac

SEQ ID NO: 2704773 - DNA, 25 bp, Homo sapien
tctttttctagaatccgagggaaca

SEQ ID NO: 2704774 - DNA, 25 bp, Homo sapien
cagtgaagcttgctaccagagaaac

SEQ ID NO: 2704775 - DNA, 25 bp, Homo sapien
aaggcgaccgccaaaatcactgcga

SEQ ID NO: 2704776 - DNA, 25 bp, Homo sapien
aatagattccttgaatgatcctgaa

SEQ ID NO: 2704777 - DNA, 25 bp, Homo sapien
gaatgatcctgaatggaaggattac

SEQ ID NO: 2704778 - DNA, 25 bp, Homo sapien
tgatcctgaatggaaggattacttt

SEQ ID NO: 2704779 - DNA, 25 bp, Homo sapien
atcctgaatggaaggattactttac

SEQ ID NO: 2704780 - DNA, 25 bp, Homo sapien
tattatggagatgtctccctaggag

SEQ ID NO: 2704781 - DNA, 25 bp, Homo sapien
cacacctattatggagatgtctccc

SEQ ID NO: 2704782 - DNA, 25 bp, Homo sapien
gagatgtctccctaggagtttctct

SEQ ID NO: 2704783 - DNA, 25 bp, Homo sapien
ccccaacacacctattatggagatg

SEQ ID NO: 2704784 - DNA, 25 bp, Homo sapien
atgagcttttaaatgaattggaagt

SEQ ID NO: 2704785 - DNA, 25 bp, Homo sapien
caatgagcttttaaatgaattggaa

SEQ ID NO: 2704786 - DNA, 25 bp, Homo sapien
tttaaatgaattggaagtttctata

SEQ ID NO: 2704787 - DNA, 25 bp, Homo sapien
taaatgaattggaagtttctataaa

SEQ ID NO: 2704788 - DNA, 25 bp, Homo sapien
ggagcagttccttcgcccatagaat

SEQ ID NO: 2704789 - DNA, 25 bp, Homo sapien
tctccccgattggtgaacagcggcg

SEQ ID NO: 2704790 - DNA, 25 bp, Homo sapien
ctttgtgcttcaggcgcgtgcaagg

SEQ ID NO: 2704791 - DNA, 25 bp, Homo sapien
cggcgctcagagtcctaaccaatta

SEQ ID NO: 2704792 - DNA, 25 bp, Homo sapien
tggtagaatcctgactcctcgtggt

SEQ ID NO: 2704793 - DNA, 25 bp, Homo sapien
tagagggaaccgcatctcagtggct

SEQ ID NO: 2704794 - DNA, 25 bp, Homo sapien
caagccctttgtagtcccggtgcag

SEQ ID NO: 2704795 - DNA, 25 bp, Homo sapien
acacgtaggacgataggcttgcccc

SEQ ID NO: 2704796 - DNA, 25 bp, Homo sapien
ctcaattaacccatgactgtcttta

SEQ ID NO: 2704797 - DNA, 25 bp, Homo sapien
caattaacccatgactgtctttaga

SEQ ID NO: 2704798 - DNA, 25 bp, Homo sapien
taacccatgactgtctttagaaaat

SEQ ID NO: 2704799 - DNA, 25 bp, Homo sapien
attaacccatgactgtctttagaaa

SEQ ID NO: 2704800 - DNA, 25 bp, Homo sapien
agaaagaagatttgatataaactca

SEQ ID NO: 2704801 - DNA, 25 bp, Homo sapien
gaaagaagatttgatataaactcac

SEQ ID NO: 2704802 - DNA, 25 bp, Homo sapien
aagaaagaagatttgatataaactc

SEQ ID NO: 2704803 - DNA, 25 bp, Homo sapien
aaagaaagaagatttgatataaact

SEQ ID NO: 2704804 - DNA, 25 bp, Homo sapien
tgtagtccctgttacaccggaggca

SEQ ID NO: 2704805 - DNA, 25 bp, Homo sapien
actcctgtctgtacaagaaagtaat

SEQ ID NO: 2704806 - DNA, 25 bp, Homo sapien
agtccctgttacaccggaggcaaag

SEQ ID NO: 2704807 - DNA, 25 bp, Homo sapien
cctgtctgtacaagaaagtaataga

SEQ ID NO: 2704808 - DNA, 25 bp, Homo sapien
gcaggaggctagcctgagcccaagt

SEQ ID NO: 2704809 - DNA, 25 bp, Homo sapien
agcaggaggctagcctgagcccaag

SEQ ID NO: 2704810 - DNA, 25 bp, Homo sapien
tggatgaaactagaggataaagttt

SEQ ID NO: 2704811 - DNA, 25 bp, Homo sapien
gattaaagcaagtgtcatcaatgga

SEQ ID NO: 2704812 - DNA, 25 bp, Homo sapien
ggtagaaagccaattaacaactgta

SEQ ID NO: 2704813 - DNA, 25 bp, Homo sapien
catttggaggtgattgtaataagtg

SEQ ID NO: 2704814 - DNA, 25 bp, Homo sapien
taagataagtcagacagttggcagg

SEQ ID NO: 2704815 - DNA, 25 bp, Homo sapien
agccttttaagataagtcagacagt

SEQ ID NO: 2704816 - DNA, 25 bp, Homo sapien
gaaatcttatgaactgaggcatcta

SEQ ID NO: 2704817 - DNA, 25 bp, Homo sapien
ataagtcagacagttggcagggtgc

SEQ ID NO: 2704818 - DNA, 25 bp, Homo sapien
ataggaatgttgtgggtctgctctt

SEQ ID NO: 2704819 - DNA, 25 bp, Homo sapien
aataggaatgttgtgggtctgctct

SEQ ID NO: 2704820 - DNA, 25 bp, Homo sapien
taggaatgttgtgggtctgctcttg

SEQ ID NO: 2704821 - DNA, 25 bp, Homo sapien
tataatttgtagaactaggagccat

SEQ ID NO: 2704822 - DNA, 25 bp, Homo sapien
ctgcttataatttgtagaactagga

SEQ ID NO: 2704823 - DNA, 25 bp, Homo sapien
cttataatttgtagaactaggagcc

SEQ ID NO: 2704824 - DNA, 25 bp, Homo sapien
gcttataatttgtagaactaggagc

SEQ ID NO: 2704825 - DNA, 25 bp, Homo sapien
tcttggattatagaatctccagcca

SEQ ID NO: 2704826 - DNA, 25 bp, Homo sapien
tcattgcctgtaaatccgttccgtt

SEQ ID NO: 2704827 - DNA, 25 bp, Homo sapien
gaaggagctgaactcattgcctgta

SEQ ID NO: 2704828 - DNA, 25 bp, Homo sapien
acagttagagttgctgctgctccag

SEQ ID NO: 2704829 - DNA, 25 bp, Homo sapien
gcatcatagagaatgcccagcagga

SEQ ID NO: 2704830 - DNA, 25 bp, Homo sapien
gaatgcccagcaggatagaaatagc

SEQ ID NO: 2704831 - DNA, 25 bp, Homo sapien
ggaggcagtagtcgccttggttcta

SEQ ID NO: 2704832 - DNA, 25 bp, Homo sapien
ggttctacccagactgtcagtccag

SEQ ID NO: 2704833 - DNA, 25 bp, Homo sapien
gctcctctaggactgaataacggat

SEQ ID NO: 2704834 - DNA, 25 bp, Homo sapien
agctcctctaggactgaataacgga

SEQ ID NO: 2704835 - DNA, 25 bp, Homo sapien
tgtcctcgacactgagtcccagatc

SEQ ID NO: 2704836 - DNA, 25 bp, Homo sapien
tcaagtgggcatgtcctcgacactg

SEQ ID NO: 2704837 - DNA, 25 bp, Homo sapien
tgggcatgtcctcgacactgagtcc

SEQ ID NO: 2704838 - DNA, 25 bp, Homo sapien
catgtcctcgacactgagtcccaga

SEQ ID NO: 2704839 - DNA, 25 bp, Homo sapien
ggccccatttgttacaagcatgtag

SEQ ID NO: 2704840 - DNA, 25 bp, Homo sapien
caagcatgtagttaattattggagg

SEQ ID NO: 2704841 - DNA, 25 bp, Homo sapien
catgtagttaattattggaggaaga

SEQ ID NO: 2704842 - DNA, 25 bp, Homo sapien
ctggtccacggccccatttgttaca

SEQ ID NO: 2704843 - DNA, 25 bp, Homo sapien
tgtggctccaggtcactggccacga

SEQ ID NO: 2704844 - DNA, 25 bp, Homo sapien
aggtcactggccacgatggaatagg

SEQ ID NO: 2704845 - DNA, 25 bp, Homo sapien
ctagaatcacagcgcctgtggctcc

SEQ ID NO: 2704846 - DNA, 25 bp, Homo sapien
tagaatcacagcgcctgtggctcca

SEQ ID NO: 2704847 - DNA, 25 bp, Homo sapien
cagcgtgagcttgaaggctcgcggc

SEQ ID NO: 2704848 - DNA, 25 bp, Homo sapien
tgcagcgtgagcttgaaggctcgcg

SEQ ID NO: 2704849 - DNA, 25 bp, Homo sapien
cgtgagcttgaaggctcgcggctgc

SEQ ID NO: 2704850 - DNA, 25 bp, Homo sapien
agcttgaaggctcgcggctgctctt

SEQ ID NO: 2704851 - DNA, 25 bp, Homo sapien
cgttgtcattcaggtcgtccaccaa

SEQ ID NO: 2704852 - DNA, 25 bp, Homo sapien
ccgcggtgcgttgtcattcaggtcg

SEQ ID NO: 2704853 - DNA, 25 bp, Homo sapien
gcgttgtcattcaggtcgtccacca

SEQ ID NO: 2704854 - DNA, 25 bp, Homo sapien
ggtgcgttgtcattcaggtcgtcca

SEQ ID NO: 2704855 - DNA, 25 bp, Homo sapien
atccaagagcgcgaagccattgcgc

SEQ ID NO: 2704856 - DNA, 25 bp, Homo sapien
caagagcgcgaagccattgcgctcc

SEQ ID NO: 2704857 - DNA, 25 bp, Homo sapien
tccaagagcgcgaagccattgcgct

SEQ ID NO: 2704858 - DNA, 25 bp, Homo sapien
aagagcgcgaagccattgcgctcca

SEQ ID NO: 2704859 - DNA, 25 bp, Homo sapien
accaggtagccaggctccgcggcgt

SEQ ID NO: 2704860 - DNA, 25 bp, Homo sapien
ccaggtagccaggctccgcggcgtg

SEQ ID NO: 2704861 - DNA, 25 bp, Homo sapien
caggtagccaggctccgcggcgtgc

SEQ ID NO: 2704862 - DNA, 25 bp, Homo sapien
ggtaggacagccacgcattgtgtct

SEQ ID NO: 2704863 - DNA, 25 bp, Homo sapien
aggacagccacgcattgtgtctcac

SEQ ID NO: 2704864 - DNA, 25 bp, Homo sapien
taggacagccacgcattgtgtctca

SEQ ID NO: 2704865 - DNA, 25 bp, Homo sapien
gtaggacagccacgcattgtgtctc

SEQ ID NO: 2704866 - DNA, 25 bp, Homo sapien
ctcgtcggtgcgcattccaggctga

SEQ ID NO: 2704867 - DNA, 25 bp, Homo sapien
gtcggtgcgcattccaggctgaaga

SEQ ID NO: 2704868 - DNA, 25 bp, Homo sapien
tcgtcggtgcgcattccaggctgaa

SEQ ID NO: 2704869 - DNA, 25 bp, Homo sapien
tcggtgcgcattccaggctgaagag

SEQ ID NO: 2704870 - DNA, 25 bp, Homo sapien
taggcgctggcgagtcgctttcctg

SEQ ID NO: 2704871 - DNA, 25 bp, Homo sapien
gctggcgagtcgctttcctgtggcc

SEQ ID NO: 2704872 - DNA, 25 bp, Homo sapien
accagtaggcgctggcgagtcgctt

SEQ ID NO: 2704873 - DNA, 25 bp, Homo sapien
tggcgagtcgctttcctgtggccca

SEQ ID NO: 2704874 - DNA, 25 bp, Homo sapien
cgtggcggtagcgagaggagcggct

SEQ ID NO: 2704875 - DNA, 25 bp, Homo sapien
ctgaggtctggcagagtctcctgca

SEQ ID NO: 2704876 - DNA, 25 bp, Homo sapien
gctgtcggcgacgaggggcggtagt

SEQ ID NO: 2704877 - DNA, 25 bp, Homo sapien
gtagctttgcagagtgatcgctgag

SEQ ID NO: 2704878 - DNA, 25 bp, Homo sapien
caaagtttaggtctggcaacttcca

SEQ ID NO: 2704879 - DNA, 25 bp, Homo sapien
taagattatagatgcgcctggcgag

SEQ ID NO: 2704880 - DNA, 25 bp, Homo sapien
taagacgctcttcagtggaacaata

SEQ ID NO: 2704881 - DNA, 25 bp, Homo sapien
tggaacactcagtcataagacgctc

SEQ ID NO: 2704882 - DNA, 25 bp, Homo sapien
ccaattcactgatagggaaatgtat

SEQ ID NO: 2704883 - DNA, 25 bp, Homo sapien
taaataagtcataaggagagaagct

SEQ ID NO: 2704884 - DNA, 25 bp, Homo sapien
gctatgctaacattatctggatcaa

SEQ ID NO: 2704885 - DNA, 25 bp, Homo sapien
tactagttcagtaaaatgctatgct

SEQ ID NO: 2704886 - DNA, 25 bp, Homo sapien
gttagaaaatcatctccccagagtg

SEQ ID NO: 2704887 - DNA, 25 bp, Homo sapien
gacaaggcctagaaacagtgacagc

SEQ ID NO: 2704888 - DNA, 25 bp, Homo sapien
cagaactggaggtatcaatatgaac

SEQ ID NO: 2704889 - DNA, 25 bp, Homo sapien
gcccattagcagtgagcatacctca

SEQ ID NO: 2704890 - DNA, 25 bp, Homo sapien
gaatagcactaaactggacacaact

SEQ ID NO: 2704891 - DNA, 25 bp, Homo sapien
atgaatgaacacattgtgatatatc

SEQ ID NO: 2704892 - DNA, 25 bp, Homo sapien
agaccagttgttgcctggagctgga

SEQ ID NO: 2704893 - DNA, 25 bp, Homo sapien
gctggagaagtagtgaattgattgc

SEQ ID NO: 2704894 - DNA, 25 bp, Homo sapien
tgcgggcacttgagcatgtgaggcg

SEQ ID NO: 2704895 - DNA, 25 bp, Homo sapien
tgaggtgcgggcacttgagcatgtg

SEQ ID NO: 2704896 - DNA, 25 bp, Homo sapien
gtgcgggcacttgagcatgtgaggc

SEQ ID NO: 2704897 - DNA, 25 bp, Homo sapien
aggtgcgggcacttgagcatgtgag

SEQ ID NO: 2704898 - DNA, 25 bp, Homo sapien
tctatttttagcagagacagggttt

SEQ ID NO: 2704899 - DNA, 25 bp, Homo sapien
ttttgagatggagtttaccgttgct

SEQ ID NO: 2704900 - DNA, 25 bp, Homo sapien
gatggagtttaccgttgctcttgtt

SEQ ID NO: 2704901 - DNA, 25 bp, Homo sapien
ctatttttagcagagacagggtttc

SEQ ID NO: 2704902 - DNA, 25 bp, Homo sapien
acaaatgttaaatatgtcaggaaac

SEQ ID NO: 2704903 - DNA, 25 bp, Homo sapien
ccttcttattgtttactatatcaca

SEQ ID NO: 2704904 - DNA, 25 bp, Homo sapien
actaaatttgtccacatgaaaatct

SEQ ID NO: 2704905 - DNA, 25 bp, Homo sapien
tgtcaggaaactacctgcaaaaaat

SEQ ID NO: 2704906 - DNA, 25 bp, Homo sapien
tacgtaacttgtagggtcagtgcaa

SEQ ID NO: 2704907 - DNA, 25 bp, Homo sapien
catgcagagacctgagtaatctttc

SEQ ID NO: 2704908 - DNA, 25 bp, Homo sapien
cataactaagcctagctacgtaact

SEQ ID NO: 2704909 - DNA, 25 bp, Homo sapien
gcagagacctgagtaatctttcaaa

SEQ ID NO: 2704910 - DNA, 25 bp, Homo sapien
tatagtgcccctatacgatgcaggg

SEQ ID NO: 2704911 - DNA, 25 bp, Homo sapien
tcatgcttgtctgtagtcaatcttc

SEQ ID NO: 2704912 - DNA, 25 bp, Homo sapien
tagtactcattgatataaccacaga

SEQ ID NO: 2704913 - DNA, 25 bp, Homo sapien
tatacagtaatgcaaccaaccccac

SEQ ID NO: 2704914 - DNA, 25 bp, Homo sapien
gaccaatggtctaggcatcaccggg

SEQ ID NO: 2704915 - DNA, 25 bp, Homo sapien
gtatgcattctccacaatagcgagg

SEQ ID NO: 2704916 - DNA, 25 bp, Homo sapien
taatagaggtcttccattaggcccc

SEQ ID NO: 2704917 - DNA, 25 bp, Homo sapien
cacttggagggtggtcagaacccca

SEQ ID NO: 2704918 - DNA, 25 bp, Homo sapien
tcttcattggccgacagcggcacac

SEQ ID NO: 2704919 - DNA, 25 bp, Homo sapien
cgccgagtccgacatggctttctgg

SEQ ID NO: 2704920 - DNA, 25 bp, Homo sapien
tgctcgccggctgttcagtctctgc

SEQ ID NO: 2704921 - DNA, 25 bp, Homo sapien
tggatgccgttgatttgctcgccgg

SEQ ID NO: 2704922 - DNA, 25 bp, Homo sapien
cagcggggtccagatcgtccctgag

SEQ ID NO: 2704923 - DNA, 25 bp, Homo sapien
tcgtccctgagatttcgctgagaaa

SEQ ID NO: 2704924 - DNA, 25 bp, Homo sapien
gggtccagatcgtccctgagatttc

SEQ ID NO: 2704925 - DNA, 25 bp, Homo sapien
tccagatcgtccctgagatttcgct

SEQ ID NO: 2704926 - DNA, 25 bp, Homo sapien
cttgttcaaggcaccaagcagaagc

SEQ ID NO: 2704927 - DNA, 25 bp, Homo sapien
gatccagacggtcgttcacaaacat

SEQ ID NO: 2704928 - DNA, 25 bp, Homo sapien
caaaccaaggttcgcgaccacgttg

SEQ ID NO: 2704929 - DNA, 25 bp, Homo sapien
gctgagaggctaccgagatccaaac

SEQ ID NO: 2704930 - DNA, 25 bp, Homo sapien
tcaaagaatcttcggctagctccag

SEQ ID NO: 2704931 - DNA, 25 bp, Homo sapien
tcggctcagctcataggtttgtaaa

SEQ ID NO: 2704932 - DNA, 25 bp, Homo sapien
taaagagttgcttcccacatcggga

SEQ ID NO: 2704933 - DNA, 25 bp, Homo sapien
gggccttcatccagatccgttgcaa

SEQ ID NO: 2704934 - DNA, 25 bp, Homo sapien
ttgcaaggacttgtaccacgcgcgt

SEQ ID NO: 2704935 - DNA, 25 bp, Homo sapien
tctaaggcgaatagttgccgcacgc

SEQ ID NO: 2704936 - DNA, 25 bp, Homo sapien
tactgatttgaccagtgtgcagccc

SEQ ID NO: 2704937 - DNA, 25 bp, Homo sapien
tactgggctgtacacggaggtgact

SEQ ID NO: 2704938 - DNA, 25 bp, Homo sapien
tatgattactccgaacactgtgacc

SEQ ID NO: 2704939 - DNA, 25 bp, Homo sapien
aacacctgcctatagaacaccggat

SEQ ID NO: 2704940 - DNA, 25 bp, Homo sapien
cggcgggagtccgtggtgagataca

SEQ ID NO: 2704941 - DNA, 25 bp, Homo sapien
tgcaccaggtttcttcagcagcggg

SEQ ID NO: 2704942 - DNA, 25 bp, Homo sapien
ccggatcacagctccgcagcgtgtt

SEQ ID NO: 2704943 - DNA, 25 bp, Homo sapien
taaaaaagcactaacagggtcaagc

SEQ ID NO: 2704944 - DNA, 25 bp, Homo sapien
cactaacagggtcaagcatgacttg

SEQ ID NO: 2704945 - DNA, 25 bp, Homo sapien
ttgaaagtgtgaatgcatcaccagg

SEQ ID NO: 2704946 - DNA, 25 bp, Homo sapien
tcaagcatgacttgctaaaccttac

SEQ ID NO: 2704947 - DNA, 25 bp, Homo sapien
aaaccacactctggcaggccaccat

SEQ ID NO: 2704948 - DNA, 25 bp, Homo sapien
aatgggaccacaaaccacactctgg

SEQ ID NO: 2704949 - DNA, 25 bp, Homo sapien
ggaccacaaaccacactctggcagg

SEQ ID NO: 2704950 - DNA, 25 bp, Homo sapien
ctgaaatgggaccacaaaccacact

SEQ ID NO: 2704951 - DNA, 25 bp, Homo sapien
catcccttagcaagattggttagtt

SEQ ID NO: 2704952 - DNA, 25 bp, Homo sapien
caagctaaactctgatcgctgagat

SEQ ID NO: 2704953 - DNA, 25 bp, Homo sapien
tagaagctgccactggttagaggta

SEQ ID NO: 2704954 - DNA, 25 bp, Homo sapien
gatgtgaattaggtccacagatgag

SEQ ID NO: 2704955 - DNA, 25 bp, Homo sapien
ttgtaagcagggtgcacatcatttc

SEQ ID NO: 2704956 - DNA, 25 bp, Homo sapien
tattttgtaagcagggtgcacatca

SEQ ID NO: 2704957 - DNA, 25 bp, Homo sapien
aaatattttgtaagcagggtgcaca

SEQ ID NO: 2704958 - DNA, 25 bp, Homo sapien
aaaatattttgtaagcagggtgcac

SEQ ID NO: 2704959 - DNA, 25 bp, Homo sapien
aatggttatctttgggtttggagat

SEQ ID NO: 2704960 - DNA, 25 bp, Homo sapien
tggttatctttgggtttggagatta

SEQ ID NO: 2704961 - DNA, 25 bp, Homo sapien
tatctttgggtttggagattatagt

SEQ ID NO: 2704962 - DNA, 25 bp, Homo sapien
gttatctttgggtttggagattata

SEQ ID NO: 2704963 - DNA, 25 bp, Homo sapien
ggcactgagcagcaagaactacagg

SEQ ID NO: 2704964 - DNA, 25 bp, Homo sapien
cagacagtggattgatcaattgatc

SEQ ID NO: 2704965 - DNA, 25 bp, Homo sapien
ccactactggatagcacagcagttt

SEQ ID NO: 2704966 - DNA, 25 bp, Homo sapien
cagatgtcatcccactactggatag

SEQ ID NO: 2704967 - DNA, 25 bp, Homo sapien
cagggactaacactggaggcaccaa

SEQ ID NO: 2704968 - DNA, 25 bp, Homo sapien
tctacctttcacattgtgcatatac

SEQ ID NO: 2704969 - DNA, 25 bp, Homo sapien
gatagtatccttgcataccaccctg

SEQ ID NO: 2704970 - DNA, 25 bp, Homo sapien
aatgctttacctgtctaaggatatg

SEQ ID NO: 2704971 - DNA, 25 bp, Homo sapien
cacagactcctagttggtaaatggt

SEQ ID NO: 2704972 - DNA, 25 bp, Homo sapien
tttaacagttatgatatgccaggca

SEQ ID NO: 2704973 - DNA, 25 bp, Homo sapien
aacagtgtttctcctacagttgaga

SEQ ID NO: 2704974 - DNA, 25 bp, Homo sapien
tagaacctcatttgactaactgcca

SEQ ID NO: 2704975 - DNA, 25 bp, Homo sapien
tacttgctccatacagggactttat

SEQ ID NO: 2704976 - DNA, 25 bp, Homo sapien
tctcacaacaagtttgcaaagtaga

SEQ ID NO: 2704977 - DNA, 25 bp, Homo sapien
ctctgggtaccagaatgataacttt

SEQ ID NO: 2704978 - DNA, 25 bp, Homo sapien
tgtctggcacatagggatgctaata

SEQ ID NO: 2704979 - DNA, 25 bp, Homo sapien
ccaataggctgagcagagaacgtcc

SEQ ID NO: 2704980 - DNA, 25 bp, Homo sapien
gctcaacggcatgtttttccacggg

SEQ ID NO: 2704981 - DNA, 25 bp, Homo sapien
gcagcagggttaatgcgtcgcagca

SEQ ID NO: 2704982 - DNA, 25 bp, Homo sapien
tttcaccacccgattggcagacagc

SEQ ID NO: 2704983 - DNA, 25 bp, Homo sapien
ggccggcgccgcaagggttacgcgc

SEQ ID NO: 2704984 - DNA, 25 bp, Homo sapien
ctacttgctcctgagacgcggatga

SEQ ID NO: 2704985 - DNA, 25 bp, Homo sapien
tttccccgcgccagctctggcgcgg

SEQ ID NO: 2704986 - DNA, 25 bp, Homo sapien
gccagctctggcgcggttcggccgg

SEQ ID NO: 2704987 - DNA, 25 bp, Homo sapien
gccagatttctgtccagcttctcac

SEQ ID NO: 2704988 - DNA, 25 bp, Homo sapien
cgccagatttctgtccagcttctca

SEQ ID NO: 2704989 - DNA, 25 bp, Homo sapien
ctgcccacaaacgtaacccaggtgg

SEQ ID NO: 2704990 - DNA, 25 bp, Homo sapien
cagactgtccgtatccagcaggaaa

SEQ ID NO: 2704991 - DNA, 25 bp, Homo sapien
cagcaggaaatcttgagcgacattc

SEQ ID NO: 2704992 - DNA, 25 bp, Homo sapien
cctgtgactcctctgggaccgggta

SEQ ID NO: 2704993 - DNA, 25 bp, Homo sapien
gagcgacattccctacaaaagtccc

SEQ ID NO: 2704994 - DNA, 25 bp, Homo sapien
gcaaagtgttcattggagctcagcc

SEQ ID NO: 2704995 - DNA, 25 bp, Homo sapien
cacacagtgcctctcggtcgattgg

SEQ ID NO: 2704996 - DNA, 25 bp, Homo sapien
tgtcgtttacgtccagcacggatac

SEQ ID NO: 2704997 - DNA, 25 bp, Homo sapien
tgcatcctgagccttttccaacggg

SEQ ID NO: 2704998 - DNA, 25 bp, Homo sapien
aaagaggtttcttacacgatcaggg

SEQ ID NO: 2704999 - DNA, 25 bp, Homo sapien
tagatttggcctctcgatccaaggg

SEQ ID NO: 2705000 - DNA, 25 bp, Homo sapien
gatccactcgaaggctgcaatgttg

SEQ ID NO: 2705001 - DNA, 25 bp, Homo sapien
aggtgacgttaccactgggacccag

SEQ ID NO: 2705002 - DNA, 25 bp, Homo sapien
cctttgtgattaggtggccagcacc

SEQ ID NO: 2705003 - DNA, 25 bp, Homo sapien
tatcgagagactgcaaacaggctgg

SEQ ID NO: 2705004 - DNA, 25 bp, Homo sapien
caaaggatcgagtagcatgaacagc

SEQ ID NO: 2705005 - DNA, 25 bp, Homo sapien
tagtgccacgaatgagccaaaggag

SEQ ID NO: 2705006 - DNA, 25 bp, Homo sapien
gcctagccatatgcctggatcagaa

SEQ ID NO: 2705007 - DNA, 25 bp, Homo sapien
tggatcagaataaccctcaagcatt

SEQ ID NO: 2705008 - DNA, 25 bp, Homo sapien
tttgttgagcctgcaaaggtctcac

SEQ ID NO: 2705009 - DNA, 25 bp, Homo sapien
gaggccagtactctctaggacatgg

SEQ ID NO: 2705010 - DNA, 25 bp, Homo sapien
cagttacaaagcacagcgtctacca

SEQ ID NO: 2705011 - DNA, 25 bp, Homo sapien
ttaattcacgaaacagttacaaagc

SEQ ID NO: 2705012 - DNA, 25 bp, Homo sapien
aaagcacagcgtctaccacatagtt

SEQ ID NO: 2705013 - DNA, 25 bp, Homo sapien
gcgtctaccacatagttacctctta

SEQ ID NO: 2705014 - DNA, 25 bp, Homo sapien
cctgtctccaaggtagacccagggc

SEQ ID NO: 2705015 - DNA, 25 bp, Homo sapien
ccagggcttggaatgcagcagctga

SEQ ID NO: 2705016 - DNA, 25 bp, Homo sapien
ttgtggagagtaagtctgtgctgtc

SEQ ID NO: 2705017 - DNA, 25 bp, Homo sapien
gaagtctcttatgtctccttccagc

SEQ ID NO: 2705018 - DNA, 25 bp, Homo sapien
ttgccatttcccagcgagctgtggg

SEQ ID NO: 2705019 - DNA, 25 bp, Homo sapien
ccatttcccagcgagctgtgggagt

SEQ ID NO: 2705020 - DNA, 25 bp, Homo sapien
tcccagcgagctgtgggagtgtctt

SEQ ID NO: 2705021 - DNA, 25 bp, Homo sapien
tttcccagcgagctgtgggagtgtc

SEQ ID NO: 2705022 - DNA, 25 bp, Homo sapien
caatcttttgattcactgccagggc

SEQ ID NO: 2705023 - DNA, 25 bp, Homo sapien
tcaagctcagggaaaaatagcgccc

SEQ ID NO: 2705024 - DNA, 25 bp, Homo sapien
acagatctgtcatctttaagcccag

SEQ ID NO: 2705025 - DNA, 25 bp, Homo sapien
tgctggctccacataggctttctcg

SEQ ID NO: 2705026 - DNA, 25 bp, Homo sapien
gattgccccactgctagggtctagg

SEQ ID NO: 2705027 - DNA, 25 bp, Homo sapien
taaaagctcacagtattggtgccca

SEQ ID NO: 2705028 - DNA, 25 bp, Homo sapien
gggattcccacacgtagaactgagg

SEQ ID NO: 2705029 - DNA, 25 bp, Homo sapien
ggtctaggccaaagaggttccgcac

SEQ ID NO: 2705030 - DNA, 25 bp, Homo sapien
ttcatagtcaaaggtacgctgggca

SEQ ID NO: 2705031 - DNA, 25 bp, Homo sapien
agagtcatcctccagtaaggcccgg

SEQ ID NO: 2705032 - DNA, 25 bp, Homo sapien
tgtgtagacacgaggaacagtcctg

SEQ ID NO: 2705033 - DNA, 25 bp, Homo sapien
caacagtgagtaggagagccacgca

SEQ ID NO: 2705034 - DNA, 25 bp, Homo sapien
tggaggagagtgaagggtcaccatt

SEQ ID NO: 2705035 - DNA, 25 bp, Homo sapien
ggagagtgaagggtcaccattgtcc

SEQ ID NO: 2705036 - DNA, 25 bp, Homo sapien
gagtgaagggtcaccattgtccctc

SEQ ID NO: 2705037 - DNA, 25 bp, Homo sapien
gaaccagcagcactgtggctgtgga

SEQ ID NO: 2705038 - DNA, 25 bp, Homo sapien
ggagggtgtatgaggaagtcactgg

SEQ ID NO: 2705039 - DNA, 25 bp, Homo sapien
aggagggtgtatgaggaagtcactg

SEQ ID NO: 2705040 - DNA, 25 bp, Homo sapien
caggagggtgtatgaggaagtcact

SEQ ID NO: 2705041 - DNA, 25 bp, Homo sapien
tcaggagggtgtatgaggaagtcac

SEQ ID NO: 2705042 - DNA, 25 bp, Homo sapien
gagccacaatgaggtaaagggtaag

SEQ ID NO: 2705043 - DNA, 25 bp, Homo sapien
cttcgctgacagaaaggtgaaggtg

SEQ ID NO: 2705044 - DNA, 25 bp, Homo sapien
gaaggcacttcgctgacagaaaggt

SEQ ID NO: 2705045 - DNA, 25 bp, Homo sapien
ctagggataagagactgacggtcgc

SEQ ID NO: 2705046 - DNA, 25 bp, Homo sapien
gtccgaggccggtgaaaagcacgtc

SEQ ID NO: 2705047 - DNA, 25 bp, Homo sapien
agcgggaccggatggcgtcaggctc

SEQ ID NO: 2705048 - DNA, 25 bp, Homo sapien
tgtagcagtggctctgcgagtctgt

SEQ ID NO: 2705049 - DNA, 25 bp, Homo sapien
gctccgctcccgcagcgtattagag

SEQ ID NO: 2705050 - DNA, 25 bp, Homo sapien
caatcccttatgaggacgggcggct

SEQ ID NO: 2705051 - DNA, 25 bp, Homo sapien
aatgatcccgagaatcgggtggagc

SEQ ID NO: 2705052 - DNA, 25 bp, Homo sapien
taatcggccactctggtttcgcgca

SEQ ID NO: 2705053 - DNA, 25 bp, Homo sapien
ttcgcgcaaacggtccaatgatccc

SEQ ID NO: 2705054 - DNA, 25 bp, Homo sapien
cacccccggtgctcggagccccatc

SEQ ID NO: 2705055 - DNA, 25 bp, Homo sapien
acctcccctcgcccacagtcgccac

SEQ ID NO: 2705056 - DNA, 25 bp, Homo sapien
acagtcgccaccacccccggtgctc

SEQ ID NO: 2705057 - DNA, 25 bp, Homo sapien
cgtggcgagcccgtgcaacttgtgt

SEQ ID NO: 2705058 - DNA, 25 bp, Homo sapien
ggaaatctacagaccggcgaagcgt

SEQ ID NO: 2705059 - DNA, 25 bp, Homo sapien
aattcaccggaagctcgaaggaggc

SEQ ID NO: 2705060 - DNA, 25 bp, Homo sapien
tagggagggtaacagtgaagtcaca

SEQ ID NO: 2705061 - DNA, 25 bp, Homo sapien
gaggagtgcgtgcgtgcgtccgcgc

SEQ ID NO: 2705062 - DNA, 25 bp, Homo sapien
cgaggagtgcgtgcgtgcgtccgcg

SEQ ID NO: 2705063 - DNA, 25 bp, Homo sapien
aggagtgcgtgcgtgcgtccgcgca

SEQ ID NO: 2705064 - DNA, 25 bp, Homo sapien
ggagtgcgtgcgtgcgtccgcgcac

SEQ ID NO: 2705065 - DNA, 25 bp, Homo sapien
cacttagagcggcagtcgctccagc

SEQ ID NO: 2705066 - DNA, 25 bp, Homo sapien
aggcgcgcacaatcagctacgagta

SEQ ID NO: 2705067 - DNA, 25 bp, Homo sapien
gtcgccgacccttgagacggagtcc

SEQ ID NO: 2705068 - DNA, 25 bp, Homo sapien
ggacctctggcccaaggatcgtaga

SEQ ID NO: 2705069 - DNA, 25 bp, Homo sapien
gcacattgtgatcacgacggcgcca

SEQ ID NO: 2705070 - DNA, 25 bp, Homo sapien
aaatctctgaccctagatcgctggg

SEQ ID NO: 2705071 - DNA, 25 bp, Homo sapien
gctcgaggctttcacttcctgcggg

SEQ ID NO: 2705072 - DNA, 25 bp, Homo sapien
agcctatagctttccatctgccaga

SEQ ID NO: 2705073 - DNA, 25 bp, Homo sapien
gcattccaggtgtatcgggagtcac

SEQ ID NO: 2705074 - DNA, 25 bp, Homo sapien
tagtacctagccaacagcaatggtg

SEQ ID NO: 2705075 - DNA, 25 bp, Homo sapien
tcaatctccaaaaggataactggcc

SEQ ID NO: 2705076 - DNA, 25 bp, Homo sapien
gaacccagaaacctagcattccagg

SEQ ID NO: 2705077 - DNA, 25 bp, Homo sapien
caatgagaattctaccagccctaga

SEQ ID NO: 2705078 - DNA, 25 bp, Homo sapien
ctagaactccgtgccagacaatggt

SEQ ID NO: 2705079 - DNA, 25 bp, Homo sapien
tttaggagtcatgccagattgggcc

SEQ ID NO: 2705080 - DNA, 25 bp, Homo sapien
gagaagttagaatgtcacccgagcc

SEQ ID NO: 2705081 - DNA, 25 bp, Homo sapien
tgagagaaacgccagtccgtgttgg

SEQ ID NO: 2705082 - DNA, 25 bp, Homo sapien
cctgagagaaacgccagtccgtgtt

SEQ ID NO: 2705083 - DNA, 25 bp, Homo sapien
gcctgagagaaacgccagtccgtgt

SEQ ID NO: 2705084 - DNA, 25 bp, Homo sapien
agagaaacgccagtccgtgttgggc

SEQ ID NO: 2705085 - DNA, 25 bp, Homo sapien
taatggagcccagctcaactcaggg

SEQ ID NO: 2705086 - DNA, 25 bp, Homo sapien
cccacagacagagagcaggacaagt

SEQ ID NO: 2705087 - DNA, 25 bp, Homo sapien
cctcctccggtcaaatgcttttctg

SEQ ID NO: 2705088 - DNA, 25 bp, Homo sapien
gaaagtggcaaagacggaaactcaa

SEQ ID NO: 2705089 - DNA, 25 bp, Homo sapien
aggcaggggtaaggtgctcacccca

SEQ ID NO: 2705090 - DNA, 25 bp, Homo sapien
ggcttccaggttcaatggtgaattc

SEQ ID NO: 2705091 - DNA, 25 bp, Homo sapien
gccactaagcctctcatttgatgga

SEQ ID NO: 2705092 - DNA, 25 bp, Homo sapien
ttctgcttcaaagccagtgtatggc

SEQ ID NO: 2705093 - DNA, 25 bp, Homo sapien
actggcggacgccaagatcatggct

SEQ ID NO: 2705094 - DNA, 25 bp, Homo sapien
cagcatctctgtgtcaaactggttg

SEQ ID NO: 2705095 - DNA, 25 bp, Homo sapien
ccaggtgccggtgtcatcgccattt

SEQ ID NO: 2705096 - DNA, 25 bp, Homo sapien
tctgtgtcaaactggttgttgggcc

SEQ ID NO: 2705097 - DNA, 25 bp, Homo sapien
tggtgcgattttctgctcaccacag

SEQ ID NO: 2705098 - DNA, 25 bp, Homo sapien
tgcgattttctgctcaccacagcca

SEQ ID NO: 2705099 - DNA, 25 bp, Homo sapien
ggtgcgattttctgctcaccacagc

SEQ ID NO: 2705100 - DNA, 25 bp, Homo sapien
agtggtgcgattttctgctcaccac

SEQ ID NO: 2705101 - DNA, 25 bp, Homo sapien
gcttggcagctcaaaactgaggacc

SEQ ID NO: 2705102 - DNA, 25 bp, Homo sapien
agaggattcattgacaggaggcccc

SEQ ID NO: 2705103 - DNA, 25 bp, Homo sapien
gaagccgaggctggatccaaaggca

SEQ ID NO: 2705104 - DNA, 25 bp, Homo sapien
tcgagtgtgagaaatcagacctgcc

SEQ ID NO: 2705105 - DNA, 25 bp, Homo sapien
taatcctgggacatcaaccagggat

SEQ ID NO: 2705106 - DNA, 25 bp, Homo sapien
taaagccggagaggctgagtaatcc

SEQ ID NO: 2705107 - DNA, 25 bp, Homo sapien
ctgggagcgggtagcgagagtgact

SEQ ID NO: 2705108 - DNA, 25 bp, Homo sapien
agctggcagtagagcttctctccca

SEQ ID NO: 2705109 - DNA, 25 bp, Homo sapien
cccctcccagggtggagctcccatc

SEQ ID NO: 2705110 - DNA, 25 bp, Homo sapien
cctcccagggtggagctcccatcag

SEQ ID NO: 2705111 - DNA, 25 bp, Homo sapien
tgccggcaccccctcccagggtgga

SEQ ID NO: 2705112 - DNA, 25 bp, Homo sapien
tcccagggtggagctcccatcagca

SEQ ID NO: 2705113 - DNA, 25 bp, Homo sapien
gtccgtagcgggcgctcaatcccat

SEQ ID NO: 2705114 - DNA, 25 bp, Homo sapien
acgtgctgcagggtgaactggggtc

SEQ ID NO: 2705115 - DNA, 25 bp, Homo sapien
gaactggggtccgtagcgggcgctc

SEQ ID NO: 2705116 - DNA, 25 bp, Homo sapien
ctggggtccgtagcgggcgctcaat

SEQ ID NO: 2705117 - DNA, 25 bp, Homo sapien
tgctgcctgggatgtagacattctg

SEQ ID NO: 2705118 - DNA, 25 bp, Homo sapien
cccgcttgccagctgcgttggtcag

SEQ ID NO: 2705119 - DNA, 25 bp, Homo sapien
cgttggtcagtgtggcattgctgcc

SEQ ID NO: 2705120 - DNA, 25 bp, Homo sapien
gcattgctgcctgggatgtagacat

SEQ ID NO: 2705121 - DNA, 25 bp, Homo sapien
cttcttgcccgacttcttcttgttg

SEQ ID NO: 2705122 - DNA, 25 bp, Homo sapien
cttcttgttgccattgccacctgct

SEQ ID NO: 2705123 - DNA, 25 bp, Homo sapien
gcccgacttcttcttgttgccattg

SEQ ID NO: 2705124 - DNA, 25 bp, Homo sapien
cttgttgccattgccacctgctggg

SEQ ID NO: 2705125 - DNA, 25 bp, Homo sapien
ccttggcccctaccagtattctggg

SEQ ID NO: 2705126 - DNA, 25 bp, Homo sapien
gcctgggtgcaggtaaggagaagct

SEQ ID NO: 2705127 - DNA, 25 bp, Homo sapien
tgactgggcacttgtttctgtttcc

SEQ ID NO: 2705128 - DNA, 25 bp, Homo sapien
gaactgcttttgcatattcaacccc

SEQ ID NO: 2705129 - DNA, 25 bp, Homo sapien
tccaacttttcagaactaggaggct

SEQ ID NO: 2705130 - DNA, 25 bp, Homo sapien
gaggccaagaggtcatgatgccctt

SEQ ID NO: 2705131 - DNA, 25 bp, Homo sapien
cagctgtaactaaacggggtgtggc

SEQ ID NO: 2705132 - DNA, 25 bp, Homo sapien
ggatgggcctgattgatttggaaga

SEQ ID NO: 2705133 - DNA, 25 bp, Homo sapien
caaaacttgagcattgatcttgggc

SEQ ID NO: 2705134 - DNA, 25 bp, Homo sapien
ccaaaacttgagcattgatcttggg

SEQ ID NO: 2705135 - DNA, 25 bp, Homo sapien
aaacttgagcattgatcttgggctc

SEQ ID NO: 2705136 - DNA, 25 bp, Homo sapien
ctccaaaacttgagcattgatcttg

SEQ ID NO: 2705137 - DNA, 25 bp, Homo sapien
gaggatgttgtcagtcccctgagga

SEQ ID NO: 2705138 - DNA, 25 bp, Homo sapien
aaacagaagactggtccccagggcg

SEQ ID NO: 2705139 - DNA, 25 bp, Homo sapien
cctgcttcgagcttccttggactga

SEQ ID NO: 2705140 - DNA, 25 bp, Homo sapien
cctattatgtagtgggaagggtcca

SEQ ID NO: 2705141 - DNA, 25 bp, Homo sapien
gctccgctgacccttccaccagtgg

SEQ ID NO: 2705142 - DNA, 25 bp, Homo sapien
gctgacccttccaccagtggcacct

SEQ ID NO: 2705143 - DNA, 25 bp, Homo sapien
tccgctgacccttccaccagtggca

SEQ ID NO: 2705144 - DNA, 25 bp, Homo sapien
acccttccaccagtggcacctctgg

SEQ ID NO: 2705145 - DNA, 25 bp, Homo sapien
aacggcacctggcaaggtgaaggac

SEQ ID NO: 2705146 - DNA, 25 bp, Homo sapien
cccatcctgggctgagactttctgt

SEQ ID NO: 2705147 - DNA, 25 bp, Homo sapien
cccagggactaagaatggcctggct

SEQ ID NO: 2705148 - DNA, 25 bp, Homo sapien
cagtggccttcacggaagagaaacg

SEQ ID NO: 2705149 - DNA, 25 bp, Homo sapien
ctttaaccaggctatggccactagg

SEQ ID NO: 2705150 - DNA, 25 bp, Homo sapien
tttaaccaggctatggccactaggg

SEQ ID NO: 2705151 - DNA, 25 bp, Homo sapien
ttaaccaggctatggccactagggg

SEQ ID NO: 2705152 - DNA, 25 bp, Homo sapien
tacactactgtaagggcaggtctgg

SEQ ID NO: 2705153 - DNA, 25 bp, Homo sapien
gaagaaggtctatgcacaaggaggc

SEQ ID NO: 2705154 - DNA, 25 bp, Homo sapien
tattctacaccagccgaaagaggga

SEQ ID NO: 2705155 - DNA, 25 bp, Homo sapien
cgtgactatgcgaagagaagcgctt

SEQ ID NO: 2705156 - DNA, 25 bp, Homo sapien
tggctgcagcaacctcggaatccca

SEQ ID NO: 2705157 - DNA, 25 bp, Homo sapien
gaggaagccgcatacccttgctgac

SEQ ID NO: 2705158 - DNA, 25 bp, Homo sapien
ctccgcagcgcggaggaagccgcat

SEQ ID NO: 2705159 - DNA, 25 bp, Homo sapien
tgctgaccagccagataaccgcagt

SEQ ID NO: 2705160 - DNA, 25 bp, Homo sapien
atgttcccagatgtcacgcaaggtt

SEQ ID NO: 2705161 - DNA, 25 bp, Homo sapien
gtttcctggcagtacctgtgtctct

SEQ ID NO: 2705162 - DNA, 25 bp, Homo sapien
catacttgtctgagcacgttatgac

SEQ ID NO: 2705163 - DNA, 25 bp, Homo sapien
gatgtcacgcaaggtttcctggcag

SEQ ID NO: 2705164 - DNA, 25 bp, Homo sapien
gcttgtaaacctttgggctagatcc

SEQ ID NO: 2705165 - DNA, 25 bp, Homo sapien
tctggaccagtttccctgctgtgct

SEQ ID NO: 2705166 - DNA, 25 bp, Homo sapien
gggttgtactgtgaccatcccaaca

SEQ ID NO: 2705167 - DNA, 25 bp, Homo sapien
ggtgcatctcatctggactatgggt

SEQ ID NO: 2705168 - DNA, 25 bp, Homo sapien
agcctcttcctgtggaactatacta

SEQ ID NO: 2705169 - DNA, 25 bp, Homo sapien
caggtagccagacatcagtggcttc

SEQ ID NO: 2705170 - DNA, 25 bp, Homo sapien
gaactatactagaatcccagatgct

SEQ ID NO: 2705171 - DNA, 25 bp, Homo sapien
tgtccacaggtagccagacatcagt

SEQ ID NO: 2705172 - DNA, 25 bp, Homo sapien
tcacttacagtgagatcttccctga

SEQ ID NO: 2705173 - DNA, 25 bp, Homo sapien
ctttcccctggatgtttatgtggct

SEQ ID NO: 2705174 - DNA, 25 bp, Homo sapien
taagaggtctttactcagatgtcac

SEQ ID NO: 2705175 - DNA, 25 bp, Homo sapien
aatggagcctggcacatataggtac

SEQ ID NO: 2705176 - DNA, 25 bp, Homo sapien
ctttatcggataagtgttttgcaga

SEQ ID NO: 2705177 - DNA, 25 bp, Homo sapien
ttgggtatactagttctttatcgga

SEQ ID NO: 2705178 - DNA, 25 bp, Homo sapien
ttttaatctgtgttgggtatactag

SEQ ID NO: 2705179 - DNA, 25 bp, Homo sapien
tgttttcttatgatctagtcataac

SEQ ID NO: 2705180 - DNA, 25 bp, Homo sapien
taatttccggctaattgcattctgg

SEQ ID NO: 2705181 - DNA, 25 bp, Homo sapien
ggtaggtgctcttgtgatttcagtc

SEQ ID NO: 2705182 - DNA, 25 bp, Homo sapien
gctttagggctcagaatattgccaa

SEQ ID NO: 2705183 - DNA, 25 bp, Homo sapien
tgcactgaaagaacacgtatatggt

SEQ ID NO: 2705184 - DNA, 25 bp, Homo sapien
ccttctcttgcagatggttgccttc

SEQ ID NO: 2705185 - DNA, 25 bp, Homo sapien
ggacacatcagatttgaagtactta

SEQ ID NO: 2705186 - DNA, 25 bp, Homo sapien
caaggtgttagcaagtttcatttct

SEQ ID NO: 2705187 - DNA, 25 bp, Homo sapien
tctgtgtgcgcattccttgtgtctc

SEQ ID NO: 2705188 - DNA, 25 bp, Homo sapien
gaaaataaaataggtggtgcccaga

SEQ ID NO: 2705189 - DNA, 25 bp, Homo sapien
aaataaaataggtggtgcccagagc

SEQ ID NO: 2705190 - DNA, 25 bp, Homo sapien
ctgtctaaggatatgaaaataaaat

SEQ ID NO: 2705191 - DNA, 25 bp, Homo sapien
ataaaataggtggtgcccagagcca

SEQ ID NO: 2705192 - DNA, 25 bp, Homo sapien
taacagtgacagagtgctagctttt

SEQ ID NO: 2705193 - DNA, 25 bp, Homo sapien
cagtgacagagtgctagcttttgag

SEQ ID NO: 2705194 - DNA, 25 bp, Homo sapien
ctactaacagtgacagagtgctagc

SEQ ID NO: 2705195 - DNA, 25 bp, Homo sapien
cagagtgctagcttttgaggcagca

SEQ ID NO: 2705196 - DNA, 25 bp, Homo sapien
gcaaaatggtttggctgccggacac

SEQ ID NO: 2705197 - DNA, 25 bp, Homo sapien
agagcaaaatggtttggctgccgga

SEQ ID NO: 2705198 - DNA, 25 bp, Homo sapien
gcaagtccttgccagcggagcacag

SEQ ID NO: 2705199 - DNA, 25 bp, Homo sapien
tgcatcctgagcaatcgatgccgca

SEQ ID NO: 2705200 - DNA, 25 bp, Homo sapien
gattccgggggtcattagtccatta

SEQ ID NO: 2705201 - DNA, 25 bp, Homo sapien
tttgtggtcttcattgagagacgcc

SEQ ID NO: 2705202 - DNA, 25 bp, Homo sapien
caggctatagcggtgggattccggg

SEQ ID NO: 2705203 - DNA, 25 bp, Homo sapien
ttaagaacgtagtttccaggatgtc

SEQ ID NO: 2705204 - DNA, 25 bp, Homo sapien
atgtattagaactctcgcccattgc

SEQ ID NO: 2705205 - DNA, 25 bp, Homo sapien
tctggagatgaattgctctagaact

SEQ ID NO: 2705206 - DNA, 25 bp, Homo sapien
tgaattgctctagaacttagtgtcc

SEQ ID NO: 2705207 - DNA, 25 bp, Homo sapien
gttccatgtattagaactctcgccc

SEQ ID NO: 2705208 - DNA, 25 bp, Homo sapien
ttagggcagagtattgtgctggact

SEQ ID NO: 2705209 - DNA, 25 bp, Homo sapien
tacaacacggaaggagttgtgagaa

SEQ ID NO: 2705210 - DNA, 25 bp, Homo sapien
ggcttgtacaacacggaaggagttg

SEQ ID NO: 2705211 - DNA, 25 bp, Homo sapien
agggcagagtgattagggcagagta

SEQ ID NO: 2705212 - DNA, 25 bp, Homo sapien
ggtcagtgaactagctcggaaccac

SEQ ID NO: 2705213 - DNA, 25 bp, Homo sapien
tctgtggtcagtgaactagctcgga

SEQ ID NO: 2705214 - DNA, 25 bp, Homo sapien
agtcctctgtggtcagtgaactagc

SEQ ID NO: 2705215 - DNA, 25 bp, Homo sapien
gaactagctcggaaccacttagaga

SEQ ID NO: 2705216 - DNA, 25 bp, Homo sapien
tgatgtcatcacgttagagagaggc

SEQ ID NO: 2705217 - DNA, 25 bp, Homo sapien
tactctatgcaccaaaggtcaggca

SEQ ID NO: 2705218 - DNA, 25 bp, Homo sapien
ttttaagtccaaggtaccatctgcc

SEQ ID NO: 2705219 - DNA, 25 bp, Homo sapien
tttaaaactattgcgcgaaggctgc

SEQ ID NO: 2705220 - DNA, 25 bp, Homo sapien
tgttgtcatctactgacacccgtgt

SEQ ID NO: 2705221 - DNA, 25 bp, Homo sapien
tcttatgacatcgttatgtcaccca

SEQ ID NO: 2705222 - DNA, 25 bp, Homo sapien
tttgttattcattgccactctcaga

SEQ ID NO: 2705223 - DNA, 25 bp, Homo sapien
caaacaatttagctcttgactcata

SEQ ID NO: 2705224 - DNA, 25 bp, Homo sapien
tcttctttgcctggaggtactgcca

SEQ ID NO: 2705225 - DNA, 25 bp, Homo sapien
tgggagtgctggaattcccccccca

SEQ ID NO: 2705226 - DNA, 25 bp, Homo sapien
cctcctttgcctgggagtgctagaa

SEQ ID NO: 2705227 - DNA, 25 bp, Homo sapien
gagtgctagaatccccccaccacca

SEQ ID NO: 2705228 - DNA, 25 bp, Homo sapien
tattggacattcttaaacgacttca

SEQ ID NO: 2705229 - DNA, 25 bp, Homo sapien
cagttgggtgcaaacatttggtgct

SEQ ID NO: 2705230 - DNA, 25 bp, Homo sapien
gaaggcttggcctccttattggaca

SEQ ID NO: 2705231 - DNA, 25 bp, Homo sapien
aacttcaagttggagagtcacaggg

SEQ ID NO: 2705232 - DNA, 25 bp, Homo sapien
ggcagctctttgcatccgccagggc

SEQ ID NO: 2705233 - DNA, 25 bp, Homo sapien
tcgttacttacttctaggtctgtgg

SEQ ID NO: 2705234 - DNA, 25 bp, Homo sapien
ccgccagggctgttcgttacttact

SEQ ID NO: 2705235 - DNA, 25 bp, Homo sapien
tacttacttctaggtctgtgggtga

SEQ ID NO: 2705236 - DNA, 25 bp, Homo sapien
caccgggcccagctatcaacccctt

SEQ ID NO: 2705237 - DNA, 25 bp, Homo sapien
ccagctatcaacccctttactttat

SEQ ID NO: 2705238 - DNA, 25 bp, Homo sapien
ctatcaacccctttactttatagat

SEQ ID NO: 2705239 - DNA, 25 bp, Homo sapien
agctatcaacccctttactttatag

SEQ ID NO: 2705240 - DNA, 25 bp, Homo sapien
gctctaacatcatcacctgtcagga

SEQ ID NO: 2705241 - DNA, 25 bp, Homo sapien
ttaaagacctctgtttgtgctcctg

SEQ ID NO: 2705242 - DNA, 25 bp, Homo sapien
tggctaataaccaggatctcttctg

SEQ ID NO: 2705243 - DNA, 25 bp, Homo sapien
cctttgtaagtagaacagctctaac

SEQ ID NO: 2705244 - DNA, 25 bp, Homo sapien
cagtacccgaacacgcctcctcttt

SEQ ID NO: 2705245 - DNA, 25 bp, Homo sapien
cctccagtacccgaacacgcctcct

SEQ ID NO: 2705246 - DNA, 25 bp, Homo sapien
tccagtacccgaacacgcctcctct

SEQ ID NO: 2705247 - DNA, 25 bp, Homo sapien
cttcctccagtacccgaacacgcct

SEQ ID NO: 2705248 - DNA, 25 bp, Homo sapien
tacctattagggatgagatacagac

SEQ ID NO: 2705249 - DNA, 25 bp, Homo sapien
tgaacgggtagacaaggactgagat

SEQ ID NO: 2705250 - DNA, 25 bp, Homo sapien
taacacctgaatcccagatgatggg

SEQ ID NO: 2705251 - DNA, 25 bp, Homo sapien
cagacaaggatagctatctgggaca

SEQ ID NO: 2705252 - DNA, 25 bp, Homo sapien
cagatttccttacatgactgaggga

SEQ ID NO: 2705253 - DNA, 25 bp, Homo sapien
ccacgcagggttagaggtttgagcc

SEQ ID NO: 2705254 - DNA, 25 bp, Homo sapien
tgtgggacacgctgtcttgctccca

SEQ ID NO: 2705255 - DNA, 25 bp, Homo sapien
ggataaccacagctggacacttgtg

SEQ ID NO: 2705256 - DNA, 25 bp, Homo sapien
gattgggcagctattatgtaggtgc

SEQ ID NO: 2705257 - DNA, 25 bp, Homo sapien
agagctctgcagactaaacccctgg

SEQ ID NO: 2705258 - DNA, 25 bp, Homo sapien
gctctgcagactaaacccctgggct

SEQ ID NO: 2705259 - DNA, 25 bp, Homo sapien
gaagagattgggcagctattatgta

SEQ ID NO: 2705260 - DNA, 25 bp, Homo sapien
tgtccctcagatatggccacatggg

SEQ ID NO: 2705261 - DNA, 25 bp, Homo sapien
tatactgtccgaaatgttgcccgct

SEQ ID NO: 2705262 - DNA, 25 bp, Homo sapien
tccagtgtgagctagggtgtccctc

SEQ ID NO: 2705263 - DNA, 25 bp, Homo sapien
ttcaatatccctctactcgtgctgg

SEQ ID NO: 2705264 - DNA, 25 bp, Homo sapien
tgactgtaggcacactagcccttgg

SEQ ID NO: 2705265 - DNA, 25 bp, Homo sapien
gaagatgatcgtgagttccgccgcc

SEQ ID NO: 2705266 - DNA, 25 bp, Homo sapien
gaaagtactttctcacctcaggtcg

SEQ ID NO: 2705267 - DNA, 25 bp, Homo sapien
tgggcaacttccactacggtgagga

SEQ ID NO: 2705268 - DNA, 25 bp, Homo sapien
tcaggaatcttctccgagggctggg

SEQ ID NO: 2705269 - DNA, 25 bp, Homo sapien
gctcaaagccccagataccgggaga

SEQ ID NO: 2705270 - DNA, 25 bp, Homo sapien
acaaatggccctcgcatcctaggag

SEQ ID NO: 2705271 - DNA, 25 bp, Homo sapien
ttcctagagaagtgaccacggcctg

SEQ ID NO: 2705272 - DNA, 25 bp, Homo sapien
tccggcttctgctggggttccggct

SEQ ID NO: 2705273 - DNA, 25 bp, Homo sapien
cccccgacgcccttccggcgctcat

SEQ ID NO: 2705274 - DNA, 25 bp, Homo sapien
tccaggggcgtcctagtgcggctca

SEQ ID NO: 2705275 - DNA, 25 bp, Homo sapien
tttggttctggttccggcttctgct

SEQ ID NO: 2705276 - DNA, 25 bp, Homo sapien
gcagcacgagatgggacggcattct

SEQ ID NO: 2705277 - DNA, 25 bp, Homo sapien
cgtctaagacgtccggctgaggtcc

SEQ ID NO: 2705278 - DNA, 25 bp, Homo sapien
taggaatgccgtcctcaggatctga

SEQ ID NO: 2705279 - DNA, 25 bp, Homo sapien
cctttcggcaagaggtcagcggcaa

SEQ ID NO: 2705280 - DNA, 25 bp, Homo sapien
ctggggggcgagcgcgggccagggc

SEQ ID NO: 2705281 - DNA, 25 bp, Homo sapien
ggggggcgagcgcgggccagggcgc

SEQ ID NO: 2705282 - DNA, 25 bp, Homo sapien
gggcgagcgcgggccagggcgcctc

SEQ ID NO: 2705283 - DNA, 25 bp, Homo sapien
ggggcgagcgcgggccagggcgcct

SEQ ID NO: 2705284 - DNA, 25 bp, Homo sapien
ttcttcttgagcacgtggcagatca

SEQ ID NO: 2705285 - DNA, 25 bp, Homo sapien
gaagaagaccagcacaagcaggaag

SEQ ID NO: 2705286 - DNA, 25 bp, Homo sapien
tgaagctgggcatcgtcaggctcag

SEQ ID NO: 2705287 - DNA, 25 bp, Homo sapien
gcagatcatgaagcctaccaggccc

SEQ ID NO: 2705288 - DNA, 25 bp, Homo sapien
aaggatgaaagagattggcaaggaa

SEQ ID NO: 2705289 - DNA, 25 bp, Homo sapien
gaaggatgaaagagattggcaagga

SEQ ID NO: 2705290 - DNA, 25 bp, Homo sapien
ctgaaggatgaaagagattggcaag

SEQ ID NO: 2705291 - DNA, 25 bp, Homo sapien
tgaaggatgaaagagattggcaagg

SEQ ID NO: 2705292 - DNA, 25 bp, Homo sapien
tcctcattcatgtcatcgtcctcag

SEQ ID NO: 2705293 - DNA, 25 bp, Homo sapien
gcagcgaacaatcctctctactgtg

SEQ ID NO: 2705294 - DNA, 25 bp, Homo sapien
tgtgtcctcattcatgtcatcgtcc

SEQ ID NO: 2705295 - DNA, 25 bp, Homo sapien
tctggatgatgcagcgaacaatcct

SEQ ID NO: 2705296 - DNA, 25 bp, Homo sapien
aagagggagcaaggggctatgctag

SEQ ID NO: 2705297 - DNA, 25 bp, Homo sapien
gagggagcaaggggctatgctagac

SEQ ID NO: 2705298 - DNA, 25 bp, Homo sapien
agaagagggagcaaggggctatgct

SEQ ID NO: 2705299 - DNA, 25 bp, Homo sapien
gggagcaaggggctatgctagaccc

SEQ ID NO: 2705300 - DNA, 25 bp, Homo sapien
gcatctccttcaaggcctcagcatt

SEQ ID NO: 2705301 - DNA, 25 bp, Homo sapien
tggacagctgcactgtcccttctcc

SEQ ID NO: 2705302 - DNA, 25 bp, Homo sapien
tctccttcactgtcccccagcatct

SEQ ID NO: 2705303 - DNA, 25 bp, Homo sapien
tgtcccccagcatctccttcaaggc

SEQ ID NO: 2705304 - DNA, 25 bp, Homo sapien
caaggcaagctaagtcatgctggcc

SEQ ID NO: 2705305 - DNA, 25 bp, Homo sapien
tcctcccagggctgtttgctaaaaa

SEQ ID NO: 2705306 - DNA, 25 bp, Homo sapien
gcttaacccaaaggagtggcactag

SEQ ID NO: 2705307 - DNA, 25 bp, Homo sapien
aaccccatacatgcaaggaggctgg

SEQ ID NO: 2705308 - DNA, 25 bp, Homo sapien
cagagcccaggtgcactgtgtgatg

SEQ ID NO: 2705309 - DNA, 25 bp, Homo sapien
gggctccgtcctgcaggctggaggt

SEQ ID NO: 2705310 - DNA, 25 bp, Homo sapien
agcccaggtgcactgtgtgatgatg

SEQ ID NO: 2705311 - DNA, 25 bp, Homo sapien
tgtgatgatgggagggggctccgtc

SEQ ID NO: 2705312 - DNA, 25 bp, Homo sapien
tccttccttggagcgtccctgacgg

SEQ ID NO: 2705313 - DNA, 25 bp, Homo sapien
ttggagcgtccctgacggacaagtg

SEQ ID NO: 2705314 - DNA, 25 bp, Homo sapien
tccttggagcgtccctgacggacaa

SEQ ID NO: 2705315 - DNA, 25 bp, Homo sapien
cttccttggagcgtccctgacggac

SEQ ID NO: 2705316 - DNA, 25 bp, Homo sapien
agccaaggcccacttttgggatcag

SEQ ID NO: 2705317 - DNA, 25 bp, Homo sapien
atcaggtgcctgatcactgggcccc

SEQ ID NO: 2705318 - DNA, 25 bp, Homo sapien
agtttggtggctacttccctctggc

SEQ ID NO: 2705319 - DNA, 25 bp, Homo sapien
tgtagcctgacttctgccggagctc

SEQ ID NO: 2705320 - DNA, 25 bp, Homo sapien
tccatagcgcttctcaatgtgtgtc

SEQ ID NO: 2705321 - DNA, 25 bp, Homo sapien
tgttcgtgcagtccatagcgcttct

SEQ ID NO: 2705322 - DNA, 25 bp, Homo sapien
gcttctcaatgtgtgtcacccggaa

SEQ ID NO: 2705323 - DNA, 25 bp, Homo sapien
ggagccatcacggtgttcgtgcagt

SEQ ID NO: 2705324 - DNA, 25 bp, Homo sapien
tgccttgggctgccctcccccagac

SEQ ID NO: 2705325 - DNA, 25 bp, Homo sapien
cagcctctccatggcaggcatccct

SEQ ID NO: 2705326 - DNA, 25 bp, Homo sapien
gcatccctgccttgggctgccctcc

SEQ ID NO: 2705327 - DNA, 25 bp, Homo sapien
gggctgtggcctctcagggggcagc

SEQ ID NO: 2705328 - DNA, 25 bp, Homo sapien
tcctccattctgtactggggggctg

SEQ ID NO: 2705329 - DNA, 25 bp, Homo sapien
cttcaagtgcacgaggggttaggct

SEQ ID NO: 2705330 - DNA, 25 bp, Homo sapien
tgagtcctccattctgtactggggg

SEQ ID NO: 2705331 - DNA, 25 bp, Homo sapien
ccattctgtactggggggctggcta

SEQ ID NO: 2705332 - DNA, 25 bp, Homo sapien
ctccctccggccctcagtgttggct

SEQ ID NO: 2705333 - DNA, 25 bp, Homo sapien
ctccggccctcagtgttggctctgc

SEQ ID NO: 2705334 - DNA, 25 bp, Homo sapien
gtgatcagaagtgtctggtttgctt

SEQ ID NO: 2705335 - DNA, 25 bp, Homo sapien
cctccggccctcagtgttggctctg

SEQ ID NO: 2705336 - DNA, 25 bp, Homo sapien
atcagtgccccccagagtagagagc

SEQ ID NO: 2705337 - DNA, 25 bp, Homo sapien
gtagagagcaataagagcccagccc

SEQ ID NO: 2705338 - DNA, 25 bp, Homo sapien
gagaccaggagtaggtcctatcagt

SEQ ID NO: 2705339 - DNA, 25 bp, Homo sapien
tgcagtcccggctgtgttttcctac

SEQ ID NO: 2705340 - DNA, 25 bp, Homo sapien
gctaagcctgcagtttactcggggg

SEQ ID NO: 2705341 - DNA, 25 bp, Homo sapien
tcagggagccgaaaggcttaaatag

SEQ ID NO: 2705342 - DNA, 25 bp, Homo sapien
ggaagatgagattacctcatttagg

SEQ ID NO: 2705343 - DNA, 25 bp, Homo sapien
ttacctcatttagggctcaggcaga

SEQ ID NO: 2705344 - DNA, 25 bp, Homo sapien
tgcttcctgttcaagctgtgtccag

SEQ ID NO: 2705345 - DNA, 25 bp, Homo sapien
aataacactgttgcttcctgttcaa

SEQ ID NO: 2705346 - DNA, 25 bp, Homo sapien
gcttcctgttcaagctgtgtccagc

SEQ ID NO: 2705347 - DNA, 25 bp, Homo sapien
gaataacactgttgcttcctgttca

SEQ ID NO: 2705348 - DNA, 25 bp, Homo sapien
ctggtagtccatcagcacaatgaag

SEQ ID NO: 2705349 - DNA, 25 bp, Homo sapien
tgagactgtgcaactccaggtggaa

SEQ ID NO: 2705350 - DNA, 25 bp, Homo sapien
aagtagagctggtccctcagctggg

SEQ ID NO: 2705351 - DNA, 25 bp, Homo sapien
gccagctggtagtccatcagcacaa

SEQ ID NO: 2705352 - DNA, 25 bp, Homo sapien
cagctgccacgctctatcatatgga

SEQ ID NO: 2705353 - DNA, 25 bp, Homo sapien
tgaataaagggcacgaaggccaggc

SEQ ID NO: 2705354 - DNA, 25 bp, Homo sapien
ggcctacggtgctattgctttaggg

SEQ ID NO: 2705355 - DNA, 25 bp, Homo sapien
agggcctgggcctcttgtgctaaga

SEQ ID NO: 2705356 - DNA, 25 bp, Homo sapien
aggaacaggccttgggaatcaggag

SEQ ID NO: 2705357 - DNA, 25 bp, Homo sapien
agaggaacaggccttgggaatcagg

SEQ ID NO: 2705358 - DNA, 25 bp, Homo sapien
gaggaacaggccttgggaatcagga

SEQ ID NO: 2705359 - DNA, 25 bp, Homo sapien
gagaggaacaggccttgggaatcag

SEQ ID NO: 2705360 - DNA, 25 bp, Homo sapien
caaggtctctagtagttctggccca

SEQ ID NO: 2705361 - DNA, 25 bp, Homo sapien
catccatcaaggtctctagtagttc

SEQ ID NO: 2705362 - DNA, 25 bp, Homo sapien
gctggaaaccatccatcaaggtctc

SEQ ID NO: 2705363 - DNA, 25 bp, Homo sapien
gtctctagtagttctggcccacctc

SEQ ID NO: 2705364 - DNA, 25 bp, Homo sapien
tcaatgatccagagcaacacagcca

SEQ ID NO: 2705365 - DNA, 25 bp, Homo sapien
tacccttaagggagaactctggagc

SEQ ID NO: 2705366 - DNA, 25 bp, Homo sapien
tgtgtgttccctacagatgcgtcca

SEQ ID NO: 2705367 - DNA, 25 bp, Homo sapien
tggacatgatggcacctcgactcag

SEQ ID NO: 2705368 - DNA, 25 bp, Homo sapien
gtcctgggagtctgttatttccatc

SEQ ID NO: 2705369 - DNA, 25 bp, Homo sapien
gtctccctccctggagttaccacca

SEQ ID NO: 2705370 - DNA, 25 bp, Homo sapien
ggcttctagtgtacctgtaactcaa

SEQ ID NO: 2705371 - DNA, 25 bp, Homo sapien
gtgcttgtttgtcatatggatatat

SEQ ID NO: 2705372 - DNA, 25 bp, Homo sapien
gaactgggttctagccagcactctg

SEQ ID NO: 2705373 - DNA, 25 bp, Homo sapien
gaatgaattggtacacgtgaagtgc

SEQ ID NO: 2705374 - DNA, 25 bp, Homo sapien
aactggcttcgtgattttggacagc

SEQ ID NO: 2705375 - DNA, 25 bp, Homo sapien
gacagctggcttaacctgggtctca

SEQ ID NO: 2705376 - DNA, 25 bp, Homo sapien
tctgtaagggctttgagtaccagcc

SEQ ID NO: 2705377 - DNA, 25 bp, Homo sapien
tagtattatcctgctctgtggtgac

SEQ ID NO: 2705378 - DNA, 25 bp, Homo sapien
gctgtgcaatctcgaaaagtgactt

SEQ ID NO: 2705379 - DNA, 25 bp, Homo sapien
agtgggccccatatgaggtctgttc

SEQ ID NO: 2705380 - DNA, 25 bp, Homo sapien
tcttatcgtggcactgttgcagctt

SEQ ID NO: 2705381 - DNA, 25 bp, Homo sapien
gagggtaggtaccagaagacccaga

SEQ ID NO: 2705382 - DNA, 25 bp, Homo sapien
ctaggaccagcagtctgagagggta

SEQ ID NO: 2705383 - DNA, 25 bp, Homo sapien
cgtgtcccaggacaggtcatggccc

SEQ ID NO: 2705384 - DNA, 25 bp, Homo sapien
cacaaccggaggaccctgtccatgt

SEQ ID NO: 2705385 - DNA, 25 bp, Homo sapien
gtgtccagcggcgactacacaaccg

SEQ ID NO: 2705386 - DNA, 25 bp, Homo sapien
ctttgtgagtattgtgcctgctcca

SEQ ID NO: 2705387 - DNA, 25 bp, Homo sapien
ggaccctgtccatgttctttgtgag

SEQ ID NO: 2705388 - DNA, 25 bp, Homo sapien
agcctgcggaaggcgcagcacgccg

SEQ ID NO: 2705389 - DNA, 25 bp, Homo sapien
gcgcagcacgccgagcgccttgcac

SEQ ID NO: 2705390 - DNA, 25 bp, Homo sapien
agcacgccgagcgccttgcacaagg

SEQ ID NO: 2705391 - DNA, 25 bp, Homo sapien
acgccgagcgccttgcacaagggcg

SEQ ID NO: 2705392 - DNA, 25 bp, Homo sapien
atgaccttgggaccgcacccaggtt

SEQ ID NO: 2705393 - DNA, 25 bp, Homo sapien
tgaaaggtgcggactggtcgctgtg

SEQ ID NO: 2705394 - DNA, 25 bp, Homo sapien
ccagatgcaggatgaccttgggacc

SEQ ID NO: 2705395 - DNA, 25 bp, Homo sapien
cacccaggttgaaaggtgcggactg

SEQ ID NO: 2705396 - DNA, 25 bp, Homo sapien
cttcttcacattgacacttttctgg

SEQ ID NO: 2705397 - DNA, 25 bp, Homo sapien
acattgacacttttctgggaggagg

SEQ ID NO: 2705398 - DNA, 25 bp, Homo sapien
tgatagagcaaattccccttcttca

SEQ ID NO: 2705399 - DNA, 25 bp, Homo sapien
ccagggttcagagggtctggaaatt

SEQ ID NO: 2705400 - DNA, 25 bp, Homo sapien
aatttgccagttacccaatccagca

SEQ ID NO: 2705401 - DNA, 25 bp, Homo sapien
gctgacaccttgatagacgaaaaga

SEQ ID NO: 2705402 - DNA, 25 bp, Homo sapien
tgaagcctttgccaggtaattagca

SEQ ID NO: 2705403 - DNA, 25 bp, Homo sapien
tccaactggcgccaataacgcaaga

SEQ ID NO: 2705404 - DNA, 25 bp, Homo sapien
ggcaaaacgtcttgtgctgcgtgtt

SEQ ID NO: 2705405 - DNA, 25 bp, Homo sapien
ttcccgacacctgtgatttgctggt

SEQ ID NO: 2705406 - DNA, 25 bp, Homo sapien
tttgctttggcaaaacgtcttgtgc

SEQ ID NO: 2705407 - DNA, 25 bp, Homo sapien
tgagcgtaactcctgttgttcccga

SEQ ID NO: 2705408 - DNA, 25 bp, Homo sapien
gaaaccgcagaacctgacgtgtata

SEQ ID NO: 2705409 - DNA, 25 bp, Homo sapien
cagaacctgacgtgtataactgcag

SEQ ID NO: 2705410 - DNA, 25 bp, Homo sapien
gaagttgtcgaaaccgcagaacctg

SEQ ID NO: 2705411 - DNA, 25 bp, Homo sapien
ggcctgagaagttgtcgaaaccgca

SEQ ID NO: 2705412 - DNA, 25 bp, Homo sapien
caaaggaacccaggctcttgcaagc

SEQ ID NO: 2705413 - DNA, 25 bp, Homo sapien
tcagtccagtgtcatcgagagagct

SEQ ID NO: 2705414 - DNA, 25 bp, Homo sapien
ggctggctgcacgagcttgctctgt

SEQ ID NO: 2705415 - DNA, 25 bp, Homo sapien
tgtttatcctcctacgtcccagaat

SEQ ID NO: 2705416 - DNA, 25 bp, Homo sapien
gctcctggacatctgtagctactgg

SEQ ID NO: 2705417 - DNA, 25 bp, Homo sapien
tcctggacatctgtagctactggct

SEQ ID NO: 2705418 - DNA, 25 bp, Homo sapien
ctcctggacatctgtagctactggc

SEQ ID NO: 2705419 - DNA, 25 bp, Homo sapien
ggccaggatgtctgggccaatttgc

SEQ ID NO: 2705420 - DNA, 25 bp, Homo sapien
agggaagtggccaggatgtctgggc

SEQ ID NO: 2705421 - DNA, 25 bp, Homo sapien
ctgccagggaagtggccaggatgtc

SEQ ID NO: 2705422 - DNA, 25 bp, Homo sapien
gccaggatgtctgggccaatttgca

SEQ ID NO: 2705423 - DNA, 25 bp, Homo sapien
cagtgcccgaccatttgaggaacca

SEQ ID NO: 2705424 - DNA, 25 bp, Homo sapien
gagatcagaccctgcaggtacacca

SEQ ID NO: 2705425 - DNA, 25 bp, Homo sapien
tcctcagggtcgcaggagatcagac

SEQ ID NO: 2705426 - DNA, 25 bp, Homo sapien
tcagaccctgcaggtacaccaaggg

SEQ ID NO: 2705427 - DNA, 25 bp, Homo sapien
tgtcagtgaatgcaaaagatcgggt

SEQ ID NO: 2705428 - DNA, 25 bp, Homo sapien
caaaagatcgggttctttgagcagc

SEQ ID NO: 2705429 - DNA, 25 bp, Homo sapien
gggttctttgagcagcagtctctcc

SEQ ID NO: 2705430 - DNA, 25 bp, Homo sapien
gccctgaggttgtaaatgccaaatc

SEQ ID NO: 2705431 - DNA, 25 bp, Homo sapien
ctgcagctgaaagtggtccccagtg

SEQ ID NO: 2705432 - DNA, 25 bp, Homo sapien
caccatgattgccagtggggattat

SEQ ID NO: 2705433 - DNA, 25 bp, Homo sapien
agtgcttagagtgacacacagatcc

SEQ ID NO: 2705434 - DNA, 25 bp, Homo sapien
gccagtggggattatgaacatcatt

SEQ ID NO: 2705435 - DNA, 25 bp, Homo sapien
cagcctccaggctaggtgccatcct

SEQ ID NO: 2705436 - DNA, 25 bp, Homo sapien
gtgctcctagcccagagaggctgca

SEQ ID NO: 2705437 - DNA, 25 bp, Homo sapien
ggccctgcaggcctatagcactcag

SEQ ID NO: 2705438 - DNA, 25 bp, Homo sapien
ccagagactgcagaatgtcttcccc

SEQ ID NO: 2705439 - DNA, 25 bp, Homo sapien
ggccagctgcctttaccgaaaaggc

SEQ ID NO: 2705440 - DNA, 25 bp, Homo sapien
gctgcctttaccgaaaaggcagtgt

SEQ ID NO: 2705441 - DNA, 25 bp, Homo sapien
cagctgcctttaccgaaaaggcagt

SEQ ID NO: 2705442 - DNA, 25 bp, Homo sapien
tgcctttaccgaaaaggcagtgtag

SEQ ID NO: 2705443 - DNA, 25 bp, Homo sapien
acacctgccggcggccagcaggcat

SEQ ID NO: 2705444 - DNA, 25 bp, Homo sapien
ccagcagacacctgccggcggccag

SEQ ID NO: 2705445 - DNA, 25 bp, Homo sapien
gcaccgcggggccagcagacacctg

SEQ ID NO: 2705446 - DNA, 25 bp, Homo sapien
gtttgcaggcaccgcggggccagca

SEQ ID NO: 2705447 - DNA, 25 bp, Homo sapien
gtctctcaggctagatagcagtaat

SEQ ID NO: 2705448 - DNA, 25 bp, Homo sapien
tagatagcagtaattgaactgtggg

SEQ ID NO: 2705449 - DNA, 25 bp, Homo sapien
taattgaactgtgggctcgctcagc

SEQ ID NO: 2705450 - DNA, 25 bp, Homo sapien
tagcagtaattgaactgtgggctcg

SEQ ID NO: 2705451 - DNA, 25 bp, Homo sapien
cagctgcaaagacttcagtgggtgg

SEQ ID NO: 2705452 - DNA, 25 bp, Homo sapien
gctgctgtcctcctcactctcaagg

SEQ ID NO: 2705453 - DNA, 25 bp, Homo sapien
gcagggagggctcttctcctcacat

SEQ ID NO: 2705454 - DNA, 25 bp, Homo sapien
tgctgtcctcctcactctcaagggt

SEQ ID NO: 2705455 - DNA, 25 bp, Homo sapien
gctgtttggaatgtgaggcttgtcc

SEQ ID NO: 2705456 - DNA, 25 bp, Homo sapien
tggggtcagccctgtatcctctagc

SEQ ID NO: 2705457 - DNA, 25 bp, Homo sapien
ctgtatcctctagccctgccaggga

SEQ ID NO: 2705458 - DNA, 25 bp, Homo sapien
caaatgctgatttggtcccttggca

SEQ ID NO: 2705459 - DNA, 25 bp, Homo sapien
atgctggaccaatggaaataatttc

SEQ ID NO: 2705460 - DNA, 25 bp, Homo sapien
acaatttccaacatgcttcccttga

SEQ ID NO: 2705461 - DNA, 25 bp, Homo sapien
tgcttcccttgatgtccaacaaatg

SEQ ID NO: 2705462 - DNA, 25 bp, Homo sapien
tatgcgagcacgaggccacaatttc

SEQ ID NO: 2705463 - DNA, 25 bp, Homo sapien
ttcccctgaacatctggactgctcc

SEQ ID NO: 2705464 - DNA, 25 bp, Homo sapien
gaacatctggactgctcctgaaatc

SEQ ID NO: 2705465 - DNA, 25 bp, Homo sapien
gctccttgttccatccagagggagc

SEQ ID NO: 2705466 - DNA, 25 bp, Homo sapien
ctccttgttccatccagagggagct

SEQ ID NO: 2705467 - DNA, 25 bp, Homo sapien
ctccagggatcacagtttcctgagg

SEQ ID NO: 2705468 - DNA, 25 bp, Homo sapien
acacaggccttgagtaccagaagtc

SEQ ID NO: 2705469 - DNA, 25 bp, Homo sapien
cagggatcacagtttcctgaggggc

SEQ ID NO: 2705470 - DNA, 25 bp, Homo sapien
cacaggccttgagtaccagaagtcc

SEQ ID NO: 2705471 - DNA, 25 bp, Homo sapien
ggttcatgccggctgttatcactat

SEQ ID NO: 2705472 - DNA, 25 bp, Homo sapien
tgtcatatgccagtgtcacgtgtgg

SEQ ID NO: 2705473 - DNA, 25 bp, Homo sapien
ggctagatcgtagcagtgtcaggat

SEQ ID NO: 2705474 - DNA, 25 bp, Homo sapien
gagaaaaccagggaggttgtcatat

SEQ ID NO: 2705475 - DNA, 25 bp, Homo sapien
caggccagcagggctgccatggcca

SEQ ID NO: 2705476 - DNA, 25 bp, Homo sapien
aggccagcagggctgccatggccat

SEQ ID NO: 2705477 - DNA, 25 bp, Homo sapien
caagtgcaaacaattagcagcttct

SEQ ID NO: 2705478 - DNA, 25 bp, Homo sapien
tggtcgtgcttcttgtgccctggag

SEQ ID NO: 2705479 - DNA, 25 bp, Homo sapien
gcaaacaattagcagcttcttgagg

SEQ ID NO: 2705480 - DNA, 25 bp, Homo sapien
ccctgtgggactggtcgtgcttctt

SEQ ID NO: 2705481 - DNA, 25 bp, Homo sapien
agccagcagtgcagcatcactgagg

SEQ ID NO: 2705482 - DNA, 25 bp, Homo sapien
ctgctggagcagccagcagtgcagc

SEQ ID NO: 2705483 - DNA, 25 bp, Homo sapien
tggagcagccagcagtgcagcatca

SEQ ID NO: 2705484 - DNA, 25 bp, Homo sapien
gagcagccagcagtgcagcatcact

SEQ ID NO: 2705485 - DNA, 25 bp, Homo sapien
tgctgggtgatggagatggatgagc

SEQ ID NO: 2705486 - DNA, 25 bp, Homo sapien
ttgctgggtgatggagatggatgag

SEQ ID NO: 2705487 - DNA, 25 bp, Homo sapien
ctgggtgatggagatggatgagctc

SEQ ID NO: 2705488 - DNA, 25 bp, Homo sapien
gggtgatggagatggatgagctcat

SEQ ID NO: 2705489 - DNA, 25 bp, Homo sapien
cctaacgcatacatccatacacaga

SEQ ID NO: 2705490 - DNA, 25 bp, Homo sapien
taacgcatacatccatacacagatg

SEQ ID NO: 2705491 - DNA, 25 bp, Homo sapien
cagcatgtttcaggctctgatgagc

SEQ ID NO: 2705492 - DNA, 25 bp, Homo sapien
acacacagcatgtttcaggctctga

SEQ ID NO: 2705493 - DNA, 25 bp, Homo sapien
tcagaatcctgcttcggaaagagac

SEQ ID NO: 2705494 - DNA, 25 bp, Homo sapien
ctattaaattcagcacgttacctcc

SEQ ID NO: 2705495 - DNA, 25 bp, Homo sapien
taaattcagcacgttacctcctgcc

SEQ ID NO: 2705496 - DNA, 25 bp, Homo sapien
ggacgtactccggacttgtcagaat

SEQ ID NO: 2705497 - DNA, 25 bp, Homo sapien
tcgcaatacatccagaatcagactt

SEQ ID NO: 2705498 - DNA, 25 bp, Homo sapien
aagggatgggtcttcaggaattgag

SEQ ID NO: 2705499 - DNA, 25 bp, Homo sapien
tcatccgcggtgattgcttctttct

SEQ ID NO: 2705500 - DNA, 25 bp, Homo sapien
tggaaggggtaaaatcctcagaatc

SEQ ID NO: 2705501 - DNA, 25 bp, Homo sapien
gtgagggagactgaggatgtcagca

SEQ ID NO: 2705502 - DNA, 25 bp, Homo sapien
tgcccacagggccaaacccaggtga

SEQ ID NO: 2705503 - DNA, 25 bp, Homo sapien
agactgaggatgtcagcagaagttg

SEQ ID NO: 2705504 - DNA, 25 bp, Homo sapien
cacagggccaaacccaggtgaggga

SEQ ID NO: 2705505 - DNA, 25 bp, Homo sapien
acaactgcaaacaatttgttcagta

SEQ ID NO: 2705506 - DNA, 25 bp, Homo sapien
aatttcctgttaatcaggacccttg

SEQ ID NO: 2705507 - DNA, 25 bp, Homo sapien
actttgctctaattggcattcgtag

SEQ ID NO: 2705508 - DNA, 25 bp, Homo sapien
tgcaaacaatttgttcagtaaactt

SEQ ID NO: 2705509 - DNA, 25 bp, Homo sapien
gcactgtcccccatcgcacagctgc

SEQ ID NO: 2705510 - DNA, 25 bp, Homo sapien
tcctgtggattcccggtgagtccca

SEQ ID NO: 2705511 - DNA, 25 bp, Homo sapien
ctgtggattcccggtgagtcccagc

SEQ ID NO: 2705512 - DNA, 25 bp, Homo sapien
cagctccacggaaggaggctgaatt

SEQ ID NO: 2705513 - DNA, 25 bp, Homo sapien
caagacaccgccttatttgaagctg

SEQ ID NO: 2705514 - DNA, 25 bp, Homo sapien
aaagtgacagaagggctcaactgca

SEQ ID NO: 2705515 - DNA, 25 bp, Homo sapien
cagaggtgcccatagtaattgcagc

SEQ ID NO: 2705516 - DNA, 25 bp, Homo sapien
tgcagcacctttactaagcgtgaag

SEQ ID NO: 2705517 - DNA, 25 bp, Homo sapien
ggctcttaagggaacagatactcca

SEQ ID NO: 2705518 - DNA, 25 bp, Homo sapien
tggctcttaagggaacagatactcc

SEQ ID NO: 2705519 - DNA, 25 bp, Homo sapien
ttggctcttaagggaacagatactc

SEQ ID NO: 2705520 - DNA, 25 bp, Homo sapien
gcttcagggtcaccgtaggttccga

SEQ ID NO: 2705521 - DNA, 25 bp, Homo sapien
caaggcctccagaggatgaatctca

SEQ ID NO: 2705522 - DNA, 25 bp, Homo sapien
tctggtcctgcggaagcatcttcag

SEQ ID NO: 2705523 - DNA, 25 bp, Homo sapien
gagggactgctgtgcctccgctgcc

SEQ ID NO: 2705524 - DNA, 25 bp, Homo sapien
tgatcaaagcaaatttcactcgttc

SEQ ID NO: 2705525 - DNA, 25 bp, Homo sapien
ctggaaaggacgtggcggacacttt

SEQ ID NO: 2705526 - DNA, 25 bp, Homo sapien
gcaaatttcactcgttctctgtata

SEQ ID NO: 2705527 - DNA, 25 bp, Homo sapien
ggacactttacttccagagtcatat

SEQ ID NO: 2705528 - DNA, 25 bp, Homo sapien
tctctgcttggcctacggtgatgcc

SEQ ID NO: 2705529 - DNA, 25 bp, Homo sapien
tcaatgagcaaaacctctcctgttg

SEQ ID NO: 2705530 - DNA, 25 bp, Homo sapien
gatgccgtgtaatctcccaaaaaat

SEQ ID NO: 2705531 - DNA, 25 bp, Homo sapien
tatggtgctaatattcgccgggtta

SEQ ID NO: 2705532 - DNA, 25 bp, Homo sapien
gagccataaggccatcagacagcct

SEQ ID NO: 2705533 - DNA, 25 bp, Homo sapien
ctggcctctgagctacagtttggct

SEQ ID NO: 2705534 - DNA, 25 bp, Homo sapien
gctaggtcttggatctccacagaga

SEQ ID NO: 2705535 - DNA, 25 bp, Homo sapien
cagacagcctggctaggtcttggat

SEQ ID NO: 2705536 - DNA, 25 bp, Homo sapien
ctcccaggacctggagaatttgttc

SEQ ID NO: 2705537 - DNA, 25 bp, Homo sapien
agagtctccacccagaattccagcc

SEQ ID NO: 2705538 - DNA, 25 bp, Homo sapien
ccggcacaggatgtacaggaaagag

SEQ ID NO: 2705539 - DNA, 25 bp, Homo sapien
gagggcaatggcttcccggaccaga

SEQ ID NO: 2705540 - DNA, 25 bp, Homo sapien
tgctggttggctgtccatgagtgtt

SEQ ID NO: 2705541 - DNA, 25 bp, Homo sapien
tggttggctgtccatgagtgttggc

SEQ ID NO: 2705542 - DNA, 25 bp, Homo sapien
ctggttggctgtccatgagtgttgg

SEQ ID NO: 2705543 - DNA, 25 bp, Homo sapien
gctggttggctgtccatgagtgttg

SEQ ID NO: 2705544 - DNA, 25 bp, Homo sapien
cacatatactcctccctttgtaagt

SEQ ID NO: 2705545 - DNA, 25 bp, Homo sapien
agtaaaggtacgaaaccagaatgtg

SEQ ID NO: 2705546 - DNA, 25 bp, Homo sapien
tacgaaaccagaatgtggaaggcag

SEQ ID NO: 2705547 - DNA, 25 bp, Homo sapien
ggtacgaaaccagaatgtggaaggc

SEQ ID NO: 2705548 - DNA, 25 bp, Homo sapien
ggcagtctcacccaagggacacttc

SEQ ID NO: 2705549 - DNA, 25 bp, Homo sapien
ctctgtgtttacacatgattctagg

SEQ ID NO: 2705550 - DNA, 25 bp, Homo sapien
tctcacccaagggacacttctcagg

SEQ ID NO: 2705551 - DNA, 25 bp, Homo sapien
ctgggcagtctcacccaagggacac

SEQ ID NO: 2705552 - DNA, 25 bp, Homo sapien
ccaggtaaacacaggaacacagtct

SEQ ID NO: 2705553 - DNA, 25 bp, Homo sapien
caggtaaacacaggaacacagtctg

SEQ ID NO: 2705554 - DNA, 25 bp, Homo sapien
cccccaggtaaacacaggaacacag

SEQ ID NO: 2705555 - DNA, 25 bp, Homo sapien
gtaaacacaggaacacagtctgttc

SEQ ID NO: 2705556 - DNA, 25 bp, Homo sapien
gaggtgcacgttgaacacggcagaa

SEQ ID NO: 2705557 - DNA, 25 bp, Homo sapien
tagcatttgggccattctgcaagaa

SEQ ID NO: 2705558 - DNA, 25 bp, Homo sapien
gtgctctggtaggagaatccgctga

SEQ ID NO: 2705559 - DNA, 25 bp, Homo sapien
cacctgtatgggacgtagcatttgg

SEQ ID NO: 2705560 - DNA, 25 bp, Homo sapien
tcagaggcgagttgccaaggggagc

SEQ ID NO: 2705561 - DNA, 25 bp, Homo sapien
aggcgagttgccaaggggagccggg

SEQ ID NO: 2705562 - DNA, 25 bp, Homo sapien
cagaggcgagttgccaaggggagcc

SEQ ID NO: 2705563 - DNA, 25 bp, Homo sapien
ctcctcagaggcgagttgccaaggg

SEQ ID NO: 2705564 - DNA, 25 bp, Homo sapien
ttgttccttggccctctcctcagcc

SEQ ID NO: 2705565 - DNA, 25 bp, Homo sapien
cttgttccttggccctctcctcagc

SEQ ID NO: 2705566 - DNA, 25 bp, Homo sapien
ttggccctctcctcagcccaggggc

SEQ ID NO: 2705567 - DNA, 25 bp, Homo sapien
gccctctcctcagcccaggggcttc

SEQ ID NO: 2705568 - DNA, 25 bp, Homo sapien
ggacaataagggatgagcagcgtcc

SEQ ID NO: 2705569 - DNA, 25 bp, Homo sapien
agggggacaataagggatgagcagc

SEQ ID NO: 2705570 - DNA, 25 bp, Homo sapien
gggacaataagggatgagcagcgtc

SEQ ID NO: 2705571 - DNA, 25 bp, Homo sapien
ctgagggggacaataagggatgagc

SEQ ID NO: 2705572 - DNA, 25 bp, Homo sapien
cataaatgatgtaggggaagcgtac

SEQ ID NO: 2705573 - DNA, 25 bp, Homo sapien
ataaatgatgtaggggaagcgtact

SEQ ID NO: 2705574 - DNA, 25 bp, Homo sapien
aaatgatgtaggggaagcgtacttg

SEQ ID NO: 2705575 - DNA, 25 bp, Homo sapien
gccataaatgatgtaggggaagcgt

SEQ ID NO: 2705576 - DNA, 25 bp, Homo sapien
gatgaggctgggatcctgccctctg

SEQ ID NO: 2705577 - DNA, 25 bp, Homo sapien
gggatgaggctgggatcctgccctc

SEQ ID NO: 2705578 - DNA, 25 bp, Homo sapien
tgaggctgggatcctgccctctgcc

SEQ ID NO: 2705579 - DNA, 25 bp, Homo sapien
taggggatgaggctgggatcctgcc

SEQ ID NO: 2705580 - DNA, 25 bp, Homo sapien
tagtcttgggataggaatacttggt

SEQ ID NO: 2705581 - DNA, 25 bp, Homo sapien
ggcagtaaggagtgggcagaatcaa

SEQ ID NO: 2705582 - DNA, 25 bp, Homo sapien
ctggacacaggtaacggggcacagt

SEQ ID NO: 2705583 - DNA, 25 bp, Homo sapien
aagggaactttcttgacagtctgta

SEQ ID NO: 2705584 - DNA, 25 bp, Homo sapien
gtggggactaagcagtagattaggg

SEQ ID NO: 2705585 - DNA, 25 bp, Homo sapien
gggactaagcagtagattaggggct

SEQ ID NO: 2705586 - DNA, 25 bp, Homo sapien
agggtggggactaagcagtagatta

SEQ ID NO: 2705587 - DNA, 25 bp, Homo sapien
ggtggggactaagcagtagattagg

SEQ ID NO: 2705588 - DNA, 25 bp, Homo sapien
caggaagacgtgagtggattcgggc

SEQ ID NO: 2705589 - DNA, 25 bp, Homo sapien
ctgccaggaagacgtgagtggattc

SEQ ID NO: 2705590 - DNA, 25 bp, Homo sapien
accctgccaggaagacgtgagtgga

SEQ ID NO: 2705591 - DNA, 25 bp, Homo sapien
aggaagacgtgagtggattcgggcc

SEQ ID NO: 2705592 - DNA, 25 bp, Homo sapien
agctgcaccgtgcgtctccatggca

SEQ ID NO: 2705593 - DNA, 25 bp, Homo sapien
gctgcaccgtgcgtctccatggcaa

SEQ ID NO: 2705594 - DNA, 25 bp, Homo sapien
cgtgtaaacccggatcgacagcggg

SEQ ID NO: 2705595 - DNA, 25 bp, Homo sapien
ccttgctgctttcggagagacccga

SEQ ID NO: 2705596 - DNA, 25 bp, Homo sapien
tcatccgttcccagacgcggagcat

SEQ ID NO: 2705597 - DNA, 25 bp, Homo sapien
taatcccggatgagcctcgtgtaaa

SEQ ID NO: 2705598 - DNA, 25 bp, Homo sapien
caggtgcaatagtcttggagttggt

SEQ ID NO: 2705599 - DNA, 25 bp, Homo sapien
agttggtagtattgggtgcccagct

SEQ ID NO: 2705600 - DNA, 25 bp, Homo sapien
agtggcctcaaggattgtcctgggt

SEQ ID NO: 2705601 - DNA, 25 bp, Homo sapien
taaagagacagcccctttcccctgc

SEQ ID NO: 2705602 - DNA, 25 bp, Homo sapien
taccacattgtatatgcagaggagg

SEQ ID NO: 2705603 - DNA, 25 bp, Homo sapien
gaattagggtgcacagtgataccac

SEQ ID NO: 2705604 - DNA, 25 bp, Homo sapien
aagtagtcagatgagccttgtgcca

SEQ ID NO: 2705605 - DNA, 25 bp, Homo sapien
ggcagcaggatacagtcccataaga

SEQ ID NO: 2705606 - DNA, 25 bp, Homo sapien
ccaattccaaaagggacttcagctg

SEQ ID NO: 2705607 - DNA, 25 bp, Homo sapien
agtgggtgtcttgctggtctgccat

SEQ ID NO: 2705608 - DNA, 25 bp, Homo sapien
gaagtgggtgtcttgctggtctgcc

SEQ ID NO: 2705609 - DNA, 25 bp, Homo sapien
agctggaagtgggtgtcttgctggt

SEQ ID NO: 2705610 - DNA, 25 bp, Homo sapien
acactcggcgtcctctgggaggagt

SEQ ID NO: 2705611 - DNA, 25 bp, Homo sapien
ggaagacgccgcgaggcttctagca

SEQ ID NO: 2705612 - DNA, 25 bp, Homo sapien
cccgctgaccaaggcggtgcggact

SEQ ID NO: 2705613 - DNA, 25 bp, Homo sapien
cttgggtcgcttcgtgcaggaagac

SEQ ID NO: 2705614 - DNA, 25 bp, Homo sapien
ccgcacacctgggttcgtctcacac

SEQ ID NO: 2705615 - DNA, 25 bp, Homo sapien
acctgggttcgtctcacacctgagc

SEQ ID NO: 2705616 - DNA, 25 bp, Homo sapien
tgggttcgtctcacacctgagcgcc

SEQ ID NO: 2705617 - DNA, 25 bp, Homo sapien
acacctgggttcgtctcacacctga

SEQ ID NO: 2705618 - DNA, 25 bp, Homo sapien
gcggcgcggacgcaaagccgccggg

SEQ ID NO: 2705619 - DNA, 25 bp, Homo sapien
ccgaagcggtcatggccggcgggag

SEQ ID NO: 2705620 - DNA, 25 bp, Homo sapien
ccagccgtgcggagccgcagcccag

SEQ ID NO: 2705621 - DNA, 25 bp, Homo sapien
ggcgctgcccggaggcgggtaagga

SEQ ID NO: 2705622 - DNA, 25 bp, Homo sapien
gaggggtggactttccccgagcgca

SEQ ID NO: 2705623 - DNA, 25 bp, Homo sapien
gagggccacacagggcgatcgggga

SEQ ID NO: 2705624 - DNA, 25 bp, Homo sapien
ggggtggactttccccgagcgcagc

SEQ ID NO: 2705625 - DNA, 25 bp, Homo sapien
tctgcggcttcggccggagggggag

SEQ ID NO: 2705626 - DNA, 25 bp, Homo sapien
acggcttgctgcggccaccgaggct

SEQ ID NO: 2705627 - DNA, 25 bp, Homo sapien
gcttgctgcggccaccgaggctgac

SEQ ID NO: 2705628 - DNA, 25 bp, Homo sapien
ccccacggcttgctgcggccaccga

SEQ ID NO: 2705629 - DNA, 25 bp, Homo sapien
cacggcttgctgcggccaccgaggc

SEQ ID NO: 2705630 - DNA, 25 bp, Homo sapien
tctagagcccccgggtcccattagc

SEQ ID NO: 2705631 - DNA, 25 bp, Homo sapien
tcctcggagctgtgctcaatgatgt

SEQ ID NO: 2705632 - DNA, 25 bp, Homo sapien
gctgtgctcaatgatgtggagagta

SEQ ID NO: 2705633 - DNA, 25 bp, Homo sapien
ttccctcctcggagctgtgctcaat

SEQ ID NO: 2705634 - DNA, 25 bp, Homo sapien
tcggagctgtgctcaatgatgtgga

SEQ ID NO: 2705635 - DNA, 25 bp, Homo sapien
gaatggctcccagcaagcagactgg

SEQ ID NO: 2705636 - DNA, 25 bp, Homo sapien
agggtttgctgcattgggcagcggg

SEQ ID NO: 2705637 - DNA, 25 bp, Homo sapien
ctttgaatggctcccagcaagcaga

SEQ ID NO: 2705638 - DNA, 25 bp, Homo sapien
agaggagcctttgaatggctcccag

SEQ ID NO: 2705639 - DNA, 25 bp, Homo sapien
gggagattagcatttcctgcccagc

SEQ ID NO: 2705640 - DNA, 25 bp, Homo sapien
agggaggatggaggcgaacatctgg

SEQ ID NO: 2705641 - DNA, 25 bp, Homo sapien
agctctgcggctgctgatcctgctc

SEQ ID NO: 2705642 - DNA, 25 bp, Homo sapien
agattagcatttcctgcccagctct

SEQ ID NO: 2705643 - DNA, 25 bp, Homo sapien
tgctgctgctgtggcccagttctgc

SEQ ID NO: 2705644 - DNA, 25 bp, Homo sapien
cctggtgctgctgctgtggcccagt

SEQ ID NO: 2705645 - DNA, 25 bp, Homo sapien
ctgctgctgtggcccagttctgctc

SEQ ID NO: 2705646 - DNA, 25 bp, Homo sapien
ggtgctgctgctgtggcccagttct

SEQ ID NO: 2705647 - DNA, 25 bp, Homo sapien
catagtccccagaacagtcgtcttg

SEQ ID NO: 2705648 - DNA, 25 bp, Homo sapien
cagtcgtcttggtgtttgcttattt

SEQ ID NO: 2705649 - DNA, 25 bp, Homo sapien
ccagaacagtcgtcttggtgtttgc

SEQ ID NO: 2705650 - DNA, 25 bp, Homo sapien
tttttgatcagatattttggcactg

SEQ ID NO: 2705651 - DNA, 25 bp, Homo sapien
tttcctggatctgagccatcggctc

SEQ ID NO: 2705652 - DNA, 25 bp, Homo sapien
tggatctgagccatcggctctccct

SEQ ID NO: 2705653 - DNA, 25 bp, Homo sapien
cctggagcctagggtttcctggatc

SEQ ID NO: 2705654 - DNA, 25 bp, Homo sapien
ctggagcctagggtttcctggatct

SEQ ID NO: 2705655 - DNA, 25 bp, Homo sapien
ggccttctaggttatcagaacgttc

SEQ ID NO: 2705656 - DNA, 25 bp, Homo sapien
aggggccttctaggttatcagaacg

SEQ ID NO: 2705657 - DNA, 25 bp, Homo sapien
agtgggccccggagaagagattcat

SEQ ID NO: 2705658 - DNA, 25 bp, Homo sapien
aggaattccatggtccctttcttag

SEQ ID NO: 2705659 - DNA, 25 bp, Homo sapien
ttcttagagactagtgggccccgga

SEQ ID NO: 2705660 - DNA, 25 bp, Homo sapien
ggaattccatggtccctttcttaga

SEQ ID NO: 2705661 - DNA, 25 bp, Homo sapien
tcccgcagcggggagcacattagca

SEQ ID NO: 2705662 - DNA, 25 bp, Homo sapien
gaattatgatcccttcccgcagcgg

SEQ ID NO: 2705663 - DNA, 25 bp, Homo sapien
ccgcagcggggagcacattagcaga

SEQ ID NO: 2705664 - DNA, 25 bp, Homo sapien
cgcagcggggagcacattagcagag

SEQ ID NO: 2705665 - DNA, 25 bp, Homo sapien
gaaaatttacaactcaatggcacag

SEQ ID NO: 2705666 - DNA, 25 bp, Homo sapien
gagtctctgagtatcttgagagccg

SEQ ID NO: 2705667 - DNA, 25 bp, Homo sapien
ggagacatctagtggctgtcggcct

SEQ ID NO: 2705668 - DNA, 25 bp, Homo sapien
ttgagagccggagacctaaagttcc

SEQ ID NO: 2705669 - DNA, 25 bp, Homo sapien
agtggtggccttttgattccccatc

SEQ ID NO: 2705670 - DNA, 25 bp, Homo sapien
tccccatcttactaatcatggcaaa

SEQ ID NO: 2705671 - DNA, 25 bp, Homo sapien
ccatcttactaatcatggcaaacat

SEQ ID NO: 2705672 - DNA, 25 bp, Homo sapien
tggtggccttttgattccccatctt

SEQ ID NO: 2705673 - DNA, 25 bp, Homo sapien
cagcgaatgagataggctgggctcc

SEQ ID NO: 2705674 - DNA, 25 bp, Homo sapien
caatgtagaagacccaggattccct

SEQ ID NO: 2705675 - DNA, 25 bp, Homo sapien
cctgtccttgtaggaatgaccaccc

SEQ ID NO: 2705676 - DNA, 25 bp, Homo sapien
tggtgcccaacacaggacctagcat

SEQ ID NO: 2705677 - DNA, 25 bp, Homo sapien
gccgagtacccgaggaagctctgag

SEQ ID NO: 2705678 - DNA, 25 bp, Homo sapien
cggctagaaaggccgccgcgatgcc

SEQ ID NO: 2705679 - DNA, 25 bp, Homo sapien
agagagctcgcagccgaaagcgcga

SEQ ID NO: 2705680 - DNA, 25 bp, Homo sapien
agaccaacccttgggacagcggcta

SEQ ID NO: 2705681 - DNA, 25 bp, Homo sapien
tcggcccaggagtcccgggaggcgc

SEQ ID NO: 2705682 - DNA, 25 bp, Homo sapien
ccaggagtcccgggaggcgccacat

SEQ ID NO: 2705683 - DNA, 25 bp, Homo sapien
ctcggcccaggagtcccgggaggcg

SEQ ID NO: 2705684 - DNA, 25 bp, Homo sapien
ggcccaggagtcccgggaggcgcca

SEQ ID NO: 2705685 - DNA, 25 bp, Homo sapien
ctccagaggctaggtcccagtgtac

SEQ ID NO: 2705686 - DNA, 25 bp, Homo sapien
ctgtcgaggttaggcacaggaacca

SEQ ID NO: 2705687 - DNA, 25 bp, Homo sapien
aggtagtctgaggcccatctgggct

SEQ ID NO: 2705688 - DNA, 25 bp, Homo sapien
tctgggctggtggacttaggagtca

SEQ ID NO: 2705689 - DNA, 25 bp, Homo sapien
ggcatccttccatccatgggacctt

SEQ ID NO: 2705690 - DNA, 25 bp, Homo sapien
cttggacccccgctcgtgcctgggc

SEQ ID NO: 2705691 - DNA, 25 bp, Homo sapien
gaaggcatccttccatccatgggac

SEQ ID NO: 2705692 - DNA, 25 bp, Homo sapien
tccttccatccatgggaccttggac

SEQ ID NO: 2705693 - DNA, 25 bp, Homo sapien
aagatatggcatcccatagggtgtt

SEQ ID NO: 2705694 - DNA, 25 bp, Homo sapien
tatggcatcccatagggtgttcggg

SEQ ID NO: 2705695 - DNA, 25 bp, Homo sapien
gatatggcatcccatagggtgttcg

SEQ ID NO: 2705696 - DNA, 25 bp, Homo sapien
ccaagatatggcatcccatagggtg

SEQ ID NO: 2705697 - DNA, 25 bp, Homo sapien
gtggatctgccttgccagctgcagg

SEQ ID NO: 2705698 - DNA, 25 bp, Homo sapien
cctggaagtggatctgccttgccag

SEQ ID NO: 2705699 - DNA, 25 bp, Homo sapien
tgctggcagggatgcctggaagtgg

SEQ ID NO: 2705700 - DNA, 25 bp, Homo sapien
aagtggatctgccttgccagctgca

SEQ ID NO: 2705701 - DNA, 25 bp, Homo sapien
aggagcatgggtgccacaagggaga

SEQ ID NO: 2705702 - DNA, 25 bp, Homo sapien
catgggtgccacaagggagatgaga

SEQ ID NO: 2705703 - DNA, 25 bp, Homo sapien
gatgagaagaaacggtccaggggac

SEQ ID NO: 2705704 - DNA, 25 bp, Homo sapien
gagcatgggtgccacaagggagatg

SEQ ID NO: 2705705 - DNA, 25 bp, Homo sapien
gaatctaaagtagtctggaccctgt

SEQ ID NO: 2705706 - DNA, 25 bp, Homo sapien
tcagaagaggatcagtgcaggctgc

SEQ ID NO: 2705707 - DNA, 25 bp, Homo sapien
catgccctgggtggatagaacttcc

SEQ ID NO: 2705708 - DNA, 25 bp, Homo sapien
tcctgaggtgtgtccagagacgctt

SEQ ID NO: 2705709 - DNA, 25 bp, Homo sapien
gaaagagccagcaagagtagtcagg

SEQ ID NO: 2705710 - DNA, 25 bp, Homo sapien
aagagccagcaagagtagtcaggtc

SEQ ID NO: 2705711 - DNA, 25 bp, Homo sapien
tggaaagagccagcaagagtagtca

SEQ ID NO: 2705712 - DNA, 25 bp, Homo sapien
gagccagcaagagtagtcaggtctg

SEQ ID NO: 2705713 - DNA, 25 bp, Homo sapien
tgggttccctgaggccagtgtgcct

SEQ ID NO: 2705714 - DNA, 25 bp, Homo sapien
gctggggaggatgtgttgtcgcagt

SEQ ID NO: 2705715 - DNA, 25 bp, Homo sapien
tgtgtgagaagttccggggctgagc

SEQ ID NO: 2705716 - DNA, 25 bp, Homo sapien
gagctcctctcaaagagttgtgtga

SEQ ID NO: 2705717 - DNA, 25 bp, Homo sapien
gggacctcacaggagtgccaattcc

SEQ ID NO: 2705718 - DNA, 25 bp, Homo sapien
ggagtgccaattcccttcgcagcaa

SEQ ID NO: 2705719 - DNA, 25 bp, Homo sapien
taaccctgaatcacctcacaaggca

SEQ ID NO: 2705720 - DNA, 25 bp, Homo sapien
ttcgcagcaaacaacgtccatcttg

SEQ ID NO: 2705721 - DNA, 25 bp, Homo sapien
ttcttttctccgactctcccagtct

SEQ ID NO: 2705722 - DNA, 25 bp, Homo sapien
ttttctccgactctcccagtctacc

SEQ ID NO: 2705723 - DNA, 25 bp, Homo sapien
tcttttctccgactctcccagtcta

SEQ ID NO: 2705724 - DNA, 25 bp, Homo sapien
cttcttttctccgactctcccagtc

SEQ ID NO: 2705725 - DNA, 25 bp, Homo sapien
ggttttgcctcggactcgatgctac

SEQ ID NO: 2705726 - DNA, 25 bp, Homo sapien
tgctactactggcatgcaggaagcc

SEQ ID NO: 2705727 - DNA, 25 bp, Homo sapien
ggactcgatgctactactggcatgc

SEQ ID NO: 2705728 - DNA, 25 bp, Homo sapien
gctgggctggttttgcctcggactc

SEQ ID NO: 2705729 - DNA, 25 bp, Homo sapien
gactcaccaagggatggtttaccag

SEQ ID NO: 2705730 - DNA, 25 bp, Homo sapien
agaaatataaaagactcaccaaggg

SEQ ID NO: 2705731 - DNA, 25 bp, Homo sapien
ggatggtttaccaggattgccacct

SEQ ID NO: 2705732 - DNA, 25 bp, Homo sapien
tatggggatccaggtggccaaatct

SEQ ID NO: 2705733 - DNA, 25 bp, Homo sapien
tcacagcctcctcaagggaaagagt

SEQ ID NO: 2705734 - DNA, 25 bp, Homo sapien
ccaggaagttgaaagcgatggaaac

SEQ ID NO: 2705735 - DNA, 25 bp, Homo sapien
ttgaaagcgatggaaacactgagct

SEQ ID NO: 2705736 - DNA, 25 bp, Homo sapien
gctgctgaatggaagtcacagcctc

SEQ ID NO: 2705737 - DNA, 25 bp, Homo sapien
tgccttggggcagggtccatttggt

SEQ ID NO: 2705738 - DNA, 25 bp, Homo sapien
ctgccttggggcagggtccatttgg

SEQ ID NO: 2705739 - DNA, 25 bp, Homo sapien
catctgcataagaatgggtccctgc

SEQ ID NO: 2705740 - DNA, 25 bp, Homo sapien
aagaggttcctgttcacacatcgag

SEQ ID NO: 2705741 - DNA, 25 bp, Homo sapien
tctgagtctccgcattagaaggcct

SEQ ID NO: 2705742 - DNA, 25 bp, Homo sapien
caaactgcgcctcaagatgggagcc

SEQ ID NO: 2705743 - DNA, 25 bp, Homo sapien
gctcagtgaggacttctaaatcaaa

SEQ ID NO: 2705744 - DNA, 25 bp, Homo sapien
gcgcttactgttcccgccacttgga

SEQ ID NO: 2705745 - DNA, 25 bp, Homo sapien
tgtgacaggtcttagatcaaaggtc

SEQ ID NO: 2705746 - DNA, 25 bp, Homo sapien
tgcctcaggattttcgcgcttactg

SEQ ID NO: 2705747 - DNA, 25 bp, Homo sapien
ggcacggccaattctcaactcaagg

SEQ ID NO: 2705748 - DNA, 25 bp, Homo sapien
taattttgcctagggtgaaggcgcc

SEQ ID NO: 2705749 - DNA, 25 bp, Homo sapien
taaagctcatgagggagaaaccagg

SEQ ID NO: 2705750 - DNA, 25 bp, Homo sapien
tgaggcttggcaggtcaatagatcc

SEQ ID NO: 2705751 - DNA, 25 bp, Homo sapien
cgtgtggtcgccactcttcatgttc

SEQ ID NO: 2705752 - DNA, 25 bp, Homo sapien
tctggaagtaagaaaaggctgccgt

SEQ ID NO: 2705753 - DNA, 25 bp, Homo sapien
cattgtactgcgctttgctgtagcc

SEQ ID NO: 2705754 - DNA, 25 bp, Homo sapien
tgctcatgacacaagcccgcattgt

SEQ ID NO: 2705755 - DNA, 25 bp, Homo sapien
caagatgctattctaggctgaggat

SEQ ID NO: 2705756 - DNA, 25 bp, Homo sapien
taaaattttagcgtacagccttgca

SEQ ID NO: 2705757 - DNA, 25 bp, Homo sapien
caaagggagaaacacccagtcggct

SEQ ID NO: 2705758 - DNA, 25 bp, Homo sapien
tttagacatctacgcatttgcacgc

SEQ ID NO: 2705759 - DNA, 25 bp, Homo sapien
gctcagggttccacgaagaggctgg

SEQ ID NO: 2705760 - DNA, 25 bp, Homo sapien
aggctgggtctcgtagtaggcacct

SEQ ID NO: 2705761 - DNA, 25 bp, Homo sapien
gcatagcggtactgagccaggctgt

SEQ ID NO: 2705762 - DNA, 25 bp, Homo sapien
tagtaggcacctggcatagcggtac

SEQ ID NO: 2705763 - DNA, 25 bp, Homo sapien
ggctccttggtgaaaagcaccccga

SEQ ID NO: 2705764 - DNA, 25 bp, Homo sapien
cccattgttggctgcaagccaaaga

SEQ ID NO: 2705765 - DNA, 25 bp, Homo sapien
tggtgaaaagcaccccgaggaaagc

SEQ ID NO: 2705766 - DNA, 25 bp, Homo sapien
catccaggtagggctccttggtgaa

SEQ ID NO: 2705767 - DNA, 25 bp, Homo sapien
tgatgcgtcttctaatttccctggg

SEQ ID NO: 2705768 - DNA, 25 bp, Homo sapien
tgacttacaagcatcccagagaact

SEQ ID NO: 2705769 - DNA, 25 bp, Homo sapien
tttgaatcaagaagtgaccaggccc

SEQ ID NO: 2705770 - DNA, 25 bp, Homo sapien
tgttgaacaactggctctcgaggag

SEQ ID NO: 2705771 - DNA, 25 bp, Homo sapien
gaaaagcattctgatgcccaggagt

SEQ ID NO: 2705772 - DNA, 25 bp, Homo sapien
tgctagcacgctggtctgattaaag

SEQ ID NO: 2705773 - DNA, 25 bp, Homo sapien
ccaatacagcgtcatatagcaggtg

SEQ ID NO: 2705774 - DNA, 25 bp, Homo sapien
tgacagctactacagatactctggg

SEQ ID NO: 2705775 - DNA, 25 bp, Homo sapien
tcaactacgaaatgccagaggctca

SEQ ID NO: 2705776 - DNA, 25 bp, Homo sapien
ggctgaaagcatgcacaacgaaggc

SEQ ID NO: 2705777 - DNA, 25 bp, Homo sapien
gttatagcaaacctgggagtcgggc

SEQ ID NO: 2705778 - DNA, 25 bp, Homo sapien
taaaaagctatgcttggcctgggcg

SEQ ID NO: 2705779 - DNA, 25 bp, Homo sapien
cagcctctcctgggcggcctcattt

SEQ ID NO: 2705780 - DNA, 25 bp, Homo sapien
gcagcccccatggaaaagagggctc

SEQ ID NO: 2705781 - DNA, 25 bp, Homo sapien
gcggcctcatttcccagagcggctg

SEQ ID NO: 2705782 - DNA, 25 bp, Homo sapien
cccccatggaaaagagggctcgcag

SEQ ID NO: 2705783 - DNA, 25 bp, Homo sapien
gactaggagaccagagactactgct

SEQ ID NO: 2705784 - DNA, 25 bp, Homo sapien
tgtcacagagtactgagctcaggga

SEQ ID NO: 2705785 - DNA, 25 bp, Homo sapien
ccactggggttggaaatgactagga

SEQ ID NO: 2705786 - DNA, 25 bp, Homo sapien
gctacctacttatctgtcacagagt

SEQ ID NO: 2705787 - DNA, 25 bp, Homo sapien
tactgtgctgtcaggctgtgctaag

SEQ ID NO: 2705788 - DNA, 25 bp, Homo sapien
gcattgttaactcccaaccccagtg

SEQ ID NO: 2705789 - DNA, 25 bp, Homo sapien
gactcctactttggagccagcactt

SEQ ID NO: 2705790 - DNA, 25 bp, Homo sapien
cctagaagggtaattcaggcaacct

SEQ ID NO: 2705791 - DNA, 25 bp, Homo sapien
taactgtcaggtcgctgggccccgg

SEQ ID NO: 2705792 - DNA, 25 bp, Homo sapien
actgtcaggtcgctgggccccgggg

SEQ ID NO: 2705793 - DNA, 25 bp, Homo sapien
tgtaactgtcaggtcgctgggcccc

SEQ ID NO: 2705794 - DNA, 25 bp, Homo sapien
ctgtaactgtcaggtcgctgggccc

SEQ ID NO: 2705795 - DNA, 25 bp, Homo sapien
ggaggggctggagaaagacttcagt

SEQ ID NO: 2705796 - DNA, 25 bp, Homo sapien
agggaggggctggagaaagacttca

SEQ ID NO: 2705797 - DNA, 25 bp, Homo sapien
gaggggctggagaaagacttcagtc

SEQ ID NO: 2705798 - DNA, 25 bp, Homo sapien
agagggaggggctggagaaagactt

SEQ ID NO: 2705799 - DNA, 25 bp, Homo sapien
tgctcgaggcatgtggtaggcgtga

SEQ ID NO: 2705800 - DNA, 25 bp, Homo sapien
cgtgaggttcctgctagcagggtgt

SEQ ID NO: 2705801 - DNA, 25 bp, Homo sapien
catgtggtaggcgtgaggttcctgc

SEQ ID NO: 2705802 - DNA, 25 bp, Homo sapien
ctgtgctcgaggcatgtggtaggcg

SEQ ID NO: 2705803 - DNA, 25 bp, Homo sapien
gaatagccctgctggaggcttccag

SEQ ID NO: 2705804 - DNA, 25 bp, Homo sapien
tacaacactcctttccagtgggtag

SEQ ID NO: 2705805 - DNA, 25 bp, Homo sapien
ctcctttccagtgggtaggggtgtg

SEQ ID NO: 2705806 - DNA, 25 bp, Homo sapien
ttccaggctggctccgagatgccca

SEQ ID NO: 2705807 - DNA, 25 bp, Homo sapien
tctggcccctaagaggcaccaggga

SEQ ID NO: 2705808 - DNA, 25 bp, Homo sapien
tgttatccaacctcctgcccgctct

SEQ ID NO: 2705809 - DNA, 25 bp, Homo sapien
ttttgttatccaacctcctgcccgc

SEQ ID NO: 2705810 - DNA, 25 bp, Homo sapien
ttatccaacctcctgcccgctctgg

SEQ ID NO: 2705811 - DNA, 25 bp, Homo sapien
cgtgaaattgcttgggaacctgaac

SEQ ID NO: 2705812 - DNA, 25 bp, Homo sapien
aattgcttgggaacctgaactcccg

SEQ ID NO: 2705813 - DNA, 25 bp, Homo sapien
cagccatgtacgtgaaattgcttgg

SEQ ID NO: 2705814 - DNA, 25 bp, Homo sapien
ttgggaacctgaactcccgctggaa

SEQ ID NO: 2705815 - DNA, 25 bp, Homo sapien
gcggggggaaagatcagtcacttac

SEQ ID NO: 2705816 - DNA, 25 bp, Homo sapien
accaagcggggggaaagatcagtca

SEQ ID NO: 2705817 - DNA, 25 bp, Homo sapien
caagcggggggaaagatcagtcact

SEQ ID NO: 2705818 - DNA, 25 bp, Homo sapien
ctaccaagcggggggaaagatcagt

SEQ ID NO: 2705819 - DNA, 25 bp, Homo sapien
gaatgcatcctttggtgcacagacc

SEQ ID NO: 2705820 - DNA, 25 bp, Homo sapien
ttttcataggtcactgaatgcatcc

SEQ ID NO: 2705821 - DNA, 25 bp, Homo sapien
gaaatgactgtgaatgcatccaaga

SEQ ID NO: 2705822 - DNA, 25 bp, Homo sapien
gaatgcatccaagactcatctgtga

SEQ ID NO: 2705823 - DNA, 25 bp, Homo sapien
cacacatcagacattggcaaacagt

SEQ ID NO: 2705824 - DNA, 25 bp, Homo sapien
tcagagtttcctaagtgtcagccat

SEQ ID NO: 2705825 - DNA, 25 bp, Homo sapien
tagtctcgaggatggcctaattcag

SEQ ID NO: 2705826 - DNA, 25 bp, Homo sapien
atgaaaacgattatgagcccacggg

SEQ ID NO: 2705827 - DNA, 25 bp, Homo sapien
ctgaaagtcaagcagacacatccag

SEQ ID NO: 2705828 - DNA, 25 bp, Homo sapien
acatccaggcatttgggcaagaaac

SEQ ID NO: 2705829 - DNA, 25 bp, Homo sapien
gaaagtcaagcagacacatccaggc

SEQ ID NO: 2705830 - DNA, 25 bp, Homo sapien
gcagacacatccaggcatttgggca

SEQ ID NO: 2705831 - DNA, 25 bp, Homo sapien
tatgaactgatggacaagaactctg

SEQ ID NO: 2705832 - DNA, 25 bp, Homo sapien
caatatagggagtcaggtcacagct

SEQ ID NO: 2705833 - DNA, 25 bp, Homo sapien
tggcccagcgactcataaagtcatg

SEQ ID NO: 2705834 - DNA, 25 bp, Homo sapien
catttgtcttctaaggtaggagggc

SEQ ID NO: 2705835 - DNA, 25 bp, Homo sapien
ggaaacgggctctgggctcaattca

SEQ ID NO: 2705836 - DNA, 25 bp, Homo sapien
tcaaaagcaatctgtagggaaacgg

SEQ ID NO: 2705837 - DNA, 25 bp, Homo sapien
ggacgtctggtgcagcatttcccaa

SEQ ID NO: 2705838 - DNA, 25 bp, Homo sapien
tgacatttcacgcagagggtgcccc

SEQ ID NO: 2705839 - DNA, 25 bp, Homo sapien
cagtgactgaacagccaaggatttt

SEQ ID NO: 2705840 - DNA, 25 bp, Homo sapien
gctggatcaagaccgcagtgactga

SEQ ID NO: 2705841 - DNA, 25 bp, Homo sapien
gccgggctttaacccagcatcctga

SEQ ID NO: 2705842 - DNA, 25 bp, Homo sapien
ttggtcccttgacaacacctttctc

SEQ ID NO: 2705843 - DNA, 25 bp, Homo sapien
tgccagaagtagcacaggaaaccgt

SEQ ID NO: 2705844 - DNA, 25 bp, Homo sapien
taatgatatagtaaaccaaatagcc

SEQ ID NO: 2705845 - DNA, 25 bp, Homo sapien
gaaaacagcatctccggatagggaa

SEQ ID NO: 2705846 - DNA, 25 bp, Homo sapien
cccatcatagtgtcaggactccctg

SEQ ID NO: 2705847 - DNA, 25 bp, Homo sapien
gattctcaaagagatttcgggccca

SEQ ID NO: 2705848 - DNA, 25 bp, Homo sapien
tacaatcctctaggtcagccctcag

SEQ ID NO: 2705849 - DNA, 25 bp, Homo sapien
ggatctatgaacctactgaactaca

SEQ ID NO: 2705850 - DNA, 25 bp, Homo sapien
tcgggcccaattaagattagaaagc

SEQ ID NO: 2705851 - DNA, 25 bp, Homo sapien
caacaagtagctcttcaagtgcgga

SEQ ID NO: 2705852 - DNA, 25 bp, Homo sapien
gattttccaacaatcctgggaggga

SEQ ID NO: 2705853 - DNA, 25 bp, Homo sapien
caagatcaagcagggagtagagcca

SEQ ID NO: 2705854 - DNA, 25 bp, Homo sapien
tgaactgggtctatgaaatcggcac

SEQ ID NO: 2705855 - DNA, 25 bp, Homo sapien
ataaagcatttacatgagccaggca

SEQ ID NO: 2705856 - DNA, 25 bp, Homo sapien
taaagcatttacatgagccaggcac

SEQ ID NO: 2705857 - DNA, 25 bp, Homo sapien
gagccccaggactaacagctgactg

SEQ ID NO: 2705858 - DNA, 25 bp, Homo sapien
ttgtaactcactagctagcggcggc

SEQ ID NO: 2705859 - DNA, 25 bp, Homo sapien
ctgactgaccaaagcagccccttgt

SEQ ID NO: 2705860 - DNA, 25 bp, Homo sapien
tgtgaacatacctcagacgcctctg

SEQ ID NO: 2705861 - DNA, 25 bp, Homo sapien
gccaggctgtgtatccagttcccta

SEQ ID NO: 2705862 - DNA, 25 bp, Homo sapien
caggttggtctgactctagaggcca

SEQ ID NO: 2705863 - DNA, 25 bp, Homo sapien
tatatgggaatgtccctacccatgg

SEQ ID NO: 2705864 - DNA, 25 bp, Homo sapien
ggagtgcaatcccagacacagatgg

SEQ ID NO: 2705865 - DNA, 25 bp, Homo sapien
cagactcactgctcaaaaacattag

SEQ ID NO: 2705866 - DNA, 25 bp, Homo sapien
tgcatcgcataaggcctgactcaga

SEQ ID NO: 2705867 - DNA, 25 bp, Homo sapien
agagaaccccttacaggtgtggaag

SEQ ID NO: 2705868 - DNA, 25 bp, Homo sapien
gtttgaataagacggtgcatggacc

SEQ ID NO: 2705869 - DNA, 25 bp, Homo sapien
cattgagggaaacatccggcgagga

SEQ ID NO: 2705870 - DNA, 25 bp, Homo sapien
cgaatgtccaaatactgctaaaggg

SEQ ID NO: 2705871 - DNA, 25 bp, Homo sapien
tacatctggtcaacaaaaattggcc

SEQ ID NO: 2705872 - DNA, 25 bp, Homo sapien
gaaataagtacttggccaagccagg

SEQ ID NO: 2705873 - DNA, 25 bp, Homo sapien
gaaggcgtgtgggtatttctagccc

SEQ ID NO: 2705874 - DNA, 25 bp, Homo sapien
aggcaggcaataagaccccgagtct

SEQ ID NO: 2705875 - DNA, 25 bp, Homo sapien
taactgtgaagtgaccctgaatgac

SEQ ID NO: 2705876 - DNA, 25 bp, Homo sapien
tgaatgacagtgctcagcatagggc

SEQ ID NO: 2705877 - DNA, 25 bp, Homo sapien
gaaaagcaggtatgaagtctccacg

SEQ ID NO: 2705878 - DNA, 25 bp, Homo sapien
tgttagcccaagaccaaggactcca

SEQ ID NO: 2705879 - DNA, 25 bp, Homo sapien
gactccagcccttatcagccaagaa

SEQ ID NO: 2705880 - DNA, 25 bp, Homo sapien
aatggtttggtccactgctggctga

SEQ ID NO: 2705881 - DNA, 25 bp, Homo sapien
ccttgctgcgtggacagcagcttcc

SEQ ID NO: 2705882 - DNA, 25 bp, Homo sapien
cagccgccttgctgcgtggacagca

SEQ ID NO: 2705883 - DNA, 25 bp, Homo sapien
tgctgcgtggacagcagcttcccat

SEQ ID NO: 2705884 - DNA, 25 bp, Homo sapien
agccgccttgctgcgtggacagcag

SEQ ID NO: 2705885 - DNA, 25 bp, Homo sapien
tcaggattcagcgtgtgccctccat

SEQ ID NO: 2705886 - DNA, 25 bp, Homo sapien
tccgtcaggattcagcgtgtgccct

SEQ ID NO: 2705887 - DNA, 25 bp, Homo sapien
cctccaggtccgtcaggattcagcg

SEQ ID NO: 2705888 - DNA, 25 bp, Homo sapien
gcgtgtgccctccatgaggagcctc

SEQ ID NO: 2705889 - DNA, 25 bp, Homo sapien
gagccagggttagagccgattcctc

SEQ ID NO: 2705890 - DNA, 25 bp, Homo sapien
tttggccagtatcacacagtggtgg

SEQ ID NO: 2705891 - DNA, 25 bp, Homo sapien
tgatggaggcactaaggtttggcca

SEQ ID NO: 2705892 - DNA, 25 bp, Homo sapien
tccaggagcctgtcagagaataagg

SEQ ID NO: 2705893 - DNA, 25 bp, Homo sapien
tcagagtgctcagagaggggagacc

SEQ ID NO: 2705894 - DNA, 25 bp, Homo sapien
gaggggagaccagagacctcttcgt

SEQ ID NO: 2705895 - DNA, 25 bp, Homo sapien
ctcagagaggggagaccagagacct

SEQ ID NO: 2705896 - DNA, 25 bp, Homo sapien
ggggagaccagagacctcttcgtga

SEQ ID NO: 2705897 - DNA, 25 bp, Homo sapien
gaagggccccagatttagaagtggc

SEQ ID NO: 2705898 - DNA, 25 bp, Homo sapien
tagaagtggcctgctcttaagaatg

SEQ ID NO: 2705899 - DNA, 25 bp, Homo sapien
aagactctaacccaagcctacagga

SEQ ID NO: 2705900 - DNA, 25 bp, Homo sapien
caggattagattcatgggccagcaa

SEQ ID NO: 2705901 - DNA, 25 bp, Homo sapien
tgttataactgtaacaccgaccgca

SEQ ID NO: 2705902 - DNA, 25 bp, Homo sapien
gaaatgctgccggtctttctggcac

SEQ ID NO: 2705903 - DNA, 25 bp, Homo sapien
tcgagtagttaggatgcttcaagca

SEQ ID NO: 2705904 - DNA, 25 bp, Homo sapien
tgtggaagcacgcattcatcgctca

SEQ ID NO: 2705905 - DNA, 25 bp, Homo sapien
cgccgtggtcgcccctgcctctcgg

SEQ ID NO: 2705906 - DNA, 25 bp, Homo sapien
cgcgaccgccggcatagggaggact

SEQ ID NO: 2705907 - DNA, 25 bp, Homo sapien
ctagagacgccctgctcaaccggcg

SEQ ID NO: 2705908 - DNA, 25 bp, Homo sapien
cctcttccgttctcgggagctgtca

SEQ ID NO: 2705909 - DNA, 25 bp, Homo sapien
tgagccaggcggatcccgctggcgc

SEQ ID NO: 2705910 - DNA, 25 bp, Homo sapien
ggccgcccggcagtgccgaacccca

SEQ ID NO: 2705911 - DNA, 25 bp, Homo sapien
gccgcccggcagtgccgaaccccaa

SEQ ID NO: 2705912 - DNA, 25 bp, Homo sapien
cgcccggcagtgccgaaccccaaag

SEQ ID NO: 2705913 - DNA, 25 bp, Homo sapien
tatccatttggtcttcgggtgtcct

SEQ ID NO: 2705914 - DNA, 25 bp, Homo sapien
tggaatccagtacctcaattcaggt

SEQ ID NO: 2705915 - DNA, 25 bp, Homo sapien
caacgctgggatcagagggcgcaat

SEQ ID NO: 2705916 - DNA, 25 bp, Homo sapien
tagtctgggttcagctcgccactag

SEQ ID NO: 2705917 - DNA, 25 bp, Homo sapien
gaaaaggatattaacaccgcagtct

SEQ ID NO: 2705918 - DNA, 25 bp, Homo sapien
tatttcagctcagagtggagttcat

SEQ ID NO: 2705919 - DNA, 25 bp, Homo sapien
ccatttattctctaactggtggagc

SEQ ID NO: 2705920 - DNA, 25 bp, Homo sapien
gccaagatgtggaactcatactaca

SEQ ID NO: 2705921 - DNA, 25 bp, Homo sapien
gagcttctcgatcttctgacgacat

SEQ ID NO: 2705922 - DNA, 25 bp, Homo sapien
tccatcgtaaatacttgccagggcc

SEQ ID NO: 2705923 - DNA, 25 bp, Homo sapien
atcttgaaattctgtggcaaatcca

SEQ ID NO: 2705924 - DNA, 25 bp, Homo sapien
cgctcacaaatatcttgaaattctg

SEQ ID NO: 2705925 - DNA, 25 bp, Homo sapien
aattctgtggcaaatccaaatagat

SEQ ID NO: 2705926 - DNA, 25 bp, Homo sapien
tccaaatagatcctggtttctccac

SEQ ID NO: 2705927 - DNA, 25 bp, Homo sapien
tcaaagccactattctggagacact

SEQ ID NO: 2705928 - DNA, 25 bp, Homo sapien
tgtattcaaagccactattctggag

SEQ ID NO: 2705929 - DNA, 25 bp, Homo sapien
tattcaaagccactattctggagac

SEQ ID NO: 2705930 - DNA, 25 bp, Homo sapien
gtgtattcaaagccactattctgga

SEQ ID NO: 2705931 - DNA, 25 bp, Homo sapien
gttcttcccataggttgtctaagtg

SEQ ID NO: 2705932 - DNA, 25 bp, Homo sapien
tgtctaagtgcttgcatagagcaga

SEQ ID NO: 2705933 - DNA, 25 bp, Homo sapien
ggttgtctaagtgcttgcatagagc

SEQ ID NO: 2705934 - DNA, 25 bp, Homo sapien
cccataggttgtctaagtgcttgca

SEQ ID NO: 2705935 - DNA, 25 bp, Homo sapien
agttgaggcattgaacctggccatc

SEQ ID NO: 2705936 - DNA, 25 bp, Homo sapien
cagttgaggcattgaacctggccat

SEQ ID NO: 2705937 - DNA, 25 bp, Homo sapien
gcagttgaggcattgaacctggcca

SEQ ID NO: 2705938 - DNA, 25 bp, Homo sapien
aatggatacagcaaaacaacttgtg

SEQ ID NO: 2705939 - DNA, 25 bp, Homo sapien
ccatgagccctatcaaggaagttcc

SEQ ID NO: 2705940 - DNA, 25 bp, Homo sapien
cctgagatgatatctccatttatgg

SEQ ID NO: 2705941 - DNA, 25 bp, Homo sapien
aaaacaacttgtgggctggctccaa

SEQ ID NO: 2705942 - DNA, 25 bp, Homo sapien
ggtcataacgggcaaataactctgc

SEQ ID NO: 2705943 - DNA, 25 bp, Homo sapien
aggcggtcataacgggcaaataact

SEQ ID NO: 2705944 - DNA, 25 bp, Homo sapien
gaggagaaggcggtcataacgggca

SEQ ID NO: 2705945 - DNA, 25 bp, Homo sapien
gagaaggcggtcataacgggcaaat

SEQ ID NO: 2705946 - DNA, 25 bp, Homo sapien
tggggagaccccatggtaggtcaac

SEQ ID NO: 2705947 - DNA, 25 bp, Homo sapien
atggggagaccccatggtaggtcaa

SEQ ID NO: 2705948 - DNA, 25 bp, Homo sapien
gaatggcagcttagatgccctgcat

SEQ ID NO: 2705949 - DNA, 25 bp, Homo sapien
ggccatccaggatctacattattcc

SEQ ID NO: 2705950 - DNA, 25 bp, Homo sapien
gccctggtagtagagtgaaatgtga

SEQ ID NO: 2705951 - DNA, 25 bp, Homo sapien
cctggtatctgcacggtttttctta

SEQ ID NO: 2705952 - DNA, 25 bp, Homo sapien
tttattagcctcatccgcttgcagg

SEQ ID NO: 2705953 - DNA, 25 bp, Homo sapien
cttttattagcctcatccgcttgca

SEQ ID NO: 2705954 - DNA, 25 bp, Homo sapien
ttattagcctcatccgcttgcaggt

SEQ ID NO: 2705955 - DNA, 25 bp, Homo sapien
tattagcctcatccgcttgcaggta

SEQ ID NO: 2705956 - DNA, 25 bp, Homo sapien
gtgccttctgaatcactctcttacc

SEQ ID NO: 2705957 - DNA, 25 bp, Homo sapien
cttctgaatcactctcttaccatac

SEQ ID NO: 2705958 - DNA, 25 bp, Homo sapien
cagtgccttctgaatcactctctta

SEQ ID NO: 2705959 - DNA, 25 bp, Homo sapien
gccttctgaatcactctcttaccat

SEQ ID NO: 2705960 - DNA, 25 bp, Homo sapien
gttccacaacatgggcagctctttg

SEQ ID NO: 2705961 - DNA, 25 bp, Homo sapien
tgggagttccacaacatgggcagct

SEQ ID NO: 2705962 - DNA, 25 bp, Homo sapien
ctctatgggagttccacaacatggg

SEQ ID NO: 2705963 - DNA, 25 bp, Homo sapien
acatgggcagctctttgagttcttc

SEQ ID NO: 2705964 - DNA, 25 bp, Homo sapien
gaaccagggtcattgaaatgtttgt

SEQ ID NO: 2705965 - DNA, 25 bp, Homo sapien
tggtgaaccagggtcattgaaatgt

SEQ ID NO: 2705966 - DNA, 25 bp, Homo sapien
aaacatggtgaaccagggtcattga

SEQ ID NO: 2705967 - DNA, 25 bp, Homo sapien
ccagggtcattgaaatgtttgtaag

SEQ ID NO: 2705968 - DNA, 25 bp, Homo sapien
tcttcccaaatatcgtcgtcaacat

SEQ ID NO: 2705969 - DNA, 25 bp, Homo sapien
aatatcgtcgtcaacatccacagca

SEQ ID NO: 2705970 - DNA, 25 bp, Homo sapien
ccaaatatcgtcgtcaacatccaca

SEQ ID NO: 2705971 - DNA, 25 bp, Homo sapien
tcatcttcccaaatatcgtcgtcaa

SEQ ID NO: 2705972 - DNA, 25 bp, Homo sapien
cgttcttccatatcttctacgcagg

SEQ ID NO: 2705973 - DNA, 25 bp, Homo sapien
gaatagtaccctaaatatcccgcaa

SEQ ID NO: 2705974 - DNA, 25 bp, Homo sapien
aaatatcccgcaaagttactttgtg

SEQ ID NO: 2705975 - DNA, 25 bp, Homo sapien
caatgcaccttcttcagtagtacca

SEQ ID NO: 2705976 - DNA, 25 bp, Homo sapien
tattctgtagtttaattttctgaac

SEQ ID NO: 2705977 - DNA, 25 bp, Homo sapien
taatattctgtagtttaattttctg

SEQ ID NO: 2705978 - DNA, 25 bp, Homo sapien
tggcttataaatttttctcaactta

SEQ ID NO: 2705979 - DNA, 25 bp, Homo sapien
taattttctgaacctttggcttata

SEQ ID NO: 2705980 - DNA, 25 bp, Homo sapien
aaggcttctacccactccagttgta

SEQ ID NO: 2705981 - DNA, 25 bp, Homo sapien
gaatagtactgagggaactccaaca

SEQ ID NO: 2705982 - DNA, 25 bp, Homo sapien
tatcaagtgccccacagtgtttgtg

SEQ ID NO: 2705983 - DNA, 25 bp, Homo sapien
tctaggttctaacacccaggaaggc

SEQ ID NO: 2705984 - DNA, 25 bp, Homo sapien
gaaaatatcaagtagctcacgaact

SEQ ID NO: 2705985 - DNA, 25 bp, Homo sapien
tatgggccctaaaacctaagctcag

SEQ ID NO: 2705986 - DNA, 25 bp, Homo sapien
taagctcagtcacaagcccaggtaa

SEQ ID NO: 2705987 - DNA, 25 bp, Homo sapien
aatgtgattagttgccttggtgaca

SEQ ID NO: 2705988 - DNA, 25 bp, Homo sapien
tactaggtaggagggagatccaaac

SEQ ID NO: 2705989 - DNA, 25 bp, Homo sapien
ttaccagcatcagagggcaccatgg

SEQ ID NO: 2705990 - DNA, 25 bp, Homo sapien
gcagacagccacgtgaacaacttta

SEQ ID NO: 2705991 - DNA, 25 bp, Homo sapien
gaaactgtacagtctaaacgatggg

SEQ ID NO: 2705992 - DNA, 25 bp, Homo sapien
tgccatggagaacagaagatctggg

SEQ ID NO: 2705993 - DNA, 25 bp, Homo sapien
tctgccttaggtgagccgatctcca

SEQ ID NO: 2705994 - DNA, 25 bp, Homo sapien
tctttacaggagaacctagtgggtc

SEQ ID NO: 2705995 - DNA, 25 bp, Homo sapien
ggcttctgcaagtagttttccctga

SEQ ID NO: 2705996 - DNA, 25 bp, Homo sapien
ccatctgttgcttatactacgtgac

SEQ ID NO: 2705997 - DNA, 25 bp, Homo sapien
aatttctgacatatctgagtctggc

SEQ ID NO: 2705998 - DNA, 25 bp, Homo sapien
ttcgctgtaggtgctagaggctcca

SEQ ID NO: 2705999 - DNA, 25 bp, Homo sapien
taaaatagagtccatgtcttgcagc

SEQ ID NO: 2706000 - DNA, 25 bp, Homo sapien
ctgtgttcagtcttatgagcccatc

SEQ ID NO: 2706001 - DNA, 25 bp, Homo sapien
attacaagtgtaagacactacatcc

SEQ ID NO: 2706002 - DNA, 25 bp, Homo sapien
gacactacatccaacctacactttt

SEQ ID NO: 2706003 - DNA, 25 bp, Homo sapien
agtgtaagacactacatccaaccta

SEQ ID NO: 2706004 - DNA, 25 bp, Homo sapien
ttagtcacaactcctgagtgtcccg

SEQ ID NO: 2706005 - DNA, 25 bp, Homo sapien
gccctgtgtttttgtgaaagcctca

SEQ ID NO: 2706006 - DNA, 25 bp, Homo sapien
actcattagtaagtgggaggtccac

SEQ ID NO: 2706007 - DNA, 25 bp, Homo sapien
tttcagtgttgtgttcagccaaggg

SEQ ID NO: 2706008 - DNA, 25 bp, Homo sapien
tcttggccatgaggctgggagccta

SEQ ID NO: 2706009 - DNA, 25 bp, Homo sapien
tgatgtctgccaaacccaggttggg

SEQ ID NO: 2706010 - DNA, 25 bp, Homo sapien
tgggagcctagtcacggagtttagc

SEQ ID NO: 2706011 - DNA, 25 bp, Homo sapien
gcttcagccatggttcacacatatg

SEQ ID NO: 2706012 - DNA, 25 bp, Homo sapien
tcataacaagttggtggaccccttg

SEQ ID NO: 2706013 - DNA, 25 bp, Homo sapien
tcaagtacccatagggaaaggcagg

SEQ ID NO: 2706014 - DNA, 25 bp, Homo sapien
tgctgggacctagtgtcaagtaccc

SEQ ID NO: 2706015 - DNA, 25 bp, Homo sapien
caatcttcgaagaaaccatacagcg

SEQ ID NO: 2706016 - DNA, 25 bp, Homo sapien
tagacctacagctatatgaatcaaa

SEQ ID NO: 2706017 - DNA, 25 bp, Homo sapien
tttgactactccaggtacacataga

SEQ ID NO: 2706018 - DNA, 25 bp, Homo sapien
tgcacagttggtgaagtacattcac

SEQ ID NO: 2706019 - DNA, 25 bp, Homo sapien
tttaggtgcacagttggtgaagtac

SEQ ID NO: 2706020 - DNA, 25 bp, Homo sapien
caggctgaggatggaagagtcaccc

SEQ ID NO: 2706021 - DNA, 25 bp, Homo sapien
tcaaggtcatgcaagaaacggagca

SEQ ID NO: 2706022 - DNA, 25 bp, Homo sapien
taaagttaccgtcagataccaaggc

SEQ ID NO: 2706023 - DNA, 25 bp, Homo sapien
gagcaagtaacggtgttgccccaga

SEQ ID NO: 2706024 - DNA, 25 bp, Homo sapien
tacaatctagttacccagggaagga

SEQ ID NO: 2706025 - DNA, 25 bp, Homo sapien
tctttgggcatcattgcaggaacgc

SEQ ID NO: 2706026 - DNA, 25 bp, Homo sapien
tctgtgagcagtaggaagacatttc

SEQ ID NO: 2706027 - DNA, 25 bp, Homo sapien
tgagtcacagattgcacaggaagca

SEQ ID NO: 2706028 - DNA, 25 bp, Homo sapien
gattggctgttaccatggtaactgg

SEQ ID NO: 2706029 - DNA, 25 bp, Homo sapien
tggctgccgctctctgtccaattat

SEQ ID NO: 2706030 - DNA, 25 bp, Homo sapien
tctgtccaattatgtcagccctgaa

SEQ ID NO: 2706031 - DNA, 25 bp, Homo sapien
ggccactcggattggctgttaccat

SEQ ID NO: 2706032 - DNA, 25 bp, Homo sapien
ggactgcaccagagtccaaataggg

SEQ ID NO: 2706033 - DNA, 25 bp, Homo sapien
atgtctgcatttcccggcacttctg

SEQ ID NO: 2706034 - DNA, 25 bp, Homo sapien
agctgctgcctccaatgccgatttc

SEQ ID NO: 2706035 - DNA, 25 bp, Homo sapien
accacagagcccctgagttgccata

SEQ ID NO: 2706036 - DNA, 25 bp, Homo sapien
tcaggctgattcggaagctcatcac

SEQ ID NO: 2706037 - DNA, 25 bp, Homo sapien
ttggatcccgccaaactgaaactgt

SEQ ID NO: 2706038 - DNA, 25 bp, Homo sapien
tgtgtgcttgagatccttaaagggc

SEQ ID NO: 2706039 - DNA, 25 bp, Homo sapien
tgggagggcttcggcccatgtctac

SEQ ID NO: 2706040 - DNA, 25 bp, Homo sapien
taattgctgaggtcggcatgcaagt

SEQ ID NO: 2706041 - DNA, 25 bp, Homo sapien
aagggctagcacttccaccagatgg

SEQ ID NO: 2706042 - DNA, 25 bp, Homo sapien
catgcaagttgggataatttctgaa

SEQ ID NO: 2706043 - DNA, 25 bp, Homo sapien
aggtcaccaagcctcgcttcaaagg

SEQ ID NO: 2706044 - DNA, 25 bp, Homo sapien
gcaagccaagcagacagagaagata

SEQ ID NO: 2706045 - DNA, 25 bp, Homo sapien
gacctaggtagtgcagagctcagta

SEQ ID NO: 2706046 - DNA, 25 bp, Homo sapien
tctggctcacagatccatgcctggt

SEQ ID NO: 2706047 - DNA, 25 bp, Homo sapien
gagtcactgctatattaggcctcca

SEQ ID NO: 2706048 - DNA, 25 bp, Homo sapien
caaagcaagggcgatgctgctgatg

SEQ ID NO: 2706049 - DNA, 25 bp, Homo sapien
accggccctggtgtagttgctccga

SEQ ID NO: 2706050 - DNA, 25 bp, Homo sapien
actaacaggccagcccaaagcaagg

SEQ ID NO: 2706051 - DNA, 25 bp, Homo sapien
tccgaggctcaagtgttgtattcga

SEQ ID NO: 2706052 - DNA, 25 bp, Homo sapien
ggactacgacgacggcgctgcgccg

SEQ ID NO: 2706053 - DNA, 25 bp, Homo sapien
cgccgaggctccgacgcggcccctg

SEQ ID NO: 2706054 - DNA, 25 bp, Homo sapien
cttgggtgggtctcgatggccgccg

SEQ ID NO: 2706055 - DNA, 25 bp, Homo sapien
cgggcgagacgctcttctcaggctg

SEQ ID NO: 2706056 - DNA, 25 bp, Homo sapien
agcgagcgagctagctgaaggggcg

SEQ ID NO: 2706057 - DNA, 25 bp, Homo sapien
gcgagcgagctagctgaaggggcgc

SEQ ID NO: 2706058 - DNA, 25 bp, Homo sapien
gagcgagctagctgaaggggcgcgg

SEQ ID NO: 2706059 - DNA, 25 bp, Homo sapien
cgagcgagctagctgaaggggcgcg

SEQ ID NO: 2706060 - DNA, 25 bp, Homo sapien
gcaggccggctcgaccgccgccagc

SEQ ID NO: 2706061 - DNA, 25 bp, Homo sapien
aggccggctcgaccgccgccagcgc

SEQ ID NO: 2706062 - DNA, 25 bp, Homo sapien
cgcaggccggctcgaccgccgccag

SEQ ID NO: 2706063 - DNA, 25 bp, Homo sapien
caggccggctcgaccgccgccagcg

SEQ ID NO: 2706064 - DNA, 25 bp, Homo sapien
cagagccagggaccggagttcgggg

SEQ ID NO: 2706065 - DNA, 25 bp, Homo sapien
ctgccaagccccggcgtcgagttgg

SEQ ID NO: 2706066 - DNA, 25 bp, Homo sapien
tggcagcctcgaatccgagcccggg

SEQ ID NO: 2706067 - DNA, 25 bp, Homo sapien
cggcgtcgagttggccgcgggccgg

SEQ ID NO: 2706068 - DNA, 25 bp, Homo sapien
aggccgggcccgtggcagcctcgaa

SEQ ID NO: 2706069 - DNA, 25 bp, Homo sapien
gggaacttagctacagacgcggagt

SEQ ID NO: 2706070 - DNA, 25 bp, Homo sapien
cgcggagtgaaacaagcagctcttt

SEQ ID NO: 2706071 - DNA, 25 bp, Homo sapien
tccctggggcctcaatgtattaaat

SEQ ID NO: 2706072 - DNA, 25 bp, Homo sapien
caaacccgagaaaatgatccaatca

SEQ ID NO: 2706073 - DNA, 25 bp, Homo sapien
caagatacacatggacacgtgcaaa

SEQ ID NO: 2706074 - DNA, 25 bp, Homo sapien
gaacagccctgtgtgacaaccaaag

SEQ ID NO: 2706075 - DNA, 25 bp, Homo sapien
agtatcatgctcctatcaagttgcc

SEQ ID NO: 2706076 - DNA, 25 bp, Homo sapien
taaaaatgcatattcgctgaccagg

SEQ ID NO: 2706077 - DNA, 25 bp, Homo sapien
ctgtcactatgctaaattcaagttg

SEQ ID NO: 2706078 - DNA, 25 bp, Homo sapien
actatgctaaattcaagttgtccac

SEQ ID NO: 2706079 - DNA, 25 bp, Homo sapien
tagtctgtcactatgctaaattcaa

SEQ ID NO: 2706080 - DNA, 25 bp, Homo sapien
cctttctgcatagtctgtcactatg

SEQ ID NO: 2706081 - DNA, 25 bp, Homo sapien
ctggagatggactggttccacaaca

SEQ ID NO: 2706082 - DNA, 25 bp, Homo sapien
aattttctttgatcactgaccatgt

SEQ ID NO: 2706083 - DNA, 25 bp, Homo sapien
ttccacttatgagaggtacctacgg

SEQ ID NO: 2706084 - DNA, 25 bp, Homo sapien
acctacggtagtcaaatacatagaa

SEQ ID NO: 2706085 - DNA, 25 bp, Homo sapien
aaattccctagagcagttcaactgg

SEQ ID NO: 2706086 - DNA, 25 bp, Homo sapien
gaagcactgccctattttcaggaca

SEQ ID NO: 2706087 - DNA, 25 bp, Homo sapien
agttagttatggatccacagcccga

SEQ ID NO: 2706088 - DNA, 25 bp, Homo sapien
tactggtggcatcagcttagagcaa

SEQ ID NO: 2706089 - DNA, 25 bp, Homo sapien
taagaaaagtattctactcccagga

SEQ ID NO: 2706090 - DNA, 25 bp, Homo sapien
tcaaagaggcaaaatgggtacatat

SEQ ID NO: 2706091 - DNA, 25 bp, Homo sapien
tacatataagtgttgtgtcagcaaa

SEQ ID NO: 2706092 - DNA, 25 bp, Homo sapien
tcacacaaaggactactaaacggcc

SEQ ID NO: 2706093 - DNA, 25 bp, Homo sapien
ctgcgctctctgcagaaatgctgct

SEQ ID NO: 2706094 - DNA, 25 bp, Homo sapien
cagtgttgtagctacattgtaagat

SEQ ID NO: 2706095 - DNA, 25 bp, Homo sapien
gggcagtgttgtagctacattgtaa

SEQ ID NO: 2706096 - DNA, 25 bp, Homo sapien
tgttgtagctacattgtaagatggg

SEQ ID NO: 2706097 - DNA, 25 bp, Homo sapien
gcagtgttgtagctacattgtaaga

SEQ ID NO: 2706098 - DNA, 25 bp, Homo sapien
gaaccaaagggatagtagcttcagc

SEQ ID NO: 2706099 - DNA, 25 bp, Homo sapien
ccttggtcctctccgcttcatcata

SEQ ID NO: 2706100 - DNA, 25 bp, Homo sapien
gccttggtcctctccgcttcatcat

SEQ ID NO: 2706101 - DNA, 25 bp, Homo sapien
aaccaaagggatagtagcttcagcc

SEQ ID NO: 2706102 - DNA, 25 bp, Homo sapien
tctagaatatcagtaatcgaggacc

SEQ ID NO: 2706103 - DNA, 25 bp, Homo sapien
aattctagaatatcagtaatcgagg

SEQ ID NO: 2706104 - DNA, 25 bp, Homo sapien
gaatatcagtaatcgaggacctgtt

SEQ ID NO: 2706105 - DNA, 25 bp, Homo sapien
tatcagtaatcgaggacctgtttag

SEQ ID NO: 2706106 - DNA, 25 bp, Homo sapien
tttcctatcctcagctggtcagcat

SEQ ID NO: 2706107 - DNA, 25 bp, Homo sapien
ttcctatcctcagctggtcagcatc

SEQ ID NO: 2706108 - DNA, 25 bp, Homo sapien
aaatcatcccgacccacaaaatcct

SEQ ID NO: 2706109 - DNA, 25 bp, Homo sapien
atcaaaatcatcccgacccacaaaa

SEQ ID NO: 2706110 - DNA, 25 bp, Homo sapien
cctgacaatcaggatccatttaatt

SEQ ID NO: 2706111 - DNA, 25 bp, Homo sapien
gaagtggtcaggcaaaaagacagga

SEQ ID NO: 2706112 - DNA, 25 bp, Homo sapien
ctctctgtagagcccatcttttctg

SEQ ID NO: 2706113 - DNA, 25 bp, Homo sapien
tctgattattgcctctctgtagagc

SEQ ID NO: 2706114 - DNA, 25 bp, Homo sapien
tgtgtgcatgaaccatttgcaaatg

SEQ ID NO: 2706115 - DNA, 25 bp, Homo sapien
aatgatagaccagttttcaatagat

SEQ ID NO: 2706116 - DNA, 25 bp, Homo sapien
cacccggcccatttgattcactttt

SEQ ID NO: 2706117 - DNA, 25 bp, Homo sapien
caccagagccagtactgaccatcaa

SEQ ID NO: 2706118 - DNA, 25 bp, Homo sapien
gagccagtactgaccatcaaaatat

SEQ ID NO: 2706119 - DNA, 25 bp, Homo sapien
cagtactgaccatcaaaatatccag

SEQ ID NO: 2706120 - DNA, 25 bp, Homo sapien
ccagagccagtactgaccatcaaaa

SEQ ID NO: 2706121 - DNA, 25 bp, Homo sapien
taacgtgcatgttactctgatggta

SEQ ID NO: 2706122 - DNA, 25 bp, Homo sapien
gagtcatcagcataccccatttatc

SEQ ID NO: 2706123 - DNA, 25 bp, Homo sapien
tgaatgctgtgtggcaatagctcac

SEQ ID NO: 2706124 - DNA, 25 bp, Homo sapien
taagcaattctggtttgagtctgtg

SEQ ID NO: 2706125 - DNA, 25 bp, Homo sapien
tgaagttctcaataatcaatagagg

SEQ ID NO: 2706126 - DNA, 25 bp, Homo sapien
tcagttttggcaaaacaggtcctga

SEQ ID NO: 2706127 - DNA, 25 bp, Homo sapien
tgtagggtcagcaatgcaaggctct

SEQ ID NO: 2706128 - DNA, 25 bp, Homo sapien
aaacacgggtggtcagcctttctct

SEQ ID NO: 2706129 - DNA, 25 bp, Homo sapien
aggattataaaacctcctcccatga

SEQ ID NO: 2706130 - DNA, 25 bp, Homo sapien
tagcaagaatgatcaatgatgaagg

SEQ ID NO: 2706131 - DNA, 25 bp, Homo sapien
tgatgaaggattataaaacctcctc

SEQ ID NO: 2706132 - DNA, 25 bp, Homo sapien
tgcttacaagcaaatggtacatagc

SEQ ID NO: 2706133 - DNA, 25 bp, Homo sapien
taggctaactatagctcaagagcag

SEQ ID NO: 2706134 - DNA, 25 bp, Homo sapien
ggtgatatgcccctccagtggaaac

SEQ ID NO: 2706135 - DNA, 25 bp, Homo sapien
tttagcagtaaccaagagctgtcag

SEQ ID NO: 2706136 - DNA, 25 bp, Homo sapien
caaaatgacccgaatattgggcaca

SEQ ID NO: 2706137 - DNA, 25 bp, Homo sapien
gaaggtataatgtaagagtcaatag

SEQ ID NO: 2706138 - DNA, 25 bp, Homo sapien
tgtaagagtcaatagtgtcttttgc

SEQ ID NO: 2706139 - DNA, 25 bp, Homo sapien
tataatgtaagagtcaatagtgtct

SEQ ID NO: 2706140 - DNA, 25 bp, Homo sapien
gagtcaatagtgtcttttgcacatt

SEQ ID NO: 2706141 - DNA, 25 bp, Homo sapien
tccatgttaagtcccctccccagaa

SEQ ID NO: 2706142 - DNA, 25 bp, Homo sapien
aaatccctctcctgatagcgataca

SEQ ID NO: 2706143 - DNA, 25 bp, Homo sapien
tagcgatacattgttatttttctgc

SEQ ID NO: 2706144 - DNA, 25 bp, Homo sapien
tgctaaaggtaatcaaaacattagc

SEQ ID NO: 2706145 - DNA, 25 bp, Homo sapien
gatttgagaaagtttctggcatctt

SEQ ID NO: 2706146 - DNA, 25 bp, Homo sapien
ggcatcttccgaacttttgcataat

SEQ ID NO: 2706147 - DNA, 25 bp, Homo sapien
taaagagaactctggtcctggggag

SEQ ID NO: 2706148 - DNA, 25 bp, Homo sapien
gaactctggtcctggggagatttga

SEQ ID NO: 2706149 - DNA, 25 bp, Homo sapien
gcacatggttacactgggactagaa

SEQ ID NO: 2706150 - DNA, 25 bp, Homo sapien
cacatggttacactgggactagaat

SEQ ID NO: 2706151 - DNA, 25 bp, Homo sapien
atgtagcacatggttacactgggac

SEQ ID NO: 2706152 - DNA, 25 bp, Homo sapien
tagcacatggttacactgggactag

SEQ ID NO: 2706153 - DNA, 25 bp, Homo sapien
ttctgatgactgctaagacccctgc

SEQ ID NO: 2706154 - DNA, 25 bp, Homo sapien
tggtgcaacagtaagcagtggcttc

SEQ ID NO: 2706155 - DNA, 25 bp, Homo sapien
tccctgttactagacaagaaactgc

SEQ ID NO: 2706156 - DNA, 25 bp, Homo sapien
gatgctggaattcagtcaagcagcc

SEQ ID NO: 2706157 - DNA, 25 bp, Homo sapien
ctggtgtactctttctcaagattct

SEQ ID NO: 2706158 - DNA, 25 bp, Homo sapien
gtgtactctttctcaagattctcta

SEQ ID NO: 2706159 - DNA, 25 bp, Homo sapien
gtactctttctcaagattctctacc

SEQ ID NO: 2706160 - DNA, 25 bp, Homo sapien
ggtgtactctttctcaagattctct

SEQ ID NO: 2706161 - DNA, 25 bp, Homo sapien
ggtgatttcagcacccttcataagg

SEQ ID NO: 2706162 - DNA, 25 bp, Homo sapien
gatgaagaaggtatgcaatccccta

SEQ ID NO: 2706163 - DNA, 25 bp, Homo sapien
cccaggccagtggtatgaatatcca

SEQ ID NO: 2706164 - DNA, 25 bp, Homo sapien
gaggacttgtagcaacccaacagta

SEQ ID NO: 2706165 - DNA, 25 bp, Homo sapien
taataggtacagctcactaggtcac

SEQ ID NO: 2706166 - DNA, 25 bp, Homo sapien
gaaagtgtctgttatcacatggaaa

SEQ ID NO: 2706167 - DNA, 25 bp, Homo sapien
tatgaaggccctagctcattaatgc

SEQ ID NO: 2706168 - DNA, 25 bp, Homo sapien
tataacatagtccaataagtaaacc

SEQ ID NO: 2706169 - DNA, 25 bp, Homo sapien
tcaccagtgggtaatctcaatcacc

SEQ ID NO: 2706170 - DNA, 25 bp, Homo sapien
tgaaagactgctagagggcactgct

SEQ ID NO: 2706171 - DNA, 25 bp, Homo sapien
tatggtacggacaattacctggcca

SEQ ID NO: 2706172 - DNA, 25 bp, Homo sapien
ggtaaacagctttaatagatccctc

SEQ ID NO: 2706173 - DNA, 25 bp, Homo sapien
gtatttaaaaggctgccaaaatgga

SEQ ID NO: 2706174 - DNA, 25 bp, Homo sapien
tacaaacacactggaggaaatgaac

SEQ ID NO: 2706175 - DNA, 25 bp, Homo sapien
agtgactggcactaacaggcgtgca

SEQ ID NO: 2706176 - DNA, 25 bp, Homo sapien
agtaaaccactgaaactgatacaag

SEQ ID NO: 2706177 - DNA, 25 bp, Homo sapien
ttggctaagagaaggatgtagtcac

SEQ ID NO: 2706178 - DNA, 25 bp, Homo sapien
caggatgtttggagacacaagtgca

SEQ ID NO: 2706179 - DNA, 25 bp, Homo sapien
tgtagtcacaaaagaaggcaggatg

SEQ ID NO: 2706180 - DNA, 25 bp, Homo sapien
gattactgtatactgacatcacggt

SEQ ID NO: 2706181 - DNA, 25 bp, Homo sapien
ttttaaagcaggtgattattcctct

SEQ ID NO: 2706182 - DNA, 25 bp, Homo sapien
tacagtatgttagggatcatctcaa

SEQ ID NO: 2706183 - DNA, 25 bp, Homo sapien
cgactacagggacatggctcatgct

SEQ ID NO: 2706184 - DNA, 25 bp, Homo sapien
cagactttggcctaatcaccaggag

SEQ ID NO: 2706185 - DNA, 25 bp, Homo sapien
taaggtaccgcagaattgtgaatac

SEQ ID NO: 2706186 - DNA, 25 bp, Homo sapien
tgccttagcaatcaacaaatgcaag

SEQ ID NO: 2706187 - DNA, 25 bp, Homo sapien
caaaccagttggtgcattcaactga

SEQ ID NO: 2706188 - DNA, 25 bp, Homo sapien
aactgactgaatgctcacaggactc

SEQ ID NO: 2706189 - DNA, 25 bp, Homo sapien
taggatataagaggacttcttgtgc

SEQ ID NO: 2706190 - DNA, 25 bp, Homo sapien
tttaagattgagacaagaatagaaa

SEQ ID NO: 2706191 - DNA, 25 bp, Homo sapien
ctaaatttaagattgagacaagaat

SEQ ID NO: 2706192 - DNA, 25 bp, Homo sapien
aaatttaagattgagacaagaatag

SEQ ID NO: 2706193 - DNA, 25 bp, Homo sapien
aatttaagattgagacaagaataga

SEQ ID NO: 2706194 - DNA, 25 bp, Homo sapien
tacaaaaccaaataaggcgcaagga

SEQ ID NO: 2706195 - DNA, 25 bp, Homo sapien
tatgggtgaatcctagtcgtcctgc

SEQ ID NO: 2706196 - DNA, 25 bp, Homo sapien
gaaatgtcaatccaggaggctccta

SEQ ID NO: 2706197 - DNA, 25 bp, Homo sapien
gactctagatgatatatggtgccca

SEQ ID NO: 2706198 - DNA, 25 bp, Homo sapien
tggcttcgggaggacagctctcaat

SEQ ID NO: 2706199 - DNA, 25 bp, Homo sapien
catacaaagcaggttggacgacatc

SEQ ID NO: 2706200 - DNA, 25 bp, Homo sapien
taaaatgccacgcagtagatggact

SEQ ID NO: 2706201 - DNA, 25 bp, Homo sapien
tatagtcagggaaactggcttcggg

SEQ ID NO: 2706202 - DNA, 25 bp, Homo sapien
tcctgtgggtctgaaggattaaagc

SEQ ID NO: 2706203 - DNA, 25 bp, Homo sapien
tggaattttgggcaaagcacagctt

SEQ ID NO: 2706204 - DNA, 25 bp, Homo sapien
cctctcaagagggtatccaaccact

SEQ ID NO: 2706205 - DNA, 25 bp, Homo sapien
tgaaaatggctccagaaactagagg

SEQ ID NO: 2706206 - DNA, 25 bp, Homo sapien
tcattcccaccttcaataaagggaa

SEQ ID NO: 2706207 - DNA, 25 bp, Homo sapien
ctgcagtccagaatccccctcattc

SEQ ID NO: 2706208 - DNA, 25 bp, Homo sapien
ctcattcccaccttcaataaaggga

SEQ ID NO: 2706209 - DNA, 25 bp, Homo sapien
agggcagatgtcctgtgcctgcagt

SEQ ID NO: 2706210 - DNA, 25 bp, Homo sapien
gattctgcgtgaaaaggactgtagc

SEQ ID NO: 2706211 - DNA, 25 bp, Homo sapien
aaaggttcatactatcagctgtgcc

SEQ ID NO: 2706212 - DNA, 25 bp, Homo sapien
tatatatgacctcaactgggcagct

SEQ ID NO: 2706213 - DNA, 25 bp, Homo sapien
taaagacacgctcttcccatgaagg

SEQ ID NO: 2706214 - DNA, 25 bp, Homo sapien
ttcaggccattcttctgcttcagca

SEQ ID NO: 2706215 - DNA, 25 bp, Homo sapien
tcaggccattcttctgcttcagcat

SEQ ID NO: 2706216 - DNA, 25 bp, Homo sapien
aggccattcttctgcttcagcatcc

SEQ ID NO: 2706217 - DNA, 25 bp, Homo sapien
ggccattcttctgcttcagcatcct

SEQ ID NO: 2706218 - DNA, 25 bp, Homo sapien
tgggtaaactgaagtgcctagcaaa

SEQ ID NO: 2706219 - DNA, 25 bp, Homo sapien
aaaccatggtccctgataagctgct

SEQ ID NO: 2706220 - DNA, 25 bp, Homo sapien
tgtgggcagaatgcaaataaggtct

SEQ ID NO: 2706221 - DNA, 25 bp, Homo sapien
cctagcaaatgtacgtggaaaacca

SEQ ID NO: 2706222 - DNA, 25 bp, Homo sapien
tagggcaaaattcatgaaggctaca

SEQ ID NO: 2706223 - DNA, 25 bp, Homo sapien
aaatgccaaagacagccttccacag

SEQ ID NO: 2706224 - DNA, 25 bp, Homo sapien
tttaaagcatggcaccaatacactg

SEQ ID NO: 2706225 - DNA, 25 bp, Homo sapien
gaagttccgatcatagctctatcat

SEQ ID NO: 2706226 - DNA, 25 bp, Homo sapien
gcaatatcctttcagcaagagcaca

SEQ ID NO: 2706227 - DNA, 25 bp, Homo sapien
tcattagagcaactaaaacaggtcc

SEQ ID NO: 2706228 - DNA, 25 bp, Homo sapien
gagggaccttactgcacaattctgc

SEQ ID NO: 2706229 - DNA, 25 bp, Homo sapien
cagcttatgccccagagggtatgga

SEQ ID NO: 2706230 - DNA, 25 bp, Homo sapien
cctaggaatctcctgcgactggcag

SEQ ID NO: 2706231 - DNA, 25 bp, Homo sapien
ttgtgcctgatgttcctgtaaactc

SEQ ID NO: 2706232 - DNA, 25 bp, Homo sapien
cacatgttgggtctgtttggtaaag

SEQ ID NO: 2706233 - DNA, 25 bp, Homo sapien
gatgtgctttttatctccctaggaa

SEQ ID NO: 2706234 - DNA, 25 bp, Homo sapien
tcagctgtcacctagaaactcgaag

SEQ ID NO: 2706235 - DNA, 25 bp, Homo sapien
taggtagcctgctgaaccctagggc

SEQ ID NO: 2706236 - DNA, 25 bp, Homo sapien
taaacatgggatggaaccccagctc

SEQ ID NO: 2706237 - DNA, 25 bp, Homo sapien
tatatacagacctgcccaactggaa

SEQ ID NO: 2706238 - DNA, 25 bp, Homo sapien
tagctcagagggtcagtaacgaatg

SEQ ID NO: 2706239 - DNA, 25 bp, Homo sapien
tcagtaacgaatggagactcttcac

SEQ ID NO: 2706240 - DNA, 25 bp, Homo sapien
gggcatgacatagctcagagggtca

SEQ ID NO: 2706241 - DNA, 25 bp, Homo sapien
gagactcttcactgcccatgactaa

SEQ ID NO: 2706242 - DNA, 25 bp, Homo sapien
ctgcgctaatcacggccaagcttct

SEQ ID NO: 2706243 - DNA, 25 bp, Homo sapien
gcttctggagatgtgggtgtcgaag

SEQ ID NO: 2706244 - DNA, 25 bp, Homo sapien
caggcactgcgctaatcacggccaa

SEQ ID NO: 2706245 - DNA, 25 bp, Homo sapien
tggagatgtgggtgtcgaaggacat

SEQ ID NO: 2706246 - DNA, 25 bp, Homo sapien
tggtccctccgcagcatcaccttca

SEQ ID NO: 2706247 - DNA, 25 bp, Homo sapien
ttcatctggtccctccgcagcatca

SEQ ID NO: 2706248 - DNA, 25 bp, Homo sapien
gcagaggtctgtcccttagatgctg

SEQ ID NO: 2706249 - DNA, 25 bp, Homo sapien
aggtctgtcccttagatgctggctg

SEQ ID NO: 2706250 - DNA, 25 bp, Homo sapien
accccttcacaccttcctgaacatc

SEQ ID NO: 2706251 - DNA, 25 bp, Homo sapien
cccttcacaccttcctgaacatcct

SEQ ID NO: 2706252 - DNA, 25 bp, Homo sapien
gtaccccttcacaccttcctgaaca

SEQ ID NO: 2706253 - DNA, 25 bp, Homo sapien
tcacaccttcctgaacatcctccag

SEQ ID NO: 2706254 - DNA, 25 bp, Homo sapien
cctgctttctgtaggcattcactct

SEQ ID NO: 2706255 - DNA, 25 bp, Homo sapien
tctccagaggccacattagtcacca

SEQ ID NO: 2706256 - DNA, 25 bp, Homo sapien
tctgtttactcaataagatccagct

SEQ ID NO: 2706257 - DNA, 25 bp, Homo sapien
ttttcatcatggtgggaagacggct

SEQ ID NO: 2706258 - DNA, 25 bp, Homo sapien
gattccattcccattgttctcgctc

SEQ ID NO: 2706259 - DNA, 25 bp, Homo sapien
gaaggattccattcccattgttctc

SEQ ID NO: 2706260 - DNA, 25 bp, Homo sapien
gaggggaagaaggattccattccca

SEQ ID NO: 2706261 - DNA, 25 bp, Homo sapien
ggaagaaggattccattcccattgt

SEQ ID NO: 2706262 - DNA, 25 bp, Homo sapien
aaagcattcctttcggtggggccag

SEQ ID NO: 2706263 - DNA, 25 bp, Homo sapien
caagaaagcattcctttcggtgggg

SEQ ID NO: 2706264 - DNA, 25 bp, Homo sapien
tgcgggtaccacacagtctggacaa

SEQ ID NO: 2706265 - DNA, 25 bp, Homo sapien
ttcttccctgcgggtaccacacagt

SEQ ID NO: 2706266 - DNA, 25 bp, Homo sapien
tgctcctgcatcagaaaggagagcc

SEQ ID NO: 2706267 - DNA, 25 bp, Homo sapien
gaaggaaacatgcagccgtttggcg

SEQ ID NO: 2706268 - DNA, 25 bp, Homo sapien
gcaccccaggagagcaatgagaagg

SEQ ID NO: 2706269 - DNA, 25 bp, Homo sapien
ccaggagagcaatgagaaggaaaca

SEQ ID NO: 2706270 - DNA, 25 bp, Homo sapien
tcagtacgatttagttcataacaac

SEQ ID NO: 2706271 - DNA, 25 bp, Homo sapien
gagcaaaaataaaccgcgcatggaa

SEQ ID NO: 2706272 - DNA, 25 bp, Homo sapien
tattttacacgttgggaatctgtcc

SEQ ID NO: 2706273 - DNA, 25 bp, Homo sapien
tgaaatgccctcttacaactaactg

SEQ ID NO: 2706274 - DNA, 25 bp, Homo sapien
caaaatcaaaggtcattcttctagc

SEQ ID NO: 2706275 - DNA, 25 bp, Homo sapien
tagcttgcttattcacaacattgac

SEQ ID NO: 2706276 - DNA, 25 bp, Homo sapien
gaattatcaacatgcccactatgag

SEQ ID NO: 2706277 - DNA, 25 bp, Homo sapien
cattgactgaaaagtgaaagtctga

SEQ ID NO: 2706278 - DNA, 25 bp, Homo sapien
gctgatggtagaaaaactacaaaca

SEQ ID NO: 2706279 - DNA, 25 bp, Homo sapien
caatgaagctgatggtagaaaaact

SEQ ID NO: 2706280 - DNA, 25 bp, Homo sapien
gaagctgatggtagaaaaactacaa

SEQ ID NO: 2706281 - DNA, 25 bp, Homo sapien
gaggcaatgaagctgatggtagaaa

SEQ ID NO: 2706282 - DNA, 25 bp, Homo sapien
ggaccgaagcttgcattcccagtaa

SEQ ID NO: 2706283 - DNA, 25 bp, Homo sapien
gaggagcccaccaggaccgaagctt

SEQ ID NO: 2706284 - DNA, 25 bp, Homo sapien
gaagcttgcattcccagtaaagaag

SEQ ID NO: 2706285 - DNA, 25 bp, Homo sapien
accaggaccgaagcttgcattccca

SEQ ID NO: 2706286 - DNA, 25 bp, Homo sapien
tgactgcagccctcactaatatgtg

SEQ ID NO: 2706287 - DNA, 25 bp, Homo sapien
tgactgcaatcacataagagaacga

SEQ ID NO: 2706288 - DNA, 25 bp, Homo sapien
taagagaacgaaaacattcctggac

SEQ ID NO: 2706289 - DNA, 25 bp, Homo sapien
caactttaaggtatgggagtcagcc

SEQ ID NO: 2706290 - DNA, 25 bp, Homo sapien
gaggataccagtgtcatcacaacac

SEQ ID NO: 2706291 - DNA, 25 bp, Homo sapien
ctgccactacccaggatgaattctc

SEQ ID NO: 2706292 - DNA, 25 bp, Homo sapien
tgaggataccagtgtcatcacaaca

SEQ ID NO: 2706293 - DNA, 25 bp, Homo sapien
aggggagaagatgatagagacaggc

SEQ ID NO: 2706294 - DNA, 25 bp, Homo sapien
agccacagccgctttggctgctggt

SEQ ID NO: 2706295 - DNA, 25 bp, Homo sapien
cacagccgctttggctgctggtgtg

SEQ ID NO: 2706296 - DNA, 25 bp, Homo sapien
agaagatgatagagacaggctgctc

SEQ ID NO: 2706297 - DNA, 25 bp, Homo sapien
cacatcctgtctcccggagaaccag

SEQ ID NO: 2706298 - DNA, 25 bp, Homo sapien
taccagtattggcttctgggccaag

SEQ ID NO: 2706299 - DNA, 25 bp, Homo sapien
acatcctgtctcccggagaaccagg

SEQ ID NO: 2706300 - DNA, 25 bp, Homo sapien
tcttttataatagctggtattgtgt

SEQ ID NO: 2706301 - DNA, 25 bp, Homo sapien
ttttataatagctggtattgtgttg

SEQ ID NO: 2706302 - DNA, 25 bp, Homo sapien
gtcttttataatagctggtattgtg

SEQ ID NO: 2706303 - DNA, 25 bp, Homo sapien
tttataatagctggtattgtgttgt

SEQ ID NO: 2706304 - DNA, 25 bp, Homo sapien
tcagagaggtaagtggcctccccaa

SEQ ID NO: 2706305 - DNA, 25 bp, Homo sapien
caaagccaagaacagcagccaggtt

SEQ ID NO: 2706306 - DNA, 25 bp, Homo sapien
gtcccacagaagcttagttgcaaag

SEQ ID NO: 2706307 - DNA, 25 bp, Homo sapien
gaggccagtggttcctagcccagaa

SEQ ID NO: 2706308 - DNA, 25 bp, Homo sapien
tctattaccacacgacattgctttt

SEQ ID NO: 2706309 - DNA, 25 bp, Homo sapien
ttaccacacgacattgcttttggcc

SEQ ID NO: 2706310 - DNA, 25 bp, Homo sapien
gaaggatcttctattaccacacgac

SEQ ID NO: 2706311 - DNA, 25 bp, Homo sapien
gatcttctattaccacacgacattg

SEQ ID NO: 2706312 - DNA, 25 bp, Homo sapien
ttacaaacagaaaagctcgaggctc

SEQ ID NO: 2706313 - DNA, 25 bp, Homo sapien
tacgattcactagggcatcctgcga

SEQ ID NO: 2706314 - DNA, 25 bp, Homo sapien
cagtcgccatcatacctcgagtgag

SEQ ID NO: 2706315 - DNA, 25 bp, Homo sapien
tgactgtcaccttgaagcatcctgt

SEQ ID NO: 2706316 - DNA, 25 bp, Homo sapien
cacaactaaggctttcctgagcagg

SEQ ID NO: 2706317 - DNA, 25 bp, Homo sapien
tctggctgcccgtgttaatgaagga

SEQ ID NO: 2706318 - DNA, 25 bp, Homo sapien
taatgaaggacagcgcttccgcgag

SEQ ID NO: 2706319 - DNA, 25 bp, Homo sapien
tcttgggtagcaaagccctcccaga

SEQ ID NO: 2706320 - DNA, 25 bp, Homo sapien
tgggagggggtgcagcccgcgcagc

SEQ ID NO: 2706321 - DNA, 25 bp, Homo sapien
gggagggggtgcagcccgcgcagct

SEQ ID NO: 2706322 - DNA, 25 bp, Homo sapien
tatacttgtccccattaatcaacca

SEQ ID NO: 2706323 - DNA, 25 bp, Homo sapien
caattggttgatgttagctatagtc

SEQ ID NO: 2706324 - DNA, 25 bp, Homo sapien
tattcatataatcaggtcagggtaa

SEQ ID NO: 2706325 - DNA, 25 bp, Homo sapien
ataagcctaggcttctccagtgtcc

SEQ ID NO: 2706326 - DNA, 25 bp, Homo sapien
tttgttggtacaaatcttctactag

SEQ ID NO: 2706327 - DNA, 25 bp, Homo sapien
ttggtacaaatcttctactagcttc

SEQ ID NO: 2706328 - DNA, 25 bp, Homo sapien
tattctcaagttgtttactccttgg

SEQ ID NO: 2706329 - DNA, 25 bp, Homo sapien
ctgagctcatgcagttattctcaag

SEQ ID NO: 2706330 - DNA, 25 bp, Homo sapien
acataatacagaccgggcacagtag

SEQ ID NO: 2706331 - DNA, 25 bp, Homo sapien
tatataaacataatacagaccgggc

SEQ ID NO: 2706332 - DNA, 25 bp, Homo sapien
ataaacataatacagaccgggcaca

SEQ ID NO: 2706333 - DNA, 25 bp, Homo sapien
atgatggcgggcaccagctacttgg

SEQ ID NO: 2706334 - DNA, 25 bp, Homo sapien
gctggctccaactgacgtaagaaat

SEQ ID NO: 2706335 - DNA, 25 bp, Homo sapien
aattgtccaaagtgccattcggtgg

SEQ ID NO: 2706336 - DNA, 25 bp, Homo sapien
ggcattggagttcaaaggctctgac

SEQ ID NO: 2706337 - DNA, 25 bp, Homo sapien
agtggcaggctcttaactggtcagc

SEQ ID NO: 2706338 - DNA, 25 bp, Homo sapien
cagggtagatacctggtaacgccat

SEQ ID NO: 2706339 - DNA, 25 bp, Homo sapien
gcagggtagatacctggtaacgcca

SEQ ID NO: 2706340 - DNA, 25 bp, Homo sapien
gaattctatgcagggtagcagggta

SEQ ID NO: 2706341 - DNA, 25 bp, Homo sapien
gtcttgggaattctatgcagggtag

SEQ ID NO: 2706342 - DNA, 25 bp, Homo sapien
catgcccttttcacctttgaccacc

SEQ ID NO: 2706343 - DNA, 25 bp, Homo sapien
cccatgcccttttcacctttgacca

SEQ ID NO: 2706344 - DNA, 25 bp, Homo sapien
accaccttcccatttgtgcagttcc

SEQ ID NO: 2706345 - DNA, 25 bp, Homo sapien
tttgaccaccttcccatttgtgcag

SEQ ID NO: 2706346 - DNA, 25 bp, Homo sapien
cggcggcggcgcaccaatctgaagg

SEQ ID NO: 2706347 - DNA, 25 bp, Homo sapien
caccaatctgaaggacgtcccggcc

SEQ ID NO: 2706348 - DNA, 25 bp, Homo sapien
tgaaacgtgcacctcgcctacgggt

SEQ ID NO: 2706349 - DNA, 25 bp, Homo sapien
gcttgggttctggaagcaggctacg

SEQ ID NO: 2706350 - DNA, 25 bp, Homo sapien
ttctggaagcaggctacggcaggcc

SEQ ID NO: 2706351 - DNA, 25 bp, Homo sapien
tcactgtgaaacgtgcacctcgcct

SEQ ID NO: 2706352 - DNA, 25 bp, Homo sapien
tgaagctaccctccaagggcctttg

SEQ ID NO: 2706353 - DNA, 25 bp, Homo sapien
tagacctcctatgctgtgtcccttt

SEQ ID NO: 2706354 - DNA, 25 bp, Homo sapien
caggccaagacaactctggagttcc

SEQ ID NO: 2706355 - DNA, 25 bp, Homo sapien
cagtagaccttagccaatgaccttg

SEQ ID NO: 2706356 - DNA, 25 bp, Homo sapien
gacttcctgcttcgtgtgaggaccc

SEQ ID NO: 2706357 - DNA, 25 bp, Homo sapien
catgtatgacaagatgaccacggac

SEQ ID NO: 2706358 - DNA, 25 bp, Homo sapien
ctgagatacagggtgacttcctgct

SEQ ID NO: 2706359 - DNA, 25 bp, Homo sapien
tgaggaccccttcgaatccaatgga

SEQ ID NO: 2706360 - DNA, 25 bp, Homo sapien
ctttctataggaagcttctaaggaa

SEQ ID NO: 2706361 - DNA, 25 bp, Homo sapien
ctggtgctttctataggaagcttct

SEQ ID NO: 2706362 - DNA, 25 bp, Homo sapien
aggaaaacaaacagacatagaagcc

SEQ ID NO: 2706363 - DNA, 25 bp, Homo sapien
aaacagacatagaagccggtgcaga

SEQ ID NO: 2706364 - DNA, 25 bp, Homo sapien
tagacattcggttctttgacaggcc

SEQ ID NO: 2706365 - DNA, 25 bp, Homo sapien
gtagcctggatctttggcatcctcg

SEQ ID NO: 2706366 - DNA, 25 bp, Homo sapien
gaaattactgcatcaaaggtcacgc

SEQ ID NO: 2706367 - DNA, 25 bp, Homo sapien
caggcatcttcgcaacactggtagc

SEQ ID NO: 2706368 - DNA, 25 bp, Homo sapien
atctgggccaaagcttccaggagaa

SEQ ID NO: 2706369 - DNA, 25 bp, Homo sapien
tgggccaaagcttccaggagaaggc

SEQ ID NO: 2706370 - DNA, 25 bp, Homo sapien
ttactcttccaacatctgggccaaa

SEQ ID NO: 2706371 - DNA, 25 bp, Homo sapien
ccaaagcttccaggagaaggcaaga

SEQ ID NO: 2706372 - DNA, 25 bp, Homo sapien
gcaggaagaccaaaagccagaatct

SEQ ID NO: 2706373 - DNA, 25 bp, Homo sapien
ccaaaagccagaatctgggctccct

SEQ ID NO: 2706374 - DNA, 25 bp, Homo sapien
gaaacagcaggaagaccaaaagcca

SEQ ID NO: 2706375 - DNA, 25 bp, Homo sapien
gggcctcacagttgctcctccagga

SEQ ID NO: 2706376 - DNA, 25 bp, Homo sapien
cctcagccattgccagcgagccaca

SEQ ID NO: 2706377 - DNA, 25 bp, Homo sapien
tcagccattgccagcgagccacagc

SEQ ID NO: 2706378 - DNA, 25 bp, Homo sapien
ctcagccattgccagcgagccacag

SEQ ID NO: 2706379 - DNA, 25 bp, Homo sapien
gcttcacgccagtccattcacgtag

SEQ ID NO: 2706380 - DNA, 25 bp, Homo sapien
cttcccatctggaaacgcctcagag

SEQ ID NO: 2706381 - DNA, 25 bp, Homo sapien
gaaaatacagaaacgcacttcccat

SEQ ID NO: 2706382 - DNA, 25 bp, Homo sapien
agagaacacggctatgaaaatacag

SEQ ID NO: 2706383 - DNA, 25 bp, Homo sapien
taattttgatacacagctcccaggg

SEQ ID NO: 2706384 - DNA, 25 bp, Homo sapien
gctataaaagctgccaacacgggtt

SEQ ID NO: 2706385 - DNA, 25 bp, Homo sapien
cagtaacatttagacagcgtggacc

SEQ ID NO: 2706386 - DNA, 25 bp, Homo sapien
gaaagtgcccagcaattcccatgtg

SEQ ID NO: 2706387 - DNA, 25 bp, Homo sapien
cagtcactggccatggggcacagag

SEQ ID NO: 2706388 - DNA, 25 bp, Homo sapien
tcagtcactggccatggggcacaga

SEQ ID NO: 2706389 - DNA, 25 bp, Homo sapien
agtcactggccatggggcacagagg

SEQ ID NO: 2706390 - DNA, 25 bp, Homo sapien
tctgactgaacggaattgactcgcc

SEQ ID NO: 2706391 - DNA, 25 bp, Homo sapien
ttagaggtcacgctttcaaatcctg

SEQ ID NO: 2706392 - DNA, 25 bp, Homo sapien
taattttgggcatagtctgagagga

SEQ ID NO: 2706393 - DNA, 25 bp, Homo sapien
agagttctcccaggcctgtattgac

SEQ ID NO: 2706394 - DNA, 25 bp, Homo sapien
aatctgtttcctcttaagcgttggt

SEQ ID NO: 2706395 - DNA, 25 bp, Homo sapien
taagcgttggtttagttccagtgtg

SEQ ID NO: 2706396 - DNA, 25 bp, Homo sapien
ctcttaagcgttggtttagttccag

SEQ ID NO: 2706397 - DNA, 25 bp, Homo sapien
gcgttggtttagttccagtgtggtc

SEQ ID NO: 2706398 - DNA, 25 bp, Homo sapien
gctcagacaccggaccagactgaga

SEQ ID NO: 2706399 - DNA, 25 bp, Homo sapien
tggtgtgccgtggcaacacctggga

SEQ ID NO: 2706400 - DNA, 25 bp, Homo sapien
ataaaccgccctttaatctgcatgt

SEQ ID NO: 2706401 - DNA, 25 bp, Homo sapien
tacagtcatagtgaggtaggaggca

SEQ ID NO: 2706402 - DNA, 25 bp, Homo sapien
cccatgggaattactcggaaatatc

SEQ ID NO: 2706403 - DNA, 25 bp, Homo sapien
ccgcctttgtcagtggagtgctcaa

SEQ ID NO: 2706404 - DNA, 25 bp, Homo sapien
cagcataaccccaggacttcaaagt

SEQ ID NO: 2706405 - DNA, 25 bp, Homo sapien
catgctgcagaagggaacaactggc

SEQ ID NO: 2706406 - DNA, 25 bp, Homo sapien
taaattgagacacatgccttgaagg

SEQ ID NO: 2706407 - DNA, 25 bp, Homo sapien
tgagcatctactaagccctaggagg

SEQ ID NO: 2706408 - DNA, 25 bp, Homo sapien
taaatcccttccgtctgtgaagcag

SEQ ID NO: 2706409 - DNA, 25 bp, Homo sapien
cagggagtctgattagtgccaagga

SEQ ID NO: 2706410 - DNA, 25 bp, Homo sapien
gctggcggcgccacctctgagcagc

SEQ ID NO: 2706411 - DNA, 25 bp, Homo sapien
ctggcggcgccacctctgagcagca

SEQ ID NO: 2706412 - DNA, 25 bp, Homo sapien
gattacaggcatgagcaaccatgcc

SEQ ID NO: 2706413 - DNA, 25 bp, Homo sapien
tgaactcatgatctcaggtgatcta

SEQ ID NO: 2706414 - DNA, 25 bp, Homo sapien
ttacaggcatgagcaaccatgccca

SEQ ID NO: 2706415 - DNA, 25 bp, Homo sapien
acaggcatgagcaaccatgcccagc

SEQ ID NO: 2706416 - DNA, 25 bp, Homo sapien
gatcaaagggctgaatatgagcacc

SEQ ID NO: 2706417 - DNA, 25 bp, Homo sapien
tgggaacactagacagcacaatgcc

SEQ ID NO: 2706418 - DNA, 25 bp, Homo sapien
gccagcagcactaaaactcaagcct

SEQ ID NO: 2706419 - DNA, 25 bp, Homo sapien
tcttaaagcctctagccaaacggat

SEQ ID NO: 2706420 - DNA, 25 bp, Homo sapien
cctcagtgccttcttttactggaag

SEQ ID NO: 2706421 - DNA, 25 bp, Homo sapien
aaacctcagtgccttcttttactgg

SEQ ID NO: 2706422 - DNA, 25 bp, Homo sapien
agtgccttcttttactggaagttgt

SEQ ID NO: 2706423 - DNA, 25 bp, Homo sapien
cagtgccttcttttactggaagttg

SEQ ID NO: 2706424 - DNA, 25 bp, Homo sapien
cttgaatctatgcagcctcccattg

SEQ ID NO: 2706425 - DNA, 25 bp, Homo sapien
aatcggcaactgctcccacgtagca

SEQ ID NO: 2706426 - DNA, 25 bp, Homo sapien
tgcagcctcccattgcaaaaatcgg

SEQ ID NO: 2706427 - DNA, 25 bp, Homo sapien
tcccattgcaaaaatcggcaactgc

SEQ ID NO: 2706428 - DNA, 25 bp, Homo sapien
tttcatgcgatcaggataaggtgac

SEQ ID NO: 2706429 - DNA, 25 bp, Homo sapien
cagacattgagggtttaggtcataa

SEQ ID NO: 2706430 - DNA, 25 bp, Homo sapien
caaatgatcttatgttctccaaagc

SEQ ID NO: 2706431 - DNA, 25 bp, Homo sapien
ggtgagttggttatattcaaactta

SEQ ID NO: 2706432 - DNA, 25 bp, Homo sapien
tgctaactgagataaggtacacggt

SEQ ID NO: 2706433 - DNA, 25 bp, Homo sapien
gctcaatttgaagtgcccatgggca

SEQ ID NO: 2706434 - DNA, 25 bp, Homo sapien
gagtgcaaaccatgatcccagggtg

SEQ ID NO: 2706435 - DNA, 25 bp, Homo sapien
cccagggtggtggtccatagtcaga

SEQ ID NO: 2706436 - DNA, 25 bp, Homo sapien
gattgggtcacacaccccattccaa

SEQ ID NO: 2706437 - DNA, 25 bp, Homo sapien
tccaaaatcaatcattgtcagggga

SEQ ID NO: 2706438 - DNA, 25 bp, Homo sapien
catctcactggccccgattgggtca

SEQ ID NO: 2706439 - DNA, 25 bp, Homo sapien
tttatgtatctctttcttagcaaga

SEQ ID NO: 2706440 - DNA, 25 bp, Homo sapien
cctgttaaacgcctctggtgaggca

SEQ ID NO: 2706441 - DNA, 25 bp, Homo sapien
tacaatctgggtaatgtgatagcgc

SEQ ID NO: 2706442 - DNA, 25 bp, Homo sapien
tttagcagctaaatagatggtggta

SEQ ID NO: 2706443 - DNA, 25 bp, Homo sapien
gtcccatctccttgaatggtaaatt

SEQ ID NO: 2706444 - DNA, 25 bp, Homo sapien
tgcatcttaaaagtcggtctgagac

SEQ ID NO: 2706445 - DNA, 25 bp, Homo sapien
tgggacaagaagtgaagccgttcgc

SEQ ID NO: 2706446 - DNA, 25 bp, Homo sapien
aacgactgatttccttgggcacctg

SEQ ID NO: 2706447 - DNA, 25 bp, Homo sapien
tcattcaggctagagaattccagcc

SEQ ID NO: 2706448 - DNA, 25 bp, Homo sapien
tagtatctagagagggctgctctct

SEQ ID NO: 2706449 - DNA, 25 bp, Homo sapien
tcctccagagggcacaaactctgtg

SEQ ID NO: 2706450 - DNA, 25 bp, Homo sapien
ctccagagggcacaaactctgtgtg

SEQ ID NO: 2706451 - DNA, 25 bp, Homo sapien
caccagcaggtttagtatctagaga

SEQ ID NO: 2706452 - DNA, 25 bp, Homo sapien
cgggggaacttgttgacaatatcca

SEQ ID NO: 2706453 - DNA, 25 bp, Homo sapien
gggggaacttgttgacaatatccat

SEQ ID NO: 2706454 - DNA, 25 bp, Homo sapien
cttcatgctccacagggtaaaactg

SEQ ID NO: 2706455 - DNA, 25 bp, Homo sapien
gaaagcagacgtcattctccaggtc

SEQ ID NO: 2706456 - DNA, 25 bp, Homo sapien
tccaagggtaaaagctctgagggtg

SEQ ID NO: 2706457 - DNA, 25 bp, Homo sapien
attaagtgaaagcagacgtcattct

SEQ ID NO: 2706458 - DNA, 25 bp, Homo sapien
tcaatgaagcagaaatgttgtgtcc

SEQ ID NO: 2706459 - DNA, 25 bp, Homo sapien
gggcaggtcttctcctaaatttgcc

SEQ ID NO: 2706460 - DNA, 25 bp, Homo sapien
cctaaatttgccacggaataatctg

SEQ ID NO: 2706461 - DNA, 25 bp, Homo sapien
atttgccacggaataatctgaattc

SEQ ID NO: 2706462 - DNA, 25 bp, Homo sapien
taaggcatctgacccaactcttcca

SEQ ID NO: 2706463 - DNA, 25 bp, Homo sapien
gatatagtctttgaatctcttcgaa

SEQ ID NO: 2706464 - DNA, 25 bp, Homo sapien
cagattctggcaagaccatggtggt

SEQ ID NO: 2706465 - DNA, 25 bp, Homo sapien
ccatggtggtgatatagtctttgaa

SEQ ID NO: 2706466 - DNA, 25 bp, Homo sapien
gtctttgaatctcttcgaattctca

SEQ ID NO: 2706467 - DNA, 25 bp, Homo sapien
gctggttctacagataatcagtaga

SEQ ID NO: 2706468 - DNA, 25 bp, Homo sapien
ttatataaggctggttctacagata

SEQ ID NO: 2706469 - DNA, 25 bp, Homo sapien
gataatcagtagattaagaaatgac

SEQ ID NO: 2706470 - DNA, 25 bp, Homo sapien
aaggctggttctacagataatcagt

SEQ ID NO: 2706471 - DNA, 25 bp, Homo sapien
gccaccatctttttaatctccactg

SEQ ID NO: 2706472 - DNA, 25 bp, Homo sapien
cgtgagccaccatctttttaatctc

SEQ ID NO: 2706473 - DNA, 25 bp, Homo sapien
acttaatgcattataatcaacatca

SEQ ID NO: 2706474 - DNA, 25 bp, Homo sapien
taatctccactgtgaactcatagtt

SEQ ID NO: 2706475 - DNA, 25 bp, Homo sapien
ggctgggactttgcatttcgagttc

SEQ ID NO: 2706476 - DNA, 25 bp, Homo sapien
gagctcttgcagcttaatttccccg

SEQ ID NO: 2706477 - DNA, 25 bp, Homo sapien
gcagcttaatttccccggctgggac

SEQ ID NO: 2706478 - DNA, 25 bp, Homo sapien
cgagttcccatctttggcccctgct

SEQ ID NO: 2706479 - DNA, 25 bp, Homo sapien
ggatgtctaagttgactttcataag

SEQ ID NO: 2706480 - DNA, 25 bp, Homo sapien
cctggatgtctaagttgactttcat

SEQ ID NO: 2706481 - DNA, 25 bp, Homo sapien
gtcctggatgtctaagttgactttc

SEQ ID NO: 2706482 - DNA, 25 bp, Homo sapien
tgtctaagttgactttcataagaaa

SEQ ID NO: 2706483 - DNA, 25 bp, Homo sapien
tatgcatgggacttatcagtctctt

SEQ ID NO: 2706484 - DNA, 25 bp, Homo sapien
ttgtcatatgcccagaaggtaccca

SEQ ID NO: 2706485 - DNA, 25 bp, Homo sapien
tacatggatggatttagcaactgat

SEQ ID NO: 2706486 - DNA, 25 bp, Homo sapien
cttctattaaatgatgagctgtgct

SEQ ID NO: 2706487 - DNA, 25 bp, Homo sapien
gttgcccatcaaaacagtgcaaagt

SEQ ID NO: 2706488 - DNA, 25 bp, Homo sapien
cagtgcaaagtagacacgttttcat

SEQ ID NO: 2706489 - DNA, 25 bp, Homo sapien
aagaagttgcccatcaaaacagtgc

SEQ ID NO: 2706490 - DNA, 25 bp, Homo sapien
aacagtgcaaagtagacacgttttc

SEQ ID NO: 2706491 - DNA, 25 bp, Homo sapien
ggggaacatgaaattgtctcctttc

SEQ ID NO: 2706492 - DNA, 25 bp, Homo sapien
cggggaacatgaaattgtctccttt

SEQ ID NO: 2706493 - DNA, 25 bp, Homo sapien
aagattcaatgcaacaatacaagga

SEQ ID NO: 2706494 - DNA, 25 bp, Homo sapien
gccctgtgcccaggacacacaaagg

SEQ ID NO: 2706495 - DNA, 25 bp, Homo sapien
attatcattgttgtaattactcctt

SEQ ID NO: 2706496 - DNA, 25 bp, Homo sapien
tacaaggaaagcatttagccctgtg

SEQ ID NO: 2706497 - DNA, 25 bp, Homo sapien
tggtgcctcgtaaccaactgcagat

SEQ ID NO: 2706498 - DNA, 25 bp, Homo sapien
ttcagtctcttaggctattaaggga

SEQ ID NO: 2706499 - DNA, 25 bp, Homo sapien
gcagacttctcaacacgacgacagt

SEQ ID NO: 2706500 - DNA, 25 bp, Homo sapien
tctgttttgaaccttctcatgacct

SEQ ID NO: 2706501 - DNA, 25 bp, Homo sapien
ctggttgagggtttctactagaggt

SEQ ID NO: 2706502 - DNA, 25 bp, Homo sapien
atccttctctggttgagggtttcta

SEQ ID NO: 2706503 - DNA, 25 bp, Homo sapien
ccattgacttccatccttctctggt

SEQ ID NO: 2706504 - DNA, 25 bp, Homo sapien
ctactagaggtgtaaatcccaggac

SEQ ID NO: 2706505 - DNA, 25 bp, Homo sapien
tcagtgaactaagccatgcagattg

SEQ ID NO: 2706506 - DNA, 25 bp, Homo sapien
agacagcacgggtttgggcacaagc

SEQ ID NO: 2706507 - DNA, 25 bp, Homo sapien
tctttattgcaggactaagcttcca

SEQ ID NO: 2706508 - DNA, 25 bp, Homo sapien
tgagcagcacaacttgccagaggtg

SEQ ID NO: 2706509 - DNA, 25 bp, Homo sapien
cgtggattagataccagagagtcac

SEQ ID NO: 2706510 - DNA, 25 bp, Homo sapien
catggagtctcacctcactcgtgga

SEQ ID NO: 2706511 - DNA, 25 bp, Homo sapien
tttacagcagcctagacagactaag

SEQ ID NO: 2706512 - DNA, 25 bp, Homo sapien
gagagtcacgcatgaaagggagcca

SEQ ID NO: 2706513 - DNA, 25 bp, Homo sapien
gcttcacactcacaacttggctgga

SEQ ID NO: 2706514 - DNA, 25 bp, Homo sapien
ggtttgtatgtctgcatgtccccaa

SEQ ID NO: 2706515 - DNA, 25 bp, Homo sapien
aaaccgacactattgagagcttcac

SEQ ID NO: 2706516 - DNA, 25 bp, Homo sapien
gaatgtaacaggagagcactaagag

SEQ ID NO: 2706517 - DNA, 25 bp, Homo sapien
tactgctgacaactaaactcacagg

SEQ ID NO: 2706518 - DNA, 25 bp, Homo sapien
gtaagtctcatagccagctcctgtc

SEQ ID NO: 2706519 - DNA, 25 bp, Homo sapien
tatggattcattttcgggccagctc

SEQ ID NO: 2706520 - DNA, 25 bp, Homo sapien
ggctgcaaagcagacctctgatgaa

SEQ ID NO: 2706521 - DNA, 25 bp, Homo sapien
tcggcccacctaagattgacaatac

SEQ ID NO: 2706522 - DNA, 25 bp, Homo sapien
tttgtgcagttaagtggcaaccact

SEQ ID NO: 2706523 - DNA, 25 bp, Homo sapien
tgaaattgccccacaatcagaggca

SEQ ID NO: 2706524 - DNA, 25 bp, Homo sapien
atcagaggcaaatgggacctacact

SEQ ID NO: 2706525 - DNA, 25 bp, Homo sapien
gttcacttcattgttgggtacaagg

SEQ ID NO: 2706526 - DNA, 25 bp, Homo sapien
ggtacaaggttcttttatacactca

SEQ ID NO: 2706527 - DNA, 25 bp, Homo sapien
cctggtacatggtcaattttcgtaa

SEQ ID NO: 2706528 - DNA, 25 bp, Homo sapien
taaaatctcccaccataattgcgga

SEQ ID NO: 2706529 - DNA, 25 bp, Homo sapien
ggtgatgttctcttgcatcatctcc

SEQ ID NO: 2706530 - DNA, 25 bp, Homo sapien
ccataaaggaggactcctttgcctg

SEQ ID NO: 2706531 - DNA, 25 bp, Homo sapien
tagaatactaatgatgtggtcacag

SEQ ID NO: 2706532 - DNA, 25 bp, Homo sapien
tcacaggaccatgagagccatcggt

SEQ ID NO: 2706533 - DNA, 25 bp, Homo sapien
gaagagcagtttctaggactcagct

SEQ ID NO: 2706534 - DNA, 25 bp, Homo sapien
tccccttcactggtctacaggatcc

SEQ ID NO: 2706535 - DNA, 25 bp, Homo sapien
catactctaggctatgcatggcatt

SEQ ID NO: 2706536 - DNA, 25 bp, Homo sapien
agtggagtctgtcctgatcccacct

SEQ ID NO: 2706537 - DNA, 25 bp, Homo sapien
tgtgaacacagtacaagctgagaat

SEQ ID NO: 2706538 - DNA, 25 bp, Homo sapien
gaacacagtacaagctgagaatctt

SEQ ID NO: 2706539 - DNA, 25 bp, Homo sapien
gtgaacacagtacaagctgagaatc

SEQ ID NO: 2706540 - DNA, 25 bp, Homo sapien
tctgaatgtcccagcgcctcttgtg

SEQ ID NO: 2706541 - DNA, 25 bp, Homo sapien
tcccagcgcctcttgtgtttcttca

SEQ ID NO: 2706542 - DNA, 25 bp, Homo sapien
tgccccatagcactaggtgacttct

SEQ ID NO: 2706543 - DNA, 25 bp, Homo sapien
cactaggtgacttctgaatgtccca

SEQ ID NO: 2706544 - DNA, 25 bp, Homo sapien
gctcccgcccacaggataagtcggg

SEQ ID NO: 2706545 - DNA, 25 bp, Homo sapien
tggctctcccgttccaatatcagca

SEQ ID NO: 2706546 - DNA, 25 bp, Homo sapien
tgagctcggagcgccctcttctggc

SEQ ID NO: 2706547 - DNA, 25 bp, Homo sapien
ccacaggataagtcgggttttcagt

SEQ ID NO: 2706548 - DNA, 25 bp, Homo sapien
cagcatggcgagtgtggtggaccag

SEQ ID NO: 2706549 - DNA, 25 bp, Homo sapien
atgtggtagagacccagtcttgggc

SEQ ID NO: 2706550 - DNA, 25 bp, Homo sapien
caagaattgtccagagtgggttgga

SEQ ID NO: 2706551 - DNA, 25 bp, Homo sapien
ggttggaaagttccgctgcccactg

SEQ ID NO: 2706552 - DNA, 25 bp, Homo sapien
tggttttcagctgccgcacagttga

SEQ ID NO: 2706553 - DNA, 25 bp, Homo sapien
ttttcagctgccgcacagttgaggc

SEQ ID NO: 2706554 - DNA, 25 bp, Homo sapien
agatggttttcagctgccgcacagt

SEQ ID NO: 2706555 - DNA, 25 bp, Homo sapien
gatggttttcagctgccgcacagtt

SEQ ID NO: 2706556 - DNA, 25 bp, Homo sapien
ctttttctttgtatggctgtctcaa

SEQ ID NO: 2706557 - DNA, 25 bp, Homo sapien
agccctgctgagaagaactttaaaa

SEQ ID NO: 2706558 - DNA, 25 bp, Homo sapien
tcacctatcctctgtccttcggaat

SEQ ID NO: 2706559 - DNA, 25 bp, Homo sapien
tatggctgtctcaactcagcctaac

SEQ ID NO: 2706560 - DNA, 25 bp, Homo sapien
ctcagagtgtggagtgacccccagg

SEQ ID NO: 2706561 - DNA, 25 bp, Homo sapien
ctctttgtagcttcgggcagtgcag

SEQ ID NO: 2706562 - DNA, 25 bp, Homo sapien
tcctctgtggtaaccggctgcactg

SEQ ID NO: 2706563 - DNA, 25 bp, Homo sapien
cgctgtctgcttcgctcttcaggct

SEQ ID NO: 2706564 - DNA, 25 bp, Homo sapien
gcagctgtgttttacgattgtctgt

SEQ ID NO: 2706565 - DNA, 25 bp, Homo sapien
gtagcagctgtgttttacgattgtc

SEQ ID NO: 2706566 - DNA, 25 bp, Homo sapien
tagcagctgtgttttacgattgtct

SEQ ID NO: 2706567 - DNA, 25 bp, Homo sapien
gaagaaccaggtttattggattaga

SEQ ID NO: 2706568 - DNA, 25 bp, Homo sapien
ctcagaggatgtaatcaggtaaaac

SEQ ID NO: 2706569 - DNA, 25 bp, Homo sapien
aggtaaaggtctcccgagcactctg

SEQ ID NO: 2706570 - DNA, 25 bp, Homo sapien
aacaggtaaaggtctcccgagcact

SEQ ID NO: 2706571 - DNA, 25 bp, Homo sapien
gaggatgtaatcaggtaaaacaggt

SEQ ID NO: 2706572 - DNA, 25 bp, Homo sapien
ggaaaaacctcagttgtggctgaaa

SEQ ID NO: 2706573 - DNA, 25 bp, Homo sapien
tgggccctgaagttagacaactggg

SEQ ID NO: 2706574 - DNA, 25 bp, Homo sapien
gaatgatgacattactcacctctca

SEQ ID NO: 2706575 - DNA, 25 bp, Homo sapien
ttttgtgcaattccaccacaatggg

SEQ ID NO: 2706576 - DNA, 25 bp, Homo sapien
tgattcggtggcttcataagggacc

SEQ ID NO: 2706577 - DNA, 25 bp, Homo sapien
ggcctaggtaattctgttgcctttg

SEQ ID NO: 2706578 - DNA, 25 bp, Homo sapien
tctggctgttgctcggcttcctttc

SEQ ID NO: 2706579 - DNA, 25 bp, Homo sapien
agagcacaattaaagaagatcaggt

SEQ ID NO: 2706580 - DNA, 25 bp, Homo sapien
gcttccgaggaaagtcccctcttga

SEQ ID NO: 2706581 - DNA, 25 bp, Homo sapien
gaaagtcccctcttgagatgttgat

SEQ ID NO: 2706582 - DNA, 25 bp, Homo sapien
tctgattcacagtcgcaaattccct

SEQ ID NO: 2706583 - DNA, 25 bp, Homo sapien
gactgaggattttggtggagactct

SEQ ID NO: 2706584 - DNA, 25 bp, Homo sapien
atcacatcctcgtttcagtacccct

SEQ ID NO: 2706585 - DNA, 25 bp, Homo sapien
gccccatggtcactcggattacttc

SEQ ID NO: 2706586 - DNA, 25 bp, Homo sapien
ctcgtttcagtacccctccgatggg

SEQ ID NO: 2706587 - DNA, 25 bp, Homo sapien
cccatggtcactcggattacttctt

SEQ ID NO: 2706588 - DNA, 25 bp, Homo sapien
tgtgtcacactagctctctcttggg

SEQ ID NO: 2706589 - DNA, 25 bp, Homo sapien
tactaaagtgctggatgcagccctt

SEQ ID NO: 2706590 - DNA, 25 bp, Homo sapien
cagcccttgaggttcggcagaagca

SEQ ID NO: 2706591 - DNA, 25 bp, Homo sapien
cacatggtgggcagcttagatttta

SEQ ID NO: 2706592 - DNA, 25 bp, Homo sapien
cttccttcttgagggtcattggact

SEQ ID NO: 2706593 - DNA, 25 bp, Homo sapien
cttgagcaacgaatacaatttccca

SEQ ID NO: 2706594 - DNA, 25 bp, Homo sapien
ggtctccttgagcaacgaatacaat

SEQ ID NO: 2706595 - DNA, 25 bp, Homo sapien
tccttgagcaacgaatacaatttcc

SEQ ID NO: 2706596 - DNA, 25 bp, Homo sapien
tcaaaagtattgtgtgtgccttttc

SEQ ID NO: 2706597 - DNA, 25 bp, Homo sapien
tcccctcacacgtttcccgcacaga

SEQ ID NO: 2706598 - DNA, 25 bp, Homo sapien
gcattgctagttatatgggattcaa

SEQ ID NO: 2706599 - DNA, 25 bp, Homo sapien
ccgcacagaacacttagtagtgctt

SEQ ID NO: 2706600 - DNA, 25 bp, Homo sapien
cactggcttaagttccagggagatg

SEQ ID NO: 2706601 - DNA, 25 bp, Homo sapien
cagacgtgcccaactgtgagtgaga

SEQ ID NO: 2706602 - DNA, 25 bp, Homo sapien
gtccttgagcgagggtgatacagaa

SEQ ID NO: 2706603 - DNA, 25 bp, Homo sapien
tacagtcctggtgagttcactggct

SEQ ID NO: 2706604 - DNA, 25 bp, Homo sapien
tagcacacaagagaataaccaggcc

SEQ ID NO: 2706605 - DNA, 25 bp, Homo sapien
cacgaaggtccatttgaggaagtct

SEQ ID NO: 2706606 - DNA, 25 bp, Homo sapien
agaaatgaggtccagcacgaaggtc

SEQ ID NO: 2706607 - DNA, 25 bp, Homo sapien
caaaagcaaagagctcagtggatac

SEQ ID NO: 2706608 - DNA, 25 bp, Homo sapien
ggcctgggtttagcataatttgtaa

SEQ ID NO: 2706609 - DNA, 25 bp, Homo sapien
ctggcctgggtttagcataatttgt

SEQ ID NO: 2706610 - DNA, 25 bp, Homo sapien
ctgggtttagcataatttgtaaggg

SEQ ID NO: 2706611 - DNA, 25 bp, Homo sapien
tctggcctgggtttagcataatttg

SEQ ID NO: 2706612 - DNA, 25 bp, Homo sapien
gctggaatgcgttttgacaaaggcc

SEQ ID NO: 2706613 - DNA, 25 bp, Homo sapien
gatttcctgttaaggccactttgcc

SEQ ID NO: 2706614 - DNA, 25 bp, Homo sapien
gctccttgagcgacagggaagcctc

SEQ ID NO: 2706615 - DNA, 25 bp, Homo sapien
gacagtaattcactgggcgctggaa

SEQ ID NO: 2706616 - DNA, 25 bp, Homo sapien
tcctggcagaagtgtgatgagatca

SEQ ID NO: 2706617 - DNA, 25 bp, Homo sapien
gacactgagcatcaagaatgtagcc

SEQ ID NO: 2706618 - DNA, 25 bp, Homo sapien
tgaagaagacactgagcatcaagaa

SEQ ID NO: 2706619 - DNA, 25 bp, Homo sapien
gaatgtagcctcttcgatttcacct

SEQ ID NO: 2706620 - DNA, 25 bp, Homo sapien
gctgcatatcaccaccagatggact

SEQ ID NO: 2706621 - DNA, 25 bp, Homo sapien
ctgcacctggacagaatgatgtaac

SEQ ID NO: 2706622 - DNA, 25 bp, Homo sapien
tgtcatccaggagccggcgtggctg

SEQ ID NO: 2706623 - DNA, 25 bp, Homo sapien
tttgggagtaagcaaggcagccgca

SEQ ID NO: 2706624 - DNA, 25 bp, Homo sapien
catggctagtctatacaatagaata

SEQ ID NO: 2706625 - DNA, 25 bp, Homo sapien
cataataggcaaatcagtaggggag

SEQ ID NO: 2706626 - DNA, 25 bp, Homo sapien
gatactcataagtgtaccttgaaaa

SEQ ID NO: 2706627 - DNA, 25 bp, Homo sapien
ggacaaactaaacatggctagtcta

SEQ ID NO: 2706628 - DNA, 25 bp, Homo sapien
ttaagtcacatcaccaggtaagcca

SEQ ID NO: 2706629 - DNA, 25 bp, Homo sapien
agtcacatcaccaggtaagccataa

SEQ ID NO: 2706630 - DNA, 25 bp, Homo sapien
acatcaccaggtaagccataaagac

SEQ ID NO: 2706631 - DNA, 25 bp, Homo sapien
cacatcaccaggtaagccataaaga

SEQ ID NO: 2706632 - DNA, 25 bp, Homo sapien
gacaaagctcagaactacagtcaat

SEQ ID NO: 2706633 - DNA, 25 bp, Homo sapien
ccatcttggtctacaagtaatttcc

SEQ ID NO: 2706634 - DNA, 25 bp, Homo sapien
gccacacacggagtcctcccatctt

SEQ ID NO: 2706635 - DNA, 25 bp, Homo sapien
cagaagttagtggtttggtgggata

SEQ ID NO: 2706636 - DNA, 25 bp, Homo sapien
tccaagtttccgctggcaaccttcc

SEQ ID NO: 2706637 - DNA, 25 bp, Homo sapien
atctcaagcttagataacaatctcc

SEQ ID NO: 2706638 - DNA, 25 bp, Homo sapien
tattttaggaagtttctttgtcaca

SEQ ID NO: 2706639 - DNA, 25 bp, Homo sapien
gctggcaaccttccatctcaagctt

SEQ ID NO: 2706640 - DNA, 25 bp, Homo sapien
gtggtcaatcccaggcgactggctg

SEQ ID NO: 2706641 - DNA, 25 bp, Homo sapien
ccctgtggtcaatcccaggcgactg

SEQ ID NO: 2706642 - DNA, 25 bp, Homo sapien
tgtggtcaatcccaggcgactggct

SEQ ID NO: 2706643 - DNA, 25 bp, Homo sapien
aacagcctccatcttttacctggat

SEQ ID NO: 2706644 - DNA, 25 bp, Homo sapien
tttcaaatgcgtaggtaccaactcc

SEQ ID NO: 2706645 - DNA, 25 bp, Homo sapien
caaggtcacttatttagagaacgag

SEQ ID NO: 2706646 - DNA, 25 bp, Homo sapien
tctattaagcgaggaggaaaccaat

SEQ ID NO: 2706647 - DNA, 25 bp, Homo sapien
tcaatttaagataccagcgtagcct

SEQ ID NO: 2706648 - DNA, 25 bp, Homo sapien
ccagcaatattagcaggaagagagt

SEQ ID NO: 2706649 - DNA, 25 bp, Homo sapien
caagcacagcgcatttaacagggaa

SEQ ID NO: 2706650 - DNA, 25 bp, Homo sapien
tgttccactaaaggacaagcacagc

SEQ ID NO: 2706651 - DNA, 25 bp, Homo sapien
acctttgtctgtggtggcttcagtc

SEQ ID NO: 2706652 - DNA, 25 bp, Homo sapien
aaataactttacacctgccatgcaa

SEQ ID NO: 2706653 - DNA, 25 bp, Homo sapien
cagttaagccgcagaaatcactttc

SEQ ID NO: 2706654 - DNA, 25 bp, Homo sapien
tggcaaagcactcccatgtacattg

SEQ ID NO: 2706655 - DNA, 25 bp, Homo sapien
gacaacatcagttatggccatgcac

SEQ ID NO: 2706656 - DNA, 25 bp, Homo sapien
ctagctagctctcggcagcctcgag

SEQ ID NO: 2706657 - DNA, 25 bp, Homo sapien
gctagctagctctcggcagcctcga

SEQ ID NO: 2706658 - DNA, 25 bp, Homo sapien
tcgctagctagctctcggcagcctc

SEQ ID NO: 2706659 - DNA, 25 bp, Homo sapien
cttcgctagctagctctcggcagcc

SEQ ID NO: 2706660 - DNA, 25 bp, Homo sapien
cggcgccgggaagcgagcgagcggg

SEQ ID NO: 2706661 - DNA, 25 bp, Homo sapien
gcgggcgagcgagtgcagacgccgc

SEQ ID NO: 2706662 - DNA, 25 bp, Homo sapien
gagcgggcgagcgagtgcagacgcc

SEQ ID NO: 2706663 - DNA, 25 bp, Homo sapien
gagcgagtgcagacgccgcctcccc

SEQ ID NO: 2706664 - DNA, 25 bp, Homo sapien
tccgggcgcgggcaacggagcggat

SEQ ID NO: 2706665 - DNA, 25 bp, Homo sapien
gcaagactcccgaaccgagctcgga

SEQ ID NO: 2706666 - DNA, 25 bp, Homo sapien
ggccgccggctccacaggtgtggcg

SEQ ID NO: 2706667 - DNA, 25 bp, Homo sapien
aggtgtggcgctggctcactccgcg

SEQ ID NO: 2706668 - DNA, 25 bp, Homo sapien
tgagcgcgcttatgagtgacttccc

SEQ ID NO: 2706669 - DNA, 25 bp, Homo sapien
gtctctcggaagtgcggactatcga

SEQ ID NO: 2706670 - DNA, 25 bp, Homo sapien
tccagctctgcttcgtgcgacttga

SEQ ID NO: 2706671 - DNA, 25 bp, Homo sapien
ggactatcgaggcagcagtcgctga

SEQ ID NO: 2706672 - DNA, 25 bp, Homo sapien
tccccgaggggctcgggacactcac

SEQ ID NO: 2706673 - DNA, 25 bp, Homo sapien
gtccccgaggggctcgggacactca

SEQ ID NO: 2706674 - DNA, 25 bp, Homo sapien
cagttcctcccgccccggagccgcg

SEQ ID NO: 2706675 - DNA, 25 bp, Homo sapien
cggagccgcgtccccgaggggctcg

SEQ ID NO: 2706676 - DNA, 25 bp, Homo sapien
gtaacaatgatctacctgaactttg

SEQ ID NO: 2706677 - DNA, 25 bp, Homo sapien
agatctataaagaatttgcatctcc

SEQ ID NO: 2706678 - DNA, 25 bp, Homo sapien
gcatgtttctcctttacgggatcta

SEQ ID NO: 2706679 - DNA, 25 bp, Homo sapien
tgcatctccattgccagcatctcat

SEQ ID NO: 2706680 - DNA, 25 bp, Homo sapien
tacgcttggtctctacacagctgcc

SEQ ID NO: 2706681 - DNA, 25 bp, Homo sapien
tactctagtctagggctctggagga

SEQ ID NO: 2706682 - DNA, 25 bp, Homo sapien
taaaaggtaaaacgaggctcactca

SEQ ID NO: 2706683 - DNA, 25 bp, Homo sapien
tgagtacgatcatggcacagccttc

SEQ ID NO: 2706684 - DNA, 25 bp, Homo sapien
tgcaaaggacctaaacaacagatgt

SEQ ID NO: 2706685 - DNA, 25 bp, Homo sapien
ggagccagcaaccattccacttgaa

SEQ ID NO: 2706686 - DNA, 25 bp, Homo sapien
cagtgtcagtgtctaacagaagggt

SEQ ID NO: 2706687 - DNA, 25 bp, Homo sapien
ttatcaaccggctacaaggatgcaa

SEQ ID NO: 2706688 - DNA, 25 bp, Homo sapien
agcggtatcttttcaaaccatataa

SEQ ID NO: 2706689 - DNA, 25 bp, Homo sapien
cagcggtatcttttcaaaccatata

SEQ ID NO: 2706690 - DNA, 25 bp, Homo sapien
tgcccaccgggaagcttctatgata

SEQ ID NO: 2706691 - DNA, 25 bp, Homo sapien
cctagaccagagtcacggtctccgg

SEQ ID NO: 2706692 - DNA, 25 bp, Homo sapien
gtctccggtcacagaaggcagaaga

SEQ ID NO: 2706693 - DNA, 25 bp, Homo sapien
gataggcaacgtgtcccctagacca

SEQ ID NO: 2706694 - DNA, 25 bp, Homo sapien
ctggccaatgtagccttctacatca

SEQ ID NO: 2706695 - DNA, 25 bp, Homo sapien
gattgcccaggagcaaaagtttcct

SEQ ID NO: 2706696 - DNA, 25 bp, Homo sapien
caggccaagctcacggaacaactgg

SEQ ID NO: 2706697 - DNA, 25 bp, Homo sapien
ctgctgaagggttcccgctcacagg

SEQ ID NO: 2706698 - DNA, 25 bp, Homo sapien
caactggatcccaggcgtggagcca

SEQ ID NO: 2706699 - DNA, 25 bp, Homo sapien
ctgctgggtaagtcgcccacggtaa

SEQ ID NO: 2706700 - DNA, 25 bp, Homo sapien
tgctgggtaagtcgcccacggtaaa

SEQ ID NO: 2706701 - DNA, 25 bp, Homo sapien
tctgggcagcttcggtcagaaggcc

SEQ ID NO: 2706702 - DNA, 25 bp, Homo sapien
gagcatctggatgccgaagcctacg

SEQ ID NO: 2706703 - DNA, 25 bp, Homo sapien
tgtggcaagtcctggccagcagaca

SEQ ID NO: 2706704 - DNA, 25 bp, Homo sapien
aagcctacggatgctgaggcactcg

SEQ ID NO: 2706705 - DNA, 25 bp, Homo sapien
tctcattgtttatgtccaaaataca

SEQ ID NO: 2706706 - DNA, 25 bp, Homo sapien
aagccatccatcttatccacgtctc

SEQ ID NO: 2706707 - DNA, 25 bp, Homo sapien
tccacgtctcattgtttatgtccaa

SEQ ID NO: 2706708 - DNA, 25 bp, Homo sapien
tcagtggctttgtcagctgtgggct

SEQ ID NO: 2706709 - DNA, 25 bp, Homo sapien
ttctgtgacactctggtaatgtatc

SEQ ID NO: 2706710 - DNA, 25 bp, Homo sapien
tcttctctttgtccccaaggttctg

SEQ ID NO: 2706711 - DNA, 25 bp, Homo sapien
ttattctgtgacactctggtaatgt

SEQ ID NO: 2706712 - DNA, 25 bp, Homo sapien
gacactctggtaatgtatcttctct

SEQ ID NO: 2706713 - DNA, 25 bp, Homo sapien
taatctctctatgcttccgttgcta

SEQ ID NO: 2706714 - DNA, 25 bp, Homo sapien
ggttcaaattctgacaacagcactt

SEQ ID NO: 2706715 - DNA, 25 bp, Homo sapien
taagggctgggctaacaatttatag

SEQ ID NO: 2706716 - DNA, 25 bp, Homo sapien
cacgcaaaagggttggcattagatc

SEQ ID NO: 2706717 - DNA, 25 bp, Homo sapien
agatcactaaggttccaggtggtca

SEQ ID NO: 2706718 - DNA, 25 bp, Homo sapien
gatcactaaggttccaggtggtcat

SEQ ID NO: 2706719 - DNA, 25 bp, Homo sapien
aagatcactaaggttccaggtggtc

SEQ ID NO: 2706720 - DNA, 25 bp, Homo sapien
caagatcactaaggttccaggtggt

SEQ ID NO: 2706721 - DNA, 25 bp, Homo sapien
ctgataaaagtaaagcaatagagac

SEQ ID NO: 2706722 - DNA, 25 bp, Homo sapien
ttcaccgaaagtcaactggcccagc

SEQ ID NO: 2706723 - DNA, 25 bp, Homo sapien
taagagtcagccatcagtccatttc

SEQ ID NO: 2706724 - DNA, 25 bp, Homo sapien
ggaaacacatcaattcaccgaaagt

SEQ ID NO: 2706725 - DNA, 25 bp, Homo sapien
gtgtgaagattaggaaacacatcaa

SEQ ID NO: 2706726 - DNA, 25 bp, Homo sapien
ttttttcaaatcctccaacgctgct

SEQ ID NO: 2706727 - DNA, 25 bp, Homo sapien
attttttcaaatcctccaacgctgc

SEQ ID NO: 2706728 - DNA, 25 bp, Homo sapien
gattttttcaaatcctccaacgctg

SEQ ID NO: 2706729 - DNA, 25 bp, Homo sapien
cccatggatctcatgtctttcctca

SEQ ID NO: 2706730 - DNA, 25 bp, Homo sapien
aaaggggcatccagtgtctttccca

SEQ ID NO: 2706731 - DNA, 25 bp, Homo sapien
ttcccatggatctcatgtctttcct

SEQ ID NO: 2706732 - DNA, 25 bp, Homo sapien
aaggggcatccagtgtctttcccat

SEQ ID NO: 2706733 - DNA, 25 bp, Homo sapien
ccactctttttctcaaaaagatgat

SEQ ID NO: 2706734 - DNA, 25 bp, Homo sapien
actctttttctcaaaaagatgattg

SEQ ID NO: 2706735 - DNA, 25 bp, Homo sapien
caaaaagatgattggggtttttatg

SEQ ID NO: 2706736 - DNA, 25 bp, Homo sapien
ctttttctcaaaaagatgattgggg

SEQ ID NO: 2706737 - DNA, 25 bp, Homo sapien
ggcaatccatctccttggtaacagt

SEQ ID NO: 2706738 - DNA, 25 bp, Homo sapien
ttgaacacaagagcagccaaaggcg

SEQ ID NO: 2706739 - DNA, 25 bp, Homo sapien
aaatgcaatgtttccctaagggctg

SEQ ID NO: 2706740 - DNA, 25 bp, Homo sapien
tagacataagtatcaacagcacgga

SEQ ID NO: 2706741 - DNA, 25 bp, Homo sapien
tattagcaacaacaaaggacaggag

SEQ ID NO: 2706742 - DNA, 25 bp, Homo sapien
ctattagcaacaacaaaggacagga

SEQ ID NO: 2706743 - DNA, 25 bp, Homo sapien
ctctaactgctccagggtgaactgc

SEQ ID NO: 2706744 - DNA, 25 bp, Homo sapien
tagatgacgggacctttcgtgaaag

SEQ ID NO: 2706745 - DNA, 25 bp, Homo sapien
aaatgtttggctgctatgcaaccag

SEQ ID NO: 2706746 - DNA, 25 bp, Homo sapien
tcatcacagagatttccgtccggct

SEQ ID NO: 2706747 - DNA, 25 bp, Homo sapien
ctgctattaaagcccaagaacacat

SEQ ID NO: 2706748 - DNA, 25 bp, Homo sapien
acacatccccagatgccaccagagt

SEQ ID NO: 2706749 - DNA, 25 bp, Homo sapien
ttaaagcccaagaacacatccccag

SEQ ID NO: 2706750 - DNA, 25 bp, Homo sapien
gctattaaagcccaagaacacatcc

SEQ ID NO: 2706751 - DNA, 25 bp, Homo sapien
tatcctgaaatgagtcaactgctgg

SEQ ID NO: 2706752 - DNA, 25 bp, Homo sapien
caaagccctcaccacatacagttgg

SEQ ID NO: 2706753 - DNA, 25 bp, Homo sapien
ccaaccttgaggacgggcacagtat

SEQ ID NO: 2706754 - DNA, 25 bp, Homo sapien
tgtcgtccaggcatcactctagatg

SEQ ID NO: 2706755 - DNA, 25 bp, Homo sapien
gcagctgggctagcaatcaaaagat

SEQ ID NO: 2706756 - DNA, 25 bp, Homo sapien
tcattgtcaatgtccagcctgctcc

SEQ ID NO: 2706757 - DNA, 25 bp, Homo sapien
ggagctcaaccctagtcccaaacag

SEQ ID NO: 2706758 - DNA, 25 bp, Homo sapien
aacagatggaccatgctctaggcag

SEQ ID NO: 2706759 - DNA, 25 bp, Homo sapien
tgtcccttcaaaaagaacaagcact

SEQ ID NO: 2706760 - DNA, 25 bp, Homo sapien
caaatcgctttatgtaggacacaaa

SEQ ID NO: 2706761 - DNA, 25 bp, Homo sapien
tgcaacttgcctgtccactcaggta

SEQ ID NO: 2706762 - DNA, 25 bp, Homo sapien
tatgtccttgcataccacaaatcgc

SEQ ID NO: 2706763 - DNA, 25 bp, Homo sapien
tgcttcagcgctggcaatattactg

SEQ ID NO: 2706764 - DNA, 25 bp, Homo sapien
ggttgaccacagcacatttcacagt

SEQ ID NO: 2706765 - DNA, 25 bp, Homo sapien
cttctactctatgccacccaggatg

SEQ ID NO: 2706766 - DNA, 25 bp, Homo sapien
taagcaaagtccgtatgcactggct

SEQ ID NO: 2706767 - DNA, 25 bp, Homo sapien
tcatactacaggaagcgaagaggaa

SEQ ID NO: 2706768 - DNA, 25 bp, Homo sapien
ggatgtctgcccgaacaaccctcat

SEQ ID NO: 2706769 - DNA, 25 bp, Homo sapien
aaccctcatactacaggaagcgaag

SEQ ID NO: 2706770 - DNA, 25 bp, Homo sapien
cgaacaaccctcatactacaggaag

SEQ ID NO: 2706771 - DNA, 25 bp, Homo sapien
actgtcaagggctgaattgaggccc

SEQ ID NO: 2706772 - DNA, 25 bp, Homo sapien
tattaaactagtaatggtggccacc

SEQ ID NO: 2706773 - DNA, 25 bp, Homo sapien
gaaaagaccgtgtgaagatactggg

SEQ ID NO: 2706774 - DNA, 25 bp, Homo sapien
agggcaggccctaatacaatatggt

SEQ ID NO: 2706775 - DNA, 25 bp, Homo sapien
gcagggacatctcaataaatgtgtg

SEQ ID NO: 2706776 - DNA, 25 bp, Homo sapien
gaatccatgaccctcatcacttagc

SEQ ID NO: 2706777 - DNA, 25 bp, Homo sapien
gtgtgcagtgaataagaatccatga

SEQ ID NO: 2706778 - DNA, 25 bp, Homo sapien
gtggcagggacatctcaataaatgt

SEQ ID NO: 2706779 - DNA, 25 bp, Homo sapien
ggaagcctgccaatacccaagctgt

SEQ ID NO: 2706780 - DNA, 25 bp, Homo sapien
agtagatttcaggttctgtccagga

SEQ ID NO: 2706781 - DNA, 25 bp, Homo sapien
ccttaaatacaagcccagaacctgt

SEQ ID NO: 2706782 - DNA, 25 bp, Homo sapien
catggcacggtggaaggaaagatac

SEQ ID NO: 2706783 - DNA, 25 bp, Homo sapien
tcagagtgacagcagacggtgcagc

SEQ ID NO: 2706784 - DNA, 25 bp, Homo sapien
agagtgacagcagacggtgcagcca

SEQ ID NO: 2706785 - DNA, 25 bp, Homo sapien
tcctgtgccgtcagtccctgacccc

SEQ ID NO: 2706786 - DNA, 25 bp, Homo sapien
gagtgacagcagacggtgcagccac

SEQ ID NO: 2706787 - DNA, 25 bp, Homo sapien
tgtatgcaacaccagtcagggcttc

SEQ ID NO: 2706788 - DNA, 25 bp, Homo sapien
tttcgacttggactagggtgacctc

SEQ ID NO: 2706789 - DNA, 25 bp, Homo sapien
gtgacctgtctaccccatcagtgag

SEQ ID NO: 2706790 - DNA, 25 bp, Homo sapien
ggcagaaaaccagtccatagaggca

SEQ ID NO: 2706791 - DNA, 25 bp, Homo sapien
cacaggatcatagcactctttgggt

SEQ ID NO: 2706792 - DNA, 25 bp, Homo sapien
tatggtagattgctaatggccacgc

SEQ ID NO: 2706793 - DNA, 25 bp, Homo sapien
gtggtccccgccctgaatgtagctg

SEQ ID NO: 2706794 - DNA, 25 bp, Homo sapien
gaaccaggtggaacagagtctcagt

SEQ ID NO: 2706795 - DNA, 25 bp, Homo sapien
ctgaatactctcttacacggggtat

SEQ ID NO: 2706796 - DNA, 25 bp, Homo sapien
acactcagattgctatctgccaata

SEQ ID NO: 2706797 - DNA, 25 bp, Homo sapien
caaacactcagattgctatctgcca

SEQ ID NO: 2706798 - DNA, 25 bp, Homo sapien
ctcagattgctatctgccaatatcc

SEQ ID NO: 2706799 - DNA, 25 bp, Homo sapien
ctgcaaacactcagattgctatctg

SEQ ID NO: 2706800 - DNA, 25 bp, Homo sapien
tttatattgacaggatgtcatcatg

SEQ ID NO: 2706801 - DNA, 25 bp, Homo sapien
atttttatattgacaggatgtcatc

SEQ ID NO: 2706802 - DNA, 25 bp, Homo sapien
tttttatattgacaggatgtcatca

SEQ ID NO: 2706803 - DNA, 25 bp, Homo sapien
tatattgacaggatgtcatcatgtt

SEQ ID NO: 2706804 - DNA, 25 bp, Homo sapien
ctgggccacaccaaaagacattccc

SEQ ID NO: 2706805 - DNA, 25 bp, Homo sapien
acttttaatctccaagaacaagtca

SEQ ID NO: 2706806 - DNA, 25 bp, Homo sapien
ataacttttaatctccaagaacaag

SEQ ID NO: 2706807 - DNA, 25 bp, Homo sapien
ttttaatctccaagaacaagtcaag

SEQ ID NO: 2706808 - DNA, 25 bp, Homo sapien
ttaatctccaagaacaagtcaagtt

SEQ ID NO: 2706809 - DNA, 25 bp, Homo sapien
tacaaagcagctgggtctcagaatg

SEQ ID NO: 2706810 - DNA, 25 bp, Homo sapien
ccttccatgggagcgtagagtagag

SEQ ID NO: 2706811 - DNA, 25 bp, Homo sapien
catttccagggtctactcggtctca

SEQ ID NO: 2706812 - DNA, 25 bp, Homo sapien
gaaggataccacaagctgaaggaga

SEQ ID NO: 2706813 - DNA, 25 bp, Homo sapien
taggtgcccacgaaatccccaggct

SEQ ID NO: 2706814 - DNA, 25 bp, Homo sapien
cctcctcataggtgcccacgaaatc

SEQ ID NO: 2706815 - DNA, 25 bp, Homo sapien
ttccagtccaggcaggaactcatgc

SEQ ID NO: 2706816 - DNA, 25 bp, Homo sapien
gctccagcaaggagtaccccttgcc

SEQ ID NO: 2706817 - DNA, 25 bp, Homo sapien
atatcagagaacaccttgaccaagc

SEQ ID NO: 2706818 - DNA, 25 bp, Homo sapien
gccactaggtggcaatcaactatat

SEQ ID NO: 2706819 - DNA, 25 bp, Homo sapien
ggtggcaatcaactatatcagagaa

SEQ ID NO: 2706820 - DNA, 25 bp, Homo sapien
ctatatcagagaacaccttgaccaa

SEQ ID NO: 2706821 - DNA, 25 bp, Homo sapien
gaggcttctgcacaggggcacccat

SEQ ID NO: 2706822 - DNA, 25 bp, Homo sapien
cacaacggggcctttgtgaggcttc

SEQ ID NO: 2706823 - DNA, 25 bp, Homo sapien
tttgtgaggcttctgcacaggggca

SEQ ID NO: 2706824 - DNA, 25 bp, Homo sapien
ctggtcatgcacaacggggcctttg

SEQ ID NO: 2706825 - DNA, 25 bp, Homo sapien
gctctgctctacaccaaaagaaggc

SEQ ID NO: 2706826 - DNA, 25 bp, Homo sapien
gaggaggctacaggtagacacaaga

SEQ ID NO: 2706827 - DNA, 25 bp, Homo sapien
gaaacagatgcacccaaaagccaga

SEQ ID NO: 2706828 - DNA, 25 bp, Homo sapien
gagatagctgcggtttgtccaaagc

SEQ ID NO: 2706829 - DNA, 25 bp, Homo sapien
agaacaaagccccggcaacattttg

SEQ ID NO: 2706830 - DNA, 25 bp, Homo sapien
acaaagccccggcaacattttgtat

SEQ ID NO: 2706831 - DNA, 25 bp, Homo sapien
aggagaacaaagccccggcaacatt

SEQ ID NO: 2706832 - DNA, 25 bp, Homo sapien
agccccggcaacattttgtattagg

SEQ ID NO: 2706833 - DNA, 25 bp, Homo sapien
aaattcatttaaggaatctgcaaac

SEQ ID NO: 2706834 - DNA, 25 bp, Homo sapien
tgcaaacttccgcttcgctgaagac

SEQ ID NO: 2706835 - DNA, 25 bp, Homo sapien
gtttctgcatctcctatgcactgaa

SEQ ID NO: 2706836 - DNA, 25 bp, Homo sapien
aaacttccgcttcgctgaagacaaa

SEQ ID NO: 2706837 - DNA, 25 bp, Homo sapien
tgaggatactcgagacccttgagcc

SEQ ID NO: 2706838 - DNA, 25 bp, Homo sapien
taagcattacgtgcaatggccctga

SEQ ID NO: 2706839 - DNA, 25 bp, Homo sapien
tgtcatggcgttgcgtcagaaccca

SEQ ID NO: 2706840 - DNA, 25 bp, Homo sapien
tacatgaacagtcgtctttgccaaa

SEQ ID NO: 2706841 - DNA, 25 bp, Homo sapien
catccgtatccgttcatcttcaaga

SEQ ID NO: 2706842 - DNA, 25 bp, Homo sapien
atcttcaagattcctgaggacagtg

SEQ ID NO: 2706843 - DNA, 25 bp, Homo sapien
tccgtatccgttcatcttcaagatt

SEQ ID NO: 2706844 - DNA, 25 bp, Homo sapien
atccgtatccgttcatcttcaagat

SEQ ID NO: 2706845 - DNA, 25 bp, Homo sapien
tctacaaagatgaggcttgctgaag

SEQ ID NO: 2706846 - DNA, 25 bp, Homo sapien
tactatctgggaccaagagtagccc

SEQ ID NO: 2706847 - DNA, 25 bp, Homo sapien
taaagttatccaccagagtaatcct

SEQ ID NO: 2706848 - DNA, 25 bp, Homo sapien
gagctcaaaacattcaaatggcaga

SEQ ID NO: 2706849 - DNA, 25 bp, Homo sapien
aaatactaactcagccaagaatcag

SEQ ID NO: 2706850 - DNA, 25 bp, Homo sapien
gagaaagtggtctttccgtagggca

SEQ ID NO: 2706851 - DNA, 25 bp, Homo sapien
ttctggttcaggcaccagcagtgag

SEQ ID NO: 2706852 - DNA, 25 bp, Homo sapien
tttccctttcttaggcaccagcaca

SEQ ID NO: 2706853 - DNA, 25 bp, Homo sapien
attgttcccttaccacaggccatag

SEQ ID NO: 2706854 - DNA, 25 bp, Homo sapien
tgttcccttaccacaggccatagca

SEQ ID NO: 2706855 - DNA, 25 bp, Homo sapien
gtcattgttcccttaccacaggcca

SEQ ID NO: 2706856 - DNA, 25 bp, Homo sapien
tccagtcattgttcccttaccacag

SEQ ID NO: 2706857 - DNA, 25 bp, Homo sapien
cttggcagccccgatctgttccttt

SEQ ID NO: 2706858 - DNA, 25 bp, Homo sapien
ggcagccccgatctgttcctttcga

SEQ ID NO: 2706859 - DNA, 25 bp, Homo sapien
aagggagtgatgagcacctcgctgg

SEQ ID NO: 2706860 - DNA, 25 bp, Homo sapien
caagggagtgatgagcacctcgctg

SEQ ID NO: 2706861 - DNA, 25 bp, Homo sapien
gacagattgtcacaggcagtctgcc

SEQ ID NO: 2706862 - DNA, 25 bp, Homo sapien
ggcacttggctgataaacgggatca

SEQ ID NO: 2706863 - DNA, 25 bp, Homo sapien
gagcctaggacaatgtgcctccaaa

SEQ ID NO: 2706864 - DNA, 25 bp, Homo sapien
tgtggagcctgaacccatagggatg

SEQ ID NO: 2706865 - DNA, 25 bp, Homo sapien
gaaaaagagtaacacgttgcaggaa

SEQ ID NO: 2706866 - DNA, 25 bp, Homo sapien
cacgttgcaggaataaaagcagcct

SEQ ID NO: 2706867 - DNA, 25 bp, Homo sapien
tcagaacacagatgacgactcagct

SEQ ID NO: 2706868 - DNA, 25 bp, Homo sapien
gacgactcagctcctacttttcagg

SEQ ID NO: 2706869 - DNA, 25 bp, Homo sapien
tggaagacaaattcaagtgtttttc

SEQ ID NO: 2706870 - DNA, 25 bp, Homo sapien
ttctaagatgccacaatacttttct

SEQ ID NO: 2706871 - DNA, 25 bp, Homo sapien
gtttttctaagatgccacaatactt

SEQ ID NO: 2706872 - DNA, 25 bp, Homo sapien
aagtgtttttctaagatgccacaat

SEQ ID NO: 2706873 - DNA, 25 bp, Homo sapien
gcagcccaacaaggaggtggtcatc

SEQ ID NO: 2706874 - DNA, 25 bp, Homo sapien
tttctagcaaagagcaaccagcaca

SEQ ID NO: 2706875 - DNA, 25 bp, Homo sapien
agtgtcttccaccttgacaggcggg

SEQ ID NO: 2706876 - DNA, 25 bp, Homo sapien
tcaaatcactgataagaggcaggaa

SEQ ID NO: 2706877 - DNA, 25 bp, Homo sapien
gtacaatggcgcgaattcggctcac

SEQ ID NO: 2706878 - DNA, 25 bp, Homo sapien
tacaatggcgcgaattcggctcacc

SEQ ID NO: 2706879 - DNA, 25 bp, Homo sapien
accgcgccaggccttgtatttttca

SEQ ID NO: 2706880 - DNA, 25 bp, Homo sapien
gccaccgcgccaggccttgtatttt

SEQ ID NO: 2706881 - DNA, 25 bp, Homo sapien
gatcttcttgtagcgcaaatccaac

SEQ ID NO: 2706882 - DNA, 25 bp, Homo sapien
tgcttagacaactgggctgatacgc

SEQ ID NO: 2706883 - DNA, 25 bp, Homo sapien
tctgcctgggcttgccaactgacac

SEQ ID NO: 2706884 - DNA, 25 bp, Homo sapien
caacacgcttacacggagagatgca

SEQ ID NO: 2706885 - DNA, 25 bp, Homo sapien
ttcatagaaatgctgccggaccagg

SEQ ID NO: 2706886 - DNA, 25 bp, Homo sapien
accttgaagacatattccagggata

SEQ ID NO: 2706887 - DNA, 25 bp, Homo sapien
tgctgccggaccaggtccacttggc

SEQ ID NO: 2706888 - DNA, 25 bp, Homo sapien
cttgaagacatattccagggatact

SEQ ID NO: 2706889 - DNA, 25 bp, Homo sapien
aatggttaactgtgtcttgaagtcc

SEQ ID NO: 2706890 - DNA, 25 bp, Homo sapien
cgtaaccatggtgatagaaagtgaa

SEQ ID NO: 2706891 - DNA, 25 bp, Homo sapien
gaaatccttggccagttcgtaacca

SEQ ID NO: 2706892 - DNA, 25 bp, Homo sapien
ttgaagtccccgaaatccttggcca

SEQ ID NO: 2706893 - DNA, 25 bp, Homo sapien
agtgattccacttctgatctagtgc

SEQ ID NO: 2706894 - DNA, 25 bp, Homo sapien
ttctgatctagtgccttcaaagcga

SEQ ID NO: 2706895 - DNA, 25 bp, Homo sapien
cacttctgatctagtgccttcaaag

SEQ ID NO: 2706896 - DNA, 25 bp, Homo sapien
gattccacttctgatctagtgcctt

SEQ ID NO: 2706897 - DNA, 25 bp, Homo sapien
ggatcttctcactgggcaaagaggg

SEQ ID NO: 2706898 - DNA, 25 bp, Homo sapien
cagccataaggcatgaacttgtgag

SEQ ID NO: 2706899 - DNA, 25 bp, Homo sapien
gaatgtgctatcctaaacggcacgg

SEQ ID NO: 2706900 - DNA, 25 bp, Homo sapien
tatcccatcggaaagctattaggag

SEQ ID NO: 2706901 - DNA, 25 bp, Homo sapien
tggaatcccgttgatatgtacagta

SEQ ID NO: 2706902 - DNA, 25 bp, Homo sapien
gtttggaatcccgttgatatgtaca

SEQ ID NO: 2706903 - DNA, 25 bp, Homo sapien
ggtgatttgtttggaatcccgttga

SEQ ID NO: 2706904 - DNA, 25 bp, Homo sapien
ggtcaaatggtaccatggtgatttg

SEQ ID NO: 2706905 - DNA, 25 bp, Homo sapien
aaactgagagggctattgtgaccat

SEQ ID NO: 2706906 - DNA, 25 bp, Homo sapien
ctcccatggagaggcagggtctacc

SEQ ID NO: 2706907 - DNA, 25 bp, Homo sapien
tacaatgagactttgatgcccctcc

SEQ ID NO: 2706908 - DNA, 25 bp, Homo sapien
accaaatggcgaggccctgggagta

SEQ ID NO: 2706909 - DNA, 25 bp, Homo sapien
aaagcaaaacctcttctcaatggag

SEQ ID NO: 2706910 - DNA, 25 bp, Homo sapien
ccgccgtgtgcaggatttgaggata

SEQ ID NO: 2706911 - DNA, 25 bp, Homo sapien
aatggagtctgttttccgccgtgtg

SEQ ID NO: 2706912 - DNA, 25 bp, Homo sapien
tttgaggataactgattcatcttct

SEQ ID NO: 2706913 - DNA, 25 bp, Homo sapien
taaatataaccatcccctctttcac

SEQ ID NO: 2706914 - DNA, 25 bp, Homo sapien
taaacttgcattttgatcctctgcc

SEQ ID NO: 2706915 - DNA, 25 bp, Homo sapien
ttcacttccacatttcctaggtgct

SEQ ID NO: 2706916 - DNA, 25 bp, Homo sapien
cacatttcctaggtgctaaacttgc

SEQ ID NO: 2706917 - DNA, 25 bp, Homo sapien
gacttcagcatatgattttggcagg

SEQ ID NO: 2706918 - DNA, 25 bp, Homo sapien
gggacacaatttaatctataactag

SEQ ID NO: 2706919 - DNA, 25 bp, Homo sapien
ttgattatctctatcaagtaatctc

SEQ ID NO: 2706920 - DNA, 25 bp, Homo sapien
tttacaaggacaatggtaatatcgc

SEQ ID NO: 2706921 - DNA, 25 bp, Homo sapien
cttctgccttcatgttaacacggta

SEQ ID NO: 2706922 - DNA, 25 bp, Homo sapien
caagggttcctcctgaggtctgtga

SEQ ID NO: 2706923 - DNA, 25 bp, Homo sapien
taggtgcatcacctcgacttctgcc

SEQ ID NO: 2706924 - DNA, 25 bp, Homo sapien
gctgccaacctttggtgttcattgg

SEQ ID NO: 2706925 - DNA, 25 bp, Homo sapien
tacttgtctcccagcgttaccagga

SEQ ID NO: 2706926 - DNA, 25 bp, Homo sapien
cacggcagactagcaactgaactat

SEQ ID NO: 2706927 - DNA, 25 bp, Homo sapien
ttaaagaacagtagcatagagcagt

SEQ ID NO: 2706928 - DNA, 25 bp, Homo sapien
tcctagatgtataaccacggcagac

SEQ ID NO: 2706929 - DNA, 25 bp, Homo sapien
aaaggagggacatggatatgaaacc

SEQ ID NO: 2706930 - DNA, 25 bp, Homo sapien
atggatatgaaaccagtgccacatg

SEQ ID NO: 2706931 - DNA, 25 bp, Homo sapien
gacatggatatgaaaccagtgccac

SEQ ID NO: 2706932 - DNA, 25 bp, Homo sapien
gggacatggatatgaaaccagtgcc

SEQ ID NO: 2706933 - DNA, 25 bp, Homo sapien
cagagcctccggtcctcttccgaca

SEQ ID NO: 2706934 - DNA, 25 bp, Homo sapien
tccggtcctcttccgacaaagcttg

SEQ ID NO: 2706935 - DNA, 25 bp, Homo sapien
aggttcccggccatccatggcttcc

SEQ ID NO: 2706936 - DNA, 25 bp, Homo sapien
ggtcctcttccgacaaagcttgcat

SEQ ID NO: 2706937 - DNA, 25 bp, Homo sapien
actcagggccttcattcttgctcta

SEQ ID NO: 2706938 - DNA, 25 bp, Homo sapien
tcagggccttcattcttgctctact

SEQ ID NO: 2706939 - DNA, 25 bp, Homo sapien
ctcagggccttcattcttgctctac

SEQ ID NO: 2706940 - DNA, 25 bp, Homo sapien
agggccttcattcttgctctacttc

SEQ ID NO: 2706941 - DNA, 25 bp, Homo sapien
tgcagaagccatgccttaggacaga

SEQ ID NO: 2706942 - DNA, 25 bp, Homo sapien
gcagggatcatattaccaggctcac

SEQ ID NO: 2706943 - DNA, 25 bp, Homo sapien
gacgactacagtgattccagggctc

SEQ ID NO: 2706944 - DNA, 25 bp, Homo sapien
caagattacatcacccagctgaggc

SEQ ID NO: 2706945 - DNA, 25 bp, Homo sapien
tcaaaggtagaaatgtgtatctggt

SEQ ID NO: 2706946 - DNA, 25 bp, Homo sapien
aaatgtgtatctggttttgagggtt

SEQ ID NO: 2706947 - DNA, 25 bp, Homo sapien
tagaaatgtgtatctggttttgagg

SEQ ID NO: 2706948 - DNA, 25 bp, Homo sapien
ggtagaaatgtgtatctggttttga

SEQ ID NO: 2706949 - DNA, 25 bp, Homo sapien
cagggatcaacaaactatgtatggc

SEQ ID NO: 2706950 - DNA, 25 bp, Homo sapien
tttctctcagaggaagatgaccttc

SEQ ID NO: 2706951 - DNA, 25 bp, Homo sapien
cactagacttacagatcagggatca

SEQ ID NO: 2706952 - DNA, 25 bp, Homo sapien
caaagttagtagctgcaatcgcgac

SEQ ID NO: 2706953 - DNA, 25 bp, Homo sapien
ctacgtgtctatccctctgtcaata

SEQ ID NO: 2706954 - DNA, 25 bp, Homo sapien
tgatctacgtgtctatccctctgtc

SEQ ID NO: 2706955 - DNA, 25 bp, Homo sapien
cgtgtctatccctctgtcaatacca

SEQ ID NO: 2706956 - DNA, 25 bp, Homo sapien
gatctacgtgtctatccctctgtca

SEQ ID NO: 2706957 - DNA, 25 bp, Homo sapien
ccttgccggcattcagtattttcac

SEQ ID NO: 2706958 - DNA, 25 bp, Homo sapien
ttatgggttgtgtatgctttccgca

SEQ ID NO: 2706959 - DNA, 25 bp, Homo sapien
cccgctagcagtgtacagaagatcc

SEQ ID NO: 2706960 - DNA, 25 bp, Homo sapien
cattctagaaggtgatagttcatag

SEQ ID NO: 2706961 - DNA, 25 bp, Homo sapien
caaagtccacaaagacgaaaacaga

SEQ ID NO: 2706962 - DNA, 25 bp, Homo sapien
tcgggcacggtagagaaaggtgaga

SEQ ID NO: 2706963 - DNA, 25 bp, Homo sapien
ctagggggttagagctcgggcacgg

SEQ ID NO: 2706964 - DNA, 25 bp, Homo sapien
attttgttcagccccaaagtccaca

SEQ ID NO: 2706965 - DNA, 25 bp, Homo sapien
aagaataagatcatgccccttgggg

SEQ ID NO: 2706966 - DNA, 25 bp, Homo sapien
tacttgctgaatgcttactctgcca

SEQ ID NO: 2706967 - DNA, 25 bp, Homo sapien
tcaggtctcagataacgaaggcaac

SEQ ID NO: 2706968 - DNA, 25 bp, Homo sapien
taagacctgagtaagtgccaccaac

SEQ ID NO: 2706969 - DNA, 25 bp, Homo sapien
tactacccatcaaagtgactgctgg

SEQ ID NO: 2706970 - DNA, 25 bp, Homo sapien
gcattactgtataggcacacagccc

SEQ ID NO: 2706971 - DNA, 25 bp, Homo sapien
acagaagttatcacacctgcccaga

SEQ ID NO: 2706972 - DNA, 25 bp, Homo sapien
ggcaacacaccacagtagtacttgt

SEQ ID NO: 2706973 - DNA, 25 bp, Homo sapien
tctagagagaggatacagggagtcc

SEQ ID NO: 2706974 - DNA, 25 bp, Homo sapien
caaaaatgctacacaacagaagggt

SEQ ID NO: 2706975 - DNA, 25 bp, Homo sapien
caagccgttgttcataatgatgtca

SEQ ID NO: 2706976 - DNA, 25 bp, Homo sapien
taggaggctctacaaacccaggcat

SEQ ID NO: 2706977 - DNA, 25 bp, Homo sapien
gacttctccctcacattagagctga

SEQ ID NO: 2706978 - DNA, 25 bp, Homo sapien
ttggccataaccactagaccgcacg

SEQ ID NO: 2706979 - DNA, 25 bp, Homo sapien
taaaactggcatcataagctctctc

SEQ ID NO: 2706980 - DNA, 25 bp, Homo sapien
gagcccagttcagcaaatccaaaga

SEQ ID NO: 2706981 - DNA, 25 bp, Homo sapien
gaccgcacgtttgcactattttcca

SEQ ID NO: 2706982 - DNA, 25 bp, Homo sapien
gaactggtgagtgatatggctcggg

SEQ ID NO: 2706983 - DNA, 25 bp, Homo sapien
ctggtgagtgatatggctcgggtcc

SEQ ID NO: 2706984 - DNA, 25 bp, Homo sapien
ggtgagtgatatggctcgggtcctg

SEQ ID NO: 2706985 - DNA, 25 bp, Homo sapien
gagtgatatggctcgggtcctgagc

SEQ ID NO: 2706986 - DNA, 25 bp, Homo sapien
ccagtgaggacaatcctggttggtg

SEQ ID NO: 2706987 - DNA, 25 bp, Homo sapien
cagtagtgggaatccagtgaggaca

SEQ ID NO: 2706988 - DNA, 25 bp, Homo sapien
cttcccttgtatgtcaagaatgaga

SEQ ID NO: 2706989 - DNA, 25 bp, Homo sapien
ccttgtatgtcaagaatgagagcag

SEQ ID NO: 2706990 - DNA, 25 bp, Homo sapien
tcaggcagaggtaataccaagtcac

SEQ ID NO: 2706991 - DNA, 25 bp, Homo sapien
cagaggtaataccaagtcactacat

SEQ ID NO: 2706992 - DNA, 25 bp, Homo sapien
ggcagaggtaataccaagtcactac

SEQ ID NO: 2706993 - DNA, 25 bp, Homo sapien
cttcaggcagaggtaataccaagtc

SEQ ID NO: 2706994 - DNA, 25 bp, Homo sapien
cccagctaattagcatacctgtatc

SEQ ID NO: 2706995 - DNA, 25 bp, Homo sapien
cacccggcctatgttgaatttgcta

SEQ ID NO: 2706996 - DNA, 25 bp, Homo sapien
caaggtcacaatagttaaggaaggc

SEQ ID NO: 2706997 - DNA, 25 bp, Homo sapien
gaaggctgctgaaaaaggaatctac

SEQ ID NO: 2706998 - DNA, 25 bp, Homo sapien
tatcctatatagaaacagacagtct

SEQ ID NO: 2706999 - DNA, 25 bp, Homo sapien
catatgtcttacttcagttgccagg

SEQ ID NO: 2707000 - DNA, 25 bp, Homo sapien
ttatatccttcagggtaaaaggcta

SEQ ID NO: 2707001 - DNA, 25 bp, Homo sapien
cagacagtctagcatttcagttctg

SEQ ID NO: 2707002 - DNA, 25 bp, Homo sapien
tcatcacaaaatggccagccttcct

SEQ ID NO: 2707003 - DNA, 25 bp, Homo sapien
aaatgactacttggtcaggcatggt

SEQ ID NO: 2707004 - DNA, 25 bp, Homo sapien
gagcctgccaaactataaaggtctc

SEQ ID NO: 2707005 - DNA, 25 bp, Homo sapien
ccaagagcctgccaaactataaagg

SEQ ID NO: 2707006 - DNA, 25 bp, Homo sapien
cagatggagagaaaacagcttcatc

SEQ ID NO: 2707007 - DNA, 25 bp, Homo sapien
atggagagaaaacagcttcatcttc

SEQ ID NO: 2707008 - DNA, 25 bp, Homo sapien
ctggccagatggagagaaaacagct

SEQ ID NO: 2707009 - DNA, 25 bp, Homo sapien
ggagagaaaacagcttcatcttcat

SEQ ID NO: 2707010 - DNA, 25 bp, Homo sapien
taaatctggcctctaatgtaggagg

SEQ ID NO: 2707011 - DNA, 25 bp, Homo sapien
ccattgggactgatcaacggcagcc

SEQ ID NO: 2707012 - DNA, 25 bp, Homo sapien
caagagtcactgtctccattgggac

SEQ ID NO: 2707013 - DNA, 25 bp, Homo sapien
aagataaagagtctctaaagaacag

SEQ ID NO: 2707014 - DNA, 25 bp, Homo sapien
agaaggcctggttcacgagtgctga

SEQ ID NO: 2707015 - DNA, 25 bp, Homo sapien
tctcctagaacataagcccttaaag

SEQ ID NO: 2707016 - DNA, 25 bp, Homo sapien
tattcctgtaatctagcagaaggcc

SEQ ID NO: 2707017 - DNA, 25 bp, Homo sapien
ggaaacaaaccaggctcactaataa

SEQ ID NO: 2707018 - DNA, 25 bp, Homo sapien
tgcagcgctgctaattagtgatacc

SEQ ID NO: 2707019 - DNA, 25 bp, Homo sapien
tactgtcaagttctaggcacctgga

SEQ ID NO: 2707020 - DNA, 25 bp, Homo sapien
gatagcagctaatccagggcttcag

SEQ ID NO: 2707021 - DNA, 25 bp, Homo sapien
cagaaaccgggtagcagtctcctaa

SEQ ID NO: 2707022 - DNA, 25 bp, Homo sapien
tggcatttgttctagcccactctga

SEQ ID NO: 2707023 - DNA, 25 bp, Homo sapien
tctggcatttgttctagcccactct

SEQ ID NO: 2707024 - DNA, 25 bp, Homo sapien
ctgtagttctggcatttgttctagc

SEQ ID NO: 2707025 - DNA, 25 bp, Homo sapien
tagttctggcatttgttctagccca

SEQ ID NO: 2707026 - DNA, 25 bp, Homo sapien
ggattgggctcacagtgagacactt

SEQ ID NO: 2707027 - DNA, 25 bp, Homo sapien
cccttaattctcacacaaatactct

SEQ ID NO: 2707028 - DNA, 25 bp, Homo sapien
tctgggattgggctcacagtgagac

SEQ ID NO: 2707029 - DNA, 25 bp, Homo sapien
aattctcacacaaatactctctttg

SEQ ID NO: 2707030 - DNA, 25 bp, Homo sapien
tacttttgtatgactgagagcatgg

SEQ ID NO: 2707031 - DNA, 25 bp, Homo sapien
gaatcatgtatagcagcccactgag

SEQ ID NO: 2707032 - DNA, 25 bp, Homo sapien
gatgtgttgcagtaatatgacggct

SEQ ID NO: 2707033 - DNA, 25 bp, Homo sapien
tgacggctacaacagcactaagaga

SEQ ID NO: 2707034 - DNA, 25 bp, Homo sapien
taaggtcctgcaaatgttggaggga

SEQ ID NO: 2707035 - DNA, 25 bp, Homo sapien
tgacagttgactaggaataaggtcc

SEQ ID NO: 2707036 - DNA, 25 bp, Homo sapien
aataaggtcctgcaaatgttggagg

SEQ ID NO: 2707037 - DNA, 25 bp, Homo sapien
gggatctgctgacagttgactagga

SEQ ID NO: 2707038 - DNA, 25 bp, Homo sapien
gttcatgatcgccttcatccccaca

SEQ ID NO: 2707039 - DNA, 25 bp, Homo sapien
cacgttcatgatcgccttcatcccc

SEQ ID NO: 2707040 - DNA, 25 bp, Homo sapien
aaagcacgttcatgatcgccttcat

SEQ ID NO: 2707041 - DNA, 25 bp, Homo sapien
agcacgttcatgatcgccttcatcc

SEQ ID NO: 2707042 - DNA, 25 bp, Homo sapien
tctaccacttttgaactatgcgccc

SEQ ID NO: 2707043 - DNA, 25 bp, Homo sapien
taatcattcaacatttccgagtctg

SEQ ID NO: 2707044 - DNA, 25 bp, Homo sapien
ttaaaatagttatcacagggactgg

SEQ ID NO: 2707045 - DNA, 25 bp, Homo sapien
gagtctctctgaatgtgtggtgatt

SEQ ID NO: 2707046 - DNA, 25 bp, Homo sapien
cattaggagatgaatttgtgccaaa

SEQ ID NO: 2707047 - DNA, 25 bp, Homo sapien
caagggaaccttgcttctatttata

SEQ ID NO: 2707048 - DNA, 25 bp, Homo sapien
cagaaggaatagtaaaatgcaggac

SEQ ID NO: 2707049 - DNA, 25 bp, Homo sapien
tatagctggcaaaatccagaaggaa

SEQ ID NO: 2707050 - DNA, 25 bp, Homo sapien
gggaagtgcagaagagaagaccaca

SEQ ID NO: 2707051 - DNA, 25 bp, Homo sapien
caagggaagtgcagaagagaagacc

SEQ ID NO: 2707052 - DNA, 25 bp, Homo sapien
ggcaagggaagtgcagaagagaaga

SEQ ID NO: 2707053 - DNA, 25 bp, Homo sapien
aagggaagtgcagaagagaagacca

SEQ ID NO: 2707054 - DNA, 25 bp, Homo sapien
tggctgtctttgttcgagttgtaga

SEQ ID NO: 2707055 - DNA, 25 bp, Homo sapien
ggctgtctttgttcgagttgtagac

SEQ ID NO: 2707056 - DNA, 25 bp, Homo sapien
tactcccaaccctggctgtagaagg

SEQ ID NO: 2707057 - DNA, 25 bp, Homo sapien
tcccaaccctggctgtagaaggtta

SEQ ID NO: 2707058 - DNA, 25 bp, Homo sapien
ctactcccaaccctggctgtagaag

SEQ ID NO: 2707059 - DNA, 25 bp, Homo sapien
actcccaaccctggctgtagaaggt

SEQ ID NO: 2707060 - DNA, 25 bp, Homo sapien
catgtcccactgcactcgggaactg

SEQ ID NO: 2707061 - DNA, 25 bp, Homo sapien
acgcccacagcaccgcctggtggtt

SEQ ID NO: 2707062 - DNA, 25 bp, Homo sapien
tcccactgcactcgggaactggagc

SEQ ID NO: 2707063 - DNA, 25 bp, Homo sapien
ccacagcaccgcctggtggttcaca

SEQ ID NO: 2707064 - DNA, 25 bp, Homo sapien
tgctttgtaaagtgtgacccattat

SEQ ID NO: 2707065 - DNA, 25 bp, Homo sapien
tttgtaaagtgtgacccattatttc

SEQ ID NO: 2707066 - DNA, 25 bp, Homo sapien
atttcaatgcaaggtgtcactacac

SEQ ID NO: 2707067 - DNA, 25 bp, Homo sapien
caatgcaaggtgtcactacactaca

SEQ ID NO: 2707068 - DNA, 25 bp, Homo sapien
gattaaccagagtgcttacaggcag

SEQ ID NO: 2707069 - DNA, 25 bp, Homo sapien
gcaaatgcactacagtctacagagg

SEQ ID NO: 2707070 - DNA, 25 bp, Homo sapien
tgtactcttgcagcaacctggaagg

SEQ ID NO: 2707071 - DNA, 25 bp, Homo sapien
tggaattcacagtagggcaaccttt

SEQ ID NO: 2707072 - DNA, 25 bp, Homo sapien
gacggcaggacaatagcagcctgag

SEQ ID NO: 2707073 - DNA, 25 bp, Homo sapien
caggtgggacggcaggacaatagca

SEQ ID NO: 2707074 - DNA, 25 bp, Homo sapien
ggtgggacggcaggacaatagcagc

SEQ ID NO: 2707075 - DNA, 25 bp, Homo sapien
tgggacggcaggacaatagcagcct

SEQ ID NO: 2707076 - DNA, 25 bp, Homo sapien
gcaccctgggtacttctgtagatgg

SEQ ID NO: 2707077 - DNA, 25 bp, Homo sapien
gaacctccacagcagatcacatgag

SEQ ID NO: 2707078 - DNA, 25 bp, Homo sapien
gaatatgacatacacccacacgatg

SEQ ID NO: 2707079 - DNA, 25 bp, Homo sapien
tatgagtgtccttacctctcggtac

SEQ ID NO: 2707080 - DNA, 25 bp, Homo sapien
ctgcagtgggttcttcagcattttt

SEQ ID NO: 2707081 - DNA, 25 bp, Homo sapien
caaattggcaaactgcagtgggttc

SEQ ID NO: 2707082 - DNA, 25 bp, Homo sapien
ttattcaaatataaaggattcttat

SEQ ID NO: 2707083 - DNA, 25 bp, Homo sapien
atataaaggattcttataaaagcac

SEQ ID NO: 2707084 - DNA, 25 bp, Homo sapien
aaatggaagcttagagaggcgcacc

SEQ ID NO: 2707085 - DNA, 25 bp, Homo sapien
tcaagagcagtgttaccaatccagc

SEQ ID NO: 2707086 - DNA, 25 bp, Homo sapien
aaatgacctagtgtaccaccagtgg

SEQ ID NO: 2707087 - DNA, 25 bp, Homo sapien
tggcctggccagatgataagagtaa

SEQ ID NO: 2707088 - DNA, 25 bp, Homo sapien
gggtgttctaacagcaaaaggccaa

SEQ ID NO: 2707089 - DNA, 25 bp, Homo sapien
taaaaacagcacactaggacatgcc

SEQ ID NO: 2707090 - DNA, 25 bp, Homo sapien
catgaactagaaagggttactgtcc

SEQ ID NO: 2707091 - DNA, 25 bp, Homo sapien
gcaagaagtggccaaatcgcccaat

SEQ ID NO: 2707092 - DNA, 25 bp, Homo sapien
tactataagttgactgatggacaca

SEQ ID NO: 2707093 - DNA, 25 bp, Homo sapien
tagaccatcatgctacccgtgagac

SEQ ID NO: 2707094 - DNA, 25 bp, Homo sapien
taactcggccatctaaatgagggtc

SEQ ID NO: 2707095 - DNA, 25 bp, Homo sapien
acctagcagcgaagcccaagaatgg

SEQ ID NO: 2707096 - DNA, 25 bp, Homo sapien
tgattcctcaggctcaagagcccct

SEQ ID NO: 2707097 - DNA, 25 bp, Homo sapien
gacaacaaggctggaaattccctaa

SEQ ID NO: 2707098 - DNA, 25 bp, Homo sapien
gcatggatgcatttcctgattatgc

SEQ ID NO: 2707099 - DNA, 25 bp, Homo sapien
gaaacctgtgcaatatgaccactcc

SEQ ID NO: 2707100 - DNA, 25 bp, Homo sapien
ctgctcccagaacgggctcatactg

SEQ ID NO: 2707101 - DNA, 25 bp, Homo sapien
attaccttagtaatgaacacttcaa

SEQ ID NO: 2707102 - DNA, 25 bp, Homo sapien
gaaagttagaccgtgcacagtggct

SEQ ID NO: 2707103 - DNA, 25 bp, Homo sapien
caaacgagtgggatttggtacagct

SEQ ID NO: 2707104 - DNA, 25 bp, Homo sapien
tcagctcagctcttagcaaacgagt

SEQ ID NO: 2707105 - DNA, 25 bp, Homo sapien
catgttagttcagtcatcagcggcg

SEQ ID NO: 2707106 - DNA, 25 bp, Homo sapien
gtacagctgtctaggatttcacgga

SEQ ID NO: 2707107 - DNA, 25 bp, Homo sapien
tctggagttgacacccacaattcga

SEQ ID NO: 2707108 - DNA, 25 bp, Homo sapien
cgatacagcccttgctcgttgatcc

SEQ ID NO: 2707109 - DNA, 25 bp, Homo sapien
aacttctgcactctggagttgacac

SEQ ID NO: 2707110 - DNA, 25 bp, Homo sapien
cacaattcgatacagcccttgctcg

SEQ ID NO: 2707111 - DNA, 25 bp, Homo sapien
gccacactgcacttgctatgaggaa

SEQ ID NO: 2707112 - DNA, 25 bp, Homo sapien
ggtaggacactagtacaaagccaca

SEQ ID NO: 2707113 - DNA, 25 bp, Homo sapien
taaggaatcctgatcagtacaaaga

SEQ ID NO: 2707114 - DNA, 25 bp, Homo sapien
tcaagggtagctcttggtaggacac

SEQ ID NO: 2707115 - DNA, 25 bp, Homo sapien
ggtcaagtggataagtattagagga

SEQ ID NO: 2707116 - DNA, 25 bp, Homo sapien
cattatatggatactggtcaagtgg

SEQ ID NO: 2707117 - DNA, 25 bp, Homo sapien
ctttgcatgacagattttaaggaaa

SEQ ID NO: 2707118 - DNA, 25 bp, Homo sapien
tgctagaatataaagaatcaggaga

SEQ ID NO: 2707119 - DNA, 25 bp, Homo sapien
cagagcactagtgatggtctttatc

SEQ ID NO: 2707120 - DNA, 25 bp, Homo sapien
tcttcagagcactagtgatggtctt

SEQ ID NO: 2707121 - DNA, 25 bp, Homo sapien
ggtcttcagagcactagtgatggtc

SEQ ID NO: 2707122 - DNA, 25 bp, Homo sapien
gagcactagtgatggtctttatctc

SEQ ID NO: 2707123 - DNA, 25 bp, Homo sapien
tttgaaactggtacatcatgagtgg

SEQ ID NO: 2707124 - DNA, 25 bp, Homo sapien
cttctttgaaactggtacatcatga

SEQ ID NO: 2707125 - DNA, 25 bp, Homo sapien
actggtacatcatgagtggtcctgg

SEQ ID NO: 2707126 - DNA, 25 bp, Homo sapien
tacatcatgagtggtcctggaagca

SEQ ID NO: 2707127 - DNA, 25 bp, Homo sapien
tctgccgatttttctctgggagccg

SEQ ID NO: 2707128 - DNA, 25 bp, Homo sapien
agacccgagactcctggttctccag

SEQ ID NO: 2707129 - DNA, 25 bp, Homo sapien
aacaaggctgtggatttcagagacc

SEQ ID NO: 2707130 - DNA, 25 bp, Homo sapien
cagctgtaacatctgccgatttttc

SEQ ID NO: 2707131 - DNA, 25 bp, Homo sapien
ccaatttgcccttgatcaccatagg

SEQ ID NO: 2707132 - DNA, 25 bp, Homo sapien
ttggtggcctggttgcatgagcact

SEQ ID NO: 2707133 - DNA, 25 bp, Homo sapien
tttctttcctaagcctccagcatac

SEQ ID NO: 2707134 - DNA, 25 bp, Homo sapien
gacctggtatcatggacaacacact

SEQ ID NO: 2707135 - DNA, 25 bp, Homo sapien
actgtcccaccaggtggaatgtgat

SEQ ID NO: 2707136 - DNA, 25 bp, Homo sapien
aactgtcccaccaggtggaatgtga

SEQ ID NO: 2707137 - DNA, 25 bp, Homo sapien
gggcaaactgtcccaccaggtggaa

SEQ ID NO: 2707138 - DNA, 25 bp, Homo sapien
ggcaaactgtcccaccaggtggaat

SEQ ID NO: 2707139 - DNA, 25 bp, Homo sapien
ttttctcatggaatatctgacttta

SEQ ID NO: 2707140 - DNA, 25 bp, Homo sapien
tctcatggaatatctgactttaata

SEQ ID NO: 2707141 - DNA, 25 bp, Homo sapien
cattttctcatggaatatctgactt

SEQ ID NO: 2707142 - DNA, 25 bp, Homo sapien
catggaatatctgactttaataaaa

SEQ ID NO: 2707143 - DNA, 25 bp, Homo sapien
gaatgcctttaggtaggagcactgg

SEQ ID NO: 2707144 - DNA, 25 bp, Homo sapien
ggagaaactactcaagcacccaagt

SEQ ID NO: 2707145 - DNA, 25 bp, Homo sapien
cctgtcgcacaggagagatggcaga

SEQ ID NO: 2707146 - DNA, 25 bp, Homo sapien
gactagtgtgcataaaaagcctgag

SEQ ID NO: 2707147 - DNA, 25 bp, Homo sapien
gggacatctgaagacatgctgtgaa

SEQ ID NO: 2707148 - DNA, 25 bp, Homo sapien
taatagggctattgaggcacttaca

SEQ ID NO: 2707149 - DNA, 25 bp, Homo sapien
taaccacctagcctgagagacatat

SEQ ID NO: 2707150 - DNA, 25 bp, Homo sapien
gggaaccaagctgtgtaaccaagta

SEQ ID NO: 2707151 - DNA, 25 bp, Homo sapien
aatacctgttcagatcacttgccca

SEQ ID NO: 2707152 - DNA, 25 bp, Homo sapien
tagtggtgcaagaaacattagtgtg

SEQ ID NO: 2707153 - DNA, 25 bp, Homo sapien
gacttttaacaatgggactttgaca

SEQ ID NO: 2707154 - DNA, 25 bp, Homo sapien
gtggctgtactatggaaaacattcc

SEQ ID NO: 2707155 - DNA, 25 bp, Homo sapien
tctggagctatgtgacagctggctt

SEQ ID NO: 2707156 - DNA, 25 bp, Homo sapien
tactagaatggccatctgaacttgt

SEQ ID NO: 2707157 - DNA, 25 bp, Homo sapien
aaggtcccccactatccagaggtag

SEQ ID NO: 2707158 - DNA, 25 bp, Homo sapien
tgtgtttgaatagtgtaaggtcccc

SEQ ID NO: 2707159 - DNA, 25 bp, Homo sapien
tacatatatagtacaaccgtatatg

SEQ ID NO: 2707160 - DNA, 25 bp, Homo sapien
tatagtacaaccgtatatgtcccac

SEQ ID NO: 2707161 - DNA, 25 bp, Homo sapien
gtacaaccgtatatgtcccactata

SEQ ID NO: 2707162 - DNA, 25 bp, Homo sapien
cgtatatgtcccactataacaagtt

SEQ ID NO: 2707163 - DNA, 25 bp, Homo sapien
caaggataaggctagtgactggatg

SEQ ID NO: 2707164 - DNA, 25 bp, Homo sapien
caggatttatggtgccaaggataag

SEQ ID NO: 2707165 - DNA, 25 bp, Homo sapien
gactggatgttccttcgctatttcc

SEQ ID NO: 2707166 - DNA, 25 bp, Homo sapien
ttccttcgctatttcccacacaatg

SEQ ID NO: 2707167 - DNA, 25 bp, Homo sapien
cacatctacgggatgttggtgtaaa

SEQ ID NO: 2707168 - DNA, 25 bp, Homo sapien
tgtccagttgtaaatcccacatcta

SEQ ID NO: 2707169 - DNA, 25 bp, Homo sapien
aaatcagaggtgataccgtaagtac

SEQ ID NO: 2707170 - DNA, 25 bp, Homo sapien
ccgtaagtacaagaaacaatgtcca

SEQ ID NO: 2707171 - DNA, 25 bp, Homo sapien
actctggtacttgctagtggaacag

SEQ ID NO: 2707172 - DNA, 25 bp, Homo sapien
acagactgaagtttatcaggaggga

SEQ ID NO: 2707173 - DNA, 25 bp, Homo sapien
tacttgctagtggaacagactgaag

SEQ ID NO: 2707174 - DNA, 25 bp, Homo sapien
ggtacttgctagtggaacagactga

SEQ ID NO: 2707175 - DNA, 25 bp, Homo sapien
cccctgttaggtcccggtgtatgct

SEQ ID NO: 2707176 - DNA, 25 bp, Homo sapien
tgtaacaaatagcaggatctccttt

SEQ ID NO: 2707177 - DNA, 25 bp, Homo sapien
gttaggtcccggtgtatgctgtgcc

SEQ ID NO: 2707178 - DNA, 25 bp, Homo sapien
ggtcccggtgtatgctgtgcccctc

SEQ ID NO: 2707179 - DNA, 25 bp, Homo sapien
ggcctgcccgactatttttaacaca

SEQ ID NO: 2707180 - DNA, 25 bp, Homo sapien
gaagttgggtgaataacatacctac

SEQ ID NO: 2707181 - DNA, 25 bp, Homo sapien
ggtgtctgggcagagtgactcaatc

SEQ ID NO: 2707182 - DNA, 25 bp, Homo sapien
tttcctcaaatcaccactaggcctg

SEQ ID NO: 2707183 - DNA, 25 bp, Homo sapien
tttcgtggttttctattaggatctc

SEQ ID NO: 2707184 - DNA, 25 bp, Homo sapien
ggttttctattaggatctcaatgac

SEQ ID NO: 2707185 - DNA, 25 bp, Homo sapien
ggtttgccaccgtcatcaaattctg

SEQ ID NO: 2707186 - DNA, 25 bp, Homo sapien
gcagagtgggtccaaacaccacacc

SEQ ID NO: 2707187 - DNA, 25 bp, Homo sapien
tttagaccttcttcaatcccatctg

SEQ ID NO: 2707188 - DNA, 25 bp, Homo sapien
catctgtcacatgcgcctgcaattt

SEQ ID NO: 2707189 - DNA, 25 bp, Homo sapien
tcttgacattgcagagcattgacac

SEQ ID NO: 2707190 - DNA, 25 bp, Homo sapien
cttattcccttgcactgtctacaaa

SEQ ID NO: 2707191 - DNA, 25 bp, Homo sapien
cgaagtttcacaacaaggttactca

SEQ ID NO: 2707192 - DNA, 25 bp, Homo sapien
ggcatatcgggcacggtgttaaata

SEQ ID NO: 2707193 - DNA, 25 bp, Homo sapien
tctctgttgactgaacggtgtggaa

SEQ ID NO: 2707194 - DNA, 25 bp, Homo sapien
gagtcactgctcttcttccgagaca

SEQ ID NO: 2707195 - DNA, 25 bp, Homo sapien
gctgggcattggtgagaggcatatc

SEQ ID NO: 2707196 - DNA, 25 bp, Homo sapien
tctgcagcccgtgtgacaacaggaa

SEQ ID NO: 2707197 - DNA, 25 bp, Homo sapien
tgccaaagcaaacaggtgtgcccag

SEQ ID NO: 2707198 - DNA, 25 bp, Homo sapien
gagaaagggcacatgctacagcttt

SEQ ID NO: 2707199 - DNA, 25 bp, Homo sapien
ccgggatctgcaaaggcaacctgag

SEQ ID NO: 2707200 - DNA, 25 bp, Homo sapien
agttttgcaatgaagtctgtaatgt

SEQ ID NO: 2707201 - DNA, 25 bp, Homo sapien
gttttgcaatgaagtctgtaatgta

SEQ ID NO: 2707202 - DNA, 25 bp, Homo sapien
tggagttcatgttgggctgtaagct

SEQ ID NO: 2707203 - DNA, 25 bp, Homo sapien
aggtctgggtcactggagttcatgt

SEQ ID NO: 2707204 - DNA, 25 bp, Homo sapien
gctgtttggatttgatgagacagat

SEQ ID NO: 2707205 - DNA, 25 bp, Homo sapien
caaactggagttgatgatgctgttc

SEQ ID NO: 2707206 - DNA, 25 bp, Homo sapien
taatgttcaggggataatggtccaa

SEQ ID NO: 2707207 - DNA, 25 bp, Homo sapien
gggataatggtccaaagtcagatgg

SEQ ID NO: 2707208 - DNA, 25 bp, Homo sapien
ggtccaaagtcagatggagccagac

SEQ ID NO: 2707209 - DNA, 25 bp, Homo sapien
aaattctaggtggaatggctgacca

SEQ ID NO: 2707210 - DNA, 25 bp, Homo sapien
aaactcggccacagagctgctacag

SEQ ID NO: 2707211 - DNA, 25 bp, Homo sapien
gaaaccgagacaacatagatgagtg

SEQ ID NO: 2707212 - DNA, 25 bp, Homo sapien
catggagttggcattgaacatttcc

SEQ ID NO: 2707213 - DNA, 25 bp, Homo sapien
tcaccaaggctaagaagcagtatgt

SEQ ID NO: 2707214 - DNA, 25 bp, Homo sapien
ctgagagtccaactgttccggtcat

SEQ ID NO: 2707215 - DNA, 25 bp, Homo sapien
tctgcaaaggcgctagttgacaaga

SEQ ID NO: 2707216 - DNA, 25 bp, Homo sapien
ggcgctagttgacaagatttatggg

SEQ ID NO: 2707217 - DNA, 25 bp, Homo sapien
aactgttccggtcatggcctcacat

SEQ ID NO: 2707218 - DNA, 25 bp, Homo sapien
gcattcaactgactggtggtcccaa

SEQ ID NO: 2707219 - DNA, 25 bp, Homo sapien
tctgaaaaccgagaggctagtctcc

SEQ ID NO: 2707220 - DNA, 25 bp, Homo sapien
aaacaactctgtctggacgcaggcc

SEQ ID NO: 2707221 - DNA, 25 bp, Homo sapien
tagtgggcatgctcaggtccagaga

SEQ ID NO: 2707222 - DNA, 25 bp, Homo sapien
cgcatttgcgaagcagctgactggg

SEQ ID NO: 2707223 - DNA, 25 bp, Homo sapien
acaggcacgcatttgcgaagcagct

SEQ ID NO: 2707224 - DNA, 25 bp, Homo sapien
cacgcatttgcgaagcagctgactg

SEQ ID NO: 2707225 - DNA, 25 bp, Homo sapien
aggcacgcatttgcgaagcagctga

SEQ ID NO: 2707226 - DNA, 25 bp, Homo sapien
ctgggcgaggccagcctggagagag

SEQ ID NO: 2707227 - DNA, 25 bp, Homo sapien
tggagagagggagccatttggccat

SEQ ID NO: 2707228 - DNA, 25 bp, Homo sapien
tacactgacacagagccctgggcga

SEQ ID NO: 2707229 - DNA, 25 bp, Homo sapien
ctgacacagagccctgggcgaggcc

SEQ ID NO: 2707230 - DNA, 25 bp, Homo sapien
tgatcttattgtcctacaggcaggg

SEQ ID NO: 2707231 - DNA, 25 bp, Homo sapien
tgatttaagcagtaagtctgagctt

SEQ ID NO: 2707232 - DNA, 25 bp, Homo sapien
tctgagcttaccagggcaactgcta

SEQ ID NO: 2707233 - DNA, 25 bp, Homo sapien
tacccttacaacagaagctgaaaag

SEQ ID NO: 2707234 - DNA, 25 bp, Homo sapien
tatgatgacagacttgccaatttca

SEQ ID NO: 2707235 - DNA, 25 bp, Homo sapien
tcatccttaaattctagtctgcaag

SEQ ID NO: 2707236 - DNA, 25 bp, Homo sapien
tgatatgatgacagacttgccaatt

SEQ ID NO: 2707237 - DNA, 25 bp, Homo sapien
ttaaattctagtctgcaagtttcac

SEQ ID NO: 2707238 - DNA, 25 bp, Homo sapien
ctgtggcagcatacaaatagggttc

SEQ ID NO: 2707239 - DNA, 25 bp, Homo sapien
tatgcaccgtgtacaagaaagtcca

SEQ ID NO: 2707240 - DNA, 25 bp, Homo sapien
gccagccccatggtgatgtgtaaaa

SEQ ID NO: 2707241 - DNA, 25 bp, Homo sapien
ggacgaggattcacattatgcaccg

SEQ ID NO: 2707242 - DNA, 25 bp, Homo sapien
tgatgaaattgtgggctcttccggc

SEQ ID NO: 2707243 - DNA, 25 bp, Homo sapien
tcttccggctactcagagagctttt

SEQ ID NO: 2707244 - DNA, 25 bp, Homo sapien
tgtccaacaggtctagagagctgat

SEQ ID NO: 2707245 - DNA, 25 bp, Homo sapien
gttcactgccagctacgtacatggg

SEQ ID NO: 2707246 - DNA, 25 bp, Homo sapien
caaatgcaatttacttgaggtgaga

SEQ ID NO: 2707247 - DNA, 25 bp, Homo sapien
cttggcctccgaacatgctgacatt

SEQ ID NO: 2707248 - DNA, 25 bp, Homo sapien
cctttctaaaacacggcacacattt

SEQ ID NO: 2707249 - DNA, 25 bp, Homo sapien
gaagggtagctagttctttatccag

SEQ ID NO: 2707250 - DNA, 25 bp, Homo sapien
aggccgatcaccagcaaacatgctt

SEQ ID NO: 2707251 - DNA, 25 bp, Homo sapien
ggccgatcaccagcaaacatgcttt

SEQ ID NO: 2707252 - DNA, 25 bp, Homo sapien
caggccgatcaccagcaaacatgct

SEQ ID NO: 2707253 - DNA, 25 bp, Homo sapien
tgccgtagacatggtaactgcttgc

SEQ ID NO: 2707254 - DNA, 25 bp, Homo sapien
actgcttgctgaactcgcatgaacc

SEQ ID NO: 2707255 - DNA, 25 bp, Homo sapien
tgggtgcaggtctcacgtacacgga

SEQ ID NO: 2707256 - DNA, 25 bp, Homo sapien
ttcccaacagtatcctggcatgccg

SEQ ID NO: 2707257 - DNA, 25 bp, Homo sapien
gagtgccacagtcctctatctgcag

SEQ ID NO: 2707258 - DNA, 25 bp, Homo sapien
accaggtgttgaagtctgtaccaac

SEQ ID NO: 2707259 - DNA, 25 bp, Homo sapien
tcatgctaagttgaggtctgacaga

SEQ ID NO: 2707260 - DNA, 25 bp, Homo sapien
tagcctttctctgtgacaagatgac

SEQ ID NO: 2707261 - DNA, 25 bp, Homo sapien
aaatcctacaggctcgtgatgcagc

SEQ ID NO: 2707262 - DNA, 25 bp, Homo sapien
atttcacggatccaaatcctacagg

SEQ ID NO: 2707263 - DNA, 25 bp, Homo sapien
ggctcgtgatgcagcctgagaagct

SEQ ID NO: 2707264 - DNA, 25 bp, Homo sapien
ctcacatacatttcacggatccaaa

SEQ ID NO: 2707265 - DNA, 25 bp, Homo sapien
taatcaaccatgactgagcgtcttg

SEQ ID NO: 2707266 - DNA, 25 bp, Homo sapien
gagcgtcttggcattcgatgagtcc

SEQ ID NO: 2707267 - DNA, 25 bp, Homo sapien
ttcgatgagtcctgttttcactggg

SEQ ID NO: 2707268 - DNA, 25 bp, Homo sapien
ttctgtggtctggtaatcaaccatg

SEQ ID NO: 2707269 - DNA, 25 bp, Homo sapien
tgaatcggaggcattgctaaacctg

SEQ ID NO: 2707270 - DNA, 25 bp, Homo sapien
gaataagcacaggagcgtacaagcc

SEQ ID NO: 2707271 - DNA, 25 bp, Homo sapien
gacactggcatctccaaagtgcgga

SEQ ID NO: 2707272 - DNA, 25 bp, Homo sapien
tgctaaggcctcacagcgagaatgg

SEQ ID NO: 2707273 - DNA, 25 bp, Homo sapien
tgttcaagataaggccaactcccag

SEQ ID NO: 2707274 - DNA, 25 bp, Homo sapien
caaacgagtgaaataccgggcaaga

SEQ ID NO: 2707275 - DNA, 25 bp, Homo sapien
gtcaacaaagccagacaaccacggg

SEQ ID NO: 2707276 - DNA, 25 bp, Homo sapien
cagtgggttagcaccaaagccgagt

SEQ ID NO: 2707277 - DNA, 25 bp, Homo sapien
agaacagccgaaattcccctacagg

SEQ ID NO: 2707278 - DNA, 25 bp, Homo sapien
ttttgtgagattatactgccaccaa

SEQ ID NO: 2707279 - DNA, 25 bp, Homo sapien
gattatactgccaccaagaacagcc

SEQ ID NO: 2707280 - DNA, 25 bp, Homo sapien
tgccaccaagaacagccgaaattcc

SEQ ID NO: 2707281 - DNA, 25 bp, Homo sapien
aagccattcccctggtacgccttcg

SEQ ID NO: 2707282 - DNA, 25 bp, Homo sapien
aactcacagtacgtgtgggcaggga

SEQ ID NO: 2707283 - DNA, 25 bp, Homo sapien
tacgccttcgcccataaccagaggt

SEQ ID NO: 2707284 - DNA, 25 bp, Homo sapien
ggaatttccactggtgaatgcagct

SEQ ID NO: 2707285 - DNA, 25 bp, Homo sapien
gtttctagctataaaaagacttcat

SEQ ID NO: 2707286 - DNA, 25 bp, Homo sapien
tcatcttgtgcattaaaatgacacc

SEQ ID NO: 2707287 - DNA, 25 bp, Homo sapien
tatcagtactcctactccaggtacc

SEQ ID NO: 2707288 - DNA, 25 bp, Homo sapien
tagttgcattgtagttcatggctgt

SEQ ID NO: 2707289 - DNA, 25 bp, Homo sapien
agtctgagtccctaggcactgctgt

SEQ ID NO: 2707290 - DNA, 25 bp, Homo sapien
gtctgagtccctaggcactgctgtg

SEQ ID NO: 2707291 - DNA, 25 bp, Homo sapien
ctcccagtccacactcatactgatg

SEQ ID NO: 2707292 - DNA, 25 bp, Homo sapien
tcccagtccacactcatactgatgg

SEQ ID NO: 2707293 - DNA, 25 bp, Homo sapien
taacagctcccaatggatagagtgc

SEQ ID NO: 2707294 - DNA, 25 bp, Homo sapien
tcaggcaaactgacgtcgggaaact

SEQ ID NO: 2707295 - DNA, 25 bp, Homo sapien
ccttacagctgagaagggacaatca

SEQ ID NO: 2707296 - DNA, 25 bp, Homo sapien
cacttatgacatgccaggtagggct

SEQ ID NO: 2707297 - DNA, 25 bp, Homo sapien
tctgtcagctcttccttcttccaac

SEQ ID NO: 2707298 - DNA, 25 bp, Homo sapien
tgtcagctcttccttcttccaacat

SEQ ID NO: 2707299 - DNA, 25 bp, Homo sapien
gtctctgtcagctcttccttcttcc

SEQ ID NO: 2707300 - DNA, 25 bp, Homo sapien
tctctgtcagctcttccttcttcca

SEQ ID NO: 2707301 - DNA, 25 bp, Homo sapien
taaactttccacaatgtcatcccca

SEQ ID NO: 2707302 - DNA, 25 bp, Homo sapien
gggtaaactttccacaatgtcatcc

SEQ ID NO: 2707303 - DNA, 25 bp, Homo sapien
actttccacaatgtcatccccaaaa

SEQ ID NO: 2707304 - DNA, 25 bp, Homo sapien
tgagggtaaactttccacaatgtca

SEQ ID NO: 2707305 - DNA, 25 bp, Homo sapien
tattcataatatgtgcccttgcctg

SEQ ID NO: 2707306 - DNA, 25 bp, Homo sapien
gaagctggtccatttgtgccatctg

SEQ ID NO: 2707307 - DNA, 25 bp, Homo sapien
tgagctctgctcttaccaaggaagc

SEQ ID NO: 2707308 - DNA, 25 bp, Homo sapien
tatctagccaccatggcgcacagag

SEQ ID NO: 2707309 - DNA, 25 bp, Homo sapien
gaaatttctgttctcggccactaat

SEQ ID NO: 2707310 - DNA, 25 bp, Homo sapien
gtcacacagctcacattttggaaat

SEQ ID NO: 2707311 - DNA, 25 bp, Homo sapien
gaataaagttcacccaagcaccact

SEQ ID NO: 2707312 - DNA, 25 bp, Homo sapien
ttataccctcttgtaaaagtgtggc

SEQ ID NO: 2707313 - DNA, 25 bp, Homo sapien
tccccaggggtctccaagtcagcaa

SEQ ID NO: 2707314 - DNA, 25 bp, Homo sapien
ggccataaagtaaatagtttagaca

SEQ ID NO: 2707315 - DNA, 25 bp, Homo sapien
aatagtttagacattgcaggccaag

SEQ ID NO: 2707316 - DNA, 25 bp, Homo sapien
aggcaaaactgagaatattatttag

SEQ ID NO: 2707317 - DNA, 25 bp, Homo sapien
ggtggctgtatacctgtgatcgcag

SEQ ID NO: 2707318 - DNA, 25 bp, Homo sapien
agcattaccactcttggactttggg

SEQ ID NO: 2707319 - DNA, 25 bp, Homo sapien
tacggcttctctttagcatatgcaa

SEQ ID NO: 2707320 - DNA, 25 bp, Homo sapien
ttactgtaccataaaccgtagcagc

SEQ ID NO: 2707321 - DNA, 25 bp, Homo sapien
gactggaatatgtagttacagttta

SEQ ID NO: 2707322 - DNA, 25 bp, Homo sapien
gtggagtctaacaaagtagtgcccc

SEQ ID NO: 2707323 - DNA, 25 bp, Homo sapien
tggttatgttccaagatgcccagtg

SEQ ID NO: 2707324 - DNA, 25 bp, Homo sapien
tcttttccatcctaagtgacccagg

SEQ ID NO: 2707325 - DNA, 25 bp, Homo sapien
ctgccatggaggaatgtaatcttac

SEQ ID NO: 2707326 - DNA, 25 bp, Homo sapien
tgccatggaggaatgtaatcttact

SEQ ID NO: 2707327 - DNA, 25 bp, Homo sapien
gccatggaggaatgtaatcttacta

SEQ ID NO: 2707328 - DNA, 25 bp, Homo sapien
tgttcccgctggccctccacaatgg

SEQ ID NO: 2707329 - DNA, 25 bp, Homo sapien
gttcccgctggccctccacaatggc

SEQ ID NO: 2707330 - DNA, 25 bp, Homo sapien
tggaaaattgtctctgatctgattt

SEQ ID NO: 2707331 - DNA, 25 bp, Homo sapien
tgctccttcagcgtgaccattcaca

SEQ ID NO: 2707332 - DNA, 25 bp, Homo sapien
tagtagtctaaacatgtggaaaatt

SEQ ID NO: 2707333 - DNA, 25 bp, Homo sapien
taattctggtgcttatttagtagtc

SEQ ID NO: 2707334 - DNA, 25 bp, Homo sapien
actttcctgtatggtctactttcag

SEQ ID NO: 2707335 - DNA, 25 bp, Homo sapien
tcctgtatggtctactttcagggaa

SEQ ID NO: 2707336 - DNA, 25 bp, Homo sapien
ctgaggggcattggctctctggcat

SEQ ID NO: 2707337 - DNA, 25 bp, Homo sapien
ggctctctggcatactttcctgtat

SEQ ID NO: 2707338 - DNA, 25 bp, Homo sapien
gggacgtcaaggaggatgtctctga

SEQ ID NO: 2707339 - DNA, 25 bp, Homo sapien
gacgtcaaggaggatgtctctgatg

SEQ ID NO: 2707340 - DNA, 25 bp, Homo sapien
gtagggggacgtcaaggaggatgtc

SEQ ID NO: 2707341 - DNA, 25 bp, Homo sapien
cgtcaaggaggatgtctctgatgta

SEQ ID NO: 2707342 - DNA, 25 bp, Homo sapien
tagggcatagagagggcatatcaaa

SEQ ID NO: 2707343 - DNA, 25 bp, Homo sapien
tatacacggtgctagactaactgga

SEQ ID NO: 2707344 - DNA, 25 bp, Homo sapien
tactgttaggaatttatcatgggcc

SEQ ID NO: 2707345 - DNA, 25 bp, Homo sapien
tgtaagcaagaaactatgactgcct

SEQ ID NO: 2707346 - DNA, 25 bp, Homo sapien
ggacaacagtcctagttcaattgct

SEQ ID NO: 2707347 - DNA, 25 bp, Homo sapien
gcaccgtggctcacaatacttattg

SEQ ID NO: 2707348 - DNA, 25 bp, Homo sapien
gaatgcttctattgtgcaccgtggc

SEQ ID NO: 2707349 - DNA, 25 bp, Homo sapien
taatgttccccaagtcaataatccg

SEQ ID NO: 2707350 - DNA, 25 bp, Homo sapien
taatgaaaattactgacggccttgt

SEQ ID NO: 2707351 - DNA, 25 bp, Homo sapien
taactggaggagtaagctgaccacg

SEQ ID NO: 2707352 - DNA, 25 bp, Homo sapien
gaatccaggtagcatgttccctcca

SEQ ID NO: 2707353 - DNA, 25 bp, Homo sapien
tgagatataagacgcacagggatgg

SEQ ID NO: 2707354 - DNA, 25 bp, Homo sapien
ccgaaacccagggatgtgctgtcag

SEQ ID NO: 2707355 - DNA, 25 bp, Homo sapien
tcatgggaggccagatgacggaaag

SEQ ID NO: 2707356 - DNA, 25 bp, Homo sapien
cagaggagcaccgaaacccagggat

SEQ ID NO: 2707357 - DNA, 25 bp, Homo sapien
cagatgacggaaagctgggcagagc

SEQ ID NO: 2707358 - DNA, 25 bp, Homo sapien
ccaagatggcgagaggggtgaagtt

SEQ ID NO: 2707359 - DNA, 25 bp, Homo sapien
tggcgccgagaacatgggccaagat

SEQ ID NO: 2707360 - DNA, 25 bp, Homo sapien
atagggctggatggcgccgagaaca

SEQ ID NO: 2707361 - DNA, 25 bp, Homo sapien
ggatgaggtgggcatagggctggat

SEQ ID NO: 2707362 - DNA, 25 bp, Homo sapien
aatgagagaacaacggcagcaacag

SEQ ID NO: 2707363 - DNA, 25 bp, Homo sapien
ctgcatgaagagaggaccgagccaa

SEQ ID NO: 2707364 - DNA, 25 bp, Homo sapien
ggaccgagccaatgagagaacaacg

SEQ ID NO: 2707365 - DNA, 25 bp, Homo sapien
agagaacaacggcagcaacagaaaa

SEQ ID NO: 2707366 - DNA, 25 bp, Homo sapien
tggcagggaacaaagttgacgagga

SEQ ID NO: 2707367 - DNA, 25 bp, Homo sapien
acaaagttgacgaggaggctgaaca

SEQ ID NO: 2707368 - DNA, 25 bp, Homo sapien
caaaaagcaagtgcaggtttggatg

SEQ ID NO: 2707369 - DNA, 25 bp, Homo sapien
ctgtcaaaaagcaagtgcaggtttg

SEQ ID NO: 2707370 - DNA, 25 bp, Homo sapien
ctggagtcttcatgtaccgcttctt

SEQ ID NO: 2707371 - DNA, 25 bp, Homo sapien
gtcttcatgtaccgcttcttctggc

SEQ ID NO: 2707372 - DNA, 25 bp, Homo sapien
gagtcttcatgtaccgcttcttctg

SEQ ID NO: 2707373 - DNA, 25 bp, Homo sapien
tggagtcttcatgtaccgcttcttc

SEQ ID NO: 2707374 - DNA, 25 bp, Homo sapien
gattggtcatcatccgagattttac

SEQ ID NO: 2707375 - DNA, 25 bp, Homo sapien
tagctctggtctcttaggatggaac

SEQ ID NO: 2707376 - DNA, 25 bp, Homo sapien
ccagctttggataaacgggaacaga

SEQ ID NO: 2707377 - DNA, 25 bp, Homo sapien
tctggtctcttaggatggaaccaca

SEQ ID NO: 2707378 - DNA, 25 bp, Homo sapien
ctctaggcaccagagaggttaattc

SEQ ID NO: 2707379 - DNA, 25 bp, Homo sapien
catgctgattcatgcaaatggtccc

SEQ ID NO: 2707380 - DNA, 25 bp, Homo sapien
aatgccatgctgattcatgcaaatg

SEQ ID NO: 2707381 - DNA, 25 bp, Homo sapien
cagaaacttgagtcagggttgaaaa

SEQ ID NO: 2707382 - DNA, 25 bp, Homo sapien
taagtgcggaagtcacaaaagcagg

SEQ ID NO: 2707383 - DNA, 25 bp, Homo sapien
caggcttcatgacacacagagacag

SEQ ID NO: 2707384 - DNA, 25 bp, Homo sapien
aataaatattgcctgacgctgcctg

SEQ ID NO: 2707385 - DNA, 25 bp, Homo sapien
cagagagaggtagtgcctgttccca

SEQ ID NO: 2707386 - DNA, 25 bp, Homo sapien
tcaggtcctcatgatctaatgagaa

SEQ ID NO: 2707387 - DNA, 25 bp, Homo sapien
ttagtttcctctggttcaggtcctc

SEQ ID NO: 2707388 - DNA, 25 bp, Homo sapien
gaaatcactagaatgtcaggaagac

SEQ ID NO: 2707389 - DNA, 25 bp, Homo sapien
ccaaagtgcccagaagatgtccaag

SEQ ID NO: 2707390 - DNA, 25 bp, Homo sapien
ctgtcaatctggaaatactttggga

SEQ ID NO: 2707391 - DNA, 25 bp, Homo sapien
caagatggcaacagaatggcagatt

SEQ ID NO: 2707392 - DNA, 25 bp, Homo sapien
ttggggagatgaaaacgagtgaaga

SEQ ID NO: 2707393 - DNA, 25 bp, Homo sapien
gatggcaacagaatggcagattcta

SEQ ID NO: 2707394 - DNA, 25 bp, Homo sapien
tatactgacaggcaaatggagcctg

SEQ ID NO: 2707395 - DNA, 25 bp, Homo sapien
ctcactaaacaaggataatgggaca

SEQ ID NO: 2707396 - DNA, 25 bp, Homo sapien
tggagcctgttatgacactgacatt

SEQ ID NO: 2707397 - DNA, 25 bp, Homo sapien
gaatccagttcacattagccagggt

SEQ ID NO: 2707398 - DNA, 25 bp, Homo sapien
ggagttacaacagccaaacagcggg

SEQ ID NO: 2707399 - DNA, 25 bp, Homo sapien
ttacaacagccaaacagcgggaggg

SEQ ID NO: 2707400 - DNA, 25 bp, Homo sapien
ctgggagttacaacagccaaacagc

SEQ ID NO: 2707401 - DNA, 25 bp, Homo sapien
acaacagccaaacagcgggagggca

SEQ ID NO: 2707402 - DNA, 25 bp, Homo sapien
tgtaagctacctagtcccctctcgt

SEQ ID NO: 2707403 - DNA, 25 bp, Homo sapien
ctacctagtcccctctcgtgggaag

SEQ ID NO: 2707404 - DNA, 25 bp, Homo sapien
tagtcccctctcgtgggaagtgcct

SEQ ID NO: 2707405 - DNA, 25 bp, Homo sapien
tccctgtaagctacctagtcccctc

SEQ ID NO: 2707406 - DNA, 25 bp, Homo sapien
ctgctgtgaacgaaagttctgagtc

SEQ ID NO: 2707407 - DNA, 25 bp, Homo sapien
tgcaggcatacaaggcttttgcctt

SEQ ID NO: 2707408 - DNA, 25 bp, Homo sapien
cgttatcgaagaccgtgcctgctgt

SEQ ID NO: 2707409 - DNA, 25 bp, Homo sapien
cgaaagttctgagtcatgttcagct

SEQ ID NO: 2707410 - DNA, 25 bp, Homo sapien
ggacccacggaatcaggtgcagcac

SEQ ID NO: 2707411 - DNA, 25 bp, Homo sapien
agccaggacccacggaatcaggtgc

SEQ ID NO: 2707412 - DNA, 25 bp, Homo sapien
ggtccccaggaactcatctctgctc

SEQ ID NO: 2707413 - DNA, 25 bp, Homo sapien
gatgcagccaggacccacggaatca

SEQ ID NO: 2707414 - DNA, 25 bp, Homo sapien
aaatggctttggacagccttcagca

SEQ ID NO: 2707415 - DNA, 25 bp, Homo sapien
cagtgaaatggctttggacagcctt

SEQ ID NO: 2707416 - DNA, 25 bp, Homo sapien
tcagcagacccactgcacctgcagt

SEQ ID NO: 2707417 - DNA, 25 bp, Homo sapien
tgaaatggctttggacagccttcag

SEQ ID NO: 2707418 - DNA, 25 bp, Homo sapien
gaggaaacaacgtgcccatctactg

SEQ ID NO: 2707419 - DNA, 25 bp, Homo sapien
caagagaactggaaacctacgccct

SEQ ID NO: 2707420 - DNA, 25 bp, Homo sapien
ggaattaatatgaccctgcaatccc

SEQ ID NO: 2707421 - DNA, 25 bp, Homo sapien
tatttaagctactgcagaaagactt

SEQ ID NO: 2707422 - DNA, 25 bp, Homo sapien
agaccagtgtcagcgaactctgcca

SEQ ID NO: 2707423 - DNA, 25 bp, Homo sapien
gaaggcttgggtaaggtctctcact

SEQ ID NO: 2707424 - DNA, 25 bp, Homo sapien
gacgaccatgttgtatgtgggagca

SEQ ID NO: 2707425 - DNA, 25 bp, Homo sapien
catagtttgccgaccttgcttgaga

SEQ ID NO: 2707426 - DNA, 25 bp, Homo sapien
gaacccagcttgtttgactccagag

SEQ ID NO: 2707427 - DNA, 25 bp, Homo sapien
ggtagtgcaagtacaacggccctgt

SEQ ID NO: 2707428 - DNA, 25 bp, Homo sapien
cctgtgacgggaaaaagctgggcat

SEQ ID NO: 2707429 - DNA, 25 bp, Homo sapien
tgtgcttcggaaccctcaggatgct

SEQ ID NO: 2707430 - DNA, 25 bp, Homo sapien
gccagtctttccgttcagagtcccc

SEQ ID NO: 2707431 - DNA, 25 bp, Homo sapien
actccacgtaattctcagggatgag

SEQ ID NO: 2707432 - DNA, 25 bp, Homo sapien
ggaactccacgtaattctcagggat

SEQ ID NO: 2707433 - DNA, 25 bp, Homo sapien
agaggaactccacgtaattctcagg

SEQ ID NO: 2707434 - DNA, 25 bp, Homo sapien
ttagaggaactccacgtaattctca

SEQ ID NO: 2707435 - DNA, 25 bp, Homo sapien
tatctcactgatgacaggccaacgg

SEQ ID NO: 2707436 - DNA, 25 bp, Homo sapien
gctactgggaaagctcagggatcct

SEQ ID NO: 2707437 - DNA, 25 bp, Homo sapien
caattacagagaggcggttcagcac

SEQ ID NO: 2707438 - DNA, 25 bp, Homo sapien
aacatcaaatgtggtcggccgcagc

SEQ ID NO: 2707439 - DNA, 25 bp, Homo sapien
cagggctactaacagggacaaaggt

SEQ ID NO: 2707440 - DNA, 25 bp, Homo sapien
gaaagccaagtttcagaggcctctg

SEQ ID NO: 2707441 - DNA, 25 bp, Homo sapien
catagggattgtcacataaaccaac

SEQ ID NO: 2707442 - DNA, 25 bp, Homo sapien
cagcattggattctatgcacgagtc

SEQ ID NO: 2707443 - DNA, 25 bp, Homo sapien
ggtaatgaactgctgaagtaagtta

SEQ ID NO: 2707444 - DNA, 25 bp, Homo sapien
gtaatgaactgctgaagtaagttac

SEQ ID NO: 2707445 - DNA, 25 bp, Homo sapien
aaaagtgaactttcctaagatcgca

SEQ ID NO: 2707446 - DNA, 25 bp, Homo sapien
taagatcgcaaacctggtaagtggc

SEQ ID NO: 2707447 - DNA, 25 bp, Homo sapien
tagcctacatatgaccacagtgtgt

SEQ ID NO: 2707448 - DNA, 25 bp, Homo sapien
tttcagggactactcagaatagtgc

SEQ ID NO: 2707449 - DNA, 25 bp, Homo sapien
catttctgtagaacaccttcacata

SEQ ID NO: 2707450 - DNA, 25 bp, Homo sapien
gctgtaccattcactttaagtagta

SEQ ID NO: 2707451 - DNA, 25 bp, Homo sapien
gcagagataccagatacggcatcaa

SEQ ID NO: 2707452 - DNA, 25 bp, Homo sapien
cagtgtcttcaggtataatgcagag

SEQ ID NO: 2707453 - DNA, 25 bp, Homo sapien
ttttcaagcaacctggtccacccag

SEQ ID NO: 2707454 - DNA, 25 bp, Homo sapien
taatttcccagactattttcaagca

SEQ ID NO: 2707455 - DNA, 25 bp, Homo sapien
tccacccaggattagtgaccaggtt

SEQ ID NO: 2707456 - DNA, 25 bp, Homo sapien
aggctgtatgaaaataccctcctca

SEQ ID NO: 2707457 - DNA, 25 bp, Homo sapien
gatggcacttagctatcagaagacc

SEQ ID NO: 2707458 - DNA, 25 bp, Homo sapien
catgtggtttatagagggccaagac

SEQ ID NO: 2707459 - DNA, 25 bp, Homo sapien
gaaggatggcacctaaaccaccagt

SEQ ID NO: 2707460 - DNA, 25 bp, Homo sapien
cagaagcagttgagtcgtcatcact

SEQ ID NO: 2707461 - DNA, 25 bp, Homo sapien
aatcatgtattgcttgttgtccagt

SEQ ID NO: 2707462 - DNA, 25 bp, Homo sapien
tcatgtattgcttgttgtccagttt

SEQ ID NO: 2707463 - DNA, 25 bp, Homo sapien
tcttttcctagggatcataatcatg

SEQ ID NO: 2707464 - DNA, 25 bp, Homo sapien
tttcctagggatcataatcatgtat

SEQ ID NO: 2707465 - DNA, 25 bp, Homo sapien
tttccagtagtctgacccataaatt

SEQ ID NO: 2707466 - DNA, 25 bp, Homo sapien
ccttcgtttccagtagtctgaccca

SEQ ID NO: 2707467 - DNA, 25 bp, Homo sapien
ctccttcgtttccagtagtctgacc

SEQ ID NO: 2707468 - DNA, 25 bp, Homo sapien
tcgtttccagtagtctgacccataa

SEQ ID NO: 2707469 - DNA, 25 bp, Homo sapien
gaaccactgatctatgtagcctttt

SEQ ID NO: 2707470 - DNA, 25 bp, Homo sapien
tctatggcctcaagggatttcaccc

SEQ ID NO: 2707471 - DNA, 25 bp, Homo sapien
gatgtggcccctaggtctctactga

SEQ ID NO: 2707472 - DNA, 25 bp, Homo sapien
tattcagccgaagactgtacagatt

SEQ ID NO: 2707473 - DNA, 25 bp, Homo sapien
caataatggtttccagttccatcca

SEQ ID NO: 2707474 - DNA, 25 bp, Homo sapien
acaataatggtttccagttccatcc

SEQ ID NO: 2707475 - DNA, 25 bp, Homo sapien
tgccgctatcgaaaatgtcttcagg

SEQ ID NO: 2707476 - DNA, 25 bp, Homo sapien
cccagcatgccgctatcgaaaatgt

SEQ ID NO: 2707477 - DNA, 25 bp, Homo sapien
tgattgcatcatcgataaaattcga

SEQ ID NO: 2707478 - DNA, 25 bp, Homo sapien
gcatcatcgataaaattcgaagaaa

SEQ ID NO: 2707479 - DNA, 25 bp, Homo sapien
attccatataggacagcacaattac

SEQ ID NO: 2707480 - DNA, 25 bp, Homo sapien
ggtacattgcctctgatcctatagc

SEQ ID NO: 2707481 - DNA, 25 bp, Homo sapien
aatgactattagttgtacgtggcca

SEQ ID NO: 2707482 - DNA, 25 bp, Homo sapien
caagattggcgtaatgtgcacatcc

SEQ ID NO: 2707483 - DNA, 25 bp, Homo sapien
gctcagagtcttagctgtgcacaag

SEQ ID NO: 2707484 - DNA, 25 bp, Homo sapien
cacaagaccatgcattcaaggaggc

SEQ ID NO: 2707485 - DNA, 25 bp, Homo sapien
tcattgtcttatcagaagggttgac

SEQ ID NO: 2707486 - DNA, 25 bp, Homo sapien
gaatttaccaagtagtagaagacac

SEQ ID NO: 2707487 - DNA, 25 bp, Homo sapien
cagaccaatcttggtaaaggacgga

SEQ ID NO: 2707488 - DNA, 25 bp, Homo sapien
taaaatgtcctaatactaccagtga

SEQ ID NO: 2707489 - DNA, 25 bp, Homo sapien
taccagtgactcctctaggaaaaaa

SEQ ID NO: 2707490 - DNA, 25 bp, Homo sapien
ttcagactgctgacagggcaacagc

SEQ ID NO: 2707491 - DNA, 25 bp, Homo sapien
gggcaacagcattatctccctaaag

SEQ ID NO: 2707492 - DNA, 25 bp, Homo sapien
agtccaggctgaaatggtcccagag

SEQ ID NO: 2707493 - DNA, 25 bp, Homo sapien
tgtgcattcacgaagatatggtctg

SEQ ID NO: 2707494 - DNA, 25 bp, Homo sapien
tctgaaagcgttcagtcatgtgcat

SEQ ID NO: 2707495 - DNA, 25 bp, Homo sapien
gcatcctagtggtgacttggctgat

SEQ ID NO: 2707496 - DNA, 25 bp, Homo sapien
agttttttcagggatgattttgttg

SEQ ID NO: 2707497 - DNA, 25 bp, Homo sapien
tgaacccgctaattgctttgggcag

SEQ ID NO: 2707498 - DNA, 25 bp, Homo sapien
caatatcgattctttctatcccctg

SEQ ID NO: 2707499 - DNA, 25 bp, Homo sapien
gagcaatagcactgaacccgctaat

SEQ ID NO: 2707500 - DNA, 25 bp, Homo sapien
caatcctttcgatgcgtacaacaaa

SEQ ID NO: 2707501 - DNA, 25 bp, Homo sapien
cacttctagtcgtctgagacgcacc

SEQ ID NO: 2707502 - DNA, 25 bp, Homo sapien
tcgtctgagacgcaccttgtcacgt

SEQ ID NO: 2707503 - DNA, 25 bp, Homo sapien
gacgcaccttgtcacgtttctgccg

SEQ ID NO: 2707504 - DNA, 25 bp, Homo sapien
taggcgaagtcttgcagtggttctc

SEQ ID NO: 2707505 - DNA, 25 bp, Homo sapien
ttttctttaggcgaagtcttgcagt

SEQ ID NO: 2707506 - DNA, 25 bp, Homo sapien
tctttaggcgaagtcttgcagtggt

SEQ ID NO: 2707507 - DNA, 25 bp, Homo sapien
tttaggcgaagtcttgcagtggttc

SEQ ID NO: 2707508 - DNA, 25 bp, Homo sapien
cacataaggttccactatatgcagc

SEQ ID NO: 2707509 - DNA, 25 bp, Homo sapien
cataaggttccactatatgcagcat

SEQ ID NO: 2707510 - DNA, 25 bp, Homo sapien
taaggttccactatatgcagcattt

SEQ ID NO: 2707511 - DNA, 25 bp, Homo sapien
ggtcacataaggttccactatatgc

SEQ ID NO: 2707512 - DNA, 25 bp, Homo sapien
gtccacgtttcaaaatgagttctcg

SEQ ID NO: 2707513 - DNA, 25 bp, Homo sapien
gtttcaaaatgagttctcggacaga

SEQ ID NO: 2707514 - DNA, 25 bp, Homo sapien
tccacgtttcaaaatgagttctcgg

SEQ ID NO: 2707515 - DNA, 25 bp, Homo sapien
cacgtttcaaaatgagttctcggac

SEQ ID NO: 2707516 - DNA, 25 bp, Homo sapien
aagcaaatgaagccaaacttcccca

SEQ ID NO: 2707517 - DNA, 25 bp, Homo sapien
aaatgaagccaaacttccccaggtg

SEQ ID NO: 2707518 - DNA, 25 bp, Homo sapien
ttcagctgacggatgagctgattga

SEQ ID NO: 2707519 - DNA, 25 bp, Homo sapien
tagttcagctgacggatgagctgat

SEQ ID NO: 2707520 - DNA, 25 bp, Homo sapien
gcaggtctccatctatttgtaccag

SEQ ID NO: 2707521 - DNA, 25 bp, Homo sapien
taactcttaggctatgcatagcccc

SEQ ID NO: 2707522 - DNA, 25 bp, Homo sapien
caaggcatggcctatcaaaagtcag

SEQ ID NO: 2707523 - DNA, 25 bp, Homo sapien
gaacttgtaaagtggcaaggcatgg

SEQ ID NO: 2707524 - DNA, 25 bp, Homo sapien
cacgaccggccagctactgtctttt

SEQ ID NO: 2707525 - DNA, 25 bp, Homo sapien
tcgactgctgtaggagtctcaggga

SEQ ID NO: 2707526 - DNA, 25 bp, Homo sapien
acagcacccaatgtagaaaacgctg

SEQ ID NO: 2707527 - DNA, 25 bp, Homo sapien
taggatacatgcaacaaagcaggac

SEQ ID NO: 2707528 - DNA, 25 bp, Homo sapien
tccagctcgtagcaaatcagaagac

SEQ ID NO: 2707529 - DNA, 25 bp, Homo sapien
tcgtagcaaatcagaagacttctct

SEQ ID NO: 2707530 - DNA, 25 bp, Homo sapien
tctgacacctctctatgtctaaagg

SEQ ID NO: 2707531 - DNA, 25 bp, Homo sapien
ctttccagctcgtagcaaatcagaa

SEQ ID NO: 2707532 - DNA, 25 bp, Homo sapien
aaagtgttcaaaggatgctatcata

SEQ ID NO: 2707533 - DNA, 25 bp, Homo sapien
gatggttataatggcaaaagtgttc

SEQ ID NO: 2707534 - DNA, 25 bp, Homo sapien
ttttagcaagaatggattaagactg

SEQ ID NO: 2707535 - DNA, 25 bp, Homo sapien
aatgaacattataaggctatccctc

SEQ ID NO: 2707536 - DNA, 25 bp, Homo sapien
caaggtctgaggcttaggcttagtt

SEQ ID NO: 2707537 - DNA, 25 bp, Homo sapien
tacattaagcttagacaaggtctga

SEQ ID NO: 2707538 - DNA, 25 bp, Homo sapien
tacataaatcttagtctactctggc

SEQ ID NO: 2707539 - DNA, 25 bp, Homo sapien
tgcctaatgtgaaagtcggaacatc

SEQ ID NO: 2707540 - DNA, 25 bp, Homo sapien
ggtggagtgggagcgcgtgtgtgcg

SEQ ID NO: 2707541 - DNA, 25 bp, Homo sapien
tgtctgtgacgggagcccgagtcac

SEQ ID NO: 2707542 - DNA, 25 bp, Homo sapien
gggctgccctttcgcgtgtccgcgc

SEQ ID NO: 2707543 - DNA, 25 bp, Homo sapien
cctccattttgcgagctcgtgtctg

SEQ ID NO: 2707544 - DNA, 25 bp, Homo sapien
caggagtgggacataaagctatgac

SEQ ID NO: 2707545 - DNA, 25 bp, Homo sapien
catttggccacaacaataacccagt

SEQ ID NO: 2707546 - DNA, 25 bp, Homo sapien
gatagatcaggtccttgccttgact

SEQ ID NO: 2707547 - DNA, 25 bp, Homo sapien
ccagggttacagattagtaaatgcc

SEQ ID NO: 2707548 - DNA, 25 bp, Homo sapien
taaaccatgtctgaacctgtacccc

SEQ ID NO: 2707549 - DNA, 25 bp, Homo sapien
cggaaccctggtatcctaaaccatg

SEQ ID NO: 2707550 - DNA, 25 bp, Homo sapien
tacatcccatgaaaccacaaagaga

SEQ ID NO: 2707551 - DNA, 25 bp, Homo sapien
ctgtacccctgtggccccagaaagg

SEQ ID NO: 2707552 - DNA, 25 bp, Homo sapien
aaaaatgaaggcttccaagggcagc

SEQ ID NO: 2707553 - DNA, 25 bp, Homo sapien
aaaatgaaggcttccaagggcagct

SEQ ID NO: 2707554 - DNA, 25 bp, Homo sapien
ctctggtttgtgctcatcgttggta

SEQ ID NO: 2707555 - DNA, 25 bp, Homo sapien
aaattctctggtttgtgctcatcgt

SEQ ID NO: 2707556 - DNA, 25 bp, Homo sapien
cgttggtagctatttgttcatcaag

SEQ ID NO: 2707557 - DNA, 25 bp, Homo sapien
catcaagagttgtgtagctggcttc

SEQ ID NO: 2707558 - DNA, 25 bp, Homo sapien
tcctggtatagtacttctgccctgt

SEQ ID NO: 2707559 - DNA, 25 bp, Homo sapien
agcactaggaaaactgccagtttgg

SEQ ID NO: 2707560 - DNA, 25 bp, Homo sapien
tgaggtacaaagttcctggactgtg

SEQ ID NO: 2707561 - DNA, 25 bp, Homo sapien
tctgccctgtttggaatggttacaa

SEQ ID NO: 2707562 - DNA, 25 bp, Homo sapien
taaagttctttgttgcaggctgatc

SEQ ID NO: 2707563 - DNA, 25 bp, Homo sapien
gctgttggagcggagtatggccctg

SEQ ID NO: 2707564 - DNA, 25 bp, Homo sapien
tattaaccacttaagtacagcagct

SEQ ID NO: 2707565 - DNA, 25 bp, Homo sapien
ccccaagtgctttctctattaacca

SEQ ID NO: 2707566 - DNA, 25 bp, Homo sapien
ctctgaaaatttcggggaatagctg

SEQ ID NO: 2707567 - DNA, 25 bp, Homo sapien
gaatttagaacagtacattgtgtgt

SEQ ID NO: 2707568 - DNA, 25 bp, Homo sapien
tccaatggcattggctgaactcagt

SEQ ID NO: 2707569 - DNA, 25 bp, Homo sapien
gaatagctgtgtaagagaaatgcac

SEQ ID NO: 2707570 - DNA, 25 bp, Homo sapien
ttcaaacaagccctctccagcggga

SEQ ID NO: 2707571 - DNA, 25 bp, Homo sapien
gagtgaccttcagccttgacacagt

SEQ ID NO: 2707572 - DNA, 25 bp, Homo sapien
taggaggcctgtatgactgagtgac

SEQ ID NO: 2707573 - DNA, 25 bp, Homo sapien
cagcgggatgcgtgtgttcaccaga

SEQ ID NO: 2707574 - DNA, 25 bp, Homo sapien
gctcccagaatcaatgcgtacactg

SEQ ID NO: 2707575 - DNA, 25 bp, Homo sapien
cagaatcaatgcgtacactggagtg

SEQ ID NO: 2707576 - DNA, 25 bp, Homo sapien
tctactgctcccagaatcaatgcgt

SEQ ID NO: 2707577 - DNA, 25 bp, Homo sapien
aatcaatgcgtacactggagtgatg

SEQ ID NO: 2707578 - DNA, 25 bp, Homo sapien
tattaataattcagccccaggtttg

SEQ ID NO: 2707579 - DNA, 25 bp, Homo sapien
aacctgctgattgaacttatttgcc

SEQ ID NO: 2707580 - DNA, 25 bp, Homo sapien
taaggcaataagctgctttgtccag

SEQ ID NO: 2707581 - DNA, 25 bp, Homo sapien
gagcttcgctattccaacctgctga

SEQ ID NO: 2707582 - DNA, 25 bp, Homo sapien
ctctgtaattgaaaacaatgcttac

SEQ ID NO: 2707583 - DNA, 25 bp, Homo sapien
gcattgacagttgatggtgctctcc

SEQ ID NO: 2707584 - DNA, 25 bp, Homo sapien
gatgtttagaaaccataagcattga

SEQ ID NO: 2707585 - DNA, 25 bp, Homo sapien
actggactgggttaagatgtttaga

SEQ ID NO: 2707586 - DNA, 25 bp, Homo sapien
tttcctacacctggttttcatctcc

SEQ ID NO: 2707587 - DNA, 25 bp, Homo sapien
taatatcctgatgtttaccctcctc

SEQ ID NO: 2707588 - DNA, 25 bp, Homo sapien
caaaccaggaagtgtgttatctttg

SEQ ID NO: 2707589 - DNA, 25 bp, Homo sapien
ctgtggcatgtggtgaacgtgaact

SEQ ID NO: 2707590 - DNA, 25 bp, Homo sapien
ttttagagctcaaacgacttcgtac

SEQ ID NO: 2707591 - DNA, 25 bp, Homo sapien
tgtttccagccttaagtctttccca

SEQ ID NO: 2707592 - DNA, 25 bp, Homo sapien
gagctcaaacgacttcgtaccacca

SEQ ID NO: 2707593 - DNA, 25 bp, Homo sapien
tgtcttagataataacaaagctgtg

SEQ ID NO: 2707594 - DNA, 25 bp, Homo sapien
atatgggtgacactgcccatctcca

SEQ ID NO: 2707595 - DNA, 25 bp, Homo sapien
gacactgcccatctccagtctctga

SEQ ID NO: 2707596 - DNA, 25 bp, Homo sapien
ctgatatgggtgacactgcccatct

SEQ ID NO: 2707597 - DNA, 25 bp, Homo sapien
acactgcccatctccagtctctgaa

SEQ ID NO: 2707598 - DNA, 25 bp, Homo sapien
tgctggtccacaggttcaaacgctg

SEQ ID NO: 2707599 - DNA, 25 bp, Homo sapien
taagagggctttctgcgagggaatc

SEQ ID NO: 2707600 - DNA, 25 bp, Homo sapien
cagatgggttctccacatgcctgct

SEQ ID NO: 2707601 - DNA, 25 bp, Homo sapien
tgaagaagaaggctactggcctggc

SEQ ID NO: 2707602 - DNA, 25 bp, Homo sapien
caaccaaatgtccatgaggtcggag

SEQ ID NO: 2707603 - DNA, 25 bp, Homo sapien
accaaatgtccatgaggtcggagtt

SEQ ID NO: 2707604 - DNA, 25 bp, Homo sapien
cagcacataaccatcaagcaaccaa

SEQ ID NO: 2707605 - DNA, 25 bp, Homo sapien
ttccctactcccagcacataaccat

SEQ ID NO: 2707606 - DNA, 25 bp, Homo sapien
aatccttggggacaagtttcaggca

SEQ ID NO: 2707607 - DNA, 25 bp, Homo sapien
gcttggcaggaccattcacgagagc

SEQ ID NO: 2707608 - DNA, 25 bp, Homo sapien
gtccaggcttggcaggaccattcac

SEQ ID NO: 2707609 - DNA, 25 bp, Homo sapien
ggcaggaccattcacgagagcacag

SEQ ID NO: 2707610 - DNA, 25 bp, Homo sapien
caggcttggcaggaccattcacgag

SEQ ID NO: 2707611 - DNA, 25 bp, Homo sapien
ctccttcctctgaaggagtcctgct

SEQ ID NO: 2707612 - DNA, 25 bp, Homo sapien
gctcctcctgacttgaaaaagttaa

SEQ ID NO: 2707613 - DNA, 25 bp, Homo sapien
ggctcctcctgacttgaaaaagtta

SEQ ID NO: 2707614 - DNA, 25 bp, Homo sapien
tctctgaggatacgatcttaggtgt

SEQ ID NO: 2707615 - DNA, 25 bp, Homo sapien
ctctgaggatacgatcttaggtgtc

SEQ ID NO: 2707616 - DNA, 25 bp, Homo sapien
ttggcaggcactccccgatccagtt

SEQ ID NO: 2707617 - DNA, 25 bp, Homo sapien
gtgcagctctaactgagcatcctta

SEQ ID NO: 2707618 - DNA, 25 bp, Homo sapien
catccttatagctcttgcaaaccat

SEQ ID NO: 2707619 - DNA, 25 bp, Homo sapien
cccgatccagtttagtgatgccaaa

SEQ ID NO: 2707620 - DNA, 25 bp, Homo sapien
tatcgatgggccacagaatagcagg

SEQ ID NO: 2707621 - DNA, 25 bp, Homo sapien
ttccatgcagccatcatataagtgg

SEQ ID NO: 2707622 - DNA, 25 bp, Homo sapien
tcctgcttcaaagatgaagccttgc

SEQ ID NO: 2707623 - DNA, 25 bp, Homo sapien
ttctgttacccagcatttccatgca

SEQ ID NO: 2707624 - DNA, 25 bp, Homo sapien
ctggcaaccaaaccaagggtttgct

SEQ ID NO: 2707625 - DNA, 25 bp, Homo sapien
tttccccaaattaagccagcattag

SEQ ID NO: 2707626 - DNA, 25 bp, Homo sapien
atggacacccaatagtgttcccaca

SEQ ID NO: 2707627 - DNA, 25 bp, Homo sapien
tccccaaattaagccagcattagaa

SEQ ID NO: 2707628 - DNA, 25 bp, Homo sapien
ctagcagggtgttggagatcaatac

SEQ ID NO: 2707629 - DNA, 25 bp, Homo sapien
aatactccaaggcaagtgaaaggca

SEQ ID NO: 2707630 - DNA, 25 bp, Homo sapien
taaataacaatccaagaccagtatg

SEQ ID NO: 2707631 - DNA, 25 bp, Homo sapien
gatcaatactccaaggcaagtgaaa

SEQ ID NO: 2707632 - DNA, 25 bp, Homo sapien
tgcaagaggaaagactttgctctca

SEQ ID NO: 2707633 - DNA, 25 bp, Homo sapien
caagaggaaagactttgctctcatc

SEQ ID NO: 2707634 - DNA, 25 bp, Homo sapien
aagaggaaagactttgctctcatca

SEQ ID NO: 2707635 - DNA, 25 bp, Homo sapien
ctgcaagaggaaagactttgctctc

SEQ ID NO: 2707636 - DNA, 25 bp, Homo sapien
gggacaacactttgtacttcctcag

SEQ ID NO: 2707637 - DNA, 25 bp, Homo sapien
ttcatgtgtgagctccagtcttgca

SEQ ID NO: 2707638 - DNA, 25 bp, Homo sapien
gctccagtcttgcacagaaactgct

SEQ ID NO: 2707639 - DNA, 25 bp, Homo sapien
ggatattacgaggattggggacaac

SEQ ID NO: 2707640 - DNA, 25 bp, Homo sapien
agtggtcccagagatgaatgggcaa

SEQ ID NO: 2707641 - DNA, 25 bp, Homo sapien
caagcctgctgagaatctgagatgt

SEQ ID NO: 2707642 - DNA, 25 bp, Homo sapien
gccaagcctgctgagaatctgagat

SEQ ID NO: 2707643 - DNA, 25 bp, Homo sapien
ggcttcaaaagtggtcccagagatg

SEQ ID NO: 2707644 - DNA, 25 bp, Homo sapien
tagcgaatactttaagagcaattgt

SEQ ID NO: 2707645 - DNA, 25 bp, Homo sapien
tgagtatgggagtaagaaaatgctt

SEQ ID NO: 2707646 - DNA, 25 bp, Homo sapien
gctgcttggtcttcattaggagggc

SEQ ID NO: 2707647 - DNA, 25 bp, Homo sapien
gaaaatgcttgtccttagcgaatac

SEQ ID NO: 2707648 - DNA, 25 bp, Homo sapien
tggccatagataggcaacaaggaac

SEQ ID NO: 2707649 - DNA, 25 bp, Homo sapien
ggcccaaatggccatagataggcaa

SEQ ID NO: 2707650 - DNA, 25 bp, Homo sapien
caaatggccatagataggcaacaag

SEQ ID NO: 2707651 - DNA, 25 bp, Homo sapien
gcccaggggcccaaatggccataga

SEQ ID NO: 2707652 - DNA, 25 bp, Homo sapien
tgctggtggatcaataatatcatcc

SEQ ID NO: 2707653 - DNA, 25 bp, Homo sapien
gctggtggatcaataatatcatcca

SEQ ID NO: 2707654 - DNA, 25 bp, Homo sapien
ctggtggatcaataatatcatccat

SEQ ID NO: 2707655 - DNA, 25 bp, Homo sapien
aaggacagctgtagcaccgccctgg

SEQ ID NO: 2707656 - DNA, 25 bp, Homo sapien
gccctggtgctatgctcattcaaag

SEQ ID NO: 2707657 - DNA, 25 bp, Homo sapien
tgtagcaccgccctggtgctatgct

SEQ ID NO: 2707658 - DNA, 25 bp, Homo sapien
tgctatgctcattcaaagactccag

SEQ ID NO: 2707659 - DNA, 25 bp, Homo sapien
gatgtactgtatctttgagctccag

SEQ ID NO: 2707660 - DNA, 25 bp, Homo sapien
cgggctgtagaatttaggtcccttg

SEQ ID NO: 2707661 - DNA, 25 bp, Homo sapien
cccactgatgcaggtgactgatagt

SEQ ID NO: 2707662 - DNA, 25 bp, Homo sapien
gattgtaaaagcaactgataagcca

SEQ ID NO: 2707663 - DNA, 25 bp, Homo sapien
gtcatccagctattaaccctagtac

SEQ ID NO: 2707664 - DNA, 25 bp, Homo sapien
tgtcatccagctattaaccctagta

SEQ ID NO: 2707665 - DNA, 25 bp, Homo sapien
tcatccagctattaaccctagtacc

SEQ ID NO: 2707666 - DNA, 25 bp, Homo sapien
tcaacaagtgtgactgatcccctat

SEQ ID NO: 2707667 - DNA, 25 bp, Homo sapien
gagttgaatctaccaaggcttctga

SEQ ID NO: 2707668 - DNA, 25 bp, Homo sapien
gctgaatgagctaggcacacagagt

SEQ ID NO: 2707669 - DNA, 25 bp, Homo sapien
gatcccctattacaagctgagagct

SEQ ID NO: 2707670 - DNA, 25 bp, Homo sapien
ggttaagtaacctgctagtggccaa

SEQ ID NO: 2707671 - DNA, 25 bp, Homo sapien
gagaagaggtaccaacaggcgaaca

SEQ ID NO: 2707672 - DNA, 25 bp, Homo sapien
ggaactctcctaagcatttgacaag

SEQ ID NO: 2707673 - DNA, 25 bp, Homo sapien
taagttgtagagtcaaggccccttg

SEQ ID NO: 2707674 - DNA, 25 bp, Homo sapien
cttctgagatgcggggcaagccgcc

SEQ ID NO: 2707675 - DNA, 25 bp, Homo sapien
ggatgtgaggtcagaaggctcaggg

SEQ ID NO: 2707676 - DNA, 25 bp, Homo sapien
aaggctcagggcctgcccggcttct

SEQ ID NO: 2707677 - DNA, 25 bp, Homo sapien
gatgcggggcaagccgcctcggcct

SEQ ID NO: 2707678 - DNA, 25 bp, Homo sapien
tttttcttctctgcattctggctgc

SEQ ID NO: 2707679 - DNA, 25 bp, Homo sapien
tttcttctctgcattctggctgctc

SEQ ID NO: 2707680 - DNA, 25 bp, Homo sapien
ttctctgcattctggctgctcctcc

SEQ ID NO: 2707681 - DNA, 25 bp, Homo sapien
tcttctctgcattctggctgctcct

SEQ ID NO: 2707682 - DNA, 25 bp, Homo sapien
caaccaattccgacttccaaacatg

SEQ ID NO: 2707683 - DNA, 25 bp, Homo sapien
aattccgacttccaaacatgcagag

SEQ ID NO: 2707684 - DNA, 25 bp, Homo sapien
gggaagagctgtgcctcagatacac

SEQ ID NO: 2707685 - DNA, 25 bp, Homo sapien
tcttcaacttcaaccaattccgact

SEQ ID NO: 2707686 - DNA, 25 bp, Homo sapien
tgggcttcgagtcaaacctcaacag

SEQ ID NO: 2707687 - DNA, 25 bp, Homo sapien
tgctcatccacaccaaaactctggg

SEQ ID NO: 2707688 - DNA, 25 bp, Homo sapien
agaggcaaagggcatatgttccact

SEQ ID NO: 2707689 - DNA, 25 bp, Homo sapien
tgttccacttgcttaattttactct

SEQ ID NO: 2707690 - DNA, 25 bp, Homo sapien
tttggctctccaagcagaataggga

SEQ ID NO: 2707691 - DNA, 25 bp, Homo sapien
tctccaagcagaatagggagtttct

SEQ ID NO: 2707692 - DNA, 25 bp, Homo sapien
gtctttggctctccaagcagaatag

SEQ ID NO: 2707693 - DNA, 25 bp, Homo sapien
aagcagaatagggagtttcttgctc

SEQ ID NO: 2707694 - DNA, 25 bp, Homo sapien
ccagggtactgagaagagcatgaga

SEQ ID NO: 2707695 - DNA, 25 bp, Homo sapien
agcaaaccttttggccagggtactg

SEQ ID NO: 2707696 - DNA, 25 bp, Homo sapien
gtctggaatcactgctgctgaagca

SEQ ID NO: 2707697 - DNA, 25 bp, Homo sapien
gctgctgaagcaaaccttttggcca

SEQ ID NO: 2707698 - DNA, 25 bp, Homo sapien
tataaagatactcttcactagagct

SEQ ID NO: 2707699 - DNA, 25 bp, Homo sapien
taaggaccggcttccaacatcatcc

SEQ ID NO: 2707700 - DNA, 25 bp, Homo sapien
tgtaattaggatcattcttaaggac

SEQ ID NO: 2707701 - DNA, 25 bp, Homo sapien
ctagagctcagggaaaataatttct

SEQ ID NO: 2707702 - DNA, 25 bp, Homo sapien
tccaaaaacgtggagggcacctcag

SEQ ID NO: 2707703 - DNA, 25 bp, Homo sapien
gccaaagagtggttgagcaggaata

SEQ ID NO: 2707704 - DNA, 25 bp, Homo sapien
gattgtgcccttcgctgtactcaaa

SEQ ID NO: 2707705 - DNA, 25 bp, Homo sapien
tgtactcaaacaatctaaggcctga

SEQ ID NO: 2707706 - DNA, 25 bp, Homo sapien
tcttcagcctcagccagactgtccc

SEQ ID NO: 2707707 - DNA, 25 bp, Homo sapien
cagcctcagccagactgtccctctg

SEQ ID NO: 2707708 - DNA, 25 bp, Homo sapien
tcagccagactgtccctctggccat

SEQ ID NO: 2707709 - DNA, 25 bp, Homo sapien
gcctcagccagactgtccctctggc

SEQ ID NO: 2707710 - DNA, 25 bp, Homo sapien
aacctgtttacagtctcttgtcagc

SEQ ID NO: 2707711 - DNA, 25 bp, Homo sapien
ttacagtctcttgtcagcaaataaa

SEQ ID NO: 2707712 - DNA, 25 bp, Homo sapien
cttgttaacctgtttacagtctctt

SEQ ID NO: 2707713 - DNA, 25 bp, Homo sapien
gtttacagtctcttgtcagcaaata

SEQ ID NO: 2707714 - DNA, 25 bp, Homo sapien
ttctgtttccctggtgccttcctcc

SEQ ID NO: 2707715 - DNA, 25 bp, Homo sapien
ctgtttccctggtgccttcctcctc

SEQ ID NO: 2707716 - DNA, 25 bp, Homo sapien
ctccatttctgtttccctggtgcct

SEQ ID NO: 2707717 - DNA, 25 bp, Homo sapien
ccatttctgtttccctggtgccttc

SEQ ID NO: 2707718 - DNA, 25 bp, Homo sapien
cctctggggcccctaagcccagttg

SEQ ID NO: 2707719 - DNA, 25 bp, Homo sapien
ctcctctggggcccctaagcccagt

SEQ ID NO: 2707720 - DNA, 25 bp, Homo sapien
tctggggcccctaagcccagttgtc

SEQ ID NO: 2707721 - DNA, 25 bp, Homo sapien
gtctcctctggggcccctaagccca

SEQ ID NO: 2707722 - DNA, 25 bp, Homo sapien
cctggaaccctgctttctaggaatt

SEQ ID NO: 2707723 - DNA, 25 bp, Homo sapien
agattttattgattcctgggcttcc

SEQ ID NO: 2707724 - DNA, 25 bp, Homo sapien
cctccttgccatcagaaagggagag

SEQ ID NO: 2707725 - DNA, 25 bp, Homo sapien
tttggcaggctctcacctggaaccc

SEQ ID NO: 2707726 - DNA, 25 bp, Homo sapien
ggtagaatgcccaaaagccaacaca

SEQ ID NO: 2707727 - DNA, 25 bp, Homo sapien
ggaaggtagaatgcccaaaagccaa

SEQ ID NO: 2707728 - DNA, 25 bp, Homo sapien
tatctcagggaaggtagaatgccca

SEQ ID NO: 2707729 - DNA, 25 bp, Homo sapien
cagggaaggtagaatgcccaaaagc

SEQ ID NO: 2707730 - DNA, 25 bp, Homo sapien
gacaacccagacatgaactattcgg

SEQ ID NO: 2707731 - DNA, 25 bp, Homo sapien
cagacatgaactattcggattctat

SEQ ID NO: 2707732 - DNA, 25 bp, Homo sapien
tgtccctggctggacaacccagaca

SEQ ID NO: 2707733 - DNA, 25 bp, Homo sapien
cctggctggacaacccagacatgaa

SEQ ID NO: 2707734 - DNA, 25 bp, Homo sapien
ggctccacatcttctggtgctagta

SEQ ID NO: 2707735 - DNA, 25 bp, Homo sapien
tggtgctagtaagttaactctgatc

SEQ ID NO: 2707736 - DNA, 25 bp, Homo sapien
tcttctagataagctggctccacat

SEQ ID NO: 2707737 - DNA, 25 bp, Homo sapien
aactctgatcttgtatgactttggc

SEQ ID NO: 2707738 - DNA, 25 bp, Homo sapien
tgagtttgaattagggctgttttca

SEQ ID NO: 2707739 - DNA, 25 bp, Homo sapien
ttttgggaggagcttcatcaaaagc

SEQ ID NO: 2707740 - DNA, 25 bp, Homo sapien
cttcctgaatgcttttgggaggagc

SEQ ID NO: 2707741 - DNA, 25 bp, Homo sapien
aatgcttttgggaggagcttcatca

SEQ ID NO: 2707742 - DNA, 25 bp, Homo sapien
aaggagattgctaacctgctcaagg

SEQ ID NO: 2707743 - DNA, 25 bp, Homo sapien
tattctcattaactggagtggccac

SEQ ID NO: 2707744 - DNA, 25 bp, Homo sapien
tatctcggcttgcatgcagcacgca

SEQ ID NO: 2707745 - DNA, 25 bp, Homo sapien
aaggtgaccccttgctggaaattca

SEQ ID NO: 2707746 - DNA, 25 bp, Homo sapien
cctcaattgctttctgaggacctgt

SEQ ID NO: 2707747 - DNA, 25 bp, Homo sapien
ggcctcaattgctttctgaggacct

SEQ ID NO: 2707748 - DNA, 25 bp, Homo sapien
gcctcaattgctttctgaggacctg

SEQ ID NO: 2707749 - DNA, 25 bp, Homo sapien
gcagccgtgtttgccgacttgcaga

SEQ ID NO: 2707750 - DNA, 25 bp, Homo sapien
taaccagccggatttgacactgtag

SEQ ID NO: 2707751 - DNA, 25 bp, Homo sapien
tatgttgcccattgggttggcggca

SEQ ID NO: 2707752 - DNA, 25 bp, Homo sapien
cttttccgggtccagcaggcagttg

SEQ ID NO: 2707753 - DNA, 25 bp, Homo sapien
ctttctccttctaataaatgcaccc

SEQ ID NO: 2707754 - DNA, 25 bp, Homo sapien
tccttctaataaatgcaccccatat

SEQ ID NO: 2707755 - DNA, 25 bp, Homo sapien
tcactttctccttctaataaatgca

SEQ ID NO: 2707756 - DNA, 25 bp, Homo sapien
ttctccttctaataaatgcacccca

SEQ ID NO: 2707757 - DNA, 25 bp, Homo sapien
gaatcgaattcagcaagttgtttgt

SEQ ID NO: 2707758 - DNA, 25 bp, Homo sapien
gcttctttgatatgctgctgctgac

SEQ ID NO: 2707759 - DNA, 25 bp, Homo sapien
ctatgcccacttagaatcgaattca

SEQ ID NO: 2707760 - DNA, 25 bp, Homo sapien
cccacttagaatcgaattcagcaag

SEQ ID NO: 2707761 - DNA, 25 bp, Homo sapien
ttatttccttttagcaggcacaaag

SEQ ID NO: 2707762 - DNA, 25 bp, Homo sapien
cctctcccctcaacccagagagcca

SEQ ID NO: 2707763 - DNA, 25 bp, Homo sapien
ctctcccctcaacccagagagccag

SEQ ID NO: 2707764 - DNA, 25 bp, Homo sapien
ctcccctcaacccagagagccagtt

SEQ ID NO: 2707765 - DNA, 25 bp, Homo sapien
cccctctcccctcaacccagagagc

SEQ ID NO: 2707766 - DNA, 25 bp, Homo sapien
tgaagcccagatgctccgtttctcc

SEQ ID NO: 2707767 - DNA, 25 bp, Homo sapien
ggaccacatgccataggaactgtca

SEQ ID NO: 2707768 - DNA, 25 bp, Homo sapien
tctggaacattgaagcccagatgct

SEQ ID NO: 2707769 - DNA, 25 bp, Homo sapien
agtcctgagcggaccacatgccata

SEQ ID NO: 2707770 - DNA, 25 bp, Homo sapien
tctttgacatgagacaatgagttcc

SEQ ID NO: 2707771 - DNA, 25 bp, Homo sapien
aattctttgacatgagacaatgagt

SEQ ID NO: 2707772 - DNA, 25 bp, Homo sapien
tcaattctttgacatgagacaatga

SEQ ID NO: 2707773 - DNA, 25 bp, Homo sapien
ttttcttgagtatcaattctttgac

SEQ ID NO: 2707774 - DNA, 25 bp, Homo sapien
tgggttttaggtcctctatactcat

SEQ ID NO: 2707775 - DNA, 25 bp, Homo sapien
tccagacctgctggcaatgaactgt

SEQ ID NO: 2707776 - DNA, 25 bp, Homo sapien
ataaaaggtcactaagtccacagtt

SEQ ID NO: 2707777 - DNA, 25 bp, Homo sapien
agccaaattccagacctgctggcaa

SEQ ID NO: 2707778 - DNA, 25 bp, Homo sapien
tcttcgcttcatttctttagcttta

SEQ ID NO: 2707779 - DNA, 25 bp, Homo sapien
tccacttcaggactaaggtttattg

SEQ ID NO: 2707780 - DNA, 25 bp, Homo sapien
cagatggcaccaggatgtggttgct

SEQ ID NO: 2707781 - DNA, 25 bp, Homo sapien
gaacaagagccacaggtaattgttg

SEQ ID NO: 2707782 - DNA, 25 bp, Homo sapien
tacatgggatgaaatagtttcctcc

SEQ ID NO: 2707783 - DNA, 25 bp, Homo sapien
gagtcagcttcataactaagaataa

SEQ ID NO: 2707784 - DNA, 25 bp, Homo sapien
aagcaaggctaatcgtttctccctg

SEQ ID NO: 2707785 - DNA, 25 bp, Homo sapien
ctgagagtcagcttcataactaaga

SEQ ID NO: 2707786 - DNA, 25 bp, Homo sapien
aaggctaatcgtttctccctgtcta

SEQ ID NO: 2707787 - DNA, 25 bp, Homo sapien
tgccttctctatgtctgtggcttca

SEQ ID NO: 2707788 - DNA, 25 bp, Homo sapien
tcaagcttcctctgacagccatgta

SEQ ID NO: 2707789 - DNA, 25 bp, Homo sapien
tcctctgacagccatgtagcctctg

SEQ ID NO: 2707790 - DNA, 25 bp, Homo sapien
gcttcaaaacacacaattcctttgc

SEQ ID NO: 2707791 - DNA, 25 bp, Homo sapien
ccagcctaagatgctgtttccagcc

SEQ ID NO: 2707792 - DNA, 25 bp, Homo sapien
tctccattttaaggagtaattggcc

SEQ ID NO: 2707793 - DNA, 25 bp, Homo sapien
cttgaggtcagacagtctctccatt

SEQ ID NO: 2707794 - DNA, 25 bp, Homo sapien
tttatatggagatgtaggatgttgg

SEQ ID NO: 2707795 - DNA, 25 bp, Homo sapien
gctgtttcagtaatcttccagccag

SEQ ID NO: 2707796 - DNA, 25 bp, Homo sapien
gttgcctgctgtttcagtaatcttc

SEQ ID NO: 2707797 - DNA, 25 bp, Homo sapien
taaagatttacttgagtacattttg

SEQ ID NO: 2707798 - DNA, 25 bp, Homo sapien
tacttgagtacattttgtccactgg

SEQ ID NO: 2707799 - DNA, 25 bp, Homo sapien
actctggctaatactcgggcctttt

SEQ ID NO: 2707800 - DNA, 25 bp, Homo sapien
ctctggctaatactcgggccttttt

SEQ ID NO: 2707801 - DNA, 25 bp, Homo sapien
tctggctaatactcgggcctttttc

SEQ ID NO: 2707802 - DNA, 25 bp, Homo sapien
aaaaccaagaactctggctaatact

SEQ ID NO: 2707803 - DNA, 25 bp, Homo sapien
cctggcttttgtgttaaattgcatt

SEQ ID NO: 2707804 - DNA, 25 bp, Homo sapien
gtacttcgatgacattagcagtcct

SEQ ID NO: 2707805 - DNA, 25 bp, Homo sapien
ttcgatgacattagcagtcctggct

SEQ ID NO: 2707806 - DNA, 25 bp, Homo sapien
cgatgacattagcagtcctggcttt

SEQ ID NO: 2707807 - DNA, 25 bp, Homo sapien
gagagagagagcctatatccctgaa

SEQ ID NO: 2707808 - DNA, 25 bp, Homo sapien
tatccctgaagaatcgagcattagt

SEQ ID NO: 2707809 - DNA, 25 bp, Homo sapien
gcaccaagatgctttaccacgcaca

SEQ ID NO: 2707810 - DNA, 25 bp, Homo sapien
tgttggcatcaggtacaaataaagc

SEQ ID NO: 2707811 - DNA, 25 bp, Homo sapien
tgtctggaaaatgtcgggaagaccc

SEQ ID NO: 2707812 - DNA, 25 bp, Homo sapien
ggcatgggctacagacagcagtttt

SEQ ID NO: 2707813 - DNA, 25 bp, Homo sapien
tggccactgaggtgtccactgtcca

SEQ ID NO: 2707814 - DNA, 25 bp, Homo sapien
ttttgctgggctaacactgtctgga

SEQ ID NO: 2707815 - DNA, 25 bp, Homo sapien
aaagcaccaaggttccctgcattgc

SEQ ID NO: 2707816 - DNA, 25 bp, Homo sapien
agatgaactggatctagaccatgaa

SEQ ID NO: 2707817 - DNA, 25 bp, Homo sapien
tgaataaataggagcacttttttat

SEQ ID NO: 2707818 - DNA, 25 bp, Homo sapien
caccaaggttccctgcattgctcat

SEQ ID NO: 2707819 - DNA, 25 bp, Homo sapien
gtttaactagatccaattcctcctc

SEQ ID NO: 2707820 - DNA, 25 bp, Homo sapien
agtcatttcccataggtactacatc

SEQ ID NO: 2707821 - DNA, 25 bp, Homo sapien
cacagaaatcagctgatgtttaact

SEQ ID NO: 2707822 - DNA, 25 bp, Homo sapien
tcagctgatgtttaactagatccaa

SEQ ID NO: 2707823 - DNA, 25 bp, Homo sapien
tcccttaattgtcctgctgtccaaa

SEQ ID NO: 2707824 - DNA, 25 bp, Homo sapien
ttttgaagtacacacttggttcaca

SEQ ID NO: 2707825 - DNA, 25 bp, Homo sapien
cacttggttcacaattattccctta

SEQ ID NO: 2707826 - DNA, 25 bp, Homo sapien
gtcctgctgtccaaaagaaccatga

SEQ ID NO: 2707827 - DNA, 25 bp, Homo sapien
ggaccaagaaccagccagcaaccac

SEQ ID NO: 2707828 - DNA, 25 bp, Homo sapien
caggaccaagaaccagccagcaacc

SEQ ID NO: 2707829 - DNA, 25 bp, Homo sapien
tgggtccaacaatcagatagacaca

SEQ ID NO: 2707830 - DNA, 25 bp, Homo sapien
ctgggtccaacaatcagatagacac

SEQ ID NO: 2707831 - DNA, 25 bp, Homo sapien
ctgcccaaacttccgcaatttcttt

SEQ ID NO: 2707832 - DNA, 25 bp, Homo sapien
gagttaaatctagaatgctagtgtc

SEQ ID NO: 2707833 - DNA, 25 bp, Homo sapien
tcactgcccaaacttccgcaatttc

SEQ ID NO: 2707834 - DNA, 25 bp, Homo sapien
taggagttaaatctagaatgctagt

SEQ ID NO: 2707835 - DNA, 25 bp, Homo sapien
aggaaatctgatggccccccccact

SEQ ID NO: 2707836 - DNA, 25 bp, Homo sapien
ccagtcaacatagggtactacagcc

SEQ ID NO: 2707837 - DNA, 25 bp, Homo sapien
ttaggaaatctgatggcccccccca

SEQ ID NO: 2707838 - DNA, 25 bp, Homo sapien
acccagtcaacatagggtactacag

SEQ ID NO: 2707839 - DNA, 25 bp, Homo sapien
catgcagagttgtatatagccaaaa

SEQ ID NO: 2707840 - DNA, 25 bp, Homo sapien
caaaacagctatgcagtggagttgc

SEQ ID NO: 2707841 - DNA, 25 bp, Homo sapien
tatgcttaactgttgctctgtcaaa

SEQ ID NO: 2707842 - DNA, 25 bp, Homo sapien
ccaaaataataaggtgcaaagctat

SEQ ID NO: 2707843 - DNA, 25 bp, Homo sapien
gaaggtaatttgataggctttccaa

SEQ ID NO: 2707844 - DNA, 25 bp, Homo sapien
taatcgtctggagaaacccacttgt

SEQ ID NO: 2707845 - DNA, 25 bp, Homo sapien
taataaacggtagaagatgctttgg

SEQ ID NO: 2707846 - DNA, 25 bp, Homo sapien
tcgctgttggttagacttaacactg

SEQ ID NO: 2707847 - DNA, 25 bp, Homo sapien
tagtgtgacctgaatacaaagtttg

SEQ ID NO: 2707848 - DNA, 25 bp, Homo sapien
acaagacaggttatgtgagaacaca

SEQ ID NO: 2707849 - DNA, 25 bp, Homo sapien
aactggttttagtgatagtgtgacc

SEQ ID NO: 2707850 - DNA, 25 bp, Homo sapien
cataatctgtagaggcattctccta

SEQ ID NO: 2707851 - DNA, 25 bp, Homo sapien
caccaataagtagattcaatactga

SEQ ID NO: 2707852 - DNA, 25 bp, Homo sapien
taacaaacataactgggagtgaaga

SEQ ID NO: 2707853 - DNA, 25 bp, Homo sapien
gtaataacagtaaaaccatatccac

SEQ ID NO: 2707854 - DNA, 25 bp, Homo sapien
agtagccctttacttacatgttagg

SEQ ID NO: 2707855 - DNA, 25 bp, Homo sapien
aactcaagttatttatctgttgata

SEQ ID NO: 2707856 - DNA, 25 bp, Homo sapien
ctccaaacccctatttcataactca

SEQ ID NO: 2707857 - DNA, 25 bp, Homo sapien
tccaaacccctatttcataactcaa

SEQ ID NO: 2707858 - DNA, 25 bp, Homo sapien
cactccaaacccctatttcataact

SEQ ID NO: 2707859 - DNA, 25 bp, Homo sapien
tcagcctcatcctgaatgcaataag

SEQ ID NO: 2707860 - DNA, 25 bp, Homo sapien
tgtcagcctcatcctgaatgcaata

SEQ ID NO: 2707861 - DNA, 25 bp, Homo sapien
gcctcatcctgaatgcaataagtag

SEQ ID NO: 2707862 - DNA, 25 bp, Homo sapien
tcatcctgaatgcaataagtagttc

SEQ ID NO: 2707863 - DNA, 25 bp, Homo sapien
ttaacaatctagagtaacagaaggg

SEQ ID NO: 2707864 - DNA, 25 bp, Homo sapien
atcatcaaagccgacttgagacgtc

SEQ ID NO: 2707865 - DNA, 25 bp, Homo sapien
ggattaacaatctagagtaacagaa

SEQ ID NO: 2707866 - DNA, 25 bp, Homo sapien
aagccgacttgagacgtcatcagga

SEQ ID NO: 2707867 - DNA, 25 bp, Homo sapien
aagatggctgacaaaaggtgaccaa

SEQ ID NO: 2707868 - DNA, 25 bp, Homo sapien
gatggctgacaaaaggtgaccaagc

SEQ ID NO: 2707869 - DNA, 25 bp, Homo sapien
aacactgaagctcaagatggctgac

SEQ ID NO: 2707870 - DNA, 25 bp, Homo sapien
agatggctgacaaaaggtgaccaag

SEQ ID NO: 2707871 - DNA, 25 bp, Homo sapien
cacagttcccagtgcagttcggatg

SEQ ID NO: 2707872 - DNA, 25 bp, Homo sapien
gatcttgtcaaatcccaaacaggta

SEQ ID NO: 2707873 - DNA, 25 bp, Homo sapien
caagaggtaccaggacttagaagct

SEQ ID NO: 2707874 - DNA, 25 bp, Homo sapien
tgcaggcaagaaaccatccagggaa

SEQ ID NO: 2707875 - DNA, 25 bp, Homo sapien
ggaaaagcaataagtcttagagctt

SEQ ID NO: 2707876 - DNA, 25 bp, Homo sapien
aaaagcaataagtcttagagcttac

SEQ ID NO: 2707877 - DNA, 25 bp, Homo sapien
gaaaagcaataagtcttagagctta

SEQ ID NO: 2707878 - DNA, 25 bp, Homo sapien
tgcaaggcaggccaattccccagtt

SEQ ID NO: 2707879 - DNA, 25 bp, Homo sapien
aaatgacctcctcttatcccagtat

SEQ ID NO: 2707880 - DNA, 25 bp, Homo sapien
tagtttaaaccctggatggtggatg

SEQ ID NO: 2707881 - DNA, 25 bp, Homo sapien
tttaaaggtgcaatccaatggagtc

SEQ ID NO: 2707882 - DNA, 25 bp, Homo sapien
aactgcggacccttgttctcgagga

SEQ ID NO: 2707883 - DNA, 25 bp, Homo sapien
tgtcaccgatgagttacaggccacc

SEQ ID NO: 2707884 - DNA, 25 bp, Homo sapien
taatgaaaccccacttgcggtcggc

SEQ ID NO: 2707885 - DNA, 25 bp, Homo sapien
ccttgggaggcatcttcaaagtcac

SEQ ID NO: 2707886 - DNA, 25 bp, Homo sapien
gaaagcaagtcttcagcaaccagct

SEQ ID NO: 2707887 - DNA, 25 bp, Homo sapien
agcaaccagcttaatagacctcaaa

SEQ ID NO: 2707888 - DNA, 25 bp, Homo sapien
tcttcagcaaccagcttaatagacc

SEQ ID NO: 2707889 - DNA, 25 bp, Homo sapien
gcaagtcttcagcaaccagcttaat

SEQ ID NO: 2707890 - DNA, 25 bp, Homo sapien
gccatctagccaagaccacattatt

SEQ ID NO: 2707891 - DNA, 25 bp, Homo sapien
tctgtactgccatctagccaagacc

SEQ ID NO: 2707892 - DNA, 25 bp, Homo sapien
gcagggggcctttcagcagtctgta

SEQ ID NO: 2707893 - DNA, 25 bp, Homo sapien
tattcattgcaacatccatttgtgt

SEQ ID NO: 2707894 - DNA, 25 bp, Homo sapien
caggtctcagtacaaaaggcttcag

SEQ ID NO: 2707895 - DNA, 25 bp, Homo sapien
tcaggtctcagtacaaaaggcttca

SEQ ID NO: 2707896 - DNA, 25 bp, Homo sapien
ggtctcagtacaaaaggcttcagaa

SEQ ID NO: 2707897 - DNA, 25 bp, Homo sapien
aggtctcagtacaaaaggcttcaga

SEQ ID NO: 2707898 - DNA, 25 bp, Homo sapien
gaagctgttatgcaccctagaaagc

SEQ ID NO: 2707899 - DNA, 25 bp, Homo sapien
tatggctaagcagctgcacggaagc

SEQ ID NO: 2707900 - DNA, 25 bp, Homo sapien
gcagctgcacggaagctgttatgca

SEQ ID NO: 2707901 - DNA, 25 bp, Homo sapien
aaataattatggctaagcagctgca

SEQ ID NO: 2707902 - DNA, 25 bp, Homo sapien
ttttcttcaagactaatcaacgacg

SEQ ID NO: 2707903 - DNA, 25 bp, Homo sapien
tcaacgacgtggactgttgttggtg

SEQ ID NO: 2707904 - DNA, 25 bp, Homo sapien
gaactctgggcaagcataagccatt

SEQ ID NO: 2707905 - DNA, 25 bp, Homo sapien
ggagaacatgatcaggaactctggg

SEQ ID NO: 2707906 - DNA, 25 bp, Homo sapien
cacttccaccacttactgagagtca

SEQ ID NO: 2707907 - DNA, 25 bp, Homo sapien
tttatggctcatcaaaaattttcag

SEQ ID NO: 2707908 - DNA, 25 bp, Homo sapien
ccaccacttactgagagtcatttct

SEQ ID NO: 2707909 - DNA, 25 bp, Homo sapien
caggtaggagtgtggtgtggcaaga

SEQ ID NO: 2707910 - DNA, 25 bp, Homo sapien
ataatattaaaccatgctaatgtcc

SEQ ID NO: 2707911 - DNA, 25 bp, Homo sapien
tgaattcagacacaggtagagtcct

SEQ ID NO: 2707912 - DNA, 25 bp, Homo sapien
acatgaatgctactgctcaccatca

SEQ ID NO: 2707913 - DNA, 25 bp, Homo sapien
ggtagagtccttacaacatgaatgc

SEQ ID NO: 2707914 - DNA, 25 bp, Homo sapien
ttatctactggaatttgaaggctga

SEQ ID NO: 2707915 - DNA, 25 bp, Homo sapien
ccgaggtgcttctatgatggcatat

SEQ ID NO: 2707916 - DNA, 25 bp, Homo sapien
ttcaggtggtcacttagggattctg

SEQ ID NO: 2707917 - DNA, 25 bp, Homo sapien
tggtcacttagggattctggctgtg

SEQ ID NO: 2707918 - DNA, 25 bp, Homo sapien
tggctgtgaccctcgactctgaatc

SEQ ID NO: 2707919 - DNA, 25 bp, Homo sapien
ctccatgtgtctattggcatgaaat

SEQ ID NO: 2707920 - DNA, 25 bp, Homo sapien
ttggcatgaaatggtggtggtttac

SEQ ID NO: 2707921 - DNA, 25 bp, Homo sapien
ctattggcatgaaatggtggtggtt

SEQ ID NO: 2707922 - DNA, 25 bp, Homo sapien
tccatgtgtctattggcatgaaatg

SEQ ID NO: 2707923 - DNA, 25 bp, Homo sapien
taaaaagacagaagctcaggaaggc

SEQ ID NO: 2707924 - DNA, 25 bp, Homo sapien
cggaggaaagtacgagcatggaatc

SEQ ID NO: 2707925 - DNA, 25 bp, Homo sapien
tcttggctcaagaacataaggtggc

SEQ ID NO: 2707926 - DNA, 25 bp, Homo sapien
tcttaaggaaggagttgcctctatc

SEQ ID NO: 2707927 - DNA, 25 bp, Homo sapien
tttctaatccactggcccccagaga

SEQ ID NO: 2707928 - DNA, 25 bp, Homo sapien
ttctaatccactggcccccagagaa

SEQ ID NO: 2707929 - DNA, 25 bp, Homo sapien
ttttctaatccactggcccccagag

SEQ ID NO: 2707930 - DNA, 25 bp, Homo sapien
tcccaaggtaggtcttaggtcttca

SEQ ID NO: 2707931 - DNA, 25 bp, Homo sapien
ccaaggtaggtcttaggtcttcaga

SEQ ID NO: 2707932 - DNA, 25 bp, Homo sapien
cccaaggtaggtcttaggtcttcag

SEQ ID NO: 2707933 - DNA, 25 bp, Homo sapien
gtggaaccagaatgtgagcatatat

SEQ ID NO: 2707934 - DNA, 25 bp, Homo sapien
taactgtactaacaggagtgggctg

SEQ ID NO: 2707935 - DNA, 25 bp, Homo sapien
accagaatgtgagcatatattttaa

SEQ ID NO: 2707936 - DNA, 25 bp, Homo sapien
tattttaactgtactaacaggagtg

SEQ ID NO: 2707937 - DNA, 25 bp, Homo sapien
gactggttggcggtagccattttca

SEQ ID NO: 2707938 - DNA, 25 bp, Homo sapien
tggttggcggtagccattttcagtg

SEQ ID NO: 2707939 - DNA, 25 bp, Homo sapien
ctgactggttggcggtagccatttt

SEQ ID NO: 2707940 - DNA, 25 bp, Homo sapien
ggcggtagccattttcagtgctatg

SEQ ID NO: 2707941 - DNA, 25 bp, Homo sapien
taaagtcctttgagcagtttggcac

SEQ ID NO: 2707942 - DNA, 25 bp, Homo sapien
gagtgcataaagtcctttgagcagt

SEQ ID NO: 2707943 - DNA, 25 bp, Homo sapien
tgcataaagtcctttgagcagtttg

SEQ ID NO: 2707944 - DNA, 25 bp, Homo sapien
ctaagagtgcataaagtcctttgag

SEQ ID NO: 2707945 - DNA, 25 bp, Homo sapien
taggacatattgatcaagagtttca

SEQ ID NO: 2707946 - DNA, 25 bp, Homo sapien
cttcctcctggagtcgtaggacata

SEQ ID NO: 2707947 - DNA, 25 bp, Homo sapien
tgagtagttatcttcctcctggagt

SEQ ID NO: 2707948 - DNA, 25 bp, Homo sapien
cctggagtcgtaggacatattgatc

SEQ ID NO: 2707949 - DNA, 25 bp, Homo sapien
cttgaactgctattatcttttcggc

SEQ ID NO: 2707950 - DNA, 25 bp, Homo sapien
aactcattttgcaccgcctgagttt

SEQ ID NO: 2707951 - DNA, 25 bp, Homo sapien
tgcaccgcctgagttttacaagcaa

SEQ ID NO: 2707952 - DNA, 25 bp, Homo sapien
acaagcaattggcttgaccttgaac

SEQ ID NO: 2707953 - DNA, 25 bp, Homo sapien
aaatcttcaccgttgccaacattgc

SEQ ID NO: 2707954 - DNA, 25 bp, Homo sapien
tcaccgttgccaacattgccaccat

SEQ ID NO: 2707955 - DNA, 25 bp, Homo sapien
atcttcaccgttgccaacattgcca

SEQ ID NO: 2707956 - DNA, 25 bp, Homo sapien
cttcaccgttgccaacattgccacc

SEQ ID NO: 2707957 - DNA, 25 bp, Homo sapien
ttatgcttttccaaccctggggtca

SEQ ID NO: 2707958 - DNA, 25 bp, Homo sapien
aacctctcaggaggaccatctcctc

SEQ ID NO: 2707959 - DNA, 25 bp, Homo sapien
gaggaccatctcctctttatgcttt

SEQ ID NO: 2707960 - DNA, 25 bp, Homo sapien
aaccctggggtcataaatcctatca

SEQ ID NO: 2707961 - DNA, 25 bp, Homo sapien
gctgaatatcttacaaattgtgact

SEQ ID NO: 2707962 - DNA, 25 bp, Homo sapien
tattttgcactctagatactcagcc

SEQ ID NO: 2707963 - DNA, 25 bp, Homo sapien
taagtgattgaactatccatgtgga

SEQ ID NO: 2707964 - DNA, 25 bp, Homo sapien
tacaggagtgcaccaactcgcgtgg

SEQ ID NO: 2707965 - DNA, 25 bp, Homo sapien
ttccagtaagctctgagactttccc

SEQ ID NO: 2707966 - DNA, 25 bp, Homo sapien
tttccagtaagctctgagactttcc

SEQ ID NO: 2707967 - DNA, 25 bp, Homo sapien
aagggcaccaaagcacttttataga

SEQ ID NO: 2707968 - DNA, 25 bp, Homo sapien
aaataagagttgaattcaagggcac

SEQ ID NO: 2707969 - DNA, 25 bp, Homo sapien
caaagcacttttatagataatcaca

SEQ ID NO: 2707970 - DNA, 25 bp, Homo sapien
gggcagttccagtttagaaataaga

SEQ ID NO: 2707971 - DNA, 25 bp, Homo sapien
gcatctccattatgtgcctctgcta

SEQ ID NO: 2707972 - DNA, 25 bp, Homo sapien
tcatgtggtctcacaggaaggcctt

SEQ ID NO: 2707973 - DNA, 25 bp, Homo sapien
gggcatctccattatgtgcctctgc

SEQ ID NO: 2707974 - DNA, 25 bp, Homo sapien
ggcatctccattatgtgcctctgct

SEQ ID NO: 2707975 - DNA, 25 bp, Homo sapien
caaagagaaccataccagcagggct

SEQ ID NO: 2707976 - DNA, 25 bp, Homo sapien
tcaaagagaaccataccagcagggc

SEQ ID NO: 2707977 - DNA, 25 bp, Homo sapien
gagaaccataccagcagggctaggt

SEQ ID NO: 2707978 - DNA, 25 bp, Homo sapien
aagagaaccataccagcagggctag

SEQ ID NO: 2707979 - DNA, 25 bp, Homo sapien
gccctctgcttcaaaatatctgatc

SEQ ID NO: 2707980 - DNA, 25 bp, Homo sapien
ccctctgcttcaaaatatctgatca

SEQ ID NO: 2707981 - DNA, 25 bp, Homo sapien
tgccctctgcttcaaaatatctgat

SEQ ID NO: 2707982 - DNA, 25 bp, Homo sapien
ctgccctctgcttcaaaatatctga

SEQ ID NO: 2707983 - DNA, 25 bp, Homo sapien
tggctgccatctcatacggaggacc

SEQ ID NO: 2707984 - DNA, 25 bp, Homo sapien
tcatagcagggtccttcatttgcat

SEQ ID NO: 2707985 - DNA, 25 bp, Homo sapien
acccctcatagcagggtccttcatt

SEQ ID NO: 2707986 - DNA, 25 bp, Homo sapien
atagcagggtccttcatttgcatca

SEQ ID NO: 2707987 - DNA, 25 bp, Homo sapien
cctcatagcagggtccttcatttgc

SEQ ID NO: 2707988 - DNA, 25 bp, Homo sapien
ctcttttccatgtccctagtcactc

SEQ ID NO: 2707989 - DNA, 25 bp, Homo sapien
tggcattgtggaaagggaggtttac

SEQ ID NO: 2707990 - DNA, 25 bp, Homo sapien
aaagggaggtttaccagatgtggag

SEQ ID NO: 2707991 - DNA, 25 bp, Homo sapien
tggagagtttgattatcactgctct

SEQ ID NO: 2707992 - DNA, 25 bp, Homo sapien
aatatcgccaaatcccatttcacgg

SEQ ID NO: 2707993 - DNA, 25 bp, Homo sapien
caaacgtcagtattccaggatgcat

SEQ ID NO: 2707994 - DNA, 25 bp, Homo sapien
gaaagttcatctgacaattgccaaa

SEQ ID NO: 2707995 - DNA, 25 bp, Homo sapien
gagaaaggccacaattaatatcgcc

SEQ ID NO: 2707996 - DNA, 25 bp, Homo sapien
aatggccccatttatctgcagacag

SEQ ID NO: 2707997 - DNA, 25 bp, Homo sapien
gtgaaatggccccatttatctgcag

SEQ ID NO: 2707998 - DNA, 25 bp, Homo sapien
ggaaggtgaaatggccccatttatc

SEQ ID NO: 2707999 - DNA, 25 bp, Homo sapien
gccccatttatctgcagacagtgaa

SEQ ID NO: 2708000 - DNA, 25 bp, Homo sapien
tgcaaaggtttggatacacgtagaa

SEQ ID NO: 2708001 - DNA, 25 bp, Homo sapien
tataagggtgccaaagaagtgcctg

SEQ ID NO: 2708002 - DNA, 25 bp, Homo sapien
gaagtgcctggactttgtctatcca

SEQ ID NO: 2708003 - DNA, 25 bp, Homo sapien
cacgtagaaatgctccatcacttgc

SEQ ID NO: 2708004 - DNA, 25 bp, Homo sapien
cagtgctgtcgttttggtcagatgt

SEQ ID NO: 2708005 - DNA, 25 bp, Homo sapien
gccaacagtgctgtcgttttggtca

SEQ ID NO: 2708006 - DNA, 25 bp, Homo sapien
caacagtgctgtcgttttggtcaga

SEQ ID NO: 2708007 - DNA, 25 bp, Homo sapien
aacagtgctgtcgttttggtcagat

SEQ ID NO: 2708008 - DNA, 25 bp, Homo sapien
tatcaatgatttgtggacattatgc

SEQ ID NO: 2708009 - DNA, 25 bp, Homo sapien
tggacattatgcaacaatgctatct

SEQ ID NO: 2708010 - DNA, 25 bp, Homo sapien
gcaacaatgctatcttcactgaagt

SEQ ID NO: 2708011 - DNA, 25 bp, Homo sapien
tttgtggacattatgcaacaatgct

SEQ ID NO: 2708012 - DNA, 25 bp, Homo sapien
ccattcggaaggcatgaagtacaca

SEQ ID NO: 2708013 - DNA, 25 bp, Homo sapien
gagggccctttccaatcaactgaga

SEQ ID NO: 2708014 - DNA, 25 bp, Homo sapien
taatatctctgagtggcaacaagct

SEQ ID NO: 2708015 - DNA, 25 bp, Homo sapien
gcaatgattactagatagctcagcc

SEQ ID NO: 2708016 - DNA, 25 bp, Homo sapien
catggtatccaactctcaaataagc

SEQ ID NO: 2708017 - DNA, 25 bp, Homo sapien
gattgattcatatcccatggtatcc

SEQ ID NO: 2708018 - DNA, 25 bp, Homo sapien
gagaccttcttatggcttgcataga

SEQ ID NO: 2708019 - DNA, 25 bp, Homo sapien
tggctaagacaaagagtaacagggc

SEQ ID NO: 2708020 - DNA, 25 bp, Homo sapien
tgccttttgacaactagtagagaaa

SEQ ID NO: 2708021 - DNA, 25 bp, Homo sapien
ttgccttttgacaactagtagagaa

SEQ ID NO: 2708022 - DNA, 25 bp, Homo sapien
gattggcatatcaccgacttagttg

SEQ ID NO: 2708023 - DNA, 25 bp, Homo sapien
cattcgttgctgtgaatgagtgccg

SEQ ID NO: 2708024 - DNA, 25 bp, Homo sapien
ctgaagaaaataccccagcagaagc

SEQ ID NO: 2708025 - DNA, 25 bp, Homo sapien
cagcagaagcttgcatagattggca

SEQ ID NO: 2708026 - DNA, 25 bp, Homo sapien
cttctgtaggtatttcggtttgtga

SEQ ID NO: 2708027 - DNA, 25 bp, Homo sapien
tggcttctgtaggtatttcggtttg

SEQ ID NO: 2708028 - DNA, 25 bp, Homo sapien
taggtatttcggtttgtgatgccta

SEQ ID NO: 2708029 - DNA, 25 bp, Homo sapien
ctgtaggtatttcggtttgtgatgc

SEQ ID NO: 2708030 - DNA, 25 bp, Homo sapien
tcctccagctcatgtatgattagtg

SEQ ID NO: 2708031 - DNA, 25 bp, Homo sapien
tcatgtatgattagtgagatacgct

SEQ ID NO: 2708032 - DNA, 25 bp, Homo sapien
tagtgagatacgctgagggtacccg

SEQ ID NO: 2708033 - DNA, 25 bp, Homo sapien
tgagggtacccgtattgtttctcaa

SEQ ID NO: 2708034 - DNA, 25 bp, Homo sapien
gattcattgttgatttatctagcca

SEQ ID NO: 2708035 - DNA, 25 bp, Homo sapien
gcttaaagactgttgattcattgtt

SEQ ID NO: 2708036 - DNA, 25 bp, Homo sapien
ttgatttatctagccagtctagaac

SEQ ID NO: 2708037 - DNA, 25 bp, Homo sapien
gtgcttaaagactgttgattcattg

SEQ ID NO: 2708038 - DNA, 25 bp, Homo sapien
gtttgtaaacaatgacagactatga

SEQ ID NO: 2708039 - DNA, 25 bp, Homo sapien
gagcctggagtttaattctacaatc

SEQ ID NO: 2708040 - DNA, 25 bp, Homo sapien
tctacaatcaggaatcattacattg

SEQ ID NO: 2708041 - DNA, 25 bp, Homo sapien
cttgattgacattgcaaactagagc

SEQ ID NO: 2708042 - DNA, 25 bp, Homo sapien
tggttagtccttctgctgatctgca

SEQ ID NO: 2708043 - DNA, 25 bp, Homo sapien
ttggttagtccttctgctgatctgc

SEQ ID NO: 2708044 - DNA, 25 bp, Homo sapien
ggttagtccttctgctgatctgcac

SEQ ID NO: 2708045 - DNA, 25 bp, Homo sapien
aaagtttgtcttcaagcttgacaat

SEQ ID NO: 2708046 - DNA, 25 bp, Homo sapien
gggaataggcaggctatgagagctt

SEQ ID NO: 2708047 - DNA, 25 bp, Homo sapien
agtttgtcttcaagcttgacaatca

SEQ ID NO: 2708048 - DNA, 25 bp, Homo sapien
gtttgtcttcaagcttgacaatcat

SEQ ID NO: 2708049 - DNA, 25 bp, Homo sapien
ctgaagtcagagtccggagtaagtc

SEQ ID NO: 2708050 - DNA, 25 bp, Homo sapien
ggagtaagtcgcttttccgccgcat

SEQ ID NO: 2708051 - DNA, 25 bp, Homo sapien
cagcaatcgcagtgtgagggtgacc

SEQ ID NO: 2708052 - DNA, 25 bp, Homo sapien
gaggtcattgcaagacgtgccgctc

SEQ ID NO: 2708053 - DNA, 25 bp, Homo sapien
taagatagttagcacatgggacgaa

SEQ ID NO: 2708054 - DNA, 25 bp, Homo sapien
gaaacatgcccgagtcacagtgact

SEQ ID NO: 2708055 - DNA, 25 bp, Homo sapien
tggaaaggccacaccattaaactgt

SEQ ID NO: 2708056 - DNA, 25 bp, Homo sapien
gctgagtctgtcatcctagtgtgaa

SEQ ID NO: 2708057 - DNA, 25 bp, Homo sapien
gacattataatgctcacgacagtga

SEQ ID NO: 2708058 - DNA, 25 bp, Homo sapien
gactcagtagcaaggacttgtgctt

SEQ ID NO: 2708059 - DNA, 25 bp, Homo sapien
tggaattagaatgaccctaccataa

SEQ ID NO: 2708060 - DNA, 25 bp, Homo sapien
ccatccctgggatattggtatgata

SEQ ID NO: 2708061 - DNA, 25 bp, Homo sapien
gcaattgcaggtgtcattttctcca

SEQ ID NO: 2708062 - DNA, 25 bp, Homo sapien
ttctccagacgtggaagctagctta

SEQ ID NO: 2708063 - DNA, 25 bp, Homo sapien
tcacggtgagtttcttagggtatca

SEQ ID NO: 2708064 - DNA, 25 bp, Homo sapien
ctgaagcttgccctagtgacctgtg

SEQ ID NO: 2708065 - DNA, 25 bp, Homo sapien
tgctgagaactgacgacatgtagac

SEQ ID NO: 2708066 - DNA, 25 bp, Homo sapien
gaaaaagtaacatgagcaaggcccc

SEQ ID NO: 2708067 - DNA, 25 bp, Homo sapien
gatgatgtaaaacgtcccctctgct

SEQ ID NO: 2708068 - DNA, 25 bp, Homo sapien
gagagattttgacatccgccaccca

SEQ ID NO: 2708069 - DNA, 25 bp, Homo sapien
tagctatttgtgtgccgccactcgg

SEQ ID NO: 2708070 - DNA, 25 bp, Homo sapien
aacgtgaccgaggttggtttgcctg

SEQ ID NO: 2708071 - DNA, 25 bp, Homo sapien
ggttggtttgcctgaataacagcag

SEQ ID NO: 2708072 - DNA, 25 bp, Homo sapien
caaagtaggacatttgtttcagtgg

SEQ ID NO: 2708073 - DNA, 25 bp, Homo sapien
tatcaactgatgttttcttgtcaca

SEQ ID NO: 2708074 - DNA, 25 bp, Homo sapien
gatagagtgcaagtaggtgagtatt

SEQ ID NO: 2708075 - DNA, 25 bp, Homo sapien
caactgatgttttcttgtcacagat

SEQ ID NO: 2708076 - DNA, 25 bp, Homo sapien
tcaacttgatagagtgcaagtaggt

SEQ ID NO: 2708077 - DNA, 25 bp, Homo sapien
cttttgtcaaccttgagcctcttct

SEQ ID NO: 2708078 - DNA, 25 bp, Homo sapien
acaaaaactacgcatcccttcagag

SEQ ID NO: 2708079 - DNA, 25 bp, Homo sapien
cgcatcccttcagagtggtgttgac

SEQ ID NO: 2708080 - DNA, 25 bp, Homo sapien
tatcaacagtctgccgagaatggtc

SEQ ID NO: 2708081 - DNA, 25 bp, Homo sapien
tattctcagggataatgacattgat

SEQ ID NO: 2708082 - DNA, 25 bp, Homo sapien
tgatcatgttctgtatgctactatg

SEQ ID NO: 2708083 - DNA, 25 bp, Homo sapien
ttcaaaaagagacctattctcaggg

SEQ ID NO: 2708084 - DNA, 25 bp, Homo sapien
gtatgctactatgaatagcacaaac

SEQ ID NO: 2708085 - DNA, 25 bp, Homo sapien
ctgaacaagcaacacctggcctcat

SEQ ID NO: 2708086 - DNA, 25 bp, Homo sapien
gacatagatgccatccaaaattttt

SEQ ID NO: 2708087 - DNA, 25 bp, Homo sapien
catttccttccaggattaagtcatc

SEQ ID NO: 2708088 - DNA, 25 bp, Homo sapien
caaaatttttctgatactcttgttt

SEQ ID NO: 2708089 - DNA, 25 bp, Homo sapien
tcagcttgctgaactgtcccttttt

SEQ ID NO: 2708090 - DNA, 25 bp, Homo sapien
aacagcctgcttcttacctttaata

SEQ ID NO: 2708091 - DNA, 25 bp, Homo sapien
acctttaataagtttgagtttgctg

SEQ ID NO: 2708092 - DNA, 25 bp, Homo sapien
aagtttgagtttgctgtgctcagca

SEQ ID NO: 2708093 - DNA, 25 bp, Homo sapien
gctgtgctcagcataattggacaca

SEQ ID NO: 2708094 - DNA, 25 bp, Homo sapien
tgggctgaggaaagacgtctgcttt

SEQ ID NO: 2708095 - DNA, 25 bp, Homo sapien
ccacgccaagttgcgcagtctgcat

SEQ ID NO: 2708096 - DNA, 25 bp, Homo sapien
tgtgagtgcacaccatctggcaacc

SEQ ID NO: 2708097 - DNA, 25 bp, Homo sapien
tcgtccatccggcagagcacacatg

SEQ ID NO: 2708098 - DNA, 25 bp, Homo sapien
caccaagctgaagggcacgtaccat

SEQ ID NO: 2708099 - DNA, 25 bp, Homo sapien
gtcagtagcctctttttcaccaagc

SEQ ID NO: 2708100 - DNA, 25 bp, Homo sapien
tttcaccaagctgaagggcacgtac

SEQ ID NO: 2708101 - DNA, 25 bp, Homo sapien
gcctctgtgtcagtagcctcttttt

SEQ ID NO: 2708102 - DNA, 25 bp, Homo sapien
tgtccaaacacccatacccttagca

SEQ ID NO: 2708103 - DNA, 25 bp, Homo sapien
tctgtccaaacacccatacccttag

SEQ ID NO: 2708104 - DNA, 25 bp, Homo sapien
ttctgtccaaacacccataccctta

SEQ ID NO: 2708105 - DNA, 25 bp, Homo sapien
gtccaaacacccatacccttagcag

SEQ ID NO: 2708106 - DNA, 25 bp, Homo sapien
caacaacatctaagccagtttgctg

SEQ ID NO: 2708107 - DNA, 25 bp, Homo sapien
gttcagcccatagtaaactttcctc

SEQ ID NO: 2708108 - DNA, 25 bp, Homo sapien
agaaatccctgtggtcataaactgc

SEQ ID NO: 2708109 - DNA, 25 bp, Homo sapien
tgtgttgacattgggagaaatccct

SEQ ID NO: 2708110 - DNA, 25 bp, Homo sapien
aaagcacagtccagtttaataaacg

SEQ ID NO: 2708111 - DNA, 25 bp, Homo sapien
taataaacgttgaacatccttgacg

SEQ ID NO: 2708112 - DNA, 25 bp, Homo sapien
tccttgacgacagcacctgtcttat

SEQ ID NO: 2708113 - DNA, 25 bp, Homo sapien
ctcctgacaggtacagtccttgctc

SEQ ID NO: 2708114 - DNA, 25 bp, Homo sapien
tattcagcagggttaattttttcaa

SEQ ID NO: 2708115 - DNA, 25 bp, Homo sapien
aatggctgaaaggtcaccaatttcc

SEQ ID NO: 2708116 - DNA, 25 bp, Homo sapien
tgcttcataatgatgctaatggctg

SEQ ID NO: 2708117 - DNA, 25 bp, Homo sapien
ggtcaccaatttcctggctgtttat

SEQ ID NO: 2708118 - DNA, 25 bp, Homo sapien
cacatttcggcagagttttaaactt

SEQ ID NO: 2708119 - DNA, 25 bp, Homo sapien
ttacatgccacatttcggcagagtt

SEQ ID NO: 2708120 - DNA, 25 bp, Homo sapien
gccacatttcggcagagttttaaac

SEQ ID NO: 2708121 - DNA, 25 bp, Homo sapien
catgccacatttcggcagagtttta

SEQ ID NO: 2708122 - DNA, 25 bp, Homo sapien
tgaggacaagttccacgctgtaaga

SEQ ID NO: 2708123 - DNA, 25 bp, Homo sapien
gaggacaagttccacgctgtaagaa

SEQ ID NO: 2708124 - DNA, 25 bp, Homo sapien
catgaggacaagttccacgctgtaa

SEQ ID NO: 2708125 - DNA, 25 bp, Homo sapien
gacatgaggacaagttccacgctgt

SEQ ID NO: 2708126 - DNA, 25 bp, Homo sapien
agatgatagtaaaagctggttgtaa

SEQ ID NO: 2708127 - DNA, 25 bp, Homo sapien
taaaagatgatagtaaaagctggtt

SEQ ID NO: 2708128 - DNA, 25 bp, Homo sapien
catccccagagttaaaagatgatag

SEQ ID NO: 2708129 - DNA, 25 bp, Homo sapien
taattgcttcatccccagagttaaa

SEQ ID NO: 2708130 - DNA, 25 bp, Homo sapien
tgatattgtgatagaggtcaacagg

SEQ ID NO: 2708131 - DNA, 25 bp, Homo sapien
gatgtaagcatcagtgaagtctgat

SEQ ID NO: 2708132 - DNA, 25 bp, Homo sapien
tctcatgtcagttcttaatagatac

SEQ ID NO: 2708133 - DNA, 25 bp, Homo sapien
ggttaattaaaacataggatatgct

SEQ ID NO: 2708134 - DNA, 25 bp, Homo sapien
tctgcacacgaatttcacagcactg

SEQ ID NO: 2708135 - DNA, 25 bp, Homo sapien
tcaaattccctcaaagagactcttt

SEQ ID NO: 2708136 - DNA, 25 bp, Homo sapien
gactcttttttcttggatctgcaca

SEQ ID NO: 2708137 - DNA, 25 bp, Homo sapien
tcttggatctgcacacgaatttcac

SEQ ID NO: 2708138 - DNA, 25 bp, Homo sapien
ttccttgttgggaagttttctatca

SEQ ID NO: 2708139 - DNA, 25 bp, Homo sapien
tccttgttgggaagttttctatcat

SEQ ID NO: 2708140 - DNA, 25 bp, Homo sapien
gacttcggtgtctatggagagtgat

SEQ ID NO: 2708141 - DNA, 25 bp, Homo sapien
ttgacttcggtgtctatggagagtg

SEQ ID NO: 2708142 - DNA, 25 bp, Homo sapien
cttcggtgtctatggagagtgataa

SEQ ID NO: 2708143 - DNA, 25 bp, Homo sapien
acttcggtgtctatggagagtgata

SEQ ID NO: 2708144 - DNA, 25 bp, Homo sapien
ctttgagaggttataggaaagtcgc

SEQ ID NO: 2708145 - DNA, 25 bp, Homo sapien
tgctcatgtcattagtgtgtggtga

SEQ ID NO: 2708146 - DNA, 25 bp, Homo sapien
gagatgttgtgaaccctctttgaga

SEQ ID NO: 2708147 - DNA, 25 bp, Homo sapien
tcatgggagggactgtgccaagagc

SEQ ID NO: 2708148 - DNA, 25 bp, Homo sapien
tagtcaccggtgatttgtcagatgc

SEQ ID NO: 2708149 - DNA, 25 bp, Homo sapien
cactctgactgtaggtgtgccctag

SEQ ID NO: 2708150 - DNA, 25 bp, Homo sapien
ttatttggtggccactagtcaccgg

SEQ ID NO: 2708151 - DNA, 25 bp, Homo sapien
taggatcccgtaggtccagcatgga

SEQ ID NO: 2708152 - DNA, 25 bp, Homo sapien
gaggacaaaacagattttcctgact

SEQ ID NO: 2708153 - DNA, 25 bp, Homo sapien
ctgtttttgctgccttaaggacagg

SEQ ID NO: 2708154 - DNA, 25 bp, Homo sapien
ctttttgaaacgagtctggcttaat

SEQ ID NO: 2708155 - DNA, 25 bp, Homo sapien
ctctttttgaaacgagtctggctta

SEQ ID NO: 2708156 - DNA, 25 bp, Homo sapien
gagatcagataacaatttgattttt

SEQ ID NO: 2708157 - DNA, 25 bp, Homo sapien
tttgaaacgagtctggcttaatatc

SEQ ID NO: 2708158 - DNA, 25 bp, Homo sapien
agaacaatggatagaatctttttag

SEQ ID NO: 2708159 - DNA, 25 bp, Homo sapien
tatggattcagcttaagaacatact

SEQ ID NO: 2708160 - DNA, 25 bp, Homo sapien
ggatagaatctttttagtgccatct

SEQ ID NO: 2708161 - DNA, 25 bp, Homo sapien
catactcatagcttaagaacaatgg

SEQ ID NO: 2708162 - DNA, 25 bp, Homo sapien
tctgcctgtgagttggaaaatttgc

SEQ ID NO: 2708163 - DNA, 25 bp, Homo sapien
cagctctgcctgtgagttggaaaat

SEQ ID NO: 2708164 - DNA, 25 bp, Homo sapien
ctgcctgtgagttggaaaatttgcc

SEQ ID NO: 2708165 - DNA, 25 bp, Homo sapien
gctctgcctgtgagttggaaaattt

SEQ ID NO: 2708166 - DNA, 25 bp, Homo sapien
gaggacttagtcaaagcagtgtaga

SEQ ID NO: 2708167 - DNA, 25 bp, Homo sapien
atgattagaagaggacttagtcaaa

SEQ ID NO: 2708168 - DNA, 25 bp, Homo sapien
tagaagaggacttagtcaaagcagt

SEQ ID NO: 2708169 - DNA, 25 bp, Homo sapien
cttagtcaaagcagtgtagaaatga

SEQ ID NO: 2708170 - DNA, 25 bp, Homo sapien
cagatgtttgagacggttctcttcc

SEQ ID NO: 2708171 - DNA, 25 bp, Homo sapien
ttccatgcagatgtttgagacggtt

SEQ ID NO: 2708172 - DNA, 25 bp, Homo sapien
gcagatgtttgagacggttctcttc

SEQ ID NO: 2708173 - DNA, 25 bp, Homo sapien
catgcagatgtttgagacggttctc

SEQ ID NO: 2708174 - DNA, 25 bp, Homo sapien
ggcactaagtatccaagctgcttgt

SEQ ID NO: 2708175 - DNA, 25 bp, Homo sapien
tcagtaaacagtcaaacaggaaaga

SEQ ID NO: 2708176 - DNA, 25 bp, Homo sapien
cacattcttcaagcccgagatggtt

SEQ ID NO: 2708177 - DNA, 25 bp, Homo sapien
gcctcagtaaacagtcaaacaggaa

SEQ ID NO: 2708178 - DNA, 25 bp, Homo sapien
tactgttctcctagcatcacttgag

SEQ ID NO: 2708179 - DNA, 25 bp, Homo sapien
gaagcatggttcctctttatatgtc

SEQ ID NO: 2708180 - DNA, 25 bp, Homo sapien
cattaccattatactgttctcctag

SEQ ID NO: 2708181 - DNA, 25 bp, Homo sapien
gtctcatttgcagtagggtgctcca

SEQ ID NO: 2708182 - DNA, 25 bp, Homo sapien
tcatggagcatagttctcatccgaa

SEQ ID NO: 2708183 - DNA, 25 bp, Homo sapien
tcaggaggcacatacagaggagtgt

SEQ ID NO: 2708184 - DNA, 25 bp, Homo sapien
gctagttctactgcccttatcagag

SEQ ID NO: 2708185 - DNA, 25 bp, Homo sapien
tatcagaggctgcatcaaggctgga

SEQ ID NO: 2708186 - DNA, 25 bp, Homo sapien
gcaggtcctgtaggttggactccca

SEQ ID NO: 2708187 - DNA, 25 bp, Homo sapien
aggtcctgtaggttggactcccagt

SEQ ID NO: 2708188 - DNA, 25 bp, Homo sapien
actcccagtttcagcatacatcacc

SEQ ID NO: 2708189 - DNA, 25 bp, Homo sapien
ggactcccagtttcagcatacatca

SEQ ID NO: 2708190 - DNA, 25 bp, Homo sapien
aaccctttgccaacaacatcatcat

SEQ ID NO: 2708191 - DNA, 25 bp, Homo sapien
tcaaccctttgccaacaacatcatc

SEQ ID NO: 2708192 - DNA, 25 bp, Homo sapien
cttcaaccctttgccaacaacatca

SEQ ID NO: 2708193 - DNA, 25 bp, Homo sapien
caacaacatcatcatcattaatcat

SEQ ID NO: 2708194 - DNA, 25 bp, Homo sapien
gtgctcccgttgaagaacactgatg

SEQ ID NO: 2708195 - DNA, 25 bp, Homo sapien
aaatcagctgcccatcaatctgacc

SEQ ID NO: 2708196 - DNA, 25 bp, Homo sapien
gaacaatgtgctcccgttgaagaac

SEQ ID NO: 2708197 - DNA, 25 bp, Homo sapien
gaaccacaagaacaatgtgctcccg

SEQ ID NO: 2708198 - DNA, 25 bp, Homo sapien
tccagtacaacacctctcatcccca

SEQ ID NO: 2708199 - DNA, 25 bp, Homo sapien
tctcttccagtacaacacctctcat

SEQ ID NO: 2708200 - DNA, 25 bp, Homo sapien
tcctccatattgctggggcactttt

SEQ ID NO: 2708201 - DNA, 25 bp, Homo sapien
cctccatattgctggggcacttttt

SEQ ID NO: 2708202 - DNA, 25 bp, Homo sapien
agcttttgagaaaggtggactgata

SEQ ID NO: 2708203 - DNA, 25 bp, Homo sapien
gagaaaggtggactgatagactcat

SEQ ID NO: 2708204 - DNA, 25 bp, Homo sapien
cttttgagaaaggtggactgataga

SEQ ID NO: 2708205 - DNA, 25 bp, Homo sapien
tttgagaaaggtggactgatagact

SEQ ID NO: 2708206 - DNA, 25 bp, Homo sapien
gtaaagtaatagaggtctcattgct

SEQ ID NO: 2708207 - DNA, 25 bp, Homo sapien
ttataaagatccagattggcattcc

SEQ ID NO: 2708208 - DNA, 25 bp, Homo sapien
aagtaaagtaatagaggtctcattg

SEQ ID NO: 2708209 - DNA, 25 bp, Homo sapien
acatgtgtgaagtttataaagatcc

SEQ ID NO: 2708210 - DNA, 25 bp, Homo sapien
agtgggtggtcctgagatcctaagg

SEQ ID NO: 2708211 - DNA, 25 bp, Homo sapien
taatgcctattagttcctggttcag

SEQ ID NO: 2708212 - DNA, 25 bp, Homo sapien
tctttacaagtaatgcagtaatgcc

SEQ ID NO: 2708213 - DNA, 25 bp, Homo sapien
agatcctaaggatttgtgccactgc

SEQ ID NO: 2708214 - DNA, 25 bp, Homo sapien
cacttcttagctccagatttctcca

SEQ ID NO: 2708215 - DNA, 25 bp, Homo sapien
tgaattgcatggagctcctcaaagt

SEQ ID NO: 2708216 - DNA, 25 bp, Homo sapien
catactgaattgcatggagctcctc

SEQ ID NO: 2708217 - DNA, 25 bp, Homo sapien
ggagctcctcaaagttatcttgcca

SEQ ID NO: 2708218 - DNA, 25 bp, Homo sapien
aacaggacaagactttctggctgac

SEQ ID NO: 2708219 - DNA, 25 bp, Homo sapien
ggacaagactttctggctgacaaac

SEQ ID NO: 2708220 - DNA, 25 bp, Homo sapien
gtgcaggtaacaggacaagactttc

SEQ ID NO: 2708221 - DNA, 25 bp, Homo sapien
agtgcaggtaacaggacaagacttt

SEQ ID NO: 2708222 - DNA, 25 bp, Homo sapien
tctggtattttgttgccccttcatc

SEQ ID NO: 2708223 - DNA, 25 bp, Homo sapien
tggtattttgttgccccttcatctc

SEQ ID NO: 2708224 - DNA, 25 bp, Homo sapien
tggtctggtattttgttgccccttc

SEQ ID NO: 2708225 - DNA, 25 bp, Homo sapien
ctgtggtcctggtctggtattttgt

SEQ ID NO: 2708226 - DNA, 25 bp, Homo sapien
ctttgccatttgtcagaatggcact

SEQ ID NO: 2708227 - DNA, 25 bp, Homo sapien
gtctcattcttttagtgtgttggtg

SEQ ID NO: 2708228 - DNA, 25 bp, Homo sapien
ctgtgtctcattcttttagtgtgtt

SEQ ID NO: 2708229 - DNA, 25 bp, Homo sapien
atttgtcagaatggcactgtgtctc

SEQ ID NO: 2708230 - DNA, 25 bp, Homo sapien
ggattggaggcgtgagttcccggtg

SEQ ID NO: 2708231 - DNA, 25 bp, Homo sapien
agtgaaccactcgggcccgagcagc

SEQ ID NO: 2708232 - DNA, 25 bp, Homo sapien
gaggcgtgagttcccggtgtctgga

SEQ ID NO: 2708233 - DNA, 25 bp, Homo sapien
cgtgagttcccggtgtctggaatct

SEQ ID NO: 2708234 - DNA, 25 bp, Homo sapien
ggccagtattggccaggtaggcagt

SEQ ID NO: 2708235 - DNA, 25 bp, Homo sapien
ccagtattggccaggtaggcagtga

SEQ ID NO: 2708236 - DNA, 25 bp, Homo sapien
gtattggccaggtaggcagtgacat

SEQ ID NO: 2708237 - DNA, 25 bp, Homo sapien
aggaggtgttcaggccaccactgta

SEQ ID NO: 2708238 - DNA, 25 bp, Homo sapien
cctggtgagagaagtacccaggagg

SEQ ID NO: 2708239 - DNA, 25 bp, Homo sapien
gtgagagaagtacccaggaggtagt

SEQ ID NO: 2708240 - DNA, 25 bp, Homo sapien
gtttccacttttttgtgggcgatgc

SEQ ID NO: 2708241 - DNA, 25 bp, Homo sapien
cagggcctggtgagagaagtaccca

SEQ ID NO: 2708242 - DNA, 25 bp, Homo sapien
cgttcccctttcttgtggggctgtg

SEQ ID NO: 2708243 - DNA, 25 bp, Homo sapien
atcgttcccctttcttgtggggctg

SEQ ID NO: 2708244 - DNA, 25 bp, Homo sapien
ccagggagccctccagggaccttca

SEQ ID NO: 2708245 - DNA, 25 bp, Homo sapien
ctccagggagccctccagggacctt

SEQ ID NO: 2708246 - DNA, 25 bp, Homo sapien
tccagggagccctccagggaccttc

SEQ ID NO: 2708247 - DNA, 25 bp, Homo sapien
cagggagccctccagggaccttcat

SEQ ID NO: 2708248 - DNA, 25 bp, Homo sapien
tgaaccagttgtagaactcgggcat

SEQ ID NO: 2708249 - DNA, 25 bp, Homo sapien
cttgaaccagttgtagaactcgggc

SEQ ID NO: 2708250 - DNA, 25 bp, Homo sapien
ttgaaccagttgtagaactcgggca

SEQ ID NO: 2708251 - DNA, 25 bp, Homo sapien
gaaccagttgtagaactcgggcatc

SEQ ID NO: 2708252 - DNA, 25 bp, Homo sapien
cgatggcaataagcccacaccgtgc

SEQ ID NO: 2708253 - DNA, 25 bp, Homo sapien
tccacgatggcaataagcccacacc

SEQ ID NO: 2708254 - DNA, 25 bp, Homo sapien
acgatggcaataagcccacaccgtg

SEQ ID NO: 2708255 - DNA, 25 bp, Homo sapien
cacgatggcaataagcccacaccgt

SEQ ID NO: 2708256 - DNA, 25 bp, Homo sapien
acttcccggtctgtggtgaagacct

SEQ ID NO: 2708257 - DNA, 25 bp, Homo sapien
tcccggtctgtggtgaagaccttga

SEQ ID NO: 2708258 - DNA, 25 bp, Homo sapien
ggttttgtgcacttcccggtctgtg

SEQ ID NO: 2708259 - DNA, 25 bp, Homo sapien
tgtgcacttcccggtctgtggtgaa

SEQ ID NO: 2708260 - DNA, 25 bp, Homo sapien
gtatatcagctcagcaaatttcaag

SEQ ID NO: 2708261 - DNA, 25 bp, Homo sapien
gctcagcaaatttcaagcccaggcc

SEQ ID NO: 2708262 - DNA, 25 bp, Homo sapien
ctcagcaaatttcaagcccaggcct

SEQ ID NO: 2708263 - DNA, 25 bp, Homo sapien
tatcagctcagcaaatttcaagccc

SEQ ID NO: 2708264 - DNA, 25 bp, Homo sapien
ccttgaggaccggcacctgcacttt

SEQ ID NO: 2708265 - DNA, 25 bp, Homo sapien
ttgaggaccggcacctgcactttcc

SEQ ID NO: 2708266 - DNA, 25 bp, Homo sapien
cccttctgccggctcctgggacttg

SEQ ID NO: 2708267 - DNA, 25 bp, Homo sapien
tgcactttcccttctgccggctcct

SEQ ID NO: 2708268 - DNA, 25 bp, Homo sapien
ctggagacaatggtattccttcagt

SEQ ID NO: 2708269 - DNA, 25 bp, Homo sapien
tggagacaatggtattccttcagtc

SEQ ID NO: 2708270 - DNA, 25 bp, Homo sapien
gagacaatggtattccttcagtctg

SEQ ID NO: 2708271 - DNA, 25 bp, Homo sapien
ggagacaatggtattccttcagtct

SEQ ID NO: 2708272 - DNA, 25 bp, Homo sapien
catagacacatctgtaactgttaca

SEQ ID NO: 2708273 - DNA, 25 bp, Homo sapien
atagacacatctgtaactgttacat

SEQ ID NO: 2708274 - DNA, 25 bp, Homo sapien
tagacacatctgtaactgttacatt

SEQ ID NO: 2708275 - DNA, 25 bp, Homo sapien
agcaacatcgttgaaaaattctaga

SEQ ID NO: 2708276 - DNA, 25 bp, Homo sapien
cccacataattcatgctgacgaagg

SEQ ID NO: 2708277 - DNA, 25 bp, Homo sapien
ttcccaaactgtatgttacaaaagc

SEQ ID NO: 2708278 - DNA, 25 bp, Homo sapien
cattgatcattgtaattctaaagag

SEQ ID NO: 2708279 - DNA, 25 bp, Homo sapien
ttaggtgaaagtcctttgagcaaaa

SEQ ID NO: 2708280 - DNA, 25 bp, Homo sapien
cacaaggctagtctcctcttctaca

SEQ ID NO: 2708281 - DNA, 25 bp, Homo sapien
ggctagtctcctcttctacaatatt

SEQ ID NO: 2708282 - DNA, 25 bp, Homo sapien
aggtggttgggatgatgaaggccac

SEQ ID NO: 2708283 - DNA, 25 bp, Homo sapien
atgatgaaggccacaaggctagtct

SEQ ID NO: 2708284 - DNA, 25 bp, Homo sapien
tgcaatgtccataaccaaaactagg

SEQ ID NO: 2708285 - DNA, 25 bp, Homo sapien
gcaaggttgtcaatgaaaactgtgg

SEQ ID NO: 2708286 - DNA, 25 bp, Homo sapien
ggcatcaaacaaggtgcaatgtcca

SEQ ID NO: 2708287 - DNA, 25 bp, Homo sapien
actcaatgaggcaagctggggaaga

SEQ ID NO: 2708288 - DNA, 25 bp, Homo sapien
ttctaaatgtgcctcagactgatag

SEQ ID NO: 2708289 - DNA, 25 bp, Homo sapien
actgatagtatgaataacagtcctg

SEQ ID NO: 2708290 - DNA, 25 bp, Homo sapien
cattatagtcccaatttagctcccc

SEQ ID NO: 2708291 - DNA, 25 bp, Homo sapien
caactcccaacattatagtcccaat

SEQ ID NO: 2708292 - DNA, 25 bp, Homo sapien
gggagctctggaggctccagtatcc

SEQ ID NO: 2708293 - DNA, 25 bp, Homo sapien
gagctctggaggctccagtatccat

SEQ ID NO: 2708294 - DNA, 25 bp, Homo sapien
agggagctctggaggctccagtatc

SEQ ID NO: 2708295 - DNA, 25 bp, Homo sapien
agagggagctctggaggctccagta

SEQ ID NO: 2708296 - DNA, 25 bp, Homo sapien
acaccacctacaggggtcccacagt

SEQ ID NO: 2708297 - DNA, 25 bp, Homo sapien
cacctacaggggtcccacagtagcc

SEQ ID NO: 2708298 - DNA, 25 bp, Homo sapien
accacctacaggggtcccacagtag

SEQ ID NO: 2708299 - DNA, 25 bp, Homo sapien
ccacctacaggggtcccacagtagc

SEQ ID NO: 2708300 - DNA, 25 bp, Homo sapien
catgacaggagtggaaagctgacaa

SEQ ID NO: 2708301 - DNA, 25 bp, Homo sapien
ggagcgttcatgtggtgtcagtttc

SEQ ID NO: 2708302 - DNA, 25 bp, Homo sapien
tgctggctttttattgaaatcacgt

SEQ ID NO: 2708303 - DNA, 25 bp, Homo sapien
caaaattatcttggatactgtaggt

SEQ ID NO: 2708304 - DNA, 25 bp, Homo sapien
cagaactttgtggttttacaccctg

SEQ ID NO: 2708305 - DNA, 25 bp, Homo sapien
gaagtttcttagatgcagaactttg

SEQ ID NO: 2708306 - DNA, 25 bp, Homo sapien
ttttccccacaggaccagctatttc

SEQ ID NO: 2708307 - DNA, 25 bp, Homo sapien
tgtccacccagggagatctgctgtt

SEQ ID NO: 2708308 - DNA, 25 bp, Homo sapien
ctgcctaatgagttcccactcatcc

SEQ ID NO: 2708309 - DNA, 25 bp, Homo sapien
atgagttcccactcatcctttaaga

SEQ ID NO: 2708310 - DNA, 25 bp, Homo sapien
gcctaatgagttcccactcatcctt

SEQ ID NO: 2708311 - DNA, 25 bp, Homo sapien
taatgagttcccactcatcctttaa

SEQ ID NO: 2708312 - DNA, 25 bp, Homo sapien
tcttcctaactcttggtcaagagaa

SEQ ID NO: 2708313 - DNA, 25 bp, Homo sapien
gatgttaaatttcaccataaccact

SEQ ID NO: 2708314 - DNA, 25 bp, Homo sapien
ccactggagatggtaaggatggtaa

SEQ ID NO: 2708315 - DNA, 25 bp, Homo sapien
atggtaaggacaaattagccaagtt

SEQ ID NO: 2708316 - DNA, 25 bp, Homo sapien
aatggtaacagggatatcaccactg

SEQ ID NO: 2708317 - DNA, 25 bp, Homo sapien
ggacctgagatctaataacatcccc

SEQ ID NO: 2708318 - DNA, 25 bp, Homo sapien
ggccttcggaacatgtagagggaaa

SEQ ID NO: 2708319 - DNA, 25 bp, Homo sapien
catgtagagggaaatggatgcttta

SEQ ID NO: 2708320 - DNA, 25 bp, Homo sapien
gatctaataacatcccctgttctcc

SEQ ID NO: 2708321 - DNA, 25 bp, Homo sapien
tactgccaggtgacactgtttgaag

SEQ ID NO: 2708322 - DNA, 25 bp, Homo sapien
gaaatcttctgtattttgcatggca

SEQ ID NO: 2708323 - DNA, 25 bp, Homo sapien
gttgaagcttgcctgattctggtcc

SEQ ID NO: 2708324 - DNA, 25 bp, Homo sapien
tagaagatgggcagtacagactgag

SEQ ID NO: 2708325 - DNA, 25 bp, Homo sapien
aacgttcatctaaaagaggcgaggg

SEQ ID NO: 2708326 - DNA, 25 bp, Homo sapien
tcagaaacgttcatctaaaagaggc

SEQ ID NO: 2708327 - DNA, 25 bp, Homo sapien
cagaaacgttcatctaaaagaggcg

SEQ ID NO: 2708328 - DNA, 25 bp, Homo sapien
gaaacgttcatctaaaagaggcgag

SEQ ID NO: 2708329 - DNA, 25 bp, Homo sapien
aggcttggaaagtatacctcttctc

SEQ ID NO: 2708330 - DNA, 25 bp, Homo sapien
ttggaaagtatacctcttctctagc

SEQ ID NO: 2708331 - DNA, 25 bp, Homo sapien
ttcccacagactggtggataaaacc

SEQ ID NO: 2708332 - DNA, 25 bp, Homo sapien
tccttgctttggaagagaaaggctt

SEQ ID NO: 2708333 - DNA, 25 bp, Homo sapien
ctggaggttggctggctgtcgtcct

SEQ ID NO: 2708334 - DNA, 25 bp, Homo sapien
gaggttggctggctgtcgtcctcca

SEQ ID NO: 2708335 - DNA, 25 bp, Homo sapien
tgtctggaggttggctggctgtcgt

SEQ ID NO: 2708336 - DNA, 25 bp, Homo sapien
gttggctggctgtcgtcctccagca

SEQ ID NO: 2708337 - DNA, 25 bp, Homo sapien
gaagcacattacttgctgtcaagaa

SEQ ID NO: 2708338 - DNA, 25 bp, Homo sapien
ttggtgtgcaaagatgagtgaagca

SEQ ID NO: 2708339 - DNA, 25 bp, Homo sapien
tattatgtggaggatattgggttct

SEQ ID NO: 2708340 - DNA, 25 bp, Homo sapien
aatttatcaatcacattgggaattt

SEQ ID NO: 2708341 - DNA, 25 bp, Homo sapien
tctacacagccactgagatgtccaa

SEQ ID NO: 2708342 - DNA, 25 bp, Homo sapien
ccaagtcagagacagtttatcagca

SEQ ID NO: 2708343 - DNA, 25 bp, Homo sapien
caagtcagagacagtttatcagcag

SEQ ID NO: 2708344 - DNA, 25 bp, Homo sapien
agtcagagacagtttatcagcagct

SEQ ID NO: 2708345 - DNA, 25 bp, Homo sapien
tggagctttctcgttgtcccaactg

SEQ ID NO: 2708346 - DNA, 25 bp, Homo sapien
catggttcagagagggtaagcgctt

SEQ ID NO: 2708347 - DNA, 25 bp, Homo sapien
tcaactgggtagaaagactcagccg

SEQ ID NO: 2708348 - DNA, 25 bp, Homo sapien
gtcatgttcagattgggttccctca

SEQ ID NO: 2708349 - DNA, 25 bp, Homo sapien
taagaactgtgttgtaggaagcaaa

SEQ ID NO: 2708350 - DNA, 25 bp, Homo sapien
gacattggaggtgagatgaacttga

SEQ ID NO: 2708351 - DNA, 25 bp, Homo sapien
gctgttggaccattcacagtacaga

SEQ ID NO: 2708352 - DNA, 25 bp, Homo sapien
catggctgatggttagtatctaact

SEQ ID NO: 2708353 - DNA, 25 bp, Homo sapien
tgcccaggaggtagattgttgcttc

SEQ ID NO: 2708354 - DNA, 25 bp, Homo sapien
ttttctacacaagtcactgaccggc

SEQ ID NO: 2708355 - DNA, 25 bp, Homo sapien
ggacattgcatagcctcagtgacta

SEQ ID NO: 2708356 - DNA, 25 bp, Homo sapien
ctccttgtgctgaaaattgccggct

SEQ ID NO: 2708357 - DNA, 25 bp, Homo sapien
gctctgtggatcctatgtaattacc

SEQ ID NO: 2708358 - DNA, 25 bp, Homo sapien
aagtcaagtgactcaatgcatgtcc

SEQ ID NO: 2708359 - DNA, 25 bp, Homo sapien
ctcagtagctgactcggtgccttcc

SEQ ID NO: 2708360 - DNA, 25 bp, Homo sapien
tgagatagctgatgtgaaagtgctc

SEQ ID NO: 2708361 - DNA, 25 bp, Homo sapien
gatggcctaagttggattatgttga

SEQ ID NO: 2708362 - DNA, 25 bp, Homo sapien
tggattatgttgattgcaatcacag

SEQ ID NO: 2708363 - DNA, 25 bp, Homo sapien
ttctctttttggatggcctaagttg

SEQ ID NO: 2708364 - DNA, 25 bp, Homo sapien
tgggaatcattctccagtgatttct

SEQ ID NO: 2708365 - DNA, 25 bp, Homo sapien
gcctcttgacggatctggcatattt

SEQ ID NO: 2708366 - DNA, 25 bp, Homo sapien
ctggcctcttgacggatctggcata

SEQ ID NO: 2708367 - DNA, 25 bp, Homo sapien
ggcctcttgacggatctggcatatt

SEQ ID NO: 2708368 - DNA, 25 bp, Homo sapien
cctcttgacggatctggcatatttc

SEQ ID NO: 2708369 - DNA, 25 bp, Homo sapien
tgcatcttacaccacatacctcagt

SEQ ID NO: 2708370 - DNA, 25 bp, Homo sapien
gacatcacctttgagtttccagcct

SEQ ID NO: 2708371 - DNA, 25 bp, Homo sapien
cctcctggtgatattgtttgctgca

SEQ ID NO: 2708372 - DNA, 25 bp, Homo sapien
ccttctgaatcaagaggcgacatga

SEQ ID NO: 2708373 - DNA, 25 bp, Homo sapien
caggcactgtggttagtgatagctt

SEQ ID NO: 2708374 - DNA, 25 bp, Homo sapien
ttcctgtgttcctatgaagacaggc

SEQ ID NO: 2708375 - DNA, 25 bp, Homo sapien
gttcctatgaagacaggcactgtgg

SEQ ID NO: 2708376 - DNA, 25 bp, Homo sapien
tagtgatagctttcactgaactgga

SEQ ID NO: 2708377 - DNA, 25 bp, Homo sapien
caaaaccaagagtgcactcatgaca

SEQ ID NO: 2708378 - DNA, 25 bp, Homo sapien
acaaaaccaagagtgcactcatgac

SEQ ID NO: 2708379 - DNA, 25 bp, Homo sapien
tgccctacacagtgcgtgggtctgc

SEQ ID NO: 2708380 - DNA, 25 bp, Homo sapien
tacacagtgcgtgggtctgctccag

SEQ ID NO: 2708381 - DNA, 25 bp, Homo sapien
ctctgccctacacagtgcgtgggtc

SEQ ID NO: 2708382 - DNA, 25 bp, Homo sapien
cttgccatagacagctacctgttcc

SEQ ID NO: 2708383 - DNA, 25 bp, Homo sapien
gaggaggattgatctggtgttggca

SEQ ID NO: 2708384 - DNA, 25 bp, Homo sapien
gagaggaggattgatctggtgttgg

SEQ ID NO: 2708385 - DNA, 25 bp, Homo sapien
agagagaggaggattgatctggtgt

SEQ ID NO: 2708386 - DNA, 25 bp, Homo sapien
ctggtgttggcattggggaagtaaa

SEQ ID NO: 2708387 - DNA, 25 bp, Homo sapien
tttcccaggaaattgagtagtttga

SEQ ID NO: 2708388 - DNA, 25 bp, Homo sapien
gattggcgagtttaggagaagtatc

SEQ ID NO: 2708389 - DNA, 25 bp, Homo sapien
gcatgcatggctaaacacttttctt

SEQ ID NO: 2708390 - DNA, 25 bp, Homo sapien
tgccatataataggagcaggcctcc

SEQ ID NO: 2708391 - DNA, 25 bp, Homo sapien
tgaccaccttcgcagctctttcggt

SEQ ID NO: 2708392 - DNA, 25 bp, Homo sapien
ctgctagcaagttaatgaccacctt

SEQ ID NO: 2708393 - DNA, 25 bp, Homo sapien
ggtgtagatttatggcagcaattac

SEQ ID NO: 2708394 - DNA, 25 bp, Homo sapien
ctctttcggtcccacaactattggg

SEQ ID NO: 2708395 - DNA, 25 bp, Homo sapien
tgaagtcatgttcctgctagcactg

SEQ ID NO: 2708396 - DNA, 25 bp, Homo sapien
gaaaaggcctgacagtacgtttggc

SEQ ID NO: 2708397 - DNA, 25 bp, Homo sapien
tagcactgtgatctaaaagcagggc

SEQ ID NO: 2708398 - DNA, 25 bp, Homo sapien
tatcttgcacatagggaaagagcag

SEQ ID NO: 2708399 - DNA, 25 bp, Homo sapien
tctttccggccagagggatgtcatc

SEQ ID NO: 2708400 - DNA, 25 bp, Homo sapien
tggccaatttctatcaggagtgctt

SEQ ID NO: 2708401 - DNA, 25 bp, Homo sapien
aaaacctgagagacactcctggcca

SEQ ID NO: 2708402 - DNA, 25 bp, Homo sapien
aaagaaacacgaaatgcagctggca

SEQ ID NO: 2708403 - DNA, 25 bp, Homo sapien
ttcagagagagcgccgagtaagatt

SEQ ID NO: 2708404 - DNA, 25 bp, Homo sapien
gccgagtaagattgttttagtctca

SEQ ID NO: 2708405 - DNA, 25 bp, Homo sapien
ttagtctcacaatgtggtcggtcat

SEQ ID NO: 2708406 - DNA, 25 bp, Homo sapien
tgttttagtctcacaatgtggtcgg

SEQ ID NO: 2708407 - DNA, 25 bp, Homo sapien
gaggcagttcagatatacctctata

SEQ ID NO: 2708408 - DNA, 25 bp, Homo sapien
cagatatacctctataccgcaacat

SEQ ID NO: 2708409 - DNA, 25 bp, Homo sapien
gcagttcagatatacctctataccg

SEQ ID NO: 2708410 - DNA, 25 bp, Homo sapien
agttcagatatacctctataccgca

SEQ ID NO: 2708411 - DNA, 25 bp, Homo sapien
tgacaaaggagaaaatgcgaacttg

SEQ ID NO: 2708412 - DNA, 25 bp, Homo sapien
ggataaacttttagatccgatgaca

SEQ ID NO: 2708413 - DNA, 25 bp, Homo sapien
gaaaatgcgaacttggccagttgca

SEQ ID NO: 2708414 - DNA, 25 bp, Homo sapien
tctttgtgccggtgccaggataaac

SEQ ID NO: 2708415 - DNA, 25 bp, Homo sapien
tcaagctgttctgatggttacagcc

SEQ ID NO: 2708416 - DNA, 25 bp, Homo sapien
ggctgcagtatcagcacagtgtttc

SEQ ID NO: 2708417 - DNA, 25 bp, Homo sapien
gttacagcctggtttgaggacatcc

SEQ ID NO: 2708418 - DNA, 25 bp, Homo sapien
aggacatccttgaattcaggctgca

SEQ ID NO: 2708419 - DNA, 25 bp, Homo sapien
caggtgctaatggaacgaaggacca

SEQ ID NO: 2708420 - DNA, 25 bp, Homo sapien
tgctaatggaacgaaggaccaggac

SEQ ID NO: 2708421 - DNA, 25 bp, Homo sapien
ggtgggccaggtgctaatggaacga

SEQ ID NO: 2708422 - DNA, 25 bp, Homo sapien
gccaggtgctaatggaacgaaggac

SEQ ID NO: 2708423 - DNA, 25 bp, Homo sapien
tctttatcctcatctgcagttgtca

SEQ ID NO: 2708424 - DNA, 25 bp, Homo sapien
ttctttatcctcatctgcagttgtc

SEQ ID NO: 2708425 - DNA, 25 bp, Homo sapien
ctttatcctcatctgcagttgtcat

SEQ ID NO: 2708426 - DNA, 25 bp, Homo sapien
aacgtgctaacgtgcaggttctcag

SEQ ID NO: 2708427 - DNA, 25 bp, Homo sapien
aaggcgatgatttaccctgtgattc

SEQ ID NO: 2708428 - DNA, 25 bp, Homo sapien
cagcgattctgattcgtggaatttc

SEQ ID NO: 2708429 - DNA, 25 bp, Homo sapien
gattctcagacttcacatgtaccag

SEQ ID NO: 2708430 - DNA, 25 bp, Homo sapien
tactgtgtagcttaagaaatgtcaa

SEQ ID NO: 2708431 - DNA, 25 bp, Homo sapien
actgtgtctgtcctctttttggaat

SEQ ID NO: 2708432 - DNA, 25 bp, Homo sapien
tctgtactgtgtagcttaagaaatg

SEQ ID NO: 2708433 - DNA, 25 bp, Homo sapien
gtagcttaagaaatgtcaaaaccag

SEQ ID NO: 2708434 - DNA, 25 bp, Homo sapien
gatgtagatcccttcgccctttcct

SEQ ID NO: 2708435 - DNA, 25 bp, Homo sapien
tggatgtagatcccttcgccctttc

SEQ ID NO: 2708436 - DNA, 25 bp, Homo sapien
tgtagatcccttcgccctttcctcc

SEQ ID NO: 2708437 - DNA, 25 bp, Homo sapien
ggatgtagatcccttcgccctttcc

SEQ ID NO: 2708438 - DNA, 25 bp, Homo sapien
ctgaaaggcttttagtgggaagtga

SEQ ID NO: 2708439 - DNA, 25 bp, Homo sapien
tgaaaggcttttagtgggaagtgaa

SEQ ID NO: 2708440 - DNA, 25 bp, Homo sapien
aaatgatgactttgttcagtactga

SEQ ID NO: 2708441 - DNA, 25 bp, Homo sapien
cgaagaggccacgtttaattagctt

SEQ ID NO: 2708442 - DNA, 25 bp, Homo sapien
ttcgaagaggccacgtttaattagc

SEQ ID NO: 2708443 - DNA, 25 bp, Homo sapien
tcgaagaggccacgtttaattagct

SEQ ID NO: 2708444 - DNA, 25 bp, Homo sapien
taggcttccatgaaagtgattcaga

SEQ ID NO: 2708445 - DNA, 25 bp, Homo sapien
attctcaagggagcttaggcttcca

SEQ ID NO: 2708446 - DNA, 25 bp, Homo sapien
gaggaaaatacagagaccccaattg

SEQ ID NO: 2708447 - DNA, 25 bp, Homo sapien
gccatgttggagttctaaggtcctg

SEQ ID NO: 2708448 - DNA, 25 bp, Homo sapien
tactgacacggatagtccagagcag

SEQ ID NO: 2708449 - DNA, 25 bp, Homo sapien
ccagagcagcgaacggttgtgattc

SEQ ID NO: 2708450 - DNA, 25 bp, Homo sapien
tctttggagttgagcaggagtccca

SEQ ID NO: 2708451 - DNA, 25 bp, Homo sapien
tacaaaaggtagcagcatcaggttc

SEQ ID NO: 2708452 - DNA, 25 bp, Homo sapien
ttgcagtcctagtgttacagtaggt

SEQ ID NO: 2708453 - DNA, 25 bp, Homo sapien
tctggaaacttcaccgcagaacaaa

SEQ ID NO: 2708454 - DNA, 25 bp, Homo sapien
cacacaaacacgagggcttacacac

SEQ ID NO: 2708455 - DNA, 25 bp, Homo sapien
cgcagaacaaaatggttgcagtcct

SEQ ID NO: 2708456 - DNA, 25 bp, Homo sapien
tctatttctaggtataatttcccca

SEQ ID NO: 2708457 - DNA, 25 bp, Homo sapien
ttctaggtataatttccccaatatc

SEQ ID NO: 2708458 - DNA, 25 bp, Homo sapien
taggtataatttccccaatatccat

SEQ ID NO: 2708459 - DNA, 25 bp, Homo sapien
gaatcttctatttctaggtataatt

SEQ ID NO: 2708460 - DNA, 25 bp, Homo sapien
ttaagagtaaatcccaggtgtggac

SEQ ID NO: 2708461 - DNA, 25 bp, Homo sapien
tcttccctgcagtggagtgctattg

SEQ ID NO: 2708462 - DNA, 25 bp, Homo sapien
gatgcggcttaggtgctggacaatt

SEQ ID NO: 2708463 - DNA, 25 bp, Homo sapien
gatttcacagccaagaacagtgcgg

SEQ ID NO: 2708464 - DNA, 25 bp, Homo sapien
gtttttgttgttgttactgacattc

SEQ ID NO: 2708465 - DNA, 25 bp, Homo sapien
ttgtttttgttgttgttactgacat

SEQ ID NO: 2708466 - DNA, 25 bp, Homo sapien
ttttgttgttgttactgacattcat

SEQ ID NO: 2708467 - DNA, 25 bp, Homo sapien
tttttgttgttgttactgacattca

SEQ ID NO: 2708468 - DNA, 25 bp, Homo sapien
gaccacaatgaaacgcccactctgg

SEQ ID NO: 2708469 - DNA, 25 bp, Homo sapien
aatgaaacgcccactctggagggag

SEQ ID NO: 2708470 - DNA, 25 bp, Homo sapien
taagcagagccccttgatcctacac

SEQ ID NO: 2708471 - DNA, 25 bp, Homo sapien
cgtggaacaagccagcagactctct

SEQ ID NO: 2708472 - DNA, 25 bp, Homo sapien
ctgcttccccatgaataagcttgtc

SEQ ID NO: 2708473 - DNA, 25 bp, Homo sapien
acacacgtacagtcagtttgtcact

SEQ ID NO: 2708474 - DNA, 25 bp, Homo sapien
ttattgctcatccacgatgacagac

SEQ ID NO: 2708475 - DNA, 25 bp, Homo sapien
tcacacatgatttctgccccagcag

SEQ ID NO: 2708476 - DNA, 25 bp, Homo sapien
ctgctgagttcagctcagccccctc

SEQ ID NO: 2708477 - DNA, 25 bp, Homo sapien
tttcctccaagcgccgctgctgcca

SEQ ID NO: 2708478 - DNA, 25 bp, Homo sapien
tgcgccctccaaccggcttcctttc

SEQ ID NO: 2708479 - DNA, 25 bp, Homo sapien
cttgtgcatgtaacttctgctgagt

SEQ ID NO: 2708480 - DNA, 25 bp, Homo sapien
ctggaggagcagcgtccacatggta

SEQ ID NO: 2708481 - DNA, 25 bp, Homo sapien
cacatggtagggtcagttgagccac

SEQ ID NO: 2708482 - DNA, 25 bp, Homo sapien
ctcttgagaacgtcagaatttttgc

SEQ ID NO: 2708483 - DNA, 25 bp, Homo sapien
gctggtctcttgagaacgtcagaat

SEQ ID NO: 2708484 - DNA, 25 bp, Homo sapien
gattctgacattaggcactagccgg

SEQ ID NO: 2708485 - DNA, 25 bp, Homo sapien
gccggcagcgcctcaatgttggaaa

SEQ ID NO: 2708486 - DNA, 25 bp, Homo sapien
gccttgaaaaccctctgtagacatg

SEQ ID NO: 2708487 - DNA, 25 bp, Homo sapien
aaaacacaggcgtcctgcattcggg

SEQ ID NO: 2708488 - DNA, 25 bp, Homo sapien
agtcacattgagaaagatgtaaacc

SEQ ID NO: 2708489 - DNA, 25 bp, Homo sapien
gacaccgtttcctgagtaagtgatg

SEQ ID NO: 2708490 - DNA, 25 bp, Homo sapien
aagtgatgatactccgctgaaaggc

SEQ ID NO: 2708491 - DNA, 25 bp, Homo sapien
tcccagtgtgacaccgtttcctgag

SEQ ID NO: 2708492 - DNA, 25 bp, Homo sapien
gagggtgggcacagacgatagtctg

SEQ ID NO: 2708493 - DNA, 25 bp, Homo sapien
gggcacagacgatagtctgatgtta

SEQ ID NO: 2708494 - DNA, 25 bp, Homo sapien
gtgggcacagacgatagtctgatgt

SEQ ID NO: 2708495 - DNA, 25 bp, Homo sapien
cacagacgatagtctgatgttataa

SEQ ID NO: 2708496 - DNA, 25 bp, Homo sapien
ggctggcaccatgaggtgtgactat

SEQ ID NO: 2708497 - DNA, 25 bp, Homo sapien
ccaccctagaacactggttggcaca

SEQ ID NO: 2708498 - DNA, 25 bp, Homo sapien
tggttccaccctagaacactggttg

SEQ ID NO: 2708499 - DNA, 25 bp, Homo sapien
gtgtgactattggttccaccctaga

SEQ ID NO: 2708500 - DNA, 25 bp, Homo sapien
tagtcctcacaatggcaggcaacaa

SEQ ID NO: 2708501 - DNA, 25 bp, Homo sapien
agctcggtcacctgcttggagtaga

SEQ ID NO: 2708502 - DNA, 25 bp, Homo sapien
gctgcactgaatccaagaagttgct

SEQ ID NO: 2708503 - DNA, 25 bp, Homo sapien
tgtagatacagctgatagtcctcac

SEQ ID NO: 2708504 - DNA, 25 bp, Homo sapien
ccaacaacttatgtgccccgcaatg

SEQ ID NO: 2708505 - DNA, 25 bp, Homo sapien
tgtgccccgcaatgcattctgaggt

SEQ ID NO: 2708506 - DNA, 25 bp, Homo sapien
cctcagtgtcatgggtttctgttga

SEQ ID NO: 2708507 - DNA, 25 bp, Homo sapien
tctgaggtttgcaatcctcagtgtc

SEQ ID NO: 2708508 - DNA, 25 bp, Homo sapien
tgattctgccgtatcgccttggcaa

SEQ ID NO: 2708509 - DNA, 25 bp, Homo sapien
tatgcatcaaaccaatctactcggc

SEQ ID NO: 2708510 - DNA, 25 bp, Homo sapien
tgggaattcaccactctgaggagaa

SEQ ID NO: 2708511 - DNA, 25 bp, Homo sapien
tccaggcagctcgttaatatcacag

SEQ ID NO: 2708512 - DNA, 25 bp, Homo sapien
tctgggcacatggtgtgagctacat

SEQ ID NO: 2708513 - DNA, 25 bp, Homo sapien
ggattcaaccagcaatggcagctag

SEQ ID NO: 2708514 - DNA, 25 bp, Homo sapien
cagggctccatgaggttgcaaaagg

SEQ ID NO: 2708515 - DNA, 25 bp, Homo sapien
gaacccagcccttggattcaggcag

SEQ ID NO: 2708516 - DNA, 25 bp, Homo sapien
cagcaaaggcattacctgagaactt

SEQ ID NO: 2708517 - DNA, 25 bp, Homo sapien
gacatctatacccttgctactctgg

SEQ ID NO: 2708518 - DNA, 25 bp, Homo sapien
tactctgggcgtggttcgaggacca

SEQ ID NO: 2708519 - DNA, 25 bp, Homo sapien
gaatgctttctgtcaatcctgttac

SEQ ID NO: 2708520 - DNA, 25 bp, Homo sapien
taagcaaggtcaccagcaggccaag

SEQ ID NO: 2708521 - DNA, 25 bp, Homo sapien
ctcataagcaaggtcaccagcaggc

SEQ ID NO: 2708522 - DNA, 25 bp, Homo sapien
tcaccagcaggccaaggaaccacat

SEQ ID NO: 2708523 - DNA, 25 bp, Homo sapien
tcataagcaaggtcaccagcaggcc

SEQ ID NO: 2708524 - DNA, 25 bp, Homo sapien
tatatttctgctgggcctttcccat

SEQ ID NO: 2708525 - DNA, 25 bp, Homo sapien
ttatatttctgctgggcctttccca

SEQ ID NO: 2708526 - DNA, 25 bp, Homo sapien
cttggcctgcatgctttatatttct

SEQ ID NO: 2708527 - DNA, 25 bp, Homo sapien
ggcctgcatgctttatatttctgct

SEQ ID NO: 2708528 - DNA, 25 bp, Homo sapien
tctgggccgtcactgatgattgccg

SEQ ID NO: 2708529 - DNA, 25 bp, Homo sapien
tgagtcagtgttcagtttaagagga

SEQ ID NO: 2708530 - DNA, 25 bp, Homo sapien
gagatatcacatctagcccattgcc

SEQ ID NO: 2708531 - DNA, 25 bp, Homo sapien
ttcctgtgacactcaactcttgagt

SEQ ID NO: 2708532 - DNA, 25 bp, Homo sapien
cactgctgtgagtcaccttgtgtct

SEQ ID NO: 2708533 - DNA, 25 bp, Homo sapien
ctcggcttaaaatgtaccaagggct

SEQ ID NO: 2708534 - DNA, 25 bp, Homo sapien
tggtggccactcttataatcttagg

SEQ ID NO: 2708535 - DNA, 25 bp, Homo sapien
gggcgttggccatcccaagtttgca

SEQ ID NO: 2708536 - DNA, 25 bp, Homo sapien
caggttctatgaatgtgctggccag

SEQ ID NO: 2708537 - DNA, 25 bp, Homo sapien
cagctgttgatctgagaggctccaa

SEQ ID NO: 2708538 - DNA, 25 bp, Homo sapien
tccatgagctgggtgtcattgacac

SEQ ID NO: 2708539 - DNA, 25 bp, Homo sapien
attgaaacccaatttatcgctggcc

SEQ ID NO: 2708540 - DNA, 25 bp, Homo sapien
gctggcctcatgagccaaagaaagc

SEQ ID NO: 2708541 - DNA, 25 bp, Homo sapien
acgtgggagcctgaaggatgaggga

SEQ ID NO: 2708542 - DNA, 25 bp, Homo sapien
gggtacgtgggagcctgaaggatga

SEQ ID NO: 2708543 - DNA, 25 bp, Homo sapien
gggcaaggggtacgtgggagcctga

SEQ ID NO: 2708544 - DNA, 25 bp, Homo sapien
caaggggtacgtgggagcctgaagg

SEQ ID NO: 2708545 - DNA, 25 bp, Homo sapien
atctcttctccaccagggcacaggg

SEQ ID NO: 2708546 - DNA, 25 bp, Homo sapien
tctcttctccaccagggcacagggc

SEQ ID NO: 2708547 - DNA, 25 bp, Homo sapien
catctcttctccaccagggcacagg

SEQ ID NO: 2708548 - DNA, 25 bp, Homo sapien
tcttctccaccagggcacagggcac

SEQ ID NO: 2708549 - DNA, 25 bp, Homo sapien
ttctttggttccatgtacatttaca

SEQ ID NO: 2708550 - DNA, 25 bp, Homo sapien
ctttggttccatgtacatttacaga

SEQ ID NO: 2708551 - DNA, 25 bp, Homo sapien
tctttggttccatgtacatttacag

SEQ ID NO: 2708552 - DNA, 25 bp, Homo sapien
tttggttccatgtacatttacagat

SEQ ID NO: 2708553 - DNA, 25 bp, Homo sapien
taatgaccagttgcagtgtagatgg

SEQ ID NO: 2708554 - DNA, 25 bp, Homo sapien
cttgcaccagccagtataatgacca

SEQ ID NO: 2708555 - DNA, 25 bp, Homo sapien
cagtataatgaccagttgcagtgta

SEQ ID NO: 2708556 - DNA, 25 bp, Homo sapien
ccagccagtataatgaccagttgca

SEQ ID NO: 2708557 - DNA, 25 bp, Homo sapien
tcccatttttcacaaagacataaac

SEQ ID NO: 2708558 - DNA, 25 bp, Homo sapien
cccatttttcacaaagacataaaca

SEQ ID NO: 2708559 - DNA, 25 bp, Homo sapien
catttttcacaaagacataaacatc

SEQ ID NO: 2708560 - DNA, 25 bp, Homo sapien
tatcccatttttcacaaagacataa

SEQ ID NO: 2708561 - DNA, 25 bp, Homo sapien
cattttcggaagaaaatctcgagga

SEQ ID NO: 2708562 - DNA, 25 bp, Homo sapien
ctcccattttcggaagaaaatctcg

SEQ ID NO: 2708563 - DNA, 25 bp, Homo sapien
agaaaatctcgaggaggattcttca

SEQ ID NO: 2708564 - DNA, 25 bp, Homo sapien
cggaagaaaatctcgaggaggattc

SEQ ID NO: 2708565 - DNA, 25 bp, Homo sapien
taggtcaccgggattctgccctctg

SEQ ID NO: 2708566 - DNA, 25 bp, Homo sapien
gggaagttcccgctgatgccattga

SEQ ID NO: 2708567 - DNA, 25 bp, Homo sapien
caattctcatcaagctgtctccgga

SEQ ID NO: 2708568 - DNA, 25 bp, Homo sapien
tgcttgatgacttccacggagctgg

SEQ ID NO: 2708569 - DNA, 25 bp, Homo sapien
tcatccactcggctgatcacagtga

SEQ ID NO: 2708570 - DNA, 25 bp, Homo sapien
cactcggctgatcacagtgatgata

SEQ ID NO: 2708571 - DNA, 25 bp, Homo sapien
ggctgatcacagtgatgatatcgtc

SEQ ID NO: 2708572 - DNA, 25 bp, Homo sapien
agttctcatccactcggctgatcac

SEQ ID NO: 2708573 - DNA, 25 bp, Homo sapien
tcagatgtagacttgatactcacgt

SEQ ID NO: 2708574 - DNA, 25 bp, Homo sapien
agatgtagacttgatactcacgtac

SEQ ID NO: 2708575 - DNA, 25 bp, Homo sapien
cagatgtagacttgatactcacgta

SEQ ID NO: 2708576 - DNA, 25 bp, Homo sapien
cctacggagggtagacgtgttgcct

SEQ ID NO: 2708577 - DNA, 25 bp, Homo sapien
gaccatccggttgagagtgttcaag

SEQ ID NO: 2708578 - DNA, 25 bp, Homo sapien
tttttgtgcgggatgactggcgacc

SEQ ID NO: 2708579 - DNA, 25 bp, Homo sapien
tctctaccatatggcgccctgaagg

SEQ ID NO: 2708580 - DNA, 25 bp, Homo sapien
ggagggccctgcacatgtgactccc

SEQ ID NO: 2708581 - DNA, 25 bp, Homo sapien
gtttttagtccgtagttgcagttca

SEQ ID NO: 2708582 - DNA, 25 bp, Homo sapien
cctgaattgttttcgagtgccattg

SEQ ID NO: 2708583 - DNA, 25 bp, Homo sapien
cactgcagttttccaccgaacttac

SEQ ID NO: 2708584 - DNA, 25 bp, Homo sapien
agtttaacctcttgctggagaaatg

SEQ ID NO: 2708585 - DNA, 25 bp, Homo sapien
aacgatgatgtaaagtttaacctct

SEQ ID NO: 2708586 - DNA, 25 bp, Homo sapien
ccaggattaattgggcaaaacgatg

SEQ ID NO: 2708587 - DNA, 25 bp, Homo sapien
ctgccaggattaattgggcaaaacg

SEQ ID NO: 2708588 - DNA, 25 bp, Homo sapien
tgagttagcatgtgagatgccccac

SEQ ID NO: 2708589 - DNA, 25 bp, Homo sapien
tgggcccgcaacagacatggataat

SEQ ID NO: 2708590 - DNA, 25 bp, Homo sapien
tgatatggaatcaccgagtctcaga

SEQ ID NO: 2708591 - DNA, 25 bp, Homo sapien
gaacaaatccagatgtaccccgagc

SEQ ID NO: 2708592 - DNA, 25 bp, Homo sapien
gaccttggctatgaagttcatccaa

SEQ ID NO: 2708593 - DNA, 25 bp, Homo sapien
ccttggctatgaagttcatccaaac

SEQ ID NO: 2708594 - DNA, 25 bp, Homo sapien
gggaccttggctatgaagttcatcc

SEQ ID NO: 2708595 - DNA, 25 bp, Homo sapien
ctgggggaccttggctatgaagttc

SEQ ID NO: 2708596 - DNA, 25 bp, Homo sapien
ttccataagccctgtttgttgaaga

SEQ ID NO: 2708597 - DNA, 25 bp, Homo sapien
tgggaacatttgccaggtggcctcc

SEQ ID NO: 2708598 - DNA, 25 bp, Homo sapien
tgtgggaacatttgccaggtggcct

SEQ ID NO: 2708599 - DNA, 25 bp, Homo sapien
ttttccataagccctgtttgttgaa

SEQ ID NO: 2708600 - DNA, 25 bp, Homo sapien
tggtgccacccattgtgcgtcctct

SEQ ID NO: 2708601 - DNA, 25 bp, Homo sapien
tacgtagaaagacctgacacagctg

SEQ ID NO: 2708602 - DNA, 25 bp, Homo sapien
agcagaaccaatgaatgccacaacc

SEQ ID NO: 2708603 - DNA, 25 bp, Homo sapien
gctgaaaaccaacagccatgcctgg

SEQ ID NO: 2708604 - DNA, 25 bp, Homo sapien
caggtgcggggtgataagtgctgac

SEQ ID NO: 2708605 - DNA, 25 bp, Homo sapien
tggagagacaggtgcggggtgataa

SEQ ID NO: 2708606 - DNA, 25 bp, Homo sapien
gagacaggtgcggggtgataagtgc

SEQ ID NO: 2708607 - DNA, 25 bp, Homo sapien
ctggagagacaggtgcggggtgata

SEQ ID NO: 2708608 - DNA, 25 bp, Homo sapien
gctgagaggtgttgctgggagccag

SEQ ID NO: 2708609 - DNA, 25 bp, Homo sapien
cagactgaccacggctgtggaatgt

SEQ ID NO: 2708610 - DNA, 25 bp, Homo sapien
atgttcgctgagaggtgttgctggg

SEQ ID NO: 2708611 - DNA, 25 bp, Homo sapien
ctgagaggtgttgctgggagccagg

SEQ ID NO: 2708612 - DNA, 25 bp, Homo sapien
aaggagacgcccctgagccagccgt

SEQ ID NO: 2708613 - DNA, 25 bp, Homo sapien
gactcgcccggtgaccaaggagacg

SEQ ID NO: 2708614 - DNA, 25 bp, Homo sapien
gctcatcgggtccatgggctgagta

SEQ ID NO: 2708615 - DNA, 25 bp, Homo sapien
gtttgggaagatgccgactcgcccg

SEQ ID NO: 2708616 - DNA, 25 bp, Homo sapien
attcttgctgccctcctccggacgt

SEQ ID NO: 2708617 - DNA, 25 bp, Homo sapien
tcttgctgccctcctccggacgtgg

SEQ ID NO: 2708618 - DNA, 25 bp, Homo sapien
tgctgccctcctccggacgtggcag

SEQ ID NO: 2708619 - DNA, 25 bp, Homo sapien
ttgctgccctcctccggacgtggca

SEQ ID NO: 2708620 - DNA, 25 bp, Homo sapien
cctgcacacagatagatggactggg

SEQ ID NO: 2708621 - DNA, 25 bp, Homo sapien
gagcgtatcctctaataggcacttg

SEQ ID NO: 2708622 - DNA, 25 bp, Homo sapien
cagtgaaagcattgatcctctgcca

SEQ ID NO: 2708623 - DNA, 25 bp, Homo sapien
tcttcctgagaatgttggttcccca

SEQ ID NO: 2708624 - DNA, 25 bp, Homo sapien
tttgtgaactacaggcttaactaaa

SEQ ID NO: 2708625 - DNA, 25 bp, Homo sapien
tacacccggataactgtgagggtgt

SEQ ID NO: 2708626 - DNA, 25 bp, Homo sapien
tccctacacccggataactgtgagg

SEQ ID NO: 2708627 - DNA, 25 bp, Homo sapien
tgaactacaggcttaactaaagttg

SEQ ID NO: 2708628 - DNA, 25 bp, Homo sapien
cttcttcccacccatacacacccat

SEQ ID NO: 2708629 - DNA, 25 bp, Homo sapien
gaaaatgttcagtcaagagtcctat

SEQ ID NO: 2708630 - DNA, 25 bp, Homo sapien
ttaaaaacctatcagctcccaacca

SEQ ID NO: 2708631 - DNA, 25 bp, Homo sapien
aatgttcagtcaagagtcctattta

SEQ ID NO: 2708632 - DNA, 25 bp, Homo sapien
atgttcagtcaagagtcctatttaa

SEQ ID NO: 2708633 - DNA, 25 bp, Homo sapien
gagaccagggctccgggagtctgga

SEQ ID NO: 2708634 - DNA, 25 bp, Homo sapien
gtagagaccagggctccgggagtct

SEQ ID NO: 2708635 - DNA, 25 bp, Homo sapien
tgtggtgtagagaccagggctccgg

SEQ ID NO: 2708636 - DNA, 25 bp, Homo sapien
gaccagggctccgggagtctggaaa

SEQ ID NO: 2708637 - DNA, 25 bp, Homo sapien
aggacacagaggaggtggataacgt

SEQ ID NO: 2708638 - DNA, 25 bp, Homo sapien
gaggacacagaggaggtggataacg

SEQ ID NO: 2708639 - DNA, 25 bp, Homo sapien
gggaggacacagaggaggtggataa

SEQ ID NO: 2708640 - DNA, 25 bp, Homo sapien
cttgggaggacacagaggaggtgga

SEQ ID NO: 2708641 - DNA, 25 bp, Homo sapien
ggttgactatggcagtgggcacaaa

SEQ ID NO: 2708642 - DNA, 25 bp, Homo sapien
caaagacggatttgaagggacggct

SEQ ID NO: 2708643 - DNA, 25 bp, Homo sapien
gctttgccgtggatcaccttctgaa

SEQ ID NO: 2708644 - DNA, 25 bp, Homo sapien
agagacccttgtcctaaagtcccag

SEQ ID NO: 2708645 - DNA, 25 bp, Homo sapien
ttaagttaaccctgatgaggtagga

SEQ ID NO: 2708646 - DNA, 25 bp, Homo sapien
caggcactgtgctatcagccatata

SEQ ID NO: 2708647 - DNA, 25 bp, Homo sapien
tcagccgtgtatgaacctttcaacc

SEQ ID NO: 2708648 - DNA, 25 bp, Homo sapien
agtgagttcgtgctctggatggacc

SEQ ID NO: 2708649 - DNA, 25 bp, Homo sapien
gacatatatcctgtaggtgacctgg

SEQ ID NO: 2708650 - DNA, 25 bp, Homo sapien
ggacactcgctaaacacagtcggtg

SEQ ID NO: 2708651 - DNA, 25 bp, Homo sapien
tgtacatgaaaagcaggacactcgc

SEQ ID NO: 2708652 - DNA, 25 bp, Homo sapien
gagactgatagcttgccagcctcac

SEQ ID NO: 2708653 - DNA, 25 bp, Homo sapien
tttggcagaggctcactcttgatgg

SEQ ID NO: 2708654 - DNA, 25 bp, Homo sapien
tgcccctgctgatgcacgtgagggc

SEQ ID NO: 2708655 - DNA, 25 bp, Homo sapien
tagaattggaactgctgaggccgaa

SEQ ID NO: 2708656 - DNA, 25 bp, Homo sapien
tgagggagcctaccacgagagtggg

SEQ ID NO: 2708657 - DNA, 25 bp, Homo sapien
caaggtctccagtttatgccaattc

SEQ ID NO: 2708658 - DNA, 25 bp, Homo sapien
gcactgggcctatggctcattctga

SEQ ID NO: 2708659 - DNA, 25 bp, Homo sapien
tgagggtttgatcgactcgccaaca

SEQ ID NO: 2708660 - DNA, 25 bp, Homo sapien
aatcaaagctctgacgcactgggcc

SEQ ID NO: 2708661 - DNA, 25 bp, Homo sapien
acaccagggttgtggccttgccaag

SEQ ID NO: 2708662 - DNA, 25 bp, Homo sapien
cacttcggtgggcaaataggacggt

SEQ ID NO: 2708663 - DNA, 25 bp, Homo sapien
catttgctgggaaacacggtctgcg

SEQ ID NO: 2708664 - DNA, 25 bp, Homo sapien
tctgcgtgcctgaggcagtggacac

SEQ ID NO: 2708665 - DNA, 25 bp, Homo sapien
gcagctactagtggccagtgtacag

SEQ ID NO: 2708666 - DNA, 25 bp, Homo sapien
taaagtgggcacgacaatttttcac

SEQ ID NO: 2708667 - DNA, 25 bp, Homo sapien
tttgtatgtttggaaggccacgcca

SEQ ID NO: 2708668 - DNA, 25 bp, Homo sapien
tgtaaggtcaaagaagcaacgccaa

SEQ ID NO: 2708669 - DNA, 25 bp, Homo sapien
tattttcatgcctcggcctcaagag

SEQ ID NO: 2708670 - DNA, 25 bp, Homo sapien
ctattttcatgcctcggcctcaaga

SEQ ID NO: 2708671 - DNA, 25 bp, Homo sapien
tgcatctcatcaagacacaggtagg

SEQ ID NO: 2708672 - DNA, 25 bp, Homo sapien
acttttcatagcaccaagatgccag

SEQ ID NO: 2708673 - DNA, 25 bp, Homo sapien
ggcactcttcctaggtactgtctga

SEQ ID NO: 2708674 - DNA, 25 bp, Homo sapien
tatggtcctcagagtatgtccccag

SEQ ID NO: 2708675 - DNA, 25 bp, Homo sapien
tctcacccctacttgttggacagca

SEQ ID NO: 2708676 - DNA, 25 bp, Homo sapien
gagggcttgaccctgtgagacaaac

SEQ ID NO: 2708677 - DNA, 25 bp, Homo sapien
tggacagcaagacctaacctcatgg

SEQ ID NO: 2708678 - DNA, 25 bp, Homo sapien
tcctagcaaactcagcggcacatct

SEQ ID NO: 2708679 - DNA, 25 bp, Homo sapien
tctccttgacagagacataagacat

SEQ ID NO: 2708680 - DNA, 25 bp, Homo sapien
gacatgtcctcttcgtgcaatgcag

SEQ ID NO: 2708681 - DNA, 25 bp, Homo sapien
tgttccttgtcgtggaggctagcgc

SEQ ID NO: 2708682 - DNA, 25 bp, Homo sapien
tatctaagctgtgactgacatgtcc

SEQ ID NO: 2708683 - DNA, 25 bp, Homo sapien
gtctgtactttcactcaaccttaac

SEQ ID NO: 2708684 - DNA, 25 bp, Homo sapien
cccatggacgttttttaatctctct

SEQ ID NO: 2708685 - DNA, 25 bp, Homo sapien
ctttcactcaaccttaactgaggtg

SEQ ID NO: 2708686 - DNA, 25 bp, Homo sapien
tctgtactttcactcaaccttaact

SEQ ID NO: 2708687 - DNA, 25 bp, Homo sapien
ctacataccactgaacatgggcggg

SEQ ID NO: 2708688 - DNA, 25 bp, Homo sapien
tattagcactgtctacaggccaggg

SEQ ID NO: 2708689 - DNA, 25 bp, Homo sapien
tgcatcccaagcgagtagcagtggt

SEQ ID NO: 2708690 - DNA, 25 bp, Homo sapien
tgttaatatcacaatgggcccagag

SEQ ID NO: 2708691 - DNA, 25 bp, Homo sapien
cctagtgggagagtttacaggaact

SEQ ID NO: 2708692 - DNA, 25 bp, Homo sapien
tgcattcctatgatcctcacacatg

SEQ ID NO: 2708693 - DNA, 25 bp, Homo sapien
ccaacttacactcaaatggtccaga

SEQ ID NO: 2708694 - DNA, 25 bp, Homo sapien
tttgatgaccaaactcaacctgcat

SEQ ID NO: 2708695 - DNA, 25 bp, Homo sapien
gaattcttaacatcttttgggcaga

SEQ ID NO: 2708696 - DNA, 25 bp, Homo sapien
agtctgttgtgtgcgaatgcagctg

SEQ ID NO: 2708697 - DNA, 25 bp, Homo sapien
gaagaactatagttcttcagaattc

SEQ ID NO: 2708698 - DNA, 25 bp, Homo sapien
atttcagagtctgttgtgtgcgaat

SEQ ID NO: 2708699 - DNA, 25 bp, Homo sapien
ggtgtaacctgtagcagcacatgac

SEQ ID NO: 2708700 - DNA, 25 bp, Homo sapien
tcttggaggccagactattggtatc

SEQ ID NO: 2708701 - DNA, 25 bp, Homo sapien
gaccacagagctcgaaggcattgga

SEQ ID NO: 2708702 - DNA, 25 bp, Homo sapien
cattggcctcttcggattgaacacc

SEQ ID NO: 2708703 - DNA, 25 bp, Homo sapien
ggtttatcggccaagcaggttcgaa

SEQ ID NO: 2708704 - DNA, 25 bp, Homo sapien
caaatctctgatgactccatgtggg

SEQ ID NO: 2708705 - DNA, 25 bp, Homo sapien
gagtaatctctgcacgttcacacgg

SEQ ID NO: 2708706 - DNA, 25 bp, Homo sapien
tctgatcagtctcgcggtaaagagc

SEQ ID NO: 2708707 - DNA, 25 bp, Homo sapien
gagaagacttccagccaagaggcct

SEQ ID NO: 2708708 - DNA, 25 bp, Homo sapien
agagaagacttccagccaagaggcc

SEQ ID NO: 2708709 - DNA, 25 bp, Homo sapien
ttgaagggccaggaggtaacattgt

SEQ ID NO: 2708710 - DNA, 25 bp, Homo sapien
tggttgaagggccaggaggtaacat

SEQ ID NO: 2708711 - DNA, 25 bp, Homo sapien
ctgtggttgaagggccaggaggtaa

SEQ ID NO: 2708712 - DNA, 25 bp, Homo sapien
aagggccaggaggtaacattgtaca

SEQ ID NO: 2708713 - DNA, 25 bp, Homo sapien
gctgcttggcacttatgcaacttag

SEQ ID NO: 2708714 - DNA, 25 bp, Homo sapien
cgcaggcattgattagcaattcagc

SEQ ID NO: 2708715 - DNA, 25 bp, Homo sapien
taagggcagcgctctgaatcgcagg

SEQ ID NO: 2708716 - DNA, 25 bp, Homo sapien
gcaacttagtgtccctgggcattgg

SEQ ID NO: 2708717 - DNA, 25 bp, Homo sapien
gaggatgttgaaacataccatgctt

SEQ ID NO: 2708718 - DNA, 25 bp, Homo sapien
tgaaacataccatgcttagtgggaa

SEQ ID NO: 2708719 - DNA, 25 bp, Homo sapien
tgcttagtgggaaactttgagaaag

SEQ ID NO: 2708720 - DNA, 25 bp, Homo sapien
tgttgaaacataccatgcttagtgg

SEQ ID NO: 2708721 - DNA, 25 bp, Homo sapien
gaacccgaatctgtatgaaaaccta

SEQ ID NO: 2708722 - DNA, 25 bp, Homo sapien
caccagggagagacataaaatacag

SEQ ID NO: 2708723 - DNA, 25 bp, Homo sapien
tgtttgaaggtatacgtgaacccga

SEQ ID NO: 2708724 - DNA, 25 bp, Homo sapien
tttgcactgagaattggcaccaggg

SEQ ID NO: 2708725 - DNA, 25 bp, Homo sapien
ttgagtgtgacatcgccaggcatta

SEQ ID NO: 2708726 - DNA, 25 bp, Homo sapien
gagtgtctttgttggccgttgttac

SEQ ID NO: 2708727 - DNA, 25 bp, Homo sapien
cagtctgatagcagggagacagtgc

SEQ ID NO: 2708728 - DNA, 25 bp, Homo sapien
gacagtgcagcattaaactggtggc

SEQ ID NO: 2708729 - DNA, 25 bp, Homo sapien
ctttgggccaagagatgtctacagt

SEQ ID NO: 2708730 - DNA, 25 bp, Homo sapien
ttcataccaggtatccgggctgggt

SEQ ID NO: 2708731 - DNA, 25 bp, Homo sapien
tagtcacttagtttgccagctttac

SEQ ID NO: 2708732 - DNA, 25 bp, Homo sapien
gagtgactatcttgagacttccaaa

SEQ ID NO: 2708733 - DNA, 25 bp, Homo sapien
tacttctaatctcggggctccacac

SEQ ID NO: 2708734 - DNA, 25 bp, Homo sapien
ctacttctaatctcggggctccaca

SEQ ID NO: 2708735 - DNA, 25 bp, Homo sapien
ctttcctacttctaatctcggggct

SEQ ID NO: 2708736 - DNA, 25 bp, Homo sapien
tcctacttctaatctcggggctcca

SEQ ID NO: 2708737 - DNA, 25 bp, Homo sapien
tgtatatgaaaagcaagtagtactc

SEQ ID NO: 2708738 - DNA, 25 bp, Homo sapien
tatatgaaaagcaagtagtactcca

SEQ ID NO: 2708739 - DNA, 25 bp, Homo sapien
atatgaaaagcaagtagtactccat

SEQ ID NO: 2708740 - DNA, 25 bp, Homo sapien
tttgtatatgaaaagcaagtagtac

SEQ ID NO: 2708741 - DNA, 25 bp, Homo sapien
catctttggtaccacatgtcaggat

SEQ ID NO: 2708742 - DNA, 25 bp, Homo sapien
gataccgtgtttttggagagaggaa

SEQ ID NO: 2708743 - DNA, 25 bp, Homo sapien
aaaactgtgcacagtagataccgtg

SEQ ID NO: 2708744 - DNA, 25 bp, Homo sapien
gtagtactcctatcaacaagaacaa

SEQ ID NO: 2708745 - DNA, 25 bp, Homo sapien
tcttttcagacactggtttgacact

SEQ ID NO: 2708746 - DNA, 25 bp, Homo sapien
agagataggagaatttgtaagtttt

SEQ ID NO: 2708747 - DNA, 25 bp, Homo sapien
gctggagcaccggtctcttcagtgt

SEQ ID NO: 2708748 - DNA, 25 bp, Homo sapien
cacagcaattgtccagactggcggg

SEQ ID NO: 2708749 - DNA, 25 bp, Homo sapien
ggccatgtaccagccagcgctgtgg

SEQ ID NO: 2708750 - DNA, 25 bp, Homo sapien
tggcaggacgacaatcacagcaatt

SEQ ID NO: 2708751 - DNA, 25 bp, Homo sapien
tattgttctgaaacacctttgtttc

SEQ ID NO: 2708752 - DNA, 25 bp, Homo sapien
tgttctgaaacacctttgtttccaa

SEQ ID NO: 2708753 - DNA, 25 bp, Homo sapien
ttgttctgaaacacctttgtttcca

SEQ ID NO: 2708754 - DNA, 25 bp, Homo sapien
atggttattgttctgaaacaccttt

SEQ ID NO: 2708755 - DNA, 25 bp, Homo sapien
gaaactctgtctcaatcaatccatc

SEQ ID NO: 2708756 - DNA, 25 bp, Homo sapien
tcaatcaatcaataaaatagaggtc

SEQ ID NO: 2708757 - DNA, 25 bp, Homo sapien
aaactctgtctcaatcaatccatca

SEQ ID NO: 2708758 - DNA, 25 bp, Homo sapien
ccatcaatcaatcaataaaatagag

SEQ ID NO: 2708759 - DNA, 25 bp, Homo sapien
tctgattgtgtctactgattggcta

SEQ ID NO: 2708760 - DNA, 25 bp, Homo sapien
ggttcattaaactcatgcacattgg

SEQ ID NO: 2708761 - DNA, 25 bp, Homo sapien
tcaatgtggacctcatgagcaagaa

SEQ ID NO: 2708762 - DNA, 25 bp, Homo sapien
gattggctatcagaaccttaggctg

SEQ ID NO: 2708763 - DNA, 25 bp, Homo sapien
cagattaggccaaattaagaagaac

SEQ ID NO: 2708764 - DNA, 25 bp, Homo sapien
tgtaaaccaggcactttgaaaggct

SEQ ID NO: 2708765 - DNA, 25 bp, Homo sapien
gcagaggtaggaaatgaaacaggtt

SEQ ID NO: 2708766 - DNA, 25 bp, Homo sapien
aaagtgtggataagccatggaaagg

SEQ ID NO: 2708767 - DNA, 25 bp, Homo sapien
agtcatggtcgttctttgctttgta

SEQ ID NO: 2708768 - DNA, 25 bp, Homo sapien
ggagtcatggtcgttctttgctttg

SEQ ID NO: 2708769 - DNA, 25 bp, Homo sapien
gagtcatggtcgttctttgctttgt

SEQ ID NO: 2708770 - DNA, 25 bp, Homo sapien
gtgtctaatacctttagcaggaaga

SEQ ID NO: 2708771 - DNA, 25 bp, Homo sapien
tgtgtctaatacctttagcaggaag

SEQ ID NO: 2708772 - DNA, 25 bp, Homo sapien
tgtctaatacctttagcaggaagat

SEQ ID NO: 2708773 - DNA, 25 bp, Homo sapien
tctaatacctttagcaggaagattg

SEQ ID NO: 2708774 - DNA, 25 bp, Homo sapien
ctccaggagtcaccgtctggttctt

SEQ ID NO: 2708775 - DNA, 25 bp, Homo sapien
gcctccaggagtcaccgtctggttc

SEQ ID NO: 2708776 - DNA, 25 bp, Homo sapien
ccatgctactgttcccgtgggcctg

SEQ ID NO: 2708777 - DNA, 25 bp, Homo sapien
catgctactgttcccgtgggcctga

SEQ ID NO: 2708778 - DNA, 25 bp, Homo sapien
catggcactataaatctttagtaac

SEQ ID NO: 2708779 - DNA, 25 bp, Homo sapien
caaaaacatcgtcaattttcatgct

SEQ ID NO: 2708780 - DNA, 25 bp, Homo sapien
aaacatggtcagttttctagtggaa

SEQ ID NO: 2708781 - DNA, 25 bp, Homo sapien
tcagttttctagtggaaatttttca

SEQ ID NO: 2708782 - DNA, 25 bp, Homo sapien
ccagatacccacttctttaaatgac

SEQ ID NO: 2708783 - DNA, 25 bp, Homo sapien
tcttttcagtctcaccttatctctc

SEQ ID NO: 2708784 - DNA, 25 bp, Homo sapien
ttaccacttcccagatacccacttc

SEQ ID NO: 2708785 - DNA, 25 bp, Homo sapien
gcagtatatggggttctaacctcta

SEQ ID NO: 2708786 - DNA, 25 bp, Homo sapien
gtaggaggaagatcaaagttacact

SEQ ID NO: 2708787 - DNA, 25 bp, Homo sapien
taaaatacactcgtcagtactccat

SEQ ID NO: 2708788 - DNA, 25 bp, Homo sapien
tttttcagggttaggtatcagccac

SEQ ID NO: 2708789 - DNA, 25 bp, Homo sapien
ctgtcttctccgtacactgtagtta

SEQ ID NO: 2708790 - DNA, 25 bp, Homo sapien
acgttcccttcacagctcccggtgc

SEQ ID NO: 2708791 - DNA, 25 bp, Homo sapien
gcctaacaggaactaacccaagagc

SEQ ID NO: 2708792 - DNA, 25 bp, Homo sapien
tcaacctagcccgaaggctgaggtg

SEQ ID NO: 2708793 - DNA, 25 bp, Homo sapien
ccaccgggcatcttaggagacttca

SEQ ID NO: 2708794 - DNA, 25 bp, Homo sapien
ctctatgagcatggtgcagggaagg

SEQ ID NO: 2708795 - DNA, 25 bp, Homo sapien
ccgctcttcttcaggcctgccgtgg

SEQ ID NO: 2708796 - DNA, 25 bp, Homo sapien
tctatgagcatggtgcagggaaggc

SEQ ID NO: 2708797 - DNA, 25 bp, Homo sapien
cgctcttcttcaggcctgccgtggg

SEQ ID NO: 2708798 - DNA, 25 bp, Homo sapien
catagttggctaaggctgaaggatc

SEQ ID NO: 2708799 - DNA, 25 bp, Homo sapien
caggtttgtccttcttgaccagtgc

SEQ ID NO: 2708800 - DNA, 25 bp, Homo sapien
tcttgaccagtgctacaacatagtt

SEQ ID NO: 2708801 - DNA, 25 bp, Homo sapien
tcaagttgatcagcacaaaaggctt

SEQ ID NO: 2708802 - DNA, 25 bp, Homo sapien
tgaacatcttccatgtaccaagtac

SEQ ID NO: 2708803 - DNA, 25 bp, Homo sapien
gtactgtaggttccaagtctccact

SEQ ID NO: 2708804 - DNA, 25 bp, Homo sapien
tcgctcagtcgcccattctggaatg

SEQ ID NO: 2708805 - DNA, 25 bp, Homo sapien
cactctcaaccaaacaaaaggcaaa

SEQ ID NO: 2708806 - DNA, 25 bp, Homo sapien
tagtatagagactttcaaatagttt

SEQ ID NO: 2708807 - DNA, 25 bp, Homo sapien
aatagtttgtccacaaaacctgaag

SEQ ID NO: 2708808 - DNA, 25 bp, Homo sapien
ttggactagtggttttggctcaggc

SEQ ID NO: 2708809 - DNA, 25 bp, Homo sapien
caggctttactggttccaaaagtgg

SEQ ID NO: 2708810 - DNA, 25 bp, Homo sapien
actagattctgaacgagtcttctgg

SEQ ID NO: 2708811 - DNA, 25 bp, Homo sapien
ctagattctgaacgagtcttctggg

SEQ ID NO: 2708812 - DNA, 25 bp, Homo sapien
tcactagattctgaacgagtcttct

SEQ ID NO: 2708813 - DNA, 25 bp, Homo sapien
agattctgaacgagtcttctgggga

SEQ ID NO: 2708814 - DNA, 25 bp, Homo sapien
tataatatacagatataaaagccat

SEQ ID NO: 2708815 - DNA, 25 bp, Homo sapien
ctataatatacagatataaaagcca

SEQ ID NO: 2708816 - DNA, 25 bp, Homo sapien
catagtaccggtcatagtctctcca

SEQ ID NO: 2708817 - DNA, 25 bp, Homo sapien
caattcattccgctcatagtaccgg

SEQ ID NO: 2708818 - DNA, 25 bp, Homo sapien
ggtacaattcattccgctcatagta

SEQ ID NO: 2708819 - DNA, 25 bp, Homo sapien
ttccgctcatagtaccggtcatagt

SEQ ID NO: 2708820 - DNA, 25 bp, Homo sapien
tacttcggcttctactgcgactcag

SEQ ID NO: 2708821 - DNA, 25 bp, Homo sapien
tcctatttggatcccggtctttgct

SEQ ID NO: 2708822 - DNA, 25 bp, Homo sapien
tactccgactcttactcctgcctct

SEQ ID NO: 2708823 - DNA, 25 bp, Homo sapien
tactgcgactcaggcctcgactctt

SEQ ID NO: 2708824 - DNA, 25 bp, Homo sapien
tagtaattagaccaactctcagttg

SEQ ID NO: 2708825 - DNA, 25 bp, Homo sapien
caggtgcgatcacagtaacagtgct

SEQ ID NO: 2708826 - DNA, 25 bp, Homo sapien
tctgcatcgcctctttggtggtagg

SEQ ID NO: 2708827 - DNA, 25 bp, Homo sapien
tgctgggaatagactgtgccccaga

SEQ ID NO: 2708828 - DNA, 25 bp, Homo sapien
ctgacaaaggtcaccaagtacacaa

SEQ ID NO: 2708829 - DNA, 25 bp, Homo sapien
gacaaaggtcaccaagtacacaaaa

SEQ ID NO: 2708830 - DNA, 25 bp, Homo sapien
ggtcaccaagtacacaaaatcctct

SEQ ID NO: 2708831 - DNA, 25 bp, Homo sapien
caaaggtcaccaagtacacaaaatc

SEQ ID NO: 2708832 - DNA, 25 bp, Homo sapien
ttggcagagcaacttcatcaacaac

SEQ ID NO: 2708833 - DNA, 25 bp, Homo sapien
catcaacaactaggggatcatttcc

SEQ ID NO: 2708834 - DNA, 25 bp, Homo sapien
aacaactaggggatcatttccatga

SEQ ID NO: 2708835 - DNA, 25 bp, Homo sapien
ggcagagcaacttcatcaacaacta

SEQ ID NO: 2708836 - DNA, 25 bp, Homo sapien
ggcattggaggcattaacattccag

SEQ ID NO: 2708837 - DNA, 25 bp, Homo sapien
ggacctggcattggaggcattaaca

SEQ ID NO: 2708838 - DNA, 25 bp, Homo sapien
gaggcattaacattccaggaggtgg

SEQ ID NO: 2708839 - DNA, 25 bp, Homo sapien
agtctcatactatggccaggacctg

SEQ ID NO: 2708840 - DNA, 25 bp, Homo sapien
ttggtatgggaagcacaacggatgg

SEQ ID NO: 2708841 - DNA, 25 bp, Homo sapien
ggaagcacaacggatggtggaggct

SEQ ID NO: 2708842 - DNA, 25 bp, Homo sapien
tatgggaagcacaacggatggtgga

SEQ ID NO: 2708843 - DNA, 25 bp, Homo sapien
gaagcacaacggatggtggaggctg

SEQ ID NO: 2708844 - DNA, 25 bp, Homo sapien
aggaggaggtagtcttgttcccact

SEQ ID NO: 2708845 - DNA, 25 bp, Homo sapien
ggcactgcacttgtcccaggctggt

SEQ ID NO: 2708846 - DNA, 25 bp, Homo sapien
tggtcacggctgtttatcaagcttg

SEQ ID NO: 2708847 - DNA, 25 bp, Homo sapien
tgttcccactgatgcaagattgggc

SEQ ID NO: 2708848 - DNA, 25 bp, Homo sapien
cagtgacaactgcagcctaaatgaa

SEQ ID NO: 2708849 - DNA, 25 bp, Homo sapien
tcccatcttaaattgttcatatagg

SEQ ID NO: 2708850 - DNA, 25 bp, Homo sapien
ggtaacatgcctaatatcaatattt

SEQ ID NO: 2708851 - DNA, 25 bp, Homo sapien
ctatcaaataggttacagtaatggt

SEQ ID NO: 2708852 - DNA, 25 bp, Homo sapien
cagtaatggtgaagatcagtctgtc

SEQ ID NO: 2708853 - DNA, 25 bp, Homo sapien
tgaagtcgctcagatgcagcagcac

SEQ ID NO: 2708854 - DNA, 25 bp, Homo sapien
ggcggtgtccccaactgaagtcgct

SEQ ID NO: 2708855 - DNA, 25 bp, Homo sapien
cccatgaggtttcgaggtggcacca

SEQ ID NO: 2708856 - DNA, 25 bp, Homo sapien
ggtatccaatggaggatcccatgag

SEQ ID NO: 2708857 - DNA, 25 bp, Homo sapien
gccaatcagattgggacgctgtgtc

SEQ ID NO: 2708858 - DNA, 25 bp, Homo sapien
tgtactgagatctaccagaactagt

SEQ ID NO: 2708859 - DNA, 25 bp, Homo sapien
tcttgaaaagaactgtctgtactga

SEQ ID NO: 2708860 - DNA, 25 bp, Homo sapien
tatctccagatgttaggccaatcag

SEQ ID NO: 2708861 - DNA, 25 bp, Homo sapien
ttgtgagtggcccttccaaaccact

SEQ ID NO: 2708862 - DNA, 25 bp, Homo sapien
agctctttttcgactatctggttca

SEQ ID NO: 2708863 - DNA, 25 bp, Homo sapien
actactctggttatgttgctattaa

SEQ ID NO: 2708864 - DNA, 25 bp, Homo sapien
tgctattaatcgaaacaggaactgg

SEQ ID NO: 2708865 - DNA, 25 bp, Homo sapien
ctaacacttaaaatcatatgctaaa

SEQ ID NO: 2708866 - DNA, 25 bp, Homo sapien
gctaaatagatctaccataaagatc

SEQ ID NO: 2708867 - DNA, 25 bp, Homo sapien
tctaccacaattatcaaagactcta

SEQ ID NO: 2708868 - DNA, 25 bp, Homo sapien
ggtgaacagcaatagattacaaaaa

SEQ ID NO: 2708869 - DNA, 25 bp, Homo sapien
actgattctttcgtaagaaccctgg

SEQ ID NO: 2708870 - DNA, 25 bp, Homo sapien
gaagtgttcattgagcttggtaatg

SEQ ID NO: 2708871 - DNA, 25 bp, Homo sapien
atattaacaatagttccaaatttgc

SEQ ID NO: 2708872 - DNA, 25 bp, Homo sapien
cctgagggattttcttgacttctaa

SEQ ID NO: 2708873 - DNA, 25 bp, Homo sapien
atagttaaataaattatgacccact

SEQ ID NO: 2708874 - DNA, 25 bp, Homo sapien
tagttaaataaattatgacccactg

SEQ ID NO: 2708875 - DNA, 25 bp, Homo sapien
cagaaaatagttaaataaattatga

SEQ ID NO: 2708876 - DNA, 25 bp, Homo sapien
acagaaaatagttaaataaattatg

SEQ ID NO: 2708877 - DNA, 25 bp, Homo sapien
gaggactgtagtgtcggttgctcat

SEQ ID NO: 2708878 - DNA, 25 bp, Homo sapien
tggatacctccgtgcactgttgaag

SEQ ID NO: 2708879 - DNA, 25 bp, Homo sapien
tatgccacaagactcgaatgaatcg

SEQ ID NO: 2708880 - DNA, 25 bp, Homo sapien
gaatgaatcggttgtttagaactgc

SEQ ID NO: 2708881 - DNA, 25 bp, Homo sapien
tgttaagaacatatgcacctgatgt

SEQ ID NO: 2708882 - DNA, 25 bp, Homo sapien
gcaccaccagactgattcaacaaat

SEQ ID NO: 2708883 - DNA, 25 bp, Homo sapien
tgatgcatcactctggttaccacct

SEQ ID NO: 2708884 - DNA, 25 bp, Homo sapien
tgtccaagacgatgtttaacaggaa

SEQ ID NO: 2708885 - DNA, 25 bp, Homo sapien
caccatgctcaagagttatagtata

SEQ ID NO: 2708886 - DNA, 25 bp, Homo sapien
ttactatgacagaatacccttcact

SEQ ID NO: 2708887 - DNA, 25 bp, Homo sapien
gaaattaataaagacacttatctat

SEQ ID NO: 2708888 - DNA, 25 bp, Homo sapien
tctctttgtaataatcaccatgctc

SEQ ID NO: 2708889 - DNA, 25 bp, Homo sapien
tccctgggtccctttgagtgctagg

SEQ ID NO: 2708890 - DNA, 25 bp, Homo sapien
taggattctgtggtacccttgaaga

SEQ ID NO: 2708891 - DNA, 25 bp, Homo sapien
caggactctagtaatctttgacacc

SEQ ID NO: 2708892 - DNA, 25 bp, Homo sapien
tattctaggctcatctgcagtactg

SEQ ID NO: 2708893 - DNA, 25 bp, Homo sapien
gaaggtgtctttaagtttgaggagc

SEQ ID NO: 2708894 - DNA, 25 bp, Homo sapien
tagaccctgaacagagctttgaagg

SEQ ID NO: 2708895 - DNA, 25 bp, Homo sapien
taaatcatttttggatggcctggag

SEQ ID NO: 2708896 - DNA, 25 bp, Homo sapien
gaacatcatgagatttagaccctga

SEQ ID NO: 2708897 - DNA, 25 bp, Homo sapien
catatcttgttgtaacttcattgct

SEQ ID NO: 2708898 - DNA, 25 bp, Homo sapien
ttttttcctcatatcttgttgtaac

SEQ ID NO: 2708899 - DNA, 25 bp, Homo sapien
tgcttttctaacacttcctgtcttt

SEQ ID NO: 2708900 - DNA, 25 bp, Homo sapien
tctatttgcttttctaacacttcct

SEQ ID NO: 2708901 - DNA, 25 bp, Homo sapien
ttctctccaagctctttcaaagtct

SEQ ID NO: 2708902 - DNA, 25 bp, Homo sapien
cttcattatatttgctctttcttct

SEQ ID NO: 2708903 - DNA, 25 bp, Homo sapien
cttttaattgtgagatcttctctcc

SEQ ID NO: 2708904 - DNA, 25 bp, Homo sapien
tcactttagatggtgtggagactgc

SEQ ID NO: 2708905 - DNA, 25 bp, Homo sapien
cagtatctaataactccttctgggc

SEQ ID NO: 2708906 - DNA, 25 bp, Homo sapien
ttttccgtaattctgtggtgtcttc

SEQ ID NO: 2708907 - DNA, 25 bp, Homo sapien
gcctcttgtggaggtccagttcagt

SEQ ID NO: 2708908 - DNA, 25 bp, Homo sapien
gacagcctcttgtggaggtccagtt

SEQ ID NO: 2708909 - DNA, 25 bp, Homo sapien
gacatggtctttcctcgacccacag

SEQ ID NO: 2708910 - DNA, 25 bp, Homo sapien
tttgggacgatggtccaccaccatg

SEQ ID NO: 2708911 - DNA, 25 bp, Homo sapien
tccaactgttagtgctttgggacga

SEQ ID NO: 2708912 - DNA, 25 bp, Homo sapien
caggtaaaatacctaaccgtgcagc

SEQ ID NO: 2708913 - DNA, 25 bp, Homo sapien
gaggataagaggtctgtcctccaaa

SEQ ID NO: 2708914 - DNA, 25 bp, Homo sapien
tacacaaatggtgagaatctcaaac

SEQ ID NO: 2708915 - DNA, 25 bp, Homo sapien
tatattatgacgctaccaagttagg

SEQ ID NO: 2708916 - DNA, 25 bp, Homo sapien
gggttcactcagcaattccacatac

SEQ ID NO: 2708917 - DNA, 25 bp, Homo sapien
cttcttcagtctcagtggatataga

SEQ ID NO: 2708918 - DNA, 25 bp, Homo sapien
cttgtgccatgatatctgtagccga

SEQ ID NO: 2708919 - DNA, 25 bp, Homo sapien
catgatatctgtagccgacggtctt

SEQ ID NO: 2708920 - DNA, 25 bp, Homo sapien
agtggatatagatggtaccttgggc

SEQ ID NO: 2708921 - DNA, 25 bp, Homo sapien
ttgcatgcatgaaagaaaaacccag

SEQ ID NO: 2708922 - DNA, 25 bp, Homo sapien
agaacagtctttcctatatcagaag

SEQ ID NO: 2708923 - DNA, 25 bp, Homo sapien
taaacgggtcttaatttgcatgcat

SEQ ID NO: 2708924 - DNA, 25 bp, Homo sapien
tatgttcaacttctgcacactctga

SEQ ID NO: 2708925 - DNA, 25 bp, Homo sapien
atgagcgagactcatattcatcttc

SEQ ID NO: 2708926 - DNA, 25 bp, Homo sapien
ccatgagcgagactcatattcatct

SEQ ID NO: 2708927 - DNA, 25 bp, Homo sapien
catcgtcatcatcaggcaaaaacaa

SEQ ID NO: 2708928 - DNA, 25 bp, Homo sapien
tcatcgtcatcatcaggcaaaaaca

SEQ ID NO: 2708929 - DNA, 25 bp, Homo sapien
tcttgaacctactgtgttgaaaaga

SEQ ID NO: 2708930 - DNA, 25 bp, Homo sapien
taaaagtcactaggcctttggtgct

SEQ ID NO: 2708931 - DNA, 25 bp, Homo sapien
gctgtggatcttcacaactgtgtaa

SEQ ID NO: 2708932 - DNA, 25 bp, Homo sapien
taaggctctagagattatccatgtc

SEQ ID NO: 2708933 - DNA, 25 bp, Homo sapien
tactgtctgatgacccatccataac

SEQ ID NO: 2708934 - DNA, 25 bp, Homo sapien
cctactgtctgatgacccatccata

SEQ ID NO: 2708935 - DNA, 25 bp, Homo sapien
gacccatccataacaactgagagtt

SEQ ID NO: 2708936 - DNA, 25 bp, Homo sapien
tctgatgacccatccataacaactg

SEQ ID NO: 2708937 - DNA, 25 bp, Homo sapien
gaaccttttattggagactgcctgc

SEQ ID NO: 2708938 - DNA, 25 bp, Homo sapien
tatagagctagctaccattgctgta

SEQ ID NO: 2708939 - DNA, 25 bp, Homo sapien
gactgaatacaaattgggctcctcc

SEQ ID NO: 2708940 - DNA, 25 bp, Homo sapien
tgcggttgcccaaatgaaccactta

SEQ ID NO: 2708941 - DNA, 25 bp, Homo sapien
caaaatccttgatatagtggtcacc

SEQ ID NO: 2708942 - DNA, 25 bp, Homo sapien
gaaactgtctactgagggatgcgta

SEQ ID NO: 2708943 - DNA, 25 bp, Homo sapien
ccaagacccttttggagacaacagg

SEQ ID NO: 2708944 - DNA, 25 bp, Homo sapien
tacaggcatactatacatcaagagg

SEQ ID NO: 2708945 - DNA, 25 bp, Homo sapien
tctttccagaacaagccagaattac

SEQ ID NO: 2708946 - DNA, 25 bp, Homo sapien
ctctgttgagaaagttatcctactt

SEQ ID NO: 2708947 - DNA, 25 bp, Homo sapien
tcactcactctcacaagcaagcata

SEQ ID NO: 2708948 - DNA, 25 bp, Homo sapien
tagccagtgacttcgaacccaactt

SEQ ID NO: 2708949 - DNA, 25 bp, Homo sapien
tatagtgggtcctgacaagaatttt

SEQ ID NO: 2708950 - DNA, 25 bp, Homo sapien
agttgctgtgaaaaaagattcagtc

SEQ ID NO: 2708951 - DNA, 25 bp, Homo sapien
tttcgtgtgtgtatactgggttgca

SEQ ID NO: 2708952 - DNA, 25 bp, Homo sapien
tatcaggtgcatattgggtaggtat

SEQ ID NO: 2708953 - DNA, 25 bp, Homo sapien
tccccaagggagtctggttccaatc

SEQ ID NO: 2708954 - DNA, 25 bp, Homo sapien
tcagacatgtagagacaagtgacac

SEQ ID NO: 2708955 - DNA, 25 bp, Homo sapien
gcagtggagcacagaggttaagaac

SEQ ID NO: 2708956 - DNA, 25 bp, Homo sapien
tgctgactccatcactacaaggttg

SEQ ID NO: 2708957 - DNA, 25 bp, Homo sapien
cacattttacagagctcttgtccat

SEQ ID NO: 2708958 - DNA, 25 bp, Homo sapien
tgtttctgttcccagaactcgtaaa

SEQ ID NO: 2708959 - DNA, 25 bp, Homo sapien
cattttctaatatcacattttacag

SEQ ID NO: 2708960 - DNA, 25 bp, Homo sapien
ctgtttctgttcccagaactcgtaa

SEQ ID NO: 2708961 - DNA, 25 bp, Homo sapien
gcaccatgtctaataatatcctctg

SEQ ID NO: 2708962 - DNA, 25 bp, Homo sapien
cagtgctttctagattgacaaccca

SEQ ID NO: 2708963 - DNA, 25 bp, Homo sapien
tcagcagcaccatgtctaataatat

SEQ ID NO: 2708964 - DNA, 25 bp, Homo sapien
tatcctctgataaatggagataaat

SEQ ID NO: 2708965 - DNA, 25 bp, Homo sapien
caaacttctcacatgtactcgccgc

SEQ ID NO: 2708966 - DNA, 25 bp, Homo sapien
ttctcacatgtactcgccgcctgcg

SEQ ID NO: 2708967 - DNA, 25 bp, Homo sapien
ctgctgcgggactcgtctgttggcc

SEQ ID NO: 2708968 - DNA, 25 bp, Homo sapien
gactcgtctgttggccgctgccttg

SEQ ID NO: 2708969 - DNA, 25 bp, Homo sapien
tcaagatgccatcgcgcagcgaggc

SEQ ID NO: 2708970 - DNA, 25 bp, Homo sapien
agatgccatcgcgcagcgaggcagc

SEQ ID NO: 2708971 - DNA, 25 bp, Homo sapien
aagatgccatcgcgcagcgaggcag

SEQ ID NO: 2708972 - DNA, 25 bp, Homo sapien
caagatgccatcgcgcagcgaggca

SEQ ID NO: 2708973 - DNA, 25 bp, Homo sapien
acacccatccttaaggaccagtctt

SEQ ID NO: 2708974 - DNA, 25 bp, Homo sapien
gcggtaagacaacacccatccttaa

SEQ ID NO: 2708975 - DNA, 25 bp, Homo sapien
ccctctaagaaggtctactggcagt

SEQ ID NO: 2708976 - DNA, 25 bp, Homo sapien
tactggcagttctaggcagccagcg

SEQ ID NO: 2708977 - DNA, 25 bp, Homo sapien
aacatcccttagtccaagaggacgc

SEQ ID NO: 2708978 - DNA, 25 bp, Homo sapien
agaggacgccctgacagatccgggc

SEQ ID NO: 2708979 - DNA, 25 bp, Homo sapien
tgtgcgtgccgggtttcccagaatc

SEQ ID NO: 2708980 - DNA, 25 bp, Homo sapien
ttattgtgcagggtatgtgcgtgcc

SEQ ID NO: 2708981 - DNA, 25 bp, Homo sapien
tgcctccgctgagagagcgatcttc

SEQ ID NO: 2708982 - DNA, 25 bp, Homo sapien
gctgcactccggttcggagagaaac

SEQ ID NO: 2708983 - DNA, 25 bp, Homo sapien
gatcttcggggcttagagacctcac

SEQ ID NO: 2708984 - DNA, 25 bp, Homo sapien
ttcggagagaaaccccgcgcgtgca

SEQ ID NO: 2708985 - DNA, 25 bp, Homo sapien
gcgaggaggcgcctccaagcgccca

SEQ ID NO: 2708986 - DNA, 25 bp, Homo sapien
tgtccaccagagtccggtcccgcgg

SEQ ID NO: 2708987 - DNA, 25 bp, Homo sapien
gcccaagctgtccaccagagtccgg

SEQ ID NO: 2708988 - DNA, 25 bp, Homo sapien
accagagtccggtcccgcggcgcag

SEQ ID NO: 2708989 - DNA, 25 bp, Homo sapien
tccgtcctgtcccagctcgaactgc

SEQ ID NO: 2708990 - DNA, 25 bp, Homo sapien
caaaagtcccaacctctccgtcctg

SEQ ID NO: 2708991 - DNA, 25 bp, Homo sapien
tctccgtcctgtcccagctcgaact

SEQ ID NO: 2708992 - DNA, 25 bp, Homo sapien
catgccaccccaaaagtcccaacct

SEQ ID NO: 2708993 - DNA, 25 bp, Homo sapien
tttgggttcttgcagcaccgggtgc

SEQ ID NO: 2708994 - DNA, 25 bp, Homo sapien
gctgcttggagttcatggccatcat

SEQ ID NO: 2708995 - DNA, 25 bp, Homo sapien
caccgggtgcatgccgaaaggctgc

SEQ ID NO: 2708996 - DNA, 25 bp, Homo sapien
cgcatggcctcggagccagagtgca

SEQ ID NO: 2708997 - DNA, 25 bp, Homo sapien
caagcgagaaggcgcacagcacggt

SEQ ID NO: 2708998 - DNA, 25 bp, Homo sapien
ctgcaagcgagaaggcgcacagcac

SEQ ID NO: 2708999 - DNA, 25 bp, Homo sapien
tgcaagcgagaaggcgcacagcacg

SEQ ID NO: 2709000 - DNA, 25 bp, Homo sapien
aagcgagaaggcgcacagcacggtc

SEQ ID NO: 2709001 - DNA, 25 bp, Homo sapien
ctcagcgtgggcgagatgtgctcca

SEQ ID NO: 2709002 - DNA, 25 bp, Homo sapien
gatggccgcgatcttctcagatgaa

SEQ ID NO: 2709003 - DNA, 25 bp, Homo sapien
gatcttgagattagccagagccgcg

SEQ ID NO: 2709004 - DNA, 25 bp, Homo sapien
tctgtgcgggcatcaccgagtgttc

SEQ ID NO: 2709005 - DNA, 25 bp, Homo sapien
gccgaatacttcattcgtttctgtt

SEQ ID NO: 2709006 - DNA, 25 bp, Homo sapien
gtggacagccgaatacttcattcgt

SEQ ID NO: 2709007 - DNA, 25 bp, Homo sapien
tcagtggacagccgaatacttcatt

SEQ ID NO: 2709008 - DNA, 25 bp, Homo sapien
ggacagccgaatacttcattcgttt

SEQ ID NO: 2709009 - DNA, 25 bp, Homo sapien
ggcattttcaccctagcttcgggcg

SEQ ID NO: 2709010 - DNA, 25 bp, Homo sapien
taacctgcctaggaaacgccttgga

SEQ ID NO: 2709011 - DNA, 25 bp, Homo sapien
gaagttacagtcgttttccagcagc

SEQ ID NO: 2709012 - DNA, 25 bp, Homo sapien
gaaaaaatggcaacttggagcccgc

SEQ ID NO: 2709013 - DNA, 25 bp, Homo sapien
agcccgcaaaagcgcgtccttctgg

SEQ ID NO: 2709014 - DNA, 25 bp, Homo sapien
ccgcaaaagcgcgtccttctggagc

SEQ ID NO: 2709015 - DNA, 25 bp, Homo sapien
aagcgcgtccttctggagcgcttcg

SEQ ID NO: 2709016 - DNA, 25 bp, Homo sapien
caaaagcgcgtccttctggagcgct

SEQ ID NO: 2709017 - DNA, 25 bp, Homo sapien
aacaatcatttatagcagcatcagc

SEQ ID NO: 2709018 - DNA, 25 bp, Homo sapien
tgggctctaggaatgaacaatcatt

SEQ ID NO: 2709019 - DNA, 25 bp, Homo sapien
cagtgggctctaggaatgaacaatc

SEQ ID NO: 2709020 - DNA, 25 bp, Homo sapien
agcagcatcagctctcaggatggaa

SEQ ID NO: 2709021 - DNA, 25 bp, Homo sapien
gtctctttagctccataacttttct

SEQ ID NO: 2709022 - DNA, 25 bp, Homo sapien
tgtctctttagctccataacttttc

SEQ ID NO: 2709023 - DNA, 25 bp, Homo sapien
cacagggctttggagactattttct

SEQ ID NO: 2709024 - DNA, 25 bp, Homo sapien
acagggctttggagactattttctg

SEQ ID NO: 2709025 - DNA, 25 bp, Homo sapien
actattcgaatcttcaaactctgta

SEQ ID NO: 2709026 - DNA, 25 bp, Homo sapien
gctaaaatagtcgaatgtgattgcc

SEQ ID NO: 2709027 - DNA, 25 bp, Homo sapien
aagccttgctaaactattcgaatct

SEQ ID NO: 2709028 - DNA, 25 bp, Homo sapien
gaaggctgaaggatagttctttttc

SEQ ID NO: 2709029 - DNA, 25 bp, Homo sapien
taaaaatcaattgagtgagcaccgc

SEQ ID NO: 2709030 - DNA, 25 bp, Homo sapien
ccgccgatggcttgttgagttttct

SEQ ID NO: 2709031 - DNA, 25 bp, Homo sapien
gatcatttttccatcgttcgtgcat

SEQ ID NO: 2709032 - DNA, 25 bp, Homo sapien
tccatcgttcgtgcatgaaggcaaa

SEQ ID NO: 2709033 - DNA, 25 bp, Homo sapien
tcaataacggagatacaaagagggc

SEQ ID NO: 2709034 - DNA, 25 bp, Homo sapien
gggcagctgtcatcaataacggaga

SEQ ID NO: 2709035 - DNA, 25 bp, Homo sapien
atacaaagagggcagtgaccccagg

SEQ ID NO: 2709036 - DNA, 25 bp, Homo sapien
taacggagatacaaagagggcagtg

SEQ ID NO: 2709037 - DNA, 25 bp, Homo sapien
cacatcagtgtaattagcgcgccgc

SEQ ID NO: 2709038 - DNA, 25 bp, Homo sapien
taaattatggatgcgcctaggtgct

SEQ ID NO: 2709039 - DNA, 25 bp, Homo sapien
gctgctcccgcgtttcctctgtagt

SEQ ID NO: 2709040 - DNA, 25 bp, Homo sapien
tctgagcaaaggactgcgcggccca

SEQ ID NO: 2709041 - DNA, 25 bp, Homo sapien
taatgcatcctctacatgagtagcc

SEQ ID NO: 2709042 - DNA, 25 bp, Homo sapien
caagggtttcctcttgaatccagga

SEQ ID NO: 2709043 - DNA, 25 bp, Homo sapien
cagaagtatcttgcccattggatca

SEQ ID NO: 2709044 - DNA, 25 bp, Homo sapien
tggatcaacatatcgtagacattcg

SEQ ID NO: 2709045 - DNA, 25 bp, Homo sapien
catctaagatggctccatactggcg

SEQ ID NO: 2709046 - DNA, 25 bp, Homo sapien
ggtggtcctcttgggtagcatctaa

SEQ ID NO: 2709047 - DNA, 25 bp, Homo sapien
caaggtcccgttgcctcttcaggtg

SEQ ID NO: 2709048 - DNA, 25 bp, Homo sapien
ccagcttctgtctatcaaggtcccg

SEQ ID NO: 2709049 - DNA, 25 bp, Homo sapien
tctggctgattgctcgtggctccac

SEQ ID NO: 2709050 - DNA, 25 bp, Homo sapien
ttcatgggttcttgggaggccccca

SEQ ID NO: 2709051 - DNA, 25 bp, Homo sapien
gcagattgctcgcttcagtttcctt

SEQ ID NO: 2709052 - DNA, 25 bp, Homo sapien
cagtttccttgacacgaatgaatgc

SEQ ID NO: 2709053 - DNA, 25 bp, Homo sapien
cattctaagtggcacatccatggca

SEQ ID NO: 2709054 - DNA, 25 bp, Homo sapien
gacatggttgtggtccctgtcctag

SEQ ID NO: 2709055 - DNA, 25 bp, Homo sapien
tggaacttcttcaataattgatggc

SEQ ID NO: 2709056 - DNA, 25 bp, Homo sapien
tccatggcatctgcacagtagaatc

SEQ ID NO: 2709057 - DNA, 25 bp, Homo sapien
gcccgcgctttcctgtctttgtcag

SEQ ID NO: 2709058 - DNA, 25 bp, Homo sapien
tcagcctccaaagcatttggagctt

SEQ ID NO: 2709059 - DNA, 25 bp, Homo sapien
agatgaaaaagacccatcagccccg

SEQ ID NO: 2709060 - DNA, 25 bp, Homo sapien
gtcattttacagcactgcctcttca

SEQ ID NO: 2709061 - DNA, 25 bp, Homo sapien
tgttgtttgacagttaagccttcaa

SEQ ID NO: 2709062 - DNA, 25 bp, Homo sapien
ctttaatggcatttcagctttggtt

SEQ ID NO: 2709063 - DNA, 25 bp, Homo sapien
gaaaagttgcttccgatgaaaacac

SEQ ID NO: 2709064 - DNA, 25 bp, Homo sapien
gcttccgatgaaaacactttcttta

SEQ ID NO: 2709065 - DNA, 25 bp, Homo sapien
gtgggagggccacatcttggatata

SEQ ID NO: 2709066 - DNA, 25 bp, Homo sapien
catcttggatataactggattcccc

SEQ ID NO: 2709067 - DNA, 25 bp, Homo sapien
tgcatccctatcaaacctgaactgc

SEQ ID NO: 2709068 - DNA, 25 bp, Homo sapien
tgcaaacctggactttcacccacag

SEQ ID NO: 2709069 - DNA, 25 bp, Homo sapien
tctcagttgtgcctgccaacagttc

SEQ ID NO: 2709070 - DNA, 25 bp, Homo sapien
caaaacaatgatattagattctagc

SEQ ID NO: 2709071 - DNA, 25 bp, Homo sapien
ctgccaacagttctgagccagagtc

SEQ ID NO: 2709072 - DNA, 25 bp, Homo sapien
ggaaaaccaatattgcttgtcataa

SEQ ID NO: 2709073 - DNA, 25 bp, Homo sapien
tccaacccaccagagggtcctgaag

SEQ ID NO: 2709074 - DNA, 25 bp, Homo sapien
caacccaccagagggtcctgaaggt

SEQ ID NO: 2709075 - DNA, 25 bp, Homo sapien
atccaacccaccagagggtcctgaa

SEQ ID NO: 2709076 - DNA, 25 bp, Homo sapien
cacatccaacccaccagagggtcct

SEQ ID NO: 2709077 - DNA, 25 bp, Homo sapien
tagccagcgtattaactggtgttga

SEQ ID NO: 2709078 - DNA, 25 bp, Homo sapien
gaagaaatctaactggtcattgggt

SEQ ID NO: 2709079 - DNA, 25 bp, Homo sapien
gatttgtatggccatccttgtgcca

SEQ ID NO: 2709080 - DNA, 25 bp, Homo sapien
tctggatatctgtaggtaagaagtc

SEQ ID NO: 2709081 - DNA, 25 bp, Homo sapien
ctctcatcccctaatctcctttgga

SEQ ID NO: 2709082 - DNA, 25 bp, Homo sapien
agaacaagttctaacctctcatccc

SEQ ID NO: 2709083 - DNA, 25 bp, Homo sapien
aacaagttctaacctctcatcccct

SEQ ID NO: 2709084 - DNA, 25 bp, Homo sapien
tctcatcccctaatctcctttggat

SEQ ID NO: 2709085 - DNA, 25 bp, Homo sapien
gacccgacgtctcctattggctaga

SEQ ID NO: 2709086 - DNA, 25 bp, Homo sapien
tgaaagcggtatgaagacagccagt

SEQ ID NO: 2709087 - DNA, 25 bp, Homo sapien
gtcaatccccaacgagagaggcgga

SEQ ID NO: 2709088 - DNA, 25 bp, Homo sapien
tttgctattgggcaaggcgcccgcc

SEQ ID NO: 2709089 - DNA, 25 bp, Homo sapien
gggttgaatcgttcactctcgcccc

SEQ ID NO: 2709090 - DNA, 25 bp, Homo sapien
gagctcccccgggttgaatcgttca

SEQ ID NO: 2709091 - DNA, 25 bp, Homo sapien
ccgggttgaatcgttcactctcgcc

SEQ ID NO: 2709092 - DNA, 25 bp, Homo sapien
ccccgggttgaatcgttcactctcg

SEQ ID NO: 2709093 - DNA, 25 bp, Homo sapien
tggaggagggcctcgcatcatacca

SEQ ID NO: 2709094 - DNA, 25 bp, Homo sapien
cataccaaaaggtggaggaggtcgc

SEQ ID NO: 2709095 - DNA, 25 bp, Homo sapien
gcggcatattaggatcaaaaggagg

SEQ ID NO: 2709096 - DNA, 25 bp, Homo sapien
gtggtgggcctcgcatcactgcatt

SEQ ID NO: 2709097 - DNA, 25 bp, Homo sapien
gcccataggtggaggtatccctcct

SEQ ID NO: 2709098 - DNA, 25 bp, Homo sapien
tgtggagggcccataggtggaggta

SEQ ID NO: 2709099 - DNA, 25 bp, Homo sapien
cataggtggaggtatccctcctgga

SEQ ID NO: 2709100 - DNA, 25 bp, Homo sapien
agggcccataggtggaggtatccct

SEQ ID NO: 2709101 - DNA, 25 bp, Homo sapien
tgggaggaggcatgaaaggtggtct

SEQ ID NO: 2709102 - DNA, 25 bp, Homo sapien
ggaaacatcatacccggaggaggag

SEQ ID NO: 2709103 - DNA, 25 bp, Homo sapien
aggaggcattcctggtggaaacatc

SEQ ID NO: 2709104 - DNA, 25 bp, Homo sapien
gaggcatggaactcatgggaggagg

SEQ ID NO: 2709105 - DNA, 25 bp, Homo sapien
cccatatctcctccgtaggaggtag

SEQ ID NO: 2709106 - DNA, 25 bp, Homo sapien
ctcctccgtaggaggtagtgctgga

SEQ ID NO: 2709107 - DNA, 25 bp, Homo sapien
tatctcctccgtaggaggtagtgct

SEQ ID NO: 2709108 - DNA, 25 bp, Homo sapien
tttcaacccatatctcctccgtagg

SEQ ID NO: 2709109 - DNA, 25 bp, Homo sapien
gtgtccgagcattataataataaac

SEQ ID NO: 2709110 - DNA, 25 bp, Homo sapien
ctccatctggcttggtccatgcaga

SEQ ID NO: 2709111 - DNA, 25 bp, Homo sapien
cttaactccatctggcttggtccat

SEQ ID NO: 2709112 - DNA, 25 bp, Homo sapien
tctggcttggtccatgcagattcac

SEQ ID NO: 2709113 - DNA, 25 bp, Homo sapien
aactccatctggcttggtccatgca

SEQ ID NO: 2709114 - DNA, 25 bp, Homo sapien
ctgggctgcaagcataggtgtcagt

SEQ ID NO: 2709115 - DNA, 25 bp, Homo sapien
gtgtcagttctgattgctgaataac

SEQ ID NO: 2709116 - DNA, 25 bp, Homo sapien
cataggtgtcagttctgattgctga

SEQ ID NO: 2709117 - DNA, 25 bp, Homo sapien
gcaagcataggtgtcagttctgatt

SEQ ID NO: 2709118 - DNA, 25 bp, Homo sapien
tgagcctgcgcctgggcctgagcct

SEQ ID NO: 2709119 - DNA, 25 bp, Homo sapien
tgggcctgagcttgtgcctgggcct

SEQ ID NO: 2709120 - DNA, 25 bp, Homo sapien
agcctgggcctgagcttgtgcctgg

SEQ ID NO: 2709121 - DNA, 25 bp, Homo sapien
cctgagcttgtgcctgggcctgagc

SEQ ID NO: 2709122 - DNA, 25 bp, Homo sapien
tcgtaggggtggaagctccaactgc

SEQ ID NO: 2709123 - DNA, 25 bp, Homo sapien
tgcttgcacttgtgcctggacctgg

SEQ ID NO: 2709124 - DNA, 25 bp, Homo sapien
tccaactgcttgtgcttgcacttgt

SEQ ID NO: 2709125 - DNA, 25 bp, Homo sapien
ttgatactgtctgcgcaactgaagt

SEQ ID NO: 2709126 - DNA, 25 bp, Homo sapien
aatataattttataacagtgtgaaa

SEQ ID NO: 2709127 - DNA, 25 bp, Homo sapien
taacagtgtgaaaaatacaaagtac

SEQ ID NO: 2709128 - DNA, 25 bp, Homo sapien
ttttataacagtgtgaaaaatacaa

SEQ ID NO: 2709129 - DNA, 25 bp, Homo sapien
cttagggtacagtatcatattaata

SEQ ID NO: 2709130 - DNA, 25 bp, Homo sapien
attgttggtctagcatagacctagc

SEQ ID NO: 2709131 - DNA, 25 bp, Homo sapien
caagtatcttcaggggcccaggaat

SEQ ID NO: 2709132 - DNA, 25 bp, Homo sapien
aatgaattgttggtctagcatagac

SEQ ID NO: 2709133 - DNA, 25 bp, Homo sapien
gggcccaggaatgaattgttggtct

SEQ ID NO: 2709134 - DNA, 25 bp, Homo sapien
cagtgctttcccaatctttatgcca

SEQ ID NO: 2709135 - DNA, 25 bp, Homo sapien
actcacttaggctgggaagatgtga

SEQ ID NO: 2709136 - DNA, 25 bp, Homo sapien
cctgtatcggactaagaatgaattt

SEQ ID NO: 2709137 - DNA, 25 bp, Homo sapien
caatttcgtacttgttaatgaggga

SEQ ID NO: 2709138 - DNA, 25 bp, Homo sapien
aacactaactgtaggcgtggcaact

SEQ ID NO: 2709139 - DNA, 25 bp, Homo sapien
ctgtaggcgtggcaactgaaacagc

SEQ ID NO: 2709140 - DNA, 25 bp, Homo sapien
gagttgaaacactaactgtaggcgt

SEQ ID NO: 2709141 - DNA, 25 bp, Homo sapien
ctgtaggagcaggagttgaaacact

SEQ ID NO: 2709142 - DNA, 25 bp, Homo sapien
tggggaacggtttgcacaggtgtgg

SEQ ID NO: 2709143 - DNA, 25 bp, Homo sapien
tggaagtggaattggcatgccagga

SEQ ID NO: 2709144 - DNA, 25 bp, Homo sapien
caggaggtaacgtctgagggtgcgg

SEQ ID NO: 2709145 - DNA, 25 bp, Homo sapien
cacgaaacggaggtaccattactgg

SEQ ID NO: 2709146 - DNA, 25 bp, Homo sapien
tgaggaacagcaggaggtaacgtct

SEQ ID NO: 2709147 - DNA, 25 bp, Homo sapien
actgtctttacatacgggcagctga

SEQ ID NO: 2709148 - DNA, 25 bp, Homo sapien
gctgactatttgcatcattgctaca

SEQ ID NO: 2709149 - DNA, 25 bp, Homo sapien
tacatacgggcagctgactatttgc

SEQ ID NO: 2709150 - DNA, 25 bp, Homo sapien
cggtcttggtggtagcgactgtctt

SEQ ID NO: 2709151 - DNA, 25 bp, Homo sapien
aatgcctaaactcaattagacacag

SEQ ID NO: 2709152 - DNA, 25 bp, Homo sapien
tagacacagaaattcaacccttaaa

SEQ ID NO: 2709153 - DNA, 25 bp, Homo sapien
aattagatccaagtatcaaaccgca

SEQ ID NO: 2709154 - DNA, 25 bp, Homo sapien
ggatctcacctatgacaaagtctta

SEQ ID NO: 2709155 - DNA, 25 bp, Homo sapien
taggaggggccattcctggcaatac

SEQ ID NO: 2709156 - DNA, 25 bp, Homo sapien
ggtgaagctgcaatagcaacctggg

SEQ ID NO: 2709157 - DNA, 25 bp, Homo sapien
ttatattcagtccattcagaaactg

SEQ ID NO: 2709158 - DNA, 25 bp, Homo sapien
caacctggggatgtatcatgggtac

SEQ ID NO: 2709159 - DNA, 25 bp, Homo sapien
tctacttattacagtttatactact

SEQ ID NO: 2709160 - DNA, 25 bp, Homo sapien
acagtttatactactttccaagtca

SEQ ID NO: 2709161 - DNA, 25 bp, Homo sapien
tccaatgactgtgtaattagaaaat

SEQ ID NO: 2709162 - DNA, 25 bp, Homo sapien
taaacaatccaatgactgtgtaatt

SEQ ID NO: 2709163 - DNA, 25 bp, Homo sapien
tggctctttaatcttctcttctaac

SEQ ID NO: 2709164 - DNA, 25 bp, Homo sapien
taattggctctttaatcttctcttc

SEQ ID NO: 2709165 - DNA, 25 bp, Homo sapien
gctctttaatcttctcttctaactt

SEQ ID NO: 2709166 - DNA, 25 bp, Homo sapien
tttaattggctctttaatcttctct

SEQ ID NO: 2709167 - DNA, 25 bp, Homo sapien
tcctccgtctccattggcagaggct

SEQ ID NO: 2709168 - DNA, 25 bp, Homo sapien
tcctcctccgtctccattggcagag

SEQ ID NO: 2709169 - DNA, 25 bp, Homo sapien
ctccgtctccattggcagaggctct

SEQ ID NO: 2709170 - DNA, 25 bp, Homo sapien
tccgtctccattggcagaggctctt

SEQ ID NO: 2709171 - DNA, 25 bp, Homo sapien
ctcctttatctcctttataggctct

SEQ ID NO: 2709172 - DNA, 25 bp, Homo sapien
cctttatctcctttataggctcttc

SEQ ID NO: 2709173 - DNA, 25 bp, Homo sapien
tcctttatctcctttataggctctt

SEQ ID NO: 2709174 - DNA, 25 bp, Homo sapien
ataggagcagtagcaactggctttg

SEQ ID NO: 2709175 - DNA, 25 bp, Homo sapien
taggagcagtagcaactggctttgc

SEQ ID NO: 2709176 - DNA, 25 bp, Homo sapien
tatcattctcttatgttacagaaca

SEQ ID NO: 2709177 - DNA, 25 bp, Homo sapien
aaatatcattctcttatgttacaga

SEQ ID NO: 2709178 - DNA, 25 bp, Homo sapien
atcattctcttatgttacagaacat

SEQ ID NO: 2709179 - DNA, 25 bp, Homo sapien
atatcattctcttatgttacagaac

SEQ ID NO: 2709180 - DNA, 25 bp, Homo sapien
ggattataaaagaagacccgctcat

SEQ ID NO: 2709181 - DNA, 25 bp, Homo sapien
catagaaagacgagtggtgggatta

SEQ ID NO: 2709182 - DNA, 25 bp, Homo sapien
caatcagatcatcaggtcggtccca

SEQ ID NO: 2709183 - DNA, 25 bp, Homo sapien
gctcatcaccagtccaaacgacaca

SEQ ID NO: 2709184 - DNA, 25 bp, Homo sapien
ccacttttggatcgacagcattgtc

SEQ ID NO: 2709185 - DNA, 25 bp, Homo sapien
gaattgccacttttggatcgacagc

SEQ ID NO: 2709186 - DNA, 25 bp, Homo sapien
atcgacagcattgtcggagttgggt

SEQ ID NO: 2709187 - DNA, 25 bp, Homo sapien
ttttggatcgacagcattgtcggag

SEQ ID NO: 2709188 - DNA, 25 bp, Homo sapien
ttcttccattaattcttgttcctct

SEQ ID NO: 2709189 - DNA, 25 bp, Homo sapien
cgtttttttgctttaacaggctcat

SEQ ID NO: 2709190 - DNA, 25 bp, Homo sapien
tttgctttaacaggctcatcttcat

SEQ ID NO: 2709191 - DNA, 25 bp, Homo sapien
tcttccattaattcttgttcctctt

SEQ ID NO: 2709192 - DNA, 25 bp, Homo sapien
tatcaggcctaagagagcaatcatg

SEQ ID NO: 2709193 - DNA, 25 bp, Homo sapien
ttttacccaactctagagcactggc

SEQ ID NO: 2709194 - DNA, 25 bp, Homo sapien
gcagagcacttcctaagcttatggg

SEQ ID NO: 2709195 - DNA, 25 bp, Homo sapien
taatgaccagactcaaggactaggt

SEQ ID NO: 2709196 - DNA, 25 bp, Homo sapien
tgtacctaaatagagaagctcgggc

SEQ ID NO: 2709197 - DNA, 25 bp, Homo sapien
tagaagacatagtccgtgacctgca

SEQ ID NO: 2709198 - DNA, 25 bp, Homo sapien
gatttaagttgaaggacaggtccca

SEQ ID NO: 2709199 - DNA, 25 bp, Homo sapien
tgtaaacatggaatcacggcacctc

SEQ ID NO: 2709200 - DNA, 25 bp, Homo sapien
gggacaatggccctttctcgggcag

SEQ ID NO: 2709201 - DNA, 25 bp, Homo sapien
tagcagcatgtccttgaactgcttc

SEQ ID NO: 2709202 - DNA, 25 bp, Homo sapien
gaactgcttcattcgagcctccaga

SEQ ID NO: 2709203 - DNA, 25 bp, Homo sapien
tcgagcctccagagggacaatggcc

SEQ ID NO: 2709204 - DNA, 25 bp, Homo sapien
caagcagtgggaggctagcaatagc

SEQ ID NO: 2709205 - DNA, 25 bp, Homo sapien
cacactaattggctctgaacattcc

SEQ ID NO: 2709206 - DNA, 25 bp, Homo sapien
aatcagtacatcagaaaaagccttg

SEQ ID NO: 2709207 - DNA, 25 bp, Homo sapien
tatcccaagcagtccgccattctgt

SEQ ID NO: 2709208 - DNA, 25 bp, Homo sapien
gggatcaaaaactatcttgtgcaac

SEQ ID NO: 2709209 - DNA, 25 bp, Homo sapien
cttctcccacgttgaaaaagcagac

SEQ ID NO: 2709210 - DNA, 25 bp, Homo sapien
aactatcttgtgcaactccttctcc

SEQ ID NO: 2709211 - DNA, 25 bp, Homo sapien
gattgagaagtaagtaccggggatc

SEQ ID NO: 2709212 - DNA, 25 bp, Homo sapien
gctggctgtactaacacctggagga

SEQ ID NO: 2709213 - DNA, 25 bp, Homo sapien
cttgttcaagtaatatcagggccag

SEQ ID NO: 2709214 - DNA, 25 bp, Homo sapien
tatacaattagagccatgagcacca

SEQ ID NO: 2709215 - DNA, 25 bp, Homo sapien
gaatagcaaacaccagaatgactgg

SEQ ID NO: 2709216 - DNA, 25 bp, Homo sapien
gaatgtcactcgtattttgatacag

SEQ ID NO: 2709217 - DNA, 25 bp, Homo sapien
gtctttccctttgtatcctgttcag

SEQ ID NO: 2709218 - DNA, 25 bp, Homo sapien
agagatctcactatgacagtctcaa

SEQ ID NO: 2709219 - DNA, 25 bp, Homo sapien
gagccaccttgcctatccagatttt

SEQ ID NO: 2709220 - DNA, 25 bp, Homo sapien
tgagacacctcactgctgttttgat

SEQ ID NO: 2709221 - DNA, 25 bp, Homo sapien
gatcatctgcccatttgttagtaag

SEQ ID NO: 2709222 - DNA, 25 bp, Homo sapien
tgtaagtcatcctaactgagtgaga

SEQ ID NO: 2709223 - DNA, 25 bp, Homo sapien
cccttgctatggagaactgttttaa

SEQ ID NO: 2709224 - DNA, 25 bp, Homo sapien
tgtctttgtccaaactataccagga

SEQ ID NO: 2709225 - DNA, 25 bp, Homo sapien
cagctctctacttaggcttcaagaa

SEQ ID NO: 2709226 - DNA, 25 bp, Homo sapien
gatattacacaagcacacagctctc

SEQ ID NO: 2709227 - DNA, 25 bp, Homo sapien
gaaatgcggaagagaaatcacagtc

SEQ ID NO: 2709228 - DNA, 25 bp, Homo sapien
ctgccctggtctttacatactgatc

SEQ ID NO: 2709229 - DNA, 25 bp, Homo sapien
gaaactgactgtgggaggtatgact

SEQ ID NO: 2709230 - DNA, 25 bp, Homo sapien
ttggaacaaactctggtgctctata

SEQ ID NO: 2709231 - DNA, 25 bp, Homo sapien
gacagggagatagtagtgaccagaa

SEQ ID NO: 2709232 - DNA, 25 bp, Homo sapien
caagagacaggcacagttcagtaat

SEQ ID NO: 2709233 - DNA, 25 bp, Homo sapien
gctactcaggatgactgcttaagcc

SEQ ID NO: 2709234 - DNA, 25 bp, Homo sapien
caatttccactctgcgatgaagcta

SEQ ID NO: 2709235 - DNA, 25 bp, Homo sapien
cagttacttctgcttgtataaaggc

SEQ ID NO: 2709236 - DNA, 25 bp, Homo sapien
tgcatgcctcaagagacaagagctc

SEQ ID NO: 2709237 - DNA, 25 bp, Homo sapien
gacactgggactcaacatctaccta

SEQ ID NO: 2709238 - DNA, 25 bp, Homo sapien
gcttggctgcaaattcactaaaagt

SEQ ID NO: 2709239 - DNA, 25 bp, Homo sapien
aactcattaaacaaggcttctcggt

SEQ ID NO: 2709240 - DNA, 25 bp, Homo sapien
cattaaacaaggcttctcggtcttt

SEQ ID NO: 2709241 - DNA, 25 bp, Homo sapien
tcacctctggtcttcgaatcttctt

SEQ ID NO: 2709242 - DNA, 25 bp, Homo sapien
tatgccaatgaataaggttagaaac

SEQ ID NO: 2709243 - DNA, 25 bp, Homo sapien
ggttagaaacataacaccagcatag

SEQ ID NO: 2709244 - DNA, 25 bp, Homo sapien
tccatgtacgtcctattatttatgc

SEQ ID NO: 2709245 - DNA, 25 bp, Homo sapien
taacttaaaagaacagtccatgtac

SEQ ID NO: 2709246 - DNA, 25 bp, Homo sapien
caagaatgattaggctccagaggtt

SEQ ID NO: 2709247 - DNA, 25 bp, Homo sapien
tataactttctggaataagaggcaa

SEQ ID NO: 2709248 - DNA, 25 bp, Homo sapien
tgcatgttttgatggttcacacacc

SEQ ID NO: 2709249 - DNA, 25 bp, Homo sapien
aagcataccaggacactaaggagag

SEQ ID NO: 2709250 - DNA, 25 bp, Homo sapien
actgaactgattgacaggccgcaca

SEQ ID NO: 2709251 - DNA, 25 bp, Homo sapien
tagtaatggtataaagccaaccctg

SEQ ID NO: 2709252 - DNA, 25 bp, Homo sapien
cactttgcgtgtcagtgattgacag

SEQ ID NO: 2709253 - DNA, 25 bp, Homo sapien
tagggaatcccataacactttgcgt

SEQ ID NO: 2709254 - DNA, 25 bp, Homo sapien
catgctactggtactgctcttgcta

SEQ ID NO: 2709255 - DNA, 25 bp, Homo sapien
caccactcctggtcaataagtagac

SEQ ID NO: 2709256 - DNA, 25 bp, Homo sapien
gaaaatgatgctcttactgtgagaa

SEQ ID NO: 2709257 - DNA, 25 bp, Homo sapien
accagctggagaattacaagaacaa

SEQ ID NO: 2709258 - DNA, 25 bp, Homo sapien
tcctaccatagaagatacccaaggt

SEQ ID NO: 2709259 - DNA, 25 bp, Homo sapien
tctcctactggaggattaaaagtga

SEQ ID NO: 2709260 - DNA, 25 bp, Homo sapien
tggtaccttcccacctgatcatggg

SEQ ID NO: 2709261 - DNA, 25 bp, Homo sapien
taaccaaggtcatttcaacaaagga

SEQ ID NO: 2709262 - DNA, 25 bp, Homo sapien
tcaggcttatgaagctgacaattct

SEQ ID NO: 2709263 - DNA, 25 bp, Homo sapien
taaatttacatcgagctgcatttct

SEQ ID NO: 2709264 - DNA, 25 bp, Homo sapien
tgtaaacatcgacaagcatataggc

SEQ ID NO: 2709265 - DNA, 25 bp, Homo sapien
gataactttagatctcagaactgcc

SEQ ID NO: 2709266 - DNA, 25 bp, Homo sapien
tttactttgctccatcgagactgac

SEQ ID NO: 2709267 - DNA, 25 bp, Homo sapien
tctctcattgatgaactatctactg

SEQ ID NO: 2709268 - DNA, 25 bp, Homo sapien
ccaagtgatgattagataatagttc

SEQ ID NO: 2709269 - DNA, 25 bp, Homo sapien
gctttgtaacgtggatcactttcta

SEQ ID NO: 2709270 - DNA, 25 bp, Homo sapien
tctcgttctcgaaggcttgcctcaa

SEQ ID NO: 2709271 - DNA, 25 bp, Homo sapien
tgaacctccctttctcgttctcgaa

SEQ ID NO: 2709272 - DNA, 25 bp, Homo sapien
tcaatgcgggcttgcctttcaagct

SEQ ID NO: 2709273 - DNA, 25 bp, Homo sapien
tccctttctcgttctcgaaggcttg

SEQ ID NO: 2709274 - DNA, 25 bp, Homo sapien
aaattatctccctcagaattaaaga

SEQ ID NO: 2709275 - DNA, 25 bp, Homo sapien
taacataataaatttccaatatcca

SEQ ID NO: 2709276 - DNA, 25 bp, Homo sapien
aatttagcaaattatctccctcaga

SEQ ID NO: 2709277 - DNA, 25 bp, Homo sapien
caatatccagtactttagagaaaaa

SEQ ID NO: 2709278 - DNA, 25 bp, Homo sapien
agagaaaaaattatatatatatcac

SEQ ID NO: 2709279 - DNA, 25 bp, Homo sapien
ctgaagagaaaaaattatatatata

SEQ ID NO: 2709280 - DNA, 25 bp, Homo sapien
gaagagaaaaaattatatatatatc

SEQ ID NO: 2709281 - DNA, 25 bp, Homo sapien
tacgagtatcagaccatgacacatc

SEQ ID NO: 2709282 - DNA, 25 bp, Homo sapien
cagcggtgatcttttcggagggtcc

SEQ ID NO: 2709283 - DNA, 25 bp, Homo sapien
tccagaagttgcctaaagtgctctc

SEQ ID NO: 2709284 - DNA, 25 bp, Homo sapien
taaggatccagattcccagcggtga

SEQ ID NO: 2709285 - DNA, 25 bp, Homo sapien
ggataacaaagcgtacaaactgccg

SEQ ID NO: 2709286 - DNA, 25 bp, Homo sapien
tgtaatgcccaagcgtaactggact

SEQ ID NO: 2709287 - DNA, 25 bp, Homo sapien
ctattattaggagggatcactgacc

SEQ ID NO: 2709288 - DNA, 25 bp, Homo sapien
tacttagggagtcaaactgcagcac

SEQ ID NO: 2709289 - DNA, 25 bp, Homo sapien
ctttccacgtggatgttaaggtaat

SEQ ID NO: 2709290 - DNA, 25 bp, Homo sapien
ggaggagaacttaatacatcgagga

SEQ ID NO: 2709291 - DNA, 25 bp, Homo sapien
tacttctttccacgtggatgttaag

SEQ ID NO: 2709292 - DNA, 25 bp, Homo sapien
aatacatcgaggatcttccttaatg

SEQ ID NO: 2709293 - DNA, 25 bp, Homo sapien
gtagtgctgttaggccccgatttaa

SEQ ID NO: 2709294 - DNA, 25 bp, Homo sapien
tagactgacagtaaatctcgacaca

SEQ ID NO: 2709295 - DNA, 25 bp, Homo sapien
gatttacttctcatacacttaaaag

SEQ ID NO: 2709296 - DNA, 25 bp, Homo sapien
gtgctgtcttgctaatttatcatgc

SEQ ID NO: 2709297 - DNA, 25 bp, Homo sapien
tttcaaaagcgtcctgaagtcagct

SEQ ID NO: 2709298 - DNA, 25 bp, Homo sapien
gtctctttcaaaagcgtcctgaagt

SEQ ID NO: 2709299 - DNA, 25 bp, Homo sapien
tctttcaaaagcgtcctgaagtcag

SEQ ID NO: 2709300 - DNA, 25 bp, Homo sapien
tcaaaagcgtcctgaagtcagcttt

SEQ ID NO: 2709301 - DNA, 25 bp, Homo sapien
cactgaatagtcttcagaggaggca

SEQ ID NO: 2709302 - DNA, 25 bp, Homo sapien
catactgactggtaagcaatgcgaa

SEQ ID NO: 2709303 - DNA, 25 bp, Homo sapien
taagaattgacatctgggccctttc

SEQ ID NO: 2709304 - DNA, 25 bp, Homo sapien
gcccaagctgatgcaaaacattaag

SEQ ID NO: 2709305 - DNA, 25 bp, Homo sapien
tataaaaatgtagaaagaagtctta

SEQ ID NO: 2709306 - DNA, 25 bp, Homo sapien
ctataaaaatgtagaaagaagtctt

SEQ ID NO: 2709307 - DNA, 25 bp, Homo sapien
cagtctgcggggctgccaatcccag

SEQ ID NO: 2709308 - DNA, 25 bp, Homo sapien
tgaacagaggacttcagtctgcggg

SEQ ID NO: 2709309 - DNA, 25 bp, Homo sapien
tctgtggatgaacagaggacttcag

SEQ ID NO: 2709310 - DNA, 25 bp, Homo sapien
tcccagcatctttcacaagctttca

SEQ ID NO: 2709311 - DNA, 25 bp, Homo sapien
ccacccctagtggtggtccctccag

SEQ ID NO: 2709312 - DNA, 25 bp, Homo sapien
agtggtggtccctccagatcagggc

SEQ ID NO: 2709313 - DNA, 25 bp, Homo sapien
tgggtgggtaaatcttgcccgtgct

SEQ ID NO: 2709314 - DNA, 25 bp, Homo sapien
ggtgggtaaatcttgcccgtgctgt

SEQ ID NO: 2709315 - DNA, 25 bp, Homo sapien
gagtgaaagggcctcagaagctgaa

SEQ ID NO: 2709316 - DNA, 25 bp, Homo sapien
tgaaagggcctcagaagctgaatta

SEQ ID NO: 2709317 - DNA, 25 bp, Homo sapien
cctcagcaaagactccaaggagtga

SEQ ID NO: 2709318 - DNA, 25 bp, Homo sapien
agtggtcacctttgtaagtcgcctc

SEQ ID NO: 2709319 - DNA, 25 bp, Homo sapien
gtggaccccggcgatccaggtcatc

SEQ ID NO: 2709320 - DNA, 25 bp, Homo sapien
gtccagtactagataccgtttgtca

SEQ ID NO: 2709321 - DNA, 25 bp, Homo sapien
ggtcatcaacatatgccacaatcag

SEQ ID NO: 2709322 - DNA, 25 bp, Homo sapien
tttgttgatcgtctcgtgggctccg

SEQ ID NO: 2709323 - DNA, 25 bp, Homo sapien
gagtatgtatgtcagtcatgccaca

SEQ ID NO: 2709324 - DNA, 25 bp, Homo sapien
gaccgtggttccatacctgagaaga

SEQ ID NO: 2709325 - DNA, 25 bp, Homo sapien
taacactgctaggaagaacgtcacc

SEQ ID NO: 2709326 - DNA, 25 bp, Homo sapien
gaatagatgcccctatggaagagta

SEQ ID NO: 2709327 - DNA, 25 bp, Homo sapien
tatgtggcactctgaaacgagcaac

SEQ ID NO: 2709328 - DNA, 25 bp, Homo sapien
gaatgccaaaaaggcgcaaaccatc

SEQ ID NO: 2709329 - DNA, 25 bp, Homo sapien
tgctatgaggcaataaggcactgct

SEQ ID NO: 2709330 - DNA, 25 bp, Homo sapien
taactcgggaggtaaagctagatat

SEQ ID NO: 2709331 - DNA, 25 bp, Homo sapien
tcctctaggaatgctctctgaaaag

SEQ ID NO: 2709332 - DNA, 25 bp, Homo sapien
cagacagcagtcaagattttaggaa

SEQ ID NO: 2709333 - DNA, 25 bp, Homo sapien
cattatccagctgtgtttgaactca

SEQ ID NO: 2709334 - DNA, 25 bp, Homo sapien
caaagtgtggtctcccaacctgcag

SEQ ID NO: 2709335 - DNA, 25 bp, Homo sapien
ttttcccacccatgccatctggatc

SEQ ID NO: 2709336 - DNA, 25 bp, Homo sapien
caagaccctagcatatccatctttc

SEQ ID NO: 2709337 - DNA, 25 bp, Homo sapien
actgccactcatggggggccaagac

SEQ ID NO: 2709338 - DNA, 25 bp, Homo sapien
cgctctgtacttcccgactccactg

SEQ ID NO: 2709339 - DNA, 25 bp, Homo sapien
ccgatctccggttgaggtgagcccc

SEQ ID NO: 2709340 - DNA, 25 bp, Homo sapien
tccgatctccggttgaggtgagccc

SEQ ID NO: 2709341 - DNA, 25 bp, Homo sapien
agcctgcagtccgatctccggttga

SEQ ID NO: 2709342 - DNA, 25 bp, Homo sapien
gcagtccgatctccggttgaggtga

SEQ ID NO: 2709343 - DNA, 25 bp, Homo sapien
tgccaaccatacaggctcagacttg

SEQ ID NO: 2709344 - DNA, 25 bp, Homo sapien
caaccatacaggctcagacttgtgg

SEQ ID NO: 2709345 - DNA, 25 bp, Homo sapien
tggggtgcctaccaccagatgccaa

SEQ ID NO: 2709346 - DNA, 25 bp, Homo sapien
gggtcactggggtgcctaccaccag

SEQ ID NO: 2709347 - DNA, 25 bp, Homo sapien
cgcagcaagaaagccgttctgccac

SEQ ID NO: 2709348 - DNA, 25 bp, Homo sapien
gactttcaataggacgcagcaagaa

SEQ ID NO: 2709349 - DNA, 25 bp, Homo sapien
gaaagccgttctgccacgtacaaaa

SEQ ID NO: 2709350 - DNA, 25 bp, Homo sapien
gctgactttcaataggacgcagcaa

SEQ ID NO: 2709351 - DNA, 25 bp, Homo sapien
cagcacactacacgtaaccagcatg

SEQ ID NO: 2709352 - DNA, 25 bp, Homo sapien
aggatgctacgcgtaaccagcacac

SEQ ID NO: 2709353 - DNA, 25 bp, Homo sapien
acacataaccagcatgctacacgta

SEQ ID NO: 2709354 - DNA, 25 bp, Homo sapien
acataaccagcatgctacacgtaac

SEQ ID NO: 2709355 - DNA, 25 bp, Homo sapien
tcaaagactggagcaccaggcaagg

SEQ ID NO: 2709356 - DNA, 25 bp, Homo sapien
tatcccctaatgtctaagaatgtgg

SEQ ID NO: 2709357 - DNA, 25 bp, Homo sapien
gaagccgcagaagaagttgctatga

SEQ ID NO: 2709358 - DNA, 25 bp, Homo sapien
gataaggtctctatattgggtagaa

SEQ ID NO: 2709359 - DNA, 25 bp, Homo sapien
catggtttaaggagttcataggccc

SEQ ID NO: 2709360 - DNA, 25 bp, Homo sapien
gcaagacttagcctcctccaaagaa

SEQ ID NO: 2709361 - DNA, 25 bp, Homo sapien
cacatattagagtcagcagggctgc

SEQ ID NO: 2709362 - DNA, 25 bp, Homo sapien
gggaccctgagtaactgatatgaca

SEQ ID NO: 2709363 - DNA, 25 bp, Homo sapien
gagaatttggctagggaacttgaat

SEQ ID NO: 2709364 - DNA, 25 bp, Homo sapien
ttattccattgacttctaaaggccg

SEQ ID NO: 2709365 - DNA, 25 bp, Homo sapien
gaaagggcacatcaaccctgctatg

SEQ ID NO: 2709366 - DNA, 25 bp, Homo sapien
ccagagatttattgcatgaagctga

SEQ ID NO: 2709367 - DNA, 25 bp, Homo sapien
gataacagtccactcgagtacacag

SEQ ID NO: 2709368 - DNA, 25 bp, Homo sapien
gaggccaaccggctgaatacttatg

SEQ ID NO: 2709369 - DNA, 25 bp, Homo sapien
gatcatggaggcaaagccctcagcg

SEQ ID NO: 2709370 - DNA, 25 bp, Homo sapien
ggtgggcaagcaaacgtcaaagtat

SEQ ID NO: 2709371 - DNA, 25 bp, Homo sapien
tcatcgtgagcggaccctcatgtcc

SEQ ID NO: 2709372 - DNA, 25 bp, Homo sapien
gaagaaatgtcagcaaaagtgagca

SEQ ID NO: 2709373 - DNA, 25 bp, Homo sapien
gcatgattccgagcccgttcctttt

SEQ ID NO: 2709374 - DNA, 25 bp, Homo sapien
agtgagcaatttaaagccctgcgca

SEQ ID NO: 2709375 - DNA, 25 bp, Homo sapien
ggaagaacgtgccagccgtgcttcc

SEQ ID NO: 2709376 - DNA, 25 bp, Homo sapien
aggaaaattgccagttgtgtcccca

SEQ ID NO: 2709377 - DNA, 25 bp, Homo sapien
tgtcaaccatgtctccaaacggaag

SEQ ID NO: 2709378 - DNA, 25 bp, Homo sapien
gtccccattatggagaaattgtcaa

SEQ ID NO: 2709379 - DNA, 25 bp, Homo sapien
ggatgtgtcttctgtatagtaaaaa

SEQ ID NO: 2709380 - DNA, 25 bp, Homo sapien
tgtctctgaaggaaaattgccatct

SEQ ID NO: 2709381 - DNA, 25 bp, Homo sapien
aattgttggccgtttctctcactgg

SEQ ID NO: 2709382 - DNA, 25 bp, Homo sapien
ctgcatctcaatcggcgaggctttt

SEQ ID NO: 2709383 - DNA, 25 bp, Homo sapien
taaggctcagcttcttattaagtct

SEQ ID NO: 2709384 - DNA, 25 bp, Homo sapien
tatctatccagtgcttcttgatcat

SEQ ID NO: 2709385 - DNA, 25 bp, Homo sapien
tccccactatgaatttttggtctgt

SEQ ID NO: 2709386 - DNA, 25 bp, Homo sapien
tcttggtcataccagcccatttgct

SEQ ID NO: 2709387 - DNA, 25 bp, Homo sapien
ttcatcagttggtgaacacttaggt

SEQ ID NO: 2709388 - DNA, 25 bp, Homo sapien
cattcatcagttggtgaacacttag

SEQ ID NO: 2709389 - DNA, 25 bp, Homo sapien
tccattcatcagttggtgaacactt

SEQ ID NO: 2709390 - DNA, 25 bp, Homo sapien
cagttggtgaacacttaggttgctt

SEQ ID NO: 2709391 - DNA, 25 bp, Homo sapien
tagcacatggtaggattgccggtcg

SEQ ID NO: 2709392 - DNA, 25 bp, Homo sapien
gatgggtcagacctcaatggagcat

SEQ ID NO: 2709393 - DNA, 25 bp, Homo sapien
tgctgctaagccctgatgtctctga

SEQ ID NO: 2709394 - DNA, 25 bp, Homo sapien
tattggaatgctgacctagggcttg

SEQ ID NO: 2709395 - DNA, 25 bp, Homo sapien
gctcataaagccagccctcgctgtt

SEQ ID NO: 2709396 - DNA, 25 bp, Homo sapien
ccctcgctgttaccagatttcttca

SEQ ID NO: 2709397 - DNA, 25 bp, Homo sapien
gaccaaatatgagcgctcataaagc

SEQ ID NO: 2709398 - DNA, 25 bp, Homo sapien
tgaaagaccaaatatgagcgctcat

SEQ ID NO: 2709399 - DNA, 25 bp, Homo sapien
cctaataatagccactcgagagctc

SEQ ID NO: 2709400 - DNA, 25 bp, Homo sapien
tcttggagtaactgcacaaagctac

SEQ ID NO: 2709401 - DNA, 25 bp, Homo sapien
aatagccactcgagagctcttccac

SEQ ID NO: 2709402 - DNA, 25 bp, Homo sapien
ctcttggagtaactgcacaaagcta

SEQ ID NO: 2709403 - DNA, 25 bp, Homo sapien
agcttgggagttcagcactggcctc

SEQ ID NO: 2709404 - DNA, 25 bp, Homo sapien
gcttgggagttcagcactggcctct

SEQ ID NO: 2709405 - DNA, 25 bp, Homo sapien
cagcttgggagttcagcactggcct

SEQ ID NO: 2709406 - DNA, 25 bp, Homo sapien
cttgggagttcagcactggcctctg

SEQ ID NO: 2709407 - DNA, 25 bp, Homo sapien
cctgtgcctctcattgcagtgatta

SEQ ID NO: 2709408 - DNA, 25 bp, Homo sapien
tgcctgtgcctctcattgcagtgat

SEQ ID NO: 2709409 - DNA, 25 bp, Homo sapien
gcctgtgcctctcattgcagtgatt

SEQ ID NO: 2709410 - DNA, 25 bp, Homo sapien
gtgcctgtgcctctcattgcagtga

SEQ ID NO: 2709411 - DNA, 25 bp, Homo sapien
cagtggcctcaagttctagagtgac

SEQ ID NO: 2709412 - DNA, 25 bp, Homo sapien
cagcggtttaatccttgccagtcca

SEQ ID NO: 2709413 - DNA, 25 bp, Homo sapien
gaaggatagcccacgtgttaatggc

SEQ ID NO: 2709414 - DNA, 25 bp, Homo sapien
ccagagttgggtttacgtcctagct

SEQ ID NO: 2709415 - DNA, 25 bp, Homo sapien
aatttgtgttaatccaacgtactgt

SEQ ID NO: 2709416 - DNA, 25 bp, Homo sapien
ctgtggggccacaaaaccacaaatt

SEQ ID NO: 2709417 - DNA, 25 bp, Homo sapien
cccaaaagttctgacgcgtagcatt

SEQ ID NO: 2709418 - DNA, 25 bp, Homo sapien
ctcagcatatcctatgtgtacccaa

SEQ ID NO: 2709419 - DNA, 25 bp, Homo sapien
ctgacgcgtagcatttttcagtttc

SEQ ID NO: 2709420 - DNA, 25 bp, Homo sapien
cctatgtgtacccaaaagttctgac

SEQ ID NO: 2709421 - DNA, 25 bp, Homo sapien
tgccctgtaacaagctatcactagc

SEQ ID NO: 2709422 - DNA, 25 bp, Homo sapien
taacaagctatcactagcaaagcag

SEQ ID NO: 2709423 - DNA, 25 bp, Homo sapien
tgtcgtcatgccctgtaacaagcta

SEQ ID NO: 2709424 - DNA, 25 bp, Homo sapien
agctatcactagcaaagcagccaca

SEQ ID NO: 2709425 - DNA, 25 bp, Homo sapien
tagacactctcttctagcagcaagg

SEQ ID NO: 2709426 - DNA, 25 bp, Homo sapien
ttcggatgacaccaaagcagccttc

SEQ ID NO: 2709427 - DNA, 25 bp, Homo sapien
tgcagcaccaatccttgcactggct

SEQ ID NO: 2709428 - DNA, 25 bp, Homo sapien
taccagcaagtccactgcctgtaga

SEQ ID NO: 2709429 - DNA, 25 bp, Homo sapien
gactgggaatagtaaaagtgatacc

SEQ ID NO: 2709430 - DNA, 25 bp, Homo sapien
agtgataccttgaaaggccacagag

SEQ ID NO: 2709431 - DNA, 25 bp, Homo sapien
gcagcaggtgaaatcctcaagtggg

SEQ ID NO: 2709432 - DNA, 25 bp, Homo sapien
caaaagccagtcttgaagggagagg

SEQ ID NO: 2709433 - DNA, 25 bp, Homo sapien
tggacacagggctcttgcacagccc

SEQ ID NO: 2709434 - DNA, 25 bp, Homo sapien
atggacacagggctcttgcacagcc

SEQ ID NO: 2709435 - DNA, 25 bp, Homo sapien
cacctggtggggcttcatagaacat

SEQ ID NO: 2709436 - DNA, 25 bp, Homo sapien
atagcacctggtggggcttcataga

SEQ ID NO: 2709437 - DNA, 25 bp, Homo sapien
gcacctggtggggcttcatagaaca

SEQ ID NO: 2709438 - DNA, 25 bp, Homo sapien
tagcacctggtggggcttcatagaa

SEQ ID NO: 2709439 - DNA, 25 bp, Homo sapien
caatggcttttaaccctctgagcca

SEQ ID NO: 2709440 - DNA, 25 bp, Homo sapien
gcaatggcttttaaccctctgagcc

SEQ ID NO: 2709441 - DNA, 25 bp, Homo sapien
catggcatacaacacccaagcaggg

SEQ ID NO: 2709442 - DNA, 25 bp, Homo sapien
gagcaatgggtgtgtctccggtccc

SEQ ID NO: 2709443 - DNA, 25 bp, Homo sapien
ccaagcagggcattgctcaagaatc

SEQ ID NO: 2709444 - DNA, 25 bp, Homo sapien
ggtccccgaaactacacgtgcatgt

SEQ ID NO: 2709445 - DNA, 25 bp, Homo sapien
tgctcttcaacccattgtgcagctc

SEQ ID NO: 2709446 - DNA, 25 bp, Homo sapien
atgctcttcaacccattgtgcagct

SEQ ID NO: 2709447 - DNA, 25 bp, Homo sapien
ctctgcaagattgccctttgttcct

SEQ ID NO: 2709448 - DNA, 25 bp, Homo sapien
gttttatcccatgttcccacataac

SEQ ID NO: 2709449 - DNA, 25 bp, Homo sapien
gagtgggttacttgcatatttaggg

SEQ ID NO: 2709450 - DNA, 25 bp, Homo sapien
gaagaatatgagtaaccagattgcg

SEQ ID NO: 2709451 - DNA, 25 bp, Homo sapien
tgagtaaccagattgcgggaacagc

SEQ ID NO: 2709452 - DNA, 25 bp, Homo sapien
gattctcggagctctgagttctgtc

SEQ ID NO: 2709453 - DNA, 25 bp, Homo sapien
ggtgacgcagtccttcttgagatgg

SEQ ID NO: 2709454 - DNA, 25 bp, Homo sapien
tatacccctagctatggattcccat

SEQ ID NO: 2709455 - DNA, 25 bp, Homo sapien
gaggcggtcgcccttcgtattatac

SEQ ID NO: 2709456 - DNA, 25 bp, Homo sapien
tgcatggccatcacaggtgtagcac

SEQ ID NO: 2709457 - DNA, 25 bp, Homo sapien
gcgctataaggttttcatagccaag

SEQ ID NO: 2709458 - DNA, 25 bp, Homo sapien
tcttgattaacacgctgcatggcca

SEQ ID NO: 2709459 - DNA, 25 bp, Homo sapien
tagccaagccaattaaagtctgtca

SEQ ID NO: 2709460 - DNA, 25 bp, Homo sapien
acacacaaagcagattggagtccgg

SEQ ID NO: 2709461 - DNA, 25 bp, Homo sapien
cactaatggggatttaagcatcttc

SEQ ID NO: 2709462 - DNA, 25 bp, Homo sapien
gcagccctgccccactaatggggat

SEQ ID NO: 2709463 - DNA, 25 bp, Homo sapien
acaaagcagattggagtccggctct

SEQ ID NO: 2709464 - DNA, 25 bp, Homo sapien
cactggatcccccacattaaatgtt

SEQ ID NO: 2709465 - DNA, 25 bp, Homo sapien
gatcccccacattaaatgttttctg

SEQ ID NO: 2709466 - DNA, 25 bp, Homo sapien
tgttttctgatcagctggcagctgt

SEQ ID NO: 2709467 - DNA, 25 bp, Homo sapien
aaatgttttctgatcagctggcagc

SEQ ID NO: 2709468 - DNA, 25 bp, Homo sapien
tcagctgttgccctcggattccacc

SEQ ID NO: 2709469 - DNA, 25 bp, Homo sapien
tcaagacacaatcagctgttgccct

SEQ ID NO: 2709470 - DNA, 25 bp, Homo sapien
acacaatcagctgttgccctcggat

SEQ ID NO: 2709471 - DNA, 25 bp, Homo sapien
caatcagctgttgccctcggattcc

SEQ ID NO: 2709472 - DNA, 25 bp, Homo sapien
ctttgtctcagcattgtagttgcag

SEQ ID NO: 2709473 - DNA, 25 bp, Homo sapien
cacttaggtcctttatattctcgtt

SEQ ID NO: 2709474 - DNA, 25 bp, Homo sapien
ctcagtataaccctagagacaggga

SEQ ID NO: 2709475 - DNA, 25 bp, Homo sapien
tatattctcgttatttctaacccta

SEQ ID NO: 2709476 - DNA, 25 bp, Homo sapien
ggtgtaccattgtttgagtcagcag

SEQ ID NO: 2709477 - DNA, 25 bp, Homo sapien
cgtagggatagtctatatgcaggca

SEQ ID NO: 2709478 - DNA, 25 bp, Homo sapien
tattaggcagtaactaggcagctga

SEQ ID NO: 2709479 - DNA, 25 bp, Homo sapien
caggcatgtttatacccagttgagc

SEQ ID NO: 2709480 - DNA, 25 bp, Homo sapien
gatgcccagtagataggtctcttta

SEQ ID NO: 2709481 - DNA, 25 bp, Homo sapien
taatgtgcttagctgctggtagtcg

SEQ ID NO: 2709482 - DNA, 25 bp, Homo sapien
tatatcatattcagcacagatgcag

SEQ ID NO: 2709483 - DNA, 25 bp, Homo sapien
tgtgagtattaatccctccagaggc

SEQ ID NO: 2709484 - DNA, 25 bp, Homo sapien
aagctccagttttctgccgtattca

SEQ ID NO: 2709485 - DNA, 25 bp, Homo sapien
ctgagacaagctccagttttctgcc

SEQ ID NO: 2709486 - DNA, 25 bp, Homo sapien
tgagacaagctccagttttctgccg

SEQ ID NO: 2709487 - DNA, 25 bp, Homo sapien
gacaagctccagttttctgccgtat

SEQ ID NO: 2709488 - DNA, 25 bp, Homo sapien
tcagagagacagttgtgaagtgtct

SEQ ID NO: 2709489 - DNA, 25 bp, Homo sapien
gcagaaagcctgacggccacataga

SEQ ID NO: 2709490 - DNA, 25 bp, Homo sapien
tgacggccacatagaaggctttacc

SEQ ID NO: 2709491 - DNA, 25 bp, Homo sapien
cattatttgccttaatttccaaagc

SEQ ID NO: 2709492 - DNA, 25 bp, Homo sapien
gataacgtcggctctgtgaaaccca

SEQ ID NO: 2709493 - DNA, 25 bp, Homo sapien
gcatgaacaaagtcgtgtctatgtg

SEQ ID NO: 2709494 - DNA, 25 bp, Homo sapien
ccctctgaagggttgttccatacac

SEQ ID NO: 2709495 - DNA, 25 bp, Homo sapien
ggaactgacctgaccttgtaatgtg

SEQ ID NO: 2709496 - DNA, 25 bp, Homo sapien
tcaactaggccatggagactcccaa

SEQ ID NO: 2709497 - DNA, 25 bp, Homo sapien
cagtatttaccgacagaattaaagg

SEQ ID NO: 2709498 - DNA, 25 bp, Homo sapien
tgtaggaagacgacagaaaaagggc

SEQ ID NO: 2709499 - DNA, 25 bp, Homo sapien
tgctctctttctcaaggaactgtct

SEQ ID NO: 2709500 - DNA, 25 bp, Homo sapien
cgccaccatgaaagaaagcgtacat

SEQ ID NO: 2709501 - DNA, 25 bp, Homo sapien
tccttgagttgcaactattgcagca

SEQ ID NO: 2709502 - DNA, 25 bp, Homo sapien
cagcagccaggacgccaccatgaaa

SEQ ID NO: 2709503 - DNA, 25 bp, Homo sapien
gagttgcaactattgcagcagccag

SEQ ID NO: 2709504 - DNA, 25 bp, Homo sapien
gaattcatgggataatgcatgatca

SEQ ID NO: 2709505 - DNA, 25 bp, Homo sapien
ggataatgcatgatcatgcaggagg

SEQ ID NO: 2709506 - DNA, 25 bp, Homo sapien
taaaaccttcaactagagaatgtgc

SEQ ID NO: 2709507 - DNA, 25 bp, Homo sapien
aaccttcaactagagaatgtgcatt

SEQ ID NO: 2709508 - DNA, 25 bp, Homo sapien
ccagtatcagtactggctggtggtg

SEQ ID NO: 2709509 - DNA, 25 bp, Homo sapien
gatccagtatcagtactggctggtg

SEQ ID NO: 2709510 - DNA, 25 bp, Homo sapien
tctttgatccagtatcagtactggc

SEQ ID NO: 2709511 - DNA, 25 bp, Homo sapien
taatctttgatccagtatcagtact

SEQ ID NO: 2709512 - DNA, 25 bp, Homo sapien
gaattcctcaagttgtttgatcacc

SEQ ID NO: 2709513 - DNA, 25 bp, Homo sapien
tgtgctgggtcctcactactccagg

SEQ ID NO: 2709514 - DNA, 25 bp, Homo sapien
tgaccctttaagaagattagtctgt

SEQ ID NO: 2709515 - DNA, 25 bp, Homo sapien
tgatcttcaaagcattgaggctggc

SEQ ID NO: 2709516 - DNA, 25 bp, Homo sapien
gtagggacatgcaaactggaactca

SEQ ID NO: 2709517 - DNA, 25 bp, Homo sapien
gaagagcttccctagaaccctgaac

SEQ ID NO: 2709518 - DNA, 25 bp, Homo sapien
tagagtagcgcagatctgtagggac

SEQ ID NO: 2709519 - DNA, 25 bp, Homo sapien
gaaacttggtaagcacccaccagga

SEQ ID NO: 2709520 - DNA, 25 bp, Homo sapien
ctttgagtatggatctgctgattag

SEQ ID NO: 2709521 - DNA, 25 bp, Homo sapien
ttttcttgcatgaactgtcccccaa

SEQ ID NO: 2709522 - DNA, 25 bp, Homo sapien
atttttcttgcatgaactgtccccc

SEQ ID NO: 2709523 - DNA, 25 bp, Homo sapien
gatctgctgattaggggttgtaata

SEQ ID NO: 2709524 - DNA, 25 bp, Homo sapien
caaataaccatctggtgagcagggt

SEQ ID NO: 2709525 - DNA, 25 bp, Homo sapien
caaaggtggctggtggaacaaataa

SEQ ID NO: 2709526 - DNA, 25 bp, Homo sapien
gaatcagggactcagcaaaggtggc

SEQ ID NO: 2709527 - DNA, 25 bp, Homo sapien
gtgaatcagggactcagcaaaggtg

SEQ ID NO: 2709528 - DNA, 25 bp, Homo sapien
tgccttgcagcatgaatgctggaga

SEQ ID NO: 2709529 - DNA, 25 bp, Homo sapien
cagcatgaatgctggagacagtcct

SEQ ID NO: 2709530 - DNA, 25 bp, Homo sapien
ggcaggagctgccttgcagcatgaa

SEQ ID NO: 2709531 - DNA, 25 bp, Homo sapien
ttggcaaagttgttggcaggagctg

SEQ ID NO: 2709532 - DNA, 25 bp, Homo sapien
ggtcaaatcatccttctggcaagaa

SEQ ID NO: 2709533 - DNA, 25 bp, Homo sapien
tcaaatcatccttctggcaagaagg

SEQ ID NO: 2709534 - DNA, 25 bp, Homo sapien
caaatcatccttctggcaagaaggt

SEQ ID NO: 2709535 - DNA, 25 bp, Homo sapien
gtcaaatcatccttctggcaagaag

SEQ ID NO: 2709536 - DNA, 25 bp, Homo sapien
atggccataggctttaaatgacccc

SEQ ID NO: 2709537 - DNA, 25 bp, Homo sapien
gtgagactgggaaaacatggccata

SEQ ID NO: 2709538 - DNA, 25 bp, Homo sapien
agactgggaaaacatggccataggc

SEQ ID NO: 2709539 - DNA, 25 bp, Homo sapien
tcacctcaggggtgagactgggaaa

SEQ ID NO: 2709540 - DNA, 25 bp, Homo sapien
tcagaaatgtaccaatgatcctggg

SEQ ID NO: 2709541 - DNA, 25 bp, Homo sapien
taggccagtcctgtcaaaatattgg

SEQ ID NO: 2709542 - DNA, 25 bp, Homo sapien
cagctgtagactgacattcctagac

SEQ ID NO: 2709543 - DNA, 25 bp, Homo sapien
taatgcccaatgaaaagagcacagc

SEQ ID NO: 2709544 - DNA, 25 bp, Homo sapien
caagggagagtggactttttcagac

SEQ ID NO: 2709545 - DNA, 25 bp, Homo sapien
ttttcagactgatcctgtttactag

SEQ ID NO: 2709546 - DNA, 25 bp, Homo sapien
caaaacctaacggagaggctgcaat

SEQ ID NO: 2709547 - DNA, 25 bp, Homo sapien
tccaaaacgaagtgcaaactgcaag

SEQ ID NO: 2709548 - DNA, 25 bp, Homo sapien
taattgaaacacagaaccagcagac

SEQ ID NO: 2709549 - DNA, 25 bp, Homo sapien
tcttctcaagatatgtcacaggatg

SEQ ID NO: 2709550 - DNA, 25 bp, Homo sapien
gcagctgcaagctgacctcttggca

SEQ ID NO: 2709551 - DNA, 25 bp, Homo sapien
tgtgacacagaggacatgcgggctt

SEQ ID NO: 2709552 - DNA, 25 bp, Homo sapien
ttttccatatgacggtagtacttga

SEQ ID NO: 2709553 - DNA, 25 bp, Homo sapien
cagcatataatccccagaagagctt

SEQ ID NO: 2709554 - DNA, 25 bp, Homo sapien
agagcttggactagtcttttttcca

SEQ ID NO: 2709555 - DNA, 25 bp, Homo sapien
catatgacggtagtacttgacacat

SEQ ID NO: 2709556 - DNA, 25 bp, Homo sapien
ctttgccaactgtgtccagttgtgg

SEQ ID NO: 2709557 - DNA, 25 bp, Homo sapien
gttgtggcaggtgagtccttcaggg

SEQ ID NO: 2709558 - DNA, 25 bp, Homo sapien
gagctattgtttgggctgtccatgg

SEQ ID NO: 2709559 - DNA, 25 bp, Homo sapien
catagcaagaatctggagctattgt

SEQ ID NO: 2709560 - DNA, 25 bp, Homo sapien
gcagggtgtagagcccatgtcacta

SEQ ID NO: 2709561 - DNA, 25 bp, Homo sapien
catgtcactagttattacgggagca

SEQ ID NO: 2709562 - DNA, 25 bp, Homo sapien
cctctcactgtattgggcctggtaa

SEQ ID NO: 2709563 - DNA, 25 bp, Homo sapien
catattgttactgccctccctgaag

SEQ ID NO: 2709564 - DNA, 25 bp, Homo sapien
gcataggtacagtttagcatacagt

SEQ ID NO: 2709565 - DNA, 25 bp, Homo sapien
tcaactaggcaccatattggatagg

SEQ ID NO: 2709566 - DNA, 25 bp, Homo sapien
ctttcagacctagggatgaatccca

SEQ ID NO: 2709567 - DNA, 25 bp, Homo sapien
gctatgtacttaaccctcaactagg

SEQ ID NO: 2709568 - DNA, 25 bp, Homo sapien
gatgccaagaacactaggctgcttc

SEQ ID NO: 2709569 - DNA, 25 bp, Homo sapien
tcccggcagtctctgagctaggagg

SEQ ID NO: 2709570 - DNA, 25 bp, Homo sapien
tctagcttacagtccaacatgtgag

SEQ ID NO: 2709571 - DNA, 25 bp, Homo sapien
gagtagggtgtacttcctccaagca

SEQ ID NO: 2709572 - DNA, 25 bp, Homo sapien
ctccttgtttctcactggcctgaac

SEQ ID NO: 2709573 - DNA, 25 bp, Homo sapien
actggcctgaactgagtcttctgat

SEQ ID NO: 2709574 - DNA, 25 bp, Homo sapien
tttctcactggcctgaactgagtct

SEQ ID NO: 2709575 - DNA, 25 bp, Homo sapien
tcactggcctgaactgagtcttctg

SEQ ID NO: 2709576 - DNA, 25 bp, Homo sapien
tagactctcatgtagcggaaaaacc

SEQ ID NO: 2709577 - DNA, 25 bp, Homo sapien
gagagaacctcttccctcgtagttc

SEQ ID NO: 2709578 - DNA, 25 bp, Homo sapien
gaaaatctggctcaaaaccggctaa

SEQ ID NO: 2709579 - DNA, 25 bp, Homo sapien
gttctacatgaatctccaacaggga

SEQ ID NO: 2709580 - DNA, 25 bp, Homo sapien
tgagagcgctctggaagatcactgc

SEQ ID NO: 2709581 - DNA, 25 bp, Homo sapien
ctttgggactgccatagggagaatc

SEQ ID NO: 2709582 - DNA, 25 bp, Homo sapien
gatgagctaataagtggtcccctct

SEQ ID NO: 2709583 - DNA, 25 bp, Homo sapien
gaatgccaatggtgcaatggtctaa

SEQ ID NO: 2709584 - DNA, 25 bp, Homo sapien
tcttctcagatgagtgcctattatc

SEQ ID NO: 2709585 - DNA, 25 bp, Homo sapien
gatgagtgcctattatctatatgca

SEQ ID NO: 2709586 - DNA, 25 bp, Homo sapien
tctcagatgagtgcctattatctat

SEQ ID NO: 2709587 - DNA, 25 bp, Homo sapien
attgtcttctcagatgagtgcctat

SEQ ID NO: 2709588 - DNA, 25 bp, Homo sapien
gggtgggttgtcagtgatcagattt

SEQ ID NO: 2709589 - DNA, 25 bp, Homo sapien
tggggtgggttgtcagtgatcagat

SEQ ID NO: 2709590 - DNA, 25 bp, Homo sapien
gggttgtcagtgatcagatttccct

SEQ ID NO: 2709591 - DNA, 25 bp, Homo sapien
gtgggttgtcagtgatcagatttcc

SEQ ID NO: 2709592 - DNA, 25 bp, Homo sapien
gtcttattcgaaaaatctttgccta

SEQ ID NO: 2709593 - DNA, 25 bp, Homo sapien
catattttactcttcactcggttga

SEQ ID NO: 2709594 - DNA, 25 bp, Homo sapien
catttattgggactgttttttctca

SEQ ID NO: 2709595 - DNA, 25 bp, Homo sapien
tcttcttcatgtgactatctagttt

SEQ ID NO: 2709596 - DNA, 25 bp, Homo sapien
tcagtctttttaaacaccgaatcag

SEQ ID NO: 2709597 - DNA, 25 bp, Homo sapien
aatagttcaaaaaccactggactag

SEQ ID NO: 2709598 - DNA, 25 bp, Homo sapien
ccgggttcccgctctgacactttct

SEQ ID NO: 2709599 - DNA, 25 bp, Homo sapien
ggttttgctgaatccctcaggatca

SEQ ID NO: 2709600 - DNA, 25 bp, Homo sapien
tcttgcagtaataaacagagagcag

SEQ ID NO: 2709601 - DNA, 25 bp, Homo sapien
tttgcaaatgaaacacttcgggtag

SEQ ID NO: 2709602 - DNA, 25 bp, Homo sapien
gggcaaatttatgtaccagaagatc

SEQ ID NO: 2709603 - DNA, 25 bp, Homo sapien
tgtaggctgaactatacaaagcaag

SEQ ID NO: 2709604 - DNA, 25 bp, Homo sapien
ttcaggtcattgtgaaatctaaaat

SEQ ID NO: 2709605 - DNA, 25 bp, Homo sapien
attcaggtcattgtgaaatctaaaa

SEQ ID NO: 2709606 - DNA, 25 bp, Homo sapien
tgatggctttaacatctcttacatg

SEQ ID NO: 2709607 - DNA, 25 bp, Homo sapien
ttaagtgatggctttaacatctctt

SEQ ID NO: 2709608 - DNA, 25 bp, Homo sapien
agtgatggctttaacatctcttaca

SEQ ID NO: 2709609 - DNA, 25 bp, Homo sapien
aagtgatggctttaacatctcttac

SEQ ID NO: 2709610 - DNA, 25 bp, Homo sapien
agcccacgtcaaatgcacctccacc

SEQ ID NO: 2709611 - DNA, 25 bp, Homo sapien
ttcacagcccacgtcaaatgcacct

SEQ ID NO: 2709612 - DNA, 25 bp, Homo sapien
acagcccacgtcaaatgcacctcca

SEQ ID NO: 2709613 - DNA, 25 bp, Homo sapien
tcttcacagcccacgtcaaatgcac

SEQ ID NO: 2709614 - DNA, 25 bp, Homo sapien
cagaaggtacagaccagagagggag

SEQ ID NO: 2709615 - DNA, 25 bp, Homo sapien
gacctccgaacaccatcctttcttc

SEQ ID NO: 2709616 - DNA, 25 bp, Homo sapien
ctgccttacatcttcagacctccga

SEQ ID NO: 2709617 - DNA, 25 bp, Homo sapien
ttcagacctccgaacaccatccttt

SEQ ID NO: 2709618 - DNA, 25 bp, Homo sapien
taataattgaagctacatccagggc

SEQ ID NO: 2709619 - DNA, 25 bp, Homo sapien
tgttggcatttagctcacggacccg

SEQ ID NO: 2709620 - DNA, 25 bp, Homo sapien
tagcaatggctgtagtaaactccag

SEQ ID NO: 2709621 - DNA, 25 bp, Homo sapien
caggcttaacaacctgactcgggag

SEQ ID NO: 2709622 - DNA, 25 bp, Homo sapien
caaaagcattagtattcccgtgaaa

SEQ ID NO: 2709623 - DNA, 25 bp, Homo sapien
ttcccgtgaaaagggccagtcacac

SEQ ID NO: 2709624 - DNA, 25 bp, Homo sapien
caagtccttcgtaaccactccagga

SEQ ID NO: 2709625 - DNA, 25 bp, Homo sapien
gggacaaactccaattgctccagtt

SEQ ID NO: 2709626 - DNA, 25 bp, Homo sapien
ggttgccaatcgaaatcctccagtg

SEQ ID NO: 2709627 - DNA, 25 bp, Homo sapien
gatcccgtgcaaaggaaacgtttca

SEQ ID NO: 2709628 - DNA, 25 bp, Homo sapien
aacctgatgtgcttactatctctgc

SEQ ID NO: 2709629 - DNA, 25 bp, Homo sapien
gatccaatgatggtttttccgtaat

SEQ ID NO: 2709630 - DNA, 25 bp, Homo sapien
cctcttattttgatgtggcactgtt

SEQ ID NO: 2709631 - DNA, 25 bp, Homo sapien
ctcttattttgatgtggcactgttt

SEQ ID NO: 2709632 - DNA, 25 bp, Homo sapien
tcttattttgatgtggcactgtttg

SEQ ID NO: 2709633 - DNA, 25 bp, Homo sapien
ccagggcttcggccagaaaagaagt

SEQ ID NO: 2709634 - DNA, 25 bp, Homo sapien
cagggcttcggccagaaaagaagtt

SEQ ID NO: 2709635 - DNA, 25 bp, Homo sapien
accagggcttcggccagaaaagaag

SEQ ID NO: 2709636 - DNA, 25 bp, Homo sapien
taaccagggcttcggccagaaaaga

SEQ ID NO: 2709637 - DNA, 25 bp, Homo sapien
ttaggaaccttgaattgaaggtgtg

SEQ ID NO: 2709638 - DNA, 25 bp, Homo sapien
caggggcatctccatcggtcatgcc

SEQ ID NO: 2709639 - DNA, 25 bp, Homo sapien
ggggcatctccatcggtcatgccac

SEQ ID NO: 2709640 - DNA, 25 bp, Homo sapien
aggaaccttgaattgaaggtgtgac

SEQ ID NO: 2709641 - DNA, 25 bp, Homo sapien
gatgctgccctttgcgtctgctgag

SEQ ID NO: 2709642 - DNA, 25 bp, Homo sapien
gacaaagatgctgccctttgcgtct

SEQ ID NO: 2709643 - DNA, 25 bp, Homo sapien
cctttgcgtctgctgaggcacatga

SEQ ID NO: 2709644 - DNA, 25 bp, Homo sapien
ctaagacaaagatgctgccctttgc

SEQ ID NO: 2709645 - DNA, 25 bp, Homo sapien
tcctaatcccactccgtatctgcag

SEQ ID NO: 2709646 - DNA, 25 bp, Homo sapien
attcccaaaacacaggactcccctg

SEQ ID NO: 2709647 - DNA, 25 bp, Homo sapien
tctgcaggtttaccacatcgtggga

SEQ ID NO: 2709648 - DNA, 25 bp, Homo sapien
ggatggttcaggatcgtgcataact

SEQ ID NO: 2709649 - DNA, 25 bp, Homo sapien
gaggcttgccaacaattgaaggacc

SEQ ID NO: 2709650 - DNA, 25 bp, Homo sapien
ttccgtaagaggcttgccaacaatt

SEQ ID NO: 2709651 - DNA, 25 bp, Homo sapien
actgactcattgtgcagccttggtg

SEQ ID NO: 2709652 - DNA, 25 bp, Homo sapien
ctgactcattgtgcagccttggtga

SEQ ID NO: 2709653 - DNA, 25 bp, Homo sapien
cgcagattgggcacataggttgcct

SEQ ID NO: 2709654 - DNA, 25 bp, Homo sapien
cctacgcagattgggcacataggtt

SEQ ID NO: 2709655 - DNA, 25 bp, Homo sapien
tgggcacataggttgcctctgtcat

SEQ ID NO: 2709656 - DNA, 25 bp, Homo sapien
ctaagcctacgcagattgggcacat

SEQ ID NO: 2709657 - DNA, 25 bp, Homo sapien
ttcatccagggaacagggactaaga

SEQ ID NO: 2709658 - DNA, 25 bp, Homo sapien
tcccatgaggctcggagcgatgctt

SEQ ID NO: 2709659 - DNA, 25 bp, Homo sapien
gaactccaagagcaaggagcaagaa

SEQ ID NO: 2709660 - DNA, 25 bp, Homo sapien
gaaaaggcacctatctgcccggaag

SEQ ID NO: 2709661 - DNA, 25 bp, Homo sapien
tgcccagacctggatcctcgattta

SEQ ID NO: 2709662 - DNA, 25 bp, Homo sapien
cagaaacacccatcttcgctcaaaa

SEQ ID NO: 2709663 - DNA, 25 bp, Homo sapien
gatttatactatccgggcagaaaca

SEQ ID NO: 2709664 - DNA, 25 bp, Homo sapien
aacatgtcccgaagccttagttgga

SEQ ID NO: 2709665 - DNA, 25 bp, Homo sapien
cttcattttcatcaaacactggtgg

SEQ ID NO: 2709666 - DNA, 25 bp, Homo sapien
ttttcatcaaacactggtggttttc

SEQ ID NO: 2709667 - DNA, 25 bp, Homo sapien
gttttcttgaagtgttcgctcccat

SEQ ID NO: 2709668 - DNA, 25 bp, Homo sapien
caaacactggtggttttcttgaagt

SEQ ID NO: 2709669 - DNA, 25 bp, Homo sapien
gaaagctgccaaaggtcccatggaa

SEQ ID NO: 2709670 - DNA, 25 bp, Homo sapien
tatagtggagattaggaaagctgcc

SEQ ID NO: 2709671 - DNA, 25 bp, Homo sapien
tagtacacaaaagcttggcagttgg

SEQ ID NO: 2709672 - DNA, 25 bp, Homo sapien
caaggccctacagaccatgcttatg

SEQ ID NO: 2709673 - DNA, 25 bp, Homo sapien
ttcccccagacaacctataaacagc

SEQ ID NO: 2709674 - DNA, 25 bp, Homo sapien
ttcacaaccgccaactctcctaagt

SEQ ID NO: 2709675 - DNA, 25 bp, Homo sapien
tttgagctcaaagcattaagaactg

SEQ ID NO: 2709676 - DNA, 25 bp, Homo sapien
gattgtggactccatccgcttcaca

SEQ ID NO: 2709677 - DNA, 25 bp, Homo sapien
caactctcctaagtgaggacatgga

SEQ ID NO: 2709678 - DNA, 25 bp, Homo sapien
ccacctcctttcatataccatttta

SEQ ID NO: 2709679 - DNA, 25 bp, Homo sapien
gaaagcatgaagttccatgttgata

SEQ ID NO: 2709680 - DNA, 25 bp, Homo sapien
gattacatgtcaggatcctggtaaa

SEQ ID NO: 2709681 - DNA, 25 bp, Homo sapien
ggtaaatttatactagcaaaactgc

SEQ ID NO: 2709682 - DNA, 25 bp, Homo sapien
catgatgacattttgaatctccaag

SEQ ID NO: 2709683 - DNA, 25 bp, Homo sapien
gaatctccaaggatgcagcaggtac

SEQ ID NO: 2709684 - DNA, 25 bp, Homo sapien
tctagcctagaatgccatgatgaca

SEQ ID NO: 2709685 - DNA, 25 bp, Homo sapien
tctccactgccagtctagcctagaa

SEQ ID NO: 2709686 - DNA, 25 bp, Homo sapien
tatcttgagcaaatccaataactca

SEQ ID NO: 2709687 - DNA, 25 bp, Homo sapien
aagctgaccaggatttatttgcaaa

SEQ ID NO: 2709688 - DNA, 25 bp, Homo sapien
cccattacatgaatctgagttgtgt

SEQ ID NO: 2709689 - DNA, 25 bp, Homo sapien
ttttcttacacccattacatgaatc

SEQ ID NO: 2709690 - DNA, 25 bp, Homo sapien
aactgcctttcccaatggctcgcaa

SEQ ID NO: 2709691 - DNA, 25 bp, Homo sapien
tgcctttcccaatggctcgcaaaat

SEQ ID NO: 2709692 - DNA, 25 bp, Homo sapien
cccaatggctcgcaaaatttcaaag

SEQ ID NO: 2709693 - DNA, 25 bp, Homo sapien
ctttcccaatggctcgcaaaatttc

SEQ ID NO: 2709694 - DNA, 25 bp, Homo sapien
tcattgcgctccacgcacttttgtt

SEQ ID NO: 2709695 - DNA, 25 bp, Homo sapien
gcgctccacgcacttttgtttattc

SEQ ID NO: 2709696 - DNA, 25 bp, Homo sapien
ttgcgctccacgcacttttgtttat

SEQ ID NO: 2709697 - DNA, 25 bp, Homo sapien
cttcattgcgctccacgcacttttg

SEQ ID NO: 2709698 - DNA, 25 bp, Homo sapien
gcagcattttgaataggccactcta

SEQ ID NO: 2709699 - DNA, 25 bp, Homo sapien
tagactctaccatatccgagtagtg

SEQ ID NO: 2709700 - DNA, 25 bp, Homo sapien
ccgagtagtgcataaactgtaatag

SEQ ID NO: 2709701 - DNA, 25 bp, Homo sapien
caactgtggcatagaggctttgagc

SEQ ID NO: 2709702 - DNA, 25 bp, Homo sapien
cacataacttgggtaaatcttcggt

SEQ ID NO: 2709703 - DNA, 25 bp, Homo sapien
gaaactattgaaaactggcaaatga

SEQ ID NO: 2709704 - DNA, 25 bp, Homo sapien
ctttcgggttcttgcttaggtggca

SEQ ID NO: 2709705 - DNA, 25 bp, Homo sapien
gctaacaattgtttagggcttgaca

SEQ ID NO: 2709706 - DNA, 25 bp, Homo sapien
ctcaataacatcatgtggctctgag

SEQ ID NO: 2709707 - DNA, 25 bp, Homo sapien
ctacaaggactcaataacatcatgt

SEQ ID NO: 2709708 - DNA, 25 bp, Homo sapien
tctgagttcttgcagtgtttatagt

SEQ ID NO: 2709709 - DNA, 25 bp, Homo sapien
caaggactcaataacatcatgtggc

SEQ ID NO: 2709710 - DNA, 25 bp, Homo sapien
tcagggtcatatgccaaaacaactt

SEQ ID NO: 2709711 - DNA, 25 bp, Homo sapien
gaataacacttctctactaagttct

SEQ ID NO: 2709712 - DNA, 25 bp, Homo sapien
ataacacttctctactaagttcttc

SEQ ID NO: 2709713 - DNA, 25 bp, Homo sapien
catcagggtcatatgccaaaacaac

SEQ ID NO: 2709714 - DNA, 25 bp, Homo sapien
ataatacgacataatggtttttctc

SEQ ID NO: 2709715 - DNA, 25 bp, Homo sapien
acgcaggaataatacgacataatgg

SEQ ID NO: 2709716 - DNA, 25 bp, Homo sapien
caggaataatacgacataatggttt

SEQ ID NO: 2709717 - DNA, 25 bp, Homo sapien
caggaacgcaggaataatacgacat

SEQ ID NO: 2709718 - DNA, 25 bp, Homo sapien
tgatgtccagcagtagaaacgctac

SEQ ID NO: 2709719 - DNA, 25 bp, Homo sapien
ctgatgtccagcagtagaaacgcta

SEQ ID NO: 2709720 - DNA, 25 bp, Homo sapien
tctgatgtccagcagtagaaacgct

SEQ ID NO: 2709721 - DNA, 25 bp, Homo sapien
tgctctccatataaaagggcaagcc

SEQ ID NO: 2709722 - DNA, 25 bp, Homo sapien
catatactggctctggagatttaat

SEQ ID NO: 2709723 - DNA, 25 bp, Homo sapien
taatctgtcggcttacatatactgg

SEQ ID NO: 2709724 - DNA, 25 bp, Homo sapien
aatacagccagtaatcaggcaaagg

SEQ ID NO: 2709725 - DNA, 25 bp, Homo sapien
ccctggcatatagcttggtacttaa

SEQ ID NO: 2709726 - DNA, 25 bp, Homo sapien
caaagaattttgtgccctgctcatt

SEQ ID NO: 2709727 - DNA, 25 bp, Homo sapien
atttctaaccatcagcaacccctgg

SEQ ID NO: 2709728 - DNA, 25 bp, Homo sapien
aaacacttcagaaatctagtggcag

SEQ ID NO: 2709729 - DNA, 25 bp, Homo sapien
tcattgcaagaaactttatggatac

SEQ ID NO: 2709730 - DNA, 25 bp, Homo sapien
cacaatttacatgcccatcgataag

SEQ ID NO: 2709731 - DNA, 25 bp, Homo sapien
tatggatacactcgaaaaactgtgc

SEQ ID NO: 2709732 - DNA, 25 bp, Homo sapien
tacaggtacatatcaccataccaaa

SEQ ID NO: 2709733 - DNA, 25 bp, Homo sapien
attcatcacagccttgctcttgcat

SEQ ID NO: 2709734 - DNA, 25 bp, Homo sapien
ctcaaccattcatcacagccttgct

SEQ ID NO: 2709735 - DNA, 25 bp, Homo sapien
accattcatcacagccttgctcttg

SEQ ID NO: 2709736 - DNA, 25 bp, Homo sapien
aaccattcatcacagccttgctctt

SEQ ID NO: 2709737 - DNA, 25 bp, Homo sapien
gtcttcctcatcttggaaggaatac

SEQ ID NO: 2709738 - DNA, 25 bp, Homo sapien
ccttgaagtggacgttctgttgcag

SEQ ID NO: 2709739 - DNA, 25 bp, Homo sapien
ctgtgaatgatgcgctggttctgca

SEQ ID NO: 2709740 - DNA, 25 bp, Homo sapien
gggccatgaccagctcacagatgaa

SEQ ID NO: 2709741 - DNA, 25 bp, Homo sapien
gttgcaggtgataacgcaggtctcc

SEQ ID NO: 2709742 - DNA, 25 bp, Homo sapien
tcatggccatctccttggacttgac

SEQ ID NO: 2709743 - DNA, 25 bp, Homo sapien
gttcatggccatctccttggacttg

SEQ ID NO: 2709744 - DNA, 25 bp, Homo sapien
ggccatctccttggacttgactgac

SEQ ID NO: 2709745 - DNA, 25 bp, Homo sapien
atggccatctccttggacttgactg

SEQ ID NO: 2709746 - DNA, 25 bp, Homo sapien
tctgagaacgggcactaagtaataa

SEQ ID NO: 2709747 - DNA, 25 bp, Homo sapien
catggtgaggagacatttcagtaca

SEQ ID NO: 2709748 - DNA, 25 bp, Homo sapien
aaaggcccttctgagaacgggcact

SEQ ID NO: 2709749 - DNA, 25 bp, Homo sapien
ctttaccatggtgaggagacatttc

SEQ ID NO: 2709750 - DNA, 25 bp, Homo sapien
taggctgttttctgtatgagctctc

SEQ ID NO: 2709751 - DNA, 25 bp, Homo sapien
atgcataggtgtcccgtgctcccct

SEQ ID NO: 2709752 - DNA, 25 bp, Homo sapien
gaaacttattttgcgactccacact

SEQ ID NO: 2709753 - DNA, 25 bp, Homo sapien
attttaggctgttctctgtctgtcc

SEQ ID NO: 2709754 - DNA, 25 bp, Homo sapien
aagcagcatgttaggagtgaggaca

SEQ ID NO: 2709755 - DNA, 25 bp, Homo sapien
tgtaagcagcatgttaggagtgagg

SEQ ID NO: 2709756 - DNA, 25 bp, Homo sapien
agttttgtcacttggtcttctatcc

SEQ ID NO: 2709757 - DNA, 25 bp, Homo sapien
ttttgtcacttggtcttctatccca

SEQ ID NO: 2709758 - DNA, 25 bp, Homo sapien
gatggtccatagtttgtatttaatt

SEQ ID NO: 2709759 - DNA, 25 bp, Homo sapien
tgatggtccatagtttgtatttaat

SEQ ID NO: 2709760 - DNA, 25 bp, Homo sapien
tttgatggtccatagtttgtattta

SEQ ID NO: 2709761 - DNA, 25 bp, Homo sapien
cttttgatggtccatagtttgtatt

SEQ ID NO: 2709762 - DNA, 25 bp, Homo sapien
tatatcgaaaccaaaatcaactcct

SEQ ID NO: 2709763 - DNA, 25 bp, Homo sapien
cctgcaatcctataccggtacatgt

SEQ ID NO: 2709764 - DNA, 25 bp, Homo sapien
aatcggtatatcgaaaccaaaatca

SEQ ID NO: 2709765 - DNA, 25 bp, Homo sapien
tcctataccggtacatgtacatgaa

SEQ ID NO: 2709766 - DNA, 25 bp, Homo sapien
ggtccattggatcatataaagcatt

SEQ ID NO: 2709767 - DNA, 25 bp, Homo sapien
gcttaagaaagctaactggagttga

SEQ ID NO: 2709768 - DNA, 25 bp, Homo sapien
tgtaactctagaattgcacagatga

SEQ ID NO: 2709769 - DNA, 25 bp, Homo sapien
cacagatgatgtgagcttaaagact

SEQ ID NO: 2709770 - DNA, 25 bp, Homo sapien
catgttcgtcaagtaaaatattgtc

SEQ ID NO: 2709771 - DNA, 25 bp, Homo sapien
agtaaaatattgtcaggcttcatat

SEQ ID NO: 2709772 - DNA, 25 bp, Homo sapien
tcgtcaagtaaaatattgtcaggct

SEQ ID NO: 2709773 - DNA, 25 bp, Homo sapien
taaaatattgtcaggcttcatatcc

SEQ ID NO: 2709774 - DNA, 25 bp, Homo sapien
gtgggacttgtaggagagccaggta

SEQ ID NO: 2709775 - DNA, 25 bp, Homo sapien
tgggacttgtaggagagccaggtat

SEQ ID NO: 2709776 - DNA, 25 bp, Homo sapien
tcagtgggacttgtaggagagccag

SEQ ID NO: 2709777 - DNA, 25 bp, Homo sapien
cagtgggacttgtaggagagccagg

SEQ ID NO: 2709778 - DNA, 25 bp, Homo sapien
ggcttcggtctcctgaaactccaat

SEQ ID NO: 2709779 - DNA, 25 bp, Homo sapien
gggcttcggtctcctgaaactccaa

SEQ ID NO: 2709780 - DNA, 25 bp, Homo sapien
gcagcatcgcagcaatgttgaaatc

SEQ ID NO: 2709781 - DNA, 25 bp, Homo sapien
cctgggcagcatcgcagcaatgttg

SEQ ID NO: 2709782 - DNA, 25 bp, Homo sapien
tgggcagcatcgcagcaatgttgaa

SEQ ID NO: 2709783 - DNA, 25 bp, Homo sapien
tccctgggcagcatcgcagcaatgt

SEQ ID NO: 2709784 - DNA, 25 bp, Homo sapien
taaatgttcactatatgatgctatc

SEQ ID NO: 2709785 - DNA, 25 bp, Homo sapien
gcttgctagtccatagtgaacttat

SEQ ID NO: 2709786 - DNA, 25 bp, Homo sapien
catttagcatgatcgaatatttaaa

SEQ ID NO: 2709787 - DNA, 25 bp, Homo sapien
tagcaaagtgcttggaacaataaat

SEQ ID NO: 2709788 - DNA, 25 bp, Homo sapien
ggctcaccctgaaatcaagaaggct

SEQ ID NO: 2709789 - DNA, 25 bp, Homo sapien
ggccttcatggataaactcttcgct

SEQ ID NO: 2709790 - DNA, 25 bp, Homo sapien
caacgtgcagaatttggtacagcat

SEQ ID NO: 2709791 - DNA, 25 bp, Homo sapien
tataacagtcgcagacaacgtgcag

SEQ ID NO: 2709792 - DNA, 25 bp, Homo sapien
agcagttcatatgccgtcactccca

SEQ ID NO: 2709793 - DNA, 25 bp, Homo sapien
cggcctctcagcagttcatatgccg

SEQ ID NO: 2709794 - DNA, 25 bp, Homo sapien
ttcatatgccgtcactcccagggac

SEQ ID NO: 2709795 - DNA, 25 bp, Homo sapien
tctcagcagttcatatgccgtcact

SEQ ID NO: 2709796 - DNA, 25 bp, Homo sapien
gttaaatattgtgaccaggtgcggc

SEQ ID NO: 2709797 - DNA, 25 bp, Homo sapien
aatattgtgaccaggtgcggcggct

SEQ ID NO: 2709798 - DNA, 25 bp, Homo sapien
aaagttaaatattgtgaccaggtgc

SEQ ID NO: 2709799 - DNA, 25 bp, Homo sapien
tggctcaaaacgtcccccgctgagc

SEQ ID NO: 2709800 - DNA, 25 bp, Homo sapien
gtcgtctcaaacgtgtgtacaattt

SEQ ID NO: 2709801 - DNA, 25 bp, Homo sapien
cagtcgtctcaaacgtgtgtacaat

SEQ ID NO: 2709802 - DNA, 25 bp, Homo sapien
aacagtcgtctcaaacgtgtgtaca

SEQ ID NO: 2709803 - DNA, 25 bp, Homo sapien
acagtcgtctcaaacgtgtgtacaa

SEQ ID NO: 2709804 - DNA, 25 bp, Homo sapien
taacttctaaacttaagccagagag

SEQ ID NO: 2709805 - DNA, 25 bp, Homo sapien
tttgttacttcgtttggacatgcag

SEQ ID NO: 2709806 - DNA, 25 bp, Homo sapien
agagagcctgcttccttttgttact

SEQ ID NO: 2709807 - DNA, 25 bp, Homo sapien
acttcgtttggacatgcagtcttcc

SEQ ID NO: 2709808 - DNA, 25 bp, Homo sapien
gaatgaaacctggaatgagcctctt

SEQ ID NO: 2709809 - DNA, 25 bp, Homo sapien
cgttggtctggattaggttcgagta

SEQ ID NO: 2709810 - DNA, 25 bp, Homo sapien
tatcattcatatacgggaagttctg

SEQ ID NO: 2709811 - DNA, 25 bp, Homo sapien
gataactgagaaaatcgttggtctg

SEQ ID NO: 2709812 - DNA, 25 bp, Homo sapien
tggctatccatccaatgggaattat

SEQ ID NO: 2709813 - DNA, 25 bp, Homo sapien
gaagtccattggtttggctatccat

SEQ ID NO: 2709814 - DNA, 25 bp, Homo sapien
cagcataatgcagtagaccacagaa

SEQ ID NO: 2709815 - DNA, 25 bp, Homo sapien
tctttggttatcagtccttacaaat

SEQ ID NO: 2709816 - DNA, 25 bp, Homo sapien
taagcttctggactctggctcttac

SEQ ID NO: 2709817 - DNA, 25 bp, Homo sapien
ctaagcttctggactctggctctta

SEQ ID NO: 2709818 - DNA, 25 bp, Homo sapien
ctgcaaggaagacagttggctcaat

SEQ ID NO: 2709819 - DNA, 25 bp, Homo sapien
tgcaaggaagacagttggctcaatc

SEQ ID NO: 2709820 - DNA, 25 bp, Homo sapien
tcaagttcaaaggtaggatcacaat

SEQ ID NO: 2709821 - DNA, 25 bp, Homo sapien
gaagaatcgcatttcctcatatcct

SEQ ID NO: 2709822 - DNA, 25 bp, Homo sapien
ctccttctttgccagacgctttttt

SEQ ID NO: 2709823 - DNA, 25 bp, Homo sapien
tgtagaggtttggactccaaaatca

SEQ ID NO: 2709824 - DNA, 25 bp, Homo sapien
gaagctctcgaagatattgcagcca

SEQ ID NO: 2709825 - DNA, 25 bp, Homo sapien
gacatcatctctagggttggctgct

SEQ ID NO: 2709826 - DNA, 25 bp, Homo sapien
gaaatgacctcccagtagaagctct

SEQ ID NO: 2709827 - DNA, 25 bp, Homo sapien
gaatcatcccctgacctaagcttgg

SEQ ID NO: 2709828 - DNA, 25 bp, Homo sapien
gagggtttccagtatcggtcacagg

SEQ ID NO: 2709829 - DNA, 25 bp, Homo sapien
cctgagggtttccagtatcggtcac

SEQ ID NO: 2709830 - DNA, 25 bp, Homo sapien
ttgcaaacggaagcatttgtaatcc

SEQ ID NO: 2709831 - DNA, 25 bp, Homo sapien
ggaagcatttgtaatcctgagggtt

SEQ ID NO: 2709832 - DNA, 25 bp, Homo sapien
tgaggatctgtgcttccgacactgc

SEQ ID NO: 2709833 - DNA, 25 bp, Homo sapien
gcaaagcgcagttaattatgaccaa

SEQ ID NO: 2709834 - DNA, 25 bp, Homo sapien
cacatgttccggagcagtttgcaca

SEQ ID NO: 2709835 - DNA, 25 bp, Homo sapien
agattccgggaagctggcaaaacag

SEQ ID NO: 2709836 - DNA, 25 bp, Homo sapien
ttgaaaattatgaactccttctgga

SEQ ID NO: 2709837 - DNA, 25 bp, Homo sapien
tccttctggacagagtcaaggtgct

SEQ ID NO: 2709838 - DNA, 25 bp, Homo sapien
aaaattatgaactccttctggacag

SEQ ID NO: 2709839 - DNA, 25 bp, Homo sapien
tctctgttgaaaattatgaactcct

SEQ ID NO: 2709840 - DNA, 25 bp, Homo sapien
gtctttggtttgttccaaggctaga

SEQ ID NO: 2709841 - DNA, 25 bp, Homo sapien
gttccaaggctagatttggttgtct

SEQ ID NO: 2709842 - DNA, 25 bp, Homo sapien
ttccaaggctagatttggttgtctt

SEQ ID NO: 2709843 - DNA, 25 bp, Homo sapien
tggtttgttccaaggctagatttgg

SEQ ID NO: 2709844 - DNA, 25 bp, Homo sapien
gattcacgcatatcactggaaggcc

SEQ ID NO: 2709845 - DNA, 25 bp, Homo sapien
gaaatgacatcccaggagctcaggc

SEQ ID NO: 2709846 - DNA, 25 bp, Homo sapien
tctgaactgcaaggtggacatactt

SEQ ID NO: 2709847 - DNA, 25 bp, Homo sapien
tcctgccagctgagataagcggatc

SEQ ID NO: 2709848 - DNA, 25 bp, Homo sapien
cctggccagcttagcaaaatcctat

SEQ ID NO: 2709849 - DNA, 25 bp, Homo sapien
aacctggccagcttagcaaaatcct

SEQ ID NO: 2709850 - DNA, 25 bp, Homo sapien
ctggccagcttagcaaaatcctatc

SEQ ID NO: 2709851 - DNA, 25 bp, Homo sapien
acctggccagcttagcaaaatccta

SEQ ID NO: 2709852 - DNA, 25 bp, Homo sapien
gaaaactgtgaatgccaagctgaag

SEQ ID NO: 2709853 - DNA, 25 bp, Homo sapien
aaataagtagggaattctgcctgcc

SEQ ID NO: 2709854 - DNA, 25 bp, Homo sapien
tcccaaatgggcatcagtcaggtct

SEQ ID NO: 2709855 - DNA, 25 bp, Homo sapien
gacacatgctctccataagtaagga

SEQ ID NO: 2709856 - DNA, 25 bp, Homo sapien
gaagagacatgttccacctagtggg

SEQ ID NO: 2709857 - DNA, 25 bp, Homo sapien
tgtcattcacctggctagcactaga

SEQ ID NO: 2709858 - DNA, 25 bp, Homo sapien
tgagtccacagcacataaaggcttg

SEQ ID NO: 2709859 - DNA, 25 bp, Homo sapien
tacagagattgtatcgggttcccat

SEQ ID NO: 2709860 - DNA, 25 bp, Homo sapien
tgggcagctctgtcacagtgcaaga

SEQ ID NO: 2709861 - DNA, 25 bp, Homo sapien
cagtgcaagagccttatagctggga

SEQ ID NO: 2709862 - DNA, 25 bp, Homo sapien
gatgctccatacaggcaagggaagc

SEQ ID NO: 2709863 - DNA, 25 bp, Homo sapien
tagctgggatgctcttggacttcaa

SEQ ID NO: 2709864 - DNA, 25 bp, Homo sapien
taagttgccgggtttgactgcccta

SEQ ID NO: 2709865 - DNA, 25 bp, Homo sapien
tgtagacaatacagggacaactggg

SEQ ID NO: 2709866 - DNA, 25 bp, Homo sapien
aagcacttgtttcccattcgagggc

SEQ ID NO: 2709867 - DNA, 25 bp, Homo sapien
ggttagccattagcagacgacttcc

SEQ ID NO: 2709868 - DNA, 25 bp, Homo sapien
tgggtctgagaggtggtgacagtgc

SEQ ID NO: 2709869 - DNA, 25 bp, Homo sapien
aacagcctactatttcaggacaagc

SEQ ID NO: 2709870 - DNA, 25 bp, Homo sapien
agcctactatttcaggacaagccca

SEQ ID NO: 2709871 - DNA, 25 bp, Homo sapien
ggacaagcccatggagccagcagct

SEQ ID NO: 2709872 - DNA, 25 bp, Homo sapien
catcacgtgactgttaatgtaaacc

SEQ ID NO: 2709873 - DNA, 25 bp, Homo sapien
tggtgggtatggacagacagtaatc

SEQ ID NO: 2709874 - DNA, 25 bp, Homo sapien
cctctttgaaaactggtgtgtgggt

SEQ ID NO: 2709875 - DNA, 25 bp, Homo sapien
gacagtaatctcctgtgatctgtgc

SEQ ID NO: 2709876 - DNA, 25 bp, Homo sapien
tgggcaattcccaacttccttgcca

SEQ ID NO: 2709877 - DNA, 25 bp, Homo sapien
agcttgagtcccagatacactcatg

SEQ ID NO: 2709878 - DNA, 25 bp, Homo sapien
gtgggcaattcccaacttccttgcc

SEQ ID NO: 2709879 - DNA, 25 bp, Homo sapien
tgagtcccagatacactcatgggct

SEQ ID NO: 2709880 - DNA, 25 bp, Homo sapien
gattgtagtcatcctgaaaatgggt

SEQ ID NO: 2709881 - DNA, 25 bp, Homo sapien
gccttgttcttcacgactgtctata

SEQ ID NO: 2709882 - DNA, 25 bp, Homo sapien
cacgactgtctatactgagagtgtc

SEQ ID NO: 2709883 - DNA, 25 bp, Homo sapien
gagagtgtcatgtttccacaaaggg

SEQ ID NO: 2709884 - DNA, 25 bp, Homo sapien
cagatggcaatccatcccggttctc

SEQ ID NO: 2709885 - DNA, 25 bp, Homo sapien
tgttaaatcagttacccgtagtaga

SEQ ID NO: 2709886 - DNA, 25 bp, Homo sapien
cggttctctctgagggccacgggct

SEQ ID NO: 2709887 - DNA, 25 bp, Homo sapien
catattgcctctgaacccagatggc

SEQ ID NO: 2709888 - DNA, 25 bp, Homo sapien
ggaacaacatgagctcaggaagcct

SEQ ID NO: 2709889 - DNA, 25 bp, Homo sapien
tccctgggaattgcgagaataactc

SEQ ID NO: 2709890 - DNA, 25 bp, Homo sapien
tcatgcaagtgtaggaaggcacgct

SEQ ID NO: 2709891 - DNA, 25 bp, Homo sapien
aaggcacgctggatcgtctatctga

SEQ ID NO: 2709892 - DNA, 25 bp, Homo sapien
gggacttccgaagtgaaccattcca

SEQ ID NO: 2709893 - DNA, 25 bp, Homo sapien
tgggataggttgcagtaccagccac

SEQ ID NO: 2709894 - DNA, 25 bp, Homo sapien
gagagagtttgccagatctgaagca

SEQ ID NO: 2709895 - DNA, 25 bp, Homo sapien
taagtcttccatggccaaatcggtc

SEQ ID NO: 2709896 - DNA, 25 bp, Homo sapien
aagtcagtcttgagcagagggagca

SEQ ID NO: 2709897 - DNA, 25 bp, Homo sapien
taattgcttaggagaaaccattgtc

SEQ ID NO: 2709898 - DNA, 25 bp, Homo sapien
tgggatcagacttccatgctctggg

SEQ ID NO: 2709899 - DNA, 25 bp, Homo sapien
cagttttggagcaagtcctgtgagc

SEQ ID NO: 2709900 - DNA, 25 bp, Homo sapien
tccatggaagatagccgctgtggca

SEQ ID NO: 2709901 - DNA, 25 bp, Homo sapien
tacatgcatgcaatcagacaggcca

SEQ ID NO: 2709902 - DNA, 25 bp, Homo sapien
cagctgagaacatagcacaggccca

SEQ ID NO: 2709903 - DNA, 25 bp, Homo sapien
gacgcttccttctaaacacggcgag

SEQ ID NO: 2709904 - DNA, 25 bp, Homo sapien
tgaagccaaaatggtacaccgatat

SEQ ID NO: 2709905 - DNA, 25 bp, Homo sapien
aggaaagcgaatccaaacggttgtg

SEQ ID NO: 2709906 - DNA, 25 bp, Homo sapien
caggcggccgttctaatatcacatc

SEQ ID NO: 2709907 - DNA, 25 bp, Homo sapien
ttcgctcagccagcaagcgcatcgt

SEQ ID NO: 2709908 - DNA, 25 bp, Homo sapien
cttcatcagtcgggatttagcctgt

SEQ ID NO: 2709909 - DNA, 25 bp, Homo sapien
tcttcatcagtcgggatttagcctg

SEQ ID NO: 2709910 - DNA, 25 bp, Homo sapien
atcttcatcagtcgggatttagcct

SEQ ID NO: 2709911 - DNA, 25 bp, Homo sapien
aatcttcatcagtcgggatttagcc

SEQ ID NO: 2709912 - DNA, 25 bp, Homo sapien
ggtcacatttagcagataggaaagc

SEQ ID NO: 2709913 - DNA, 25 bp, Homo sapien
ttaacactgcatctaacaaccaatg

SEQ ID NO: 2709914 - DNA, 25 bp, Homo sapien
gaattaacactgcatctaacaacca

SEQ ID NO: 2709915 - DNA, 25 bp, Homo sapien
tctagagaatacaaacttggtcaca

SEQ ID NO: 2709916 - DNA, 25 bp, Homo sapien
tcagccgcaaacctctatagccgtg

SEQ ID NO: 2709917 - DNA, 25 bp, Homo sapien
ggagggtgatgtaaccttccaaaga

SEQ ID NO: 2709918 - DNA, 25 bp, Homo sapien
gcaagacggatttccagcagcagcc

SEQ ID NO: 2709919 - DNA, 25 bp, Homo sapien
tatagccgtggaaggccatttgggt

SEQ ID NO: 2709920 - DNA, 25 bp, Homo sapien
ccatccacccaagcttcggacccag

SEQ ID NO: 2709921 - DNA, 25 bp, Homo sapien
cacccaagcttcggacccagagcat

SEQ ID NO: 2709922 - DNA, 25 bp, Homo sapien
atccacccaagcttcggacccagag

SEQ ID NO: 2709923 - DNA, 25 bp, Homo sapien
tccacccaagcttcggacccagagc

SEQ ID NO: 2709924 - DNA, 25 bp, Homo sapien
ccatatctggtttcctgttttctga

SEQ ID NO: 2709925 - DNA, 25 bp, Homo sapien
ggtttcctgttttctgataaggcat

SEQ ID NO: 2709926 - DNA, 25 bp, Homo sapien
tatctggtttcctgttttctgataa

SEQ ID NO: 2709927 - DNA, 25 bp, Homo sapien
tggtttcctgttttctgataaggca

SEQ ID NO: 2709928 - DNA, 25 bp, Homo sapien
attccaaggcctgagcccgcattcc

SEQ ID NO: 2709929 - DNA, 25 bp, Homo sapien
gagttgcattttggcgggctttcag

SEQ ID NO: 2709930 - DNA, 25 bp, Homo sapien
ttccaaggcctgagcccgcattcct

SEQ ID NO: 2709931 - DNA, 25 bp, Homo sapien
ctctgggagttgcattttggcgggc

SEQ ID NO: 2709932 - DNA, 25 bp, Homo sapien
gggcacatgtgccagaaagtccatc

SEQ ID NO: 2709933 - DNA, 25 bp, Homo sapien
ccatccatcacttggacttctttct

SEQ ID NO: 2709934 - DNA, 25 bp, Homo sapien
ctgggcacatgtgccagaaagtcca

SEQ ID NO: 2709935 - DNA, 25 bp, Homo sapien
catcacttggacttctttcttgtct

SEQ ID NO: 2709936 - DNA, 25 bp, Homo sapien
aaattcacagagaggagttctaagg

SEQ ID NO: 2709937 - DNA, 25 bp, Homo sapien
ttcacagagaggagttctaaggcct

SEQ ID NO: 2709938 - DNA, 25 bp, Homo sapien
attcacagagaggagttctaaggcc

SEQ ID NO: 2709939 - DNA, 25 bp, Homo sapien
cacagagaggagttctaaggccttc

SEQ ID NO: 2709940 - DNA, 25 bp, Homo sapien
taggcttggaacatcctgtgcgttt

SEQ ID NO: 2709941 - DNA, 25 bp, Homo sapien
cgattgagatgcagaaccttcccct

SEQ ID NO: 2709942 - DNA, 25 bp, Homo sapien
tgcagggtccgccaggttttgttgt

SEQ ID NO: 2709943 - DNA, 25 bp, Homo sapien
ttgatttgcagggtccgccaggttt

SEQ ID NO: 2709944 - DNA, 25 bp, Homo sapien
gacaatgtattccatcgccgaaggg

SEQ ID NO: 2709945 - DNA, 25 bp, Homo sapien
tcagccctgcctaaagtaaactcgg

SEQ ID NO: 2709946 - DNA, 25 bp, Homo sapien
taaactcgggattgtgagcagtgca

SEQ ID NO: 2709947 - DNA, 25 bp, Homo sapien
caggttgcagagtcggaccagtctc

SEQ ID NO: 2709948 - DNA, 25 bp, Homo sapien
tttactgtcctggaaaatgattttc

SEQ ID NO: 2709949 - DNA, 25 bp, Homo sapien
cctagatggtcttagctgatggcag

SEQ ID NO: 2709950 - DNA, 25 bp, Homo sapien
tctggttaacacgcctctgacactg

SEQ ID NO: 2709951 - DNA, 25 bp, Homo sapien
ttcctagatggtcttagctgatggc

SEQ ID NO: 2709952 - DNA, 25 bp, Homo sapien
ttgatgcgactccactccaagcact

SEQ ID NO: 2709953 - DNA, 25 bp, Homo sapien
aaaaatagtgttaggagtagctgcc

SEQ ID NO: 2709954 - DNA, 25 bp, Homo sapien
taatggtcaaaactaggtaaatggc

SEQ ID NO: 2709955 - DNA, 25 bp, Homo sapien
caaatgcttaattaaggcagctcta

SEQ ID NO: 2709956 - DNA, 25 bp, Homo sapien
tactgaccattctagatgctcctca

SEQ ID NO: 2709957 - DNA, 25 bp, Homo sapien
tttttccacagctggtcttaagacc

SEQ ID NO: 2709958 - DNA, 25 bp, Homo sapien
tcttctcttgggaggtctcagggcc

SEQ ID NO: 2709959 - DNA, 25 bp, Homo sapien
ctagtaccttcactggtccagatgg

SEQ ID NO: 2709960 - DNA, 25 bp, Homo sapien
aatcatatgcagttgtagcctggtc

SEQ ID NO: 2709961 - DNA, 25 bp, Homo sapien
gagactaaaactctcatgggctgta

SEQ ID NO: 2709962 - DNA, 25 bp, Homo sapien
tggaaactattaatggatgctgacc

SEQ ID NO: 2709963 - DNA, 25 bp, Homo sapien
gtatggcccacagcaaaagtaagga

SEQ ID NO: 2709964 - DNA, 25 bp, Homo sapien
ggcagggcctaccacttacttctca

SEQ ID NO: 2709965 - DNA, 25 bp, Homo sapien
tatgatggaaagtactctagagcca

SEQ ID NO: 2709966 - DNA, 25 bp, Homo sapien
tatttcccaggtcagtgctgtttcc

SEQ ID NO: 2709967 - DNA, 25 bp, Homo sapien
cataggaaacaaagggagagactgg

SEQ ID NO: 2709968 - DNA, 25 bp, Homo sapien
ataatgctgcgattggcagagttcc

SEQ ID NO: 2709969 - DNA, 25 bp, Homo sapien
agttccctcaaagtaatggtccctg

SEQ ID NO: 2709970 - DNA, 25 bp, Homo sapien
ccttcaggccacacttgaatctggg

SEQ ID NO: 2709971 - DNA, 25 bp, Homo sapien
aaatacgccttctcaataatgctgc

SEQ ID NO: 2709972 - DNA, 25 bp, Homo sapien
caggagtcttgggtcatttctagtt

SEQ ID NO: 2709973 - DNA, 25 bp, Homo sapien
tcaggagtcttgggtcatttctagt

SEQ ID NO: 2709974 - DNA, 25 bp, Homo sapien
gttgtttacaaccacttctagccac

SEQ ID NO: 2709975 - DNA, 25 bp, Homo sapien
ttgttgtttacaaccacttctagcc

SEQ ID NO: 2709976 - DNA, 25 bp, Homo sapien
tgttgtttacaaccacttctagcca

SEQ ID NO: 2709977 - DNA, 25 bp, Homo sapien
tgtttacaaccacttctagccacat

SEQ ID NO: 2709978 - DNA, 25 bp, Homo sapien
tagaactatcaatcaactgatcagg

SEQ ID NO: 2709979 - DNA, 25 bp, Homo sapien
ctttggctaatcttgtagaactatc

SEQ ID NO: 2709980 - DNA, 25 bp, Homo sapien
gtgagcgtgtgatccaaggcctcca

SEQ ID NO: 2709981 - DNA, 25 bp, Homo sapien
ccccatttagctgcatagtttctcc

SEQ ID NO: 2709982 - DNA, 25 bp, Homo sapien
ccagtgatgcagtaagctgcttttc

SEQ ID NO: 2709983 - DNA, 25 bp, Homo sapien
tggtccatatgaaccttcgcctttt

SEQ ID NO: 2709984 - DNA, 25 bp, Homo sapien
ccttctggtccatatgaaccttcgc

SEQ ID NO: 2709985 - DNA, 25 bp, Homo sapien
cttggggccagtgatgcagtaagct

SEQ ID NO: 2709986 - DNA, 25 bp, Homo sapien
gaatagaaaccatcagtcacagggc

SEQ ID NO: 2709987 - DNA, 25 bp, Homo sapien
gccaacgagaatagaaaccatcagt

SEQ ID NO: 2709988 - DNA, 25 bp, Homo sapien
ccatcagtcacagggctaagttgta

SEQ ID NO: 2709989 - DNA, 25 bp, Homo sapien
ctgccaacgagaatagaaaccatca

SEQ ID NO: 2709990 - DNA, 25 bp, Homo sapien
aatactgcccatcggctcttctctt

SEQ ID NO: 2709991 - DNA, 25 bp, Homo sapien
caaatactgcccatcggctcttctc

SEQ ID NO: 2709992 - DNA, 25 bp, Homo sapien
tactgcccatcggctcttctcttta

SEQ ID NO: 2709993 - DNA, 25 bp, Homo sapien
actgcccatcggctcttctctttag

SEQ ID NO: 2709994 - DNA, 25 bp, Homo sapien
ttagataactgtcacagcagacaca

SEQ ID NO: 2709995 - DNA, 25 bp, Homo sapien
agtgcctctcccgtgcaaatctcct

SEQ ID NO: 2709996 - DNA, 25 bp, Homo sapien
cctgcacagcgatgatcatttcttt

SEQ ID NO: 2709997 - DNA, 25 bp, Homo sapien
ttagaggactgatgtgcacagctgc

SEQ ID NO: 2709998 - DNA, 25 bp, Homo sapien
ttcttttagaggactgatgtgcaca

SEQ ID NO: 2709999 - DNA, 25 bp, Homo sapien
aaatgtcaggctgggtagtgccagg

SEQ ID NO: 2710000 - DNA, 25 bp, Homo sapien
gcagggtgagttcctccaaatgtca

SEQ ID NO: 2710001 - DNA, 25 bp, Homo sapien
aaaatgcagggtgagttcctccaaa

SEQ ID NO: 2710002 - DNA, 25 bp, Homo sapien
ccaaatgtcaggctgggtagtgcca

SEQ ID NO: 2710003 - DNA, 25 bp, Homo sapien
gcaaagccccttttataggcagaat

SEQ ID NO: 2710004 - DNA, 25 bp, Homo sapien
catatcaactaatactccgggaggg

SEQ ID NO: 2710005 - DNA, 25 bp, Homo sapien
cactgacttcctgaaagaaagtgga

SEQ ID NO: 2710006 - DNA, 25 bp, Homo sapien
tccgggagggagtagtttctgtcca

SEQ ID NO: 2710007 - DNA, 25 bp, Homo sapien
caaagtgtggtccgcagatcaacag

SEQ ID NO: 2710008 - DNA, 25 bp, Homo sapien
gtgtggtccgcagatcaacagcatc

SEQ ID NO: 2710009 - DNA, 25 bp, Homo sapien
gttttgattcctggatgggagttct

SEQ ID NO: 2710010 - DNA, 25 bp, Homo sapien
tttgattcctggatgggagttcttt

SEQ ID NO: 2710011 - DNA, 25 bp, Homo sapien
gttccatggccaaaatgtgaagaca

SEQ ID NO: 2710012 - DNA, 25 bp, Homo sapien
aagttccatggccaaaatgtgaaga

SEQ ID NO: 2710013 - DNA, 25 bp, Homo sapien
ttccatggccaaaatgtgaagacat

SEQ ID NO: 2710014 - DNA, 25 bp, Homo sapien
cccaagttccatggccaaaatgtga

SEQ ID NO: 2710015 - DNA, 25 bp, Homo sapien
attcagtaccttggacttctttagc

SEQ ID NO: 2710016 - DNA, 25 bp, Homo sapien
tctaaattcagtaccttggacttct

SEQ ID NO: 2710017 - DNA, 25 bp, Homo sapien
aattcagtaccttggacttctttag

SEQ ID NO: 2710018 - DNA, 25 bp, Homo sapien
ctgtctaaattcagtaccttggact

SEQ ID NO: 2710019 - DNA, 25 bp, Homo sapien
ccaagctgagtgattaagagtctgc

SEQ ID NO: 2710020 - DNA, 25 bp, Homo sapien
gatgatgtagctggcaacttcccta

SEQ ID NO: 2710021 - DNA, 25 bp, Homo sapien
ggaattacaagatgatgtagctggc

SEQ ID NO: 2710022 - DNA, 25 bp, Homo sapien
gagtctgcccttgtaagaaaaggag

SEQ ID NO: 2710023 - DNA, 25 bp, Homo sapien
tcaagacatctccacggggaaaggg

SEQ ID NO: 2710024 - DNA, 25 bp, Homo sapien
gaaggatcctcacgaagcacaaaag

SEQ ID NO: 2710025 - DNA, 25 bp, Homo sapien
tgagctgttccacacttgaaggatc

SEQ ID NO: 2710026 - DNA, 25 bp, Homo sapien
cacacttgaaggatcctcacgaagc

SEQ ID NO: 2710027 - DNA, 25 bp, Homo sapien
ggctttagaacctccatatgtcaaa

SEQ ID NO: 2710028 - DNA, 25 bp, Homo sapien
ggccatgggatctcacagattgctg

SEQ ID NO: 2710029 - DNA, 25 bp, Homo sapien
tcatatgttaatagaagcctgacat

SEQ ID NO: 2710030 - DNA, 25 bp, Homo sapien
ctcacagaagatgggcggtgtgcct

SEQ ID NO: 2710031 - DNA, 25 bp, Homo sapien
ttcttttcccagttcccgtgatctg

SEQ ID NO: 2710032 - DNA, 25 bp, Homo sapien
tgcctcaacagaagggactcagtga

SEQ ID NO: 2710033 - DNA, 25 bp, Homo sapien
ggactcagtgagtccctgcatttct

SEQ ID NO: 2710034 - DNA, 25 bp, Homo sapien
gttcccgtgatctgcctcaacagaa

SEQ ID NO: 2710035 - DNA, 25 bp, Homo sapien
cagggcgtcgctgtagaaaaaccgc

SEQ ID NO: 2710036 - DNA, 25 bp, Homo sapien
tcgctgtagaaaaaccgctgtggtt

SEQ ID NO: 2710037 - DNA, 25 bp, Homo sapien
acaccacagggcgtcgctgtagaaa

SEQ ID NO: 2710038 - DNA, 25 bp, Homo sapien
ccgctgtggtttggggcgcctctca

SEQ ID NO: 2710039 - DNA, 25 bp, Homo sapien
ctaagcaaaacatcatcaccaagag

SEQ ID NO: 2710040 - DNA, 25 bp, Homo sapien
ttcctggtgctctctgaaaaagcta

SEQ ID NO: 2710041 - DNA, 25 bp, Homo sapien
catcatcctcccctgattcctggtg

SEQ ID NO: 2710042 - DNA, 25 bp, Homo sapien
ctctgaaaaagctaagcaaaacatc

SEQ ID NO: 2710043 - DNA, 25 bp, Homo sapien
gggaactcatgtttttgtcgagcat

SEQ ID NO: 2710044 - DNA, 25 bp, Homo sapien
caagaaaggttttttctgcgctgct

SEQ ID NO: 2710045 - DNA, 25 bp, Homo sapien
aaacgtgtacttctgttctaggatg

SEQ ID NO: 2710046 - DNA, 25 bp, Homo sapien
gagcatttagtgtttgaactcttcc

SEQ ID NO: 2710047 - DNA, 25 bp, Homo sapien
gactctacgagaactcttcctcttc

SEQ ID NO: 2710048 - DNA, 25 bp, Homo sapien
tcagggtctgactctacgagaactc

SEQ ID NO: 2710049 - DNA, 25 bp, Homo sapien
agggtctgactctacgagaactctt

SEQ ID NO: 2710050 - DNA, 25 bp, Homo sapien
ctgactctacgagaactcttcctct

SEQ ID NO: 2710051 - DNA, 25 bp, Homo sapien
caacatgtgtttactcaaatgaggg

SEQ ID NO: 2710052 - DNA, 25 bp, Homo sapien
tcaatcctcaaaagtcttaagccag

SEQ ID NO: 2710053 - DNA, 25 bp, Homo sapien
tcccttaggcatgagccaagtaccc

SEQ ID NO: 2710054 - DNA, 25 bp, Homo sapien
gggctctcatcccagtggaatgtaa

SEQ ID NO: 2710055 - DNA, 25 bp, Homo sapien
gcttaagccccagaggtcgatgctg

SEQ ID NO: 2710056 - DNA, 25 bp, Homo sapien
gatggcttaagccccagaggtcgat

SEQ ID NO: 2710057 - DNA, 25 bp, Homo sapien
ctgaagtgcaaggatggcttaagcc

SEQ ID NO: 2710058 - DNA, 25 bp, Homo sapien
ggctgaagtgcaaggatggcttaag

SEQ ID NO: 2710059 - DNA, 25 bp, Homo sapien
gctggaaattgaagatcgaggcacc

SEQ ID NO: 2710060 - DNA, 25 bp, Homo sapien
gaggctggaaattgaagatcgaggc

SEQ ID NO: 2710061 - DNA, 25 bp, Homo sapien
agggcctggtgtctacttccaagat

SEQ ID NO: 2710062 - DNA, 25 bp, Homo sapien
gagggcctggtgtctacttccaaga

SEQ ID NO: 2710063 - DNA, 25 bp, Homo sapien
tgatatagaagccatcgaacgctcc

SEQ ID NO: 2710064 - DNA, 25 bp, Homo sapien
taagccatctgcacgctggagaacc

SEQ ID NO: 2710065 - DNA, 25 bp, Homo sapien
gagaattcgctcacctggttatggg

SEQ ID NO: 2710066 - DNA, 25 bp, Homo sapien
gaaggcacccttactggactcagtg

SEQ ID NO: 2710067 - DNA, 25 bp, Homo sapien
gaagatcagctcagcctatgaagta

SEQ ID NO: 2710068 - DNA, 25 bp, Homo sapien
gaaacttaaaactaggtgtgccaga

SEQ ID NO: 2710069 - DNA, 25 bp, Homo sapien
agaatgatctgttaagtacctgacc

SEQ ID NO: 2710070 - DNA, 25 bp, Homo sapien
tgaaaacatcccaaggaagttcagg

SEQ ID NO: 2710071 - DNA, 25 bp, Homo sapien
caaagtggtttgacaacacaggctc

SEQ ID NO: 2710072 - DNA, 25 bp, Homo sapien
tattctttgtcaaacaggattcaca

SEQ ID NO: 2710073 - DNA, 25 bp, Homo sapien
aggctctttcgtgccactctgaaat

SEQ ID NO: 2710074 - DNA, 25 bp, Homo sapien
tgaaatgctgactgcgcgatattct

SEQ ID NO: 2710075 - DNA, 25 bp, Homo sapien
gaatgacatcgttggttgctctcac

SEQ ID NO: 2710076 - DNA, 25 bp, Homo sapien
gctagtaaggatgcactaagacctc

SEQ ID NO: 2710077 - DNA, 25 bp, Homo sapien
ttaggcaatagtctccagagtgagg

SEQ ID NO: 2710078 - DNA, 25 bp, Homo sapien
tattggcacacacgatcgcaaggtg

SEQ ID NO: 2710079 - DNA, 25 bp, Homo sapien
gaatctcaagaacagtagtgcgcac

SEQ ID NO: 2710080 - DNA, 25 bp, Homo sapien
cattaatgcttcaggactaagtcag

SEQ ID NO: 2710081 - DNA, 25 bp, Homo sapien
tattaatgcttcaggcactaaggac

SEQ ID NO: 2710082 - DNA, 25 bp, Homo sapien
cacatcattgaccttcagaagagac

SEQ ID NO: 2710083 - DNA, 25 bp, Homo sapien
gaaattgcggacctgaaaacggcca

SEQ ID NO: 2710084 - DNA, 25 bp, Homo sapien
taacatgcttcctgggtgataccga

SEQ ID NO: 2710085 - DNA, 25 bp, Homo sapien
gaaccttatcaagcagcacgagcag

SEQ ID NO: 2710086 - DNA, 25 bp, Homo sapien
gaattaagagatcacagcggcctga

SEQ ID NO: 2710087 - DNA, 25 bp, Homo sapien
taagtgcatcctgcagaaattgaag

SEQ ID NO: 2710088 - DNA, 25 bp, Homo sapien
cacttgagctgaagtaactttccca

SEQ ID NO: 2710089 - DNA, 25 bp, Homo sapien
tcccaaggtcttatatggaaggtaa

SEQ ID NO: 2710090 - DNA, 25 bp, Homo sapien
gaaagcagccttaagcaatatgtaa

SEQ ID NO: 2710091 - DNA, 25 bp, Homo sapien
gaaactcagctttatctttgaacat

SEQ ID NO: 2710092 - DNA, 25 bp, Homo sapien
cacaatacgtactgaagaaactcag

SEQ ID NO: 2710093 - DNA, 25 bp, Homo sapien
cttccacgtcaagattagatgctgc

SEQ ID NO: 2710094 - DNA, 25 bp, Homo sapien
gccaatgccagagaacacaatacgt

SEQ ID NO: 2710095 - DNA, 25 bp, Homo sapien
ctgaggagtgaaattaagcttgtta

SEQ ID NO: 2710096 - DNA, 25 bp, Homo sapien
gctgaggagtgaaattaagcttgtt

SEQ ID NO: 2710097 - DNA, 25 bp, Homo sapien
cttactctgcaacagctgtaaaaca

SEQ ID NO: 2710098 - DNA, 25 bp, Homo sapien
tgcctgaccttgaatacataattgc

SEQ ID NO: 2710099 - DNA, 25 bp, Homo sapien
tcatgtccaatgaagttgacacttc

SEQ ID NO: 2710100 - DNA, 25 bp, Homo sapien
acataattgcttcccgctctgtttg

SEQ ID NO: 2710101 - DNA, 25 bp, Homo sapien
agttccaatctaactgactgcacag

SEQ ID NO: 2710102 - DNA, 25 bp, Homo sapien
taagtcaggttttgcagcgtggaca

SEQ ID NO: 2710103 - DNA, 25 bp, Homo sapien
gccttgttgattccaattaagtcag

SEQ ID NO: 2710104 - DNA, 25 bp, Homo sapien
gacaattgtgctgtgactcgctgtg

SEQ ID NO: 2710105 - DNA, 25 bp, Homo sapien
tgtaattcatactctgctacattat

SEQ ID NO: 2710106 - DNA, 25 bp, Homo sapien
ttgtaattcatactctgctacatta

SEQ ID NO: 2710107 - DNA, 25 bp, Homo sapien
aattcatactctgctacattattag

SEQ ID NO: 2710108 - DNA, 25 bp, Homo sapien
gtaattcatactctgctacattatt

SEQ ID NO: 2710109 - DNA, 25 bp, Homo sapien
aacagcatccttaaatgattgcaca

SEQ ID NO: 2710110 - DNA, 25 bp, Homo sapien
atgattgcacaggtatttataaaat

SEQ ID NO: 2710111 - DNA, 25 bp, Homo sapien
ctgaatcctgtgatagcaagttata

SEQ ID NO: 2710112 - DNA, 25 bp, Homo sapien
tgatagcaagttataacagcatcct

SEQ ID NO: 2710113 - DNA, 25 bp, Homo sapien
gatctcctcaggatagtcccttcgt

SEQ ID NO: 2710114 - DNA, 25 bp, Homo sapien
ttcgtggttgccaagaacatgttgc

SEQ ID NO: 2710115 - DNA, 25 bp, Homo sapien
tcagggatctcctcaggatagtccc

SEQ ID NO: 2710116 - DNA, 25 bp, Homo sapien
cgtggttgccaagaacatgttgcca

SEQ ID NO: 2710117 - DNA, 25 bp, Homo sapien
gaacccaggccgtcattgtgaaaag

SEQ ID NO: 2710118 - DNA, 25 bp, Homo sapien
tgccatatggtcacaagctcaagct

SEQ ID NO: 2710119 - DNA, 25 bp, Homo sapien
ggctaactacaacatgaacccctaa

SEQ ID NO: 2710120 - DNA, 25 bp, Homo sapien
gacaaatacaccctactttagctgg

SEQ ID NO: 2710121 - DNA, 25 bp, Homo sapien
cctgtggcataaatgtgtggggaat

SEQ ID NO: 2710122 - DNA, 25 bp, Homo sapien
ggaatctcacatattctttgacccg

SEQ ID NO: 2710123 - DNA, 25 bp, Homo sapien
acacccctaggcaggcttttctcct

SEQ ID NO: 2710124 - DNA, 25 bp, Homo sapien
tttctcctcctgtggcataaatgtg

SEQ ID NO: 2710125 - DNA, 25 bp, Homo sapien
ttgtgggctcttcagaggctcttct

SEQ ID NO: 2710126 - DNA, 25 bp, Homo sapien
cttgctccgccgctggttgtctggg

SEQ ID NO: 2710127 - DNA, 25 bp, Homo sapien
tgttcgtctcatgcaccagtcaacg

SEQ ID NO: 2710128 - DNA, 25 bp, Homo sapien
taaagtctcgttgcctcttccaggt

SEQ ID NO: 2710129 - DNA, 25 bp, Homo sapien
gaccgagaaggtattgcttgaacca

SEQ ID NO: 2710130 - DNA, 25 bp, Homo sapien
gaaaaataagttcaaagctgactct

SEQ ID NO: 2710131 - DNA, 25 bp, Homo sapien
gaaccatgatgctgcttcaagagag

SEQ ID NO: 2710132 - DNA, 25 bp, Homo sapien
aagcttctgttgcctactgaaaaat

SEQ ID NO: 2710133 - DNA, 25 bp, Homo sapien
gcagcaggatatgtctgtaatacac

SEQ ID NO: 2710134 - DNA, 25 bp, Homo sapien
tttagttgatcagggttttgcagca

SEQ ID NO: 2710135 - DNA, 25 bp, Homo sapien
agcttatattttagttgatcagggt

SEQ ID NO: 2710136 - DNA, 25 bp, Homo sapien
tactgatcggcttcatcccaagaag

SEQ ID NO: 2710137 - DNA, 25 bp, Homo sapien
cattggtttgtctcaggtcagacag

SEQ ID NO: 2710138 - DNA, 25 bp, Homo sapien
cagccttggcttgaagcctgtcgca

SEQ ID NO: 2710139 - DNA, 25 bp, Homo sapien
tgcgtgtgagagtgatcattggttt

SEQ ID NO: 2710140 - DNA, 25 bp, Homo sapien
tatttagataatgcgtgtgagagtg

SEQ ID NO: 2710141 - DNA, 25 bp, Homo sapien
tcatcagtaagcattggacatacaa

SEQ ID NO: 2710142 - DNA, 25 bp, Homo sapien
gatcatcagtaagcattggacatac

SEQ ID NO: 2710143 - DNA, 25 bp, Homo sapien
ctgatcatcagtaagcattggacat

SEQ ID NO: 2710144 - DNA, 25 bp, Homo sapien
atcagtaagcattggacatacaaac

SEQ ID NO: 2710145 - DNA, 25 bp, Homo sapien
cagtctctcaggtagtagttttgat

SEQ ID NO: 2710146 - DNA, 25 bp, Homo sapien
gtagtagttttgatggcacctggaa

SEQ ID NO: 2710147 - DNA, 25 bp, Homo sapien
tctctcaggtagtagttttgatggc

SEQ ID NO: 2710148 - DNA, 25 bp, Homo sapien
ctcaggtagtagttttgatggcacc

SEQ ID NO: 2710149 - DNA, 25 bp, Homo sapien
tagattagcttttctaccacaagga

SEQ ID NO: 2710150 - DNA, 25 bp, Homo sapien
cacaaggaagatggttagtacactg

SEQ ID NO: 2710151 - DNA, 25 bp, Homo sapien
tgtgagtggtagttgctaagaccga

SEQ ID NO: 2710152 - DNA, 25 bp, Homo sapien
tgctaagaccgaattctttaatgcc

SEQ ID NO: 2710153 - DNA, 25 bp, Homo sapien
tggaaaagaattcccatgagcaaca

SEQ ID NO: 2710154 - DNA, 25 bp, Homo sapien
ctgtcccagtctgcattgagtggaa

SEQ ID NO: 2710155 - DNA, 25 bp, Homo sapien
cagtcttaaagagatttactggatg

SEQ ID NO: 2710156 - DNA, 25 bp, Homo sapien
agagatttactggatgttgtttgta

SEQ ID NO: 2710157 - DNA, 25 bp, Homo sapien
caagaactaagatagtgacttcacc

SEQ ID NO: 2710158 - DNA, 25 bp, Homo sapien
tgacttcacctgtgaagggttctcc

SEQ ID NO: 2710159 - DNA, 25 bp, Homo sapien
agggttctccctcgcccttgatagt

SEQ ID NO: 2710160 - DNA, 25 bp, Homo sapien
tcatcaagaactaagatagtgactt

SEQ ID NO: 2710161 - DNA, 25 bp, Homo sapien
ttggaacatcgagattccacatcaa

SEQ ID NO: 2710162 - DNA, 25 bp, Homo sapien
catcaagattgaaaggcccttgaaa

SEQ ID NO: 2710163 - DNA, 25 bp, Homo sapien
tgctcccagaagtgcaaggacacct

SEQ ID NO: 2710164 - DNA, 25 bp, Homo sapien
cacatgttctcattggaacatcgag

SEQ ID NO: 2710165 - DNA, 25 bp, Homo sapien
gtcaattacctccaagtcctgttca

SEQ ID NO: 2710166 - DNA, 25 bp, Homo sapien
gatgtgtcaattacctccaagtcct

SEQ ID NO: 2710167 - DNA, 25 bp, Homo sapien
ttcctcagggatgtgtcaattacct

SEQ ID NO: 2710168 - DNA, 25 bp, Homo sapien
cagggatgtgtcaattacctccaag

SEQ ID NO: 2710169 - DNA, 25 bp, Homo sapien
actgacaaattgttcatgcctgatt

SEQ ID NO: 2710170 - DNA, 25 bp, Homo sapien
gttgctttcattgcagtagcataag

SEQ ID NO: 2710171 - DNA, 25 bp, Homo sapien
cattgcagtagcataagctcagtga

SEQ ID NO: 2710172 - DNA, 25 bp, Homo sapien
ctgatccactgacaaattgttcatg

SEQ ID NO: 2710173 - DNA, 25 bp, Homo sapien
ctgcagttccccaaaactgagggtt

SEQ ID NO: 2710174 - DNA, 25 bp, Homo sapien
cacttctctactgaaggtgtggatg

SEQ ID NO: 2710175 - DNA, 25 bp, Homo sapien
gggacggtaggaatatcagtgacac

SEQ ID NO: 2710176 - DNA, 25 bp, Homo sapien
gcagttctagtttccagttgcagtt

SEQ ID NO: 2710177 - DNA, 25 bp, Homo sapien
aagcaggctacaatgggacttcata

SEQ ID NO: 2710178 - DNA, 25 bp, Homo sapien
tctcagttattggaagatagtaaga

SEQ ID NO: 2710179 - DNA, 25 bp, Homo sapien
ggctattcctagttgaccttcttca

SEQ ID NO: 2710180 - DNA, 25 bp, Homo sapien
ttacataggaccttccacagaaagc

SEQ ID NO: 2710181 - DNA, 25 bp, Homo sapien
attgcttggaacacgctttgctttt

SEQ ID NO: 2710182 - DNA, 25 bp, Homo sapien
aattgcttggaacacgctttgcttt

SEQ ID NO: 2710183 - DNA, 25 bp, Homo sapien
ttggaacacgctttgcttttgctca

SEQ ID NO: 2710184 - DNA, 25 bp, Homo sapien
gcttggaacacgctttgcttttgct

SEQ ID NO: 2710185 - DNA, 25 bp, Homo sapien
atgcttcttctctagtagtaattgc

SEQ ID NO: 2710186 - DNA, 25 bp, Homo sapien
gatgcttcttctctagtagtaattg

SEQ ID NO: 2710187 - DNA, 25 bp, Homo sapien
tgatgcttcttctctagtagtaatt

SEQ ID NO: 2710188 - DNA, 25 bp, Homo sapien
tgcttcttctctagtagtaattgca

SEQ ID NO: 2710189 - DNA, 25 bp, Homo sapien
gttttcaactgacctctggacgcag

SEQ ID NO: 2710190 - DNA, 25 bp, Homo sapien
tggaggccaggctatgacacagagt

SEQ ID NO: 2710191 - DNA, 25 bp, Homo sapien
ccacagagggagttagggatcaaac

SEQ ID NO: 2710192 - DNA, 25 bp, Homo sapien
aatgactttcccacaaccacagagg

SEQ ID NO: 2710193 - DNA, 25 bp, Homo sapien
ccagctggttatggtagctctgtaa

SEQ ID NO: 2710194 - DNA, 25 bp, Homo sapien
gtgtgggtggtacctcaacctgccc

SEQ ID NO: 2710195 - DNA, 25 bp, Homo sapien
tctagtcctggaacaattgcacacc

SEQ ID NO: 2710196 - DNA, 25 bp, Homo sapien
cactgacttgtgatcctgtggccaa

SEQ ID NO: 2710197 - DNA, 25 bp, Homo sapien
aaggtctcactttgtaagacatctg

SEQ ID NO: 2710198 - DNA, 25 bp, Homo sapien
agtacttcacaatggctctaagctt

SEQ ID NO: 2710199 - DNA, 25 bp, Homo sapien
cacttggatcaagaaagtacttcac

SEQ ID NO: 2710200 - DNA, 25 bp, Homo sapien
gaaagtagttacagcaggcaggccc

SEQ ID NO: 2710201 - DNA, 25 bp, Homo sapien
cctgatcacgcttgatttattgatg

SEQ ID NO: 2710202 - DNA, 25 bp, Homo sapien
acgcttgatttattgatggtggttc

SEQ ID NO: 2710203 - DNA, 25 bp, Homo sapien
gcttgatttattgatggtggttcca

SEQ ID NO: 2710204 - DNA, 25 bp, Homo sapien
tcacgcttgatttattgatggtggt

SEQ ID NO: 2710205 - DNA, 25 bp, Homo sapien
attgttttgcctatccaccccatgg

SEQ ID NO: 2710206 - DNA, 25 bp, Homo sapien
gttttgcctatccaccccatggtgc

SEQ ID NO: 2710207 - DNA, 25 bp, Homo sapien
tgttttgcctatccaccccatggtg

SEQ ID NO: 2710208 - DNA, 25 bp, Homo sapien
aaattgttttgcctatccaccccat

SEQ ID NO: 2710209 - DNA, 25 bp, Homo sapien
ccccgtgttaatcaatatggaagct

SEQ ID NO: 2710210 - DNA, 25 bp, Homo sapien
gttaatcaatatggaagctacccac

SEQ ID NO: 2710211 - DNA, 25 bp, Homo sapien
cgtccccgtgttaatcaatatggaa

SEQ ID NO: 2710212 - DNA, 25 bp, Homo sapien
agtccgtccccgtgttaatcaatat

SEQ ID NO: 2710213 - DNA, 25 bp, Homo sapien
aagaccgacactgcccgatcacctc

SEQ ID NO: 2710214 - DNA, 25 bp, Homo sapien
atcacctcggaagccccctagacca

SEQ ID NO: 2710215 - DNA, 25 bp, Homo sapien
gaagaccgacactgcccgatcacct

SEQ ID NO: 2710216 - DNA, 25 bp, Homo sapien
ccaagccagtggttccacttgccat

SEQ ID NO: 2710217 - DNA, 25 bp, Homo sapien
caccaagccagtggttccacttgcc

SEQ ID NO: 2710218 - DNA, 25 bp, Homo sapien
accaagccagtggttccacttgcca

SEQ ID NO: 2710219 - DNA, 25 bp, Homo sapien
gtaactacaaaggctgatggtcacc

SEQ ID NO: 2710220 - DNA, 25 bp, Homo sapien
agtaactacaaaggctgatggtcac

SEQ ID NO: 2710221 - DNA, 25 bp, Homo sapien
cagagtaactacaaaggctgatggt

SEQ ID NO: 2710222 - DNA, 25 bp, Homo sapien
gagtaactacaaaggctgatggtca

SEQ ID NO: 2710223 - DNA, 25 bp, Homo sapien
aatgttgtccagaggtaaaggtgcc

SEQ ID NO: 2710224 - DNA, 25 bp, Homo sapien
cccctccacaaggtgctcaacagaa

SEQ ID NO: 2710225 - DNA, 25 bp, Homo sapien
tttcagaagaagctttaatggatcc

SEQ ID NO: 2710226 - DNA, 25 bp, Homo sapien
ggtgccaacttgtcaacaggaaggg

SEQ ID NO: 2710227 - DNA, 25 bp, Homo sapien
gaaatgcacatttacaagggacaag

SEQ ID NO: 2710228 - DNA, 25 bp, Homo sapien
gtggaaatgcacatttacaagggac

SEQ ID NO: 2710229 - DNA, 25 bp, Homo sapien
cagggtgagtatgcctcccctttgg

SEQ ID NO: 2710230 - DNA, 25 bp, Homo sapien
aagaggagctagacattcagggtga

SEQ ID NO: 2710231 - DNA, 25 bp, Homo sapien
tccagtgtcctgtttggccactatt

SEQ ID NO: 2710232 - DNA, 25 bp, Homo sapien
tccaaaatcacgaaggtggtaaatg

SEQ ID NO: 2710233 - DNA, 25 bp, Homo sapien
ggtattgtcacaactataacacatg

SEQ ID NO: 2710234 - DNA, 25 bp, Homo sapien
cagagtgattacgtctcatccaaaa

SEQ ID NO: 2710235 - DNA, 25 bp, Homo sapien
ttgatctataattggtagaacaggt

SEQ ID NO: 2710236 - DNA, 25 bp, Homo sapien
cacgggtcactacattttagggcat

SEQ ID NO: 2710237 - DNA, 25 bp, Homo sapien
tttgtccttttcacgggtcactaca

SEQ ID NO: 2710238 - DNA, 25 bp, Homo sapien
aggtttcaggcagggaggataggag

SEQ ID NO: 2710239 - DNA, 25 bp, Homo sapien
tttatcctgtgaccagggctcagag

SEQ ID NO: 2710240 - DNA, 25 bp, Homo sapien
ctcagaggggcgaccacatgtagct

SEQ ID NO: 2710241 - DNA, 25 bp, Homo sapien
tcagaggggcgaccacatgtagcta

SEQ ID NO: 2710242 - DNA, 25 bp, Homo sapien
ttatcctgtgaccagggctcagagg

SEQ ID NO: 2710243 - DNA, 25 bp, Homo sapien
gatagtgtacaagatgtttggggtt

SEQ ID NO: 2710244 - DNA, 25 bp, Homo sapien
taaattcatcttcgggctctgggtt

SEQ ID NO: 2710245 - DNA, 25 bp, Homo sapien
tttaaattcatcttcgggctctggg

SEQ ID NO: 2710246 - DNA, 25 bp, Homo sapien
ctgatagtgtacaagatgtttgggg

SEQ ID NO: 2710247 - DNA, 25 bp, Homo sapien
tggttacattaccactggctccaac

SEQ ID NO: 2710248 - DNA, 25 bp, Homo sapien
agctgccttggtgatttcgcagaga

SEQ ID NO: 2710249 - DNA, 25 bp, Homo sapien
gagaaagcgagtagggttctccacg

SEQ ID NO: 2710250 - DNA, 25 bp, Homo sapien
gacatgtgttcaggctcccagctgc

SEQ ID NO: 2710251 - DNA, 25 bp, Homo sapien
ttcaggacatgtgttcaggctccca

SEQ ID NO: 2710252 - DNA, 25 bp, Homo sapien
tggcaatagcattgctctcccacac

SEQ ID NO: 2710253 - DNA, 25 bp, Homo sapien
gtggcaatagcattgctctcccaca

SEQ ID NO: 2710254 - DNA, 25 bp, Homo sapien
ggcaatagcattgctctcccacaca

SEQ ID NO: 2710255 - DNA, 25 bp, Homo sapien
gggaacaccctggtactggctatca

SEQ ID NO: 2710256 - DNA, 25 bp, Homo sapien
ggtgggaacaccctggtactggcta

SEQ ID NO: 2710257 - DNA, 25 bp, Homo sapien
caccctggtactggctatcatcagc

SEQ ID NO: 2710258 - DNA, 25 bp, Homo sapien
ccaaggtgggaacaccctggtactg

SEQ ID NO: 2710259 - DNA, 25 bp, Homo sapien
aaccagcagttgataatgggaatgg

SEQ ID NO: 2710260 - DNA, 25 bp, Homo sapien
gaaccagcagttgataatgggaatg

SEQ ID NO: 2710261 - DNA, 25 bp, Homo sapien
accagcagttgataatgggaatggc

SEQ ID NO: 2710262 - DNA, 25 bp, Homo sapien
gtttcatttccacccaagacagcct

SEQ ID NO: 2710263 - DNA, 25 bp, Homo sapien
aatattttagcatcaaagtgggcca

SEQ ID NO: 2710264 - DNA, 25 bp, Homo sapien
cacagtttcatttccacccaagaca

SEQ ID NO: 2710265 - DNA, 25 bp, Homo sapien
tcacacagtttcatttccacccaag

SEQ ID NO: 2710266 - DNA, 25 bp, Homo sapien
ctctaaagaggatgacactagcaaa

SEQ ID NO: 2710267 - DNA, 25 bp, Homo sapien
tcttcagctcgtccaatcgctggaa

SEQ ID NO: 2710268 - DNA, 25 bp, Homo sapien
gagactgcaactcatgaaggtctgg

SEQ ID NO: 2710269 - DNA, 25 bp, Homo sapien
ctagcaaagacatgttcttcagctc

SEQ ID NO: 2710270 - DNA, 25 bp, Homo sapien
agtactctccaaccagtgtctgggc

SEQ ID NO: 2710271 - DNA, 25 bp, Homo sapien
taatgattcccatcttcgtgaaggg

SEQ ID NO: 2710272 - DNA, 25 bp, Homo sapien
tctgccttttatatgactcggagtc

SEQ ID NO: 2710273 - DNA, 25 bp, Homo sapien
gctttgcccaaatgcttgaagaccc

SEQ ID NO: 2710274 - DNA, 25 bp, Homo sapien
ttccatgatgttacaggtcaacatt

SEQ ID NO: 2710275 - DNA, 25 bp, Homo sapien
tgatgttacaggtcaacattgccaa

SEQ ID NO: 2710276 - DNA, 25 bp, Homo sapien
tcccatgactgctatctgcctttgt

SEQ ID NO: 2710277 - DNA, 25 bp, Homo sapien
cccatgactgctatctgcctttgtg

SEQ ID NO: 2710278 - DNA, 25 bp, Homo sapien
ttaattcactggagagtcaaagtca

SEQ ID NO: 2710279 - DNA, 25 bp, Homo sapien
aattcactggagagtcaaagtcaat

SEQ ID NO: 2710280 - DNA, 25 bp, Homo sapien
ttcactggagagtcaaagtcaatgt

SEQ ID NO: 2710281 - DNA, 25 bp, Homo sapien
actggagagtcaaagtcaatgttcc

SEQ ID NO: 2710282 - DNA, 25 bp, Homo sapien
cctctaagttttccgatcattatta

SEQ ID NO: 2710283 - DNA, 25 bp, Homo sapien
tcctctaagttttccgatcattatt

SEQ ID NO: 2710284 - DNA, 25 bp, Homo sapien
tctaagttttccgatcattattatg

SEQ ID NO: 2710285 - DNA, 25 bp, Homo sapien
ctctaagttttccgatcattattat

SEQ ID NO: 2710286 - DNA, 25 bp, Homo sapien
tgtctaccaaaagtcatgtaactgc

SEQ ID NO: 2710287 - DNA, 25 bp, Homo sapien
cataggtacacatgggagatttggg

SEQ ID NO: 2710288 - DNA, 25 bp, Homo sapien
gattgccatttgctggagatcaggg

SEQ ID NO: 2710289 - DNA, 25 bp, Homo sapien
tgtaactgcacacccaaactgtgaa

SEQ ID NO: 2710290 - DNA, 25 bp, Homo sapien
gagaacacaggtagctaatagaagc

SEQ ID NO: 2710291 - DNA, 25 bp, Homo sapien
aaatttccgtggcatgttaacaaga

SEQ ID NO: 2710292 - DNA, 25 bp, Homo sapien
taatagaagcttccctgagatgatc

SEQ ID NO: 2710293 - DNA, 25 bp, Homo sapien
gagatgatcatacaaacctgagggt

SEQ ID NO: 2710294 - DNA, 25 bp, Homo sapien
gacgatgcaagtcgcctacaggtcc

SEQ ID NO: 2710295 - DNA, 25 bp, Homo sapien
tgaagacgatgcaagtcgcctacag

SEQ ID NO: 2710296 - DNA, 25 bp, Homo sapien
gatgcaagtcgcctacaggtccact

SEQ ID NO: 2710297 - DNA, 25 bp, Homo sapien
gttgaagacgatgcaagtcgcctac

SEQ ID NO: 2710298 - DNA, 25 bp, Homo sapien
gcactgacactgtggctatcttcat

SEQ ID NO: 2710299 - DNA, 25 bp, Homo sapien
caagggcagaagcactgacactgtg

SEQ ID NO: 2710300 - DNA, 25 bp, Homo sapien
tatgaggcaaagagccaagggcaga

SEQ ID NO: 2710301 - DNA, 25 bp, Homo sapien
cttgtatgaggcaaagagccaaggg

SEQ ID NO: 2710302 - DNA, 25 bp, Homo sapien
ctgatcttcattcttactggcagca

SEQ ID NO: 2710303 - DNA, 25 bp, Homo sapien
tgatcttcattcttactggcagcat

SEQ ID NO: 2710304 - DNA, 25 bp, Homo sapien
gcatcagaggcccaaataataggtt

SEQ ID NO: 2710305 - DNA, 25 bp, Homo sapien
ttatcatgctgaaaggaacccaagc

SEQ ID NO: 2710306 - DNA, 25 bp, Homo sapien
caggaaaactggagccctctagggc

SEQ ID NO: 2710307 - DNA, 25 bp, Homo sapien
tctctgagcaaaatggaataccctt

SEQ ID NO: 2710308 - DNA, 25 bp, Homo sapien
cagaagtatacttgcctggatgaat

SEQ ID NO: 2710309 - DNA, 25 bp, Homo sapien
cattgaatgagccagcaatcactta

SEQ ID NO: 2710310 - DNA, 25 bp, Homo sapien
tagatacagcattaggtagaacaga

SEQ ID NO: 2710311 - DNA, 25 bp, Homo sapien
ttactatactttgctaggtgacata

SEQ ID NO: 2710312 - DNA, 25 bp, Homo sapien
cataaatgcctgaaattcatggcac

SEQ ID NO: 2710313 - DNA, 25 bp, Homo sapien
agtatcattttgcacgtggcacatt

SEQ ID NO: 2710314 - DNA, 25 bp, Homo sapien
gatgaacattattccatcaagactt

SEQ ID NO: 2710315 - DNA, 25 bp, Homo sapien
tcctggggacagaacagttttccat

SEQ ID NO: 2710316 - DNA, 25 bp, Homo sapien
gagtctggcattatgcttaagccaa

SEQ ID NO: 2710317 - DNA, 25 bp, Homo sapien
gcttaagccaatcttctcagtccct

SEQ ID NO: 2710318 - DNA, 25 bp, Homo sapien
tctgctggttggctgtcacgggaga

SEQ ID NO: 2710319 - DNA, 25 bp, Homo sapien
cttgcttaagtccttctgctggttg

SEQ ID NO: 2710320 - DNA, 25 bp, Homo sapien
tttgcaattgataacccaagccttc

SEQ ID NO: 2710321 - DNA, 25 bp, Homo sapien
ttgcaattgataacccaagccttct

SEQ ID NO: 2710322 - DNA, 25 bp, Homo sapien
tgcaattgataacccaagccttctt

SEQ ID NO: 2710323 - DNA, 25 bp, Homo sapien
tgttggggcagtagccttgggagct

SEQ ID NO: 2710324 - DNA, 25 bp, Homo sapien
gccttgggagctcttgctaaatgcc

SEQ ID NO: 2710325 - DNA, 25 bp, Homo sapien
tcttgctaaatgcctggccctcttc

SEQ ID NO: 2710326 - DNA, 25 bp, Homo sapien
ggcagtagccttgggagctcttgct

SEQ ID NO: 2710327 - DNA, 25 bp, Homo sapien
catactagttattaaagcaataaat

SEQ ID NO: 2710328 - DNA, 25 bp, Homo sapien
ctagttattaaagcaataaatgaat

SEQ ID NO: 2710329 - DNA, 25 bp, Homo sapien
tactagttattaaagcaataaatga

SEQ ID NO: 2710330 - DNA, 25 bp, Homo sapien
actagttattaaagcaataaatgaa

SEQ ID NO: 2710331 - DNA, 25 bp, Homo sapien
acaaacagcttcataataatcagga

SEQ ID NO: 2710332 - DNA, 25 bp, Homo sapien
cacacagtgcacatctgttgtcata

SEQ ID NO: 2710333 - DNA, 25 bp, Homo sapien
gcttcataataatcaggacagataa

SEQ ID NO: 2710334 - DNA, 25 bp, Homo sapien
gttgtcatatgttttcccatctgtg

SEQ ID NO: 2710335 - DNA, 25 bp, Homo sapien
gattgagatcacaagccagaacccg

SEQ ID NO: 2710336 - DNA, 25 bp, Homo sapien
ttgtagagcctcctagcagctagag

SEQ ID NO: 2710337 - DNA, 25 bp, Homo sapien
tagataacactcagcacccaaggaa

SEQ ID NO: 2710338 - DNA, 25 bp, Homo sapien
tgggattccccacataagacacagt

SEQ ID NO: 2710339 - DNA, 25 bp, Homo sapien
ctgctctggattactgctcttacat

SEQ ID NO: 2710340 - DNA, 25 bp, Homo sapien
gctctggattactgctcttacattc

SEQ ID NO: 2710341 - DNA, 25 bp, Homo sapien
attactgctcttacattccccttca

SEQ ID NO: 2710342 - DNA, 25 bp, Homo sapien
ggattactgctcttacattcccctt

SEQ ID NO: 2710343 - DNA, 25 bp, Homo sapien
taacgcaggctaagtgactgaagtg

SEQ ID NO: 2710344 - DNA, 25 bp, Homo sapien
aacttgctcccaatctcctaggtga

SEQ ID NO: 2710345 - DNA, 25 bp, Homo sapien
caaggctcccacctaagaaggaaga

SEQ ID NO: 2710346 - DNA, 25 bp, Homo sapien
cacttagagcagtaccagctgtgta

SEQ ID NO: 2710347 - DNA, 25 bp, Homo sapien
cagaaattttattgaactcagtccc

SEQ ID NO: 2710348 - DNA, 25 bp, Homo sapien
tcagaaattttattgaactcagtcc

SEQ ID NO: 2710349 - DNA, 25 bp, Homo sapien
tgaagaacagggaaaagaacttgaa

SEQ ID NO: 2710350 - DNA, 25 bp, Homo sapien
ctgaagaacagggaaaagaacttga

SEQ ID NO: 2710351 - DNA, 25 bp, Homo sapien
cagctcagcacacattgcacactta

SEQ ID NO: 2710352 - DNA, 25 bp, Homo sapien
gtcttccatctctaacaaagggccg

SEQ ID NO: 2710353 - DNA, 25 bp, Homo sapien
ttattgccatgcgtcttcccatcag

SEQ ID NO: 2710354 - DNA, 25 bp, Homo sapien
caggaccaagaacaggatcattttc

SEQ ID NO: 2710355 - DNA, 25 bp, Homo sapien
ttagcctcacattactcaggaaggg

SEQ ID NO: 2710356 - DNA, 25 bp, Homo sapien
caggaagggtctctacatatgccca

SEQ ID NO: 2710357 - DNA, 25 bp, Homo sapien
tgcatcatcatcaagtccacctggg

SEQ ID NO: 2710358 - DNA, 25 bp, Homo sapien
tgattctcgggacagcaaccaagtg

SEQ ID NO: 2710359 - DNA, 25 bp, Homo sapien
tgtaaagtatttgtttgctttcatg

SEQ ID NO: 2710360 - DNA, 25 bp, Homo sapien
gtaaagtatttgtttgctttcatgt

SEQ ID NO: 2710361 - DNA, 25 bp, Homo sapien
cttgtaaagtatttgtttgctttca

SEQ ID NO: 2710362 - DNA, 25 bp, Homo sapien
ttgtaaagtatttgtttgctttcat

SEQ ID NO: 2710363 - DNA, 25 bp, Homo sapien
ggtgtgacaccttgattgacaaaca

SEQ ID NO: 2710364 - DNA, 25 bp, Homo sapien
tgacagtcaattagaagctttgttc

SEQ ID NO: 2710365 - DNA, 25 bp, Homo sapien
aaactgaatgggtgtgacaccttga

SEQ ID NO: 2710366 - DNA, 25 bp, Homo sapien
gacaaacagaagattgtcaggaaaa

SEQ ID NO: 2710367 - DNA, 25 bp, Homo sapien
gagacaagcatttccgtcttcaatg

SEQ ID NO: 2710368 - DNA, 25 bp, Homo sapien
gcatttccgtcttcaatgcctgagc

SEQ ID NO: 2710369 - DNA, 25 bp, Homo sapien
agaaagaaagacggcaatagcttat

SEQ ID NO: 2710370 - DNA, 25 bp, Homo sapien
caagcatttccgtcttcaatgcctg

SEQ ID NO: 2710371 - DNA, 25 bp, Homo sapien
tcaccctctcgcttggcattttcag

SEQ ID NO: 2710372 - DNA, 25 bp, Homo sapien
tcgtcgaattctagtttcaccctct

SEQ ID NO: 2710373 - DNA, 25 bp, Homo sapien
ttttcagcatttcgtcgaattctag

SEQ ID NO: 2710374 - DNA, 25 bp, Homo sapien
accctctcgcttggcattttcagct

SEQ ID NO: 2710375 - DNA, 25 bp, Homo sapien
gttgccatgcatcctgccgtcaggg

SEQ ID NO: 2710376 - DNA, 25 bp, Homo sapien
agcacacagggcacatttgttgcca

SEQ ID NO: 2710377 - DNA, 25 bp, Homo sapien
ctggatcactctcccgtgtacaaaa

SEQ ID NO: 2710378 - DNA, 25 bp, Homo sapien
tcagggccacggactggatcactct

SEQ ID NO: 2710379 - DNA, 25 bp, Homo sapien
gttttcctctgaaaaacgctgcttg

SEQ ID NO: 2710380 - DNA, 25 bp, Homo sapien
gcttgacacatggaacacaagttgc

SEQ ID NO: 2710381 - DNA, 25 bp, Homo sapien
ttttcccatctggaccacgaatagg

SEQ ID NO: 2710382 - DNA, 25 bp, Homo sapien
cacaagttgccatgcattttcccat

SEQ ID NO: 2710383 - DNA, 25 bp, Homo sapien
cacgaatagggtcattttctctggt

SEQ ID NO: 2710384 - DNA, 25 bp, Homo sapien
ttgtttctagctcgtgcttcagcct

SEQ ID NO: 2710385 - DNA, 25 bp, Homo sapien
tgcatatgaggttgcttttccagat

SEQ ID NO: 2710386 - DNA, 25 bp, Homo sapien
tatgaggttgcttttccagattctc

SEQ ID NO: 2710387 - DNA, 25 bp, Homo sapien
tctcttttgtttctagctcgtgctt

SEQ ID NO: 2710388 - DNA, 25 bp, Homo sapien
ggcaaaatctcaccctttaggctct

SEQ ID NO: 2710389 - DNA, 25 bp, Homo sapien
tgttcaaattatagcaccaaatagg

SEQ ID NO: 2710390 - DNA, 25 bp, Homo sapien
taattcatctcaataccatccccag

SEQ ID NO: 2710391 - DNA, 25 bp, Homo sapien
ccatccccagattgaagagttaaga

SEQ ID NO: 2710392 - DNA, 25 bp, Homo sapien
tggagcaggtgttgccatgcacttt

SEQ ID NO: 2710393 - DNA, 25 bp, Homo sapien
cacaagctttcgatattcactgcaa

SEQ ID NO: 2710394 - DNA, 25 bp, Homo sapien
catctgggccctggataggatcgtt

SEQ ID NO: 2710395 - DNA, 25 bp, Homo sapien
tggataggatcgttctctctggtgc

SEQ ID NO: 2710396 - DNA, 25 bp, Homo sapien
caaaggaagctgtactcttagattg

SEQ ID NO: 2710397 - DNA, 25 bp, Homo sapien
ctcaaaggaagctgtactcttagat

SEQ ID NO: 2710398 - DNA, 25 bp, Homo sapien
gctgtactcttagattgtcttttgt

SEQ ID NO: 2710399 - DNA, 25 bp, Homo sapien
ggaagctgtactcttagattgtctt

SEQ ID NO: 2710400 - DNA, 25 bp, Homo sapien
attgaggcaggaagttgaaagtgtt

SEQ ID NO: 2710401 - DNA, 25 bp, Homo sapien
gggtcattctctctggtgcaaaaaa

SEQ ID NO: 2710402 - DNA, 25 bp, Homo sapien
gatttgcggtattcactacacaact

SEQ ID NO: 2710403 - DNA, 25 bp, Homo sapien
tctctggtgcaaaaaagccgtccgt

SEQ ID NO: 2710404 - DNA, 25 bp, Homo sapien
ttttcctggatttgcggtattcact

SEQ ID NO: 2710405 - DNA, 25 bp, Homo sapien
ttctcttttagcctttgctcttgct

SEQ ID NO: 2710406 - DNA, 25 bp, Homo sapien
tggtcccgaaattcactgcagattt

SEQ ID NO: 2710407 - DNA, 25 bp, Homo sapien
ttggtcccgaaattcactgcagatt

SEQ ID NO: 2710408 - DNA, 25 bp, Homo sapien
ggtcccgaaattcactgcagatttc

SEQ ID NO: 2710409 - DNA, 25 bp, Homo sapien
gacaggattatgctccctggtgcat

SEQ ID NO: 2710410 - DNA, 25 bp, Homo sapien
tctgggccacggacaggattatgct

SEQ ID NO: 2710411 - DNA, 25 bp, Homo sapien
gtgcatataagtgttccattcctca

SEQ ID NO: 2710412 - DNA, 25 bp, Homo sapien
gctccctggtgcatataagtgttcc

SEQ ID NO: 2710413 - DNA, 25 bp, Homo sapien
ctcttaactttttcagcctcgactt

SEQ ID NO: 2710414 - DNA, 25 bp, Homo sapien
ctgaactgcttctctcttaactttt

SEQ ID NO: 2710415 - DNA, 25 bp, Homo sapien
ttctctcttaactttttcagcctcg

SEQ ID NO: 2710416 - DNA, 25 bp, Homo sapien
tctcttaactttttcagcctcgact

SEQ ID NO: 2710417 - DNA, 25 bp, Homo sapien
tacaggggagtcgtccattcctcac

SEQ ID NO: 2710418 - DNA, 25 bp, Homo sapien
gcaggtgttgccgtggattttccca

SEQ ID NO: 2710419 - DNA, 25 bp, Homo sapien
taatgacgatattcactgcacagct

SEQ ID NO: 2710420 - DNA, 25 bp, Homo sapien
tcaataggatcattctctctggtac

SEQ ID NO: 2710421 - DNA, 25 bp, Homo sapien
ttgctctgggttcagctctttcttt

SEQ ID NO: 2710422 - DNA, 25 bp, Homo sapien
ctcttttgacttttgctctgggttc

SEQ ID NO: 2710423 - DNA, 25 bp, Homo sapien
ttttgacttttgctctgggttcagc

SEQ ID NO: 2710424 - DNA, 25 bp, Homo sapien
gacttttgctctgggttcagctctt

SEQ ID NO: 2710425 - DNA, 25 bp, Homo sapien
gtctccgaaattcatcgcatgtctc

SEQ ID NO: 2710426 - DNA, 25 bp, Homo sapien
aaaagtctccgaaattcatcgcatg

SEQ ID NO: 2710427 - DNA, 25 bp, Homo sapien
ttgcaaaagtctccgaaattcatcg

SEQ ID NO: 2710428 - DNA, 25 bp, Homo sapien
ccattttgcaaaagtctccgaaatt

SEQ ID NO: 2710429 - DNA, 25 bp, Homo sapien
ggcacacttgttgccatgggtcttg

SEQ ID NO: 2710430 - DNA, 25 bp, Homo sapien
cacacttgttgccatgggtcttgcc

SEQ ID NO: 2710431 - DNA, 25 bp, Homo sapien
tggcacacttgttgccatgggtctt

SEQ ID NO: 2710432 - DNA, 25 bp, Homo sapien
acatggcacacttgttgccatgggt

SEQ ID NO: 2710433 - DNA, 25 bp, Homo sapien
accaccactggaaccatgtcctgca

SEQ ID NO: 2710434 - DNA, 25 bp, Homo sapien
gtcctgcagcatttctctgatcttc

SEQ ID NO: 2710435 - DNA, 25 bp, Homo sapien
ccactggaaccatgtcctgcagcat

SEQ ID NO: 2710436 - DNA, 25 bp, Homo sapien
tccaccaccactggaaccatgtcct

SEQ ID NO: 2710437 - DNA, 25 bp, Homo sapien
catttgttcccgatactcagcacat

SEQ ID NO: 2710438 - DNA, 25 bp, Homo sapien
gttcccgatactcagcacattcgtc

SEQ ID NO: 2710439 - DNA, 25 bp, Homo sapien
tgttcccgatactcagcacattcgt

SEQ ID NO: 2710440 - DNA, 25 bp, Homo sapien
tttgttcccgatactcagcacattc

SEQ ID NO: 2710441 - DNA, 25 bp, Homo sapien
aattttgctttacacatggtacact

SEQ ID NO: 2710442 - DNA, 25 bp, Homo sapien
tacactgattgttgtacgatttgcc

SEQ ID NO: 2710443 - DNA, 25 bp, Homo sapien
tgttgtacgatttgccatcagcatc

SEQ ID NO: 2710444 - DNA, 25 bp, Homo sapien
cacatggtacactgattgttgtacg

SEQ ID NO: 2710445 - DNA, 25 bp, Homo sapien
tgatccagtcccatttgatctggag

SEQ ID NO: 2710446 - DNA, 25 bp, Homo sapien
gatctggagcgagaatactcatttt

SEQ ID NO: 2710447 - DNA, 25 bp, Homo sapien
ctgattctgatccagtcccatttga

SEQ ID NO: 2710448 - DNA, 25 bp, Homo sapien
cagtcccatttgatctggagcgaga

SEQ ID NO: 2710449 - DNA, 25 bp, Homo sapien
gatcgccaactgctgactcacagaa

SEQ ID NO: 2710450 - DNA, 25 bp, Homo sapien
ttctatagttttgatcgccaactgc

SEQ ID NO: 2710451 - DNA, 25 bp, Homo sapien
tcatgttgacaccttcttctatagt

SEQ ID NO: 2710452 - DNA, 25 bp, Homo sapien
cttctaagggcaagctctagcttga

SEQ ID NO: 2710453 - DNA, 25 bp, Homo sapien
gagacgtctatgttctaattcctgg

SEQ ID NO: 2710454 - DNA, 25 bp, Homo sapien
caaatatgttgctttacgtggcaag

SEQ ID NO: 2710455 - DNA, 25 bp, Homo sapien
gtaaccttgctgtgataggcaaaat

SEQ ID NO: 2710456 - DNA, 25 bp, Homo sapien
gagtcaggcagccatgtaaccttgc

SEQ ID NO: 2710457 - DNA, 25 bp, Homo sapien
tacacatagtacacttattgccatg

SEQ ID NO: 2710458 - DNA, 25 bp, Homo sapien
ccccggacagggtcactttctcgag

SEQ ID NO: 2710459 - DNA, 25 bp, Homo sapien
atctggaccccggacagggtcactt

SEQ ID NO: 2710460 - DNA, 25 bp, Homo sapien
tcactttctcgagtgcagatgagtt

SEQ ID NO: 2710461 - DNA, 25 bp, Homo sapien
gctcctttctcctgtattgctcctg

SEQ ID NO: 2710462 - DNA, 25 bp, Homo sapien
gatgctctgacacatagcacattta

SEQ ID NO: 2710463 - DNA, 25 bp, Homo sapien
tgccatatgggcctcgaacagggtt

SEQ ID NO: 2710464 - DNA, 25 bp, Homo sapien
ttctctgcatgcttcgaaattcacg

SEQ ID NO: 2710465 - DNA, 25 bp, Homo sapien
tttctctggtgcagataagctttcc

SEQ ID NO: 2710466 - DNA, 25 bp, Homo sapien
tttcaagggttgttactgaattgtc

SEQ ID NO: 2710467 - DNA, 25 bp, Homo sapien
tgcattatttgagggcttgctactt

SEQ ID NO: 2710468 - DNA, 25 bp, Homo sapien
ctttgcattatttgagggcttgcta

SEQ ID NO: 2710469 - DNA, 25 bp, Homo sapien
atttgagggcttgctacttgatttc

SEQ ID NO: 2710470 - DNA, 25 bp, Homo sapien
attatttgagggcttgctacttgat

SEQ ID NO: 2710471 - DNA, 25 bp, Homo sapien
tcccaaagctggagaagaatgcaaa

SEQ ID NO: 2710472 - DNA, 25 bp, Homo sapien
gcaaaattctgaaggtgaaaagtaa

SEQ ID NO: 2710473 - DNA, 25 bp, Homo sapien
tgcaaaattctgaaggtgaaaagta

SEQ ID NO: 2710474 - DNA, 25 bp, Homo sapien
tattattcccaaagctggagaagaa

SEQ ID NO: 2710475 - DNA, 25 bp, Homo sapien
acgcccaggttgtctaaattttgca

SEQ ID NO: 2710476 - DNA, 25 bp, Homo sapien
ggttgtctaaattttgcatcctccg

SEQ ID NO: 2710477 - DNA, 25 bp, Homo sapien
ttgcatcctccgcttcattctgaac

SEQ ID NO: 2710478 - DNA, 25 bp, Homo sapien
agaggccaaggaacgcccaggttgt

SEQ ID NO: 2710479 - DNA, 25 bp, Homo sapien
catgtagcacttgtttgtatagaac

SEQ ID NO: 2710480 - DNA, 25 bp, Homo sapien
aactttccatcagcaccgtgcactg

SEQ ID NO: 2710481 - DNA, 25 bp, Homo sapien
tctctagggcagatgagttcattgt

SEQ ID NO: 2710482 - DNA, 25 bp, Homo sapien
tatagtttcgaaattcactgcactc

SEQ ID NO: 2710483 - DNA, 25 bp, Homo sapien
tcttgagaagctctaacatgggatg

SEQ ID NO: 2710484 - DNA, 25 bp, Homo sapien
tgagaagctctaacatgggatggct

SEQ ID NO: 2710485 - DNA, 25 bp, Homo sapien
tcctcttgagaagctctaacatggg

SEQ ID NO: 2710486 - DNA, 25 bp, Homo sapien
ttgagaagctctaacatgggatggc

SEQ ID NO: 2710487 - DNA, 25 bp, Homo sapien
gtgacacaattacctgcccataaga

SEQ ID NO: 2710488 - DNA, 25 bp, Homo sapien
aaatctagaatgataggcatgccag

SEQ ID NO: 2710489 - DNA, 25 bp, Homo sapien
catgcttaacgcagtatctgtcaca

SEQ ID NO: 2710490 - DNA, 25 bp, Homo sapien
gcagacgtactttatggcattcaag

SEQ ID NO: 2710491 - DNA, 25 bp, Homo sapien
ggttttcatgacagagcatgcaagg

SEQ ID NO: 2710492 - DNA, 25 bp, Homo sapien
taggtttggccatcgtcaccacaga

SEQ ID NO: 2710493 - DNA, 25 bp, Homo sapien
tggacaaagataacctatcctgggc

SEQ ID NO: 2710494 - DNA, 25 bp, Homo sapien
tatcctgggcaatactcggtagtct

SEQ ID NO: 2710495 - DNA, 25 bp, Homo sapien
tgtactgcggatgtgtgtatttgtt

SEQ ID NO: 2710496 - DNA, 25 bp, Homo sapien
cctgtactgcggatgtgtgtatttg

SEQ ID NO: 2710497 - DNA, 25 bp, Homo sapien
ctgtactgcggatgtgtgtatttgt

SEQ ID NO: 2710498 - DNA, 25 bp, Homo sapien
aatcaaagaaatccatagatcctgc

SEQ ID NO: 2710499 - DNA, 25 bp, Homo sapien
caaagaaatccatagatcctgcatt

SEQ ID NO: 2710500 - DNA, 25 bp, Homo sapien
ttaatcaaagaaatccatagatcct

SEQ ID NO: 2710501 - DNA, 25 bp, Homo sapien
tcaaagaaatccatagatcctgcat

SEQ ID NO: 2710502 - DNA, 25 bp, Homo sapien
tctatagcaaataagacaagctccg

SEQ ID NO: 2710503 - DNA, 25 bp, Homo sapien
actgaaaatcagtgagtccattccc

SEQ ID NO: 2710504 - DNA, 25 bp, Homo sapien
tattttttccctcatggctttcaac

SEQ ID NO: 2710505 - DNA, 25 bp, Homo sapien
gtccattcccaaaagctctgtattg

SEQ ID NO: 2710506 - DNA, 25 bp, Homo sapien
cagacttggtggagatgtctttata

SEQ ID NO: 2710507 - DNA, 25 bp, Homo sapien
gcattgtaatcaggacattttgagg

SEQ ID NO: 2710508 - DNA, 25 bp, Homo sapien
cattgtaatcaggacattttgaggg

SEQ ID NO: 2710509 - DNA, 25 bp, Homo sapien
ttgagggctcagacttggtggagat

SEQ ID NO: 2710510 - DNA, 25 bp, Homo sapien
tatctattatccagatagtgacaaa

SEQ ID NO: 2710511 - DNA, 25 bp, Homo sapien
tctattatccagatagtgacaaaga

SEQ ID NO: 2710512 - DNA, 25 bp, Homo sapien
atctattatccagatagtgacaaag

SEQ ID NO: 2710513 - DNA, 25 bp, Homo sapien
ctattatccagatagtgacaaagaa

SEQ ID NO: 2710514 - DNA, 25 bp, Homo sapien
ctttgtatagctgttggctgatggg

SEQ ID NO: 2710515 - DNA, 25 bp, Homo sapien
tctcttctagacagtccttctcagc

SEQ ID NO: 2710516 - DNA, 25 bp, Homo sapien
atgggaacccatatctccccacctc

SEQ ID NO: 2710517 - DNA, 25 bp, Homo sapien
tgtatagctgttggctgatgggaac

SEQ ID NO: 2710518 - DNA, 25 bp, Homo sapien
gcagcactgcgttgcctaatacggt

SEQ ID NO: 2710519 - DNA, 25 bp, Homo sapien
aagtaagtccgtcccatcaggctag

SEQ ID NO: 2710520 - DNA, 25 bp, Homo sapien
gagtgttttcagaactagcccagaa

SEQ ID NO: 2710521 - DNA, 25 bp, Homo sapien
gatttcccacgtccattagctcatg

SEQ ID NO: 2710522 - DNA, 25 bp, Homo sapien
gaatgcagcataagggataatttat

SEQ ID NO: 2710523 - DNA, 25 bp, Homo sapien
tgtaacatagaaaagaatgcagcat

SEQ ID NO: 2710524 - DNA, 25 bp, Homo sapien
taatgtaacatagaaaagaatgcag

SEQ ID NO: 2710525 - DNA, 25 bp, Homo sapien
tcttaatgtaacatagaaaagaatg

SEQ ID NO: 2710526 - DNA, 25 bp, Homo sapien
ttctggatttcctataagtgaacat

SEQ ID NO: 2710527 - DNA, 25 bp, Homo sapien
taaaatctcatatgtcatgggcact

SEQ ID NO: 2710528 - DNA, 25 bp, Homo sapien
tgaacccatcctatacatcctgaaa

SEQ ID NO: 2710529 - DNA, 25 bp, Homo sapien
atgacataacaaaacaccttctcag

SEQ ID NO: 2710530 - DNA, 25 bp, Homo sapien
tagaagtgcaaagctaaatccccat

SEQ ID NO: 2710531 - DNA, 25 bp, Homo sapien
aacaaattgcacagttagaagtgca

SEQ ID NO: 2710532 - DNA, 25 bp, Homo sapien
tttgtttgatcaccagaagagagcg

SEQ ID NO: 2710533 - DNA, 25 bp, Homo sapien
cagttgaagaggagcagttggagaa

SEQ ID NO: 2710534 - DNA, 25 bp, Homo sapien
gaagttttctgagttgaaattcttg

SEQ ID NO: 2710535 - DNA, 25 bp, Homo sapien
catgaagttttctgagttgaaattc

SEQ ID NO: 2710536 - DNA, 25 bp, Homo sapien
ttttctgagttgaaattcttgatct

SEQ ID NO: 2710537 - DNA, 25 bp, Homo sapien
ttcatgaagttttctgagttgaaat

SEQ ID NO: 2710538 - DNA, 25 bp, Homo sapien
agataaaggacaaaagtgagaatac

SEQ ID NO: 2710539 - DNA, 25 bp, Homo sapien
tcaagataaaggacaaaagtgagaa

SEQ ID NO: 2710540 - DNA, 25 bp, Homo sapien
caagataaaggacaaaagtgagaat

SEQ ID NO: 2710541 - DNA, 25 bp, Homo sapien
gaagataacaccaaatgtatcaaga

SEQ ID NO: 2710542 - DNA, 25 bp, Homo sapien
cttaataattccacgtggtggccac

SEQ ID NO: 2710543 - DNA, 25 bp, Homo sapien
ttaataattccacgtggtggccacc

SEQ ID NO: 2710544 - DNA, 25 bp, Homo sapien
ctcaacacacagaatgcagggatta

SEQ ID NO: 2710545 - DNA, 25 bp, Homo sapien
gggttgaccgttccattgtaccagc

SEQ ID NO: 2710546 - DNA, 25 bp, Homo sapien
tgccgcagatgggttgatataagcc

SEQ ID NO: 2710547 - DNA, 25 bp, Homo sapien
gtttactttctcatatggacatttc

SEQ ID NO: 2710548 - DNA, 25 bp, Homo sapien
aaacctgattcttccatgagatttc

SEQ ID NO: 2710549 - DNA, 25 bp, Homo sapien
tagcttttgataagactctgattct

SEQ ID NO: 2710550 - DNA, 25 bp, Homo sapien
gttcttggtcgtttctggctgtgcc

SEQ ID NO: 2710551 - DNA, 25 bp, Homo sapien
gctggcagtggcatatagcttttga

SEQ ID NO: 2710552 - DNA, 25 bp, Homo sapien
tggctgtgccctctgataggctctt

SEQ ID NO: 2710553 - DNA, 25 bp, Homo sapien
gggaatctctatattcttatctgtt

SEQ ID NO: 2710554 - DNA, 25 bp, Homo sapien
tgggaatctctatattcttatctgt

SEQ ID NO: 2710555 - DNA, 25 bp, Homo sapien
gaatctctatattcttatctgtttc

SEQ ID NO: 2710556 - DNA, 25 bp, Homo sapien
ttgggaatctctatattcttatctg

SEQ ID NO: 2710557 - DNA, 25 bp, Homo sapien
taatggaatcttgggtgtaacttgg

SEQ ID NO: 2710558 - DNA, 25 bp, Homo sapien
gtgtaacttggatttttagagtcca

SEQ ID NO: 2710559 - DNA, 25 bp, Homo sapien
gtctgtggtccaagtgagtaaccac

SEQ ID NO: 2710560 - DNA, 25 bp, Homo sapien
taaccacaggataatggaatcttgg

SEQ ID NO: 2710561 - DNA, 25 bp, Homo sapien
ttcagaccacatgagtcctatgcag

SEQ ID NO: 2710562 - DNA, 25 bp, Homo sapien
gctgaggttctctgtcaagacaatt

SEQ ID NO: 2710563 - DNA, 25 bp, Homo sapien
acaattatgtgtgtcgcacctcaga

SEQ ID NO: 2710564 - DNA, 25 bp, Homo sapien
tgtcagttagctcactcagatcaag

SEQ ID NO: 2710565 - DNA, 25 bp, Homo sapien
agagaggagcagaaacatgcctgac

SEQ ID NO: 2710566 - DNA, 25 bp, Homo sapien
gagaggagcagaaacatgcctgaca

SEQ ID NO: 2710567 - DNA, 25 bp, Homo sapien
gcagaaacatgcctgacagtttcat

SEQ ID NO: 2710568 - DNA, 25 bp, Homo sapien
aggagcagaaacatgcctgacagtt

SEQ ID NO: 2710569 - DNA, 25 bp, Homo sapien
gccacagtgtgggttagattcccga

SEQ ID NO: 2710570 - DNA, 25 bp, Homo sapien
gattcccgagtgcagtagaccttgg

SEQ ID NO: 2710571 - DNA, 25 bp, Homo sapien
actatggccttacagaaggcacatt

SEQ ID NO: 2710572 - DNA, 25 bp, Homo sapien
cacatttattgccatatgtctggcc

SEQ ID NO: 2710573 - DNA, 25 bp, Homo sapien
tttccaggatgctttaggctaatct

SEQ ID NO: 2710574 - DNA, 25 bp, Homo sapien
ttccaggatgctttaggctaatctt

SEQ ID NO: 2710575 - DNA, 25 bp, Homo sapien
caggatgctttaggctaatctttcc

SEQ ID NO: 2710576 - DNA, 25 bp, Homo sapien
ccaggatgctttaggctaatctttc

SEQ ID NO: 2710577 - DNA, 25 bp, Homo sapien
aatccaccagcaaaagtataagcag

SEQ ID NO: 2710578 - DNA, 25 bp, Homo sapien
cctcaagacccaggcagagtaggta

SEQ ID NO: 2710579 - DNA, 25 bp, Homo sapien
tgcaaaagctggcaagtcaccaaga

SEQ ID NO: 2710580 - DNA, 25 bp, Homo sapien
tttatgaattaaaggaatccaccag

SEQ ID NO: 2710581 - DNA, 25 bp, Homo sapien
ttgtcaggtgaacctactccttcaa

SEQ ID NO: 2710582 - DNA, 25 bp, Homo sapien
ctagttgtcaggtgaacctactcct

SEQ ID NO: 2710583 - DNA, 25 bp, Homo sapien
tagttgtcaggtgaacctactcctt

SEQ ID NO: 2710584 - DNA, 25 bp, Homo sapien
gttgtcaggtgaacctactccttca

SEQ ID NO: 2710585 - DNA, 25 bp, Homo sapien
ggtggaggaatggaccgagcagaga

SEQ ID NO: 2710586 - DNA, 25 bp, Homo sapien
gggtggaggaatggaccgagcagag

SEQ ID NO: 2710587 - DNA, 25 bp, Homo sapien
ggaatggaccgagcagagatggtca

SEQ ID NO: 2710588 - DNA, 25 bp, Homo sapien
gtggaggaatggaccgagcagagat

SEQ ID NO: 2710589 - DNA, 25 bp, Homo sapien
gaagagaaagaaaatgaaagccctc

SEQ ID NO: 2710590 - DNA, 25 bp, Homo sapien
agagaaagaaaatgaaagccctcat

SEQ ID NO: 2710591 - DNA, 25 bp, Homo sapien
ctgagaacatggccaggagcatgaa

SEQ ID NO: 2710592 - DNA, 25 bp, Homo sapien
gagaacatggccaggagcatgaaga

SEQ ID NO: 2710593 - DNA, 25 bp, Homo sapien
tcctccagaataagtgcaggttttg

SEQ ID NO: 2710594 - DNA, 25 bp, Homo sapien
aaatccctggtctccctagttggct

SEQ ID NO: 2710595 - DNA, 25 bp, Homo sapien
tgtcctcctagatggttagcttcat

SEQ ID NO: 2710596 - DNA, 25 bp, Homo sapien
tgtccttgaagcctaaacgttcctg

SEQ ID NO: 2710597 - DNA, 25 bp, Homo sapien
ctggcttcccttgatggctagacaa

SEQ ID NO: 2710598 - DNA, 25 bp, Homo sapien
cctctgtttgctagaaggtccttga

SEQ ID NO: 2710599 - DNA, 25 bp, Homo sapien
tgatggctagataaacccagatgcc

SEQ ID NO: 2710600 - DNA, 25 bp, Homo sapien
tgatgaccctagattcccgtgttgg

SEQ ID NO: 2710601 - DNA, 25 bp, Homo sapien
agatttccttgacggctggatgaac

SEQ ID NO: 2710602 - DNA, 25 bp, Homo sapien
tcatagatttccttgacggctggat

SEQ ID NO: 2710603 - DNA, 25 bp, Homo sapien
catagatttccttgacggctggatg

SEQ ID NO: 2710604 - DNA, 25 bp, Homo sapien
tagatttccttgacggctggatgaa

SEQ ID NO: 2710605 - DNA, 25 bp, Homo sapien
tggtggccaaatagttgaatcccag

SEQ ID NO: 2710606 - DNA, 25 bp, Homo sapien
ggtggccaaatagttgaatcccaga

SEQ ID NO: 2710607 - DNA, 25 bp, Homo sapien
gtggccaaatagttgaatcccagaa

SEQ ID NO: 2710608 - DNA, 25 bp, Homo sapien
gaggcagagggcttaaagttagtat

SEQ ID NO: 2710609 - DNA, 25 bp, Homo sapien
tatctgcttaaatgagggtgaaaac

SEQ ID NO: 2710610 - DNA, 25 bp, Homo sapien
tcatagtagtggagcatacagtcag

SEQ ID NO: 2710611 - DNA, 25 bp, Homo sapien
tctctggaagattggacatattaag

SEQ ID NO: 2710612 - DNA, 25 bp, Homo sapien
gcatgagcaagcctaaaaactcgcc

SEQ ID NO: 2710613 - DNA, 25 bp, Homo sapien
taaagtttgcaatatccaagcctcc

SEQ ID NO: 2710614 - DNA, 25 bp, Homo sapien
ttcttctcagaagtcgcacctgttc

SEQ ID NO: 2710615 - DNA, 25 bp, Homo sapien
tgtgtgtgccaaattcaaggtggtc

SEQ ID NO: 2710616 - DNA, 25 bp, Homo sapien
ctgtttctgagtttgatccctctcc

SEQ ID NO: 2710617 - DNA, 25 bp, Homo sapien
tccggaaccaacccctctgatgtgt

SEQ ID NO: 2710618 - DNA, 25 bp, Homo sapien
gagtttgatccctctccggaaccaa

SEQ ID NO: 2710619 - DNA, 25 bp, Homo sapien
ggaaccaacccctctgatgtgtcct

SEQ ID NO: 2710620 - DNA, 25 bp, Homo sapien
ctgtagccaaggacgtacagcagtg

SEQ ID NO: 2710621 - DNA, 25 bp, Homo sapien
tagccaaggacgtacagcagtggag

SEQ ID NO: 2710622 - DNA, 25 bp, Homo sapien
ccaaggacgtacagcagtggaggct

SEQ ID NO: 2710623 - DNA, 25 bp, Homo sapien
tgtagccaaggacgtacagcagtgg

SEQ ID NO: 2710624 - DNA, 25 bp, Homo sapien
tgaggtggctgaatatgggcctgct

SEQ ID NO: 2710625 - DNA, 25 bp, Homo sapien
tccaggagtctgtcacaactagcct

SEQ ID NO: 2710626 - DNA, 25 bp, Homo sapien
tgaatatgggcctgctcttgtcact

SEQ ID NO: 2710627 - DNA, 25 bp, Homo sapien
tgttccaggagtctgtcacaactag

SEQ ID NO: 2710628 - DNA, 25 bp, Homo sapien
catgtgtcaaagtagagcataccag

SEQ ID NO: 2710629 - DNA, 25 bp, Homo sapien
aaatataatcttgtggggaaaggca

SEQ ID NO: 2710630 - DNA, 25 bp, Homo sapien
gatctcatataagactcttctttga

SEQ ID NO: 2710631 - DNA, 25 bp, Homo sapien
ggaaaggcagccatttgatctcata

SEQ ID NO: 2710632 - DNA, 25 bp, Homo sapien
ggccacctagtgaagtcacgtttat

SEQ ID NO: 2710633 - DNA, 25 bp, Homo sapien
cttaggccacctagtgaagtcacgt

SEQ ID NO: 2710634 - DNA, 25 bp, Homo sapien
taggccacctagtgaagtcacgttt

SEQ ID NO: 2710635 - DNA, 25 bp, Homo sapien
ccacctagtgaagtcacgtttattg

SEQ ID NO: 2710636 - DNA, 25 bp, Homo sapien
tctgcattgtaatcagggtccagtg

SEQ ID NO: 2710637 - DNA, 25 bp, Homo sapien
gggcagtctgcattgtaatcagggt

SEQ ID NO: 2710638 - DNA, 25 bp, Homo sapien
tgtggccatttgaggcacaaacagg

SEQ ID NO: 2710639 - DNA, 25 bp, Homo sapien
cacaaacaggtgctgtcacattggg

SEQ ID NO: 2710640 - DNA, 25 bp, Homo sapien
gcttggagcctagtgggtaatataa

SEQ ID NO: 2710641 - DNA, 25 bp, Homo sapien
cagttggcactgtgtagattgaaca

SEQ ID NO: 2710642 - DNA, 25 bp, Homo sapien
tgtattacatctctaaagacactgc

SEQ ID NO: 2710643 - DNA, 25 bp, Homo sapien
cacttatttggttcaggaattgcaa

SEQ ID NO: 2710644 - DNA, 25 bp, Homo sapien
tccttatcttctaaaagaggtcctg

SEQ ID NO: 2710645 - DNA, 25 bp, Homo sapien
tatcttctaaaagaggtcctgaaaa

SEQ ID NO: 2710646 - DNA, 25 bp, Homo sapien
aagtgaacattggtattgaatgtac

SEQ ID NO: 2710647 - DNA, 25 bp, Homo sapien
gattagtatcataaggaaagtgaac

SEQ ID NO: 2710648 - DNA, 25 bp, Homo sapien
tggttcttgtcagtttgattccttc

SEQ ID NO: 2710649 - DNA, 25 bp, Homo sapien
ttttgttcgacatttaagtacagca

SEQ ID NO: 2710650 - DNA, 25 bp, Homo sapien
gtagttactctggtacccattaatc

SEQ ID NO: 2710651 - DNA, 25 bp, Homo sapien
aaagaataagcaagtgtagttactc

SEQ ID NO: 2710652 - DNA, 25 bp, Homo sapien
gagattgtcactacagctgcatcga

SEQ ID NO: 2710653 - DNA, 25 bp, Homo sapien
tctgagattgtcactacagctgcat

SEQ ID NO: 2710654 - DNA, 25 bp, Homo sapien
tgagattgtcactacagctgcatcg

SEQ ID NO: 2710655 - DNA, 25 bp, Homo sapien
gctctgagattgtcactacagctgc

SEQ ID NO: 2710656 - DNA, 25 bp, Homo sapien
gaaatagaccactgtacagagcaga

SEQ ID NO: 2710657 - DNA, 25 bp, Homo sapien
aaatagaccactgtacagagcagaa

SEQ ID NO: 2710658 - DNA, 25 bp, Homo sapien
tacagaaatagaccactgtacagag

SEQ ID NO: 2710659 - DNA, 25 bp, Homo sapien
cagaaatagaccactgtacagagca

SEQ ID NO: 2710660 - DNA, 25 bp, Homo sapien
ttttttggagacagactagcagctt

SEQ ID NO: 2710661 - DNA, 25 bp, Homo sapien
tttttttggagacagactagcagct

SEQ ID NO: 2710662 - DNA, 25 bp, Homo sapien
tcccataggtgatgtagtcagaacc

SEQ ID NO: 2710663 - DNA, 25 bp, Homo sapien
gctctcggtacacaagtgacattca

SEQ ID NO: 2710664 - DNA, 25 bp, Homo sapien
tggatacttcttgtaaatgctgcag

SEQ ID NO: 2710665 - DNA, 25 bp, Homo sapien
cacaaactggtaggtatgtgatggg

SEQ ID NO: 2710666 - DNA, 25 bp, Homo sapien
aacttccatcgtgaagaaactgaac

SEQ ID NO: 2710667 - DNA, 25 bp, Homo sapien
acttccatcgtgaagaaactgaact

SEQ ID NO: 2710668 - DNA, 25 bp, Homo sapien
tcctttctctctatgtccatggaga

SEQ ID NO: 2710669 - DNA, 25 bp, Homo sapien
ttcctttctctctatgtccatggag

SEQ ID NO: 2710670 - DNA, 25 bp, Homo sapien
cattcctttctctctatgtccatgg

SEQ ID NO: 2710671 - DNA, 25 bp, Homo sapien
ctttctctctatgtccatggagaat

SEQ ID NO: 2710672 - DNA, 25 bp, Homo sapien
gtcaagattactctgaatctggctc

SEQ ID NO: 2710673 - DNA, 25 bp, Homo sapien
ccattcagtcaagattactctgaat

SEQ ID NO: 2710674 - DNA, 25 bp, Homo sapien
ccacccagaacatcagtaaaactga

SEQ ID NO: 2710675 - DNA, 25 bp, Homo sapien
tctgtcagtgaggcatgggtttgta

SEQ ID NO: 2710676 - DNA, 25 bp, Homo sapien
ggtccccacctatgctttctagctt

SEQ ID NO: 2710677 - DNA, 25 bp, Homo sapien
tgttgaaaatcagggtggcataatg

SEQ ID NO: 2710678 - DNA, 25 bp, Homo sapien
tggcatttaatcctaggtccccacc

SEQ ID NO: 2710679 - DNA, 25 bp, Homo sapien
aaaaaattgcaccagtccatcctat

SEQ ID NO: 2710680 - DNA, 25 bp, Homo sapien
gtaggactatggctgttgctctcat

SEQ ID NO: 2710681 - DNA, 25 bp, Homo sapien
cagagccaagagtaggactatggct

SEQ ID NO: 2710682 - DNA, 25 bp, Homo sapien
ccaagagtaggactatggctgttgc

SEQ ID NO: 2710683 - DNA, 25 bp, Homo sapien
agtgtcagagccaagagtaggacta

SEQ ID NO: 2710684 - DNA, 25 bp, Homo sapien
tctgtttcgtctgtttggcacattc

SEQ ID NO: 2710685 - DNA, 25 bp, Homo sapien
catctgtttcgtctgtttggcacat

SEQ ID NO: 2710686 - DNA, 25 bp, Homo sapien
ctgtttcgtctgtttggcacattct

SEQ ID NO: 2710687 - DNA, 25 bp, Homo sapien
atctgtttcgtctgtttggcacatt

SEQ ID NO: 2710688 - DNA, 25 bp, Homo sapien
cataaaagtaggatgggtgtactga

SEQ ID NO: 2710689 - DNA, 25 bp, Homo sapien
ataaaagtaggatgggtgtactgac

SEQ ID NO: 2710690 - DNA, 25 bp, Homo sapien
atcaaatatttccttactgatattg

SEQ ID NO: 2710691 - DNA, 25 bp, Homo sapien
ccatgtgtatatcttaagaatcaga

SEQ ID NO: 2710692 - DNA, 25 bp, Homo sapien
tggactgtccctgatgctttgacca

SEQ ID NO: 2710693 - DNA, 25 bp, Homo sapien
tttccttagagggaagatcagtagc

SEQ ID NO: 2710694 - DNA, 25 bp, Homo sapien
tcaggcactagaataaggatccatg

SEQ ID NO: 2710695 - DNA, 25 bp, Homo sapien
ttgaggctgcaatcttcttatttat

SEQ ID NO: 2710696 - DNA, 25 bp, Homo sapien
agttgaggctgcaatcttcttattt

SEQ ID NO: 2710697 - DNA, 25 bp, Homo sapien
ttctggttatcagaagttgaggctg

SEQ ID NO: 2710698 - DNA, 25 bp, Homo sapien
aaaagtacattttctggttatcaga

SEQ ID NO: 2710699 - DNA, 25 bp, Homo sapien
gacactggtttgcatagaatgcatt

SEQ ID NO: 2710700 - DNA, 25 bp, Homo sapien
taattagaaaaagtcgagtgctgtc

SEQ ID NO: 2710701 - DNA, 25 bp, Homo sapien
ggtgtcctaatagtaagccatgtaa

SEQ ID NO: 2710702 - DNA, 25 bp, Homo sapien
gaatttgataacatctggtggtgtc

SEQ ID NO: 2710703 - DNA, 25 bp, Homo sapien
ccttatcctgttcctaggtttaatg

SEQ ID NO: 2710704 - DNA, 25 bp, Homo sapien
atttaaacccaagcattatcctctg

SEQ ID NO: 2710705 - DNA, 25 bp, Homo sapien
ctgggaattcaaccttatcctgttc

SEQ ID NO: 2710706 - DNA, 25 bp, Homo sapien
taatgttgaccttaggcagggggta

SEQ ID NO: 2710707 - DNA, 25 bp, Homo sapien
tgtgaagaagcatcgaagcgcggca

SEQ ID NO: 2710708 - DNA, 25 bp, Homo sapien
cactgagtctgatacgtcggaacca

SEQ ID NO: 2710709 - DNA, 25 bp, Homo sapien
aagcgcggcagccatgttcagcgtg

SEQ ID NO: 2710710 - DNA, 25 bp, Homo sapien
tttcacctgacactaaagcgccatg

SEQ ID NO: 2710711 - DNA, 25 bp, Homo sapien
ttccgccgccgctcgcatatttccg

SEQ ID NO: 2710712 - DNA, 25 bp, Homo sapien
gccgccgctcgcatatttccggagt

SEQ ID NO: 2710713 - DNA, 25 bp, Homo sapien
gctcgcatatttccggagtgttgtc

SEQ ID NO: 2710714 - DNA, 25 bp, Homo sapien
catatttccggagtgttgtcatccg

SEQ ID NO: 2710715 - DNA, 25 bp, Homo sapien
gggacgctacagacacttccccggc

SEQ ID NO: 2710716 - DNA, 25 bp, Homo sapien
gagggacgctacagacacttccccg

SEQ ID NO: 2710717 - DNA, 25 bp, Homo sapien
agggacgctacagacacttccccgg

SEQ ID NO: 2710718 - DNA, 25 bp, Homo sapien
caggcccactcagccgccgcctcac

SEQ ID NO: 2710719 - DNA, 25 bp, Homo sapien
cgctcccggtccccaggcccactca

SEQ ID NO: 2710720 - DNA, 25 bp, Homo sapien
gtccccaggcccactcagccgccgc

SEQ ID NO: 2710721 - DNA, 25 bp, Homo sapien
ccccaggcccactcagccgccgcct

SEQ ID NO: 2710722 - DNA, 25 bp, Homo sapien
tcattgcacaggaaccttcctaagt

SEQ ID NO: 2710723 - DNA, 25 bp, Homo sapien
ttcctaagtgaccagttgcccttgg

SEQ ID NO: 2710724 - DNA, 25 bp, Homo sapien
accttcctaagtgaccagttgccct

SEQ ID NO: 2710725 - DNA, 25 bp, Homo sapien
caggaaccttcctaagtgaccagtt

SEQ ID NO: 2710726 - DNA, 25 bp, Homo sapien
taatagcaactttggaacaaaaatc

SEQ ID NO: 2710727 - DNA, 25 bp, Homo sapien
ccttccctgggaaaatcatggcttt

SEQ ID NO: 2710728 - DNA, 25 bp, Homo sapien
caaagtaaaccatcaagttaatagc

SEQ ID NO: 2710729 - DNA, 25 bp, Homo sapien
cagtgacctaatccaacgtcttcct

SEQ ID NO: 2710730 - DNA, 25 bp, Homo sapien
tgccactaaacaccctgccttcaac

SEQ ID NO: 2710731 - DNA, 25 bp, Homo sapien
aaactcagtaatgcagagaacgtac

SEQ ID NO: 2710732 - DNA, 25 bp, Homo sapien
gaagaggaaccaaagaaagtgagga

SEQ ID NO: 2710733 - DNA, 25 bp, Homo sapien
ccatcactagccttgtgtttttttc

SEQ ID NO: 2710734 - DNA, 25 bp, Homo sapien
cagtatcaacgagaaaatcttccct

SEQ ID NO: 2710735 - DNA, 25 bp, Homo sapien
tctccagtatcaacgagaaaatctt

SEQ ID NO: 2710736 - DNA, 25 bp, Homo sapien
tccagtatcaacgagaaaatcttcc

SEQ ID NO: 2710737 - DNA, 25 bp, Homo sapien
agtctccagtatcaacgagaaaatc

SEQ ID NO: 2710738 - DNA, 25 bp, Homo sapien
tggcaaagtacttcatgtgaaagtt

SEQ ID NO: 2710739 - DNA, 25 bp, Homo sapien
gattcatatagtcctttgtttcatc

SEQ ID NO: 2710740 - DNA, 25 bp, Homo sapien
gttgattcatatagtcctttgtttc

SEQ ID NO: 2710741 - DNA, 25 bp, Homo sapien
tacttcatgtgaaagttgattcata

SEQ ID NO: 2710742 - DNA, 25 bp, Homo sapien
ctctataacttagattataagcaga

SEQ ID NO: 2710743 - DNA, 25 bp, Homo sapien
tagattataagcagaatttttcaga

SEQ ID NO: 2710744 - DNA, 25 bp, Homo sapien
tgctagccataacttaatttactct

SEQ ID NO: 2710745 - DNA, 25 bp, Homo sapien
tccaatgtatttgcctaggttaaaa

SEQ ID NO: 2710746 - DNA, 25 bp, Homo sapien
ctgttgaatatttagcagatccatt

SEQ ID NO: 2710747 - DNA, 25 bp, Homo sapien
tctacaactctcacaactcgcagat

SEQ ID NO: 2710748 - DNA, 25 bp, Homo sapien
gatatagggtcactgcttcctttag

SEQ ID NO: 2710749 - DNA, 25 bp, Homo sapien
tttagcttccgggaaagacattcca

SEQ ID NO: 2710750 - DNA, 25 bp, Homo sapien
tagcttccgggaaagacattccata

SEQ ID NO: 2710751 - DNA, 25 bp, Homo sapien
tggaatgctaaaagcctcatggccc

SEQ ID NO: 2710752 - DNA, 25 bp, Homo sapien
taagtttgggcatgcctgcaaagct

SEQ ID NO: 2710753 - DNA, 25 bp, Homo sapien
ctgcaaagcttctaggactcctgga

SEQ ID NO: 2710754 - DNA, 25 bp, Homo sapien
tcaaggtatcgagggtgaaggccat

SEQ ID NO: 2710755 - DNA, 25 bp, Homo sapien
gctccattacgattacgaaatttcc

SEQ ID NO: 2710756 - DNA, 25 bp, Homo sapien
ggaattggaaaagctccattacgat

SEQ ID NO: 2710757 - DNA, 25 bp, Homo sapien
ggctcctataggaattttcagttta

SEQ ID NO: 2710758 - DNA, 25 bp, Homo sapien
gggcatatatgtccaaatggattct

SEQ ID NO: 2710759 - DNA, 25 bp, Homo sapien
ggagctctgctagcaagaataacta

SEQ ID NO: 2710760 - DNA, 25 bp, Homo sapien
gaagtgaggtacagattgagatgta

SEQ ID NO: 2710761 - DNA, 25 bp, Homo sapien
cacacattgtatagcaacaaatggg

SEQ ID NO: 2710762 - DNA, 25 bp, Homo sapien
aaaattgcagtacttgaatggtcag

SEQ ID NO: 2710763 - DNA, 25 bp, Homo sapien
tggaagatagccaaacacagaactt

SEQ ID NO: 2710764 - DNA, 25 bp, Homo sapien
caggagtggcttaatactaggaatc

SEQ ID NO: 2710765 - DNA, 25 bp, Homo sapien
taggaatcatatccacagaggacca

SEQ ID NO: 2710766 - DNA, 25 bp, Homo sapien
taatttgatgcatgggatccaggag

SEQ ID NO: 2710767 - DNA, 25 bp, Homo sapien
tttgcttataagttcaagagtctat

SEQ ID NO: 2710768 - DNA, 25 bp, Homo sapien
tattttgcttataagttcaagagtc

SEQ ID NO: 2710769 - DNA, 25 bp, Homo sapien
ttttgcttataagttcaagagtcta

SEQ ID NO: 2710770 - DNA, 25 bp, Homo sapien
gcttataagttcaagagtctatttt

SEQ ID NO: 2710771 - DNA, 25 bp, Homo sapien
tcttaagctgatacaaaggaagtct

SEQ ID NO: 2710772 - DNA, 25 bp, Homo sapien
cagttcctcatgacgaaagttctta

SEQ ID NO: 2710773 - DNA, 25 bp, Homo sapien
taaaggtgccttagcattgggatac

SEQ ID NO: 2710774 - DNA, 25 bp, Homo sapien
ggtttagtgagtcttacccacttca

SEQ ID NO: 2710775 - DNA, 25 bp, Homo sapien
acaagatgaatatgttataagacat

SEQ ID NO: 2710776 - DNA, 25 bp, Homo sapien
aaatgtagctagagtttgcttcagg

SEQ ID NO: 2710777 - DNA, 25 bp, Homo sapien
tatttacaaatgtagctagagtttg

SEQ ID NO: 2710778 - DNA, 25 bp, Homo sapien
ttagaataacttatgtttaattcca

SEQ ID NO: 2710779 - DNA, 25 bp, Homo sapien
gctaagcctgttactaaagggacat

SEQ ID NO: 2710780 - DNA, 25 bp, Homo sapien
catgttggataagacctccaaggaa

SEQ ID NO: 2710781 - DNA, 25 bp, Homo sapien
ctccaaggaaaggaactcgaaccat

SEQ ID NO: 2710782 - DNA, 25 bp, Homo sapien
ccaagtttcgggcagaggctaagcc

SEQ ID NO: 2710783 - DNA, 25 bp, Homo sapien
tcaagagcatttttgcaagctccca

SEQ ID NO: 2710784 - DNA, 25 bp, Homo sapien
gctcccagaacaatagtgtgcaaat

SEQ ID NO: 2710785 - DNA, 25 bp, Homo sapien
cagcagtaatgatgaggtaaccaag

SEQ ID NO: 2710786 - DNA, 25 bp, Homo sapien
gaggtaaccaagatctacttcaaga

SEQ ID NO: 2710787 - DNA, 25 bp, Homo sapien
taaaacaaaaaccatcagaatcaaa

SEQ ID NO: 2710788 - DNA, 25 bp, Homo sapien
aataaagacagagaacatatcagag

SEQ ID NO: 2710789 - DNA, 25 bp, Homo sapien
tgtgaataaagacagagaacatatc

SEQ ID NO: 2710790 - DNA, 25 bp, Homo sapien
aaagacagagaacatatcagagtaa

SEQ ID NO: 2710791 - DNA, 25 bp, Homo sapien
aggctggatccgaacttcatgtaac

SEQ ID NO: 2710792 - DNA, 25 bp, Homo sapien
ttagggcagaaaagacaccatcttt

SEQ ID NO: 2710793 - DNA, 25 bp, Homo sapien
cagaaaagacaccatctttggttag

SEQ ID NO: 2710794 - DNA, 25 bp, Homo sapien
ctttggttagggaaggctggatccg

SEQ ID NO: 2710795 - DNA, 25 bp, Homo sapien
cctagatgaagggtttcaaactggg

SEQ ID NO: 2710796 - DNA, 25 bp, Homo sapien
tatcctagatgaagggtttcaaact

SEQ ID NO: 2710797 - DNA, 25 bp, Homo sapien
catatcctagatgaagggtttcaaa

SEQ ID NO: 2710798 - DNA, 25 bp, Homo sapien
tacatatcctagatgaagggtttca

SEQ ID NO: 2710799 - DNA, 25 bp, Homo sapien
aaagacatggcacaacccaattcag

SEQ ID NO: 2710800 - DNA, 25 bp, Homo sapien
caagacgtgagagcacctaagattt

SEQ ID NO: 2710801 - DNA, 25 bp, Homo sapien
tacagtaattctaggaattaaaatg

SEQ ID NO: 2710802 - DNA, 25 bp, Homo sapien
ccaattcagatttcagtttgtcaag

SEQ ID NO: 2710803 - DNA, 25 bp, Homo sapien
taagatagggtaaaccttgaactga

SEQ ID NO: 2710804 - DNA, 25 bp, Homo sapien
aaccttgaactgaccctgtttcctg

SEQ ID NO: 2710805 - DNA, 25 bp, Homo sapien
cttgaactgaccctgtttcctgggc

SEQ ID NO: 2710806 - DNA, 25 bp, Homo sapien
tttcctgggcactatctgaataaat

SEQ ID NO: 2710807 - DNA, 25 bp, Homo sapien
tatcatctgcttatcattgggttca

SEQ ID NO: 2710808 - DNA, 25 bp, Homo sapien
caactttgtatcttaccagtcagta

SEQ ID NO: 2710809 - DNA, 25 bp, Homo sapien
tcttaagtgttagggagtgttacca

SEQ ID NO: 2710810 - DNA, 25 bp, Homo sapien
ccagtcagtataaaaagtctctacc

SEQ ID NO: 2710811 - DNA, 25 bp, Homo sapien
gatccaattgtatgggttgtgtaga

SEQ ID NO: 2710812 - DNA, 25 bp, Homo sapien
tacttcaccagatccgcattagcca

SEQ ID NO: 2710813 - DNA, 25 bp, Homo sapien
tccctatatcagtgatgataccagg

SEQ ID NO: 2710814 - DNA, 25 bp, Homo sapien
tacaggaaaaaacttcattgactgc

SEQ ID NO: 2710815 - DNA, 25 bp, Homo sapien
tggccaaaagagtccagcttcaaag

SEQ ID NO: 2710816 - DNA, 25 bp, Homo sapien
aaccaatcgagtccatcttgagtgg

SEQ ID NO: 2710817 - DNA, 25 bp, Homo sapien
gcttcaaagcatggcaccgtactag

SEQ ID NO: 2710818 - DNA, 25 bp, Homo sapien
ggttcacgaaacatctgatccagtg

SEQ ID NO: 2710819 - DNA, 25 bp, Homo sapien
cttcaacagtgggaatgtaaccatt

SEQ ID NO: 2710820 - DNA, 25 bp, Homo sapien
tcaacagtgggaatgtaaccattaa

SEQ ID NO: 2710821 - DNA, 25 bp, Homo sapien
tgcttcaacagtgggaatgtaacca

SEQ ID NO: 2710822 - DNA, 25 bp, Homo sapien
aacagtgggaatgtaaccattaata

SEQ ID NO: 2710823 - DNA, 25 bp, Homo sapien
cagatcttgccgaaagtcattctcc

SEQ ID NO: 2710824 - DNA, 25 bp, Homo sapien
cattctcctcgtctgagtcatctgg

SEQ ID NO: 2710825 - DNA, 25 bp, Homo sapien
tgcactcagaccaactcgagcacaa

SEQ ID NO: 2710826 - DNA, 25 bp, Homo sapien
tggagttctggttgctaacaagagc

SEQ ID NO: 2710827 - DNA, 25 bp, Homo sapien
gaacagtcccgctgattactaggcc

SEQ ID NO: 2710828 - DNA, 25 bp, Homo sapien
ccgctgattactaggcctgccctga

SEQ ID NO: 2710829 - DNA, 25 bp, Homo sapien
ccctaagaactgaacagtcccgctg

SEQ ID NO: 2710830 - DNA, 25 bp, Homo sapien
aggcaaaactgtggccgccctaaga

SEQ ID NO: 2710831 - DNA, 25 bp, Homo sapien
cttcaacgaaaatatacacaaagta

SEQ ID NO: 2710832 - DNA, 25 bp, Homo sapien
tcaacgaaaatatacacaaagtaaa

SEQ ID NO: 2710833 - DNA, 25 bp, Homo sapien
ttcaacgaaaatatacacaaagtaa

SEQ ID NO: 2710834 - DNA, 25 bp, Homo sapien
ggagtattatttccactctcggcca

SEQ ID NO: 2710835 - DNA, 25 bp, Homo sapien
ctccatcttcttggacgatgtcttc

SEQ ID NO: 2710836 - DNA, 25 bp, Homo sapien
acaggaataattgcctggctgtgag

SEQ ID NO: 2710837 - DNA, 25 bp, Homo sapien
atccacaggaataattgcctggctg

SEQ ID NO: 2710838 - DNA, 25 bp, Homo sapien
tcttcacgttcagagtaacgccgag

SEQ ID NO: 2710839 - DNA, 25 bp, Homo sapien
gccgagtaccgttcttaggaatcca

SEQ ID NO: 2710840 - DNA, 25 bp, Homo sapien
taggaatccagacttcttggagttc

SEQ ID NO: 2710841 - DNA, 25 bp, Homo sapien
ttactacacgctgaagaccactggg

SEQ ID NO: 2710842 - DNA, 25 bp, Homo sapien
aaactgcttcgactggcccatctga

SEQ ID NO: 2710843 - DNA, 25 bp, Homo sapien
gctgcagctgggataaacatccttg

SEQ ID NO: 2710844 - DNA, 25 bp, Homo sapien
tccacttctgtagggctaggctcgg

SEQ ID NO: 2710845 - DNA, 25 bp, Homo sapien
tacctctttcgaagtggagtcttgc

SEQ ID NO: 2710846 - DNA, 25 bp, Homo sapien
catctggggcagacagaactctctg

SEQ ID NO: 2710847 - DNA, 25 bp, Homo sapien
gctcggctggttgaaggacgttcct

SEQ ID NO: 2710848 - DNA, 25 bp, Homo sapien
gttcctcatcagaacacctgctagt

SEQ ID NO: 2710849 - DNA, 25 bp, Homo sapien
ggccattcacaacacaggctcggct

SEQ ID NO: 2710850 - DNA, 25 bp, Homo sapien
cagagtcctaaaggaaaaggcggat

SEQ ID NO: 2710851 - DNA, 25 bp, Homo sapien
catcatgtgctgggcctgaagaccc

SEQ ID NO: 2710852 - DNA, 25 bp, Homo sapien
ctcccattagtcctctcatcatgtg

SEQ ID NO: 2710853 - DNA, 25 bp, Homo sapien
ccccttgtggcagagtcctaaagga

SEQ ID NO: 2710854 - DNA, 25 bp, Homo sapien
gactcagataccagcagtacatggg

SEQ ID NO: 2710855 - DNA, 25 bp, Homo sapien
gggcctccgagggtagtcttcatta

SEQ ID NO: 2710856 - DNA, 25 bp, Homo sapien
gcacgtcacaactctcaggctggga

SEQ ID NO: 2710857 - DNA, 25 bp, Homo sapien
catgggacagtctgctcctggccct

SEQ ID NO: 2710858 - DNA, 25 bp, Homo sapien
cctggcaaatcttacttgaagcaaa

SEQ ID NO: 2710859 - DNA, 25 bp, Homo sapien
gaaacaagttcatgcctttctgcag

SEQ ID NO: 2710860 - DNA, 25 bp, Homo sapien
atggcagcagagttcatctactggg

SEQ ID NO: 2710861 - DNA, 25 bp, Homo sapien
gctaatcctaggagcattgtcatac

SEQ ID NO: 2710862 - DNA, 25 bp, Homo sapien
tcaccatatggcagaaccactgttt

SEQ ID NO: 2710863 - DNA, 25 bp, Homo sapien
gattttaaaactgagggctacttga

SEQ ID NO: 2710864 - DNA, 25 bp, Homo sapien
actaaggtctcaaatgtatctcatg

SEQ ID NO: 2710865 - DNA, 25 bp, Homo sapien
ggtaactagcacataactaaggtct

SEQ ID NO: 2710866 - DNA, 25 bp, Homo sapien
cactgaatggtaaagttatatttta

SEQ ID NO: 2710867 - DNA, 25 bp, Homo sapien
actgaattatacactgtacactgaa

SEQ ID NO: 2710868 - DNA, 25 bp, Homo sapien
gcctaacaagatgaatgtatttagt

SEQ ID NO: 2710869 - DNA, 25 bp, Homo sapien
actgtacactgaatggtaaagttat

SEQ ID NO: 2710870 - DNA, 25 bp, Homo sapien
ggaaaggcctttcgcagcataaaaa

SEQ ID NO: 2710871 - DNA, 25 bp, Homo sapien
tatctgaaccaagtgtaggaaaggc

SEQ ID NO: 2710872 - DNA, 25 bp, Homo sapien
gaagatgcgcacatttatctgaacc

SEQ ID NO: 2710873 - DNA, 25 bp, Homo sapien
tcatagcacgagaatggacatccat

SEQ ID NO: 2710874 - DNA, 25 bp, Homo sapien
caaacataacagtccctaaacagga

SEQ ID NO: 2710875 - DNA, 25 bp, Homo sapien
ccaagcttagtttttggaacttgat

SEQ ID NO: 2710876 - DNA, 25 bp, Homo sapien
tcaatggctaatatgaaggctctgt

SEQ ID NO: 2710877 - DNA, 25 bp, Homo sapien
caaatgcatggctagtcaaggaaat

SEQ ID NO: 2710878 - DNA, 25 bp, Homo sapien
tggagttccaacaaaacatgaagac

SEQ ID NO: 2710879 - DNA, 25 bp, Homo sapien
taggccttctcccacagtatcctga

SEQ ID NO: 2710880 - DNA, 25 bp, Homo sapien
tgaccacacaacacaacgtaggcct

SEQ ID NO: 2710881 - DNA, 25 bp, Homo sapien
ctaaaggcagcacatttcacctgat

SEQ ID NO: 2710882 - DNA, 25 bp, Homo sapien
ggttcccagtggaatacagttacat

SEQ ID NO: 2710883 - DNA, 25 bp, Homo sapien
tcccaaatctacaatttggttccca

SEQ ID NO: 2710884 - DNA, 25 bp, Homo sapien
aagcacattcaatcacatacgtatg

SEQ ID NO: 2710885 - DNA, 25 bp, Homo sapien
tgaacataatcaaggtaattcccaa

SEQ ID NO: 2710886 - DNA, 25 bp, Homo sapien
tccgcttccgtttcatggcgtgacg

SEQ ID NO: 2710887 - DNA, 25 bp, Homo sapien
catggcgtgacgtggctttgttttg

SEQ ID NO: 2710888 - DNA, 25 bp, Homo sapien
gatttatctgctgtccgcttccgtt

SEQ ID NO: 2710889 - DNA, 25 bp, Homo sapien
caggatcacttgtactagtggattt

SEQ ID NO: 2710890 - DNA, 25 bp, Homo sapien
gattccacaattggtcatagtgact

SEQ ID NO: 2710891 - DNA, 25 bp, Homo sapien
tttggacagtcttttagcactagat

SEQ ID NO: 2710892 - DNA, 25 bp, Homo sapien
tagtgactccaacaagattcttgga

SEQ ID NO: 2710893 - DNA, 25 bp, Homo sapien
tagcactagatctgtgattccacaa

SEQ ID NO: 2710894 - DNA, 25 bp, Homo sapien
tgaccaagccagcaatcaagctgag

SEQ ID NO: 2710895 - DNA, 25 bp, Homo sapien
gttatacacttgaggcccaaccgct

SEQ ID NO: 2710896 - DNA, 25 bp, Homo sapien
tgttatttactctgccagatcaggc

SEQ ID NO: 2710897 - DNA, 25 bp, Homo sapien
tgatactcttgtataatatgggccc

SEQ ID NO: 2710898 - DNA, 25 bp, Homo sapien
aaatgctttatgagttaagcaaaat

SEQ ID NO: 2710899 - DNA, 25 bp, Homo sapien
caaaattatgcacggcttacagatt

SEQ ID NO: 2710900 - DNA, 25 bp, Homo sapien
ttatgcacggcttacagattgaaaa

SEQ ID NO: 2710901 - DNA, 25 bp, Homo sapien
aagcaaaattatgcacggcttacag

SEQ ID NO: 2710902 - DNA, 25 bp, Homo sapien
cactaaaggttcaggtgattgttag

SEQ ID NO: 2710903 - DNA, 25 bp, Homo sapien
gggcaaggccctcaacattcaggca

SEQ ID NO: 2710904 - DNA, 25 bp, Homo sapien
taacccagggcaaggccctcaacat

SEQ ID NO: 2710905 - DNA, 25 bp, Homo sapien
tagccaagttgtgaacaccaaggaa

SEQ ID NO: 2710906 - DNA, 25 bp, Homo sapien
atacaatgatgtcgaaattaggcca

SEQ ID NO: 2710907 - DNA, 25 bp, Homo sapien
tacaatgatgtcgaaattaggccaa

SEQ ID NO: 2710908 - DNA, 25 bp, Homo sapien
gatacaatgatgtcgaaattaggcc

SEQ ID NO: 2710909 - DNA, 25 bp, Homo sapien
gagatacaatgatgtcgaaattagg

SEQ ID NO: 2710910 - DNA, 25 bp, Homo sapien
ttcaaccaggtccaacttgagagag

SEQ ID NO: 2710911 - DNA, 25 bp, Homo sapien
tttaaacactgagagagactcccgc

SEQ ID NO: 2710912 - DNA, 25 bp, Homo sapien
cgctagatgacagtaaggatccagt

SEQ ID NO: 2710913 - DNA, 25 bp, Homo sapien
tcagtccaatctagtagccatgtgg

SEQ ID NO: 2710914 - DNA, 25 bp, Homo sapien
gtcaaatcggtttacaattggtgca

SEQ ID NO: 2710915 - DNA, 25 bp, Homo sapien
tgttttagtaccctgcacctggtag

SEQ ID NO: 2710916 - DNA, 25 bp, Homo sapien
tcttgcactgtgcatagtcaaatcg

SEQ ID NO: 2710917 - DNA, 25 bp, Homo sapien
taaatgttttagtaccctgcacctg

SEQ ID NO: 2710918 - DNA, 25 bp, Homo sapien
gcgtaggtatatgatgcggtttctc

SEQ ID NO: 2710919 - DNA, 25 bp, Homo sapien
gctgcattgggcgtaggtatatgat

SEQ ID NO: 2710920 - DNA, 25 bp, Homo sapien
tcgggtggcattcttagtatctggt

SEQ ID NO: 2710921 - DNA, 25 bp, Homo sapien
tatgatgcggtttctctcgggtggc

SEQ ID NO: 2710922 - DNA, 25 bp, Homo sapien
ggtagggaccactaaatagcttctg

SEQ ID NO: 2710923 - DNA, 25 bp, Homo sapien
tgattgatgtttgctatagtgtcca

SEQ ID NO: 2710924 - DNA, 25 bp, Homo sapien
tagtgtccatccagctgcgaatgcg

SEQ ID NO: 2710925 - DNA, 25 bp, Homo sapien
tgcgcaccttattccggacattggg

SEQ ID NO: 2710926 - DNA, 25 bp, Homo sapien
ggaaccatcaaaactgtttcggaca

SEQ ID NO: 2710927 - DNA, 25 bp, Homo sapien
ctggaaataattagtgtcgggtagg

SEQ ID NO: 2710928 - DNA, 25 bp, Homo sapien
gattctaccgaacatctcaaacaaa

SEQ ID NO: 2710929 - DNA, 25 bp, Homo sapien
tagtgtcgggtaggaaggaaccatc

SEQ ID NO: 2710930 - DNA, 25 bp, Homo sapien
cttcagggaagaattcatatttaat

SEQ ID NO: 2710931 - DNA, 25 bp, Homo sapien
ttaagtcttcttcacttcgagtggc

SEQ ID NO: 2710932 - DNA, 25 bp, Homo sapien
agtcttcttcacttcgagtggcttc

SEQ ID NO: 2710933 - DNA, 25 bp, Homo sapien
ctttaagtcttcttcacttcgagtg

SEQ ID NO: 2710934 - DNA, 25 bp, Homo sapien
tcgtatcgagcgaagctgttgggct

SEQ ID NO: 2710935 - DNA, 25 bp, Homo sapien
caagggaagtcagaaatcatggaat

SEQ ID NO: 2710936 - DNA, 25 bp, Homo sapien
catggaatatggagctccatccaca

SEQ ID NO: 2710937 - DNA, 25 bp, Homo sapien
gcagctcgtaatgacctcagccaag

SEQ ID NO: 2710938 - DNA, 25 bp, Homo sapien
catctgacgcatctctgaaatttcc

SEQ ID NO: 2710939 - DNA, 25 bp, Homo sapien
ctccattgacatcacaatagtggat

SEQ ID NO: 2710940 - DNA, 25 bp, Homo sapien
gataaaaattgccactactcgctga

SEQ ID NO: 2710941 - DNA, 25 bp, Homo sapien
tactcgctgaaatacacccttcttc

SEQ ID NO: 2710942 - DNA, 25 bp, Homo sapien
ctatatagcaaaccgagccaggacc

SEQ ID NO: 2710943 - DNA, 25 bp, Homo sapien
ctttgtacagaaacatagagccttg

SEQ ID NO: 2710944 - DNA, 25 bp, Homo sapien
tggatggccctacttgctttctgac

SEQ ID NO: 2710945 - DNA, 25 bp, Homo sapien
aagtccctgtggagcactctggcag

SEQ ID NO: 2710946 - DNA, 25 bp, Homo sapien
gtccactttcaaatgatactataca

SEQ ID NO: 2710947 - DNA, 25 bp, Homo sapien
gccagagatgtagaatggacccagt

SEQ ID NO: 2710948 - DNA, 25 bp, Homo sapien
tatagaaagttgtgatgaagcggac

SEQ ID NO: 2710949 - DNA, 25 bp, Homo sapien
tggacccagtgagagttattcaggc

SEQ ID NO: 2710950 - DNA, 25 bp, Homo sapien
gaacttgggctttgacattacatgg

SEQ ID NO: 2710951 - DNA, 25 bp, Homo sapien
ccagggcaaagttcgcaggaaggta

SEQ ID NO: 2710952 - DNA, 25 bp, Homo sapien
ctaggagcaccccttgggtattaat

SEQ ID NO: 2710953 - DNA, 25 bp, Homo sapien
atattctaggagcaccccttgggta

SEQ ID NO: 2710954 - DNA, 25 bp, Homo sapien
gagtaagtttctatgttgataaaga

SEQ ID NO: 2710955 - DNA, 25 bp, Homo sapien
acagaggcagcacgtgcactgggtc

SEQ ID NO: 2710956 - DNA, 25 bp, Homo sapien
tgagcacattggtgggaggagtaca

SEQ ID NO: 2710957 - DNA, 25 bp, Homo sapien
cacagaggcagcacgtgcactgggt

SEQ ID NO: 2710958 - DNA, 25 bp, Homo sapien
gaggcagcacgtgcactgggtccat

SEQ ID NO: 2710959 - DNA, 25 bp, Homo sapien
gaggctttccgtccgccagtgcagg

SEQ ID NO: 2710960 - DNA, 25 bp, Homo sapien
ttctcttcacctgaggctttccgtc

SEQ ID NO: 2710961 - DNA, 25 bp, Homo sapien
agctgctgcttgtgcgcgactgcac

SEQ ID NO: 2710962 - DNA, 25 bp, Homo sapien
tgcacccggtattctcttcacctga

SEQ ID NO: 2710963 - DNA, 25 bp, Homo sapien
agaagacagccatgcctccgaaaga

SEQ ID NO: 2710964 - DNA, 25 bp, Homo sapien
agccatgcctccgaaagagggccag

SEQ ID NO: 2710965 - DNA, 25 bp, Homo sapien
agacagccatgcctccgaaagaggg

SEQ ID NO: 2710966 - DNA, 25 bp, Homo sapien
ccagaagacagccatgcctccgaaa

SEQ ID NO: 2710967 - DNA, 25 bp, Homo sapien
cccatgagctctctatcctcttgct

SEQ ID NO: 2710968 - DNA, 25 bp, Homo sapien
ccatgagctctctatcctcttgctt

SEQ ID NO: 2710969 - DNA, 25 bp, Homo sapien
catgagctctctatcctcttgcttc

SEQ ID NO: 2710970 - DNA, 25 bp, Homo sapien
ccccatgagctctctatcctcttgc

SEQ ID NO: 2710971 - DNA, 25 bp, Homo sapien
ccatgggagctcctgttaagtttag

SEQ ID NO: 2710972 - DNA, 25 bp, Homo sapien
cccatgggagctcctgttaagttta

SEQ ID NO: 2710973 - DNA, 25 bp, Homo sapien
gcccatgggagctcctgttaagttt

SEQ ID NO: 2710974 - DNA, 25 bp, Homo sapien
cttggactctgatgcttcagtgggc

SEQ ID NO: 2710975 - DNA, 25 bp, Homo sapien
cttccattcgtgcacctctcttgga

SEQ ID NO: 2710976 - DNA, 25 bp, Homo sapien
tggcttgtaatagagacaatctgcc

SEQ ID NO: 2710977 - DNA, 25 bp, Homo sapien
cattgggcaacccagacacaacatc

SEQ ID NO: 2710978 - DNA, 25 bp, Homo sapien
cctgtccctggaatggaacttgagc

SEQ ID NO: 2710979 - DNA, 25 bp, Homo sapien
acttgagcatcagtgaccaagggag

SEQ ID NO: 2710980 - DNA, 25 bp, Homo sapien
tcctggtgagcacaggttttgaagg

SEQ ID NO: 2710981 - DNA, 25 bp, Homo sapien
agatgttgctgcgtgctcctggtga

SEQ ID NO: 2710982 - DNA, 25 bp, Homo sapien
tttccagcgtgggatcactgtaggc

SEQ ID NO: 2710983 - DNA, 25 bp, Homo sapien
tggactcaggacacccggctttgcg

SEQ ID NO: 2710984 - DNA, 25 bp, Homo sapien
gtggccgctcgaatctgccagggca

SEQ ID NO: 2710985 - DNA, 25 bp, Homo sapien
tgggctggctggttgtatacaacgt

SEQ ID NO: 2710986 - DNA, 25 bp, Homo sapien
caagagcctctaggtgtatgaatgg

SEQ ID NO: 2710987 - DNA, 25 bp, Homo sapien
tcctacttacatgacaagagcctct

SEQ ID NO: 2710988 - DNA, 25 bp, Homo sapien
tttaagggatcttcaggggccagag

SEQ ID NO: 2710989 - DNA, 25 bp, Homo sapien
agggcttcctttcctacttacatga

SEQ ID NO: 2710990 - DNA, 25 bp, Homo sapien
tgaccatctccactgcctgcagtgc

SEQ ID NO: 2710991 - DNA, 25 bp, Homo sapien
ctgcagtgctgcctggagatgaatc

SEQ ID NO: 2710992 - DNA, 25 bp, Homo sapien
tgtccctcttttctctgaccatctc

SEQ ID NO: 2710993 - DNA, 25 bp, Homo sapien
gcagtgctgcctggagatgaatcct

SEQ ID NO: 2710994 - DNA, 25 bp, Homo sapien
tggaggccaagaatcaaagcatgga

SEQ ID NO: 2710995 - DNA, 25 bp, Homo sapien
gcaaatgaagaatcttcaaacctgg

SEQ ID NO: 2710996 - DNA, 25 bp, Homo sapien
ctttgcaaatgaagaatcttcaaac

SEQ ID NO: 2710997 - DNA, 25 bp, Homo sapien
gagacaatttgttgccttcctcttg

SEQ ID NO: 2710998 - DNA, 25 bp, Homo sapien
tctggagctgtttaacatggactgg

SEQ ID NO: 2710999 - DNA, 25 bp, Homo sapien
attgggagaattaaacaagcaactg

SEQ ID NO: 2711000 - DNA, 25 bp, Homo sapien
aatgtgggttctattaagtgctggc

SEQ ID NO: 2711001 - DNA, 25 bp, Homo sapien
catggactggatcccagctttgcca

SEQ ID NO: 2711002 - DNA, 25 bp, Homo sapien
gatcctcttgtgttgcagcaatgtc

SEQ ID NO: 2711003 - DNA, 25 bp, Homo sapien
tctgcaatcaacctgtggttgaagc

SEQ ID NO: 2711004 - DNA, 25 bp, Homo sapien
gaagctcccatttgtaacctctgag

SEQ ID NO: 2711005 - DNA, 25 bp, Homo sapien
cagattgacacttgcagattgacac

SEQ ID NO: 2711006 - DNA, 25 bp, Homo sapien
aacgacatgaggtgatgcatgccca

SEQ ID NO: 2711007 - DNA, 25 bp, Homo sapien
tatttaggagccactttggcagtgc

SEQ ID NO: 2711008 - DNA, 25 bp, Homo sapien
gcatcctgcatactccgggctattt

SEQ ID NO: 2711009 - DNA, 25 bp, Homo sapien
tggcagtgctcttgtgagaacgaca

SEQ ID NO: 2711010 - DNA, 25 bp, Homo sapien
ttaggttcttgggtattgcccgcat

SEQ ID NO: 2711011 - DNA, 25 bp, Homo sapien
tgcctccagttaggttcttgggtat

SEQ ID NO: 2711012 - DNA, 25 bp, Homo sapien
tccagttaggttcttgggtattgcc

SEQ ID NO: 2711013 - DNA, 25 bp, Homo sapien
ctgtcttgcctccagttaggttctt

SEQ ID NO: 2711014 - DNA, 25 bp, Homo sapien
ctggagctactgagggtttgtggtt

SEQ ID NO: 2711015 - DNA, 25 bp, Homo sapien
ttccttgtagatatctcttgttttc

SEQ ID NO: 2711016 - DNA, 25 bp, Homo sapien
tctgtagttccctcatcgctttcca

SEQ ID NO: 2711017 - DNA, 25 bp, Homo sapien
tttccacgtaattaaggcatcttcc

SEQ ID NO: 2711018 - DNA, 25 bp, Homo sapien
tactgctgggcatcattggtcctcc

SEQ ID NO: 2711019 - DNA, 25 bp, Homo sapien
tccagatgggctcggagatggtccc

SEQ ID NO: 2711020 - DNA, 25 bp, Homo sapien
ggctagggtcctgatgaaagctgaa

SEQ ID NO: 2711021 - DNA, 25 bp, Homo sapien
tgaggcaaccaccttcagcagtttc

SEQ ID NO: 2711022 - DNA, 25 bp, Homo sapien
tggtagaactgccccacaatttctc

SEQ ID NO: 2711023 - DNA, 25 bp, Homo sapien
tctggtagaactgccccacaatttc

SEQ ID NO: 2711024 - DNA, 25 bp, Homo sapien
agcgttccgtgtaaataaacttctg

SEQ ID NO: 2711025 - DNA, 25 bp, Homo sapien
gtagaactgccccacaatttctcct

SEQ ID NO: 2711026 - DNA, 25 bp, Homo sapien
gtatgtcacatgtaatccaaaaact

SEQ ID NO: 2711027 - DNA, 25 bp, Homo sapien
tccaggtggccaagtgggatctgcc

SEQ ID NO: 2711028 - DNA, 25 bp, Homo sapien
tttgagagttcccaaagtatgtcac

SEQ ID NO: 2711029 - DNA, 25 bp, Homo sapien
ttttcctgatgggtagttgtcagat

SEQ ID NO: 2711030 - DNA, 25 bp, Homo sapien
aatctgtgtcacagtcttccctgaa

SEQ ID NO: 2711031 - DNA, 25 bp, Homo sapien
cagcttcttccagatctgtgctcat

SEQ ID NO: 2711032 - DNA, 25 bp, Homo sapien
ccttcagcttcttccagatctgtgc

SEQ ID NO: 2711033 - DNA, 25 bp, Homo sapien
ctcctcgtcccttcagcttcttcca

SEQ ID NO: 2711034 - DNA, 25 bp, Homo sapien
ttcagcttcttccagatctgtgctc

SEQ ID NO: 2711035 - DNA, 25 bp, Homo sapien
ttgggtccagaattcttcatacctg

SEQ ID NO: 2711036 - DNA, 25 bp, Homo sapien
tatgtcataagcagcgtgagcaaca

SEQ ID NO: 2711037 - DNA, 25 bp, Homo sapien
cacactcattcgataatggaggaca

SEQ ID NO: 2711038 - DNA, 25 bp, Homo sapien
gacatgccagttgaagttgggtcca

SEQ ID NO: 2711039 - DNA, 25 bp, Homo sapien
tcgacccctcctccccctgctgtca

SEQ ID NO: 2711040 - DNA, 25 bp, Homo sapien
cgacccctcctccccctgctgtcat

SEQ ID NO: 2711041 - DNA, 25 bp, Homo sapien
ccctcgacccctcctccccctgctg

SEQ ID NO: 2711042 - DNA, 25 bp, Homo sapien
ctcgacccctcctccccctgctgtc

SEQ ID NO: 2711043 - DNA, 25 bp, Homo sapien
cagaacaagccccatcgctcctctg

SEQ ID NO: 2711044 - DNA, 25 bp, Homo sapien
aacaagccccatcgctcctctgtcc

SEQ ID NO: 2711045 - DNA, 25 bp, Homo sapien
acacagaacaagccccatcgctcct

SEQ ID NO: 2711046 - DNA, 25 bp, Homo sapien
caagccccatcgctcctctgtccca

SEQ ID NO: 2711047 - DNA, 25 bp, Homo sapien
cagccacgggagcaaagcagagtgt

SEQ ID NO: 2711048 - DNA, 25 bp, Homo sapien
gagactgggtaaacagagcagccac

SEQ ID NO: 2711049 - DNA, 25 bp, Homo sapien
tactggttactggaaaatggaggag

SEQ ID NO: 2711050 - DNA, 25 bp, Homo sapien
ttgaggaggagagacctaaagtact

SEQ ID NO: 2711051 - DNA, 25 bp, Homo sapien
catctggcgtctgtgacttaccaaa

SEQ ID NO: 2711052 - DNA, 25 bp, Homo sapien
tcaaacatttggcaagagcacagga

SEQ ID NO: 2711053 - DNA, 25 bp, Homo sapien
gcacactcgctgtcaagtactttag

SEQ ID NO: 2711054 - DNA, 25 bp, Homo sapien
taggtgccctccttaggaatttgca

SEQ ID NO: 2711055 - DNA, 25 bp, Homo sapien
gagcactgataatgctcccctccca

SEQ ID NO: 2711056 - DNA, 25 bp, Homo sapien
ggtactccgaacttgcctcacccga

SEQ ID NO: 2711057 - DNA, 25 bp, Homo sapien
acatacacccggtaacccagtgtat

SEQ ID NO: 2711058 - DNA, 25 bp, Homo sapien
tgcctcacccgagcactgataatgc

SEQ ID NO: 2711059 - DNA, 25 bp, Homo sapien
gaaagtaaacacacgctggcttgga

SEQ ID NO: 2711060 - DNA, 25 bp, Homo sapien
tccagagcgacacagacacggatgt

SEQ ID NO: 2711061 - DNA, 25 bp, Homo sapien
gcagacatgctcagacttataccga

SEQ ID NO: 2711062 - DNA, 25 bp, Homo sapien
ttcggaaggaaacgagagtgcccac

SEQ ID NO: 2711063 - DNA, 25 bp, Homo sapien
tgccctcgccgtgacgtacgggaac

SEQ ID NO: 2711064 - DNA, 25 bp, Homo sapien
ctggccccagagggctaaagctgga

SEQ ID NO: 2711065 - DNA, 25 bp, Homo sapien
actgcttcccggctaccctggctgg

SEQ ID NO: 2711066 - DNA, 25 bp, Homo sapien
gtacgggaactttcggccaatggca

SEQ ID NO: 2711067 - DNA, 25 bp, Homo sapien
tgaagaagccgcttcgcagtgcgtt

SEQ ID NO: 2711068 - DNA, 25 bp, Homo sapien
gcccgtgctctgaagaagccgcttc

SEQ ID NO: 2711069 - DNA, 25 bp, Homo sapien
ggactcgtcctgcacactcagcttg

SEQ ID NO: 2711070 - DNA, 25 bp, Homo sapien
acactcagcttgtcgggtgctaggg

SEQ ID NO: 2711071 - DNA, 25 bp, Homo sapien
tcagcgggcggacccacggcggggc

SEQ ID NO: 2711072 - DNA, 25 bp, Homo sapien
cgggcggacccacggcggggctctg

SEQ ID NO: 2711073 - DNA, 25 bp, Homo sapien
ggctctgcgggccgcgagcggacgc

SEQ ID NO: 2711074 - DNA, 25 bp, Homo sapien
cggggctctgcgggccgcgagcgga

SEQ ID NO: 2711075 - DNA, 25 bp, Homo sapien
agtctggcaggtgagcgcactggct

SEQ ID NO: 2711076 - DNA, 25 bp, Homo sapien
gtctggcaggtgagcgcactggctg

SEQ ID NO: 2711077 - DNA, 25 bp, Homo sapien
tttcataagaatatgggcggcccca

SEQ ID NO: 2711078 - DNA, 25 bp, Homo sapien
caatcctgaaatctgggctccggca

SEQ ID NO: 2711079 - DNA, 25 bp, Homo sapien
gaagcggccctcagatttgtcaatc

SEQ ID NO: 2711080 - DNA, 25 bp, Homo sapien
caaagtcttccgtgcctgggaggtc

SEQ ID NO: 2711081 - DNA, 25 bp, Homo sapien
ctcccttgtgaatcaatgttatcgc

SEQ ID NO: 2711082 - DNA, 25 bp, Homo sapien
tcaatgttatcgctaggcacagtac

SEQ ID NO: 2711083 - DNA, 25 bp, Homo sapien
gagtcatttgtactacaattcctcc

SEQ ID NO: 2711084 - DNA, 25 bp, Homo sapien
acagcagtgagtcatttgtactaca

SEQ ID NO: 2711085 - DNA, 25 bp, Homo sapien
tagcagactcaggtcctctaggact

SEQ ID NO: 2711086 - DNA, 25 bp, Homo sapien
cctcaagtccaagggtgtaggaagg

SEQ ID NO: 2711087 - DNA, 25 bp, Homo sapien
cagctgaaaggtccgagatactcaa

SEQ ID NO: 2711088 - DNA, 25 bp, Homo sapien
taccccgtgtgagcaaataagagga

SEQ ID NO: 2711089 - DNA, 25 bp, Homo sapien
agactttgctcgggaaaacaactga

SEQ ID NO: 2711090 - DNA, 25 bp, Homo sapien
gactttgctcgggaaaacaactgaa

SEQ ID NO: 2711091 - DNA, 25 bp, Homo sapien
agcactccagtcaaggggttttgga

SEQ ID NO: 2711092 - DNA, 25 bp, Homo sapien
acagcactccagtcaaggggttttg

SEQ ID NO: 2711093 - DNA, 25 bp, Homo sapien
agtgggggaggcaacagcactccag

SEQ ID NO: 2711094 - DNA, 25 bp, Homo sapien
cactccagtcaaggggttttggaga

SEQ ID NO: 2711095 - DNA, 25 bp, Homo sapien
gatagctcggtgctcacccaaacat

SEQ ID NO: 2711096 - DNA, 25 bp, Homo sapien
ttctcctgatagctcggtgctcacc

SEQ ID NO: 2711097 - DNA, 25 bp, Homo sapien
cttctcctgatagctcggtgctcac

SEQ ID NO: 2711098 - DNA, 25 bp, Homo sapien
cctgatagctcggtgctcacccaaa

SEQ ID NO: 2711099 - DNA, 25 bp, Homo sapien
gctttactctgctgtgttcgtttta

SEQ ID NO: 2711100 - DNA, 25 bp, Homo sapien
gagaaagagtgccaggacgtagggc

SEQ ID NO: 2711101 - DNA, 25 bp, Homo sapien
gctgtgttcgttttagagtttcata

SEQ ID NO: 2711102 - DNA, 25 bp, Homo sapien
gccttcccaactttggagctgagaa

SEQ ID NO: 2711103 - DNA, 25 bp, Homo sapien
tgggctatgacagaccccaggtctc

SEQ ID NO: 2711104 - DNA, 25 bp, Homo sapien
tgttccagtgctagccagggacctg

SEQ ID NO: 2711105 - DNA, 25 bp, Homo sapien
aaaagcaatgcagtcagatgtgtgg

SEQ ID NO: 2711106 - DNA, 25 bp, Homo sapien
tgaggttacccagactcttagtggc

SEQ ID NO: 2711107 - DNA, 25 bp, Homo sapien
aaccacatgagctcacccaagcttg

SEQ ID NO: 2711108 - DNA, 25 bp, Homo sapien
ttgtcaacagtaaaagcatcctggg

SEQ ID NO: 2711109 - DNA, 25 bp, Homo sapien
ccacatgagctcacccaagcttggg

SEQ ID NO: 2711110 - DNA, 25 bp, Homo sapien
aagcttggggcttgtcaacagtaaa

SEQ ID NO: 2711111 - DNA, 25 bp, Homo sapien
tcctgtcagtgattggacacaaaca

SEQ ID NO: 2711112 - DNA, 25 bp, Homo sapien
gagacgaatcctagccttcctgcag

SEQ ID NO: 2711113 - DNA, 25 bp, Homo sapien
gaatcaattatgttctagacactgg

SEQ ID NO: 2711114 - DNA, 25 bp, Homo sapien
gatagtggtacatgctttagaggca

SEQ ID NO: 2711115 - DNA, 25 bp, Homo sapien
tattaattagctgaaacttaggaaa

SEQ ID NO: 2711116 - DNA, 25 bp, Homo sapien
cacatacaactgagccacacaggaa

SEQ ID NO: 2711117 - DNA, 25 bp, Homo sapien
cacaggaaaactgcatcattagcaa

SEQ ID NO: 2711118 - DNA, 25 bp, Homo sapien
aactgcatcattagcaatttctata

SEQ ID NO: 2711119 - DNA, 25 bp, Homo sapien
gaaacccttgactttgcccagactc

SEQ ID NO: 2711120 - DNA, 25 bp, Homo sapien
tccttttgcttagttgagttctcac

SEQ ID NO: 2711121 - DNA, 25 bp, Homo sapien
gttctcactagacggcatatccacc

SEQ ID NO: 2711122 - DNA, 25 bp, Homo sapien
tggattcaaacaggagttcccgttc

SEQ ID NO: 2711123 - DNA, 25 bp, Homo sapien
taggcgccagataagcatgaacctg

SEQ ID NO: 2711124 - DNA, 25 bp, Homo sapien
tagcaaggcatctacatgggaagag

SEQ ID NO: 2711125 - DNA, 25 bp, Homo sapien
gagtctctgattcactagcaaggca

SEQ ID NO: 2711126 - DNA, 25 bp, Homo sapien
tctacacaccgagaatgggaatacc

SEQ ID NO: 2711127 - DNA, 25 bp, Homo sapien
aggcatatccggtatgaatttcagc

SEQ ID NO: 2711128 - DNA, 25 bp, Homo sapien
cagccaaaggcatatccggtatgaa

SEQ ID NO: 2711129 - DNA, 25 bp, Homo sapien
agcccctcctactaagacgccaaag

SEQ ID NO: 2711130 - DNA, 25 bp, Homo sapien
cgccaaagcacgcaggtttgtggtg

SEQ ID NO: 2711131 - DNA, 25 bp, Homo sapien
tcagggatagggtgcaggcaggctg

SEQ ID NO: 2711132 - DNA, 25 bp, Homo sapien
atagggtgcaggcaggctggggcca

SEQ ID NO: 2711133 - DNA, 25 bp, Homo sapien
tagggtgcaggcaggctggggccac

SEQ ID NO: 2711134 - DNA, 25 bp, Homo sapien
gggatagggtgcaggcaggctgggg

SEQ ID NO: 2711135 - DNA, 25 bp, Homo sapien
gaagtttccatcctctcaggccgaa

SEQ ID NO: 2711136 - DNA, 25 bp, Homo sapien
tgagttggaaatcctagctccgcct

SEQ ID NO: 2711137 - DNA, 25 bp, Homo sapien
tgggagctgcaatggtgaacacaca

SEQ ID NO: 2711138 - DNA, 25 bp, Homo sapien
tcactcttggcatgagcagaccggg

SEQ ID NO: 2711139 - DNA, 25 bp, Homo sapien
gaggcctctttcgatttgcgttgac

SEQ ID NO: 2711140 - DNA, 25 bp, Homo sapien
gaccacagccctatcaagggagcag

SEQ ID NO: 2711141 - DNA, 25 bp, Homo sapien
catcccaaggtcactattagcagct

SEQ ID NO: 2711142 - DNA, 25 bp, Homo sapien
tttccacctaagtcagcccactggg

SEQ ID NO: 2711143 - DNA, 25 bp, Homo sapien
gaaatggcttatgtcttggatgcac

SEQ ID NO: 2711144 - DNA, 25 bp, Homo sapien
cacctggacggaactaaaacattat

SEQ ID NO: 2711145 - DNA, 25 bp, Homo sapien
tagttaacacatcatacctgtgggc

SEQ ID NO: 2711146 - DNA, 25 bp, Homo sapien
ggtgacccacctatgagctcctaat

SEQ ID NO: 2711147 - DNA, 25 bp, Homo sapien
gagaaatgcagccacgaggaggatc

SEQ ID NO: 2711148 - DNA, 25 bp, Homo sapien
ccactgggcagtatgggttaatgca

SEQ ID NO: 2711149 - DNA, 25 bp, Homo sapien
ttaatgcagccaatccgaacagagc

SEQ ID NO: 2711150 - DNA, 25 bp, Homo sapien
tctgtagatgcaggggttctccact

SEQ ID NO: 2711151 - DNA, 25 bp, Homo sapien
gcttgcctgggatcgcatagccagt

SEQ ID NO: 2711152 - DNA, 25 bp, Homo sapien
gactaaaatctagggctggctccag

SEQ ID NO: 2711153 - DNA, 25 bp, Homo sapien
tcagctaacttaccaacctgggagg

SEQ ID NO: 2711154 - DNA, 25 bp, Homo sapien
gggcttccccgtgttgctgtgtaaa

SEQ ID NO: 2711155 - DNA, 25 bp, Homo sapien
tttcttcaccccgatatcgtagcag

SEQ ID NO: 2711156 - DNA, 25 bp, Homo sapien
tcttcaccccgatatcgtagcagtt

SEQ ID NO: 2711157 - DNA, 25 bp, Homo sapien
caccccgatatcgtagcagttggcc

SEQ ID NO: 2711158 - DNA, 25 bp, Homo sapien
ttcaccccgatatcgtagcagttgg

SEQ ID NO: 2711159 - DNA, 25 bp, Homo sapien
ctgaatttttacaattagaaatgaa

SEQ ID NO: 2711160 - DNA, 25 bp, Homo sapien
tttacaattagaaatgaagtgttta

SEQ ID NO: 2711161 - DNA, 25 bp, Homo sapien
ttagaaatgaagtgtttaatttcag

SEQ ID NO: 2711162 - DNA, 25 bp, Homo sapien
agaaatgaagtgtttaatttcaggt

SEQ ID NO: 2711163 - DNA, 25 bp, Homo sapien
gctggtcttccacatggggaagtgt

SEQ ID NO: 2711164 - DNA, 25 bp, Homo sapien
ccgtaataaggggacgattgtctgc

SEQ ID NO: 2711165 - DNA, 25 bp, Homo sapien
taaggggacgattgtctgctcctcc

SEQ ID NO: 2711166 - DNA, 25 bp, Homo sapien
ggtcttccacatggggaagtgtaga

SEQ ID NO: 2711167 - DNA, 25 bp, Homo sapien
cagttcaatctgagattgcttctct

SEQ ID NO: 2711168 - DNA, 25 bp, Homo sapien
ttcagttcaatctgagattgcttct

SEQ ID NO: 2711169 - DNA, 25 bp, Homo sapien
gttcaatctgagattgcttctcttc

SEQ ID NO: 2711170 - DNA, 25 bp, Homo sapien
ttcaatctgagattgcttctcttct

SEQ ID NO: 2711171 - DNA, 25 bp, Homo sapien
gctgttctgcattctggggttcaat

SEQ ID NO: 2711172 - DNA, 25 bp, Homo sapien
tcaattccacattaagccaggaaca

SEQ ID NO: 2711173 - DNA, 25 bp, Homo sapien
aattccacattaagccaggaacagt

SEQ ID NO: 2711174 - DNA, 25 bp, Homo sapien
ccacattaagccaggaacagtttct

SEQ ID NO: 2711175 - DNA, 25 bp, Homo sapien
aagttatcgctttaattcatatgaa

SEQ ID NO: 2711176 - DNA, 25 bp, Homo sapien
gtttgcttatctcttcaacatctgg

SEQ ID NO: 2711177 - DNA, 25 bp, Homo sapien
caaaaatacacccatgacatgggaa

SEQ ID NO: 2711178 - DNA, 25 bp, Homo sapien
caacatctggcttaatagaggatag

SEQ ID NO: 2711179 - DNA, 25 bp, Homo sapien
gcattcctatcagtaaagtctctat

SEQ ID NO: 2711180 - DNA, 25 bp, Homo sapien
ctaatggtcacagcattcctatcag

SEQ ID NO: 2711181 - DNA, 25 bp, Homo sapien
ggtcacagcattcctatcagtaaag

SEQ ID NO: 2711182 - DNA, 25 bp, Homo sapien
cagcattcctatcagtaaagtctct

SEQ ID NO: 2711183 - DNA, 25 bp, Homo sapien
ggattcttagagaggacggcaggca

SEQ ID NO: 2711184 - DNA, 25 bp, Homo sapien
ggcagctccatttgattggtcttgc

SEQ ID NO: 2711185 - DNA, 25 bp, Homo sapien
gcaggcagctccatttgattggtct

SEQ ID NO: 2711186 - DNA, 25 bp, Homo sapien
ctcccaactgtaggacaagggctgg

SEQ ID NO: 2711187 - DNA, 25 bp, Homo sapien
acaccattgtgaataaatacagaac

SEQ ID NO: 2711188 - DNA, 25 bp, Homo sapien
gcacagaagtgtaaaacgacctcca

SEQ ID NO: 2711189 - DNA, 25 bp, Homo sapien
ctctgggatgttgggcatggctgac

SEQ ID NO: 2711190 - DNA, 25 bp, Homo sapien
catggctgacgtgttggattgtgag

SEQ ID NO: 2711191 - DNA, 25 bp, Homo sapien
ttactggggactgtcacgagattgg

SEQ ID NO: 2711192 - DNA, 25 bp, Homo sapien
acataacttactggggactgtcacg

SEQ ID NO: 2711193 - DNA, 25 bp, Homo sapien
cagggagggaaacataacttactgg

SEQ ID NO: 2711194 - DNA, 25 bp, Homo sapien
gactgtcacgagattgggggctagg

SEQ ID NO: 2711195 - DNA, 25 bp, Homo sapien
tagggcctagccgatatagggctcc

SEQ ID NO: 2711196 - DNA, 25 bp, Homo sapien
ggatctgtcagtgctgccaacacag

SEQ ID NO: 2711197 - DNA, 25 bp, Homo sapien
ttcctgtaagttcccagcaggtctc

SEQ ID NO: 2711198 - DNA, 25 bp, Homo sapien
ctggcagccagaagttggatctgtc

SEQ ID NO: 2711199 - DNA, 25 bp, Homo sapien
taacgatcccctctctatctttaac

SEQ ID NO: 2711200 - DNA, 25 bp, Homo sapien
ctttaatacccgtaagattcttcat

SEQ ID NO: 2711201 - DNA, 25 bp, Homo sapien
gatcccctctctatctttaacttta

SEQ ID NO: 2711202 - DNA, 25 bp, Homo sapien
ctggataataacgatcccctctcta

SEQ ID NO: 2711203 - DNA, 25 bp, Homo sapien
cccaggcccctgacaagtcaccagt

SEQ ID NO: 2711204 - DNA, 25 bp, Homo sapien
cacaggccagctctgacttggtctc

SEQ ID NO: 2711205 - DNA, 25 bp, Homo sapien
caggcccctgacaagtcaccagtca

SEQ ID NO: 2711206 - DNA, 25 bp, Homo sapien
acaggccagctctgacttggtctcc

SEQ ID NO: 2711207 - DNA, 25 bp, Homo sapien
tctcttccaattgtgtttttattca

SEQ ID NO: 2711208 - DNA, 25 bp, Homo sapien
ctcttccaattgtgtttttattcag

SEQ ID NO: 2711209 - DNA, 25 bp, Homo sapien
gtctcttccaattgtgtttttattc

SEQ ID NO: 2711210 - DNA, 25 bp, Homo sapien
cccatcagaatgaaccaggccataa

SEQ ID NO: 2711211 - DNA, 25 bp, Homo sapien
tgggcaaccccacattgaaactggg

SEQ ID NO: 2711212 - DNA, 25 bp, Homo sapien
tgtgataactcctgctaaatggtgg

SEQ ID NO: 2711213 - DNA, 25 bp, Homo sapien
catgaacatcctctacggtaagggc

SEQ ID NO: 2711214 - DNA, 25 bp, Homo sapien
taccagtcaattgagggcctagcta

SEQ ID NO: 2711215 - DNA, 25 bp, Homo sapien
aattgagggcctagctatgaaagga

SEQ ID NO: 2711216 - DNA, 25 bp, Homo sapien
tatttattgtaccagtcaattgagg

SEQ ID NO: 2711217 - DNA, 25 bp, Homo sapien
cagcctctgcgctttaccagccttg

SEQ ID NO: 2711218 - DNA, 25 bp, Homo sapien
atgtctccaatcacaaattaagctg

SEQ ID NO: 2711219 - DNA, 25 bp, Homo sapien
gacatatctgggcaggagatccagc

SEQ ID NO: 2711220 - DNA, 25 bp, Homo sapien
tctccaatcacaaattaagctgttc

SEQ ID NO: 2711221 - DNA, 25 bp, Homo sapien
tcattctccagctgacatatctggg

SEQ ID NO: 2711222 - DNA, 25 bp, Homo sapien
tttactgataagtctgaggccacct

SEQ ID NO: 2711223 - DNA, 25 bp, Homo sapien
gtctgaggccacctatgaatctctc

SEQ ID NO: 2711224 - DNA, 25 bp, Homo sapien
cactttactgataagtctgaggcca

SEQ ID NO: 2711225 - DNA, 25 bp, Homo sapien
ctatgaatctctcagaactctcaag

SEQ ID NO: 2711226 - DNA, 25 bp, Homo sapien
ggcacaacaaggtctggaaacctgg

SEQ ID NO: 2711227 - DNA, 25 bp, Homo sapien
ccaaaggtggctggcacaacaaggt

SEQ ID NO: 2711228 - DNA, 25 bp, Homo sapien
gagggtgccaaaggtggctggcaca

SEQ ID NO: 2711229 - DNA, 25 bp, Homo sapien
aaggtggctggcacaacaaggtctg

SEQ ID NO: 2711230 - DNA, 25 bp, Homo sapien
gaatttcatctggtgtagatgtcat

SEQ ID NO: 2711231 - DNA, 25 bp, Homo sapien
ctcaacacagcagtagagaaggttt

SEQ ID NO: 2711232 - DNA, 25 bp, Homo sapien
tagagaaggtttaaccttgccatca

SEQ ID NO: 2711233 - DNA, 25 bp, Homo sapien
ctggcccagagccttctgaatctca

SEQ ID NO: 2711234 - DNA, 25 bp, Homo sapien
gctttgagtctcatgggctctgctc

SEQ ID NO: 2711235 - DNA, 25 bp, Homo sapien
tgcctccaacttgtggtgtagacat

SEQ ID NO: 2711236 - DNA, 25 bp, Homo sapien
tctgcctccaacttgtggtgtagac

SEQ ID NO: 2711237 - DNA, 25 bp, Homo sapien
ctgcctccaacttgtggtgtagaca

SEQ ID NO: 2711238 - DNA, 25 bp, Homo sapien
ggatgtgggtgaaggagatttgctg

SEQ ID NO: 2711239 - DNA, 25 bp, Homo sapien
tggggctttgcatgaggctgcggga

SEQ ID NO: 2711240 - DNA, 25 bp, Homo sapien
ggggatgtgggtgaaggagatttgc

SEQ ID NO: 2711241 - DNA, 25 bp, Homo sapien
actggggctttgcatgaggctgcgg

SEQ ID NO: 2711242 - DNA, 25 bp, Homo sapien
cagtgtgctctccactgctgtcttt

SEQ ID NO: 2711243 - DNA, 25 bp, Homo sapien
tgtgctctccactgctgtctttctt

SEQ ID NO: 2711244 - DNA, 25 bp, Homo sapien
agtgtgctctccactgctgtctttc

SEQ ID NO: 2711245 - DNA, 25 bp, Homo sapien
gctctccactgctgtctttcttcat

SEQ ID NO: 2711246 - DNA, 25 bp, Homo sapien
tctgatatgcagcatcccccttaac

SEQ ID NO: 2711247 - DNA, 25 bp, Homo sapien
gcagcatcccccttaaccctcctac

SEQ ID NO: 2711248 - DNA, 25 bp, Homo sapien
tgcagcatcccccttaaccctccta

SEQ ID NO: 2711249 - DNA, 25 bp, Homo sapien
ctgatatgcagcatcccccttaacc

SEQ ID NO: 2711250 - DNA, 25 bp, Homo sapien
ttttcccctcccattatgatgcctg

SEQ ID NO: 2711251 - DNA, 25 bp, Homo sapien
ccctcccattatgatgcctgaaact

SEQ ID NO: 2711252 - DNA, 25 bp, Homo sapien
tcccctcccattatgatgcctgaaa

SEQ ID NO: 2711253 - DNA, 25 bp, Homo sapien
atgttttcccctcccattatgatgc

SEQ ID NO: 2711254 - DNA, 25 bp, Homo sapien
ttcattcaggtgaatctgtgttctc

SEQ ID NO: 2711255 - DNA, 25 bp, Homo sapien
agttgggtgtgccagcaaactgcct

SEQ ID NO: 2711256 - DNA, 25 bp, Homo sapien
ttaaatacagccaaacagttggtcc

SEQ ID NO: 2711257 - DNA, 25 bp, Homo sapien
ttggcgcgagctgcagacctgttgt

SEQ ID NO: 2711258 - DNA, 25 bp, Homo sapien
gatgtttaaacaagctttggcgcga

SEQ ID NO: 2711259 - DNA, 25 bp, Homo sapien
ttctcacagccaactatttcccggg

SEQ ID NO: 2711260 - DNA, 25 bp, Homo sapien
aggaaaccatgtgcaaggactccag

SEQ ID NO: 2711261 - DNA, 25 bp, Homo sapien
aaccatgtgcaaggactccagaatg

SEQ ID NO: 2711262 - DNA, 25 bp, Homo sapien
ttcccggggacattgctgaaagctg

SEQ ID NO: 2711263 - DNA, 25 bp, Homo sapien
ctctgagcagccctaaagtgttcct

SEQ ID NO: 2711264 - DNA, 25 bp, Homo sapien
tgagcagccctaaagtgttcctgtg

SEQ ID NO: 2711265 - DNA, 25 bp, Homo sapien
tctgagcagccctaaagtgttcctg

SEQ ID NO: 2711266 - DNA, 25 bp, Homo sapien
agtggccagatgtcattcactgtca

SEQ ID NO: 2711267 - DNA, 25 bp, Homo sapien
ggtcctattgctctcagaactccca

SEQ ID NO: 2711268 - DNA, 25 bp, Homo sapien
ctatctctcccttaggctctggtcc

SEQ ID NO: 2711269 - DNA, 25 bp, Homo sapien
tgttacccctatctctcccttaggc

SEQ ID NO: 2711270 - DNA, 25 bp, Homo sapien
gctctggtcctattgctctcagaac

SEQ ID NO: 2711271 - DNA, 25 bp, Homo sapien
ttcttccctcttgctgtccgggaga

SEQ ID NO: 2711272 - DNA, 25 bp, Homo sapien
ggatcaggtaaagggagctgtgttt

SEQ ID NO: 2711273 - DNA, 25 bp, Homo sapien
gggatcaggtaaagggagctgtgtt

SEQ ID NO: 2711274 - DNA, 25 bp, Homo sapien
gatcaggtaaagggagctgtgtttc

SEQ ID NO: 2711275 - DNA, 25 bp, Homo sapien
ataaagtcccatgtgatgatctgcc

SEQ ID NO: 2711276 - DNA, 25 bp, Homo sapien
tctgttgtgagtatagagtgattca

SEQ ID NO: 2711277 - DNA, 25 bp, Homo sapien
cccatgtgatgatctgccatatttg

SEQ ID NO: 2711278 - DNA, 25 bp, Homo sapien
agtatagagtgattcagggcaggtt

SEQ ID NO: 2711279 - DNA, 25 bp, Homo sapien
cacacacatacgtgaagagcgttgt

SEQ ID NO: 2711280 - DNA, 25 bp, Homo sapien
tctgacttgaacttctgtttggaca

SEQ ID NO: 2711281 - DNA, 25 bp, Homo sapien
cattctatatgtaaaccgcttgcta

SEQ ID NO: 2711282 - DNA, 25 bp, Homo sapien
gagcgttgtttctatccatgttaca

SEQ ID NO: 2711283 - DNA, 25 bp, Homo sapien
ggaagtgtttgctaatgctgtctct

SEQ ID NO: 2711284 - DNA, 25 bp, Homo sapien
ctagcctgtcctggaagtgtttgct

SEQ ID NO: 2711285 - DNA, 25 bp, Homo sapien
accattaggagcaggctggacaaca

SEQ ID NO: 2711286 - DNA, 25 bp, Homo sapien
taccacggggttaggatgcccatga

SEQ ID NO: 2711287 - DNA, 25 bp, Homo sapien
tagatgattcaaataggcagctggg

SEQ ID NO: 2711288 - DNA, 25 bp, Homo sapien
gggtaaatcacatcgcctcaaacat

SEQ ID NO: 2711289 - DNA, 25 bp, Homo sapien
caaggtcattgaactcatgtatggg

SEQ ID NO: 2711290 - DNA, 25 bp, Homo sapien
tgaaaactcacaaagtggacaggtg

SEQ ID NO: 2711291 - DNA, 25 bp, Homo sapien
tgccctcacaagaaccaaactgtgt

SEQ ID NO: 2711292 - DNA, 25 bp, Homo sapien
ttgcatgttccccagtgaggagctg

SEQ ID NO: 2711293 - DNA, 25 bp, Homo sapien
gctgctaggtccaagtgaaatgctg

SEQ ID NO: 2711294 - DNA, 25 bp, Homo sapien
tccaactttatcagagagccaaggg

SEQ ID NO: 2711295 - DNA, 25 bp, Homo sapien
ggaaacattgggtgagcagtgctct

SEQ ID NO: 2711296 - DNA, 25 bp, Homo sapien
tgttagagcagtcatgcttccgtcc

SEQ ID NO: 2711297 - DNA, 25 bp, Homo sapien
tcctttgcaagatctcatgggaggt

SEQ ID NO: 2711298 - DNA, 25 bp, Homo sapien
cagtgtcaactggattcccctgctc

SEQ ID NO: 2711299 - DNA, 25 bp, Homo sapien
accagggtcctttcaccactttgct

SEQ ID NO: 2711300 - DNA, 25 bp, Homo sapien
ccaaatagcctgcaacataggcctg

SEQ ID NO: 2711301 - DNA, 25 bp, Homo sapien
caaatagcctgcaacataggcctgg

SEQ ID NO: 2711302 - DNA, 25 bp, Homo sapien
aaatagcctgcaacataggcctggc

SEQ ID NO: 2711303 - DNA, 25 bp, Homo sapien
ggcaatgtgatcagagagaccccat

SEQ ID NO: 2711304 - DNA, 25 bp, Homo sapien
tcctagtagtcatgggagaacccac

SEQ ID NO: 2711305 - DNA, 25 bp, Homo sapien
tctctgacacatggcctgggatcct

SEQ ID NO: 2711306 - DNA, 25 bp, Homo sapien
gtcaattcatcaggctacccaggag

SEQ ID NO: 2711307 - DNA, 25 bp, Homo sapien
ttctaggtactcaggccttctctca

SEQ ID NO: 2711308 - DNA, 25 bp, Homo sapien
tctctcataccccacatctcatgca

SEQ ID NO: 2711309 - DNA, 25 bp, Homo sapien
tctaggtactcaggccttctctcat

SEQ ID NO: 2711310 - DNA, 25 bp, Homo sapien
tccttctaggtactcaggccttctc

SEQ ID NO: 2711311 - DNA, 25 bp, Homo sapien
tgcaccaatggtagatgcgtatata

SEQ ID NO: 2711312 - DNA, 25 bp, Homo sapien
gaatgtatattctcccgctgttagg

SEQ ID NO: 2711313 - DNA, 25 bp, Homo sapien
tctcgtgtgcagttcaagtccagta

SEQ ID NO: 2711314 - DNA, 25 bp, Homo sapien
taagacttattctgtggcctagcat

SEQ ID NO: 2711315 - DNA, 25 bp, Homo sapien
tcctgcatgacgtctgtcccagaag

SEQ ID NO: 2711316 - DNA, 25 bp, Homo sapien
tacaggcagcgctctatgaaggcca

SEQ ID NO: 2711317 - DNA, 25 bp, Homo sapien
tctgtgatgctcagtatgagggacc

SEQ ID NO: 2711318 - DNA, 25 bp, Homo sapien
catacttggagggtggctacattca

SEQ ID NO: 2711319 - DNA, 25 bp, Homo sapien
gcgggtcgaatggaggcacttcatc

SEQ ID NO: 2711320 - DNA, 25 bp, Homo sapien
ccctctgagcagattgcgggtcgaa

SEQ ID NO: 2711321 - DNA, 25 bp, Homo sapien
taatgcccagattgaccgctgagag

SEQ ID NO: 2711322 - DNA, 25 bp, Homo sapien
gagcatacaactcaaaccggtagag

SEQ ID NO: 2711323 - DNA, 25 bp, Homo sapien
aaaatgcttccaaagatacttctga

SEQ ID NO: 2711324 - DNA, 25 bp, Homo sapien
attttgatgatgtccccagcatctc

SEQ ID NO: 2711325 - DNA, 25 bp, Homo sapien
atgtccccagcatctcaaaattaac

SEQ ID NO: 2711326 - DNA, 25 bp, Homo sapien
acttctgaatttcctctcacagcca

SEQ ID NO: 2711327 - DNA, 25 bp, Homo sapien
cactacaatcttctgaggcaggtaa

SEQ ID NO: 2711328 - DNA, 25 bp, Homo sapien
tgtcctccctcatgtgcgccatgga

SEQ ID NO: 2711329 - DNA, 25 bp, Homo sapien
ggtaagattcaaaccaggccctgat

SEQ ID NO: 2711330 - DNA, 25 bp, Homo sapien
tatttctgtgtgatctgcgacaaga

SEQ ID NO: 2711331 - DNA, 25 bp, Homo sapien
agctcagggaggctggtgatcacct

SEQ ID NO: 2711332 - DNA, 25 bp, Homo sapien
gatcacctcggcttactataaagct

SEQ ID NO: 2711333 - DNA, 25 bp, Homo sapien
tggtcagtgccagtcctgggatgtt

SEQ ID NO: 2711334 - DNA, 25 bp, Homo sapien
tgacattccgttacttgggagagga

SEQ ID NO: 2711335 - DNA, 25 bp, Homo sapien
ctggtgactcagcataaggtctcca

SEQ ID NO: 2711336 - DNA, 25 bp, Homo sapien
cagcataaggtctccaggacggaag

SEQ ID NO: 2711337 - DNA, 25 bp, Homo sapien
gactcagcataaggtctccaggacg

SEQ ID NO: 2711338 - DNA, 25 bp, Homo sapien
caggacggaagagcctgcacaccat

SEQ ID NO: 2711339 - DNA, 25 bp, Homo sapien
tgactgactaagcttgtatgagtca

SEQ ID NO: 2711340 - DNA, 25 bp, Homo sapien
agggctgattcatgactgactaagc

SEQ ID NO: 2711341 - DNA, 25 bp, Homo sapien
atgactgactaagcttgtatgagtc

SEQ ID NO: 2711342 - DNA, 25 bp, Homo sapien
gactgactaagcttgtatgagtcat

SEQ ID NO: 2711343 - DNA, 25 bp, Homo sapien
aaaatcaaagtggctcccaacatct

SEQ ID NO: 2711344 - DNA, 25 bp, Homo sapien
caaaatcaaagtggctcccaacatc

SEQ ID NO: 2711345 - DNA, 25 bp, Homo sapien
agatctgaccacattctcggttggg

SEQ ID NO: 2711346 - DNA, 25 bp, Homo sapien
ccacagggagtggtgctttgtatga

SEQ ID NO: 2711347 - DNA, 25 bp, Homo sapien
ccaagggacaccactggtttgtgct

SEQ ID NO: 2711348 - DNA, 25 bp, Homo sapien
tctaagcatagagcggttgaaccaa

SEQ ID NO: 2711349 - DNA, 25 bp, Homo sapien
gctgttattgaccaaggcaactctt

SEQ ID NO: 2711350 - DNA, 25 bp, Homo sapien
aaggcaactcttggcccctgacttt

SEQ ID NO: 2711351 - DNA, 25 bp, Homo sapien
tgcctcccattgctgttattgacca

SEQ ID NO: 2711352 - DNA, 25 bp, Homo sapien
ctctcattcccgtcccattgcatct

SEQ ID NO: 2711353 - DNA, 25 bp, Homo sapien
cattgggagacaaaccttccaactt

SEQ ID NO: 2711354 - DNA, 25 bp, Homo sapien
tctgggtgttgaaaaaccatgtggc

SEQ ID NO: 2711355 - DNA, 25 bp, Homo sapien
ccatgtggcaaaatcattgggagac

SEQ ID NO: 2711356 - DNA, 25 bp, Homo sapien
gctctgggtgttgaaaaaccatgtg

SEQ ID NO: 2711357 - DNA, 25 bp, Homo sapien
tcgacatccatgatgcgggctcgcg

SEQ ID NO: 2711358 - DNA, 25 bp, Homo sapien
tgcgactgatttcatgaatcctggt

SEQ ID NO: 2711359 - DNA, 25 bp, Homo sapien
cggcccctgcgactgatttcatgaa

SEQ ID NO: 2711360 - DNA, 25 bp, Homo sapien
cgaattccagggctagcaatgcgaa

SEQ ID NO: 2711361 - DNA, 25 bp, Homo sapien
tctgtatcctcaggtgctctctctc

SEQ ID NO: 2711362 - DNA, 25 bp, Homo sapien
cttgaaggcgcgtggactaataggc

SEQ ID NO: 2711363 - DNA, 25 bp, Homo sapien
ctgctcgcgcgcaccccggactatt

SEQ ID NO: 2711364 - DNA, 25 bp, Homo sapien
tcagattggaatcccgggcagaagt

SEQ ID NO: 2711365 - DNA, 25 bp, Homo sapien
taaatcttccgttcttcgaacctca

SEQ ID NO: 2711366 - DNA, 25 bp, Homo sapien
tttcattcaatacggaggccccggc

SEQ ID NO: 2711367 - DNA, 25 bp, Homo sapien
ggtgatgtctttgcactgggtcttt

SEQ ID NO: 2711368 - DNA, 25 bp, Homo sapien
tgcactgggtctttcattcaatacg

SEQ ID NO: 2711369 - DNA, 25 bp, Homo sapien
gcaaaggagaggaggatccacttac

SEQ ID NO: 2711370 - DNA, 25 bp, Homo sapien
ccccacccctgttcccatggcaaag

SEQ ID NO: 2711371 - DNA, 25 bp, Homo sapien
ccctgttcccatggcaaaggagagg

SEQ ID NO: 2711372 - DNA, 25 bp, Homo sapien
tggcaaaggagaggaggatccactt

SEQ ID NO: 2711373 - DNA, 25 bp, Homo sapien
agttgttgcctctggcatgttagag

SEQ ID NO: 2711374 - DNA, 25 bp, Homo sapien
ttcttgttctcaaggatagctaacc

SEQ ID NO: 2711375 - DNA, 25 bp, Homo sapien
ctctggcatgttagagcccttggcc

SEQ ID NO: 2711376 - DNA, 25 bp, Homo sapien
ttgttctcaaggatagctaaccagc

SEQ ID NO: 2711377 - DNA, 25 bp, Homo sapien
aatttcggactgcattctcagtagc

SEQ ID NO: 2711378 - DNA, 25 bp, Homo sapien
aagagaaacagactgtgccttcttg

SEQ ID NO: 2711379 - DNA, 25 bp, Homo sapien
ttgaagagaaacagactgtgccttc

SEQ ID NO: 2711380 - DNA, 25 bp, Homo sapien
tgccttcttgaatttcggactgcat

SEQ ID NO: 2711381 - DNA, 25 bp, Homo sapien
tgtgacccactagctgatagaggct

SEQ ID NO: 2711382 - DNA, 25 bp, Homo sapien
tcatgtgaactcataaaagcgccca

SEQ ID NO: 2711383 - DNA, 25 bp, Homo sapien
caagagttccttagcattccagaga

SEQ ID NO: 2711384 - DNA, 25 bp, Homo sapien
gaaacctgcctacactgagggctga

SEQ ID NO: 2711385 - DNA, 25 bp, Homo sapien
gtgcccacagccaaggtaccacact

SEQ ID NO: 2711386 - DNA, 25 bp, Homo sapien
gctgtgcccacagccaaggtaccac

SEQ ID NO: 2711387 - DNA, 25 bp, Homo sapien
gatgccagctgtgcccacagccaag

SEQ ID NO: 2711388 - DNA, 25 bp, Homo sapien
agctgtgcccacagccaaggtacca

SEQ ID NO: 2711389 - DNA, 25 bp, Homo sapien
tgacagtgtgaccacccatcactga

SEQ ID NO: 2711390 - DNA, 25 bp, Homo sapien
gcttgctagtgtcataaaatccaca

SEQ ID NO: 2711391 - DNA, 25 bp, Homo sapien
acaatgacagccacaatgatgccca

SEQ ID NO: 2711392 - DNA, 25 bp, Homo sapien
gacagccacaatgatgcccacagtg

SEQ ID NO: 2711393 - DNA, 25 bp, Homo sapien
aattcatgagaaggatgtgactgaa

SEQ ID NO: 2711394 - DNA, 25 bp, Homo sapien
ttcatgagaaggatgtgactgaagt

SEQ ID NO: 2711395 - DNA, 25 bp, Homo sapien
attcatgagaaggatgtgactgaag

SEQ ID NO: 2711396 - DNA, 25 bp, Homo sapien
tcaattcatgagaaggatgtgactg

SEQ ID NO: 2711397 - DNA, 25 bp, Homo sapien
taagcttcctgtaggcttcccggga

SEQ ID NO: 2711398 - DNA, 25 bp, Homo sapien
tgttgaccgttcaccacagcagatg

SEQ ID NO: 2711399 - DNA, 25 bp, Homo sapien
tagcagaggaaggtcatcatgcccc

SEQ ID NO: 2711400 - DNA, 25 bp, Homo sapien
tagatgttctcaactggaccaggca

SEQ ID NO: 2711401 - DNA, 25 bp, Homo sapien
gagcctgtatgttctccttgtctgt

SEQ ID NO: 2711402 - DNA, 25 bp, Homo sapien
tgtctggtgacacccttagaaaaaa

SEQ ID NO: 2711403 - DNA, 25 bp, Homo sapien
ttgtctgtctggtgacacccttaga

SEQ ID NO: 2711404 - DNA, 25 bp, Homo sapien
gtggagcctgtatgttctccttgtc

SEQ ID NO: 2711405 - DNA, 25 bp, Homo sapien
gcccatggagaaagatctgtgcttt

SEQ ID NO: 2711406 - DNA, 25 bp, Homo sapien
cagatgtgaggacgaagctttggaa

SEQ ID NO: 2711407 - DNA, 25 bp, Homo sapien
tggtgagggcaagagtaacagccca

SEQ ID NO: 2711408 - DNA, 25 bp, Homo sapien
gagagtagcattctgctgcgagaga

SEQ ID NO: 2711409 - DNA, 25 bp, Homo sapien
tcaggtgcttaaaatagatcagctg

SEQ ID NO: 2711410 - DNA, 25 bp, Homo sapien
gacttgcagcgggaagattggcact

SEQ ID NO: 2711411 - DNA, 25 bp, Homo sapien
caaagcagttgcttcatcggccctg

SEQ ID NO: 2711412 - DNA, 25 bp, Homo sapien
cttgatagagtgtgcttcaggtgct

SEQ ID NO: 2711413 - DNA, 25 bp, Homo sapien
tttatttcggtctccatcccagtac

SEQ ID NO: 2711414 - DNA, 25 bp, Homo sapien
ccaggactcaggaattgtgcattag

SEQ ID NO: 2711415 - DNA, 25 bp, Homo sapien
ccagtacccagacaaaggcccagga

SEQ ID NO: 2711416 - DNA, 25 bp, Homo sapien
ttcctaacagttcccgatgagggct

SEQ ID NO: 2711417 - DNA, 25 bp, Homo sapien
cagatgagaaacagagaagctccaa

SEQ ID NO: 2711418 - DNA, 25 bp, Homo sapien
tccaaatcctactcacataaagggc

SEQ ID NO: 2711419 - DNA, 25 bp, Homo sapien
gggcttattgacattatctgctgaa

SEQ ID NO: 2711420 - DNA, 25 bp, Homo sapien
caataattaacgtgtgggccagagg

SEQ ID NO: 2711421 - DNA, 25 bp, Homo sapien
gaaggcatctgtttaataaccagca

SEQ ID NO: 2711422 - DNA, 25 bp, Homo sapien
gatcatcaccaaccacgaatcaggt

SEQ ID NO: 2711423 - DNA, 25 bp, Homo sapien
cagaggctaacgcaaaggctttctc

SEQ ID NO: 2711424 - DNA, 25 bp, Homo sapien
tcaggtgaggcaaggatcactccgg

SEQ ID NO: 2711425 - DNA, 25 bp, Homo sapien
ggaaggcaaatgcaacacactcgtt

SEQ ID NO: 2711426 - DNA, 25 bp, Homo sapien
aaacaaccagcacaggagatttctg

SEQ ID NO: 2711427 - DNA, 25 bp, Homo sapien
ttggtcagcataaatgtgacagctg

SEQ ID NO: 2711428 - DNA, 25 bp, Homo sapien
caggtattcttgagcccgcaaggaa

SEQ ID NO: 2711429 - DNA, 25 bp, Homo sapien
caaggatgtctgtcagtggtcacta

SEQ ID NO: 2711430 - DNA, 25 bp, Homo sapien
tcagtatccgcatgtgtctagtggc

SEQ ID NO: 2711431 - DNA, 25 bp, Homo sapien
tgggaaagcttatgtcacctggaga

SEQ ID NO: 2711432 - DNA, 25 bp, Homo sapien
tagtggctgctctagtggacaatgc

SEQ ID NO: 2711433 - DNA, 25 bp, Homo sapien
tggagacagcgtaacaactgtgaat

SEQ ID NO: 2711434 - DNA, 25 bp, Homo sapien
ggaagtgtaatataaacagtggaac

SEQ ID NO: 2711435 - DNA, 25 bp, Homo sapien
gaatccactggttcagcaatgagca

SEQ ID NO: 2711436 - DNA, 25 bp, Homo sapien
tgaaacatcaagcagagaatccact

SEQ ID NO: 2711437 - DNA, 25 bp, Homo sapien
ttgcaagaacacaagccaaatccct

SEQ ID NO: 2711438 - DNA, 25 bp, Homo sapien
gcaagaacacaagccaaatccctga

SEQ ID NO: 2711439 - DNA, 25 bp, Homo sapien
ttccttgcaagaacacaagccaaat

SEQ ID NO: 2711440 - DNA, 25 bp, Homo sapien
agaacacaagccaaatccctgaatg

SEQ ID NO: 2711441 - DNA, 25 bp, Homo sapien
aagagatcactatccagaggccctg

SEQ ID NO: 2711442 - DNA, 25 bp, Homo sapien
gaaacaaagagatcactatccagag

SEQ ID NO: 2711443 - DNA, 25 bp, Homo sapien
cagaggccctgattctttacaaagt

SEQ ID NO: 2711444 - DNA, 25 bp, Homo sapien
tcactatccagaggccctgattctt

SEQ ID NO: 2711445 - DNA, 25 bp, Homo sapien
tgcaggtgtctccacagcggtagca

SEQ ID NO: 2711446 - DNA, 25 bp, Homo sapien
aagtggttgttgtgcacgcggacca

SEQ ID NO: 2711447 - DNA, 25 bp, Homo sapien
agcggtagcactggatgacattgga

SEQ ID NO: 2711448 - DNA, 25 bp, Homo sapien
tgacattggagctgccccgtggatt

SEQ ID NO: 2711449 - DNA, 25 bp, Homo sapien
tgaaaaagttatcccagctctctgg

SEQ ID NO: 2711450 - DNA, 25 bp, Homo sapien
gtaaaggttgataagcctctcaggg

SEQ ID NO: 2711451 - DNA, 25 bp, Homo sapien
caatgtaaatataaggcccagaagg

SEQ ID NO: 2711452 - DNA, 25 bp, Homo sapien
tctgaggctgagtgaaacgcaatat

SEQ ID NO: 2711453 - DNA, 25 bp, Homo sapien
caattgacttcatggctgcggaatc

SEQ ID NO: 2711454 - DNA, 25 bp, Homo sapien
tgcggaatcaattaggtcatggcct

SEQ ID NO: 2711455 - DNA, 25 bp, Homo sapien
tacaacctcattggaaacagctccg

SEQ ID NO: 2711456 - DNA, 25 bp, Homo sapien
caggccaccataggaaaacttggaa

SEQ ID NO: 2711457 - DNA, 25 bp, Homo sapien
cagtgtggagcattgcttgtggccc

SEQ ID NO: 2711458 - DNA, 25 bp, Homo sapien
aaactcagtgtggagcattgcttgt

SEQ ID NO: 2711459 - DNA, 25 bp, Homo sapien
gtgtggagcattgcttgtggccccc

SEQ ID NO: 2711460 - DNA, 25 bp, Homo sapien
agtgtggagcattgcttgtggcccc

SEQ ID NO: 2711461 - DNA, 25 bp, Homo sapien
tattcgggctttctacatcagtttt

SEQ ID NO: 2711462 - DNA, 25 bp, Homo sapien
catccacattgatgaacaggtattc

SEQ ID NO: 2711463 - DNA, 25 bp, Homo sapien
cattgatgaacaggtattcgggctt

SEQ ID NO: 2711464 - DNA, 25 bp, Homo sapien
tgaacaggtattcgggctttctaca

SEQ ID NO: 2711465 - DNA, 25 bp, Homo sapien
acttcgcctgtgatgaagtcccggc

SEQ ID NO: 2711466 - DNA, 25 bp, Homo sapien
tgcacaagctgcacacgaagcactt

SEQ ID NO: 2711467 - DNA, 25 bp, Homo sapien
tagtcctgggtgcagatgtactcct

SEQ ID NO: 2711468 - DNA, 25 bp, Homo sapien
tgtcacagcgggtgccatagagttg

SEQ ID NO: 2711469 - DNA, 25 bp, Homo sapien
aattaacaagtgatggtgatgcgga

SEQ ID NO: 2711470 - DNA, 25 bp, Homo sapien
ttgctgaattaacaagtgatggtga

SEQ ID NO: 2711471 - DNA, 25 bp, Homo sapien
aggcagggatgagctctccatccct

SEQ ID NO: 2711472 - DNA, 25 bp, Homo sapien
ctgaattaacaagtgatggtgatgc

SEQ ID NO: 2711473 - DNA, 25 bp, Homo sapien
gcacgtttggcacacacattcttta

SEQ ID NO: 2711474 - DNA, 25 bp, Homo sapien
catggactgggagcacgtttggcac

SEQ ID NO: 2711475 - DNA, 25 bp, Homo sapien
tgggcttactgctggccatggactg

SEQ ID NO: 2711476 - DNA, 25 bp, Homo sapien
ggcttggtccacgaatcttgatggg

SEQ ID NO: 2711477 - DNA, 25 bp, Homo sapien
gatcagccctattgaggcgtccatg

SEQ ID NO: 2711478 - DNA, 25 bp, Homo sapien
taccactgtttatggccaggcagcc

SEQ ID NO: 2711479 - DNA, 25 bp, Homo sapien
cataccatgtggcaaatattggcac

SEQ ID NO: 2711480 - DNA, 25 bp, Homo sapien
tgggacataagatcaggaactcagc

SEQ ID NO: 2711481 - DNA, 25 bp, Homo sapien
aggatgccaaagaaagggctccgca

SEQ ID NO: 2711482 - DNA, 25 bp, Homo sapien
gaaagggctccgcacattccaggaa

SEQ ID NO: 2711483 - DNA, 25 bp, Homo sapien
attcttgagcatcatcaaggatgcc

SEQ ID NO: 2711484 - DNA, 25 bp, Homo sapien
ctattcttgagcatcatcaaggatg

SEQ ID NO: 2711485 - DNA, 25 bp, Homo sapien
gatagtcctgttgtagggaagcctg

SEQ ID NO: 2711486 - DNA, 25 bp, Homo sapien
aagcctgctgattccccgtgagaat

SEQ ID NO: 2711487 - DNA, 25 bp, Homo sapien
gagttgtatgctctctaagcccaga

SEQ ID NO: 2711488 - DNA, 25 bp, Homo sapien
taattaaaatcaggcccattaggcc

SEQ ID NO: 2711489 - DNA, 25 bp, Homo sapien
gggaattcaggcctagccaaccgga

SEQ ID NO: 2711490 - DNA, 25 bp, Homo sapien
gagaatgtgggacaagcctagcatc

SEQ ID NO: 2711491 - DNA, 25 bp, Homo sapien
ggtccggaaatggagccaacgtcca

SEQ ID NO: 2711492 - DNA, 25 bp, Homo sapien
gcctagcatcagcttgttgctcaat

SEQ ID NO: 2711493 - DNA, 25 bp, Homo sapien
actccccggtgaggatgacgctgca

SEQ ID NO: 2711494 - DNA, 25 bp, Homo sapien
tgactggccgtgcttgatctcctcc

SEQ ID NO: 2711495 - DNA, 25 bp, Homo sapien
agcagctgacgtgccactgcttgtc

SEQ ID NO: 2711496 - DNA, 25 bp, Homo sapien
ctggcacttgaagcagctgacgtgc

SEQ ID NO: 2711497 - DNA, 25 bp, Homo sapien
ctggggcaggagcagggggacccac

SEQ ID NO: 2711498 - DNA, 25 bp, Homo sapien
gcagctggggcaggagcagggggac

SEQ ID NO: 2711499 - DNA, 25 bp, Homo sapien
agctggggcaggagcagggggaccc

SEQ ID NO: 2711500 - DNA, 25 bp, Homo sapien
agaatgcagaggcccaggcagctgg

SEQ ID NO: 2711501 - DNA, 25 bp, Homo sapien
agcccaggatctggcttcacctggg

SEQ ID NO: 2711502 - DNA, 25 bp, Homo sapien
ctatgcagcccaggatctggcttca

SEQ ID NO: 2711503 - DNA, 25 bp, Homo sapien
tgcagcccaggatctggcttcacct

SEQ ID NO: 2711504 - DNA, 25 bp, Homo sapien
gcttcacctgggcacatgtttgagc

SEQ ID NO: 2711505 - DNA, 25 bp, Homo sapien
acttttccatctcgaagctgttgcc

SEQ ID NO: 2711506 - DNA, 25 bp, Homo sapien
catctcgaagctgttgccctgatga

SEQ ID NO: 2711507 - DNA, 25 bp, Homo sapien
aggagaggcacatcacttttccatc

SEQ ID NO: 2711508 - DNA, 25 bp, Homo sapien
agctgttgccctgatgaggttgctg

SEQ ID NO: 2711509 - DNA, 25 bp, Homo sapien
ctgccactgatgtatcggtcacaag

SEQ ID NO: 2711510 - DNA, 25 bp, Homo sapien
ggtcacaagtctcacatttaatgcc

SEQ ID NO: 2711511 - DNA, 25 bp, Homo sapien
atttaatgccaaactgggcatggta

SEQ ID NO: 2711512 - DNA, 25 bp, Homo sapien
cggactcacagtatggaacaccatc

SEQ ID NO: 2711513 - DNA, 25 bp, Homo sapien
ggaaatcctgaggactctggtggtg

SEQ ID NO: 2711514 - DNA, 25 bp, Homo sapien
actgtgagcagctgctcgccaaggt

SEQ ID NO: 2711515 - DNA, 25 bp, Homo sapien
ctttctgagtcgctttcactgtgag

SEQ ID NO: 2711516 - DNA, 25 bp, Homo sapien
cagctgctcgccaaggttggtgtca

SEQ ID NO: 2711517 - DNA, 25 bp, Homo sapien
tacactctggatgcctcttccccac

SEQ ID NO: 2711518 - DNA, 25 bp, Homo sapien
gccaacaaacgactcttctgaaggt

SEQ ID NO: 2711519 - DNA, 25 bp, Homo sapien
ctgcaaagccaacaaacgactcttc

SEQ ID NO: 2711520 - DNA, 25 bp, Homo sapien
catccaacagcttttccgcagccca

SEQ ID NO: 2711521 - DNA, 25 bp, Homo sapien
gaggaacagtctaccgcaatgctaa

SEQ ID NO: 2711522 - DNA, 25 bp, Homo sapien
catatcttgcttaaggcttcagggc

SEQ ID NO: 2711523 - DNA, 25 bp, Homo sapien
gaaactcagtcacaacagctgcctg

SEQ ID NO: 2711524 - DNA, 25 bp, Homo sapien
aatgctaaacaacggtaactctcgg

SEQ ID NO: 2711525 - DNA, 25 bp, Homo sapien
gtcagctagctgagatgaaccattt

SEQ ID NO: 2711526 - DNA, 25 bp, Homo sapien
cacgtcagctagctgagatgaacca

SEQ ID NO: 2711527 - DNA, 25 bp, Homo sapien
gcctgcacccagagtaaggaaaagc

SEQ ID NO: 2711528 - DNA, 25 bp, Homo sapien
agcctgcacccagagtaaggaaaag

SEQ ID NO: 2711529 - DNA, 25 bp, Homo sapien
tgaacatctggtggcagcgtacaca

SEQ ID NO: 2711530 - DNA, 25 bp, Homo sapien
tccttcggtgaacatctggtggcag

SEQ ID NO: 2711531 - DNA, 25 bp, Homo sapien
gcacaggttgggtggtagtgcttcc

SEQ ID NO: 2711532 - DNA, 25 bp, Homo sapien
gcagcgtacacacctggcacaggtt

SEQ ID NO: 2711533 - DNA, 25 bp, Homo sapien
tctgtagaccaaggcactctgttcc

SEQ ID NO: 2711534 - DNA, 25 bp, Homo sapien
cactaaaagctaccgaattgtgcgc

SEQ ID NO: 2711535 - DNA, 25 bp, Homo sapien
gaatgacctgctgatacctgctatt

SEQ ID NO: 2711536 - DNA, 25 bp, Homo sapien
tgctactgaaagtgccaaactcggc

SEQ ID NO: 2711537 - DNA, 25 bp, Homo sapien
agtgacagagcatggtgaactccag

SEQ ID NO: 2711538 - DNA, 25 bp, Homo sapien
gcttgagagcattgccttgacctgc

SEQ ID NO: 2711539 - DNA, 25 bp, Homo sapien
catggtgtatattccgcttgagagc

SEQ ID NO: 2711540 - DNA, 25 bp, Homo sapien
ccagcacgggactttgctcttagaa

SEQ ID NO: 2711541 - DNA, 25 bp, Homo sapien
gggtcatgaaaataacgaagactca

SEQ ID NO: 2711542 - DNA, 25 bp, Homo sapien
catgaaaataacgaagactcagacc

SEQ ID NO: 2711543 - DNA, 25 bp, Homo sapien
ctaaggggtcatgaaaataacgaag

SEQ ID NO: 2711544 - DNA, 25 bp, Homo sapien
ctcagacctttcaaaccctccagca

SEQ ID NO: 2711545 - DNA, 25 bp, Homo sapien
ttgcagatggggtgccaaacctcgg

SEQ ID NO: 2711546 - DNA, 25 bp, Homo sapien
tgcccgggctgcctgtttgcagatg

SEQ ID NO: 2711547 - DNA, 25 bp, Homo sapien
cagatggggtgccaaacctcggaac

SEQ ID NO: 2711548 - DNA, 25 bp, Homo sapien
ctgcccgggctgcctgtttgcagat

SEQ ID NO: 2711549 - DNA, 25 bp, Homo sapien
tattaacgagtgaccttaggctggg

SEQ ID NO: 2711550 - DNA, 25 bp, Homo sapien
tcagcaatggtagagttacagcctc

SEQ ID NO: 2711551 - DNA, 25 bp, Homo sapien
taggctgggaaaaaccatggcgaga

SEQ ID NO: 2711552 - DNA, 25 bp, Homo sapien
catggcgagagcttctcagcgaggc

SEQ ID NO: 2711553 - DNA, 25 bp, Homo sapien
gacccagaagccggatccttcctgc

SEQ ID NO: 2711554 - DNA, 25 bp, Homo sapien
acccagaagccggatccttcctgca

SEQ ID NO: 2711555 - DNA, 25 bp, Homo sapien
agacccagaagccggatccttcctg

SEQ ID NO: 2711556 - DNA, 25 bp, Homo sapien
cccaggtgtctcctctacatcatca

SEQ ID NO: 2711557 - DNA, 25 bp, Homo sapien
gatggaggtttcagatgtccgtcta

SEQ ID NO: 2711558 - DNA, 25 bp, Homo sapien
gcagatgactcggttgggtgaccca

SEQ ID NO: 2711559 - DNA, 25 bp, Homo sapien
tggaggtttcagatgtccgtctatg

SEQ ID NO: 2711560 - DNA, 25 bp, Homo sapien
gactcggttgggtgacccaatgctg

SEQ ID NO: 2711561 - DNA, 25 bp, Homo sapien
ttgtacctcgtagatagacttaacc

SEQ ID NO: 2711562 - DNA, 25 bp, Homo sapien
tccagcatctcgtcggacatgtatc

SEQ ID NO: 2711563 - DNA, 25 bp, Homo sapien
gggcgttgtacctcgtagatagact

SEQ ID NO: 2711564 - DNA, 25 bp, Homo sapien
ctggaatgaggctcataggaaatga

SEQ ID NO: 2711565 - DNA, 25 bp, Homo sapien
agtagggagataatgttcccagcga

SEQ ID NO: 2711566 - DNA, 25 bp, Homo sapien
ggagtagggagataatgttcccagc

SEQ ID NO: 2711567 - DNA, 25 bp, Homo sapien
tgggagtagggagataatgttccca

SEQ ID NO: 2711568 - DNA, 25 bp, Homo sapien
ctgggagtagggagataatgttccc

SEQ ID NO: 2711569 - DNA, 25 bp, Homo sapien
gggacatgccctgccggctgtaggt

SEQ ID NO: 2711570 - DNA, 25 bp, Homo sapien
gggagtctatgtaccccgggctgga

SEQ ID NO: 2711571 - DNA, 25 bp, Homo sapien
ggctggaggcccgtctctgccggag

SEQ ID NO: 2711572 - DNA, 25 bp, Homo sapien
aggcccgtctctgccggaggtccag

SEQ ID NO: 2711573 - DNA, 25 bp, Homo sapien
gccacactgtgatggagatcatggg

SEQ ID NO: 2711574 - DNA, 25 bp, Homo sapien
gggaccccaagtgactgcattgtct

SEQ ID NO: 2711575 - DNA, 25 bp, Homo sapien
gagccttgtgccctctgcagcaggg

SEQ ID NO: 2711576 - DNA, 25 bp, Homo sapien
gtggccataggcctccagagggcca

SEQ ID NO: 2711577 - DNA, 25 bp, Homo sapien
ctcttggttctgccctccggatggg

SEQ ID NO: 2711578 - DNA, 25 bp, Homo sapien
gatggggcaggccacgaggatggtg

SEQ ID NO: 2711579 - DNA, 25 bp, Homo sapien
gagggtgactgtggatggtctgact

SEQ ID NO: 2711580 - DNA, 25 bp, Homo sapien
ggtgaaggccagttcatagccatat

SEQ ID NO: 2711581 - DNA, 25 bp, Homo sapien
cgtctcagcgtgctcaggttccggg

SEQ ID NO: 2711582 - DNA, 25 bp, Homo sapien
gcatgtgctctcatgcaccacgttg

SEQ ID NO: 2711583 - DNA, 25 bp, Homo sapien
gggcgtctcagcgtgctcaggttcc

SEQ ID NO: 2711584 - DNA, 25 bp, Homo sapien
ccacgttggcagaaacaagcttgac

SEQ ID NO: 2711585 - DNA, 25 bp, Homo sapien
tctaactggctatggtatggagagc

SEQ ID NO: 2711586 - DNA, 25 bp, Homo sapien
actggctatggtatggagagctccg

SEQ ID NO: 2711587 - DNA, 25 bp, Homo sapien
gacctcacatctaactggctatggt

SEQ ID NO: 2711588 - DNA, 25 bp, Homo sapien
aagaggttggagtggaggacctcac

SEQ ID NO: 2711589 - DNA, 25 bp, Homo sapien
gagggagaccttgtccaaactacac

SEQ ID NO: 2711590 - DNA, 25 bp, Homo sapien
aaaactgagcttggtgtcaggagac

SEQ ID NO: 2711591 - DNA, 25 bp, Homo sapien
tcctgtcatgacctgcggtcacatg

SEQ ID NO: 2711592 - DNA, 25 bp, Homo sapien
gtcacatgacatgatagtgctcttc

SEQ ID NO: 2711593 - DNA, 25 bp, Homo sapien
ggtttccggtagatgttactgtctc

SEQ ID NO: 2711594 - DNA, 25 bp, Homo sapien
gcaggactgcttcgctcatctccaa

SEQ ID NO: 2711595 - DNA, 25 bp, Homo sapien
taggcacccagagccgctgtttaaa

SEQ ID NO: 2711596 - DNA, 25 bp, Homo sapien
taaaatgtagaatcttaggcaccca

SEQ ID NO: 2711597 - DNA, 25 bp, Homo sapien
gctaattagttcagaacctggtgca

SEQ ID NO: 2711598 - DNA, 25 bp, Homo sapien
agtcctgagaagcttgtgacctggg

SEQ ID NO: 2711599 - DNA, 25 bp, Homo sapien
caaagtcctgagaagcttgtgacct

SEQ ID NO: 2711600 - DNA, 25 bp, Homo sapien
tggaaaatcccacaaagtcctgaga

SEQ ID NO: 2711601 - DNA, 25 bp, Homo sapien
ctggaaaatcccacaaagtcctgag

SEQ ID NO: 2711602 - DNA, 25 bp, Homo sapien
gtctgctttagtgccacccctcagg

SEQ ID NO: 2711603 - DNA, 25 bp, Homo sapien
cctcttgagtctgctttagtgccac

SEQ ID NO: 2711604 - DNA, 25 bp, Homo sapien
gactcctcttgagtctgctttagtg

SEQ ID NO: 2711605 - DNA, 25 bp, Homo sapien
ttgagtctgctttagtgccacccct

SEQ ID NO: 2711606 - DNA, 25 bp, Homo sapien
gagcagtgacttctcgtggcccaaa

SEQ ID NO: 2711607 - DNA, 25 bp, Homo sapien
tctcgtggcccaaacgtgggtgaca

SEQ ID NO: 2711608 - DNA, 25 bp, Homo sapien
gtgacttctcgtggcccaaacgtgg

SEQ ID NO: 2711609 - DNA, 25 bp, Homo sapien
cttctcgtggcccaaacgtgggtga

SEQ ID NO: 2711610 - DNA, 25 bp, Homo sapien
aactgggccatggagcatcggagct

SEQ ID NO: 2711611 - DNA, 25 bp, Homo sapien
tcagctgtaacactgggcaggtcct

SEQ ID NO: 2711612 - DNA, 25 bp, Homo sapien
tcagggctctctgttagaactgggc

SEQ ID NO: 2711613 - DNA, 25 bp, Homo sapien
gacctctaagggtgtggctcctcaa

SEQ ID NO: 2711614 - DNA, 25 bp, Homo sapien
ccatggtaggtccagtactcagact

SEQ ID NO: 2711615 - DNA, 25 bp, Homo sapien
tagatgggactgtacttggaggtct

SEQ ID NO: 2711616 - DNA, 25 bp, Homo sapien
catagtaggggtctggcgagtagat

SEQ ID NO: 2711617 - DNA, 25 bp, Homo sapien
actcagactccgaagcatagtaggg

SEQ ID NO: 2711618 - DNA, 25 bp, Homo sapien
cacaggtgttagggccctggaccca

SEQ ID NO: 2711619 - DNA, 25 bp, Homo sapien
gcacaggtgttagggccctggaccc

SEQ ID NO: 2711620 - DNA, 25 bp, Homo sapien
gacccaggctcctatgggggtacta

SEQ ID NO: 2711621 - DNA, 25 bp, Homo sapien
cttgtgcatgctgcggtcaaaatca

SEQ ID NO: 2711622 - DNA, 25 bp, Homo sapien
tgcatgctgcggtcaaaatcatcct

SEQ ID NO: 2711623 - DNA, 25 bp, Homo sapien
ctcctctcctccagacgagaacctt

SEQ ID NO: 2711624 - DNA, 25 bp, Homo sapien
tctcctccagacgagaaccttctgg

SEQ ID NO: 2711625 - DNA, 25 bp, Homo sapien
ataggagctcgaccgggccttcatt

SEQ ID NO: 2711626 - DNA, 25 bp, Homo sapien
gatctgcataggagctcgaccgggc

SEQ ID NO: 2711627 - DNA, 25 bp, Homo sapien
ccttcagaatcagccggccaattcc

SEQ ID NO: 2711628 - DNA, 25 bp, Homo sapien
tcagccggccaattccactttggag

SEQ ID NO: 2711629 - DNA, 25 bp, Homo sapien
cactgtcagccaggtagtgcgaccg

SEQ ID NO: 2711630 - DNA, 25 bp, Homo sapien
tgtcagccaggtagtgcgaccgagg

SEQ ID NO: 2711631 - DNA, 25 bp, Homo sapien
actgtcagccaggtagtgcgaccga

SEQ ID NO: 2711632 - DNA, 25 bp, Homo sapien
tcagccaggtagtgcgaccgagggg

SEQ ID NO: 2711633 - DNA, 25 bp, Homo sapien
catctctatcttcttgtgatagacc

SEQ ID NO: 2711634 - DNA, 25 bp, Homo sapien
ccaaggcacccactcatacactctt

SEQ ID NO: 2711635 - DNA, 25 bp, Homo sapien
tctatccttgacctgcacatctcta

SEQ ID NO: 2711636 - DNA, 25 bp, Homo sapien
ttcttgtgatagacccctgtgtcct

SEQ ID NO: 2711637 - DNA, 25 bp, Homo sapien
catttcttcggtaggcaggcaggga

SEQ ID NO: 2711638 - DNA, 25 bp, Homo sapien
tttcttcggtaggcaggcagggagg

SEQ ID NO: 2711639 - DNA, 25 bp, Homo sapien
atttcttcggtaggcaggcagggag

SEQ ID NO: 2711640 - DNA, 25 bp, Homo sapien
ggagatttgccctgacaacctggct

SEQ ID NO: 2711641 - DNA, 25 bp, Homo sapien
gcagcctctgtctcaagttagggaa

SEQ ID NO: 2711642 - DNA, 25 bp, Homo sapien
aatggactggcgcttgtgggacata

SEQ ID NO: 2711643 - DNA, 25 bp, Homo sapien
tccataacagcacgctcagggagct

SEQ ID NO: 2711644 - DNA, 25 bp, Homo sapien
ctcgcatgccccagttgactgcgtt

SEQ ID NO: 2711645 - DNA, 25 bp, Homo sapien
cagttgactgcgttcatgctgtcgt

SEQ ID NO: 2711646 - DNA, 25 bp, Homo sapien
catgctgtcgtagtggaagaggtct

SEQ ID NO: 2711647 - DNA, 25 bp, Homo sapien
actgcgttcatgctgtcgtagtgga

SEQ ID NO: 2711648 - DNA, 25 bp, Homo sapien
aaccctcggtccacagtccagggag

SEQ ID NO: 2711649 - DNA, 25 bp, Homo sapien
tggcaggcaaccctcggtccacagt

SEQ ID NO: 2711650 - DNA, 25 bp, Homo sapien
aacagtgtgcaattggctctgagtg

SEQ ID NO: 2711651 - DNA, 25 bp, Homo sapien
cagtgtgcaattggctctgagtgct

SEQ ID NO: 2711652 - DNA, 25 bp, Homo sapien
gggtctggcctctattgtctccttc

SEQ ID NO: 2711653 - DNA, 25 bp, Homo sapien
caaggctggtatgagcacagtggaa

SEQ ID NO: 2711654 - DNA, 25 bp, Homo sapien
ccttgtccttgctgaattcaccctg

SEQ ID NO: 2711655 - DNA, 25 bp, Homo sapien
tcaccctgaaggacaatcaaggctg

SEQ ID NO: 2711656 - DNA, 25 bp, Homo sapien
atccccagtgtagcggctccaagaa

SEQ ID NO: 2711657 - DNA, 25 bp, Homo sapien
tcctcctggtgatccccagtgtagc

SEQ ID NO: 2711658 - DNA, 25 bp, Homo sapien
cccagggtctatgcacatcctttac

SEQ ID NO: 2711659 - DNA, 25 bp, Homo sapien
gtgtagcggctccaagaatcctgga

SEQ ID NO: 2711660 - DNA, 25 bp, Homo sapien
gcttggaggtatttgccatgtgccc

SEQ ID NO: 2711661 - DNA, 25 bp, Homo sapien
tttcagtaggcaagagacctagggc

SEQ ID NO: 2711662 - DNA, 25 bp, Homo sapien
ggcccaagagagtcccctaatacta

SEQ ID NO: 2711663 - DNA, 25 bp, Homo sapien
taatatgggcacatgacctcccgaa

SEQ ID NO: 2711664 - DNA, 25 bp, Homo sapien
tctaaacgggtcctgtctacatcct

SEQ ID NO: 2711665 - DNA, 25 bp, Homo sapien
tgtagtcaccagcagcagttcataa

SEQ ID NO: 2711666 - DNA, 25 bp, Homo sapien
catccttgggcagtcggtttcttcc

SEQ ID NO: 2711667 - DNA, 25 bp, Homo sapien
ttcttcctcttgtagtcaccagcag

SEQ ID NO: 2711668 - DNA, 25 bp, Homo sapien
tatatcttcattagccgcattagag

SEQ ID NO: 2711669 - DNA, 25 bp, Homo sapien
ggcagggagtggcaacaggctgtaa

SEQ ID NO: 2711670 - DNA, 25 bp, Homo sapien
aactggaactccacaccaggtggtc

SEQ ID NO: 2711671 - DNA, 25 bp, Homo sapien
ggtggtctggactgctcaaatgccc

SEQ ID NO: 2711672 - DNA, 25 bp, Homo sapien
gttaacagtgcagctcttacagcca

SEQ ID NO: 2711673 - DNA, 25 bp, Homo sapien
gagcatcctagtgtctccaccatga

SEQ ID NO: 2711674 - DNA, 25 bp, Homo sapien
ggtcatgtgctcaacactcaagggc

SEQ ID NO: 2711675 - DNA, 25 bp, Homo sapien
ccagggagaaatggccatgtgacca

SEQ ID NO: 2711676 - DNA, 25 bp, Homo sapien
gatggtcatgccaaagacttggtag

SEQ ID NO: 2711677 - DNA, 25 bp, Homo sapien
agaacagccgggcttgcttcttcag

SEQ ID NO: 2711678 - DNA, 25 bp, Homo sapien
acttggtagaactcttcctgggaca

SEQ ID NO: 2711679 - DNA, 25 bp, Homo sapien
agccggtcaaactcagagatggtca

SEQ ID NO: 2711680 - DNA, 25 bp, Homo sapien
tatctcgatgacgtgggcttgcctg

SEQ ID NO: 2711681 - DNA, 25 bp, Homo sapien
tcttcgtgggcgctcaaaggtgctc

SEQ ID NO: 2711682 - DNA, 25 bp, Homo sapien
tacacaagagaggattataccgagc

SEQ ID NO: 2711683 - DNA, 25 bp, Homo sapien
gaacctttctttgagacacggccta

SEQ ID NO: 2711684 - DNA, 25 bp, Homo sapien
taagcagccactcttccaaaagttt

SEQ ID NO: 2711685 - DNA, 25 bp, Homo sapien
tcataagcagccactcttccaaaag

SEQ ID NO: 2711686 - DNA, 25 bp, Homo sapien
cataagcagccactcttccaaaagt

SEQ ID NO: 2711687 - DNA, 25 bp, Homo sapien
agcagccactcttccaaaagtttcc

SEQ ID NO: 2711688 - DNA, 25 bp, Homo sapien
taggcatatccctgagaccgagtcc

SEQ ID NO: 2711689 - DNA, 25 bp, Homo sapien
tcaaaatggtccgactcaaggcttc

SEQ ID NO: 2711690 - DNA, 25 bp, Homo sapien
aacttccatgattgcgtctggctgg

SEQ ID NO: 2711691 - DNA, 25 bp, Homo sapien
gagggctgacatcctacatgagaac

SEQ ID NO: 2711692 - DNA, 25 bp, Homo sapien
tgtaaggttgatctccagtgtccaa

SEQ ID NO: 2711693 - DNA, 25 bp, Homo sapien
tattgatgtaaggttgatctccagt

SEQ ID NO: 2711694 - DNA, 25 bp, Homo sapien
ttctgctttattgatgtaaggttga

SEQ ID NO: 2711695 - DNA, 25 bp, Homo sapien
tctccagtgtccaaacgggttgcat

SEQ ID NO: 2711696 - DNA, 25 bp, Homo sapien
tagtccacgtttggctctgtggcca

SEQ ID NO: 2711697 - DNA, 25 bp, Homo sapien
gctgcagctgctgacatcttccaca

SEQ ID NO: 2711698 - DNA, 25 bp, Homo sapien
tggtgcccatgtctatgaactgggt

SEQ ID NO: 2711699 - DNA, 25 bp, Homo sapien
acagctggtgcccatgtctatgaac

SEQ ID NO: 2711700 - DNA, 25 bp, Homo sapien
caccgcacccctcagccggctccat

SEQ ID NO: 2711701 - DNA, 25 bp, Homo sapien
agggacatgccctactcttggacgg

SEQ ID NO: 2711702 - DNA, 25 bp, Homo sapien
ccgtccaagagtagggcatgtccct

SEQ ID NO: 2711703 - DNA, 25 bp, Homo sapien
ggctccggcgcggctggtagcggcc

SEQ ID NO: 2711704 - DNA, 25 bp, Homo sapien
gctccggcgcggctggtagcggccg

SEQ ID NO: 2711705 - DNA, 25 bp, Homo sapien
cagtcactcagcaatgtcatttgga

SEQ ID NO: 2711706 - DNA, 25 bp, Homo sapien
caagtgaagttctgtaaagcagtct

SEQ ID NO: 2711707 - DNA, 25 bp, Homo sapien
gataagcaccataagggatcactgt

SEQ ID NO: 2711708 - DNA, 25 bp, Homo sapien
gatgacatagccacagtcagtaggc

SEQ ID NO: 2711709 - DNA, 25 bp, Homo sapien
ttctttttggtccaagtggagctaa

SEQ ID NO: 2711710 - DNA, 25 bp, Homo sapien
ggaaaggccatcaggctctctggct

SEQ ID NO: 2711711 - DNA, 25 bp, Homo sapien
tctttttggtccaagtggagctaaa

SEQ ID NO: 2711712 - DNA, 25 bp, Homo sapien
ccaggcatcggtgaccaagtttcac

SEQ ID NO: 2711713 - DNA, 25 bp, Homo sapien
gttccaggcatcggtgaccaagttt

SEQ ID NO: 2711714 - DNA, 25 bp, Homo sapien
tccaggcatcggtgaccaagtttca

SEQ ID NO: 2711715 - DNA, 25 bp, Homo sapien
ttccaggcatcggtgaccaagtttc

SEQ ID NO: 2711716 - DNA, 25 bp, Homo sapien
atctgctcttttgggctctcggcat

SEQ ID NO: 2711717 - DNA, 25 bp, Homo sapien
atgctgccccgctttgctttctgag

SEQ ID NO: 2711718 - DNA, 25 bp, Homo sapien
tcttttgggctctcggcatgctgcc

SEQ ID NO: 2711719 - DNA, 25 bp, Homo sapien
ctttccacgattttctccatctgga

SEQ ID NO: 2711720 - DNA, 25 bp, Homo sapien
gtgacacacacgcgcactcctcaca

SEQ ID NO: 2711721 - DNA, 25 bp, Homo sapien
agctgtttccgcatccagcgtcctg

SEQ ID NO: 2711722 - DNA, 25 bp, Homo sapien
ggcagctgtttccgcatccagcgtc

SEQ ID NO: 2711723 - DNA, 25 bp, Homo sapien
acgcgcactcctcacacaagatggc

SEQ ID NO: 2711724 - DNA, 25 bp, Homo sapien
gtagaggaaggccacccgcttctga

SEQ ID NO: 2711725 - DNA, 25 bp, Homo sapien
gggactgggctctcccagaattgtt

SEQ ID NO: 2711726 - DNA, 25 bp, Homo sapien
tgtctgcggattcctccctgttgag

SEQ ID NO: 2711727 - DNA, 25 bp, Homo sapien
cctgttgagctcacaaaggaaatgg

SEQ ID NO: 2711728 - DNA, 25 bp, Homo sapien
tcagggaagccccacatcctcaatg

SEQ ID NO: 2711729 - DNA, 25 bp, Homo sapien
ggaagccccacatcctcaatggcct

SEQ ID NO: 2711730 - DNA, 25 bp, Homo sapien
agggaagccccacatcctcaatggc

SEQ ID NO: 2711731 - DNA, 25 bp, Homo sapien
agccccacatcctcaatggccttac

SEQ ID NO: 2711732 - DNA, 25 bp, Homo sapien
ggcctgctcagtgtgggtgctcttc

SEQ ID NO: 2711733 - DNA, 25 bp, Homo sapien
gggcctgctcagtgtgggtgctctt

SEQ ID NO: 2711734 - DNA, 25 bp, Homo sapien
ggaggccacggccatcttcttttcc

SEQ ID NO: 2711735 - DNA, 25 bp, Homo sapien
ccagggtggtatcgctgaggtactc

SEQ ID NO: 2711736 - DNA, 25 bp, Homo sapien
ggaggctgagcagcccggtgagctc

SEQ ID NO: 2711737 - DNA, 25 bp, Homo sapien
tgaggtactcgtggtccaggaggct

SEQ ID NO: 2711738 - DNA, 25 bp, Homo sapien
tgtgaggaagaagggggacatgcca

SEQ ID NO: 2711739 - DNA, 25 bp, Homo sapien
ctgtgaggaagaagggggacatgcc

SEQ ID NO: 2711740 - DNA, 25 bp, Homo sapien
gtgaggaagaagggggacatgccag

SEQ ID NO: 2711741 - DNA, 25 bp, Homo sapien
tgttcacatacaggtaggagacctc

SEQ ID NO: 2711742 - DNA, 25 bp, Homo sapien
ctgtgttcacatacaggtaggagac

SEQ ID NO: 2711743 - DNA, 25 bp, Homo sapien
gattccacgaagctgggccccgagt

SEQ ID NO: 2711744 - DNA, 25 bp, Homo sapien
aattcttcaaagagggattccacga

SEQ ID NO: 2711745 - DNA, 25 bp, Homo sapien
ccatcatcctctggcatgtcccgaa

SEQ ID NO: 2711746 - DNA, 25 bp, Homo sapien
tgggctcttggctagctcagggctg

SEQ ID NO: 2711747 - DNA, 25 bp, Homo sapien
atcatcctctggcatgtcccgaagg

SEQ ID NO: 2711748 - DNA, 25 bp, Homo sapien
catcctctggcatgtcccgaaggtc

SEQ ID NO: 2711749 - DNA, 25 bp, Homo sapien
tgggagctgatgtactcaggcgact

SEQ ID NO: 2711750 - DNA, 25 bp, Homo sapien
ctcaggcgacttgccgggtcccaga

SEQ ID NO: 2711751 - DNA, 25 bp, Homo sapien
ctgatgtactcaggcgacttgccgg

SEQ ID NO: 2711752 - DNA, 25 bp, Homo sapien
tgtactcaggcgacttgccgggtcc

SEQ ID NO: 2711753 - DNA, 25 bp, Homo sapien
gggagggtgacaggcttgcagttcc

SEQ ID NO: 2711754 - DNA, 25 bp, Homo sapien
ggtgacatggttgggagggtgacag

SEQ ID NO: 2711755 - DNA, 25 bp, Homo sapien
gggtgacaggcttgcagttccagct

SEQ ID NO: 2711756 - DNA, 25 bp, Homo sapien
gagggtgacaggcttgcagttccag

SEQ ID NO: 2711757 - DNA, 25 bp, Homo sapien
cataataaaaccgatctgtctttgc

SEQ ID NO: 2711758 - DNA, 25 bp, Homo sapien
cactgtgctactgaatgacagagca

SEQ ID NO: 2711759 - DNA, 25 bp, Homo sapien
attaatttcccgcaggaaaatcctg

SEQ ID NO: 2711760 - DNA, 25 bp, Homo sapien
catgctgagccatccaaacattagg

SEQ ID NO: 2711761 - DNA, 25 bp, Homo sapien
ctgatccaagcaccatagccaaaag

SEQ ID NO: 2711762 - DNA, 25 bp, Homo sapien
aaggtgcaatcagcccaaggtccat

SEQ ID NO: 2711763 - DNA, 25 bp, Homo sapien
gtgcaatcagcccaaggtccatcag

SEQ ID NO: 2711764 - DNA, 25 bp, Homo sapien
gccaaaaggtgcaatcagcccaagg

SEQ ID NO: 2711765 - DNA, 25 bp, Homo sapien
ggagctcttaagctcgccgttcacc

SEQ ID NO: 2711766 - DNA, 25 bp, Homo sapien
gctgtctgcgtcctcatagtagcca

SEQ ID NO: 2711767 - DNA, 25 bp, Homo sapien
tccacaatcgagtgtgaggggctgc

SEQ ID NO: 2711768 - DNA, 25 bp, Homo sapien
ttaagctcgccgttcaccctggttg

SEQ ID NO: 2711769 - DNA, 25 bp, Homo sapien
ctccctgatgaccgtcagctgcttg

SEQ ID NO: 2711770 - DNA, 25 bp, Homo sapien
aggactcataggagctgctcattgc

SEQ ID NO: 2711771 - DNA, 25 bp, Homo sapien
gcttggcccactgcccgaaacgctt

SEQ ID NO: 2711772 - DNA, 25 bp, Homo sapien
gctgctcattgcgtcagagtcatta

SEQ ID NO: 2711773 - DNA, 25 bp, Homo sapien
agggagagaaacacatcaggatctt

SEQ ID NO: 2711774 - DNA, 25 bp, Homo sapien
ggacagggagagaaacacatcagga

SEQ ID NO: 2711775 - DNA, 25 bp, Homo sapien
ctggacagggagagaaacacatcag

SEQ ID NO: 2711776 - DNA, 25 bp, Homo sapien
acagggagagaaacacatcaggatc

SEQ ID NO: 2711777 - DNA, 25 bp, Homo sapien
tgctctcggctctgcagtgccagca

SEQ ID NO: 2711778 - DNA, 25 bp, Homo sapien
tccttgggcacgtagatgatgctgc

SEQ ID NO: 2711779 - DNA, 25 bp, Homo sapien
tatccagtgccaacctcagatgtgg

SEQ ID NO: 2711780 - DNA, 25 bp, Homo sapien
gaaacgcagctcgtgcctcttgtgc

SEQ ID NO: 2711781 - DNA, 25 bp, Homo sapien
cttgtccaggtccaacttgcacagg

SEQ ID NO: 2711782 - DNA, 25 bp, Homo sapien
agctcccccaactggcttgctcact

SEQ ID NO: 2711783 - DNA, 25 bp, Homo sapien
tgtccaggtccaacttgcacaggag

SEQ ID NO: 2711784 - DNA, 25 bp, Homo sapien
ccaggtccaacttgcacaggaggac

SEQ ID NO: 2711785 - DNA, 25 bp, Homo sapien
tcccctggggttgagcccgtgttga

SEQ ID NO: 2711786 - DNA, 25 bp, Homo sapien
ccctggggttgagcccgtgttgagt

SEQ ID NO: 2711787 - DNA, 25 bp, Homo sapien
tggggttgagcccgtgttgagtggc

SEQ ID NO: 2711788 - DNA, 25 bp, Homo sapien
ggttgagcccgtgttgagtggccac

SEQ ID NO: 2711789 - DNA, 25 bp, Homo sapien
tgaattcaggagacatttattaagc

SEQ ID NO: 2711790 - DNA, 25 bp, Homo sapien
taagcacctactgttgtgccagctc

SEQ ID NO: 2711791 - DNA, 25 bp, Homo sapien
gcacctactgttgtgccagctctgt

SEQ ID NO: 2711792 - DNA, 25 bp, Homo sapien
ttaagcacctactgttgtgccagct

SEQ ID NO: 2711793 - DNA, 25 bp, Homo sapien
ctgccaggctcaagtaagtctccta

SEQ ID NO: 2711794 - DNA, 25 bp, Homo sapien
caggctcaagtaagtctcctacctt

SEQ ID NO: 2711795 - DNA, 25 bp, Homo sapien
cacacctggataattgttttgtaac

SEQ ID NO: 2711796 - DNA, 25 bp, Homo sapien
tgcgcccggcctactccttctcttt

SEQ ID NO: 2711797 - DNA, 25 bp, Homo sapien
ctccaactcccccagcacatgataa

SEQ ID NO: 2711798 - DNA, 25 bp, Homo sapien
caaatgtttgtcagcaactatcctg

SEQ ID NO: 2711799 - DNA, 25 bp, Homo sapien
aatgtttgtcagcaactatcctgtg

SEQ ID NO: 2711800 - DNA, 25 bp, Homo sapien
ccaactcccccagcacatgataatt

SEQ ID NO: 2711801 - DNA, 25 bp, Homo sapien
tctcccggcggccaagggtagaaca

SEQ ID NO: 2711802 - DNA, 25 bp, Homo sapien
gtgatcacaggtctcccggcggcca

SEQ ID NO: 2711803 - DNA, 25 bp, Homo sapien
cacacccacgctgtcagaatctgag

SEQ ID NO: 2711804 - DNA, 25 bp, Homo sapien
gggtagaacagttgtcacccacacc

SEQ ID NO: 2711805 - DNA, 25 bp, Homo sapien
cccaggtctacagaatggtcagaac

SEQ ID NO: 2711806 - DNA, 25 bp, Homo sapien
tggcaggccaggtcaccttacccag

SEQ ID NO: 2711807 - DNA, 25 bp, Homo sapien
ttttcagcctgcatacaggatgggc

SEQ ID NO: 2711808 - DNA, 25 bp, Homo sapien
tgagtcccacccatccttagtcttc

SEQ ID NO: 2711809 - DNA, 25 bp, Homo sapien
gctcattgagcccttcagttctgcc

SEQ ID NO: 2711810 - DNA, 25 bp, Homo sapien
gagaagccaatgatacgggtgatct

SEQ ID NO: 2711811 - DNA, 25 bp, Homo sapien
acgggtgatcttgcggcccgcagcc

SEQ ID NO: 2711812 - DNA, 25 bp, Homo sapien
tcttggagaagccaatgatacgggt

SEQ ID NO: 2711813 - DNA, 25 bp, Homo sapien
tgagcacccttcctccccgtgccct

SEQ ID NO: 2711814 - DNA, 25 bp, Homo sapien
agcacccttcctccccgtgccctgg

SEQ ID NO: 2711815 - DNA, 25 bp, Homo sapien
ctgagcacccttcctccccgtgccc

SEQ ID NO: 2711816 - DNA, 25 bp, Homo sapien
gcacccttcctccccgtgccctgga

SEQ ID NO: 2711817 - DNA, 25 bp, Homo sapien
gagacaatggtgtgaggttcccata

SEQ ID NO: 2711818 - DNA, 25 bp, Homo sapien
atggtgtgaggttcccatagcctgc

SEQ ID NO: 2711819 - DNA, 25 bp, Homo sapien
aggagacaatggtgtgaggttccca

SEQ ID NO: 2711820 - DNA, 25 bp, Homo sapien
caatggtgtgaggttcccatagcct

SEQ ID NO: 2711821 - DNA, 25 bp, Homo sapien
tccttgtggaaatacagagtgttgc

SEQ ID NO: 2711822 - DNA, 25 bp, Homo sapien
ccggttgcgcaggatcctgaaggca

SEQ ID NO: 2711823 - DNA, 25 bp, Homo sapien
catgggttcgcaggtccatgtgatc

SEQ ID NO: 2711824 - DNA, 25 bp, Homo sapien
gccttgcagggcgatggcgttcaca

SEQ ID NO: 2711825 - DNA, 25 bp, Homo sapien
gacgatgctggttaaggtctccaca

SEQ ID NO: 2711826 - DNA, 25 bp, Homo sapien
aggagttgcgcccagcactgacgat

SEQ ID NO: 2711827 - DNA, 25 bp, Homo sapien
gcagcgcctccggagtgactctgga

SEQ ID NO: 2711828 - DNA, 25 bp, Homo sapien
gtctccacatccacgtagtcatagt

SEQ ID NO: 2711829 - DNA, 25 bp, Homo sapien
gcatcttttcataaggaacatcatc

SEQ ID NO: 2711830 - DNA, 25 bp, Homo sapien
cactgattctggcaggatcttgcat

SEQ ID NO: 2711831 - DNA, 25 bp, Homo sapien
ttcataaggaacatcatcatagact

SEQ ID NO: 2711832 - DNA, 25 bp, Homo sapien
cttttcataaggaacatcatcatag

SEQ ID NO: 2711833 - DNA, 25 bp, Homo sapien
cagacaccacggaatcagcaggata

SEQ ID NO: 2711834 - DNA, 25 bp, Homo sapien
ttgctcaaaccggagacgatgcctc

SEQ ID NO: 2711835 - DNA, 25 bp, Homo sapien
ggagggccccagcaacttgctcaaa

SEQ ID NO: 2711836 - DNA, 25 bp, Homo sapien
gagccatgctctatgataagaaggg

SEQ ID NO: 2711837 - DNA, 25 bp, Homo sapien
attggaatgtggctctcctcttgct

SEQ ID NO: 2711838 - DNA, 25 bp, Homo sapien
gtctgattggaatgtggctctcctc

SEQ ID NO: 2711839 - DNA, 25 bp, Homo sapien
tgattggaatgtggctctcctcttg

SEQ ID NO: 2711840 - DNA, 25 bp, Homo sapien
cagcgtctgattggaatgtggctct

SEQ ID NO: 2711841 - DNA, 25 bp, Homo sapien
tatccaagaaggtaggttttatcat

SEQ ID NO: 2711842 - DNA, 25 bp, Homo sapien
taattcttgcagttatccaagaagg

SEQ ID NO: 2711843 - DNA, 25 bp, Homo sapien
tgcagttatccaagaaggtaggttt

SEQ ID NO: 2711844 - DNA, 25 bp, Homo sapien
tcttgcagttatccaagaaggtagg

SEQ ID NO: 2711845 - DNA, 25 bp, Homo sapien
gggtccacacgatgggacttctcac

SEQ ID NO: 2711846 - DNA, 25 bp, Homo sapien
gaggcgtggcgtttgactttgacct

SEQ ID NO: 2711847 - DNA, 25 bp, Homo sapien
tttgacctgcgggtccacacgatgg

SEQ ID NO: 2711848 - DNA, 25 bp, Homo sapien
caggaggaggcgtgacgcttcacct

SEQ ID NO: 2711849 - DNA, 25 bp, Homo sapien
ttgccatacttgtattgattggcac

SEQ ID NO: 2711850 - DNA, 25 bp, Homo sapien
tccgaatggcttccttcagttccct

SEQ ID NO: 2711851 - DNA, 25 bp, Homo sapien
gctatcagctctgtccgaatcgtct

SEQ ID NO: 2711852 - DNA, 25 bp, Homo sapien
ctaccaagtacctccgggcatcctc

SEQ ID NO: 2711853 - DNA, 25 bp, Homo sapien
ggactgctgcaagcgctccttcaca

SEQ ID NO: 2711854 - DNA, 25 bp, Homo sapien
ttcagctccaggtcaatccggcgct

SEQ ID NO: 2711855 - DNA, 25 bp, Homo sapien
ccactcttgggcttgctgctcacgg

SEQ ID NO: 2711856 - DNA, 25 bp, Homo sapien
tccagggtggccacggcttcttcca

SEQ ID NO: 2711857 - DNA, 25 bp, Homo sapien
gagaggttgctctggaacgctgttc

SEQ ID NO: 2711858 - DNA, 25 bp, Homo sapien
ccttccttggttggaggctacgatg

SEQ ID NO: 2711859 - DNA, 25 bp, Homo sapien
gaggctacgatggatgggctcctct

SEQ ID NO: 2711860 - DNA, 25 bp, Homo sapien
ggctttctgtagcacccttccttgg

SEQ ID NO: 2711861 - DNA, 25 bp, Homo sapien
ggaagattccagtagctgcactctg

SEQ ID NO: 2711862 - DNA, 25 bp, Homo sapien
gacttgatttactgagagaccctac

SEQ ID NO: 2711863 - DNA, 25 bp, Homo sapien
tatagaagggcaaactagtgggcct

SEQ ID NO: 2711864 - DNA, 25 bp, Homo sapien
tagcacagtaaggagactgcccagg

SEQ ID NO: 2711865 - DNA, 25 bp, Homo sapien
cctatctggatctgggcttataacc

SEQ ID NO: 2711866 - DNA, 25 bp, Homo sapien
tggtctccagctacctcagagggtg

SEQ ID NO: 2711867 - DNA, 25 bp, Homo sapien
gcaaagtggccacggttattctggg

SEQ ID NO: 2711868 - DNA, 25 bp, Homo sapien
tatgtaacccctatagcaaagtggc

SEQ ID NO: 2711869 - DNA, 25 bp, Homo sapien
gaaaagtggttagttagcaccagga

SEQ ID NO: 2711870 - DNA, 25 bp, Homo sapien
tcttatattcacatgctggctccac

SEQ ID NO: 2711871 - DNA, 25 bp, Homo sapien
caccaggactggctatctaatttaa

SEQ ID NO: 2711872 - DNA, 25 bp, Homo sapien
tagggcaatataacttatctcaggg

SEQ ID NO: 2711873 - DNA, 25 bp, Homo sapien
tttttcctccaactagaatgtgagc

SEQ ID NO: 2711874 - DNA, 25 bp, Homo sapien
gagcttcatgaggtgtctgtcttgt

SEQ ID NO: 2711875 - DNA, 25 bp, Homo sapien
tccagggcacttggagttgccagct

SEQ ID NO: 2711876 - DNA, 25 bp, Homo sapien
gccagcttagttactggatagtccc

SEQ ID NO: 2711877 - DNA, 25 bp, Homo sapien
taactcagactagatggtgccctga

SEQ ID NO: 2711878 - DNA, 25 bp, Homo sapien
tgaactgaactgaccccatgacagt

SEQ ID NO: 2711879 - DNA, 25 bp, Homo sapien
gagagaccttcctaaccactgtaaa

SEQ ID NO: 2711880 - DNA, 25 bp, Homo sapien
tgggcaggccatcctcaacctttgt

SEQ ID NO: 2711881 - DNA, 25 bp, Homo sapien
gatgctcccgcttaaaaaccagcct

SEQ ID NO: 2711882 - DNA, 25 bp, Homo sapien
gagatgctcccgcttaaaaaccagc

SEQ ID NO: 2711883 - DNA, 25 bp, Homo sapien
cctttgcgggcgtttccctctcagg

SEQ ID NO: 2711884 - DNA, 25 bp, Homo sapien
agatgctcccgcttaaaaaccagcc

SEQ ID NO: 2711885 - DNA, 25 bp, Homo sapien
ggctgagaggcagcgcacgcgcact

SEQ ID NO: 2711886 - DNA, 25 bp, Homo sapien
ctgagaggcagcgcacgcgcacttg

SEQ ID NO: 2711887 - DNA, 25 bp, Homo sapien
ttccaatttgggctgagaggcagcg

SEQ ID NO: 2711888 - DNA, 25 bp, Homo sapien
gtttccaatttgggctgagaggcag

SEQ ID NO: 2711889 - DNA, 25 bp, Homo sapien
acgcggcactccaggccagtaggcg

SEQ ID NO: 2711890 - DNA, 25 bp, Homo sapien
tctcccacgcggcactccaggccag

SEQ ID NO: 2711891 - DNA, 25 bp, Homo sapien
ccgcccacagcgaccgtacggccat

SEQ ID NO: 2711892 - DNA, 25 bp, Homo sapien
ttgctctcccacgcggcactccagg

SEQ ID NO: 2711893 - DNA, 25 bp, Homo sapien
taagaaagaggcacggctgatggcc

SEQ ID NO: 2711894 - DNA, 25 bp, Homo sapien
gtgagtgcacggtcgtagaggccga

SEQ ID NO: 2711895 - DNA, 25 bp, Homo sapien
ctaagaaagaggcacggctgatggc

SEQ ID NO: 2711896 - DNA, 25 bp, Homo sapien
gggccgtgagtgcacggtcgtagag

SEQ ID NO: 2711897 - DNA, 25 bp, Homo sapien
catgcatgacctcggatctccttac

SEQ ID NO: 2711898 - DNA, 25 bp, Homo sapien
gcatgacctcggatctccttacctt

SEQ ID NO: 2711899 - DNA, 25 bp, Homo sapien
ggccatgcatgacctcggatctcct

SEQ ID NO: 2711900 - DNA, 25 bp, Homo sapien
tccaggccatgcatgacctcggatc

SEQ ID NO: 2711901 - DNA, 25 bp, Homo sapien
cccaagctcatcaggagggtcctca

SEQ ID NO: 2711902 - DNA, 25 bp, Homo sapien
agggtcctcagaacggcagtcctca

SEQ ID NO: 2711903 - DNA, 25 bp, Homo sapien
ccttaaggctcgttcagcaagaggg

SEQ ID NO: 2711904 - DNA, 25 bp, Homo sapien
gcagtgctgaatggaagcggccatc

SEQ ID NO: 2711905 - DNA, 25 bp, Homo sapien
taaggataactgagaataagtttta

SEQ ID NO: 2711906 - DNA, 25 bp, Homo sapien
cttaaggataactgagaataagttt

SEQ ID NO: 2711907 - DNA, 25 bp, Homo sapien
acttaaggataactgagaataagtt

SEQ ID NO: 2711908 - DNA, 25 bp, Homo sapien
catctctgggttcgcctccttatgt

SEQ ID NO: 2711909 - DNA, 25 bp, Homo sapien
caaatatcttggcgtcttccacaca

SEQ ID NO: 2711910 - DNA, 25 bp, Homo sapien
gcctccttatgttttcacaatcagc

SEQ ID NO: 2711911 - DNA, 25 bp, Homo sapien
acacatctctgggttcgcctcctta

SEQ ID NO: 2711912 - DNA, 25 bp, Homo sapien
tctgacagccttagactctcaaagt

SEQ ID NO: 2711913 - DNA, 25 bp, Homo sapien
gatctgacagccttagactctcaaa

SEQ ID NO: 2711914 - DNA, 25 bp, Homo sapien
tgatctgacagccttagactctcaa

SEQ ID NO: 2711915 - DNA, 25 bp, Homo sapien
tgacagccttagactctcaaagtgc

SEQ ID NO: 2711916 - DNA, 25 bp, Homo sapien
cacttccactcgggcaagcctaatg

SEQ ID NO: 2711917 - DNA, 25 bp, Homo sapien
ccactcgggcaagcctaatggtgcg

SEQ ID NO: 2711918 - DNA, 25 bp, Homo sapien
gccacttccactcgggcaagcctaa

SEQ ID NO: 2711919 - DNA, 25 bp, Homo sapien
tcgggcaagcctaatggtgcggcca

SEQ ID NO: 2711920 - DNA, 25 bp, Homo sapien
aaacataggtgactgcgctctggga

SEQ ID NO: 2711921 - DNA, 25 bp, Homo sapien
aagaaacataggtgactgcgctctg

SEQ ID NO: 2711922 - DNA, 25 bp, Homo sapien
gaaacataggtgactgcgctctggg

SEQ ID NO: 2711923 - DNA, 25 bp, Homo sapien
aaaagaaacataggtgactgcgctc

SEQ ID NO: 2711924 - DNA, 25 bp, Homo sapien
agggtcctgggtatctcaaatttcg

SEQ ID NO: 2711925 - DNA, 25 bp, Homo sapien
tagagaccgctaggaagaaacatgt

SEQ ID NO: 2711926 - DNA, 25 bp, Homo sapien
gataaaggccattggaacacctgtc

SEQ ID NO: 2711927 - DNA, 25 bp, Homo sapien
gaaatcactggtgcctaaagtcctg

SEQ ID NO: 2711928 - DNA, 25 bp, Homo sapien
agggccctcagttccattccacagg

SEQ ID NO: 2711929 - DNA, 25 bp, Homo sapien
cagtttgctcttggcacgatggtaa

SEQ ID NO: 2711930 - DNA, 25 bp, Homo sapien
caggactcagtgagatcagctcatc

SEQ ID NO: 2711931 - DNA, 25 bp, Homo sapien
tcagctgaaagctcaaccagggccc

SEQ ID NO: 2711932 - DNA, 25 bp, Homo sapien
ggtcaacgcggcgagcagcggggct

SEQ ID NO: 2711933 - DNA, 25 bp, Homo sapien
agcgcggtcaacgcggcgagcagcg

SEQ ID NO: 2711934 - DNA, 25 bp, Homo sapien
cgcggtcaacgcggcgagcagcggg

SEQ ID NO: 2711935 - DNA, 25 bp, Homo sapien
cggcggcgaggagcgcggtcaacgc

SEQ ID NO: 2711936 - DNA, 25 bp, Homo sapien
cctagccacactgtattcaaacgat

SEQ ID NO: 2711937 - DNA, 25 bp, Homo sapien
tcctagccacactgtattcaaacga

SEQ ID NO: 2711938 - DNA, 25 bp, Homo sapien
taaggcctagaagctgcccaagatc

SEQ ID NO: 2711939 - DNA, 25 bp, Homo sapien
gagaaattgatattaaggcctagaa

SEQ ID NO: 2711940 - DNA, 25 bp, Homo sapien
gacaccaattctctaatttacagta

SEQ ID NO: 2711941 - DNA, 25 bp, Homo sapien
cattgtgaaccagctcatttaacac

SEQ ID NO: 2711942 - DNA, 25 bp, Homo sapien
aggtgagtcaggtgttcctcctgca

SEQ ID NO: 2711943 - DNA, 25 bp, Homo sapien
cctgcatattcccacagcacactct

SEQ ID NO: 2711944 - DNA, 25 bp, Homo sapien
gtgagtcaggtgttcctcctgcata

SEQ ID NO: 2711945 - DNA, 25 bp, Homo sapien
ctgaggtgagtcaggtgttcctcct

SEQ ID NO: 2711946 - DNA, 25 bp, Homo sapien
actttgtatcctcctgcgctggtgg

SEQ ID NO: 2711947 - DNA, 25 bp, Homo sapien
tcccaggtgcttaaatttcctaggc

SEQ ID NO: 2711948 - DNA, 25 bp, Homo sapien
gaatactgaaagtcaggatgaccaa

SEQ ID NO: 2711949 - DNA, 25 bp, Homo sapien
tccaaaaggaaatctgcggactgag

SEQ ID NO: 2711950 - DNA, 25 bp, Homo sapien
ctggagaaaatgggccacagcagag

SEQ ID NO: 2711951 - DNA, 25 bp, Homo sapien
gagcccccaatcccagccccaacca

SEQ ID NO: 2711952 - DNA, 25 bp, Homo sapien
acagcagagcccccaatcccagccc

SEQ ID NO: 2711953 - DNA, 25 bp, Homo sapien
tggagaaaatgggccacagcagagc

SEQ ID NO: 2711954 - DNA, 25 bp, Homo sapien
gatggtggccaagcggccacccacg

SEQ ID NO: 2711955 - DNA, 25 bp, Homo sapien
gtacacgtcgatctgcacccgaggt

SEQ ID NO: 2711956 - DNA, 25 bp, Homo sapien
gcttgacgaagtcctgcatgtgcag

SEQ ID NO: 2711957 - DNA, 25 bp, Homo sapien
ccgctctcatagtgctgcttgttga

SEQ ID NO: 2711958 - DNA, 25 bp, Homo sapien
tggccttgggcactgagatcacttg

SEQ ID NO: 2711959 - DNA, 25 bp, Homo sapien
taaaatgagattgggccacatgacc

SEQ ID NO: 2711960 - DNA, 25 bp, Homo sapien
gcctggcaagcactagcatgtggaa

SEQ ID NO: 2711961 - DNA, 25 bp, Homo sapien
gaccacctgtagcatcacttctgag

SEQ ID NO: 2711962 - DNA, 25 bp, Homo sapien
tgccatagtgccaccagaggcggaa

SEQ ID NO: 2711963 - DNA, 25 bp, Homo sapien
gcatgaagtgctccccgccgaagat

SEQ ID NO: 2711964 - DNA, 25 bp, Homo sapien
ggaagaggttcagcaggtaccagtc

SEQ ID NO: 2711965 - DNA, 25 bp, Homo sapien
ggaagctgatgccatagtgccacca

SEQ ID NO: 2711966 - DNA, 25 bp, Homo sapien
tgagtagatctagccacatgaggtg

SEQ ID NO: 2711967 - DNA, 25 bp, Homo sapien
tctaggacctgatgacacactgcaa

SEQ ID NO: 2711968 - DNA, 25 bp, Homo sapien
gaaaagatttcacacacgactctgg

SEQ ID NO: 2711969 - DNA, 25 bp, Homo sapien
caaagtttgcaaatgagtggtccac

SEQ ID NO: 2711970 - DNA, 25 bp, Homo sapien
tcctccacacccgagaaggcatagc

SEQ ID NO: 2711971 - DNA, 25 bp, Homo sapien
cacacccgagaaggcatagccgtgg

SEQ ID NO: 2711972 - DNA, 25 bp, Homo sapien
cccgagaaggcatagccgtgggcct

SEQ ID NO: 2711973 - DNA, 25 bp, Homo sapien
tccacacccgagaaggcatagccgt

SEQ ID NO: 2711974 - DNA, 25 bp, Homo sapien
caggacagcagaaacgacatcatca

SEQ ID NO: 2711975 - DNA, 25 bp, Homo sapien
agcagggactcagccacagagtgct

SEQ ID NO: 2711976 - DNA, 25 bp, Homo sapien
gaaacgacatcatcaataaagcgct

SEQ ID NO: 2711977 - DNA, 25 bp, Homo sapien
tcaataaagcgctgcgtgacgccca

SEQ ID NO: 2711978 - DNA, 25 bp, Homo sapien
caaaggcgggcatcgctgctgactg

SEQ ID NO: 2711979 - DNA, 25 bp, Homo sapien
cgggcatcgctgctgactggccata

SEQ ID NO: 2711980 - DNA, 25 bp, Homo sapien
gggcatcgctgctgactggccatag

SEQ ID NO: 2711981 - DNA, 25 bp, Homo sapien
ctgcaaaggcgggcatcgctgctga

SEQ ID NO: 2711982 - DNA, 25 bp, Homo sapien
ttcagcaaaccggaacaaaccagct

SEQ ID NO: 2711983 - DNA, 25 bp, Homo sapien
catggatcacattggccttggtgag

SEQ ID NO: 2711984 - DNA, 25 bp, Homo sapien
cttgggccccggctagtgacatggc

SEQ ID NO: 2711985 - DNA, 25 bp, Homo sapien
gaacaaaccagcttattgcctcctt

SEQ ID NO: 2711986 - DNA, 25 bp, Homo sapien
tctcatacgccacctggtacagggc

SEQ ID NO: 2711987 - DNA, 25 bp, Homo sapien
gaaagagccctgcacgtcatcaatg

SEQ ID NO: 2711988 - DNA, 25 bp, Homo sapien
tcatggagtgcaaacctcgggagcg

SEQ ID NO: 2711989 - DNA, 25 bp, Homo sapien
taccagcggttgtaagccagcaagg

SEQ ID NO: 2711990 - DNA, 25 bp, Homo sapien
tgatgagaaagtaccaggctaacct

SEQ ID NO: 2711991 - DNA, 25 bp, Homo sapien
gccgccgtgtggacccttaatatag

SEQ ID NO: 2711992 - DNA, 25 bp, Homo sapien
gagcatggcttattcagtcctgggc

SEQ ID NO: 2711993 - DNA, 25 bp, Homo sapien
gatatggtgacgactattcaggcac

SEQ ID NO: 2711994 - DNA, 25 bp, Homo sapien
gtttgtgtcttctgtgcacaaattc

SEQ ID NO: 2711995 - DNA, 25 bp, Homo sapien
ggtttgtgtcttctgtgcacaaatt

SEQ ID NO: 2711996 - DNA, 25 bp, Homo sapien
tttgtgtcttctgtgcacaaattct

SEQ ID NO: 2711997 - DNA, 25 bp, Homo sapien
tctgaaggacatagccagttccaat

SEQ ID NO: 2711998 - DNA, 25 bp, Homo sapien
gattgtgggcattttggctggcttt

SEQ ID NO: 2711999 - DNA, 25 bp, Homo sapien
ggattgtgggcattttggctggctt

SEQ ID NO: 2712000 - DNA, 25 bp, Homo sapien
caaaggcgtcctgttggttcttatt

SEQ ID NO: 2712001 - DNA, 25 bp, Homo sapien
ctggggcaaaggcgtcctgttggtt

SEQ ID NO: 2712002 - DNA, 25 bp, Homo sapien
ggcaaaggcgtcctgttggttctta

SEQ ID NO: 2712003 - DNA, 25 bp, Homo sapien
tggggcaaaggcgtcctgttggttc

SEQ ID NO: 2712004 - DNA, 25 bp, Homo sapien
ggactgaggatgtgtggccctttac

SEQ ID NO: 2712005 - DNA, 25 bp, Homo sapien
caggactgaggatgtgtggcccttt

SEQ ID NO: 2712006 - DNA, 25 bp, Homo sapien
ttaaacgtctactacactgcatcca

SEQ ID NO: 2712007 - DNA, 25 bp, Homo sapien
tactacactgcatccaggactgagg

SEQ ID NO: 2712008 - DNA, 25 bp, Homo sapien
aggaagcttcggctgggttccagac

SEQ ID NO: 2712009 - DNA, 25 bp, Homo sapien
ggtcttaagacttcagccccacatg

SEQ ID NO: 2712010 - DNA, 25 bp, Homo sapien
ggaaaacagacttcctgtgccagcg

SEQ ID NO: 2712011 - DNA, 25 bp, Homo sapien
tgtgccagcgcatgctgatcccttc

SEQ ID NO: 2712012 - DNA, 25 bp, Homo sapien
gaggcacggtgcctgtgtctgggct

SEQ ID NO: 2712013 - DNA, 25 bp, Homo sapien
gaggaccgcagcatggtgagcgtgc

SEQ ID NO: 2712014 - DNA, 25 bp, Homo sapien
tgtgtgaaccccttcaccatgcagg

SEQ ID NO: 2712015 - DNA, 25 bp, Homo sapien
tgagcgtgccggtgttcagccaggt

SEQ ID NO: 2712016 - DNA, 25 bp, Homo sapien
gaccttgaagctggataaccttggg

SEQ ID NO: 2712017 - DNA, 25 bp, Homo sapien
cagtttcctcacgtggaacatggag

SEQ ID NO: 2712018 - DNA, 25 bp, Homo sapien
acagcgcaacctagtactgggatgg

SEQ ID NO: 2712019 - DNA, 25 bp, Homo sapien
aggaaacacatgagggccctaggtg

SEQ ID NO: 2712020 - DNA, 25 bp, Homo sapien
tacatgtccacaggtccagttcacc

SEQ ID NO: 2712021 - DNA, 25 bp, Homo sapien
tgccaatgaatcactcagggatctg

SEQ ID NO: 2712022 - DNA, 25 bp, Homo sapien
cattggaagggtcggtaaagatcct

SEQ ID NO: 2712023 - DNA, 25 bp, Homo sapien
taatttgacacatgaagctagtggc

SEQ ID NO: 2712024 - DNA, 25 bp, Homo sapien
ctgtgatgatgtaaagtccagtatg

SEQ ID NO: 2712025 - DNA, 25 bp, Homo sapien
gtgatgatgtaaagtccagtatggt

SEQ ID NO: 2712026 - DNA, 25 bp, Homo sapien
gtagccactagcctcatgcagctac

SEQ ID NO: 2712027 - DNA, 25 bp, Homo sapien
agccactagcctcatgcagctactg

SEQ ID NO: 2712028 - DNA, 25 bp, Homo sapien
agctgattgtcttagctggccctgt

SEQ ID NO: 2712029 - DNA, 25 bp, Homo sapien
cttgccatcccctaagcaaacgaag

SEQ ID NO: 2712030 - DNA, 25 bp, Homo sapien
aggcggaggtgccaccggccagagc

SEQ ID NO: 2712031 - DNA, 25 bp, Homo sapien
cctaagcaaacgaagctgattgtct

SEQ ID NO: 2712032 - DNA, 25 bp, Homo sapien
cactcctggccagcacaatttgaga

SEQ ID NO: 2712033 - DNA, 25 bp, Homo sapien
actcctggccagcacaatttgagaa

SEQ ID NO: 2712034 - DNA, 25 bp, Homo sapien
tcctggccagcacaatttgagaaca

SEQ ID NO: 2712035 - DNA, 25 bp, Homo sapien
cctggccagcacaatttgagaacat

SEQ ID NO: 2712036 - DNA, 25 bp, Homo sapien
aggccaggacaatcagccgtaagtc

SEQ ID NO: 2712037 - DNA, 25 bp, Homo sapien
cagagtgagggcgtacagcttcaga

SEQ ID NO: 2712038 - DNA, 25 bp, Homo sapien
cctcatggatctgaaacttggccag

SEQ ID NO: 2712039 - DNA, 25 bp, Homo sapien
gagcggagaccaccccaggagggag

SEQ ID NO: 2712040 - DNA, 25 bp, Homo sapien
gacctcacaaacttgtggcctgaat

SEQ ID NO: 2712041 - DNA, 25 bp, Homo sapien
gtcatccgacctcacaaacttgtgg

SEQ ID NO: 2712042 - DNA, 25 bp, Homo sapien
tgtggcctgaatcttggaggcctag

SEQ ID NO: 2712043 - DNA, 25 bp, Homo sapien
atcttggaggcctagacctctctca

SEQ ID NO: 2712044 - DNA, 25 bp, Homo sapien
gaccccgacacctggaatcggtgac

SEQ ID NO: 2712045 - DNA, 25 bp, Homo sapien
atcggtgaccccgacacctggaatc

SEQ ID NO: 2712046 - DNA, 25 bp, Homo sapien
tcggtgaccccgacaccgcctgtgt

SEQ ID NO: 2712047 - DNA, 25 bp, Homo sapien
tggaatcggtgaccccgacacctgg

SEQ ID NO: 2712048 - DNA, 25 bp, Homo sapien
tgcattcttctgctggttctagcct

SEQ ID NO: 2712049 - DNA, 25 bp, Homo sapien
gtgggcccgctggaaataggcacct

SEQ ID NO: 2712050 - DNA, 25 bp, Homo sapien
tggccttgccaacgctctagggtgg

SEQ ID NO: 2712051 - DNA, 25 bp, Homo sapien
tgggcaagttcttagaccaaatcct

SEQ ID NO: 2712052 - DNA, 25 bp, Homo sapien
ggctgcaccctcctggtcgcagcca

SEQ ID NO: 2712053 - DNA, 25 bp, Homo sapien
agcaaaggcgccgactagcctcttc

SEQ ID NO: 2712054 - DNA, 25 bp, Homo sapien
ccctcctggtcgcagccagcaaagg

SEQ ID NO: 2712055 - DNA, 25 bp, Homo sapien
gcagccagcaaaggcgccgactagc

SEQ ID NO: 2712056 - DNA, 25 bp, Homo sapien
cttaaaatagcacctcttggctggg

SEQ ID NO: 2712057 - DNA, 25 bp, Homo sapien
catttgtgcaaatatgggcctggga

SEQ ID NO: 2712058 - DNA, 25 bp, Homo sapien
agtgagcagcgaggcaagcatttgt

SEQ ID NO: 2712059 - DNA, 25 bp, Homo sapien
caccaacaatgttcccgtccaggga

SEQ ID NO: 2712060 - DNA, 25 bp, Homo sapien
gcagggcaaatgtccaaccaccatt

SEQ ID NO: 2712061 - DNA, 25 bp, Homo sapien
caaaggcacttagaaagcgttcccg

SEQ ID NO: 2712062 - DNA, 25 bp, Homo sapien
tagagagatgatacccagcaaaggc

SEQ ID NO: 2712063 - DNA, 25 bp, Homo sapien
cattgcctgaagtctgccgtgcttt

SEQ ID NO: 2712064 - DNA, 25 bp, Homo sapien
tccagacgtcctgtaaactctgagc

SEQ ID NO: 2712065 - DNA, 25 bp, Homo sapien
actctgagcagaggataaacatccc

SEQ ID NO: 2712066 - DNA, 25 bp, Homo sapien
gatcttgtgaatccagacgtcctgt

SEQ ID NO: 2712067 - DNA, 25 bp, Homo sapien
aattccagatcttgtgaatccagac

SEQ ID NO: 2712068 - DNA, 25 bp, Homo sapien
tgagctgtgggctggtcctaaaata

SEQ ID NO: 2712069 - DNA, 25 bp, Homo sapien
gctggtcctaaaatatcgatactgt

SEQ ID NO: 2712070 - DNA, 25 bp, Homo sapien
agaacataagctcaggaataggcca

SEQ ID NO: 2712071 - DNA, 25 bp, Homo sapien
tcctcatcctgcattagaacataag

SEQ ID NO: 2712072 - DNA, 25 bp, Homo sapien
ctccacatgccccgagggctgaggt

SEQ ID NO: 2712073 - DNA, 25 bp, Homo sapien
agcagttcccatgcatgcaggaggt

SEQ ID NO: 2712074 - DNA, 25 bp, Homo sapien
cacatgccccgagggctgaggtcat

SEQ ID NO: 2712075 - DNA, 25 bp, Homo sapien
gcagttcccatgcatgcaggaggtg

SEQ ID NO: 2712076 - DNA, 25 bp, Homo sapien
atggaaatttggcaagatttcacat

SEQ ID NO: 2712077 - DNA, 25 bp, Homo sapien
ggcaagatttcacattctggagaca

SEQ ID NO: 2712078 - DNA, 25 bp, Homo sapien
aactgaccttccaatggaaatttgg

SEQ ID NO: 2712079 - DNA, 25 bp, Homo sapien
gaccttccaatggaaatttggcaag

SEQ ID NO: 2712080 - DNA, 25 bp, Homo sapien
tgccttctcacattagagcaattac

SEQ ID NO: 2712081 - DNA, 25 bp, Homo sapien
atcagcatctgcgtgggtccttggc

SEQ ID NO: 2712082 - DNA, 25 bp, Homo sapien
gcgtgggtccttggctggacacctt

SEQ ID NO: 2712083 - DNA, 25 bp, Homo sapien
cattagagcaattaccgaggcttct

SEQ ID NO: 2712084 - DNA, 25 bp, Homo sapien
gctgctggttccagtgctcattcac

SEQ ID NO: 2712085 - DNA, 25 bp, Homo sapien
ctctaactgctgctggttccagtgc

SEQ ID NO: 2712086 - DNA, 25 bp, Homo sapien
tgctggttccagtgctcattcactt

SEQ ID NO: 2712087 - DNA, 25 bp, Homo sapien
ggttccagtgctcattcactttccc

SEQ ID NO: 2712088 - DNA, 25 bp, Homo sapien
tcctctattgcacaccggccagtcg

SEQ ID NO: 2712089 - DNA, 25 bp, Homo sapien
acagctcagtgacgggcctgccatg

SEQ ID NO: 2712090 - DNA, 25 bp, Homo sapien
cgtcctccattgcacacagttcaat

SEQ ID NO: 2712091 - DNA, 25 bp, Homo sapien
cagaattgcattcccaggaatgaca

SEQ ID NO: 2712092 - DNA, 25 bp, Homo sapien
atgtccacggttctagtttcttgct

SEQ ID NO: 2712093 - DNA, 25 bp, Homo sapien
catgagagtgtgacttcccctggca

SEQ ID NO: 2712094 - DNA, 25 bp, Homo sapien
agagtgtgacttcccctggcaggct

SEQ ID NO: 2712095 - DNA, 25 bp, Homo sapien
tgtgacttcccctggcaggctctgt

SEQ ID NO: 2712096 - DNA, 25 bp, Homo sapien
gagccagcctgtttggggagtggtt

SEQ ID NO: 2712097 - DNA, 25 bp, Homo sapien
ggtgtcactgcttctcaactaatta

SEQ ID NO: 2712098 - DNA, 25 bp, Homo sapien
tctcaactaattagacccagcctct

SEQ ID NO: 2712099 - DNA, 25 bp, Homo sapien
cactgcttctcaactaattagaccc

SEQ ID NO: 2712100 - DNA, 25 bp, Homo sapien
gggtctggtccaggtgtggctcctt

SEQ ID NO: 2712101 - DNA, 25 bp, Homo sapien
ggtctggtccaggtgtggctccttg

SEQ ID NO: 2712102 - DNA, 25 bp, Homo sapien
ctggggtctggtccaggtgtggctc

SEQ ID NO: 2712103 - DNA, 25 bp, Homo sapien
tctggtccaggtgtggctccttggg

SEQ ID NO: 2712104 - DNA, 25 bp, Homo sapien
gaactagagccgatcagctggatgg

SEQ ID NO: 2712105 - DNA, 25 bp, Homo sapien
caatggccttgctatacagatggga

SEQ ID NO: 2712106 - DNA, 25 bp, Homo sapien
caaagttcagactcggctcagggac

SEQ ID NO: 2712107 - DNA, 25 bp, Homo sapien
gaagcactgcctatgtagaagccag

SEQ ID NO: 2712108 - DNA, 25 bp, Homo sapien
tgaggctcaaacagcaagcaacttg

SEQ ID NO: 2712109 - DNA, 25 bp, Homo sapien
ggcagctggcacacacaacttaaca

SEQ ID NO: 2712110 - DNA, 25 bp, Homo sapien
cagagtgttttcagaggagcccgac

SEQ ID NO: 2712111 - DNA, 25 bp, Homo sapien
cagtttgtgagagtcctaggccgcc

SEQ ID NO: 2712112 - DNA, 25 bp, Homo sapien
tgcttcaaggaaactgatggcttca

SEQ ID NO: 2712113 - DNA, 25 bp, Homo sapien
catacacagctgatggaagcataac

SEQ ID NO: 2712114 - DNA, 25 bp, Homo sapien
gaaactctggcttatgggtcctagg

SEQ ID NO: 2712115 - DNA, 25 bp, Homo sapien
tggttcttcgaaccaccccatggcg

SEQ ID NO: 2712116 - DNA, 25 bp, Homo sapien
tctgcaacttgtgcatggagggcaa

SEQ ID NO: 2712117 - DNA, 25 bp, Homo sapien
acctttgattggacccgggccactg

SEQ ID NO: 2712118 - DNA, 25 bp, Homo sapien
gggcaaagttctagacgccctcgtg

SEQ ID NO: 2712119 - DNA, 25 bp, Homo sapien
tcctgatgagggtgctctgcaactt

SEQ ID NO: 2712120 - DNA, 25 bp, Homo sapien
aatgagtcaacctctgtgggccacg

SEQ ID NO: 2712121 - DNA, 25 bp, Homo sapien
tctcagagtgctgggtaaatctcca

SEQ ID NO: 2712122 - DNA, 25 bp, Homo sapien
cacagatccattgcgggtggtccta

SEQ ID NO: 2712123 - DNA, 25 bp, Homo sapien
caacagcctcttttgcaagtgggca

SEQ ID NO: 2712124 - DNA, 25 bp, Homo sapien
ctttgtctcattcctgccgggcaga

SEQ ID NO: 2712125 - DNA, 25 bp, Homo sapien
tcctggaatttccacgcagactctc

SEQ ID NO: 2712126 - DNA, 25 bp, Homo sapien
cagactctctggagcgtgtgaacag

SEQ ID NO: 2712127 - DNA, 25 bp, Homo sapien
aggccatcagctgaatgttccccgg

SEQ ID NO: 2712128 - DNA, 25 bp, Homo sapien
tggcccaggcgatgtagttgcccac

SEQ ID NO: 2712129 - DNA, 25 bp, Homo sapien
tcacaggcggtttggccatgccctt

SEQ ID NO: 2712130 - DNA, 25 bp, Homo sapien
gtgactcagcccaagaggatgcttg

SEQ ID NO: 2712131 - DNA, 25 bp, Homo sapien
tggtcttgagcatctagggaaggct

SEQ ID NO: 2712132 - DNA, 25 bp, Homo sapien
tgtgaagagtgtaccatagtctcca

SEQ ID NO: 2712133 - DNA, 25 bp, Homo sapien
tcatatgaagagttagggcacagcc

SEQ ID NO: 2712134 - DNA, 25 bp, Homo sapien
ggagaccatctctggccattcaaag

SEQ ID NO: 2712135 - DNA, 25 bp, Homo sapien
gagatagttgcatcctgcctgggca

SEQ ID NO: 2712136 - DNA, 25 bp, Homo sapien
agaaactggtgcatcaaggaatgag

SEQ ID NO: 2712137 - DNA, 25 bp, Homo sapien
tgtgaatgccggtgaatggccggca

SEQ ID NO: 2712138 - DNA, 25 bp, Homo sapien
aatgccggtgaatggccggcataga

SEQ ID NO: 2712139 - DNA, 25 bp, Homo sapien
gtgaatggccggcatagatctccat

SEQ ID NO: 2712140 - DNA, 25 bp, Homo sapien
tgggtgtgaatgccggtgaatggcc

SEQ ID NO: 2712141 - DNA, 25 bp, Homo sapien
gaagaccatctgaaccctggaaagc

SEQ ID NO: 2712142 - DNA, 25 bp, Homo sapien
tttttacagagtgataaccggagtc

SEQ ID NO: 2712143 - DNA, 25 bp, Homo sapien
tccactttactgaggcgccagtggt

SEQ ID NO: 2712144 - DNA, 25 bp, Homo sapien
gtgcctggctgaattaggtaccatt

SEQ ID NO: 2712145 - DNA, 25 bp, Homo sapien
gctctggggagttttgagcaagctc

SEQ ID NO: 2712146 - DNA, 25 bp, Homo sapien
agttttgagcaagctctgggaacgc

SEQ ID NO: 2712147 - DNA, 25 bp, Homo sapien
ttttgagcaagctctgggaacgcag

SEQ ID NO: 2712148 - DNA, 25 bp, Homo sapien
ggagttttgagcaagctctgggaac

SEQ ID NO: 2712149 - DNA, 25 bp, Homo sapien
ctgtgcacttgttacagccgttgct

SEQ ID NO: 2712150 - DNA, 25 bp, Homo sapien
agggccgtagggtttccaccacatg

SEQ ID NO: 2712151 - DNA, 25 bp, Homo sapien
gcacttgttacagccgttgctctcc

SEQ ID NO: 2712152 - DNA, 25 bp, Homo sapien
cagggccgtagggtttccaccacat

SEQ ID NO: 2712153 - DNA, 25 bp, Homo sapien
tcatcgccacggtcgttgcgaaagc

SEQ ID NO: 2712154 - DNA, 25 bp, Homo sapien
gtcaaagctatcatcgccacggtcg

SEQ ID NO: 2712155 - DNA, 25 bp, Homo sapien
gctatcatcgccacggtcgttgcga

SEQ ID NO: 2712156 - DNA, 25 bp, Homo sapien
ggtcgttgcgaaagcccctgtgccc

SEQ ID NO: 2712157 - DNA, 25 bp, Homo sapien
tggctcccaccagctagcgcccttg

SEQ ID NO: 2712158 - DNA, 25 bp, Homo sapien
ggtggctcccaccagctagcgccct

SEQ ID NO: 2712159 - DNA, 25 bp, Homo sapien
atcagcatggcggggtggctcccac

SEQ ID NO: 2712160 - DNA, 25 bp, Homo sapien
ctgacatcagcatggcggggtggct

SEQ ID NO: 2712161 - DNA, 25 bp, Homo sapien
tgtgggtgccggaagggtggaggtg

SEQ ID NO: 2712162 - DNA, 25 bp, Homo sapien
gggagcggatgtgggtgccggaagg

SEQ ID NO: 2712163 - DNA, 25 bp, Homo sapien
gcggatgtgggtgccggaagggtgg

SEQ ID NO: 2712164 - DNA, 25 bp, Homo sapien
atgtgggtgccggaagggtggaggt

SEQ ID NO: 2712165 - DNA, 25 bp, Homo sapien
tcagtgtgtccgagagaccacagct

SEQ ID NO: 2712166 - DNA, 25 bp, Homo sapien
gaccgactgtcagtgtgtccgagag

SEQ ID NO: 2712167 - DNA, 25 bp, Homo sapien
agggagccaaggaccgactgtcagt

SEQ ID NO: 2712168 - DNA, 25 bp, Homo sapien
actgtggcatcctctcagaccccaa

SEQ ID NO: 2712169 - DNA, 25 bp, Homo sapien
ctctgaagcatgccccgagtctcat

SEQ ID NO: 2712170 - DNA, 25 bp, Homo sapien
agatgccacctttaagacagcattg

SEQ ID NO: 2712171 - DNA, 25 bp, Homo sapien
ttctgagctgactccccgctcagcc

SEQ ID NO: 2712172 - DNA, 25 bp, Homo sapien
tcaatctgctcaaggacggggctct

SEQ ID NO: 2712173 - DNA, 25 bp, Homo sapien
gcacatcacacagggcgtggcacag

SEQ ID NO: 2712174 - DNA, 25 bp, Homo sapien
cggcacatcacacagggcgtggcac

SEQ ID NO: 2712175 - DNA, 25 bp, Homo sapien
ggcacatcacacagggcgtggcaca

SEQ ID NO: 2712176 - DNA, 25 bp, Homo sapien
aggaatcgcctggacaacctgggca

SEQ ID NO: 2712177 - DNA, 25 bp, Homo sapien
aattggctggttgtcaaggctcccg

SEQ ID NO: 2712178 - DNA, 25 bp, Homo sapien
ttttgcagaagggaaaactggcttg

SEQ ID NO: 2712179 - DNA, 25 bp, Homo sapien
tctgggttttctcgccaggcctgag

SEQ ID NO: 2712180 - DNA, 25 bp, Homo sapien
tgtttctgcctctgtgttccccatg

SEQ ID NO: 2712181 - DNA, 25 bp, Homo sapien
ttccccatgtcttcaggaaatgtct

SEQ ID NO: 2712182 - DNA, 25 bp, Homo sapien
gtcttctgttgggaggcttggagag

SEQ ID NO: 2712183 - DNA, 25 bp, Homo sapien
ggacctctgtcttctgttgggaggc

SEQ ID NO: 2712184 - DNA, 25 bp, Homo sapien
ctgtgaaaggtgatgttgaaccagg

SEQ ID NO: 2712185 - DNA, 25 bp, Homo sapien
aaaggtgatgttgaaccaggtggcc

SEQ ID NO: 2712186 - DNA, 25 bp, Homo sapien
gatgttgaaccaggtggcctcagtt

SEQ ID NO: 2712187 - DNA, 25 bp, Homo sapien
ggtgatgttgaaccaggtggcctca

SEQ ID NO: 2712188 - DNA, 25 bp, Homo sapien
caaaggctccctcctactctggatc

SEQ ID NO: 2712189 - DNA, 25 bp, Homo sapien
cagtcaggatgagagacaccgcttg

SEQ ID NO: 2712190 - DNA, 25 bp, Homo sapien
ctctggatccccagtcaggatgaga

SEQ ID NO: 2712191 - DNA, 25 bp, Homo sapien
cctactctggatccccagtcaggat

SEQ ID NO: 2712192 - DNA, 25 bp, Homo sapien
cttagcacttgtcccaacccctgcc

SEQ ID NO: 2712193 - DNA, 25 bp, Homo sapien
tgagtcttgcatacttagcacttgt

SEQ ID NO: 2712194 - DNA, 25 bp, Homo sapien
tcccttgagtcttgcatacttagca

SEQ ID NO: 2712195 - DNA, 25 bp, Homo sapien
agctcttcccttgagtcttgcatac

SEQ ID NO: 2712196 - DNA, 25 bp, Homo sapien
gcgcactgcctcttctatgtgccaa

SEQ ID NO: 2712197 - DNA, 25 bp, Homo sapien
tccttgacctggaggacctcggtca

SEQ ID NO: 2712198 - DNA, 25 bp, Homo sapien
gactgagagcctcgctgtccttgac

SEQ ID NO: 2712199 - DNA, 25 bp, Homo sapien
cctcggtcagattgagtagaaggaa

SEQ ID NO: 2712200 - DNA, 25 bp, Homo sapien
tgtgcaagtccttgtgcatccacaa

SEQ ID NO: 2712201 - DNA, 25 bp, Homo sapien
tctacgctgaatgtctcatgccctg

SEQ ID NO: 2712202 - DNA, 25 bp, Homo sapien
ccaagggtacagagctgagaactga

SEQ ID NO: 2712203 - DNA, 25 bp, Homo sapien
tccacaaagctccatgggaagggaa

SEQ ID NO: 2712204 - DNA, 25 bp, Homo sapien
ggaggtagtcccatgcttctgaagg

SEQ ID NO: 2712205 - DNA, 25 bp, Homo sapien
gaatggatcagttgctccctgtgaa

SEQ ID NO: 2712206 - DNA, 25 bp, Homo sapien
tattgctcctacatggaggaccagg

SEQ ID NO: 2712207 - DNA, 25 bp, Homo sapien
gcatctcccctaggtttagaaacga

SEQ ID NO: 2712208 - DNA, 25 bp, Homo sapien
agcctgtgtagaggacagcctctgt

SEQ ID NO: 2712209 - DNA, 25 bp, Homo sapien
caggcaggtcagtaggtcagttctg

SEQ ID NO: 2712210 - DNA, 25 bp, Homo sapien
gtctgtctcttacactcagtctggg

SEQ ID NO: 2712211 - DNA, 25 bp, Homo sapien
cagcctctgtctaaggtattcccag

SEQ ID NO: 2712212 - DNA, 25 bp, Homo sapien
catgatgatggacctaggtaatgcc

SEQ ID NO: 2712213 - DNA, 25 bp, Homo sapien
cactactgaaatcagggccaggtgg

SEQ ID NO: 2712214 - DNA, 25 bp, Homo sapien
ctttcaggtgagcaggcaaagcccc

SEQ ID NO: 2712215 - DNA, 25 bp, Homo sapien
tgtggactacatggctcacctgtga

SEQ ID NO: 2712216 - DNA, 25 bp, Homo sapien
tatgcttggcgcattccagcctaac

SEQ ID NO: 2712217 - DNA, 25 bp, Homo sapien
tgacctaccttttgatgccatgccc

SEQ ID NO: 2712218 - DNA, 25 bp, Homo sapien
taggtctctaatcaagtggccactc

SEQ ID NO: 2712219 - DNA, 25 bp, Homo sapien
tagacaacccctagtcctgggcaga

SEQ ID NO: 2712220 - DNA, 25 bp, Homo sapien
cgctctggtggcctgtggcgggact

SEQ ID NO: 2712221 - DNA, 25 bp, Homo sapien
gctctggtggcctgtggcgggactc

SEQ ID NO: 2712222 - DNA, 25 bp, Homo sapien
gctccgctctggtggcctgtggcgg

SEQ ID NO: 2712223 - DNA, 25 bp, Homo sapien
ctggtggcctgtggcgggactccaa

SEQ ID NO: 2712224 - DNA, 25 bp, Homo sapien
tctctcttcctgagctacagtgctt

SEQ ID NO: 2712225 - DNA, 25 bp, Homo sapien
gactcccaactgaccagagatgcag

SEQ ID NO: 2712226 - DNA, 25 bp, Homo sapien
tgagctacagtgcttcatctcagac

SEQ ID NO: 2712227 - DNA, 25 bp, Homo sapien
ctcagactcccaactgaccagagat

SEQ ID NO: 2712228 - DNA, 25 bp, Homo sapien
gaacttgtgtagaggaacttcccca

SEQ ID NO: 2712229 - DNA, 25 bp, Homo sapien
ctcatgctaagatggacacactggg

SEQ ID NO: 2712230 - DNA, 25 bp, Homo sapien
gggaaatgctaacgcctcatgctaa

SEQ ID NO: 2712231 - DNA, 25 bp, Homo sapien
cagactcgtgaagcagatcgtggca

SEQ ID NO: 2712232 - DNA, 25 bp, Homo sapien
aatgcatgagtccacgacctactgg

SEQ ID NO: 2712233 - DNA, 25 bp, Homo sapien
gacatttgtgacgtgcctggactgg

SEQ ID NO: 2712234 - DNA, 25 bp, Homo sapien
tattaatggcaagtgtccgggtctg

SEQ ID NO: 2712235 - DNA, 25 bp, Homo sapien
gcaataccccggagccaaggttaga

SEQ ID NO: 2712236 - DNA, 25 bp, Homo sapien
ctgggaaaactggaccgtgaggaca

SEQ ID NO: 2712237 - DNA, 25 bp, Homo sapien
gacctcaagaacagtatttccagga

SEQ ID NO: 2712238 - DNA, 25 bp, Homo sapien
tcttagcatctaagggattcctggg

SEQ ID NO: 2712239 - DNA, 25 bp, Homo sapien
caggaatccccatcttagcatctaa

SEQ ID NO: 2712240 - DNA, 25 bp, Homo sapien
cacagatctacgtaaggagggcttt

SEQ ID NO: 2712241 - DNA, 25 bp, Homo sapien
aaatttcccaagagtacggcagtgc

SEQ ID NO: 2712242 - DNA, 25 bp, Homo sapien
tggtggagacaagaaacgcatgcct

SEQ ID NO: 2712243 - DNA, 25 bp, Homo sapien
tcatgtggatgcaataccgcagccc

SEQ ID NO: 2712244 - DNA, 25 bp, Homo sapien
tctctggcaatgtgggagtcggacc

SEQ ID NO: 2712245 - DNA, 25 bp, Homo sapien
cagccctgtcactacggatgaggaa

SEQ ID NO: 2712246 - DNA, 25 bp, Homo sapien
catgaaaagccctagcaagagtacg

SEQ ID NO: 2712247 - DNA, 25 bp, Homo sapien
aaatgccttcaatgcggcctgtgag

SEQ ID NO: 2712248 - DNA, 25 bp, Homo sapien
caggttctttccctgccttcgccac

SEQ ID NO: 2712249 - DNA, 25 bp, Homo sapien
tgatccattccccaagcatgtggaa

SEQ ID NO: 2712250 - DNA, 25 bp, Homo sapien
cccaagcatgtggaaagggagttct

SEQ ID NO: 2712251 - DNA, 25 bp, Homo sapien
gttctggaaggaaccatggcaagga

SEQ ID NO: 2712252 - DNA, 25 bp, Homo sapien
ggagttctggaaggaaccatggcaa

SEQ ID NO: 2712253 - DNA, 25 bp, Homo sapien
gtctgtgggattcgagaagccccat

SEQ ID NO: 2712254 - DNA, 25 bp, Homo sapien
tgtctgtgggattcgagaagcccca

SEQ ID NO: 2712255 - DNA, 25 bp, Homo sapien
cttgggatccttgttgggaaccctg

SEQ ID NO: 2712256 - DNA, 25 bp, Homo sapien
accctgagtcaattctggtgggtga

SEQ ID NO: 2712257 - DNA, 25 bp, Homo sapien
gttgggaaccctgagtcaattctgg

SEQ ID NO: 2712258 - DNA, 25 bp, Homo sapien
gggctgctggttccaaggccaatgg

SEQ ID NO: 2712259 - DNA, 25 bp, Homo sapien
cctttgtgtgggccattgagccata

SEQ ID NO: 2712260 - DNA, 25 bp, Homo sapien
ctcctttgtgtgggccattgagcca

SEQ ID NO: 2712261 - DNA, 25 bp, Homo sapien
tcctttgtgtgggccattgagccat

SEQ ID NO: 2712262 - DNA, 25 bp, Homo sapien
ctttgtgtgggccattgagccatac

SEQ ID NO: 2712263 - DNA, 25 bp, Homo sapien
cagaggcaccaaaatgtgccatttg

SEQ ID NO: 2712264 - DNA, 25 bp, Homo sapien
ccacagttggcgtgtgccggccagt

SEQ ID NO: 2712265 - DNA, 25 bp, Homo sapien
tgccccacatgtctagtcctactgt

SEQ ID NO: 2712266 - DNA, 25 bp, Homo sapien
agcctttgtgagaccgccatctgcc

SEQ ID NO: 2712267 - DNA, 25 bp, Homo sapien
tgtctgattccacagttggcgtgtg

SEQ ID NO: 2712268 - DNA, 25 bp, Homo sapien
tcctcttttcgggaatgtgaattca

SEQ ID NO: 2712269 - DNA, 25 bp, Homo sapien
atgtgaattcaaggcaaagagtgga

SEQ ID NO: 2712270 - DNA, 25 bp, Homo sapien
caagtagatcctcttttcgggaatg

SEQ ID NO: 2712271 - DNA, 25 bp, Homo sapien
ctggacaagtagatcctcttttcgg

SEQ ID NO: 2712272 - DNA, 25 bp, Homo sapien
gcacttgcactaccctgggatggcc

SEQ ID NO: 2712273 - DNA, 25 bp, Homo sapien
gtggggcacttgcactaccctggga

SEQ ID NO: 2712274 - DNA, 25 bp, Homo sapien
gggcacttgcactaccctgggatgg

SEQ ID NO: 2712275 - DNA, 25 bp, Homo sapien
acttgcactaccctgggatggccac

SEQ ID NO: 2712276 - DNA, 25 bp, Homo sapien
tggttcctggaacttgtcgcagtcc

SEQ ID NO: 2712277 - DNA, 25 bp, Homo sapien
ttgtcctgccagagcgtggttcctg

SEQ ID NO: 2712278 - DNA, 25 bp, Homo sapien
ccccgagaaggtgctatgctgcagg

SEQ ID NO: 2712279 - DNA, 25 bp, Homo sapien
cacagtgatcggctccctcttgggt

SEQ ID NO: 2712280 - DNA, 25 bp, Homo sapien
ggagaccaggcacgcagtgggctgt

SEQ ID NO: 2712281 - DNA, 25 bp, Homo sapien
gtggagaccaggcacgcagtgggct

SEQ ID NO: 2712282 - DNA, 25 bp, Homo sapien
caggcacgcagtgggctgtctggat

SEQ ID NO: 2712283 - DNA, 25 bp, Homo sapien
agaccaggcacgcagtgggctgtct

SEQ ID NO: 2712284 - DNA, 25 bp, Homo sapien
tgtaaattgatctaagcagcccatg

SEQ ID NO: 2712285 - DNA, 25 bp, Homo sapien
gaacttggtattgtagctgctgccc

SEQ ID NO: 2712286 - DNA, 25 bp, Homo sapien
gcagttgactttcacccttggagag

SEQ ID NO: 2712287 - DNA, 25 bp, Homo sapien
tctggaaatgctgccgggagcctat

SEQ ID NO: 2712288 - DNA, 25 bp, Homo sapien
caagccagctgatatggtagcaacc

SEQ ID NO: 2712289 - DNA, 25 bp, Homo sapien
gcagagcagatgatcggagcagcat

SEQ ID NO: 2712290 - DNA, 25 bp, Homo sapien
ggtagcaaccaaagattccagtgtt

SEQ ID NO: 2712291 - DNA, 25 bp, Homo sapien
cagtataaactgactctgggcagca

SEQ ID NO: 2712292 - DNA, 25 bp, Homo sapien
agaggccctagggtctacttgtggt

SEQ ID NO: 2712293 - DNA, 25 bp, Homo sapien
tgaggcttcttgtattcaaacttgg

SEQ ID NO: 2712294 - DNA, 25 bp, Homo sapien
caaacttggcctagggcctatgtag

SEQ ID NO: 2712295 - DNA, 25 bp, Homo sapien
taaagtgtggttatgacctgaggct

SEQ ID NO: 2712296 - DNA, 25 bp, Homo sapien
caaaggagcattggtgcctcagagt

SEQ ID NO: 2712297 - DNA, 25 bp, Homo sapien
gaaaacatgacctgggctgaagaag

SEQ ID NO: 2712298 - DNA, 25 bp, Homo sapien
tgggctagaatgagctatagtttct

SEQ ID NO: 2712299 - DNA, 25 bp, Homo sapien
tgattgaagaaaacatgacctgggc

SEQ ID NO: 2712300 - DNA, 25 bp, Homo sapien
attccctatggtgaagtatattctc

SEQ ID NO: 2712301 - DNA, 25 bp, Homo sapien
cttcttaataacatgcatcaaatga

SEQ ID NO: 2712302 - DNA, 25 bp, Homo sapien
tttacctcgctaatacttcttaata

SEQ ID NO: 2712303 - DNA, 25 bp, Homo sapien
aatttggtcacagggtatagtcaga

SEQ ID NO: 2712304 - DNA, 25 bp, Homo sapien
taccagtttctaaacaattgtaatc

SEQ ID NO: 2712305 - DNA, 25 bp, Homo sapien
atttgactgctctattctaccagga

SEQ ID NO: 2712306 - DNA, 25 bp, Homo sapien
tcagcaattcctcagataacaggtc

SEQ ID NO: 2712307 - DNA, 25 bp, Homo sapien
aagagttaaagctggatttgactgc

SEQ ID NO: 2712308 - DNA, 25 bp, Homo sapien
ttaatcatcacatcctccaactctg

SEQ ID NO: 2712309 - DNA, 25 bp, Homo sapien
ttcttgaactcttggaagcctggat

SEQ ID NO: 2712310 - DNA, 25 bp, Homo sapien
tggatgagccacctaatctgcaaga

SEQ ID NO: 2712311 - DNA, 25 bp, Homo sapien
tacagtgaagatgggttcttgaact

SEQ ID NO: 2712312 - DNA, 25 bp, Homo sapien
ttacgaataagaacagatacacact

SEQ ID NO: 2712313 - DNA, 25 bp, Homo sapien
tactgctacgtaaatatccctttga

SEQ ID NO: 2712314 - DNA, 25 bp, Homo sapien
gttgtcttgtagcttgaagggatcc

SEQ ID NO: 2712315 - DNA, 25 bp, Homo sapien
gaagggatcctaaatatcaaaagcc

SEQ ID NO: 2712316 - DNA, 25 bp, Homo sapien
gagtccatgtctccaagactgctgg

SEQ ID NO: 2712317 - DNA, 25 bp, Homo sapien
tccagaacgtcagaaatgtgtagca

SEQ ID NO: 2712318 - DNA, 25 bp, Homo sapien
gaatgcagaccatctaccagctggg

SEQ ID NO: 2712319 - DNA, 25 bp, Homo sapien
ttagaagacctagaagaatacagcg

SEQ ID NO: 2712320 - DNA, 25 bp, Homo sapien
cagggaaccgcatcttcttgctgaa

SEQ ID NO: 2712321 - DNA, 25 bp, Homo sapien
aaccgcatcttcttgctgaaatctt

SEQ ID NO: 2712322 - DNA, 25 bp, Homo sapien
gcatcttcttgctgaaatcttgaat

SEQ ID NO: 2712323 - DNA, 25 bp, Homo sapien
ccgcatcttcttgctgaaatcttga

SEQ ID NO: 2712324 - DNA, 25 bp, Homo sapien
tactgggctgcatctaccgtttatg

SEQ ID NO: 2712325 - DNA, 25 bp, Homo sapien
agtcttccttgaattaccttccagt

SEQ ID NO: 2712326 - DNA, 25 bp, Homo sapien
gactttttctgagttcaccaattgc

SEQ ID NO: 2712327 - DNA, 25 bp, Homo sapien
gtctgaacacactgctctgaataca

SEQ ID NO: 2712328 - DNA, 25 bp, Homo sapien
gcaaattgtgatatttgtggcacaa

SEQ ID NO: 2712329 - DNA, 25 bp, Homo sapien
taaaagtactcagtggctcaagcaa

SEQ ID NO: 2712330 - DNA, 25 bp, Homo sapien
tgatactccccaagcttcttaacct

SEQ ID NO: 2712331 - DNA, 25 bp, Homo sapien
ggagaccaagacacgaggatctctt

SEQ ID NO: 2712332 - DNA, 25 bp, Homo sapien
tcggagtaggtatctctgtctgcca

SEQ ID NO: 2712333 - DNA, 25 bp, Homo sapien
aatgagtgcacttgctgaggctagc

SEQ ID NO: 2712334 - DNA, 25 bp, Homo sapien
ccaaagggtgtcagctgcgaactcg

SEQ ID NO: 2712335 - DNA, 25 bp, Homo sapien
tgcgaactcgattgacttgcctaca

SEQ ID NO: 2712336 - DNA, 25 bp, Homo sapien
aaactggtacggaagatcgggtctg

SEQ ID NO: 2712337 - DNA, 25 bp, Homo sapien
aaacctgactgagcggcggtgatca

SEQ ID NO: 2712338 - DNA, 25 bp, Homo sapien
tggcgatcaacatcaccaacggcga

SEQ ID NO: 2712339 - DNA, 25 bp, Homo sapien
tagccttgcctagtgtaggagcccc

SEQ ID NO: 2712340 - DNA, 25 bp, Homo sapien
ttagctaggctctgctacaaccgag

SEQ ID NO: 2712341 - DNA, 25 bp, Homo sapien
gaaacatgaaggtgactcctcccaa

SEQ ID NO: 2712342 - DNA, 25 bp, Homo sapien
tgagagattcctcgacgctggctgc

SEQ ID NO: 2712343 - DNA, 25 bp, Homo sapien
gaaagagggtctataacactccgta

SEQ ID NO: 2712344 - DNA, 25 bp, Homo sapien
cgcgcaaggtgcctgccggcgctca

SEQ ID NO: 2712345 - DNA, 25 bp, Homo sapien
cggccgcccgggcaacagcgcagcc

SEQ ID NO: 2712346 - DNA, 25 bp, Homo sapien
ggcaggaggggcgcgtcgcccagct

SEQ ID NO: 2712347 - DNA, 25 bp, Homo sapien
ggcgctcacgcacggaggtcggccg

SEQ ID NO: 2712348 - DNA, 25 bp, Homo sapien
ccatcgcctgggctatttccacagc

SEQ ID NO: 2712349 - DNA, 25 bp, Homo sapien
ctgggctatttccacagccctcaga

SEQ ID NO: 2712350 - DNA, 25 bp, Homo sapien
gctatttccacagccctcagagtca

SEQ ID NO: 2712351 - DNA, 25 bp, Homo sapien
tacccatcgcctgggctatttccac

SEQ ID NO: 2712352 - DNA, 25 bp, Homo sapien
cttccctgtccggactccctgacct

SEQ ID NO: 2712353 - DNA, 25 bp, Homo sapien
ctggaggatggctcgtcggctccat

SEQ ID NO: 2712354 - DNA, 25 bp, Homo sapien
gacctggaggatggctcgtcggctc

SEQ ID NO: 2712355 - DNA, 25 bp, Homo sapien
ccctgacctggaggatggctcgtcg

SEQ ID NO: 2712356 - DNA, 25 bp, Homo sapien
tgaagcagcgatctgtcctcagagg

SEQ ID NO: 2712357 - DNA, 25 bp, Homo sapien
gatgaagcagcgatctgtcctcaga

SEQ ID NO: 2712358 - DNA, 25 bp, Homo sapien
gaagcagcgatctgtcctcagaggc

SEQ ID NO: 2712359 - DNA, 25 bp, Homo sapien
atgaagcagcgatctgtcctcagag

SEQ ID NO: 2712360 - DNA, 25 bp, Homo sapien
gacctcagtgtcgatgagctcccgg

SEQ ID NO: 2712361 - DNA, 25 bp, Homo sapien
aggcggctcctgatgtcagaggcac

SEQ ID NO: 2712362 - DNA, 25 bp, Homo sapien
tgcaagtaggagacctcagtgtcga

SEQ ID NO: 2712363 - DNA, 25 bp, Homo sapien
tgtcgatgagctcccggacagccag

SEQ ID NO: 2712364 - DNA, 25 bp, Homo sapien
catggaggaatctgctgttcacttt

SEQ ID NO: 2712365 - DNA, 25 bp, Homo sapien
caactagctgcacttgttcctcttc

SEQ ID NO: 2712366 - DNA, 25 bp, Homo sapien
gagaacaggacatccagatctccct

SEQ ID NO: 2712367 - DNA, 25 bp, Homo sapien
tgtttgagaacaggacatccagatc

SEQ ID NO: 2712368 - DNA, 25 bp, Homo sapien
gatctttgaaaaacataaatcagct

SEQ ID NO: 2712369 - DNA, 25 bp, Homo sapien
agcagctgaagagatctttgaaaaa

SEQ ID NO: 2712370 - DNA, 25 bp, Homo sapien
tgaaaaacataaatcagctgggcac

SEQ ID NO: 2712371 - DNA, 25 bp, Homo sapien
tttgaaaaacataaatcagctgggc

SEQ ID NO: 2712372 - DNA, 25 bp, Homo sapien
catcattcgtgttcaggaaaggtta

SEQ ID NO: 2712373 - DNA, 25 bp, Homo sapien
gccactgtagtgaatctgacaccca

SEQ ID NO: 2712374 - DNA, 25 bp, Homo sapien
taagaagactatcctcctcaggagg

SEQ ID NO: 2712375 - DNA, 25 bp, Homo sapien
taggaaatccctcaccatgggaatc

SEQ ID NO: 2712376 - DNA, 25 bp, Homo sapien
tagaccttatagacttgctccaact

SEQ ID NO: 2712377 - DNA, 25 bp, Homo sapien
tcaacgatgccctggatgtgccgct

SEQ ID NO: 2712378 - DNA, 25 bp, Homo sapien
tcgtagctggcacagtagaccttat

SEQ ID NO: 2712379 - DNA, 25 bp, Homo sapien
tacgtgtccaccagtagcaaggcct

SEQ ID NO: 2712380 - DNA, 25 bp, Homo sapien
cgcaggcatttaacgggcagggaca

SEQ ID NO: 2712381 - DNA, 25 bp, Homo sapien
ggtcagcgtgcattttggaatccca

SEQ ID NO: 2712382 - DNA, 25 bp, Homo sapien
caaaggcctcgaaatgtgttacact

SEQ ID NO: 2712383 - DNA, 25 bp, Homo sapien
gctctggaaagtaatgccgcaggca

SEQ ID NO: 2712384 - DNA, 25 bp, Homo sapien
agggagaaggctggtattaggcagg

SEQ ID NO: 2712385 - DNA, 25 bp, Homo sapien
gaggaattaccagcaagaaactgag

SEQ ID NO: 2712386 - DNA, 25 bp, Homo sapien
actgaggcctgaagatccagcttgc

SEQ ID NO: 2712387 - DNA, 25 bp, Homo sapien
tgcagaggaattaccagcaagaaac

SEQ ID NO: 2712388 - DNA, 25 bp, Homo sapien
gaggcctgaagatccagcttgcggc

SEQ ID NO: 2712389 - DNA, 25 bp, Homo sapien
ctgaaggacaggataggcactggca

SEQ ID NO: 2712390 - DNA, 25 bp, Homo sapien
cacttccttgcgcatcttgtactca

SEQ ID NO: 2712391 - DNA, 25 bp, Homo sapien
ctcattgatattggtgttcacgtcc

SEQ ID NO: 2712392 - DNA, 25 bp, Homo sapien
gcagcagtgggtacctggtgatcct

SEQ ID NO: 2712393 - DNA, 25 bp, Homo sapien
gaaaagcatagggtcctctgtctga

SEQ ID NO: 2712394 - DNA, 25 bp, Homo sapien
cattcatgaggttagtgagtcacac

SEQ ID NO: 2712395 - DNA, 25 bp, Homo sapien
ccaactcaggaaagtggatgtcacg

SEQ ID NO: 2712396 - DNA, 25 bp, Homo sapien
gaagcacggtgatcaagccaactca

SEQ ID NO: 2712397 - DNA, 25 bp, Homo sapien
gtgtgtgttgatgcgggccagccgc

SEQ ID NO: 2712398 - DNA, 25 bp, Homo sapien
ctcagccgggtggtcttcttggaga

SEQ ID NO: 2712399 - DNA, 25 bp, Homo sapien
tgctctaccttggtgtacttggagg

SEQ ID NO: 2712400 - DNA, 25 bp, Homo sapien
agctggctcagccgggtggtcttct

SEQ ID NO: 2712401 - DNA, 25 bp, Homo sapien
gccacgttgttcttcagctcagtca

SEQ ID NO: 2712402 - DNA, 25 bp, Homo sapien
agccacgttgttcttcagctcagtc

SEQ ID NO: 2712403 - DNA, 25 bp, Homo sapien
taaaaaaatgccccatagcatttaa

SEQ ID NO: 2712404 - DNA, 25 bp, Homo sapien
ttaaaaaaatgccccatagcattta

SEQ ID NO: 2712405 - DNA, 25 bp, Homo sapien
aaaaaatgccccatagcatttaaat

SEQ ID NO: 2712406 - DNA, 25 bp, Homo sapien
ttcgtgcggcctgaagtagaggaaa

SEQ ID NO: 2712407 - DNA, 25 bp, Homo sapien
aaatttcaggaaggcctcaaggtga

SEQ ID NO: 2712408 - DNA, 25 bp, Homo sapien
gcccctcggggatgtccagattgta

SEQ ID NO: 2712409 - DNA, 25 bp, Homo sapien
tcaggaaggcctcaaggtgaaggtc

SEQ ID NO: 2712410 - DNA, 25 bp, Homo sapien
gagcctcaatctctcacctgcagaa

SEQ ID NO: 2712411 - DNA, 25 bp, Homo sapien
cctggcagatagtgaggctcaataa

SEQ ID NO: 2712412 - DNA, 25 bp, Homo sapien
tctgtataaatgacccaggaggtga

SEQ ID NO: 2712413 - DNA, 25 bp, Homo sapien
taataatctctatgctgctgaccac

SEQ ID NO: 2712414 - DNA, 25 bp, Homo sapien
caaagtccagtagcttgtccagacg

SEQ ID NO: 2712415 - DNA, 25 bp, Homo sapien
tgtccagacgcttcttgatcaggtt

SEQ ID NO: 2712416 - DNA, 25 bp, Homo sapien
cttccacccgctcaaagtccagtag

SEQ ID NO: 2712417 - DNA, 25 bp, Homo sapien
acaccaggccttctagccgttgctt

SEQ ID NO: 2712418 - DNA, 25 bp, Homo sapien
gaccagctggttaaactgtgggagc

SEQ ID NO: 2712419 - DNA, 25 bp, Homo sapien
ggagctcagccactagcagcgagtt

SEQ ID NO: 2712420 - DNA, 25 bp, Homo sapien
ccctctggagggtcacgaatgtgca

SEQ ID NO: 2712421 - DNA, 25 bp, Homo sapien
tagcagcgagttgagtgcctggtat

SEQ ID NO: 2712422 - DNA, 25 bp, Homo sapien
attattttcaacccaaggagttctg

SEQ ID NO: 2712423 - DNA, 25 bp, Homo sapien
tgagatccctggcttgctttgggtt

SEQ ID NO: 2712424 - DNA, 25 bp, Homo sapien
tgggcaagaggggacaatgagatcc

SEQ ID NO: 2712425 - DNA, 25 bp, Homo sapien
gggacagacactgtcaacagagctg

SEQ ID NO: 2712426 - DNA, 25 bp, Homo sapien
tgggaggtggctgcactttctcaaa

SEQ ID NO: 2712427 - DNA, 25 bp, Homo sapien
aggtctcttgaaaggagcgaagctg

SEQ ID NO: 2712428 - DNA, 25 bp, Homo sapien
tgcactttctcaaaggtctcttgaa

SEQ ID NO: 2712429 - DNA, 25 bp, Homo sapien
ctggttactcgtccggcccagtgcg

SEQ ID NO: 2712430 - DNA, 25 bp, Homo sapien
cctgatcagggcaacagggccctca

SEQ ID NO: 2712431 - DNA, 25 bp, Homo sapien
actagcagatggctggctcttagca

SEQ ID NO: 2712432 - DNA, 25 bp, Homo sapien
taaacctgtcaaagctggcaccaac

SEQ ID NO: 2712433 - DNA, 25 bp, Homo sapien
gcagcctacggcgttttggaagaaa

SEQ ID NO: 2712434 - DNA, 25 bp, Homo sapien
cctggcgttcagaccctggaaggag

SEQ ID NO: 2712435 - DNA, 25 bp, Homo sapien
tgaaggatggccacgatttggcccc

SEQ ID NO: 2712436 - DNA, 25 bp, Homo sapien
ctgatgttgcttgtcacctggtaca

SEQ ID NO: 2712437 - DNA, 25 bp, Homo sapien
ccagggccatacctgctcaggagag

SEQ ID NO: 2712438 - DNA, 25 bp, Homo sapien
ccacatggtacagctgtagtttccc

SEQ ID NO: 2712439 - DNA, 25 bp, Homo sapien
gggaccacatggtacagctgtagtt

SEQ ID NO: 2712440 - DNA, 25 bp, Homo sapien
ccagccggcacatacccacgatgtc

SEQ ID NO: 2712441 - DNA, 25 bp, Homo sapien
ggtacagctgtagtttcccagccgg

SEQ ID NO: 2712442 - DNA, 25 bp, Homo sapien
ggtgggaatagagggcactagagct

SEQ ID NO: 2712443 - DNA, 25 bp, Homo sapien
tgggctgggctccggtgttagacat

SEQ ID NO: 2712444 - DNA, 25 bp, Homo sapien
ctccggtgttagacatcgggggtct

SEQ ID NO: 2712445 - DNA, 25 bp, Homo sapien
ctgggctccggtgttagacatcggg

SEQ ID NO: 2712446 - DNA, 25 bp, Homo sapien
ggcactgtcctagcactctactggg

SEQ ID NO: 2712447 - DNA, 25 bp, Homo sapien
ttcccagctgaaagtagagacaagg

SEQ ID NO: 2712448 - DNA, 25 bp, Homo sapien
ttgcacagcagtgaatctaggcctg

SEQ ID NO: 2712449 - DNA, 25 bp, Homo sapien
ctaatggtttgagctgcccaggcca

SEQ ID NO: 2712450 - DNA, 25 bp, Homo sapien
tgcaggctcacttcatggctgcttc

SEQ ID NO: 2712451 - DNA, 25 bp, Homo sapien
ccacaaaagggtacgcggctatgac

SEQ ID NO: 2712452 - DNA, 25 bp, Homo sapien
ttctggccacaaaagggtacgcggc

SEQ ID NO: 2712453 - DNA, 25 bp, Homo sapien
gcctgcaggctcacttcatggctgc

SEQ ID NO: 2712454 - DNA, 25 bp, Homo sapien
gggctccgagccctggccaagaagc

SEQ ID NO: 2712455 - DNA, 25 bp, Homo sapien
taagagggcagactccagccccaca

SEQ ID NO: 2712456 - DNA, 25 bp, Homo sapien
ctaagagggcagactccagccccac

SEQ ID NO: 2712457 - DNA, 25 bp, Homo sapien
gccaagaagccagaaggcacataac

SEQ ID NO: 2712458 - DNA, 25 bp, Homo sapien
gggaacctctctgctacaccgataa

SEQ ID NO: 2712459 - DNA, 25 bp, Homo sapien
tacagggagctctgcatgcttagcc

SEQ ID NO: 2712460 - DNA, 25 bp, Homo sapien
tgaacaaggtttgctgccacaggca

SEQ ID NO: 2712461 - DNA, 25 bp, Homo sapien
catgctttaacaggcccagaggagg

SEQ ID NO: 2712462 - DNA, 25 bp, Homo sapien
gcacattacacagattcccctggag

SEQ ID NO: 2712463 - DNA, 25 bp, Homo sapien
gggtacccttgtgaaccagacttca

SEQ ID NO: 2712464 - DNA, 25 bp, Homo sapien
gaagtcttgttcagttcataggcaa

SEQ ID NO: 2712465 - DNA, 25 bp, Homo sapien
gcaagtttagtatgagacagcccaa

SEQ ID NO: 2712466 - DNA, 25 bp, Homo sapien
cctagtgtctaggatctggtgtcac

SEQ ID NO: 2712467 - DNA, 25 bp, Homo sapien
cctgtttgatgggacgtgggaccac

SEQ ID NO: 2712468 - DNA, 25 bp, Homo sapien
caaggcagggaacaaacatgatggc

SEQ ID NO: 2712469 - DNA, 25 bp, Homo sapien
ggcagccgctgcttacaactcagtt

SEQ ID NO: 2712470 - DNA, 25 bp, Homo sapien
ctggacaaagtgcttttggctggta

SEQ ID NO: 2712471 - DNA, 25 bp, Homo sapien
aatctggacaaagtgcttttggctg

SEQ ID NO: 2712472 - DNA, 25 bp, Homo sapien
atgtattacatgcatattgttatcc

SEQ ID NO: 2712473 - DNA, 25 bp, Homo sapien
aggggtggaggcacaatgctcctaa

SEQ ID NO: 2712474 - DNA, 25 bp, Homo sapien
taggcgcattttacagggttggagc

SEQ ID NO: 2712475 - DNA, 25 bp, Homo sapien
cactatcgtaaggacagcatcaggg

SEQ ID NO: 2712476 - DNA, 25 bp, Homo sapien
gagaagtaggcgcattttacagggt

SEQ ID NO: 2712477 - DNA, 25 bp, Homo sapien
catcaggggacggtggtgctaaaca

SEQ ID NO: 2712478 - DNA, 25 bp, Homo sapien
atggcactcctccttggcactaggg

SEQ ID NO: 2712479 - DNA, 25 bp, Homo sapien
cttggcactagggtgttgccccttc

SEQ ID NO: 2712480 - DNA, 25 bp, Homo sapien
ggtgttgccccttcacttccgtgtc

SEQ ID NO: 2712481 - DNA, 25 bp, Homo sapien
catggcactcctccttggcactagg

SEQ ID NO: 2712482 - DNA, 25 bp, Homo sapien
accacagatggtgcttgctgaaaag

SEQ ID NO: 2712483 - DNA, 25 bp, Homo sapien
cacagatggtgcttgctgaaaaggc

SEQ ID NO: 2712484 - DNA, 25 bp, Homo sapien
gcagtgacaccacagatggtgcttg

SEQ ID NO: 2712485 - DNA, 25 bp, Homo sapien
aaggggagtcttccagcactgggta

SEQ ID NO: 2712486 - DNA, 25 bp, Homo sapien
gttcttgggcgcctgaacatccgtt

SEQ ID NO: 2712487 - DNA, 25 bp, Homo sapien
tgcccatgtgtgagacaccctcttg

SEQ ID NO: 2712488 - DNA, 25 bp, Homo sapien
caatttgcccatgtgtgagacaccc

SEQ ID NO: 2712489 - DNA, 25 bp, Homo sapien
tgaacatccgttttcagttctgctg

SEQ ID NO: 2712490 - DNA, 25 bp, Homo sapien
gatgccatccctcaactaatcagca

SEQ ID NO: 2712491 - DNA, 25 bp, Homo sapien
tcaccgcacattaggcaacctagtg

SEQ ID NO: 2712492 - DNA, 25 bp, Homo sapien
cagatgccatccctcaactaatcag

SEQ ID NO: 2712493 - DNA, 25 bp, Homo sapien
gctggttcaccgcacattaggcaac

SEQ ID NO: 2712494 - DNA, 25 bp, Homo sapien
ttatactttgtctcttactggcttt

SEQ ID NO: 2712495 - DNA, 25 bp, Homo sapien
caggtaaggggcactggcagctata

SEQ ID NO: 2712496 - DNA, 25 bp, Homo sapien
ttgcaagagccccataaatcctcct

SEQ ID NO: 2712497 - DNA, 25 bp, Homo sapien
cccagttttgcaagagccccataaa

SEQ ID NO: 2712498 - DNA, 25 bp, Homo sapien
gcagctataatgtcagctattactg

SEQ ID NO: 2712499 - DNA, 25 bp, Homo sapien
cggagtcaacgccgagccggcccgg

SEQ ID NO: 2712500 - DNA, 25 bp, Homo sapien
gtgcggcggagtcaacgccgagccg

SEQ ID NO: 2712501 - DNA, 25 bp, Homo sapien
gcgtgcggcggagtcaacgccgagc

SEQ ID NO: 2712502 - DNA, 25 bp, Homo sapien
gcggcggagtcaacgccgagccggc

SEQ ID NO: 2712503 - DNA, 25 bp, Homo sapien
tcttcgtccagcagcgcgccgcagt

SEQ ID NO: 2712504 - DNA, 25 bp, Homo sapien
gcgcgccgcagtcgttccccgccat

SEQ ID NO: 2712505 - DNA, 25 bp, Homo sapien
ctgcgtgtcagcgagatagttgagg

SEQ ID NO: 2712506 - DNA, 25 bp, Homo sapien
tgtcagcgagatagttgaggaagaa

SEQ ID NO: 2712507 - DNA, 25 bp, Homo sapien
gccccggtaacggagcgcatcgcag

SEQ ID NO: 2712508 - DNA, 25 bp, Homo sapien
gcgccgggagacctccggctccctg

SEQ ID NO: 2712509 - DNA, 25 bp, Homo sapien
tttgcccgcggggtggcagactcca

SEQ ID NO: 2712510 - DNA, 25 bp, Homo sapien
gactccaagcggccaaggctagacc

SEQ ID NO: 2712511 - DNA, 25 bp, Homo sapien
tgatttctaacattcccgctgccaa

SEQ ID NO: 2712512 - DNA, 25 bp, Homo sapien
aactgatgatttctaacattcccgc

SEQ ID NO: 2712513 - DNA, 25 bp, Homo sapien
tgcatctatgactgatgccctaagc

SEQ ID NO: 2712514 - DNA, 25 bp, Homo sapien
tgactgatgccctaagcaacttcaa

SEQ ID NO: 2712515 - DNA, 25 bp, Homo sapien
gattaattaaatacatctcggttca

SEQ ID NO: 2712516 - DNA, 25 bp, Homo sapien
aaatcagtatattcaggataactcc

SEQ ID NO: 2712517 - DNA, 25 bp, Homo sapien
cacagcatattgtttggaagaggaa

SEQ ID NO: 2712518 - DNA, 25 bp, Homo sapien
gttacagaacagtgcaattccaagt

SEQ ID NO: 2712519 - DNA, 25 bp, Homo sapien
cagatctgggtagcaattcggtctc

SEQ ID NO: 2712520 - DNA, 25 bp, Homo sapien
tccagatctgggtagcaattcggtc

SEQ ID NO: 2712521 - DNA, 25 bp, Homo sapien
tctgggtagcaattcggtctctatc

SEQ ID NO: 2712522 - DNA, 25 bp, Homo sapien
gatctgggtagcaattcggtctcta

SEQ ID NO: 2712523 - DNA, 25 bp, Homo sapien
caacatcagggagcgactcgtgggc

SEQ ID NO: 2712524 - DNA, 25 bp, Homo sapien
gcattccctctgctaaatgactatg

SEQ ID NO: 2712525 - DNA, 25 bp, Homo sapien
tggtttctaacatctcctcgcattc

SEQ ID NO: 2712526 - DNA, 25 bp, Homo sapien
aaataaaggcgcgagcagccacgtt

SEQ ID NO: 2712527 - DNA, 25 bp, Homo sapien
gccctccccagtgttctgggtacca

SEQ ID NO: 2712528 - DNA, 25 bp, Homo sapien
gggcagggccctccccagtgttctg

SEQ ID NO: 2712529 - DNA, 25 bp, Homo sapien
cagggccctccccagtgttctgggt

SEQ ID NO: 2712530 - DNA, 25 bp, Homo sapien
tcagtgccaaggatccagggcaggg

SEQ ID NO: 2712531 - DNA, 25 bp, Homo sapien
gatatgctagccatcacgacagcct

SEQ ID NO: 2712532 - DNA, 25 bp, Homo sapien
gaagaactagtcaccctcaaagtca

SEQ ID NO: 2712533 - DNA, 25 bp, Homo sapien
tctcggacgagaatcttggtgttcc

SEQ ID NO: 2712534 - DNA, 25 bp, Homo sapien
tggtttcccgtgcacaaggagtgac

SEQ ID NO: 2712535 - DNA, 25 bp, Homo sapien
caacagtgacctcagcgggtaagtc

SEQ ID NO: 2712536 - DNA, 25 bp, Homo sapien
caagataaggcagggaactcagaca

SEQ ID NO: 2712537 - DNA, 25 bp, Homo sapien
tacaatggcgagatgtggcaattcc

SEQ ID NO: 2712538 - DNA, 25 bp, Homo sapien
tggcaattccgaaaagactggagat

SEQ ID NO: 2712539 - DNA, 25 bp, Homo sapien
caaacccactcgtttaaggcacatg

SEQ ID NO: 2712540 - DNA, 25 bp, Homo sapien
tcttccaacttacagttcaaagaga

SEQ ID NO: 2712541 - DNA, 25 bp, Homo sapien
caacttacagttcaaagagaagtca

SEQ ID NO: 2712542 - DNA, 25 bp, Homo sapien
ggcacatgatcccatgacaaatttc

SEQ ID NO: 2712543 - DNA, 25 bp, Homo sapien
cagagcacagctatggatgtacaca

SEQ ID NO: 2712544 - DNA, 25 bp, Homo sapien
tgcgtacttggacctgccggtcagt

SEQ ID NO: 2712545 - DNA, 25 bp, Homo sapien
tggtattgaattgcccattggccac

SEQ ID NO: 2712546 - DNA, 25 bp, Homo sapien
tcatggttgagccagcagcggctct

SEQ ID NO: 2712547 - DNA, 25 bp, Homo sapien
agatattgtctaaacctggtattat

SEQ ID NO: 2712548 - DNA, 25 bp, Homo sapien
ttaaatcgcagatccaagagtggaa

SEQ ID NO: 2712549 - DNA, 25 bp, Homo sapien
ggaaattgactttgtgtcgatggtg

SEQ ID NO: 2712550 - DNA, 25 bp, Homo sapien
ctttgtgtcgatggtggctgcagac

SEQ ID NO: 2712551 - DNA, 25 bp, Homo sapien
aagagtggaaattgactttgtgtcg

SEQ ID NO: 2712552 - DNA, 25 bp, Homo sapien
gaatgaaccagataagtgtccctag

SEQ ID NO: 2712553 - DNA, 25 bp, Homo sapien
catttcagcaaggaccatagcttct

SEQ ID NO: 2712554 - DNA, 25 bp, Homo sapien
tagggcatccttggctcttgcagca

SEQ ID NO: 2712555 - DNA, 25 bp, Homo sapien
cagtgtatgcgtaaggaatgaacca

SEQ ID NO: 2712556 - DNA, 25 bp, Homo sapien
tctgcttgttcacattcgtgtccat

SEQ ID NO: 2712557 - DNA, 25 bp, Homo sapien
ggagcactgcggctgggatagccca

SEQ ID NO: 2712558 - DNA, 25 bp, Homo sapien
agcactgcggctgggatagcccaac

SEQ ID NO: 2712559 - DNA, 25 bp, Homo sapien
tcaggagcactgcggctgggatagc

SEQ ID NO: 2712560 - DNA, 25 bp, Homo sapien
caggagcactgcggctgggatagcc

SEQ ID NO: 2712561 - DNA, 25 bp, Homo sapien
cagcaggtgcatgagatcattacta

SEQ ID NO: 2712562 - DNA, 25 bp, Homo sapien
catggctgctggagatacattcaag

SEQ ID NO: 2712563 - DNA, 25 bp, Homo sapien
taagcatagcatttgggctccactt

SEQ ID NO: 2712564 - DNA, 25 bp, Homo sapien
tgtgcaatgtcaaccccaaacgtgt

SEQ ID NO: 2712565 - DNA, 25 bp, Homo sapien
gaacctggggccacgatgaagctcc

SEQ ID NO: 2712566 - DNA, 25 bp, Homo sapien
aacctggggccacgatgaagctccc

SEQ ID NO: 2712567 - DNA, 25 bp, Homo sapien
agaacctggggccacgatgaagctc

SEQ ID NO: 2712568 - DNA, 25 bp, Homo sapien
tgggcaacttttacagccatcgacc

SEQ ID NO: 2712569 - DNA, 25 bp, Homo sapien
gttctgctccatcgggctaggcctg

SEQ ID NO: 2712570 - DNA, 25 bp, Homo sapien
cacatctttggacttctggtcaggg

SEQ ID NO: 2712571 - DNA, 25 bp, Homo sapien
taaacctagatttgaccccagtctc

SEQ ID NO: 2712572 - DNA, 25 bp, Homo sapien
ttcaggccacgaaccggtacaagtc

SEQ ID NO: 2712573 - DNA, 25 bp, Homo sapien
tataagacgttatgcagtgcagacc

SEQ ID NO: 2712574 - DNA, 25 bp, Homo sapien
gcaagagatctagattgttcactcc

SEQ ID NO: 2712575 - DNA, 25 bp, Homo sapien
gattaacattagcagagaggtctga

SEQ ID NO: 2712576 - DNA, 25 bp, Homo sapien
cagtcttgactttgtgtgggcaccc

SEQ ID NO: 2712577 - DNA, 25 bp, Homo sapien
ctttttggaggaagcgatgatgtcc

SEQ ID NO: 2712578 - DNA, 25 bp, Homo sapien
gacacagctgataactgcctggaag

SEQ ID NO: 2712579 - DNA, 25 bp, Homo sapien
tattcttatcacaacccttgggaga

SEQ ID NO: 2712580 - DNA, 25 bp, Homo sapien
acagcaactaattcagagttgcttg

SEQ ID NO: 2712581 - DNA, 25 bp, Homo sapien
tggcacgtctaagttggaaaccttc

SEQ ID NO: 2712582 - DNA, 25 bp, Homo sapien
ctcagaggtccccacctgtgcacag

SEQ ID NO: 2712583 - DNA, 25 bp, Homo sapien
tgtgcacagcctggcacgtctaagt

SEQ ID NO: 2712584 - DNA, 25 bp, Homo sapien
caacattccagagaaatgccagtgg

SEQ ID NO: 2712585 - DNA, 25 bp, Homo sapien
gagcaccaacattccagagaaatgc

SEQ ID NO: 2712586 - DNA, 25 bp, Homo sapien
tggggacagagcaccaacattccag

SEQ ID NO: 2712587 - DNA, 25 bp, Homo sapien
ggacagagcaccaacattccagaga

SEQ ID NO: 2712588 - DNA, 25 bp, Homo sapien
gctttctgactggcaggtacaggct

SEQ ID NO: 2712589 - DNA, 25 bp, Homo sapien
tgctttctgactggcaggtacaggc

SEQ ID NO: 2712590 - DNA, 25 bp, Homo sapien
gatgctaggcatgggtcatctcccc

SEQ ID NO: 2712591 - DNA, 25 bp, Homo sapien
tagggctccctagacactggtctgt

SEQ ID NO: 2712592 - DNA, 25 bp, Homo sapien
tctagagagctccagggatgcagtg

SEQ ID NO: 2712593 - DNA, 25 bp, Homo sapien
tcacgatgggcctttggtgtcccga

SEQ ID NO: 2712594 - DNA, 25 bp, Homo sapien
gaaccacttgggtggcaccgtcagg

SEQ ID NO: 2712595 - DNA, 25 bp, Homo sapien
tctttgtctttgtgcatgaagaacg

SEQ ID NO: 2712596 - DNA, 25 bp, Homo sapien
caggaaccaaaacagagggtctttg

SEQ ID NO: 2712597 - DNA, 25 bp, Homo sapien
caagcgcacagcaggctctctataa

SEQ ID NO: 2712598 - DNA, 25 bp, Homo sapien
tctgtcttttctactaccaaagata

SEQ ID NO: 2712599 - DNA, 25 bp, Homo sapien
tccactcgaaccctctgaagtctgt

SEQ ID NO: 2712600 - DNA, 25 bp, Homo sapien
ctgtttgctgatctccactcgaacc

SEQ ID NO: 2712601 - DNA, 25 bp, Homo sapien
ttttctactaccaaagatattcctc

SEQ ID NO: 2712602 - DNA, 25 bp, Homo sapien
ttcatgagggactgggttaataagg

SEQ ID NO: 2712603 - DNA, 25 bp, Homo sapien
tcatgagggactgggttaataaggc

SEQ ID NO: 2712604 - DNA, 25 bp, Homo sapien
cattttcatgagggactgggttaat

SEQ ID NO: 2712605 - DNA, 25 bp, Homo sapien
ttttcatgagggactgggttaataa

SEQ ID NO: 2712606 - DNA, 25 bp, Homo sapien
tgtacctgagacaagtggcactggg

SEQ ID NO: 2712607 - DNA, 25 bp, Homo sapien
gctttccaagcgtaaggctgtacct

SEQ ID NO: 2712608 - DNA, 25 bp, Homo sapien
tcggcagtggactggtcagacagct

SEQ ID NO: 2712609 - DNA, 25 bp, Homo sapien
cagggttctgcactggattccagaa

SEQ ID NO: 2712610 - DNA, 25 bp, Homo sapien
actcagaggcatacacaggaggcat

SEQ ID NO: 2712611 - DNA, 25 bp, Homo sapien
gacatactcagaggcatacacagga

SEQ ID NO: 2712612 - DNA, 25 bp, Homo sapien
gcaagacatactcagaggcatacac

SEQ ID NO: 2712613 - DNA, 25 bp, Homo sapien
ctggagtggcaagacatactcagag

SEQ ID NO: 2712614 - DNA, 25 bp, Homo sapien
taaagtatcctatggctacaacaac

SEQ ID NO: 2712615 - DNA, 25 bp, Homo sapien
gcacatccgggccaattaaagtatc

SEQ ID NO: 2712616 - DNA, 25 bp, Homo sapien
gctacaacaactggttggattgggt

SEQ ID NO: 2712617 - DNA, 25 bp, Homo sapien
caattaaagtatcctatggctacaa

SEQ ID NO: 2712618 - DNA, 25 bp, Homo sapien
tttgaccagccacctaatcccagtg

SEQ ID NO: 2712619 - DNA, 25 bp, Homo sapien
gtcaactttgaccagccacctaatc

SEQ ID NO: 2712620 - DNA, 25 bp, Homo sapien
ttttctgtcaactttgaccagccac

SEQ ID NO: 2712621 - DNA, 25 bp, Homo sapien
ttgaccagccacctaatcccagtgt

SEQ ID NO: 2712622 - DNA, 25 bp, Homo sapien
cagctccttcctccgtgagttgaca

SEQ ID NO: 2712623 - DNA, 25 bp, Homo sapien
gactcagctccttcctccgtgagtt

SEQ ID NO: 2712624 - DNA, 25 bp, Homo sapien
ctcagctccttcctccgtgagttga

SEQ ID NO: 2712625 - DNA, 25 bp, Homo sapien
tgttatataagactcagctccttcc

SEQ ID NO: 2712626 - DNA, 25 bp, Homo sapien
cagctgtatgagttcaattcttctg

SEQ ID NO: 2712627 - DNA, 25 bp, Homo sapien
gagtcaaagtcgctggcatccagct

SEQ ID NO: 2712628 - DNA, 25 bp, Homo sapien
agcatagagttgctcctccccggac

SEQ ID NO: 2712629 - DNA, 25 bp, Homo sapien
catccagctgggagaggtcaagttc

SEQ ID NO: 2712630 - DNA, 25 bp, Homo sapien
ggccgagtcaaagtcgctggcatcc

SEQ ID NO: 2712631 - DNA, 25 bp, Homo sapien
ggcaggcgaagctgaggtgcatgat

SEQ ID NO: 2712632 - DNA, 25 bp, Homo sapien
ctgccaggagggcctcattctcact

SEQ ID NO: 2712633 - DNA, 25 bp, Homo sapien
aagctgaggtgcatgatagagcgtc

SEQ ID NO: 2712634 - DNA, 25 bp, Homo sapien
gtgcatgatagagcgtctccaccat

SEQ ID NO: 2712635 - DNA, 25 bp, Homo sapien
cttgatgttgggtaggatgtggcca

SEQ ID NO: 2712636 - DNA, 25 bp, Homo sapien
ctgcctggcgccaggcggtcccttc

SEQ ID NO: 2712637 - DNA, 25 bp, Homo sapien
gttgacttttagatctgaggcctgc

SEQ ID NO: 2712638 - DNA, 25 bp, Homo sapien
taacacaaggccgttgacttttaga

SEQ ID NO: 2712639 - DNA, 25 bp, Homo sapien
gctggctcacaatggggtgtggctg

SEQ ID NO: 2712640 - DNA, 25 bp, Homo sapien
ccagagggcaaacagctggctcaca

SEQ ID NO: 2712641 - DNA, 25 bp, Homo sapien
ggagcttcttaggctcccagagggc

SEQ ID NO: 2712642 - DNA, 25 bp, Homo sapien
gggcaaacagctggctcacaatggg

SEQ ID NO: 2712643 - DNA, 25 bp, Homo sapien
catcatgggagccttcttgtcttgg

SEQ ID NO: 2712644 - DNA, 25 bp, Homo sapien
gttctgtacaacttcggctctgaga

SEQ ID NO: 2712645 - DNA, 25 bp, Homo sapien
cagcactgtgccgaggtgaggtgct

SEQ ID NO: 2712646 - DNA, 25 bp, Homo sapien
cgaggtgaggtgcttatgtagttct

SEQ ID NO: 2712647 - DNA, 25 bp, Homo sapien
gggctcgggcagtcctcacccggct

SEQ ID NO: 2712648 - DNA, 25 bp, Homo sapien
ccagagctagggagtcccggggaga

SEQ ID NO: 2712649 - DNA, 25 bp, Homo sapien
tgcccagagctagggagtcccgggg

SEQ ID NO: 2712650 - DNA, 25 bp, Homo sapien
gggcagtcctcacccggctccttgt

SEQ ID NO: 2712651 - DNA, 25 bp, Homo sapien
cacagagcacgtcttgagccagaag

SEQ ID NO: 2712652 - DNA, 25 bp, Homo sapien
cataaacaggcgtggccagacggta

SEQ ID NO: 2712653 - DNA, 25 bp, Homo sapien
cagtaggtgtgcatgtagcgtatga

SEQ ID NO: 2712654 - DNA, 25 bp, Homo sapien
cgtatgagttgcaccatcgcctgca

SEQ ID NO: 2712655 - DNA, 25 bp, Homo sapien
gcttggtctgggcccggtgctcttg

SEQ ID NO: 2712656 - DNA, 25 bp, Homo sapien
tcttgggtgaagctgcgatccttac

SEQ ID NO: 2712657 - DNA, 25 bp, Homo sapien
tccagccgcagtgggcgcaggcttg

SEQ ID NO: 2712658 - DNA, 25 bp, Homo sapien
tgggcccggtgctcttgggtgaagc

SEQ ID NO: 2712659 - DNA, 25 bp, Homo sapien
gcaggccggcggacctcccttttca

SEQ ID NO: 2712660 - DNA, 25 bp, Homo sapien
gctgctgcagtctggcaggccggcg

SEQ ID NO: 2712661 - DNA, 25 bp, Homo sapien
tgcagtctggcaggccggcggacct

SEQ ID NO: 2712662 - DNA, 25 bp, Homo sapien
gctgcagtctggcaggccggcggac

SEQ ID NO: 2712663 - DNA, 25 bp, Homo sapien
ttcagtctccgagaacgccgcacgg

SEQ ID NO: 2712664 - DNA, 25 bp, Homo sapien
ggctcatctgcaaatgtcagccagg

SEQ ID NO: 2712665 - DNA, 25 bp, Homo sapien
cagctcagggttcagtctccgagaa

SEQ ID NO: 2712666 - DNA, 25 bp, Homo sapien
tccgaggggaccagcggctcatctg

SEQ ID NO: 2712667 - DNA, 25 bp, Homo sapien
cccagctcccgctctacgtcgtagg

SEQ ID NO: 2712668 - DNA, 25 bp, Homo sapien
tctggggtccccgtaggagctgctg

SEQ ID NO: 2712669 - DNA, 25 bp, Homo sapien
ccagctcccgctctacgtcgtaggc

SEQ ID NO: 2712670 - DNA, 25 bp, Homo sapien
tctgggagggagctgcgggcagctg

SEQ ID NO: 2712671 - DNA, 25 bp, Homo sapien
tgcgggcagctggggtcctcatcca

SEQ ID NO: 2712672 - DNA, 25 bp, Homo sapien
gcagctggggtcctcatccatgtcc

SEQ ID NO: 2712673 - DNA, 25 bp, Homo sapien
cgggcagctggggtcctcatccatg

SEQ ID NO: 2712674 - DNA, 25 bp, Homo sapien
acaaggccagcatgaggcacctggg

SEQ ID NO: 2712675 - DNA, 25 bp, Homo sapien
tgacaaggccagcatgaggcacctg

SEQ ID NO: 2712676 - DNA, 25 bp, Homo sapien
tgtgacaaggccagcatgaggcacc

SEQ ID NO: 2712677 - DNA, 25 bp, Homo sapien
ctttgtgacaaggccagcatgaggc

SEQ ID NO: 2712678 - DNA, 25 bp, Homo sapien
tccactgtcaaggtctgctcaaagc

SEQ ID NO: 2712679 - DNA, 25 bp, Homo sapien
tcaaagctcttcttgccaaaagttg

SEQ ID NO: 2712680 - DNA, 25 bp, Homo sapien
gccacagagctccactgtcaaggtc

SEQ ID NO: 2712681 - DNA, 25 bp, Homo sapien
cagagctccactgtcaaggtctgct

SEQ ID NO: 2712682 - DNA, 25 bp, Homo sapien
gagatgcacgggtgttttcctgaag

SEQ ID NO: 2712683 - DNA, 25 bp, Homo sapien
ctcagagatgcacgggtgttttcct

SEQ ID NO: 2712684 - DNA, 25 bp, Homo sapien
aaaaactcagagatgcacgggtgtt

SEQ ID NO: 2712685 - DNA, 25 bp, Homo sapien
atgaaaaactcagagatgcacgggt

SEQ ID NO: 2712686 - DNA, 25 bp, Homo sapien
ctcctctgtgggcttgtacggtggt

SEQ ID NO: 2712687 - DNA, 25 bp, Homo sapien
tatgcttgatgtctggtttgaaggg

SEQ ID NO: 2712688 - DNA, 25 bp, Homo sapien
tatttctttgcctagactatgcttg

SEQ ID NO: 2712689 - DNA, 25 bp, Homo sapien
ttcgctctgggtgcttctttggcag

SEQ ID NO: 2712690 - DNA, 25 bp, Homo sapien
tagtcatggtctccaaaggaacagg

SEQ ID NO: 2712691 - DNA, 25 bp, Homo sapien
cggagcacctggcagtagtcatggt

SEQ ID NO: 2712692 - DNA, 25 bp, Homo sapien
acaggagaagggacgcttctggcca

SEQ ID NO: 2712693 - DNA, 25 bp, Homo sapien
aggacgccttctggtcggagcacct

SEQ ID NO: 2712694 - DNA, 25 bp, Homo sapien
tgaaccccagacggctcccaggacc

SEQ ID NO: 2712695 - DNA, 25 bp, Homo sapien
aggtgaaccccagacggctcccagg

SEQ ID NO: 2712696 - DNA, 25 bp, Homo sapien
tcaaggtgaaccccagacggctccc

SEQ ID NO: 2712697 - DNA, 25 bp, Homo sapien
ggtgaaccccagacggctcccagga

SEQ ID NO: 2712698 - DNA, 25 bp, Homo sapien
ccaggggcctgtgcctcagcccaag

SEQ ID NO: 2712699 - DNA, 25 bp, Homo sapien
ggcctgtgcctcagcccaaggggca

SEQ ID NO: 2712700 - DNA, 25 bp, Homo sapien
ggtggggcgccagcatcacagcttc

SEQ ID NO: 2712701 - DNA, 25 bp, Homo sapien
cttgggtggggcgccagcatcacag

SEQ ID NO: 2712702 - DNA, 25 bp, Homo sapien
ggcggtctccagcagcccaaagtgt

SEQ ID NO: 2712703 - DNA, 25 bp, Homo sapien
cacggatctcatggtctctcagcag

SEQ ID NO: 2712704 - DNA, 25 bp, Homo sapien
gaggctggcacggatctcatggtct

SEQ ID NO: 2712705 - DNA, 25 bp, Homo sapien
cggtctccagcagcccaaagtgttt

SEQ ID NO: 2712706 - DNA, 25 bp, Homo sapien
gtcagagcaagtggggctgacccct

SEQ ID NO: 2712707 - DNA, 25 bp, Homo sapien
ctctgggaggaagctgctctcgccg

SEQ ID NO: 2712708 - DNA, 25 bp, Homo sapien
gggctgacccctgagtcctcttctt

SEQ ID NO: 2712709 - DNA, 25 bp, Homo sapien
gctgtcttcaaagacagtgtcatac

SEQ ID NO: 2712710 - DNA, 25 bp, Homo sapien
gaagttccttcgagtggctggtgac

SEQ ID NO: 2712711 - DNA, 25 bp, Homo sapien
tccttcgagtggctggtgaccagga

SEQ ID NO: 2712712 - DNA, 25 bp, Homo sapien
gccggttggccttgcttggtgggct

SEQ ID NO: 2712713 - DNA, 25 bp, Homo sapien
agcggctgcgggaacagagctgccg

SEQ ID NO: 2712714 - DNA, 25 bp, Homo sapien
ctgagctcagccaggtagctgagca

SEQ ID NO: 2712715 - DNA, 25 bp, Homo sapien
tgagcaggagccaggttacccaatt

SEQ ID NO: 2712716 - DNA, 25 bp, Homo sapien
gagcaggagccaggttacccaatta

SEQ ID NO: 2712717 - DNA, 25 bp, Homo sapien
caggagccaggttacccaattaagt

SEQ ID NO: 2712718 - DNA, 25 bp, Homo sapien
gccgcttcctggcgtgccggatgct

SEQ ID NO: 2712719 - DNA, 25 bp, Homo sapien
ttctgtctgaacacggccctctgct

SEQ ID NO: 2712720 - DNA, 25 bp, Homo sapien
cgcttcctggcgtgccggatgcttg

SEQ ID NO: 2712721 - DNA, 25 bp, Homo sapien
cgttctgtctgaacacggccctctg

SEQ ID NO: 2712722 - DNA, 25 bp, Homo sapien
tatttcttgtcagcacctcgcactc

SEQ ID NO: 2712723 - DNA, 25 bp, Homo sapien
gattttgaatgtacaccacgcggcc

SEQ ID NO: 2712724 - DNA, 25 bp, Homo sapien
tcagctctcgggagctcatgtcgct

SEQ ID NO: 2712725 - DNA, 25 bp, Homo sapien
caaacacttcaaagcgcctcttcag

SEQ ID NO: 2712726 - DNA, 25 bp, Homo sapien
taaataatgtcgttatgagcttggg

SEQ ID NO: 2712727 - DNA, 25 bp, Homo sapien
gaacaaatacctcttggagatcctg

SEQ ID NO: 2712728 - DNA, 25 bp, Homo sapien
aatatatacccgtaagtggaatggc

SEQ ID NO: 2712729 - DNA, 25 bp, Homo sapien
tgtggtgacgtgagtcagaatttcc

SEQ ID NO: 2712730 - DNA, 25 bp, Homo sapien
cccattactagatgaggaaccgact

SEQ ID NO: 2712731 - DNA, 25 bp, Homo sapien
gagaccacccattactagatgagga

SEQ ID NO: 2712732 - DNA, 25 bp, Homo sapien
ggacactgtgagaccacccattact

SEQ ID NO: 2712733 - DNA, 25 bp, Homo sapien
atgaggaaccgactgccacagtgat

SEQ ID NO: 2712734 - DNA, 25 bp, Homo sapien
gcgtgctcagaacaccggtaggtga

SEQ ID NO: 2712735 - DNA, 25 bp, Homo sapien
ggagccctccgtagctcagctggaa

SEQ ID NO: 2712736 - DNA, 25 bp, Homo sapien
aaggagggctcgttgcgcttcctca

SEQ ID NO: 2712737 - DNA, 25 bp, Homo sapien
tttgtcaaagagagggccgcgtgct

SEQ ID NO: 2712738 - DNA, 25 bp, Homo sapien
actgtggctgggtttcaggggctta

SEQ ID NO: 2712739 - DNA, 25 bp, Homo sapien
gactgtggctgggtttcaggggctt

SEQ ID NO: 2712740 - DNA, 25 bp, Homo sapien
tagactgtggctgggtttcaggggc

SEQ ID NO: 2712741 - DNA, 25 bp, Homo sapien
ctgtggctgggtttcaggggcttac

SEQ ID NO: 2712742 - DNA, 25 bp, Homo sapien
caaggaaggcactgcttcccaagct

SEQ ID NO: 2712743 - DNA, 25 bp, Homo sapien
ggcactgcttcccaagctttgagtc

SEQ ID NO: 2712744 - DNA, 25 bp, Homo sapien
tctgggttttgttcaaggaaggcac

SEQ ID NO: 2712745 - DNA, 25 bp, Homo sapien
ctgcttcccaagctttgagtcttac

SEQ ID NO: 2712746 - DNA, 25 bp, Homo sapien
aacaggatggtagtcttcaggcaaa

SEQ ID NO: 2712747 - DNA, 25 bp, Homo sapien
gactgaatcttcctagaggccgtgg

SEQ ID NO: 2712748 - DNA, 25 bp, Homo sapien
cacaggacaggataaggtggaccag

SEQ ID NO: 2712749 - DNA, 25 bp, Homo sapien
cagctggccctgtgaagtcaaggag

SEQ ID NO: 2712750 - DNA, 25 bp, Homo sapien
gctgccttgtctggggtcaccacgg

SEQ ID NO: 2712751 - DNA, 25 bp, Homo sapien
gccttgtctggggtcaccacggaat

SEQ ID NO: 2712752 - DNA, 25 bp, Homo sapien
gctgctgccttgtctggggtcacca

SEQ ID NO: 2712753 - DNA, 25 bp, Homo sapien
tgtctggggtcaccacggaatgccc

SEQ ID NO: 2712754 - DNA, 25 bp, Homo sapien
taacctgctgcagtgccacataagg

SEQ ID NO: 2712755 - DNA, 25 bp, Homo sapien
tgtcctatctagagacctggaggcc

SEQ ID NO: 2712756 - DNA, 25 bp, Homo sapien
gacactcagtcctgtaccatcaagg

SEQ ID NO: 2712757 - DNA, 25 bp, Homo sapien
tcaaggctgcattggattctctcca

SEQ ID NO: 2712758 - DNA, 25 bp, Homo sapien
ctgccactatgagtgggcaccgtgg

SEQ ID NO: 2712759 - DNA, 25 bp, Homo sapien
tacaaagaccggatggttgaagaat

SEQ ID NO: 2712760 - DNA, 25 bp, Homo sapien
caacttacaaagaccggatggttga

SEQ ID NO: 2712761 - DNA, 25 bp, Homo sapien
tctgccactatgagtgggcaccgtg

SEQ ID NO: 2712762 - DNA, 25 bp, Homo sapien
ttgcttttccctgacgcaggaaggg

SEQ ID NO: 2712763 - DNA, 25 bp, Homo sapien
atccatggcttcatacttgcttttc

SEQ ID NO: 2712764 - DNA, 25 bp, Homo sapien
ctctttcagtaagctgtcaaaatcc

SEQ ID NO: 2712765 - DNA, 25 bp, Homo sapien
aaatccatggcttcatacttgcttt

SEQ ID NO: 2712766 - DNA, 25 bp, Homo sapien
taatcccaggcacagtacatctgag

SEQ ID NO: 2712767 - DNA, 25 bp, Homo sapien
taatgtggcagtggaacgtcaacac

SEQ ID NO: 2712768 - DNA, 25 bp, Homo sapien
cccgttggaagcgaggacactaatg

SEQ ID NO: 2712769 - DNA, 25 bp, Homo sapien
gaacacagctgcaagtctacgagag

SEQ ID NO: 2712770 - DNA, 25 bp, Homo sapien
tggaaaccttccaaagattagccca

SEQ ID NO: 2712771 - DNA, 25 bp, Homo sapien
tagttatgtctgtattggtcaagga

SEQ ID NO: 2712772 - DNA, 25 bp, Homo sapien
gcccaagatgtcaaatagattgaac

SEQ ID NO: 2712773 - DNA, 25 bp, Homo sapien
gtaatgacttaccagagcactgatt

SEQ ID NO: 2712774 - DNA, 25 bp, Homo sapien
gagcccatctgtgtgtaaaaacccc

SEQ ID NO: 2712775 - DNA, 25 bp, Homo sapien
ccaaacttgacgagcagacctggag

SEQ ID NO: 2712776 - DNA, 25 bp, Homo sapien
tgtgggtaaccccaaactgaaggca

SEQ ID NO: 2712777 - DNA, 25 bp, Homo sapien
tcctgggtgtcttgtagccggctca

SEQ ID NO: 2712778 - DNA, 25 bp, Homo sapien
cccaggaatcacgaaggctcagtca

SEQ ID NO: 2712779 - DNA, 25 bp, Homo sapien
gacatcgttacctagccaagttggg

SEQ ID NO: 2712780 - DNA, 25 bp, Homo sapien
gccttgagggcagaattcggaccac

SEQ ID NO: 2712781 - DNA, 25 bp, Homo sapien
tctgggtagctggtggagacaacct

SEQ ID NO: 2712782 - DNA, 25 bp, Homo sapien
ccagaagttgaaaatggcaataaca

SEQ ID NO: 2712783 - DNA, 25 bp, Homo sapien
accagaagttgaaaatggcaataac

SEQ ID NO: 2712784 - DNA, 25 bp, Homo sapien
tgcaagtcaatttgttacacttgtc

SEQ ID NO: 2712785 - DNA, 25 bp, Homo sapien
ttgttacacttgtccaaatcttgat

SEQ ID NO: 2712786 - DNA, 25 bp, Homo sapien
cacagagtataaattaagtcagatt

SEQ ID NO: 2712787 - DNA, 25 bp, Homo sapien
gatttcacagagtataaattaagtc

SEQ ID NO: 2712788 - DNA, 25 bp, Homo sapien
ttcattgatttcacagagtataaat

SEQ ID NO: 2712789 - DNA, 25 bp, Homo sapien
taaattaagtcagattattctcaat

SEQ ID NO: 2712790 - DNA, 25 bp, Homo sapien
ttacaactttaattgccaggcactc

SEQ ID NO: 2712791 - DNA, 25 bp, Homo sapien
ggcacatcagtaatacgtactgaag

SEQ ID NO: 2712792 - DNA, 25 bp, Homo sapien
ccagggaccatgacactagggcaaa

SEQ ID NO: 2712793 - DNA, 25 bp, Homo sapien
cactggacccagactatttggaccc

SEQ ID NO: 2712794 - DNA, 25 bp, Homo sapien
gaaatagttgctcatcacgcttggg

SEQ ID NO: 2712795 - DNA, 25 bp, Homo sapien
gagagtgagtcacgcctccagtatg

SEQ ID NO: 2712796 - DNA, 25 bp, Homo sapien
tctgagcaaccctgttcaaggtgac

SEQ ID NO: 2712797 - DNA, 25 bp, Homo sapien
cactgagctgggaattaaggaccca

SEQ ID NO: 2712798 - DNA, 25 bp, Homo sapien
catcgctcggactccgaaggaggcg

SEQ ID NO: 2712799 - DNA, 25 bp, Homo sapien
gcgtcttccaccgtggcctgactga

SEQ ID NO: 2712800 - DNA, 25 bp, Homo sapien
ccaccgtggcctgactgaggtggac

SEQ ID NO: 2712801 - DNA, 25 bp, Homo sapien
gcgccgacagagctatacctgcctg

SEQ ID NO: 2712802 - DNA, 25 bp, Homo sapien
gggaggggcccgctgaccgcttggc

SEQ ID NO: 2712803 - DNA, 25 bp, Homo sapien
tctgggaggggcccgctgaccgctt

SEQ ID NO: 2712804 - DNA, 25 bp, Homo sapien
gactctgggaggggcccgctgaccg

SEQ ID NO: 2712805 - DNA, 25 bp, Homo sapien
aggggcccgctgaccgcttggcggc

SEQ ID NO: 2712806 - DNA, 25 bp, Homo sapien
tgaaataataccaacttagtgtgtg

SEQ ID NO: 2712807 - DNA, 25 bp, Homo sapien
tgcaaaagacttgctgtgtattttt

SEQ ID NO: 2712808 - DNA, 25 bp, Homo sapien
aattccaagaagtcacgagttcatc

SEQ ID NO: 2712809 - DNA, 25 bp, Homo sapien
cagtggtacaactaggtaagaggtg

SEQ ID NO: 2712810 - DNA, 25 bp, Homo sapien
gagttcatcctctaagctacagtta

SEQ ID NO: 2712811 - DNA, 25 bp, Homo sapien
aggcctaacttccaaggcaggaaag

SEQ ID NO: 2712812 - DNA, 25 bp, Homo sapien
gctacacaaagtgatccagtaataa

SEQ ID NO: 2712813 - DNA, 25 bp, Homo sapien
aataatatcaacaatgttgttccca

SEQ ID NO: 2712814 - DNA, 25 bp, Homo sapien
tatcaacaatgttgttcccaactct

SEQ ID NO: 2712815 - DNA, 25 bp, Homo sapien
cacaaagtgatccagtaataatatc

SEQ ID NO: 2712816 - DNA, 25 bp, Homo sapien
catggaggccagaacatgatggagt

SEQ ID NO: 2712817 - DNA, 25 bp, Homo sapien
aaaaataagaattatagcagacttc

SEQ ID NO: 2712818 - DNA, 25 bp, Homo sapien
gatggagtggtatctttgtatcaaa

SEQ ID NO: 2712819 - DNA, 25 bp, Homo sapien
tggaaatcatggaggccagaacatg

SEQ ID NO: 2712820 - DNA, 25 bp, Homo sapien
ttctggagatagatggttcagcttc

SEQ ID NO: 2712821 - DNA, 25 bp, Homo sapien
ctatgataaggtctgcattgatcat

SEQ ID NO: 2712822 - DNA, 25 bp, Homo sapien
gcttgaagtcagtacttgattccct

SEQ ID NO: 2712823 - DNA, 25 bp, Homo sapien
ctgagtctctgggtgaaacgttatg

SEQ ID NO: 2712824 - DNA, 25 bp, Homo sapien
cattggtctcaaattgcttgaagtc

SEQ ID NO: 2712825 - DNA, 25 bp, Homo sapien
taatatgcccacaatcaagcctgac

SEQ ID NO: 2712826 - DNA, 25 bp, Homo sapien
tctttaggtcgtattttgggagcca

SEQ ID NO: 2712827 - DNA, 25 bp, Homo sapien
tgtgtacagaccatagacaggttct

SEQ ID NO: 2712828 - DNA, 25 bp, Homo sapien
acagagatgtgacgggaggtaccca

SEQ ID NO: 2712829 - DNA, 25 bp, Homo sapien
cctaaggaaggagcactatgggcat

SEQ ID NO: 2712830 - DNA, 25 bp, Homo sapien
tgtagttctcggtcaactgtctcac

SEQ ID NO: 2712831 - DNA, 25 bp, Homo sapien
ccatttgaaaccattcctaaggaag

SEQ ID NO: 2712832 - DNA, 25 bp, Homo sapien
tgtatgatttaataatgtgctccca

SEQ ID NO: 2712833 - DNA, 25 bp, Homo sapien
ggttacagtgctgccaaccataatt

SEQ ID NO: 2712834 - DNA, 25 bp, Homo sapien
tgccaaccataattgcatagcaact

SEQ ID NO: 2712835 - DNA, 25 bp, Homo sapien
tccagctataaaggttacagtgctg

SEQ ID NO: 2712836 - DNA, 25 bp, Homo sapien
tagcaacttttgtcacatatcctgt

SEQ ID NO: 2712837 - DNA, 25 bp, Homo sapien
tgagtgagcccacaccattagtccg

SEQ ID NO: 2712838 - DNA, 25 bp, Homo sapien
cattagtccgaggaaggttgagccc

SEQ ID NO: 2712839 - DNA, 25 bp, Homo sapien
tatagtatgcagctccaagggatca

SEQ ID NO: 2712840 - DNA, 25 bp, Homo sapien
gcagacacagattcaaagacctcag

SEQ ID NO: 2712841 - DNA, 25 bp, Homo sapien
aagactcagaccattgggaacacat

SEQ ID NO: 2712842 - DNA, 25 bp, Homo sapien
taagactcagaccattgggaacaca

SEQ ID NO: 2712843 - DNA, 25 bp, Homo sapien
actactaagactcagaccattggga

SEQ ID NO: 2712844 - DNA, 25 bp, Homo sapien
ttaatcactactaagactcagacca

SEQ ID NO: 2712845 - DNA, 25 bp, Homo sapien
tcaagtgtgcaaaatttcccactgt

SEQ ID NO: 2712846 - DNA, 25 bp, Homo sapien
gaaattttaacctattggctagaca

SEQ ID NO: 2712847 - DNA, 25 bp, Homo sapien
aacctattggctagacattcttcta

SEQ ID NO: 2712848 - DNA, 25 bp, Homo sapien
ctgggaaatgttggacacttgaaat

SEQ ID NO: 2712849 - DNA, 25 bp, Homo sapien
catgtcaccaaatgggagagctcta

SEQ ID NO: 2712850 - DNA, 25 bp, Homo sapien
caattcatgacctgtgggccagcta

SEQ ID NO: 2712851 - DNA, 25 bp, Homo sapien
ctatggtactagagcaggtgcaaca

SEQ ID NO: 2712852 - DNA, 25 bp, Homo sapien
tatctgcaagaaagcctgaaaccgt

SEQ ID NO: 2712853 - DNA, 25 bp, Homo sapien
cataattcaaggattcgctaactgc

SEQ ID NO: 2712854 - DNA, 25 bp, Homo sapien
gtttctacagatggctaccaaaagc

SEQ ID NO: 2712855 - DNA, 25 bp, Homo sapien
tatgcaagtataggcaacctcaacc

SEQ ID NO: 2712856 - DNA, 25 bp, Homo sapien
tgggacaagtacaaaccagaacata

SEQ ID NO: 2712857 - DNA, 25 bp, Homo sapien
aaaaggcaagggctatttgatccca

SEQ ID NO: 2712858 - DNA, 25 bp, Homo sapien
ggagagttgctacacagcccatcta

SEQ ID NO: 2712859 - DNA, 25 bp, Homo sapien
tcctagactgctgggtaggtcctca

SEQ ID NO: 2712860 - DNA, 25 bp, Homo sapien
tagaggctaaccagggattggatcc

SEQ ID NO: 2712861 - DNA, 25 bp, Homo sapien
tcagtcaaaacaggtaacagcagat

SEQ ID NO: 2712862 - DNA, 25 bp, Homo sapien
caatacctgctaatggtgtgatgtc

SEQ ID NO: 2712863 - DNA, 25 bp, Homo sapien
ttcagaaacccatagcaattcagtg

SEQ ID NO: 2712864 - DNA, 25 bp, Homo sapien
cctgcttcaggttaattttttggat

SEQ ID NO: 2712865 - DNA, 25 bp, Homo sapien
gtgccgcatcaagtagcgccttcat

SEQ ID NO: 2712866 - DNA, 25 bp, Homo sapien
tcaggatcgggttcatacgtagtgc

SEQ ID NO: 2712867 - DNA, 25 bp, Homo sapien
ctctcattcaggatcgggttcatac

SEQ ID NO: 2712868 - DNA, 25 bp, Homo sapien
ggttcatacgtagtgccgcatcaag

SEQ ID NO: 2712869 - DNA, 25 bp, Homo sapien
aacagcccagccctagcttgggagc

SEQ ID NO: 2712870 - DNA, 25 bp, Homo sapien
tctagtaaggcgaacggactgcttc

SEQ ID NO: 2712871 - DNA, 25 bp, Homo sapien
tcggcagcgcgtgactgcatgcgac

SEQ ID NO: 2712872 - DNA, 25 bp, Homo sapien
cacacgaactgctcaaaggcttgga

SEQ ID NO: 2712873 - DNA, 25 bp, Homo sapien
cggtttggcggctgcaccggcagta

SEQ ID NO: 2712874 - DNA, 25 bp, Homo sapien
tcgtcaccgaggcaccggtttggcg

SEQ ID NO: 2712875 - DNA, 25 bp, Homo sapien
tttggcggctgcaccggcagtagcg

SEQ ID NO: 2712876 - DNA, 25 bp, Homo sapien
aagacggcagggacacggtcgtcac

SEQ ID NO: 2712877 - DNA, 25 bp, Homo sapien
cccctcctcggagtcgcgatatggg

SEQ ID NO: 2712878 - DNA, 25 bp, Homo sapien
aggagcacaggttcgctccgcaggc

SEQ ID NO: 2712879 - DNA, 25 bp, Homo sapien
agaataggagcacaggttcgctccg

SEQ ID NO: 2712880 - DNA, 25 bp, Homo sapien
ttcccctcctcggagtcgcgatatg

SEQ ID NO: 2712881 - DNA, 25 bp, Homo sapien
tcgcgcgcgcatcccgggggctgaa

SEQ ID NO: 2712882 - DNA, 25 bp, Homo sapien
caacaaggaagtggaggcgagggct

SEQ ID NO: 2712883 - DNA, 25 bp, Homo sapien
gaagtggaggcgagggctcgcgcgc

SEQ ID NO: 2712884 - DNA, 25 bp, Homo sapien
aggcggctccagtcgtgacagcagc

SEQ ID NO: 2712885 - DNA, 25 bp, Homo sapien
ggatggctggcgcactcgcgctccc

SEQ ID NO: 2712886 - DNA, 25 bp, Homo sapien
aggagcgtgcaagctgcgccgctca

SEQ ID NO: 2712887 - DNA, 25 bp, Homo sapien
ccggaggcgcttggcccggcggctg

SEQ ID NO: 2712888 - DNA, 25 bp, Homo sapien
cgctcacattcccggaggcgcttgg

SEQ ID NO: 2712889 - DNA, 25 bp, Homo sapien
tccatcacgacagttacctcagtac

SEQ ID NO: 2712890 - DNA, 25 bp, Homo sapien
ggtgtaacaataggcttcctcaatt

SEQ ID NO: 2712891 - DNA, 25 bp, Homo sapien
gtggcccaggagaggtgtaacaata

SEQ ID NO: 2712892 - DNA, 25 bp, Homo sapien
gtaccatcatatgatgcgtccatgg

SEQ ID NO: 2712893 - DNA, 25 bp, Homo sapien
tccaagtagtaactcctctcggcca

SEQ ID NO: 2712894 - DNA, 25 bp, Homo sapien
gctgagaagcctccaactctcacta

SEQ ID NO: 2712895 - DNA, 25 bp, Homo sapien
caactctcactaatcttcttattga

SEQ ID NO: 2712896 - DNA, 25 bp, Homo sapien
gctgcactttcaggtagatgtcgta

SEQ ID NO: 2712897 - DNA, 25 bp, Homo sapien
tagggaagcgtcctctaggagcaca

SEQ ID NO: 2712898 - DNA, 25 bp, Homo sapien
tgtccggaaccacagcagtcagtgc

SEQ ID NO: 2712899 - DNA, 25 bp, Homo sapien
tgagccacacatagctctagctgag

SEQ ID NO: 2712900 - DNA, 25 bp, Homo sapien
tgtctggtaaggttggtggctctcc

SEQ ID NO: 2712901 - DNA, 25 bp, Homo sapien
tgcagaggagctactctcactggaa

SEQ ID NO: 2712902 - DNA, 25 bp, Homo sapien
gggttctccacaaccgagtaggcag

SEQ ID NO: 2712903 - DNA, 25 bp, Homo sapien
tggggttctccacaaccgagtaggc

SEQ ID NO: 2712904 - DNA, 25 bp, Homo sapien
cagaggagctactctcactggaatc

SEQ ID NO: 2712905 - DNA, 25 bp, Homo sapien
ccagatgccttctcttataattgat

SEQ ID NO: 2712906 - DNA, 25 bp, Homo sapien
caggcacatatcaccgtgcccggcc

SEQ ID NO: 2712907 - DNA, 25 bp, Homo sapien
tgtatcctccaactactgggcccaa

SEQ ID NO: 2712908 - DNA, 25 bp, Homo sapien
acaagtagacaaaatcagtaaggat

SEQ ID NO: 2712909 - DNA, 25 bp, Homo sapien
ggtcagtgttggaaaggtcctacaa

SEQ ID NO: 2712910 - DNA, 25 bp, Homo sapien
gatagttgctatgcattgagctagg

SEQ ID NO: 2712911 - DNA, 25 bp, Homo sapien
tagaacaacctctctcagactgatg

SEQ ID NO: 2712912 - DNA, 25 bp, Homo sapien
ccaacattacagttaggtaccagaa

SEQ ID NO: 2712913 - DNA, 25 bp, Homo sapien
gacatatgtaaaggagcaccctggg

SEQ ID NO: 2712914 - DNA, 25 bp, Homo sapien
tggtgcatgtcccatggccccggcg

SEQ ID NO: 2712915 - DNA, 25 bp, Homo sapien
tggccccggcgggtatatgtagtgg

SEQ ID NO: 2712916 - DNA, 25 bp, Homo sapien
agttaccacaggtagggcacttagg

SEQ ID NO: 2712917 - DNA, 25 bp, Homo sapien
tggaaatgatttacttgtatagtca

SEQ ID NO: 2712918 - DNA, 25 bp, Homo sapien
gatttacttgtatagtcagacagta

SEQ ID NO: 2712919 - DNA, 25 bp, Homo sapien
tgatttacttgtatagtcagacagt

SEQ ID NO: 2712920 - DNA, 25 bp, Homo sapien
aaatgatttacttgtatagtcagac

SEQ ID NO: 2712921 - DNA, 25 bp, Homo sapien
tgctgtaccacaattcccgggagct

SEQ ID NO: 2712922 - DNA, 25 bp, Homo sapien
tgcacaccacttttgacgactggcg

SEQ ID NO: 2712923 - DNA, 25 bp, Homo sapien
cctttggaagagacgccagaagcca

SEQ ID NO: 2712924 - DNA, 25 bp, Homo sapien
cctcggatggtgttggtacgtctgc

SEQ ID NO: 2712925 - DNA, 25 bp, Homo sapien
ctggagctctggacccaggggtaag

SEQ ID NO: 2712926 - DNA, 25 bp, Homo sapien
tctggacccaggggtaagcaggtca

SEQ ID NO: 2712927 - DNA, 25 bp, Homo sapien
gctctggacccaggggtaagcaggt

SEQ ID NO: 2712928 - DNA, 25 bp, Homo sapien
gagctctggacccaggggtaagcag

SEQ ID NO: 2712929 - DNA, 25 bp, Homo sapien
gctgcctcgccccacgttaactggg

SEQ ID NO: 2712930 - DNA, 25 bp, Homo sapien
aatgagggcttgccccgtgctctgc

SEQ ID NO: 2712931 - DNA, 25 bp, Homo sapien
ctgcagccagtaatgagggcttgcc

SEQ ID NO: 2712932 - DNA, 25 bp, Homo sapien
gggtcttgctgcagccagtaatgag

SEQ ID NO: 2712933 - DNA, 25 bp, Homo sapien
gccagatggctgttgaatgggctgg

SEQ ID NO: 2712934 - DNA, 25 bp, Homo sapien
gcttcagtgtgcttggcttcagacc

SEQ ID NO: 2712935 - DNA, 25 bp, Homo sapien
caagtcctcacagagggagtcttat

SEQ ID NO: 2712936 - DNA, 25 bp, Homo sapien
ttcacctcaccagggccagatggct

SEQ ID NO: 2712937 - DNA, 25 bp, Homo sapien
taacagagtgtacatgaagggaatc

SEQ ID NO: 2712938 - DNA, 25 bp, Homo sapien
ccaaaggctgagtgtcatgttcaag

SEQ ID NO: 2712939 - DNA, 25 bp, Homo sapien
cctgaaacgacttgagggaatgctt

SEQ ID NO: 2712940 - DNA, 25 bp, Homo sapien
tagtgcttttgaaccttagccaaac

SEQ ID NO: 2712941 - DNA, 25 bp, Homo sapien
gtgcagctgtacttatatggaggaa

SEQ ID NO: 2712942 - DNA, 25 bp, Homo sapien
gacctccacaactttcacctgagaa

SEQ ID NO: 2712943 - DNA, 25 bp, Homo sapien
caatgtgacagtgcagctgtactta

SEQ ID NO: 2712944 - DNA, 25 bp, Homo sapien
tggaggaaacatatcgggcttgacc

SEQ ID NO: 2712945 - DNA, 25 bp, Homo sapien
ttggcaaggttaacaccacagctgg

SEQ ID NO: 2712946 - DNA, 25 bp, Homo sapien
gagggattcttgcactttccccggc

SEQ ID NO: 2712947 - DNA, 25 bp, Homo sapien
ccacagctgggacaaattcgaggtt

SEQ ID NO: 2712948 - DNA, 25 bp, Homo sapien
ggttttctcagtccggtctttggca

SEQ ID NO: 2712949 - DNA, 25 bp, Homo sapien
cactcacgttggacaagataagtcg

SEQ ID NO: 2712950 - DNA, 25 bp, Homo sapien
gtttgctcgatggtgactgtctcct

SEQ ID NO: 2712951 - DNA, 25 bp, Homo sapien
gcactgcgtggacggagactcataa

SEQ ID NO: 2712952 - DNA, 25 bp, Homo sapien
cctttgaataatgggctgctacaga

SEQ ID NO: 2712953 - DNA, 25 bp, Homo sapien
cagacaatgggggttcagacacatc

SEQ ID NO: 2712954 - DNA, 25 bp, Homo sapien
ctgggcagtcactgtctgcagacgg

SEQ ID NO: 2712955 - DNA, 25 bp, Homo sapien
actgtctgcagacggctggctgtca

SEQ ID NO: 2712956 - DNA, 25 bp, Homo sapien
gtagatgtctatgaagctgtgcagg

SEQ ID NO: 2712957 - DNA, 25 bp, Homo sapien
gaacaacattgatggacactctggg

SEQ ID NO: 2712958 - DNA, 25 bp, Homo sapien
cagcttgttccccacattaaagaga

SEQ ID NO: 2712959 - DNA, 25 bp, Homo sapien
agtccaggcttaccagcagcttgtt

SEQ ID NO: 2712960 - DNA, 25 bp, Homo sapien
gggtcctctccgagcttgatctgat

SEQ ID NO: 2712961 - DNA, 25 bp, Homo sapien
aaaggcccaatagccattgcacagc

SEQ ID NO: 2712962 - DNA, 25 bp, Homo sapien
cggacagtgaggcactcaaaggccc

SEQ ID NO: 2712963 - DNA, 25 bp, Homo sapien
tcagctcctccgaggtcagagtctt

SEQ ID NO: 2712964 - DNA, 25 bp, Homo sapien
cacagatcatgtcattgtagtctcg

SEQ ID NO: 2712965 - DNA, 25 bp, Homo sapien
tctcagtgttgacgaccacagctcc

SEQ ID NO: 2712966 - DNA, 25 bp, Homo sapien
tctgtctccatcgtggcccaaaagt

SEQ ID NO: 2712967 - DNA, 25 bp, Homo sapien
catttacctcattagagcccaggaa

SEQ ID NO: 2712968 - DNA, 25 bp, Homo sapien
caaatttggtgatagggatgctggc

SEQ ID NO: 2712969 - DNA, 25 bp, Homo sapien
tgccgccagtcaccagaggccaagg

SEQ ID NO: 2712970 - DNA, 25 bp, Homo sapien
tctcttcactgtaggagccaatctc

SEQ ID NO: 2712971 - DNA, 25 bp, Homo sapien
tgtaggagccaatctcatcaagctt

SEQ ID NO: 2712972 - DNA, 25 bp, Homo sapien
tcatcaagcttgcaggtgccctcct

SEQ ID NO: 2712973 - DNA, 25 bp, Homo sapien
cccaaaggggattccacactgcctt

SEQ ID NO: 2712974 - DNA, 25 bp, Homo sapien
tgatgggggcacaccttgtagattt

SEQ ID NO: 2712975 - DNA, 25 bp, Homo sapien
tccattctgtacagattcgtagagg

SEQ ID NO: 2712976 - DNA, 25 bp, Homo sapien
cgtagagggccaacaaggagaagca

SEQ ID NO: 2712977 - DNA, 25 bp, Homo sapien
cgtgggggccgtatagctctagctc

SEQ ID NO: 2712978 - DNA, 25 bp, Homo sapien
ccacatctggttagtcagctctggg

SEQ ID NO: 2712979 - DNA, 25 bp, Homo sapien
gggcactctcacctcgcacaagata

SEQ ID NO: 2712980 - DNA, 25 bp, Homo sapien
acaagatacttggagccgcagacca

SEQ ID NO: 2712981 - DNA, 25 bp, Homo sapien
tatctaccacatagacaggcggcca

SEQ ID NO: 2712982 - DNA, 25 bp, Homo sapien
acaccgtttggtttgctgtccacga

SEQ ID NO: 2712983 - DNA, 25 bp, Homo sapien
tttcgcggctggtgaggaagtccat

SEQ ID NO: 2712984 - DNA, 25 bp, Homo sapien
gtcaccaggattgggctgtaggcct

SEQ ID NO: 2712985 - DNA, 25 bp, Homo sapien
caggatggttgcgtaaggtgccaat

SEQ ID NO: 2712986 - DNA, 25 bp, Homo sapien
gctaagcaattcatcagactgaggg

SEQ ID NO: 2712987 - DNA, 25 bp, Homo sapien
gacccctagagttaatgaggccacc

SEQ ID NO: 2712988 - DNA, 25 bp, Homo sapien
cctagtcaaaggcaacaggctaagc

SEQ ID NO: 2712989 - DNA, 25 bp, Homo sapien
tggaagctctttggtcagtcccagc

SEQ ID NO: 2712990 - DNA, 25 bp, Homo sapien
tggcgactcacctgtgtcaaactct

SEQ ID NO: 2712991 - DNA, 25 bp, Homo sapien
gaccagcctaggctgcgacaaagcc

SEQ ID NO: 2712992 - DNA, 25 bp, Homo sapien
aaaaaagtcagatggcgactcacct

SEQ ID NO: 2712993 - DNA, 25 bp, Homo sapien
caaactctcagggtctctcactgcc

SEQ ID NO: 2712994 - DNA, 25 bp, Homo sapien
gcacagcaggaacctccttcttctt

SEQ ID NO: 2712995 - DNA, 25 bp, Homo sapien
tcttcttctcttctacaccctccat

SEQ ID NO: 2712996 - DNA, 25 bp, Homo sapien
cttcttcttctcttctacaccctcc

SEQ ID NO: 2712997 - DNA, 25 bp, Homo sapien
ctggcacagcaggaacctccttctt

SEQ ID NO: 2712998 - DNA, 25 bp, Homo sapien
ctctgcgaaattccttcgctttttc

SEQ ID NO: 2712999 - DNA, 25 bp, Homo sapien
caggcgcttcatcttcagctctgcg

SEQ ID NO: 2713000 - DNA, 25 bp, Homo sapien
ttctttctcaggcgcttcatcttca

SEQ ID NO: 2713001 - DNA, 25 bp, Homo sapien
ctttctcaggcgcttcatcttcagc

SEQ ID NO: 2713002 - DNA, 25 bp, Homo sapien
ctttcgaagcatcttttgggcaaac

SEQ ID NO: 2713003 - DNA, 25 bp, Homo sapien
gtcctgtacatctgcctatattcct

SEQ ID NO: 2713004 - DNA, 25 bp, Homo sapien
ctcgccattcgaatttcagtcctgt

SEQ ID NO: 2713005 - DNA, 25 bp, Homo sapien
catcctcgccattcgaatttcagtc

SEQ ID NO: 2713006 - DNA, 25 bp, Homo sapien
tgtgatagtgctttgctttttcata

SEQ ID NO: 2713007 - DNA, 25 bp, Homo sapien
tgggctcactccattgatacctctg

SEQ ID NO: 2713008 - DNA, 25 bp, Homo sapien
ctttgggctcactccattgatacct

SEQ ID NO: 2713009 - DNA, 25 bp, Homo sapien
gctcactccattgatacctctgatt

SEQ ID NO: 2713010 - DNA, 25 bp, Homo sapien
tccattgatacctctgattctgatg

SEQ ID NO: 2713011 - DNA, 25 bp, Homo sapien
tccacctcgtggagaagacaatttg

SEQ ID NO: 2713012 - DNA, 25 bp, Homo sapien
cattccacctcgtggagaagacaat

SEQ ID NO: 2713013 - DNA, 25 bp, Homo sapien
ccacctcgtggagaagacaatttga

SEQ ID NO: 2713014 - DNA, 25 bp, Homo sapien
ttcattccacctcgtggagaagaca

SEQ ID NO: 2713015 - DNA, 25 bp, Homo sapien
aatttgagagcaggtactgtttatt

SEQ ID NO: 2713016 - DNA, 25 bp, Homo sapien
tactgtttattaaccaaccagctta

SEQ ID NO: 2713017 - DNA, 25 bp, Homo sapien
ctgtttattaaccaaccagcttaga

SEQ ID NO: 2713018 - DNA, 25 bp, Homo sapien
tagaaaaataatcatggtagacacc

SEQ ID NO: 2713019 - DNA, 25 bp, Homo sapien
agtggagaaggaacaaagaaacctg

SEQ ID NO: 2713020 - DNA, 25 bp, Homo sapien
taactggttgtgatcaatttgttgt

SEQ ID NO: 2713021 - DNA, 25 bp, Homo sapien
aaggtaagccaagtgaaacagtggg

SEQ ID NO: 2713022 - DNA, 25 bp, Homo sapien
aaacaccactgcactcagacagcct

SEQ ID NO: 2713023 - DNA, 25 bp, Homo sapien
caagaagcttcagatgggtacccca

SEQ ID NO: 2713024 - DNA, 25 bp, Homo sapien
gcacctgtgccgaggtctgcgtcga

SEQ ID NO: 2713025 - DNA, 25 bp, Homo sapien
gcccagacctagcagtgacatctca

SEQ ID NO: 2713026 - DNA, 25 bp, Homo sapien
ggcgctttggaggtttgcccctcac

SEQ ID NO: 2713027 - DNA, 25 bp, Homo sapien
acaaatagtaccagctacctaccat

SEQ ID NO: 2713028 - DNA, 25 bp, Homo sapien
aaagattttaagcataacaatggca

SEQ ID NO: 2713029 - DNA, 25 bp, Homo sapien
aacaatggcattcacttagtaattc

SEQ ID NO: 2713030 - DNA, 25 bp, Homo sapien
tagtaccagctacctaccatgtgcc

SEQ ID NO: 2713031 - DNA, 25 bp, Homo sapien
cctgtccctttgccctaacctgcat

SEQ ID NO: 2713032 - DNA, 25 bp, Homo sapien
ccctgtccctttgccctaacctgca

SEQ ID NO: 2713033 - DNA, 25 bp, Homo sapien
gagggggtgactgtccagagcctgg

SEQ ID NO: 2713034 - DNA, 25 bp, Homo sapien
cagcagtctttctgataactgggag

SEQ ID NO: 2713035 - DNA, 25 bp, Homo sapien
agagcctggaactgtgcccacacca

SEQ ID NO: 2713036 - DNA, 25 bp, Homo sapien
tctttctgataactgggagagggca

SEQ ID NO: 2713037 - DNA, 25 bp, Homo sapien
taatgcccggatgccactgattatc

SEQ ID NO: 2713038 - DNA, 25 bp, Homo sapien
gtactgctggaggactcgccgtact

SEQ ID NO: 2713039 - DNA, 25 bp, Homo sapien
cagtaatgcccggatgccactgatt

SEQ ID NO: 2713040 - DNA, 25 bp, Homo sapien
actgttgccttgtctcagtaatgcc

SEQ ID NO: 2713041 - DNA, 25 bp, Homo sapien
gctgccggccgccccgacgacgagc

SEQ ID NO: 2713042 - DNA, 25 bp, Homo sapien
gggtcccccgcgcatgctgggccct

SEQ ID NO: 2713043 - DNA, 25 bp, Homo sapien
atgctgggccctggagccgccgctg

SEQ ID NO: 2713044 - DNA, 25 bp, Homo sapien
tgccggccgccccgacgacgagcaa

SEQ ID NO: 2713045 - DNA, 25 bp, Homo sapien
gggtacacgggcgaatccttgtcca

SEQ ID NO: 2713046 - DNA, 25 bp, Homo sapien
gaatccttgtccagcacatagccca

SEQ ID NO: 2713047 - DNA, 25 bp, Homo sapien
gggcgaatccttgtccagcacatag

SEQ ID NO: 2713048 - DNA, 25 bp, Homo sapien
gggccgtaggcttgcgggcccaggc

SEQ ID NO: 2713049 - DNA, 25 bp, Homo sapien
gctccgggcgaggacggtgtgcccg

SEQ ID NO: 2713050 - DNA, 25 bp, Homo sapien
cccagtcgtccttgggcgcagggaa

SEQ ID NO: 2713051 - DNA, 25 bp, Homo sapien
gcccgaatgccagcgaagctgggct

SEQ ID NO: 2713052 - DNA, 25 bp, Homo sapien
cggcaccgggctaaagtctggaggg

SEQ ID NO: 2713053 - DNA, 25 bp, Homo sapien
ctccggccgccacgctgcgccgcat

SEQ ID NO: 2713054 - DNA, 25 bp, Homo sapien
cacgctgcgccgcatccactcgtag

SEQ ID NO: 2713055 - DNA, 25 bp, Homo sapien
tgcgccgcatccactcgtagggcgt

SEQ ID NO: 2713056 - DNA, 25 bp, Homo sapien
gctgcgccgcatccactcgtagggc

SEQ ID NO: 2713057 - DNA, 25 bp, Homo sapien
tgctgccctatcttcttcatcaagg

SEQ ID NO: 2713058 - DNA, 25 bp, Homo sapien
ctagttagagttcttcatcatctct

SEQ ID NO: 2713059 - DNA, 25 bp, Homo sapien
tccagggccacctttgcatcatctg

SEQ ID NO: 2713060 - DNA, 25 bp, Homo sapien
catcaaggtccacaatctgacccag

SEQ ID NO: 2713061 - DNA, 25 bp, Homo sapien
tacaatggatggatacccttcctgg

SEQ ID NO: 2713062 - DNA, 25 bp, Homo sapien
aatggatggatacccttcctgggac

SEQ ID NO: 2713063 - DNA, 25 bp, Homo sapien
ggcagtccccggctgctaatatcat

SEQ ID NO: 2713064 - DNA, 25 bp, Homo sapien
cagctctacaatggatggataccct

SEQ ID NO: 2713065 - DNA, 25 bp, Homo sapien
ggctggtctgcccaagccgtccaca

SEQ ID NO: 2713066 - DNA, 25 bp, Homo sapien
tggtctgcccaagccgtccacacat

SEQ ID NO: 2713067 - DNA, 25 bp, Homo sapien
gaggctggtctgcccaagccgtcca

SEQ ID NO: 2713068 - DNA, 25 bp, Homo sapien
ctggtctgcccaagccgtccacaca

SEQ ID NO: 2713069 - DNA, 25 bp, Homo sapien
gccgggaaggaaggtgagttgagag

SEQ ID NO: 2713070 - DNA, 25 bp, Homo sapien
aggaaggtgagttgagaggaggagg

SEQ ID NO: 2713071 - DNA, 25 bp, Homo sapien
aggagccgggaaggaaggtgagttg

SEQ ID NO: 2713072 - DNA, 25 bp, Homo sapien
gagaagcagaaggagccgggaagga

SEQ ID NO: 2713073 - DNA, 25 bp, Homo sapien
tcagtgagccccagattggcagcca

SEQ ID NO: 2713074 - DNA, 25 bp, Homo sapien
taacggctgtaatgaaactccttct

SEQ ID NO: 2713075 - DNA, 25 bp, Homo sapien
acgcggtacttgtccttggtccgag

SEQ ID NO: 2713076 - DNA, 25 bp, Homo sapien
cagctctgatttccgccggattgtg

SEQ ID NO: 2713077 - DNA, 25 bp, Homo sapien
ctttgcgctcctttgcccgccggtt

SEQ ID NO: 2713078 - DNA, 25 bp, Homo sapien
gggtggccgtgatgtcgtgggccat

SEQ ID NO: 2713079 - DNA, 25 bp, Homo sapien
ttcttcttgttcactttgcgctcct

SEQ ID NO: 2713080 - DNA, 25 bp, Homo sapien
gatgtcgtgggccatcggcggctgt

SEQ ID NO: 2713081 - DNA, 25 bp, Homo sapien
cagctgcacctctgaacgtatggag

SEQ ID NO: 2713082 - DNA, 25 bp, Homo sapien
gcttggtccgaataaagtcctctgg

SEQ ID NO: 2713083 - DNA, 25 bp, Homo sapien
tagaaacctggtagggaagactctg

SEQ ID NO: 2713084 - DNA, 25 bp, Homo sapien
gattctgtaacccagtggagcagcc

SEQ ID NO: 2713085 - DNA, 25 bp, Homo sapien
tctttaatgctatgtataatgattt

SEQ ID NO: 2713086 - DNA, 25 bp, Homo sapien
ttctttaatgctatgtataatgatt

SEQ ID NO: 2713087 - DNA, 25 bp, Homo sapien
ccagtctaggggacaaggactgtgt

SEQ ID NO: 2713088 - DNA, 25 bp, Homo sapien
aggcccagccacgcgtagcacatgg

SEQ ID NO: 2713089 - DNA, 25 bp, Homo sapien
taggggacaaggactgtgtgcttcc

SEQ ID NO: 2713090 - DNA, 25 bp, Homo sapien
cacatggggtgagcaatgaatgtca

SEQ ID NO: 2713091 - DNA, 25 bp, Homo sapien
gtcctccttcaggtgggtagaacat

SEQ ID NO: 2713092 - DNA, 25 bp, Homo sapien
tcctaatgcggagacaggcttgtcc

SEQ ID NO: 2713093 - DNA, 25 bp, Homo sapien
cctttgatgtggtaatgcgccgctg

SEQ ID NO: 2713094 - DNA, 25 bp, Homo sapien
tgcgccgctgtgactctatcagagg

SEQ ID NO: 2713095 - DNA, 25 bp, Homo sapien
gctcctcccacttcacggacccagc

SEQ ID NO: 2713096 - DNA, 25 bp, Homo sapien
ctcctcccacttcacggacccagcc

SEQ ID NO: 2713097 - DNA, 25 bp, Homo sapien
gcggggggatgcgcgcgcccccgca

SEQ ID NO: 2713098 - DNA, 25 bp, Homo sapien
gcgctgccgtctggcggctgcgggc

SEQ ID NO: 2713099 - DNA, 25 bp, Homo sapien
cccggagcgcagagagcgagggcac

SEQ ID NO: 2713100 - DNA, 25 bp, Homo sapien
tggtccgctggccactgcgcctttg

SEQ ID NO: 2713101 - DNA, 25 bp, Homo sapien
gcacgagagatggtccgctggccac

SEQ ID NO: 2713102 - DNA, 25 bp, Homo sapien
tgcggaggtgagctccctggagctt

SEQ ID NO: 2713103 - DNA, 25 bp, Homo sapien
cttgcggaggtgagctccctggagc

SEQ ID NO: 2713104 - DNA, 25 bp, Homo sapien
aggtgagctccctggagcttcttca

SEQ ID NO: 2713105 - DNA, 25 bp, Homo sapien
cggaggtgagctccctggagcttct

SEQ ID NO: 2713106 - DNA, 25 bp, Homo sapien
gcaggaagtccagcttgcctgtcca

SEQ ID NO: 2713107 - DNA, 25 bp, Homo sapien
acatccaggtcgacatcgccctggt

SEQ ID NO: 2713108 - DNA, 25 bp, Homo sapien
ggcctacacagtagccaatgcagga

SEQ ID NO: 2713109 - DNA, 25 bp, Homo sapien
tcctccattggtgtacgctcgatag

SEQ ID NO: 2713110 - DNA, 25 bp, Homo sapien
ccaggggccctaggctggagaactg

SEQ ID NO: 2713111 - DNA, 25 bp, Homo sapien
gattttccagacagccaggggccct

SEQ ID NO: 2713112 - DNA, 25 bp, Homo sapien
attttccagacagccaggggcccta

SEQ ID NO: 2713113 - DNA, 25 bp, Homo sapien
cctccctggggaccactgaggcctc

SEQ ID NO: 2713114 - DNA, 25 bp, Homo sapien
ccttccctccctggggaccactgag

SEQ ID NO: 2713115 - DNA, 25 bp, Homo sapien
tgagcccttccctccctggggacca

SEQ ID NO: 2713116 - DNA, 25 bp, Homo sapien
tccctccctggggaccactgaggcc

SEQ ID NO: 2713117 - DNA, 25 bp, Homo sapien
ctggtgtggggagaggctgctgggc

SEQ ID NO: 2713118 - DNA, 25 bp, Homo sapien
gaggctgctgggctgcccaggccaa

SEQ ID NO: 2713119 - DNA, 25 bp, Homo sapien
ggctgctgggctgcccaggccaagc

SEQ ID NO: 2713120 - DNA, 25 bp, Homo sapien
tgctgggctgcccaggccaagctct

SEQ ID NO: 2713121 - DNA, 25 bp, Homo sapien
gggctgacggtgcaggtgaggttga

SEQ ID NO: 2713122 - DNA, 25 bp, Homo sapien
gaagagcacgtaggcgatgatcatg

SEQ ID NO: 2713123 - DNA, 25 bp, Homo sapien
tccaggcagagttctgtgttccacc

SEQ ID NO: 2713124 - DNA, 25 bp, Homo sapien
caagcccacgatgagcagcatggct

SEQ ID NO: 2713125 - DNA, 25 bp, Homo sapien
agaggaacacgatgacccaggccag

SEQ ID NO: 2713126 - DNA, 25 bp, Homo sapien
ggatacagaggaacacgatgaccca

SEQ ID NO: 2713127 - DNA, 25 bp, Homo sapien
ttgcccgaagacttcacacccttga

SEQ ID NO: 2713128 - DNA, 25 bp, Homo sapien
gacttcacacccttgaggatacaga

SEQ ID NO: 2713129 - DNA, 25 bp, Homo sapien
tggatgcccttccaggcccctggga

SEQ ID NO: 2713130 - DNA, 25 bp, Homo sapien
gtgactccgcggaccagcagcatga

SEQ ID NO: 2713131 - DNA, 25 bp, Homo sapien
gggtgagatagaactggatgccctt

SEQ ID NO: 2713132 - DNA, 25 bp, Homo sapien
cttggaagacaacaagtggtggaac

SEQ ID NO: 2713133 - DNA, 25 bp, Homo sapien
ctatagatgttctggtgaaacgtgt

SEQ ID NO: 2713134 - DNA, 25 bp, Homo sapien
acacccagggaatagaagatctgaa

SEQ ID NO: 2713135 - DNA, 25 bp, Homo sapien
tgttctggtgaaacgtgttgtagga

SEQ ID NO: 2713136 - DNA, 25 bp, Homo sapien
cacccagggaatagaagatctgaag

SEQ ID NO: 2713137 - DNA, 25 bp, Homo sapien
tggcgttgcccagagtgacgatgaa

SEQ ID NO: 2713138 - DNA, 25 bp, Homo sapien
tagcccagcacggagaagatggcaa

SEQ ID NO: 2713139 - DNA, 25 bp, Homo sapien
cagctcctgagacatgtagcccagc

SEQ ID NO: 2713140 - DNA, 25 bp, Homo sapien
tttggctacttggtccacaggcacg

SEQ ID NO: 2713141 - DNA, 25 bp, Homo sapien
cctgtgggtagacgacaaaggccag

SEQ ID NO: 2713142 - DNA, 25 bp, Homo sapien
tatctaggccgagagtcagaagcat

SEQ ID NO: 2713143 - DNA, 25 bp, Homo sapien
ctggctatctaggccgagagtcaga

SEQ ID NO: 2713144 - DNA, 25 bp, Homo sapien
catggcctgtgggtagacgacaaag

SEQ ID NO: 2713145 - DNA, 25 bp, Homo sapien
tggtgaggatcagccccatcaggta

SEQ ID NO: 2713146 - DNA, 25 bp, Homo sapien
gccgcaggtagtatgggaactcatc

SEQ ID NO: 2713147 - DNA, 25 bp, Homo sapien
tgagaacaccgccttcttgggccgc

SEQ ID NO: 2713148 - DNA, 25 bp, Homo sapien
tcacagctgtcacaatggtctccag

SEQ ID NO: 2713149 - DNA, 25 bp, Homo sapien
gcaaggcacgtggtgataaccacca

SEQ ID NO: 2713150 - DNA, 25 bp, Homo sapien
ccgaagctggcgctgtagtcatcca

SEQ ID NO: 2713151 - DNA, 25 bp, Homo sapien
catacacccgtgtcacggcaaggca

SEQ ID NO: 2713152 - DNA, 25 bp, Homo sapien
agaaggaccagccagtacatgcccc

SEQ ID NO: 2713153 - DNA, 25 bp, Homo sapien
ccattctcccactgcggagagctcg

SEQ ID NO: 2713154 - DNA, 25 bp, Homo sapien
gctccccagggtagactcccattct

SEQ ID NO: 2713155 - DNA, 25 bp, Homo sapien
gagagctcgactccacttcccacgg

SEQ ID NO: 2713156 - DNA, 25 bp, Homo sapien
tctcccactgcggagagctcgactc

SEQ ID NO: 2713157 - DNA, 25 bp, Homo sapien
ccagcatcatgtggatgtctcggca

SEQ ID NO: 2713158 - DNA, 25 bp, Homo sapien
gtagaggcccggcttgaagcccagc

SEQ ID NO: 2713159 - DNA, 25 bp, Homo sapien
gcccggcttgaagcccagcatcatg

SEQ ID NO: 2713160 - DNA, 25 bp, Homo sapien
caggccctgaagtagaggcccggct

SEQ ID NO: 2713161 - DNA, 25 bp, Homo sapien
cccgctttcaattctggggccccag

SEQ ID NO: 2713162 - DNA, 25 bp, Homo sapien
taagctgtaccgaaccctgaagtgg

SEQ ID NO: 2713163 - DNA, 25 bp, Homo sapien
gcctttgagggtttagccagcccat

SEQ ID NO: 2713164 - DNA, 25 bp, Homo sapien
tcttgaagctgacccaacaccaagg

SEQ ID NO: 2713165 - DNA, 25 bp, Homo sapien
agcccagagctacccaggatcctaa

SEQ ID NO: 2713166 - DNA, 25 bp, Homo sapien
tctaaactgcttaaggcccgaggta

SEQ ID NO: 2713167 - DNA, 25 bp, Homo sapien
tgtctaaactgcttaaggcccgagg

SEQ ID NO: 2713168 - DNA, 25 bp, Homo sapien
gggactcccagcatcactgcgggct

SEQ ID NO: 2713169 - DNA, 25 bp, Homo sapien
cactgcgggcttttgtctaaactgc

SEQ ID NO: 2713170 - DNA, 25 bp, Homo sapien
tccgagggctggtacttgacgatgc

SEQ ID NO: 2713171 - DNA, 25 bp, Homo sapien
tgccagctgggatcatgaggcagga

SEQ ID NO: 2713172 - DNA, 25 bp, Homo sapien
ggcgggaagcggtaactgccatact

SEQ ID NO: 2713173 - DNA, 25 bp, Homo sapien
ttgacgatgctatacaccatgaggg

SEQ ID NO: 2713174 - DNA, 25 bp, Homo sapien
gccggccggctggcctgttggagcc

SEQ ID NO: 2713175 - DNA, 25 bp, Homo sapien
tcccagccagcgtggccacatacat

SEQ ID NO: 2713176 - DNA, 25 bp, Homo sapien
acatacatgcccgtccggttctcct

SEQ ID NO: 2713177 - DNA, 25 bp, Homo sapien
tccagcgatggtccccagtccatgg

SEQ ID NO: 2713178 - DNA, 25 bp, Homo sapien
tgatgcccccgtacttgcgcatgtg

SEQ ID NO: 2713179 - DNA, 25 bp, Homo sapien
gtgttctcgaagctggtgatgcccc

SEQ ID NO: 2713180 - DNA, 25 bp, Homo sapien
tgcaatctcacggtccacctcgatg

SEQ ID NO: 2713181 - DNA, 25 bp, Homo sapien
tgcgcatgtgcaccatcagtggctt

SEQ ID NO: 2713182 - DNA, 25 bp, Homo sapien
tatgtccatccgcaaagtagggctg

SEQ ID NO: 2713183 - DNA, 25 bp, Homo sapien
tgagggacccacagtaccaagggct

SEQ ID NO: 2713184 - DNA, 25 bp, Homo sapien
tgtcttgaaccctcctgtaacctgg

SEQ ID NO: 2713185 - DNA, 25 bp, Homo sapien
tcctggaacaaggtgggtggcctca

SEQ ID NO: 2713186 - DNA, 25 bp, Homo sapien
caagggtttagtggcaggcgtcctc

SEQ ID NO: 2713187 - DNA, 25 bp, Homo sapien
gagcaggtttcaggcagtccttggc

SEQ ID NO: 2713188 - DNA, 25 bp, Homo sapien
catcaccgatgtcctcaagggttta

SEQ ID NO: 2713189 - DNA, 25 bp, Homo sapien
tagtacgtctaccatgccctgtgag

SEQ ID NO: 2713190 - DNA, 25 bp, Homo sapien
gacacaggcgttccttttgggactg

SEQ ID NO: 2713191 - DNA, 25 bp, Homo sapien
tccgactcggaattatgttgctgcc

SEQ ID NO: 2713192 - DNA, 25 bp, Homo sapien
ccatttcggtcccaaggtgagctga

SEQ ID NO: 2713193 - DNA, 25 bp, Homo sapien
gactctgagtggaataccttggcac

SEQ ID NO: 2713194 - DNA, 25 bp, Homo sapien
ctccaacctccatcttcaagcaatt

SEQ ID NO: 2713195 - DNA, 25 bp, Homo sapien
gctcactccaacctccatcttcaag

SEQ ID NO: 2713196 - DNA, 25 bp, Homo sapien
cactccaacctccatcttcaagcaa

SEQ ID NO: 2713197 - DNA, 25 bp, Homo sapien
tcactccaacctccatcttcaagca

SEQ ID NO: 2713198 - DNA, 25 bp, Homo sapien
aaaaggttcccaagatatcatcatg

SEQ ID NO: 2713199 - DNA, 25 bp, Homo sapien
catttgtgtgattgaaggtcttcca

SEQ ID NO: 2713200 - DNA, 25 bp, Homo sapien
gagaatcaccgagcccaggggagtc

SEQ ID NO: 2713201 - DNA, 25 bp, Homo sapien
caaccatctggggaggaagcaaaaa

SEQ ID NO: 2713202 - DNA, 25 bp, Homo sapien
tcctgctggaatttcgggccgcctg

SEQ ID NO: 2713203 - DNA, 25 bp, Homo sapien
gatcaggctgtcctatgcagggagc

SEQ ID NO: 2713204 - DNA, 25 bp, Homo sapien
ggacggcaagacatgtgcttcccat

SEQ ID NO: 2713205 - DNA, 25 bp, Homo sapien
catccagcctgcactagagtgtcat

SEQ ID NO: 2713206 - DNA, 25 bp, Homo sapien
ggcaccgtggtgcaaaattcctctt

SEQ ID NO: 2713207 - DNA, 25 bp, Homo sapien
cttcttgggtcttcacatggcctag

SEQ ID NO: 2713208 - DNA, 25 bp, Homo sapien
ctttagaggatcttccccactccgg

SEQ ID NO: 2713209 - DNA, 25 bp, Homo sapien
caggtgacccacatgagcttttagc

SEQ ID NO: 2713210 - DNA, 25 bp, Homo sapien
gcagccgcgggggcttgccaaagtg

SEQ ID NO: 2713211 - DNA, 25 bp, Homo sapien
cagccgcgggggcttgccaaagtgc

SEQ ID NO: 2713212 - DNA, 25 bp, Homo sapien
tgatcctgcctagacaaattgaccc

SEQ ID NO: 2713213 - DNA, 25 bp, Homo sapien
ctcctctgagttaagtgattgaact

SEQ ID NO: 2713214 - DNA, 25 bp, Homo sapien
gacttaagagttaggaaggcctgag

SEQ ID NO: 2713215 - DNA, 25 bp, Homo sapien
gcttctaatattctcggactgggaa

SEQ ID NO: 2713216 - DNA, 25 bp, Homo sapien
tcttctcggaagaatgtttcattga

SEQ ID NO: 2713217 - DNA, 25 bp, Homo sapien
aaggagccattgaaatgccagggct

SEQ ID NO: 2713218 - DNA, 25 bp, Homo sapien
gaatgtttcattgagcgccagagaa

SEQ ID NO: 2713219 - DNA, 25 bp, Homo sapien
tcaataatcttctcggaagaatgtt

SEQ ID NO: 2713220 - DNA, 25 bp, Homo sapien
gaagctgatcgatagcctgtcttgt

SEQ ID NO: 2713221 - DNA, 25 bp, Homo sapien
tctgagaagctgatcgatagcctgt

SEQ ID NO: 2713222 - DNA, 25 bp, Homo sapien
ttttctgagaagctgatcgatagcc

SEQ ID NO: 2713223 - DNA, 25 bp, Homo sapien
tgatcgatagcctgtcttgtccact

SEQ ID NO: 2713224 - DNA, 25 bp, Homo sapien
aggaggacatcgtaggggaaggcaa

SEQ ID NO: 2713225 - DNA, 25 bp, Homo sapien
gctggatcaagccatagggagagag

SEQ ID NO: 2713226 - DNA, 25 bp, Homo sapien
tctgagggctggatcaagccatagg

SEQ ID NO: 2713227 - DNA, 25 bp, Homo sapien
ggatcaagccatagggagagaggag

SEQ ID NO: 2713228 - DNA, 25 bp, Homo sapien
caatggaatgcagagcattccaagt

SEQ ID NO: 2713229 - DNA, 25 bp, Homo sapien
tgaaagcacactaccttttccttat

SEQ ID NO: 2713230 - DNA, 25 bp, Homo sapien
atgatctccaacctcctgatactca

SEQ ID NO: 2713231 - DNA, 25 bp, Homo sapien
gatactcagcgtattgagaattcca

SEQ ID NO: 2713232 - DNA, 25 bp, Homo sapien
tacaaaggagagacgagaatgttgt

SEQ ID NO: 2713233 - DNA, 25 bp, Homo sapien
ggtacaaaggagagacgagaatgtt

SEQ ID NO: 2713234 - DNA, 25 bp, Homo sapien
gggtggtacaaaggagagacgagaa

SEQ ID NO: 2713235 - DNA, 25 bp, Homo sapien
tggtacaaaggagagacgagaatgt

SEQ ID NO: 2713236 - DNA, 25 bp, Homo sapien
aacaggtctcttgaggccatggcag

SEQ ID NO: 2713237 - DNA, 25 bp, Homo sapien
cactcatatgtgaccacgtgccagc

SEQ ID NO: 2713238 - DNA, 25 bp, Homo sapien
tcacctctgagcagttcaatcctgg

SEQ ID NO: 2713239 - DNA, 25 bp, Homo sapien
caatcctgggcacagcatacacagg

SEQ ID NO: 2713240 - DNA, 25 bp, Homo sapien
tcaccctcgcagcagggtggggagg

SEQ ID NO: 2713241 - DNA, 25 bp, Homo sapien
gggagggcatctgagggctccaaga

SEQ ID NO: 2713242 - DNA, 25 bp, Homo sapien
atctgagggctccaagagaatattt

SEQ ID NO: 2713243 - DNA, 25 bp, Homo sapien
agggtggggagggcatctgagggct

SEQ ID NO: 2713244 - DNA, 25 bp, Homo sapien
ccccggccggccggctacctgcacg

SEQ ID NO: 2713245 - DNA, 25 bp, Homo sapien
acttccctcgcgcccttagacctcg

SEQ ID NO: 2713246 - DNA, 25 bp, Homo sapien
cgccacttccctcgcgcccttagac

SEQ ID NO: 2713247 - DNA, 25 bp, Homo sapien
tgcacgccccgccttagtccccgcc

SEQ ID NO: 2713248 - DNA, 25 bp, Homo sapien
acgcacatagccagcccgcagcaga

SEQ ID NO: 2713249 - DNA, 25 bp, Homo sapien
gtagatcaggggaagtagctcccgc

SEQ ID NO: 2713250 - DNA, 25 bp, Homo sapien
gggaagtagctcccgccgcttcctg

SEQ ID NO: 2713251 - DNA, 25 bp, Homo sapien
ttcccgcgccgcacgcacatagcca

SEQ ID NO: 2713252 - DNA, 25 bp, Homo sapien
ggttacgggctgagccaggaaacac

SEQ ID NO: 2713253 - DNA, 25 bp, Homo sapien
gttacgggctgagccaggaaacact

SEQ ID NO: 2713254 - DNA, 25 bp, Homo sapien
tccagaagggttacgggctgagcca

SEQ ID NO: 2713255 - DNA, 25 bp, Homo sapien
tagatgtccagaagggttacgggct

SEQ ID NO: 2713256 - DNA, 25 bp, Homo sapien
ggacaagggtgactgtctataccaa

SEQ ID NO: 2713257 - DNA, 25 bp, Homo sapien
gcaggacaagggtgactgtctatac

SEQ ID NO: 2713258 - DNA, 25 bp, Homo sapien
caggacaagggtgactgtctatacc

SEQ ID NO: 2713259 - DNA, 25 bp, Homo sapien
ctgcaggacaagggtgactgtctat

SEQ ID NO: 2713260 - DNA, 25 bp, Homo sapien
tgatggggtctgacacacgggtttt

SEQ ID NO: 2713261 - DNA, 25 bp, Homo sapien
tcttagcttgcagtgccgcatcttc

SEQ ID NO: 2713262 - DNA, 25 bp, Homo sapien
cttccgcttccgaccaagctctgag

SEQ ID NO: 2713263 - DNA, 25 bp, Homo sapien
tggctttggcggtttcggcttctgc

SEQ ID NO: 2713264 - DNA, 25 bp, Homo sapien
ctggtgctggcatgaggatctgagg

SEQ ID NO: 2713265 - DNA, 25 bp, Homo sapien
ggtttcatctcacctaacaattcta

SEQ ID NO: 2713266 - DNA, 25 bp, Homo sapien
aacaattctattggtattggctgcc

SEQ ID NO: 2713267 - DNA, 25 bp, Homo sapien
taacatgaagctatgtgtctgcatc

SEQ ID NO: 2713268 - DNA, 25 bp, Homo sapien
ttgatggcaagtccgcccccaggac

SEQ ID NO: 2713269 - DNA, 25 bp, Homo sapien
tgaggagttggtagatgctagtctt

SEQ ID NO: 2713270 - DNA, 25 bp, Homo sapien
aggactgaggagttggtagatgcta

SEQ ID NO: 2713271 - DNA, 25 bp, Homo sapien
tgcttgatggcaagtccgcccccag

SEQ ID NO: 2713272 - DNA, 25 bp, Homo sapien
caatagcttggaaggcagtcccact

SEQ ID NO: 2713273 - DNA, 25 bp, Homo sapien
ggactaagatcccacaactggtgac

SEQ ID NO: 2713274 - DNA, 25 bp, Homo sapien
aagaaatcgcctaccccaggtgtag

SEQ ID NO: 2713275 - DNA, 25 bp, Homo sapien
taatgctccaggcaatcgcagaggc

SEQ ID NO: 2713276 - DNA, 25 bp, Homo sapien
gttggccaccgtcttcccagtggca

SEQ ID NO: 2713277 - DNA, 25 bp, Homo sapien
gcatggaattcccagtcttgccagc

SEQ ID NO: 2713278 - DNA, 25 bp, Homo sapien
cagtttctgagaccaacgtagtatt

SEQ ID NO: 2713279 - DNA, 25 bp, Homo sapien
ccagaaagaaggttggccaccgtct

SEQ ID NO: 2713280 - DNA, 25 bp, Homo sapien
ctggagctggaggtgtcctcgctgg

SEQ ID NO: 2713281 - DNA, 25 bp, Homo sapien
cactggtgtctgaagccccagacag

SEQ ID NO: 2713282 - DNA, 25 bp, Homo sapien
gttgctgaactcatctgggcccact

SEQ ID NO: 2713283 - DNA, 25 bp, Homo sapien
gcccactggtgtctgaagccccaga

SEQ ID NO: 2713284 - DNA, 25 bp, Homo sapien
cacagttgctgaactcatctgggcc

SEQ ID NO: 2713285 - DNA, 25 bp, Homo sapien
agtagaaactgatgaggctttgacc

SEQ ID NO: 2713286 - DNA, 25 bp, Homo sapien
cttgctggagactccttagtagaaa

SEQ ID NO: 2713287 - DNA, 25 bp, Homo sapien
tccttagtagaaactgatgaggctt

SEQ ID NO: 2713288 - DNA, 25 bp, Homo sapien
ggagactccttagtagaaactgatg

SEQ ID NO: 2713289 - DNA, 25 bp, Homo sapien
tttcagatccctcctcactactctc

SEQ ID NO: 2713290 - DNA, 25 bp, Homo sapien
ctttcagatccctcctcactactct

SEQ ID NO: 2713291 - DNA, 25 bp, Homo sapien
actttcagatccctcctcactactc

SEQ ID NO: 2713292 - DNA, 25 bp, Homo sapien
ttcagatccctcctcactactctct

SEQ ID NO: 2713293 - DNA, 25 bp, Homo sapien
cctgccttggtctgggaggctacag

SEQ ID NO: 2713294 - DNA, 25 bp, Homo sapien
cactgtcagatgactcctcgctgct

SEQ ID NO: 2713295 - DNA, 25 bp, Homo sapien
cagggccttggcagctggcgtctcc

SEQ ID NO: 2713296 - DNA, 25 bp, Homo sapien
tctgggaggctacagcccctgcctt

SEQ ID NO: 2713297 - DNA, 25 bp, Homo sapien
gggctgaggcagctccgacctgaga

SEQ ID NO: 2713298 - DNA, 25 bp, Homo sapien
ccgacctgagaggtttttcctgagg

SEQ ID NO: 2713299 - DNA, 25 bp, Homo sapien
ggcagctccgacctgagaggttttt

SEQ ID NO: 2713300 - DNA, 25 bp, Homo sapien
tgaggcagctccgacctgagaggtt

SEQ ID NO: 2713301 - DNA, 25 bp, Homo sapien
ggagacaggagctggatgtggcaaa

SEQ ID NO: 2713302 - DNA, 25 bp, Homo sapien
gacaggagctggatgtggcaaaggt

SEQ ID NO: 2713303 - DNA, 25 bp, Homo sapien
ctggggtttaggcatggggctactc

SEQ ID NO: 2713304 - DNA, 25 bp, Homo sapien
gcccagagggtggacgtgtggagac

SEQ ID NO: 2713305 - DNA, 25 bp, Homo sapien
tgcaggccctgttttcctaggaggt

SEQ ID NO: 2713306 - DNA, 25 bp, Homo sapien
ccctgttttcctaggaggtgctggg

SEQ ID NO: 2713307 - DNA, 25 bp, Homo sapien
cggctgcaggccctgttttcctagg

SEQ ID NO: 2713308 - DNA, 25 bp, Homo sapien
gggccgaggcggctctgacctgggg

SEQ ID NO: 2713309 - DNA, 25 bp, Homo sapien
tgcttcttgagtcctcctcctgctt

SEQ ID NO: 2713310 - DNA, 25 bp, Homo sapien
ctgcttcttgagtcctcctcctgct

SEQ ID NO: 2713311 - DNA, 25 bp, Homo sapien
ttcttgagtcctcctcctgcttccc

SEQ ID NO: 2713312 - DNA, 25 bp, Homo sapien
ttgagtcctcctcctgcttccccac

SEQ ID NO: 2713313 - DNA, 25 bp, Homo sapien
catggctgccagtgcctctctgtca

SEQ ID NO: 2713314 - DNA, 25 bp, Homo sapien
attcatggctgccagtgcctctctg

SEQ ID NO: 2713315 - DNA, 25 bp, Homo sapien
tgcattcatggctgccagtgcctct

SEQ ID NO: 2713316 - DNA, 25 bp, Homo sapien
tctctgtcactgtctgactcctcgc

SEQ ID NO: 2713317 - DNA, 25 bp, Homo sapien
cacagggctctaggttcagagagga

SEQ ID NO: 2713318 - DNA, 25 bp, Homo sapien
agtcaaaaccacaggaggtcttttg

SEQ ID NO: 2713319 - DNA, 25 bp, Homo sapien
aaaccacaggaggtcttttgaggca

SEQ ID NO: 2713320 - DNA, 25 bp, Homo sapien
agcaaacgaagccagccgcacaggg

SEQ ID NO: 2713321 - DNA, 25 bp, Homo sapien
cacctgggctgagggggttgcaggc

SEQ ID NO: 2713322 - DNA, 25 bp, Homo sapien
ctgagggggttgcaggccccacctt

SEQ ID NO: 2713323 - DNA, 25 bp, Homo sapien
tctgatgactcctcactactgctct

SEQ ID NO: 2713324 - DNA, 25 bp, Homo sapien
caagggccccatgcccatggtagag

SEQ ID NO: 2713325 - DNA, 25 bp, Homo sapien
ctggacggctacaggccctgccttc

SEQ ID NO: 2713326 - DNA, 25 bp, Homo sapien
tcgctgctctccgagttgtccatgg

SEQ ID NO: 2713327 - DNA, 25 bp, Homo sapien
gctctccgagttgtccatgggcttt

SEQ ID NO: 2713328 - DNA, 25 bp, Homo sapien
gctgctctccgagttgtccatgggc

SEQ ID NO: 2713329 - DNA, 25 bp, Homo sapien
tcactgtccgcactgtccgatgact

SEQ ID NO: 2713330 - DNA, 25 bp, Homo sapien
gtgtggcagatcaggccatgtagca

SEQ ID NO: 2713331 - DNA, 25 bp, Homo sapien
gagaaggttcctgaactcagagtcc

SEQ ID NO: 2713332 - DNA, 25 bp, Homo sapien
gcagatcaggccatgtagcagcctc

SEQ ID NO: 2713333 - DNA, 25 bp, Homo sapien
gagtcccccatctgttctgccccac

SEQ ID NO: 2713334 - DNA, 25 bp, Homo sapien
tgtcccacggttactgcaagacctg

SEQ ID NO: 2713335 - DNA, 25 bp, Homo sapien
tggagaagtcgcagttcctgctttc

SEQ ID NO: 2713336 - DNA, 25 bp, Homo sapien
ggcagatgcagtggtattggttttc

SEQ ID NO: 2713337 - DNA, 25 bp, Homo sapien
caggccttggtctgaggaattttca

SEQ ID NO: 2713338 - DNA, 25 bp, Homo sapien
ctgaggctgctttcacctggaggcc

SEQ ID NO: 2713339 - DNA, 25 bp, Homo sapien
ccagggagtactggagcagtccctt

SEQ ID NO: 2713340 - DNA, 25 bp, Homo sapien
tactggagcagtcccttgccccaag

SEQ ID NO: 2713341 - DNA, 25 bp, Homo sapien
tgggtgactgtaggccccgtcttcc

SEQ ID NO: 2713342 - DNA, 25 bp, Homo sapien
ctgtgctggagatgcagctgcttcc

SEQ ID NO: 2713343 - DNA, 25 bp, Homo sapien
gctgcttcctcactgtctgattcct

SEQ ID NO: 2713344 - DNA, 25 bp, Homo sapien
ttcctcactgtctgattcctcctca

SEQ ID NO: 2713345 - DNA, 25 bp, Homo sapien
gtgctggagatgcagctgcttcctc

SEQ ID NO: 2713346 - DNA, 25 bp, Homo sapien
gagacctctgcttggcttgagcagc

SEQ ID NO: 2713347 - DNA, 25 bp, Homo sapien
aaattgtcccttttgctgaaggtgc

SEQ ID NO: 2713348 - DNA, 25 bp, Homo sapien
ctgaaggtgctctggcggcagctgg

SEQ ID NO: 2713349 - DNA, 25 bp, Homo sapien
tggagacctctgcttggcttgagca

SEQ ID NO: 2713350 - DNA, 25 bp, Homo sapien
gggggtttctcactggtggcttcac

SEQ ID NO: 2713351 - DNA, 25 bp, Homo sapien
tctgggggtttctcactggtggctt

SEQ ID NO: 2713352 - DNA, 25 bp, Homo sapien
ttctgggggtttctcactggtggct

SEQ ID NO: 2713353 - DNA, 25 bp, Homo sapien
ctgttctgggggtttctcactggtg

SEQ ID NO: 2713354 - DNA, 25 bp, Homo sapien
atgctgggcccctcgccaagacggt

SEQ ID NO: 2713355 - DNA, 25 bp, Homo sapien
gatgctgggcccctcgccaagacgg

SEQ ID NO: 2713356 - DNA, 25 bp, Homo sapien
tgctgggcccctcgccaagacggta

SEQ ID NO: 2713357 - DNA, 25 bp, Homo sapien
tcacagctgccggtgcctccccatc

SEQ ID NO: 2713358 - DNA, 25 bp, Homo sapien
ctgggcagccgaaggccctgtcttc

SEQ ID NO: 2713359 - DNA, 25 bp, Homo sapien
ggagccaaggcagctctgatctggt

SEQ ID NO: 2713360 - DNA, 25 bp, Homo sapien
ccccatcactgtctgattcctcgct

SEQ ID NO: 2713361 - DNA, 25 bp, Homo sapien
gacccaggacacttttagctacgga

SEQ ID NO: 2713362 - DNA, 25 bp, Homo sapien
tgcctgagaagatgcgcctgcctat

SEQ ID NO: 2713363 - DNA, 25 bp, Homo sapien
cacttctgtaggatgtagcaagccc

SEQ ID NO: 2713364 - DNA, 25 bp, Homo sapien
tggagacctcgacctagatatagac

SEQ ID NO: 2713365 - DNA, 25 bp, Homo sapien
ttgtaacacccccagccaaaagcag

SEQ ID NO: 2713366 - DNA, 25 bp, Homo sapien
ccactggctaccatcccctcctgtt

SEQ ID NO: 2713367 - DNA, 25 bp, Homo sapien
aagtgttccactggctaccatcccc

SEQ ID NO: 2713368 - DNA, 25 bp, Homo sapien
gttgtaacacccccagccaaaagca

SEQ ID NO: 2713369 - DNA, 25 bp, Homo sapien
tccgatgcagctaaaacctgagggc

SEQ ID NO: 2713370 - DNA, 25 bp, Homo sapien
agagctgactccgaacatgaaaggg

SEQ ID NO: 2713371 - DNA, 25 bp, Homo sapien
ggctgttggcccaatgtctcgacaa

SEQ ID NO: 2713372 - DNA, 25 bp, Homo sapien
acagccactggaaacatgcttccac

SEQ ID NO: 2713373 - DNA, 25 bp, Homo sapien
taggcaatgaccctcaggcactctg

SEQ ID NO: 2713374 - DNA, 25 bp, Homo sapien
caatgaccctcaggcactctggttt

SEQ ID NO: 2713375 - DNA, 25 bp, Homo sapien
cagccagtaggcaatgaccctcagg

SEQ ID NO: 2713376 - DNA, 25 bp, Homo sapien
gggaaacagccagtaggcaatgacc

SEQ ID NO: 2713377 - DNA, 25 bp, Homo sapien
aagacctggataagcacgtggtcgg

SEQ ID NO: 2713378 - DNA, 25 bp, Homo sapien
gggacaagacctggataagcacgtg

SEQ ID NO: 2713379 - DNA, 25 bp, Homo sapien
ctgaggggacaagacctggataagc

SEQ ID NO: 2713380 - DNA, 25 bp, Homo sapien
gacaagacctggataagcacgtggt

SEQ ID NO: 2713381 - DNA, 25 bp, Homo sapien
ttgcttctggcaggtttggagttac

SEQ ID NO: 2713382 - DNA, 25 bp, Homo sapien
tcttgcttctggcaggtttggagtt

SEQ ID NO: 2713383 - DNA, 25 bp, Homo sapien
cagggtcttgcttctggcaggtttg

SEQ ID NO: 2713384 - DNA, 25 bp, Homo sapien
gccagggtcttgcttctggcaggtt

SEQ ID NO: 2713385 - DNA, 25 bp, Homo sapien
gctctccgaggacccctccgtgttc

SEQ ID NO: 2713386 - DNA, 25 bp, Homo sapien
cagttgtttagatccctcagagagg

SEQ ID NO: 2713387 - DNA, 25 bp, Homo sapien
ccatgtgatgctgggacaggtccct

SEQ ID NO: 2713388 - DNA, 25 bp, Homo sapien
tgtgaatggcctgtgctcaaacacc

SEQ ID NO: 2713389 - DNA, 25 bp, Homo sapien
cacccttggaggtgtagcctgagca

SEQ ID NO: 2713390 - DNA, 25 bp, Homo sapien
ggaactaaaaatctctcaatcagga

SEQ ID NO: 2713391 - DNA, 25 bp, Homo sapien
ctgaaacttgtcaatagagaggtgc

SEQ ID NO: 2713392 - DNA, 25 bp, Homo sapien
tactctgcacaacagggcggaggca

SEQ ID NO: 2713393 - DNA, 25 bp, Homo sapien
ggagccaaggtatctatccctgcct

SEQ ID NO: 2713394 - DNA, 25 bp, Homo sapien
ctacgattagggtcgacaaaaatca

SEQ ID NO: 2713395 - DNA, 25 bp, Homo sapien
acgattagggtcgacaaaaatcaga

SEQ ID NO: 2713396 - DNA, 25 bp, Homo sapien
cgattagggtcgacaaaaatcagag

SEQ ID NO: 2713397 - DNA, 25 bp, Homo sapien
tacgattagggtcgacaaaaatcag

SEQ ID NO: 2713398 - DNA, 25 bp, Homo sapien
cttgtgcgggtgtagcagctgggcc

SEQ ID NO: 2713399 - DNA, 25 bp, Homo sapien
gggcttgtgcgggtgtagcagctgg

SEQ ID NO: 2713400 - DNA, 25 bp, Homo sapien
ttgtgcgggtgtagcagctgggcca

SEQ ID NO: 2713401 - DNA, 25 bp, Homo sapien
gcttgtgcgggtgtagcagctgggc

SEQ ID NO: 2713402 - DNA, 25 bp, Homo sapien
tgtagcggggatcacgtcctcatcc

SEQ ID NO: 2713403 - DNA, 25 bp, Homo sapien
caggagtcaagcactgtgtagcggg

SEQ ID NO: 2713404 - DNA, 25 bp, Homo sapien
tcgggccttcctcggggtgcttgca

SEQ ID NO: 2713405 - DNA, 25 bp, Homo sapien
ctcgggccttcctcggggtgcttgc

SEQ ID NO: 2713406 - DNA, 25 bp, Homo sapien
atggtcaccacattggttctgatgc

SEQ ID NO: 2713407 - DNA, 25 bp, Homo sapien
tgggcatggtcaccacattggttct

SEQ ID NO: 2713408 - DNA, 25 bp, Homo sapien
ttgccatctgatatccgactggact

SEQ ID NO: 2713409 - DNA, 25 bp, Homo sapien
tctgatatccgactggactccttgc

SEQ ID NO: 2713410 - DNA, 25 bp, Homo sapien
gagcctcactggctttctgggcgag

SEQ ID NO: 2713411 - DNA, 25 bp, Homo sapien
tctgggcgaggaccttcagggcagc

SEQ ID NO: 2713412 - DNA, 25 bp, Homo sapien
tcctggcaacaggaggctgagcctc

SEQ ID NO: 2713413 - DNA, 25 bp, Homo sapien
gggaagctgggttcttctttgacac

SEQ ID NO: 2713414 - DNA, 25 bp, Homo sapien
ccgagggaggcaaaccaagtgcaga

SEQ ID NO: 2713415 - DNA, 25 bp, Homo sapien
gcgatgcagggccacgcctgcacct

SEQ ID NO: 2713416 - DNA, 25 bp, Homo sapien
agatgagtgctggtgccgcgatgca

SEQ ID NO: 2713417 - DNA, 25 bp, Homo sapien
gcaccttctacgctccgtgggcttg

SEQ ID NO: 2713418 - DNA, 25 bp, Homo sapien
ttagatggggcacacatgcagcctc

SEQ ID NO: 2713419 - DNA, 25 bp, Homo sapien
tgaacacttcagtagggccaggaac

SEQ ID NO: 2713420 - DNA, 25 bp, Homo sapien
tgatccttccaactacgaaaggtac

SEQ ID NO: 2713421 - DNA, 25 bp, Homo sapien
tggtccttcctgaacacttcagtag

SEQ ID NO: 2713422 - DNA, 25 bp, Homo sapien
ttgcagggagtgttcccacagcact

SEQ ID NO: 2713423 - DNA, 25 bp, Homo sapien
ggacttgttgcagggagtgttccca

SEQ ID NO: 2713424 - DNA, 25 bp, Homo sapien
cctttggcctggacggaggtgctct

SEQ ID NO: 2713425 - DNA, 25 bp, Homo sapien
ccctttggcctggacggaggtgctc

SEQ ID NO: 2713426 - DNA, 25 bp, Homo sapien
aatgagtctgagatatggagctgag

SEQ ID NO: 2713427 - DNA, 25 bp, Homo sapien
agtctgagatatggagctgaggcca

SEQ ID NO: 2713428 - DNA, 25 bp, Homo sapien
gagtctgagatatggagctgaggcc

SEQ ID NO: 2713429 - DNA, 25 bp, Homo sapien
cagaatgagtctgagatatggagct

SEQ ID NO: 2713430 - DNA, 25 bp, Homo sapien
tgggatggcgccaccacatcatcct

SEQ ID NO: 2713431 - DNA, 25 bp, Homo sapien
ctgggatggcgccaccacatcatcc

SEQ ID NO: 2713432 - DNA, 25 bp, Homo sapien
aaactgaggggctggagtctagctt

SEQ ID NO: 2713433 - DNA, 25 bp, Homo sapien
tttggcggccagagtagaggaaact

SEQ ID NO: 2713434 - DNA, 25 bp, Homo sapien
tgcctcctgcttgccatctgggtca

SEQ ID NO: 2713435 - DNA, 25 bp, Homo sapien
ctggagtctagcttgggagtggctt

SEQ ID NO: 2713436 - DNA, 25 bp, Homo sapien
cacaccgtgagcctatttacaggga

SEQ ID NO: 2713437 - DNA, 25 bp, Homo sapien
ggcaagggctatcctaccaggtgca

SEQ ID NO: 2713438 - DNA, 25 bp, Homo sapien
ccaaaagacgcagcttcctctgagg

SEQ ID NO: 2713439 - DNA, 25 bp, Homo sapien
tattgtctaagctatcctctgaggc

SEQ ID NO: 2713440 - DNA, 25 bp, Homo sapien
aaacacccagaacaccaaggctggg

SEQ ID NO: 2713441 - DNA, 25 bp, Homo sapien
tgctgcttatctgcaaacacccaga

SEQ ID NO: 2713442 - DNA, 25 bp, Homo sapien
caagtgtgcccagctggtacatatt

SEQ ID NO: 2713443 - DNA, 25 bp, Homo sapien
cccaagtgtgcccagctggtacata

SEQ ID NO: 2713444 - DNA, 25 bp, Homo sapien
gagagaatgtggggtcacagatctg

SEQ ID NO: 2713445 - DNA, 25 bp, Homo sapien
agagagaatgtggggtcacagatct

SEQ ID NO: 2713446 - DNA, 25 bp, Homo sapien
cttccgggacttctgaggtgtggtg

SEQ ID NO: 2713447 - DNA, 25 bp, Homo sapien
tccgggacttctgaggtgtggtgcc

SEQ ID NO: 2713448 - DNA, 25 bp, Homo sapien
ggacttctgaggtgtggtgcctgaa

SEQ ID NO: 2713449 - DNA, 25 bp, Homo sapien
ccgggacttctgaggtgtggtgcct

SEQ ID NO: 2713450 - DNA, 25 bp, Homo sapien
tgctttccccttggaagtcgtggag

SEQ ID NO: 2713451 - DNA, 25 bp, Homo sapien
gctggctggtctcccgatagcttcc

SEQ ID NO: 2713452 - DNA, 25 bp, Homo sapien
ggtctcccgatagcttccgcttgcg

SEQ ID NO: 2713453 - DNA, 25 bp, Homo sapien
tccttgacatcaccacttgctttgt

SEQ ID NO: 2713454 - DNA, 25 bp, Homo sapien
cttctgaagctcctcttctggctcg

SEQ ID NO: 2713455 - DNA, 25 bp, Homo sapien
tctgaagctcctcttctggctcgtc

SEQ ID NO: 2713456 - DNA, 25 bp, Homo sapien
ttctgaagctcctcttctggctcgt

SEQ ID NO: 2713457 - DNA, 25 bp, Homo sapien
ccttctgaagctcctcttctggctc

SEQ ID NO: 2713458 - DNA, 25 bp, Homo sapien
tgctttgatctccaccttcaaccgt

SEQ ID NO: 2713459 - DNA, 25 bp, Homo sapien
ttgggttgctttgatctccaccttc

SEQ ID NO: 2713460 - DNA, 25 bp, Homo sapien
gggttgctttgatctccaccttcaa

SEQ ID NO: 2713461 - DNA, 25 bp, Homo sapien
ggttgctttgatctccaccttcaac

SEQ ID NO: 2713462 - DNA, 25 bp, Homo sapien
cctctcttttctacatgggaggaat

SEQ ID NO: 2713463 - DNA, 25 bp, Homo sapien
gaggaatgagaccaggtgctggctg

SEQ ID NO: 2713464 - DNA, 25 bp, Homo sapien
ggaatgagaccaggtgctggctgag

SEQ ID NO: 2713465 - DNA, 25 bp, Homo sapien
tctacatgggaggaatgagaccagg

SEQ ID NO: 2713466 - DNA, 25 bp, Homo sapien
ttctgggacggtgactcagaatctt

SEQ ID NO: 2713467 - DNA, 25 bp, Homo sapien
tttcttctgggacggtgactcagaa

SEQ ID NO: 2713468 - DNA, 25 bp, Homo sapien
tcttctgggacggtgactcagaatc

SEQ ID NO: 2713469 - DNA, 25 bp, Homo sapien
tttttcttctgggacggtgactcag

SEQ ID NO: 2713470 - DNA, 25 bp, Homo sapien
tcatacagtctgctctgctgtcttc

SEQ ID NO: 2713471 - DNA, 25 bp, Homo sapien
catacagtctgctctgctgtcttct

SEQ ID NO: 2713472 - DNA, 25 bp, Homo sapien
atacagtctgctctgctgtcttctt

SEQ ID NO: 2713473 - DNA, 25 bp, Homo sapien
gggatggccactgctcggctaggaa

SEQ ID NO: 2713474 - DNA, 25 bp, Homo sapien
ggggatggccactgctcggctagga

SEQ ID NO: 2713475 - DNA, 25 bp, Homo sapien
ggatggccactgctcggctaggaaa

SEQ ID NO: 2713476 - DNA, 25 bp, Homo sapien
agcctcgggatcagccagagaccga

SEQ ID NO: 2713477 - DNA, 25 bp, Homo sapien
caggcctagctggatctgtggagca

SEQ ID NO: 2713478 - DNA, 25 bp, Homo sapien
aagtcccgaggcctttgggcatgtg

SEQ ID NO: 2713479 - DNA, 25 bp, Homo sapien
cacaaccaaaagaactgacgagagg

SEQ ID NO: 2713480 - DNA, 25 bp, Homo sapien
caagacctaggctcatggacgagat

SEQ ID NO: 2713481 - DNA, 25 bp, Homo sapien
ccaggaagtggccaaaagctagaca

SEQ ID NO: 2713482 - DNA, 25 bp, Homo sapien
tggacaagacaaaccaagtcggaac

SEQ ID NO: 2713483 - DNA, 25 bp, Homo sapien
ttgttatcagctttcagggccatgg

SEQ ID NO: 2713484 - DNA, 25 bp, Homo sapien
cgcggagccctgtacacaggctttt

SEQ ID NO: 2713485 - DNA, 25 bp, Homo sapien
agccgcggagccctgtacacaggct

SEQ ID NO: 2713486 - DNA, 25 bp, Homo sapien
cggagccctgtacacaggcttttcc

SEQ ID NO: 2713487 - DNA, 25 bp, Homo sapien
gccgcggagccctgtacacaggctt

SEQ ID NO: 2713488 - DNA, 25 bp, Homo sapien
gatcatcaggagatccgcacggcaa

SEQ ID NO: 2713489 - DNA, 25 bp, Homo sapien
ctgttccccttgagggcagccctga

SEQ ID NO: 2713490 - DNA, 25 bp, Homo sapien
tctctgttcaactcaggcccgtggc

SEQ ID NO: 2713491 - DNA, 25 bp, Homo sapien
cagggaagacttcaggcacatcgat

SEQ ID NO: 2713492 - DNA, 25 bp, Homo sapien
ggtgatctacctgtcttggcttcct

SEQ ID NO: 2713493 - DNA, 25 bp, Homo sapien
gatctacctgtcttggcttcctaaa

SEQ ID NO: 2713494 - DNA, 25 bp, Homo sapien
tcactctatcccccaggatggaatg

SEQ ID NO: 2713495 - DNA, 25 bp, Homo sapien
cactctatcccccaggatggaatgc

SEQ ID NO: 2713496 - DNA, 25 bp, Homo sapien
gggacaggcgttcaagatgcataaa

SEQ ID NO: 2713497 - DNA, 25 bp, Homo sapien
gaactcccctgagaattgcactgag

SEQ ID NO: 2713498 - DNA, 25 bp, Homo sapien
caggttatgtggtctcgtcttcagg

SEQ ID NO: 2713499 - DNA, 25 bp, Homo sapien
tctaggttcttaggcctcctgagga

SEQ ID NO: 2713500 - DNA, 25 bp, Homo sapien
cagtcatggatgaccagcgcgacct

SEQ ID NO: 2713501 - DNA, 25 bp, Homo sapien
cagcgcgaccttatctccaacaatg

SEQ ID NO: 2713502 - DNA, 25 bp, Homo sapien
cagaagccagtcatggatgaccagc

SEQ ID NO: 2713503 - DNA, 25 bp, Homo sapien
tatctccaacaatgagcaactgccc

SEQ ID NO: 2713504 - DNA, 25 bp, Homo sapien
gtccagagagggcactagcaaggcc

SEQ ID NO: 2713505 - DNA, 25 bp, Homo sapien
ccagagagggcactagcaaggccat

SEQ ID NO: 2713506 - DNA, 25 bp, Homo sapien
gttgtccagagagggcactagcaag

SEQ ID NO: 2713507 - DNA, 25 bp, Homo sapien
ctgttgtccagagagggcactagca

SEQ ID NO: 2713508 - DNA, 25 bp, Homo sapien
tcttgtgccaagcagcataaaggac

SEQ ID NO: 2713509 - DNA, 25 bp, Homo sapien
cctgtggtgagactgtaacttgtcc

SEQ ID NO: 2713510 - DNA, 25 bp, Homo sapien
caatcagccgggtctttgaaagcag

SEQ ID NO: 2713511 - DNA, 25 bp, Homo sapien
gccagtcgccggagcattcttttta

SEQ ID NO: 2713512 - DNA, 25 bp, Homo sapien
taagaccacgtcaggaaattcgagg

SEQ ID NO: 2713513 - DNA, 25 bp, Homo sapien
tcagaacctggatttgtcctgtgcc

SEQ ID NO: 2713514 - DNA, 25 bp, Homo sapien
ttcctctagagaagacggtgggcta

SEQ ID NO: 2713515 - DNA, 25 bp, Homo sapien
gaaaacgagacagttgcagttaccc

SEQ ID NO: 2713516 - DNA, 25 bp, Homo sapien
ctgccgtgtgactggtgggatgaag

SEQ ID NO: 2713517 - DNA, 25 bp, Homo sapien
tctgccgtgtgactggtgggatgaa

SEQ ID NO: 2713518 - DNA, 25 bp, Homo sapien
atctgccgtgtgactggtgggatga

SEQ ID NO: 2713519 - DNA, 25 bp, Homo sapien
tgccgtgtgactggtgggatgaagg

SEQ ID NO: 2713520 - DNA, 25 bp, Homo sapien
ggtgtctgccatatctttgcatcct

SEQ ID NO: 2713521 - DNA, 25 bp, Homo sapien
caatgacacttttgtccatgtcact

SEQ ID NO: 2713522 - DNA, 25 bp, Homo sapien
aggtcatcagcctcggacctcaggt

SEQ ID NO: 2713523 - DNA, 25 bp, Homo sapien
ggaagaacaggtcatcagcctcgga

SEQ ID NO: 2713524 - DNA, 25 bp, Homo sapien
aaagccccttggcagcaggccgtga

SEQ ID NO: 2713525 - DNA, 25 bp, Homo sapien
tgcccatattccctgctagacaaag

SEQ ID NO: 2713526 - DNA, 25 bp, Homo sapien
cagttgctcgcagaccgcgtgtgag

SEQ ID NO: 2713527 - DNA, 25 bp, Homo sapien
ccgtgacacggtcactgtgtggcga

SEQ ID NO: 2713528 - DNA, 25 bp, Homo sapien
ctgcagcacggagatctggcgccat

SEQ ID NO: 2713529 - DNA, 25 bp, Homo sapien
ccaagaactgaagggtgcttttcct

SEQ ID NO: 2713530 - DNA, 25 bp, Homo sapien
gaacttaatgttcactcccaggccg

SEQ ID NO: 2713531 - DNA, 25 bp, Homo sapien
tgggaatccagagactgccaagaac

SEQ ID NO: 2713532 - DNA, 25 bp, Homo sapien
ttccttccgggcgggcagatttgga

SEQ ID NO: 2713533 - DNA, 25 bp, Homo sapien
gccgaagagacaaacatcagaggtc

SEQ ID NO: 2713534 - DNA, 25 bp, Homo sapien
cctcggcagccgaagagacaaacat

SEQ ID NO: 2713535 - DNA, 25 bp, Homo sapien
cattttccacgggatgcttccaggc

SEQ ID NO: 2713536 - DNA, 25 bp, Homo sapien
cacgggatgcttccaggctgggttt

SEQ ID NO: 2713537 - DNA, 25 bp, Homo sapien
gcccaaatccttccaactcattgtc

SEQ ID NO: 2713538 - DNA, 25 bp, Homo sapien
atcttctcaggtcttccgagttgct

SEQ ID NO: 2713539 - DNA, 25 bp, Homo sapien
tccaactcattgtcacccggagaac

SEQ ID NO: 2713540 - DNA, 25 bp, Homo sapien
ttctcaggtcttccgagttgctctt

SEQ ID NO: 2713541 - DNA, 25 bp, Homo sapien
tgacccctatctccgagcgggtagg

SEQ ID NO: 2713542 - DNA, 25 bp, Homo sapien
ttcgatcccgtgatgccgcgtgggt

SEQ ID NO: 2713543 - DNA, 25 bp, Homo sapien
tggatttctcgacttccacccggat

SEQ ID NO: 2713544 - DNA, 25 bp, Homo sapien
acgtgacgcgggctgcctttgaccc

SEQ ID NO: 2713545 - DNA, 25 bp, Homo sapien
ctgccacggctggggcgccactcgg

SEQ ID NO: 2713546 - DNA, 25 bp, Homo sapien
tgccacggctggggcgccactcggg

SEQ ID NO: 2713547 - DNA, 25 bp, Homo sapien
cccttcttggcagtgtcttcacaag

SEQ ID NO: 2713548 - DNA, 25 bp, Homo sapien
ttcttggcagtgtcttcacaaggca

SEQ ID NO: 2713549 - DNA, 25 bp, Homo sapien
accccttcttggcagtgtcttcaca

SEQ ID NO: 2713550 - DNA, 25 bp, Homo sapien
cccaccccttcttggcagtgtcttc

SEQ ID NO: 2713551 - DNA, 25 bp, Homo sapien
tgggaatggacaggtcacgatcaca

SEQ ID NO: 2713552 - DNA, 25 bp, Homo sapien
tcatggacccctgcactggtgggaa

SEQ ID NO: 2713553 - DNA, 25 bp, Homo sapien
ggtagcagagggagccgactccctc

SEQ ID NO: 2713554 - DNA, 25 bp, Homo sapien
cacgatcacaggatactcaagagac

SEQ ID NO: 2713555 - DNA, 25 bp, Homo sapien
tctcgaatgtcctctccttaacacg

SEQ ID NO: 2713556 - DNA, 25 bp, Homo sapien
acgccctctcgaatgtcctctcctt

SEQ ID NO: 2713557 - DNA, 25 bp, Homo sapien
gaggttcctcttcacttcgccacgc

SEQ ID NO: 2713558 - DNA, 25 bp, Homo sapien
atgtcctctccttaacacggctgca

SEQ ID NO: 2713559 - DNA, 25 bp, Homo sapien
cagagacttaggaagcgacgccctt

SEQ ID NO: 2713560 - DNA, 25 bp, Homo sapien
gagaatcgtccactgaccaacaaat

SEQ ID NO: 2713561 - DNA, 25 bp, Homo sapien
gcgcccctttatgtcaccatggcaa

SEQ ID NO: 2713562 - DNA, 25 bp, Homo sapien
cacaggaggagacacgagaatcgtc

SEQ ID NO: 2713563 - DNA, 25 bp, Homo sapien
gacacgtgccgacacagcctccgga

SEQ ID NO: 2713564 - DNA, 25 bp, Homo sapien
ggacacgtgccgacacagcctccgg

SEQ ID NO: 2713565 - DNA, 25 bp, Homo sapien
tccggaggcatgccagggcaggcat

SEQ ID NO: 2713566 - DNA, 25 bp, Homo sapien
ctccggaggcatgccagggcaggca

SEQ ID NO: 2713567 - DNA, 25 bp, Homo sapien
tagtaggccgagatgaaaacgctga

SEQ ID NO: 2713568 - DNA, 25 bp, Homo sapien
gagtagaggctctccacaaagacca

SEQ ID NO: 2713569 - DNA, 25 bp, Homo sapien
tctctgtgcggtatttgaagcggct

SEQ ID NO: 2713570 - DNA, 25 bp, Homo sapien
tcgcttccagccatataggtagtag

SEQ ID NO: 2713571 - DNA, 25 bp, Homo sapien
gagttttcagatccctggagcccac

SEQ ID NO: 2713572 - DNA, 25 bp, Homo sapien
catttgagcagaaaatcacaggcct

SEQ ID NO: 2713573 - DNA, 25 bp, Homo sapien
gatagtcttgtcctaggcaacaggg

SEQ ID NO: 2713574 - DNA, 25 bp, Homo sapien
caaagactgtgggagctctgtgcac

SEQ ID NO: 2713575 - DNA, 25 bp, Homo sapien
gtacctggcatagatagacgctcaa

SEQ ID NO: 2713576 - DNA, 25 bp, Homo sapien
tagtgcccagcttgatacccagcag

SEQ ID NO: 2713577 - DNA, 25 bp, Homo sapien
gctatgaatcgctgccaagaggtcg

SEQ ID NO: 2713578 - DNA, 25 bp, Homo sapien
tgatgtttcgcctttggacccctag

SEQ ID NO: 2713579 - DNA, 25 bp, Homo sapien
cggcatccacgaagacaagcttgtg

SEQ ID NO: 2713580 - DNA, 25 bp, Homo sapien
gaagatgtcatcaatgtccaccagg

SEQ ID NO: 2713581 - DNA, 25 bp, Homo sapien
gttgttgccaaacagcacgcgctgg

SEQ ID NO: 2713582 - DNA, 25 bp, Homo sapien
tccaccaggatgtagcggtccaatg

SEQ ID NO: 2713583 - DNA, 25 bp, Homo sapien
tcctccaccttcatgcgtgtgccct

SEQ ID NO: 2713584 - DNA, 25 bp, Homo sapien
ttgcccggtctagcacccccggcca

SEQ ID NO: 2713585 - DNA, 25 bp, Homo sapien
gcccggtctagcacccccggccata

SEQ ID NO: 2713586 - DNA, 25 bp, Homo sapien
tgccttgcccggtctagcacccccg

SEQ ID NO: 2713587 - DNA, 25 bp, Homo sapien
ctgccttgcccggtctagcaccccc

SEQ ID NO: 2713588 - DNA, 25 bp, Homo sapien
taagagttttgtaggcgctctgaca

SEQ ID NO: 2713589 - DNA, 25 bp, Homo sapien
ggaatgccatgcacagtcatggctc

SEQ ID NO: 2713590 - DNA, 25 bp, Homo sapien
cactgtctacttacacctcagttaa

SEQ ID NO: 2713591 - DNA, 25 bp, Homo sapien
tcatgcatgattcaagctctcatcc

SEQ ID NO: 2713592 - DNA, 25 bp, Homo sapien
agaatttccctgagtagcccaggtt

SEQ ID NO: 2713593 - DNA, 25 bp, Homo sapien
tgaagtttgggatgtgtgcgcgtag

SEQ ID NO: 2713594 - DNA, 25 bp, Homo sapien
gcgcgtagttcgttctgtgtgtcaa

SEQ ID NO: 2713595 - DNA, 25 bp, Homo sapien
aatttccctgagtagcccaggttga

SEQ ID NO: 2713596 - DNA, 25 bp, Homo sapien
ccttcacatacgacagcagcagatc

SEQ ID NO: 2713597 - DNA, 25 bp, Homo sapien
aactccttcacatacgacagcagca

SEQ ID NO: 2713598 - DNA, 25 bp, Homo sapien
atctgctcggccaacacggactggt

SEQ ID NO: 2713599 - DNA, 25 bp, Homo sapien
gccaacacggactggttgtggaaaa

SEQ ID NO: 2713600 - DNA, 25 bp, Homo sapien
tacagctgcacgtgcacggggtaca

SEQ ID NO: 2713601 - DNA, 25 bp, Homo sapien
gggtactcctccgtgctggtcacgc

SEQ ID NO: 2713602 - DNA, 25 bp, Homo sapien
tgcttccaagcctcgtacagctgca

SEQ ID NO: 2713603 - DNA, 25 bp, Homo sapien
ccgtgctggtcacgcggatgctcca

SEQ ID NO: 2713604 - DNA, 25 bp, Homo sapien
tactcgttgtagaagatggtgtgtg

SEQ ID NO: 2713605 - DNA, 25 bp, Homo sapien
tccagctcactggagccgccagggt

SEQ ID NO: 2713606 - DNA, 25 bp, Homo sapien
gattgaggagcacggtgaggaagag

SEQ ID NO: 2713607 - DNA, 25 bp, Homo sapien
gagctcgcccccgttgatgatcttg

SEQ ID NO: 2713608 - DNA, 25 bp, Homo sapien
tggctccaggaagcctgtgtcagct

SEQ ID NO: 2713609 - DNA, 25 bp, Homo sapien
cagacaggctgtgcagcagcccctt

SEQ ID NO: 2713610 - DNA, 25 bp, Homo sapien
agccccttctcaccagcagccatgg

SEQ ID NO: 2713611 - DNA, 25 bp, Homo sapien
gcagccatgggctgtggagcactca

SEQ ID NO: 2713612 - DNA, 25 bp, Homo sapien
tacaaataaggaaagcgagacctag

SEQ ID NO: 2713613 - DNA, 25 bp, Homo sapien
tattaaagtacatgattaggaaagg

SEQ ID NO: 2713614 - DNA, 25 bp, Homo sapien
tgctcggattctttagccaaggtca

SEQ ID NO: 2713615 - DNA, 25 bp, Homo sapien
ggagagtgggtctcccaactgccag

SEQ ID NO: 2713616 - DNA, 25 bp, Homo sapien
agagcgggtccttctcctcggagaa

SEQ ID NO: 2713617 - DNA, 25 bp, Homo sapien
gtacttctgcgccaactgcacaggg

SEQ ID NO: 2713618 - DNA, 25 bp, Homo sapien
tgcttgaaggtgtacaggcccaggc

SEQ ID NO: 2713619 - DNA, 25 bp, Homo sapien
tcccatagttggacaggtgcgtcat

SEQ ID NO: 2713620 - DNA, 25 bp, Homo sapien
ccagatgtctttgtgacgtttgtcc

SEQ ID NO: 2713621 - DNA, 25 bp, Homo sapien
gatgtctttgtgacgtttgtcctcg

SEQ ID NO: 2713622 - DNA, 25 bp, Homo sapien
ctttgtgacgtttgtcctcgcaggg

SEQ ID NO: 2713623 - DNA, 25 bp, Homo sapien
gtctttgtgacgtttgtcctcgcag

SEQ ID NO: 2713624 - DNA, 25 bp, Homo sapien
tgggggccgatgatgaggagctttg

SEQ ID NO: 2713625 - DNA, 25 bp, Homo sapien
ttctgggggccgatgatgaggagct

SEQ ID NO: 2713626 - DNA, 25 bp, Homo sapien
tctgggggccgatgatgaggagctt

SEQ ID NO: 2713627 - DNA, 25 bp, Homo sapien
tttctgggggccgatgatgaggagc

SEQ ID NO: 2713628 - DNA, 25 bp, Homo sapien
ctcctcagtgagttcattcactttc

SEQ ID NO: 2713629 - DNA, 25 bp, Homo sapien
tcagtgagttcattcactttctgtg

SEQ ID NO: 2713630 - DNA, 25 bp, Homo sapien
cagtgagttcattcactttctgtgg

SEQ ID NO: 2713631 - DNA, 25 bp, Homo sapien
cctcagtgagttcattcactttctg

SEQ ID NO: 2713632 - DNA, 25 bp, Homo sapien
aggtcagggtgcatgcccaggaaca

SEQ ID NO: 2713633 - DNA, 25 bp, Homo sapien
ctgcttaggtcagggtgcatgccca

SEQ ID NO: 2713634 - DNA, 25 bp, Homo sapien
gcttaggtcagggtgcatgcccagg

SEQ ID NO: 2713635 - DNA, 25 bp, Homo sapien
ttaggtcagggtgcatgcccaggaa

SEQ ID NO: 2713636 - DNA, 25 bp, Homo sapien
ctcctcaaaggtctcagagctgggg

SEQ ID NO: 2713637 - DNA, 25 bp, Homo sapien
tagttgtggccattaaaaaactgga

SEQ ID NO: 2713638 - DNA, 25 bp, Homo sapien
cagtcgatgcctttgtgatagttgt

SEQ ID NO: 2713639 - DNA, 25 bp, Homo sapien
aaaaactggatctcctcaaaggtct

SEQ ID NO: 2713640 - DNA, 25 bp, Homo sapien
ttctgaatcaaagtagttggcgctt

SEQ ID NO: 2713641 - DNA, 25 bp, Homo sapien
tggcgcttttctcaaagtagaagtc

SEQ ID NO: 2713642 - DNA, 25 bp, Homo sapien
tcaggaccttggctttgggcaagag

SEQ ID NO: 2713643 - DNA, 25 bp, Homo sapien
tctcaaagtagaagtcggaggtggt

SEQ ID NO: 2713644 - DNA, 25 bp, Homo sapien
tttagggccactgggtcgtcatggg

SEQ ID NO: 2713645 - DNA, 25 bp, Homo sapien
cagcttcgaggatgcgtcagagccg

SEQ ID NO: 2713646 - DNA, 25 bp, Homo sapien
ctcgatgtgggtggcgtaccagcca

SEQ ID NO: 2713647 - DNA, 25 bp, Homo sapien
tcagagccggcggtaatcacctcat

SEQ ID NO: 2713648 - DNA, 25 bp, Homo sapien
cactttggcaggttctgtgcgaagc

SEQ ID NO: 2713649 - DNA, 25 bp, Homo sapien
gaagcagtttgccatccaagaccag

SEQ ID NO: 2713650 - DNA, 25 bp, Homo sapien
tgttggtcaccccaaggaacttctg

SEQ ID NO: 2713651 - DNA, 25 bp, Homo sapien
gccaaggttttgtggtagtcaatgg

SEQ ID NO: 2713652 - DNA, 25 bp, Homo sapien
aaagcgaggcttgaaaggctgaaga

SEQ ID NO: 2713653 - DNA, 25 bp, Homo sapien
ttcaactcccacgacagtgaagacg

SEQ ID NO: 2713654 - DNA, 25 bp, Homo sapien
agacggaatattcttgttgcaaaac

SEQ ID NO: 2713655 - DNA, 25 bp, Homo sapien
cttcaggacgcagggattattatct

SEQ ID NO: 2713656 - DNA, 25 bp, Homo sapien
ttatcaaaacatgcagtatccacag

SEQ ID NO: 2713657 - DNA, 25 bp, Homo sapien
gcaagactgccaacatcatcctgtc

SEQ ID NO: 2713658 - DNA, 25 bp, Homo sapien
gcacttaagcatgcctgtcactgga

SEQ ID NO: 2713659 - DNA, 25 bp, Homo sapien
gtatccacagctgcacttaagcatg

SEQ ID NO: 2713660 - DNA, 25 bp, Homo sapien
tccaagtccatctcgggatatttcc

SEQ ID NO: 2713661 - DNA, 25 bp, Homo sapien
tcaagcagttggcaccaaaatcctt

SEQ ID NO: 2713662 - DNA, 25 bp, Homo sapien
tttccggcccttgcttttgcccaga

SEQ ID NO: 2713663 - DNA, 25 bp, Homo sapien
tgcttttgcccagacacttggtttt

SEQ ID NO: 2713664 - DNA, 25 bp, Homo sapien
ccttatgcaggtgctacaggtagtg

SEQ ID NO: 2713665 - DNA, 25 bp, Homo sapien
tacaggtagtgtgtccaccacttac

SEQ ID NO: 2713666 - DNA, 25 bp, Homo sapien
tgcaggtgctacaggtagtgtgtcc

SEQ ID NO: 2713667 - DNA, 25 bp, Homo sapien
tgctacaggtagtgtgtccaccact

SEQ ID NO: 2713668 - DNA, 25 bp, Homo sapien
acttagtggtgttgggactcatacc

SEQ ID NO: 2713669 - DNA, 25 bp, Homo sapien
aatggatctcatccttctaggcgca

SEQ ID NO: 2713670 - DNA, 25 bp, Homo sapien
gcactcagcccttagtagaaggtaa

SEQ ID NO: 2713671 - DNA, 25 bp, Homo sapien
tgtttgacgaaatcaggtctgaccc

SEQ ID NO: 2713672 - DNA, 25 bp, Homo sapien
agagctcgatgttgtggtcccggta

SEQ ID NO: 2713673 - DNA, 25 bp, Homo sapien
tatacagcagcttggagagctcgat

SEQ ID NO: 2713674 - DNA, 25 bp, Homo sapien
gtgtctggcccatcttatacagcag

SEQ ID NO: 2713675 - DNA, 25 bp, Homo sapien
ggtcctctcgtagccaagtgggaag

SEQ ID NO: 2713676 - DNA, 25 bp, Homo sapien
tattgctcataagtgcgcagctgcc

SEQ ID NO: 2713677 - DNA, 25 bp, Homo sapien
gctgggaacggaatggacctctgct

SEQ ID NO: 2713678 - DNA, 25 bp, Homo sapien
gtgcttgcagatccgcctgggtgct

SEQ ID NO: 2713679 - DNA, 25 bp, Homo sapien
gctttcacaaacgttcagtctggct

SEQ ID NO: 2713680 - DNA, 25 bp, Homo sapien
tatatataacacagtgcgaccccag

SEQ ID NO: 2713681 - DNA, 25 bp, Homo sapien
gatgcaaacgcagacctcggaatga

SEQ ID NO: 2713682 - DNA, 25 bp, Homo sapien
gatttccgaacctgggagctgtaag

SEQ ID NO: 2713683 - DNA, 25 bp, Homo sapien
tccaggcctagagggtagatttccg

SEQ ID NO: 2713684 - DNA, 25 bp, Homo sapien
tgcaggtcagcgcagcagctctcct

SEQ ID NO: 2713685 - DNA, 25 bp, Homo sapien
tcaggggggctcagaaaaggcccat

SEQ ID NO: 2713686 - DNA, 25 bp, Homo sapien
gctgggaacagatggcttccttagc

SEQ ID NO: 2713687 - DNA, 25 bp, Homo sapien
agcaggatgctccaccacagaaggc

SEQ ID NO: 2713688 - DNA, 25 bp, Homo sapien
caaaacggctggttcgagagccctc

SEQ ID NO: 2713689 - DNA, 25 bp, Homo sapien
cagtggaggcgcatcttaggcagaa

SEQ ID NO: 2713690 - DNA, 25 bp, Homo sapien
gctactaaatgcacccggctgggat

SEQ ID NO: 2713691 - DNA, 25 bp, Homo sapien
gagagccctcatcaggcgaactgga

SEQ ID NO: 2713692 - DNA, 25 bp, Homo sapien
tgaaccagatgtactgcaagcagct

SEQ ID NO: 2713693 - DNA, 25 bp, Homo sapien
caggcaggctgtcccaatatgtcca

SEQ ID NO: 2713694 - DNA, 25 bp, Homo sapien
tgggcacccgggaacatggtgactc

SEQ ID NO: 2713695 - DNA, 25 bp, Homo sapien
gactcctggaagcttagagacacca

SEQ ID NO: 2713696 - DNA, 25 bp, Homo sapien
taaaagaaacccgtcactattgctc

SEQ ID NO: 2713697 - DNA, 25 bp, Homo sapien
gccaagtacccaagatacaaagatg

SEQ ID NO: 2713698 - DNA, 25 bp, Homo sapien
gaaagctggaattcgaactgagatc

SEQ ID NO: 2713699 - DNA, 25 bp, Homo sapien
gatccacattaccatcttggaaagg

SEQ ID NO: 2713700 - DNA, 25 bp, Homo sapien
gtgggggcacagtagacatcgcggg

SEQ ID NO: 2713701 - DNA, 25 bp, Homo sapien
gaagggccttgcagtaccactaacc

SEQ ID NO: 2713702 - DNA, 25 bp, Homo sapien
ggcacagtagacatcgcgggcagct

SEQ ID NO: 2713703 - DNA, 25 bp, Homo sapien
agggccttgcagtaccactaaccac

SEQ ID NO: 2713704 - DNA, 25 bp, Homo sapien
gccagtcctgcatgctggcttgcag

SEQ ID NO: 2713705 - DNA, 25 bp, Homo sapien
tgccaatgaatcctgaggaccttca

SEQ ID NO: 2713706 - DNA, 25 bp, Homo sapien
tggcttgcagctgcgccatacagca

SEQ ID NO: 2713707 - DNA, 25 bp, Homo sapien
gcctggtacttgtgccggcccctgg

SEQ ID NO: 2713708 - DNA, 25 bp, Homo sapien
tcagacatcaaagagcctgtgcggc

SEQ ID NO: 2713709 - DNA, 25 bp, Homo sapien
agcctgtgcggctggcgctttgatg

SEQ ID NO: 2713710 - DNA, 25 bp, Homo sapien
gtgcggctggcgctttgatgggagc

SEQ ID NO: 2713711 - DNA, 25 bp, Homo sapien
agacatcaaagagcctgtgcggctg

SEQ ID NO: 2713712 - DNA, 25 bp, Homo sapien
gggaaggcaggaaggggccagccag

SEQ ID NO: 2713713 - DNA, 25 bp, Homo sapien
ttcctggctccgttgggccgactta

SEQ ID NO: 2713714 - DNA, 25 bp, Homo sapien
tcctggctccgttgggccgacttac

SEQ ID NO: 2713715 - DNA, 25 bp, Homo sapien
cttcctggctccgttgggccgactt

SEQ ID NO: 2713716 - DNA, 25 bp, Homo sapien
cccttgcagggtcatgggagagcct

SEQ ID NO: 2713717 - DNA, 25 bp, Homo sapien
ctgcccttgcagggtcatgggagag

SEQ ID NO: 2713718 - DNA, 25 bp, Homo sapien
gagagcctgtggcccgggcctcttt

SEQ ID NO: 2713719 - DNA, 25 bp, Homo sapien
ctgtggcccgggcctcttttcccag

SEQ ID NO: 2713720 - DNA, 25 bp, Homo sapien
cctctgacacatgagccgtcctgat

SEQ ID NO: 2713721 - DNA, 25 bp, Homo sapien
cctcaagaaggtaccctgggctgtg

SEQ ID NO: 2713722 - DNA, 25 bp, Homo sapien
gacctcaagaaggtaccctgggctg

SEQ ID NO: 2713723 - DNA, 25 bp, Homo sapien
tcagatcactggtaattgagttgcc

SEQ ID NO: 2713724 - DNA, 25 bp, Homo sapien
gtttctgatacagggaagtttgtcc

SEQ ID NO: 2713725 - DNA, 25 bp, Homo sapien
tgatacagggaagtttgtccctcct

SEQ ID NO: 2713726 - DNA, 25 bp, Homo sapien
tctgatacagggaagtttgtccctc

SEQ ID NO: 2713727 - DNA, 25 bp, Homo sapien
ctgtttctgatacagggaagtttgt

SEQ ID NO: 2713728 - DNA, 25 bp, Homo sapien
tgtagccggacaccacaccctctgg

SEQ ID NO: 2713729 - DNA, 25 bp, Homo sapien
ctgtagccggacaccacaccctctg

SEQ ID NO: 2713730 - DNA, 25 bp, Homo sapien
tcctcactcgcgctctgtctggagc

SEQ ID NO: 2713731 - DNA, 25 bp, Homo sapien
ggggccagctgcatcttttctcccc

SEQ ID NO: 2713732 - DNA, 25 bp, Homo sapien
cccaggcttggcggcgtctctgccc

SEQ ID NO: 2713733 - DNA, 25 bp, Homo sapien
aggcttggcggcgtctctgccccgc

SEQ ID NO: 2713734 - DNA, 25 bp, Homo sapien
gccagctgcatcttttctcccccag

SEQ ID NO: 2713735 - DNA, 25 bp, Homo sapien
cagggctacagtggtgatgccgagc

SEQ ID NO: 2713736 - DNA, 25 bp, Homo sapien
gctacagtggtgatgccgagctcct

SEQ ID NO: 2713737 - DNA, 25 bp, Homo sapien
gggctacagtggtgatgccgagctc

SEQ ID NO: 2713738 - DNA, 25 bp, Homo sapien
ctgccagggctacagtggtgatgcc

SEQ ID NO: 2713739 - DNA, 25 bp, Homo sapien
acaggaatcacaggagtggtgtgac

SEQ ID NO: 2713740 - DNA, 25 bp, Homo sapien
gaatcacaggagtggtgtgacctaa

SEQ ID NO: 2713741 - DNA, 25 bp, Homo sapien
ccacaggaatcacaggagtggtgtg

SEQ ID NO: 2713742 - DNA, 25 bp, Homo sapien
caggaatcacaggagtggtgtgacc

SEQ ID NO: 2713743 - DNA, 25 bp, Homo sapien
gaaagataagtccttcctgggctag

SEQ ID NO: 2713744 - DNA, 25 bp, Homo sapien
taacccgtctctggtgtgaggccgc

SEQ ID NO: 2713745 - DNA, 25 bp, Homo sapien
ggagtggtggacctccaatccctct

SEQ ID NO: 2713746 - DNA, 25 bp, Homo sapien
tgttcttcctcagcgatgcagggaa

SEQ ID NO: 2713747 - DNA, 25 bp, Homo sapien
ggcggaggtgggaggtgaggaccca

SEQ ID NO: 2713748 - DNA, 25 bp, Homo sapien
ctgggtgcaaggggcggaggtggga

SEQ ID NO: 2713749 - DNA, 25 bp, Homo sapien
cggaggtgggaggtgaggacccagc

SEQ ID NO: 2713750 - DNA, 25 bp, Homo sapien
gaggtgggaggtgaggacccagcat

SEQ ID NO: 2713751 - DNA, 25 bp, Homo sapien
gtcgtgctgggacgccccttgttcc

SEQ ID NO: 2713752 - DNA, 25 bp, Homo sapien
ctgtcgtcgtgctgggacgcccctt

SEQ ID NO: 2713753 - DNA, 25 bp, Homo sapien
tcctggctggccctgtcgtcgtgct

SEQ ID NO: 2713754 - DNA, 25 bp, Homo sapien
cctggctggccctgtcgtcgtgctg

SEQ ID NO: 2713755 - DNA, 25 bp, Homo sapien
tgttaatctgggcatgcccatggga

SEQ ID NO: 2713756 - DNA, 25 bp, Homo sapien
taatctgggcatgcccatgggactg

SEQ ID NO: 2713757 - DNA, 25 bp, Homo sapien
ctccacagctgttaatctgggcatg

SEQ ID NO: 2713758 - DNA, 25 bp, Homo sapien
cagctgttaatctgggcatgcccat

SEQ ID NO: 2713759 - DNA, 25 bp, Homo sapien
tggaggtgattcagcgtgggcttcc

SEQ ID NO: 2713760 - DNA, 25 bp, Homo sapien
atctggacccacttcagcgtttcca

SEQ ID NO: 2713761 - DNA, 25 bp, Homo sapien
gtgattcagcgtgggcttccctgtc

SEQ ID NO: 2713762 - DNA, 25 bp, Homo sapien
ggctgtggaggtgattcagcgtggg

SEQ ID NO: 2713763 - DNA, 25 bp, Homo sapien
gggagtagataagggcaacagctga

SEQ ID NO: 2713764 - DNA, 25 bp, Homo sapien
gcttaatttaggtgtcagttgtggg

SEQ ID NO: 2713765 - DNA, 25 bp, Homo sapien
aatgctggttccaaccacagcttaa

SEQ ID NO: 2713766 - DNA, 25 bp, Homo sapien
gagttaaaggccttatttagccatg

SEQ ID NO: 2713767 - DNA, 25 bp, Homo sapien
aattgcttggctgacgaagccagga

SEQ ID NO: 2713768 - DNA, 25 bp, Homo sapien
tcctgccggccttcaagccttggtt

SEQ ID NO: 2713769 - DNA, 25 bp, Homo sapien
ttggttctcaaagcctccggcaaag

SEQ ID NO: 2713770 - DNA, 25 bp, Homo sapien
tcccacatcggcagcaacatgaagg

SEQ ID NO: 2713771 - DNA, 25 bp, Homo sapien
ggatcaccctatctattaaagatgt

SEQ ID NO: 2713772 - DNA, 25 bp, Homo sapien
tctattagccatctattagccaggc

SEQ ID NO: 2713773 - DNA, 25 bp, Homo sapien
caagttactgtacctctcagagcca

SEQ ID NO: 2713774 - DNA, 25 bp, Homo sapien
tcccctgctctgcttagaaaccagg

SEQ ID NO: 2713775 - DNA, 25 bp, Homo sapien
ggcatcttgccagcgaggctctgaa

SEQ ID NO: 2713776 - DNA, 25 bp, Homo sapien
tataagatcaccataggcaaccatt

SEQ ID NO: 2713777 - DNA, 25 bp, Homo sapien
catggcatgctgagtctgtctccag

SEQ ID NO: 2713778 - DNA, 25 bp, Homo sapien
catcagtggctaagaaaattcctcc

SEQ ID NO: 2713779 - DNA, 25 bp, Homo sapien
caagtggtctactcatcccaaaagg

SEQ ID NO: 2713780 - DNA, 25 bp, Homo sapien
gtaaaaagtgtcaccccatccctga

SEQ ID NO: 2713781 - DNA, 25 bp, Homo sapien
gggtctctagtccatgctcaagtgg

SEQ ID NO: 2713782 - DNA, 25 bp, Homo sapien
aaggaactgccccaaggttgcaaag

SEQ ID NO: 2713783 - DNA, 25 bp, Homo sapien
tctgccggcgcctgttgaagagctg

SEQ ID NO: 2713784 - DNA, 25 bp, Homo sapien
ttctccgtgaggctagtgctccggc

SEQ ID NO: 2713785 - DNA, 25 bp, Homo sapien
ggagcactctgagggactcctggct

SEQ ID NO: 2713786 - DNA, 25 bp, Homo sapien
ggtgaactcgttcaccctctgccgg

SEQ ID NO: 2713787 - DNA, 25 bp, Homo sapien
caattaggagtgtgctgcatctcac

SEQ ID NO: 2713788 - DNA, 25 bp, Homo sapien
gaagcaggccctgtgccattagatg

SEQ ID NO: 2713789 - DNA, 25 bp, Homo sapien
acctcactgtagaccttggtgggcg

SEQ ID NO: 2713790 - DNA, 25 bp, Homo sapien
gtaaacatggatttgcggctgcccc

SEQ ID NO: 2713791 - DNA, 25 bp, Homo sapien
cagctcttggtgagaccttggcagg

SEQ ID NO: 2713792 - DNA, 25 bp, Homo sapien
ctgggcttcgggatgccactcggaa

SEQ ID NO: 2713793 - DNA, 25 bp, Homo sapien
cagctctggcgtgtggcttgaagac

SEQ ID NO: 2713794 - DNA, 25 bp, Homo sapien
atatttctccatccgtgactggcgg

SEQ ID NO: 2713795 - DNA, 25 bp, Homo sapien
tgtcaccgccgtaaggagggctcac

SEQ ID NO: 2713796 - DNA, 25 bp, Homo sapien
cacgggggagatgtcaccgccgtaa

SEQ ID NO: 2713797 - DNA, 25 bp, Homo sapien
tgagcctcgatcccggcgttccggg

SEQ ID NO: 2713798 - DNA, 25 bp, Homo sapien
gggcctgcttggctcggggagacca

SEQ ID NO: 2713799 - DNA, 25 bp, Homo sapien
ttgaagcagaaggaaggcttccaca

SEQ ID NO: 2713800 - DNA, 25 bp, Homo sapien
tgaagcagaaggaaggcttccacac

SEQ ID NO: 2713801 - DNA, 25 bp, Homo sapien
tgtcagaggcgatgggaagtctcca

SEQ ID NO: 2713802 - DNA, 25 bp, Homo sapien
gctggtggccgcatctgaccttgaa

SEQ ID NO: 2713803 - DNA, 25 bp, Homo sapien
tgttacagctagaaaagccctcctt

SEQ ID NO: 2713804 - DNA, 25 bp, Homo sapien
aatgagctcactaagaaggcacccc

SEQ ID NO: 2713805 - DNA, 25 bp, Homo sapien
agagtgtattgagaacatgagagaa

SEQ ID NO: 2713806 - DNA, 25 bp, Homo sapien
agaaaacaaagttgggggcagagct

SEQ ID NO: 2713807 - DNA, 25 bp, Homo sapien
gaggcagagtgtattgagaacatga

SEQ ID NO: 2713808 - DNA, 25 bp, Homo sapien
gcagagtgtattgagaacatgagag

SEQ ID NO: 2713809 - DNA, 25 bp, Homo sapien
taatgctggagtgacccttagagac

SEQ ID NO: 2713810 - DNA, 25 bp, Homo sapien
gaggtcacacacgaatcagatgcag

SEQ ID NO: 2713811 - DNA, 25 bp, Homo sapien
caaacctggactgtcggagaccaaa

SEQ ID NO: 2713812 - DNA, 25 bp, Homo sapien
gacagagagctcaatgcaccgtgca

SEQ ID NO: 2713813 - DNA, 25 bp, Homo sapien
gatcagccataaccaagccagtcat

SEQ ID NO: 2713814 - DNA, 25 bp, Homo sapien
gatgagcccagactccaaactggag

SEQ ID NO: 2713815 - DNA, 25 bp, Homo sapien
aacagaatgtagcagctgctagatg

SEQ ID NO: 2713816 - DNA, 25 bp, Homo sapien
catccaactgagagtcttctaattc

SEQ ID NO: 2713817 - DNA, 25 bp, Homo sapien
gtccaccttgccatttaatccaatc

SEQ ID NO: 2713818 - DNA, 25 bp, Homo sapien
ttccatgcttcctacccgatcaaaa

SEQ ID NO: 2713819 - DNA, 25 bp, Homo sapien
tcactagcagtcatccaccagagtt

SEQ ID NO: 2713820 - DNA, 25 bp, Homo sapien
agttcagagctagccagtccattcc

SEQ ID NO: 2713821 - DNA, 25 bp, Homo sapien
ggctcacccagccgtctaggctgct

SEQ ID NO: 2713822 - DNA, 25 bp, Homo sapien
gctcacccagccgtctaggctgctg

SEQ ID NO: 2713823 - DNA, 25 bp, Homo sapien
cgggacgcgcccggcgtccagggtg

SEQ ID NO: 2713824 - DNA, 25 bp, Homo sapien
ctcgctccacgagggagacatgggc

SEQ ID NO: 2713825 - DNA, 25 bp, Homo sapien
tgcgccgggccgcattgatgatgtt

SEQ ID NO: 2713826 - DNA, 25 bp, Homo sapien
gatgtttcgcgccagaagcgcctgc

SEQ ID NO: 2713827 - DNA, 25 bp, Homo sapien
gcgcctcggtctcaggtcgcagcgg

SEQ ID NO: 2713828 - DNA, 25 bp, Homo sapien
cgcgggatgggcgcgaaggctgccc

SEQ ID NO: 2713829 - DNA, 25 bp, Homo sapien
gagaagggccgcgggttctcggcgc

SEQ ID NO: 2713830 - DNA, 25 bp, Homo sapien
ggatgggcgcgaaggctgcccccgg

SEQ ID NO: 2713831 - DNA, 25 bp, Homo sapien
gcgggctgtggcgagcgcatgcgcg

SEQ ID NO: 2713832 - DNA, 25 bp, Homo sapien
gtgcaggacgaaggaccggcgggca

SEQ ID NO: 2713833 - DNA, 25 bp, Homo sapien
tggtgcaggacgaaggaccggcggg

SEQ ID NO: 2713834 - DNA, 25 bp, Homo sapien
caggacgaaggaccggcgggcaacg

SEQ ID NO: 2713835 - DNA, 25 bp, Homo sapien
ctggtgcaggacgaaggaccggcgg

SEQ ID NO: 2713836 - DNA, 25 bp, Homo sapien
aggcgcgggcagcgggctccgggga

SEQ ID NO: 2713837 - DNA, 25 bp, Homo sapien
ctgggaggcgcgggcagcgggctcc

SEQ ID NO: 2713838 - DNA, 25 bp, Homo sapien
ggaggcgcgggcagcgggctccggg

SEQ ID NO: 2713839 - DNA, 25 bp, Homo sapien
gggaggcgcgggcagcgggctccgg

SEQ ID NO: 2713840 - DNA, 25 bp, Homo sapien
acacgtcggagtccgtgggcgagcg

SEQ ID NO: 2713841 - DNA, 25 bp, Homo sapien
ccgcggggacagatattgtagccca

SEQ ID NO: 2713842 - DNA, 25 bp, Homo sapien
ccaggatgcctggagacttagcccc

SEQ ID NO: 2713843 - DNA, 25 bp, Homo sapien
agtcctcggagtcgagggacacgtc

SEQ ID NO: 2713844 - DNA, 25 bp, Homo sapien
ccacgcttgagccgaaggctgccat

SEQ ID NO: 2713845 - DNA, 25 bp, Homo sapien
cgcttgagccgaaggctgccattcc

SEQ ID NO: 2713846 - DNA, 25 bp, Homo sapien
tgccacgcttgagccgaaggctgcc

SEQ ID NO: 2713847 - DNA, 25 bp, Homo sapien
cacgcttgagccgaaggctgccatt

SEQ ID NO: 2713848 - DNA, 25 bp, Homo sapien
gacgtttgtggattgccttggccaa

SEQ ID NO: 2713849 - DNA, 25 bp, Homo sapien
gaaccctgaaggtagcaagtccagg

SEQ ID NO: 2713850 - DNA, 25 bp, Homo sapien
tgcgacacaggcctaggaccttctg

SEQ ID NO: 2713851 - DNA, 25 bp, Homo sapien
aagggctagaactcaagcttgcgtc

SEQ ID NO: 2713852 - DNA, 25 bp, Homo sapien
tctgggcacgatatggacactggga

SEQ ID NO: 2713853 - DNA, 25 bp, Homo sapien
gacactgggactgaggtctgacact

SEQ ID NO: 2713854 - DNA, 25 bp, Homo sapien
gaactgccggtttctcaaggctgcc

SEQ ID NO: 2713855 - DNA, 25 bp, Homo sapien
agaaagtagcatgacagggacccgg

SEQ ID NO: 2713856 - DNA, 25 bp, Homo sapien
caggaagcatttattgagggccaga

SEQ ID NO: 2713857 - DNA, 25 bp, Homo sapien
gcaggaagcatttattgagggccag

SEQ ID NO: 2713858 - DNA, 25 bp, Homo sapien
aactgttatatccttagtgccaaga

SEQ ID NO: 2713859 - DNA, 25 bp, Homo sapien
tagcttccgcttgttaactgttata

SEQ ID NO: 2713860 - DNA, 25 bp, Homo sapien
ctggaaatgttgagggtcagctgct

SEQ ID NO: 2713861 - DNA, 25 bp, Homo sapien
gcttgataggaactcagcagatatt

SEQ ID NO: 2713862 - DNA, 25 bp, Homo sapien
aagctgagagttgcgtggcgtccct

SEQ ID NO: 2713863 - DNA, 25 bp, Homo sapien
tcagcggtcagcagtcagtaggcag

SEQ ID NO: 2713864 - DNA, 25 bp, Homo sapien
gagaatcattcctgccttgccatgg

SEQ ID NO: 2713865 - DNA, 25 bp, Homo sapien
tatttcgggctgcaataggagctgg

SEQ ID NO: 2713866 - DNA, 25 bp, Homo sapien
gcagccatcactggccccttctgct

SEQ ID NO: 2713867 - DNA, 25 bp, Homo sapien
agtgaggtcccccatggcagccatc

SEQ ID NO: 2713868 - DNA, 25 bp, Homo sapien
ctggttcagtgaggtcccccatggc

SEQ ID NO: 2713869 - DNA, 25 bp, Homo sapien
gttcagtgaggtcccccatggcagc

SEQ ID NO: 2713870 - DNA, 25 bp, Homo sapien
caagttaaagatctccacatttcca

SEQ ID NO: 2713871 - DNA, 25 bp, Homo sapien
tgttttatcaagatctttacaagtt

SEQ ID NO: 2713872 - DNA, 25 bp, Homo sapien
tacaagttaaagatctccacatttc

SEQ ID NO: 2713873 - DNA, 25 bp, Homo sapien
tttacaagttaaagatctccacatt

SEQ ID NO: 2713874 - DNA, 25 bp, Homo sapien
gactgcaaggtttctggccttagcc

SEQ ID NO: 2713875 - DNA, 25 bp, Homo sapien
caccgggtgtcatgattgtttgaaa

SEQ ID NO: 2713876 - DNA, 25 bp, Homo sapien
acctgatgggcaaaaatgacacctc

SEQ ID NO: 2713877 - DNA, 25 bp, Homo sapien
tgtttctcaccaagcttgccgacac

SEQ ID NO: 2713878 - DNA, 25 bp, Homo sapien
gccagagcgggctctcaccacccca

SEQ ID NO: 2713879 - DNA, 25 bp, Homo sapien
atcccccatacactccaggccccac

SEQ ID NO: 2713880 - DNA, 25 bp, Homo sapien
ccatcccccatacactccaggcccc

SEQ ID NO: 2713881 - DNA, 25 bp, Homo sapien
agagcgggctctcaccaccccatcc

SEQ ID NO: 2713882 - DNA, 25 bp, Homo sapien
gggaccctctgttgttgcgtagtga

SEQ ID NO: 2713883 - DNA, 25 bp, Homo sapien
tggctggctgctaactcgaaagtga

SEQ ID NO: 2713884 - DNA, 25 bp, Homo sapien
gaaagtgaacttctgcacacggcgc

SEQ ID NO: 2713885 - DNA, 25 bp, Homo sapien
ttcttgcccaggtccagcgtaggga

SEQ ID NO: 2713886 - DNA, 25 bp, Homo sapien
attttccccatgagcacaatggtgg

SEQ ID NO: 2713887 - DNA, 25 bp, Homo sapien
ttccccatgagcacaatggtggctt

SEQ ID NO: 2713888 - DNA, 25 bp, Homo sapien
ccccatgagcacaatggtggcttac

SEQ ID NO: 2713889 - DNA, 25 bp, Homo sapien
tcattttccccatgagcacaatggt

SEQ ID NO: 2713890 - DNA, 25 bp, Homo sapien
tttggtaggagccagagtcccttca

SEQ ID NO: 2713891 - DNA, 25 bp, Homo sapien
tgttctgtatccagggagagatgcc

SEQ ID NO: 2713892 - DNA, 25 bp, Homo sapien
gactttaggctaaccagtggctctc

SEQ ID NO: 2713893 - DNA, 25 bp, Homo sapien
taatctgatgggaacatcacagtcc

SEQ ID NO: 2713894 - DNA, 25 bp, Homo sapien
ttcctcctggcgcttccggccagca

SEQ ID NO: 2713895 - DNA, 25 bp, Homo sapien
tcctcctggcgcttccggccagcat

SEQ ID NO: 2713896 - DNA, 25 bp, Homo sapien
cttcctcctggcgcttccggccagc

SEQ ID NO: 2713897 - DNA, 25 bp, Homo sapien
cgtccccgactccgctgttccagtc

SEQ ID NO: 2713898 - DNA, 25 bp, Homo sapien
gtccccgactccgctgttccagtca

SEQ ID NO: 2713899 - DNA, 25 bp, Homo sapien
tccccgactccgctgttccagtcac

SEQ ID NO: 2713900 - DNA, 25 bp, Homo sapien
ccgagcggtagttcggcccctcagg

SEQ ID NO: 2713901 - DNA, 25 bp, Homo sapien
ggaagatgtggagctccgagcggta

SEQ ID NO: 2713902 - DNA, 25 bp, Homo sapien
gagctccgagcggtagttcggcccc

SEQ ID NO: 2713903 - DNA, 25 bp, Homo sapien
tgaggccgggaagatgtggagctcc

SEQ ID NO: 2713904 - DNA, 25 bp, Homo sapien
gatggcggtgtggttgaacttctct

SEQ ID NO: 2713905 - DNA, 25 bp, Homo sapien
tagtcccggtagctgacgaactcct

SEQ ID NO: 2713906 - DNA, 25 bp, Homo sapien
tgtgacttcggccatcgctctggta

SEQ ID NO: 2713907 - DNA, 25 bp, Homo sapien
gaactcctgccaagggcagcggtag

SEQ ID NO: 2713908 - DNA, 25 bp, Homo sapien
tagatgttcatcaaagaggtagcac

SEQ ID NO: 2713909 - DNA, 25 bp, Homo sapien
taaacccatataggccactgcgctg

SEQ ID NO: 2713910 - DNA, 25 bp, Homo sapien
gagaatatccaagatgtgcggcacc

SEQ ID NO: 2713911 - DNA, 25 bp, Homo sapien
gaacaggaaaactcatagcacccgc

SEQ ID NO: 2713912 - DNA, 25 bp, Homo sapien
ggaactagagctctacgtattagta

SEQ ID NO: 2713913 - DNA, 25 bp, Homo sapien
cgtattagtatggtagatttcgaaa

SEQ ID NO: 2713914 - DNA, 25 bp, Homo sapien
caggccagcctgacaaccatgttac

SEQ ID NO: 2713915 - DNA, 25 bp, Homo sapien
gatttcgaaagcgtaatgttgagta

SEQ ID NO: 2713916 - DNA, 25 bp, Homo sapien
acccaggttggagcgcagtggggtg

SEQ ID NO: 2713917 - DNA, 25 bp, Homo sapien
gtcacccaggttggagcgcagtggg

SEQ ID NO: 2713918 - DNA, 25 bp, Homo sapien
gcgcagtggggtgatctcagctcac

SEQ ID NO: 2713919 - DNA, 25 bp, Homo sapien
agcgcagtggggtgatctcagctca

SEQ ID NO: 2713920 - DNA, 25 bp, Homo sapien
gagttccaagccactgaggggctcc

SEQ ID NO: 2713921 - DNA, 25 bp, Homo sapien
ccactgaggggctccgggatgaagg

SEQ ID NO: 2713922 - DNA, 25 bp, Homo sapien
ccaagccactgaggggctccgggat

SEQ ID NO: 2713923 - DNA, 25 bp, Homo sapien
gttccaagccactgaggggctccgg

SEQ ID NO: 2713924 - DNA, 25 bp, Homo sapien
ctgggaggttacggacccagccctg

SEQ ID NO: 2713925 - DNA, 25 bp, Homo sapien
agctcctcggactctgggaggttac

SEQ ID NO: 2713926 - DNA, 25 bp, Homo sapien
ccagccctgggccactctgttgaag

SEQ ID NO: 2713927 - DNA, 25 bp, Homo sapien
gactctgggaggttacggacccagc

SEQ ID NO: 2713928 - DNA, 25 bp, Homo sapien
cagatgatttcagagcgagtgggca

SEQ ID NO: 2713929 - DNA, 25 bp, Homo sapien
caagtcttggctccggatgttacca

SEQ ID NO: 2713930 - DNA, 25 bp, Homo sapien
ttttgggacgactgaacttggtgac

SEQ ID NO: 2713931 - DNA, 25 bp, Homo sapien
tggcagtgtctagcgcacagtcagc

SEQ ID NO: 2713932 - DNA, 25 bp, Homo sapien
tagggcacacagctgggtacacttg

SEQ ID NO: 2713933 - DNA, 25 bp, Homo sapien
gcttgccaaattccattgcctaggg

SEQ ID NO: 2713934 - DNA, 25 bp, Homo sapien
gaatgcacagaatggtctctagaag

SEQ ID NO: 2713935 - DNA, 25 bp, Homo sapien
gggttcctccatcaccacttagaag

SEQ ID NO: 2713936 - DNA, 25 bp, Homo sapien
ggtcttcagcattcaccttcgtgtg

SEQ ID NO: 2713937 - DNA, 25 bp, Homo sapien
catggagctgtgtaccatcgaagaa

SEQ ID NO: 2713938 - DNA, 25 bp, Homo sapien
catcgaagaaacctggtgtctggca

SEQ ID NO: 2713939 - DNA, 25 bp, Homo sapien
aatgaaagacgtgacctcctgctgg

SEQ ID NO: 2713940 - DNA, 25 bp, Homo sapien
gccccgttgttatcagatctccaga

SEQ ID NO: 2713941 - DNA, 25 bp, Homo sapien
ggtcttccagtaaaaatcagtgcta

SEQ ID NO: 2713942 - DNA, 25 bp, Homo sapien
gattgcccagatcaggaccattgac

SEQ ID NO: 2713943 - DNA, 25 bp, Homo sapien
tcttacggtgtcagtggatgggcac

SEQ ID NO: 2713944 - DNA, 25 bp, Homo sapien
tcaggtctcacgttactaggaaggc

SEQ ID NO: 2713945 - DNA, 25 bp, Homo sapien
cattcctaggaagtcatgttccatg

SEQ ID NO: 2713946 - DNA, 25 bp, Homo sapien
ttcctagaagtcatgtcccacaaag

SEQ ID NO: 2713947 - DNA, 25 bp, Homo sapien
gacctgtggagtgccttgagcctgt

SEQ ID NO: 2713948 - DNA, 25 bp, Homo sapien
catgcatatttgtgaagaaacaccc

SEQ ID NO: 2713949 - DNA, 25 bp, Homo sapien
gcacttgaaactacagctttggaaa

SEQ ID NO: 2713950 - DNA, 25 bp, Homo sapien
taatgctagtcagtatgcaccacca

SEQ ID NO: 2713951 - DNA, 25 bp, Homo sapien
tatcagcataatgagctaagtgtca

SEQ ID NO: 2713952 - DNA, 25 bp, Homo sapien
tagttcagcaagtagcccacagttc

SEQ ID NO: 2713953 - DNA, 25 bp, Homo sapien
tatcctggagttgggttgctaacct

SEQ ID NO: 2713954 - DNA, 25 bp, Homo sapien
cacacatgtcatgcgtttatggcag

SEQ ID NO: 2713955 - DNA, 25 bp, Homo sapien
taacttgcagaataatagagccact

SEQ ID NO: 2713956 - DNA, 25 bp, Homo sapien
cagcatgtggaacttagcttgggcc

SEQ ID NO: 2713957 - DNA, 25 bp, Homo sapien
gaaccctgcacgttgagtaacagca

SEQ ID NO: 2713958 - DNA, 25 bp, Homo sapien
taaacctgcgttaaaatgtggaagc

SEQ ID NO: 2713959 - DNA, 25 bp, Homo sapien
taacgatgtacccatgcactacgga

SEQ ID NO: 2713960 - DNA, 25 bp, Homo sapien
ggaaaacttcaactgcttactgcca

SEQ ID NO: 2713961 - DNA, 25 bp, Homo sapien
caaaggaggggtggcatgattatac

SEQ ID NO: 2713962 - DNA, 25 bp, Homo sapien
cctggcatctcgtgatggcaaagga

SEQ ID NO: 2713963 - DNA, 25 bp, Homo sapien
ggaacactgcttgcgtggtcctggc

SEQ ID NO: 2713964 - DNA, 25 bp, Homo sapien
tctcacattctatcaatttggttta

SEQ ID NO: 2713965 - DNA, 25 bp, Homo sapien
catggtagccctgaatgatcttttc

SEQ ID NO: 2713966 - DNA, 25 bp, Homo sapien
gttaatctcacattctatcaatttg

SEQ ID NO: 2713967 - DNA, 25 bp, Homo sapien
cataaaggtgttcatggtagccctg

SEQ ID NO: 2713968 - DNA, 25 bp, Homo sapien
gacacgtagccctcctgtgcaaata

SEQ ID NO: 2713969 - DNA, 25 bp, Homo sapien
tatcacgagacacatgcaagttagc

SEQ ID NO: 2713970 - DNA, 25 bp, Homo sapien
taataccagtctcacgtagtcgctg

SEQ ID NO: 2713971 - DNA, 25 bp, Homo sapien
ccaagggatagcaagaagagcagat

SEQ ID NO: 2713972 - DNA, 25 bp, Homo sapien
aatcatcattatcacacgccagttt

SEQ ID NO: 2713973 - DNA, 25 bp, Homo sapien
gctgtttcctctgattcagggatga

SEQ ID NO: 2713974 - DNA, 25 bp, Homo sapien
cagggatgaggtcagcagaaatgac

SEQ ID NO: 2713975 - DNA, 25 bp, Homo sapien
gaaatgacctctaaatcatcattat

SEQ ID NO: 2713976 - DNA, 25 bp, Homo sapien
gactatcagtgagaccttgagcagt

SEQ ID NO: 2713977 - DNA, 25 bp, Homo sapien
aaaaaggagcacaagccttgactat

SEQ ID NO: 2713978 - DNA, 25 bp, Homo sapien
tggagcccagtagtgttttggaggg

SEQ ID NO: 2713979 - DNA, 25 bp, Homo sapien
acaagccttgactatcagtgagacc

SEQ ID NO: 2713980 - DNA, 25 bp, Homo sapien
tagcccaatccaaggtgatcaagag

SEQ ID NO: 2713981 - DNA, 25 bp, Homo sapien
cacgacctttccagctatagagtag

SEQ ID NO: 2713982 - DNA, 25 bp, Homo sapien
tgcgatgtccgaagtgtagggtcct

SEQ ID NO: 2713983 - DNA, 25 bp, Homo sapien
gaagctggttggttctctgccataa

SEQ ID NO: 2713984 - DNA, 25 bp, Homo sapien
cgggctccccttccacgttgccaca

SEQ ID NO: 2713985 - DNA, 25 bp, Homo sapien
ggagagaccagggcgtctcgggctc

SEQ ID NO: 2713986 - DNA, 25 bp, Homo sapien
agagaccagggcgtctcgggctccc

SEQ ID NO: 2713987 - DNA, 25 bp, Homo sapien
gccacacactcgccgcgtagccgtg

SEQ ID NO: 2713988 - DNA, 25 bp, Homo sapien
tctggaatgcgcggctgctggggac

SEQ ID NO: 2713989 - DNA, 25 bp, Homo sapien
ctctggaatgcgcggctgctgggga

SEQ ID NO: 2713990 - DNA, 25 bp, Homo sapien
ggctctggaatgcgcggctgctggg

SEQ ID NO: 2713991 - DNA, 25 bp, Homo sapien
ctggctctggaatgcgcggctgctg

SEQ ID NO: 2713992 - DNA, 25 bp, Homo sapien
tgggtcagggatggctcggtgcttc

SEQ ID NO: 2713993 - DNA, 25 bp, Homo sapien
atggcggcgagtctgcggaaagttc

SEQ ID NO: 2713994 - DNA, 25 bp, Homo sapien
gtccccaggactgcacgggatctgg

SEQ ID NO: 2713995 - DNA, 25 bp, Homo sapien
ccagatggcggcgagtctgcggaaa

SEQ ID NO: 2713996 - DNA, 25 bp, Homo sapien
tcacttgtgggagagttcatgaagc

SEQ ID NO: 2713997 - DNA, 25 bp, Homo sapien
cagttctgaggttcggagaggtcac

SEQ ID NO: 2713998 - DNA, 25 bp, Homo sapien
agcatgattcacagtcccaggacag

SEQ ID NO: 2713999 - DNA, 25 bp, Homo sapien
cagatctttagtgtcatggagccac

SEQ ID NO: 2714000 - DNA, 25 bp, Homo sapien
cacttgttgatttgcttgggccgat

SEQ ID NO: 2714001 - DNA, 25 bp, Homo sapien
ttgggccgataagctcaaattcgag

SEQ ID NO: 2714002 - DNA, 25 bp, Homo sapien
gagaactggcctttcagaacgaagc

SEQ ID NO: 2714003 - DNA, 25 bp, Homo sapien
ttctgactccatgtgctcaggagct

SEQ ID NO: 2714004 - DNA, 25 bp, Homo sapien
tgattccaacgtgcagccagatttg

SEQ ID NO: 2714005 - DNA, 25 bp, Homo sapien
agactgaaactgttagaggaccggg

SEQ ID NO: 2714006 - DNA, 25 bp, Homo sapien
ggaagacgtaatcaccctggctgat

SEQ ID NO: 2714007 - DNA, 25 bp, Homo sapien
cataggattatctgccgagcttgca

SEQ ID NO: 2714008 - DNA, 25 bp, Homo sapien
tccagtttcgttctgctacatgtga

SEQ ID NO: 2714009 - DNA, 25 bp, Homo sapien
tgaaggtcagtttgctgtaagtatt

SEQ ID NO: 2714010 - DNA, 25 bp, Homo sapien
gtttcgttctgctacatgtgactag

SEQ ID NO: 2714011 - DNA, 25 bp, Homo sapien
gttctgctacatgtgactagccaat

SEQ ID NO: 2714012 - DNA, 25 bp, Homo sapien
ccatggggacttggctgactgcatc

SEQ ID NO: 2714013 - DNA, 25 bp, Homo sapien
ggaagcacgacttccatggggactt

SEQ ID NO: 2714014 - DNA, 25 bp, Homo sapien
gtgcttgggaagcacgacttccatg

SEQ ID NO: 2714015 - DNA, 25 bp, Homo sapien
taaggatcggatgagtccgcatgcg

SEQ ID NO: 2714016 - DNA, 25 bp, Homo sapien
cccactaaggatcggatgagtccgc

SEQ ID NO: 2714017 - DNA, 25 bp, Homo sapien
tcaaacagccccactaaggatcgga

SEQ ID NO: 2714018 - DNA, 25 bp, Homo sapien
gagtccgcatgcgatagatgattac

SEQ ID NO: 2714019 - DNA, 25 bp, Homo sapien
cacagctggctcgtggcagaatcaa

SEQ ID NO: 2714020 - DNA, 25 bp, Homo sapien
ggtagaaagggcagggatcaccatc

SEQ ID NO: 2714021 - DNA, 25 bp, Homo sapien
tataattgccataggctggctgcag

SEQ ID NO: 2714022 - DNA, 25 bp, Homo sapien
tacacgtggagctaattacagcagg

SEQ ID NO: 2714023 - DNA, 25 bp, Homo sapien
catcaatgagatcacatcaaagtaa

SEQ ID NO: 2714024 - DNA, 25 bp, Homo sapien
gttgtgtacatcaatgagatcacat

SEQ ID NO: 2714025 - DNA, 25 bp, Homo sapien
ttctagcactttattggaacttggt

SEQ ID NO: 2714026 - DNA, 25 bp, Homo sapien
gcactttattggaacttggttgtgt

SEQ ID NO: 2714027 - DNA, 25 bp, Homo sapien
agttgctctttaaagaaagacctca

SEQ ID NO: 2714028 - DNA, 25 bp, Homo sapien
gttgctctttaaagaaagacctcag

SEQ ID NO: 2714029 - DNA, 25 bp, Homo sapien
gactcttgtcactgggttagaaccc

SEQ ID NO: 2714030 - DNA, 25 bp, Homo sapien
tctgtgtgtcagtccttcgtgtgtc

SEQ ID NO: 2714031 - DNA, 25 bp, Homo sapien
taccctgtgtattagcttcctgtgg

SEQ ID NO: 2714032 - DNA, 25 bp, Homo sapien
tatactcacgcagttggatgccagg

SEQ ID NO: 2714033 - DNA, 25 bp, Homo sapien
tatcattgcattcgccaaacctggc

SEQ ID NO: 2714034 - DNA, 25 bp, Homo sapien
tatacgtgaagtaagccaccagcct

SEQ ID NO: 2714035 - DNA, 25 bp, Homo sapien
cacacgtgcagagcagtactgaaat

SEQ ID NO: 2714036 - DNA, 25 bp, Homo sapien
tctgctgaagatggcgccagaggac

SEQ ID NO: 2714037 - DNA, 25 bp, Homo sapien
aagtctcctgaaaagcccaagaggt

SEQ ID NO: 2714038 - DNA, 25 bp, Homo sapien
cagagaatgaaccaagtctcctgaa

SEQ ID NO: 2714039 - DNA, 25 bp, Homo sapien
ccaagtctcctgaaaagcccaagag

SEQ ID NO: 2714040 - DNA, 25 bp, Homo sapien
agcagagaatgaaccaagtctcctg

SEQ ID NO: 2714041 - DNA, 25 bp, Homo sapien
tgcaaccatgatgaagtcataccgg

SEQ ID NO: 2714042 - DNA, 25 bp, Homo sapien
catgtcctgtgtttcgaagggcact

SEQ ID NO: 2714043 - DNA, 25 bp, Homo sapien
gagtcccctgccatagtgatgttaa

SEQ ID NO: 2714044 - DNA, 25 bp, Homo sapien
gatgttagagatcacctctggcaag

SEQ ID NO: 2714045 - DNA, 25 bp, Homo sapien
cttctgggagggcacctgtgctgag

SEQ ID NO: 2714046 - DNA, 25 bp, Homo sapien
ggtccatgtctagcttggtccagac

SEQ ID NO: 2714047 - DNA, 25 bp, Homo sapien
cttggtccagacaatgtagaacttc

SEQ ID NO: 2714048 - DNA, 25 bp, Homo sapien
tctagcttggtccagacaatgtaga

SEQ ID NO: 2714049 - DNA, 25 bp, Homo sapien
atagaaatagttgtttgattcttct

SEQ ID NO: 2714050 - DNA, 25 bp, Homo sapien
aatagaaatagttgtttgattcttc

SEQ ID NO: 2714051 - DNA, 25 bp, Homo sapien
ccgaaatagaaatagttgtttgatt

SEQ ID NO: 2714052 - DNA, 25 bp, Homo sapien
gaaatagaaatagttgtttgattct

SEQ ID NO: 2714053 - DNA, 25 bp, Homo sapien
ctagtggttatttaggtcacccgtg

SEQ ID NO: 2714054 - DNA, 25 bp, Homo sapien
tagtggttatttaggtcacccgtga

SEQ ID NO: 2714055 - DNA, 25 bp, Homo sapien
ttgggtacacttgttggtttctaga

SEQ ID NO: 2714056 - DNA, 25 bp, Homo sapien
tttcagcaagcaagaggtacgtggc

SEQ ID NO: 2714057 - DNA, 25 bp, Homo sapien
gcttgcggagctgatctgtatttct

SEQ ID NO: 2714058 - DNA, 25 bp, Homo sapien
ggccttgctatttctagggcttgcg

SEQ ID NO: 2714059 - DNA, 25 bp, Homo sapien
cttgtggaattctctggagtactct

SEQ ID NO: 2714060 - DNA, 25 bp, Homo sapien
tactcttgaggtatttctcatggca

SEQ ID NO: 2714061 - DNA, 25 bp, Homo sapien
tggagtactcttgaggtatttctca

SEQ ID NO: 2714062 - DNA, 25 bp, Homo sapien
gagtactcttgaggtatttctcatg

SEQ ID NO: 2714063 - DNA, 25 bp, Homo sapien
gcctgtatagccttgagaactggag

SEQ ID NO: 2714064 - DNA, 25 bp, Homo sapien
caactgtagagtagagggcacactg

SEQ ID NO: 2714065 - DNA, 25 bp, Homo sapien
gacctgcaggagagcatacttggca

SEQ ID NO: 2714066 - DNA, 25 bp, Homo sapien
gaagccccaactgtttgccctgaaa

SEQ ID NO: 2714067 - DNA, 25 bp, Homo sapien
acgtttcttaagtacccagtatatg

SEQ ID NO: 2714068 - DNA, 25 bp, Homo sapien
gtatatgtcatatgcactggctagc

SEQ ID NO: 2714069 - DNA, 25 bp, Homo sapien
gtttcttaagtacccagtatatgtc

SEQ ID NO: 2714070 - DNA, 25 bp, Homo sapien
tagctgttgaatatcctgagcagat

SEQ ID NO: 2714071 - DNA, 25 bp, Homo sapien
ggtagcccattagttacttgacttc

SEQ ID NO: 2714072 - DNA, 25 bp, Homo sapien
cagtcatctggccttttggaagagc

SEQ ID NO: 2714073 - DNA, 25 bp, Homo sapien
gagtaaagaatgatccctcctccac

SEQ ID NO: 2714074 - DNA, 25 bp, Homo sapien
caaacaaccttatcccacagggtag

SEQ ID NO: 2714075 - DNA, 25 bp, Homo sapien
tttccagtggttccaacctatcacc

SEQ ID NO: 2714076 - DNA, 25 bp, Homo sapien
tccagtggttccaacctatcaccat

SEQ ID NO: 2714077 - DNA, 25 bp, Homo sapien
ttttccagtggttccaacctatcac

SEQ ID NO: 2714078 - DNA, 25 bp, Homo sapien
tttttccagtggttccaacctatca

SEQ ID NO: 2714079 - DNA, 25 bp, Homo sapien
cctgataatcgagctgggagtcaga

SEQ ID NO: 2714080 - DNA, 25 bp, Homo sapien
tggttttgggacctgataatcgagc

SEQ ID NO: 2714081 - DNA, 25 bp, Homo sapien
gacagcggttcccattaagcggtga

SEQ ID NO: 2714082 - DNA, 25 bp, Homo sapien
gagagtttgccaatagggatgtgac

SEQ ID NO: 2714083 - DNA, 25 bp, Homo sapien
caaagcctctgaagatgcggaacgg

SEQ ID NO: 2714084 - DNA, 25 bp, Homo sapien
gaatcctccgctagtacgaagacga

SEQ ID NO: 2714085 - DNA, 25 bp, Homo sapien
cccatgcggaaacagctccagggag

SEQ ID NO: 2714086 - DNA, 25 bp, Homo sapien
ttctcgggctcagcactgggcgaat

SEQ ID NO: 2714087 - DNA, 25 bp, Homo sapien
gagcatgttttctatacctaggtga

SEQ ID NO: 2714088 - DNA, 25 bp, Homo sapien
ggcattatttagctaacctgtggta

SEQ ID NO: 2714089 - DNA, 25 bp, Homo sapien
ctcttgaatggcagcagtgtcgaca

SEQ ID NO: 2714090 - DNA, 25 bp, Homo sapien
gcagtatagtttgtactccatgcca

SEQ ID NO: 2714091 - DNA, 25 bp, Homo sapien
ttgtttagagactggtgaatgttag

SEQ ID NO: 2714092 - DNA, 25 bp, Homo sapien
gtttagagactggtgaatgttagtt

SEQ ID NO: 2714093 - DNA, 25 bp, Homo sapien
ggtggttgtttagagactggtgaat

SEQ ID NO: 2714094 - DNA, 25 bp, Homo sapien
tggttgtttagagactggtgaatgt

SEQ ID NO: 2714095 - DNA, 25 bp, Homo sapien
caggtcacagactactctcaagttg

SEQ ID NO: 2714096 - DNA, 25 bp, Homo sapien
ggtcacagactactctcaagttgaa

SEQ ID NO: 2714097 - DNA, 25 bp, Homo sapien
ctgcaggtcacagactactctcaag

SEQ ID NO: 2714098 - DNA, 25 bp, Homo sapien
tctcaagttgaaaaccttcagaagt

SEQ ID NO: 2714099 - DNA, 25 bp, Homo sapien
cgcttgtactgagacgcctgggatc

SEQ ID NO: 2714100 - DNA, 25 bp, Homo sapien
cggaaacagcgtctgggagcagtca

SEQ ID NO: 2714101 - DNA, 25 bp, Homo sapien
tggtacagtccacattccggctcag

SEQ ID NO: 2714102 - DNA, 25 bp, Homo sapien
gcctgggatctcaaaatggcggccc

SEQ ID NO: 2714103 - DNA, 25 bp, Homo sapien
ctgtctgcaaaagtgtggaccttac

SEQ ID NO: 2714104 - DNA, 25 bp, Homo sapien
tctgtctgcaaaagtgtggacctta

SEQ ID NO: 2714105 - DNA, 25 bp, Homo sapien
aatgtgggaaaacctgtatctggaa

SEQ ID NO: 2714106 - DNA, 25 bp, Homo sapien
tgggaaaacctgtatctggaaatcg

SEQ ID NO: 2714107 - DNA, 25 bp, Homo sapien
tgtatctggaaatcgtaacttacgg

SEQ ID NO: 2714108 - DNA, 25 bp, Homo sapien
gaaaacctgtatctggaaatcgtaa

SEQ ID NO: 2714109 - DNA, 25 bp, Homo sapien
aatgctgaggtgtaagttttggaaa

SEQ ID NO: 2714110 - DNA, 25 bp, Homo sapien
cactcgtaggttttctcttgagtat

SEQ ID NO: 2714111 - DNA, 25 bp, Homo sapien
tttctacattcaacacactcgtagg

SEQ ID NO: 2714112 - DNA, 25 bp, Homo sapien
ttctctaacgttcaacagatgtgac

SEQ ID NO: 2714113 - DNA, 25 bp, Homo sapien
ttggtctggaagattatctggtctt

SEQ ID NO: 2714114 - DNA, 25 bp, Homo sapien
gtttggtctggaagattatctggtc

SEQ ID NO: 2714115 - DNA, 25 bp, Homo sapien
ctgtttggtctggaagattatctgg

SEQ ID NO: 2714116 - DNA, 25 bp, Homo sapien
actgtttggtctggaagattatctg

SEQ ID NO: 2714117 - DNA, 25 bp, Homo sapien
tgcagtgggtaacatcaagcacatt

SEQ ID NO: 2714118 - DNA, 25 bp, Homo sapien
ttagactgaatccattgcctgtccc

SEQ ID NO: 2714119 - DNA, 25 bp, Homo sapien
ctgcagtgggtaacatcaagcacat

SEQ ID NO: 2714120 - DNA, 25 bp, Homo sapien
gcagtgggtaacatcaagcacattt

SEQ ID NO: 2714121 - DNA, 25 bp, Homo sapien
ctggtttcttgcttctcctacaact

SEQ ID NO: 2714122 - DNA, 25 bp, Homo sapien
tggtttcttgcttctcctacaactt

SEQ ID NO: 2714123 - DNA, 25 bp, Homo sapien
ttgcttctcctacaactttctgttt

SEQ ID NO: 2714124 - DNA, 25 bp, Homo sapien
tctcctacaactttctgtttgttca

SEQ ID NO: 2714125 - DNA, 25 bp, Homo sapien
gacggattcctagcccagatcagtg

SEQ ID NO: 2714126 - DNA, 25 bp, Homo sapien
aaggtggcgcagacggattcctagc

SEQ ID NO: 2714127 - DNA, 25 bp, Homo sapien
ccagcttccagtgggagtggcgagt

SEQ ID NO: 2714128 - DNA, 25 bp, Homo sapien
caattaacacggctgcacaggtgat

SEQ ID NO: 2714129 - DNA, 25 bp, Homo sapien
gggcgacagtgacataagcaaatct

SEQ ID NO: 2714130 - DNA, 25 bp, Homo sapien
cagccaatcgctaggcggctgggat

SEQ ID NO: 2714131 - DNA, 25 bp, Homo sapien
caccgtccgtctgaggtgtccggcg

SEQ ID NO: 2714132 - DNA, 25 bp, Homo sapien
tcaagccctcgggtgtgaccaatcc

SEQ ID NO: 2714133 - DNA, 25 bp, Homo sapien
ccggctctgcgagacgaagccggcc

SEQ ID NO: 2714134 - DNA, 25 bp, Homo sapien
cggctctgcgagacgaagccggcca

SEQ ID NO: 2714135 - DNA, 25 bp, Homo sapien
gtccccggctctgcgagacgaagcc

SEQ ID NO: 2714136 - DNA, 25 bp, Homo sapien
ccccggctctgcgagacgaagccgg

SEQ ID NO: 2714137 - DNA, 25 bp, Homo sapien
ttgcactgagcgctggacaccgagg

SEQ ID NO: 2714138 - DNA, 25 bp, Homo sapien
ggtgcattgcactgagcgctggaca

SEQ ID NO: 2714139 - DNA, 25 bp, Homo sapien
gcattgcactgagcgctggacaccg

SEQ ID NO: 2714140 - DNA, 25 bp, Homo sapien
aaaaggggtgcattgcactgagcgc

SEQ ID NO: 2714141 - DNA, 25 bp, Homo sapien
ctggggattgcccatctggcgggga

SEQ ID NO: 2714142 - DNA, 25 bp, Homo sapien
tggggattgcccatctggcggggag

SEQ ID NO: 2714143 - DNA, 25 bp, Homo sapien
ggggattgcccatctggcggggagc

SEQ ID NO: 2714144 - DNA, 25 bp, Homo sapien
atgtagcaaggcgaccctcgaggtg

SEQ ID NO: 2714145 - DNA, 25 bp, Homo sapien
aggtctcggctctccaacagatgga

SEQ ID NO: 2714146 - DNA, 25 bp, Homo sapien
ccttagtcattctgcccgcctgaag

SEQ ID NO: 2714147 - DNA, 25 bp, Homo sapien
gatggaactacgagacgacgacggt

SEQ ID NO: 2714148 - DNA, 25 bp, Homo sapien
ttcctcaggctaatgaggacagtgg

SEQ ID NO: 2714149 - DNA, 25 bp, Homo sapien
tctccaactaccaggtttcctcagg

SEQ ID NO: 2714150 - DNA, 25 bp, Homo sapien
ggacagtgggtcctgggtagtgagg

SEQ ID NO: 2714151 - DNA, 25 bp, Homo sapien
tctacctcttcttctgaattagcag

SEQ ID NO: 2714152 - DNA, 25 bp, Homo sapien
gacttggacgaagtggcttcacatc

SEQ ID NO: 2714153 - DNA, 25 bp, Homo sapien
cagagaagacacagctatgatgagt

SEQ ID NO: 2714154 - DNA, 25 bp, Homo sapien
actccacggtgctggcctgtctatg

SEQ ID NO: 2714155 - DNA, 25 bp, Homo sapien
gaaaatcgatcccattcctgacctg

SEQ ID NO: 2714156 - DNA, 25 bp, Homo sapien
ccgtgcacgtcagcagttgtcactc

SEQ ID NO: 2714157 - DNA, 25 bp, Homo sapien
gatcccgtgcacgtcagcagttgtc

SEQ ID NO: 2714158 - DNA, 25 bp, Homo sapien
ggagcgtgggcagcctgaagttgga

SEQ ID NO: 2714159 - DNA, 25 bp, Homo sapien
ttgtcactctttccggcttctgcag

SEQ ID NO: 2714160 - DNA, 25 bp, Homo sapien
cagttccgccttaaaatgcagacaa

SEQ ID NO: 2714161 - DNA, 25 bp, Homo sapien
caagtcacttacactgtctgggcat

SEQ ID NO: 2714162 - DNA, 25 bp, Homo sapien
tggaacgaaatctcatgtcaaggga

SEQ ID NO: 2714163 - DNA, 25 bp, Homo sapien
tacaggttgtcctaataatgggaac

SEQ ID NO: 2714164 - DNA, 25 bp, Homo sapien
atatatgctggcagggcgtggcccc

SEQ ID NO: 2714165 - DNA, 25 bp, Homo sapien
cctgaccaggtgaagggagtgatat

SEQ ID NO: 2714166 - DNA, 25 bp, Homo sapien
gagtctaatattccacatccggtga

SEQ ID NO: 2714167 - DNA, 25 bp, Homo sapien
tggccccagtagagtgcagaagagc

SEQ ID NO: 2714168 - DNA, 25 bp, Homo sapien
gttgacaaagaggacgtatttgcca

SEQ ID NO: 2714169 - DNA, 25 bp, Homo sapien
ccgtactcgtaaatggtgccactta

SEQ ID NO: 2714170 - DNA, 25 bp, Homo sapien
gtgagggctccgtactcgtaaatgg

SEQ ID NO: 2714171 - DNA, 25 bp, Homo sapien
cacttatgccaccatggcagtccat

SEQ ID NO: 2714172 - DNA, 25 bp, Homo sapien
gccaagagaagcaccaaagcagatg

SEQ ID NO: 2714173 - DNA, 25 bp, Homo sapien
cagccaaagggagctctaagcacaa

SEQ ID NO: 2714174 - DNA, 25 bp, Homo sapien
ttttcccctgggtgctgtcgcttgc

SEQ ID NO: 2714175 - DNA, 25 bp, Homo sapien
ggagatcatgaaacctgcgccaaat

SEQ ID NO: 2714176 - DNA, 25 bp, Homo sapien
cacgtgaccgccgtcctttcacttc

SEQ ID NO: 2714177 - DNA, 25 bp, Homo sapien
tgggccacgtgaccgccgtcctttc

SEQ ID NO: 2714178 - DNA, 25 bp, Homo sapien
cgtgaccgccgtcctttcacttccg

SEQ ID NO: 2714179 - DNA, 25 bp, Homo sapien
agccactgggccacgtgaccgccgt

SEQ ID NO: 2714180 - DNA, 25 bp, Homo sapien
tagagagaagcatcccagaaaaagc

SEQ ID NO: 2714181 - DNA, 25 bp, Homo sapien
ctagagagaagcatcccagaaaaag

SEQ ID NO: 2714182 - DNA, 25 bp, Homo sapien
agagaagcatcccagaaaaagcact

SEQ ID NO: 2714183 - DNA, 25 bp, Homo sapien
gaagcatcccagaaaaagcactcac

SEQ ID NO: 2714184 - DNA, 25 bp, Homo sapien
ccagcccatctcttgcccaaacgca

SEQ ID NO: 2714185 - DNA, 25 bp, Homo sapien
cagcccatctcttgcccaaacgcac

SEQ ID NO: 2714186 - DNA, 25 bp, Homo sapien
tcattcagaaccctcaggattgagt

SEQ ID NO: 2714187 - DNA, 25 bp, Homo sapien
ggccagctagagcactcattcagaa

SEQ ID NO: 2714188 - DNA, 25 bp, Homo sapien
cattcagaaccctcaggattgagtt

SEQ ID NO: 2714189 - DNA, 25 bp, Homo sapien
cagctagagcactcattcagaaccc

SEQ ID NO: 2714190 - DNA, 25 bp, Homo sapien
gaggacaagaataatacccttcctc

SEQ ID NO: 2714191 - DNA, 25 bp, Homo sapien
ggacaagaataatacccttcctcaa

SEQ ID NO: 2714192 - DNA, 25 bp, Homo sapien
tggaggacaagaataatacccttcc

SEQ ID NO: 2714193 - DNA, 25 bp, Homo sapien
ttggaggacaagaataatacccttc

SEQ ID NO: 2714194 - DNA, 25 bp, Homo sapien
tgctgggactcaggtcctatcctct

SEQ ID NO: 2714195 - DNA, 25 bp, Homo sapien
tggcgaggagccctgtctcatccac

SEQ ID NO: 2714196 - DNA, 25 bp, Homo sapien
gacttgcgcaggatcaccagtgagt

SEQ ID NO: 2714197 - DNA, 25 bp, Homo sapien
tggaactactgaggcccgagaaagg

SEQ ID NO: 2714198 - DNA, 25 bp, Homo sapien
ggaaagcccagaatgaccagaccga

SEQ ID NO: 2714199 - DNA, 25 bp, Homo sapien
ccagaccgaatggtgcaagctcttc

SEQ ID NO: 2714200 - DNA, 25 bp, Homo sapien
ccagaatgaccagaccgaatggtgc

SEQ ID NO: 2714201 - DNA, 25 bp, Homo sapien
gggtaggaaggatctctgagttctc

SEQ ID NO: 2714202 - DNA, 25 bp, Homo sapien
cataatgtgagtccacggtcttcct

SEQ ID NO: 2714203 - DNA, 25 bp, Homo sapien
tcctttctagcctggtcccttttca

SEQ ID NO: 2714204 - DNA, 25 bp, Homo sapien
gcggatgcacatcacaaccagttgt

SEQ ID NO: 2714205 - DNA, 25 bp, Homo sapien
tgaatgtgcagtgggcataggcata

SEQ ID NO: 2714206 - DNA, 25 bp, Homo sapien
tgggtcccaaggaggtgggcacagg

SEQ ID NO: 2714207 - DNA, 25 bp, Homo sapien
taggtgggtcccaaggaggtgggca

SEQ ID NO: 2714208 - DNA, 25 bp, Homo sapien
ggtgggtcccaaggaggtgggcaca

SEQ ID NO: 2714209 - DNA, 25 bp, Homo sapien
gtgggtcccaaggaggtgggcacag

SEQ ID NO: 2714210 - DNA, 25 bp, Homo sapien
aaagcctccacctggtcggacatac

SEQ ID NO: 2714211 - DNA, 25 bp, Homo sapien
ctggaaattagggacaaagcctcca

SEQ ID NO: 2714212 - DNA, 25 bp, Homo sapien
acaaagcctccacctggtcggacat

SEQ ID NO: 2714213 - DNA, 25 bp, Homo sapien
ggacaaagcctccacctggtcggac

SEQ ID NO: 2714214 - DNA, 25 bp, Homo sapien
aaagtgtagaatttctgctctttct

SEQ ID NO: 2714215 - DNA, 25 bp, Homo sapien
ctttaggaaagtgtagaatttctgc

SEQ ID NO: 2714216 - DNA, 25 bp, Homo sapien
ggaaagtgtagaatttctgctcttt

SEQ ID NO: 2714217 - DNA, 25 bp, Homo sapien
taggaaagtgtagaatttctgctct

SEQ ID NO: 2714218 - DNA, 25 bp, Homo sapien
ttccagcggatgtcgtgaaccttca

SEQ ID NO: 2714219 - DNA, 25 bp, Homo sapien
tcttgacgttgctgaccgtggtccg

SEQ ID NO: 2714220 - DNA, 25 bp, Homo sapien
agatgtacccaggagctccgaggtg

SEQ ID NO: 2714221 - DNA, 25 bp, Homo sapien
tcatgggttcccagaagaggcggtc

SEQ ID NO: 2714222 - DNA, 25 bp, Homo sapien
cattcccagaaagacacataggtag

SEQ ID NO: 2714223 - DNA, 25 bp, Homo sapien
ccccaaggttgaggtatcagttaga

SEQ ID NO: 2714224 - DNA, 25 bp, Homo sapien
taggtagacacgtggctgtacaccc

SEQ ID NO: 2714225 - DNA, 25 bp, Homo sapien
gaaagggttgtcactgtccagcact

SEQ ID NO: 2714226 - DNA, 25 bp, Homo sapien
gtccgtggcccttgctgtcacatct

SEQ ID NO: 2714227 - DNA, 25 bp, Homo sapien
ccagaaacttctggggacgtcagtc

SEQ ID NO: 2714228 - DNA, 25 bp, Homo sapien
tggggagtgtggtagacccagaaac

SEQ ID NO: 2714229 - DNA, 25 bp, Homo sapien
cttctggggacgtcagtcatagtta

SEQ ID NO: 2714230 - DNA, 25 bp, Homo sapien
aggggccttagcctgaatgcactaa

SEQ ID NO: 2714231 - DNA, 25 bp, Homo sapien
tgaatgcactaagggctggcccctc

SEQ ID NO: 2714232 - DNA, 25 bp, Homo sapien
gcactaagggctggcccctcagaca

SEQ ID NO: 2714233 - DNA, 25 bp, Homo sapien
ctcatgaagacgccacccctgccat

SEQ ID NO: 2714234 - DNA, 25 bp, Homo sapien
tgagggcacgtcctccgaaggagca

SEQ ID NO: 2714235 - DNA, 25 bp, Homo sapien
tgagtctcaagccagtggaccagtg

SEQ ID NO: 2714236 - DNA, 25 bp, Homo sapien
tctcaagccagtggaccagtgaggg

SEQ ID NO: 2714237 - DNA, 25 bp, Homo sapien
agaaaggcttttactgggcagacgg

SEQ ID NO: 2714238 - DNA, 25 bp, Homo sapien
tcatgaagatgccacccctaatagg

SEQ ID NO: 2714239 - DNA, 25 bp, Homo sapien
gcgccactgcagctaactatcaggt

SEQ ID NO: 2714240 - DNA, 25 bp, Homo sapien
cagactcagtcacggcacactatag

SEQ ID NO: 2714241 - DNA, 25 bp, Homo sapien
taatagggctacatggcccttgcag

SEQ ID NO: 2714242 - DNA, 25 bp, Homo sapien
cagtagccttgctgaagccatcaca

SEQ ID NO: 2714243 - DNA, 25 bp, Homo sapien
tggaccccatagctggaggcctgtg

SEQ ID NO: 2714244 - DNA, 25 bp, Homo sapien
cccagattagggtggctgtccatcc

SEQ ID NO: 2714245 - DNA, 25 bp, Homo sapien
catccctggatagctatttgcacga

SEQ ID NO: 2714246 - DNA, 25 bp, Homo sapien
gctttgtcccttcgccttacatctg

SEQ ID NO: 2714247 - DNA, 25 bp, Homo sapien
ttgtcccttcgccttacatctgggc

SEQ ID NO: 2714248 - DNA, 25 bp, Homo sapien
gttgactccccagcgccaagagaaa

SEQ ID NO: 2714249 - DNA, 25 bp, Homo sapien
gaaactgagtgttgcgtgttttgga

SEQ ID NO: 2714250 - DNA, 25 bp, Homo sapien
ggtcagcagaacttggaaattccct

SEQ ID NO: 2714251 - DNA, 25 bp, Homo sapien
tgaccatctgggcatgaggtcagca

SEQ ID NO: 2714252 - DNA, 25 bp, Homo sapien
ggatatttctcctgcgtctcctctg

SEQ ID NO: 2714253 - DNA, 25 bp, Homo sapien
agagttcccgtctgcccagtggtca

SEQ ID NO: 2714254 - DNA, 25 bp, Homo sapien
ggcttagggccaaatgcttacgtgc

SEQ ID NO: 2714255 - DNA, 25 bp, Homo sapien
tctgggaatcctttacaatgtctgg

SEQ ID NO: 2714256 - DNA, 25 bp, Homo sapien
aatgtctggagcaaaaaatgttcgc

SEQ ID NO: 2714257 - DNA, 25 bp, Homo sapien
ttaagaagagtcctggagtgccctg

SEQ ID NO: 2714258 - DNA, 25 bp, Homo sapien
tactgttctgtgactccccgaaaga

SEQ ID NO: 2714259 - DNA, 25 bp, Homo sapien
ccccgaaagagggattctctctaca

SEQ ID NO: 2714260 - DNA, 25 bp, Homo sapien
ctgaaatttgttgtccctatcctgg

SEQ ID NO: 2714261 - DNA, 25 bp, Homo sapien
tccacttagtggcttagcttgcgtt

SEQ ID NO: 2714262 - DNA, 25 bp, Homo sapien
ggctttcgcccctgtcatctggtgg

SEQ ID NO: 2714263 - DNA, 25 bp, Homo sapien
taggctcatcctttgaccttgggca

SEQ ID NO: 2714264 - DNA, 25 bp, Homo sapien
catctggtgggtttagatcctggca

SEQ ID NO: 2714265 - DNA, 25 bp, Homo sapien
tcctggcacacagatttaggctcat

SEQ ID NO: 2714266 - DNA, 25 bp, Homo sapien
tactgtcacctttgtcagcagccgc

SEQ ID NO: 2714267 - DNA, 25 bp, Homo sapien
agccgcagcgccaaatctatcgtca

SEQ ID NO: 2714268 - DNA, 25 bp, Homo sapien
actcccctggttgagtgagatggaa

SEQ ID NO: 2714269 - DNA, 25 bp, Homo sapien
tgaaaccttgctagagtcccggact

SEQ ID NO: 2714270 - DNA, 25 bp, Homo sapien
cgtcagcacaggagcttcggtttcc

SEQ ID NO: 2714271 - DNA, 25 bp, Homo sapien
ccttgagggccagctaagagctttt

SEQ ID NO: 2714272 - DNA, 25 bp, Homo sapien
tgggctgtgaactcaagtgccttga

SEQ ID NO: 2714273 - DNA, 25 bp, Homo sapien
cacctatcctgtagccttgtgggaa

SEQ ID NO: 2714274 - DNA, 25 bp, Homo sapien
ggttgggttgggctcttatcttcag

SEQ ID NO: 2714275 - DNA, 25 bp, Homo sapien
aaccgtagccatagatcctgtccac

SEQ ID NO: 2714276 - DNA, 25 bp, Homo sapien
tggagcttaggaaacgctcccactc

SEQ ID NO: 2714277 - DNA, 25 bp, Homo sapien
ccagcacggctgagcggctgaaaaa

SEQ ID NO: 2714278 - DNA, 25 bp, Homo sapien
cattgctagggatccagtgccaggg

SEQ ID NO: 2714279 - DNA, 25 bp, Homo sapien
gagacagcattgctagggatccagt

SEQ ID NO: 2714280 - DNA, 25 bp, Homo sapien
ttaatatttccacactggtcccagg

SEQ ID NO: 2714281 - DNA, 25 bp, Homo sapien
ttccacactggtcccaggaggtcct

SEQ ID NO: 2714282 - DNA, 25 bp, Homo sapien
ctgccttgatcctgggttcccgcag

SEQ ID NO: 2714283 - DNA, 25 bp, Homo sapien
cagggtggaaagtcccttctctgct

SEQ ID NO: 2714284 - DNA, 25 bp, Homo sapien
ttcagggtggaaagtcccttctctg

SEQ ID NO: 2714285 - DNA, 25 bp, Homo sapien
ctgaatatttcagggtggaaagtcc

SEQ ID NO: 2714286 - DNA, 25 bp, Homo sapien
tcccaagaggccactaggactcctg

SEQ ID NO: 2714287 - DNA, 25 bp, Homo sapien
ccaagaggccactaggactcctgct

SEQ ID NO: 2714288 - DNA, 25 bp, Homo sapien
aagaggccactaggactcctgctcc

SEQ ID NO: 2714289 - DNA, 25 bp, Homo sapien
gaggccactaggactcctgctccag

SEQ ID NO: 2714290 - DNA, 25 bp, Homo sapien
ctccttggaaaggggagctcctcca

SEQ ID NO: 2714291 - DNA, 25 bp, Homo sapien
cttggaaaggggagctcctccagat

SEQ ID NO: 2714292 - DNA, 25 bp, Homo sapien
tccttggaaaggggagctcctccag

SEQ ID NO: 2714293 - DNA, 25 bp, Homo sapien
aggcacacagaaactgctctcagag

SEQ ID NO: 2714294 - DNA, 25 bp, Homo sapien
gaatgaccgccccagtttcagcccc

SEQ ID NO: 2714295 - DNA, 25 bp, Homo sapien
ggtgaagtgaatgaccgccccagtt

SEQ ID NO: 2714296 - DNA, 25 bp, Homo sapien
tgaagtgaatgaccgccccagtttc

SEQ ID NO: 2714297 - DNA, 25 bp, Homo sapien
atgaccgccccagtttcagcccctg

SEQ ID NO: 2714298 - DNA, 25 bp, Homo sapien
ccagtcatcggctgatgggtacccc

SEQ ID NO: 2714299 - DNA, 25 bp, Homo sapien
ttgctgctgggctaacgggctccga

SEQ ID NO: 2714300 - DNA, 25 bp, Homo sapien
tgcagggacacaagaaataagcgcc

SEQ ID NO: 2714301 - DNA, 25 bp, Homo sapien
tccagcgagcgctgcgtcctcgagt

SEQ ID NO: 2714302 - DNA, 25 bp, Homo sapien
cgccggattggcctctgcgcgccac

SEQ ID NO: 2714303 - DNA, 25 bp, Homo sapien
gcgccggattggcctctgcgcgcca

SEQ ID NO: 2714304 - DNA, 25 bp, Homo sapien
gcgggcgcgccggattggcctctgc

SEQ ID NO: 2714305 - DNA, 25 bp, Homo sapien
ggcgcgccggattggcctctgcgcg

SEQ ID NO: 2714306 - DNA, 25 bp, Homo sapien
tgtttgtgtcctaagtaaccaccac

SEQ ID NO: 2714307 - DNA, 25 bp, Homo sapien
gggagcttgggttctcgttatcgct

SEQ ID NO: 2714308 - DNA, 25 bp, Homo sapien
tgcttgtagccagtggaaaccctcc

SEQ ID NO: 2714309 - DNA, 25 bp, Homo sapien
caatgaccattcttggaactaggga

SEQ ID NO: 2714310 - DNA, 25 bp, Homo sapien
cacagccacgattttgcagggatta

SEQ ID NO: 2714311 - DNA, 25 bp, Homo sapien
ggattattatgtccccaacctcttc

SEQ ID NO: 2714312 - DNA, 25 bp, Homo sapien
caagcagtatctggaagaggaaatc

SEQ ID NO: 2714313 - DNA, 25 bp, Homo sapien
ggctccttgaggagaatccaacagc

SEQ ID NO: 2714314 - DNA, 25 bp, Homo sapien
tatagataacagaacaattccttga

SEQ ID NO: 2714315 - DNA, 25 bp, Homo sapien
caaataatcgggttactctgattgg

SEQ ID NO: 2714316 - DNA, 25 bp, Homo sapien
gataaagagataagactaaacctga

SEQ ID NO: 2714317 - DNA, 25 bp, Homo sapien
ggagacctacccatcagcttctcaa

SEQ ID NO: 2714318 - DNA, 25 bp, Homo sapien
cactgtgcttgtgaactgctgccca

SEQ ID NO: 2714319 - DNA, 25 bp, Homo sapien
gatatacaggcaccctccagtggac

SEQ ID NO: 2714320 - DNA, 25 bp, Homo sapien
taatccctgtaaactgttgtcactg

SEQ ID NO: 2714321 - DNA, 25 bp, Homo sapien
gttctgccatgctccgggatttcac

SEQ ID NO: 2714322 - DNA, 25 bp, Homo sapien
cagtgcggagcccaacagctatatt

SEQ ID NO: 2714323 - DNA, 25 bp, Homo sapien
gcatgcgccgtcctgacagtgcgga

SEQ ID NO: 2714324 - DNA, 25 bp, Homo sapien
tctttctctggtaggccaggcattc

SEQ ID NO: 2714325 - DNA, 25 bp, Homo sapien
attccccggtgtctgcgccagagga

SEQ ID NO: 2714326 - DNA, 25 bp, Homo sapien
tcccagtgtagtgccatctgggcca

SEQ ID NO: 2714327 - DNA, 25 bp, Homo sapien
gcgcagctgtaccacctcatagtag

SEQ ID NO: 2714328 - DNA, 25 bp, Homo sapien
aaaggagatgtctgtctcccactgg

SEQ ID NO: 2714329 - DNA, 25 bp, Homo sapien
ctcatagtagttatctgtagggaca

SEQ ID NO: 2714330 - DNA, 25 bp, Homo sapien
tctcctcactctgggacagacgatg

SEQ ID NO: 2714331 - DNA, 25 bp, Homo sapien
gggacagacgatgtatggaaactaa

SEQ ID NO: 2714332 - DNA, 25 bp, Homo sapien
aggagatcaacttctcctcactctg

SEQ ID NO: 2714333 - DNA, 25 bp, Homo sapien
cactctgggacagacgatgtatgga

SEQ ID NO: 2714334 - DNA, 25 bp, Homo sapien
gggactggtcaaaggactcttatgt

SEQ ID NO: 2714335 - DNA, 25 bp, Homo sapien
cattctaggattgtctgaaggccag

SEQ ID NO: 2714336 - DNA, 25 bp, Homo sapien
ggacaaaccccgcaaatcagagtgg

SEQ ID NO: 2714337 - DNA, 25 bp, Homo sapien
tgtcactgcagtgtcccattctagg

SEQ ID NO: 2714338 - DNA, 25 bp, Homo sapien
tttgtacgtaaaagtgtatatcctg

SEQ ID NO: 2714339 - DNA, 25 bp, Homo sapien
tatgtttccaagtaattatgctgct

SEQ ID NO: 2714340 - DNA, 25 bp, Homo sapien
caacaaaacacatggttgtgattat

SEQ ID NO: 2714341 - DNA, 25 bp, Homo sapien
ggcaagaccgtaaagtacatggctt

SEQ ID NO: 2714342 - DNA, 25 bp, Homo sapien
ggaccacggaactcgttctggctga

SEQ ID NO: 2714343 - DNA, 25 bp, Homo sapien
tgttgatgccactagattaattgcc

SEQ ID NO: 2714344 - DNA, 25 bp, Homo sapien
cacctcatggttgggtgggaccacg

SEQ ID NO: 2714345 - DNA, 25 bp, Homo sapien
attggttaaaacaagcagagctggc

SEQ ID NO: 2714346 - DNA, 25 bp, Homo sapien
tctggagactggtcccactcgaaat

SEQ ID NO: 2714347 - DNA, 25 bp, Homo sapien
tctggagactggtcccacccgaaat

SEQ ID NO: 2714348 - DNA, 25 bp, Homo sapien
ccatgtctggccagcgactaatttt

SEQ ID NO: 2714349 - DNA, 25 bp, Homo sapien
tgtctggccagcgactaatttttta

SEQ ID NO: 2714350 - DNA, 25 bp, Homo sapien
tggaattgagtctcctggcctcaac

SEQ ID NO: 2714351 - DNA, 25 bp, Homo sapien
agtaaagctggaattgagtctcctg

SEQ ID NO: 2714352 - DNA, 25 bp, Homo sapien
aaagctggaattgagtctcctggcc

SEQ ID NO: 2714353 - DNA, 25 bp, Homo sapien
ctggaattgagtctcctggcctcaa

SEQ ID NO: 2714354 - DNA, 25 bp, Homo sapien
cagtttgtgatggttctgaaatttt

SEQ ID NO: 2714355 - DNA, 25 bp, Homo sapien
tagatgacacgccagcagcttctac

SEQ ID NO: 2714356 - DNA, 25 bp, Homo sapien
ttcttcatactgaactgaaacttct

SEQ ID NO: 2714357 - DNA, 25 bp, Homo sapien
ggccacaatcctgtcctccaaggct

SEQ ID NO: 2714358 - DNA, 25 bp, Homo sapien
tccatctggctgtatgtttgtatcg

SEQ ID NO: 2714359 - DNA, 25 bp, Homo sapien
ggaacattagaatgtagtccttcca

SEQ ID NO: 2714360 - DNA, 25 bp, Homo sapien
tcatcattctaacaatgggtccact

SEQ ID NO: 2714361 - DNA, 25 bp, Homo sapien
gtttgtatcgtttgaccagcctttc

SEQ ID NO: 2714362 - DNA, 25 bp, Homo sapien
catttgtgggtcgaccacaccgggc

SEQ ID NO: 2714363 - DNA, 25 bp, Homo sapien
tacttggtgggtcagtcattcagca

SEQ ID NO: 2714364 - DNA, 25 bp, Homo sapien
caagggcatggctaacttggcaaac

SEQ ID NO: 2714365 - DNA, 25 bp, Homo sapien
catccatgtagcaagccaggtgaca

SEQ ID NO: 2714366 - DNA, 25 bp, Homo sapien
taaagttctcatccctgtaggctgt

SEQ ID NO: 2714367 - DNA, 25 bp, Homo sapien
ttgggtactacctgggctgacgcac

SEQ ID NO: 2714368 - DNA, 25 bp, Homo sapien
tctgaagggcaagtaaagctggcac

SEQ ID NO: 2714369 - DNA, 25 bp, Homo sapien
gctcagtgaggaacgatgggtccaa

SEQ ID NO: 2714370 - DNA, 25 bp, Homo sapien
ccagctcagagacgagggaggctct

SEQ ID NO: 2714371 - DNA, 25 bp, Homo sapien
gcgccggcggagaagtttgctttca

SEQ ID NO: 2714372 - DNA, 25 bp, Homo sapien
tcagtttcagggtctcgccggcagc

SEQ ID NO: 2714373 - DNA, 25 bp, Homo sapien
ccaagcagccgagtttacaaacacg

SEQ ID NO: 2714374 - DNA, 25 bp, Homo sapien
tcacctagcccaactgaggtaggag

SEQ ID NO: 2714375 - DNA, 25 bp, Homo sapien
tttacataatgatcctcccattctg

SEQ ID NO: 2714376 - DNA, 25 bp, Homo sapien
tgttgataagacacccgtggcctgg

SEQ ID NO: 2714377 - DNA, 25 bp, Homo sapien
gggcatgacattggtacactattat

SEQ ID NO: 2714378 - DNA, 25 bp, Homo sapien
tattggttacgcaaagaagctgagt

SEQ ID NO: 2714379 - DNA, 25 bp, Homo sapien
tctctctagcgtaggtgtcaaggcc

SEQ ID NO: 2714380 - DNA, 25 bp, Homo sapien
tcagggcggagttaactgcaaggtc

SEQ ID NO: 2714381 - DNA, 25 bp, Homo sapien
gagaattggaccgattcctcccggc

SEQ ID NO: 2714382 - DNA, 25 bp, Homo sapien
gcgcaggggccgcgagaagcaagcc

SEQ ID NO: 2714383 - DNA, 25 bp, Homo sapien
ccagggcgatcaggaggggagcctg

SEQ ID NO: 2714384 - DNA, 25 bp, Homo sapien
tgcgcaggggccgcgagaagcaagc

SEQ ID NO: 2714385 - DNA, 25 bp, Homo sapien
cagggcgatcaggaggggagcctgc

SEQ ID NO: 2714386 - DNA, 25 bp, Homo sapien
gtgcagacgtgagattaatctctcc

SEQ ID NO: 2714387 - DNA, 25 bp, Homo sapien
caggagagtgcagacgtgagattaa

SEQ ID NO: 2714388 - DNA, 25 bp, Homo sapien
gagtgcagacgtgagattaatctct

SEQ ID NO: 2714389 - DNA, 25 bp, Homo sapien
ggagagtgcagacgtgagattaatc

SEQ ID NO: 2714390 - DNA, 25 bp, Homo sapien
ggcaatgccttagttttaaggctgt

SEQ ID NO: 2714391 - DNA, 25 bp, Homo sapien
tctgggggcaatgccttagttttaa

SEQ ID NO: 2714392 - DNA, 25 bp, Homo sapien
gactgaatctctgggggcaatgcct

SEQ ID NO: 2714393 - DNA, 25 bp, Homo sapien
acaggactgaatctctgggggcaat

SEQ ID NO: 2714394 - DNA, 25 bp, Homo sapien
gacaactccccgagatgcacgttgg

SEQ ID NO: 2714395 - DNA, 25 bp, Homo sapien
tttgtagggtgagctagcagcctct

SEQ ID NO: 2714396 - DNA, 25 bp, Homo sapien
gcaaatgaagtcaaaaggtccacgt

SEQ ID NO: 2714397 - DNA, 25 bp, Homo sapien
ggacctatccctttgctaccagaaa

SEQ ID NO: 2714398 - DNA, 25 bp, Homo sapien
ctccacatcccccaggtctcctgat

SEQ ID NO: 2714399 - DNA, 25 bp, Homo sapien
ggtctcctgattccaccaccactac

SEQ ID NO: 2714400 - DNA, 25 bp, Homo sapien
ccaccaccactacatctgcatgtga

SEQ ID NO: 2714401 - DNA, 25 bp, Homo sapien
cacccctgtgctgagctgctcctgt

SEQ ID NO: 2714402 - DNA, 25 bp, Homo sapien
actggtgctgcccatgacactgagg

SEQ ID NO: 2714403 - DNA, 25 bp, Homo sapien
gacactgagggtcacatttccagga

SEQ ID NO: 2714404 - DNA, 25 bp, Homo sapien
tcatcacagttatcccaggaaaagc

SEQ ID NO: 2714405 - DNA, 25 bp, Homo sapien
gagtcaggcttctgatcaccgcagg

SEQ ID NO: 2714406 - DNA, 25 bp, Homo sapien
tccatgaacctgtgaaagagtgtct

SEQ ID NO: 2714407 - DNA, 25 bp, Homo sapien
tctgccaggtgcaaggtatccgtca

SEQ ID NO: 2714408 - DNA, 25 bp, Homo sapien
gacaataatgagcagttggccacca

SEQ ID NO: 2714409 - DNA, 25 bp, Homo sapien
aagttgctggcgctgacatcagaga

SEQ ID NO: 2714410 - DNA, 25 bp, Homo sapien
gctgccaatgtagtctgtgcatggg

SEQ ID NO: 2714411 - DNA, 25 bp, Homo sapien
gtagtctgtgcatgggatcttgatc

SEQ ID NO: 2714412 - DNA, 25 bp, Homo sapien
gctccccagtaggaattaacatgtc

SEQ ID NO: 2714413 - DNA, 25 bp, Homo sapien
aattaacatgtcaagcacatcacag

SEQ ID NO: 2714414 - DNA, 25 bp, Homo sapien
gatggataactgaggctcccggaag

SEQ ID NO: 2714415 - DNA, 25 bp, Homo sapien
gagagacggccatagcactgtagag

SEQ ID NO: 2714416 - DNA, 25 bp, Homo sapien
tcaaaacagccgcacaagatgagag

SEQ ID NO: 2714417 - DNA, 25 bp, Homo sapien
tagagccactgctaggattgcagcc

SEQ ID NO: 2714418 - DNA, 25 bp, Homo sapien
caggcacaacgaattcgctcttggg

SEQ ID NO: 2714419 - DNA, 25 bp, Homo sapien
gcggtagttcccggtggtgagccaa

SEQ ID NO: 2714420 - DNA, 25 bp, Homo sapien
ccaggtcaggcacaacgaattcgct

SEQ ID NO: 2714421 - DNA, 25 bp, Homo sapien
caacgaattcgctcttgggcagtga

SEQ ID NO: 2714422 - DNA, 25 bp, Homo sapien
accgctccattctgctgtggcagat

SEQ ID NO: 2714423 - DNA, 25 bp, Homo sapien
gctccattctgctgtggcagatgcc

SEQ ID NO: 2714424 - DNA, 25 bp, Homo sapien
tccattctgctgtggcagatgccat

SEQ ID NO: 2714425 - DNA, 25 bp, Homo sapien
cgctccattctgctgtggcagatgc

SEQ ID NO: 2714426 - DNA, 25 bp, Homo sapien
tttggaaatgaacgaggctctttag

SEQ ID NO: 2714427 - DNA, 25 bp, Homo sapien
gggctatcaagaactgtccaactca

SEQ ID NO: 2714428 - DNA, 25 bp, Homo sapien
ccaactcattctcccttaggtcagg

SEQ ID NO: 2714429 - DNA, 25 bp, Homo sapien
gatgagtaacgtggtcagcccagca

SEQ ID NO: 2714430 - DNA, 25 bp, Homo sapien
ctccaggatacactgcaccctagta

SEQ ID NO: 2714431 - DNA, 25 bp, Homo sapien
gcaccctagtattaattgggcaaat

SEQ ID NO: 2714432 - DNA, 25 bp, Homo sapien
caggatacactgcaccctagtatta

SEQ ID NO: 2714433 - DNA, 25 bp, Homo sapien
atacactgcaccctagtattaattg

SEQ ID NO: 2714434 - DNA, 25 bp, Homo sapien
gcaacatgtttctcacggttcttat

SEQ ID NO: 2714435 - DNA, 25 bp, Homo sapien
ctgcgggtacctgagtttgtaaaca

SEQ ID NO: 2714436 - DNA, 25 bp, Homo sapien
tttaagtctcttgctaggccctgcg

SEQ ID NO: 2714437 - DNA, 25 bp, Homo sapien
tgtaaacaacagagcactcctaata

SEQ ID NO: 2714438 - DNA, 25 bp, Homo sapien
tatatttccaactggagaccaggcc

SEQ ID NO: 2714439 - DNA, 25 bp, Homo sapien
acaaggcatgcacggtctgagatca

SEQ ID NO: 2714440 - DNA, 25 bp, Homo sapien
gtttgggacacatcacactgcacag

SEQ ID NO: 2714441 - DNA, 25 bp, Homo sapien
cagcagccttgtatcaatgggcaca

SEQ ID NO: 2714442 - DNA, 25 bp, Homo sapien
agccttgtccttgggaccggacact

SEQ ID NO: 2714443 - DNA, 25 bp, Homo sapien
ttgtccttgggaccggacactatgg

SEQ ID NO: 2714444 - DNA, 25 bp, Homo sapien
tccttgggaccggacactatggctt

SEQ ID NO: 2714445 - DNA, 25 bp, Homo sapien
gggaccggacactatggctttggcc

SEQ ID NO: 2714446 - DNA, 25 bp, Homo sapien
ttcacccaacaggactccaagactg

SEQ ID NO: 2714447 - DNA, 25 bp, Homo sapien
tcagaagttgttatgatgtaacagg

SEQ ID NO: 2714448 - DNA, 25 bp, Homo sapien
aggcagccttgtgatccccacagct

SEQ ID NO: 2714449 - DNA, 25 bp, Homo sapien
tccaggcagtttgatgtcgaggcca

SEQ ID NO: 2714450 - DNA, 25 bp, Homo sapien
cacggaacatatgacccaagagcag

SEQ ID NO: 2714451 - DNA, 25 bp, Homo sapien
gaggactgaatgtaccacggtggat

SEQ ID NO: 2714452 - DNA, 25 bp, Homo sapien
cactaggtgatttttgctctccgca

SEQ ID NO: 2714453 - DNA, 25 bp, Homo sapien
gaagatccaacagagggaaacggct

SEQ ID NO: 2714454 - DNA, 25 bp, Homo sapien
aggtctaacttcaactttctccaag

SEQ ID NO: 2714455 - DNA, 25 bp, Homo sapien
tcatgtagtcaaatgtgtcaatatt

SEQ ID NO: 2714456 - DNA, 25 bp, Homo sapien
atatggtgtgaagtacaggtctaac

SEQ ID NO: 2714457 - DNA, 25 bp, Homo sapien
ggatccagatggagttcattcttgc

SEQ ID NO: 2714458 - DNA, 25 bp, Homo sapien
gcactttcaaaacgtactggccagt

SEQ ID NO: 2714459 - DNA, 25 bp, Homo sapien
aaatatactcagatacactcggcag

SEQ ID NO: 2714460 - DNA, 25 bp, Homo sapien
tatagccttgcctaacagaaatgtg

SEQ ID NO: 2714461 - DNA, 25 bp, Homo sapien
tctaaatcggtatctcacaatgcag

SEQ ID NO: 2714462 - DNA, 25 bp, Homo sapien
caattgcgagtgaaactgaggacca

SEQ ID NO: 2714463 - DNA, 25 bp, Homo sapien
aaagacagacaagcactgagcctgg

SEQ ID NO: 2714464 - DNA, 25 bp, Homo sapien
caggcaagtcctggttgggcaagca

SEQ ID NO: 2714465 - DNA, 25 bp, Homo sapien
gctaaactaggagaggccaaaagcc

SEQ ID NO: 2714466 - DNA, 25 bp, Homo sapien
cactttgccagagaatgggttgtca

SEQ ID NO: 2714467 - DNA, 25 bp, Homo sapien
gatcccatagcctacagagtccctg

SEQ ID NO: 2714468 - DNA, 25 bp, Homo sapien
tgggcaacaggacactcatagctcg

SEQ ID NO: 2714469 - DNA, 25 bp, Homo sapien
ccactcagatggaggaaaggctggt

SEQ ID NO: 2714470 - DNA, 25 bp, Homo sapien
gatatttggctctaccctgctcatg

SEQ ID NO: 2714471 - DNA, 25 bp, Homo sapien
tgccaattggcagacaggactctac

SEQ ID NO: 2714472 - DNA, 25 bp, Homo sapien
ttaggagactcttcagaatgctgat

SEQ ID NO: 2714473 - DNA, 25 bp, Homo sapien
gggccatggttccaatatccagtta

SEQ ID NO: 2714474 - DNA, 25 bp, Homo sapien
tttagaataactgcagatcagcctc

SEQ ID NO: 2714475 - DNA, 25 bp, Homo sapien
cattctgggtcacaaggtatataga

SEQ ID NO: 2714476 - DNA, 25 bp, Homo sapien
gatcagcctcacataccttagaaga

SEQ ID NO: 2714477 - DNA, 25 bp, Homo sapien
caattccaaaggttgcccagttaga

SEQ ID NO: 2714478 - DNA, 25 bp, Homo sapien
tacgggtgtccatccattggctcca

SEQ ID NO: 2714479 - DNA, 25 bp, Homo sapien
gggctttgccaactctgacccaatt

SEQ ID NO: 2714480 - DNA, 25 bp, Homo sapien
ttattattgttcctgtgaaaaggcc

SEQ ID NO: 2714481 - DNA, 25 bp, Homo sapien
tcttcttccgagagatacgggtgtc

SEQ ID NO: 2714482 - DNA, 25 bp, Homo sapien
attaacttgtctaggatcacccact

SEQ ID NO: 2714483 - DNA, 25 bp, Homo sapien
ctactgcatctacaaactgacgaag

SEQ ID NO: 2714484 - DNA, 25 bp, Homo sapien
caaactgacgaagttcttcagtgga

SEQ ID NO: 2714485 - DNA, 25 bp, Homo sapien
gagccactactgcatctacaaactg

SEQ ID NO: 2714486 - DNA, 25 bp, Homo sapien
atgtgagccactactgcatctacaa

SEQ ID NO: 2714487 - DNA, 25 bp, Homo sapien
agaggtctccgatctgagttttcag

SEQ ID NO: 2714488 - DNA, 25 bp, Homo sapien
ctagaggtctccgatctgagttttc

SEQ ID NO: 2714489 - DNA, 25 bp, Homo sapien
tagaggtctccgatctgagttttca

SEQ ID NO: 2714490 - DNA, 25 bp, Homo sapien
aatgcttgcggcatcaggtgcagcc

SEQ ID NO: 2714491 - DNA, 25 bp, Homo sapien
gccagttctggtggaaccatttcct

SEQ ID NO: 2714492 - DNA, 25 bp, Homo sapien
tcccagaggccttgcgctcacaatg

SEQ ID NO: 2714493 - DNA, 25 bp, Homo sapien
cattgccaatgcttgcggcatcagg

SEQ ID NO: 2714494 - DNA, 25 bp, Homo sapien
ggtggtgacatggtcgtgtggctgg

SEQ ID NO: 2714495 - DNA, 25 bp, Homo sapien
cagcaaatgagcaataggagccatg

SEQ ID NO: 2714496 - DNA, 25 bp, Homo sapien
catatagtccatgggctagcaggtc

SEQ ID NO: 2714497 - DNA, 25 bp, Homo sapien
tcattcctgaggaggaggcatatag

SEQ ID NO: 2714498 - DNA, 25 bp, Homo sapien
gagcaataggagccatgatgaggct

SEQ ID NO: 2714499 - DNA, 25 bp, Homo sapien
gggttacatcagtgcctcctgtaac

SEQ ID NO: 2714500 - DNA, 25 bp, Homo sapien
tcctgtaacaggaagggcaaagact

SEQ ID NO: 2714501 - DNA, 25 bp, Homo sapien
ggcaaagactgggagagctcccggg

SEQ ID NO: 2714502 - DNA, 25 bp, Homo sapien
taggctctctttgggggttacatca

SEQ ID NO: 2714503 - DNA, 25 bp, Homo sapien
ctgcactgtgcttgaaagggtcgtg

SEQ ID NO: 2714504 - DNA, 25 bp, Homo sapien
cactgtgcttgaaagggtcgtgctc

SEQ ID NO: 2714505 - DNA, 25 bp, Homo sapien
cccaggctggtagtgagtctcgatg

SEQ ID NO: 2714506 - DNA, 25 bp, Homo sapien
ctgtgcttgaaagggtcgtgctctg

SEQ ID NO: 2714507 - DNA, 25 bp, Homo sapien
gtgatggttgctgagcagatcatcc

SEQ ID NO: 2714508 - DNA, 25 bp, Homo sapien
ggtgatggttgctgagcagatcatc

SEQ ID NO: 2714509 - DNA, 25 bp, Homo sapien
cctccaggtagattccccaccccat

SEQ ID NO: 2714510 - DNA, 25 bp, Homo sapien
tcctccaggtagattccccacccca

SEQ ID NO: 2714511 - DNA, 25 bp, Homo sapien
ctttctagatgctgaacaaagtctt

SEQ ID NO: 2714512 - DNA, 25 bp, Homo sapien
ctgaacaaagtcttcacgctgggaa

SEQ ID NO: 2714513 - DNA, 25 bp, Homo sapien
acgctgggaagcctcgtcctcatcc

SEQ ID NO: 2714514 - DNA, 25 bp, Homo sapien
cagagcctctgtgcgctgcctactt

SEQ ID NO: 2714515 - DNA, 25 bp, Homo sapien
acaaaatcttcatggttggtttctt

SEQ ID NO: 2714516 - DNA, 25 bp, Homo sapien
tcttgagtgatacaaaatcttcatg

SEQ ID NO: 2714517 - DNA, 25 bp, Homo sapien
tttcttcccctcagtacacaaaagc

SEQ ID NO: 2714518 - DNA, 25 bp, Homo sapien
tcttcccctcagtacacaaaagcaa

SEQ ID NO: 2714519 - DNA, 25 bp, Homo sapien
gaggaggtctgaggctacaagccag

SEQ ID NO: 2714520 - DNA, 25 bp, Homo sapien
atacctggacataaatgtaatgagc

SEQ ID NO: 2714521 - DNA, 25 bp, Homo sapien
tgacgcaaaggctctgcctggaaac

SEQ ID NO: 2714522 - DNA, 25 bp, Homo sapien
cttgacgcaaaggctctgcctggaa

SEQ ID NO: 2714523 - DNA, 25 bp, Homo sapien
acttttattgccagactctccactc

SEQ ID NO: 2714524 - DNA, 25 bp, Homo sapien
cccttcgccttctctgaagttgctg

SEQ ID NO: 2714525 - DNA, 25 bp, Homo sapien
aacccatgtcctgtccaacataatg

SEQ ID NO: 2714526 - DNA, 25 bp, Homo sapien
tctctgtgatattagaggtgactgg

SEQ ID NO: 2714527 - DNA, 25 bp, Homo sapien
tagtagatccttctgaaacaaggca

SEQ ID NO: 2714528 - DNA, 25 bp, Homo sapien
agcagcttccttgctgtcagtcttg

SEQ ID NO: 2714529 - DNA, 25 bp, Homo sapien
tgaagagctctggagcaaaccccca

SEQ ID NO: 2714530 - DNA, 25 bp, Homo sapien
caagatagggccaactagtagatcc

SEQ ID NO: 2714531 - DNA, 25 bp, Homo sapien
gggttcagtatcagcccctcgccat

SEQ ID NO: 2714532 - DNA, 25 bp, Homo sapien
ccgggttcagtatcagcccctcgcc

SEQ ID NO: 2714533 - DNA, 25 bp, Homo sapien
cacccttcccgggttcagtatcagc

SEQ ID NO: 2714534 - DNA, 25 bp, Homo sapien
ttcccgggttcagtatcagcccctc

SEQ ID NO: 2714535 - DNA, 25 bp, Homo sapien
aggaactcactgctcgggttctggc

SEQ ID NO: 2714536 - DNA, 25 bp, Homo sapien
ggcgagcgccgccagccggcagcca

SEQ ID NO: 2714537 - DNA, 25 bp, Homo sapien
gaactcactgctcgggttctggccc

SEQ ID NO: 2714538 - DNA, 25 bp, Homo sapien
gccgccagccggcagccagtggagg

SEQ ID NO: 2714539 - DNA, 25 bp, Homo sapien
ggaggaaggcgaggtgggtcctgcc

SEQ ID NO: 2714540 - DNA, 25 bp, Homo sapien
gggaggaaggcgaggtgggtcctgc

SEQ ID NO: 2714541 - DNA, 25 bp, Homo sapien
tgtacacagcgggtaaaatctctcg

SEQ ID NO: 2714542 - DNA, 25 bp, Homo sapien
tagactgagaaacccaaacgcgagt

SEQ ID NO: 2714543 - DNA, 25 bp, Homo sapien
gaagagggccctgatcatgtttaaa

SEQ ID NO: 2714544 - DNA, 25 bp, Homo sapien
aacgcgagtcacttaaggttgccag

SEQ ID NO: 2714545 - DNA, 25 bp, Homo sapien
catccatcccacatgctagtaataa

SEQ ID NO: 2714546 - DNA, 25 bp, Homo sapien
gtccactctacgtgctagtaagcgg

SEQ ID NO: 2714547 - DNA, 25 bp, Homo sapien
tcatcccacatgctagtaagcagac

SEQ ID NO: 2714548 - DNA, 25 bp, Homo sapien
aagtggacatctgctccgtccactc

SEQ ID NO: 2714549 - DNA, 25 bp, Homo sapien
gctagtaagtggacatcggctccat

SEQ ID NO: 2714550 - DNA, 25 bp, Homo sapien
tagtaagtggacatcggctccatcc

SEQ ID NO: 2714551 - DNA, 25 bp, Homo sapien
tgctagtaagtggacatcggctcca

SEQ ID NO: 2714552 - DNA, 25 bp, Homo sapien
gtaagtggacatcggctccatccat

SEQ ID NO: 2714553 - DNA, 25 bp, Homo sapien
atgccagtaagtggacatctgctcc

SEQ ID NO: 2714554 - DNA, 25 bp, Homo sapien
taagtggacatctgctccatccatc

SEQ ID NO: 2714555 - DNA, 25 bp, Homo sapien
ccagtaagtggacatctgctccatc

SEQ ID NO: 2714556 - DNA, 25 bp, Homo sapien
aagtggacatctgctccatccatcc

SEQ ID NO: 2714557 - DNA, 25 bp, Homo sapien
atcacaaaactggacatcagctcca

SEQ ID NO: 2714558 - DNA, 25 bp, Homo sapien
tagaaacaaagtaatcacaaaactg

SEQ ID NO: 2714559 - DNA, 25 bp, Homo sapien
aaagtaatcacaaaactggacatca

SEQ ID NO: 2714560 - DNA, 25 bp, Homo sapien
ctgagacaaggttataaatagaaac

SEQ ID NO: 2714561 - DNA, 25 bp, Homo sapien
tgtgctcatcacagtaaggcctggc

SEQ ID NO: 2714562 - DNA, 25 bp, Homo sapien
tgggaaacaagagaaggcctggatg

SEQ ID NO: 2714563 - DNA, 25 bp, Homo sapien
ccaaaggagagaggtacaggattct

SEQ ID NO: 2714564 - DNA, 25 bp, Homo sapien
ggaaataaacggattccatgtgagt

SEQ ID NO: 2714565 - DNA, 25 bp, Homo sapien
gcacagagtggcttttcctactaga

SEQ ID NO: 2714566 - DNA, 25 bp, Homo sapien
tagagatggtcattaaggactagcc

SEQ ID NO: 2714567 - DNA, 25 bp, Homo sapien
aagaagagacaaccccaaatgcagc

SEQ ID NO: 2714568 - DNA, 25 bp, Homo sapien
gaagccaggtccctaccttggagat

SEQ ID NO: 2714569 - DNA, 25 bp, Homo sapien
ggcaggattaggtctgcagcgggta

SEQ ID NO: 2714570 - DNA, 25 bp, Homo sapien
aaatctccctgcgaacaaagctggc

SEQ ID NO: 2714571 - DNA, 25 bp, Homo sapien
caggattaggtctgcagcgggtatt

SEQ ID NO: 2714572 - DNA, 25 bp, Homo sapien
cttaaaatctccctgcgaacaaagc

SEQ ID NO: 2714573 - DNA, 25 bp, Homo sapien
tagaacagctacagggcagctgctg

SEQ ID NO: 2714574 - DNA, 25 bp, Homo sapien
gatgctagaacagctacagggcagc

SEQ ID NO: 2714575 - DNA, 25 bp, Homo sapien
ggagtctgatgctagaacagctaca

SEQ ID NO: 2714576 - DNA, 25 bp, Homo sapien
ttttcctgtaggagtctgatgctag

SEQ ID NO: 2714577 - DNA, 25 bp, Homo sapien
ccgaaggctctccttaggtccagtg

SEQ ID NO: 2714578 - DNA, 25 bp, Homo sapien
agaggatggtgctccgccgaaggct

SEQ ID NO: 2714579 - DNA, 25 bp, Homo sapien
ccagtgccagggtactcctttggaa

SEQ ID NO: 2714580 - DNA, 25 bp, Homo sapien
taggtccagtgccagggtactcctt

SEQ ID NO: 2714581 - DNA, 25 bp, Homo sapien
tgtcagagttgctcactgtgacagc

SEQ ID NO: 2714582 - DNA, 25 bp, Homo sapien
gctcactgtgacagctccactatgg

SEQ ID NO: 2714583 - DNA, 25 bp, Homo sapien
gtcagagttgctcactgtgacagct

SEQ ID NO: 2714584 - DNA, 25 bp, Homo sapien
gttgctcactgtgacagctccacta

SEQ ID NO: 2714585 - DNA, 25 bp, Homo sapien
gcctttagctccatatttggggtgg

SEQ ID NO: 2714586 - DNA, 25 bp, Homo sapien
tttagctccatatttggggtggcct

SEQ ID NO: 2714587 - DNA, 25 bp, Homo sapien
ctttagctccatatttggggtggcc

SEQ ID NO: 2714588 - DNA, 25 bp, Homo sapien
gggccagcattaagacctcctgcag

SEQ ID NO: 2714589 - DNA, 25 bp, Homo sapien
tgaccaaagcgctggtaggagcccg

SEQ ID NO: 2714590 - DNA, 25 bp, Homo sapien
tcattccgaagtctctgcgtggaca

SEQ ID NO: 2714591 - DNA, 25 bp, Homo sapien
ttgttgaggccttccgacgggctct

SEQ ID NO: 2714592 - DNA, 25 bp, Homo sapien
ggagctgtagtcgtggtagtcttca

SEQ ID NO: 2714593 - DNA, 25 bp, Homo sapien
tgccttttaacaggtggatcaaggt

SEQ ID NO: 2714594 - DNA, 25 bp, Homo sapien
gatgcctgcatttttcaccgccaga

SEQ ID NO: 2714595 - DNA, 25 bp, Homo sapien
tgcacggccacgatgcctatgatca

SEQ ID NO: 2714596 - DNA, 25 bp, Homo sapien
ctatgatcagcaggctgatgggacc

SEQ ID NO: 2714597 - DNA, 25 bp, Homo sapien
aggatacccatgcagtgcacggcca

SEQ ID NO: 2714598 - DNA, 25 bp, Homo sapien
accaggatacccatgcagtgcacgg

SEQ ID NO: 2714599 - DNA, 25 bp, Homo sapien
cccagtgtgcgtggttccggagcca

SEQ ID NO: 2714600 - DNA, 25 bp, Homo sapien
cagtatcaccataatccacaaagga

SEQ ID NO: 2714601 - DNA, 25 bp, Homo sapien
ggctggattctagtccatacatcac

SEQ ID NO: 2714602 - DNA, 25 bp, Homo sapien
cttccccagtgtgcgtggttccgga

SEQ ID NO: 2714603 - DNA, 25 bp, Homo sapien
gctttacactgtctcccacgttgca

SEQ ID NO: 2714604 - DNA, 25 bp, Homo sapien
catctgaaggcctcacactgggagg

SEQ ID NO: 2714605 - DNA, 25 bp, Homo sapien
actggtcatagaccgccaaagctgg

SEQ ID NO: 2714606 - DNA, 25 bp, Homo sapien
caaagctggaatggctctagagacc

SEQ ID NO: 2714607 - DNA, 25 bp, Homo sapien
gagggtgtactcctagctcatgaca

SEQ ID NO: 2714608 - DNA, 25 bp, Homo sapien
tggcacagccgacaagagaatcttt

SEQ ID NO: 2714609 - DNA, 25 bp, Homo sapien
cactgaagagttaccataacgagaa

SEQ ID NO: 2714610 - DNA, 25 bp, Homo sapien
tctttgctcctatctctcatgtgcg

SEQ ID NO: 2714611 - DNA, 25 bp, Homo sapien
aatcaggaagaagtccacaacacgt

SEQ ID NO: 2714612 - DNA, 25 bp, Homo sapien
caatcaggaagaagtccacaacacg

SEQ ID NO: 2714613 - DNA, 25 bp, Homo sapien
gcagaatcccagctgggtgacaatc

SEQ ID NO: 2714614 - DNA, 25 bp, Homo sapien
cagaatcccagctgggtgacaatca

SEQ ID NO: 2714615 - DNA, 25 bp, Homo sapien
ggtggtcccattggccgcttctatc

SEQ ID NO: 2714616 - DNA, 25 bp, Homo sapien
ctggtagatcatgaccaagctgacc

SEQ ID NO: 2714617 - DNA, 25 bp, Homo sapien
tcaccgtctcattgttgtggcagtt

SEQ ID NO: 2714618 - DNA, 25 bp, Homo sapien
ctgaacaatgaactggtagatcatg

SEQ ID NO: 2714619 - DNA, 25 bp, Homo sapien
tatgggcagtgactacatcaaaaca

SEQ ID NO: 2714620 - DNA, 25 bp, Homo sapien
gaagcaactacaacactatgggcag

SEQ ID NO: 2714621 - DNA, 25 bp, Homo sapien
aacagtagtaacaagccgcagaggc

SEQ ID NO: 2714622 - DNA, 25 bp, Homo sapien
ccaggcagacggcactatttgatca

SEQ ID NO: 2714623 - DNA, 25 bp, Homo sapien
aaaacatttattgggagcaccctct

SEQ ID NO: 2714624 - DNA, 25 bp, Homo sapien
ccagaactgttccatttgagactcc

SEQ ID NO: 2714625 - DNA, 25 bp, Homo sapien
gaactgttccatttgagactccaca

SEQ ID NO: 2714626 - DNA, 25 bp, Homo sapien
acatttattgggagcaccctctgtg

SEQ ID NO: 2714627 - DNA, 25 bp, Homo sapien
gacggcctgttgtggaaacctgtga

SEQ ID NO: 2714628 - DNA, 25 bp, Homo sapien
tgtaagaagcatttcaatacctgga

SEQ ID NO: 2714629 - DNA, 25 bp, Homo sapien
tctccagtaacagactgtgtggaag

SEQ ID NO: 2714630 - DNA, 25 bp, Homo sapien
tctgttagatccctttgtaagaagc

SEQ ID NO: 2714631 - DNA, 25 bp, Homo sapien
ccaagaagcacacaacaggagtgct

SEQ ID NO: 2714632 - DNA, 25 bp, Homo sapien
cactttcaaagtattaccaagaagc

SEQ ID NO: 2714633 - DNA, 25 bp, Homo sapien
gaagcacacaacaggagtgctggaa

SEQ ID NO: 2714634 - DNA, 25 bp, Homo sapien
tgagcactttcaaagtattaccaag

SEQ ID NO: 2714635 - DNA, 25 bp, Homo sapien
tgaaaaaatcgctgtgccaaagaag

SEQ ID NO: 2714636 - DNA, 25 bp, Homo sapien
ttcaaatgaaaaaatcgctgtgcca

SEQ ID NO: 2714637 - DNA, 25 bp, Homo sapien
caaatgaaaaaatcgctgtgccaaa

SEQ ID NO: 2714638 - DNA, 25 bp, Homo sapien
aaatcgctgtgccaaagaagagagg

SEQ ID NO: 2714639 - DNA, 25 bp, Homo sapien
tgagtgggaacttccgaggatcctt

SEQ ID NO: 2714640 - DNA, 25 bp, Homo sapien
tgccttggatattagctccaaattg

SEQ ID NO: 2714641 - DNA, 25 bp, Homo sapien
gctccaaattgcaggtaccccagac

SEQ ID NO: 2714642 - DNA, 25 bp, Homo sapien
atgtagaggatggtgacgatgacca

SEQ ID NO: 2714643 - DNA, 25 bp, Homo sapien
catttatcttccagggaaaggtgac

SEQ ID NO: 2714644 - DNA, 25 bp, Homo sapien
gcttcggatcatgtgggctgcttct

SEQ ID NO: 2714645 - DNA, 25 bp, Homo sapien
gtgacacagttacaccaagctacca

SEQ ID NO: 2714646 - DNA, 25 bp, Homo sapien
gcttctgttgctcccgatccattta

SEQ ID NO: 2714647 - DNA, 25 bp, Homo sapien
ctcagccgggacgtagaactggagt

SEQ ID NO: 2714648 - DNA, 25 bp, Homo sapien
ggtgaaaaagatcccgatggagtac

SEQ ID NO: 2714649 - DNA, 25 bp, Homo sapien
tagaactggagtgcgtaggtgaaaa

SEQ ID NO: 2714650 - DNA, 25 bp, Homo sapien
ggagtacagcagcttaactgactgg

SEQ ID NO: 2714651 - DNA, 25 bp, Homo sapien
aacaggtccaccactaactcacagt

SEQ ID NO: 2714652 - DNA, 25 bp, Homo sapien
gcactgtgcgcacaaacaggtccac

SEQ ID NO: 2714653 - DNA, 25 bp, Homo sapien
tcaggcagaccagcactgtgcgcac

SEQ ID NO: 2714654 - DNA, 25 bp, Homo sapien
agtgctcgggcgctcgggacacaaa

SEQ ID NO: 2714655 - DNA, 25 bp, Homo sapien
tttcaaccacagcaaacagaagggt

SEQ ID NO: 2714656 - DNA, 25 bp, Homo sapien
cagaagggtatcctgtcttttaact

SEQ ID NO: 2714657 - DNA, 25 bp, Homo sapien
aatgtcaccagttttcaaccacagc

SEQ ID NO: 2714658 - DNA, 25 bp, Homo sapien
cacagcaaacagaagggtatcctgt

SEQ ID NO: 2714659 - DNA, 25 bp, Homo sapien
aagctactctgtttggacctggaag

SEQ ID NO: 2714660 - DNA, 25 bp, Homo sapien
cctgaggccttatgagggttcctgg

SEQ ID NO: 2714661 - DNA, 25 bp, Homo sapien
aatcaagcgcaaagcacctatacag

SEQ ID NO: 2714662 - DNA, 25 bp, Homo sapien
tcactgtagctgcaagactaaaaag

SEQ ID NO: 2714663 - DNA, 25 bp, Homo sapien
aggaggtgccatcggcttccgtgcc

SEQ ID NO: 2714664 - DNA, 25 bp, Homo sapien
ggaactgacgaagaccaatggtgca

SEQ ID NO: 2714665 - DNA, 25 bp, Homo sapien
cacatctgaaactcagccacgggtg

SEQ ID NO: 2714666 - DNA, 25 bp, Homo sapien
cacgacgaccgtatctctgtgacag

SEQ ID NO: 2714667 - DNA, 25 bp, Homo sapien
gtccaggcgggggatgaggatggcc

SEQ ID NO: 2714668 - DNA, 25 bp, Homo sapien
cgggggatgaggatggccaagatgc

SEQ ID NO: 2714669 - DNA, 25 bp, Homo sapien
ggcgggggatgaggatggccaagat

SEQ ID NO: 2714670 - DNA, 25 bp, Homo sapien
aggtccaggcgggggatgaggatgg

SEQ ID NO: 2714671 - DNA, 25 bp, Homo sapien
gctcatagagagcctcataggtccc

SEQ ID NO: 2714672 - DNA, 25 bp, Homo sapien
agctcatagagagcctcataggtcc

SEQ ID NO: 2714673 - DNA, 25 bp, Homo sapien
cagctcatagagagcctcataggtc

SEQ ID NO: 2714674 - DNA, 25 bp, Homo sapien
tcagctcatagagagcctcataggt

SEQ ID NO: 2714675 - DNA, 25 bp, Homo sapien
caatctcagaactcggatgggcagg

SEQ ID NO: 2714676 - DNA, 25 bp, Homo sapien
tttgagtcctcagccaagagtgccg

SEQ ID NO: 2714677 - DNA, 25 bp, Homo sapien
gaagtgattcgtaatagccccagat

SEQ ID NO: 2714678 - DNA, 25 bp, Homo sapien
ttgtaaacaaccgagcactgcgcgt

SEQ ID NO: 2714679 - DNA, 25 bp, Homo sapien
aaaacaggatctacgaactctggca

SEQ ID NO: 2714680 - DNA, 25 bp, Homo sapien
tacgatccatgtgcaaaccccaaaa

SEQ ID NO: 2714681 - DNA, 25 bp, Homo sapien
cacataccatgctggaagtgcacat

SEQ ID NO: 2714682 - DNA, 25 bp, Homo sapien
tagttatcaacacctacagattggt

SEQ ID NO: 2714683 - DNA, 25 bp, Homo sapien
ggtgcaaaacatcactagccattgg

SEQ ID NO: 2714684 - DNA, 25 bp, Homo sapien
cattaggaatccaacaaggaacggc

SEQ ID NO: 2714685 - DNA, 25 bp, Homo sapien
caaaacttgcgaatggccactggga

SEQ ID NO: 2714686 - DNA, 25 bp, Homo sapien
cttgaggtgacggtacagttaggca

SEQ ID NO: 2714687 - DNA, 25 bp, Homo sapien
ggtccacaggccgttccaagattca

SEQ ID NO: 2714688 - DNA, 25 bp, Homo sapien
tgatgagtccactaactagcaggct

SEQ ID NO: 2714689 - DNA, 25 bp, Homo sapien
cactgcatggcattagttacggaga

SEQ ID NO: 2714690 - DNA, 25 bp, Homo sapien
gatcctagagattgtcaagcaacag

SEQ ID NO: 2714691 - DNA, 25 bp, Homo sapien
tggccgtggcgttcattatcataag

SEQ ID NO: 2714692 - DNA, 25 bp, Homo sapien
ggttgttcagaaggacactgcctag

SEQ ID NO: 2714693 - DNA, 25 bp, Homo sapien
tactgatcatcacagtggccgtggc

SEQ ID NO: 2714694 - DNA, 25 bp, Homo sapien
caattctaagcaacggccagtggtc

SEQ ID NO: 2714695 - DNA, 25 bp, Homo sapien
tatccaaggaatccatcacttctct

SEQ ID NO: 2714696 - DNA, 25 bp, Homo sapien
aaatatccaaggaatccatcacttc

SEQ ID NO: 2714697 - DNA, 25 bp, Homo sapien
atatccaaggaatccatcacttctc

SEQ ID NO: 2714698 - DNA, 25 bp, Homo sapien
aatatccaaggaatccatcacttct

SEQ ID NO: 2714699 - DNA, 25 bp, Homo sapien
aatggtgggaagtgctcatggaccc

SEQ ID NO: 2714700 - DNA, 25 bp, Homo sapien
cagaacacatgcctcaatggtggga

SEQ ID NO: 2714701 - DNA, 25 bp, Homo sapien
gcctggatgctgtcgtggtcaacga

SEQ ID NO: 2714702 - DNA, 25 bp, Homo sapien
tggttgacagcatgggcaacacctc

SEQ ID NO: 2714703 - DNA, 25 bp, Homo sapien
tcacccaaggaataagcatagttcc

SEQ ID NO: 2714704 - DNA, 25 bp, Homo sapien
ttatccagcccactgttgttgagca

SEQ ID NO: 2714705 - DNA, 25 bp, Homo sapien
ttctttgcgtccctgtgtactcagc

SEQ ID NO: 2714706 - DNA, 25 bp, Homo sapien
tacgggtaaccgatgtatcataggg

SEQ ID NO: 2714707 - DNA, 25 bp, Homo sapien
gggtgacgtcatcctcacggtaagg

SEQ ID NO: 2714708 - DNA, 25 bp, Homo sapien
ccaagatccatatagcacaagggtc

SEQ ID NO: 2714709 - DNA, 25 bp, Homo sapien
aatacactgtagacttgactctgac

SEQ ID NO: 2714710 - DNA, 25 bp, Homo sapien
tgagtatggccaaacaatgctcggc

SEQ ID NO: 2714711 - DNA, 25 bp, Homo sapien
tttagcggttatatgacaaatcacc

SEQ ID NO: 2714712 - DNA, 25 bp, Homo sapien
catgttctttgactgaatttagcgg

SEQ ID NO: 2714713 - DNA, 25 bp, Homo sapien
catgtaggttgttgacttagctgct

SEQ ID NO: 2714714 - DNA, 25 bp, Homo sapien
tggaatcactttaaaacggctactc

SEQ ID NO: 2714715 - DNA, 25 bp, Homo sapien
gagcatatagattagaacaacattt

SEQ ID NO: 2714716 - DNA, 25 bp, Homo sapien
gggagttagttacaattgggcatat

SEQ ID NO: 2714717 - DNA, 25 bp, Homo sapien
tcattgactgatccatttacataaa

SEQ ID NO: 2714718 - DNA, 25 bp, Homo sapien
ttaaaacagctgagcctaggaatca

SEQ ID NO: 2714719 - DNA, 25 bp, Homo sapien
gatgagacctactacagctttacgg

SEQ ID NO: 2714720 - DNA, 25 bp, Homo sapien
gcttggtcagaatcacaggacgctc

SEQ ID NO: 2714721 - DNA, 25 bp, Homo sapien
acacattgagtggatcccttggccc

SEQ ID NO: 2714722 - DNA, 25 bp, Homo sapien
gagacggaccctgtgaaccacatgg

SEQ ID NO: 2714723 - DNA, 25 bp, Homo sapien
ttagactcgaccagagaccagtggc

SEQ ID NO: 2714724 - DNA, 25 bp, Homo sapien
tgagttttgtctacataccaggcac

SEQ ID NO: 2714725 - DNA, 25 bp, Homo sapien
ggaacagtctgtggctaggccagca

SEQ ID NO: 2714726 - DNA, 25 bp, Homo sapien
gctgagtacattaacgtgcacgatc

SEQ ID NO: 2714727 - DNA, 25 bp, Homo sapien
aggctcaatggtgccaaacgtatca

SEQ ID NO: 2714728 - DNA, 25 bp, Homo sapien
gggtcttcccatcaaatgcaaggct

SEQ ID NO: 2714729 - DNA, 25 bp, Homo sapien
tcaaatgcaaggctcaatggtgcca

SEQ ID NO: 2714730 - DNA, 25 bp, Homo sapien
cctcagggtcttcccatcaaatgca

SEQ ID NO: 2714731 - DNA, 25 bp, Homo sapien
gatagttcctaagtcctcacagagc

SEQ ID NO: 2714732 - DNA, 25 bp, Homo sapien
cctgcatggatcacatcagggtgag

SEQ ID NO: 2714733 - DNA, 25 bp, Homo sapien
tgatgacagcgaggagaataccacc

SEQ ID NO: 2714734 - DNA, 25 bp, Homo sapien
tgctagatgctcttgctaggcatag

SEQ ID NO: 2714735 - DNA, 25 bp, Homo sapien
cggttctgtacaaaacgggtggctg

SEQ ID NO: 2714736 - DNA, 25 bp, Homo sapien
tcaggcttgactctctcagttgaga

SEQ ID NO: 2714737 - DNA, 25 bp, Homo sapien
tatccgaatgtgtgccaatagagcc

SEQ ID NO: 2714738 - DNA, 25 bp, Homo sapien
gaattagagcggaggtcagcacatc

SEQ ID NO: 2714739 - DNA, 25 bp, Homo sapien
tgcaaccttgagctaggcaatactc

SEQ ID NO: 2714740 - DNA, 25 bp, Homo sapien
gatactgacataaggataggcatat

SEQ ID NO: 2714741 - DNA, 25 bp, Homo sapien
gaatttggacccctatatcactcca

SEQ ID NO: 2714742 - DNA, 25 bp, Homo sapien
taggcatatgggtcactgggataca

SEQ ID NO: 2714743 - DNA, 25 bp, Homo sapien
ccatgagtctgggtctatgaaggac

SEQ ID NO: 2714744 - DNA, 25 bp, Homo sapien
gaagcccgtgcatgcctgagatgca

SEQ ID NO: 2714745 - DNA, 25 bp, Homo sapien
gagggctcccctatggaaagttggc

SEQ ID NO: 2714746 - DNA, 25 bp, Homo sapien
gaggccccttcctgtgagtcgaaag

SEQ ID NO: 2714747 - DNA, 25 bp, Homo sapien
gcagccgtaattgcacagcgagtac

SEQ ID NO: 2714748 - DNA, 25 bp, Homo sapien
cacacggtaatggagctcagacagg

SEQ ID NO: 2714749 - DNA, 25 bp, Homo sapien
tgggtgggtcctgtgcagttcccac

SEQ ID NO: 2714750 - DNA, 25 bp, Homo sapien
cactcatactaactgggtgggtcct

SEQ ID NO: 2714751 - DNA, 25 bp, Homo sapien
ttcctgccctgggaggggaatcctg

SEQ ID NO: 2714752 - DNA, 25 bp, Homo sapien
ctttgctcccttcccacgccatcct

SEQ ID NO: 2714753 - DNA, 25 bp, Homo sapien
aggcctggtcatgccccacagccct

SEQ ID NO: 2714754 - DNA, 25 bp, Homo sapien
gaatcctggaatgaagcctgctgct

SEQ ID NO: 2714755 - DNA, 25 bp, Homo sapien
catgcaggaggtgagacaattcttc

SEQ ID NO: 2714756 - DNA, 25 bp, Homo sapien
gttcgttccaagctcagatcatctg

SEQ ID NO: 2714757 - DNA, 25 bp, Homo sapien
taaaggggagttcgttccaagctca

SEQ ID NO: 2714758 - DNA, 25 bp, Homo sapien
ttcttcactgtgcacaactgtctca

SEQ ID NO: 2714759 - DNA, 25 bp, Homo sapien
aaggttagtgtcaccagagcccagg

SEQ ID NO: 2714760 - DNA, 25 bp, Homo sapien
tcttttattaactgagcccaactgg

SEQ ID NO: 2714761 - DNA, 25 bp, Homo sapien
ggtaaaattctcttgtggtccgaca

SEQ ID NO: 2714762 - DNA, 25 bp, Homo sapien
gaactggacccatcggagagctgtg

SEQ ID NO: 2714763 - DNA, 25 bp, Homo sapien
tgaggcaccgataaagggggagaac

SEQ ID NO: 2714764 - DNA, 25 bp, Homo sapien
catgtgatgaggcaccgataaaggg

SEQ ID NO: 2714765 - DNA, 25 bp, Homo sapien
acgttcagggagcttgggtgacttg

SEQ ID NO: 2714766 - DNA, 25 bp, Homo sapien
gtgacttggtcatgtgatgaggcac

SEQ ID NO: 2714767 - DNA, 25 bp, Homo sapien
ggaatgcaagcccagcactagtctc

SEQ ID NO: 2714768 - DNA, 25 bp, Homo sapien
tctacacagtgggagggcgagcagt

SEQ ID NO: 2714769 - DNA, 25 bp, Homo sapien
cgagcagtaggagagattggcccat

SEQ ID NO: 2714770 - DNA, 25 bp, Homo sapien
gcaagcccagcactagtctcataat

SEQ ID NO: 2714771 - DNA, 25 bp, Homo sapien
tataaattgcaagatgtcacaggtg

SEQ ID NO: 2714772 - DNA, 25 bp, Homo sapien
aatgtgctcaattgcaatgggccac

SEQ ID NO: 2714773 - DNA, 25 bp, Homo sapien
tgatgtatttactctgcaccaggtc

SEQ ID NO: 2714774 - DNA, 25 bp, Homo sapien
gaaacagacccaagaaatgtgctca

SEQ ID NO: 2714775 - DNA, 25 bp, Homo sapien
taatgggatggtcggatctcacagg

SEQ ID NO: 2714776 - DNA, 25 bp, Homo sapien
tgcctgaggctgtaactgagagaaa

SEQ ID NO: 2714777 - DNA, 25 bp, Homo sapien
tctctgggaagtggtcagcgcatcc

SEQ ID NO: 2714778 - DNA, 25 bp, Homo sapien
caaacttttgggagcacggactgtc

SEQ ID NO: 2714779 - DNA, 25 bp, Homo sapien
actctgagttcagggcactttctgg

SEQ ID NO: 2714780 - DNA, 25 bp, Homo sapien
actgagcgattatggaaggtcaaca

SEQ ID NO: 2714781 - DNA, 25 bp, Homo sapien
tgatgtttgacctgggcctacaaaa

SEQ ID NO: 2714782 - DNA, 25 bp, Homo sapien
tctggagtctctcactagcatctga

SEQ ID NO: 2714783 - DNA, 25 bp, Homo sapien
acaaagtgcaccctggagggcacca

SEQ ID NO: 2714784 - DNA, 25 bp, Homo sapien
acaacaagaccttcgactcttcctg

SEQ ID NO: 2714785 - DNA, 25 bp, Homo sapien
atgacaacaagaccttcgactcttc

SEQ ID NO: 2714786 - DNA, 25 bp, Homo sapien
tctttgccacaaagtgcaccctgga

SEQ ID NO: 2714787 - DNA, 25 bp, Homo sapien
cccattggcgagtttgagaaggtga

SEQ ID NO: 2714788 - DNA, 25 bp, Homo sapien
acacccccatgtgcgtgtgccagga

SEQ ID NO: 2714789 - DNA, 25 bp, Homo sapien
tgcccagcccccattggcgagtttg

SEQ ID NO: 2714790 - DNA, 25 bp, Homo sapien
gaacaacacccccatgtgcgtgtgc

SEQ ID NO: 2714791 - DNA, 25 bp, Homo sapien
tggatggtttccgtacaggacctaa

SEQ ID NO: 2714792 - DNA, 25 bp, Homo sapien
gtattttctagatctcagctaacat

SEQ ID NO: 2714793 - DNA, 25 bp, Homo sapien
tagatctcagctaacatcccctctg

SEQ ID NO: 2714794 - DNA, 25 bp, Homo sapien
tctggatggtttccgtacaggacct

SEQ ID NO: 2714795 - DNA, 25 bp, Homo sapien
ctgttagccgttggcagttttctcc

SEQ ID NO: 2714796 - DNA, 25 bp, Homo sapien
gaaatatgtgacttgagcccccagt

SEQ ID NO: 2714797 - DNA, 25 bp, Homo sapien
ttctcatctgtactattgggcagaa

SEQ ID NO: 2714798 - DNA, 25 bp, Homo sapien
tggggtgctggattatgaaaacacc

SEQ ID NO: 2714799 - DNA, 25 bp, Homo sapien
gctgtacttttccatcctcagagtc

SEQ ID NO: 2714800 - DNA, 25 bp, Homo sapien
ggcagccaaggacgggttttcagca

SEQ ID NO: 2714801 - DNA, 25 bp, Homo sapien
gctggcagccaaggacgggttttca

SEQ ID NO: 2714802 - DNA, 25 bp, Homo sapien
ttccatcctcagagtctttccagag

SEQ ID NO: 2714803 - DNA, 25 bp, Homo sapien
gaatgcgagttgccacggtaacctt

SEQ ID NO: 2714804 - DNA, 25 bp, Homo sapien
atgcgagttgccacggtaacctttt

SEQ ID NO: 2714805 - DNA, 25 bp, Homo sapien
aatgcgagttgccacggtaaccttt

SEQ ID NO: 2714806 - DNA, 25 bp, Homo sapien
ggaatgcgagttgccacggtaacct

SEQ ID NO: 2714807 - DNA, 25 bp, Homo sapien
cagaaggctcttctctgcctgactc

SEQ ID NO: 2714808 - DNA, 25 bp, Homo sapien
gaaggctcttctctgcctgactcac

SEQ ID NO: 2714809 - DNA, 25 bp, Homo sapien
agaaggctcttctctgcctgactca

SEQ ID NO: 2714810 - DNA, 25 bp, Homo sapien
gggatgagttatgtcttccaggatt

SEQ ID NO: 2714811 - DNA, 25 bp, Homo sapien
gccactggctccgtgaactggctgt

SEQ ID NO: 2714812 - DNA, 25 bp, Homo sapien
gaactggctgtcaagtggacttcct

SEQ ID NO: 2714813 - DNA, 25 bp, Homo sapien
ggcactgggatgagttatgtcttcc

SEQ ID NO: 2714814 - DNA, 25 bp, Homo sapien
cagttcttcttcagacaaatccact

SEQ ID NO: 2714815 - DNA, 25 bp, Homo sapien
gttcttcttcagacaaatccactac

SEQ ID NO: 2714816 - DNA, 25 bp, Homo sapien
agggtgtcagttcttcttcagacaa

SEQ ID NO: 2714817 - DNA, 25 bp, Homo sapien
tcagggtgtcagttcttcttcagac

SEQ ID NO: 2714818 - DNA, 25 bp, Homo sapien
ccaagttgaaacgtagaatcagccc

SEQ ID NO: 2714819 - DNA, 25 bp, Homo sapien
caggtccaccagctagatgtctaat

SEQ ID NO: 2714820 - DNA, 25 bp, Homo sapien
aaccaagacctgttgcactgagcag

SEQ ID NO: 2714821 - DNA, 25 bp, Homo sapien
tctgtacagtggtaagtcctggcct

SEQ ID NO: 2714822 - DNA, 25 bp, Homo sapien
ccagagatggttcatcaggtggtcc

SEQ ID NO: 2714823 - DNA, 25 bp, Homo sapien
cccagagatggttcatcaggtggtc

SEQ ID NO: 2714824 - DNA, 25 bp, Homo sapien
tcccagagatggttcatcaggtggt

SEQ ID NO: 2714825 - DNA, 25 bp, Homo sapien
gaccagcagcggcaatattacagac

SEQ ID NO: 2714826 - DNA, 25 bp, Homo sapien
taagagctgccacgttgtcgggtct

SEQ ID NO: 2714827 - DNA, 25 bp, Homo sapien
gatgcctgcgtgtgagtgttccctg

SEQ ID NO: 2714828 - DNA, 25 bp, Homo sapien
caaagttatggatacagagccctgg

SEQ ID NO: 2714829 - DNA, 25 bp, Homo sapien
cttcaggactgagaactgtgctcat

SEQ ID NO: 2714830 - DNA, 25 bp, Homo sapien
cctctctggagattggcaagggtgt

SEQ ID NO: 2714831 - DNA, 25 bp, Homo sapien
tgttcttgttaccttcaggactgag

SEQ ID NO: 2714832 - DNA, 25 bp, Homo sapien
caagggtgttcttgttaccttcagg

SEQ ID NO: 2714833 - DNA, 25 bp, Homo sapien
cagaacacacagtcacatctttgct

SEQ ID NO: 2714834 - DNA, 25 bp, Homo sapien
tcacatctttgctaatgttgtctgc

SEQ ID NO: 2714835 - DNA, 25 bp, Homo sapien
cacagtcacatctttgctaatgttg

SEQ ID NO: 2714836 - DNA, 25 bp, Homo sapien
ctttgctaatgttgtctgctaattc

SEQ ID NO: 2714837 - DNA, 25 bp, Homo sapien
ttatcaaggcgctggaagaggagtt

SEQ ID NO: 2714838 - DNA, 25 bp, Homo sapien
actgaaagactggaaccattcagct

SEQ ID NO: 2714839 - DNA, 25 bp, Homo sapien
ggttgtttatcaaggcgctggaaga

SEQ ID NO: 2714840 - DNA, 25 bp, Homo sapien
aagaggagttggctagactttgaga

SEQ ID NO: 2714841 - DNA, 25 bp, Homo sapien
ctcatctatctcatggacagtttcc

SEQ ID NO: 2714842 - DNA, 25 bp, Homo sapien
ctctgcatttgaccagctcagacat

SEQ ID NO: 2714843 - DNA, 25 bp, Homo sapien
agatctggctctgcatttgaccagc

SEQ ID NO: 2714844 - DNA, 25 bp, Homo sapien
catctatctcatggacagtttcctc

SEQ ID NO: 2714845 - DNA, 25 bp, Homo sapien
cagtcatgccgggtgatggtgttcc

SEQ ID NO: 2714846 - DNA, 25 bp, Homo sapien
taggatgctgatcctcccgctggct

SEQ ID NO: 2714847 - DNA, 25 bp, Homo sapien
aatgtcgctatgtccacaccagatg

SEQ ID NO: 2714848 - DNA, 25 bp, Homo sapien
ggtgttcctgcggagaccctcagtt

SEQ ID NO: 2714849 - DNA, 25 bp, Homo sapien
ggcagccctggaaattccccagaag

SEQ ID NO: 2714850 - DNA, 25 bp, Homo sapien
cccagaagagggctttggcagtgat

SEQ ID NO: 2714851 - DNA, 25 bp, Homo sapien
ttgactgggtatcctggcagccctg

SEQ ID NO: 2714852 - DNA, 25 bp, Homo sapien
ttagcaaggttaatgcgttccagcc

SEQ ID NO: 2714853 - DNA, 25 bp, Homo sapien
gaggctctcataaagctgcagtgag

SEQ ID NO: 2714854 - DNA, 25 bp, Homo sapien
catgcttgttagctcgagggttcaa

SEQ ID NO: 2714855 - DNA, 25 bp, Homo sapien
tcactttgtggacctctccttgtgg

SEQ ID NO: 2714856 - DNA, 25 bp, Homo sapien
tgggaacagcttggcctagtggctc

SEQ ID NO: 2714857 - DNA, 25 bp, Homo sapien
aagagtttgagaagccacttagcca

SEQ ID NO: 2714858 - DNA, 25 bp, Homo sapien
tctgcactggaaaatcgagctgctt

SEQ ID NO: 2714859 - DNA, 25 bp, Homo sapien
tcagcggtgtttagagacttggaaa

SEQ ID NO: 2714860 - DNA, 25 bp, Homo sapien
agtgacaatccagactcagcggtgt

SEQ ID NO: 2714861 - DNA, 25 bp, Homo sapien
tgtctgtgaatagtcaggaaacaag

SEQ ID NO: 2714862 - DNA, 25 bp, Homo sapien
tctttccagaatctgttattgttgc

SEQ ID NO: 2714863 - DNA, 25 bp, Homo sapien
aaatcagagatgtttagaagaaagg

SEQ ID NO: 2714864 - DNA, 25 bp, Homo sapien
gaatctgttattgttgctgtctgtg

SEQ ID NO: 2714865 - DNA, 25 bp, Homo sapien
tgtaatgtttatacccagaagctgg

SEQ ID NO: 2714866 - DNA, 25 bp, Homo sapien
ccctggagcgaagaaagcctaggtt

SEQ ID NO: 2714867 - DNA, 25 bp, Homo sapien
gaaccagcaagatttccctggagcg

SEQ ID NO: 2714868 - DNA, 25 bp, Homo sapien
tacctagtgaactcttgggaacttc

SEQ ID NO: 2714869 - DNA, 25 bp, Homo sapien
tgatgtcctgttcaaggcggtgccc

SEQ ID NO: 2714870 - DNA, 25 bp, Homo sapien
cgttctgaaaaaggccgacagtcga

SEQ ID NO: 2714871 - DNA, 25 bp, Homo sapien
ttctctggcattccctaacacaagc

SEQ ID NO: 2714872 - DNA, 25 bp, Homo sapien
taacacaagcttgacccgaagtagg

SEQ ID NO: 2714873 - DNA, 25 bp, Homo sapien
gggccctttcagctcagaatctttg

SEQ ID NO: 2714874 - DNA, 25 bp, Homo sapien
aagcagtgaggcaagtggtgtatac

SEQ ID NO: 2714875 - DNA, 25 bp, Homo sapien
aaaatgtgtctgtagacccagttct

SEQ ID NO: 2714876 - DNA, 25 bp, Homo sapien
cagaatctttggtcccagataaagg

SEQ ID NO: 2714877 - DNA, 25 bp, Homo sapien
ccgtgcgccaggtaccttgctaata

SEQ ID NO: 2714878 - DNA, 25 bp, Homo sapien
gctagggctagaagctgggactctc

SEQ ID NO: 2714879 - DNA, 25 bp, Homo sapien
tggagtccatggcaaatcttgaaca

SEQ ID NO: 2714880 - DNA, 25 bp, Homo sapien
tttgctgcacactctggtaccacat

SEQ ID NO: 2714881 - DNA, 25 bp, Homo sapien
tggaaatgaagcatgtggagcgcct

SEQ ID NO: 2714882 - DNA, 25 bp, Homo sapien
gagcgaagtgaaagccccttctggt

SEQ ID NO: 2714883 - DNA, 25 bp, Homo sapien
ggtctcccgcggagttttgctgaga

SEQ ID NO: 2714884 - DNA, 25 bp, Homo sapien
tccgagatgagcgagacgctgctct

SEQ ID NO: 2714885 - DNA, 25 bp, Homo sapien
aggcctgagagtgcgcccttccgcc

SEQ ID NO: 2714886 - DNA, 25 bp, Homo sapien
tgagagtgcgcccttccgccaggcg

SEQ ID NO: 2714887 - DNA, 25 bp, Homo sapien
aggagggtcgttcctgcgccgcccg

SEQ ID NO: 2714888 - DNA, 25 bp, Homo sapien
gaggaaggagggtcgttcctgcgcc

SEQ ID NO: 2714889 - DNA, 25 bp, Homo sapien
aaagtacaatagaaaggcgagtgag

SEQ ID NO: 2714890 - DNA, 25 bp, Homo sapien
gagagaccaataaccgaaaagtaca

SEQ ID NO: 2714891 - DNA, 25 bp, Homo sapien
tagaaaggcgagtgagcagttcttt

SEQ ID NO: 2714892 - DNA, 25 bp, Homo sapien
ctaagagagaccaataaccgaaaag

SEQ ID NO: 2714893 - DNA, 25 bp, Homo sapien
tcgtttccctagtaacagatcggca

SEQ ID NO: 2714894 - DNA, 25 bp, Homo sapien
tgagactgtgaggatctcgtttccc

SEQ ID NO: 2714895 - DNA, 25 bp, Homo sapien
gctttgactcctgcctatgagactg

SEQ ID NO: 2714896 - DNA, 25 bp, Homo sapien
tcagggctcttcgaacagtaattgg

SEQ ID NO: 2714897 - DNA, 25 bp, Homo sapien
aactgcgtccgcacacacgcgtgct

SEQ ID NO: 2714898 - DNA, 25 bp, Homo sapien
gaggatagtacaaacccctcacgca

SEQ ID NO: 2714899 - DNA, 25 bp, Homo sapien
cgccggtctatataactgccactca

SEQ ID NO: 2714900 - DNA, 25 bp, Homo sapien
gctctgcaccacagcaccgaggata

SEQ ID NO: 2714901 - DNA, 25 bp, Homo sapien
gctgcggctcggcttagtcctctgg

SEQ ID NO: 2714902 - DNA, 25 bp, Homo sapien
gcggctcggcttagtcctctggcct

SEQ ID NO: 2714903 - DNA, 25 bp, Homo sapien
ctgcggctcggcttagtcctctggc

SEQ ID NO: 2714904 - DNA, 25 bp, Homo sapien
ggctcggcttagtcctctggcctcc

SEQ ID NO: 2714905 - DNA, 25 bp, Homo sapien
ggaccgcaagactccaatcagactt

SEQ ID NO: 2714906 - DNA, 25 bp, Homo sapien
tggtccgaaccgactggatcccttg

SEQ ID NO: 2714907 - DNA, 25 bp, Homo sapien
acagtgccggacacacagtgagggc

SEQ ID NO: 2714908 - DNA, 25 bp, Homo sapien
gctctctgcaaaaccgaaggcgctt

SEQ ID NO: 2714909 - DNA, 25 bp, Homo sapien
gtcagagggcccggcgtcaacaaat

SEQ ID NO: 2714910 - DNA, 25 bp, Homo sapien
ctctccaaacccgtgccttgggccg

SEQ ID NO: 2714911 - DNA, 25 bp, Homo sapien
cgcccttcccgtgcgtgcctgtgac

SEQ ID NO: 2714912 - DNA, 25 bp, Homo sapien
taaggaaggaggatagccgtaccca

SEQ ID NO: 2714913 - DNA, 25 bp, Homo sapien
gatgctgccccgagggacaagtgct

SEQ ID NO: 2714914 - DNA, 25 bp, Homo sapien
cctggaagcccagaactagcccaag

SEQ ID NO: 2714915 - DNA, 25 bp, Homo sapien
acaaatgccgctgcagccttctcgg

SEQ ID NO: 2714916 - DNA, 25 bp, Homo sapien
tacaagtacacgtagaaaggaagcc

SEQ ID NO: 2714917 - DNA, 25 bp, Homo sapien
tagtatactgtaactgggcgccaac

SEQ ID NO: 2714918 - DNA, 25 bp, Homo sapien
gaaaaatataagctccagtccctga

SEQ ID NO: 2714919 - DNA, 25 bp, Homo sapien
aagtgataaccatttgcctgaggcc

SEQ ID NO: 2714920 - DNA, 25 bp, Homo sapien
tctgtaagggcaagtaaccggaatc

SEQ ID NO: 2714921 - DNA, 25 bp, Homo sapien
ctggggggaaaagagtcaaatatgt

SEQ ID NO: 2714922 - DNA, 25 bp, Homo sapien
gggggaaaagagtcaaatatgtcca

SEQ ID NO: 2714923 - DNA, 25 bp, Homo sapien
gggaaaagagtcaaatatgtccaaa

SEQ ID NO: 2714924 - DNA, 25 bp, Homo sapien
ggaaaagagtcaaatatgtccaaac

SEQ ID NO: 2714925 - DNA, 25 bp, Homo sapien
ggcctggttcagcagtgtgtaatac

SEQ ID NO: 2714926 - DNA, 25 bp, Homo sapien
cagcaggggactaggcttctccatc

SEQ ID NO: 2714927 - DNA, 25 bp, Homo sapien
tgtgtaatactgtctcacaaattcc

SEQ ID NO: 2714928 - DNA, 25 bp, Homo sapien
taatactgtctcacaaattcccgcc

SEQ ID NO: 2714929 - DNA, 25 bp, Homo sapien
taacccctctgagtgtatctgcaaa

SEQ ID NO: 2714930 - DNA, 25 bp, Homo sapien
tatctgcaaaatgaagttaactctc

SEQ ID NO: 2714931 - DNA, 25 bp, Homo sapien
cgtggtggattgcacctcagtccca

SEQ ID NO: 2714932 - DNA, 25 bp, Homo sapien
catatgtacctgcaaatttttaacc

SEQ ID NO: 2714933 - DNA, 25 bp, Homo sapien
ccatgcctggcctatgcttttttct

SEQ ID NO: 2714934 - DNA, 25 bp, Homo sapien
accatgcctggcctatgcttttttc

SEQ ID NO: 2714935 - DNA, 25 bp, Homo sapien
tagtttcatgtcaagatggccacca

SEQ ID NO: 2714936 - DNA, 25 bp, Homo sapien
gaaaatgtgcggtaaggctggaaca

SEQ ID NO: 2714937 - DNA, 25 bp, Homo sapien
taaacacctagttcatgcaagtggt

SEQ ID NO: 2714938 - DNA, 25 bp, Homo sapien
tgagaataagcgtgagcggttcccc

SEQ ID NO: 2714939 - DNA, 25 bp, Homo sapien
tgtgccggggctatgatctttgatg

SEQ ID NO: 2714940 - DNA, 25 bp, Homo sapien
cagcttcgatgtgccggggctatga

SEQ ID NO: 2714941 - DNA, 25 bp, Homo sapien
tcattgcagcttcgatgtgccgggg

SEQ ID NO: 2714942 - DNA, 25 bp, Homo sapien
gctatgatctttgatgtgcacattt

SEQ ID NO: 2714943 - DNA, 25 bp, Homo sapien
caatcccccatggacataagaagag

SEQ ID NO: 2714944 - DNA, 25 bp, Homo sapien
cagttggtgaagttttgtgacatca

SEQ ID NO: 2714945 - DNA, 25 bp, Homo sapien
catcaacatggcgaatcttggtgtg

SEQ ID NO: 2714946 - DNA, 25 bp, Homo sapien
ccacaccatcatttagcgtggcatg

SEQ ID NO: 2714947 - DNA, 25 bp, Homo sapien
catttagcgtggcatgagcatcaac

SEQ ID NO: 2714948 - DNA, 25 bp, Homo sapien
gagcaaggacaaacgtttgcatgaa

SEQ ID NO: 2714949 - DNA, 25 bp, Homo sapien
ctcaggagcaaggacaaacgtttgc

SEQ ID NO: 2714950 - DNA, 25 bp, Homo sapien
caaggacaaacgtttgcatgaatct

SEQ ID NO: 2714951 - DNA, 25 bp, Homo sapien
gacaaacgtttgcatgaatctcctc

SEQ ID NO: 2714952 - DNA, 25 bp, Homo sapien
cacatgtgggcaagtggtgacagct

SEQ ID NO: 2714953 - DNA, 25 bp, Homo sapien
tttttaaagatatgcacaacagttc

SEQ ID NO: 2714954 - DNA, 25 bp, Homo sapien
gctgctctaggtaaggagtatatag

SEQ ID NO: 2714955 - DNA, 25 bp, Homo sapien
tattcttaggaaatgcccactaaac

SEQ ID NO: 2714956 - DNA, 25 bp, Homo sapien
gaaaatgcccactctacaatagccg

SEQ ID NO: 2714957 - DNA, 25 bp, Homo sapien
tattgcccggattggtctttaattc

SEQ ID NO: 2714958 - DNA, 25 bp, Homo sapien
tagccggtaaaaagactacactcac

SEQ ID NO: 2714959 - DNA, 25 bp, Homo sapien
gaatgctactgacaacttataaggt

SEQ ID NO: 2714960 - DNA, 25 bp, Homo sapien
ggctcagtgacaaacccaccaaaga

SEQ ID NO: 2714961 - DNA, 25 bp, Homo sapien
tgaggctcagtgacaaacccaccaa

SEQ ID NO: 2714962 - DNA, 25 bp, Homo sapien
aagttccagaatcatcaggtaccac

SEQ ID NO: 2714963 - DNA, 25 bp, Homo sapien
gttccagaatcatcaggtaccacct

SEQ ID NO: 2714964 - DNA, 25 bp, Homo sapien
agaaagttccagaatcatcaggtac

SEQ ID NO: 2714965 - DNA, 25 bp, Homo sapien
gaaagttccagaatcatcaggtacc

SEQ ID NO: 2714966 - DNA, 25 bp, Homo sapien
tatgtaaatgccctccaacaaaggg

SEQ ID NO: 2714967 - DNA, 25 bp, Homo sapien
tatgcccgatctctaattaaatagg

SEQ ID NO: 2714968 - DNA, 25 bp, Homo sapien
aagggaaagactagacaatgcaagt

SEQ ID NO: 2714969 - DNA, 25 bp, Homo sapien
tatgcagccccggacatgtgaacaa

SEQ ID NO: 2714970 - DNA, 25 bp, Homo sapien
acaggaaaatttgagaaatatcatt

SEQ ID NO: 2714971 - DNA, 25 bp, Homo sapien
tgacaggaaaatttgagaaatatca

SEQ ID NO: 2714972 - DNA, 25 bp, Homo sapien
ctttgacaggaaaatttgagaaata

SEQ ID NO: 2714973 - DNA, 25 bp, Homo sapien
ttgacaggaaaatttgagaaatatc

SEQ ID NO: 2714974 - DNA, 25 bp, Homo sapien
tgttctggttctggttcaggatcag

SEQ ID NO: 2714975 - DNA, 25 bp, Homo sapien
gatcaggctctggttcagcaacagg

SEQ ID NO: 2714976 - DNA, 25 bp, Homo sapien
tcctctaaatgttcttccatgtcat

SEQ ID NO: 2714977 - DNA, 25 bp, Homo sapien
tcaggcttttcctcttggatttcag

SEQ ID NO: 2714978 - DNA, 25 bp, Homo sapien
tcctgtactgtctgagctatgtctg

SEQ ID NO: 2714979 - DNA, 25 bp, Homo sapien
tgtactgtctgagctatgtctgcag

SEQ ID NO: 2714980 - DNA, 25 bp, Homo sapien
cctgtactgtctgagctatgtctgc

SEQ ID NO: 2714981 - DNA, 25 bp, Homo sapien
cttcctgtactgtctgagctatgtc

SEQ ID NO: 2714982 - DNA, 25 bp, Homo sapien
cacatttaaaaatcgccagaacctg

SEQ ID NO: 2714983 - DNA, 25 bp, Homo sapien
gattaaatgcgtaagccacaacgcc

SEQ ID NO: 2714984 - DNA, 25 bp, Homo sapien
tccttgggactgatgatcaagtacc

SEQ ID NO: 2714985 - DNA, 25 bp, Homo sapien
gcaaatccgagaggcttaggttcaa

SEQ ID NO: 2714986 - DNA, 25 bp, Homo sapien
acaacatgaggtggtatcccagtaa

SEQ ID NO: 2714987 - DNA, 25 bp, Homo sapien
ctttaacaacatgaggtggtatccc

SEQ ID NO: 2714988 - DNA, 25 bp, Homo sapien
acagctccactgggtggaagattct

SEQ ID NO: 2714989 - DNA, 25 bp, Homo sapien
gctggtactttaacaacatgaggtg

SEQ ID NO: 2714990 - DNA, 25 bp, Homo sapien
tcttaatgaagtttcttagctaaca

SEQ ID NO: 2714991 - DNA, 25 bp, Homo sapien
ggacaattccctcacaagaaaaatc

SEQ ID NO: 2714992 - DNA, 25 bp, Homo sapien
ttttcttaatgaagtttcttagcta

SEQ ID NO: 2714993 - DNA, 25 bp, Homo sapien
taatgaagtttcttagctaacaagt

SEQ ID NO: 2714994 - DNA, 25 bp, Homo sapien
ctgaggtctttgtggtggaatctga

SEQ ID NO: 2714995 - DNA, 25 bp, Homo sapien
gaatatttattcgttgttctcgcac

SEQ ID NO: 2714996 - DNA, 25 bp, Homo sapien
gttgttctcgcactctttgatcccg

SEQ ID NO: 2714997 - DNA, 25 bp, Homo sapien
tttgatcccgctgaggtctttgtgg

SEQ ID NO: 2714998 - DNA, 25 bp, Homo sapien
caatgactgctcacattcaatagtt

SEQ ID NO: 2714999 - DNA, 25 bp, Homo sapien
aacaggtaattccatcaaccctaca

SEQ ID NO: 2715000 - DNA, 25 bp, Homo sapien
caaacgagaaatcgcccttctgagc

SEQ ID NO: 2715001 - DNA, 25 bp, Homo sapien
gtatataaatatcaactgccctccc

SEQ ID NO: 2715002 - DNA, 25 bp, Homo sapien
ggttcaatgtcaccttgctcaccag

SEQ ID NO: 2715003 - DNA, 25 bp, Homo sapien
tctcaccattcttcggggttcaatg

SEQ ID NO: 2715004 - DNA, 25 bp, Homo sapien
gtgactgtcagggtgtctcaccatt

SEQ ID NO: 2715005 - DNA, 25 bp, Homo sapien
tcttcggggttcaatgtcaccttgc

SEQ ID NO: 2715006 - DNA, 25 bp, Homo sapien
cagtgctagagagacactagatgaa

SEQ ID NO: 2715007 - DNA, 25 bp, Homo sapien
ttagtgttcaaaactcaataaccta

SEQ ID NO: 2715008 - DNA, 25 bp, Homo sapien
tagagagacactagatgaatttagt

SEQ ID NO: 2715009 - DNA, 25 bp, Homo sapien
ctactggacagtgctagagagacac

SEQ ID NO: 2715010 - DNA, 25 bp, Homo sapien
tgttaatgcgcaactccaccacgtt

SEQ ID NO: 2715011 - DNA, 25 bp, Homo sapien
ttaatgcgcaactccaccacgtttc

SEQ ID NO: 2715012 - DNA, 25 bp, Homo sapien
actgttaatgcgcaactccaccacg

SEQ ID NO: 2715013 - DNA, 25 bp, Homo sapien
ttcccaccactgttaatgcgcaact

SEQ ID NO: 2715014 - DNA, 25 bp, Homo sapien
ggtagttacgtaaatctcagtgcac

SEQ ID NO: 2715015 - DNA, 25 bp, Homo sapien
agcagtataccaaaactgtcctggg

SEQ ID NO: 2715016 - DNA, 25 bp, Homo sapien
tgggagacaggtacaaggaatgact

SEQ ID NO: 2715017 - DNA, 25 bp, Homo sapien
taaggatggttccaagtaggttgac

SEQ ID NO: 2715018 - DNA, 25 bp, Homo sapien
aatcaaggtgaccagacttaagagt

SEQ ID NO: 2715019 - DNA, 25 bp, Homo sapien
ggctatcactatcaaagataaagaa

SEQ ID NO: 2715020 - DNA, 25 bp, Homo sapien
gacttaagagtactgatgagctggc

SEQ ID NO: 2715021 - DNA, 25 bp, Homo sapien
gatgagctggctatcactatcaaag

SEQ ID NO: 2715022 - DNA, 25 bp, Homo sapien
ttatctcgtcggtcgccttccctgg

SEQ ID NO: 2715023 - DNA, 25 bp, Homo sapien
gcgattatctcgtcggtcgccttcc

SEQ ID NO: 2715024 - DNA, 25 bp, Homo sapien
gtccccgaaggcgattatctcgtcg

SEQ ID NO: 2715025 - DNA, 25 bp, Homo sapien
gaaggcgattatctcgtcggtcgcc

SEQ ID NO: 2715026 - DNA, 25 bp, Homo sapien
actgccgtggcgcaagcccccttcc

SEQ ID NO: 2715027 - DNA, 25 bp, Homo sapien
ctgcaccatgcctccacggggaggg

SEQ ID NO: 2715028 - DNA, 25 bp, Homo sapien
ggagggcctctcattccaccaccca

SEQ ID NO: 2715029 - DNA, 25 bp, Homo sapien
ggggagggcctctcattccaccacc

SEQ ID NO: 2715030 - DNA, 25 bp, Homo sapien
taccaaaggctgtcgaaaattcacc

SEQ ID NO: 2715031 - DNA, 25 bp, Homo sapien
gggtcatactccaagataccaaagg

SEQ ID NO: 2715032 - DNA, 25 bp, Homo sapien
gaaccagggtttgtatggctgcatg

SEQ ID NO: 2715033 - DNA, 25 bp, Homo sapien
gagggagcacacaccattaacacac

SEQ ID NO: 2715034 - DNA, 25 bp, Homo sapien
tgcatgcccatcaataaaagagaac

SEQ ID NO: 2715035 - DNA, 25 bp, Homo sapien
aaatgcggacacgagcacatgagca

SEQ ID NO: 2715036 - DNA, 25 bp, Homo sapien
ggccatttccaagtaacacccactg

SEQ ID NO: 2715037 - DNA, 25 bp, Homo sapien
taacattccttcttacgggctatga

SEQ ID NO: 2715038 - DNA, 25 bp, Homo sapien
tacgctgaattttacaacctggttg

SEQ ID NO: 2715039 - DNA, 25 bp, Homo sapien
tgatctgggccaaaagtggttacca

SEQ ID NO: 2715040 - DNA, 25 bp, Homo sapien
ttaaccatcacagcaaacctagagt

SEQ ID NO: 2715041 - DNA, 25 bp, Homo sapien
tatgctatcctcaaacgacagtcct

SEQ ID NO: 2715042 - DNA, 25 bp, Homo sapien
gctagtagtaaacccatccctgagg

SEQ ID NO: 2715043 - DNA, 25 bp, Homo sapien
taaagggccaaatcagtgtacatcc

SEQ ID NO: 2715044 - DNA, 25 bp, Homo sapien
caaactgtctgggatatactaggca

SEQ ID NO: 2715045 - DNA, 25 bp, Homo sapien
caatgcctggcttatcgggaggacc

SEQ ID NO: 2715046 - DNA, 25 bp, Homo sapien
agtatttattgataggtgctaggca

SEQ ID NO: 2715047 - DNA, 25 bp, Homo sapien
tgataggtgctaggcaagatacaaa

SEQ ID NO: 2715048 - DNA, 25 bp, Homo sapien
tatttattgataggtgctaggcaag

SEQ ID NO: 2715049 - DNA, 25 bp, Homo sapien
tattgataggtgctaggcaagatac

SEQ ID NO: 2715050 - DNA, 25 bp, Homo sapien
ggaaaacatctcactttagacaagg

SEQ ID NO: 2715051 - DNA, 25 bp, Homo sapien
aaacctatgtatgacctggaaaaca

SEQ ID NO: 2715052 - DNA, 25 bp, Homo sapien
caaggctttatgtcgagaaatgaga

SEQ ID NO: 2715053 - DNA, 25 bp, Homo sapien
ttaaccaactttatatgcaagaact

SEQ ID NO: 2715054 - DNA, 25 bp, Homo sapien
gtcacaaaagttatggcagttattt

SEQ ID NO: 2715055 - DNA, 25 bp, Homo sapien
gttaagcaatcgcttccttaatgta

SEQ ID NO: 2715056 - DNA, 25 bp, Homo sapien
acttcttactggacactcaaccttg

SEQ ID NO: 2715057 - DNA, 25 bp, Homo sapien
aaaaatctatttctgcagtttgaag

SEQ ID NO: 2715058 - DNA, 25 bp, Homo sapien
cattgactaacttaagatgggctag

SEQ ID NO: 2715059 - DNA, 25 bp, Homo sapien
gtttaggcagaagagcaaatcccag

SEQ ID NO: 2715060 - DNA, 25 bp, Homo sapien
gatacgaacttccaatagctagggc

SEQ ID NO: 2715061 - DNA, 25 bp, Homo sapien
gcccgcttagatacttgcacaaaag

SEQ ID NO: 2715062 - DNA, 25 bp, Homo sapien
gaaaacgtgcaaccattccagacca

SEQ ID NO: 2715063 - DNA, 25 bp, Homo sapien
tgtctaaattcataccattgactaa

SEQ ID NO: 2715064 - DNA, 25 bp, Homo sapien
ctacagcagaaaacgtgcaaccatt

SEQ ID NO: 2715065 - DNA, 25 bp, Homo sapien
ccagaccactggagggtttgtctaa

SEQ ID NO: 2715066 - DNA, 25 bp, Homo sapien
tactgattccaagcataatgggtct

SEQ ID NO: 2715067 - DNA, 25 bp, Homo sapien
caagcataatgggtctcccattccc

SEQ ID NO: 2715068 - DNA, 25 bp, Homo sapien
aagcataatgggtctcccattccca

SEQ ID NO: 2715069 - DNA, 25 bp, Homo sapien
gattccaagcataatgggtctccca

SEQ ID NO: 2715070 - DNA, 25 bp, Homo sapien
cagatgccaagtagtatggtagcca

SEQ ID NO: 2715071 - DNA, 25 bp, Homo sapien
gcatagaggattggtgatttcaccc

SEQ ID NO: 2715072 - DNA, 25 bp, Homo sapien
taggaggtaccaattaagcagaccg

SEQ ID NO: 2715073 - DNA, 25 bp, Homo sapien
gactctagggaatgaacaagaccag

SEQ ID NO: 2715074 - DNA, 25 bp, Homo sapien
catgtacacctgcttaatacctttg

SEQ ID NO: 2715075 - DNA, 25 bp, Homo sapien
ctgggtcttgcagcgccatccttct

SEQ ID NO: 2715076 - DNA, 25 bp, Homo sapien
tacctttgtttaagtgggaatgtgc

SEQ ID NO: 2715077 - DNA, 25 bp, Homo sapien
gagtctgggtcttgcagcgccatcc

SEQ ID NO: 2715078 - DNA, 25 bp, Homo sapien
tcactgcaggctttcggttgtactc

SEQ ID NO: 2715079 - DNA, 25 bp, Homo sapien
actgcaggctttcggttgtactcga

SEQ ID NO: 2715080 - DNA, 25 bp, Homo sapien
catgtccattatccacttacaagtg

SEQ ID NO: 2715081 - DNA, 25 bp, Homo sapien
ccacttacaagtgtgcctcaaattg

SEQ ID NO: 2715082 - DNA, 25 bp, Homo sapien
caaccaaagtggtacccatctgtcc

SEQ ID NO: 2715083 - DNA, 25 bp, Homo sapien
aggccaaccaaagtggtacccatct

SEQ ID NO: 2715084 - DNA, 25 bp, Homo sapien
ccattggaaggccaaccaaagtggt

SEQ ID NO: 2715085 - DNA, 25 bp, Homo sapien
cattggaaggccaaccaaagtggta

SEQ ID NO: 2715086 - DNA, 25 bp, Homo sapien
gcctgaacacttcctgttcccagga

SEQ ID NO: 2715087 - DNA, 25 bp, Homo sapien
gattctttcacagggtccggtttga

SEQ ID NO: 2715088 - DNA, 25 bp, Homo sapien
tgcaaaatgaaacagcccacccaga

SEQ ID NO: 2715089 - DNA, 25 bp, Homo sapien
tcagcattagtacccaccatcttgg

SEQ ID NO: 2715090 - DNA, 25 bp, Homo sapien
taggtgttgggctttgtccaggcct

SEQ ID NO: 2715091 - DNA, 25 bp, Homo sapien
ggtgttgggctttgtccaggcctcc

SEQ ID NO: 2715092 - DNA, 25 bp, Homo sapien
ctaggtgttgggctttgtccaggcc

SEQ ID NO: 2715093 - DNA, 25 bp, Homo sapien
aggtgttgggctttgtccaggcctc

SEQ ID NO: 2715094 - DNA, 25 bp, Homo sapien
gaaaagggttcgcagtggcagaggg

SEQ ID NO: 2715095 - DNA, 25 bp, Homo sapien
tcaccgaaaagggttcgcagtggca

SEQ ID NO: 2715096 - DNA, 25 bp, Homo sapien
ccgaaaagggttcgcagtggcagag

SEQ ID NO: 2715097 - DNA, 25 bp, Homo sapien
caccgaaaagggttcgcagtggcag

SEQ ID NO: 2715098 - DNA, 25 bp, Homo sapien
tgttcttcaacactcaagcctctga

SEQ ID NO: 2715099 - DNA, 25 bp, Homo sapien
ccatgcttaagccaagcattctttc

SEQ ID NO: 2715100 - DNA, 25 bp, Homo sapien
cactgtaactcatctgagggccact

SEQ ID NO: 2715101 - DNA, 25 bp, Homo sapien
gagggccacttgatgcccccatgct

SEQ ID NO: 2715102 - DNA, 25 bp, Homo sapien
tgagctagatatggcagcgcagccc

SEQ ID NO: 2715103 - DNA, 25 bp, Homo sapien
agccctggctccgtagctgttgcag

SEQ ID NO: 2715104 - DNA, 25 bp, Homo sapien
tctgagccattgcagataaggttgc

SEQ ID NO: 2715105 - DNA, 25 bp, Homo sapien
acagggcatgtccaaactctgggcc

SEQ ID NO: 2715106 - DNA, 25 bp, Homo sapien
ctccagaggaatgcggcaaggctgc

SEQ ID NO: 2715107 - DNA, 25 bp, Homo sapien
gttctgcaacattcgccagctccag

SEQ ID NO: 2715108 - DNA, 25 bp, Homo sapien
caacattcgccagctccagaggaat

SEQ ID NO: 2715109 - DNA, 25 bp, Homo sapien
ttcgccagctccagaggaatgcggc

SEQ ID NO: 2715110 - DNA, 25 bp, Homo sapien
tctgaagtcctggtgcaccaaaagc

SEQ ID NO: 2715111 - DNA, 25 bp, Homo sapien
tccagagggttcttcagggagctat

SEQ ID NO: 2715112 - DNA, 25 bp, Homo sapien
ttcttcagggagctatccctatccc

SEQ ID NO: 2715113 - DNA, 25 bp, Homo sapien
caaactggtggcctggtctctgaag

SEQ ID NO: 2715114 - DNA, 25 bp, Homo sapien
cttgaaggagagctgtactccacct

SEQ ID NO: 2715115 - DNA, 25 bp, Homo sapien
tccaccttgaatcttacctgctgca

SEQ ID NO: 2715116 - DNA, 25 bp, Homo sapien
ccaccttgaatcttacctgctgcat

SEQ ID NO: 2715117 - DNA, 25 bp, Homo sapien
gagagctgtactccaccttgaatct

SEQ ID NO: 2715118 - DNA, 25 bp, Homo sapien
ctggcttgtgcgtggaggtctgaga

SEQ ID NO: 2715119 - DNA, 25 bp, Homo sapien
tgtgcgtggaggtctgagacagtcg

SEQ ID NO: 2715120 - DNA, 25 bp, Homo sapien
cccgcagggtgtctggcttgtgcgt

SEQ ID NO: 2715121 - DNA, 25 bp, Homo sapien
cagggtgtctggcttgtgcgtggag

SEQ ID NO: 2715122 - DNA, 25 bp, Homo sapien
tactcttcgcgctcctgaaaagcag

SEQ ID NO: 2715123 - DNA, 25 bp, Homo sapien
aaagcaggtctggacgctctccgtg

SEQ ID NO: 2715124 - DNA, 25 bp, Homo sapien
agccgccgctgtccgtggtatctac

SEQ ID NO: 2715125 - DNA, 25 bp, Homo sapien
gtggtgctgaaacgcctcgcagccg

SEQ ID NO: 2715126 - DNA, 25 bp, Homo sapien
aagcatcagcaactattccatctgg

SEQ ID NO: 2715127 - DNA, 25 bp, Homo sapien
gagaaggcccactgagagattaaga

SEQ ID NO: 2715128 - DNA, 25 bp, Homo sapien
ttaggacatgtctgagaggttttcc

SEQ ID NO: 2715129 - DNA, 25 bp, Homo sapien
ttttcctgcagttagagcttcacta

SEQ ID NO: 2715130 - DNA, 25 bp, Homo sapien
ccatgaaggcagaagtactggcccc

SEQ ID NO: 2715131 - DNA, 25 bp, Homo sapien
tgttcccacagtgttcaataactcg

SEQ ID NO: 2715132 - DNA, 25 bp, Homo sapien
ctcacaactggtcggtggaatcaca

SEQ ID NO: 2715133 - DNA, 25 bp, Homo sapien
gaatcacagtgtaaggcaacatggc

SEQ ID NO: 2715134 - DNA, 25 bp, Homo sapien
gagggcctgctcaatgcttcaaaga

SEQ ID NO: 2715135 - DNA, 25 bp, Homo sapien
gggcctgctcaatgcttcaaagaca

SEQ ID NO: 2715136 - DNA, 25 bp, Homo sapien
gcctgctcaatgcttcaaagacagt

SEQ ID NO: 2715137 - DNA, 25 bp, Homo sapien
ggtgagggcctgctcaatgcttcaa

SEQ ID NO: 2715138 - DNA, 25 bp, Homo sapien
tggcaaccagctgtgctcatgtgtg

SEQ ID NO: 2715139 - DNA, 25 bp, Homo sapien
tgtgctcatgtgtggcagctgtagg

SEQ ID NO: 2715140 - DNA, 25 bp, Homo sapien
agttggcaaccagctgtgctcatgt

SEQ ID NO: 2715141 - DNA, 25 bp, Homo sapien
gctcatgtgtggcagctgtaggagc

SEQ ID NO: 2715142 - DNA, 25 bp, Homo sapien
ctgtgcaggaacgcgtgcagcaggc

SEQ ID NO: 2715143 - DNA, 25 bp, Homo sapien
acagtgtctgtgcaggaacgcgtgc

SEQ ID NO: 2715144 - DNA, 25 bp, Homo sapien
agtgtctgtgcaggaacgcgtgcag

SEQ ID NO: 2715145 - DNA, 25 bp, Homo sapien
tgtctgtgcaggaacgcgtgcagca

SEQ ID NO: 2715146 - DNA, 25 bp, Homo sapien
agtggatgcgttcctctcggagatt

SEQ ID NO: 2715147 - DNA, 25 bp, Homo sapien
tgctctccgctctaccaggccagga

SEQ ID NO: 2715148 - DNA, 25 bp, Homo sapien
gccaggaagtggatgcgttcctctc

SEQ ID NO: 2715149 - DNA, 25 bp, Homo sapien
tctgctctccgctctaccaggccag

SEQ ID NO: 2715150 - DNA, 25 bp, Homo sapien
cagccttaggggaagttcttggact

SEQ ID NO: 2715151 - DNA, 25 bp, Homo sapien
cttaggggaagttcttggactcctg

SEQ ID NO: 2715152 - DNA, 25 bp, Homo sapien
cgactagcagccttaggggaagttc

SEQ ID NO: 2715153 - DNA, 25 bp, Homo sapien
ctagcagccttaggggaagttcttg

SEQ ID NO: 2715154 - DNA, 25 bp, Homo sapien
ttcttgtttcttgccgaggatctca

SEQ ID NO: 2715155 - DNA, 25 bp, Homo sapien
tctgccttgttaatctatgttcttg

SEQ ID NO: 2715156 - DNA, 25 bp, Homo sapien
tcttgccgaggatctcagagctcag

SEQ ID NO: 2715157 - DNA, 25 bp, Homo sapien
tctatgttcttgtttcttgccgagg

SEQ ID NO: 2715158 - DNA, 25 bp, Homo sapien
attaaaattgctgtgggatcctggg

SEQ ID NO: 2715159 - DNA, 25 bp, Homo sapien
gaaagtggacacaataatccctgcc

SEQ ID NO: 2715160 - DNA, 25 bp, Homo sapien
gacaacatgtgtcgggttctctcaa

SEQ ID NO: 2715161 - DNA, 25 bp, Homo sapien
tgagtgaacagacggcagctaccgc

SEQ ID NO: 2715162 - DNA, 25 bp, Homo sapien
gtgccatttgttgagtccattggaa

SEQ ID NO: 2715163 - DNA, 25 bp, Homo sapien
ccaggtgccatctataacccttttc

SEQ ID NO: 2715164 - DNA, 25 bp, Homo sapien
ttccaggtgccatctataacccttt

SEQ ID NO: 2715165 - DNA, 25 bp, Homo sapien
ggtgtgccatttgttgagtccattg

SEQ ID NO: 2715166 - DNA, 25 bp, Homo sapien
tctccagggaccctaattattacca

SEQ ID NO: 2715167 - DNA, 25 bp, Homo sapien
ctccagggaccctaattattaccat

SEQ ID NO: 2715168 - DNA, 25 bp, Homo sapien
catttcacgggagttcacagtctgg

SEQ ID NO: 2715169 - DNA, 25 bp, Homo sapien
tttcacgggagttcacagtctgggc

SEQ ID NO: 2715170 - DNA, 25 bp, Homo sapien
ctggttgtgattacttccctcttgc

SEQ ID NO: 2715171 - DNA, 25 bp, Homo sapien
ggttgtgattacttccctcttgctt

SEQ ID NO: 2715172 - DNA, 25 bp, Homo sapien
gttgtgattacttccctcttgcttc

SEQ ID NO: 2715173 - DNA, 25 bp, Homo sapien
tggttgtgattacttccctcttgct

SEQ ID NO: 2715174 - DNA, 25 bp, Homo sapien
agttttctcctagttggactgatgt

SEQ ID NO: 2715175 - DNA, 25 bp, Homo sapien
gttttctcctagttggactgatgtt

SEQ ID NO: 2715176 - DNA, 25 bp, Homo sapien
ttctgccctggatatacccagctaa

SEQ ID NO: 2715177 - DNA, 25 bp, Homo sapien
aaagtccatagcaatctctggctca

SEQ ID NO: 2715178 - DNA, 25 bp, Homo sapien
ctggctcacccagaaccatgtaggt

SEQ ID NO: 2715179 - DNA, 25 bp, Homo sapien
ggctcacccagaaccatgtaggtca

SEQ ID NO: 2715180 - DNA, 25 bp, Homo sapien
tggagatgggctccgtgctataaac

SEQ ID NO: 2715181 - DNA, 25 bp, Homo sapien
gcagtctggtcgagcccagctctgt

SEQ ID NO: 2715182 - DNA, 25 bp, Homo sapien
gacaagtccaggagatttaatttgg

SEQ ID NO: 2715183 - DNA, 25 bp, Homo sapien
cacactaggactgccagctacagta

SEQ ID NO: 2715184 - DNA, 25 bp, Homo sapien
cagactgtacatgtccccgttctga

SEQ ID NO: 2715185 - DNA, 25 bp, Homo sapien
gactgtacatgtccccgttctgacc

SEQ ID NO: 2715186 - DNA, 25 bp, Homo sapien
ttgaagccgtagtaatatggaaagc

SEQ ID NO: 2715187 - DNA, 25 bp, Homo sapien
cccaggtttgaagccgtagtaatat

SEQ ID NO: 2715188 - DNA, 25 bp, Homo sapien
tcttcccggaacgtttctcatcaaa

SEQ ID NO: 2715189 - DNA, 25 bp, Homo sapien
gaatattatgaatactccaaacagg

SEQ ID NO: 2715190 - DNA, 25 bp, Homo sapien
aacaggaccagtgcttgaggtggca

SEQ ID NO: 2715191 - DNA, 25 bp, Homo sapien
aagggtctcatgatggtagcagtga

SEQ ID NO: 2715192 - DNA, 25 bp, Homo sapien
tcagctcagggagaactgatgctct

SEQ ID NO: 2715193 - DNA, 25 bp, Homo sapien
agctcagggagaactgatgctctac

SEQ ID NO: 2715194 - DNA, 25 bp, Homo sapien
cagctcagggagaactgatgctcta

SEQ ID NO: 2715195 - DNA, 25 bp, Homo sapien
ggaccagtacccttctattgtggca

SEQ ID NO: 2715196 - DNA, 25 bp, Homo sapien
tctgacttctaccagataggaccag

SEQ ID NO: 2715197 - DNA, 25 bp, Homo sapien
cttctattgtggcaatgacctgtga

SEQ ID NO: 2715198 - DNA, 25 bp, Homo sapien
gattctgtcaccctcttggctttgc

SEQ ID NO: 2715199 - DNA, 25 bp, Homo sapien
tgggaacatcgaaggctgcaataag

SEQ ID NO: 2715200 - DNA, 25 bp, Homo sapien
gaagggaagtgtgctaacagagcag

SEQ ID NO: 2715201 - DNA, 25 bp, Homo sapien
cagagcaggtgctgaattgcagaaa

SEQ ID NO: 2715202 - DNA, 25 bp, Homo sapien
aagttaaatatggaatgggaacatc

SEQ ID NO: 2715203 - DNA, 25 bp, Homo sapien
cagcttaggctgatctaaatgcagg

SEQ ID NO: 2715204 - DNA, 25 bp, Homo sapien
cctgatcccacacagcttaggctga

SEQ ID NO: 2715205 - DNA, 25 bp, Homo sapien
aatgcaggtgcttcacgctaaaagc

SEQ ID NO: 2715206 - DNA, 25 bp, Homo sapien
cccacacagcttaggctgatctaaa

SEQ ID NO: 2715207 - DNA, 25 bp, Homo sapien
tagccaacaggacttgactcaagga

SEQ ID NO: 2715208 - DNA, 25 bp, Homo sapien
tcaaggaaccgtggcatggtggact

SEQ ID NO: 2715209 - DNA, 25 bp, Homo sapien
gacaactcagggcagtggcactact

SEQ ID NO: 2715210 - DNA, 25 bp, Homo sapien
gacttgaggtttctggctacagccc

SEQ ID NO: 2715211 - DNA, 25 bp, Homo sapien
gagaatccatgttatgccttctgat

SEQ ID NO: 2715212 - DNA, 25 bp, Homo sapien
aaatgactgagttcctctggcagta

SEQ ID NO: 2715213 - DNA, 25 bp, Homo sapien
ttgccacatcaactccaggggaaag

SEQ ID NO: 2715214 - DNA, 25 bp, Homo sapien
catgttatgccttctgatggaatag

SEQ ID NO: 2715215 - DNA, 25 bp, Homo sapien
cgtggcaaatatgcctgtctgagga

SEQ ID NO: 2715216 - DNA, 25 bp, Homo sapien
cccaggtcgtggcaaatatgcctgt

SEQ ID NO: 2715217 - DNA, 25 bp, Homo sapien
aagcaccacgggtactgacgacaaa

SEQ ID NO: 2715218 - DNA, 25 bp, Homo sapien
tactgacgacaaagcccaggtcgtg

SEQ ID NO: 2715219 - DNA, 25 bp, Homo sapien
gtgaaagacaggaccaagtgacagc

SEQ ID NO: 2715220 - DNA, 25 bp, Homo sapien
gaggacagaaaacccctcatatcaa

SEQ ID NO: 2715221 - DNA, 25 bp, Homo sapien
gaaaacccctcatatcaacctctat

SEQ ID NO: 2715222 - DNA, 25 bp, Homo sapien
gacagaaaacccctcatatcaacct

SEQ ID NO: 2715223 - DNA, 25 bp, Homo sapien
tgggaggacagaaaacccctcatat

SEQ ID NO: 2715224 - DNA, 25 bp, Homo sapien
cttctcgtctcccaatttctctgga

SEQ ID NO: 2715225 - DNA, 25 bp, Homo sapien
ctcgtctcccaatttctctggagtt

SEQ ID NO: 2715226 - DNA, 25 bp, Homo sapien
cccttctcgtctcccaatttctctg

SEQ ID NO: 2715227 - DNA, 25 bp, Homo sapien
cacccttctcgtctcccaatttctc

SEQ ID NO: 2715228 - DNA, 25 bp, Homo sapien
ttaaccacccgagcatcaaaatgcc

SEQ ID NO: 2715229 - DNA, 25 bp, Homo sapien
tgcccaataccactactttcttggg

SEQ ID NO: 2715230 - DNA, 25 bp, Homo sapien
gggcctgttcagggaccaacacttc

SEQ ID NO: 2715231 - DNA, 25 bp, Homo sapien
gtttgccacaattaaccacccgagc

SEQ ID NO: 2715232 - DNA, 25 bp, Homo sapien
atatgtggaccaggagaaaaatttc

SEQ ID NO: 2715233 - DNA, 25 bp, Homo sapien
ctgaagatgtagggttaatttcaat

SEQ ID NO: 2715234 - DNA, 25 bp, Homo sapien
atgtggaccaggagaaaaatttcct

SEQ ID NO: 2715235 - DNA, 25 bp, Homo sapien
aaatatgtggaccaggagaaaaatt

SEQ ID NO: 2715236 - DNA, 25 bp, Homo sapien
gactggcccggttaacagatgactt

SEQ ID NO: 2715237 - DNA, 25 bp, Homo sapien
caattagggatggttccctggccaa

SEQ ID NO: 2715238 - DNA, 25 bp, Homo sapien
gaacgctttctgtatgcttgggcac

SEQ ID NO: 2715239 - DNA, 25 bp, Homo sapien
tattcaacaaaagtcagatgctagg

SEQ ID NO: 2715240 - DNA, 25 bp, Homo sapien
agttgcataggccttcccatcaaca

SEQ ID NO: 2715241 - DNA, 25 bp, Homo sapien
tgcataggccttcccatcaacatta

SEQ ID NO: 2715242 - DNA, 25 bp, Homo sapien
catcagttgcataggccttcccatc

SEQ ID NO: 2715243 - DNA, 25 bp, Homo sapien
cccatcaacattactgatgttctcc

SEQ ID NO: 2715244 - DNA, 25 bp, Homo sapien
gcaaactgcttgattagattttaga

SEQ ID NO: 2715245 - DNA, 25 bp, Homo sapien
cacataatgccaagatcaggcttcc

SEQ ID NO: 2715246 - DNA, 25 bp, Homo sapien
ctgcttgattagattttagagcctg

SEQ ID NO: 2715247 - DNA, 25 bp, Homo sapien
catcttcccctctaacatacagctg

SEQ ID NO: 2715248 - DNA, 25 bp, Homo sapien
caacatgataaaatcgccttccttt

SEQ ID NO: 2715249 - DNA, 25 bp, Homo sapien
gaacaacatgataaaatcgccttcc

SEQ ID NO: 2715250 - DNA, 25 bp, Homo sapien
tagaacaacatgataaaatcgcctt

SEQ ID NO: 2715251 - DNA, 25 bp, Homo sapien
acatgataaaatcgccttcctttcc

SEQ ID NO: 2715252 - DNA, 25 bp, Homo sapien
ccgggtgctgaaatatgttatcatt

SEQ ID NO: 2715253 - DNA, 25 bp, Homo sapien
cgcctgccgggtgctgaaatatgtt

SEQ ID NO: 2715254 - DNA, 25 bp, Homo sapien
accgcctgccgggtgctgaaatatg

SEQ ID NO: 2715255 - DNA, 25 bp, Homo sapien
cctgccgggtgctgaaatatgttat

SEQ ID NO: 2715256 - DNA, 25 bp, Homo sapien
agataagagaatctgcctggctggc

SEQ ID NO: 2715257 - DNA, 25 bp, Homo sapien
cctgattttgttgagaagggtttct

SEQ ID NO: 2715258 - DNA, 25 bp, Homo sapien
gcctcctccgaaatggcccaagaga

SEQ ID NO: 2715259 - DNA, 25 bp, Homo sapien
tgtttaaaagatgacgaggctgtgc

SEQ ID NO: 2715260 - DNA, 25 bp, Homo sapien
agcttctgccccacatcatcgaaag

SEQ ID NO: 2715261 - DNA, 25 bp, Homo sapien
gagcttctgccccacatcatcgaaa

SEQ ID NO: 2715262 - DNA, 25 bp, Homo sapien
cctggagcttctgccccacatcatc

SEQ ID NO: 2715263 - DNA, 25 bp, Homo sapien
tggagcttctgccccacatcatcga

SEQ ID NO: 2715264 - DNA, 25 bp, Homo sapien
caccaaaggttctgcagtggctcct

SEQ ID NO: 2715265 - DNA, 25 bp, Homo sapien
tctagtatgatggatgagaggccca

SEQ ID NO: 2715266 - DNA, 25 bp, Homo sapien
tttctgatcacatcgcagctggctg

SEQ ID NO: 2715267 - DNA, 25 bp, Homo sapien
gaaagaaggtgactatcccagtggc

SEQ ID NO: 2715268 - DNA, 25 bp, Homo sapien
ctcatccatctaccgctcttccttc

SEQ ID NO: 2715269 - DNA, 25 bp, Homo sapien
atccatctaccgctcttccttccca

SEQ ID NO: 2715270 - DNA, 25 bp, Homo sapien
ctgcctcatccatctaccgctcttc

SEQ ID NO: 2715271 - DNA, 25 bp, Homo sapien
gcccatactctgggtctgcctcatc

SEQ ID NO: 2715272 - DNA, 25 bp, Homo sapien
gagaggagacacagccttagaaagc

SEQ ID NO: 2715273 - DNA, 25 bp, Homo sapien
agaggagacacagccttagaaagcc

SEQ ID NO: 2715274 - DNA, 25 bp, Homo sapien
cagagagaggagacacagccttaga

SEQ ID NO: 2715275 - DNA, 25 bp, Homo sapien
ggagacacagccttagaaagcccat

SEQ ID NO: 2715276 - DNA, 25 bp, Homo sapien
tgacattgacctggcaaggagacga

SEQ ID NO: 2715277 - DNA, 25 bp, Homo sapien
caatcaccagccaaagccacttagg

SEQ ID NO: 2715278 - DNA, 25 bp, Homo sapien
aaggagacgatcctgcaatcaccag

SEQ ID NO: 2715279 - DNA, 25 bp, Homo sapien
taatcggctggttttcacgcccagg

SEQ ID NO: 2715280 - DNA, 25 bp, Homo sapien
gggccaaatctcacttccattcttc

SEQ ID NO: 2715281 - DNA, 25 bp, Homo sapien
tggaaaacatgaccggggccaaatc

SEQ ID NO: 2715282 - DNA, 25 bp, Homo sapien
ttgggtctctgctcaagagatgggt

SEQ ID NO: 2715283 - DNA, 25 bp, Homo sapien
ctcttgggtctctgctcaagagatg

SEQ ID NO: 2715284 - DNA, 25 bp, Homo sapien
tcctgaaagcctattccctggaata

SEQ ID NO: 2715285 - DNA, 25 bp, Homo sapien
aaagcctattccctggaataccagg

SEQ ID NO: 2715286 - DNA, 25 bp, Homo sapien
tgaaagcctattccctggaatacca

SEQ ID NO: 2715287 - DNA, 25 bp, Homo sapien
cctgaaagcctattccctggaatac

SEQ ID NO: 2715288 - DNA, 25 bp, Homo sapien
agccccatatctgcgttaacttcta

SEQ ID NO: 2715289 - DNA, 25 bp, Homo sapien
cagccccatatctgcgttaacttct

SEQ ID NO: 2715290 - DNA, 25 bp, Homo sapien
tgcatatgacataaccttgggttct

SEQ ID NO: 2715291 - DNA, 25 bp, Homo sapien
ataaccttgggttctagttgttcag

SEQ ID NO: 2715292 - DNA, 25 bp, Homo sapien
gcttcagaatcgtacagtgcatatg

SEQ ID NO: 2715293 - DNA, 25 bp, Homo sapien
ctaaggcacggtggcttcagaatcg

SEQ ID NO: 2715294 - DNA, 25 bp, Homo sapien
cagtgccactcaaattcatccacga

SEQ ID NO: 2715295 - DNA, 25 bp, Homo sapien
ccttcataagtccagcttgatttac

SEQ ID NO: 2715296 - DNA, 25 bp, Homo sapien
aatccttcataagtccagcttgatt

SEQ ID NO: 2715297 - DNA, 25 bp, Homo sapien
aattcatccacgaatggagagagga

SEQ ID NO: 2715298 - DNA, 25 bp, Homo sapien
ctaatttcagaccaaggttgacctc

SEQ ID NO: 2715299 - DNA, 25 bp, Homo sapien
tacttctgggtagttagttgcttgt

SEQ ID NO: 2715300 - DNA, 25 bp, Homo sapien
tgctcataagcaagggcaattctta

SEQ ID NO: 2715301 - DNA, 25 bp, Homo sapien
gccagagggctaccctccagtgaaa

SEQ ID NO: 2715302 - DNA, 25 bp, Homo sapien
cagatcttcagaatacctaacaggt

SEQ ID NO: 2715303 - DNA, 25 bp, Homo sapien
ggtcctctatagcattatttgaaga

SEQ ID NO: 2715304 - DNA, 25 bp, Homo sapien
cctctatagcattatttgaagatag

SEQ ID NO: 2715305 - DNA, 25 bp, Homo sapien
caggtcctctatagcattatttgaa

SEQ ID NO: 2715306 - DNA, 25 bp, Homo sapien
cttcaggtcctctatagcattattt

SEQ ID NO: 2715307 - DNA, 25 bp, Homo sapien
cagaaatgacagaatggggttagga

SEQ ID NO: 2715308 - DNA, 25 bp, Homo sapien
gcatatttcaccagcatgcaggcag

SEQ ID NO: 2715309 - DNA, 25 bp, Homo sapien
gataagagcgacatggttattttca

SEQ ID NO: 2715310 - DNA, 25 bp, Homo sapien
ttaggatgtggataagagcgacatg

SEQ ID NO: 2715311 - DNA, 25 bp, Homo sapien
aataatgcagcagggtgatcctcct

SEQ ID NO: 2715312 - DNA, 25 bp, Homo sapien
gagcgagtaacacctctaaggcctg

SEQ ID NO: 2715313 - DNA, 25 bp, Homo sapien
caggcagtcccttatagagcgagta

SEQ ID NO: 2715314 - DNA, 25 bp, Homo sapien
ggaagcccacctagactaaataatg

SEQ ID NO: 2715315 - DNA, 25 bp, Homo sapien
ggctccatactctcacgtgtcctat

SEQ ID NO: 2715316 - DNA, 25 bp, Homo sapien
ttcaccgatggttcagcctactcag

SEQ ID NO: 2715317 - DNA, 25 bp, Homo sapien
atttttgagatgcttggcctccttt

SEQ ID NO: 2715318 - DNA, 25 bp, Homo sapien
ctgagtgtcacattggctccatact

SEQ ID NO: 2715319 - DNA, 25 bp, Homo sapien
tctactagagcaggcaaggttgtct

SEQ ID NO: 2715320 - DNA, 25 bp, Homo sapien
caacacagcaggaagtcagtagcag

SEQ ID NO: 2715321 - DNA, 25 bp, Homo sapien
agactaactgttgggagcagccagg

SEQ ID NO: 2715322 - DNA, 25 bp, Homo sapien
gacacagtagcagaagcccgagtaa

SEQ ID NO: 2715323 - DNA, 25 bp, Homo sapien
cttgcctcaaagtcatgcggttaca

SEQ ID NO: 2715324 - DNA, 25 bp, Homo sapien
tgttcttggtctggacttgcctcaa

SEQ ID NO: 2715325 - DNA, 25 bp, Homo sapien
tgcggttacattcacagctggttct

SEQ ID NO: 2715326 - DNA, 25 bp, Homo sapien
tctcattgcagaggagctatcccag

SEQ ID NO: 2715327 - DNA, 25 bp, Homo sapien
gcacgcagctggagatctgagaacg

SEQ ID NO: 2715328 - DNA, 25 bp, Homo sapien
gtaacctctgcagacttaagtgtcc

SEQ ID NO: 2715329 - DNA, 25 bp, Homo sapien
aacaaaaagacagcagtaacctctg

SEQ ID NO: 2715330 - DNA, 25 bp, Homo sapien
gggcagggcacagacaaacaaaaag

SEQ ID NO: 2715331 - DNA, 25 bp, Homo sapien
gaaggctccttagccacccaaatct

SEQ ID NO: 2715332 - DNA, 25 bp, Homo sapien
aaggctccttagccacccaaatctc

SEQ ID NO: 2715333 - DNA, 25 bp, Homo sapien
cagaaggctccttagccacccaaat

SEQ ID NO: 2715334 - DNA, 25 bp, Homo sapien
tcagaaggctccttagccacccaaa

SEQ ID NO: 2715335 - DNA, 25 bp, Homo sapien
ccagaaagccctttcatagatgggt

SEQ ID NO: 2715336 - DNA, 25 bp, Homo sapien
tcatagatgggtcctccaagcttct

SEQ ID NO: 2715337 - DNA, 25 bp, Homo sapien
gggtaaattctataggtggtgcatc

SEQ ID NO: 2715338 - DNA, 25 bp, Homo sapien
ttctataggtggtgcatcaattttt

SEQ ID NO: 2715339 - DNA, 25 bp, Homo sapien
gaaggtctgtcacacccaagggaca

SEQ ID NO: 2715340 - DNA, 25 bp, Homo sapien
cagaatctgctctgacaaggtatca

SEQ ID NO: 2715341 - DNA, 25 bp, Homo sapien
tctgctctgacaaggtatcaggttg

SEQ ID NO: 2715342 - DNA, 25 bp, Homo sapien
cactgttaggcccatctctgaaggt

SEQ ID NO: 2715343 - DNA, 25 bp, Homo sapien
tttgtctacacgagttacccaccag

SEQ ID NO: 2715344 - DNA, 25 bp, Homo sapien
agttacccaccagtcgtgccagact

SEQ ID NO: 2715345 - DNA, 25 bp, Homo sapien
taaattctcttggaaatactataga

SEQ ID NO: 2715346 - DNA, 25 bp, Homo sapien
tcttggaaatactatagaatcctgg

SEQ ID NO: 2715347 - DNA, 25 bp, Homo sapien
gaataccactctttgaggaggccct

SEQ ID NO: 2715348 - DNA, 25 bp, Homo sapien
tgggctggagctttgaccatacata

SEQ ID NO: 2715349 - DNA, 25 bp, Homo sapien
gacacgtgacaccttgtgattcaga

SEQ ID NO: 2715350 - DNA, 25 bp, Homo sapien
cataattttgcgatacaggtaaccc

SEQ ID NO: 2715351 - DNA, 25 bp, Homo sapien
ttgacgttgcttgagtctagctttc

SEQ ID NO: 2715352 - DNA, 25 bp, Homo sapien
cagtttgacgttgcttgagtctagc

SEQ ID NO: 2715353 - DNA, 25 bp, Homo sapien
cattttagcattcagtttgacgttg

SEQ ID NO: 2715354 - DNA, 25 bp, Homo sapien
tagcattcagtttgacgttgcttga

SEQ ID NO: 2715355 - DNA, 25 bp, Homo sapien
ctgtcattgcaattgatctgctgca

SEQ ID NO: 2715356 - DNA, 25 bp, Homo sapien
gcttggaaatagggagattctgatg

SEQ ID NO: 2715357 - DNA, 25 bp, Homo sapien
aacagtgaagtctgtcattgcaatt

SEQ ID NO: 2715358 - DNA, 25 bp, Homo sapien
aagcttggaaatagggagattctga

SEQ ID NO: 2715359 - DNA, 25 bp, Homo sapien
ctctccagtgcctgattctccaggg

SEQ ID NO: 2715360 - DNA, 25 bp, Homo sapien
ggatctctccagtgcctgattctcc

SEQ ID NO: 2715361 - DNA, 25 bp, Homo sapien
tcattttgggatctctccagtgcct

SEQ ID NO: 2715362 - DNA, 25 bp, Homo sapien
gatctctccagtgcctgattctcca

SEQ ID NO: 2715363 - DNA, 25 bp, Homo sapien
gcttctcagtggtaggaaatgactc

SEQ ID NO: 2715364 - DNA, 25 bp, Homo sapien
tctcacacattctccaaagcctctt

SEQ ID NO: 2715365 - DNA, 25 bp, Homo sapien
cattctcaatgacttgctggtgaac

SEQ ID NO: 2715366 - DNA, 25 bp, Homo sapien
actctgaagagaactacaagctttt

SEQ ID NO: 2715367 - DNA, 25 bp, Homo sapien
gtctactactttgatttccattctc

SEQ ID NO: 2715368 - DNA, 25 bp, Homo sapien
gaactctgaagagaactacaagctt

SEQ ID NO: 2715369 - DNA, 25 bp, Homo sapien
tggctgctccccaaagtatactcca

SEQ ID NO: 2715370 - DNA, 25 bp, Homo sapien
tctgaacagcaccccttttgactca

SEQ ID NO: 2715371 - DNA, 25 bp, Homo sapien
ggtctctccaattgcagctccctga

SEQ ID NO: 2715372 - DNA, 25 bp, Homo sapien
cactccacagcctcttaatgtaagg

SEQ ID NO: 2715373 - DNA, 25 bp, Homo sapien
tacataatgaagagtactggcatgg

SEQ ID NO: 2715374 - DNA, 25 bp, Homo sapien
cgcgtgagctgtcagaaggaaagtt

SEQ ID NO: 2715375 - DNA, 25 bp, Homo sapien
aagatgtgacatgttccgcgtgagc

SEQ ID NO: 2715376 - DNA, 25 bp, Homo sapien
gaaaactcctctttcaagatgtgac

SEQ ID NO: 2715377 - DNA, 25 bp, Homo sapien
tctctctcttcactgtcatgaagca

SEQ ID NO: 2715378 - DNA, 25 bp, Homo sapien
gccctggtgctgaggcagagcctgg

SEQ ID NO: 2715379 - DNA, 25 bp, Homo sapien
ccttgatcttgggtgttggaatctc

SEQ ID NO: 2715380 - DNA, 25 bp, Homo sapien
tcatgaagcaggccctggtgctgag

SEQ ID NO: 2715381 - DNA, 25 bp, Homo sapien
aacttcataaggactaacacttcgt

SEQ ID NO: 2715382 - DNA, 25 bp, Homo sapien
taggaccaaccctattgctgtctct

SEQ ID NO: 2715383 - DNA, 25 bp, Homo sapien
tacagagtcagccttaggaactaag

SEQ ID NO: 2715384 - DNA, 25 bp, Homo sapien
tattcaggctctaataaaataggac

SEQ ID NO: 2715385 - DNA, 25 bp, Homo sapien
aattgagtggaaaatcagagactgt

SEQ ID NO: 2715386 - DNA, 25 bp, Homo sapien
tagcaagctctttcgcattgtgaaa

SEQ ID NO: 2715387 - DNA, 25 bp, Homo sapien
tggctctaggcctttcattacagag

SEQ ID NO: 2715388 - DNA, 25 bp, Homo sapien
ttttataacagatgaggctacagac

SEQ ID NO: 2715389 - DNA, 25 bp, Homo sapien
caaatgcaatgaggtgcgactgaca

SEQ ID NO: 2715390 - DNA, 25 bp, Homo sapien
aggtgcgactgacaccagggaagat

SEQ ID NO: 2715391 - DNA, 25 bp, Homo sapien
gatgatgagcaaagagaatggcagc

SEQ ID NO: 2715392 - DNA, 25 bp, Homo sapien
gtcaggagtgttgccaaatgcaatg

SEQ ID NO: 2715393 - DNA, 25 bp, Homo sapien
tgctatactaatgctcattgttgac

SEQ ID NO: 2715394 - DNA, 25 bp, Homo sapien
aatagaccaaggcttttccttccag

SEQ ID NO: 2715395 - DNA, 25 bp, Homo sapien
tagaccaaggcttttccttccagtc

SEQ ID NO: 2715396 - DNA, 25 bp, Homo sapien
tccagtccaactgctatactaatgc

SEQ ID NO: 2715397 - DNA, 25 bp, Homo sapien
gatgaattctagttacacagctgtc

SEQ ID NO: 2715398 - DNA, 25 bp, Homo sapien
ctgaaagggaaggacgtgcctgtct

SEQ ID NO: 2715399 - DNA, 25 bp, Homo sapien
cctatttagtgacgagcctgagatc

SEQ ID NO: 2715400 - DNA, 25 bp, Homo sapien
cagagcttctgtaattggcatcaca

SEQ ID NO: 2715401 - DNA, 25 bp, Homo sapien
aaagcagccgggaagctccaactgg

SEQ ID NO: 2715402 - DNA, 25 bp, Homo sapien
agccgggaagctccaactgggtgga

SEQ ID NO: 2715403 - DNA, 25 bp, Homo sapien
agcagccgggaagctccaactgggt

SEQ ID NO: 2715404 - DNA, 25 bp, Homo sapien
caaagcagccgggaagctccaactg

SEQ ID NO: 2715405 - DNA, 25 bp, Homo sapien
tgtgtcataaccatgcaaaagtgga

SEQ ID NO: 2715406 - DNA, 25 bp, Homo sapien
gactagtactacatgtaagagttag

SEQ ID NO: 2715407 - DNA, 25 bp, Homo sapien
tagaaggctgttatgattgagaaat

SEQ ID NO: 2715408 - DNA, 25 bp, Homo sapien
gggattgttcgttactgtgtcataa

SEQ ID NO: 2715409 - DNA, 25 bp, Homo sapien
aggagagggcatccaggatcatttt

SEQ ID NO: 2715410 - DNA, 25 bp, Homo sapien
aaagctgactggaaaagtgatgatg

SEQ ID NO: 2715411 - DNA, 25 bp, Homo sapien
ggcatccaggatcattttagattca

SEQ ID NO: 2715412 - DNA, 25 bp, Homo sapien
actggaaaagtgatgatgtgagacc

SEQ ID NO: 2715413 - DNA, 25 bp, Homo sapien
ctcctcacccttgcatctacattag

SEQ ID NO: 2715414 - DNA, 25 bp, Homo sapien
acccttgcatctacattagctctga

SEQ ID NO: 2715415 - DNA, 25 bp, Homo sapien
ttccacatagtcatcattgagctcc

SEQ ID NO: 2715416 - DNA, 25 bp, Homo sapien
ttgcatctacattagctctgaatgc

SEQ ID NO: 2715417 - DNA, 25 bp, Homo sapien
gttgtgtgtctcataaatctctcca

SEQ ID NO: 2715418 - DNA, 25 bp, Homo sapien
tgatggcacaaacatcctcgtttcg

SEQ ID NO: 2715419 - DNA, 25 bp, Homo sapien
tccaggacgtctactgctgctgctt

SEQ ID NO: 2715420 - DNA, 25 bp, Homo sapien
aatctctccaggacgtctactgctg

SEQ ID NO: 2715421 - DNA, 25 bp, Homo sapien
ctgaaaatctgtcatatgttatttt

SEQ ID NO: 2715422 - DNA, 25 bp, Homo sapien
ccttcagaccactgagttatttctg

SEQ ID NO: 2715423 - DNA, 25 bp, Homo sapien
cacagccttcagaccactgagttat

SEQ ID NO: 2715424 - DNA, 25 bp, Homo sapien
atcagcacagccttcagaccactga

SEQ ID NO: 2715425 - DNA, 25 bp, Homo sapien
tgtgcccctttcagggaaagggatg

SEQ ID NO: 2715426 - DNA, 25 bp, Homo sapien
gaaagggatgtgtgtggatgatcaa

SEQ ID NO: 2715427 - DNA, 25 bp, Homo sapien
aaagggatgtgtgtggatgatcaaa

SEQ ID NO: 2715428 - DNA, 25 bp, Homo sapien
ccctttcagggaaagggatgtgtgt

SEQ ID NO: 2715429 - DNA, 25 bp, Homo sapien
gaattgtacttgctttatcctcgac

SEQ ID NO: 2715430 - DNA, 25 bp, Homo sapien
tatcctcgaccgcacatctagctga

SEQ ID NO: 2715431 - DNA, 25 bp, Homo sapien
ctttcccaagagtgtttcctatgcc

SEQ ID NO: 2715432 - DNA, 25 bp, Homo sapien
cctcaaataatgagcacgtttgtgc

SEQ ID NO: 2715433 - DNA, 25 bp, Homo sapien
attccagacctttagataatagctc

SEQ ID NO: 2715434 - DNA, 25 bp, Homo sapien
gagagagatgcaactaacagaaaaa

SEQ ID NO: 2715435 - DNA, 25 bp, Homo sapien
aaaacaatgctacacagaacttgac

SEQ ID NO: 2715436 - DNA, 25 bp, Homo sapien
cacagaacttgacccattgatgctg

SEQ ID NO: 2715437 - DNA, 25 bp, Homo sapien
tcacaaatatcaatacagagacttt

SEQ ID NO: 2715438 - DNA, 25 bp, Homo sapien
ccagattatcctgaatgactagttc

SEQ ID NO: 2715439 - DNA, 25 bp, Homo sapien
tgggaatcagacatgcctcacaaat

SEQ ID NO: 2715440 - DNA, 25 bp, Homo sapien
cagaacagactctttaggtatggtt

SEQ ID NO: 2715441 - DNA, 25 bp, Homo sapien
tttcatcaagtgcatagattgcaaa

SEQ ID NO: 2715442 - DNA, 25 bp, Homo sapien
tagtcagttctcctagccccatttg

SEQ ID NO: 2715443 - DNA, 25 bp, Homo sapien
agactttcatcaagtgcatagattg

SEQ ID NO: 2715444 - DNA, 25 bp, Homo sapien
actttcatcaagtgcatagattgca

SEQ ID NO: 2715445 - DNA, 25 bp, Homo sapien
ttgatgggacatatttcaaaataat

SEQ ID NO: 2715446 - DNA, 25 bp, Homo sapien
taggtattgatgggacatatttcaa

SEQ ID NO: 2715447 - DNA, 25 bp, Homo sapien
tgacaaaattcaacaatgcttcatg

SEQ ID NO: 2715448 - DNA, 25 bp, Homo sapien
cagcatataaacagagccaaagaca

SEQ ID NO: 2715449 - DNA, 25 bp, Homo sapien
ggcattgtactctttcatcaggagg

SEQ ID NO: 2715450 - DNA, 25 bp, Homo sapien
gatgtttacacccattgctgcttaa

SEQ ID NO: 2715451 - DNA, 25 bp, Homo sapien
tatacttacattcgacctcttcgga

SEQ ID NO: 2715452 - DNA, 25 bp, Homo sapien
gaaatacgtgtttgccagtcatcct

SEQ ID NO: 2715453 - DNA, 25 bp, Homo sapien
aactcattgatgctgggtcttatga

SEQ ID NO: 2715454 - DNA, 25 bp, Homo sapien
aaactgaagagtcagttgctgttta

SEQ ID NO: 2715455 - DNA, 25 bp, Homo sapien
gctgggtcttatgaaagacaacagg

SEQ ID NO: 2715456 - DNA, 25 bp, Homo sapien
tagccaagaattggacagtcttcat

SEQ ID NO: 2715457 - DNA, 25 bp, Homo sapien
aaggtaatgggattatctgcccaga

SEQ ID NO: 2715458 - DNA, 25 bp, Homo sapien
ggtaatgggattatctgcccagagt

SEQ ID NO: 2715459 - DNA, 25 bp, Homo sapien
aatgggattatctgcccagagtcat

SEQ ID NO: 2715460 - DNA, 25 bp, Homo sapien
agagtcatcagcatatgctttggtt

SEQ ID NO: 2715461 - DNA, 25 bp, Homo sapien
cctctttcctgtgatggcactcttg

SEQ ID NO: 2715462 - DNA, 25 bp, Homo sapien
atggcatcagcctctgtattattca

SEQ ID NO: 2715463 - DNA, 25 bp, Homo sapien
actatcccatttcagaccctttctg

SEQ ID NO: 2715464 - DNA, 25 bp, Homo sapien
aagacatggcatcagcctctgtatt

SEQ ID NO: 2715465 - DNA, 25 bp, Homo sapien
gacatggcatcagcctctgtattat

SEQ ID NO: 2715466 - DNA, 25 bp, Homo sapien
tttggattttggatctgattctcta

SEQ ID NO: 2715467 - DNA, 25 bp, Homo sapien
ttggattttggatctgattctctac

SEQ ID NO: 2715468 - DNA, 25 bp, Homo sapien
catcacaggcctcaagaaggtcaag

SEQ ID NO: 2715469 - DNA, 25 bp, Homo sapien
aagggtagcggcgagtggcatcaca

SEQ ID NO: 2715470 - DNA, 25 bp, Homo sapien
gttcagcccaatctcattaccatct

SEQ ID NO: 2715471 - DNA, 25 bp, Homo sapien
caagaaggtcaagttgtctacaggg

SEQ ID NO: 2715472 - DNA, 25 bp, Homo sapien
caaagaatgtaatgggaaaactgac

SEQ ID NO: 2715473 - DNA, 25 bp, Homo sapien
tcaaagaatgtaatgggaaaactga

SEQ ID NO: 2715474 - DNA, 25 bp, Homo sapien
ggaggggcattgaggaataagcagg

SEQ ID NO: 2715475 - DNA, 25 bp, Homo sapien
gcacttcacagtgggcagtgctagg

SEQ ID NO: 2715476 - DNA, 25 bp, Homo sapien
ggtggaggggcattgaggaataagc

SEQ ID NO: 2715477 - DNA, 25 bp, Homo sapien
caggcacttcacagtgggcagtgct

SEQ ID NO: 2715478 - DNA, 25 bp, Homo sapien
gcctcattcttccccggcctcttct

SEQ ID NO: 2715479 - DNA, 25 bp, Homo sapien
tgcctcattcttccccggcctcttc

SEQ ID NO: 2715480 - DNA, 25 bp, Homo sapien
cactattaatcctaacttcccggag

SEQ ID NO: 2715481 - DNA, 25 bp, Homo sapien
agcactaatttgcagggtctaggcc

SEQ ID NO: 2715482 - DNA, 25 bp, Homo sapien
tggcaacacttaactagagcgatac

SEQ ID NO: 2715483 - DNA, 25 bp, Homo sapien
taggccccatacaagaaagacttcc

SEQ ID NO: 2715484 - DNA, 25 bp, Homo sapien
cataaacgcgattgtctaacactgg

SEQ ID NO: 2715485 - DNA, 25 bp, Homo sapien
agtcataaacgcgattgtctaacac

SEQ ID NO: 2715486 - DNA, 25 bp, Homo sapien
aacgcgattgtctaacactggcaga

SEQ ID NO: 2715487 - DNA, 25 bp, Homo sapien
agaagagtcataaacgcgattgtct

SEQ ID NO: 2715488 - DNA, 25 bp, Homo sapien
gtgaaggtattggccaaccatggat

SEQ ID NO: 2715489 - DNA, 25 bp, Homo sapien
ccatggatgacatgtggcctgagag

SEQ ID NO: 2715490 - DNA, 25 bp, Homo sapien
gaaggtattggccaaccatggatga

SEQ ID NO: 2715491 - DNA, 25 bp, Homo sapien
ttggccaaccatggatgacatgtgg

SEQ ID NO: 2715492 - DNA, 25 bp, Homo sapien
agggaagagcatatgttttgagccc

SEQ ID NO: 2715493 - DNA, 25 bp, Homo sapien
gagggaagagcatatgttttgagcc

SEQ ID NO: 2715494 - DNA, 25 bp, Homo sapien
ggagggaagagcatatgttttgagc

SEQ ID NO: 2715495 - DNA, 25 bp, Homo sapien
gggaagagcatatgttttgagccct

SEQ ID NO: 2715496 - DNA, 25 bp, Homo sapien
agagcttggctaaagctgcgatgag

SEQ ID NO: 2715497 - DNA, 25 bp, Homo sapien
gggagcttcatctcatcccctggtt

SEQ ID NO: 2715498 - DNA, 25 bp, Homo sapien
gagagcttggctaaagctgcgatga

SEQ ID NO: 2715499 - DNA, 25 bp, Homo sapien
atgagggagcttcatctcatcccct

SEQ ID NO: 2715500 - DNA, 25 bp, Homo sapien
gtgtgaagtgatggcttcagtccag

SEQ ID NO: 2715501 - DNA, 25 bp, Homo sapien
agtgtgaagtgatggcttcagtcca

SEQ ID NO: 2715502 - DNA, 25 bp, Homo sapien
agtgagtgatgtgtggctacatctc

SEQ ID NO: 2715503 - DNA, 25 bp, Homo sapien
ctggaaatagtctcgagtgagtgat

SEQ ID NO: 2715504 - DNA, 25 bp, Homo sapien
gctacatctctgcacaggcactgaa

SEQ ID NO: 2715505 - DNA, 25 bp, Homo sapien
aggaccactggaaatagtctcgagt

SEQ ID NO: 2715506 - DNA, 25 bp, Homo sapien
aattctgattatgcactgtgttctg

SEQ ID NO: 2715507 - DNA, 25 bp, Homo sapien
gaggctcctgtcctccataaaatgc

SEQ ID NO: 2715508 - DNA, 25 bp, Homo sapien
cctgctgtgcaagcagggtctggaa

SEQ ID NO: 2715509 - DNA, 25 bp, Homo sapien
ctcagtgggaaagtgtagccttgca

SEQ ID NO: 2715510 - DNA, 25 bp, Homo sapien
ttcaccgtggaagctacatctatgc

SEQ ID NO: 2715511 - DNA, 25 bp, Homo sapien
atgcagttggtaaatttccaccctg

SEQ ID NO: 2715512 - DNA, 25 bp, Homo sapien
aaaactaagacattcttcaccgtgg

SEQ ID NO: 2715513 - DNA, 25 bp, Homo sapien
ttcgctttgccagtgtcacaggaga

SEQ ID NO: 2715514 - DNA, 25 bp, Homo sapien
gttttgctaagttacttgctggctt

SEQ ID NO: 2715515 - DNA, 25 bp, Homo sapien
gggttttgctaagttacttgctggc

SEQ ID NO: 2715516 - DNA, 25 bp, Homo sapien
tttgctaagttacttgctggctttt

SEQ ID NO: 2715517 - DNA, 25 bp, Homo sapien
ggttttgctaagttacttgctggct

SEQ ID NO: 2715518 - DNA, 25 bp, Homo sapien
tcttgtctatgccatagttcttgaa

SEQ ID NO: 2715519 - DNA, 25 bp, Homo sapien
tgtctatgccatagttcttgaattc

SEQ ID NO: 2715520 - DNA, 25 bp, Homo sapien
caaaatgtcttgtctatgccatagt

SEQ ID NO: 2715521 - DNA, 25 bp, Homo sapien
ttcccaaaatgtcttgtctatgcca

SEQ ID NO: 2715522 - DNA, 25 bp, Homo sapien
tcctgctgactcaatagacttgccc

SEQ ID NO: 2715523 - DNA, 25 bp, Homo sapien
tatcgtccaatccatcttcctgctg

SEQ ID NO: 2715524 - DNA, 25 bp, Homo sapien
gctttgccaggtctatatcgtccaa

SEQ ID NO: 2715525 - DNA, 25 bp, Homo sapien
tcccgctgtgtgttgtgaactggtt

SEQ ID NO: 2715526 - DNA, 25 bp, Homo sapien
gatgtggcttgcttcacatgtgaac

SEQ ID NO: 2715527 - DNA, 25 bp, Homo sapien
gaacttataagagatccctcaaata

SEQ ID NO: 2715528 - DNA, 25 bp, Homo sapien
catgtgaacttataagagatccctc

SEQ ID NO: 2715529 - DNA, 25 bp, Homo sapien
ttttgccgtacactttcttgacctg

SEQ ID NO: 2715530 - DNA, 25 bp, Homo sapien
ttgaactcctccagatgtatagcca

SEQ ID NO: 2715531 - DNA, 25 bp, Homo sapien
acccagaacgtcctgtccaggccaa

SEQ ID NO: 2715532 - DNA, 25 bp, Homo sapien
gccactctggcatatcactttcttg

SEQ ID NO: 2715533 - DNA, 25 bp, Homo sapien
ctcctccagatgtatagccaattcc

SEQ ID NO: 2715534 - DNA, 25 bp, Homo sapien
ctttcagtttggtgtggactggcag

SEQ ID NO: 2715535 - DNA, 25 bp, Homo sapien
catctcttcgtactttcagtttggt

SEQ ID NO: 2715536 - DNA, 25 bp, Homo sapien
caggttcgatgactgaagacctgag

SEQ ID NO: 2715537 - DNA, 25 bp, Homo sapien
tcgtactttcagtttggtgtggact

SEQ ID NO: 2715538 - DNA, 25 bp, Homo sapien
cacatttctaatacctttttcttca

SEQ ID NO: 2715539 - DNA, 25 bp, Homo sapien
acatttctaatacctttttcttcag

SEQ ID NO: 2715540 - DNA, 25 bp, Homo sapien
ctctgctttcaggtttttccacatt

SEQ ID NO: 2715541 - DNA, 25 bp, Homo sapien
tcaggtttttccacatttctaatac

SEQ ID NO: 2715542 - DNA, 25 bp, Homo sapien
gggagtctgaagcattagcatacat

SEQ ID NO: 2715543 - DNA, 25 bp, Homo sapien
gggaaggggagtctgaagcattagc

SEQ ID NO: 2715544 - DNA, 25 bp, Homo sapien
aggggagtctgaagcattagcatac

SEQ ID NO: 2715545 - DNA, 25 bp, Homo sapien
gaaggggagtctgaagcattagcat

SEQ ID NO: 2715546 - DNA, 25 bp, Homo sapien
gctgatagatacctccaccatttgt

SEQ ID NO: 2715547 - DNA, 25 bp, Homo sapien
tcattaagatgtgggttgtcgtggt

SEQ ID NO: 2715548 - DNA, 25 bp, Homo sapien
caaggtaaggtcctcaggcttgtag

SEQ ID NO: 2715549 - DNA, 25 bp, Homo sapien
tcgtggtaatgggagcaagagggct

SEQ ID NO: 2715550 - DNA, 25 bp, Homo sapien
gatttccccaaagcttaccagtaga

SEQ ID NO: 2715551 - DNA, 25 bp, Homo sapien
cctagagcttagatacacatggtga

SEQ ID NO: 2715552 - DNA, 25 bp, Homo sapien
tacatgcctgtcctaaaccagttgc

SEQ ID NO: 2715553 - DNA, 25 bp, Homo sapien
aaaatgcatcccgtggtgtggaagg

SEQ ID NO: 2715554 - DNA, 25 bp, Homo sapien
cctcataacctgttactaggaagat

SEQ ID NO: 2715555 - DNA, 25 bp, Homo sapien
cataacctgttactaggaagataca

SEQ ID NO: 2715556 - DNA, 25 bp, Homo sapien
ataacctgttactaggaagatacag

SEQ ID NO: 2715557 - DNA, 25 bp, Homo sapien
tcataacctgttactaggaagatac

SEQ ID NO: 2715558 - DNA, 25 bp, Homo sapien
gccagtgtgtgtgcacaccgtgcgc

SEQ ID NO: 2715559 - DNA, 25 bp, Homo sapien
caggccagtgtgtgtgcacaccgtg

SEQ ID NO: 2715560 - DNA, 25 bp, Homo sapien
gtgggcgcaggccagtgtgtgtgca

SEQ ID NO: 2715561 - DNA, 25 bp, Homo sapien
gggcgcaggccagtgtgtgtgcaca

SEQ ID NO: 2715562 - DNA, 25 bp, Homo sapien
cccactgtggattcgagtgggaaaa

SEQ ID NO: 2715563 - DNA, 25 bp, Homo sapien
cagcgtctgcagttctgatagctct

SEQ ID NO: 2715564 - DNA, 25 bp, Homo sapien
gagtgggaaaaaccagcgtctgcag

SEQ ID NO: 2715565 - DNA, 25 bp, Homo sapien
gctctgcagcagatggtctcccagg

SEQ ID NO: 2715566 - DNA, 25 bp, Homo sapien
ctccaaacagcgctttctcttgtac

SEQ ID NO: 2715567 - DNA, 25 bp, Homo sapien
tccaaacagcgctttctcttgtact

SEQ ID NO: 2715568 - DNA, 25 bp, Homo sapien
tttctcttgtacttacactagtatg

SEQ ID NO: 2715569 - DNA, 25 bp, Homo sapien
cttgtacttacactagtatgtctca

SEQ ID NO: 2715570 - DNA, 25 bp, Homo sapien
tggagaagctgtcaccagattttct

SEQ ID NO: 2715571 - DNA, 25 bp, Homo sapien
ttctcttgggacacccagttccttc

SEQ ID NO: 2715572 - DNA, 25 bp, Homo sapien
tgactctctcaggaattcttccgca

SEQ ID NO: 2715573 - DNA, 25 bp, Homo sapien
ttgactctctcaggaattcttccgc

SEQ ID NO: 2715574 - DNA, 25 bp, Homo sapien
ctctcaggaattcttccgcatccat

SEQ ID NO: 2715575 - DNA, 25 bp, Homo sapien
actctctcaggaattcttccgcatc

SEQ ID NO: 2715576 - DNA, 25 bp, Homo sapien
gctttctgatgcgtgtctggaataa

SEQ ID NO: 2715577 - DNA, 25 bp, Homo sapien
ttctgatgcgtgtctggaataaaga

SEQ ID NO: 2715578 - DNA, 25 bp, Homo sapien
cattggctttctgatgcgtgtctgg

SEQ ID NO: 2715579 - DNA, 25 bp, Homo sapien
tggcattggctttctgatgcgtgtc

SEQ ID NO: 2715580 - DNA, 25 bp, Homo sapien
tctgagccttctaattctgtatcta

SEQ ID NO: 2715581 - DNA, 25 bp, Homo sapien
aaatattatactctctgagccttct

SEQ ID NO: 2715582 - DNA, 25 bp, Homo sapien
tatctactagattgttagggccaag

SEQ ID NO: 2715583 - DNA, 25 bp, Homo sapien
gtatctactagattgttagggccaa

SEQ ID NO: 2715584 - DNA, 25 bp, Homo sapien
aaatctgtggtccacgggaggacac

SEQ ID NO: 2715585 - DNA, 25 bp, Homo sapien
taaccttcgaagtccctctcaaatc

SEQ ID NO: 2715586 - DNA, 25 bp, Homo sapien
ctcaaatcggtgtctgaatctgtaa

SEQ ID NO: 2715587 - DNA, 25 bp, Homo sapien
taagaggaacagctatggtcacatc

SEQ ID NO: 2715588 - DNA, 25 bp, Homo sapien
gaagggtgcttgaatagatattggt

SEQ ID NO: 2715589 - DNA, 25 bp, Homo sapien
tgaagtaatatggtgtgaagggtgc

SEQ ID NO: 2715590 - DNA, 25 bp, Homo sapien
gtgtgaagggtgcttgaatagatat

SEQ ID NO: 2715591 - DNA, 25 bp, Homo sapien
ggtgcttgaatagatattggtataa

SEQ ID NO: 2715592 - DNA, 25 bp, Homo sapien
gaatggagaagggaccagttacact

SEQ ID NO: 2715593 - DNA, 25 bp, Homo sapien
gagatgacatctgaagaatggagaa

SEQ ID NO: 2715594 - DNA, 25 bp, Homo sapien
ctgtgaggaagtgctacttgagatg

SEQ ID NO: 2715595 - DNA, 25 bp, Homo sapien
cagttacactgttcaggtcctgaga

SEQ ID NO: 2715596 - DNA, 25 bp, Homo sapien
atgcagaaagagggacaaccacggg

SEQ ID NO: 2715597 - DNA, 25 bp, Homo sapien
gcagaaagagggacaaccacgggga

SEQ ID NO: 2715598 - DNA, 25 bp, Homo sapien
aatgatgcagaaagagggacaacca

SEQ ID NO: 2715599 - DNA, 25 bp, Homo sapien
tgatgcagaaagagggacaaccacg

SEQ ID NO: 2715600 - DNA, 25 bp, Homo sapien
catacagtttaggtgtggccagttg

SEQ ID NO: 2715601 - DNA, 25 bp, Homo sapien
catctacttgtatgggcacaatttc

SEQ ID NO: 2715602 - DNA, 25 bp, Homo sapien
acacacatacagtttaggtgtggcc

SEQ ID NO: 2715603 - DNA, 25 bp, Homo sapien
ccttcttactccatctacttgtatg

SEQ ID NO: 2715604 - DNA, 25 bp, Homo sapien
atctacatgatagcagacgtgcttc

SEQ ID NO: 2715605 - DNA, 25 bp, Homo sapien
agcagacgtgcttcaaatgactctc

SEQ ID NO: 2715606 - DNA, 25 bp, Homo sapien
tacatgatagcagacgtgcttcaaa

SEQ ID NO: 2715607 - DNA, 25 bp, Homo sapien
gatagcagacgtgcttcaaatgact

SEQ ID NO: 2715608 - DNA, 25 bp, Homo sapien
tgtactttctgaggttgcctgttca

SEQ ID NO: 2715609 - DNA, 25 bp, Homo sapien
gagaaagctgacaacctgaaaagga

SEQ ID NO: 2715610 - DNA, 25 bp, Homo sapien
tataaaatcgaccactaggtagggc

SEQ ID NO: 2715611 - DNA, 25 bp, Homo sapien
tccataaccgtttttccaagagatg

SEQ ID NO: 2715612 - DNA, 25 bp, Homo sapien
cccacttccagtgctcttcaaaatg

SEQ ID NO: 2715613 - DNA, 25 bp, Homo sapien
gggaccccacttccagtgctcttca

SEQ ID NO: 2715614 - DNA, 25 bp, Homo sapien
cacttccagtgctcttcaaaatggc

SEQ ID NO: 2715615 - DNA, 25 bp, Homo sapien
tgccttcaggggaccccacttccag

SEQ ID NO: 2715616 - DNA, 25 bp, Homo sapien
ttcattgctaggaattggcttccca

SEQ ID NO: 2715617 - DNA, 25 bp, Homo sapien
gatgagttcattgctaggaattggc

SEQ ID NO: 2715618 - DNA, 25 bp, Homo sapien
ctgtgatgagttcattgctaggaat

SEQ ID NO: 2715619 - DNA, 25 bp, Homo sapien
tcagctgtgatgagttcattgctag

SEQ ID NO: 2715620 - DNA, 25 bp, Homo sapien
gatggacaaggaccaatccagtcat

SEQ ID NO: 2715621 - DNA, 25 bp, Homo sapien
tggacaaggaccaatccagtcatgt

SEQ ID NO: 2715622 - DNA, 25 bp, Homo sapien
ggacaaggaccaatccagtcatgtt

SEQ ID NO: 2715623 - DNA, 25 bp, Homo sapien
actgatggacaaggaccaatccagt

SEQ ID NO: 2715624 - DNA, 25 bp, Homo sapien
tccctgtgcccgcaacatgcttcca

SEQ ID NO: 2715625 - DNA, 25 bp, Homo sapien
gatgccgatgggctctgctgatcta

SEQ ID NO: 2715626 - DNA, 25 bp, Homo sapien
cctctgtaccaagactaggtaagta

SEQ ID NO: 2715627 - DNA, 25 bp, Homo sapien
cagaggatccacttgattggagatg

SEQ ID NO: 2715628 - DNA, 25 bp, Homo sapien
gtataaagaagatctcttaatctca

SEQ ID NO: 2715629 - DNA, 25 bp, Homo sapien
aatttctttgtccaaggaaggctca

SEQ ID NO: 2715630 - DNA, 25 bp, Homo sapien
tatgtataaagaagatctcttaatc

SEQ ID NO: 2715631 - DNA, 25 bp, Homo sapien
gaatttctttgtccaaggaaggctc

SEQ ID NO: 2715632 - DNA, 25 bp, Homo sapien
gctcttgctgttgagaacattttgc

SEQ ID NO: 2715633 - DNA, 25 bp, Homo sapien
cacttctttcaactatggttttaat

SEQ ID NO: 2715634 - DNA, 25 bp, Homo sapien
tggttttaatagcatcaacactgaa

SEQ ID NO: 2715635 - DNA, 25 bp, Homo sapien
tcacttctttcaactatggttttaa

SEQ ID NO: 2715636 - DNA, 25 bp, Homo sapien
gtttctgtctaggtcagtgccatcc

SEQ ID NO: 2715637 - DNA, 25 bp, Homo sapien
tgtaaacttagctttggccccatcc

SEQ ID NO: 2715638 - DNA, 25 bp, Homo sapien
aatatgcttaattccccacccatgg

SEQ ID NO: 2715639 - DNA, 25 bp, Homo sapien
tcttccacgttgagtccccattagg

SEQ ID NO: 2715640 - DNA, 25 bp, Homo sapien
tgctgtgagctgcaccaatgagctt

SEQ ID NO: 2715641 - DNA, 25 bp, Homo sapien
gatatgttttagctcccctggtgac

SEQ ID NO: 2715642 - DNA, 25 bp, Homo sapien
caatgagcttcaaggattccgttcc

SEQ ID NO: 2715643 - DNA, 25 bp, Homo sapien
gtccagtggaaagattgaacccatt

SEQ ID NO: 2715644 - DNA, 25 bp, Homo sapien
cccacccttccttgtaatatcttgg

SEQ ID NO: 2715645 - DNA, 25 bp, Homo sapien
tcatcatcgtcctgtctgtgtccca

SEQ ID NO: 2715646 - DNA, 25 bp, Homo sapien
tccttgtaatatcttgggttattca

SEQ ID NO: 2715647 - DNA, 25 bp, Homo sapien
catcatcatcgtcctgtctgtgtcc

SEQ ID NO: 2715648 - DNA, 25 bp, Homo sapien
aggtcagagagcgtatttctttttc

SEQ ID NO: 2715649 - DNA, 25 bp, Homo sapien
tcataaggtcagagagcgtatttct

SEQ ID NO: 2715650 - DNA, 25 bp, Homo sapien
tgaattgcttccataattagggaag

SEQ ID NO: 2715651 - DNA, 25 bp, Homo sapien
tttaatcttcataaggtcagagagc

SEQ ID NO: 2715652 - DNA, 25 bp, Homo sapien
gctaagttgtctaaagtccaacaat

SEQ ID NO: 2715653 - DNA, 25 bp, Homo sapien
gacttctgagtagttcagcaagcca

SEQ ID NO: 2715654 - DNA, 25 bp, Homo sapien
tgaactgctctttctcttgatgact

SEQ ID NO: 2715655 - DNA, 25 bp, Homo sapien
gcagataactcttgcaacttaagtc

SEQ ID NO: 2715656 - DNA, 25 bp, Homo sapien
ttctcattggtggtataatctcaaa

SEQ ID NO: 2715657 - DNA, 25 bp, Homo sapien
cgtgcccatttctggtgagatggtt

SEQ ID NO: 2715658 - DNA, 25 bp, Homo sapien
ttccctaatagtaggtaatttgaca

SEQ ID NO: 2715659 - DNA, 25 bp, Homo sapien
gaggatccctcccacgtgcccattt

SEQ ID NO: 2715660 - DNA, 25 bp, Homo sapien
tatggctttttaagtgcttctgcat

SEQ ID NO: 2715661 - DNA, 25 bp, Homo sapien
ttatggctttttaagtgcttctgca

SEQ ID NO: 2715662 - DNA, 25 bp, Homo sapien
agccccccgccaggcgagccgcgcc

SEQ ID NO: 2715663 - DNA, 25 bp, Homo sapien
tcagccccccgccaggcgagccgcg

SEQ ID NO: 2715664 - DNA, 25 bp, Homo sapien
agtcagccccccgccaggcgagccg

SEQ ID NO: 2715665 - DNA, 25 bp, Homo sapien
gggagtcagccccccgccaggcgag

SEQ ID NO: 2715666 - DNA, 25 bp, Homo sapien
tttgctgaattacagtaaaagagaa

SEQ ID NO: 2715667 - DNA, 25 bp, Homo sapien
tccctctcatgccaagctgaagctg

SEQ ID NO: 2715668 - DNA, 25 bp, Homo sapien
ttatgaaattatcaggcagagagat

SEQ ID NO: 2715669 - DNA, 25 bp, Homo sapien
ccaagctgaagctggactgtgctgc

SEQ ID NO: 2715670 - DNA, 25 bp, Homo sapien
taaaatacattgacaactgtttctt

SEQ ID NO: 2715671 - DNA, 25 bp, Homo sapien
ctttggcagcttgatataattagag

SEQ ID NO: 2715672 - DNA, 25 bp, Homo sapien
gaacaatgtgagttaatgacagcat

SEQ ID NO: 2715673 - DNA, 25 bp, Homo sapien
tcctaatttttcacacttctcaaga

SEQ ID NO: 2715674 - DNA, 25 bp, Homo sapien
tccatgatgtctgagtgagcagacc

SEQ ID NO: 2715675 - DNA, 25 bp, Homo sapien
gacctcataggctttcataccaagt

SEQ ID NO: 2715676 - DNA, 25 bp, Homo sapien
agttaggctgacatcagatgggacc

SEQ ID NO: 2715677 - DNA, 25 bp, Homo sapien
tctgagccctttgtcagcatggaat

SEQ ID NO: 2715678 - DNA, 25 bp, Homo sapien
ttataagagttcctgaatgaagtac

SEQ ID NO: 2715679 - DNA, 25 bp, Homo sapien
actaacagtggatctttttacagaa

SEQ ID NO: 2715680 - DNA, 25 bp, Homo sapien
tcttcatactgctgccactctttat

SEQ ID NO: 2715681 - DNA, 25 bp, Homo sapien
actgctgccactctttatggtttcc

SEQ ID NO: 2715682 - DNA, 25 bp, Homo sapien
tcatactgctgccactctttatggt

SEQ ID NO: 2715683 - DNA, 25 bp, Homo sapien
cttcttacagcttaagaacatttct

SEQ ID NO: 2715684 - DNA, 25 bp, Homo sapien
gacaacctctgacgggaaagtatgg

SEQ ID NO: 2715685 - DNA, 25 bp, Homo sapien
ccatcacccgctccgcaaatgacaa

SEQ ID NO: 2715686 - DNA, 25 bp, Homo sapien
gaaagtatggggagccaatttggaa

SEQ ID NO: 2715687 - DNA, 25 bp, Homo sapien
ttcagtgtctgctttgagaataaag

SEQ ID NO: 2715688 - DNA, 25 bp, Homo sapien
cctctccttcagatacctgcatagt

SEQ ID NO: 2715689 - DNA, 25 bp, Homo sapien
acctgcatagtagttaggtctcccc

SEQ ID NO: 2715690 - DNA, 25 bp, Homo sapien
catagtagttaggtctccccactcc

SEQ ID NO: 2715691 - DNA, 25 bp, Homo sapien
tctccttcagatacctgcatagtag

SEQ ID NO: 2715692 - DNA, 25 bp, Homo sapien
cagggtcagggaagcacagccaaag

SEQ ID NO: 2715693 - DNA, 25 bp, Homo sapien
gaagatgtaacaggagggggtcagc

SEQ ID NO: 2715694 - DNA, 25 bp, Homo sapien
cagaccagggtcagggaagcacagc

SEQ ID NO: 2715695 - DNA, 25 bp, Homo sapien
ggtcagcagaaccagcagaccaggg

SEQ ID NO: 2715696 - DNA, 25 bp, Homo sapien
acagtcaggtctagggctgcctgga

SEQ ID NO: 2715697 - DNA, 25 bp, Homo sapien
ctggatattgggataggtgagttgc

SEQ ID NO: 2715698 - DNA, 25 bp, Homo sapien
atctacagtcaggtctagggctgcc

SEQ ID NO: 2715699 - DNA, 25 bp, Homo sapien
ggttggcttggagacttgatctaca

SEQ ID NO: 2715700 - DNA, 25 bp, Homo sapien
gaaggaacatacatctacccgaaca

SEQ ID NO: 2715701 - DNA, 25 bp, Homo sapien
gcttagagaaggaacatacatctac

SEQ ID NO: 2715702 - DNA, 25 bp, Homo sapien
ctagggcttagagaaggaacataca

SEQ ID NO: 2715703 - DNA, 25 bp, Homo sapien
tagagaaggaacatacatctacccg

SEQ ID NO: 2715704 - DNA, 25 bp, Homo sapien
agtgggcaaattgttgtctgatgaa

SEQ ID NO: 2715705 - DNA, 25 bp, Homo sapien
gtgggcaaattgttgtctgatgaat

SEQ ID NO: 2715706 - DNA, 25 bp, Homo sapien
cagtgggcaaattgttgtctgatga

SEQ ID NO: 2715707 - DNA, 25 bp, Homo sapien
gccatttccagcacccacatgtggc

SEQ ID NO: 2715708 - DNA, 25 bp, Homo sapien
atgccatttccagcacccacatgtg

SEQ ID NO: 2715709 - DNA, 25 bp, Homo sapien
tgccatttccagcacccacatgtgg

SEQ ID NO: 2715710 - DNA, 25 bp, Homo sapien
catgccatttccagcacccacatgt

SEQ ID NO: 2715711 - DNA, 25 bp, Homo sapien
gctttggtcatctcgcttggggtcc

SEQ ID NO: 2715712 - DNA, 25 bp, Homo sapien
tgagaggtgccatccgcttactctg

SEQ ID NO: 2715713 - DNA, 25 bp, Homo sapien
ctgtagaggcttgttgcgggttggg

SEQ ID NO: 2715714 - DNA, 25 bp, Homo sapien
cactttctgtgatactatgtgaagc

SEQ ID NO: 2715715 - DNA, 25 bp, Homo sapien
cctgagtttttctacaagcatattc

SEQ ID NO: 2715716 - DNA, 25 bp, Homo sapien
tcctgagtttttctacaagcatatt

SEQ ID NO: 2715717 - DNA, 25 bp, Homo sapien
atcctgagtttttctacaagcatat

SEQ ID NO: 2715718 - DNA, 25 bp, Homo sapien
gtgtatccggaaagaaaagagtgag

SEQ ID NO: 2715719 - DNA, 25 bp, Homo sapien
caagaagagcaatttgcctcaggct

SEQ ID NO: 2715720 - DNA, 25 bp, Homo sapien
tttgcctcaggctgtccaacagctg

SEQ ID NO: 2715721 - DNA, 25 bp, Homo sapien
cagctgaattagtgtatccggaaag

SEQ ID NO: 2715722 - DNA, 25 bp, Homo sapien
gaagtaacccaacttcattatccag

SEQ ID NO: 2715723 - DNA, 25 bp, Homo sapien
agtaacccaacttcattatccagat

SEQ ID NO: 2715724 - DNA, 25 bp, Homo sapien
gtctatccgaagtaacccaacttca

SEQ ID NO: 2715725 - DNA, 25 bp, Homo sapien
ctggcctctgtctatccgaagtaac

SEQ ID NO: 2715726 - DNA, 25 bp, Homo sapien
cacagtccagtttttggaagaaagc

SEQ ID NO: 2715727 - DNA, 25 bp, Homo sapien
acacacagtccagtttttggaagaa

SEQ ID NO: 2715728 - DNA, 25 bp, Homo sapien
ccacagcttcttaaaattgctgtct

SEQ ID NO: 2715729 - DNA, 25 bp, Homo sapien
aaattgctgtctataattacgtttg

SEQ ID NO: 2715730 - DNA, 25 bp, Homo sapien
gggtagcagatgactcgccatttgc

SEQ ID NO: 2715731 - DNA, 25 bp, Homo sapien
taacagcgggtagcagatgactcgc

SEQ ID NO: 2715732 - DNA, 25 bp, Homo sapien
tgactcgccatttgcttgatcatag

SEQ ID NO: 2715733 - DNA, 25 bp, Homo sapien
ctaatgcaataggtaacagcgggta

SEQ ID NO: 2715734 - DNA, 25 bp, Homo sapien
ttcttccacatatgatgagaatcag

SEQ ID NO: 2715735 - DNA, 25 bp, Homo sapien
atcagagaaatctgctcattactta

SEQ ID NO: 2715736 - DNA, 25 bp, Homo sapien
agagaaatctgctcattacttaatg

SEQ ID NO: 2715737 - DNA, 25 bp, Homo sapien
cctctcttgtgacatcttccactgt

SEQ ID NO: 2715738 - DNA, 25 bp, Homo sapien
ctcatgctatgcagttggagagtct

SEQ ID NO: 2715739 - DNA, 25 bp, Homo sapien
aagagactgagaggatgttgggaga

SEQ ID NO: 2715740 - DNA, 25 bp, Homo sapien
cagtgtgctgtgagtcttcctgcca

SEQ ID NO: 2715741 - DNA, 25 bp, Homo sapien
gaaaaatgccagtgtgctgtgagtc

SEQ ID NO: 2715742 - DNA, 25 bp, Homo sapien
ccccaaatctagttgaaccaattct

SEQ ID NO: 2715743 - DNA, 25 bp, Homo sapien
cagagcttcagaattgtgatttaaa

SEQ ID NO: 2715744 - DNA, 25 bp, Homo sapien
cggggagccacaggatgtccttagt

SEQ ID NO: 2715745 - DNA, 25 bp, Homo sapien
tgaagctggactttgccaatcgggg

SEQ ID NO: 2715746 - DNA, 25 bp, Homo sapien
tgaaaactgtagtgttggaaccctg

SEQ ID NO: 2715747 - DNA, 25 bp, Homo sapien
tctggctccagttcacacatataac

SEQ ID NO: 2715748 - DNA, 25 bp, Homo sapien
tgggtagagccagaatatcagaggc

SEQ ID NO: 2715749 - DNA, 25 bp, Homo sapien
atatcagaggcctgaactatttcct

SEQ ID NO: 2715750 - DNA, 25 bp, Homo sapien
ggctccagttcacacatataaccct

SEQ ID NO: 2715751 - DNA, 25 bp, Homo sapien
taaatgtgaggacatacctctccag

SEQ ID NO: 2715752 - DNA, 25 bp, Homo sapien
ccaactctccagagccagaccaaga

SEQ ID NO: 2715753 - DNA, 25 bp, Homo sapien
gacacaccatgactgcctgcaccct

SEQ ID NO: 2715754 - DNA, 25 bp, Homo sapien
tacctctccagccccaactctccag

SEQ ID NO: 2715755 - DNA, 25 bp, Homo sapien
tgtggcaccagcctttgactccagg

SEQ ID NO: 2715756 - DNA, 25 bp, Homo sapien
tctggtacaggtgcctcgctttgct

SEQ ID NO: 2715757 - DNA, 25 bp, Homo sapien
acagctggtgagagcaatgtggcac

SEQ ID NO: 2715758 - DNA, 25 bp, Homo sapien
agggcaaactggcatctggtacagg

SEQ ID NO: 2715759 - DNA, 25 bp, Homo sapien
gtggggtctctagaatcttcctcac

SEQ ID NO: 2715760 - DNA, 25 bp, Homo sapien
aggtggggtctctagaatcttcctc

SEQ ID NO: 2715761 - DNA, 25 bp, Homo sapien
cactgggggaaggtggggtctctag

SEQ ID NO: 2715762 - DNA, 25 bp, Homo sapien
ggaaggtggggtctctagaatcttc

SEQ ID NO: 2715763 - DNA, 25 bp, Homo sapien
ctggtcatgtctggtgtaagctgga

SEQ ID NO: 2715764 - DNA, 25 bp, Homo sapien
ttcatagactctcctagaccagggc

SEQ ID NO: 2715765 - DNA, 25 bp, Homo sapien
ctggatgctggtcatgtctggtgta

SEQ ID NO: 2715766 - DNA, 25 bp, Homo sapien
tggtgtaagctggaacttcatagac

SEQ ID NO: 2715767 - DNA, 25 bp, Homo sapien
gacagccagattaactgagcacggg

SEQ ID NO: 2715768 - DNA, 25 bp, Homo sapien
gaatccgaacacttaaactgcagcg

SEQ ID NO: 2715769 - DNA, 25 bp, Homo sapien
gcgttaacaccaactgacagccaga

SEQ ID NO: 2715770 - DNA, 25 bp, Homo sapien
tgcattggcgaaaaagaagcccagg

SEQ ID NO: 2715771 - DNA, 25 bp, Homo sapien
aggaaaccggtgcagaagaaggcaa

SEQ ID NO: 2715772 - DNA, 25 bp, Homo sapien
ctaggaaaccggtgcagaagaaggc

SEQ ID NO: 2715773 - DNA, 25 bp, Homo sapien
ggaaaccggtgcagaagaaggcaaa

SEQ ID NO: 2715774 - DNA, 25 bp, Homo sapien
taggaaaccggtgcagaagaaggca

SEQ ID NO: 2715775 - DNA, 25 bp, Homo sapien
tggggaaattggcacctactaccgc

SEQ ID NO: 2715776 - DNA, 25 bp, Homo sapien
gggaaattggcacctactaccgcgc

SEQ ID NO: 2715777 - DNA, 25 bp, Homo sapien
tgttggggaaattggcacctactac

SEQ ID NO: 2715778 - DNA, 25 bp, Homo sapien
ttgttggggaaattggcacctacta

SEQ ID NO: 2715779 - DNA, 25 bp, Homo sapien
aagggattgccattgtgtgtttgca

SEQ ID NO: 2715780 - DNA, 25 bp, Homo sapien
tgacttgttacataagggattgcca

SEQ ID NO: 2715781 - DNA, 25 bp, Homo sapien
tacataagggattgccattgtgtgt

SEQ ID NO: 2715782 - DNA, 25 bp, Homo sapien
ctaggaatgacttgttacataaggg

SEQ ID NO: 2715783 - DNA, 25 bp, Homo sapien
ggctctgtgagttgcgacaaagcaa

SEQ ID NO: 2715784 - DNA, 25 bp, Homo sapien
tgtgagttgcgacaaagcaaatcta

SEQ ID NO: 2715785 - DNA, 25 bp, Homo sapien
gtgactgctggtttggaaataatcc

SEQ ID NO: 2715786 - DNA, 25 bp, Homo sapien
gactgctggtttggaaataatcccc

SEQ ID NO: 2715787 - DNA, 25 bp, Homo sapien
tcttacaaagacgaatggcaactga

SEQ ID NO: 2715788 - DNA, 25 bp, Homo sapien
gctggaatcactcagaagcctctag

SEQ ID NO: 2715789 - DNA, 25 bp, Homo sapien
caggccctcctttcattggtctagc

SEQ ID NO: 2715790 - DNA, 25 bp, Homo sapien
ttggtctagcgcagaaagacatctc

SEQ ID NO: 2715791 - DNA, 25 bp, Homo sapien
ttcgtatgtgtaaaactctctcagc

SEQ ID NO: 2715792 - DNA, 25 bp, Homo sapien
gcacccatcgtgctggcattaaagt

SEQ ID NO: 2715793 - DNA, 25 bp, Homo sapien
aaggtagggaagatgcagtcaaccc

SEQ ID NO: 2715794 - DNA, 25 bp, Homo sapien
tgccagaaaacctctgcaaggtagg

SEQ ID NO: 2715795 - DNA, 25 bp, Homo sapien
agaatgctcattgagttttggagcc

SEQ ID NO: 2715796 - DNA, 25 bp, Homo sapien
ctcttcattactgtatacacactaa

SEQ ID NO: 2715797 - DNA, 25 bp, Homo sapien
aattcttgtttatcccaccatcagc

SEQ ID NO: 2715798 - DNA, 25 bp, Homo sapien
ggataatcacctttcaagacagtta

SEQ ID NO: 2715799 - DNA, 25 bp, Homo sapien
gggctcccctgtgctttctggacag

SEQ ID NO: 2715800 - DNA, 25 bp, Homo sapien
tcaacctggacctcccatggccctg

SEQ ID NO: 2715801 - DNA, 25 bp, Homo sapien
ctggacctcccatggccctgggctc

SEQ ID NO: 2715802 - DNA, 25 bp, Homo sapien
ctcccctgtgctttctggacagcag

SEQ ID NO: 2715803 - DNA, 25 bp, Homo sapien
tgtctgcattggttcagctccagcc

SEQ ID NO: 2715804 - DNA, 25 bp, Homo sapien
cccttgtatgtgcttgtctcattgg

SEQ ID NO: 2715805 - DNA, 25 bp, Homo sapien
aatcccttgtatgtgcttgtctcat

SEQ ID NO: 2715806 - DNA, 25 bp, Homo sapien
atgtgcttgtctcattggtggctct

SEQ ID NO: 2715807 - DNA, 25 bp, Homo sapien
gcttgtctcattggtggctcttctg

SEQ ID NO: 2715808 - DNA, 25 bp, Homo sapien
tgtgggctcatcagatttgcagcca

SEQ ID NO: 2715809 - DNA, 25 bp, Homo sapien
gtggtgtgggctcatcagatttgca

SEQ ID NO: 2715810 - DNA, 25 bp, Homo sapien
gggctcatcagatttgcagccaaga

SEQ ID NO: 2715811 - DNA, 25 bp, Homo sapien
ggtgtgggctcatcagatttgcagc

SEQ ID NO: 2715812 - DNA, 25 bp, Homo sapien
gaactggcttcgcaggaacgaggaa

SEQ ID NO: 2715813 - DNA, 25 bp, Homo sapien
ctagaactggcttcgcaggaacgag

SEQ ID NO: 2715814 - DNA, 25 bp, Homo sapien
ctggcttcgcaggaacgaggaaaag

SEQ ID NO: 2715815 - DNA, 25 bp, Homo sapien
tcgcaggaacgaggaaaagaagcat

SEQ ID NO: 2715816 - DNA, 25 bp, Homo sapien
tatttgtggataacagatgtgcata

SEQ ID NO: 2715817 - DNA, 25 bp, Homo sapien
agagtatttgtggataacagatgtg

SEQ ID NO: 2715818 - DNA, 25 bp, Homo sapien
agtatttgtggataacagatgtgca

SEQ ID NO: 2715819 - DNA, 25 bp, Homo sapien
gggatctgcgttggcgggggaattc

SEQ ID NO: 2715820 - DNA, 25 bp, Homo sapien
cagcaggcggtggatgaaaaaataa

SEQ ID NO: 2715821 - DNA, 25 bp, Homo sapien
tattaagagagggaccagtcagcag

SEQ ID NO: 2715822 - DNA, 25 bp, Homo sapien
gggtattaagagagggaccagtcag

SEQ ID NO: 2715823 - DNA, 25 bp, Homo sapien
ttaagagagggaccagtcagcaggc

SEQ ID NO: 2715824 - DNA, 25 bp, Homo sapien
aagctcaaatgttctgctccccaca

SEQ ID NO: 2715825 - DNA, 25 bp, Homo sapien
cagcactagtggttactacccctgg

SEQ ID NO: 2715826 - DNA, 25 bp, Homo sapien
agctcaaatgttctgctccccacaa

SEQ ID NO: 2715827 - DNA, 25 bp, Homo sapien
cactagtggttactacccctggaag

SEQ ID NO: 2715828 - DNA, 25 bp, Homo sapien
ttgctggttgaagcatgcttctcaa

SEQ ID NO: 2715829 - DNA, 25 bp, Homo sapien
gggtcacagactccatgcccttcag

SEQ ID NO: 2715830 - DNA, 25 bp, Homo sapien
ggatggggtcacagactccatgccc

SEQ ID NO: 2715831 - DNA, 25 bp, Homo sapien
tgcccttcaggtcagctgtcttcac

SEQ ID NO: 2715832 - DNA, 25 bp, Homo sapien
agagctagcaatttgtgggccagca

SEQ ID NO: 2715833 - DNA, 25 bp, Homo sapien
gagctagcaatttgtgggccagcac

SEQ ID NO: 2715834 - DNA, 25 bp, Homo sapien
caatttgtgggccagcacattcacc

SEQ ID NO: 2715835 - DNA, 25 bp, Homo sapien
ctagcaatttgtgggccagcacatt

SEQ ID NO: 2715836 - DNA, 25 bp, Homo sapien
tgtgggtggcactgcattgttctgg

SEQ ID NO: 2715837 - DNA, 25 bp, Homo sapien
gtggcactgcattgttctggattcc

SEQ ID NO: 2715838 - DNA, 25 bp, Homo sapien
tgggtggcactgcattgttctggat

SEQ ID NO: 2715839 - DNA, 25 bp, Homo sapien
ggtggcactgcattgttctggattc

SEQ ID NO: 2715840 - DNA, 25 bp, Homo sapien
aatcttgaatctggcaacttttgat

SEQ ID NO: 2715841 - DNA, 25 bp, Homo sapien
gcaccaagctcaaacctcaaagaac

SEQ ID NO: 2715842 - DNA, 25 bp, Homo sapien
acctcaaagaactgcagagaatctt

SEQ ID NO: 2715843 - DNA, 25 bp, Homo sapien
ttgaatctggcaacttttgatttgg

SEQ ID NO: 2715844 - DNA, 25 bp, Homo sapien
attgacattttagcccagataatta

SEQ ID NO: 2715845 - DNA, 25 bp, Homo sapien
tctgtgcattacaggatggttagca

SEQ ID NO: 2715846 - DNA, 25 bp, Homo sapien
tccagtcctgagttgtgacacttaa

SEQ ID NO: 2715847 - DNA, 25 bp, Homo sapien
ggcaaaatcactcccagctgagaat

SEQ ID NO: 2715848 - DNA, 25 bp, Homo sapien
gagagggcagccctcaaggacatag

SEQ ID NO: 2715849 - DNA, 25 bp, Homo sapien
gccctcaaggacatagggaggtaaa

SEQ ID NO: 2715850 - DNA, 25 bp, Homo sapien
gcagccctcaaggacatagggaggt

SEQ ID NO: 2715851 - DNA, 25 bp, Homo sapien
agggcagccctcaaggacataggga

SEQ ID NO: 2715852 - DNA, 25 bp, Homo sapien
ttccaagatttgtcctccctcagtc

SEQ ID NO: 2715853 - DNA, 25 bp, Homo sapien
ctctttccaagatttgtcctccctc

SEQ ID NO: 2715854 - DNA, 25 bp, Homo sapien
ctttccaagatttgtcctccctcag

SEQ ID NO: 2715855 - DNA, 25 bp, Homo sapien
tccaagatttgtcctccctcagtcc

SEQ ID NO: 2715856 - DNA, 25 bp, Homo sapien
catatgtgccaggaggttgctttat

SEQ ID NO: 2715857 - DNA, 25 bp, Homo sapien
tgatagggttttggcctatcatatg

SEQ ID NO: 2715858 - DNA, 25 bp, Homo sapien
gaatgttgttcacaaatcccaagtg

SEQ ID NO: 2715859 - DNA, 25 bp, Homo sapien
actggagaatgttgttcacaaatcc

SEQ ID NO: 2715860 - DNA, 25 bp, Homo sapien
ctgtatggcgttgagaggggacagc

SEQ ID NO: 2715861 - DNA, 25 bp, Homo sapien
ggcgttgagaggggacagcaggtat

SEQ ID NO: 2715862 - DNA, 25 bp, Homo sapien
atggcgttgagaggggacagcaggt

SEQ ID NO: 2715863 - DNA, 25 bp, Homo sapien
gtatggcgttgagaggggacagcag

SEQ ID NO: 2715864 - DNA, 25 bp, Homo sapien
ccttgatgtgcagggtctggtctcc

SEQ ID NO: 2715865 - DNA, 25 bp, Homo sapien
ggcccttcgctaggcaggtctgcgg

SEQ ID NO: 2715866 - DNA, 25 bp, Homo sapien
tatgatcctcttatgtgtcaggagc

SEQ ID NO: 2715867 - DNA, 25 bp, Homo sapien
tttgcaaagtgcgtttatgatcctc

SEQ ID NO: 2715868 - DNA, 25 bp, Homo sapien
aggcagcagcgcagaaagggaccca

SEQ ID NO: 2715869 - DNA, 25 bp, Homo sapien
aggagatgcacaatagcttgactgg

SEQ ID NO: 2715870 - DNA, 25 bp, Homo sapien
catcacagacaatgcttaggcagca

SEQ ID NO: 2715871 - DNA, 25 bp, Homo sapien
gagcaggagatgcacaatagcttga

SEQ ID NO: 2715872 - DNA, 25 bp, Homo sapien
agatgcttgcccgatctggctggcc

SEQ ID NO: 2715873 - DNA, 25 bp, Homo sapien
ccacttagcattcatagaagtcttc

SEQ ID NO: 2715874 - DNA, 25 bp, Homo sapien
tgcaagagatctcgctaagcctttc

SEQ ID NO: 2715875 - DNA, 25 bp, Homo sapien
tgactttgcaagagatctcgctaag

SEQ ID NO: 2715876 - DNA, 25 bp, Homo sapien
taactgtcgttctccctcaattttg

SEQ ID NO: 2715877 - DNA, 25 bp, Homo sapien
aatgaatgcctttccgtttgactac

SEQ ID NO: 2715878 - DNA, 25 bp, Homo sapien
ctggacccttgatccatctccaaaa

SEQ ID NO: 2715879 - DNA, 25 bp, Homo sapien
ttttcagtgtctccgatgagcctgg

SEQ ID NO: 2715880 - DNA, 25 bp, Homo sapien
catgtgactgcttcggagaggatga

SEQ ID NO: 2715881 - DNA, 25 bp, Homo sapien
cagtttgggacctctggtgcagaga

SEQ ID NO: 2715882 - DNA, 25 bp, Homo sapien
tagaaagagtctgagcctcacccca

SEQ ID NO: 2715883 - DNA, 25 bp, Homo sapien
gagaaaacaggcctacagatctacc

SEQ ID NO: 2715884 - DNA, 25 bp, Homo sapien
tgaactgtagcatagacccttagag

SEQ ID NO: 2715885 - DNA, 25 bp, Homo sapien
ataattggtacaggcaacaagtgcc

SEQ ID NO: 2715886 - DNA, 25 bp, Homo sapien
tagaacctgggtaggcaactgggta

SEQ ID NO: 2715887 - DNA, 25 bp, Homo sapien
tatgaagacctgtgcttgtgcctga

SEQ ID NO: 2715888 - DNA, 25 bp, Homo sapien
gagcttggtcccacagaatacagtg

SEQ ID NO: 2715889 - DNA, 25 bp, Homo sapien
tctgggctatcccaggttcaggcgg

SEQ ID NO: 2715890 - DNA, 25 bp, Homo sapien
gctttttgccccatacagctgctca

SEQ ID NO: 2715891 - DNA, 25 bp, Homo sapien
tctgacacccggaacagagcttggt

SEQ ID NO: 2715892 - DNA, 25 bp, Homo sapien
gccatgaacttcctagaatactcag

SEQ ID NO: 2715893 - DNA, 25 bp, Homo sapien
tgccatgaacttcctagaatactca

SEQ ID NO: 2715894 - DNA, 25 bp, Homo sapien
tatgccatgaacttcctagaatact

SEQ ID NO: 2715895 - DNA, 25 bp, Homo sapien
ttatgccatgaacttcctagaatac

SEQ ID NO: 2715896 - DNA, 25 bp, Homo sapien
cttcaccgcgtagtcgtcccctgag

SEQ ID NO: 2715897 - DNA, 25 bp, Homo sapien
ttcaccgcgtagtcgtcccctgagc

SEQ ID NO: 2715898 - DNA, 25 bp, Homo sapien
gcccctagcccaacataaaatataa

SEQ ID NO: 2715899 - DNA, 25 bp, Homo sapien
ggcaggcccctagcccaacataaaa

SEQ ID NO: 2715900 - DNA, 25 bp, Homo sapien
cttgtaaatgtcctccaggcaggcc

SEQ ID NO: 2715901 - DNA, 25 bp, Homo sapien
aaatataaaagccagtaccaggaca

SEQ ID NO: 2715902 - DNA, 25 bp, Homo sapien
tcaaaaacctgaagtgccggattgt

SEQ ID NO: 2715903 - DNA, 25 bp, Homo sapien
tgcctgccaatgaagttcaatgatt

SEQ ID NO: 2715904 - DNA, 25 bp, Homo sapien
tgctgaattcgttaccctttggtgg

SEQ ID NO: 2715905 - DNA, 25 bp, Homo sapien
gccggattgtgggtctgctgaattc

SEQ ID NO: 2715906 - DNA, 25 bp, Homo sapien
catcttggtccctatctccatttga

SEQ ID NO: 2715907 - DNA, 25 bp, Homo sapien
atcttggtccctatctccatttgac

SEQ ID NO: 2715908 - DNA, 25 bp, Homo sapien
gggctcctacttgtggtcctctgtt

SEQ ID NO: 2715909 - DNA, 25 bp, Homo sapien
tgcccaagtgggctcctacttgtgg

SEQ ID NO: 2715910 - DNA, 25 bp, Homo sapien
ctcctacttgtggtcctctgtttcc

SEQ ID NO: 2715911 - DNA, 25 bp, Homo sapien
aagtgggctcctacttgtggtcctc

SEQ ID NO: 2715912 - DNA, 25 bp, Homo sapien
gacttctactgcattatctccatcc

SEQ ID NO: 2715913 - DNA, 25 bp, Homo sapien
gggaccaccttgacttctactgcat

SEQ ID NO: 2715914 - DNA, 25 bp, Homo sapien
gattccctctctggtaagatggtcc

SEQ ID NO: 2715915 - DNA, 25 bp, Homo sapien
cttgacttctactgcattatctcca

SEQ ID NO: 2715916 - DNA, 25 bp, Homo sapien
tctaatgagatgttgcagcctgaac

SEQ ID NO: 2715917 - DNA, 25 bp, Homo sapien
gagcagcactgctaaggtaccagga

SEQ ID NO: 2715918 - DNA, 25 bp, Homo sapien
ccctattagaatgttgacacgtgca

SEQ ID NO: 2715919 - DNA, 25 bp, Homo sapien
tgaatacagatagcagcaggaacct

SEQ ID NO: 2715920 - DNA, 25 bp, Homo sapien
cctgccttgtacaatggcataaaac

SEQ ID NO: 2715921 - DNA, 25 bp, Homo sapien
ctgccttgtacaatggcataaaaca

SEQ ID NO: 2715922 - DNA, 25 bp, Homo sapien
tcctgccttgtacaatggcataaaa

SEQ ID NO: 2715923 - DNA, 25 bp, Homo sapien
tacttgcatgcagaagagcccattg

SEQ ID NO: 2715924 - DNA, 25 bp, Homo sapien
tataagagcagatagtcaagggcct

SEQ ID NO: 2715925 - DNA, 25 bp, Homo sapien
cctacttgcatgcagaagagcccat

SEQ ID NO: 2715926 - DNA, 25 bp, Homo sapien
tcttcctacttgcatgcagaagagc

SEQ ID NO: 2715927 - DNA, 25 bp, Homo sapien
gcttcattcctagcagaggaggctg

SEQ ID NO: 2715928 - DNA, 25 bp, Homo sapien
tcagtctcccgcagagtgaaccctt

SEQ ID NO: 2715929 - DNA, 25 bp, Homo sapien
ccttaaagaagctttcctggtggtg

SEQ ID NO: 2715930 - DNA, 25 bp, Homo sapien
gagctgaaatgttcaaaaccgtcag

SEQ ID NO: 2715931 - DNA, 25 bp, Homo sapien
ttggcaatctctgtgcaaagctcat

SEQ ID NO: 2715932 - DNA, 25 bp, Homo sapien
gctgtgagacataaggaaactctga

SEQ ID NO: 2715933 - DNA, 25 bp, Homo sapien
cttttgggttggcaatctctgtgca

SEQ ID NO: 2715934 - DNA, 25 bp, Homo sapien
cccaggctgtgagacataaggaaac

SEQ ID NO: 2715935 - DNA, 25 bp, Homo sapien
tatatagctttgcagtcaacatgca

SEQ ID NO: 2715936 - DNA, 25 bp, Homo sapien
gacctgttaaatcactcaacacaca

SEQ ID NO: 2715937 - DNA, 25 bp, Homo sapien
tttatatagctttgcagtcaacatg

SEQ ID NO: 2715938 - DNA, 25 bp, Homo sapien
agttcaatagccagacctgttaaat

SEQ ID NO: 2715939 - DNA, 25 bp, Homo sapien
tgctgtttttctttcctgacatcca

SEQ ID NO: 2715940 - DNA, 25 bp, Homo sapien
ctgctgtttttctttcctgacatcc

SEQ ID NO: 2715941 - DNA, 25 bp, Homo sapien
gctgtttttctttcctgacatccat

SEQ ID NO: 2715942 - DNA, 25 bp, Homo sapien
gagcctgaagtctccattgggcctt

SEQ ID NO: 2715943 - DNA, 25 bp, Homo sapien
ggtgagcctgaagtctccattgggc

SEQ ID NO: 2715944 - DNA, 25 bp, Homo sapien
actcctctttctgtcagcaggcatt

SEQ ID NO: 2715945 - DNA, 25 bp, Homo sapien
cactcctctttctgtcagcaggcat

SEQ ID NO: 2715946 - DNA, 25 bp, Homo sapien
ctttgtttcggtccccagactgctc

SEQ ID NO: 2715947 - DNA, 25 bp, Homo sapien
actcccttagggattcttgaggtgg

SEQ ID NO: 2715948 - DNA, 25 bp, Homo sapien
tcatttctttgtttcggtccccaga

SEQ ID NO: 2715949 - DNA, 25 bp, Homo sapien
tataactcccttagggattcttgag

SEQ ID NO: 2715950 - DNA, 25 bp, Homo sapien
cctttaagtgcttgtcgcattgtct

SEQ ID NO: 2715951 - DNA, 25 bp, Homo sapien
taagtctacagatggtgtcattgcc

SEQ ID NO: 2715952 - DNA, 25 bp, Homo sapien
tgcctgtgcactcaaatgatttggt

SEQ ID NO: 2715953 - DNA, 25 bp, Homo sapien
cattgtctcaagtagaatctcagag

SEQ ID NO: 2715954 - DNA, 25 bp, Homo sapien
tttctgagtgatgctgagacttgca

SEQ ID NO: 2715955 - DNA, 25 bp, Homo sapien
ggtctaccgaccatgatacaacttt

SEQ ID NO: 2715956 - DNA, 25 bp, Homo sapien
ttctctgttgtctctggtctaccga

SEQ ID NO: 2715957 - DNA, 25 bp, Homo sapien
gatacttaatagtgccttgggaaca

SEQ ID NO: 2715958 - DNA, 25 bp, Homo sapien
ggatgtgaggtcctacagattgaaa

SEQ ID NO: 2715959 - DNA, 25 bp, Homo sapien
tgtgaggtcctacagattgaaattt

SEQ ID NO: 2715960 - DNA, 25 bp, Homo sapien
gaggtcctacagattgaaattttct

SEQ ID NO: 2715961 - DNA, 25 bp, Homo sapien
tgaggtcctacagattgaaattttc

SEQ ID NO: 2715962 - DNA, 25 bp, Homo sapien
gccactgtgtatgggatctcaaatt

SEQ ID NO: 2715963 - DNA, 25 bp, Homo sapien
ttgccactgtgtatgggatctcaaa

SEQ ID NO: 2715964 - DNA, 25 bp, Homo sapien
ctgtgtatgggatctcaaattacag

SEQ ID NO: 2715965 - DNA, 25 bp, Homo sapien
cactgtgtatgggatctcaaattac

SEQ ID NO: 2715966 - DNA, 25 bp, Homo sapien
catagactcctttggagaactggga

SEQ ID NO: 2715967 - DNA, 25 bp, Homo sapien
gaaagctcggcgtaatgaagcagac

SEQ ID NO: 2715968 - DNA, 25 bp, Homo sapien
tggatgtatcaacgggaaagctcgg

SEQ ID NO: 2715969 - DNA, 25 bp, Homo sapien
cccggtcggcatcataaatgtagac

SEQ ID NO: 2715970 - DNA, 25 bp, Homo sapien
tctcagcagctgtatccaggacttt

SEQ ID NO: 2715971 - DNA, 25 bp, Homo sapien
aggactttctgcaggacggataagc

SEQ ID NO: 2715972 - DNA, 25 bp, Homo sapien
ctcagcagctgtatccaggactttc

SEQ ID NO: 2715973 - DNA, 25 bp, Homo sapien
cttctcagcagctgtatccaggact

SEQ ID NO: 2715974 - DNA, 25 bp, Homo sapien
gcccaagatagcattgaggcgttct

SEQ ID NO: 2715975 - DNA, 25 bp, Homo sapien
aagagcatccggtatccctcctctg

SEQ ID NO: 2715976 - DNA, 25 bp, Homo sapien
ggtcctgaaagagcatccggtatcc

SEQ ID NO: 2715977 - DNA, 25 bp, Homo sapien
ctggcccaagatagcattgaggcgt

SEQ ID NO: 2715978 - DNA, 25 bp, Homo sapien
aatgtagtggtagccgatgccattc

SEQ ID NO: 2715979 - DNA, 25 bp, Homo sapien
caagaatgtagtggtagccgatgcc

SEQ ID NO: 2715980 - DNA, 25 bp, Homo sapien
atttgcaagaatgtagtggtagccg

SEQ ID NO: 2715981 - DNA, 25 bp, Homo sapien
agtggtagccgatgccattcttctc

SEQ ID NO: 2715982 - DNA, 25 bp, Homo sapien
aaaggacttgagctgagagcctgca

SEQ ID NO: 2715983 - DNA, 25 bp, Homo sapien
gaaaggacttgagctgagagcctgc

SEQ ID NO: 2715984 - DNA, 25 bp, Homo sapien
ggacaacagaagcaaggtagggccc

SEQ ID NO: 2715985 - DNA, 25 bp, Homo sapien
tcagttcacatcagccagggacaac

SEQ ID NO: 2715986 - DNA, 25 bp, Homo sapien
cctctgtggtgtgtctgtagagcca

SEQ ID NO: 2715987 - DNA, 25 bp, Homo sapien
tggaaaatgcggcactaacaagtga

SEQ ID NO: 2715988 - DNA, 25 bp, Homo sapien
tcaaaacagaggacctgtggacctc

SEQ ID NO: 2715989 - DNA, 25 bp, Homo sapien
agtgaatgcttcagtgccactgcga

SEQ ID NO: 2715990 - DNA, 25 bp, Homo sapien
gatgagtttcataggtacccttcag

SEQ ID NO: 2715991 - DNA, 25 bp, Homo sapien
acacagaggcatatgggcacattgt

SEQ ID NO: 2715992 - DNA, 25 bp, Homo sapien
caagtgaatactccaaatcctagcc

SEQ ID NO: 2715993 - DNA, 25 bp, Homo sapien
ttttataaaatgaggcgccgggtga

SEQ ID NO: 2715994 - DNA, 25 bp, Homo sapien
aattagtgctaaggggcccctcttg

SEQ ID NO: 2715995 - DNA, 25 bp, Homo sapien
gtgacagtgagtttccatgctctgt

SEQ ID NO: 2715996 - DNA, 25 bp, Homo sapien
gcaatcatagtcactgtcttacata

SEQ ID NO: 2715997 - DNA, 25 bp, Homo sapien
ccatgctctgtcagagcaatcatag

SEQ ID NO: 2715998 - DNA, 25 bp, Homo sapien
cagctggaaacctgtcacattggcg

SEQ ID NO: 2715999 - DNA, 25 bp, Homo sapien
cagtccacccgtgtgtggtctcgag

SEQ ID NO: 2716000 - DNA, 25 bp, Homo sapien
gctgcatgatcttggccggaatagt

SEQ ID NO: 2716001 - DNA, 25 bp, Homo sapien
ggtctcgagcatcactattcttcca

SEQ ID NO: 2716002 - DNA, 25 bp, Homo sapien
ccccatcgtaggtgagcgcagaggt

SEQ ID NO: 2716003 - DNA, 25 bp, Homo sapien
tcaccttcaccccatcgtaggtgag

SEQ ID NO: 2716004 - DNA, 25 bp, Homo sapien
ccccggcgagatatatcaattctct

SEQ ID NO: 2716005 - DNA, 25 bp, Homo sapien
tctggatgtcgatcccttggcccca

SEQ ID NO: 2716006 - DNA, 25 bp, Homo sapien
tttcatttcaatcacgtggagcgtg

SEQ ID NO: 2716007 - DNA, 25 bp, Homo sapien
agcgtgtagttggtccggcgtcctt

SEQ ID NO: 2716008 - DNA, 25 bp, Homo sapien
ttcctgttaaaccttcaaatcgcac

SEQ ID NO: 2716009 - DNA, 25 bp, Homo sapien
tcggatgccgtcatgtttcatttca

SEQ ID NO: 2716010 - DNA, 25 bp, Homo sapien
ctgtaagtcaaggcaggttactgta

SEQ ID NO: 2716011 - DNA, 25 bp, Homo sapien
gtcaaggcaggttactgtagctgat

SEQ ID NO: 2716012 - DNA, 25 bp, Homo sapien
tgttgtgacgatgtatgttctgttc

SEQ ID NO: 2716013 - DNA, 25 bp, Homo sapien
cccagcttgggcatcggtggctgca

SEQ ID NO: 2716014 - DNA, 25 bp, Homo sapien
ttctgaacacttgaattatcgcccc

SEQ ID NO: 2716015 - DNA, 25 bp, Homo sapien
cacttgaattatcgcccccagcttg

SEQ ID NO: 2716016 - DNA, 25 bp, Homo sapien
tcactgacaatctccagacggtagg

SEQ ID NO: 2716017 - DNA, 25 bp, Homo sapien
tacacagtagccctcgtaacggtca

SEQ ID NO: 2716018 - DNA, 25 bp, Homo sapien
ttcgtgtcagggtctcgggctccgt

SEQ ID NO: 2716019 - DNA, 25 bp, Homo sapien
aactgattggcgttcttcttgagca

SEQ ID NO: 2716020 - DNA, 25 bp, Homo sapien
ttacagggtttcatagacatctgtg

SEQ ID NO: 2716021 - DNA, 25 bp, Homo sapien
tacagggtttcatagacatctgtgg

SEQ ID NO: 2716022 - DNA, 25 bp, Homo sapien
tgatttcctgtcaaaccctctgcct

SEQ ID NO: 2716023 - DNA, 25 bp, Homo sapien
tgggcagggccacccaaccaccaaa

SEQ ID NO: 2716024 - DNA, 25 bp, Homo sapien
accagctgtgttggctactggggat

SEQ ID NO: 2716025 - DNA, 25 bp, Homo sapien
cacattacatgaggtgaaggtgaag

SEQ ID NO: 2716026 - DNA, 25 bp, Homo sapien
gctactggggatgatcctggcattg

SEQ ID NO: 2716027 - DNA, 25 bp, Homo sapien
cagacttttaaccaagcaaaccaca

SEQ ID NO: 2716028 - DNA, 25 bp, Homo sapien
ggattccctcagaatctgtgtcaat

SEQ ID NO: 2716029 - DNA, 25 bp, Homo sapien
cctggattccctcagaatctgtgtc

SEQ ID NO: 2716030 - DNA, 25 bp, Homo sapien
tcagaatctgtgtcaatacatccct

SEQ ID NO: 2716031 - DNA, 25 bp, Homo sapien
ctcagaatctgtgtcaatacatccc

SEQ ID NO: 2716032 - DNA, 25 bp, Homo sapien
caaagtgatagttaagggagccaca

SEQ ID NO: 2716033 - DNA, 25 bp, Homo sapien
gaccaaagtgatagttaagggagcc

SEQ ID NO: 2716034 - DNA, 25 bp, Homo sapien
agtgatagttaagggagccacagcc

SEQ ID NO: 2716035 - DNA, 25 bp, Homo sapien
cggaccaaagtgatagttaagggag

SEQ ID NO: 2716036 - DNA, 25 bp, Homo sapien
gatccccaaactcataaatggtttg

SEQ ID NO: 2716037 - DNA, 25 bp, Homo sapien
tggagatccccaaactcataaatgg

SEQ ID NO: 2716038 - DNA, 25 bp, Homo sapien
taaatggtttggagaaatctataac

SEQ ID NO: 2716039 - DNA, 25 bp, Homo sapien
gatggagatccccaaactcataaat

SEQ ID NO: 2716040 - DNA, 25 bp, Homo sapien
tggtcactggttgtctggtcccgtc

SEQ ID NO: 2716041 - DNA, 25 bp, Homo sapien
catagggactgaagcggctgaccag

SEQ ID NO: 2716042 - DNA, 25 bp, Homo sapien
gacacccggcttggatttctgtggt

SEQ ID NO: 2716043 - DNA, 25 bp, Homo sapien
aggaagaggacaacactcactccaa

SEQ ID NO: 2716044 - DNA, 25 bp, Homo sapien
aacaaaaccatagcattaggcaaag

SEQ ID NO: 2716045 - DNA, 25 bp, Homo sapien
caaaaccatagcattaggcaaaggg

SEQ ID NO: 2716046 - DNA, 25 bp, Homo sapien
acaaaaccatagcattaggcaaagg

SEQ ID NO: 2716047 - DNA, 25 bp, Homo sapien
actgtcaaggtgaaatatgctggtg

SEQ ID NO: 2716048 - DNA, 25 bp, Homo sapien
aactgtcaaggtgaaatatgctggt

SEQ ID NO: 2716049 - DNA, 25 bp, Homo sapien
aaactgtcaaggtgaaatatgctgg

SEQ ID NO: 2716050 - DNA, 25 bp, Homo sapien
agtccctttgtgttggtgttgcttg

SEQ ID NO: 2716051 - DNA, 25 bp, Homo sapien
tagttagccttgtgcctaatgcaag

SEQ ID NO: 2716052 - DNA, 25 bp, Homo sapien
caaggtttagatcccaggtggtgct

SEQ ID NO: 2716053 - DNA, 25 bp, Homo sapien
cttgcttctttaaatctgccataat

SEQ ID NO: 2716054 - DNA, 25 bp, Homo sapien
tttaaaacatcggagtgatgactcc

SEQ ID NO: 2716055 - DNA, 25 bp, Homo sapien
actgggatgggatgagtgatgctgc

SEQ ID NO: 2716056 - DNA, 25 bp, Homo sapien
tgccaatatcctccagtcataacac

SEQ ID NO: 2716057 - DNA, 25 bp, Homo sapien
gggatgagtgatgctgccaatatcc

SEQ ID NO: 2716058 - DNA, 25 bp, Homo sapien
aatagcctctggactttcctctggc

SEQ ID NO: 2716059 - DNA, 25 bp, Homo sapien
gcttagatttgaggcatacagtgaa

SEQ ID NO: 2716060 - DNA, 25 bp, Homo sapien
aagaagtgatagagtctgatcaagg

SEQ ID NO: 2716061 - DNA, 25 bp, Homo sapien
tctgatcaaggtggttaaagggctt

SEQ ID NO: 2716062 - DNA, 25 bp, Homo sapien
aaagggcttagatttgaggcataca

SEQ ID NO: 2716063 - DNA, 25 bp, Homo sapien
tgattgggtttaagtgagaaaggaa

SEQ ID NO: 2716064 - DNA, 25 bp, Homo sapien
tccactcttggtgaactgttgccat

SEQ ID NO: 2716065 - DNA, 25 bp, Homo sapien
atttgtaacgctttcctctgtaggg

SEQ ID NO: 2716066 - DNA, 25 bp, Homo sapien
aacacttgaggagcacccatttttg

SEQ ID NO: 2716067 - DNA, 25 bp, Homo sapien
caaaaacatgattgcacaagggatc

SEQ ID NO: 2716068 - DNA, 25 bp, Homo sapien
tacttttcctgttggtagcactcct

SEQ ID NO: 2716069 - DNA, 25 bp, Homo sapien
acttttcctgttggtagcactcctt

SEQ ID NO: 2716070 - DNA, 25 bp, Homo sapien
tttcagaggtgagatgggctccaag

SEQ ID NO: 2716071 - DNA, 25 bp, Homo sapien
tctctgcctcagtgggccaggtgtg

SEQ ID NO: 2716072 - DNA, 25 bp, Homo sapien
gctgatccatcagctcattttcaga

SEQ ID NO: 2716073 - DNA, 25 bp, Homo sapien
ggctccaagggcctgggtctctgcc

SEQ ID NO: 2716074 - DNA, 25 bp, Homo sapien
caacaattccactgatgaggccact

SEQ ID NO: 2716075 - DNA, 25 bp, Homo sapien
gatactgggcatcgaggttcctaga

SEQ ID NO: 2716076 - DNA, 25 bp, Homo sapien
tgaggccacttcatccaagatgctg

SEQ ID NO: 2716077 - DNA, 25 bp, Homo sapien
ggtaattagtgctggccaaatgcaa

SEQ ID NO: 2716078 - DNA, 25 bp, Homo sapien
ctgtcatttttggaataactggaga

SEQ ID NO: 2716079 - DNA, 25 bp, Homo sapien
tgtcatttttggaataactggagag

SEQ ID NO: 2716080 - DNA, 25 bp, Homo sapien
cccgcctactgaatgacgataccaa

SEQ ID NO: 2716081 - DNA, 25 bp, Homo sapien
ctgaatgacgataccaaagaaagag

SEQ ID NO: 2716082 - DNA, 25 bp, Homo sapien
ttgaacgatagtccctacatccccg

SEQ ID NO: 2716083 - DNA, 25 bp, Homo sapien
tacatccccgcctactgaatgacga

SEQ ID NO: 2716084 - DNA, 25 bp, Homo sapien
cccatgactgatcagcatcagagtt

SEQ ID NO: 2716085 - DNA, 25 bp, Homo sapien
ccatgactgatcagcatcagagttt

SEQ ID NO: 2716086 - DNA, 25 bp, Homo sapien
ggtggtgactcttggtcccccagga

SEQ ID NO: 2716087 - DNA, 25 bp, Homo sapien
ttggtggtgactcttggtcccccag

SEQ ID NO: 2716088 - DNA, 25 bp, Homo sapien
ccaggacaccaagtgctgggaatgc

SEQ ID NO: 2716089 - DNA, 25 bp, Homo sapien
tcccccaggacaccaagtgctggga

SEQ ID NO: 2716090 - DNA, 25 bp, Homo sapien
tctgcactctcaatgggagacacca

SEQ ID NO: 2716091 - DNA, 25 bp, Homo sapien
tccagcgtcccgtaggcaatttctg

SEQ ID NO: 2716092 - DNA, 25 bp, Homo sapien
ccagattggctgtatatgaggagat

SEQ ID NO: 2716093 - DNA, 25 bp, Homo sapien
tgtctgcttcgctaggtcctctgca

SEQ ID NO: 2716094 - DNA, 25 bp, Homo sapien
agggtttccgctgctcaatgtactc

SEQ ID NO: 2716095 - DNA, 25 bp, Homo sapien
tggatttcctcactcgaatcatccc

SEQ ID NO: 2716096 - DNA, 25 bp, Homo sapien
tgtggtccgcacaaaaactgatggc

SEQ ID NO: 2716097 - DNA, 25 bp, Homo sapien
tcccaccttcatggtgtcacagggt

SEQ ID NO: 2716098 - DNA, 25 bp, Homo sapien
ccttgggtgttgcaatgccatagcc

SEQ ID NO: 2716099 - DNA, 25 bp, Homo sapien
agaccccttgggtgttgcaatgcca

SEQ ID NO: 2716100 - DNA, 25 bp, Homo sapien
ggcagaccccttgggtgttgcaatg

SEQ ID NO: 2716101 - DNA, 25 bp, Homo sapien
cagggcagaccccttgggtgttgca

SEQ ID NO: 2716102 - DNA, 25 bp, Homo sapien
tcaggcccataggtgttgaagaaga

SEQ ID NO: 2716103 - DNA, 25 bp, Homo sapien
gaagagccccctcaacagcttgcat

SEQ ID NO: 2716104 - DNA, 25 bp, Homo sapien
cccataggtgttgaagaagagcccc

SEQ ID NO: 2716105 - DNA, 25 bp, Homo sapien
cattgtggcattggaggcttgtagc

SEQ ID NO: 2716106 - DNA, 25 bp, Homo sapien
gccatttatgagcttctcaaccagg

SEQ ID NO: 2716107 - DNA, 25 bp, Homo sapien
tcaaccaggcattataaaatggagc

SEQ ID NO: 2716108 - DNA, 25 bp, Homo sapien
agcctgcactgagctgctgttctca

SEQ ID NO: 2716109 - DNA, 25 bp, Homo sapien
caagacagcctcttaaaagaaagca

SEQ ID NO: 2716110 - DNA, 25 bp, Homo sapien
ttataatgggattccatgagaggtt

SEQ ID NO: 2716111 - DNA, 25 bp, Homo sapien
ccagccccttatctcttgcagctcc

SEQ ID NO: 2716112 - DNA, 25 bp, Homo sapien
tccagccccttatctcttgcagctc

SEQ ID NO: 2716113 - DNA, 25 bp, Homo sapien
tataatgggattccatgagaggttt

SEQ ID NO: 2716114 - DNA, 25 bp, Homo sapien
gaacttccttgagtgctatgctaga

SEQ ID NO: 2716115 - DNA, 25 bp, Homo sapien
gaggttagaacagctgacagagtcc

SEQ ID NO: 2716116 - DNA, 25 bp, Homo sapien
tgttctgtgaaaagggcaaagtccc

SEQ ID NO: 2716117 - DNA, 25 bp, Homo sapien
cccacccgaggagtgtagtcatgat

SEQ ID NO: 2716118 - DNA, 25 bp, Homo sapien
taggaataacaacttgaacaaattg

SEQ ID NO: 2716119 - DNA, 25 bp, Homo sapien
gaataacaacttgaacaaattgtaa

SEQ ID NO: 2716120 - DNA, 25 bp, Homo sapien
ggaataacaacttgaacaaattgta

SEQ ID NO: 2716121 - DNA, 25 bp, Homo sapien
caacttgaacaaattgtaaacctct

SEQ ID NO: 2716122 - DNA, 25 bp, Homo sapien
gatgtgtattggtcttagtcttcaa

SEQ ID NO: 2716123 - DNA, 25 bp, Homo sapien
cagagtaaagagttagtgtctttgg

SEQ ID NO: 2716124 - DNA, 25 bp, Homo sapien
tttgggtcaacacttcaaacattta

SEQ ID NO: 2716125 - DNA, 25 bp, Homo sapien
tgaagatcaatcaagtgttaagcat

SEQ ID NO: 2716126 - DNA, 25 bp, Homo sapien
ggctgctgggcatcctactttctca

SEQ ID NO: 2716127 - DNA, 25 bp, Homo sapien
tgctttgcttgtcctcctacagagg

SEQ ID NO: 2716128 - DNA, 25 bp, Homo sapien
ctgatttaatcagaccaggctgctg

SEQ ID NO: 2716129 - DNA, 25 bp, Homo sapien
taaaacagacctgcgaggaccatca

SEQ ID NO: 2716130 - DNA, 25 bp, Homo sapien
gcctcctgtggcttcagattttcca

SEQ ID NO: 2716131 - DNA, 25 bp, Homo sapien
ctcctgtggcttcagattttccact

SEQ ID NO: 2716132 - DNA, 25 bp, Homo sapien
tggcttcagattttccacttgccat

SEQ ID NO: 2716133 - DNA, 25 bp, Homo sapien
ctgcctcctgtggcttcagattttc

SEQ ID NO: 2716134 - DNA, 25 bp, Homo sapien
taggaacaactcactaaggtcaatg

SEQ ID NO: 2716135 - DNA, 25 bp, Homo sapien
tagtgacttattaagaatgcttgaa

SEQ ID NO: 2716136 - DNA, 25 bp, Homo sapien
tgaatacgcaaataagagattggtc

SEQ ID NO: 2716137 - DNA, 25 bp, Homo sapien
cactaaggtcaatgtggaatgtttt

SEQ ID NO: 2716138 - DNA, 25 bp, Homo sapien
gtcttgggcaagcagtgactggtcc

SEQ ID NO: 2716139 - DNA, 25 bp, Homo sapien
aggtgctgttctagaaaaatcaatg

SEQ ID NO: 2716140 - DNA, 25 bp, Homo sapien
tgtctttcagttggctagatttggg

SEQ ID NO: 2716141 - DNA, 25 bp, Homo sapien
aaatcaatgtctttcagttggctag

SEQ ID NO: 2716142 - DNA, 25 bp, Homo sapien
atgttaacttcactaagtagaaacg

SEQ ID NO: 2716143 - DNA, 25 bp, Homo sapien
gaacaactaccatctgctggcaact

SEQ ID NO: 2716144 - DNA, 25 bp, Homo sapien
gaaaggaagtctttaggttgaatga

SEQ ID NO: 2716145 - DNA, 25 bp, Homo sapien
ggaccaacataggtgtgtgttaaat

SEQ ID NO: 2716146 - DNA, 25 bp, Homo sapien
tgtattctaatccaatgccattgat

SEQ ID NO: 2716147 - DNA, 25 bp, Homo sapien
tccagcagattcactgtattctaat

SEQ ID NO: 2716148 - DNA, 25 bp, Homo sapien
cctatgatatttgccctccagcaga

SEQ ID NO: 2716149 - DNA, 25 bp, Homo sapien
ccctatgatatttgccctccagcag

SEQ ID NO: 2716150 - DNA, 25 bp, Homo sapien
taaggagacagaaacgaattgctaa

SEQ ID NO: 2716151 - DNA, 25 bp, Homo sapien
gacagaaacgaattgctaaaagaat

SEQ ID NO: 2716152 - DNA, 25 bp, Homo sapien
ggagacagaaacgaattgctaaaag

SEQ ID NO: 2716153 - DNA, 25 bp, Homo sapien
cagaaacgaattgctaaaagaatgg

SEQ ID NO: 2716154 - DNA, 25 bp, Homo sapien
gaaataaagtcctcactgttccact

SEQ ID NO: 2716155 - DNA, 25 bp, Homo sapien
tttagagaaagtagacggtcctcac

SEQ ID NO: 2716156 - DNA, 25 bp, Homo sapien
gctgtgaactataagaccacttttc

SEQ ID NO: 2716157 - DNA, 25 bp, Homo sapien
atcagtgcagggacaaaagggaact

SEQ ID NO: 2716158 - DNA, 25 bp, Homo sapien
tccttctcttgtctcctctacttct

SEQ ID NO: 2716159 - DNA, 25 bp, Homo sapien
ctttccttctcttgtctcctctact

SEQ ID NO: 2716160 - DNA, 25 bp, Homo sapien
tttccttctcttgtctcctctactt

SEQ ID NO: 2716161 - DNA, 25 bp, Homo sapien
ttccttctcttgtctcctctacttc

SEQ ID NO: 2716162 - DNA, 25 bp, Homo sapien
acctttatgggccagtactcctctc

SEQ ID NO: 2716163 - DNA, 25 bp, Homo sapien
gatagccactgcctatgttttgtta

SEQ ID NO: 2716164 - DNA, 25 bp, Homo sapien
ctcaatgctagggtaagtagatagc

SEQ ID NO: 2716165 - DNA, 25 bp, Homo sapien
gccaaaatggtctttgtgcctgaat

SEQ ID NO: 2716166 - DNA, 25 bp, Homo sapien
tcaagggtcaaaggagttatcaact

SEQ ID NO: 2716167 - DNA, 25 bp, Homo sapien
tggctcacccattcctctgagtgtt

SEQ ID NO: 2716168 - DNA, 25 bp, Homo sapien
gacgggcatcggtgctcatggttaa

SEQ ID NO: 2716169 - DNA, 25 bp, Homo sapien
tacagcctgaatgaaagacgggcat

SEQ ID NO: 2716170 - DNA, 25 bp, Homo sapien
cagttttaacactgccaggtttact

SEQ ID NO: 2716171 - DNA, 25 bp, Homo sapien
taacactgccaggtttactggattt

SEQ ID NO: 2716172 - DNA, 25 bp, Homo sapien
ccaaaagcccctgctcgttcagttt

SEQ ID NO: 2716173 - DNA, 25 bp, Homo sapien
agcccctgctcgttcagttttaaca

SEQ ID NO: 2716174 - DNA, 25 bp, Homo sapien
cttacttccggagtccttgcttcca

SEQ ID NO: 2716175 - DNA, 25 bp, Homo sapien
ttacttccggagtccttgcttccac

SEQ ID NO: 2716176 - DNA, 25 bp, Homo sapien
tacttccggagtccttgcttccaca

SEQ ID NO: 2716177 - DNA, 25 bp, Homo sapien
acttccggagtccttgcttccacat

SEQ ID NO: 2716178 - DNA, 25 bp, Homo sapien
catttttgttacaggtgtgcgtgac

SEQ ID NO: 2716179 - DNA, 25 bp, Homo sapien
agaacacagtggataatggagcctt

SEQ ID NO: 2716180 - DNA, 25 bp, Homo sapien
tttgaaggggtaggatcaggttcca

SEQ ID NO: 2716181 - DNA, 25 bp, Homo sapien
gaaacactggcgtgctgatattcaa

SEQ ID NO: 2716182 - DNA, 25 bp, Homo sapien
ggttgtgtgctaaacggccctgtcc

SEQ ID NO: 2716183 - DNA, 25 bp, Homo sapien
tgggttgtgtgctaaacggccctgt

SEQ ID NO: 2716184 - DNA, 25 bp, Homo sapien
taaacggccctgtcccacagcaaag

SEQ ID NO: 2716185 - DNA, 25 bp, Homo sapien
ttgtgtgctaaacggccctgtccca

SEQ ID NO: 2716186 - DNA, 25 bp, Homo sapien
tggggcttgtacacagtgtgttttc

SEQ ID NO: 2716187 - DNA, 25 bp, Homo sapien
gcagggatggggcttgtacacagtg

SEQ ID NO: 2716188 - DNA, 25 bp, Homo sapien
gatggggcttgtacacagtgtgttt

SEQ ID NO: 2716189 - DNA, 25 bp, Homo sapien
gggatggggcttgtacacagtgtgt

SEQ ID NO: 2716190 - DNA, 25 bp, Homo sapien
gggtctctttagtgcaggaacattc

SEQ ID NO: 2716191 - DNA, 25 bp, Homo sapien
agagcatcattgtgtgaattcccag

SEQ ID NO: 2716192 - DNA, 25 bp, Homo sapien
aagcggagcagagcatcattgtgtg

SEQ ID NO: 2716193 - DNA, 25 bp, Homo sapien
cttccagatggccaatgctctttac

SEQ ID NO: 2716194 - DNA, 25 bp, Homo sapien
ctgttgtcttgatttgctgtctccc

SEQ ID NO: 2716195 - DNA, 25 bp, Homo sapien
ccttccaagaatgtagggctgattc

SEQ ID NO: 2716196 - DNA, 25 bp, Homo sapien
tttccacatactgggggactgtctc

SEQ ID NO: 2716197 - DNA, 25 bp, Homo sapien
gctgtctccctcatatggaaaggag

SEQ ID NO: 2716198 - DNA, 25 bp, Homo sapien
ggagtttgagtcttctgagcacccc

SEQ ID NO: 2716199 - DNA, 25 bp, Homo sapien
gcacccctcagggtaccccattctc

SEQ ID NO: 2716200 - DNA, 25 bp, Homo sapien
tgagcacccctcagggtaccccatt

SEQ ID NO: 2716201 - DNA, 25 bp, Homo sapien
atttcacagctacacacttcccagc

SEQ ID NO: 2716202 - DNA, 25 bp, Homo sapien
ctgccacattgctgaggctcagagc

SEQ ID NO: 2716203 - DNA, 25 bp, Homo sapien
tgctgaggctcagagcgcttgtctt

SEQ ID NO: 2716204 - DNA, 25 bp, Homo sapien
tgccacattgctgaggctcagagcg

SEQ ID NO: 2716205 - DNA, 25 bp, Homo sapien
tgaggctcagagcgcttgtcttgtc

SEQ ID NO: 2716206 - DNA, 25 bp, Homo sapien
caagtcctccgatcaggatgtagaa

SEQ ID NO: 2716207 - DNA, 25 bp, Homo sapien
ggctagtccaagtcctccgatcagg

SEQ ID NO: 2716208 - DNA, 25 bp, Homo sapien
cctccgatcaggatgtagaacacgc

SEQ ID NO: 2716209 - DNA, 25 bp, Homo sapien
tagtccaagtcctccgatcaggatg

SEQ ID NO: 2716210 - DNA, 25 bp, Homo sapien
tgtagcagaactcgattaaggcaac

SEQ ID NO: 2716211 - DNA, 25 bp, Homo sapien
cttcatccgcttggattcactacgg

SEQ ID NO: 2716212 - DNA, 25 bp, Homo sapien
gattcactacgggatttgtagcaga

SEQ ID NO: 2716213 - DNA, 25 bp, Homo sapien
cgggatttgtagcagaactcgatta

SEQ ID NO: 2716214 - DNA, 25 bp, Homo sapien
atcacagaacaggttaggaaaaagg

SEQ ID NO: 2716215 - DNA, 25 bp, Homo sapien
tcctgtcttgtgctgacctcaacca

SEQ ID NO: 2716216 - DNA, 25 bp, Homo sapien
tcaccttcctcgtaacagcttcctg

SEQ ID NO: 2716217 - DNA, 25 bp, Homo sapien
tgtgctgacctcaaccacctgtcat

SEQ ID NO: 2716218 - DNA, 25 bp, Homo sapien
ctgcttcctgtcttgtgctgacctc

SEQ ID NO: 2716219 - DNA, 25 bp, Homo sapien
gatgatgctgtactgtgtcttagac

SEQ ID NO: 2716220 - DNA, 25 bp, Homo sapien
tataatctgtactgggccaactctg

SEQ ID NO: 2716221 - DNA, 25 bp, Homo sapien
ccagagcttctactctagatgatga

SEQ ID NO: 2716222 - DNA, 25 bp, Homo sapien
gatggtacaggttgtagctccccta

SEQ ID NO: 2716223 - DNA, 25 bp, Homo sapien
tggaagatgggaaattctattagga

SEQ ID NO: 2716224 - DNA, 25 bp, Homo sapien
tgggtagaagtcacaccaatcaacg

SEQ ID NO: 2716225 - DNA, 25 bp, Homo sapien
gtcacaccaatcaacggaattaatt

SEQ ID NO: 2716226 - DNA, 25 bp, Homo sapien
gatgggaaattctattaggagcctc

SEQ ID NO: 2716227 - DNA, 25 bp, Homo sapien
aatatcagctaaggattcaggagcc

SEQ ID NO: 2716228 - DNA, 25 bp, Homo sapien
gagttcacatctttgggtctctgac

SEQ ID NO: 2716229 - DNA, 25 bp, Homo sapien
ggacaggcctctgctctatacttga

SEQ ID NO: 2716230 - DNA, 25 bp, Homo sapien
gaccgaaatgttatgagctgcctga

SEQ ID NO: 2716231 - DNA, 25 bp, Homo sapien
gggtcgatgtccgtatggcttcgtt

SEQ ID NO: 2716232 - DNA, 25 bp, Homo sapien
gggagggtcgatgtccgtatggctt

SEQ ID NO: 2716233 - DNA, 25 bp, Homo sapien
cgatgtccgtatggcttcgttgatg

SEQ ID NO: 2716234 - DNA, 25 bp, Homo sapien
tccgtatggcttcgttgatggattg

SEQ ID NO: 2716235 - DNA, 25 bp, Homo sapien
gcaaggaatcgattgcatggacttg

SEQ ID NO: 2716236 - DNA, 25 bp, Homo sapien
gggcatccctgaactgtggctcatg

SEQ ID NO: 2716237 - DNA, 25 bp, Homo sapien
tgtggctcatgcaaggaatcgattg

SEQ ID NO: 2716238 - DNA, 25 bp, Homo sapien
catgcaaggaatcgattgcatggac

SEQ ID NO: 2716239 - DNA, 25 bp, Homo sapien
gagacacaggtttcattagacaggg

SEQ ID NO: 2716240 - DNA, 25 bp, Homo sapien
gaggacatacttctcagggccaagg

SEQ ID NO: 2716241 - DNA, 25 bp, Homo sapien
gcactgaatcatgcacctaggagag

SEQ ID NO: 2716242 - DNA, 25 bp, Homo sapien
tgaccacattgacacgcgagagact

SEQ ID NO: 2716243 - DNA, 25 bp, Homo sapien
gcaagaatcctttcacacatctgcc

SEQ ID NO: 2716244 - DNA, 25 bp, Homo sapien
tttgatcaagcaagaatcctttcac

SEQ ID NO: 2716245 - DNA, 25 bp, Homo sapien
tagtgtttgatcaagcaagaatcct

SEQ ID NO: 2716246 - DNA, 25 bp, Homo sapien
cagtgatttaatattcggtgatatt

SEQ ID NO: 2716247 - DNA, 25 bp, Homo sapien
ggttttacacaagcctgccagtttc

SEQ ID NO: 2716248 - DNA, 25 bp, Homo sapien
caaggtgtatgcaaacaatgactgt

SEQ ID NO: 2716249 - DNA, 25 bp, Homo sapien
caatgactgtggttttacacaagcc

SEQ ID NO: 2716250 - DNA, 25 bp, Homo sapien
agttattgtccatgctactgtttga

SEQ ID NO: 2716251 - DNA, 25 bp, Homo sapien
ttggtatttcctggccatcgttcat

SEQ ID NO: 2716252 - DNA, 25 bp, Homo sapien
tagcctgtctacgtatagggccgaa

SEQ ID NO: 2716253 - DNA, 25 bp, Homo sapien
catctacttgtggacatgggtgctc

SEQ ID NO: 2716254 - DNA, 25 bp, Homo sapien
tcagaggaccttcttcagagactgg

SEQ ID NO: 2716255 - DNA, 25 bp, Homo sapien
cagagactggacacaagaggatgat

SEQ ID NO: 2716256 - DNA, 25 bp, Homo sapien
agtctcctgtgatcttctggcttga

SEQ ID NO: 2716257 - DNA, 25 bp, Homo sapien
cactgtcggtcctactgggctggat

SEQ ID NO: 2716258 - DNA, 25 bp, Homo sapien
aaagtgtgagcttcggcagtgtgct

SEQ ID NO: 2716259 - DNA, 25 bp, Homo sapien
cacaggcatggcttcacgttcataa

SEQ ID NO: 2716260 - DNA, 25 bp, Homo sapien
agttggtgatgttgagatatctggg

SEQ ID NO: 2716261 - DNA, 25 bp, Homo sapien
ttaaatatgagctgctgtcttcttt

SEQ ID NO: 2716262 - DNA, 25 bp, Homo sapien
gagggagttggtgatgttgagatat

SEQ ID NO: 2716263 - DNA, 25 bp, Homo sapien
tctctttttgaagatgagggagttg

SEQ ID NO: 2716264 - DNA, 25 bp, Homo sapien
ctagaccacttcctctttgaggaca

SEQ ID NO: 2716265 - DNA, 25 bp, Homo sapien
gaccacttcctctttgaggacaggg

SEQ ID NO: 2716266 - DNA, 25 bp, Homo sapien
cttcctctttgaggacagggaccct

SEQ ID NO: 2716267 - DNA, 25 bp, Homo sapien
cacttcctctttgaggacagggacc

SEQ ID NO: 2716268 - DNA, 25 bp, Homo sapien
cctggtatctgcgtaagtggtgccc

SEQ ID NO: 2716269 - DNA, 25 bp, Homo sapien
tgcagaatcagcctgtgaagtcagc

SEQ ID NO: 2716270 - DNA, 25 bp, Homo sapien
tgaagtcagctcaaactgtctcagc

SEQ ID NO: 2716271 - DNA, 25 bp, Homo sapien
cagtttgggcatcctgaaccctggt

SEQ ID NO: 2716272 - DNA, 25 bp, Homo sapien
caaatggtggtttgagaggtgaaca

SEQ ID NO: 2716273 - DNA, 25 bp, Homo sapien
ggtttgagaggtgaacacaatgcat

SEQ ID NO: 2716274 - DNA, 25 bp, Homo sapien
ggttccaaggatctttatgtgcata

SEQ ID NO: 2716275 - DNA, 25 bp, Homo sapien
ttccaaggatctttatgtgcataca

SEQ ID NO: 2716276 - DNA, 25 bp, Homo sapien
cagtggaaactctgccgttgtgtac

SEQ ID NO: 2716277 - DNA, 25 bp, Homo sapien
ttagggctccagaccagtggaaact

SEQ ID NO: 2716278 - DNA, 25 bp, Homo sapien
aactctgccgttgtgtacttgtgcc

SEQ ID NO: 2716279 - DNA, 25 bp, Homo sapien
cgttgtgtacttgtgccatctggaa

SEQ ID NO: 2716280 - DNA, 25 bp, Homo sapien
tcagcacaagtcagtgacaaacttc

SEQ ID NO: 2716281 - DNA, 25 bp, Homo sapien
gtgacaaacttctccacacagttgc

SEQ ID NO: 2716282 - DNA, 25 bp, Homo sapien
gtcagtgacaaacttctccacacag

SEQ ID NO: 2716283 - DNA, 25 bp, Homo sapien
agtgacaaacttctccacacagttg

SEQ ID NO: 2716284 - DNA, 25 bp, Homo sapien
agcctgctatgtagagttgccagct

SEQ ID NO: 2716285 - DNA, 25 bp, Homo sapien
tacacctgctttatgatctgtgact

SEQ ID NO: 2716286 - DNA, 25 bp, Homo sapien
gaagcagctcaatcacgtctacacc

SEQ ID NO: 2716287 - DNA, 25 bp, Homo sapien
caggagatttgttagccattgaaaa

SEQ ID NO: 2716288 - DNA, 25 bp, Homo sapien
agcagtatggctaccacatctgcag

SEQ ID NO: 2716289 - DNA, 25 bp, Homo sapien
gcttccccaaatgttgatgctctgc

SEQ ID NO: 2716290 - DNA, 25 bp, Homo sapien
tctgcagtggctccgatctctgtta

SEQ ID NO: 2716291 - DNA, 25 bp, Homo sapien
attgctttgaggctagcagtatggc

SEQ ID NO: 2716292 - DNA, 25 bp, Homo sapien
cataaagcaaggtaatgtgtacaat

SEQ ID NO: 2716293 - DNA, 25 bp, Homo sapien
ttattttgacagtagcacataaagc

SEQ ID NO: 2716294 - DNA, 25 bp, Homo sapien
tttgacagtagcacataaagcaagg

SEQ ID NO: 2716295 - DNA, 25 bp, Homo sapien
caaggtaatgtgtacaatgacattt

SEQ ID NO: 2716296 - DNA, 25 bp, Homo sapien
ggtgcccattcaataattgcatttg

SEQ ID NO: 2716297 - DNA, 25 bp, Homo sapien
tctgaccaggagtgtttaggcttca

SEQ ID NO: 2716298 - DNA, 25 bp, Homo sapien
tctgtcctttgggaggctctaaact

SEQ ID NO: 2716299 - DNA, 25 bp, Homo sapien
taggcttcacgggtaacagtgagtg

SEQ ID NO: 2716300 - DNA, 25 bp, Homo sapien
ttttctcttggtggttgttgcttca

SEQ ID NO: 2716301 - DNA, 25 bp, Homo sapien
ttcagaatctgtcctcttggaaagg

SEQ ID NO: 2716302 - DNA, 25 bp, Homo sapien
gtggttgttgcttcattcagaatct

SEQ ID NO: 2716303 - DNA, 25 bp, Homo sapien
tggtggttgttgcttcattcagaat

SEQ ID NO: 2716304 - DNA, 25 bp, Homo sapien
tggccatcttgtaaggagccttgct

SEQ ID NO: 2716305 - DNA, 25 bp, Homo sapien
gccatcttgtaaggagccttgcttg

SEQ ID NO: 2716306 - DNA, 25 bp, Homo sapien
catcttgtaaggagccttgcttggc

SEQ ID NO: 2716307 - DNA, 25 bp, Homo sapien
atcttgtaaggagccttgcttggct

SEQ ID NO: 2716308 - DNA, 25 bp, Homo sapien
ggtggtttcagtcaacaaggtgggc

SEQ ID NO: 2716309 - DNA, 25 bp, Homo sapien
ttaggaggttctctttgtgacaaag

SEQ ID NO: 2716310 - DNA, 25 bp, Homo sapien
gactgtgactgctgatctagcccta

SEQ ID NO: 2716311 - DNA, 25 bp, Homo sapien
tcagcacagtatatggcctagtcga

SEQ ID NO: 2716312 - DNA, 25 bp, Homo sapien
tctcagagggagcatcgcaaaattg

SEQ ID NO: 2716313 - DNA, 25 bp, Homo sapien
tctgactagcagaaggaacagtgct

SEQ ID NO: 2716314 - DNA, 25 bp, Homo sapien
tcttcacttgcttgttcagggccat

SEQ ID NO: 2716315 - DNA, 25 bp, Homo sapien
ttcttcacttgcttgttcagggcca

SEQ ID NO: 2716316 - DNA, 25 bp, Homo sapien
ctgggtccttgaggtaagattcttc

SEQ ID NO: 2716317 - DNA, 25 bp, Homo sapien
cttgaggtaagattcttctgtaagc

SEQ ID NO: 2716318 - DNA, 25 bp, Homo sapien
ccatagagaggtgtctgcaaagctg

SEQ ID NO: 2716319 - DNA, 25 bp, Homo sapien
tgccatagagaggtgtctgcaaagc

SEQ ID NO: 2716320 - DNA, 25 bp, Homo sapien
gagtcttgtgtctccataatgggcc

SEQ ID NO: 2716321 - DNA, 25 bp, Homo sapien
tcatcagtggcctttggtaaacaaa

SEQ ID NO: 2716322 - DNA, 25 bp, Homo sapien
gtaaacaaagttcccagtagctgga

SEQ ID NO: 2716323 - DNA, 25 bp, Homo sapien
aagatacatcggcttggctaccaca

SEQ ID NO: 2716324 - DNA, 25 bp, Homo sapien
aaagggccagacaactgtgacttaa

SEQ ID NO: 2716325 - DNA, 25 bp, Homo sapien
caactgtgacttaagggcagggtca

SEQ ID NO: 2716326 - DNA, 25 bp, Homo sapien
aagaaagggccagacaactgtgact

SEQ ID NO: 2716327 - DNA, 25 bp, Homo sapien
aactgtgacttaagggcagggtcat

SEQ ID NO: 2716328 - DNA, 25 bp, Homo sapien
gggactagaggtgcgtgccagcatg

SEQ ID NO: 2716329 - DNA, 25 bp, Homo sapien
gatagtctcaatctcttcacctcgt

SEQ ID NO: 2716330 - DNA, 25 bp, Homo sapien
ggatagtctcaatctcttcacctcg

SEQ ID NO: 2716331 - DNA, 25 bp, Homo sapien
actagaggtgcgtgccagcatgccc

SEQ ID NO: 2716332 - DNA, 25 bp, Homo sapien
tgatcattgaagtaagtgctcccac

SEQ ID NO: 2716333 - DNA, 25 bp, Homo sapien
tatattgcggtactcagtgatgacc

SEQ ID NO: 2716334 - DNA, 25 bp, Homo sapien
cagacttctgaactagggacaatac

SEQ ID NO: 2716335 - DNA, 25 bp, Homo sapien
cactgttgtaaataggacttctgga

SEQ ID NO: 2716336 - DNA, 25 bp, Homo sapien
ctccaaaatgcaaagtgtgggccat

SEQ ID NO: 2716337 - DNA, 25 bp, Homo sapien
gcttacaactagtgacatcagaatg

SEQ ID NO: 2716338 - DNA, 25 bp, Homo sapien
ccatcctgcttacaactagtgacat

SEQ ID NO: 2716339 - DNA, 25 bp, Homo sapien
gaatgtcagctgtaaaatttcctcc

SEQ ID NO: 2716340 - DNA, 25 bp, Homo sapien
aggcctctcggactttgtatcagtg

SEQ ID NO: 2716341 - DNA, 25 bp, Homo sapien
ctttaggtcttaggaagtgatgctg

SEQ ID NO: 2716342 - DNA, 25 bp, Homo sapien
gcactgaagtggcaaaggcctctcg

SEQ ID NO: 2716343 - DNA, 25 bp, Homo sapien
gggcatatgcacaggaccacacaca

SEQ ID NO: 2716344 - DNA, 25 bp, Homo sapien
cattcccctgaggaccgtcatcagg

SEQ ID NO: 2716345 - DNA, 25 bp, Homo sapien
gacttagggtggaatgccctgggac

SEQ ID NO: 2716346 - DNA, 25 bp, Homo sapien
tcccttgaagttgggcatgctgcag

SEQ ID NO: 2716347 - DNA, 25 bp, Homo sapien
tgtgcaaagtcccttgaagttgggc

SEQ ID NO: 2716348 - DNA, 25 bp, Homo sapien
tcctgcacagctgactgttctgcag

SEQ ID NO: 2716349 - DNA, 25 bp, Homo sapien
ctcagagggacgctcctgcacagct

SEQ ID NO: 2716350 - DNA, 25 bp, Homo sapien
tcagagggacgctcctgcacagctg

SEQ ID NO: 2716351 - DNA, 25 bp, Homo sapien
cttgatattagggtcagggcctgct

SEQ ID NO: 2716352 - DNA, 25 bp, Homo sapien
ccccttgtgttggtaaggccagagc

SEQ ID NO: 2716353 - DNA, 25 bp, Homo sapien
tgtgagaggagtaagacgtggccat

SEQ ID NO: 2716354 - DNA, 25 bp, Homo sapien
ctaaggacaggtgtgaaaggagaaa

SEQ ID NO: 2716355 - DNA, 25 bp, Homo sapien
caatcaggcacacgctgggcatggg

SEQ ID NO: 2716356 - DNA, 25 bp, Homo sapien
tgatcatccattcctgcacagccag

SEQ ID NO: 2716357 - DNA, 25 bp, Homo sapien
ccacgggcttctactgtgggggctc

SEQ ID NO: 2716358 - DNA, 25 bp, Homo sapien
ctcctgatcatccattcctgcacag

SEQ ID NO: 2716359 - DNA, 25 bp, Homo sapien
gatgccctgaaggagctatgccagc

SEQ ID NO: 2716360 - DNA, 25 bp, Homo sapien
gaggggctgccgctctaggcacagc

SEQ ID NO: 2716361 - DNA, 25 bp, Homo sapien
aggggctgccgctctaggcacagcc

SEQ ID NO: 2716362 - DNA, 25 bp, Homo sapien
ggaggggctgccgctctaggcacag

SEQ ID NO: 2716363 - DNA, 25 bp, Homo sapien
agcattgagagggtgcactgacatg

SEQ ID NO: 2716364 - DNA, 25 bp, Homo sapien
gcactgacatgcagaatggtggctc

SEQ ID NO: 2716365 - DNA, 25 bp, Homo sapien
aaaatcgaaagagtcctggaatgtc

SEQ ID NO: 2716366 - DNA, 25 bp, Homo sapien
gcttttcacaaaatcgaaagagtcc

SEQ ID NO: 2716367 - DNA, 25 bp, Homo sapien
cagagcttgaacgtggcccactcat

SEQ ID NO: 2716368 - DNA, 25 bp, Homo sapien
gattctcagagcttgaacgtggccc

SEQ ID NO: 2716369 - DNA, 25 bp, Homo sapien
ttctcagagcttgaacgtggcccac

SEQ ID NO: 2716370 - DNA, 25 bp, Homo sapien
tcatttgaccatcaggacccaaggg

SEQ ID NO: 2716371 - DNA, 25 bp, Homo sapien
gatcttgtgggttcctactgctgaa

SEQ ID NO: 2716372 - DNA, 25 bp, Homo sapien
aaagacctttttgagggagagctat

SEQ ID NO: 2716373 - DNA, 25 bp, Homo sapien
cagtgctaggtgtacaaatgtgaat

SEQ ID NO: 2716374 - DNA, 25 bp, Homo sapien
tagttgctattgatatctccatttg

SEQ ID NO: 2716375 - DNA, 25 bp, Homo sapien
ccacaagcagtgtgtgattgtttca

SEQ ID NO: 2716376 - DNA, 25 bp, Homo sapien
gaacctctgtacttatttctgttag

SEQ ID NO: 2716377 - DNA, 25 bp, Homo sapien
tctgttaggatgtaaccatgagtgg

SEQ ID NO: 2716378 - DNA, 25 bp, Homo sapien
gtgcatgtcttctgatgaacctctg

SEQ ID NO: 2716379 - DNA, 25 bp, Homo sapien
ttgtacagacttatggagcctccca

SEQ ID NO: 2716380 - DNA, 25 bp, Homo sapien
tttgtacagacttatggagcctccc

SEQ ID NO: 2716381 - DNA, 25 bp, Homo sapien
gtacagacttatggagcctcccagt

SEQ ID NO: 2716382 - DNA, 25 bp, Homo sapien
tgtacagacttatggagcctcccag

SEQ ID NO: 2716383 - DNA, 25 bp, Homo sapien
tgctaaggcttgactcttccgaagt

SEQ ID NO: 2716384 - DNA, 25 bp, Homo sapien
agggtgagtctatagtggcctttac

SEQ ID NO: 2716385 - DNA, 25 bp, Homo sapien
tttgtggttggaggtcaaatgtctc

SEQ ID NO: 2716386 - DNA, 25 bp, Homo sapien
tggcctttactctaactaagtactg

SEQ ID NO: 2716387 - DNA, 25 bp, Homo sapien
ctgcctcttgggttcaagttcttct

SEQ ID NO: 2716388 - DNA, 25 bp, Homo sapien
gcctcttgggttcaagttcttctcc

SEQ ID NO: 2716389 - DNA, 25 bp, Homo sapien
tgcctcttgggttcaagttcttctc

SEQ ID NO: 2716390 - DNA, 25 bp, Homo sapien
cctcttgggttcaagttcttctcct

SEQ ID NO: 2716391 - DNA, 25 bp, Homo sapien
tcagcggcggcttaactcggaagtt

SEQ ID NO: 2716392 - DNA, 25 bp, Homo sapien
gaagttttctcggacacaccggcac

SEQ ID NO: 2716393 - DNA, 25 bp, Homo sapien
gaattcttgtcgttgtcagcgcctg

SEQ ID NO: 2716394 - DNA, 25 bp, Homo sapien
tcgaatctctcgtttgggaccccat

SEQ ID NO: 2716395 - DNA, 25 bp, Homo sapien
cgttgactgatgtgtccctggagcc

SEQ ID NO: 2716396 - DNA, 25 bp, Homo sapien
cagggcccttccgttcgttgactga

SEQ ID NO: 2716397 - DNA, 25 bp, Homo sapien
tggcaaacattttcgcctcctgcac

SEQ ID NO: 2716398 - DNA, 25 bp, Homo sapien
tctcagtaagtgttcgatgaccgaa

SEQ ID NO: 2716399 - DNA, 25 bp, Homo sapien
gcattttcactgctcgagggcaaca

SEQ ID NO: 2716400 - DNA, 25 bp, Homo sapien
cactatatggcctttgcacgcgcta

SEQ ID NO: 2716401 - DNA, 25 bp, Homo sapien
tctttctgatgaggtcccaggagta

SEQ ID NO: 2716402 - DNA, 25 bp, Homo sapien
tattttactagctctgtcagtctgg

SEQ ID NO: 2716403 - DNA, 25 bp, Homo sapien
gacttattgaattgggatctctagg

SEQ ID NO: 2716404 - DNA, 25 bp, Homo sapien
tgacaatcaccgtaattcagtgtaa

SEQ ID NO: 2716405 - DNA, 25 bp, Homo sapien
tcttgagttttagtaggcagaacac

SEQ ID NO: 2716406 - DNA, 25 bp, Homo sapien
tgcagatttcttgaccccacagact

SEQ ID NO: 2716407 - DNA, 25 bp, Homo sapien
tgcctgcactgtcacacttggaaaa

SEQ ID NO: 2716408 - DNA, 25 bp, Homo sapien
gctgaatagctactggatgcaaatg

SEQ ID NO: 2716409 - DNA, 25 bp, Homo sapien
tactaccttggagctatcacatacc

SEQ ID NO: 2716410 - DNA, 25 bp, Homo sapien
gaaaacggaccagttcctacagcag

SEQ ID NO: 2716411 - DNA, 25 bp, Homo sapien
catttgcaggtaacaggctgttcag

SEQ ID NO: 2716412 - DNA, 25 bp, Homo sapien
ttgaaagactaacggatataaccca

SEQ ID NO: 2716413 - DNA, 25 bp, Homo sapien
cagaggacttctgatttgaaagact

SEQ ID NO: 2716414 - DNA, 25 bp, Homo sapien
cctgaacacagaggacttctgattt

SEQ ID NO: 2716415 - DNA, 25 bp, Homo sapien
ccaacggctcccctctttgagccct

SEQ ID NO: 2716416 - DNA, 25 bp, Homo sapien
tttgagccctatccctatcttcttg

SEQ ID NO: 2716417 - DNA, 25 bp, Homo sapien
caacggctcccctctttgagcccta

SEQ ID NO: 2716418 - DNA, 25 bp, Homo sapien
ctctttgagccctatccctatcttc

SEQ ID NO: 2716419 - DNA, 25 bp, Homo sapien
caagattaaaagatgtgagtagaga

SEQ ID NO: 2716420 - DNA, 25 bp, Homo sapien
aacaagtggtagatccagttatatt

SEQ ID NO: 2716421 - DNA, 25 bp, Homo sapien
gcacagcgggtaatttattgcttgg

SEQ ID NO: 2716422 - DNA, 25 bp, Homo sapien
tacactacaacaaaagcacagcggg

SEQ ID NO: 2716423 - DNA, 25 bp, Homo sapien
agtgaataagcaacaatgtagcttc

SEQ ID NO: 2716424 - DNA, 25 bp, Homo sapien
tgaataagcaacaatgtagcttcat

SEQ ID NO: 2716425 - DNA, 25 bp, Homo sapien
ctaaagtgaataagcaacaatgtag

SEQ ID NO: 2716426 - DNA, 25 bp, Homo sapien
aaagtgaataagcaacaatgtagct

SEQ ID NO: 2716427 - DNA, 25 bp, Homo sapien
aaagcagctggcacaataatacttg

SEQ ID NO: 2716428 - DNA, 25 bp, Homo sapien
aagcagctggcacaataatacttgc

SEQ ID NO: 2716429 - DNA, 25 bp, Homo sapien
aaaagcagctggcacaataatactt

SEQ ID NO: 2716430 - DNA, 25 bp, Homo sapien
gcagctggcacaataatacttgcca

SEQ ID NO: 2716431 - DNA, 25 bp, Homo sapien
taagaactacgatttgcttccagtg

SEQ ID NO: 2716432 - DNA, 25 bp, Homo sapien
tggacatcttcatagtgactggctg

SEQ ID NO: 2716433 - DNA, 25 bp, Homo sapien
tcatcatccgagtgggaacttgctg

SEQ ID NO: 2716434 - DNA, 25 bp, Homo sapien
gaaaccatttggtcgaagtccacat

SEQ ID NO: 2716435 - DNA, 25 bp, Homo sapien
tagtaagcactctggattttgtcca

SEQ ID NO: 2716436 - DNA, 25 bp, Homo sapien
tggattattttagtggcacataaat

SEQ ID NO: 2716437 - DNA, 25 bp, Homo sapien
ttagtaagcactctggattttgtcc

SEQ ID NO: 2716438 - DNA, 25 bp, Homo sapien
aattagtaagcactctggattttgt

SEQ ID NO: 2716439 - DNA, 25 bp, Homo sapien
tgaattactccgtcccatctctggg

SEQ ID NO: 2716440 - DNA, 25 bp, Homo sapien
tctcccgaggtgaagataacacgta

SEQ ID NO: 2716441 - DNA, 25 bp, Homo sapien
gacgaaacaggtatagagcccacgg

SEQ ID NO: 2716442 - DNA, 25 bp, Homo sapien
aattctttcacccaggtcatcaggg

SEQ ID NO: 2716443 - DNA, 25 bp, Homo sapien
ctttgtagttacagttagattctgc

SEQ ID NO: 2716444 - DNA, 25 bp, Homo sapien
tctgcagatcctatatcatcaggtg

SEQ ID NO: 2716445 - DNA, 25 bp, Homo sapien
tgtagttacagttagattctgcaga

SEQ ID NO: 2716446 - DNA, 25 bp, Homo sapien
gatcctatatcatcaggtggactga

SEQ ID NO: 2716447 - DNA, 25 bp, Homo sapien
gataaagacgcatgcaacctatagc

SEQ ID NO: 2716448 - DNA, 25 bp, Homo sapien
ggaagatcagttaggcaatccctgc

SEQ ID NO: 2716449 - DNA, 25 bp, Homo sapien
tccaaccaatggaagaactgtgacc

SEQ ID NO: 2716450 - DNA, 25 bp, Homo sapien
gaaaccatgggactcttagttcagt

SEQ ID NO: 2716451 - DNA, 25 bp, Homo sapien
caggagcctctagctgaagtaatgc

SEQ ID NO: 2716452 - DNA, 25 bp, Homo sapien
tgaagaaacgtgaagccccaaatgg

SEQ ID NO: 2716453 - DNA, 25 bp, Homo sapien
gaggcatgagttttatcccgtcacg

SEQ ID NO: 2716454 - DNA, 25 bp, Homo sapien
ttatatcagatctcagccaggcaag

SEQ ID NO: 2716455 - DNA, 25 bp, Homo sapien
taggctagcacccatgactggctgg

SEQ ID NO: 2716456 - DNA, 25 bp, Homo sapien
taccagtctatgagccaaggcaagc

SEQ ID NO: 2716457 - DNA, 25 bp, Homo sapien
aatataaatgcgtgctggccctgac

SEQ ID NO: 2716458 - DNA, 25 bp, Homo sapien
tctgggacccaagagacaaaagtct

SEQ ID NO: 2716459 - DNA, 25 bp, Homo sapien
ctccattgaacgtttaataaattat

SEQ ID NO: 2716460 - DNA, 25 bp, Homo sapien
aattatattcaagtatgactttctt

SEQ ID NO: 2716461 - DNA, 25 bp, Homo sapien
tccattgaacgtttaataaattata

SEQ ID NO: 2716462 - DNA, 25 bp, Homo sapien
gattttcattctaaggagtctgtgg

SEQ ID NO: 2716463 - DNA, 25 bp, Homo sapien
taagtaatgagtcacacctcccatc

SEQ ID NO: 2716464 - DNA, 25 bp, Homo sapien
gcttctaccagagctaaacctcctg

SEQ ID NO: 2716465 - DNA, 25 bp, Homo sapien
tgcgttctcctaacaccttgtgctt

SEQ ID NO: 2716466 - DNA, 25 bp, Homo sapien
tattccagagagcaaatgttgggca

SEQ ID NO: 2716467 - DNA, 25 bp, Homo sapien
tgtgcagtgacatatctccagagat

SEQ ID NO: 2716468 - DNA, 25 bp, Homo sapien
taacatgctcagaatagaccaggga

SEQ ID NO: 2716469 - DNA, 25 bp, Homo sapien
tatgggtagtataactagggagccg

SEQ ID NO: 2716470 - DNA, 25 bp, Homo sapien
tccacccgtgatgttccctgaaagg

SEQ ID NO: 2716471 - DNA, 25 bp, Homo sapien
tctgcatagcttcgggggagaatag

SEQ ID NO: 2716472 - DNA, 25 bp, Homo sapien
tcagactggtgggagaaactatagg

SEQ ID NO: 2716473 - DNA, 25 bp, Homo sapien
caaggaataggtgcaagggagtgta

SEQ ID NO: 2716474 - DNA, 25 bp, Homo sapien
tattatgctccacatgctgcactga

SEQ ID NO: 2716475 - DNA, 25 bp, Homo sapien
agtaggcttactcctgacccagcta

SEQ ID NO: 2716476 - DNA, 25 bp, Homo sapien
ccactggaaaggactaacaagagct

SEQ ID NO: 2716477 - DNA, 25 bp, Homo sapien
gagatagtgaatccatgcatacggg

SEQ ID NO: 2716478 - DNA, 25 bp, Homo sapien
acctagtgggaaccaatgaaacctg

SEQ ID NO: 2716479 - DNA, 25 bp, Homo sapien
tgttcaagcatggatagccatcacc

SEQ ID NO: 2716480 - DNA, 25 bp, Homo sapien
gccatacggcaggtgcggaacctaa

SEQ ID NO: 2716481 - DNA, 25 bp, Homo sapien
tggcagctctattgtggcccaaggg

SEQ ID NO: 2716482 - DNA, 25 bp, Homo sapien
tcccaactgaaatcttgtggttgat

SEQ ID NO: 2716483 - DNA, 25 bp, Homo sapien
ttccccaaactggaagcctgctttg

SEQ ID NO: 2716484 - DNA, 25 bp, Homo sapien
caagcagttgatctttcccaactga

SEQ ID NO: 2716485 - DNA, 25 bp, Homo sapien
aggtgccaagcagttgatctttccc

SEQ ID NO: 2716486 - DNA, 25 bp, Homo sapien
tggaaaggcactggccctttgggag

SEQ ID NO: 2716487 - DNA, 25 bp, Homo sapien
ggtgagggacacctctctaccactg

SEQ ID NO: 2716488 - DNA, 25 bp, Homo sapien
tcagatgtgtgacacatccactgcc

SEQ ID NO: 2716489 - DNA, 25 bp, Homo sapien
cagaggctaccagcaccatgtggaa

SEQ ID NO: 2716490 - DNA, 25 bp, Homo sapien
gactgagtggtcaggggtttctgca

SEQ ID NO: 2716491 - DNA, 25 bp, Homo sapien
aggagactgggggcttccaaaagag

SEQ ID NO: 2716492 - DNA, 25 bp, Homo sapien
ctgcagctcctggtaaaggagactg

SEQ ID NO: 2716493 - DNA, 25 bp, Homo sapien
ctgaggacccaaaggactgagtggt

SEQ ID NO: 2716494 - DNA, 25 bp, Homo sapien
gctgagtggtataacctgtaggccc

SEQ ID NO: 2716495 - DNA, 25 bp, Homo sapien
aaactgatgctaggaagggaggaca

SEQ ID NO: 2716496 - DNA, 25 bp, Homo sapien
cagtttgagggatcctgcaagaagg

SEQ ID NO: 2716497 - DNA, 25 bp, Homo sapien
tgtaggcccagtctatgctgccatg

SEQ ID NO: 2716498 - DNA, 25 bp, Homo sapien
taaagagatagtgctcattcctcct

SEQ ID NO: 2716499 - DNA, 25 bp, Homo sapien
caggatttcccggttttagcattga

SEQ ID NO: 2716500 - DNA, 25 bp, Homo sapien
gaaagttctggacaaaccaagcagg

SEQ ID NO: 2716501 - DNA, 25 bp, Homo sapien
tgtaagaatgtctaacttgtcctgt

SEQ ID NO: 2716502 - DNA, 25 bp, Homo sapien
tcccatgcatggacattggcacagc

SEQ ID NO: 2716503 - DNA, 25 bp, Homo sapien
gtttctgctcaaaatgcacgttggc

SEQ ID NO: 2716504 - DNA, 25 bp, Homo sapien
tatcaggtcccctgttgtgaagatg

SEQ ID NO: 2716505 - DNA, 25 bp, Homo sapien
gcacgttggcagtttattcagatct

SEQ ID NO: 2716506 - DNA, 25 bp, Homo sapien
ctttgcttcgggcacctgaaccatg

SEQ ID NO: 2716507 - DNA, 25 bp, Homo sapien
tgggggaccggtaagctgcttcaaa

SEQ ID NO: 2716508 - DNA, 25 bp, Homo sapien
cagcttcagggtgtgtgggggaccg

SEQ ID NO: 2716509 - DNA, 25 bp, Homo sapien
gggtctttgcttcgggcacctgaac

SEQ ID NO: 2716510 - DNA, 25 bp, Homo sapien
tgcccttggctgaaggaccagttct

SEQ ID NO: 2716511 - DNA, 25 bp, Homo sapien
gacactatgtcagaaggtcttcgct

SEQ ID NO: 2716512 - DNA, 25 bp, Homo sapien
gaaacatcagggctaagggtagact

SEQ ID NO: 2716513 - DNA, 25 bp, Homo sapien
ttgacaatgcctgggtgacactatg

SEQ ID NO: 2716514 - DNA, 25 bp, Homo sapien
catgttatgcttataggctgctggc

SEQ ID NO: 2716515 - DNA, 25 bp, Homo sapien
tgcccttaggaagcctacattctag

SEQ ID NO: 2716516 - DNA, 25 bp, Homo sapien
gacagacttgaatgcgaagcctggc

SEQ ID NO: 2716517 - DNA, 25 bp, Homo sapien
tgagcatcaattatgtagcaggtac

SEQ ID NO: 2716518 - DNA, 25 bp, Homo sapien
aaataagataacctctgcccttagg

SEQ ID NO: 2716519 - DNA, 25 bp, Homo sapien
gatgtaaatatgggctggactctgc

SEQ ID NO: 2716520 - DNA, 25 bp, Homo sapien
aaatatgggctggactctgcagcct

SEQ ID NO: 2716521 - DNA, 25 bp, Homo sapien
tgtaaatatgggctggactctgcag

SEQ ID NO: 2716522 - DNA, 25 bp, Homo sapien
gcaggggtttgagatcctcaaggta

SEQ ID NO: 2716523 - DNA, 25 bp, Homo sapien
cctctagtattaacgctacagtcaa

SEQ ID NO: 2716524 - DNA, 25 bp, Homo sapien
tattaacgctacagtcaaactcaca

SEQ ID NO: 2716525 - DNA, 25 bp, Homo sapien
cactatttgtcctctagtattaacg

SEQ ID NO: 2716526 - DNA, 25 bp, Homo sapien
ttttccactatttgtcctctagtat

SEQ ID NO: 2716527 - DNA, 25 bp, Homo sapien
agccaccccgctaatgaagtaccag

SEQ ID NO: 2716528 - DNA, 25 bp, Homo sapien
gagtctcatgacaggctttgccaag

SEQ ID NO: 2716529 - DNA, 25 bp, Homo sapien
tttgccaagaactggcctgtcaggg

SEQ ID NO: 2716530 - DNA, 25 bp, Homo sapien
tcagggcagatttagtcaccaaagc

SEQ ID NO: 2716531 - DNA, 25 bp, Homo sapien
ctggggaccagaactcccctccagc

SEQ ID NO: 2716532 - DNA, 25 bp, Homo sapien
tggggaccagaactcccctccagct

SEQ ID NO: 2716533 - DNA, 25 bp, Homo sapien
ccttctgtgccgaatcatcagcaag

SEQ ID NO: 2716534 - DNA, 25 bp, Homo sapien
ctgtgccgaatcatcagcaaggcag

SEQ ID NO: 2716535 - DNA, 25 bp, Homo sapien
gggcagagacagtattattctggcc

SEQ ID NO: 2716536 - DNA, 25 bp, Homo sapien
tggacccttctgtgccgaatcatca

SEQ ID NO: 2716537 - DNA, 25 bp, Homo sapien
agctgcgccttatggcaatttgctc

SEQ ID NO: 2716538 - DNA, 25 bp, Homo sapien
ttaggcagagctgcgccttatggca

SEQ ID NO: 2716539 - DNA, 25 bp, Homo sapien
agagctgcgccttatggcaatttgc

SEQ ID NO: 2716540 - DNA, 25 bp, Homo sapien
gcagagctgcgccttatggcaattt

SEQ ID NO: 2716541 - DNA, 25 bp, Homo sapien
agtgatgcctggaatagtgtgagcc

SEQ ID NO: 2716542 - DNA, 25 bp, Homo sapien
agtgtgagccagcttatgactcagg

SEQ ID NO: 2716543 - DNA, 25 bp, Homo sapien
cagagtcaacttgggagcaaaacca

SEQ ID NO: 2716544 - DNA, 25 bp, Homo sapien
gagagacttctagaaaaggcttcct

SEQ ID NO: 2716545 - DNA, 25 bp, Homo sapien
caagagtcaggaacttgggttgtta

SEQ ID NO: 2716546 - DNA, 25 bp, Homo sapien
gctgagaattgggagccaaagtgag

SEQ ID NO: 2716547 - DNA, 25 bp, Homo sapien
agagacctccaagagtcaggaactt

SEQ ID NO: 2716548 - DNA, 25 bp, Homo sapien
tcaggaacttgggttgttaaggcag

SEQ ID NO: 2716549 - DNA, 25 bp, Homo sapien
ggatcctggatctatggctgcagca

SEQ ID NO: 2716550 - DNA, 25 bp, Homo sapien
gagggaaagaacagcagtaacgaag

SEQ ID NO: 2716551 - DNA, 25 bp, Homo sapien
tgggatcctggatctatggctgcag

SEQ ID NO: 2716552 - DNA, 25 bp, Homo sapien
cgaagagatctatgacccagctggg

SEQ ID NO: 2716553 - DNA, 25 bp, Homo sapien
tttttcaaacaagttccaacagctg

SEQ ID NO: 2716554 - DNA, 25 bp, Homo sapien
tcaaacaagttccaacagctgtttg

SEQ ID NO: 2716555 - DNA, 25 bp, Homo sapien
tttcaaacaagttccaacagctgtt

SEQ ID NO: 2716556 - DNA, 25 bp, Homo sapien
gcatctgttcccggaggttttttca

SEQ ID NO: 2716557 - DNA, 25 bp, Homo sapien
ggacgagaactaccaagtggaagcc

SEQ ID NO: 2716558 - DNA, 25 bp, Homo sapien
ggactggctatactcctcaggagca

SEQ ID NO: 2716559 - DNA, 25 bp, Homo sapien
gggcctacgctgctctttgggacga

SEQ ID NO: 2716560 - DNA, 25 bp, Homo sapien
gcacctggtaggatctcttcttgga

SEQ ID NO: 2716561 - DNA, 25 bp, Homo sapien
aaagtccaagttgtagccattacca

SEQ ID NO: 2716562 - DNA, 25 bp, Homo sapien
gaattgttgtatctctcactcctaa

SEQ ID NO: 2716563 - DNA, 25 bp, Homo sapien
ctgtcctgcattccctaacattcat

SEQ ID NO: 2716564 - DNA, 25 bp, Homo sapien
ggagccctggccttgatacttgata

SEQ ID NO: 2716565 - DNA, 25 bp, Homo sapien
aattggaatccagtgacacagaggg

SEQ ID NO: 2716566 - DNA, 25 bp, Homo sapien
caggtagcacaagggtggagattac

SEQ ID NO: 2716567 - DNA, 25 bp, Homo sapien
gaaattggaatccagtgacacagag

SEQ ID NO: 2716568 - DNA, 25 bp, Homo sapien
gggtggagattactcttgggccaca

SEQ ID NO: 2716569 - DNA, 25 bp, Homo sapien
acttgtttaacaacttgctggtgag

SEQ ID NO: 2716570 - DNA, 25 bp, Homo sapien
gacaagaaggctgaacttgtttaac

SEQ ID NO: 2716571 - DNA, 25 bp, Homo sapien
ttaacaacttgctggtgagtgctgg

SEQ ID NO: 2716572 - DNA, 25 bp, Homo sapien
gctggagccacagatggttgattca

SEQ ID NO: 2716573 - DNA, 25 bp, Homo sapien
aaggaatgaattcatgaagcagggc

SEQ ID NO: 2716574 - DNA, 25 bp, Homo sapien
ttgctgccaacgaggggtctgcact

SEQ ID NO: 2716575 - DNA, 25 bp, Homo sapien
gcaaggaatgaattcatgaagcagg

SEQ ID NO: 2716576 - DNA, 25 bp, Homo sapien
ggtctttgctgccaacgaggggtct

SEQ ID NO: 2716577 - DNA, 25 bp, Homo sapien
ctattgttccactaggtggcacctt

SEQ ID NO: 2716578 - DNA, 25 bp, Homo sapien
agtgggtccagagaagtcgcttcta

SEQ ID NO: 2716579 - DNA, 25 bp, Homo sapien
ccagagaagtcgcttctaggtctaa

SEQ ID NO: 2716580 - DNA, 25 bp, Homo sapien
aggtggcaccttccagcaaacttca

SEQ ID NO: 2716581 - DNA, 25 bp, Homo sapien
tcctgctaaggtttctttttgtcca

SEQ ID NO: 2716582 - DNA, 25 bp, Homo sapien
ctgctaaggtttctttttgtccaag

SEQ ID NO: 2716583 - DNA, 25 bp, Homo sapien
tgctaaggtttctttttgtccaagc

SEQ ID NO: 2716584 - DNA, 25 bp, Homo sapien
cagccagcagaagcggctgcggcgc

SEQ ID NO: 2716585 - DNA, 25 bp, Homo sapien
cccgctccaactccgcggcacttcc

SEQ ID NO: 2716586 - DNA, 25 bp, Homo sapien
tcagccagcagaagcggctgcggcg

SEQ ID NO: 2716587 - DNA, 25 bp, Homo sapien
cggccccgctccaactccgcggcac

SEQ ID NO: 2716588 - DNA, 25 bp, Homo sapien
accagcgccaccgcctgcaggagcc

SEQ ID NO: 2716589 - DNA, 25 bp, Homo sapien
atcccccaggggtgccgtcgggctg

SEQ ID NO: 2716590 - DNA, 25 bp, Homo sapien
ggtgccgtcgggctgccgctcgcgg

SEQ ID NO: 2716591 - DNA, 25 bp, Homo sapien
caggggtgccgtcgggctgccgctc

SEQ ID NO: 2716592 - DNA, 25 bp, Homo sapien
cccaggggtgccgtcgggctgccgc

SEQ ID NO: 2716593 - DNA, 25 bp, Homo sapien
gatctttacattctgcaaggaatcc

SEQ ID NO: 2716594 - DNA, 25 bp, Homo sapien
gggagcatgatctttacattctgca

SEQ ID NO: 2716595 - DNA, 25 bp, Homo sapien
tttaaagggagcatgatctttacat

SEQ ID NO: 2716596 - DNA, 25 bp, Homo sapien
catgatctttacattctgcaaggaa

SEQ ID NO: 2716597 - DNA, 25 bp, Homo sapien
ggtccctcaaggaccaggagcttac

SEQ ID NO: 2716598 - DNA, 25 bp, Homo sapien
gactcccataaggtcaaaggcagca

SEQ ID NO: 2716599 - DNA, 25 bp, Homo sapien
tggactcccataaggtcaaaggcag

SEQ ID NO: 2716600 - DNA, 25 bp, Homo sapien
ctctggactcccataaggtcaaagg

SEQ ID NO: 2716601 - DNA, 25 bp, Homo sapien
acactgggcaccaatagcctctggg

SEQ ID NO: 2716602 - DNA, 25 bp, Homo sapien
caagttcagaagagatagggaaggc

SEQ ID NO: 2716603 - DNA, 25 bp, Homo sapien
tgggcaccaatagcctctgggacat

SEQ ID NO: 2716604 - DNA, 25 bp, Homo sapien
aggcttctggtgttccatcctcagg

SEQ ID NO: 2716605 - DNA, 25 bp, Homo sapien
ctttcctcaaggccagctgacattc

SEQ ID NO: 2716606 - DNA, 25 bp, Homo sapien
agcctctttcctcaaggccagctga

SEQ ID NO: 2716607 - DNA, 25 bp, Homo sapien
agctgacattcaaacaacggactgg

SEQ ID NO: 2716608 - DNA, 25 bp, Homo sapien
ctctttcctcaaggccagctgacat

SEQ ID NO: 2716609 - DNA, 25 bp, Homo sapien
gaattcaggtgtatatgcgctacct

SEQ ID NO: 2716610 - DNA, 25 bp, Homo sapien
ggtgtatatgcgctacctcctttcc

SEQ ID NO: 2716611 - DNA, 25 bp, Homo sapien
ccatgatacacttcttgctgcggga

SEQ ID NO: 2716612 - DNA, 25 bp, Homo sapien
cttgctgcgggaattcaggtgtata

SEQ ID NO: 2716613 - DNA, 25 bp, Homo sapien
aaaatagccagataggttccagcag

SEQ ID NO: 2716614 - DNA, 25 bp, Homo sapien
cagttttcatacctacaaattgagg

SEQ ID NO: 2716615 - DNA, 25 bp, Homo sapien
ggtctcattaagcagtggcctccaa

SEQ ID NO: 2716616 - DNA, 25 bp, Homo sapien
tgatctgcgttcctccctatgggaa

SEQ ID NO: 2716617 - DNA, 25 bp, Homo sapien
cagaaaaaacgtggaagctgcagag

SEQ ID NO: 2716618 - DNA, 25 bp, Homo sapien
gcttccaaagtatgaacactccacc

SEQ ID NO: 2716619 - DNA, 25 bp, Homo sapien
agttctttttcagcttgagagaaat

SEQ ID NO: 2716620 - DNA, 25 bp, Homo sapien
cagcaagcagaattgtttagcttcc

SEQ ID NO: 2716621 - DNA, 25 bp, Homo sapien
cccaggaacagaagttcaagggcgg

SEQ ID NO: 2716622 - DNA, 25 bp, Homo sapien
caggaacagaagttcaagggcgggt

SEQ ID NO: 2716623 - DNA, 25 bp, Homo sapien
ctgcagataaacacacttcccagga

SEQ ID NO: 2716624 - DNA, 25 bp, Homo sapien
ccaggaacagaagttcaagggcggg

SEQ ID NO: 2716625 - DNA, 25 bp, Homo sapien
ctgaactggagcctgatctgcttgc

SEQ ID NO: 2716626 - DNA, 25 bp, Homo sapien
taaaagtaccacagagctcccctgt

SEQ ID NO: 2716627 - DNA, 25 bp, Homo sapien
ggattccaaagtgcacctcccatcc

SEQ ID NO: 2716628 - DNA, 25 bp, Homo sapien
gaaaataaagctctaccgccccagc

SEQ ID NO: 2716629 - DNA, 25 bp, Homo sapien
ggcaggaaggcagagcacgcatcct

SEQ ID NO: 2716630 - DNA, 25 bp, Homo sapien
tgcatatcataaaggagggctccca

SEQ ID NO: 2716631 - DNA, 25 bp, Homo sapien
ccaactggagagctagggtctgtct

SEQ ID NO: 2716632 - DNA, 25 bp, Homo sapien
gggctcccaaagtcgaatgtctcct

SEQ ID NO: 2716633 - DNA, 25 bp, Homo sapien
caggtttgagaccactaagtgcagc

SEQ ID NO: 2716634 - DNA, 25 bp, Homo sapien
acagggtagacctgaaattcagata

SEQ ID NO: 2716635 - DNA, 25 bp, Homo sapien
cagggtagacctgaaattcagatac

SEQ ID NO: 2716636 - DNA, 25 bp, Homo sapien
cagagtgcagaatagcaggcgaggg

SEQ ID NO: 2716637 - DNA, 25 bp, Homo sapien
gggcagagtgcagaatagcaggcga

SEQ ID NO: 2716638 - DNA, 25 bp, Homo sapien
gtgcagaatagcaggcgaggggggt

SEQ ID NO: 2716639 - DNA, 25 bp, Homo sapien
tgcagaatagcaggcgaggggggtc

SEQ ID NO: 2716640 - DNA, 25 bp, Homo sapien
gatgcactgcatccccgtgaacttg

SEQ ID NO: 2716641 - DNA, 25 bp, Homo sapien
cactcgtcatgctctgcctgatgca

SEQ ID NO: 2716642 - DNA, 25 bp, Homo sapien
gaacttgtctgcgtccctttttaga

SEQ ID NO: 2716643 - DNA, 25 bp, Homo sapien
taggagctctctcaaggcagcggct

SEQ ID NO: 2716644 - DNA, 25 bp, Homo sapien
taaccactcacttacaagctgtaac

SEQ ID NO: 2716645 - DNA, 25 bp, Homo sapien
ccggcctggagcctgtgatcttaac

SEQ ID NO: 2716646 - DNA, 25 bp, Homo sapien
gtgatcttaaccactcacttacaag

SEQ ID NO: 2716647 - DNA, 25 bp, Homo sapien
tggagcctgtgatcttaaccactca

SEQ ID NO: 2716648 - DNA, 25 bp, Homo sapien
gaagttgctatgtccttcttgcaaa

SEQ ID NO: 2716649 - DNA, 25 bp, Homo sapien
gaagactcctaaaaccttgcactag

SEQ ID NO: 2716650 - DNA, 25 bp, Homo sapien
ggttagggaggagtgattcccatca

SEQ ID NO: 2716651 - DNA, 25 bp, Homo sapien
tggctctagcatacacaatacaggc

SEQ ID NO: 2716652 - DNA, 25 bp, Homo sapien
acacagatggcagatcttcacaatg

SEQ ID NO: 2716653 - DNA, 25 bp, Homo sapien
acaggaagagggatgcatctggctc

SEQ ID NO: 2716654 - DNA, 25 bp, Homo sapien
gggaactttcattgattttaattca

SEQ ID NO: 2716655 - DNA, 25 bp, Homo sapien
tcatctgggaggcaagctggaactc

SEQ ID NO: 2716656 - DNA, 25 bp, Homo sapien
catctggctctgtgcatgtgggaac

SEQ ID NO: 2716657 - DNA, 25 bp, Homo sapien
gacttgcccatctgttgaataggag

SEQ ID NO: 2716658 - DNA, 25 bp, Homo sapien
gagcagccgagggacataactacct

SEQ ID NO: 2716659 - DNA, 25 bp, Homo sapien
aatgaaatgtcagtggagcagccga

SEQ ID NO: 2716660 - DNA, 25 bp, Homo sapien
caggatgtgcagactcagtaaggca

SEQ ID NO: 2716661 - DNA, 25 bp, Homo sapien
cgcggtgtcagcataaagagtggca

SEQ ID NO: 2716662 - DNA, 25 bp, Homo sapien
gcagtccaatacttagagcctgaga

SEQ ID NO: 2716663 - DNA, 25 bp, Homo sapien
tctgaaagctgctactgtaagcgcg

SEQ ID NO: 2716664 - DNA, 25 bp, Homo sapien
tccactggcaaagtaagcaaggcct

SEQ ID NO: 2716665 - DNA, 25 bp, Homo sapien
catgtgcacaatacgcaggtctgtt

SEQ ID NO: 2716666 - DNA, 25 bp, Homo sapien
gtgcacaatacgcaggtctgttaca

SEQ ID NO: 2716667 - DNA, 25 bp, Homo sapien
tgcacaatacgcaggtctgttacat

SEQ ID NO: 2716668 - DNA, 25 bp, Homo sapien
gtacatgtgcacaatacgcaggtct

SEQ ID NO: 2716669 - DNA, 25 bp, Homo sapien
gacaagtacgtaagtatcaaaggac

SEQ ID NO: 2716670 - DNA, 25 bp, Homo sapien
aagctgatgggccccaaaacctggg

SEQ ID NO: 2716671 - DNA, 25 bp, Homo sapien
tgtatgcaggatcctgtgcagaaaa

SEQ ID NO: 2716672 - DNA, 25 bp, Homo sapien
aactggactgtatgcaggatcctgt

SEQ ID NO: 2716673 - DNA, 25 bp, Homo sapien
tatccgactggtgaccaagtcgtgc

SEQ ID NO: 2716674 - DNA, 25 bp, Homo sapien
tgaccaagtcgtgctgactccacct

SEQ ID NO: 2716675 - DNA, 25 bp, Homo sapien
gactggtgaccaagtcgtgctgact

SEQ ID NO: 2716676 - DNA, 25 bp, Homo sapien
tccccgtatccgactggtgaccaag

SEQ ID NO: 2716677 - DNA, 25 bp, Homo sapien
tcacctagggcctgcttagctggtg

SEQ ID NO: 2716678 - DNA, 25 bp, Homo sapien
cctagggcctgcttagctggtggaa

SEQ ID NO: 2716679 - DNA, 25 bp, Homo sapien
ggcctgcttagctggtggaagaaaa

SEQ ID NO: 2716680 - DNA, 25 bp, Homo sapien
tccggtagtaggaataaaactctca

SEQ ID NO: 2716681 - DNA, 25 bp, Homo sapien
taattaaatactctacagcttctcc

SEQ ID NO: 2716682 - DNA, 25 bp, Homo sapien
gcttctccaacagaaatgaagattt

SEQ ID NO: 2716683 - DNA, 25 bp, Homo sapien
cctagctctggcttagccaaattcc

SEQ ID NO: 2716684 - DNA, 25 bp, Homo sapien
cactgcagtaatgagcgctgacata

SEQ ID NO: 2716685 - DNA, 25 bp, Homo sapien
caacctcttaaagcttctgttcagc

SEQ ID NO: 2716686 - DNA, 25 bp, Homo sapien
tccaggtctactgttctcaagtagg

SEQ ID NO: 2716687 - DNA, 25 bp, Homo sapien
ttcaagactgcatgacaccctgctg

SEQ ID NO: 2716688 - DNA, 25 bp, Homo sapien
gatatgttaccacaaggctccctac

SEQ ID NO: 2716689 - DNA, 25 bp, Homo sapien
ggaacagggaactaaagtcttgata

SEQ ID NO: 2716690 - DNA, 25 bp, Homo sapien
gaaaacccacctgcttgcaaactgg

SEQ ID NO: 2716691 - DNA, 25 bp, Homo sapien
ccaggtgactgcaaagtgcctaatt

SEQ ID NO: 2716692 - DNA, 25 bp, Homo sapien
tttctgattatcacctcaggctgga

SEQ ID NO: 2716693 - DNA, 25 bp, Homo sapien
gcctaattggcgattttcaaatgca

SEQ ID NO: 2716694 - DNA, 25 bp, Homo sapien
cctgccaggcttacacagaggtcaa

SEQ ID NO: 2716695 - DNA, 25 bp, Homo sapien
gaaaatacccaaagtgaagactggc

SEQ ID NO: 2716696 - DNA, 25 bp, Homo sapien
gcaatgatttggtctacatacctca

SEQ ID NO: 2716697 - DNA, 25 bp, Homo sapien
catattttccagcaagacatgggcc

SEQ ID NO: 2716698 - DNA, 25 bp, Homo sapien
cagggcacaccgcaggaaatagatg

SEQ ID NO: 2716699 - DNA, 25 bp, Homo sapien
cacttggctttgaaggttagtctgg

SEQ ID NO: 2716700 - DNA, 25 bp, Homo sapien
gaggaatgcctactctactgttcca

SEQ ID NO: 2716701 - DNA, 25 bp, Homo sapien
ggcagtagagtttgtagaagctcca

SEQ ID NO: 2716702 - DNA, 25 bp, Homo sapien
ggtgtgtaatgaccaggcctcagtc

SEQ ID NO: 2716703 - DNA, 25 bp, Homo sapien
cgttttgtaacgtgaaggaccatgc

SEQ ID NO: 2716704 - DNA, 25 bp, Homo sapien
cagctgactggaggatcaaagggca

SEQ ID NO: 2716705 - DNA, 25 bp, Homo sapien
caagtgaccctgaacatggtgtgta

SEQ ID NO: 2716706 - DNA, 25 bp, Homo sapien
tctcttcaggcttgaaagactgagg

SEQ ID NO: 2716707 - DNA, 25 bp, Homo sapien
catttatgaagagcaggaccttagg

SEQ ID NO: 2716708 - DNA, 25 bp, Homo sapien
agactgaggaacagcttagcttagg

SEQ ID NO: 2716709 - DNA, 25 bp, Homo sapien
taggcaggtccccttgtctttccag

SEQ ID NO: 2716710 - DNA, 25 bp, Homo sapien
gggaagcaacatgtgactgatggta

SEQ ID NO: 2716711 - DNA, 25 bp, Homo sapien
cccaggaggaaagtctctgcctgga

SEQ ID NO: 2716712 - DNA, 25 bp, Homo sapien
ctggctgctcactgcttgcaaaggt

SEQ ID NO: 2716713 - DNA, 25 bp, Homo sapien
tgactgatggtagtcccctcctctt

SEQ ID NO: 2716714 - DNA, 25 bp, Homo sapien
gtgtaggtggctctagaaaaggtca

SEQ ID NO: 2716715 - DNA, 25 bp, Homo sapien
taggtggctctagaaaaggtcattt

SEQ ID NO: 2716716 - DNA, 25 bp, Homo sapien
agggcagaaccatatcaaccctcca

SEQ ID NO: 2716717 - DNA, 25 bp, Homo sapien
ccaagggcagaaccatatcaaccct

SEQ ID NO: 2716718 - DNA, 25 bp, Homo sapien
gaggctgtgttagagaccaggctct

SEQ ID NO: 2716719 - DNA, 25 bp, Homo sapien
caaattttaggatggctcccctcca

SEQ ID NO: 2716720 - DNA, 25 bp, Homo sapien
tctgaggctgtgttagagaccaggc

SEQ ID NO: 2716721 - DNA, 25 bp, Homo sapien
tgctgcaaattttaggatggctccc

SEQ ID NO: 2716722 - DNA, 25 bp, Homo sapien
ccttgtcatgccagtccttcagctt

SEQ ID NO: 2716723 - DNA, 25 bp, Homo sapien
gcctccttgtcatgccagtccttca

SEQ ID NO: 2716724 - DNA, 25 bp, Homo sapien
cctccttgtcatgccagtccttcag

SEQ ID NO: 2716725 - DNA, 25 bp, Homo sapien
tccttgtcatgccagtccttcagct

SEQ ID NO: 2716726 - DNA, 25 bp, Homo sapien
ttatcactgacgtagatgttaaatc

SEQ ID NO: 2716727 - DNA, 25 bp, Homo sapien
gagcgattcaaggagattttatcac

SEQ ID NO: 2716728 - DNA, 25 bp, Homo sapien
ccggatatctgggagagagcgattc

SEQ ID NO: 2716729 - DNA, 25 bp, Homo sapien
ccattttctcggtatgcctgatcca

SEQ ID NO: 2716730 - DNA, 25 bp, Homo sapien
aaactgcctcgcttccgttctctgg

SEQ ID NO: 2716731 - DNA, 25 bp, Homo sapien
cgttctctggctacgcagtccccag

SEQ ID NO: 2716732 - DNA, 25 bp, Homo sapien
tgggccaaactgcctcgcttccgtt

SEQ ID NO: 2716733 - DNA, 25 bp, Homo sapien
tggctacgcagtccccagtgcagct

SEQ ID NO: 2716734 - DNA, 25 bp, Homo sapien
ccaggcactttagcagttgggtctc

SEQ ID NO: 2716735 - DNA, 25 bp, Homo sapien
ggtctctgttgtgccatcagccctg

SEQ ID NO: 2716736 - DNA, 25 bp, Homo sapien
tgttcacgctcacttggcaggaggt

SEQ ID NO: 2716737 - DNA, 25 bp, Homo sapien
tgcaccggaaactgcagatcccagg

SEQ ID NO: 2716738 - DNA, 25 bp, Homo sapien
ttattgagacagaggtgttgaaatc

SEQ ID NO: 2716739 - DNA, 25 bp, Homo sapien
ctaacataggcattaatgctacaaa

SEQ ID NO: 2716740 - DNA, 25 bp, Homo sapien
ccccttatgtagtagtttagtgaca

SEQ ID NO: 2716741 - DNA, 25 bp, Homo sapien
ggttatattggttgacagtgctgtg

SEQ ID NO: 2716742 - DNA, 25 bp, Homo sapien
ttatcctttgatcttctagttgctg

SEQ ID NO: 2716743 - DNA, 25 bp, Homo sapien
atcctttgatcttctagttgctgac

SEQ ID NO: 2716744 - DNA, 25 bp, Homo sapien
ctttatcctttgatcttctagttgc

SEQ ID NO: 2716745 - DNA, 25 bp, Homo sapien
ctctttatcctttgatcttctagtt

SEQ ID NO: 2716746 - DNA, 25 bp, Homo sapien
gggagacagcatatccacatctcaa

SEQ ID NO: 2716747 - DNA, 25 bp, Homo sapien
atcagaagcaatgaatattaagtct

SEQ ID NO: 2716748 - DNA, 25 bp, Homo sapien
cagtggcccttggtccaagggtaag

SEQ ID NO: 2716749 - DNA, 25 bp, Homo sapien
tgctccttggtttaaagatgaggaa

SEQ ID NO: 2716750 - DNA, 25 bp, Homo sapien
tggattttcccttaacgagatggag

SEQ ID NO: 2716751 - DNA, 25 bp, Homo sapien
cccttaacgagatggagctggttgg

SEQ ID NO: 2716752 - DNA, 25 bp, Homo sapien
gaggcagataggcagacgccagcat

SEQ ID NO: 2716753 - DNA, 25 bp, Homo sapien
ccagcatctctttgggttgaggacc

SEQ ID NO: 2716754 - DNA, 25 bp, Homo sapien
ctctatgctctgcacattgtggcaa

SEQ ID NO: 2716755 - DNA, 25 bp, Homo sapien
gagcaattacttgtagttcacagca

SEQ ID NO: 2716756 - DNA, 25 bp, Homo sapien
gttctacacgatttgcaaggcccta

SEQ ID NO: 2716757 - DNA, 25 bp, Homo sapien
actgggccatcatgacattaagagc

SEQ ID NO: 2716758 - DNA, 25 bp, Homo sapien
cttgatgtatggaaagaatgtcaca

SEQ ID NO: 2716759 - DNA, 25 bp, Homo sapien
tgatgtatggaaagaatgtcacaga

SEQ ID NO: 2716760 - DNA, 25 bp, Homo sapien
ttgatgtatggaaagaatgtcacag

SEQ ID NO: 2716761 - DNA, 25 bp, Homo sapien
gccacagttgtttagggcagaagca

SEQ ID NO: 2716762 - DNA, 25 bp, Homo sapien
ccgccaatccattgacttgccaggg

SEQ ID NO: 2716763 - DNA, 25 bp, Homo sapien
gaggctcaccagaccaatcaaattc

SEQ ID NO: 2716764 - DNA, 25 bp, Homo sapien
agaactctgactcagggccgccaat

SEQ ID NO: 2716765 - DNA, 25 bp, Homo sapien
tgggcttccacatgcagcgtggcct

SEQ ID NO: 2716766 - DNA, 25 bp, Homo sapien
tcctgaggtgcttggaagagtctct

SEQ ID NO: 2716767 - DNA, 25 bp, Homo sapien
gcctcctgaggtgcttggaagagtc

SEQ ID NO: 2716768 - DNA, 25 bp, Homo sapien
ctttgtgggcttccacatgcagcgt

SEQ ID NO: 2716769 - DNA, 25 bp, Homo sapien
ttctccgcctcttattaggctgcag

SEQ ID NO: 2716770 - DNA, 25 bp, Homo sapien
ttttctccgcctcttattaggctgc

SEQ ID NO: 2716771 - DNA, 25 bp, Homo sapien
tttctccgcctcttattaggctgca

SEQ ID NO: 2716772 - DNA, 25 bp, Homo sapien
ctggctctatagacctgcccacaag

SEQ ID NO: 2716773 - DNA, 25 bp, Homo sapien
tggctctatagacctgcccacaagc

SEQ ID NO: 2716774 - DNA, 25 bp, Homo sapien
gctctatagacctgcccacaagcca

SEQ ID NO: 2716775 - DNA, 25 bp, Homo sapien
ggctctatagacctgcccacaagcc

SEQ ID NO: 2716776 - DNA, 25 bp, Homo sapien
aatctctccagtatccagcagggta

SEQ ID NO: 2716777 - DNA, 25 bp, Homo sapien
taatctctccagtatccagcagggt

SEQ ID NO: 2716778 - DNA, 25 bp, Homo sapien
ttaatctctccagtatccagcaggg

SEQ ID NO: 2716779 - DNA, 25 bp, Homo sapien
atctctccagtatccagcagggtac

SEQ ID NO: 2716780 - DNA, 25 bp, Homo sapien
agttcttttgtctccgtatctcttg

SEQ ID NO: 2716781 - DNA, 25 bp, Homo sapien
tagggcagtgtgattctcttgcagg

SEQ ID NO: 2716782 - DNA, 25 bp, Homo sapien
catatcccaagttcttttgtctccg

SEQ ID NO: 2716783 - DNA, 25 bp, Homo sapien
agtgtgattctcttgcaggaaatgc

SEQ ID NO: 2716784 - DNA, 25 bp, Homo sapien
agagttcaacttcagtctttttata

SEQ ID NO: 2716785 - DNA, 25 bp, Homo sapien
cagagttcaacttcagtctttttat

SEQ ID NO: 2716786 - DNA, 25 bp, Homo sapien
gagttcaacttcagtctttttatac

SEQ ID NO: 2716787 - DNA, 25 bp, Homo sapien
agaaatgcggattctctggccaccc

SEQ ID NO: 2716788 - DNA, 25 bp, Homo sapien
taagcaagtcgatttggtcacacca

SEQ ID NO: 2716789 - DNA, 25 bp, Homo sapien
gattctgaaagtggtagcatcaccg

SEQ ID NO: 2716790 - DNA, 25 bp, Homo sapien
cataactggtagatattgggttccc

SEQ ID NO: 2716791 - DNA, 25 bp, Homo sapien
caagtctttagaatgagctggttcc

SEQ ID NO: 2716792 - DNA, 25 bp, Homo sapien
ttcaccccaaagtataggaaaggca

SEQ ID NO: 2716793 - DNA, 25 bp, Homo sapien
cctttggacatgatcagagtactga

SEQ ID NO: 2716794 - DNA, 25 bp, Homo sapien
cagcctcttcaaaggtggtggtaca

SEQ ID NO: 2716795 - DNA, 25 bp, Homo sapien
ctctggaggcgagcgattgagcaca

SEQ ID NO: 2716796 - DNA, 25 bp, Homo sapien
caatctcggcgaccagctctggagg

SEQ ID NO: 2716797 - DNA, 25 bp, Homo sapien
cgattgagcacactgtggacggtgc

SEQ ID NO: 2716798 - DNA, 25 bp, Homo sapien
tcgatcactgaagtcgtcgaccagt

SEQ ID NO: 2716799 - DNA, 25 bp, Homo sapien
tggagtgcacgcatactccctctct

SEQ ID NO: 2716800 - DNA, 25 bp, Homo sapien
ttattctggagtgcacgcatactcc

SEQ ID NO: 2716801 - DNA, 25 bp, Homo sapien
ttctggagtgcacgcatactccctc

SEQ ID NO: 2716802 - DNA, 25 bp, Homo sapien
ggagtgcacgcatactccctctctt

SEQ ID NO: 2716803 - DNA, 25 bp, Homo sapien
ggttctccatacttctcacagcgtt

SEQ ID NO: 2716804 - DNA, 25 bp, Homo sapien
gtgaggttctccatacttctcacag

SEQ ID NO: 2716805 - DNA, 25 bp, Homo sapien
tccatacttctcacagcgtttcctg

SEQ ID NO: 2716806 - DNA, 25 bp, Homo sapien
cttctcacagcgtttcctgagactt

SEQ ID NO: 2716807 - DNA, 25 bp, Homo sapien
atgacagctgaggtgcaagtctgaa

SEQ ID NO: 2716808 - DNA, 25 bp, Homo sapien
tgcaagtctgaagggtgtgaggtgg

SEQ ID NO: 2716809 - DNA, 25 bp, Homo sapien
tgtgaggtgggagtcctcctctggg

SEQ ID NO: 2716810 - DNA, 25 bp, Homo sapien
tgcaggctgcaaaacatgacagctg

SEQ ID NO: 2716811 - DNA, 25 bp, Homo sapien
catatttgccgtactttagacaggc

SEQ ID NO: 2716812 - DNA, 25 bp, Homo sapien
tcttgtaggatggtccatatttgcc

SEQ ID NO: 2716813 - DNA, 25 bp, Homo sapien
tagacaggcctctccataattctga

SEQ ID NO: 2716814 - DNA, 25 bp, Homo sapien
tgcagcccagagaaatctatcttgt

SEQ ID NO: 2716815 - DNA, 25 bp, Homo sapien
tagttgtaaagtaacgtatacagta

SEQ ID NO: 2716816 - DNA, 25 bp, Homo sapien
aatagttgtaaagtaacgtatacag

SEQ ID NO: 2716817 - DNA, 25 bp, Homo sapien
gtaaagtaacgtatacagtatgatc

SEQ ID NO: 2716818 - DNA, 25 bp, Homo sapien
gttgtaaagtaacgtatacagtatg

SEQ ID NO: 2716819 - DNA, 25 bp, Homo sapien
gggctatgactgtgggcctgatttt

SEQ ID NO: 2716820 - DNA, 25 bp, Homo sapien
cctgaaggtggagcacgacttgtca

SEQ ID NO: 2716821 - DNA, 25 bp, Homo sapien
gcctggccagcaataggtgctccct

SEQ ID NO: 2716822 - DNA, 25 bp, Homo sapien
gcaataggtgctccctgaaggtgga

SEQ ID NO: 2716823 - DNA, 25 bp, Homo sapien
tttccaatcaggctggttccctcct

SEQ ID NO: 2716824 - DNA, 25 bp, Homo sapien
ttgtttccaatcaggctggttccct

SEQ ID NO: 2716825 - DNA, 25 bp, Homo sapien
cagcatagtgcactaaagccccaaa

SEQ ID NO: 2716826 - DNA, 25 bp, Homo sapien
aatcaggctggttccctcctcttta

SEQ ID NO: 2716827 - DNA, 25 bp, Homo sapien
gcctctgcatgaacaaacatgcagc

SEQ ID NO: 2716828 - DNA, 25 bp, Homo sapien
cctctcttcctgaatgacaggcaag

SEQ ID NO: 2716829 - DNA, 25 bp, Homo sapien
gggcattctacatctatcatgtgga

SEQ ID NO: 2716830 - DNA, 25 bp, Homo sapien
cagagtgtgtgcgatacatttcaaa

SEQ ID NO: 2716831 - DNA, 25 bp, Homo sapien
tacagcgtgcaagacagacagagtg

SEQ ID NO: 2716832 - DNA, 25 bp, Homo sapien
taattcagtacgatgcacaaacagt

SEQ ID NO: 2716833 - DNA, 25 bp, Homo sapien
gagagggagttgatgcagtcggcag

SEQ ID NO: 2716834 - DNA, 25 bp, Homo sapien
gagggagttgatgcagtcggcagat

SEQ ID NO: 2716835 - DNA, 25 bp, Homo sapien
agagggagttgatgcagtcggcaga

SEQ ID NO: 2716836 - DNA, 25 bp, Homo sapien
aagacacaaaagcaacgggtgcaga

SEQ ID NO: 2716837 - DNA, 25 bp, Homo sapien
caaaagcaacgggtgcagaagtctc

SEQ ID NO: 2716838 - DNA, 25 bp, Homo sapien
atcccagagctgcgtatgctgaagg

SEQ ID NO: 2716839 - DNA, 25 bp, Homo sapien
gcaacgggtgcagaagtctccaaat

SEQ ID NO: 2716840 - DNA, 25 bp, Homo sapien
gagagggcttgtttaactcacacag

SEQ ID NO: 2716841 - DNA, 25 bp, Homo sapien
ttttaggaggcacgtctggtcacca

SEQ ID NO: 2716842 - DNA, 25 bp, Homo sapien
aatgaggctctagcaaaaagctgcc

SEQ ID NO: 2716843 - DNA, 25 bp, Homo sapien
caaaatcgggctgagcatgaattcc

SEQ ID NO: 2716844 - DNA, 25 bp, Homo sapien
aactgagcctccagtatttttcagg

SEQ ID NO: 2716845 - DNA, 25 bp, Homo sapien
tatttttcagggatgatatgagccg

SEQ ID NO: 2716846 - DNA, 25 bp, Homo sapien
gatatgagccgatcagaaaccaagt

SEQ ID NO: 2716847 - DNA, 25 bp, Homo sapien
gccgatcagaaaccaagtaaccaag

SEQ ID NO: 2716848 - DNA, 25 bp, Homo sapien
tacccgattcttgtgggtcaccgct

SEQ ID NO: 2716849 - DNA, 25 bp, Homo sapien
tattccatttgagtctgtcacagtg

SEQ ID NO: 2716850 - DNA, 25 bp, Homo sapien
ccagaagccaggtggtgtgatgtga

SEQ ID NO: 2716851 - DNA, 25 bp, Homo sapien
gagtcttgccagcaatgccacatgg

SEQ ID NO: 2716852 - DNA, 25 bp, Homo sapien
aaagcaaacaaggagcactggcctg

SEQ ID NO: 2716853 - DNA, 25 bp, Homo sapien
agcaaacaaggagcactggcctgga

SEQ ID NO: 2716854 - DNA, 25 bp, Homo sapien
aagcaaacaaggagcactggcctgg

SEQ ID NO: 2716855 - DNA, 25 bp, Homo sapien
gctgggaggtctatgcattctgaac

SEQ ID NO: 2716856 - DNA, 25 bp, Homo sapien
tccgagagaactccacaatgtggtg

SEQ ID NO: 2716857 - DNA, 25 bp, Homo sapien
tagcacaggctcaaacacaaacatg

SEQ ID NO: 2716858 - DNA, 25 bp, Homo sapien
gatgcccaggtattcgatttgttag

SEQ ID NO: 2716859 - DNA, 25 bp, Homo sapien
ccaaaattgatacaggtggtctcca

SEQ ID NO: 2716860 - DNA, 25 bp, Homo sapien
agccagggaggtagccccactttga

SEQ ID NO: 2716861 - DNA, 25 bp, Homo sapien
ccttgaagattcagacgtcctgcag

SEQ ID NO: 2716862 - DNA, 25 bp, Homo sapien
tgacaagctgtgctagtcacaccca

SEQ ID NO: 2716863 - DNA, 25 bp, Homo sapien
tgtctccaggaatcctattctattc

SEQ ID NO: 2716864 - DNA, 25 bp, Homo sapien
caggactcagagtgattgattttcc

SEQ ID NO: 2716865 - DNA, 25 bp, Homo sapien
tcagcgcaaagtgctcctgaagcat

SEQ ID NO: 2716866 - DNA, 25 bp, Homo sapien
gacttgtgtcgatctgcttggcaca

SEQ ID NO: 2716867 - DNA, 25 bp, Homo sapien
ggctctgggacctgtaggtgtcccg

SEQ ID NO: 2716868 - DNA, 25 bp, Homo sapien
agcatcaccagcattggttctctgg

SEQ ID NO: 2716869 - DNA, 25 bp, Homo sapien
gggtgctgctaaccttgcagaggct

SEQ ID NO: 2716870 - DNA, 25 bp, Homo sapien
gtgtcccgggtcttgtcaaatcttg

SEQ ID NO: 2716871 - DNA, 25 bp, Homo sapien
gacgcagagcatctgggagagcacc

SEQ ID NO: 2716872 - DNA, 25 bp, Homo sapien
atatttcagagtttcaatctctgat

SEQ ID NO: 2716873 - DNA, 25 bp, Homo sapien
agagctctactgtcccatgctctgg

SEQ ID NO: 2716874 - DNA, 25 bp, Homo sapien
tgctctggcaggacgcagagcatct

SEQ ID NO: 2716875 - DNA, 25 bp, Homo sapien
cccacgggatgatttggaagcgaat

SEQ ID NO: 2716876 - DNA, 25 bp, Homo sapien
ttccatagacccatcctttagcttt

SEQ ID NO: 2716877 - DNA, 25 bp, Homo sapien
gaagcgaatggagtctgtacttgta

SEQ ID NO: 2716878 - DNA, 25 bp, Homo sapien
tctgtccctgcccacgggatgattt

SEQ ID NO: 2716879 - DNA, 25 bp, Homo sapien
cccgaatgcagatggccacagtcat

SEQ ID NO: 2716880 - DNA, 25 bp, Homo sapien
aaatatcaccctggccggctctaat

SEQ ID NO: 2716881 - DNA, 25 bp, Homo sapien
cactactcccatcagagggataaat

SEQ ID NO: 2716882 - DNA, 25 bp, Homo sapien
taaatatcaccctggccggctctaa

SEQ ID NO: 2716883 - DNA, 25 bp, Homo sapien
catcagagggataaatatcaccctg

SEQ ID NO: 2716884 - DNA, 25 bp, Homo sapien
gcttcacagtgtgaatccaagaatg

SEQ ID NO: 2716885 - DNA, 25 bp, Homo sapien
gggaagccagttgacattggcttca

SEQ ID NO: 2716886 - DNA, 25 bp, Homo sapien
cagcattcgggtccttatcagccct

SEQ ID NO: 2716887 - DNA, 25 bp, Homo sapien
atgtgatgacatccccagttgccac

SEQ ID NO: 2716888 - DNA, 25 bp, Homo sapien
gaatagactttggagcccgacagat

SEQ ID NO: 2716889 - DNA, 25 bp, Homo sapien
gagggctagtggatcacgctgccct

SEQ ID NO: 2716890 - DNA, 25 bp, Homo sapien
aggcatgtttcacccagcctccagt

SEQ ID NO: 2716891 - DNA, 25 bp, Homo sapien
cagggaggcaatgtagaactgcgaa

SEQ ID NO: 2716892 - DNA, 25 bp, Homo sapien
aaaccgaactcctcaagattcaggc

SEQ ID NO: 2716893 - DNA, 25 bp, Homo sapien
gccctcatcaaaaccgaactcctca

SEQ ID NO: 2716894 - DNA, 25 bp, Homo sapien
tccatgtctgcctctcagcaccagc

SEQ ID NO: 2716895 - DNA, 25 bp, Homo sapien
catcaaaaccgaactcctcaagatt

SEQ ID NO: 2716896 - DNA, 25 bp, Homo sapien
gacatgcaacttgtgaggctccacc

SEQ ID NO: 2716897 - DNA, 25 bp, Homo sapien
gatgcacgctcaagtttgccctaaa

SEQ ID NO: 2716898 - DNA, 25 bp, Homo sapien
cagcccagtgagatcgtagaccctt

SEQ ID NO: 2716899 - DNA, 25 bp, Homo sapien
tcactggaagctgggtagacatgca

SEQ ID NO: 2716900 - DNA, 25 bp, Homo sapien
tgcctgtgtctcgtaccgaaagtcg

SEQ ID NO: 2716901 - DNA, 25 bp, Homo sapien
ggtcaattacatcaatcatcgggca

SEQ ID NO: 2716902 - DNA, 25 bp, Homo sapien
gatcgggatccgcttgtagtacatc

SEQ ID NO: 2716903 - DNA, 25 bp, Homo sapien
tcatcgggcacacaatggtcttgcg

SEQ ID NO: 2716904 - DNA, 25 bp, Homo sapien
tattactcagtaggccagcatggac

SEQ ID NO: 2716905 - DNA, 25 bp, Homo sapien
aaatcatgcagtacccacgggaaca

SEQ ID NO: 2716906 - DNA, 25 bp, Homo sapien
catttgggatgctcgaggctttgcc

SEQ ID NO: 2716907 - DNA, 25 bp, Homo sapien
gaaacaatccttgcgggaggcagcc

SEQ ID NO: 2716908 - DNA, 25 bp, Homo sapien
acagtccaccggccatcacgggaga

SEQ ID NO: 2716909 - DNA, 25 bp, Homo sapien
cgatccacggcgaacagtccaccgg

SEQ ID NO: 2716910 - DNA, 25 bp, Homo sapien
tgggtcatacccgccgagttcccag

SEQ ID NO: 2716911 - DNA, 25 bp, Homo sapien
gagttcccagaaccacttccgatcc

SEQ ID NO: 2716912 - DNA, 25 bp, Homo sapien
ggctgtgccaagaacggggcgtctg

SEQ ID NO: 2716913 - DNA, 25 bp, Homo sapien
gccaagaacggggcgtctggagagc

SEQ ID NO: 2716914 - DNA, 25 bp, Homo sapien
caagaacggggcgtctggagagctg

SEQ ID NO: 2716915 - DNA, 25 bp, Homo sapien
ctgtgccaagaacggggcgtctgga

SEQ ID NO: 2716916 - DNA, 25 bp, Homo sapien
gctgagacacctactgggacaggca

SEQ ID NO: 2716917 - DNA, 25 bp, Homo sapien
tggtgaggaccagcctttggcagct

SEQ ID NO: 2716918 - DNA, 25 bp, Homo sapien
cacaacaaagagtggcccatgagcc

SEQ ID NO: 2716919 - DNA, 25 bp, Homo sapien
caaatgccagtcagagctgtggtga

SEQ ID NO: 2716920 - DNA, 25 bp, Homo sapien
gcctggcagggagtagaaacctatt

SEQ ID NO: 2716921 - DNA, 25 bp, Homo sapien
taggatctgatcgtggcactctggc

SEQ ID NO: 2716922 - DNA, 25 bp, Homo sapien
ccataggctggtcaagtaggttaca

SEQ ID NO: 2716923 - DNA, 25 bp, Homo sapien
gggcagcccctaccaatggatcaga

SEQ ID NO: 2716924 - DNA, 25 bp, Homo sapien
ttcttgaggattatagaccaaggcc

SEQ ID NO: 2716925 - DNA, 25 bp, Homo sapien
gggccatgcgttctatcctgttttg

SEQ ID NO: 2716926 - DNA, 25 bp, Homo sapien
ggttctctcagactcctccaacgta

SEQ ID NO: 2716927 - DNA, 25 bp, Homo sapien
gatggaattagtgactcaggcgaga

SEQ ID NO: 2716928 - DNA, 25 bp, Homo sapien
gaaaaccgtatcagcacagtctggg

SEQ ID NO: 2716929 - DNA, 25 bp, Homo sapien
gcattgagagagacctagcccgagt

SEQ ID NO: 2716930 - DNA, 25 bp, Homo sapien
caaagatggcctcctaagtctggga

SEQ ID NO: 2716931 - DNA, 25 bp, Homo sapien
gatatcctaaccatggcctcctggg

SEQ ID NO: 2716932 - DNA, 25 bp, Homo sapien
gcagagttgctcttggcggcctcag

SEQ ID NO: 2716933 - DNA, 25 bp, Homo sapien
caaaggccactagggatgaagggtt

SEQ ID NO: 2716934 - DNA, 25 bp, Homo sapien
tatcagtatcacacaaagcgaaccc

SEQ ID NO: 2716935 - DNA, 25 bp, Homo sapien
gaacaagttcgatgttgcagacaca

SEQ ID NO: 2716936 - DNA, 25 bp, Homo sapien
ggttttggatgtttactggatgcag

SEQ ID NO: 2716937 - DNA, 25 bp, Homo sapien
tggttttggatgtttactggatgca

SEQ ID NO: 2716938 - DNA, 25 bp, Homo sapien
ctggttttggatgtttactggatgc

SEQ ID NO: 2716939 - DNA, 25 bp, Homo sapien
tccctcttgtgacaaacagctctca

SEQ ID NO: 2716940 - DNA, 25 bp, Homo sapien
ctccctcttgtgacaaacagctctc

SEQ ID NO: 2716941 - DNA, 25 bp, Homo sapien
gaagtggaacagatgtaggaggcca

SEQ ID NO: 2716942 - DNA, 25 bp, Homo sapien
gaacagatgtaggaggccagagaga

SEQ ID NO: 2716943 - DNA, 25 bp, Homo sapien
aggccagagagagcatcgccgtcat

SEQ ID NO: 2716944 - DNA, 25 bp, Homo sapien
gggtgaagtggaacagatgtaggag

SEQ ID NO: 2716945 - DNA, 25 bp, Homo sapien
tcctagcaacaatataagccatgag

SEQ ID NO: 2716946 - DNA, 25 bp, Homo sapien
ttttgtcatccattcttcagtcact

SEQ ID NO: 2716947 - DNA, 25 bp, Homo sapien
ttccttgtttctcgggcagaaggca

SEQ ID NO: 2716948 - DNA, 25 bp, Homo sapien
cattgccatctctttcgggctggat

SEQ ID NO: 2716949 - DNA, 25 bp, Homo sapien
tgacggtcataaagatgccgtggct

SEQ ID NO: 2716950 - DNA, 25 bp, Homo sapien
acggtcataaagatgccgtggcttc

SEQ ID NO: 2716951 - DNA, 25 bp, Homo sapien
cagaaatgacggtcataaagatgcc

SEQ ID NO: 2716952 - DNA, 25 bp, Homo sapien
gatactgcagaaatgacggtcataa

SEQ ID NO: 2716953 - DNA, 25 bp, Homo sapien
gattgtctgctgaagcctggatcac

SEQ ID NO: 2716954 - DNA, 25 bp, Homo sapien
cactatgctaagatggtcacatgca

SEQ ID NO: 2716955 - DNA, 25 bp, Homo sapien
gatcacagacctaatgacatgggaa

SEQ ID NO: 2716956 - DNA, 25 bp, Homo sapien
gcaaaagcatcagcctggattgtct

SEQ ID NO: 2716957 - DNA, 25 bp, Homo sapien
tgcttccagttcaccatcccgccag

SEQ ID NO: 2716958 - DNA, 25 bp, Homo sapien
gagaggatgacgtttctgcttccag

SEQ ID NO: 2716959 - DNA, 25 bp, Homo sapien
agaggatgacgtttctgcttccagt

SEQ ID NO: 2716960 - DNA, 25 bp, Homo sapien
tctgcttccagttcaccatcccgcc

SEQ ID NO: 2716961 - DNA, 25 bp, Homo sapien
gaccttgtagggcacatacttcctg

SEQ ID NO: 2716962 - DNA, 25 bp, Homo sapien
gtagggcacatacttcctgtagata

SEQ ID NO: 2716963 - DNA, 25 bp, Homo sapien
cttgtagggcacatacttcctgtag

SEQ ID NO: 2716964 - DNA, 25 bp, Homo sapien
ccttgtagggcacatacttcctgta

SEQ ID NO: 2716965 - DNA, 25 bp, Homo sapien
cctccccaggtcacatagcaatgaa

SEQ ID NO: 2716966 - DNA, 25 bp, Homo sapien
acacaggttcagaggacttaagcaa

SEQ ID NO: 2716967 - DNA, 25 bp, Homo sapien
tagcaatgaatggttaagtagggat

SEQ ID NO: 2716968 - DNA, 25 bp, Homo sapien
tctgggaaacagtatcacctcctta

SEQ ID NO: 2716969 - DNA, 25 bp, Homo sapien
aacatcacgtttcatgttccccatc

SEQ ID NO: 2716970 - DNA, 25 bp, Homo sapien
tcgccaacatcacgtttcatgttcc

SEQ ID NO: 2716971 - DNA, 25 bp, Homo sapien
gtttgaattctggcactagttactt

SEQ ID NO: 2716972 - DNA, 25 bp, Homo sapien
ccatcgccaacatcacgtttcatgt

SEQ ID NO: 2716973 - DNA, 25 bp, Homo sapien
ttgttaagtggcttaaagccaaaca

SEQ ID NO: 2716974 - DNA, 25 bp, Homo sapien
tgtggttctgcgaacccacacataa

SEQ ID NO: 2716975 - DNA, 25 bp, Homo sapien
gttctgcgaacccacacataatcag

SEQ ID NO: 2716976 - DNA, 25 bp, Homo sapien
tctgcgaacccacacataatcagac

SEQ ID NO: 2716977 - DNA, 25 bp, Homo sapien
ctctgtggttctgcgaacccacaca

SEQ ID NO: 2716978 - DNA, 25 bp, Homo sapien
gcaggtcccaggctatcttcgtcat

SEQ ID NO: 2716979 - DNA, 25 bp, Homo sapien
ggagctgcggagctttttctggact

SEQ ID NO: 2716980 - DNA, 25 bp, Homo sapien
ctgcgacatccccagcggagaggtg

SEQ ID NO: 2716981 - DNA, 25 bp, Homo sapien
ttcaggccggcgctggtaaatgtac

SEQ ID NO: 2716982 - DNA, 25 bp, Homo sapien
ggaactcgctctgggtgtgctaaga

SEQ ID NO: 2716983 - DNA, 25 bp, Homo sapien
gctaagaagggcaacagcatcctaa

SEQ ID NO: 2716984 - DNA, 25 bp, Homo sapien
gaagcaggaacgaccaacaagtcct

SEQ ID NO: 2716985 - DNA, 25 bp, Homo sapien
tacttgcgttactgccccgtgttag

SEQ ID NO: 2716986 - DNA, 25 bp, Homo sapien
tattgtagagtatgcagagtcctgg

SEQ ID NO: 2716987 - DNA, 25 bp, Homo sapien
cactgctgtaagtagtattgtagag

SEQ ID NO: 2716988 - DNA, 25 bp, Homo sapien
gaaattgaaccgacaggtccaggaa

SEQ ID NO: 2716989 - DNA, 25 bp, Homo sapien
gactcagtccacagaatgtaatcct

SEQ ID NO: 2716990 - DNA, 25 bp, Homo sapien
cttcaaatcgtcttgataaagcttg

SEQ ID NO: 2716991 - DNA, 25 bp, Homo sapien
gctggattaaccttcaaatcgtctt

SEQ ID NO: 2716992 - DNA, 25 bp, Homo sapien
aaaccaagtgggagacattagctgg

SEQ ID NO: 2716993 - DNA, 25 bp, Homo sapien
ccaagtgggagacattagctggatt

SEQ ID NO: 2716994 - DNA, 25 bp, Homo sapien
tgaggtgccttaaggtgcccaccgg

SEQ ID NO: 2716995 - DNA, 25 bp, Homo sapien
actgaggtgccttaaggtgcccacc

SEQ ID NO: 2716996 - DNA, 25 bp, Homo sapien
cactgaggtgccttaaggtgcccac

SEQ ID NO: 2716997 - DNA, 25 bp, Homo sapien
ctgaggtgccttaaggtgcccaccg

SEQ ID NO: 2716998 - DNA, 25 bp, Homo sapien
ggagcccaaggccccgtgctttgtg

SEQ ID NO: 2716999 - DNA, 25 bp, Homo sapien
ccaaggccccgtgctttgtgtctgc

SEQ ID NO: 2717000 - DNA, 25 bp, Homo sapien
tcggacgcagccctctagccttagt

SEQ ID NO: 2717001 - DNA, 25 bp, Homo sapien
tctagccttagtggggagcccaagg

SEQ ID NO: 2717002 - DNA, 25 bp, Homo sapien
atcagctcagggacacaattcatgg

SEQ ID NO: 2717003 - DNA, 25 bp, Homo sapien
gctactatataggaagggccaggtt

SEQ ID NO: 2717004 - DNA, 25 bp, Homo sapien
cctaggctccaagagtcaaggtaat

SEQ ID NO: 2717005 - DNA, 25 bp, Homo sapien
catgagcccactattgtctgagcag

SEQ ID NO: 2717006 - DNA, 25 bp, Homo sapien
tcgtacagcgtgacagggctggtgt

SEQ ID NO: 2717007 - DNA, 25 bp, Homo sapien
tgcggtatttccacagctggttgcc

SEQ ID NO: 2717008 - DNA, 25 bp, Homo sapien
tcatgctgtggcagtcgtacagcgt

SEQ ID NO: 2717009 - DNA, 25 bp, Homo sapien
tttgcggtatttccacagctggttg

SEQ ID NO: 2717010 - DNA, 25 bp, Homo sapien
tgagttggtgtgttcaaacagccac

SEQ ID NO: 2717011 - DNA, 25 bp, Homo sapien
cactgacagggtggtacagggtctt

SEQ ID NO: 2717012 - DNA, 25 bp, Homo sapien
gaagatcctatggtcactttcactg

SEQ ID NO: 2717013 - DNA, 25 bp, Homo sapien
actgcagtccatgcagctgccactg

SEQ ID NO: 2717014 - DNA, 25 bp, Homo sapien
gacactgggatcaacacgtaagcgt

SEQ ID NO: 2717015 - DNA, 25 bp, Homo sapien
gacatttcaaatacccagagagcag

SEQ ID NO: 2717016 - DNA, 25 bp, Homo sapien
gagggccacttctaaagctacagca

SEQ ID NO: 2717017 - DNA, 25 bp, Homo sapien
caagtatggcctttgaccggaccaa

SEQ ID NO: 2717018 - DNA, 25 bp, Homo sapien
gaagtctagctagtgctcggcaccc

SEQ ID NO: 2717019 - DNA, 25 bp, Homo sapien
caaatgccagagtgctcagaggaca

SEQ ID NO: 2717020 - DNA, 25 bp, Homo sapien
caaacaggtcccagtgaggtaatgc

SEQ ID NO: 2717021 - DNA, 25 bp, Homo sapien
gaacccagactggaaaggagaacca

SEQ ID NO: 2717022 - DNA, 25 bp, Homo sapien
tggggatgtgagcagaaacctgaat

SEQ ID NO: 2717023 - DNA, 25 bp, Homo sapien
ggggatgtgagcagaaacctgaatc

SEQ ID NO: 2717024 - DNA, 25 bp, Homo sapien
ctggggatgtgagcagaaacctgaa

SEQ ID NO: 2717025 - DNA, 25 bp, Homo sapien
tgtcagcatctccatatgctcctgg

SEQ ID NO: 2717026 - DNA, 25 bp, Homo sapien
cagcatctccatatgctcctggctg

SEQ ID NO: 2717027 - DNA, 25 bp, Homo sapien
tccatatgctcctggctgagtttta

SEQ ID NO: 2717028 - DNA, 25 bp, Homo sapien
tctccatatgctcctggctgagttt

SEQ ID NO: 2717029 - DNA, 25 bp, Homo sapien
ggatggcttttcacacacgtgcgtg

SEQ ID NO: 2717030 - DNA, 25 bp, Homo sapien
cacgtgcgtgcaagtttagccacct

SEQ ID NO: 2717031 - DNA, 25 bp, Homo sapien
gggccacatggtcacgatactttca

SEQ ID NO: 2717032 - DNA, 25 bp, Homo sapien
tgaaagctccaactggaggcagaag

SEQ ID NO: 2717033 - DNA, 25 bp, Homo sapien
tttctctcctggaccgaatgtcaca

SEQ ID NO: 2717034 - DNA, 25 bp, Homo sapien
cctgtggatgtaccccgttctgcct

SEQ ID NO: 2717035 - DNA, 25 bp, Homo sapien
gaatgtcacatcctctcgtccgatt

SEQ ID NO: 2717036 - DNA, 25 bp, Homo sapien
ctcctgtggatgtaccccgttctgc

SEQ ID NO: 2717037 - DNA, 25 bp, Homo sapien
tcacaaagagtgtccgttgaaagca

SEQ ID NO: 2717038 - DNA, 25 bp, Homo sapien
tacaaactagatatcgctgaagcag

SEQ ID NO: 2717039 - DNA, 25 bp, Homo sapien
tcacttggtatgtaggtccgactcc

SEQ ID NO: 2717040 - DNA, 25 bp, Homo sapien
tcttgagcttttggcctggaattcc

SEQ ID NO: 2717041 - DNA, 25 bp, Homo sapien
tatagttgggccatgtttgaatgca

SEQ ID NO: 2717042 - DNA, 25 bp, Homo sapien
tgaatgcattctgtcaatctatgcc

SEQ ID NO: 2717043 - DNA, 25 bp, Homo sapien
aggaacgacttaacttctgccattt

SEQ ID NO: 2717044 - DNA, 25 bp, Homo sapien
tgccattataaccactgcagctctt

SEQ ID NO: 2717045 - DNA, 25 bp, Homo sapien
gtcttttcagtaacagccattccga

SEQ ID NO: 2717046 - DNA, 25 bp, Homo sapien
tcccctgttgggtgtatagtttgca

SEQ ID NO: 2717047 - DNA, 25 bp, Homo sapien
tgtctgttcactcttttgctatgca

SEQ ID NO: 2717048 - DNA, 25 bp, Homo sapien
tctccatatcctagccaacatctgt

SEQ ID NO: 2717049 - DNA, 25 bp, Homo sapien
aacatgcaacatttgtctttctctg

SEQ ID NO: 2717050 - DNA, 25 bp, Homo sapien
gtcacactcgaagggaagaactgca

SEQ ID NO: 2717051 - DNA, 25 bp, Homo sapien
cctgagtgaagtcacactcgaaggg

SEQ ID NO: 2717052 - DNA, 25 bp, Homo sapien
tgccaggcctgagtgaagtcacact

SEQ ID NO: 2717053 - DNA, 25 bp, Homo sapien
tgaagtcacactcgaagggaagaac

SEQ ID NO: 2717054 - DNA, 25 bp, Homo sapien
acttggattccaaggagttcatgaa

SEQ ID NO: 2717055 - DNA, 25 bp, Homo sapien
ttttgttcccgtggtgttgtgtgtg

SEQ ID NO: 2717056 - DNA, 25 bp, Homo sapien
caggagatcagacgatacttggatt

SEQ ID NO: 2717057 - DNA, 25 bp, Homo sapien
caaaggctgtaaagttgctaagaaa

SEQ ID NO: 2717058 - DNA, 25 bp, Homo sapien
tgtgtgggaactcaaatctgttctc

SEQ ID NO: 2717059 - DNA, 25 bp, Homo sapien
gccatagaagttgcagatcatccct

SEQ ID NO: 2717060 - DNA, 25 bp, Homo sapien
gatcatcccttatgcacctggtatt

SEQ ID NO: 2717061 - DNA, 25 bp, Homo sapien
tctgttctcatcactaggccataga

SEQ ID NO: 2717062 - DNA, 25 bp, Homo sapien
cagttggtatggatgaaacctccat

SEQ ID NO: 2717063 - DNA, 25 bp, Homo sapien
gtgtgatgttgggtccaaagtcagt

SEQ ID NO: 2717064 - DNA, 25 bp, Homo sapien
tgttgggtccaaagtcagttggtat

SEQ ID NO: 2717065 - DNA, 25 bp, Homo sapien
aagtcagttggtatggatgaaacct

SEQ ID NO: 2717066 - DNA, 25 bp, Homo sapien
ctgggcagcgttttatgggcaggga

SEQ ID NO: 2717067 - DNA, 25 bp, Homo sapien
cagcgttttatgggcagggaagagg

SEQ ID NO: 2717068 - DNA, 25 bp, Homo sapien
ggcagcgttttatgggcagggaaga

SEQ ID NO: 2717069 - DNA, 25 bp, Homo sapien
tgggcagcgttttatgggcagggaa

SEQ ID NO: 2717070 - DNA, 25 bp, Homo sapien
ccagcccagggtcgtgtaattatgt

SEQ ID NO: 2717071 - DNA, 25 bp, Homo sapien
tctggtccagcacttcagtcatgcc

SEQ ID NO: 2717072 - DNA, 25 bp, Homo sapien
cctgcgcttggtttcggcgcccagg

SEQ ID NO: 2717073 - DNA, 25 bp, Homo sapien
gatgaggtccgaaaggcgatgggac

SEQ ID NO: 2717074 - DNA, 25 bp, Homo sapien
cggcgaagcgactgcgccctgccaa

SEQ ID NO: 2717075 - DNA, 25 bp, Homo sapien
ggcgaagcgactgcgccctgccaag

SEQ ID NO: 2717076 - DNA, 25 bp, Homo sapien
cgaagcgactgcgccctgccaagac

SEQ ID NO: 2717077 - DNA, 25 bp, Homo sapien
gcgaagcgactgcgccctgccaaga

SEQ ID NO: 2717078 - DNA, 25 bp, Homo sapien
ggacagacagtagagacgcggacgg

SEQ ID NO: 2717079 - DNA, 25 bp, Homo sapien
tggctggaccgagggccagactcca

SEQ ID NO: 2717080 - DNA, 25 bp, Homo sapien
gaggaacacattcggggacagacag

SEQ ID NO: 2717081 - DNA, 25 bp, Homo sapien
agaaccgggaaccgggctgcagact

SEQ ID NO: 2717082 - DNA, 25 bp, Homo sapien
tctgggcggggctgccgccgccgct

SEQ ID NO: 2717083 - DNA, 25 bp, Homo sapien
tggtctcatttgctctctgggcggg

SEQ ID NO: 2717084 - DNA, 25 bp, Homo sapien
tgccgccgccgctggcgcgtcccat

SEQ ID NO: 2717085 - DNA, 25 bp, Homo sapien
gcgaccattggtctcatttgctctc

SEQ ID NO: 2717086 - DNA, 25 bp, Homo sapien
cgcccttcgcgggacagcggaagtc

SEQ ID NO: 2717087 - DNA, 25 bp, Homo sapien
gggacagcggaagtcccgccttcac

SEQ ID NO: 2717088 - DNA, 25 bp, Homo sapien
ccttcgcgggacagcggaagtcccg

SEQ ID NO: 2717089 - DNA, 25 bp, Homo sapien
cgcgggacagcggaagtcccgcctt

SEQ ID NO: 2717090 - DNA, 25 bp, Homo sapien
gagggtcccagagtccgtctccagc

SEQ ID NO: 2717091 - DNA, 25 bp, Homo sapien
gggtcacccggaggagccttctgcc

SEQ ID NO: 2717092 - DNA, 25 bp, Homo sapien
ccttctttcggcagcggggcaaact

SEQ ID NO: 2717093 - DNA, 25 bp, Homo sapien
gagggcgtcccaggaaacagccgct

SEQ ID NO: 2717094 - DNA, 25 bp, Homo sapien
ggggcccttcgcggctgtcctcctc

SEQ ID NO: 2717095 - DNA, 25 bp, Homo sapien
ggcccttcgcggctgtcctcctccg

SEQ ID NO: 2717096 - DNA, 25 bp, Homo sapien
gcccttcgcggctgtcctcctccgt

SEQ ID NO: 2717097 - DNA, 25 bp, Homo sapien
gggcccttcgcggctgtcctcctcc

SEQ ID NO: 2717098 - DNA, 25 bp, Homo sapien
gcagcgctcgccgtcctcgatgagg

SEQ ID NO: 2717099 - DNA, 25 bp, Homo sapien
gcgggccggacgcagcgctcgccgt

SEQ ID NO: 2717100 - DNA, 25 bp, Homo sapien
ctgaaggaggcgttgcccgcgggcc

SEQ ID NO: 2717101 - DNA, 25 bp, Homo sapien
cgccgtcctcgatgaggcagcagct

SEQ ID NO: 2717102 - DNA, 25 bp, Homo sapien
ttgagtttcttctgcgagatgctct

SEQ ID NO: 2717103 - DNA, 25 bp, Homo sapien
tgagtttcttctgcgagatgctctt

SEQ ID NO: 2717104 - DNA, 25 bp, Homo sapien
ccctctgctgataccgaggatgcgg

SEQ ID NO: 2717105 - DNA, 25 bp, Homo sapien
acagctgcctgcgaagcagctagct

SEQ ID NO: 2717106 - DNA, 25 bp, Homo sapien
gcgaagcagctagctcggtgaccct

SEQ ID NO: 2717107 - DNA, 25 bp, Homo sapien
tctgtctgaaggaataacagggttc

SEQ ID NO: 2717108 - DNA, 25 bp, Homo sapien
gcatccctgagaggaagctagccct

SEQ ID NO: 2717109 - DNA, 25 bp, Homo sapien
catgttagctagactggcgagtcca

SEQ ID NO: 2717110 - DNA, 25 bp, Homo sapien
caaagaatcccacctagctgatgta

SEQ ID NO: 2717111 - DNA, 25 bp, Homo sapien
tgatgtaccaatataggaagtctcc

SEQ ID NO: 2717112 - DNA, 25 bp, Homo sapien
tatagtcgactggaatgtactgtcc

SEQ ID NO: 2717113 - DNA, 25 bp, Homo sapien
gacacaagggactgttgcaacggta

SEQ ID NO: 2717114 - DNA, 25 bp, Homo sapien
ttctaatacaggctggaggcacact

SEQ ID NO: 2717115 - DNA, 25 bp, Homo sapien
gacatgaagaatcctccaaggctgg

SEQ ID NO: 2717116 - DNA, 25 bp, Homo sapien
caaagtcagagttggccaattcctt

SEQ ID NO: 2717117 - DNA, 25 bp, Homo sapien
cagcaataggtatctgtcgaattgc

SEQ ID NO: 2717118 - DNA, 25 bp, Homo sapien
caataggtatctgtcgaattgcggg

SEQ ID NO: 2717119 - DNA, 25 bp, Homo sapien
aaatcaaagtcagagttggccaatt

SEQ ID NO: 2717120 - DNA, 25 bp, Homo sapien
gagaatctccgccatcgtcacttgt

SEQ ID NO: 2717121 - DNA, 25 bp, Homo sapien
tatttcggacactctggatgaaatt

SEQ ID NO: 2717122 - DNA, 25 bp, Homo sapien
ccttttatttcggacactctggatg

SEQ ID NO: 2717123 - DNA, 25 bp, Homo sapien
aatgtcagtgtcgtgctcgggagaa

SEQ ID NO: 2717124 - DNA, 25 bp, Homo sapien
taggtctcatggtctagcgcagtgg

SEQ ID NO: 2717125 - DNA, 25 bp, Homo sapien
ctctgagtgctaacaggcggttgcc

SEQ ID NO: 2717126 - DNA, 25 bp, Homo sapien
tgctagagttgagaaaaccgggtcc

SEQ ID NO: 2717127 - DNA, 25 bp, Homo sapien
tgaagcctcacttaatagacacggg

SEQ ID NO: 2717128 - DNA, 25 bp, Homo sapien
aaatgaatgatcaatatgaggggcc

SEQ ID NO: 2717129 - DNA, 25 bp, Homo sapien
aaaatgaatgatcaatatgaggggc

SEQ ID NO: 2717130 - DNA, 25 bp, Homo sapien
aagagctgttcttgcttcaggcagg

SEQ ID NO: 2717131 - DNA, 25 bp, Homo sapien
gctgttcttgcttcaggcaggtgga

SEQ ID NO: 2717132 - DNA, 25 bp, Homo sapien
ctctaaaagagctgttcttgcttca

SEQ ID NO: 2717133 - DNA, 25 bp, Homo sapien
tctaaaagagctgttcttgcttcag

SEQ ID NO: 2717134 - DNA, 25 bp, Homo sapien
ggactcaccaagagcccactatgtg

SEQ ID NO: 2717135 - DNA, 25 bp, Homo sapien
gataaagcactgagaaacggtaggg

SEQ ID NO: 2717136 - DNA, 25 bp, Homo sapien
tgggctgatctcacaaaactggtgg

SEQ ID NO: 2717137 - DNA, 25 bp, Homo sapien
tgtgcctagcactacactaaggtag

SEQ ID NO: 2717138 - DNA, 25 bp, Homo sapien
gggccttattgaagcctggtctggt

SEQ ID NO: 2717139 - DNA, 25 bp, Homo sapien
tgtagtgtcgtttataacgtcgtag

SEQ ID NO: 2717140 - DNA, 25 bp, Homo sapien
tctggtctgcaacttgtagtgtcgt

SEQ ID NO: 2717141 - DNA, 25 bp, Homo sapien
tataacgtcgtagggtgttcacctg

SEQ ID NO: 2717142 - DNA, 25 bp, Homo sapien
aagggagaatcagggtaaccatcag

SEQ ID NO: 2717143 - DNA, 25 bp, Homo sapien
ggctctctttagagggcaattttgt

SEQ ID NO: 2717144 - DNA, 25 bp, Homo sapien
taagggagaatcagggtaaccatca

SEQ ID NO: 2717145 - DNA, 25 bp, Homo sapien
gggagaatcagggtaaccatcagaa

SEQ ID NO: 2717146 - DNA, 25 bp, Homo sapien
aaagtgacggtcgagcaagaaacct

SEQ ID NO: 2717147 - DNA, 25 bp, Homo sapien
aagaaaaagtgacggtcgagcaaga

SEQ ID NO: 2717148 - DNA, 25 bp, Homo sapien
gaaaaagtgacggtcgagcaagaaa

SEQ ID NO: 2717149 - DNA, 25 bp, Homo sapien
ttaagaaaaagtgacggtcgagcaa

SEQ ID NO: 2717150 - DNA, 25 bp, Homo sapien
tggttggccagctgctaccaaacct

SEQ ID NO: 2717151 - DNA, 25 bp, Homo sapien
tgccatgtgcggaactcagagtgcc

SEQ ID NO: 2717152 - DNA, 25 bp, Homo sapien
ctctcaggccttgaaagtgggaaga

SEQ ID NO: 2717153 - DNA, 25 bp, Homo sapien
ctgtggcgggaatgacaaatgctga

SEQ ID NO: 2717154 - DNA, 25 bp, Homo sapien
accatgtagatgaagtaggcaaggg

SEQ ID NO: 2717155 - DNA, 25 bp, Homo sapien
tgttcctgaagtgtcgactcacagt

SEQ ID NO: 2717156 - DNA, 25 bp, Homo sapien
taggcaagggtctctttttcattca

SEQ ID NO: 2717157 - DNA, 25 bp, Homo sapien
tcacaggtatgttcctgaagtgtcg

SEQ ID NO: 2717158 - DNA, 25 bp, Homo sapien
tttctggtccagtctactcttgtta

SEQ ID NO: 2717159 - DNA, 25 bp, Homo sapien
ttctggtccagtctactcttgttac

SEQ ID NO: 2717160 - DNA, 25 bp, Homo sapien
ccaccctccgatttctggtccagtc

SEQ ID NO: 2717161 - DNA, 25 bp, Homo sapien
ttgccaccctccgatttctggtcca

SEQ ID NO: 2717162 - DNA, 25 bp, Homo sapien
gcattacacttcattcctttaagat

SEQ ID NO: 2717163 - DNA, 25 bp, Homo sapien
taaatgtagtagatatcacctgtgc

SEQ ID NO: 2717164 - DNA, 25 bp, Homo sapien
gtctttatgggcttaaatgtagtag

SEQ ID NO: 2717165 - DNA, 25 bp, Homo sapien
gatatcacctgtgcatcaagcatta

SEQ ID NO: 2717166 - DNA, 25 bp, Homo sapien
tatacacatgctgaatcatgagaat

SEQ ID NO: 2717167 - DNA, 25 bp, Homo sapien
atcctcctgaccaaaaagatttaca

SEQ ID NO: 2717168 - DNA, 25 bp, Homo sapien
tctttctatacacatgctgaatcat

SEQ ID NO: 2717169 - DNA, 25 bp, Homo sapien
atgctgaatcatgagaatataatcc

SEQ ID NO: 2717170 - DNA, 25 bp, Homo sapien
gaaatagtgatgtgacctacacgcc

SEQ ID NO: 2717171 - DNA, 25 bp, Homo sapien
cagactgctcaaccccttggtggga

SEQ ID NO: 2717172 - DNA, 25 bp, Homo sapien
ttaagagcaaaagtcgggccatccc

SEQ ID NO: 2717173 - DNA, 25 bp, Homo sapien
taatgactgagagcgcctttggatg

SEQ ID NO: 2717174 - DNA, 25 bp, Homo sapien
cttctggcagttgctagtgcgcgtg

SEQ ID NO: 2717175 - DNA, 25 bp, Homo sapien
ttgaagcctggtccactcctgcatc

SEQ ID NO: 2717176 - DNA, 25 bp, Homo sapien
gctagtgcgcgtggctgagtctgag

SEQ ID NO: 2717177 - DNA, 25 bp, Homo sapien
ggctccctttgaagcctggtccact

SEQ ID NO: 2717178 - DNA, 25 bp, Homo sapien
taaacacgagctgttcttgctgctg

SEQ ID NO: 2717179 - DNA, 25 bp, Homo sapien
cttcagggcaccctgagaccaggct

SEQ ID NO: 2717180 - DNA, 25 bp, Homo sapien
gaaaggcgaagacagcgtggccctt

SEQ ID NO: 2717181 - DNA, 25 bp, Homo sapien
gaagctcttagcctggcctggagca

SEQ ID NO: 2717182 - DNA, 25 bp, Homo sapien
gctcgggtttttgtgcgttgagtat

SEQ ID NO: 2717183 - DNA, 25 bp, Homo sapien
cgttgagtattcgtgcttgtctgga

SEQ ID NO: 2717184 - DNA, 25 bp, Homo sapien
tggaggttagtatgcccactggtgt

SEQ ID NO: 2717185 - DNA, 25 bp, Homo sapien
tgcttgtctggaggttagtatgccc

SEQ ID NO: 2717186 - DNA, 25 bp, Homo sapien
gcagcagcacgaaggttttcctcct

SEQ ID NO: 2717187 - DNA, 25 bp, Homo sapien
ccatgccgggcgatcggagcagaaa

SEQ ID NO: 2717188 - DNA, 25 bp, Homo sapien
cagcagcacgaaggttttcctcctg

SEQ ID NO: 2717189 - DNA, 25 bp, Homo sapien
gggcgatcggagcagaaaaattaaa

SEQ ID NO: 2717190 - DNA, 25 bp, Homo sapien
agagcgggagaaccgtggatttcca

SEQ ID NO: 2717191 - DNA, 25 bp, Homo sapien
caagcctgcatccaagccctgatgt

SEQ ID NO: 2717192 - DNA, 25 bp, Homo sapien
cagctccggcttagggggccccaag

SEQ ID NO: 2717193 - DNA, 25 bp, Homo sapien
atgtttaaaccaggttgggaggctg

SEQ ID NO: 2717194 - DNA, 25 bp, Homo sapien
gacatctctctgtgcggaaaataca

SEQ ID NO: 2717195 - DNA, 25 bp, Homo sapien
tctgtttaggttgaacgcgtcccga

SEQ ID NO: 2717196 - DNA, 25 bp, Homo sapien
gaagctcagacgacataaaaactta

SEQ ID NO: 2717197 - DNA, 25 bp, Homo sapien
aaacggagccgggacgaagctcaga

SEQ ID NO: 2717198 - DNA, 25 bp, Homo sapien
cattttttctcgtgtctttccttct

SEQ ID NO: 2717199 - DNA, 25 bp, Homo sapien
atgaaaccattttttctcgtgtctt

SEQ ID NO: 2717200 - DNA, 25 bp, Homo sapien
gatgaaaccattttttctcgtgtct

SEQ ID NO: 2717201 - DNA, 25 bp, Homo sapien
cgatgaaaccattttttctcgtgtc

SEQ ID NO: 2717202 - DNA, 25 bp, Homo sapien
ttgacagaccaaacgaaacagaggg

SEQ ID NO: 2717203 - DNA, 25 bp, Homo sapien
tttcttgccacacctagtcctgttg

SEQ ID NO: 2717204 - DNA, 25 bp, Homo sapien
ctttatcaagcctcacacgtttggg

SEQ ID NO: 2717205 - DNA, 25 bp, Homo sapien
ttgttgctggagttgacagaccaaa

SEQ ID NO: 2717206 - DNA, 25 bp, Homo sapien
aattgtttgctaatggagaagtaac

SEQ ID NO: 2717207 - DNA, 25 bp, Homo sapien
taaaattgtttgctaatggagaagt

SEQ ID NO: 2717208 - DNA, 25 bp, Homo sapien
aaattgtttgctaatggagaagtaa

SEQ ID NO: 2717209 - DNA, 25 bp, Homo sapien
aaaattgtttgctaatggagaagta

SEQ ID NO: 2717210 - DNA, 25 bp, Homo sapien
aggaagaaatggaaaacattgagaa

SEQ ID NO: 2717211 - DNA, 25 bp, Homo sapien
ctgggggatatggaggaagaaatgg

SEQ ID NO: 2717212 - DNA, 25 bp, Homo sapien
agaaatggaaaacattgagaagcat

SEQ ID NO: 2717213 - DNA, 25 bp, Homo sapien
gaagaaatggaaaacattgagaagc

SEQ ID NO: 2717214 - DNA, 25 bp, Homo sapien
caccaaatgaaggagcgacgggctt

SEQ ID NO: 2717215 - DNA, 25 bp, Homo sapien
gaagaaacagtattagcaacagata

SEQ ID NO: 2717216 - DNA, 25 bp, Homo sapien
gacaccaaatgaaggagcgacgggc

SEQ ID NO: 2717217 - DNA, 25 bp, Homo sapien
gaagtgataactcctctttgtttct

SEQ ID NO: 2717218 - DNA, 25 bp, Homo sapien
ctgtgagtcgtgacacgcttagttc

SEQ ID NO: 2717219 - DNA, 25 bp, Homo sapien
tgtgagtcgtgacacgcttagttct

SEQ ID NO: 2717220 - DNA, 25 bp, Homo sapien
ctaagtcatctttgtcagtaataat

SEQ ID NO: 2717221 - DNA, 25 bp, Homo sapien
ttactaagtcatctttgtcagtaat

SEQ ID NO: 2717222 - DNA, 25 bp, Homo sapien
ttttagttgagacaaagtcagaaac

SEQ ID NO: 2717223 - DNA, 25 bp, Homo sapien
tttttactaagtcatctttgtcagt

SEQ ID NO: 2717224 - DNA, 25 bp, Homo sapien
ggtttgccttttggctcccaagctg

SEQ ID NO: 2717225 - DNA, 25 bp, Homo sapien
tcccaagctgggctccaaaaggata

SEQ ID NO: 2717226 - DNA, 25 bp, Homo sapien
agctgggctccaaaaggatattttt

SEQ ID NO: 2717227 - DNA, 25 bp, Homo sapien
cggtttgccttttggctcccaagct

SEQ ID NO: 2717228 - DNA, 25 bp, Homo sapien
tcttccacaatattatcaggttctt

SEQ ID NO: 2717229 - DNA, 25 bp, Homo sapien
ttccacaatattatcaggttcttcc

SEQ ID NO: 2717230 - DNA, 25 bp, Homo sapien
cacaaagtcttccacaatattatca

SEQ ID NO: 2717231 - DNA, 25 bp, Homo sapien
agtcttccacaatattatcaggttc

SEQ ID NO: 2717232 - DNA, 25 bp, Homo sapien
ccctaacaatgcggaagcaggccct

SEQ ID NO: 2717233 - DNA, 25 bp, Homo sapien
ctaacaatgcggaagcaggcccttg

SEQ ID NO: 2717234 - DNA, 25 bp, Homo sapien
ctgcccctaacaatgcggaagcagg

SEQ ID NO: 2717235 - DNA, 25 bp, Homo sapien
gcccctaacaatgcggaagcaggcc

SEQ ID NO: 2717236 - DNA, 25 bp, Homo sapien
ggtcacagtgtgcaccaggtagggt

SEQ ID NO: 2717237 - DNA, 25 bp, Homo sapien
tcagcagggccctttatccagagag

SEQ ID NO: 2717238 - DNA, 25 bp, Homo sapien
aaaggctgcctcagtgggtctcaag

SEQ ID NO: 2717239 - DNA, 25 bp, Homo sapien
ggtgacaggctaaccaggtcctgct

SEQ ID NO: 2717240 - DNA, 25 bp, Homo sapien
gcccaaattgccagacacaggcctg

SEQ ID NO: 2717241 - DNA, 25 bp, Homo sapien
agccggctggccatttgtccacaga

SEQ ID NO: 2717242 - DNA, 25 bp, Homo sapien
tccacagatgggtgtgcagataaca

SEQ ID NO: 2717243 - DNA, 25 bp, Homo sapien
gagaggcggactcccctctaggcag

SEQ ID NO: 2717244 - DNA, 25 bp, Homo sapien
cagctgcagtgaaaatctagcaaat

SEQ ID NO: 2717245 - DNA, 25 bp, Homo sapien
tgtcaggagggttctggccaggatc

SEQ ID NO: 2717246 - DNA, 25 bp, Homo sapien
tgcagtgaaaatctagcaaatgagg

SEQ ID NO: 2717247 - DNA, 25 bp, Homo sapien
ggttctggccaggatcagctgcagt

SEQ ID NO: 2717248 - DNA, 25 bp, Homo sapien
tgtgacctacaaatggcaagtcttg

SEQ ID NO: 2717249 - DNA, 25 bp, Homo sapien
gaatgattgaatgctgggcgctgct

SEQ ID NO: 2717250 - DNA, 25 bp, Homo sapien
caagccgaggtttcctgagctccaa

SEQ ID NO: 2717251 - DNA, 25 bp, Homo sapien
ttgtgcgccacctagaggataccgg

SEQ ID NO: 2717252 - DNA, 25 bp, Homo sapien
ttatctgcgatgaccactccatggc

SEQ ID NO: 2717253 - DNA, 25 bp, Homo sapien
gaagaattattagcgcacatgggac

SEQ ID NO: 2717254 - DNA, 25 bp, Homo sapien
tggatgtcgcaagatgctgtctgtg

SEQ ID NO: 2717255 - DNA, 25 bp, Homo sapien
tgggacagaaagcaccaaagggccc

SEQ ID NO: 2717256 - DNA, 25 bp, Homo sapien
aaacagcgtcaggacaagccagctt

SEQ ID NO: 2717257 - DNA, 25 bp, Homo sapien
tatgggcaggactgaaggtttctgc

SEQ ID NO: 2717258 - DNA, 25 bp, Homo sapien
agatgcctgccttgttaacagaaac

SEQ ID NO: 2717259 - DNA, 25 bp, Homo sapien
gcctttatgggcaggactgaaggtt

SEQ ID NO: 2717260 - DNA, 25 bp, Homo sapien
ccagaactggactcttgtctggtcc

SEQ ID NO: 2717261 - DNA, 25 bp, Homo sapien
acccatgccacctctacacctggaa

SEQ ID NO: 2717262 - DNA, 25 bp, Homo sapien
agccaccagaactggactcttgtct

SEQ ID NO: 2717263 - DNA, 25 bp, Homo sapien
gaactggactcttgtctggtcccat

SEQ ID NO: 2717264 - DNA, 25 bp, Homo sapien
gaactgaacttgggttctctggtct

SEQ ID NO: 2717265 - DNA, 25 bp, Homo sapien
cagtgcttggtagcaacagcatggc

SEQ ID NO: 2717266 - DNA, 25 bp, Homo sapien
ggaactgaacttgggttctctggtc

SEQ ID NO: 2717267 - DNA, 25 bp, Homo sapien
ccccagtgcttggtagcaacagcat

SEQ ID NO: 2717268 - DNA, 25 bp, Homo sapien
tatggtagtgtcaagaatagtcccc

SEQ ID NO: 2717269 - DNA, 25 bp, Homo sapien
ggcttttcaacaaagtgtctgtaac

SEQ ID NO: 2717270 - DNA, 25 bp, Homo sapien
gccacaataatccagagaatatggt

SEQ ID NO: 2717271 - DNA, 25 bp, Homo sapien
aaattgaaggacttatccaacctga

SEQ ID NO: 2717272 - DNA, 25 bp, Homo sapien
tcctgtcgggtccagcatctctgag

SEQ ID NO: 2717273 - DNA, 25 bp, Homo sapien
gggctttggaatcactagactgtct

SEQ ID NO: 2717274 - DNA, 25 bp, Homo sapien
aggagatagggatgcctctgccgct

SEQ ID NO: 2717275 - DNA, 25 bp, Homo sapien
catgctgaaaggaagccttgtcaac

SEQ ID NO: 2717276 - DNA, 25 bp, Homo sapien
tggcctcgagatggctctatcagag

SEQ ID NO: 2717277 - DNA, 25 bp, Homo sapien
ggtctgatgagggtagagtgtttct

SEQ ID NO: 2717278 - DNA, 25 bp, Homo sapien
cagcgggccagaggacgccacagtt

SEQ ID NO: 2717279 - DNA, 25 bp, Homo sapien
catttctggttgtgtcacaggatac

SEQ ID NO: 2717280 - DNA, 25 bp, Homo sapien
caggactcttttatcagaggaaggg

SEQ ID NO: 2717281 - DNA, 25 bp, Homo sapien
ggctgtcaccaagcatatgtttccg

SEQ ID NO: 2717282 - DNA, 25 bp, Homo sapien
gaacaggactgaatcgatggagcac

SEQ ID NO: 2717283 - DNA, 25 bp, Homo sapien
tatgtttccgaaagagaggctgtag

SEQ ID NO: 2717284 - DNA, 25 bp, Homo sapien
aagtagaagaggttagagagggctc

SEQ ID NO: 2717285 - DNA, 25 bp, Homo sapien
gatccttggcacatcccagggcctt

SEQ ID NO: 2717286 - DNA, 25 bp, Homo sapien
tgggtgccctgctgtcagatcccag

SEQ ID NO: 2717287 - DNA, 25 bp, Homo sapien
ctgggtgccctgctgtcagatccca

SEQ ID NO: 2717288 - DNA, 25 bp, Homo sapien
aaggatccttggcacatcccagggc

SEQ ID NO: 2717289 - DNA, 25 bp, Homo sapien
gggcctggggtcctgaggggcagac

SEQ ID NO: 2717290 - DNA, 25 bp, Homo sapien
cttgcaagacagactcctgtggccg

SEQ ID NO: 2717291 - DNA, 25 bp, Homo sapien
tgtggccggggcctggggtcctgag

SEQ ID NO: 2717292 - DNA, 25 bp, Homo sapien
tgcaagacagactcctgtggccggg

SEQ ID NO: 2717293 - DNA, 25 bp, Homo sapien
tgacctttagagaagctgtgctgtg

SEQ ID NO: 2717294 - DNA, 25 bp, Homo sapien
tccttctggtgacctttagagaagc

SEQ ID NO: 2717295 - DNA, 25 bp, Homo sapien
agttgaggaggcctgacacgagaat

SEQ ID NO: 2717296 - DNA, 25 bp, Homo sapien
cctgacacgagaattattaaagcac

SEQ ID NO: 2717297 - DNA, 25 bp, Homo sapien
caggccacaaggaagggtagcatag

SEQ ID NO: 2717298 - DNA, 25 bp, Homo sapien
ggccacaaggaagggtagcataggg

SEQ ID NO: 2717299 - DNA, 25 bp, Homo sapien
aggccacaaggaagggtagcatagg

SEQ ID NO: 2717300 - DNA, 25 bp, Homo sapien
ccacaaggaagggtagcatagggca

SEQ ID NO: 2717301 - DNA, 25 bp, Homo sapien
gcaggactcatccggtaggaaagtg

SEQ ID NO: 2717302 - DNA, 25 bp, Homo sapien
ggactcatccggtaggaaagtggag

SEQ ID NO: 2717303 - DNA, 25 bp, Homo sapien
aggactcatccggtaggaaagtgga

SEQ ID NO: 2717304 - DNA, 25 bp, Homo sapien
ctgcagggttaatcccgggggcctg

SEQ ID NO: 2717305 - DNA, 25 bp, Homo sapien
agcaggggtctgaagccagcccaag

SEQ ID NO: 2717306 - DNA, 25 bp, Homo sapien
gggtctgaagccagcccaaggctcc

SEQ ID NO: 2717307 - DNA, 25 bp, Homo sapien
ctgctgccgcaggtggtgctggcag

SEQ ID NO: 2717308 - DNA, 25 bp, Homo sapien
gcaggtggtgctggcaggaccagca

SEQ ID NO: 2717309 - DNA, 25 bp, Homo sapien
tcgaagttacggatgcgaaggtccg

SEQ ID NO: 2717310 - DNA, 25 bp, Homo sapien
ggcagagggagactgccgtgtcgaa

SEQ ID NO: 2717311 - DNA, 25 bp, Homo sapien
gccgtgtcgaagttacggatgcgaa

SEQ ID NO: 2717312 - DNA, 25 bp, Homo sapien
gagactgccgtgtcgaagttacgga

SEQ ID NO: 2717313 - DNA, 25 bp, Homo sapien
ttatttcctggctcccccggctctc

SEQ ID NO: 2717314 - DNA, 25 bp, Homo sapien
tggctcccccggctctctggaagcc

SEQ ID NO: 2717315 - DNA, 25 bp, Homo sapien
gctcccccggctctctggaagcctc

SEQ ID NO: 2717316 - DNA, 25 bp, Homo sapien
ggctctctggaagcctccaaaccat

SEQ ID NO: 2717317 - DNA, 25 bp, Homo sapien
agcgtggccagctgccgtggctgag

SEQ ID NO: 2717318 - DNA, 25 bp, Homo sapien
aggaacaaggccgagcctggaactc

SEQ ID NO: 2717319 - DNA, 25 bp, Homo sapien
gtgacagctcctccacgggggacgc

SEQ ID NO: 2717320 - DNA, 25 bp, Homo sapien
actcgtcttgaaccccgagggactg

SEQ ID NO: 2717321 - DNA, 25 bp, Homo sapien
gcaatggtttttagttctccctgaa

SEQ ID NO: 2717322 - DNA, 25 bp, Homo sapien
caatggtttttagttctccctgaag

SEQ ID NO: 2717323 - DNA, 25 bp, Homo sapien
gagcaatggtttttagttctccctg

SEQ ID NO: 2717324 - DNA, 25 bp, Homo sapien
ttgagcaatggtttttagttctccc

SEQ ID NO: 2717325 - DNA, 25 bp, Homo sapien
catcaagcctgtgcctaacttagtc

SEQ ID NO: 2717326 - DNA, 25 bp, Homo sapien
aacttagtcaggagccccagagagt

SEQ ID NO: 2717327 - DNA, 25 bp, Homo sapien
tgtgcctaacttagtcaggagcccc

SEQ ID NO: 2717328 - DNA, 25 bp, Homo sapien
tcaagcctgtgcctaacttagtcag

SEQ ID NO: 2717329 - DNA, 25 bp, Homo sapien
atcccagtgacctcaaggaacctcc

SEQ ID NO: 2717330 - DNA, 25 bp, Homo sapien
ctcaaggaacctcccgaagttcatg

SEQ ID NO: 2717331 - DNA, 25 bp, Homo sapien
agtgacctcaaggaacctcccgaag

SEQ ID NO: 2717332 - DNA, 25 bp, Homo sapien
aggaacctcccgaagttcatggcag

SEQ ID NO: 2717333 - DNA, 25 bp, Homo sapien
caagatgatgaaactagcgcagaca

SEQ ID NO: 2717334 - DNA, 25 bp, Homo sapien
gggccctgctccgtcttgagtcagc

SEQ ID NO: 2717335 - DNA, 25 bp, Homo sapien
ttcacagttggaaagacccttccag

SEQ ID NO: 2717336 - DNA, 25 bp, Homo sapien
gaacatggtagtgacggcttcttcc

SEQ ID NO: 2717337 - DNA, 25 bp, Homo sapien
cttttcatcgcatattcggttgttc

SEQ ID NO: 2717338 - DNA, 25 bp, Homo sapien
cagaggagagcccttgaccaaggac

SEQ ID NO: 2717339 - DNA, 25 bp, Homo sapien
tattcggttgttcacccgcgacttc

SEQ ID NO: 2717340 - DNA, 25 bp, Homo sapien
cttcctttcccgaggagcgacggcg

SEQ ID NO: 2717341 - DNA, 25 bp, Homo sapien
tcagaggcaaagctgctctcccttt

SEQ ID NO: 2717342 - DNA, 25 bp, Homo sapien
gaggccctacagcaaatggccaagg

SEQ ID NO: 2717343 - DNA, 25 bp, Homo sapien
caggcgggagccagggtaaacttca

SEQ ID NO: 2717344 - DNA, 25 bp, Homo sapien
cccaggtggccccagtgcgaaggca

SEQ ID NO: 2717345 - DNA, 25 bp, Homo sapien
cacagcgtcgggagcttgcgagatc

SEQ ID NO: 2717346 - DNA, 25 bp, Homo sapien
tcgggagcttgcgagatcacctggc

SEQ ID NO: 2717347 - DNA, 25 bp, Homo sapien
ttgcgagatcacctggctgggatga

SEQ ID NO: 2717348 - DNA, 25 bp, Homo sapien
gctgagcacagcgtcgggagcttgc

SEQ ID NO: 2717349 - DNA, 25 bp, Homo sapien
tgtgggtctaggagtgcctccaacc

SEQ ID NO: 2717350 - DNA, 25 bp, Homo sapien
tgggtctaggagtgcctccaacccc

SEQ ID NO: 2717351 - DNA, 25 bp, Homo sapien
ttgtgggtctaggagtgcctccaac

SEQ ID NO: 2717352 - DNA, 25 bp, Homo sapien
cttgtgggtctaggagtgcctccaa

SEQ ID NO: 2717353 - DNA, 25 bp, Homo sapien
ccctgcagtcccgtccatctggtcc

SEQ ID NO: 2717354 - DNA, 25 bp, Homo sapien
ctgcagtcccgtccatctggtcccc

SEQ ID NO: 2717355 - DNA, 25 bp, Homo sapien
cctgcagtcccgtccatctggtccc

SEQ ID NO: 2717356 - DNA, 25 bp, Homo sapien
gccctgcagtcccgtccatctggtc

SEQ ID NO: 2717357 - DNA, 25 bp, Homo sapien
tggcttaacattctgtcctggagga

SEQ ID NO: 2717358 - DNA, 25 bp, Homo sapien
gaacaattaagtccaggcgtggctt

SEQ ID NO: 2717359 - DNA, 25 bp, Homo sapien
ctaacgacatcttggaacaattaag

SEQ ID NO: 2717360 - DNA, 25 bp, Homo sapien
gccagctcgccctgaatcatgggac

SEQ ID NO: 2717361 - DNA, 25 bp, Homo sapien
aagatcaacttcacaaggtcatggg

SEQ ID NO: 2717362 - DNA, 25 bp, Homo sapien
tgccagcagggaacaatggttaaga

SEQ ID NO: 2717363 - DNA, 25 bp, Homo sapien
gacttgaggactttgggcaactggc

SEQ ID NO: 2717364 - DNA, 25 bp, Homo sapien
aaagccctgcaatcctatgacaatg

SEQ ID NO: 2717365 - DNA, 25 bp, Homo sapien
gatttcaggagtgatttagctgggt

SEQ ID NO: 2717366 - DNA, 25 bp, Homo sapien
caggagtgatttagctgggtgctac

SEQ ID NO: 2717367 - DNA, 25 bp, Homo sapien
tcaggagtgatttagctgggtgcta

SEQ ID NO: 2717368 - DNA, 25 bp, Homo sapien
aggagtgatttagctgggtgctact

SEQ ID NO: 2717369 - DNA, 25 bp, Homo sapien
ctgctcgcctgctctcccagcacgg

SEQ ID NO: 2717370 - DNA, 25 bp, Homo sapien
gctcgcctgctctcccagcacggcc

SEQ ID NO: 2717371 - DNA, 25 bp, Homo sapien
tgctcgcctgctctcccagcacggc

SEQ ID NO: 2717372 - DNA, 25 bp, Homo sapien
tacccatgaatagaccggaagcgca

SEQ ID NO: 2717373 - DNA, 25 bp, Homo sapien
tacacattaggagctgagaagcact

SEQ ID NO: 2717374 - DNA, 25 bp, Homo sapien
ggaagcgcaaggagtgcacaccctt

SEQ ID NO: 2717375 - DNA, 25 bp, Homo sapien
aatgcaggatcttgggttcgttcca

SEQ ID NO: 2717376 - DNA, 25 bp, Homo sapien
ttctctctaggaaaggctcatgcag

SEQ ID NO: 2717377 - DNA, 25 bp, Homo sapien
ctctaggaaaggctcatgcagagct

SEQ ID NO: 2717378 - DNA, 25 bp, Homo sapien
ctctctaggaaaggctcatgcagag

SEQ ID NO: 2717379 - DNA, 25 bp, Homo sapien
tttctctctaggaaaggctcatgca

SEQ ID NO: 2717380 - DNA, 25 bp, Homo sapien
gccttttggaagcaccgtccatctt

SEQ ID NO: 2717381 - DNA, 25 bp, Homo sapien
aagcaagttagatatcacctatgtg

SEQ ID NO: 2717382 - DNA, 25 bp, Homo sapien
gtgtccgcaatcagaaacctttgag

SEQ ID NO: 2717383 - DNA, 25 bp, Homo sapien
tttagccttttggaagcaccgtcca

SEQ ID NO: 2717384 - DNA, 25 bp, Homo sapien
ctcttcgggaatcctgaggactgtg

SEQ ID NO: 2717385 - DNA, 25 bp, Homo sapien
gcggtggaaacgggctccaggcgcc

SEQ ID NO: 2717386 - DNA, 25 bp, Homo sapien
cctgtcccgccaggccgttgtcgca

SEQ ID NO: 2717387 - DNA, 25 bp, Homo sapien
aggactgtgcggcggtggaaacggg

SEQ ID NO: 2717388 - DNA, 25 bp, Homo sapien
gcgcagctcgtgcttcccggcaccc

SEQ ID NO: 2717389 - DNA, 25 bp, Homo sapien
cggcaccccgaaagctcggcggcca

SEQ ID NO: 2717390 - DNA, 25 bp, Homo sapien
cgcgcagctcgtgcttcccggcacc

SEQ ID NO: 2717391 - DNA, 25 bp, Homo sapien
aagctcggcggccaggcggccacgt

SEQ ID NO: 2717392 - DNA, 25 bp, Homo sapien
gcagaccttcatgccgaagggcagt

SEQ ID NO: 2717393 - DNA, 25 bp, Homo sapien
acggagggaggaatgcaagatcctc

SEQ ID NO: 2717394 - DNA, 25 bp, Homo sapien
cctgaccttgtgcagaccttcatgc

SEQ ID NO: 2717395 - DNA, 25 bp, Homo sapien
ccttgtgcagaccttcatgccgaag

SEQ ID NO: 2717396 - DNA, 25 bp, Homo sapien
tatcaggttggaggatgggtgccca

SEQ ID NO: 2717397 - DNA, 25 bp, Homo sapien
ttggaggatgggtgcccattcacgt

SEQ ID NO: 2717398 - DNA, 25 bp, Homo sapien
cgaggagcgctatcaggttggagga

SEQ ID NO: 2717399 - DNA, 25 bp, Homo sapien
agggctgccgaggagcgctatcagg

SEQ ID NO: 2717400 - DNA, 25 bp, Homo sapien
gaagtgtttgtgtccttcacagtga

SEQ ID NO: 2717401 - DNA, 25 bp, Homo sapien
tctggagctttaactacaacagtcc

SEQ ID NO: 2717402 - DNA, 25 bp, Homo sapien
aacaggaatagtcagataagcccac

SEQ ID NO: 2717403 - DNA, 25 bp, Homo sapien
aatgactcaagattagccaagtggg

SEQ ID NO: 2717404 - DNA, 25 bp, Homo sapien
taactcactatcttcagactagcct

SEQ ID NO: 2717405 - DNA, 25 bp, Homo sapien
agataactcactatcttcagactag

SEQ ID NO: 2717406 - DNA, 25 bp, Homo sapien
gtaactggctgtgaacaatcgagat

SEQ ID NO: 2717407 - DNA, 25 bp, Homo sapien
caatcgagataactcactatcttca

SEQ ID NO: 2717408 - DNA, 25 bp, Homo sapien
cagcagtaatgcaaacggccacact

SEQ ID NO: 2717409 - DNA, 25 bp, Homo sapien
agtgtaccacactaccgggtgcggt

SEQ ID NO: 2717410 - DNA, 25 bp, Homo sapien
cagacagcaggaactatgattttaa

SEQ ID NO: 2717411 - DNA, 25 bp, Homo sapien
gacactgacggaatatgtagtagtc

SEQ ID NO: 2717412 - DNA, 25 bp, Homo sapien
gtttaggtacatccagatcgcacag

SEQ ID NO: 2717413 - DNA, 25 bp, Homo sapien
tggccctggagggtttaggtacatc

SEQ ID NO: 2717414 - DNA, 25 bp, Homo sapien
aggtacatccagatcgcacagctgc

SEQ ID NO: 2717415 - DNA, 25 bp, Homo sapien
actatgtggccctggagggtttagg

SEQ ID NO: 2717416 - DNA, 25 bp, Homo sapien
tgagggaaaggaggcctctttgaca

SEQ ID NO: 2717417 - DNA, 25 bp, Homo sapien
gaggcctctttgacaaaagcaccct

SEQ ID NO: 2717418 - DNA, 25 bp, Homo sapien
gaaaggaggcctctttgacaaaagc

SEQ ID NO: 2717419 - DNA, 25 bp, Homo sapien
aggaggcctctttgacaaaagcacc

SEQ ID NO: 2717420 - DNA, 25 bp, Homo sapien
tctgccagggcagctaggtatggga

SEQ ID NO: 2717421 - DNA, 25 bp, Homo sapien
gctgccaaggccacgctgtttttcc

SEQ ID NO: 2717422 - DNA, 25 bp, Homo sapien
gtatgggagcctcttggaaatccag

SEQ ID NO: 2717423 - DNA, 25 bp, Homo sapien
agctaggtatgggagcctcttggaa

SEQ ID NO: 2717424 - DNA, 25 bp, Homo sapien
gggactcctgggagcagtctctcca

SEQ ID NO: 2717425 - DNA, 25 bp, Homo sapien
ggagcagtctctccacataggaaat

SEQ ID NO: 2717426 - DNA, 25 bp, Homo sapien
ctttcactttcaagaatgaaccctg

SEQ ID NO: 2717427 - DNA, 25 bp, Homo sapien
gaatgaaccctgtgtgtgaggcagc

SEQ ID NO: 2717428 - DNA, 25 bp, Homo sapien
ttctaccataggctctaccccgaga

SEQ ID NO: 2717429 - DNA, 25 bp, Homo sapien
gctgccacaacccttgaaaccaaca

SEQ ID NO: 2717430 - DNA, 25 bp, Homo sapien
cactccttctaccataggctctacc

SEQ ID NO: 2717431 - DNA, 25 bp, Homo sapien
ccataggctctaccccgagagaggg

SEQ ID NO: 2717432 - DNA, 25 bp, Homo sapien
gagctcctcagggttcaattaggcc

SEQ ID NO: 2717433 - DNA, 25 bp, Homo sapien
gctcctcagggttcaattaggcctc

SEQ ID NO: 2717434 - DNA, 25 bp, Homo sapien
gatgctgaaatctcagtagagctcc

SEQ ID NO: 2717435 - DNA, 25 bp, Homo sapien
atgctgaaatctcagtagagctcct

SEQ ID NO: 2717436 - DNA, 25 bp, Homo sapien
gccaaaagagggtatgtagggccta

SEQ ID NO: 2717437 - DNA, 25 bp, Homo sapien
aggcccctctgcttcgatgtgcact

SEQ ID NO: 2717438 - DNA, 25 bp, Homo sapien
ccaaaagagggtatgtagggcctag

SEQ ID NO: 2717439 - DNA, 25 bp, Homo sapien
tctgcttcgatgtgcactctctgaa

SEQ ID NO: 2717440 - DNA, 25 bp, Homo sapien
cataggtttcgcagattgtcaaggg

SEQ ID NO: 2717441 - DNA, 25 bp, Homo sapien
tgtcatcctatgtattttaggtatt

SEQ ID NO: 2717442 - DNA, 25 bp, Homo sapien
gagcccataggtttcgcagattgtc

SEQ ID NO: 2717443 - DNA, 25 bp, Homo sapien
gtttcgcagattgtcaagggatcca

SEQ ID NO: 2717444 - DNA, 25 bp, Homo sapien
agtagctggggttacaggcacacac

SEQ ID NO: 2717445 - DNA, 25 bp, Homo sapien
cctccaccaccggggtttgagcgat

SEQ ID NO: 2717446 - DNA, 25 bp, Homo sapien
ctccaccaccggggtttgagcgatt

SEQ ID NO: 2717447 - DNA, 25 bp, Homo sapien
ctgagtagctggggttacaggcaca

SEQ ID NO: 2717448 - DNA, 25 bp, Homo sapien
gaatttgaagcaaatccctttagaa

SEQ ID NO: 2717449 - DNA, 25 bp, Homo sapien
tgaagcaaatccctttagaatcttc

SEQ ID NO: 2717450 - DNA, 25 bp, Homo sapien
tttgaagcaaatccctttagaatct

SEQ ID NO: 2717451 - DNA, 25 bp, Homo sapien
tgtgaatttgaagcaaatcccttta

SEQ ID NO: 2717452 - DNA, 25 bp, Homo sapien
atggcacgatttcggctcatcgcaa

SEQ ID NO: 2717453 - DNA, 25 bp, Homo sapien
aatggcacgatttcggctcatcgca

SEQ ID NO: 2717454 - DNA, 25 bp, Homo sapien
agagatggggttcctctgtgttggt

SEQ ID NO: 2717455 - DNA, 25 bp, Homo sapien
gatggggttcctctgtgttggtcag

SEQ ID NO: 2717456 - DNA, 25 bp, Homo sapien
tctgcttcctctagtgtaaaacagg

SEQ ID NO: 2717457 - DNA, 25 bp, Homo sapien
attccagctctgcagcggacttgct

SEQ ID NO: 2717458 - DNA, 25 bp, Homo sapien
cttcctctagtgtaaaacagggaga

SEQ ID NO: 2717459 - DNA, 25 bp, Homo sapien
aattccagctctgcagcggacttgc

SEQ ID NO: 2717460 - DNA, 25 bp, Homo sapien
cagtccctggactggggaccatgct

SEQ ID NO: 2717461 - DNA, 25 bp, Homo sapien
catgctgtcagatttccaggatgat

SEQ ID NO: 2717462 - DNA, 25 bp, Homo sapien
gatgatccatgcacagccacctgtt

SEQ ID NO: 2717463 - DNA, 25 bp, Homo sapien
cctgtaatttagtgttctgctgttc

SEQ ID NO: 2717464 - DNA, 25 bp, Homo sapien
atagacatgattgtctttggttggc

SEQ ID NO: 2717465 - DNA, 25 bp, Homo sapien
gccagtgacccactttctatttgga

SEQ ID NO: 2717466 - DNA, 25 bp, Homo sapien
ctgaggcctatagaagttaagtgac

SEQ ID NO: 2717467 - DNA, 25 bp, Homo sapien
gatcgtgacaccacatcacaagaga

SEQ ID NO: 2717468 - DNA, 25 bp, Homo sapien
ccggcaggcttctagtcccgtccct

SEQ ID NO: 2717469 - DNA, 25 bp, Homo sapien
agtccaggcctcctaggcgtgcgtc

SEQ ID NO: 2717470 - DNA, 25 bp, Homo sapien
ggctgcagcaatatggacggacggg

SEQ ID NO: 2717471 - DNA, 25 bp, Homo sapien
agcagaccacgcgatccgcggcagg

SEQ ID NO: 2717472 - DNA, 25 bp, Homo sapien
agggtcggggttcacgcgaggtgcg

SEQ ID NO: 2717473 - DNA, 25 bp, Homo sapien
ccagttagatgcagccgccgtaaat

SEQ ID NO: 2717474 - DNA, 25 bp, Homo sapien
ttggctagcagagcgcccgcgacgc

SEQ ID NO: 2717475 - DNA, 25 bp, Homo sapien
aggtgcggccccctcccagttagat

SEQ ID NO: 2717476 - DNA, 25 bp, Homo sapien
cggagaagccgggcgcgcccgaggc

SEQ ID NO: 2717477 - DNA, 25 bp, Homo sapien
cgggcgcgcccgaggctgcctcccc

SEQ ID NO: 2717478 - DNA, 25 bp, Homo sapien
ccggagaagccgggcgcgcccgagg

SEQ ID NO: 2717479 - DNA, 25 bp, Homo sapien
ttcggcctgcaagagcgtggcgccc

SEQ ID NO: 2717480 - DNA, 25 bp, Homo sapien
gctcttcggcctgcaagagcgtggc

SEQ ID NO: 2717481 - DNA, 25 bp, Homo sapien
cctgcaagagcgtggcgcccccagg

SEQ ID NO: 2717482 - DNA, 25 bp, Homo sapien
tcttcggcctgcaagagcgtggcgc

SEQ ID NO: 2717483 - DNA, 25 bp, Homo sapien
tctccgagcgctgccgtccggctcc

SEQ ID NO: 2717484 - DNA, 25 bp, Homo sapien
ccggggtctccgagcgctgccgtcc

SEQ ID NO: 2717485 - DNA, 25 bp, Homo sapien
ggtctccgagcgctgccgtccggct

SEQ ID NO: 2717486 - DNA, 25 bp, Homo sapien
ggcggccggggtctccgagcgctgc

SEQ ID NO: 2717487 - DNA, 25 bp, Homo sapien
tccacgaagtcccggcgccccgcgc

SEQ ID NO: 2717488 - DNA, 25 bp, Homo sapien
ccgccctcctccccgtcgctgatgg

SEQ ID NO: 2717489 - DNA, 25 bp, Homo sapien
tcctccccgtcgctgatggccgggc

SEQ ID NO: 2717490 - DNA, 25 bp, Homo sapien
cctcctccccgtcgctgatggccgg

SEQ ID NO: 2717491 - DNA, 25 bp, Homo sapien
tccgttcacggtggtcaggaccggc

SEQ ID NO: 2717492 - DNA, 25 bp, Homo sapien
caggaccggcggcaatgcgttctta

SEQ ID NO: 2717493 - DNA, 25 bp, Homo sapien
aatgcgttcttagtccacgggttca

SEQ ID NO: 2717494 - DNA, 25 bp, Homo sapien
gactgtccgttcacggtggtcagga

SEQ ID NO: 2717495 - DNA, 25 bp, Homo sapien
tgggtttcttctccccacaactgac

SEQ ID NO: 2717496 - DNA, 25 bp, Homo sapien
gctccttcttaaggcggaaggtgcc

SEQ ID NO: 2717497 - DNA, 25 bp, Homo sapien
ctcaacccgtctccaaatggcgatt

SEQ ID NO: 2717498 - DNA, 25 bp, Homo sapien
ggagggaaaccaccgaattcgatga

SEQ ID NO: 2717499 - DNA, 25 bp, Homo sapien
gcaccgaacgccgaggccgagcggc

SEQ ID NO: 2717500 - DNA, 25 bp, Homo sapien
gcggcccgcaccgaacgccgaggcc

SEQ ID NO: 2717501 - DNA, 25 bp, Homo sapien
gccgcggcccgcaccgaacgccgag

SEQ ID NO: 2717502 - DNA, 25 bp, Homo sapien
gcccgcaccgaacgccgaggccgag

SEQ ID NO: 2717503 - DNA, 25 bp, Homo sapien
ggaggactcgcggagcgccggtcgg

SEQ ID NO: 2717504 - DNA, 25 bp, Homo sapien
cggagcgccggtcggcagtcacatg

SEQ ID NO: 2717505 - DNA, 25 bp, Homo sapien
cggcagtcacatgccgctccccgcg

SEQ ID NO: 2717506 - DNA, 25 bp, Homo sapien
cccgcgcggggaggcaccacgttgt

SEQ ID NO: 2717507 - DNA, 25 bp, Homo sapien
cccacgctgacacggctctgctggg

SEQ ID NO: 2717508 - DNA, 25 bp, Homo sapien
ggcaatgcaagagcagactccatat

SEQ ID NO: 2717509 - DNA, 25 bp, Homo sapien
tattctcggcaaaggcaatgcaaga

SEQ ID NO: 2717510 - DNA, 25 bp, Homo sapien
acccaagccgacgatctattctcgg

SEQ ID NO: 2717511 - DNA, 25 bp, Homo sapien
tacgaccagaggccatcattccaac

SEQ ID NO: 2717512 - DNA, 25 bp, Homo sapien
agtgcttctactcctttgacggtga

SEQ ID NO: 2717513 - DNA, 25 bp, Homo sapien
attctggcttccctaggactagcag

SEQ ID NO: 2717514 - DNA, 25 bp, Homo sapien
tgacggtgaagacattaagctcccc

SEQ ID NO: 2717515 - DNA, 25 bp, Homo sapien
ttccctaggactagcagtgcttcta

SEQ ID NO: 2717516 - DNA, 25 bp, Homo sapien
tagccttaccagactgacaacccaa

SEQ ID NO: 2717517 - DNA, 25 bp, Homo sapien
tgacaacccaatcatagaattctct

SEQ ID NO: 2717518 - DNA, 25 bp, Homo sapien
gagatccacgtaggctccagagaaa

SEQ ID NO: 2717519 - DNA, 25 bp, Homo sapien
tcagagatccacgtaggctccagag

SEQ ID NO: 2717520 - DNA, 25 bp, Homo sapien
tcatctttcactgcagcctttacct

SEQ ID NO: 2717521 - DNA, 25 bp, Homo sapien
accgcacccaggcagctttttcttt

SEQ ID NO: 2717522 - DNA, 25 bp, Homo sapien
gagtgcagtgacacactcatctttc

SEQ ID NO: 2717523 - DNA, 25 bp, Homo sapien
tgaaccaccgcacccaggcagcttt

SEQ ID NO: 2717524 - DNA, 25 bp, Homo sapien
tcttgctcaatatagcctcgacctc

SEQ ID NO: 2717525 - DNA, 25 bp, Homo sapien
tgcagtggctcttgctcaatatagc

SEQ ID NO: 2717526 - DNA, 25 bp, Homo sapien
gtggctcttgctcaatatagcctcg

SEQ ID NO: 2717527 - DNA, 25 bp, Homo sapien
ggctcttgctcaatatagcctcgac

SEQ ID NO: 2717528 - DNA, 25 bp, Homo sapien
cacacagggtgtttgtgcttaacag

SEQ ID NO: 2717529 - DNA, 25 bp, Homo sapien
actccccaacactttgactgaagct

SEQ ID NO: 2717530 - DNA, 25 bp, Homo sapien
tatactctgagactgatcacacagg

SEQ ID NO: 2717531 - DNA, 25 bp, Homo sapien
tagagattgacatccaagatgctat

SEQ ID NO: 2717532 - DNA, 25 bp, Homo sapien
ctcagaggcctcaaccccagcgtgc

SEQ ID NO: 2717533 - DNA, 25 bp, Homo sapien
ccaggctcagaggcctcaaccccag

SEQ ID NO: 2717534 - DNA, 25 bp, Homo sapien
gctcagaggcctcaaccccagcgtg

SEQ ID NO: 2717535 - DNA, 25 bp, Homo sapien
aggctcagaggcctcaaccccagcg

SEQ ID NO: 2717536 - DNA, 25 bp, Homo sapien
gacctgcttcaagtctaggatctcc

SEQ ID NO: 2717537 - DNA, 25 bp, Homo sapien
gaccagacggcttcttagtgaccaa

SEQ ID NO: 2717538 - DNA, 25 bp, Homo sapien
gagaacatcccagagcaactacaag

SEQ ID NO: 2717539 - DNA, 25 bp, Homo sapien
gtgaccaaagcccttttagattctg

SEQ ID NO: 2717540 - DNA, 25 bp, Homo sapien
ggttagccgaaggttatccagtgag

SEQ ID NO: 2717541 - DNA, 25 bp, Homo sapien
aaaggcaatgctctagaaccatctg

SEQ ID NO: 2717542 - DNA, 25 bp, Homo sapien
ccagtgagaaggtatctgactccaa

SEQ ID NO: 2717543 - DNA, 25 bp, Homo sapien
tagaagactcaaggcagctaagtgg

SEQ ID NO: 2717544 - DNA, 25 bp, Homo sapien
tgtttgctcacccaatgctctgtct

SEQ ID NO: 2717545 - DNA, 25 bp, Homo sapien
gaaggttctgaagggaattgtccac

SEQ ID NO: 2717546 - DNA, 25 bp, Homo sapien
ttttgcctcacagccgaacagcttc

SEQ ID NO: 2717547 - DNA, 25 bp, Homo sapien
aggtcacaagggatcagtctgggct

SEQ ID NO: 2717548 - DNA, 25 bp, Homo sapien
ggttcatacgatgacaaaatcaact

SEQ ID NO: 2717549 - DNA, 25 bp, Homo sapien
cctaagtccatagtacgttgtgcca

SEQ ID NO: 2717550 - DNA, 25 bp, Homo sapien
tgtacgtacactctaggttcatacg

SEQ ID NO: 2717551 - DNA, 25 bp, Homo sapien
tccctgttaagtgacacgagactgt

SEQ ID NO: 2717552 - DNA, 25 bp, Homo sapien
tctcggtgagttcaggatggcctac

SEQ ID NO: 2717553 - DNA, 25 bp, Homo sapien
gaagctggagttctcgagtagcaac

SEQ ID NO: 2717554 - DNA, 25 bp, Homo sapien
gagggtcatcccaaaagcagatagg

SEQ ID NO: 2717555 - DNA, 25 bp, Homo sapien
tggccggcccacaaactcattttta

SEQ ID NO: 2717556 - DNA, 25 bp, Homo sapien
gctgctgtcggtaccatctctcaga

SEQ ID NO: 2717557 - DNA, 25 bp, Homo sapien
tgctgtcggtaccatctctcagagg

SEQ ID NO: 2717558 - DNA, 25 bp, Homo sapien
tgctgctgtcggtaccatctctcag

SEQ ID NO: 2717559 - DNA, 25 bp, Homo sapien
ctgtcggtaccatctctcagaggcc

SEQ ID NO: 2717560 - DNA, 25 bp, Homo sapien
ctgtgcctgtccctcccaggccagc

SEQ ID NO: 2717561 - DNA, 25 bp, Homo sapien
gcggtaatccatgcccactggatgg

SEQ ID NO: 2717562 - DNA, 25 bp, Homo sapien
ctggctcttctgagcggtaatccat

SEQ ID NO: 2717563 - DNA, 25 bp, Homo sapien
cactggatggggataccacaccacc

SEQ ID NO: 2717564 - DNA, 25 bp, Homo sapien
tcttctgagcggtaatccatgccca

SEQ ID NO: 2717565 - DNA, 25 bp, Homo sapien
gggtggatggcagacagagtcccta

SEQ ID NO: 2717566 - DNA, 25 bp, Homo sapien
tggatggcagacagagtccctagga

SEQ ID NO: 2717567 - DNA, 25 bp, Homo sapien
cagacagagtccctaggagggtctt

SEQ ID NO: 2717568 - DNA, 25 bp, Homo sapien
cagagtccctaggagggtcttcttc

SEQ ID NO: 2717569 - DNA, 25 bp, Homo sapien
caaaagccttcttagtgtaatctta

SEQ ID NO: 2717570 - DNA, 25 bp, Homo sapien
agcttatctgtccacaggtctccga

SEQ ID NO: 2717571 - DNA, 25 bp, Homo sapien
gcacttcccttgtttttctgagtaa

SEQ ID NO: 2717572 - DNA, 25 bp, Homo sapien
tgtctactggcgaggaatgggtcaa

SEQ ID NO: 2717573 - DNA, 25 bp, Homo sapien
cccagtgcagggcaatggtgaacca

SEQ ID NO: 2717574 - DNA, 25 bp, Homo sapien
ggaaaagatacatcctgtggctctg

SEQ ID NO: 2717575 - DNA, 25 bp, Homo sapien
aatgagtagagagtgtccttgcctg

SEQ ID NO: 2717576 - DNA, 25 bp, Homo sapien
aaatttgcccggctggcttggaaag

SEQ ID NO: 2717577 - DNA, 25 bp, Homo sapien
atcaccgtccccactccacctagca

SEQ ID NO: 2717578 - DNA, 25 bp, Homo sapien
tcatcaccgtccccactccacctag

SEQ ID NO: 2717579 - DNA, 25 bp, Homo sapien
cctcatcaccgtccccactccacct

SEQ ID NO: 2717580 - DNA, 25 bp, Homo sapien
caccgtccccactccacctagcaac

SEQ ID NO: 2717581 - DNA, 25 bp, Homo sapien
ctgcctttgcgctgtttaggaacag

SEQ ID NO: 2717582 - DNA, 25 bp, Homo sapien
gctgcctttgcgctgtttaggaaca

SEQ ID NO: 2717583 - DNA, 25 bp, Homo sapien
tgggctatctctccaggtgtgggcc

SEQ ID NO: 2717584 - DNA, 25 bp, Homo sapien
tgaacactcttgtgggctatctctc

SEQ ID NO: 2717585 - DNA, 25 bp, Homo sapien
tgattgcatctccaaagtcaccaac

SEQ ID NO: 2717586 - DNA, 25 bp, Homo sapien
ccaggtgtgggccaattgattgcat

SEQ ID NO: 2717587 - DNA, 25 bp, Homo sapien
taattaacctctgcaagtctcagca

SEQ ID NO: 2717588 - DNA, 25 bp, Homo sapien
gggctagtaattaacctctgcaagt

SEQ ID NO: 2717589 - DNA, 25 bp, Homo sapien
acttccaatccccacttggccatca

SEQ ID NO: 2717590 - DNA, 25 bp, Homo sapien
catcaagggctagtaattaacctct

SEQ ID NO: 2717591 - DNA, 25 bp, Homo sapien
gcctcgctggcaatcctcatctcca

SEQ ID NO: 2717592 - DNA, 25 bp, Homo sapien
tttggactctccttactatcactcc

SEQ ID NO: 2717593 - DNA, 25 bp, Homo sapien
cgggtaggctgaggcttgtgggact

SEQ ID NO: 2717594 - DNA, 25 bp, Homo sapien
tcttctgcccgcctcgctggcaatc

SEQ ID NO: 2717595 - DNA, 25 bp, Homo sapien
ctttgatctctccgcgattggcagg

SEQ ID NO: 2717596 - DNA, 25 bp, Homo sapien
tctctccgcgattggcaggtatgtg

SEQ ID NO: 2717597 - DNA, 25 bp, Homo sapien
ctatttgtaatggaacccacttgtg

SEQ ID NO: 2717598 - DNA, 25 bp, Homo sapien
tatgtgtctaggctccggtgggcga

SEQ ID NO: 2717599 - DNA, 25 bp, Homo sapien
tcactcttcacactcgatgtctcat

SEQ ID NO: 2717600 - DNA, 25 bp, Homo sapien
tttgatctctggttgccaggctggg

SEQ ID NO: 2717601 - DNA, 25 bp, Homo sapien
ccacgggcacgtaggtggcagactc

SEQ ID NO: 2717602 - DNA, 25 bp, Homo sapien
gatgtctcatcctggtcgtgccagg

SEQ ID NO: 2717603 - DNA, 25 bp, Homo sapien
tccacggccacggaaggaagcccgc

SEQ ID NO: 2717604 - DNA, 25 bp, Homo sapien
gccacggaaggaagcccgcgcccca

SEQ ID NO: 2717605 - DNA, 25 bp, Homo sapien
ttcgagtgccaccccggccgcgtcc

SEQ ID NO: 2717606 - DNA, 25 bp, Homo sapien
tgtacttgggcgtacgaggcccctc

SEQ ID NO: 2717607 - DNA, 25 bp, Homo sapien
tagccaaactggtagtcaaaatggg

SEQ ID NO: 2717608 - DNA, 25 bp, Homo sapien
cttgatgtagtctttgagcagttcc

SEQ ID NO: 2717609 - DNA, 25 bp, Homo sapien
cacactgtaaagctcggtgctgctg

SEQ ID NO: 2717610 - DNA, 25 bp, Homo sapien
gcctgcactcggtggaaggaagcaa

SEQ ID NO: 2717611 - DNA, 25 bp, Homo sapien
gaagcaataagggtgatgggtagga

SEQ ID NO: 2717612 - DNA, 25 bp, Homo sapien
gaaatgtcagtggtaagggcctgca

SEQ ID NO: 2717613 - DNA, 25 bp, Homo sapien
gaagtctcgctctaaattgtccacg

SEQ ID NO: 2717614 - DNA, 25 bp, Homo sapien
cccagctccagggaggaagacatac

SEQ ID NO: 2717615 - DNA, 25 bp, Homo sapien
gcatcccagctccagggaggaagac

SEQ ID NO: 2717616 - DNA, 25 bp, Homo sapien
ctttctttcccctgcatcccagctc

SEQ ID NO: 2717617 - DNA, 25 bp, Homo sapien
atcccagctccagggaggaagacat

SEQ ID NO: 2717618 - DNA, 25 bp, Homo sapien
atcagtctgtgaataatccactatt

SEQ ID NO: 2717619 - DNA, 25 bp, Homo sapien
gaactttctcatcaacgatctccac

SEQ ID NO: 2717620 - DNA, 25 bp, Homo sapien
acaaattcagggcagttgagaagct

SEQ ID NO: 2717621 - DNA, 25 bp, Homo sapien
gtctccttttggtagtgctgacggg

SEQ ID NO: 2717622 - DNA, 25 bp, Homo sapien
tggaaaggggaagtcctcatccctc

SEQ ID NO: 2717623 - DNA, 25 bp, Homo sapien
tgtctttaggttgctgacctcctct

SEQ ID NO: 2717624 - DNA, 25 bp, Homo sapien
gcagacaggcccttgggtagtgtct

SEQ ID NO: 2717625 - DNA, 25 bp, Homo sapien
cttcaatccagttctcagaatccag

SEQ ID NO: 2717626 - DNA, 25 bp, Homo sapien
gtgactgcacgaggagagccaggtg

SEQ ID NO: 2717627 - DNA, 25 bp, Homo sapien
tggcccctcagagctagagtgctgt

SEQ ID NO: 2717628 - DNA, 25 bp, Homo sapien
gaactacccagatttcctgctggcc

SEQ ID NO: 2717629 - DNA, 25 bp, Homo sapien
gagtgctgtgcccatgtgttatccc

SEQ ID NO: 2717630 - DNA, 25 bp, Homo sapien
gtgttatccccttcaagcaccctag

SEQ ID NO: 2717631 - DNA, 25 bp, Homo sapien
ggctgaagccacaactgtggggaat

SEQ ID NO: 2717632 - DNA, 25 bp, Homo sapien
gctgaagccacaactgtggggaatt

SEQ ID NO: 2717633 - DNA, 25 bp, Homo sapien
tttttgagggctgaagccacaactg

SEQ ID NO: 2717634 - DNA, 25 bp, Homo sapien
gtcaggtgggaaaatctggactcct

SEQ ID NO: 2717635 - DNA, 25 bp, Homo sapien
agagaggtcaggtgggaaaatctgg

SEQ ID NO: 2717636 - DNA, 25 bp, Homo sapien
gaggtcaggtgggaaaatctggact

SEQ ID NO: 2717637 - DNA, 25 bp, Homo sapien
ggtcaggtgggaaaatctggactcc

SEQ ID NO: 2717638 - DNA, 25 bp, Homo sapien
aggttcaaacttttcagcccacagg

SEQ ID NO: 2717639 - DNA, 25 bp, Homo sapien
gattcctcatcagaccaggcagtga

SEQ ID NO: 2717640 - DNA, 25 bp, Homo sapien
tgaaggtgttcttccgcccatccat

SEQ ID NO: 2717641 - DNA, 25 bp, Homo sapien
agttcggcgctcatcttggcacgcg

SEQ ID NO: 2717642 - DNA, 25 bp, Homo sapien
ccggctgatcatattgacctttttg

SEQ ID NO: 2717643 - DNA, 25 bp, Homo sapien
tgctcccggctgatcatattgacct

SEQ ID NO: 2717644 - DNA, 25 bp, Homo sapien
tgtgtcaaactgctcccggctgatc

SEQ ID NO: 2717645 - DNA, 25 bp, Homo sapien
cttgctggaaccgaggtggcccagg

SEQ ID NO: 2717646 - DNA, 25 bp, Homo sapien
cgtgatgtctggcttgagtctttga

SEQ ID NO: 2717647 - DNA, 25 bp, Homo sapien
cttggcatccagtgtccgtccttct

SEQ ID NO: 2717648 - DNA, 25 bp, Homo sapien
gggctcaggagcaccaaacaacttg

SEQ ID NO: 2717649 - DNA, 25 bp, Homo sapien
ttcaccactgggtaaaaccgtgatg

SEQ ID NO: 2717650 - DNA, 25 bp, Homo sapien
tacggggcctgtgctcacgggaatc

SEQ ID NO: 2717651 - DNA, 25 bp, Homo sapien
ctgatggaagcagtacggggcctgt

SEQ ID NO: 2717652 - DNA, 25 bp, Homo sapien
ctctccaagggtgggtttgaactgt

SEQ ID NO: 2717653 - DNA, 25 bp, Homo sapien
gtgctcacgggaatccatcacccag

SEQ ID NO: 2717654 - DNA, 25 bp, Homo sapien
gactgccacaccacttctttaggaa

SEQ ID NO: 2717655 - DNA, 25 bp, Homo sapien
tgaaaacctcttagatgagggtccc

SEQ ID NO: 2717656 - DNA, 25 bp, Homo sapien
gctgagctttccacaccactggttt

SEQ ID NO: 2717657 - DNA, 25 bp, Homo sapien
gaaaatctggtctcacgtgactgcc

SEQ ID NO: 2717658 - DNA, 25 bp, Homo sapien
cagggagtagagagcattggtcata

SEQ ID NO: 2717659 - DNA, 25 bp, Homo sapien
tagagagcattggtcataggtaggt

SEQ ID NO: 2717660 - DNA, 25 bp, Homo sapien
ctgcagggagtagagagcattggtc

SEQ ID NO: 2717661 - DNA, 25 bp, Homo sapien
gcattggtcataggtaggtggctct

SEQ ID NO: 2717662 - DNA, 25 bp, Homo sapien
taagtaggtaaactgtacctcactc

SEQ ID NO: 2717663 - DNA, 25 bp, Homo sapien
taacagtaggcttttggagagtcaa

SEQ ID NO: 2717664 - DNA, 25 bp, Homo sapien
cgcccttcgttgttcaaagatcaat

SEQ ID NO: 2717665 - DNA, 25 bp, Homo sapien
gcatgcctatttgcagtctgtgcca

SEQ ID NO: 2717666 - DNA, 25 bp, Homo sapien
agcatttaaccttttaatgagccat

SEQ ID NO: 2717667 - DNA, 25 bp, Homo sapien
tatacgcagatttcttccacctttg

SEQ ID NO: 2717668 - DNA, 25 bp, Homo sapien
tcatgggtcaatccatctacagtga

SEQ ID NO: 2717669 - DNA, 25 bp, Homo sapien
tttgaaatgcatggatccacgcgtg

SEQ ID NO: 2717670 - DNA, 25 bp, Homo sapien
ttctgtcagccaagatccatcctct

SEQ ID NO: 2717671 - DNA, 25 bp, Homo sapien
ccaccatgtcaggaggggtccctct

SEQ ID NO: 2717672 - DNA, 25 bp, Homo sapien
cacaaaaaatactgtcaccaggttc

SEQ ID NO: 2717673 - DNA, 25 bp, Homo sapien
gggtccctctgatccgttctgtcag

SEQ ID NO: 2717674 - DNA, 25 bp, Homo sapien
tgctggaacttgggcaatgactgag

SEQ ID NO: 2717675 - DNA, 25 bp, Homo sapien
ggtagacgtgttgtgtgaagccatt

SEQ ID NO: 2717676 - DNA, 25 bp, Homo sapien
tacagccatagctgccaactgtagg

SEQ ID NO: 2717677 - DNA, 25 bp, Homo sapien
taaggcagcgcctacgatacttatg

SEQ ID NO: 2717678 - DNA, 25 bp, Homo sapien
gaactcctcatacatctttttgttg

SEQ ID NO: 2717679 - DNA, 25 bp, Homo sapien
gtagccttctttggcgtcctccaga

SEQ ID NO: 2717680 - DNA, 25 bp, Homo sapien
ctttttgttgaagtgatctcggagg

SEQ ID NO: 2717681 - DNA, 25 bp, Homo sapien
catctcctgagactggccaatgccc

SEQ ID NO: 2717682 - DNA, 25 bp, Homo sapien
tcgaaaaaggcactccaaaccatat

SEQ ID NO: 2717683 - DNA, 25 bp, Homo sapien
aaatccttgaatatgtccagccgga

SEQ ID NO: 2717684 - DNA, 25 bp, Homo sapien
tcttttccaggccataactgtagta

SEQ ID NO: 2717685 - DNA, 25 bp, Homo sapien
tagtccttcaccgtttcctcctgaa

SEQ ID NO: 2717686 - DNA, 25 bp, Homo sapien
gaatatttcaagaaggcccagaact

SEQ ID NO: 2717687 - DNA, 25 bp, Homo sapien
tactcggaagtcttcaagacgtcgg

SEQ ID NO: 2717688 - DNA, 25 bp, Homo sapien
aacttctccagcccatacagttggc

SEQ ID NO: 2717689 - DNA, 25 bp, Homo sapien
cggaatttgccgaggtattcttgca

SEQ ID NO: 2717690 - DNA, 25 bp, Homo sapien
cactggatgtcaccgttgaggcgct

SEQ ID NO: 2717691 - DNA, 25 bp, Homo sapien
tctaaagcaccgagcacagagacat

SEQ ID NO: 2717692 - DNA, 25 bp, Homo sapien
gagacatccaatcagtatctgctga

SEQ ID NO: 2717693 - DNA, 25 bp, Homo sapien
gaggcgctgctccaagaacataaga

SEQ ID NO: 2717694 - DNA, 25 bp, Homo sapien
tgagtccttgttccaccctaatagg

SEQ ID NO: 2717695 - DNA, 25 bp, Homo sapien
taagactcagaccatgctccagact

SEQ ID NO: 2717696 - DNA, 25 bp, Homo sapien
tcaccctttgatgtggacccatgga

SEQ ID NO: 2717697 - DNA, 25 bp, Homo sapien
tgatcagaagcactatctacgccct

SEQ ID NO: 2717698 - DNA, 25 bp, Homo sapien
gttggctgatcatggcagcaggcct

SEQ ID NO: 2717699 - DNA, 25 bp, Homo sapien
tcccggacaggctggccggtgggtg

SEQ ID NO: 2717700 - DNA, 25 bp, Homo sapien
actttcccaaagtctgtgtgttcga

SEQ ID NO: 2717701 - DNA, 25 bp, Homo sapien
aaagtctgtgtgttcgagtgctggc

SEQ ID NO: 2717702 - DNA, 25 bp, Homo sapien
caacagcagggatatcttgggcacg

SEQ ID NO: 2717703 - DNA, 25 bp, Homo sapien
tgttgcccagatcccactgagagtg

SEQ ID NO: 2717704 - DNA, 25 bp, Homo sapien
taaaagcagcgtctctctgggctgg

SEQ ID NO: 2717705 - DNA, 25 bp, Homo sapien
gggagactccaccagaccttaggga

SEQ ID NO: 2717706 - DNA, 25 bp, Homo sapien
ccagaggttatgttggcatggacca

SEQ ID NO: 2717707 - DNA, 25 bp, Homo sapien
tggatggcccttctctactggtagt

SEQ ID NO: 2717708 - DNA, 25 bp, Homo sapien
tcaggtcttggatccccatgggacg

SEQ ID NO: 2717709 - DNA, 25 bp, Homo sapien
ccaccagccgatgttgagatgaagt

SEQ ID NO: 2717710 - DNA, 25 bp, Homo sapien
tgtactacgagcgtaaggtggaacc

SEQ ID NO: 2717711 - DNA, 25 bp, Homo sapien
gaaatgggctccaagttcttatctt

SEQ ID NO: 2717712 - DNA, 25 bp, Homo sapien
gtggaaccttctccgcaaagccaga

SEQ ID NO: 2717713 - DNA, 25 bp, Homo sapien
ttaaatatgatatcctagcacatag

SEQ ID NO: 2717714 - DNA, 25 bp, Homo sapien
gattaaaaccaacgaggtgcagacc

SEQ ID NO: 2717715 - DNA, 25 bp, Homo sapien
gaaagagcccggaaaaacatggcag

SEQ ID NO: 2717716 - DNA, 25 bp, Homo sapien
caggcaggactatcaaaatggactc

SEQ ID NO: 2717717 - DNA, 25 bp, Homo sapien
gttcctggtgcatcaaagctgtaag

SEQ ID NO: 2717718 - DNA, 25 bp, Homo sapien
ccagtgctctgacaaagggaagggt

SEQ ID NO: 2717719 - DNA, 25 bp, Homo sapien
cattctgaacctgtcgcgctttggg

SEQ ID NO: 2717720 - DNA, 25 bp, Homo sapien
tgataccccgcctcttggtcaaggt

SEQ ID NO: 2717721 - DNA, 25 bp, Homo sapien
gaccagctctgtacagtggaccctg

SEQ ID NO: 2717722 - DNA, 25 bp, Homo sapien
gaaattgccaattcatgatgtccaa

SEQ ID NO: 2717723 - DNA, 25 bp, Homo sapien
taaataccatccataggccgacagc

SEQ ID NO: 2717724 - DNA, 25 bp, Homo sapien
gaactctctactgaattccaagctg

SEQ ID NO: 2717725 - DNA, 25 bp, Homo sapien
tcatgctgaatgtcccatgggctct

SEQ ID NO: 2717726 - DNA, 25 bp, Homo sapien
ctgcagtaagctacggttaggtgta

SEQ ID NO: 2717727 - DNA, 25 bp, Homo sapien
ctaggcaagtgaggtggcgtttgcc

SEQ ID NO: 2717728 - DNA, 25 bp, Homo sapien
aacaccccacccaacactgtctcta

SEQ ID NO: 2717729 - DNA, 25 bp, Homo sapien
agctacggttaggtgtaatggcctc

SEQ ID NO: 2717730 - DNA, 25 bp, Homo sapien
cgaattaccacgccccctcctcctg

SEQ ID NO: 2717731 - DNA, 25 bp, Homo sapien
tgaaggaccgttaaaatcgttggca

SEQ ID NO: 2717732 - DNA, 25 bp, Homo sapien
atccaaaggccgaggaaagggcgtg

SEQ ID NO: 2717733 - DNA, 25 bp, Homo sapien
cgcgtgattagttgcgctcgctcaa

SEQ ID NO: 2717734 - DNA, 25 bp, Homo sapien
tctctagagtcactccagacgcgcg

SEQ ID NO: 2717735 - DNA, 25 bp, Homo sapien
agaagtaacagggtgccgccgaata

SEQ ID NO: 2717736 - DNA, 25 bp, Homo sapien
ttggtcctctttccgagcgaacaag

SEQ ID NO: 2717737 - DNA, 25 bp, Homo sapien
cccgtgcccagagcggtcttacgtg

SEQ ID NO: 2717738 - DNA, 25 bp, Homo sapien
tagaaccgaacgagccagtgaggtg

SEQ ID NO: 2717739 - DNA, 25 bp, Homo sapien
gtcttacgtgcctcccaccaaacaa

SEQ ID NO: 2717740 - DNA, 25 bp, Homo sapien
ctagaaccgaacgagccagtgaggt

SEQ ID NO: 2717741 - DNA, 25 bp, Homo sapien
ttttccctctaccccggatctgctc

SEQ ID NO: 2717742 - DNA, 25 bp, Homo sapien
ggctgactccccgacggcggcgacg

SEQ ID NO: 2717743 - DNA, 25 bp, Homo sapien
agggcccgcgaagcgctggctggcg

SEQ ID NO: 2717744 - DNA, 25 bp, Homo sapien
agctggcgggctggcgggctgactc

SEQ ID NO: 2717745 - DNA, 25 bp, Homo sapien
gctcctctttccggtaagcgcaggc

SEQ ID NO: 2717746 - DNA, 25 bp, Homo sapien
tctttccggtaagcgcaggcccgct

SEQ ID NO: 2717747 - DNA, 25 bp, Homo sapien
ttccggtaagcgcaggcccgcttac

SEQ ID NO: 2717748 - DNA, 25 bp, Homo sapien
tcctctttccggtaagcgcaggccc

SEQ ID NO: 2717749 - DNA, 25 bp, Homo sapien
ataactaagttcgaagccaggccag

SEQ ID NO: 2717750 - DNA, 25 bp, Homo sapien
gaatattatcgtgtgacggtggcca

SEQ ID NO: 2717751 - DNA, 25 bp, Homo sapien
gatgctttgtaaagtccccgcacat

SEQ ID NO: 2717752 - DNA, 25 bp, Homo sapien
gtttgataacagtacgcacctcgga

SEQ ID NO: 2717753 - DNA, 25 bp, Homo sapien
ggtctgtgagttggctcctccattc

SEQ ID NO: 2717754 - DNA, 25 bp, Homo sapien
tgccctggattgaaccgcagttcaa

SEQ ID NO: 2717755 - DNA, 25 bp, Homo sapien
acagtgtctcaaggcactgccctgg

SEQ ID NO: 2717756 - DNA, 25 bp, Homo sapien
aaaccacccgaatggcccaggtctg

SEQ ID NO: 2717757 - DNA, 25 bp, Homo sapien
cttctaaggcaagcccactgcatgg

SEQ ID NO: 2717758 - DNA, 25 bp, Homo sapien
caagattggcagatgcaacaatgag

SEQ ID NO: 2717759 - DNA, 25 bp, Homo sapien
taagtagactatgtggcatctcccc

SEQ ID NO: 2717760 - DNA, 25 bp, Homo sapien
gccagcaaaccttgaagattccatt

SEQ ID NO: 2717761 - DNA, 25 bp, Homo sapien
caagcctttgtacccatatgatgaa

SEQ ID NO: 2717762 - DNA, 25 bp, Homo sapien
tatgcagcaattcaacagtaggact

SEQ ID NO: 2717763 - DNA, 25 bp, Homo sapien
tgtagactagaccaaaataattccg

SEQ ID NO: 2717764 - DNA, 25 bp, Homo sapien
caaatcatggaaacagtcctacagg

SEQ ID NO: 2717765 - DNA, 25 bp, Homo sapien
gtgcaagccagacaatgtttggtct

SEQ ID NO: 2717766 - DNA, 25 bp, Homo sapien
agtgcaagccagacaatgtttggtc

SEQ ID NO: 2717767 - DNA, 25 bp, Homo sapien
aacctgagaagtcgtcttcagctaa

SEQ ID NO: 2717768 - DNA, 25 bp, Homo sapien
ctgaagaaacctgagaagtcgtctt

SEQ ID NO: 2717769 - DNA, 25 bp, Homo sapien
gaaacctgagaagtcgtcttcagct

SEQ ID NO: 2717770 - DNA, 25 bp, Homo sapien
gaagaaacctgagaagtcgtcttca

SEQ ID NO: 2717771 - DNA, 25 bp, Homo sapien
actgtaactgagcacgatttctcgg

SEQ ID NO: 2717772 - DNA, 25 bp, Homo sapien
cacagataacctggctattctccac

SEQ ID NO: 2717773 - DNA, 25 bp, Homo sapien
agattactggcccacacttcacaga

SEQ ID NO: 2717774 - DNA, 25 bp, Homo sapien
tcatctcttcttctagattactggc

SEQ ID NO: 2717775 - DNA, 25 bp, Homo sapien
aaaggtcaacattgcaccgcagaag

SEQ ID NO: 2717776 - DNA, 25 bp, Homo sapien
ccgcagaagctgatattggtaatct

SEQ ID NO: 2717777 - DNA, 25 bp, Homo sapien
ttgattccagaaggatactctccct

SEQ ID NO: 2717778 - DNA, 25 bp, Homo sapien
tggaactacgaaattcaccaattgg

SEQ ID NO: 2717779 - DNA, 25 bp, Homo sapien
ttttccactgcctaggagtggaatt

SEQ ID NO: 2717780 - DNA, 25 bp, Homo sapien
gaattttccactgcctaggagtgga

SEQ ID NO: 2717781 - DNA, 25 bp, Homo sapien
gtagaaaaaacccacgtgtctatca

SEQ ID NO: 2717782 - DNA, 25 bp, Homo sapien
atggaattttccactgcctaggagt

SEQ ID NO: 2717783 - DNA, 25 bp, Homo sapien
aaagcgagaccctgtattgacagga

SEQ ID NO: 2717784 - DNA, 25 bp, Homo sapien
gattactcctaaatcatgaaacact

SEQ ID NO: 2717785 - DNA, 25 bp, Homo sapien
tacaataggaagtacactaacatca

SEQ ID NO: 2717786 - DNA, 25 bp, Homo sapien
ctcccgatgcccagttaaacaaagc

SEQ ID NO: 2717787 - DNA, 25 bp, Homo sapien
aaccactcagtgaaataactcattt

SEQ ID NO: 2717788 - DNA, 25 bp, Homo sapien
tatttttatggtacaaactacaggc

SEQ ID NO: 2717789 - DNA, 25 bp, Homo sapien
gatgatctcccaaaattacttgaac

SEQ ID NO: 2717790 - DNA, 25 bp, Homo sapien
cacgcccggctgcaagtaaacatta

SEQ ID NO: 2717791 - DNA, 25 bp, Homo sapien
tgtaatgggtatgtgttgtctgttc

SEQ ID NO: 2717792 - DNA, 25 bp, Homo sapien
gaaatgtaatgggtatgtgttgtct

SEQ ID NO: 2717793 - DNA, 25 bp, Homo sapien
gcaacacatgtattattgttgactt

SEQ ID NO: 2717794 - DNA, 25 bp, Homo sapien
tgggtatgtgttgtctgttctccta

SEQ ID NO: 2717795 - DNA, 25 bp, Homo sapien
tgcaaagtgcagtgtgtcaatccct

SEQ ID NO: 2717796 - DNA, 25 bp, Homo sapien
ggaatcctgggagtacatgtcctct

SEQ ID NO: 2717797 - DNA, 25 bp, Homo sapien
gagaaccactcctgatgtcataagc

SEQ ID NO: 2717798 - DNA, 25 bp, Homo sapien
tgtcataagcagctctgcaaagtgc

SEQ ID NO: 2717799 - DNA, 25 bp, Homo sapien
taccatatagccaaaatcatagcca

SEQ ID NO: 2717800 - DNA, 25 bp, Homo sapien
cgagaatctgtaagcaactttacca

SEQ ID NO: 2717801 - DNA, 25 bp, Homo sapien
tcctcttctggcaaacgagaatctg

SEQ ID NO: 2717802 - DNA, 25 bp, Homo sapien
gtatttcacatcataaatggatggg

SEQ ID NO: 2717803 - DNA, 25 bp, Homo sapien
ttccaatcctctgcaaatccaactg

SEQ ID NO: 2717804 - DNA, 25 bp, Homo sapien
tcctctgcaaatccaactgatcagc

SEQ ID NO: 2717805 - DNA, 25 bp, Homo sapien
aatcctctgcaaatccaactgatca

SEQ ID NO: 2717806 - DNA, 25 bp, Homo sapien
tgcaaatccaactgatcagcaactt

SEQ ID NO: 2717807 - DNA, 25 bp, Homo sapien
aagttactgccgagaggcctgtgat

SEQ ID NO: 2717808 - DNA, 25 bp, Homo sapien
caagttactgccgagaggcctgtga

SEQ ID NO: 2717809 - DNA, 25 bp, Homo sapien
cagcaagttactgccgagaggcctg

SEQ ID NO: 2717810 - DNA, 25 bp, Homo sapien
ttactgccgagaggcctgtgatcac

SEQ ID NO: 2717811 - DNA, 25 bp, Homo sapien
tattaacaaatgtaccctccagggc

SEQ ID NO: 2717812 - DNA, 25 bp, Homo sapien
cagtaagcacttaacgcaagatctc

SEQ ID NO: 2717813 - DNA, 25 bp, Homo sapien
taacaaagaggaaatgtactctccc

SEQ ID NO: 2717814 - DNA, 25 bp, Homo sapien
tggattcagccggactcacttgacc

SEQ ID NO: 2717815 - DNA, 25 bp, Homo sapien
gctgcatgttgttgataatcgccag

SEQ ID NO: 2717816 - DNA, 25 bp, Homo sapien
ggccactcctgtgcctaagccatag

SEQ ID NO: 2717817 - DNA, 25 bp, Homo sapien
gataatcgccaggatgctcatcttc

SEQ ID NO: 2717818 - DNA, 25 bp, Homo sapien
tcctgtgcctaagccatagagccgc

SEQ ID NO: 2717819 - DNA, 25 bp, Homo sapien
caaatgtcctcgagaagggtcagaa

SEQ ID NO: 2717820 - DNA, 25 bp, Homo sapien
tcagcacagtaagcaccactctggg

SEQ ID NO: 2717821 - DNA, 25 bp, Homo sapien
tgaatggcacaatggaacacagact

SEQ ID NO: 2717822 - DNA, 25 bp, Homo sapien
gaagataagtacacagtcagcacag

SEQ ID NO: 2717823 - DNA, 25 bp, Homo sapien
cggcaacacgaaaacttacagaaga

SEQ ID NO: 2717824 - DNA, 25 bp, Homo sapien
gctccttcagaaatacggcaacacg

SEQ ID NO: 2717825 - DNA, 25 bp, Homo sapien
gatgtgctggagtgctgcctcgtcc

SEQ ID NO: 2717826 - DNA, 25 bp, Homo sapien
tagatgaacctgagtgactggtgcc

SEQ ID NO: 2717827 - DNA, 25 bp, Homo sapien
ccacttgaataatccagagaaccac

SEQ ID NO: 2717828 - DNA, 25 bp, Homo sapien
agtcccccacttgaataatccagag

SEQ ID NO: 2717829 - DNA, 25 bp, Homo sapien
ggctattgaatctaaaggtaataaa

SEQ ID NO: 2717830 - DNA, 25 bp, Homo sapien
cactgtggacagtttatgatctatc

SEQ ID NO: 2717831 - DNA, 25 bp, Homo sapien
ttcgccctcccgctacggaagccgc

SEQ ID NO: 2717832 - DNA, 25 bp, Homo sapien
ggaagccgccgagttcaagcgcctt

SEQ ID NO: 2717833 - DNA, 25 bp, Homo sapien
gctacggaagccgccgagttcaagc

SEQ ID NO: 2717834 - DNA, 25 bp, Homo sapien
ctcccgctacggaagccgccgagtt

SEQ ID NO: 2717835 - DNA, 25 bp, Homo sapien
actgtcccagtactgccgccgccat

SEQ ID NO: 2717836 - DNA, 25 bp, Homo sapien
aactgtcccagtactgccgccgcca

SEQ ID NO: 2717837 - DNA, 25 bp, Homo sapien
caactgtcccagtactgccgccgcc

SEQ ID NO: 2717838 - DNA, 25 bp, Homo sapien
ccaactgtcccagtactgccgccgc

SEQ ID NO: 2717839 - DNA, 25 bp, Homo sapien
tcccttctgtcgcttaaccactaag

SEQ ID NO: 2717840 - DNA, 25 bp, Homo sapien
ctgcaacatcaacacaagccgtcaa

SEQ ID NO: 2717841 - DNA, 25 bp, Homo sapien
aacacaagccgtcaactcagattcc

SEQ ID NO: 2717842 - DNA, 25 bp, Homo sapien
agattccatctcgactcccttctgt

SEQ ID NO: 2717843 - DNA, 25 bp, Homo sapien
tcctcaggttatgtatccataacgc

SEQ ID NO: 2717844 - DNA, 25 bp, Homo sapien
agcttcccccggctcctcaggttat

SEQ ID NO: 2717845 - DNA, 25 bp, Homo sapien
ctcaggttatgtatccataacgcac

SEQ ID NO: 2717846 - DNA, 25 bp, Homo sapien
ccggctcctcaggttatgtatccat

SEQ ID NO: 2717847 - DNA, 25 bp, Homo sapien
ctttgccatccacatttaggttcca

SEQ ID NO: 2717848 - DNA, 25 bp, Homo sapien
gttggtttatgagttacccagtctc

SEQ ID NO: 2717849 - DNA, 25 bp, Homo sapien
tatatcatctatgcagaggtacaga

SEQ ID NO: 2717850 - DNA, 25 bp, Homo sapien
taaagattcccctgaaatcgttctc

SEQ ID NO: 2717851 - DNA, 25 bp, Homo sapien
gattttcatcctgccagagctagtc

SEQ ID NO: 2717852 - DNA, 25 bp, Homo sapien
tcttctcccattttcgagaaatgtc

SEQ ID NO: 2717853 - DNA, 25 bp, Homo sapien
ctccaggcagttgtggaggataaac

SEQ ID NO: 2717854 - DNA, 25 bp, Homo sapien
cccattttcgagaaatgtcaagaga

SEQ ID NO: 2717855 - DNA, 25 bp, Homo sapien
cagttgtggaggataaacaatttta

SEQ ID NO: 2717856 - DNA, 25 bp, Homo sapien
tttggccaacagcataggttctaga

SEQ ID NO: 2717857 - DNA, 25 bp, Homo sapien
tggaaaactatagcaaggaggtctc

SEQ ID NO: 2717858 - DNA, 25 bp, Homo sapien
gaaaatgttagcaggtttaccacaa

SEQ ID NO: 2717859 - DNA, 25 bp, Homo sapien
ggctggtttgtgtcaacacttgcaa

SEQ ID NO: 2717860 - DNA, 25 bp, Homo sapien
tatttgtcttcgacagtggtagatt

SEQ ID NO: 2717861 - DNA, 25 bp, Homo sapien
tttgtcttcgacagtggtagatttc

SEQ ID NO: 2717862 - DNA, 25 bp, Homo sapien
tttatttgtcttcgacagtggtaga

SEQ ID NO: 2717863 - DNA, 25 bp, Homo sapien
ttttatttgtcttcgacagtggtag

SEQ ID NO: 2717864 - DNA, 25 bp, Homo sapien
caagtttgagaggagacactattct

SEQ ID NO: 2717865 - DNA, 25 bp, Homo sapien
gagagaccacaggttggtaacaacc

SEQ ID NO: 2717866 - DNA, 25 bp, Homo sapien
cactaggcattcaaggcatctcctt

SEQ ID NO: 2717867 - DNA, 25 bp, Homo sapien
aataggtgggtttcctggattctct

SEQ ID NO: 2717868 - DNA, 25 bp, Homo sapien
ttgaattccaactgagccaaagcct

SEQ ID NO: 2717869 - DNA, 25 bp, Homo sapien
gtcattgaattccaactgagccaaa

SEQ ID NO: 2717870 - DNA, 25 bp, Homo sapien
gcctggtcaatagacattcctcgta

SEQ ID NO: 2717871 - DNA, 25 bp, Homo sapien
caaagcctggtcaatagacattcct

SEQ ID NO: 2717872 - DNA, 25 bp, Homo sapien
tgggaagctgaaggacgaaaatccc

SEQ ID NO: 2717873 - DNA, 25 bp, Homo sapien
gaagctgaaggacgaaaatcccttg

SEQ ID NO: 2717874 - DNA, 25 bp, Homo sapien
gctgaaggacgaaaatcccttgagc

SEQ ID NO: 2717875 - DNA, 25 bp, Homo sapien
gaaggacgaaaatcccttgagctca

SEQ ID NO: 2717876 - DNA, 25 bp, Homo sapien
aaattggacctgaattccacgttat

SEQ ID NO: 2717877 - DNA, 25 bp, Homo sapien
tccacgttatggtctctcactgcca

SEQ ID NO: 2717878 - DNA, 25 bp, Homo sapien
actgccatatcttgtgcttctaaga

SEQ ID NO: 2717879 - DNA, 25 bp, Homo sapien
ccatatcttgtgcttctaagagaac

SEQ ID NO: 2717880 - DNA, 25 bp, Homo sapien
cctccatctggagagtagatgttcc

SEQ ID NO: 2717881 - DNA, 25 bp, Homo sapien
tggagagtagatgttccccatatct

SEQ ID NO: 2717882 - DNA, 25 bp, Homo sapien
gatgttccccatatcttgaatttaa

SEQ ID NO: 2717883 - DNA, 25 bp, Homo sapien
taattccccctgtattgattcagcc

SEQ ID NO: 2717884 - DNA, 25 bp, Homo sapien
cccaatggtgggaatgcactcggct

SEQ ID NO: 2717885 - DNA, 25 bp, Homo sapien
gaaattacatcctgggcaaacaccc

SEQ ID NO: 2717886 - DNA, 25 bp, Homo sapien
gaaagaagactaccatgctgaagca

SEQ ID NO: 2717887 - DNA, 25 bp, Homo sapien
gagtcaatggctcccaaatgctggt

SEQ ID NO: 2717888 - DNA, 25 bp, Homo sapien
cactggcctcgtcctgaggtggact

SEQ ID NO: 2717889 - DNA, 25 bp, Homo sapien
tatactctttggcatgggcaactgc

SEQ ID NO: 2717890 - DNA, 25 bp, Homo sapien
tagcggatgcgtttcaggcactggc

SEQ ID NO: 2717891 - DNA, 25 bp, Homo sapien
catagagtgtgaacgatggtccggc

SEQ ID NO: 2717892 - DNA, 25 bp, Homo sapien
caaaatatatacactgtggagtctg

SEQ ID NO: 2717893 - DNA, 25 bp, Homo sapien
aaatatatacactgtggagtctgaa

SEQ ID NO: 2717894 - DNA, 25 bp, Homo sapien
atatatacactgtggagtctgaatc

SEQ ID NO: 2717895 - DNA, 25 bp, Homo sapien
tatatacactgtggagtctgaatct

SEQ ID NO: 2717896 - DNA, 25 bp, Homo sapien
tcatcaatcacctccctccgtcact

SEQ ID NO: 2717897 - DNA, 25 bp, Homo sapien
gaacatgcaaagtgaaacttcaggt

SEQ ID NO: 2717898 - DNA, 25 bp, Homo sapien
tgagataagattgggtgggaacaca

SEQ ID NO: 2717899 - DNA, 25 bp, Homo sapien
cctccgtcactaggtggggattaca

SEQ ID NO: 2717900 - DNA, 25 bp, Homo sapien
aatatttatcacacctattactgtg

SEQ ID NO: 2717901 - DNA, 25 bp, Homo sapien
tcctttatgataaccctagaatcaa

SEQ ID NO: 2717902 - DNA, 25 bp, Homo sapien
taggtcacgtccactttaatgatcc

SEQ ID NO: 2717903 - DNA, 25 bp, Homo sapien
gagttaggagtgttcaattatcaag

SEQ ID NO: 2717904 - DNA, 25 bp, Homo sapien
ctctctagacagagctcctatgctg

SEQ ID NO: 2717905 - DNA, 25 bp, Homo sapien
ttctctctagacagagctcctatgc

SEQ ID NO: 2717906 - DNA, 25 bp, Homo sapien
tctctctagacagagctcctatgct

SEQ ID NO: 2717907 - DNA, 25 bp, Homo sapien
ttttctctctagacagagctcctat

SEQ ID NO: 2717908 - DNA, 25 bp, Homo sapien
ttggcgagtgccacacagctgttcc

SEQ ID NO: 2717909 - DNA, 25 bp, Homo sapien
aggtaattgcttgggttgtttcctg

SEQ ID NO: 2717910 - DNA, 25 bp, Homo sapien
agtgatgcttgtcaaagacaaggta

SEQ ID NO: 2717911 - DNA, 25 bp, Homo sapien
aaatctgttggcgagtgccacacag

SEQ ID NO: 2717912 - DNA, 25 bp, Homo sapien
aatcgacagctttgatgaataatag

SEQ ID NO: 2717913 - DNA, 25 bp, Homo sapien
cttctcttcgttctgttcagggtaa

SEQ ID NO: 2717914 - DNA, 25 bp, Homo sapien
tattagcagctcaattggaaattgt

SEQ ID NO: 2717915 - DNA, 25 bp, Homo sapien
tcaataggagaaatgtagatgcatt

SEQ ID NO: 2717916 - DNA, 25 bp, Homo sapien
aggcgcataattgaactatctcccc

SEQ ID NO: 2717917 - DNA, 25 bp, Homo sapien
cctcagtggacaggcgcataattga

SEQ ID NO: 2717918 - DNA, 25 bp, Homo sapien
agtggacaggcgcataattgaacta

SEQ ID NO: 2717919 - DNA, 25 bp, Homo sapien
gacaggcgcataattgaactatctc

SEQ ID NO: 2717920 - DNA, 25 bp, Homo sapien
gatggtcacactgtcagatttctgg

SEQ ID NO: 2717921 - DNA, 25 bp, Homo sapien
tcacatgcagtggaattggaggtca

SEQ ID NO: 2717922 - DNA, 25 bp, Homo sapien
gccttgtttcaggtggatggtcaca

SEQ ID NO: 2717923 - DNA, 25 bp, Homo sapien
gtcccataatgcatttggtcaggca

SEQ ID NO: 2717924 - DNA, 25 bp, Homo sapien
tgcccaagcctgcatacgtggaaag

SEQ ID NO: 2717925 - DNA, 25 bp, Homo sapien
tgggaagccttgcatttgactgagc

SEQ ID NO: 2717926 - DNA, 25 bp, Homo sapien
tcaaagtgcctttacccacatggcc

SEQ ID NO: 2717927 - DNA, 25 bp, Homo sapien
aaagtgatgccccagctgtacacca

SEQ ID NO: 2717928 - DNA, 25 bp, Homo sapien
gatcctatctcagcaccgtctcaaa

SEQ ID NO: 2717929 - DNA, 25 bp, Homo sapien
caccgtctcaaactaaatgtccctt

SEQ ID NO: 2717930 - DNA, 25 bp, Homo sapien
tcagcaccgtctcaaactaaatgtc

SEQ ID NO: 2717931 - DNA, 25 bp, Homo sapien
tatctcagcaccgtctcaaactaaa

SEQ ID NO: 2717932 - DNA, 25 bp, Homo sapien
ttgaccatgcacctcagaaagggag

SEQ ID NO: 2717933 - DNA, 25 bp, Homo sapien
aaagggagaatgtacacttccggag

SEQ ID NO: 2717934 - DNA, 25 bp, Homo sapien
tctgtgacctctcgttgtttctgga

SEQ ID NO: 2717935 - DNA, 25 bp, Homo sapien
aagtttgtggcggtgctcactcagc

SEQ ID NO: 2717936 - DNA, 25 bp, Homo sapien
aagctgctgattttgctcacacact

SEQ ID NO: 2717937 - DNA, 25 bp, Homo sapien
agctgctgattttgctcacacactt

SEQ ID NO: 2717938 - DNA, 25 bp, Homo sapien
tttagatcctcgatgtccatgcttt

SEQ ID NO: 2717939 - DNA, 25 bp, Homo sapien
ctgaacaatattttagatcctcgat

SEQ ID NO: 2717940 - DNA, 25 bp, Homo sapien
tagatcctcgatgtccatgctttgc

SEQ ID NO: 2717941 - DNA, 25 bp, Homo sapien
tctgaacaatattttagatcctcga

SEQ ID NO: 2717942 - DNA, 25 bp, Homo sapien
ccatcaccatcttcatgctcattca

SEQ ID NO: 2717943 - DNA, 25 bp, Homo sapien
atcaccatcaccatcttcatgctca

SEQ ID NO: 2717944 - DNA, 25 bp, Homo sapien
ctcatcactgtcgccatcaccatca

SEQ ID NO: 2717945 - DNA, 25 bp, Homo sapien
caccatcaccatcttcatgctcatt

SEQ ID NO: 2717946 - DNA, 25 bp, Homo sapien
taaagaagctcaatcctggggtcac

SEQ ID NO: 2717947 - DNA, 25 bp, Homo sapien
tgaaggagccttcggaatcctgggt

SEQ ID NO: 2717948 - DNA, 25 bp, Homo sapien
gggtcacctcggtaggatcctccag

SEQ ID NO: 2717949 - DNA, 25 bp, Homo sapien
gctggcggttccgacactttgtggg

SEQ ID NO: 2717950 - DNA, 25 bp, Homo sapien
cttccctggaggcttattttgttgg

SEQ ID NO: 2717951 - DNA, 25 bp, Homo sapien
tccctggaggcttattttgttggta

SEQ ID NO: 2717952 - DNA, 25 bp, Homo sapien
caccggatgcctcttcaggatcccc

SEQ ID NO: 2717953 - DNA, 25 bp, Homo sapien
accggatgcctcttcaggatcccca

SEQ ID NO: 2717954 - DNA, 25 bp, Homo sapien
tcatagaaactgactccgctccatc

SEQ ID NO: 2717955 - DNA, 25 bp, Homo sapien
agtgctccattttgcagacagttgc

SEQ ID NO: 2717956 - DNA, 25 bp, Homo sapien
acccgtttctcctgaagcctggatc

SEQ ID NO: 2717957 - DNA, 25 bp, Homo sapien
gaagcctggatctcgtcatagaaac

SEQ ID NO: 2717958 - DNA, 25 bp, Homo sapien
gaactacatagagtaggagacaagt

SEQ ID NO: 2717959 - DNA, 25 bp, Homo sapien
ttatatgccttttccaatggccggg

SEQ ID NO: 2717960 - DNA, 25 bp, Homo sapien
tcaatcttcaattcagacatttcca

SEQ ID NO: 2717961 - DNA, 25 bp, Homo sapien
gattatagctggtaaccccaccaga

SEQ ID NO: 2717962 - DNA, 25 bp, Homo sapien
agaatgactgccagctggtcacaaa

SEQ ID NO: 2717963 - DNA, 25 bp, Homo sapien
aagaatgactgccagctggtcacaa

SEQ ID NO: 2717964 - DNA, 25 bp, Homo sapien
aaaagaatgactgccagctggtcac

SEQ ID NO: 2717965 - DNA, 25 bp, Homo sapien
gaaaaaagaatgactgccagctggt

SEQ ID NO: 2717966 - DNA, 25 bp, Homo sapien
gatactgccccttggccatttccaa

SEQ ID NO: 2717967 - DNA, 25 bp, Homo sapien
taggtttctccacttgatactgccc

SEQ ID NO: 2717968 - DNA, 25 bp, Homo sapien
taatgaagctaggtttactccgctc

SEQ ID NO: 2717969 - DNA, 25 bp, Homo sapien
gcccctcaaggctgtgctgcgttct

SEQ ID NO: 2717970 - DNA, 25 bp, Homo sapien
ctgcagctgaaatcctgtcctcatc

SEQ ID NO: 2717971 - DNA, 25 bp, Homo sapien
agaggaattggcagatattcccgac

SEQ ID NO: 2717972 - DNA, 25 bp, Homo sapien
ccactgcagctgaaatcctgtcctc

SEQ ID NO: 2717973 - DNA, 25 bp, Homo sapien
gaaatcctgtcctcatcagaggaat

SEQ ID NO: 2717974 - DNA, 25 bp, Homo sapien
taatggctctgcctaaactgagcag

SEQ ID NO: 2717975 - DNA, 25 bp, Homo sapien
tggtacatcctggacatcggcaggc

SEQ ID NO: 2717976 - DNA, 25 bp, Homo sapien
tacctgaaaaggtgagtcggcaaca

SEQ ID NO: 2717977 - DNA, 25 bp, Homo sapien
gggtctaccccttgagatcactgag

SEQ ID NO: 2717978 - DNA, 25 bp, Homo sapien
cttgaatgcgcttcgacgtatcaag

SEQ ID NO: 2717979 - DNA, 25 bp, Homo sapien
gcttcgacgtatcaagtccataagg

SEQ ID NO: 2717980 - DNA, 25 bp, Homo sapien
cgtatcaagtccataaggcccagct

SEQ ID NO: 2717981 - DNA, 25 bp, Homo sapien
tcaagtccataaggcccagctaaca

SEQ ID NO: 2717982 - DNA, 25 bp, Homo sapien
gagcttttgtctttcgacaagcatg

SEQ ID NO: 2717983 - DNA, 25 bp, Homo sapien
gacaagcatgttgcagtcgttgcta

SEQ ID NO: 2717984 - DNA, 25 bp, Homo sapien
cactttaaagtgtaaggcaatgggc

SEQ ID NO: 2717985 - DNA, 25 bp, Homo sapien
gtaatttgcaaacaccatgaggagc

SEQ ID NO: 2717986 - DNA, 25 bp, Homo sapien
taaaagtggaccagaatctatttgc

SEQ ID NO: 2717987 - DNA, 25 bp, Homo sapien
tagggcattccctggctaccaactg

SEQ ID NO: 2717988 - DNA, 25 bp, Homo sapien
catgtattcaccagacacaacgaag

SEQ ID NO: 2717989 - DNA, 25 bp, Homo sapien
cacctgctggtcactcatgtattca

SEQ ID NO: 2717990 - DNA, 25 bp, Homo sapien
gctttgattcttgggacattctata

SEQ ID NO: 2717991 - DNA, 25 bp, Homo sapien
tgattcttgggacattctatatcta

SEQ ID NO: 2717992 - DNA, 25 bp, Homo sapien
aggtgctttgattcttgggacattc

SEQ ID NO: 2717993 - DNA, 25 bp, Homo sapien
attcttgggacattctatatctata

SEQ ID NO: 2717994 - DNA, 25 bp, Homo sapien
acatttttccctggtagtgtccaga

SEQ ID NO: 2717995 - DNA, 25 bp, Homo sapien
tcaactgttttaacttcagaactgg

SEQ ID NO: 2717996 - DNA, 25 bp, Homo sapien
actgttttaacttcagaactgggct

SEQ ID NO: 2717997 - DNA, 25 bp, Homo sapien
cacatttttccctggtagtgtccag

SEQ ID NO: 2717998 - DNA, 25 bp, Homo sapien
gccatgtgcctacaaaacatctgca

SEQ ID NO: 2717999 - DNA, 25 bp, Homo sapien
tagctgccatgtgcctacaaaacat

SEQ ID NO: 2718000 - DNA, 25 bp, Homo sapien
gctgccatgtgcctacaaaacatct

SEQ ID NO: 2718001 - DNA, 25 bp, Homo sapien
gtgcctacaaaacatctgcatcccg

SEQ ID NO: 2718002 - DNA, 25 bp, Homo sapien
cattgtccctaccacagatgtcttc

SEQ ID NO: 2718003 - DNA, 25 bp, Homo sapien
agtcccgccaactgctaggtggcct

SEQ ID NO: 2718004 - DNA, 25 bp, Homo sapien
gagattttactgctgccattgtccc

SEQ ID NO: 2718005 - DNA, 25 bp, Homo sapien
taggtggcctggcttaagattcctc

SEQ ID NO: 2718006 - DNA, 25 bp, Homo sapien
catccaatctacactcgccagggcc

SEQ ID NO: 2718007 - DNA, 25 bp, Homo sapien
ccagggcccaagaccttgttacgct

SEQ ID NO: 2718008 - DNA, 25 bp, Homo sapien
atccaatctacactcgccagggccc

SEQ ID NO: 2718009 - DNA, 25 bp, Homo sapien
cagggcccaagaccttgttacgctt

SEQ ID NO: 2718010 - DNA, 25 bp, Homo sapien
tgtgctccacattagatatgactca

SEQ ID NO: 2718011 - DNA, 25 bp, Homo sapien
ccggtaagcaagtgctcaggcacaa

SEQ ID NO: 2718012 - DNA, 25 bp, Homo sapien
ttcctgaaaggagctattgtgctcc

SEQ ID NO: 2718013 - DNA, 25 bp, Homo sapien
tgctcaggcacaacttcacactgct

SEQ ID NO: 2718014 - DNA, 25 bp, Homo sapien
cactccagtttggagcagggcagcc

SEQ ID NO: 2718015 - DNA, 25 bp, Homo sapien
gaggtaaattctgcccagagcccta

SEQ ID NO: 2718016 - DNA, 25 bp, Homo sapien
tgttccttgaatccaaaccaacttg

SEQ ID NO: 2718017 - DNA, 25 bp, Homo sapien
caatatccacagtagggagatcagg

SEQ ID NO: 2718018 - DNA, 25 bp, Homo sapien
cctcattattttacagtcgctctcc

SEQ ID NO: 2718019 - DNA, 25 bp, Homo sapien
cattattttacagtcgctctccacc

SEQ ID NO: 2718020 - DNA, 25 bp, Homo sapien
cacccctaggagatgatgggcagct

SEQ ID NO: 2718021 - DNA, 25 bp, Homo sapien
ttgcctgacccacccctaggagatg

SEQ ID NO: 2718022 - DNA, 25 bp, Homo sapien
tggaagggtagtgcttcggtgtcca

SEQ ID NO: 2718023 - DNA, 25 bp, Homo sapien
ggtagtgcttcggtgtccagctgct

SEQ ID NO: 2718024 - DNA, 25 bp, Homo sapien
aagggtagtgcttcggtgtccagct

SEQ ID NO: 2718025 - DNA, 25 bp, Homo sapien
cagacacgtggaagggtagtgcttc

SEQ ID NO: 2718026 - DNA, 25 bp, Homo sapien
gctcatcctccagtgccctgcttga

SEQ ID NO: 2718027 - DNA, 25 bp, Homo sapien
atcctccagtgccctgcttgaacat

SEQ ID NO: 2718028 - DNA, 25 bp, Homo sapien
tgctcatcctccagtgccctgcttg

SEQ ID NO: 2718029 - DNA, 25 bp, Homo sapien
tcatcctccagtgccctgcttgaac

SEQ ID NO: 2718030 - DNA, 25 bp, Homo sapien
ctctgggtcttcctgcaatgttccc

SEQ ID NO: 2718031 - DNA, 25 bp, Homo sapien
tgtaggcagttgctaggagatggga

SEQ ID NO: 2718032 - DNA, 25 bp, Homo sapien
agtgctgtaggcagttgctaggaga

SEQ ID NO: 2718033 - DNA, 25 bp, Homo sapien
agttgctaggagatgggatttcagt

SEQ ID NO: 2718034 - DNA, 25 bp, Homo sapien
ttcagtgggtaggaaaggctcttcc

SEQ ID NO: 2718035 - DNA, 25 bp, Homo sapien
gtagtagagtaagtgggtagagcca

SEQ ID NO: 2718036 - DNA, 25 bp, Homo sapien
gcttgtagtagagtaagtgggtaga

SEQ ID NO: 2718037 - DNA, 25 bp, Homo sapien
ttgtagtagagtaagtgggtagagc

SEQ ID NO: 2718038 - DNA, 25 bp, Homo sapien
ctgcttgtagtagagtaagtgggta

SEQ ID NO: 2718039 - DNA, 25 bp, Homo sapien
ctggggagatatttgttcgcaatac

SEQ ID NO: 2718040 - DNA, 25 bp, Homo sapien
atacaaaccaagacttcctggaaag

SEQ ID NO: 2718041 - DNA, 25 bp, Homo sapien
tatttgttcgcaatacaaaccaaga

SEQ ID NO: 2718042 - DNA, 25 bp, Homo sapien
gggagatatttgttcgcaatacaaa

SEQ ID NO: 2718043 - DNA, 25 bp, Homo sapien
gagcagccaaccttcacagtagcaa

SEQ ID NO: 2718044 - DNA, 25 bp, Homo sapien
agtagcaaccaccttcactggccag

SEQ ID NO: 2718045 - DNA, 25 bp, Homo sapien
caccactatagcagctgacagcgag

SEQ ID NO: 2718046 - DNA, 25 bp, Homo sapien
cagcgagtcagactttagcagtttc

SEQ ID NO: 2718047 - DNA, 25 bp, Homo sapien
tctcatagcttttccgtggtctttc

SEQ ID NO: 2718048 - DNA, 25 bp, Homo sapien
tagcttttccgtggtctttctagtc

SEQ ID NO: 2718049 - DNA, 25 bp, Homo sapien
agtttattatccattatactgtgca

SEQ ID NO: 2718050 - DNA, 25 bp, Homo sapien
tttattatccattatactgtgcaac

SEQ ID NO: 2718051 - DNA, 25 bp, Homo sapien
ccttttcctataagtaacaatatag

SEQ ID NO: 2718052 - DNA, 25 bp, Homo sapien
tcaggtcaccctagtccttttccta

SEQ ID NO: 2718053 - DNA, 25 bp, Homo sapien
taagtaactatgagaatttaaatga

SEQ ID NO: 2718054 - DNA, 25 bp, Homo sapien
tacttagagtaacttagagtcatat

SEQ ID NO: 2718055 - DNA, 25 bp, Homo sapien
caggcactgtcagtaacaggctggt

SEQ ID NO: 2718056 - DNA, 25 bp, Homo sapien
tgccttgaaagtgatatccttctta

SEQ ID NO: 2718057 - DNA, 25 bp, Homo sapien
agcaaacacatgagactagtgaagg

SEQ ID NO: 2718058 - DNA, 25 bp, Homo sapien
ggccaggacacctggattgcttagt

SEQ ID NO: 2718059 - DNA, 25 bp, Homo sapien
ccagaacttgctgcaacatagccct

SEQ ID NO: 2718060 - DNA, 25 bp, Homo sapien
agaacttgctgcaacatagccctaa

SEQ ID NO: 2718061 - DNA, 25 bp, Homo sapien
tcaggagtagtggtgctccattgtg

SEQ ID NO: 2718062 - DNA, 25 bp, Homo sapien
aggagtagtggtgctccattgtgct

SEQ ID NO: 2718063 - DNA, 25 bp, Homo sapien
aatgccccatgcgaggtttctgtcc

SEQ ID NO: 2718064 - DNA, 25 bp, Homo sapien
caccacatgccagctattcctgtag

SEQ ID NO: 2718065 - DNA, 25 bp, Homo sapien
aactttttccctaatgccccatgcg

SEQ ID NO: 2718066 - DNA, 25 bp, Homo sapien
ttgccttagaacacctgcattactg

SEQ ID NO: 2718067 - DNA, 25 bp, Homo sapien
ggactctctcttgcctgccaagggc

SEQ ID NO: 2718068 - DNA, 25 bp, Homo sapien
tctctcaggactctctcttgcctgc

SEQ ID NO: 2718069 - DNA, 25 bp, Homo sapien
caggactctctcttgcctgccaagg

SEQ ID NO: 2718070 - DNA, 25 bp, Homo sapien
ctcaggactctctcttgcctgccaa

SEQ ID NO: 2718071 - DNA, 25 bp, Homo sapien
tggtggactcctgacccagtaaagg

SEQ ID NO: 2718072 - DNA, 25 bp, Homo sapien
caacaaaagagggttctgacatgtc

SEQ ID NO: 2718073 - DNA, 25 bp, Homo sapien
taccgtgacatgtttggatctgcca

SEQ ID NO: 2718074 - DNA, 25 bp, Homo sapien
atttggccggacaccctggagaggt

SEQ ID NO: 2718075 - DNA, 25 bp, Homo sapien
tcctcccttccgcagattcataggg

SEQ ID NO: 2718076 - DNA, 25 bp, Homo sapien
gacattctctagatcaagagctatc

SEQ ID NO: 2718077 - DNA, 25 bp, Homo sapien
aataaggaggatcaagtagacattc

SEQ ID NO: 2718078 - DNA, 25 bp, Homo sapien
taggggaaactgcttgtggatttct

SEQ ID NO: 2718079 - DNA, 25 bp, Homo sapien
tctgacatcctcatacaatgacagg

SEQ ID NO: 2718080 - DNA, 25 bp, Homo sapien
tcacagaaggtacacacattagagc

SEQ ID NO: 2718081 - DNA, 25 bp, Homo sapien
gacaaagaaacgagccatagccatt

SEQ ID NO: 2718082 - DNA, 25 bp, Homo sapien
caagaaaacgagtgggcagtagctg

SEQ ID NO: 2718083 - DNA, 25 bp, Homo sapien
cacattagagctctgagtacattct

SEQ ID NO: 2718084 - DNA, 25 bp, Homo sapien
aaatgctttgctagcggcatccatc

SEQ ID NO: 2718085 - DNA, 25 bp, Homo sapien
tatctgtacctctgtaaatgctttg

SEQ ID NO: 2718086 - DNA, 25 bp, Homo sapien
tcacaacttcttggctagagattac

SEQ ID NO: 2718087 - DNA, 25 bp, Homo sapien
ttgctagcggcatccatcttgtggt

SEQ ID NO: 2718088 - DNA, 25 bp, Homo sapien
tttgagctatcttagtcactagatc

SEQ ID NO: 2718089 - DNA, 25 bp, Homo sapien
tcagaagcattttcggaatcacagg

SEQ ID NO: 2718090 - DNA, 25 bp, Homo sapien
ctgggagttagatagattacattct

SEQ ID NO: 2718091 - DNA, 25 bp, Homo sapien
cattgcatcagctataggaggactt

SEQ ID NO: 2718092 - DNA, 25 bp, Homo sapien
aaagtcgtctctggtatgaagcagg

SEQ ID NO: 2718093 - DNA, 25 bp, Homo sapien
ctagtaactaaaagtcgtctctggt

SEQ ID NO: 2718094 - DNA, 25 bp, Homo sapien
tcctgccagatctagtaactaaaag

SEQ ID NO: 2718095 - DNA, 25 bp, Homo sapien
agtaactaaaagtcgtctctggtat

SEQ ID NO: 2718096 - DNA, 25 bp, Homo sapien
cagatgtctctctttgctgttagat

SEQ ID NO: 2718097 - DNA, 25 bp, Homo sapien
gatgtctctctttgctgttagattt

SEQ ID NO: 2718098 - DNA, 25 bp, Homo sapien
tgtctctctttgctgttagatttac

SEQ ID NO: 2718099 - DNA, 25 bp, Homo sapien
tcagatgtctctctttgctgttaga

SEQ ID NO: 2718100 - DNA, 25 bp, Homo sapien
gattctaactgtttagacttctctt

SEQ ID NO: 2718101 - DNA, 25 bp, Homo sapien
ctaactgtttagacttctctttact

SEQ ID NO: 2718102 - DNA, 25 bp, Homo sapien
cacattctctactcctggattgtgc

SEQ ID NO: 2718103 - DNA, 25 bp, Homo sapien
atatcacattctctactcctggatt

SEQ ID NO: 2718104 - DNA, 25 bp, Homo sapien
ctcggctttgtgactgtcctctcct

SEQ ID NO: 2718105 - DNA, 25 bp, Homo sapien
tcctttcctctgtatctatggtgct

SEQ ID NO: 2718106 - DNA, 25 bp, Homo sapien
tctacccctatctctacttcttgat

SEQ ID NO: 2718107 - DNA, 25 bp, Homo sapien
ttctccctcggctttgtgactgtcc

SEQ ID NO: 2718108 - DNA, 25 bp, Homo sapien
cagaattttctttctgtgtgaactc

SEQ ID NO: 2718109 - DNA, 25 bp, Homo sapien
tcagaattttctttctgtgtgaact

SEQ ID NO: 2718110 - DNA, 25 bp, Homo sapien
attttctttctgtgtgaactcttac

SEQ ID NO: 2718111 - DNA, 25 bp, Homo sapien
gaattttctttctgtgtgaactctt

SEQ ID NO: 2718112 - DNA, 25 bp, Homo sapien
ggcatctgactgatataccgcattg

SEQ ID NO: 2718113 - DNA, 25 bp, Homo sapien
tgtcagcagggcatctgactgatat

SEQ ID NO: 2718114 - DNA, 25 bp, Homo sapien
gcagaaatataacagcactgtctct

SEQ ID NO: 2718115 - DNA, 25 bp, Homo sapien
gatataccgcattgttttcaatcat

SEQ ID NO: 2718116 - DNA, 25 bp, Homo sapien
tgtgggtgccatctgattaagcatc

SEQ ID NO: 2718117 - DNA, 25 bp, Homo sapien
tctggagtcaggcatggctaaggct

SEQ ID NO: 2718118 - DNA, 25 bp, Homo sapien
tatgacagagagttgtaacctgcct

SEQ ID NO: 2718119 - DNA, 25 bp, Homo sapien
caggctggtcacacactgggtacta

SEQ ID NO: 2718120 - DNA, 25 bp, Homo sapien
aacttaatcagggattgtcctagtg

SEQ ID NO: 2718121 - DNA, 25 bp, Homo sapien
cttccttcaagagttcttctgccac

SEQ ID NO: 2718122 - DNA, 25 bp, Homo sapien
ctagaaacttaatcagggattgtcc

SEQ ID NO: 2718123 - DNA, 25 bp, Homo sapien
tcttctgccactagaaacttaatca

SEQ ID NO: 2718124 - DNA, 25 bp, Homo sapien
aataaagagaacacgcttgctagcc

SEQ ID NO: 2718125 - DNA, 25 bp, Homo sapien
gaccaataaagagaacacgcttgct

SEQ ID NO: 2718126 - DNA, 25 bp, Homo sapien
ctgtaagggaccaataaagagaaca

SEQ ID NO: 2718127 - DNA, 25 bp, Homo sapien
taagggaccaataaagagaacacgc

SEQ ID NO: 2718128 - DNA, 25 bp, Homo sapien
tctcaagtgaggctcgtttagttca

SEQ ID NO: 2718129 - DNA, 25 bp, Homo sapien
gccaatcagcgccaaagggcacagc

SEQ ID NO: 2718130 - DNA, 25 bp, Homo sapien
atcagcgccaaagggcacagctcag

SEQ ID NO: 2718131 - DNA, 25 bp, Homo sapien
ctcgtttagttcagtgcagccaatc

SEQ ID NO: 2718132 - DNA, 25 bp, Homo sapien
ctgtggaatttatccccagagctaa

SEQ ID NO: 2718133 - DNA, 25 bp, Homo sapien
gagctaacactgatatgtacattac

SEQ ID NO: 2718134 - DNA, 25 bp, Homo sapien
caacaagacagatctctgtggaatt

SEQ ID NO: 2718135 - DNA, 25 bp, Homo sapien
catcatttttacttggactacccat

SEQ ID NO: 2718136 - DNA, 25 bp, Homo sapien
tccctctctggctttacagcagctg

SEQ ID NO: 2718137 - DNA, 25 bp, Homo sapien
ctggctttacagcagctggtggcca

SEQ ID NO: 2718138 - DNA, 25 bp, Homo sapien
ctaaagcagcaagaagcagacttct

SEQ ID NO: 2718139 - DNA, 25 bp, Homo sapien
tttgtccctctctggctttacagca

SEQ ID NO: 2718140 - DNA, 25 bp, Homo sapien
cacaagacaccatgcggcattgcct

SEQ ID NO: 2718141 - DNA, 25 bp, Homo sapien
aagacaccatgcggcattgcctttc

SEQ ID NO: 2718142 - DNA, 25 bp, Homo sapien
acaccatgcggcattgcctttctca

SEQ ID NO: 2718143 - DNA, 25 bp, Homo sapien
acaagacaccatgcggcattgcctt

SEQ ID NO: 2718144 - DNA, 25 bp, Homo sapien
tgggttacagtatctgccaagtgta

SEQ ID NO: 2718145 - DNA, 25 bp, Homo sapien
cagggcatttgcaaaactagaatag

SEQ ID NO: 2718146 - DNA, 25 bp, Homo sapien
agtgtaagcactatggtcaatcctc

SEQ ID NO: 2718147 - DNA, 25 bp, Homo sapien
ttggagcgacttttgatttcagggc

SEQ ID NO: 2718148 - DNA, 25 bp, Homo sapien
agtctgctgtaatgcacttgctcca

SEQ ID NO: 2718149 - DNA, 25 bp, Homo sapien
gtacttgtactctacgacaaacgga

SEQ ID NO: 2718150 - DNA, 25 bp, Homo sapien
gacaaacggaatccagtctgctgta

SEQ ID NO: 2718151 - DNA, 25 bp, Homo sapien
tgggcttccagtacttgtactctac

SEQ ID NO: 2718152 - DNA, 25 bp, Homo sapien
tccaccgatggacatctgagttgtt

SEQ ID NO: 2718153 - DNA, 25 bp, Homo sapien
tcccagaaccttgtaaccatgatcc

SEQ ID NO: 2718154 - DNA, 25 bp, Homo sapien
tcctttctaagggaacgatgttcca

SEQ ID NO: 2718155 - DNA, 25 bp, Homo sapien
ccattgtatgtgcatatcaccacat

SEQ ID NO: 2718156 - DNA, 25 bp, Homo sapien
aaaagttatacgaaaatgtgctgtt

SEQ ID NO: 2718157 - DNA, 25 bp, Homo sapien
ctgtctctcctcagatagcatagat

SEQ ID NO: 2718158 - DNA, 25 bp, Homo sapien
gaaatctactgagcctttctttaat

SEQ ID NO: 2718159 - DNA, 25 bp, Homo sapien
gtctctcctcagatagcatagatat

SEQ ID NO: 2718160 - DNA, 25 bp, Homo sapien
tagcaggcggtttcctttcagcttt

SEQ ID NO: 2718161 - DNA, 25 bp, Homo sapien
tacagagtctctggaccgttatcta

SEQ ID NO: 2718162 - DNA, 25 bp, Homo sapien
tatctatcaaaagctttagcaggcg

SEQ ID NO: 2718163 - DNA, 25 bp, Homo sapien
tcagcttttgatctctgtcaagaga

SEQ ID NO: 2718164 - DNA, 25 bp, Homo sapien
cagacaggtggaagccttatatgta

SEQ ID NO: 2718165 - DNA, 25 bp, Homo sapien
ggtggaagccttatatgtagagaaa

SEQ ID NO: 2718166 - DNA, 25 bp, Homo sapien
ttccacttcagacaggtggaagcct

SEQ ID NO: 2718167 - DNA, 25 bp, Homo sapien
tggacattagatttgtctattggca

SEQ ID NO: 2718168 - DNA, 25 bp, Homo sapien
agcttccatatttattgggagtaaa

SEQ ID NO: 2718169 - DNA, 25 bp, Homo sapien
aagcttccatatttattgggagtaa

SEQ ID NO: 2718170 - DNA, 25 bp, Homo sapien
gcagcgcttccgagagcaagaaata

SEQ ID NO: 2718171 - DNA, 25 bp, Homo sapien
ccgagagcaagaaatagccataaat

SEQ ID NO: 2718172 - DNA, 25 bp, Homo sapien
ctgatggagctaacagcagcgcttc

SEQ ID NO: 2718173 - DNA, 25 bp, Homo sapien
gagctaacagcagcgcttccgagag

SEQ ID NO: 2718174 - DNA, 25 bp, Homo sapien
ggcaagaaatgtgttcccatgcatg

SEQ ID NO: 2718175 - DNA, 25 bp, Homo sapien
aagaaatgtgttcccatgcatggcc

SEQ ID NO: 2718176 - DNA, 25 bp, Homo sapien
caggcaagaaatgtgttcccatgca

SEQ ID NO: 2718177 - DNA, 25 bp, Homo sapien
tcccatgcatggccagcacttagca

SEQ ID NO: 2718178 - DNA, 25 bp, Homo sapien
tatttccatataacactactcagag

SEQ ID NO: 2718179 - DNA, 25 bp, Homo sapien
cacaatggctaacaattggaaacca

SEQ ID NO: 2718180 - DNA, 25 bp, Homo sapien
tgtcagtgtccctcaactgttggag

SEQ ID NO: 2718181 - DNA, 25 bp, Homo sapien
tcaaccaaatggaggaaaagcacta

SEQ ID NO: 2718182 - DNA, 25 bp, Homo sapien
ttgctgactacagaaatgaggttta

SEQ ID NO: 2718183 - DNA, 25 bp, Homo sapien
ctacagaaatgaggtttagcaaaac

SEQ ID NO: 2718184 - DNA, 25 bp, Homo sapien
aaatgaggtttagcaaaacagaagc

SEQ ID NO: 2718185 - DNA, 25 bp, Homo sapien
gctgactacagaaatgaggtttagc

SEQ ID NO: 2718186 - DNA, 25 bp, Homo sapien
tctgcgaatgctagtggcaggagca

SEQ ID NO: 2718187 - DNA, 25 bp, Homo sapien
gccatccacatactaaatattccag

SEQ ID NO: 2718188 - DNA, 25 bp, Homo sapien
tccagatactgcaatggccccaatg

SEQ ID NO: 2718189 - DNA, 25 bp, Homo sapien
ccacagtggagaagacgcatgagag

SEQ ID NO: 2718190 - DNA, 25 bp, Homo sapien
tcaatttactgagaacaaaggacta

SEQ ID NO: 2718191 - DNA, 25 bp, Homo sapien
tacagattcgcctattggacaggga

SEQ ID NO: 2718192 - DNA, 25 bp, Homo sapien
ggactatggtcaagagcctgaagcc

SEQ ID NO: 2718193 - DNA, 25 bp, Homo sapien
tgaagccagtctacaactgggatac

SEQ ID NO: 2718194 - DNA, 25 bp, Homo sapien
aaaaggcacacttccacctgctgtc

SEQ ID NO: 2718195 - DNA, 25 bp, Homo sapien
ggtctgttgccatttcgggatcaaa

SEQ ID NO: 2718196 - DNA, 25 bp, Homo sapien
tccacctgctgtcatatgtctgatc

SEQ ID NO: 2718197 - DNA, 25 bp, Homo sapien
gggatcaaaaggcacacttccacct

SEQ ID NO: 2718198 - DNA, 25 bp, Homo sapien
acaaaagatcccaggacgctgatat

SEQ ID NO: 2718199 - DNA, 25 bp, Homo sapien
gatcccaggacgctgatattgataa

SEQ ID NO: 2718200 - DNA, 25 bp, Homo sapien
tccagcacagttgtataaatgttcc

SEQ ID NO: 2718201 - DNA, 25 bp, Homo sapien
gcacagttgtataaatgttccttga

SEQ ID NO: 2718202 - DNA, 25 bp, Homo sapien
cttctgtggatatgagatattggca

SEQ ID NO: 2718203 - DNA, 25 bp, Homo sapien
ctcttaatgccaatcgctggaagat

SEQ ID NO: 2718204 - DNA, 25 bp, Homo sapien
cgctggaagataagaataggagttc

SEQ ID NO: 2718205 - DNA, 25 bp, Homo sapien
aacccaagcttctgtggatatgaga

SEQ ID NO: 2718206 - DNA, 25 bp, Homo sapien
aaagacttatccctcaccattacca

SEQ ID NO: 2718207 - DNA, 25 bp, Homo sapien
tcaccattaccattctgataagaaa

SEQ ID NO: 2718208 - DNA, 25 bp, Homo sapien
ctcaaagttttagagcccattgatt

SEQ ID NO: 2718209 - DNA, 25 bp, Homo sapien
tggaaatataccaaagacttatccc

SEQ ID NO: 2718210 - DNA, 25 bp, Homo sapien
gctggccctgtctcttggtcttcat

SEQ ID NO: 2718211 - DNA, 25 bp, Homo sapien
cttgcgctggccctgtctcttggtc

SEQ ID NO: 2718212 - DNA, 25 bp, Homo sapien
cttctccttgcgctggccctgtctc

SEQ ID NO: 2718213 - DNA, 25 bp, Homo sapien
tctccttgcgctggccctgtctctt

SEQ ID NO: 2718214 - DNA, 25 bp, Homo sapien
catacattatgctccagggcaagcc

SEQ ID NO: 2718215 - DNA, 25 bp, Homo sapien
tcatacattatgctccagggcaagc

SEQ ID NO: 2718216 - DNA, 25 bp, Homo sapien
ggccagtacacaaattatgctcagc

SEQ ID NO: 2718217 - DNA, 25 bp, Homo sapien
gagacgagtcatcagcaaaagcggg

SEQ ID NO: 2718218 - DNA, 25 bp, Homo sapien
aagacacgtggcttgcccgctgtca

SEQ ID NO: 2718219 - DNA, 25 bp, Homo sapien
cataatactggacaccatgtgcgat

SEQ ID NO: 2718220 - DNA, 25 bp, Homo sapien
agcccagctcgcttcaatccgccgt

SEQ ID NO: 2718221 - DNA, 25 bp, Homo sapien
tccccgccggtgcttcgccggctcg

SEQ ID NO: 2718222 - DNA, 25 bp, Homo sapien
gctcgcttcaatccgccgtgcccct

SEQ ID NO: 2718223 - DNA, 25 bp, Homo sapien
tcgccaggctcgcctgggaccagag

SEQ ID NO: 2718224 - DNA, 25 bp, Homo sapien
ccggccaagcggctgcggaaagcct

SEQ ID NO: 2718225 - DNA, 25 bp, Homo sapien
gacaagggacttgccaacggaatag

SEQ ID NO: 2718226 - DNA, 25 bp, Homo sapien
ggccaagcggctgcggaaagcctcc

SEQ ID NO: 2718227 - DNA, 25 bp, Homo sapien
tagacaagggacttgccaacggaat

SEQ ID NO: 2718228 - DNA, 25 bp, Homo sapien
cgctcgctccggctcgagcgtccgg

SEQ ID NO: 2718229 - DNA, 25 bp, Homo sapien
tcgctccggctcgagcgtccgggtg

SEQ ID NO: 2718230 - DNA, 25 bp, Homo sapien
cttcggacttcgcgctcgctccggc

SEQ ID NO: 2718231 - DNA, 25 bp, Homo sapien
gctccggctcgagcgtccgggtgcg

SEQ ID NO: 2718232 - DNA, 25 bp, Homo sapien
cagtcgatcccatgggtggcgagtt

SEQ ID NO: 2718233 - DNA, 25 bp, Homo sapien
gcgagttggcagagggcgcgccgcc

SEQ ID NO: 2718234 - DNA, 25 bp, Homo sapien
ggcagctgagggcagtcgatcccat

SEQ ID NO: 2718235 - DNA, 25 bp, Homo sapien
tcgctcccaggtctggcgcaggctg

SEQ ID NO: 2718236 - DNA, 25 bp, Homo sapien
tctcctgggccacgcggcgaaggct

SEQ ID NO: 2718237 - DNA, 25 bp, Homo sapien
tgcgcgcggagtccgcgaaacgcct

SEQ ID NO: 2718238 - DNA, 25 bp, Homo sapien
caccaagccgactggtgcgcgcgga

SEQ ID NO: 2718239 - DNA, 25 bp, Homo sapien
aaacgccttggtgtctcgctcctct

SEQ ID NO: 2718240 - DNA, 25 bp, Homo sapien
gcagatacttgctggacaacatcca

SEQ ID NO: 2718241 - DNA, 25 bp, Homo sapien
gggcagggaccattatctttacttg

SEQ ID NO: 2718242 - DNA, 25 bp, Homo sapien
cactggcttccacgctggttctcaa

SEQ ID NO: 2718243 - DNA, 25 bp, Homo sapien
cagctttggtcgcaattacacacaa

SEQ ID NO: 2718244 - DNA, 25 bp, Homo sapien
gaatcaacagccctcccctaccacc

SEQ ID NO: 2718245 - DNA, 25 bp, Homo sapien
ccttaaagcagctctcttaggaatc

SEQ ID NO: 2718246 - DNA, 25 bp, Homo sapien
tgagctaagattgagcgcatgggcc

SEQ ID NO: 2718247 - DNA, 25 bp, Homo sapien
caatttgtaatcagagcatcaagcc

SEQ ID NO: 2718248 - DNA, 25 bp, Homo sapien
cgaaaatgtcagttctggcacagcc

SEQ ID NO: 2718249 - DNA, 25 bp, Homo sapien
tcaagccatactgtacgaaaatgtc

SEQ ID NO: 2718250 - DNA, 25 bp, Homo sapien
aaaaccttcagctatgacaacatgc

SEQ ID NO: 2718251 - DNA, 25 bp, Homo sapien
tggcttggcacctttgtactctgtg

SEQ ID NO: 2718252 - DNA, 25 bp, Homo sapien
catgaaaagtgcctcctgaacagct

SEQ ID NO: 2718253 - DNA, 25 bp, Homo sapien
ttttgatctgccatgaaaagtgcct

SEQ ID NO: 2718254 - DNA, 25 bp, Homo sapien
tgaacagctgctgacctttcagcct

SEQ ID NO: 2718255 - DNA, 25 bp, Homo sapien
gagtctgcacgtggataaatatttt

SEQ ID NO: 2718256 - DNA, 25 bp, Homo sapien
tggtcttggactcctcaacttaagt

SEQ ID NO: 2718257 - DNA, 25 bp, Homo sapien
cttggactcctcaacttaagtgatt

SEQ ID NO: 2718258 - DNA, 25 bp, Homo sapien
caaagtggagtctgcacgtggataa

SEQ ID NO: 2718259 - DNA, 25 bp, Homo sapien
tctgactctgttccatgagaccacc

SEQ ID NO: 2718260 - DNA, 25 bp, Homo sapien
caccttaagttcagcaggcttttct

SEQ ID NO: 2718261 - DNA, 25 bp, Homo sapien
catgagaccaccttaagttcagcag

SEQ ID NO: 2718262 - DNA, 25 bp, Homo sapien
ccattctgactctgttccatgagac

SEQ ID NO: 2718263 - DNA, 25 bp, Homo sapien
taagcgtggtgagagtaagcatcct

SEQ ID NO: 2718264 - DNA, 25 bp, Homo sapien
tggttctagcttctgacaggctgta

SEQ ID NO: 2718265 - DNA, 25 bp, Homo sapien
ttgaataagcgtggtgagagtaagc

SEQ ID NO: 2718266 - DNA, 25 bp, Homo sapien
cagttctcgagaggaatggttctag

SEQ ID NO: 2718267 - DNA, 25 bp, Homo sapien
cctgaaatgttactgaattcatgta

SEQ ID NO: 2718268 - DNA, 25 bp, Homo sapien
aatgttactgaattcatgtatcagt

SEQ ID NO: 2718269 - DNA, 25 bp, Homo sapien
tctcagctagaatgttattggtgta

SEQ ID NO: 2718270 - DNA, 25 bp, Homo sapien
gaaatgttactgaattcatgtatca

SEQ ID NO: 2718271 - DNA, 25 bp, Homo sapien
tctcccattatgtagcctgtttatt

SEQ ID NO: 2718272 - DNA, 25 bp, Homo sapien
tggatattagactgttatcggatgc

SEQ ID NO: 2718273 - DNA, 25 bp, Homo sapien
acttggtgaatagtttctcccatta

SEQ ID NO: 2718274 - DNA, 25 bp, Homo sapien
ctgttatcggatgcatacttggtga

SEQ ID NO: 2718275 - DNA, 25 bp, Homo sapien
gtttttcagtctatgccccagcctc

SEQ ID NO: 2718276 - DNA, 25 bp, Homo sapien
tatgtccaagcatgttcaatattta

SEQ ID NO: 2718277 - DNA, 25 bp, Homo sapien
tccatttttatgtccaagcatgttc

SEQ ID NO: 2718278 - DNA, 25 bp, Homo sapien
tatgaatggtcttgtcatccaggta

SEQ ID NO: 2718279 - DNA, 25 bp, Homo sapien
ccaccacacccagctgatttttttg

SEQ ID NO: 2718280 - DNA, 25 bp, Homo sapien
cacccagctgatttttttgtatttt

SEQ ID NO: 2718281 - DNA, 25 bp, Homo sapien
aagcagctgtgactacaagcatgca

SEQ ID NO: 2718282 - DNA, 25 bp, Homo sapien
caagcagctgtgactacaagcatgc

SEQ ID NO: 2718283 - DNA, 25 bp, Homo sapien
ccaagatagatactttccgaaaatt

SEQ ID NO: 2718284 - DNA, 25 bp, Homo sapien
tcatgagtaagaaggtatggtcgga

SEQ ID NO: 2718285 - DNA, 25 bp, Homo sapien
cgaaaattcctctttcacggttgat

SEQ ID NO: 2718286 - DNA, 25 bp, Homo sapien
gttgatccatgcagagaactcttgg

SEQ ID NO: 2718287 - DNA, 25 bp, Homo sapien
gatatctggacctacactcacccgc

SEQ ID NO: 2718288 - DNA, 25 bp, Homo sapien
ggacctacactcacccgcctcctct

SEQ ID NO: 2718289 - DNA, 25 bp, Homo sapien
catttgcacaccagatgcctgaagc

SEQ ID NO: 2718290 - DNA, 25 bp, Homo sapien
aatcatttgcacaccagatgcctga

SEQ ID NO: 2718291 - DNA, 25 bp, Homo sapien
ggaaacaatgaggcccacaaggtac

SEQ ID NO: 2718292 - DNA, 25 bp, Homo sapien
gaggcccacaaggtacgtggcctga

SEQ ID NO: 2718293 - DNA, 25 bp, Homo sapien
aatgaggcccacaaggtacgtggcc

SEQ ID NO: 2718294 - DNA, 25 bp, Homo sapien
aacaatgaggcccacaaggtacgtg

SEQ ID NO: 2718295 - DNA, 25 bp, Homo sapien
aataaccaatttcccagagcctcag

SEQ ID NO: 2718296 - DNA, 25 bp, Homo sapien
ggtgtgaagacatgggttcaagtct

SEQ ID NO: 2718297 - DNA, 25 bp, Homo sapien
taacagctacagtaatgcatctggg

SEQ ID NO: 2718298 - DNA, 25 bp, Homo sapien
actcgccaatcaggcaccctggatg

SEQ ID NO: 2718299 - DNA, 25 bp, Homo sapien
gattctaacaacaacgaagcctgtg

SEQ ID NO: 2718300 - DNA, 25 bp, Homo sapien
taacaacaacgaagcctgtgtatgt

SEQ ID NO: 2718301 - DNA, 25 bp, Homo sapien
tcaagattctaacaacaacgaagcc

SEQ ID NO: 2718302 - DNA, 25 bp, Homo sapien
ttctaacaacaacgaagcctgtgta

SEQ ID NO: 2718303 - DNA, 25 bp, Homo sapien
ttcgcaaaagtatgttaatcaccat

SEQ ID NO: 2718304 - DNA, 25 bp, Homo sapien
tctttttcgcaaaagtatgttaatc

SEQ ID NO: 2718305 - DNA, 25 bp, Homo sapien
attgtcacttctttttcgcaaaagt

SEQ ID NO: 2718306 - DNA, 25 bp, Homo sapien
gtcacttctttttcgcaaaagtatg

SEQ ID NO: 2718307 - DNA, 25 bp, Homo sapien
tgcaagctctaattgtaagccgaaa

SEQ ID NO: 2718308 - DNA, 25 bp, Homo sapien
taagcaagtgcacttctcaacctgt

SEQ ID NO: 2718309 - DNA, 25 bp, Homo sapien
tcagacccgattgcagtacaagaga

SEQ ID NO: 2718310 - DNA, 25 bp, Homo sapien
tcatgattctactgatcagacccga

SEQ ID NO: 2718311 - DNA, 25 bp, Homo sapien
tggtaaataccacaagacttctgag

SEQ ID NO: 2718312 - DNA, 25 bp, Homo sapien
tcaggcagagcaccactcatatccg

SEQ ID NO: 2718313 - DNA, 25 bp, Homo sapien
acatcagggcccttaatggctttgg

SEQ ID NO: 2718314 - DNA, 25 bp, Homo sapien
taaagctcccttgtactcccctgga

SEQ ID NO: 2718315 - DNA, 25 bp, Homo sapien
cagacgagatcaggcgcgttcaggg

SEQ ID NO: 2718316 - DNA, 25 bp, Homo sapien
gttcagggtggtatggccgtagaca

SEQ ID NO: 2718317 - DNA, 25 bp, Homo sapien
tcagacgagatcaggcgcgttcagg

SEQ ID NO: 2718318 - DNA, 25 bp, Homo sapien
agatcagacgagatcaggcgcgttc

SEQ ID NO: 2718319 - DNA, 25 bp, Homo sapien
ggtgaattccatgactgatcggcag

SEQ ID NO: 2718320 - DNA, 25 bp, Homo sapien
tgatatttcttagttggcccacaat

SEQ ID NO: 2718321 - DNA, 25 bp, Homo sapien
tgatcggcagtacggtctcctttga

SEQ ID NO: 2718322 - DNA, 25 bp, Homo sapien
cagcaaatgtttgtgcagctgctcc

SEQ ID NO: 2718323 - DNA, 25 bp, Homo sapien
ttagcatctatgatgtaagacatca

SEQ ID NO: 2718324 - DNA, 25 bp, Homo sapien
ctgagaggtgatttagcatctatga

SEQ ID NO: 2718325 - DNA, 25 bp, Homo sapien
gcactgagaggtgatttagcatcta

SEQ ID NO: 2718326 - DNA, 25 bp, Homo sapien
tagcatctatgatgtaagacatcaa

SEQ ID NO: 2718327 - DNA, 25 bp, Homo sapien
tttctctagaaacggccaaatggag

SEQ ID NO: 2718328 - DNA, 25 bp, Homo sapien
ccatcattttctctagaaacggcca

SEQ ID NO: 2718329 - DNA, 25 bp, Homo sapien
gaaacggccaaatggagactccact

SEQ ID NO: 2718330 - DNA, 25 bp, Homo sapien
tctagaaacggccaaatggagactc

SEQ ID NO: 2718331 - DNA, 25 bp, Homo sapien
tgatcaagattttctcgggccctgt

SEQ ID NO: 2718332 - DNA, 25 bp, Homo sapien
gctttatctttgccgtatttttctg

SEQ ID NO: 2718333 - DNA, 25 bp, Homo sapien
gatcaagattttctcgggccctgtt

SEQ ID NO: 2718334 - DNA, 25 bp, Homo sapien
tatctttgccgtatttttctgattc

SEQ ID NO: 2718335 - DNA, 25 bp, Homo sapien
taattcatcgatgctcaagaagaaa

SEQ ID NO: 2718336 - DNA, 25 bp, Homo sapien
actcactgatactgtgaccctccca

SEQ ID NO: 2718337 - DNA, 25 bp, Homo sapien
aaattgggggaccactcactgatac

SEQ ID NO: 2718338 - DNA, 25 bp, Homo sapien
catcgatgctcaagaagaaattggg

SEQ ID NO: 2718339 - DNA, 25 bp, Homo sapien
tctaactggactttctacctcttga

SEQ ID NO: 2718340 - DNA, 25 bp, Homo sapien
ctaactggactttctacctcttgag

SEQ ID NO: 2718341 - DNA, 25 bp, Homo sapien
taactggactttctacctcttgagc

SEQ ID NO: 2718342 - DNA, 25 bp, Homo sapien
gccatgaatccattaacaagtcctg

SEQ ID NO: 2718343 - DNA, 25 bp, Homo sapien
caccatcaggtgcacaaagctgttg

SEQ ID NO: 2718344 - DNA, 25 bp, Homo sapien
tgctgcccttgaacacaactgcctg

SEQ ID NO: 2718345 - DNA, 25 bp, Homo sapien
ccacctttctcagtagctgccatga

SEQ ID NO: 2718346 - DNA, 25 bp, Homo sapien
aattgtcacagcttcgtgcaaggcc

SEQ ID NO: 2718347 - DNA, 25 bp, Homo sapien
ttaaattgtcacagcttcgtgcaag

SEQ ID NO: 2718348 - DNA, 25 bp, Homo sapien
cagcttcgtgcaaggccgatgaaga

SEQ ID NO: 2718349 - DNA, 25 bp, Homo sapien
tgtcacagcttcgtgcaaggccgat

SEQ ID NO: 2718350 - DNA, 25 bp, Homo sapien
tctttcacatataaaagatagctga

SEQ ID NO: 2718351 - DNA, 25 bp, Homo sapien
atagctgatgtttaaaaggtttctc

SEQ ID NO: 2718352 - DNA, 25 bp, Homo sapien
aaggcccataagacttcagtagatc

SEQ ID NO: 2718353 - DNA, 25 bp, Homo sapien
tcagcatgtcagtacaaccataagt

SEQ ID NO: 2718354 - DNA, 25 bp, Homo sapien
gtaaaaccctatcaaacagcatggc

SEQ ID NO: 2718355 - DNA, 25 bp, Homo sapien
taagtggagcctcaagatgtgcctg

SEQ ID NO: 2718356 - DNA, 25 bp, Homo sapien
taactgcagatatggtagcaacagc

SEQ ID NO: 2718357 - DNA, 25 bp, Homo sapien
cagcagcaggattcgagaggatcaa

SEQ ID NO: 2718358 - DNA, 25 bp, Homo sapien
cataaatgttgtgaactgttccacc

SEQ ID NO: 2718359 - DNA, 25 bp, Homo sapien
ttatagtgacttgtgaccgggatct

SEQ ID NO: 2718360 - DNA, 25 bp, Homo sapien
catatcagatggcaaactgtatcca

SEQ ID NO: 2718361 - DNA, 25 bp, Homo sapien
ctctacaatgggctttaagtgttca

SEQ ID NO: 2718362 - DNA, 25 bp, Homo sapien
tgctctgggctttggtaacacttga

SEQ ID NO: 2718363 - DNA, 25 bp, Homo sapien
tctagcacgaagagtggatcacctt

SEQ ID NO: 2718364 - DNA, 25 bp, Homo sapien
tctgtttggccatactaagctgtga

SEQ ID NO: 2718365 - DNA, 25 bp, Homo sapien
tagaccatagatgatctctagcacg

SEQ ID NO: 2718366 - DNA, 25 bp, Homo sapien
actgcctcaacctccaaaataatgg

SEQ ID NO: 2718367 - DNA, 25 bp, Homo sapien
tcaacctccaaaataatgggactac

SEQ ID NO: 2718368 - DNA, 25 bp, Homo sapien
gcctcaacctccaaaataatgggac

SEQ ID NO: 2718369 - DNA, 25 bp, Homo sapien
aacctccaaaataatgggactacag

SEQ ID NO: 2718370 - DNA, 25 bp, Homo sapien
ggtttgcaggatgagtcaagcacat

SEQ ID NO: 2718371 - DNA, 25 bp, Homo sapien
ctgtagctgtatccctccagtggca

SEQ ID NO: 2718372 - DNA, 25 bp, Homo sapien
tcttgcagctatatggtgaacccac

SEQ ID NO: 2718373 - DNA, 25 bp, Homo sapien
taagtctacaggcttgaataaggcc

SEQ ID NO: 2718374 - DNA, 25 bp, Homo sapien
gagaatgtgcttacggcaaaggcca

SEQ ID NO: 2718375 - DNA, 25 bp, Homo sapien
gatacgcatggttgtctcactaggc

SEQ ID NO: 2718376 - DNA, 25 bp, Homo sapien
tctcagataacggttgcaggtcact

SEQ ID NO: 2718377 - DNA, 25 bp, Homo sapien
taatacactaccaactggtgacagg

SEQ ID NO: 2718378 - DNA, 25 bp, Homo sapien
ctgttgctgcatgtagccaccttca

SEQ ID NO: 2718379 - DNA, 25 bp, Homo sapien
gaaccaacatctgctagcttgtaac

SEQ ID NO: 2718380 - DNA, 25 bp, Homo sapien
aaaaagagaatcaacctgccctgtg

SEQ ID NO: 2718381 - DNA, 25 bp, Homo sapien
taaactgtaagctaggctttgctgt

SEQ ID NO: 2718382 - DNA, 25 bp, Homo sapien
ctgtttgaagagactagtttcgaat

SEQ ID NO: 2718383 - DNA, 25 bp, Homo sapien
ggagcagactgtgccgcttcagcct

SEQ ID NO: 2718384 - DNA, 25 bp, Homo sapien
tgaagagactagtttcgaatgccat

SEQ ID NO: 2718385 - DNA, 25 bp, Homo sapien
tgtggttgccgcacacggagcagac

SEQ ID NO: 2718386 - DNA, 25 bp, Homo sapien
ttcaagagcaccatatttggaacca

SEQ ID NO: 2718387 - DNA, 25 bp, Homo sapien
cattcacacttgaacagccacaggc

SEQ ID NO: 2718388 - DNA, 25 bp, Homo sapien
gaaccaaaagtcctgcattcacact

SEQ ID NO: 2718389 - DNA, 25 bp, Homo sapien
acatagggtaaatggaatgcagtgg

SEQ ID NO: 2718390 - DNA, 25 bp, Homo sapien
cataataccatccaaacatgatatc

SEQ ID NO: 2718391 - DNA, 25 bp, Homo sapien
tacataataccatccaaacatgata

SEQ ID NO: 2718392 - DNA, 25 bp, Homo sapien
acataataccatccaaacatgatat

SEQ ID NO: 2718393 - DNA, 25 bp, Homo sapien
ggcagaccccagtttgtttcaggct

SEQ ID NO: 2718394 - DNA, 25 bp, Homo sapien
cactgatggaaagagacaggtggca

SEQ ID NO: 2718395 - DNA, 25 bp, Homo sapien
aatgctgcgtttgattgataaagtg

SEQ ID NO: 2718396 - DNA, 25 bp, Homo sapien
tggcctgcagtgaagtactctctga

SEQ ID NO: 2718397 - DNA, 25 bp, Homo sapien
cttcctttgatgcaggagcttgcag

SEQ ID NO: 2718398 - DNA, 25 bp, Homo sapien
agggcaatgcgagtcctcagcatga

SEQ ID NO: 2718399 - DNA, 25 bp, Homo sapien
tggacagtatccaatcgagggcaat

SEQ ID NO: 2718400 - DNA, 25 bp, Homo sapien
cataggagaaggagtagctacagag

SEQ ID NO: 2718401 - DNA, 25 bp, Homo sapien
aggagatcgaggcagtgaaagcaaa

SEQ ID NO: 2718402 - DNA, 25 bp, Homo sapien
gaagtcattactgaacgttttccac

SEQ ID NO: 2718403 - DNA, 25 bp, Homo sapien
aacctggagagcctttaaagagcat

SEQ ID NO: 2718404 - DNA, 25 bp, Homo sapien
ggcagtgaaagcaaatcgtccattc

SEQ ID NO: 2718405 - DNA, 25 bp, Homo sapien
tgttgttgtgccaatctgttcaggc

SEQ ID NO: 2718406 - DNA, 25 bp, Homo sapien
gctaatgcactcgttattccaagga

SEQ ID NO: 2718407 - DNA, 25 bp, Homo sapien
tattcaaggtagttgcaatgatcca

SEQ ID NO: 2718408 - DNA, 25 bp, Homo sapien
cagttaaaatcctgggagagtctgg

SEQ ID NO: 2718409 - DNA, 25 bp, Homo sapien
ggtattttgagctcaggtccaccag

SEQ ID NO: 2718410 - DNA, 25 bp, Homo sapien
tggggtattttgagctcaggtccac

SEQ ID NO: 2718411 - DNA, 25 bp, Homo sapien
gggtattttgagctcaggtccacca

SEQ ID NO: 2718412 - DNA, 25 bp, Homo sapien
ctggggtattttgagctcaggtcca

SEQ ID NO: 2718413 - DNA, 25 bp, Homo sapien
ccattcacttgcattttgttttgaa

SEQ ID NO: 2718414 - DNA, 25 bp, Homo sapien
tgcattttgttttgaaggcttttca

SEQ ID NO: 2718415 - DNA, 25 bp, Homo sapien
ttgaaggcttttcaaaaatcttcat

SEQ ID NO: 2718416 - DNA, 25 bp, Homo sapien
gcattttgttttgaaggcttttcaa

SEQ ID NO: 2718417 - DNA, 25 bp, Homo sapien
gaagcagggcatattctggataggc

SEQ ID NO: 2718418 - DNA, 25 bp, Homo sapien
aagaccacagacagggactgaatgt

SEQ ID NO: 2718419 - DNA, 25 bp, Homo sapien
catgtgttggatagaggagtcacag

SEQ ID NO: 2718420 - DNA, 25 bp, Homo sapien
gactgaatgtaagaggtgcctctct

SEQ ID NO: 2718421 - DNA, 25 bp, Homo sapien
ccgagccttgggagcatgatccaaa

SEQ ID NO: 2718422 - DNA, 25 bp, Homo sapien
cagcagggaatatgtggaccgagcc

SEQ ID NO: 2718423 - DNA, 25 bp, Homo sapien
aatatgtggaccgagccttgggagc

SEQ ID NO: 2718424 - DNA, 25 bp, Homo sapien
gcatgatccaaagaacgaagattaa

SEQ ID NO: 2718425 - DNA, 25 bp, Homo sapien
gttttcatgctctgataatgttgca

SEQ ID NO: 2718426 - DNA, 25 bp, Homo sapien
gaacaaatctatgtcaactcgtttc

SEQ ID NO: 2718427 - DNA, 25 bp, Homo sapien
gtaacttgcctcacatattcctttc

SEQ ID NO: 2718428 - DNA, 25 bp, Homo sapien
cctacataccatcactaaaaccaat

SEQ ID NO: 2718429 - DNA, 25 bp, Homo sapien
tgacagggatgctcgacactggatt

SEQ ID NO: 2718430 - DNA, 25 bp, Homo sapien
tggtgacctgtcctaagagcctttc

SEQ ID NO: 2718431 - DNA, 25 bp, Homo sapien
tagacagccgaagatgtattgagcc

SEQ ID NO: 2718432 - DNA, 25 bp, Homo sapien
gagaagcgtcaaagtcagaaagcca

SEQ ID NO: 2718433 - DNA, 25 bp, Homo sapien
cctgtgtcgatagatatccattcac

SEQ ID NO: 2718434 - DNA, 25 bp, Homo sapien
ctcaagcttccctgtgtcgatagat

SEQ ID NO: 2718435 - DNA, 25 bp, Homo sapien
atgactcagcttcctataccttccg

SEQ ID NO: 2718436 - DNA, 25 bp, Homo sapien
gcttcctataccttccgatacttac

SEQ ID NO: 2718437 - DNA, 25 bp, Homo sapien
gccagacaactaggttggaaatgca

SEQ ID NO: 2718438 - DNA, 25 bp, Homo sapien
tagtccagcctacaaaaaaggtaga

SEQ ID NO: 2718439 - DNA, 25 bp, Homo sapien
tttttccaggaaccataactggagc

SEQ ID NO: 2718440 - DNA, 25 bp, Homo sapien
caagagaggtactagaggccagaca

SEQ ID NO: 2718441 - DNA, 25 bp, Homo sapien
tctccctttctagaaacttggtgcc

SEQ ID NO: 2718442 - DNA, 25 bp, Homo sapien
tcttcataccaagttgttgaatctg

SEQ ID NO: 2718443 - DNA, 25 bp, Homo sapien
tcataccaagttgttgaatctggga

SEQ ID NO: 2718444 - DNA, 25 bp, Homo sapien
gaatctgggatgtcgtaacgtatct

SEQ ID NO: 2718445 - DNA, 25 bp, Homo sapien
ttaaatataaatggactaaattctg

SEQ ID NO: 2718446 - DNA, 25 bp, Homo sapien
tataaatggactaaattctgcaatt

SEQ ID NO: 2718447 - DNA, 25 bp, Homo sapien
taaatataaatggactaaattctgc

SEQ ID NO: 2718448 - DNA, 25 bp, Homo sapien
aatataaatggactaaattctgcaa

SEQ ID NO: 2718449 - DNA, 25 bp, Homo sapien
gatggaggaagatctaccaagcaaa

SEQ ID NO: 2718450 - DNA, 25 bp, Homo sapien
tcacgtgcagagacgcacataggca

SEQ ID NO: 2718451 - DNA, 25 bp, Homo sapien
cgtgcagagacgcacataggcacaa

SEQ ID NO: 2718452 - DNA, 25 bp, Homo sapien
gacgcacataggcacaaaataaaag

SEQ ID NO: 2718453 - DNA, 25 bp, Homo sapien
tataatacattctagacaacttggg

SEQ ID NO: 2718454 - DNA, 25 bp, Homo sapien
catcctggtggaaaaagttacttgt

SEQ ID NO: 2718455 - DNA, 25 bp, Homo sapien
gaatgcaagatagactttcccagag

SEQ ID NO: 2718456 - DNA, 25 bp, Homo sapien
gcccagctggcactagatattctaa

SEQ ID NO: 2718457 - DNA, 25 bp, Homo sapien
tctctgataagtggcaaaatgtacc

SEQ ID NO: 2718458 - DNA, 25 bp, Homo sapien
acactgtacagtgggcctctcctgg

SEQ ID NO: 2718459 - DNA, 25 bp, Homo sapien
taacacgctaatcttcctcacatgg

SEQ ID NO: 2718460 - DNA, 25 bp, Homo sapien
gatgatgtcatctggcacatggaag

SEQ ID NO: 2718461 - DNA, 25 bp, Homo sapien
aagtcagatccacaatattacacca

SEQ ID NO: 2718462 - DNA, 25 bp, Homo sapien
gatctcctgttcttagtgacacatg

SEQ ID NO: 2718463 - DNA, 25 bp, Homo sapien
atctcctgttcttagtgacacatga

SEQ ID NO: 2718464 - DNA, 25 bp, Homo sapien
aatccattctaagtcatccaaggac

SEQ ID NO: 2718465 - DNA, 25 bp, Homo sapien
atccattctaagtcatccaaggaca

SEQ ID NO: 2718466 - DNA, 25 bp, Homo sapien
tccattctaagtcatccaaggacat

SEQ ID NO: 2718467 - DNA, 25 bp, Homo sapien
tcaggtttagttacatcccaaccta

SEQ ID NO: 2718468 - DNA, 25 bp, Homo sapien
ataaatagttacaatgcttcagaga

SEQ ID NO: 2718469 - DNA, 25 bp, Homo sapien
tacatcccaacctaataaatagtta

SEQ ID NO: 2718470 - DNA, 25 bp, Homo sapien
caacctaataaatagttacaatgct

SEQ ID NO: 2718471 - DNA, 25 bp, Homo sapien
tggcctcggttctggaatgtcaagg

SEQ ID NO: 2718472 - DNA, 25 bp, Homo sapien
cttggcctcggttctggaatgtcaa

SEQ ID NO: 2718473 - DNA, 25 bp, Homo sapien
ccggcaatttgaggatgatcttggc

SEQ ID NO: 2718474 - DNA, 25 bp, Homo sapien
gaggatgatcttggcctcggttctg

SEQ ID NO: 2718475 - DNA, 25 bp, Homo sapien
aagggacggttgtctcagccttcac

SEQ ID NO: 2718476 - DNA, 25 bp, Homo sapien
ttcacacaggttccagtataacctt

SEQ ID NO: 2718477 - DNA, 25 bp, Homo sapien
caccacaaaagggacggttgtctca

SEQ ID NO: 2718478 - DNA, 25 bp, Homo sapien
caggttccagtataaccttcttcaa

SEQ ID NO: 2718479 - DNA, 25 bp, Homo sapien
gcaacattgggattaagaaaatccc

SEQ ID NO: 2718480 - DNA, 25 bp, Homo sapien
tcagggcaacattgggattaagaaa

SEQ ID NO: 2718481 - DNA, 25 bp, Homo sapien
gggcaacattgggattaagaaaatc

SEQ ID NO: 2718482 - DNA, 25 bp, Homo sapien
cagggcaacattgggattaagaaaa

SEQ ID NO: 2718483 - DNA, 25 bp, Homo sapien
actgacgatgcccttctatgttcat

SEQ ID NO: 2718484 - DNA, 25 bp, Homo sapien
cctttccctcattaaagtactgacg

SEQ ID NO: 2718485 - DNA, 25 bp, Homo sapien
cattaaagtactgacgatgcccttc

SEQ ID NO: 2718486 - DNA, 25 bp, Homo sapien
aaagtactgacgatgcccttctatg

SEQ ID NO: 2718487 - DNA, 25 bp, Homo sapien
tcaaaaaacctgctattaaaatcat

SEQ ID NO: 2718488 - DNA, 25 bp, Homo sapien
aaaaacctgctattaaaatcatatc

SEQ ID NO: 2718489 - DNA, 25 bp, Homo sapien
aaacctgctattaaaatcatatcca

SEQ ID NO: 2718490 - DNA, 25 bp, Homo sapien
tccatcaaaaaacctgctattaaaa

SEQ ID NO: 2718491 - DNA, 25 bp, Homo sapien
caggctgatgagcaatggagcaatc

SEQ ID NO: 2718492 - DNA, 25 bp, Homo sapien
tgtcgctcaggctgatgagcaatgg

SEQ ID NO: 2718493 - DNA, 25 bp, Homo sapien
taatttacttctaatgacagagttt

SEQ ID NO: 2718494 - DNA, 25 bp, Homo sapien
cagcacccaacctttttacacagta

SEQ ID NO: 2718495 - DNA, 25 bp, Homo sapien
tcctagactggactcatttgcaatg

SEQ ID NO: 2718496 - DNA, 25 bp, Homo sapien
cctagactggactcatttgcaatgt

SEQ ID NO: 2718497 - DNA, 25 bp, Homo sapien
gactggactcatttgcaatgtccat

SEQ ID NO: 2718498 - DNA, 25 bp, Homo sapien
tagactggactcatttgcaatgtcc

SEQ ID NO: 2718499 - DNA, 25 bp, Homo sapien
cacttgttgaggagtaagtcaggaa

SEQ ID NO: 2718500 - DNA, 25 bp, Homo sapien
caaaacactaaatgggatgacacct

SEQ ID NO: 2718501 - DNA, 25 bp, Homo sapien
aatgggatgacaccttccacaacca

SEQ ID NO: 2718502 - DNA, 25 bp, Homo sapien
gctgcaggtccagtaacacttgttg

SEQ ID NO: 2718503 - DNA, 25 bp, Homo sapien
tatatttgtgtcaagatatttttaa

SEQ ID NO: 2718504 - DNA, 25 bp, Homo sapien
ttggcattttctatgtcccataagt

SEQ ID NO: 2718505 - DNA, 25 bp, Homo sapien
tataaacttccctattaaattggca

SEQ ID NO: 2718506 - DNA, 25 bp, Homo sapien
gtcccataagttttgggatgataaa

SEQ ID NO: 2718507 - DNA, 25 bp, Homo sapien
actcacgtgcgtaggtctttaggtc

SEQ ID NO: 2718508 - DNA, 25 bp, Homo sapien
aggatgttatccctttgagactgac

SEQ ID NO: 2718509 - DNA, 25 bp, Homo sapien
cccaagtcttacatgtactcacgtg

SEQ ID NO: 2718510 - DNA, 25 bp, Homo sapien
gagattcatgtctacaccacctgag

SEQ ID NO: 2718511 - DNA, 25 bp, Homo sapien
tgagacaacaggcacccgccaacat

SEQ ID NO: 2718512 - DNA, 25 bp, Homo sapien
gctgagacaacaggcacccgccaac

SEQ ID NO: 2718513 - DNA, 25 bp, Homo sapien
agacaacaggcacccgccaacatgc

SEQ ID NO: 2718514 - DNA, 25 bp, Homo sapien
agctgagacaacaggcacccgccaa

SEQ ID NO: 2718515 - DNA, 25 bp, Homo sapien
tggagtaggaattagcacctggcag

SEQ ID NO: 2718516 - DNA, 25 bp, Homo sapien
aaataagtgagcatggttttgttcc

SEQ ID NO: 2718517 - DNA, 25 bp, Homo sapien
agaatgtaaggttcatgaaagtttt

SEQ ID NO: 2718518 - DNA, 25 bp, Homo sapien
tatcacatcccttcctctggagtag

SEQ ID NO: 2718519 - DNA, 25 bp, Homo sapien
tgtgcctgctggaatccttccatac

SEQ ID NO: 2718520 - DNA, 25 bp, Homo sapien
cctgaatcccctctgcaatggctgt

SEQ ID NO: 2718521 - DNA, 25 bp, Homo sapien
tgcctgctggaatccttccatacat

SEQ ID NO: 2718522 - DNA, 25 bp, Homo sapien
ctgtgcctgctggaatccttccata

SEQ ID NO: 2718523 - DNA, 25 bp, Homo sapien
tccatgcaacaagaggaaacctcaa

SEQ ID NO: 2718524 - DNA, 25 bp, Homo sapien
gtacattctgctggatttgatgctc

SEQ ID NO: 2718525 - DNA, 25 bp, Homo sapien
tggatttgatgctctacctttgaca

SEQ ID NO: 2718526 - DNA, 25 bp, Homo sapien
gacactccctcaagatgccctgtgt

SEQ ID NO: 2718527 - DNA, 25 bp, Homo sapien
gtgtctgccgggctcatactcacaa

SEQ ID NO: 2718528 - DNA, 25 bp, Homo sapien
tctgctctgtagtgctagatgctgg

SEQ ID NO: 2718529 - DNA, 25 bp, Homo sapien
cacatgtgtcaagcacaggccgact

SEQ ID NO: 2718530 - DNA, 25 bp, Homo sapien
cctgcaacagcgctcatggtgtctg

SEQ ID NO: 2718531 - DNA, 25 bp, Homo sapien
gtcagaccgactcacagctactggg

SEQ ID NO: 2718532 - DNA, 25 bp, Homo sapien
tgtcagaccgactcacagctactgg

SEQ ID NO: 2718533 - DNA, 25 bp, Homo sapien
ttgtcagaccgactcacagctactg

SEQ ID NO: 2718534 - DNA, 25 bp, Homo sapien
ctttgtcagaccgactcacagctac

SEQ ID NO: 2718535 - DNA, 25 bp, Homo sapien
ctgaacagcattcccgttctttttc

SEQ ID NO: 2718536 - DNA, 25 bp, Homo sapien
cagcattcccgttctttttctgact

SEQ ID NO: 2718537 - DNA, 25 bp, Homo sapien
gaacagcattcccgttctttttctg

SEQ ID NO: 2718538 - DNA, 25 bp, Homo sapien
aacagcattcccgttctttttctga

SEQ ID NO: 2718539 - DNA, 25 bp, Homo sapien
tgtccgtttcacaaaccggccgatg

SEQ ID NO: 2718540 - DNA, 25 bp, Homo sapien
cgatcccagggcgtgctgagcagct

SEQ ID NO: 2718541 - DNA, 25 bp, Homo sapien
tggccactcggcccgctgagtgtgt

SEQ ID NO: 2718542 - DNA, 25 bp, Homo sapien
ggccgatgaaaaccgcccgcgatcc

SEQ ID NO: 2718543 - DNA, 25 bp, Homo sapien
ccttcactcaacactcccggcagta

SEQ ID NO: 2718544 - DNA, 25 bp, Homo sapien
tggtcccttcactcaacactcccgg

SEQ ID NO: 2718545 - DNA, 25 bp, Homo sapien
tcactcaacactcccggcagtaatg

SEQ ID NO: 2718546 - DNA, 25 bp, Homo sapien
ctggtcccttcactcaacactcccg

SEQ ID NO: 2718547 - DNA, 25 bp, Homo sapien
gtcaccgagatctttgaaccaggcc

SEQ ID NO: 2718548 - DNA, 25 bp, Homo sapien
caggcccaacctacatgatacctgg

SEQ ID NO: 2718549 - DNA, 25 bp, Homo sapien
ccaacctacatgatacctggaccta

SEQ ID NO: 2718550 - DNA, 25 bp, Homo sapien
tgtgaagttgtcaccgagatctttg

SEQ ID NO: 2718551 - DNA, 25 bp, Homo sapien
cagtattaaaatcatgaggagcagg

SEQ ID NO: 2718552 - DNA, 25 bp, Homo sapien
tgctccggtggtgagtgtactgctc

SEQ ID NO: 2718553 - DNA, 25 bp, Homo sapien
taaatccccaccttgtatacctgtg

SEQ ID NO: 2718554 - DNA, 25 bp, Homo sapien
aaatacaggcatcgtttccgccagc

SEQ ID NO: 2718555 - DNA, 25 bp, Homo sapien
atggagggataacatacaggagatt

SEQ ID NO: 2718556 - DNA, 25 bp, Homo sapien
taatgagtcattcaattcatgagca

SEQ ID NO: 2718557 - DNA, 25 bp, Homo sapien
tatgctcatgtaatcggcaaacaga

SEQ ID NO: 2718558 - DNA, 25 bp, Homo sapien
gagattgagtgcttaatttctcagc

SEQ ID NO: 2718559 - DNA, 25 bp, Homo sapien
gagtcttttggaggagcctttagag

SEQ ID NO: 2718560 - DNA, 25 bp, Homo sapien
aattatttgcctaggccaacatcca

SEQ ID NO: 2718561 - DNA, 25 bp, Homo sapien
ttcataggttgttaattctgattac

SEQ ID NO: 2718562 - DNA, 25 bp, Homo sapien
attatttgcctaggccaacatccag

SEQ ID NO: 2718563 - DNA, 25 bp, Homo sapien
taattctgattactatttcttttac

SEQ ID NO: 2718564 - DNA, 25 bp, Homo sapien
ccaagccagtgtgtacttttgcttt

SEQ ID NO: 2718565 - DNA, 25 bp, Homo sapien
gaggagtgactctcattattcttga

SEQ ID NO: 2718566 - DNA, 25 bp, Homo sapien
aatagccagtcctcatttcttatcc

SEQ ID NO: 2718567 - DNA, 25 bp, Homo sapien
tgtcctgtcactaacaatagccagt

SEQ ID NO: 2718568 - DNA, 25 bp, Homo sapien
tcacttggtagtatttttccgtaga

SEQ ID NO: 2718569 - DNA, 25 bp, Homo sapien
gaggaaaaacttatcccagcgcgat

SEQ ID NO: 2718570 - DNA, 25 bp, Homo sapien
tcaagtgctcaggatgatgttcctc

SEQ ID NO: 2718571 - DNA, 25 bp, Homo sapien
cacatttgcaaagttgccttcattt

SEQ ID NO: 2718572 - DNA, 25 bp, Homo sapien
tcctgcctgtagctcctatcatact

SEQ ID NO: 2718573 - DNA, 25 bp, Homo sapien
tccaggggtggcacatttctgacac

SEQ ID NO: 2718574 - DNA, 25 bp, Homo sapien
tctctgatggaacaattccaggggt

SEQ ID NO: 2718575 - DNA, 25 bp, Homo sapien
cacatttctgacactcggtcctttc

SEQ ID NO: 2718576 - DNA, 25 bp, Homo sapien
tgcacatgctgcacgcccgggtaat

SEQ ID NO: 2718577 - DNA, 25 bp, Homo sapien
gggactaacatgcacatgctgcacg

SEQ ID NO: 2718578 - DNA, 25 bp, Homo sapien
tctaagcatcaaactttccatgttg

SEQ ID NO: 2718579 - DNA, 25 bp, Homo sapien
cacacccggccaatacctctatttc

SEQ ID NO: 2718580 - DNA, 25 bp, Homo sapien
gcggcatcgcaagggactattagca

SEQ ID NO: 2718581 - DNA, 25 bp, Homo sapien
tacgaacgtggccatagggaaacta

SEQ ID NO: 2718582 - DNA, 25 bp, Homo sapien
tcattaagatatatggcggcatcgc

SEQ ID NO: 2718583 - DNA, 25 bp, Homo sapien
gagtgctccgaagctctaaagagtg

SEQ ID NO: 2718584 - DNA, 25 bp, Homo sapien
gattgggcacatctgatagtcgttt

SEQ ID NO: 2718585 - DNA, 25 bp, Homo sapien
tcaggcccttgcaaatgaaataaca

SEQ ID NO: 2718586 - DNA, 25 bp, Homo sapien
tggtcgttgaatgactctgccttct

SEQ ID NO: 2718587 - DNA, 25 bp, Homo sapien
cactagatatgccaaagattgccat

SEQ ID NO: 2718588 - DNA, 25 bp, Homo sapien
ttgaatacacagacgggaaacccac

SEQ ID NO: 2718589 - DNA, 25 bp, Homo sapien
taagacgacgactatgacatcacca

SEQ ID NO: 2718590 - DNA, 25 bp, Homo sapien
tgtatcagcctgtggcccgttagga

SEQ ID NO: 2718591 - DNA, 25 bp, Homo sapien
tctccctgggtaagtcagcgagtga

SEQ ID NO: 2718592 - DNA, 25 bp, Homo sapien
gcagcaaagtgggtactggaatctg

SEQ ID NO: 2718593 - DNA, 25 bp, Homo sapien
gtgggtactggaatctgagtcacct

SEQ ID NO: 2718594 - DNA, 25 bp, Homo sapien
gaatagccagttaaatctcagaagc

SEQ ID NO: 2718595 - DNA, 25 bp, Homo sapien
taaatctcagaagcagatggatgct

SEQ ID NO: 2718596 - DNA, 25 bp, Homo sapien
cccaaaacaccgatatagtattttg

SEQ ID NO: 2718597 - DNA, 25 bp, Homo sapien
catcatcatcccaaaacaccgatat

SEQ ID NO: 2718598 - DNA, 25 bp, Homo sapien
caaaacaccgatatagtattttgca

SEQ ID NO: 2718599 - DNA, 25 bp, Homo sapien
tcatcccaaaacaccgatatagtat

SEQ ID NO: 2718600 - DNA, 25 bp, Homo sapien
tctgcatttcaagtgtagctccctt

SEQ ID NO: 2718601 - DNA, 25 bp, Homo sapien
tcgaggatcttgtggcatagccatt

SEQ ID NO: 2718602 - DNA, 25 bp, Homo sapien
tccttctgcatttcaagtgtagctc

SEQ ID NO: 2718603 - DNA, 25 bp, Homo sapien
gatatcgaggatcttgtggcatagc

SEQ ID NO: 2718604 - DNA, 25 bp, Homo sapien
gaatcctgtctagatctgtttaaca

SEQ ID NO: 2718605 - DNA, 25 bp, Homo sapien
taaaacgccgtgaaattccctgcag

SEQ ID NO: 2718606 - DNA, 25 bp, Homo sapien
cctgcagacctttaacgacctgtgt

SEQ ID NO: 2718607 - DNA, 25 bp, Homo sapien
gacctgtgttatcccatccttagaa

SEQ ID NO: 2718608 - DNA, 25 bp, Homo sapien
ctgatcgcagatgcttgttcatggt

SEQ ID NO: 2718609 - DNA, 25 bp, Homo sapien
aacctgctcaatcgtatagaactga

SEQ ID NO: 2718610 - DNA, 25 bp, Homo sapien
tgcttgttcatggtaaaacctgctc

SEQ ID NO: 2718611 - DNA, 25 bp, Homo sapien
ggtaaaacctgctcaatcgtataga

SEQ ID NO: 2718612 - DNA, 25 bp, Homo sapien
gaaggacccatagtctgaactgtca

SEQ ID NO: 2718613 - DNA, 25 bp, Homo sapien
cctgagtcactgtctacagttgtcc

SEQ ID NO: 2718614 - DNA, 25 bp, Homo sapien
tgcctggtctgtgggtcccgctgat

SEQ ID NO: 2718615 - DNA, 25 bp, Homo sapien
tgacattcggactgtgacacccagg

SEQ ID NO: 2718616 - DNA, 25 bp, Homo sapien
ggtcccgctgattcctgagtcactg

SEQ ID NO: 2718617 - DNA, 25 bp, Homo sapien
cctccagggatcatgtaggtggcca

SEQ ID NO: 2718618 - DNA, 25 bp, Homo sapien
ttttcctgccagtgtcccgaggagg

SEQ ID NO: 2718619 - DNA, 25 bp, Homo sapien
aatggctgtagcactccagcctcgc

SEQ ID NO: 2718620 - DNA, 25 bp, Homo sapien
gaggcagaacatttggacctccagg

SEQ ID NO: 2718621 - DNA, 25 bp, Homo sapien
gggcagtagacaaaagatctgtgcc

SEQ ID NO: 2718622 - DNA, 25 bp, Homo sapien
tctgtgcctcccgtgaattctagag

SEQ ID NO: 2718623 - DNA, 25 bp, Homo sapien
tgtgcctcccgtgaattctagagac

SEQ ID NO: 2718624 - DNA, 25 bp, Homo sapien
aagatctgtgcctcccgtgaattct

SEQ ID NO: 2718625 - DNA, 25 bp, Homo sapien
agaggttgtaagaattcagagtctc

SEQ ID NO: 2718626 - DNA, 25 bp, Homo sapien
gtgatcctcaggtttcccattccat

SEQ ID NO: 2718627 - DNA, 25 bp, Homo sapien
tagctttagacctttttctgtgatc

SEQ ID NO: 2718628 - DNA, 25 bp, Homo sapien
ggactggatttctttggcgtagaga

SEQ ID NO: 2718629 - DNA, 25 bp, Homo sapien
ccagaacgggcccatagaaatctgg

SEQ ID NO: 2718630 - DNA, 25 bp, Homo sapien
cgaaccaccagaacgggcccataga

SEQ ID NO: 2718631 - DNA, 25 bp, Homo sapien
aagctctacccgaaccaccagaacg

SEQ ID NO: 2718632 - DNA, 25 bp, Homo sapien
agctctacccgaaccaccagaacgg

SEQ ID NO: 2718633 - DNA, 25 bp, Homo sapien
gaaagccaagaaggatttatcacta

SEQ ID NO: 2718634 - DNA, 25 bp, Homo sapien
ctctgagaaagccaagaaggattta

SEQ ID NO: 2718635 - DNA, 25 bp, Homo sapien
ctgagaaagccaagaaggatttatc

SEQ ID NO: 2718636 - DNA, 25 bp, Homo sapien
gagaaagccaagaaggatttatcac

SEQ ID NO: 2718637 - DNA, 25 bp, Homo sapien
gtctgcagtgagaatgggtaagcag

SEQ ID NO: 2718638 - DNA, 25 bp, Homo sapien
agtgagaatgggtaagcaggggcac

SEQ ID NO: 2718639 - DNA, 25 bp, Homo sapien
cacaggcagcaatgtctgcagtgag

SEQ ID NO: 2718640 - DNA, 25 bp, Homo sapien
acaggcagcaatgtctgcagtgaga

SEQ ID NO: 2718641 - DNA, 25 bp, Homo sapien
ctgcagatggaaaattcacagccat

SEQ ID NO: 2718642 - DNA, 25 bp, Homo sapien
gatagaaatattctgcagatggaaa

SEQ ID NO: 2718643 - DNA, 25 bp, Homo sapien
tattctgcagatggaaaattcacag

SEQ ID NO: 2718644 - DNA, 25 bp, Homo sapien
atttgaaagatagaaatattctgca

SEQ ID NO: 2718645 - DNA, 25 bp, Homo sapien
agctgcagatgtaactatgccggtt

SEQ ID NO: 2718646 - DNA, 25 bp, Homo sapien
ccggttgcaggctgaaaatgatcaa

SEQ ID NO: 2718647 - DNA, 25 bp, Homo sapien
ttgctatggagtcttcaacatcttc

SEQ ID NO: 2718648 - DNA, 25 bp, Homo sapien
aaatgatcaactgactggtggcttc

SEQ ID NO: 2718649 - DNA, 25 bp, Homo sapien
tgtcaacacttagccgaatttctgg

SEQ ID NO: 2718650 - DNA, 25 bp, Homo sapien
ttcttgagcctccttcattgccaca

SEQ ID NO: 2718651 - DNA, 25 bp, Homo sapien
catcatatggaaacctcatgtcaac

SEQ ID NO: 2718652 - DNA, 25 bp, Homo sapien
tagcctacaggtgcattaatgccat

SEQ ID NO: 2718653 - DNA, 25 bp, Homo sapien
atttcaccagctgccatagagaact

SEQ ID NO: 2718654 - DNA, 25 bp, Homo sapien
ccttccagtctgagaggagggatga

SEQ ID NO: 2718655 - DNA, 25 bp, Homo sapien
tcaccagctgccatagagaactagg

SEQ ID NO: 2718656 - DNA, 25 bp, Homo sapien
agaggagggatgaatttcaccagct

SEQ ID NO: 2718657 - DNA, 25 bp, Homo sapien
gaggccctgttgctttggattttga

SEQ ID NO: 2718658 - DNA, 25 bp, Homo sapien
tcccgcagatctgagagcacaagtc

SEQ ID NO: 2718659 - DNA, 25 bp, Homo sapien
cagggctcttccatgcaaggtgttc

SEQ ID NO: 2718660 - DNA, 25 bp, Homo sapien
ctttcacagaatggtgcatggcatt

SEQ ID NO: 2718661 - DNA, 25 bp, Homo sapien
ctttgaatatcacctggaaaaaact

SEQ ID NO: 2718662 - DNA, 25 bp, Homo sapien
taacactaactttgaatatcacctg

SEQ ID NO: 2718663 - DNA, 25 bp, Homo sapien
cagtgctctatgtttactaaaataa

SEQ ID NO: 2718664 - DNA, 25 bp, Homo sapien
cacaatgcattggtcgcagtgctct

SEQ ID NO: 2718665 - DNA, 25 bp, Homo sapien
tgggtagtcagaacatagtgacttc

SEQ ID NO: 2718666 - DNA, 25 bp, Homo sapien
gaacatagtgacttctccacagtca

SEQ ID NO: 2718667 - DNA, 25 bp, Homo sapien
ggctctcaacactgggtagtcagaa

SEQ ID NO: 2718668 - DNA, 25 bp, Homo sapien
tctggaaggctctcaacactgggta

SEQ ID NO: 2718669 - DNA, 25 bp, Homo sapien
tagtctggtcattgagaatgttcac

SEQ ID NO: 2718670 - DNA, 25 bp, Homo sapien
ttctggcagacttgaagtacagggc

SEQ ID NO: 2718671 - DNA, 25 bp, Homo sapien
cagacttgaagtacagggcattacc

SEQ ID NO: 2718672 - DNA, 25 bp, Homo sapien
ctgttataagctgagttagcacttt

SEQ ID NO: 2718673 - DNA, 25 bp, Homo sapien
agtgggtgctttccacagccgttag

SEQ ID NO: 2718674 - DNA, 25 bp, Homo sapien
cacgaggtccatgtttatcattata

SEQ ID NO: 2718675 - DNA, 25 bp, Homo sapien
cacgttaccaaatcacgaggtccat

SEQ ID NO: 2718676 - DNA, 25 bp, Homo sapien
tattgtgaataaccagtccttgttt

SEQ ID NO: 2718677 - DNA, 25 bp, Homo sapien
aaagcagttgtataacttggggaca

SEQ ID NO: 2718678 - DNA, 25 bp, Homo sapien
cttggggacacacatgcttggactt

SEQ ID NO: 2718679 - DNA, 25 bp, Homo sapien
ctctgtggacctgggcaatatcatc

SEQ ID NO: 2718680 - DNA, 25 bp, Homo sapien
gacctgggcaatatcatcatcctgg

SEQ ID NO: 2718681 - DNA, 25 bp, Homo sapien
accataagcttctacggcttttgga

SEQ ID NO: 2718682 - DNA, 25 bp, Homo sapien
ttaccataagcttctacggcttttg

SEQ ID NO: 2718683 - DNA, 25 bp, Homo sapien
ccataagcttctacggcttttggac

SEQ ID NO: 2718684 - DNA, 25 bp, Homo sapien
taccataagcttctacggcttttgg

SEQ ID NO: 2718685 - DNA, 25 bp, Homo sapien
ctaaaactcgtaatctttcagctcc

SEQ ID NO: 2718686 - DNA, 25 bp, Homo sapien
ctgcacatgtccagtccaacagtca

SEQ ID NO: 2718687 - DNA, 25 bp, Homo sapien
tgtccagtccaacagtcagcctgct

SEQ ID NO: 2718688 - DNA, 25 bp, Homo sapien
catgtccagtccaacagtcagcctg

SEQ ID NO: 2718689 - DNA, 25 bp, Homo sapien
gtccaacagtcagcctgctggtgaa

SEQ ID NO: 2718690 - DNA, 25 bp, Homo sapien
cttcttgctgctttttaaaggccat

SEQ ID NO: 2718691 - DNA, 25 bp, Homo sapien
cattaattgctcacttgctgtgtgc

SEQ ID NO: 2718692 - DNA, 25 bp, Homo sapien
ggttaacattaattgctcacttgct

SEQ ID NO: 2718693 - DNA, 25 bp, Homo sapien
tcacttgctgtgtgcatggcctgac

SEQ ID NO: 2718694 - DNA, 25 bp, Homo sapien
tgtgtgcatggcctgacaccgggca

SEQ ID NO: 2718695 - DNA, 25 bp, Homo sapien
gctaaaaggtgttcttctaacgtga

SEQ ID NO: 2718696 - DNA, 25 bp, Homo sapien
tctaacgtgaattggtataagacac

SEQ ID NO: 2718697 - DNA, 25 bp, Homo sapien
cattttgtgagcctttaatagtttt

SEQ ID NO: 2718698 - DNA, 25 bp, Homo sapien
tttaagggcatctagtatctcccaa

SEQ ID NO: 2718699 - DNA, 25 bp, Homo sapien
ctctgaaacctggtagagactttgc

SEQ ID NO: 2718700 - DNA, 25 bp, Homo sapien
ttctctccaatgcttcataacaggc

SEQ ID NO: 2718701 - DNA, 25 bp, Homo sapien
taacaggcatcaaactctagcttgg

SEQ ID NO: 2718702 - DNA, 25 bp, Homo sapien
aagggaaaatgccactcagaaggca

SEQ ID NO: 2718703 - DNA, 25 bp, Homo sapien
accttagtggagagtaggctcgttg

SEQ ID NO: 2718704 - DNA, 25 bp, Homo sapien
ctaaccttagtggagagtaggctcg

SEQ ID NO: 2718705 - DNA, 25 bp, Homo sapien
cttagtggagagtaggctcgttgtc

SEQ ID NO: 2718706 - DNA, 25 bp, Homo sapien
taaccttagtggagagtaggctcgt

SEQ ID NO: 2718707 - DNA, 25 bp, Homo sapien
ttggagctaaatgcagcgaatccat

SEQ ID NO: 2718708 - DNA, 25 bp, Homo sapien
cactgattggagctaaatgcagcga

SEQ ID NO: 2718709 - DNA, 25 bp, Homo sapien
aatcagcacactgattggagctaaa

SEQ ID NO: 2718710 - DNA, 25 bp, Homo sapien
cacactgattggagctaaatgcagc

SEQ ID NO: 2718711 - DNA, 25 bp, Homo sapien
tgccctgacattaggtgtttctata

SEQ ID NO: 2718712 - DNA, 25 bp, Homo sapien
tatagatttagggaacactgtgccc

SEQ ID NO: 2718713 - DNA, 25 bp, Homo sapien
aggggtctgccctgacattaggtgt

SEQ ID NO: 2718714 - DNA, 25 bp, Homo sapien
gggtctgccctgacattaggtgttt

SEQ ID NO: 2718715 - DNA, 25 bp, Homo sapien
aggaccccatgtgggccatttgaca

SEQ ID NO: 2718716 - DNA, 25 bp, Homo sapien
caggatgtctctctagaggccttca

SEQ ID NO: 2718717 - DNA, 25 bp, Homo sapien
ctttcggccgtattgcaggatgtct

SEQ ID NO: 2718718 - DNA, 25 bp, Homo sapien
tgtccattagcattccttgacagga

SEQ ID NO: 2718719 - DNA, 25 bp, Homo sapien
gactccactctaccacccatttcct

SEQ ID NO: 2718720 - DNA, 25 bp, Homo sapien
tccactctaccacccatttcctttc

SEQ ID NO: 2718721 - DNA, 25 bp, Homo sapien
tgactccactctaccacccatttcc

SEQ ID NO: 2718722 - DNA, 25 bp, Homo sapien
ctccactctaccacccatttccttt

SEQ ID NO: 2718723 - DNA, 25 bp, Homo sapien
tcttcgggaattccatgtgccttgc

SEQ ID NO: 2718724 - DNA, 25 bp, Homo sapien
tggtatggtactgccctttctagac

SEQ ID NO: 2718725 - DNA, 25 bp, Homo sapien
ccaagatttcgggatatgatgccta

SEQ ID NO: 2718726 - DNA, 25 bp, Homo sapien
gggtctttcatgtgcctacaccact

SEQ ID NO: 2718727 - DNA, 25 bp, Homo sapien
tgttttggtgtagcaccagcatgaa

SEQ ID NO: 2718728 - DNA, 25 bp, Homo sapien
gctggcataaagatgacacattcct

SEQ ID NO: 2718729 - DNA, 25 bp, Homo sapien
tttaagtcagctggcataaagatga

SEQ ID NO: 2718730 - DNA, 25 bp, Homo sapien
tgaaaaggctaaatccaagtggatt

SEQ ID NO: 2718731 - DNA, 25 bp, Homo sapien
tctggttagaagttgcatgtgccac

SEQ ID NO: 2718732 - DNA, 25 bp, Homo sapien
ttaatctaggcaagctaccaccagg

SEQ ID NO: 2718733 - DNA, 25 bp, Homo sapien
taccaccaggtgaatggcagtattt

SEQ ID NO: 2718734 - DNA, 25 bp, Homo sapien
acaaggacccagtatttcaatgaca

SEQ ID NO: 2718735 - DNA, 25 bp, Homo sapien
gacagcacttcaggactatagttgg

SEQ ID NO: 2718736 - DNA, 25 bp, Homo sapien
caaagtggcagaacatcacctggtt

SEQ ID NO: 2718737 - DNA, 25 bp, Homo sapien
ttttctctataaggcacatgtcagc

SEQ ID NO: 2718738 - DNA, 25 bp, Homo sapien
tgatctcatagccaacaggactgta

SEQ ID NO: 2718739 - DNA, 25 bp, Homo sapien
aaagaccatttgcaagccctaattg

SEQ ID NO: 2718740 - DNA, 25 bp, Homo sapien
caagccctaattgtgcaagtgtaac

SEQ ID NO: 2718741 - DNA, 25 bp, Homo sapien
tgtgcaagtgtaacaagtccacctt

SEQ ID NO: 2718742 - DNA, 25 bp, Homo sapien
ctttcttttcagttgtgccctgcat

SEQ ID NO: 2718743 - DNA, 25 bp, Homo sapien
gacatatggctgtaatctattccag

SEQ ID NO: 2718744 - DNA, 25 bp, Homo sapien
ccagtaaggatagaccttgtttaca

SEQ ID NO: 2718745 - DNA, 25 bp, Homo sapien
cttttgaacggtgacatatggctgt

SEQ ID NO: 2718746 - DNA, 25 bp, Homo sapien
ctattccagtaaggatagaccttgt

SEQ ID NO: 2718747 - DNA, 25 bp, Homo sapien
tcatattgtgtttccatccttagag

SEQ ID NO: 2718748 - DNA, 25 bp, Homo sapien
tttggggagcgaccttcagaacatc

SEQ ID NO: 2718749 - DNA, 25 bp, Homo sapien
caaacctagacaagcttttagatca

SEQ ID NO: 2718750 - DNA, 25 bp, Homo sapien
cataagaatctacattaatcacttc

SEQ ID NO: 2718751 - DNA, 25 bp, Homo sapien
cactaacaaggtgatcgagcaggtg

SEQ ID NO: 2718752 - DNA, 25 bp, Homo sapien
gaaactcagcatgtacctagcccag

SEQ ID NO: 2718753 - DNA, 25 bp, Homo sapien
tgggagccaaaagactaaagtctcg

SEQ ID NO: 2718754 - DNA, 25 bp, Homo sapien
ccttacacatttgggagacctggtt

SEQ ID NO: 2718755 - DNA, 25 bp, Homo sapien
aattctcataactgaagcctctgtg

SEQ ID NO: 2718756 - DNA, 25 bp, Homo sapien
agatgttcttactctagcattccta

SEQ ID NO: 2718757 - DNA, 25 bp, Homo sapien
gaaaactgttcttgccctagtctct

SEQ ID NO: 2718758 - DNA, 25 bp, Homo sapien
aatactcacctgatatgtctttgaa

SEQ ID NO: 2718759 - DNA, 25 bp, Homo sapien
cctatgaggtttatagaagggcgtt

SEQ ID NO: 2718760 - DNA, 25 bp, Homo sapien
gagaacattttctgtataacatcag

SEQ ID NO: 2718761 - DNA, 25 bp, Homo sapien
gaatttttctttgacggcatcccaa

SEQ ID NO: 2718762 - DNA, 25 bp, Homo sapien
cttaaaaattgagcccgggctcaat

SEQ ID NO: 2718763 - DNA, 25 bp, Homo sapien
attctactgtcgaacactgggttgg

SEQ ID NO: 2718764 - DNA, 25 bp, Homo sapien
gcatccttaaacaatacactactat

SEQ ID NO: 2718765 - DNA, 25 bp, Homo sapien
tccctagtgttaccatataccatga

SEQ ID NO: 2718766 - DNA, 25 bp, Homo sapien
tacttcacacgcagaataattccac

SEQ ID NO: 2718767 - DNA, 25 bp, Homo sapien
tgcagtacggcctggtctagaacct

SEQ ID NO: 2718768 - DNA, 25 bp, Homo sapien
tgtaacccggactattgtaactgtg

SEQ ID NO: 2718769 - DNA, 25 bp, Homo sapien
gataatgtcagtgcaacagggagag

SEQ ID NO: 2718770 - DNA, 25 bp, Homo sapien
gggactcagtagcaggacaacagaa

SEQ ID NO: 2718771 - DNA, 25 bp, Homo sapien
tgcattgatttccactccttttggg

SEQ ID NO: 2718772 - DNA, 25 bp, Homo sapien
ctgcattgatttccactccttttgg

SEQ ID NO: 2718773 - DNA, 25 bp, Homo sapien
gcattgatttccactccttttgggg

SEQ ID NO: 2718774 - DNA, 25 bp, Homo sapien
cattgatttccactccttttggggc

SEQ ID NO: 2718775 - DNA, 25 bp, Homo sapien
ccagttatgggaagggttggcctgt

SEQ ID NO: 2718776 - DNA, 25 bp, Homo sapien
tcaaccagttatgggaagggttggc

SEQ ID NO: 2718777 - DNA, 25 bp, Homo sapien
ttatgggaagggttggcctgttgaa

SEQ ID NO: 2718778 - DNA, 25 bp, Homo sapien
atgggaagggttggcctgttgaagc

SEQ ID NO: 2718779 - DNA, 25 bp, Homo sapien
tacagcttaattatgttggctaaca

SEQ ID NO: 2718780 - DNA, 25 bp, Homo sapien
ggctccttttgttgatacactgtag

SEQ ID NO: 2718781 - DNA, 25 bp, Homo sapien
tgggtttggcttataatcatgctgc

SEQ ID NO: 2718782 - DNA, 25 bp, Homo sapien
tacactgtaggatccaactccgagg

SEQ ID NO: 2718783 - DNA, 25 bp, Homo sapien
taggtagcctgattttcgcagcatc

SEQ ID NO: 2718784 - DNA, 25 bp, Homo sapien
tgtttatctgacaagtggacccagc

SEQ ID NO: 2718785 - DNA, 25 bp, Homo sapien
cctgtaggcgtgtaggatccatgag

SEQ ID NO: 2718786 - DNA, 25 bp, Homo sapien
gaataatctcccattggcgcagacg

SEQ ID NO: 2718787 - DNA, 25 bp, Homo sapien
atatttatatccacccacacacgcg

SEQ ID NO: 2718788 - DNA, 25 bp, Homo sapien
tgccaacaatgtccactatggatag

SEQ ID NO: 2718789 - DNA, 25 bp, Homo sapien
catacacacaaggtctttgataggc

SEQ ID NO: 2718790 - DNA, 25 bp, Homo sapien
tagctggcagccagtgtctaaagcc

SEQ ID NO: 2718791 - DNA, 25 bp, Homo sapien
gacagtggatatcgcagggtcaccc

SEQ ID NO: 2718792 - DNA, 25 bp, Homo sapien
aatatgtctggtagccaaggtaggc

SEQ ID NO: 2718793 - DNA, 25 bp, Homo sapien
gagcttgagtgcgactgagattccc

SEQ ID NO: 2718794 - DNA, 25 bp, Homo sapien
gaggtgctgcttccacatacaggga

SEQ ID NO: 2718795 - DNA, 25 bp, Homo sapien
tttgaacagagatggtgtaatcccc

SEQ ID NO: 2718796 - DNA, 25 bp, Homo sapien
taaattttgcatgtgggatcacacc

SEQ ID NO: 2718797 - DNA, 25 bp, Homo sapien
gacttaaggcataggcacatttccc

SEQ ID NO: 2718798 - DNA, 25 bp, Homo sapien
catcccatgtgtgcaaatctcagcc

SEQ ID NO: 2718799 - DNA, 25 bp, Homo sapien
taactgacgtgatgtgggctaaaca

SEQ ID NO: 2718800 - DNA, 25 bp, Homo sapien
aatgggcatccctctagactatggg

SEQ ID NO: 2718801 - DNA, 25 bp, Homo sapien
gaaggcaggctttccacatgtaaca

SEQ ID NO: 2718802 - DNA, 25 bp, Homo sapien
tgagcatgagttgccccaaaaaggt

SEQ ID NO: 2718803 - DNA, 25 bp, Homo sapien
tgaggcatttggaaccccactctgg

SEQ ID NO: 2718804 - DNA, 25 bp, Homo sapien
ttctcgcaaagaagtcggcctcata

SEQ ID NO: 2718805 - DNA, 25 bp, Homo sapien
gccaaagacattacaggaccagagt

SEQ ID NO: 2718806 - DNA, 25 bp, Homo sapien
taaatgtgaggctaacaacccaggt

SEQ ID NO: 2718807 - DNA, 25 bp, Homo sapien
tctggctctggtaaggttagtccta

SEQ ID NO: 2718808 - DNA, 25 bp, Homo sapien
gcataatgatggatagcctctgcct

SEQ ID NO: 2718809 - DNA, 25 bp, Homo sapien
tcagaagcgcatctagccagcataa

SEQ ID NO: 2718810 - DNA, 25 bp, Homo sapien
taaatttagatgtgccgacacttcc

SEQ ID NO: 2718811 - DNA, 25 bp, Homo sapien
ttctctcatcgattgtctcacccat

SEQ ID NO: 2718812 - DNA, 25 bp, Homo sapien
tgaagaattaattgtggtgagtgga

SEQ ID NO: 2718813 - DNA, 25 bp, Homo sapien
tgccacaatgccttctctcatcgat

SEQ ID NO: 2718814 - DNA, 25 bp, Homo sapien
taattgtggtgagtggatccaagtg

SEQ ID NO: 2718815 - DNA, 25 bp, Homo sapien
cagtttccctagcagtcttgattca

SEQ ID NO: 2718816 - DNA, 25 bp, Homo sapien
tatttaaatattgttgcccggatga

SEQ ID NO: 2718817 - DNA, 25 bp, Homo sapien
taaaggcagcgtgatattccataaa

SEQ ID NO: 2718818 - DNA, 25 bp, Homo sapien
taaaataaccataatctagttggcc

SEQ ID NO: 2718819 - DNA, 25 bp, Homo sapien
tctgtagtagagctttgtagccatc

SEQ ID NO: 2718820 - DNA, 25 bp, Homo sapien
aaatctgtagtagagctttgtagcc

SEQ ID NO: 2718821 - DNA, 25 bp, Homo sapien
ttagtttagatgtgtggcttgtcct

SEQ ID NO: 2718822 - DNA, 25 bp, Homo sapien
gtcctttgatgtcaaatctgtagta

SEQ ID NO: 2718823 - DNA, 25 bp, Homo sapien
tagcctggtgagagactttataatg

SEQ ID NO: 2718824 - DNA, 25 bp, Homo sapien
ggtagcctggtgagagactttataa

SEQ ID NO: 2718825 - DNA, 25 bp, Homo sapien
cctggtgagagactttataatgatc

SEQ ID NO: 2718826 - DNA, 25 bp, Homo sapien
gggtagcctggtgagagactttata

SEQ ID NO: 2718827 - DNA, 25 bp, Homo sapien
tttctcttgttcctctccaacattc

SEQ ID NO: 2718828 - DNA, 25 bp, Homo sapien
caacattccagaaccttggggacat

SEQ ID NO: 2718829 - DNA, 25 bp, Homo sapien
ccaacattccagaaccttggggaca

SEQ ID NO: 2718830 - DNA, 25 bp, Homo sapien
tcttgttcctctccaacattccaga

SEQ ID NO: 2718831 - DNA, 25 bp, Homo sapien
gattgctcctcaaccagagatgtca

SEQ ID NO: 2718832 - DNA, 25 bp, Homo sapien
gaatcctgttatcagtgcctgcaca

SEQ ID NO: 2718833 - DNA, 25 bp, Homo sapien
tacactcgtttctgacccttctgaa

SEQ ID NO: 2718834 - DNA, 25 bp, Homo sapien
ttgtaaggatgctgcccggatgatt

SEQ ID NO: 2718835 - DNA, 25 bp, Homo sapien
gaaaggcttcatgagtttgtgtcat

SEQ ID NO: 2718836 - DNA, 25 bp, Homo sapien
ggtaatcttctgtgtcttgttcaaa

SEQ ID NO: 2718837 - DNA, 25 bp, Homo sapien
ccatggtaatcttctgtgtcttgtt

SEQ ID NO: 2718838 - DNA, 25 bp, Homo sapien
aatatgaaaggcttcatgagtttgt

SEQ ID NO: 2718839 - DNA, 25 bp, Homo sapien
ggctactggagcggttgtcacaacg

SEQ ID NO: 2718840 - DNA, 25 bp, Homo sapien
ctactggagcggttgtcacaacgac

SEQ ID NO: 2718841 - DNA, 25 bp, Homo sapien
cggctactggagcggttgtcacaac

SEQ ID NO: 2718842 - DNA, 25 bp, Homo sapien
gctactggagcggttgtcacaacga

SEQ ID NO: 2718843 - DNA, 25 bp, Homo sapien
tccggctgtcgcctcagggtcgctg

SEQ ID NO: 2718844 - DNA, 25 bp, Homo sapien
gggcgctccggctgtcgcctcaggg

SEQ ID NO: 2718845 - DNA, 25 bp, Homo sapien
cgctccggctgtcgcctcagggtcg

SEQ ID NO: 2718846 - DNA, 25 bp, Homo sapien
tgccgggcgctccggctgtcgcctc

SEQ ID NO: 2718847 - DNA, 25 bp, Homo sapien
ctaatttcttggctaggatgtctgg

SEQ ID NO: 2718848 - DNA, 25 bp, Homo sapien
tcagtggtctcggtgtccctacacg

SEQ ID NO: 2718849 - DNA, 25 bp, Homo sapien
atttcttggctaggatgtctggcgc

SEQ ID NO: 2718850 - DNA, 25 bp, Homo sapien
gtctcggtgtccctacacgcatctt

SEQ ID NO: 2718851 - DNA, 25 bp, Homo sapien
attaaccagtgttcttatgaaagta

SEQ ID NO: 2718852 - DNA, 25 bp, Homo sapien
aaattaaccagtgttcttatgaaag

SEQ ID NO: 2718853 - DNA, 25 bp, Homo sapien
ttaaccagtgttcttatgaaagtaa

SEQ ID NO: 2718854 - DNA, 25 bp, Homo sapien
aattaaccagtgttcttatgaaagt

SEQ ID NO: 2718855 - DNA, 25 bp, Homo sapien
tcgagaggcatagaaattcagcagt

SEQ ID NO: 2718856 - DNA, 25 bp, Homo sapien
gtgacagaaagagttcctaatgtcg

SEQ ID NO: 2718857 - DNA, 25 bp, Homo sapien
agtacatttgtcatagtatacatta

SEQ ID NO: 2718858 - DNA, 25 bp, Homo sapien
gagttcctaatgtcgtgacaatctt

SEQ ID NO: 2718859 - DNA, 25 bp, Homo sapien
ctgaaagttacccttaataatccat

SEQ ID NO: 2718860 - DNA, 25 bp, Homo sapien
gctgggtcgttatcattactggttt

SEQ ID NO: 2718861 - DNA, 25 bp, Homo sapien
cttgagggctgggtcgttatcatta

SEQ ID NO: 2718862 - DNA, 25 bp, Homo sapien
gggctgggtcgttatcattactggt

SEQ ID NO: 2718863 - DNA, 25 bp, Homo sapien
gagggctgggtcgttatcattactg

SEQ ID NO: 2718864 - DNA, 25 bp, Homo sapien
tgtccatcatgaccacaccactggc

SEQ ID NO: 2718865 - DNA, 25 bp, Homo sapien
ctgtccatcatgaccacaccactgg

SEQ ID NO: 2718866 - DNA, 25 bp, Homo sapien
gtccatcatgaccacaccactggcc

SEQ ID NO: 2718867 - DNA, 25 bp, Homo sapien
tcttcatgcaagtccgatacccttt

SEQ ID NO: 2718868 - DNA, 25 bp, Homo sapien
gcaagtccgataccctttgctgcat

SEQ ID NO: 2718869 - DNA, 25 bp, Homo sapien
caatcgggcttcaatcacaggtggc

SEQ ID NO: 2718870 - DNA, 25 bp, Homo sapien
tatcctgtggcaagttgacagcacc

SEQ ID NO: 2718871 - DNA, 25 bp, Homo sapien
gttcactagaggtggggacccacag

SEQ ID NO: 2718872 - DNA, 25 bp, Homo sapien
aacttcacatcccggaagacaatga

SEQ ID NO: 2718873 - DNA, 25 bp, Homo sapien
cttcacatcccggaagacaatgaga

SEQ ID NO: 2718874 - DNA, 25 bp, Homo sapien
tctcttgaggttcactagaggtggg

SEQ ID NO: 2718875 - DNA, 25 bp, Homo sapien
tggtgtgtgtctggataaagcactc

SEQ ID NO: 2718876 - DNA, 25 bp, Homo sapien
ccatgggatttatatcttttacggt

SEQ ID NO: 2718877 - DNA, 25 bp, Homo sapien
gataaagcactcacattggcacctg

SEQ ID NO: 2718878 - DNA, 25 bp, Homo sapien
tctggataaagcactcacattggca

SEQ ID NO: 2718879 - DNA, 25 bp, Homo sapien
tgttggtccccatgagcacatttgg

SEQ ID NO: 2718880 - DNA, 25 bp, Homo sapien
tgagcacatttggtggagtcattgg

SEQ ID NO: 2718881 - DNA, 25 bp, Homo sapien
gagtcattggccaccccaaactcat

SEQ ID NO: 2718882 - DNA, 25 bp, Homo sapien
gactctgttggtccccatgagcaca

SEQ ID NO: 2718883 - DNA, 25 bp, Homo sapien
ctgctggccaggcactgttgctgag

SEQ ID NO: 2718884 - DNA, 25 bp, Homo sapien
gctggccaggcactgttgctgagga

SEQ ID NO: 2718885 - DNA, 25 bp, Homo sapien
ctagctgctggccaggcactgttgc

SEQ ID NO: 2718886 - DNA, 25 bp, Homo sapien
tggccaggcactgttgctgaggaac

SEQ ID NO: 2718887 - DNA, 25 bp, Homo sapien
cttccctctccttggcctcctccat

SEQ ID NO: 2718888 - DNA, 25 bp, Homo sapien
tgccatccctcaagtttgccaaggt

SEQ ID NO: 2718889 - DNA, 25 bp, Homo sapien
ttcttagttctcttgcttcaaaggc

SEQ ID NO: 2718890 - DNA, 25 bp, Homo sapien
ttcttgccatccctcaagtttgcca

SEQ ID NO: 2718891 - DNA, 25 bp, Homo sapien
ttcaaaggcactgctatctctctgc

SEQ ID NO: 2718892 - DNA, 25 bp, Homo sapien
gcctgggtcttgtggcacactcctg

SEQ ID NO: 2718893 - DNA, 25 bp, Homo sapien
gctggtcagccccatggacctctaa

SEQ ID NO: 2718894 - DNA, 25 bp, Homo sapien
cactacaacgtaggcaacagagaga

SEQ ID NO: 2718895 - DNA, 25 bp, Homo sapien
ggcagtggggactttcacaaggtct

SEQ ID NO: 2718896 - DNA, 25 bp, Homo sapien
catgcaatgtttttggagcacctac

SEQ ID NO: 2718897 - DNA, 25 bp, Homo sapien
tggagaatctacatggcctccttgc

SEQ ID NO: 2718898 - DNA, 25 bp, Homo sapien
gaagcagcaggtacaaaggttcgtg

SEQ ID NO: 2718899 - DNA, 25 bp, Homo sapien
tagaagtcagcctcatgaagaatga

SEQ ID NO: 2718900 - DNA, 25 bp, Homo sapien
caccattccaggtagctccacagaa

SEQ ID NO: 2718901 - DNA, 25 bp, Homo sapien
gagtgactgctcagaatcaccaagg

SEQ ID NO: 2718902 - DNA, 25 bp, Homo sapien
taagctcaccagctatggaaggaac

SEQ ID NO: 2718903 - DNA, 25 bp, Homo sapien
gaagggccagccttgcttaagctca

SEQ ID NO: 2718904 - DNA, 25 bp, Homo sapien
tttgcacaactttaacaagtagcag

SEQ ID NO: 2718905 - DNA, 25 bp, Homo sapien
cattacctccaatcagtcttgggac

SEQ ID NO: 2718906 - DNA, 25 bp, Homo sapien
tacatgaaactgtgagggactcttc

SEQ ID NO: 2718907 - DNA, 25 bp, Homo sapien
cagaactaattgttcactgatggct

SEQ ID NO: 2718908 - DNA, 25 bp, Homo sapien
gactgttcgaacgagcaccactgtt

SEQ ID NO: 2718909 - DNA, 25 bp, Homo sapien
gacaacgactgttctgacgacaatg

SEQ ID NO: 2718910 - DNA, 25 bp, Homo sapien
tgactgtttcaacgacaacgagcgt

SEQ ID NO: 2718911 - DNA, 25 bp, Homo sapien
tgttgatttctgactccagccaagg

SEQ ID NO: 2718912 - DNA, 25 bp, Homo sapien
gtatccaggcaggtttggaagctga

SEQ ID NO: 2718913 - DNA, 25 bp, Homo sapien
tgaagtgtgtgatacactctcaacg

SEQ ID NO: 2718914 - DNA, 25 bp, Homo sapien
tttggaagctgagggtgtatttctc

SEQ ID NO: 2718915 - DNA, 25 bp, Homo sapien
cactctcaacgtaggtatccaggca

SEQ ID NO: 2718916 - DNA, 25 bp, Homo sapien
tctgacgtagccctcttagtgctgg

SEQ ID NO: 2718917 - DNA, 25 bp, Homo sapien
caggatcttggtggtctgacgtagc

SEQ ID NO: 2718918 - DNA, 25 bp, Homo sapien
cctgaagtttcttccaggtatgccc

SEQ ID NO: 2718919 - DNA, 25 bp, Homo sapien
taaacacgttattctgaagaccctg

SEQ ID NO: 2718920 - DNA, 25 bp, Homo sapien
gatggcacatgacgggttccagcca

SEQ ID NO: 2718921 - DNA, 25 bp, Homo sapien
cagatgtgcatgatttagagaacca

SEQ ID NO: 2718922 - DNA, 25 bp, Homo sapien
gatgagaaaggctactatggctgca

SEQ ID NO: 2718923 - DNA, 25 bp, Homo sapien
tgggaacggcaggtgcaaatatctc

SEQ ID NO: 2718924 - DNA, 25 bp, Homo sapien
tgatagcaacaattgtactggacag

SEQ ID NO: 2718925 - DNA, 25 bp, Homo sapien
tttggacagtcttaagagaagtttc

SEQ ID NO: 2718926 - DNA, 25 bp, Homo sapien
tgtgtcctaattgatgagatgaatg

SEQ ID NO: 2718927 - DNA, 25 bp, Homo sapien
aaattcaggtcataggagagatcag

SEQ ID NO: 2718928 - DNA, 25 bp, Homo sapien
gggtaaagggtgcaacgttcatgaa

SEQ ID NO: 2718929 - DNA, 25 bp, Homo sapien
catgaagctgcagcagtaatctggg

SEQ ID NO: 2718930 - DNA, 25 bp, Homo sapien
tggtggatgaacaattgctgctttt

SEQ ID NO: 2718931 - DNA, 25 bp, Homo sapien
tgtccttgggatgtggtggatgaac

SEQ ID NO: 2718932 - DNA, 25 bp, Homo sapien
agcacaaccaaaggaaagagttttg

SEQ ID NO: 2718933 - DNA, 25 bp, Homo sapien
cttagcacaaccaaaggaaagagtt

SEQ ID NO: 2718934 - DNA, 25 bp, Homo sapien
cttgaaaggtggtgcaccttgggca

SEQ ID NO: 2718935 - DNA, 25 bp, Homo sapien
aggtggtgcaccttgggcatcacct

SEQ ID NO: 2718936 - DNA, 25 bp, Homo sapien
aaaggtggtgcaccttgggcatcac

SEQ ID NO: 2718937 - DNA, 25 bp, Homo sapien
tgaaaggtggtgcaccttgggcatc

SEQ ID NO: 2718938 - DNA, 25 bp, Homo sapien
cttcaaagtatgccaggctggcttt

SEQ ID NO: 2718939 - DNA, 25 bp, Homo sapien
ggctggctttggttaacacaaagaa

SEQ ID NO: 2718940 - DNA, 25 bp, Homo sapien
tcttcaaagtatgccaggctggctt

SEQ ID NO: 2718941 - DNA, 25 bp, Homo sapien
taaatgtgcattgcttgatagatag

SEQ ID NO: 2718942 - DNA, 25 bp, Homo sapien
gcattgcttgatagatagatgaggg

SEQ ID NO: 2718943 - DNA, 25 bp, Homo sapien
tgtgcattgcttgatagatagatga

SEQ ID NO: 2718944 - DNA, 25 bp, Homo sapien
tcccataaatgtgcattgcttgata

SEQ ID NO: 2718945 - DNA, 25 bp, Homo sapien
tttcatgttccaccgtcaacgtcac

SEQ ID NO: 2718946 - DNA, 25 bp, Homo sapien
gagcttgctctcaggcttgctcttc

SEQ ID NO: 2718947 - DNA, 25 bp, Homo sapien
ttgctctcaggcttgctcttctgtt

SEQ ID NO: 2718948 - DNA, 25 bp, Homo sapien
tggatttcatgttccaccgtcaacg

SEQ ID NO: 2718949 - DNA, 25 bp, Homo sapien
catgtcctttaattatccgcagtcc

SEQ ID NO: 2718950 - DNA, 25 bp, Homo sapien
tcctttaattatccgcagtcccaca

SEQ ID NO: 2718951 - DNA, 25 bp, Homo sapien
aattatccgcagtcccacaatgaca

SEQ ID NO: 2718952 - DNA, 25 bp, Homo sapien
tttaattatccgcagtcccacaatg

SEQ ID NO: 2718953 - DNA, 25 bp, Homo sapien
caacacatttgattcgggagagctc

SEQ ID NO: 2718954 - DNA, 25 bp, Homo sapien
tatttatagtggcatgggatgctga

SEQ ID NO: 2718955 - DNA, 25 bp, Homo sapien
tggaccccttcagcgtgcgcttctt

SEQ ID NO: 2718956 - DNA, 25 bp, Homo sapien
ctgaaacgggtatttatagtggcat

SEQ ID NO: 2718957 - DNA, 25 bp, Homo sapien
tctcacgatctggagcaaacacata

SEQ ID NO: 2718958 - DNA, 25 bp, Homo sapien
gctgccggctctcacgatctggagc

SEQ ID NO: 2718959 - DNA, 25 bp, Homo sapien
caaacacatataggaggtagttgtc

SEQ ID NO: 2718960 - DNA, 25 bp, Homo sapien
ataggaggtagttgtcatgcaccac

SEQ ID NO: 2718961 - DNA, 25 bp, Homo sapien
tccaggtcagtctatcaagggctac

SEQ ID NO: 2718962 - DNA, 25 bp, Homo sapien
gagttatttccaggtcagtctatca

SEQ ID NO: 2718963 - DNA, 25 bp, Homo sapien
tatttccaggtcagtctatcaaggg

SEQ ID NO: 2718964 - DNA, 25 bp, Homo sapien
gaagagttatttccaggtcagtcta

SEQ ID NO: 2718965 - DNA, 25 bp, Homo sapien
gatatttaggcaccaaactgttatt

SEQ ID NO: 2718966 - DNA, 25 bp, Homo sapien
cacagcctgttgcaagcttctccag

SEQ ID NO: 2718967 - DNA, 25 bp, Homo sapien
cattcttggttggatcatattgggc

SEQ ID NO: 2718968 - DNA, 25 bp, Homo sapien
taggatgatatttaggcaccaaact

SEQ ID NO: 2718969 - DNA, 25 bp, Homo sapien
cacaaaaactagagggaattcccag

SEQ ID NO: 2718970 - DNA, 25 bp, Homo sapien
cagtgcagtgtgcttcttgaaaact

SEQ ID NO: 2718971 - DNA, 25 bp, Homo sapien
tccagggtgatgaccataagctgcg

SEQ ID NO: 2718972 - DNA, 25 bp, Homo sapien
ccaatgtgctcggtaccaggaatcc

SEQ ID NO: 2718973 - DNA, 25 bp, Homo sapien
tgctctcaactgtgcaaaactcaga

SEQ ID NO: 2718974 - DNA, 25 bp, Homo sapien
agacttccgggaatgtctctgccac

SEQ ID NO: 2718975 - DNA, 25 bp, Homo sapien
cctgccagtggggttagacttgcac

SEQ ID NO: 2718976 - DNA, 25 bp, Homo sapien
tcgggggccctctctttctgtattc

SEQ ID NO: 2718977 - DNA, 25 bp, Homo sapien
tccagaagtccatattcgggggccc

SEQ ID NO: 2718978 - DNA, 25 bp, Homo sapien
ggagtaggaggaagaggcttctttg

SEQ ID NO: 2718979 - DNA, 25 bp, Homo sapien
cctgttgtcttcaggagtaggagga

SEQ ID NO: 2718980 - DNA, 25 bp, Homo sapien
gtaggaggaagaggcttctttgaag

SEQ ID NO: 2718981 - DNA, 25 bp, Homo sapien
ctgttgtcttcaggagtaggaggaa

SEQ ID NO: 2718982 - DNA, 25 bp, Homo sapien
gaatggtcctttaagtggacagacc

SEQ ID NO: 2718983 - DNA, 25 bp, Homo sapien
cccaatgtgttgagttctgctgaat

SEQ ID NO: 2718984 - DNA, 25 bp, Homo sapien
aaagtggtcaggtgaatggccaccc

SEQ ID NO: 2718985 - DNA, 25 bp, Homo sapien
cccaagagagttcaagcccaaaaat

SEQ ID NO: 2718986 - DNA, 25 bp, Homo sapien
ggtttggtagtcatataaggcaatg

SEQ ID NO: 2718987 - DNA, 25 bp, Homo sapien
ccgcagtgcgagttcctgaggatca

SEQ ID NO: 2718988 - DNA, 25 bp, Homo sapien
gtccagcaggcagtactcttcgttg

SEQ ID NO: 2718989 - DNA, 25 bp, Homo sapien
gactctccaccagtgaatctcagaa

SEQ ID NO: 2718990 - DNA, 25 bp, Homo sapien
ttggagatttttccaccagataact

SEQ ID NO: 2718991 - DNA, 25 bp, Homo sapien
gatttttccaccagataactgcttg

SEQ ID NO: 2718992 - DNA, 25 bp, Homo sapien
ccaccagataactgcttggtacata

SEQ ID NO: 2718993 - DNA, 25 bp, Homo sapien
taactgcttggtacatatccttcat

SEQ ID NO: 2718994 - DNA, 25 bp, Homo sapien
aatactgatcattgttgatgctagg

SEQ ID NO: 2718995 - DNA, 25 bp, Homo sapien
ctaccagtgcgtttaaactcaaaag

SEQ ID NO: 2718996 - DNA, 25 bp, Homo sapien
tgattcatttccaggtattaaaatg

SEQ ID NO: 2718997 - DNA, 25 bp, Homo sapien
cacgtatgtttctaccagtgcgttt

SEQ ID NO: 2718998 - DNA, 25 bp, Homo sapien
gctttgtctcggctgatactcttat

SEQ ID NO: 2718999 - DNA, 25 bp, Homo sapien
tcggctgatactcttattgtaccac

SEQ ID NO: 2719000 - DNA, 25 bp, Homo sapien
ttttcagctttgtctcggctgatac

SEQ ID NO: 2719001 - DNA, 25 bp, Homo sapien
tgtctcggctgatactcttattgta

SEQ ID NO: 2719002 - DNA, 25 bp, Homo sapien
tatgtcaaaagacaggttaaggaga

SEQ ID NO: 2719003 - DNA, 25 bp, Homo sapien
tgtcaaaagacaggttaaggagact

SEQ ID NO: 2719004 - DNA, 25 bp, Homo sapien
tttatgtcaaaagacaggttaagga

SEQ ID NO: 2719005 - DNA, 25 bp, Homo sapien
attttatgtcaaaagacaggttaag

SEQ ID NO: 2719006 - DNA, 25 bp, Homo sapien
aatcagagtcacagacatctctgac

SEQ ID NO: 2719007 - DNA, 25 bp, Homo sapien
caggccgaatcagagtcacagacat

SEQ ID NO: 2719008 - DNA, 25 bp, Homo sapien
agagtcacagacatctctgacccac

SEQ ID NO: 2719009 - DNA, 25 bp, Homo sapien
ctgagtcaggccgaatcagagtcac

SEQ ID NO: 2719010 - DNA, 25 bp, Homo sapien
gttcaagtgactgtcttccttcaac

SEQ ID NO: 2719011 - DNA, 25 bp, Homo sapien
tcaagtgactgtcttccttcaactt

SEQ ID NO: 2719012 - DNA, 25 bp, Homo sapien
agtgactgtcttccttcaactttcc

SEQ ID NO: 2719013 - DNA, 25 bp, Homo sapien
gtgactgtcttccttcaactttcca

SEQ ID NO: 2719014 - DNA, 25 bp, Homo sapien
tacaacagccttggtgaaaacagac

SEQ ID NO: 2719015 - DNA, 25 bp, Homo sapien
tcccttaccatgaaggctccttctt

SEQ ID NO: 2719016 - DNA, 25 bp, Homo sapien
tggtgaaaacagacacggtgtatgt

SEQ ID NO: 2719017 - DNA, 25 bp, Homo sapien
ggaatcccttaccatgaaggctcct

SEQ ID NO: 2719018 - DNA, 25 bp, Homo sapien
tcagccacatagtatcgcttaggat

SEQ ID NO: 2719019 - DNA, 25 bp, Homo sapien
cctccattatgttggtgatagttga

SEQ ID NO: 2719020 - DNA, 25 bp, Homo sapien
gagggatggaatcgaacacatactt

SEQ ID NO: 2719021 - DNA, 25 bp, Homo sapien
gatgtgataatgctttatacaggga

SEQ ID NO: 2719022 - DNA, 25 bp, Homo sapien
tctgcctcccaaaacaaactggata

SEQ ID NO: 2719023 - DNA, 25 bp, Homo sapien
ttctgcctcccaaaacaaactggat

SEQ ID NO: 2719024 - DNA, 25 bp, Homo sapien
tggataccggagtcgagtcaccagg

SEQ ID NO: 2719025 - DNA, 25 bp, Homo sapien
aaacaaactggataccggagtcgag

SEQ ID NO: 2719026 - DNA, 25 bp, Homo sapien
aatggttttgatagccaccttgtcc

SEQ ID NO: 2719027 - DNA, 25 bp, Homo sapien
agcccagatgcaccaacccaaattg

SEQ ID NO: 2719028 - DNA, 25 bp, Homo sapien
tgacatagccccttcccgaatggtt

SEQ ID NO: 2719029 - DNA, 25 bp, Homo sapien
tctgaggggtcgatcacccatttcc

SEQ ID NO: 2719030 - DNA, 25 bp, Homo sapien
aaaagtccccgctgggtgcgtagat

SEQ ID NO: 2719031 - DNA, 25 bp, Homo sapien
cagccgtgctccatgaactcaaaca

SEQ ID NO: 2719032 - DNA, 25 bp, Homo sapien
tagataatctgacaggcagccgtgc

SEQ ID NO: 2719033 - DNA, 25 bp, Homo sapien
gggtctctgcagcaaaaagtccccg

SEQ ID NO: 2719034 - DNA, 25 bp, Homo sapien
taggctctaatgcaacctgatgtga

SEQ ID NO: 2719035 - DNA, 25 bp, Homo sapien
gagagtacctgacccctaattagta

SEQ ID NO: 2719036 - DNA, 25 bp, Homo sapien
taagcctcacaaatgccgctggaag

SEQ ID NO: 2719037 - DNA, 25 bp, Homo sapien
tgttgtctaaccaaagataggctct

SEQ ID NO: 2719038 - DNA, 25 bp, Homo sapien
tttctcccaccaaacaatttctggc

SEQ ID NO: 2719039 - DNA, 25 bp, Homo sapien
ctcccaccaaacaatttctggcagc

SEQ ID NO: 2719040 - DNA, 25 bp, Homo sapien
caccttgatgacttggttttctccc

SEQ ID NO: 2719041 - DNA, 25 bp, Homo sapien
tctcccaccaaacaatttctggcag

SEQ ID NO: 2719042 - DNA, 25 bp, Homo sapien
aaatgaccacacatcggacttgctg

SEQ ID NO: 2719043 - DNA, 25 bp, Homo sapien
aagagaaaacctctggggatgccca

SEQ ID NO: 2719044 - DNA, 25 bp, Homo sapien
tgctatagcgactgaaagagaaaac

SEQ ID NO: 2719045 - DNA, 25 bp, Homo sapien
ggatgcccacttcaccgggaatttg

SEQ ID NO: 2719046 - DNA, 25 bp, Homo sapien
cataatctggtagacgtgtgtggag

SEQ ID NO: 2719047 - DNA, 25 bp, Homo sapien
gagttgcttcggttttcatacggga

SEQ ID NO: 2719048 - DNA, 25 bp, Homo sapien
ctttccagcagtgattcataatctg

SEQ ID NO: 2719049 - DNA, 25 bp, Homo sapien
gaaatccggtactgatgtcttccac

SEQ ID NO: 2719050 - DNA, 25 bp, Homo sapien
gcaatttcagccagttgacgcagca

SEQ ID NO: 2719051 - DNA, 25 bp, Homo sapien
ctggagaaggctggccgatcttctg

SEQ ID NO: 2719052 - DNA, 25 bp, Homo sapien
agccagttgacgcagcagtctggag

SEQ ID NO: 2719053 - DNA, 25 bp, Homo sapien
ccagttgacgcagcagtctggagaa

SEQ ID NO: 2719054 - DNA, 25 bp, Homo sapien
caagtttcaattgctcgccaaggga

SEQ ID NO: 2719055 - DNA, 25 bp, Homo sapien
taaaattgctcaaccctagggccta

SEQ ID NO: 2719056 - DNA, 25 bp, Homo sapien
cccattttgcgggatagggcaccag

SEQ ID NO: 2719057 - DNA, 25 bp, Homo sapien
aagggagttctctacaaacacaggg

SEQ ID NO: 2719058 - DNA, 25 bp, Homo sapien
ttatttcccacgtgctcagaatcca

SEQ ID NO: 2719059 - DNA, 25 bp, Homo sapien
cttatttcccacgtgctcagaatcc

SEQ ID NO: 2719060 - DNA, 25 bp, Homo sapien
tatttcccacgtgctcagaatccat

SEQ ID NO: 2719061 - DNA, 25 bp, Homo sapien
ctgcctctcggtttcggaggaccgc

SEQ ID NO: 2719062 - DNA, 25 bp, Homo sapien
gcctctcggtttcggaggaccgctc

SEQ ID NO: 2719063 - DNA, 25 bp, Homo sapien
tctcggtttcggaggaccgctcagc

SEQ ID NO: 2719064 - DNA, 25 bp, Homo sapien
tcggtttcggaggaccgctcagccc

SEQ ID NO: 2719065 - DNA, 25 bp, Homo sapien
ggatgctctgccccgctccgctgcg

SEQ ID NO: 2719066 - DNA, 25 bp, Homo sapien
ggcctgaggctaccgcagggccccg

SEQ ID NO: 2719067 - DNA, 25 bp, Homo sapien
cgcgccggggcgcaggatgctctgc

SEQ ID NO: 2719068 - DNA, 25 bp, Homo sapien
gggcctgaggctaccgcagggcccc

SEQ ID NO: 2719069 - DNA, 25 bp, Homo sapien
gcggcatcctagtccccgtgcccgg

SEQ ID NO: 2719070 - DNA, 25 bp, Homo sapien
ccccggcggcatcctagtccccgtg

SEQ ID NO: 2719071 - DNA, 25 bp, Homo sapien
gagggggcggcccttcgcgcatcct

SEQ ID NO: 2719072 - DNA, 25 bp, Homo sapien
ggcccgaggcctgcgagggccgctt

SEQ ID NO: 2719073 - DNA, 25 bp, Homo sapien
ctggactcgaggatgtcgccgctgc

SEQ ID NO: 2719074 - DNA, 25 bp, Homo sapien
tctccggtccctgagattagcaccg

SEQ ID NO: 2719075 - DNA, 25 bp, Homo sapien
ccgcgggacgcacggtgggtccgag

SEQ ID NO: 2719076 - DNA, 25 bp, Homo sapien
ggcagagggtccgtgccgcgggacg

SEQ ID NO: 2719077 - DNA, 25 bp, Homo sapien
catcacacgttctgtgtgcccgagg

SEQ ID NO: 2719078 - DNA, 25 bp, Homo sapien
ggaggtgacggtggtcacggcggca

SEQ ID NO: 2719079 - DNA, 25 bp, Homo sapien
cacgttctgtgtgcccgaggcggct

SEQ ID NO: 2719080 - DNA, 25 bp, Homo sapien
tgacggtggtcacggcggcagaggc

SEQ ID NO: 2719081 - DNA, 25 bp, Homo sapien
cctcttcttttgcacataggtgggc

SEQ ID NO: 2719082 - DNA, 25 bp, Homo sapien
ttgcacataggtgggctgttctttg

SEQ ID NO: 2719083 - DNA, 25 bp, Homo sapien
cttcttttgcacataggtgggctgt

SEQ ID NO: 2719084 - DNA, 25 bp, Homo sapien
cttttgcacataggtgggctgttct

SEQ ID NO: 2719085 - DNA, 25 bp, Homo sapien
tcagtgcgcacaactagctagaggc

SEQ ID NO: 2719086 - DNA, 25 bp, Homo sapien
tctcatcccgaaagtggacactggg

SEQ ID NO: 2719087 - DNA, 25 bp, Homo sapien
ccttgggtgcctacagaaccggtca

SEQ ID NO: 2719088 - DNA, 25 bp, Homo sapien
caatgccaacgaggaaccctgtgta

SEQ ID NO: 2719089 - DNA, 25 bp, Homo sapien
ttcagctttctggttgatgacagca

SEQ ID NO: 2719090 - DNA, 25 bp, Homo sapien
tcagctttctggttgatgacagcag

SEQ ID NO: 2719091 - DNA, 25 bp, Homo sapien
tcattcagctttctggttgatgaca

SEQ ID NO: 2719092 - DNA, 25 bp, Homo sapien
ttctggttgatgacagcagcagagg

SEQ ID NO: 2719093 - DNA, 25 bp, Homo sapien
gctttcatgatgacaggcaggtaac

SEQ ID NO: 2719094 - DNA, 25 bp, Homo sapien
caggtaacagttgggcaggctgcct

SEQ ID NO: 2719095 - DNA, 25 bp, Homo sapien
ttttgaacgtcagagaggtagtggc

SEQ ID NO: 2719096 - DNA, 25 bp, Homo sapien
ggaagcaaagcatgccctcaacatt

SEQ ID NO: 2719097 - DNA, 25 bp, Homo sapien
tgcatgagccaatgaccaaaattct

SEQ ID NO: 2719098 - DNA, 25 bp, Homo sapien
tacttgcttaattaatacttcatga

SEQ ID NO: 2719099 - DNA, 25 bp, Homo sapien
ttgttgactgcatgagccaatgacc

SEQ ID NO: 2719100 - DNA, 25 bp, Homo sapien
gcttaattaatacttcatgaatgat

SEQ ID NO: 2719101 - DNA, 25 bp, Homo sapien
tctctgtgtgatattattgcttgca

SEQ ID NO: 2719102 - DNA, 25 bp, Homo sapien
tatgtgaggcgagggttcaagatct

SEQ ID NO: 2719103 - DNA, 25 bp, Homo sapien
gatattattgcttgcatgttcatct

SEQ ID NO: 2719104 - DNA, 25 bp, Homo sapien
cgagggttcaagatctctgtgtgat

SEQ ID NO: 2719105 - DNA, 25 bp, Homo sapien
gagggcttcaggtctggccaccaga

SEQ ID NO: 2719106 - DNA, 25 bp, Homo sapien
cggagcacgtggaactcagctccat

SEQ ID NO: 2719107 - DNA, 25 bp, Homo sapien
aagggaagccatgcatctgctacgg

SEQ ID NO: 2719108 - DNA, 25 bp, Homo sapien
catctgctacggaaacaaagaggag

SEQ ID NO: 2719109 - DNA, 25 bp, Homo sapien
cagaggccctatcacctacagcttc

SEQ ID NO: 2719110 - DNA, 25 bp, Homo sapien
tggtctttgttgtttcagtcccctg

SEQ ID NO: 2719111 - DNA, 25 bp, Homo sapien
ttgttgtttcagtcccctgctcctg

SEQ ID NO: 2719112 - DNA, 25 bp, Homo sapien
cactgactggcaaggtggtctttgt

SEQ ID NO: 2719113 - DNA, 25 bp, Homo sapien
tggaggctcgatgcatggctgctgg

SEQ ID NO: 2719114 - DNA, 25 bp, Homo sapien
gctcttcaagcaggtccacgttgga

SEQ ID NO: 2719115 - DNA, 25 bp, Homo sapien
tcttccagggtgacgtgcgtggtca

SEQ ID NO: 2719116 - DNA, 25 bp, Homo sapien
agggcatcttccagggtgacgtgcg

SEQ ID NO: 2719117 - DNA, 25 bp, Homo sapien
gtagcctgctcaatgtaccttgcaa

SEQ ID NO: 2719118 - DNA, 25 bp, Homo sapien
cttgcaatgcccgtgacaaatgcat

SEQ ID NO: 2719119 - DNA, 25 bp, Homo sapien
cctcaaagtttgtgtcaaagttagc

SEQ ID NO: 2719120 - DNA, 25 bp, Homo sapien
catgctggagtggactgtagcctgc

SEQ ID NO: 2719121 - DNA, 25 bp, Homo sapien
ggttgatgtcaggagcaaatgagac

SEQ ID NO: 2719122 - DNA, 25 bp, Homo sapien
tgatgtcaggagcaaatgagacaat

SEQ ID NO: 2719123 - DNA, 25 bp, Homo sapien
tcacagggttgatgtcaggagcaaa

SEQ ID NO: 2719124 - DNA, 25 bp, Homo sapien
gatgtcaggagcaaatgagacaatg

SEQ ID NO: 2719125 - DNA, 25 bp, Homo sapien
catgtccttcctccagcatctcatt

SEQ ID NO: 2719126 - DNA, 25 bp, Homo sapien
ctcatgtccttcctccagcatctca

SEQ ID NO: 2719127 - DNA, 25 bp, Homo sapien
catactcatgtccttcctccagcat

SEQ ID NO: 2719128 - DNA, 25 bp, Homo sapien
cgcatactcatgtccttcctccagc

SEQ ID NO: 2719129 - DNA, 25 bp, Homo sapien
cccgggaacagctgcgccaggtgta

SEQ ID NO: 2719130 - DNA, 25 bp, Homo sapien
aacagctgcgccaggtgtacagcat

SEQ ID NO: 2719131 - DNA, 25 bp, Homo sapien
ggaacagctgcgccaggtgtacagc

SEQ ID NO: 2719132 - DNA, 25 bp, Homo sapien
aatggcccgggaacagctgcgccag

SEQ ID NO: 2719133 - DNA, 25 bp, Homo sapien
gacccgttaattacatgatgatggc

SEQ ID NO: 2719134 - DNA, 25 bp, Homo sapien
gccatgggacccgttaattacatga

SEQ ID NO: 2719135 - DNA, 25 bp, Homo sapien
tgatgatggcactgatggtaataaa

SEQ ID NO: 2719136 - DNA, 25 bp, Homo sapien
ttgttgccatgggacccgttaatta

SEQ ID NO: 2719137 - DNA, 25 bp, Homo sapien
acatcctcacaacgcacacgccaag

SEQ ID NO: 2719138 - DNA, 25 bp, Homo sapien
gcagttttcaccagtgtgcacatca

SEQ ID NO: 2719139 - DNA, 25 bp, Homo sapien
ctctgcagttttcaccagtgtgcac

SEQ ID NO: 2719140 - DNA, 25 bp, Homo sapien
ttttcaccagtgtgcacatcagaat

SEQ ID NO: 2719141 - DNA, 25 bp, Homo sapien
tgggggataatggggacacacacat

SEQ ID NO: 2719142 - DNA, 25 bp, Homo sapien
gatctctactcggttgggctgctcg

SEQ ID NO: 2719143 - DNA, 25 bp, Homo sapien
ggctccagcacctctactgtcttct

SEQ ID NO: 2719144 - DNA, 25 bp, Homo sapien
cggttgggctgctcgttgcatttca

SEQ ID NO: 2719145 - DNA, 25 bp, Homo sapien
gtcttctcatagatctctactcggt

SEQ ID NO: 2719146 - DNA, 25 bp, Homo sapien
tgaagtaacccagaaagagcaagaa

SEQ ID NO: 2719147 - DNA, 25 bp, Homo sapien
gaggagaaatgatggccccgattga

SEQ ID NO: 2719148 - DNA, 25 bp, Homo sapien
tatatctctataaaactggtaccaa

SEQ ID NO: 2719149 - DNA, 25 bp, Homo sapien
tcgtgatgaatgtacaactctgtga

SEQ ID NO: 2719150 - DNA, 25 bp, Homo sapien
cagaggggcagtgagtaaggtccac

SEQ ID NO: 2719151 - DNA, 25 bp, Homo sapien
ggcagaggggcagtgagtaaggtcc

SEQ ID NO: 2719152 - DNA, 25 bp, Homo sapien
ggggcagtgagtaaggtccactgtg

SEQ ID NO: 2719153 - DNA, 25 bp, Homo sapien
ggcagtgagtaaggtccactgtgct

SEQ ID NO: 2719154 - DNA, 25 bp, Homo sapien
cgcttcacctcgctgcagaaccgct

SEQ ID NO: 2719155 - DNA, 25 bp, Homo sapien
tgcgctcggcatggcacagccgctt

SEQ ID NO: 2719156 - DNA, 25 bp, Homo sapien
acctcgctgcagaaccgctcgatgg

SEQ ID NO: 2719157 - DNA, 25 bp, Homo sapien
tgcagaaccgctcgatggccttgcg

SEQ ID NO: 2719158 - DNA, 25 bp, Homo sapien
gaggtaggcctcagagacaaagtcc

SEQ ID NO: 2719159 - DNA, 25 bp, Homo sapien
tgttgatgaacttgccaagggtcag

SEQ ID NO: 2719160 - DNA, 25 bp, Homo sapien
tcatgttctttagctcatccaggac

SEQ ID NO: 2719161 - DNA, 25 bp, Homo sapien
ctcttgtaggcagagtggtcattct

SEQ ID NO: 2719162 - DNA, 25 bp, Homo sapien
tggaggaggggcctggatggggaaa

SEQ ID NO: 2719163 - DNA, 25 bp, Homo sapien
ctggaggaggggcctggatggggaa

SEQ ID NO: 2719164 - DNA, 25 bp, Homo sapien
tatgtttgggggatggctagtttgg

SEQ ID NO: 2719165 - DNA, 25 bp, Homo sapien
tgggggatggctagtttggtatcaa

SEQ ID NO: 2719166 - DNA, 25 bp, Homo sapien
ggatggctagtttggtatcaaagaa

SEQ ID NO: 2719167 - DNA, 25 bp, Homo sapien
tgtttgggggatggctagtttggta

SEQ ID NO: 2719168 - DNA, 25 bp, Homo sapien
gagacttctgggtggctgtatactg

SEQ ID NO: 2719169 - DNA, 25 bp, Homo sapien
gaagatgtcattcaaggagggtctc

SEQ ID NO: 2719170 - DNA, 25 bp, Homo sapien
gggtctctctttatcagagacacag

SEQ ID NO: 2719171 - DNA, 25 bp, Homo sapien
tcacagttgacttaggagggtaaac

SEQ ID NO: 2719172 - DNA, 25 bp, Homo sapien
aaggttctgcgactcctggatagac

SEQ ID NO: 2719173 - DNA, 25 bp, Homo sapien
tcctgttgtggttggccaggaacat

SEQ ID NO: 2719174 - DNA, 25 bp, Homo sapien
catggaaaggttctgcgactcctgg

SEQ ID NO: 2719175 - DNA, 25 bp, Homo sapien
aggaacatggaaaggttctgcgact

SEQ ID NO: 2719176 - DNA, 25 bp, Homo sapien
ggagagggtgaatcggccacctggg

SEQ ID NO: 2719177 - DNA, 25 bp, Homo sapien
gaagctgcagactgagcttgtctgc

SEQ ID NO: 2719178 - DNA, 25 bp, Homo sapien
gctacatttcactctcaagtagggc

SEQ ID NO: 2719179 - DNA, 25 bp, Homo sapien
tgtctgcttgggctcgtggtccacc

SEQ ID NO: 2719180 - DNA, 25 bp, Homo sapien
ctcaggttaggcagcgcatgtatcc

SEQ ID NO: 2719181 - DNA, 25 bp, Homo sapien
ccgctgatggccaggaatcacagct

SEQ ID NO: 2719182 - DNA, 25 bp, Homo sapien
tgcacacctcccatggcaaggaact

SEQ ID NO: 2719183 - DNA, 25 bp, Homo sapien
ttagaaagtgctatcctggcctgag

SEQ ID NO: 2719184 - DNA, 25 bp, Homo sapien
caggtacatcttgttctcgtagtaa

SEQ ID NO: 2719185 - DNA, 25 bp, Homo sapien
gtttctcactgggagtcaggtacat

SEQ ID NO: 2719186 - DNA, 25 bp, Homo sapien
ctcatagcctgggatcacttcaagt

SEQ ID NO: 2719187 - DNA, 25 bp, Homo sapien
agatgttgacaatgtcagccagcag

SEQ ID NO: 2719188 - DNA, 25 bp, Homo sapien
tgctacaagggtgttcaatgaagtt

SEQ ID NO: 2719189 - DNA, 25 bp, Homo sapien
gatgtgcacaaaaactgctacaagg

SEQ ID NO: 2719190 - DNA, 25 bp, Homo sapien
tacttggcagtcattacacataaca

SEQ ID NO: 2719191 - DNA, 25 bp, Homo sapien
aaaccattatgtgccgtaagatctg

SEQ ID NO: 2719192 - DNA, 25 bp, Homo sapien
tttgctaagattaattctcttcttg

SEQ ID NO: 2719193 - DNA, 25 bp, Homo sapien
tctcttcttggcatccagtttgtaa

SEQ ID NO: 2719194 - DNA, 25 bp, Homo sapien
gacatttccatccattaggtagagg

SEQ ID NO: 2719195 - DNA, 25 bp, Homo sapien
ttaggtagaggccaaagcccatcac

SEQ ID NO: 2719196 - DNA, 25 bp, Homo sapien
gggtggctgccttcgctgccacccc

SEQ ID NO: 2719197 - DNA, 25 bp, Homo sapien
caaacacagctcgtgagatgctgag

SEQ ID NO: 2719198 - DNA, 25 bp, Homo sapien
aagcaaacacagctcgtgagatgct

SEQ ID NO: 2719199 - DNA, 25 bp, Homo sapien
ggtggctgccttcgctgccacccca

SEQ ID NO: 2719200 - DNA, 25 bp, Homo sapien
agctctatctgcatgtcgccgaaaa

SEQ ID NO: 2719201 - DNA, 25 bp, Homo sapien
tctatctgcatgtcgccgaaaaggg

SEQ ID NO: 2719202 - DNA, 25 bp, Homo sapien
aatgtatctggccagctctatctgc

SEQ ID NO: 2719203 - DNA, 25 bp, Homo sapien
tgtatctggccagctctatctgcat

SEQ ID NO: 2719204 - DNA, 25 bp, Homo sapien
gctggccactcttcagggaacgagg

SEQ ID NO: 2719205 - DNA, 25 bp, Homo sapien
aggacatgcgagtcactgctgggct

SEQ ID NO: 2719206 - DNA, 25 bp, Homo sapien
tcagtgtgaggaggaacaacgccac

SEQ ID NO: 2719207 - DNA, 25 bp, Homo sapien
cctctcctcactggaccactgaggg

SEQ ID NO: 2719208 - DNA, 25 bp, Homo sapien
tggacttagcgcacggtcacctaac

SEQ ID NO: 2719209 - DNA, 25 bp, Homo sapien
ccaattcacgtcgactgcacgatgg

SEQ ID NO: 2719210 - DNA, 25 bp, Homo sapien
tcacgtcgactgcacgatggactta

SEQ ID NO: 2719211 - DNA, 25 bp, Homo sapien
gactgcacgatggacttagcgcacg

SEQ ID NO: 2719212 - DNA, 25 bp, Homo sapien
cactctgcggttgaagctggctttg

SEQ ID NO: 2719213 - DNA, 25 bp, Homo sapien
tctgacagcacagacactctgcggt

SEQ ID NO: 2719214 - DNA, 25 bp, Homo sapien
cctttgggctgggattgcggaaata

SEQ ID NO: 2719215 - DNA, 25 bp, Homo sapien
tttccaacagtgccctggcaacatg

SEQ ID NO: 2719216 - DNA, 25 bp, Homo sapien
tgggcaacctccaaaaccagcctac

SEQ ID NO: 2719217 - DNA, 25 bp, Homo sapien
gaaaaagcaaggtgggcaacctcca

SEQ ID NO: 2719218 - DNA, 25 bp, Homo sapien
gcaaggtgggcaacctccaaaacca

SEQ ID NO: 2719219 - DNA, 25 bp, Homo sapien
cagaaaaagcaaggtgggcaacctc

SEQ ID NO: 2719220 - DNA, 25 bp, Homo sapien
acacagcctctctaggactacaaag

SEQ ID NO: 2719221 - DNA, 25 bp, Homo sapien
cctctctaggactacaaagggatgg

SEQ ID NO: 2719222 - DNA, 25 bp, Homo sapien
cagcctctctaggactacaaaggga

SEQ ID NO: 2719223 - DNA, 25 bp, Homo sapien
gaggggcgggaacacagcctctcta

SEQ ID NO: 2719224 - DNA, 25 bp, Homo sapien
ttccagatacctggtccataatact

SEQ ID NO: 2719225 - DNA, 25 bp, Homo sapien
ccagatacctggtccataatactta

SEQ ID NO: 2719226 - DNA, 25 bp, Homo sapien
cagatacctggtccataatacttac

SEQ ID NO: 2719227 - DNA, 25 bp, Homo sapien
tccagatacctggtccataatactt

SEQ ID NO: 2719228 - DNA, 25 bp, Homo sapien
cactgttgctgtagcgagcgagctc

SEQ ID NO: 2719229 - DNA, 25 bp, Homo sapien
gaaccatctgctcgcagatattgta

SEQ ID NO: 2719230 - DNA, 25 bp, Homo sapien
agatgaagcggatgtggtcatcccg

SEQ ID NO: 2719231 - DNA, 25 bp, Homo sapien
ggtcatcccggatctgaaccatctg

SEQ ID NO: 2719232 - DNA, 25 bp, Homo sapien
tctccagtgttccgtgggtccatgt

SEQ ID NO: 2719233 - DNA, 25 bp, Homo sapien
actctccagtgttccgtgggtccat

SEQ ID NO: 2719234 - DNA, 25 bp, Homo sapien
ctccagtgttccgtgggtccatgtt

SEQ ID NO: 2719235 - DNA, 25 bp, Homo sapien
ctctccagtgttccgtgggtccatg

SEQ ID NO: 2719236 - DNA, 25 bp, Homo sapien
ggggagcatcaggtgtcatactcat

SEQ ID NO: 2719237 - DNA, 25 bp, Homo sapien
ctggggagcatcaggtgtcatactc

SEQ ID NO: 2719238 - DNA, 25 bp, Homo sapien
tggggagcatcaggtgtcatactca

SEQ ID NO: 2719239 - DNA, 25 bp, Homo sapien
accccgcagggctaggtcgaagagc

SEQ ID NO: 2719240 - DNA, 25 bp, Homo sapien
agagctcgcgatactcctcgtctga

SEQ ID NO: 2719241 - DNA, 25 bp, Homo sapien
gacgtgggcgctccacttggataga

SEQ ID NO: 2719242 - DNA, 25 bp, Homo sapien
cacttggatagaagctgcagacccc

SEQ ID NO: 2719243 - DNA, 25 bp, Homo sapien
gtgggatgaaccagcttccaagagt

SEQ ID NO: 2719244 - DNA, 25 bp, Homo sapien
tgggatgaaccagcttccaagagta

SEQ ID NO: 2719245 - DNA, 25 bp, Homo sapien
tgtgggatgaaccagcttccaagag

SEQ ID NO: 2719246 - DNA, 25 bp, Homo sapien
ctgtgggatgaaccagcttccaaga

SEQ ID NO: 2719247 - DNA, 25 bp, Homo sapien
gtgccaggacagtccttgttgcaga

SEQ ID NO: 2719248 - DNA, 25 bp, Homo sapien
tttcctcactggtgtaattgtagcg

SEQ ID NO: 2719249 - DNA, 25 bp, Homo sapien
tccgcggtgccaggacagtccttgt

SEQ ID NO: 2719250 - DNA, 25 bp, Homo sapien
gtagcgtgtggctctctcatattcc

SEQ ID NO: 2719251 - DNA, 25 bp, Homo sapien
gatgactttgtcctctggtgatgac

SEQ ID NO: 2719252 - DNA, 25 bp, Homo sapien
ccattagtaatagaagtgccaaggg

SEQ ID NO: 2719253 - DNA, 25 bp, Homo sapien
taaaacctcccaatgtatagcaaag

SEQ ID NO: 2719254 - DNA, 25 bp, Homo sapien
ttgcgggagcatcttctgaatcact

SEQ ID NO: 2719255 - DNA, 25 bp, Homo sapien
gccagaatgtacgtatatcagcact

SEQ ID NO: 2719256 - DNA, 25 bp, Homo sapien
tttgaaggcctctccatagaccagg

SEQ ID NO: 2719257 - DNA, 25 bp, Homo sapien
tgctactcaaagtgccagcgcatgg

SEQ ID NO: 2719258 - DNA, 25 bp, Homo sapien
ggcccatgggccacaatttgagcat

SEQ ID NO: 2719259 - DNA, 25 bp, Homo sapien
tgcaatgccgcgtagatggtgttcc

SEQ ID NO: 2719260 - DNA, 25 bp, Homo sapien
ggctcacgcagcgtcacctgggcga

SEQ ID NO: 2719261 - DNA, 25 bp, Homo sapien
cacctgggcgaagtcctgcaatgcc

SEQ ID NO: 2719262 - DNA, 25 bp, Homo sapien
gcgtagatggtgttcctgatggcct

SEQ ID NO: 2719263 - DNA, 25 bp, Homo sapien
atgcttatgtctgatatgctcctga

SEQ ID NO: 2719264 - DNA, 25 bp, Homo sapien
tgcttatgtctgatatgctcctgaa

SEQ ID NO: 2719265 - DNA, 25 bp, Homo sapien
cacgccggggcaccttgatatcaaa

SEQ ID NO: 2719266 - DNA, 25 bp, Homo sapien
gatggtctttcgaattgcctgtagg

SEQ ID NO: 2719267 - DNA, 25 bp, Homo sapien
tccctcccagtcacagatggtcttt

SEQ ID NO: 2719268 - DNA, 25 bp, Homo sapien
catgggtcattagggggctctcgcc

SEQ ID NO: 2719269 - DNA, 25 bp, Homo sapien
agggtcgggggtgggcctcagatgg

SEQ ID NO: 2719270 - DNA, 25 bp, Homo sapien
gggggtgggcctcagatggtccatc

SEQ ID NO: 2719271 - DNA, 25 bp, Homo sapien
ggtcgggggtgggcctcagatggtc

SEQ ID NO: 2719272 - DNA, 25 bp, Homo sapien
tcgggggtgggcctcagatggtcca

SEQ ID NO: 2719273 - DNA, 25 bp, Homo sapien
agcctcttcggccctgtgtgccacc

SEQ ID NO: 2719274 - DNA, 25 bp, Homo sapien
caccagtggggtgaaacaaagccct

SEQ ID NO: 2719275 - DNA, 25 bp, Homo sapien
gcctcttcggccctgtgtgccacca

SEQ ID NO: 2719276 - DNA, 25 bp, Homo sapien
ttgtgaaagtcctctatggcgagga

SEQ ID NO: 2719277 - DNA, 25 bp, Homo sapien
tcagggtcttcttggagccgctttt

SEQ ID NO: 2719278 - DNA, 25 bp, Homo sapien
cactgatgttgagcagatgtgtgaa

SEQ ID NO: 2719279 - DNA, 25 bp, Homo sapien
agtgattcaagcatggtccgcacca

SEQ ID NO: 2719280 - DNA, 25 bp, Homo sapien
aggtcacaacactgctgcagggctt

SEQ ID NO: 2719281 - DNA, 25 bp, Homo sapien
gagaggtcacaacactgctgcaggg

SEQ ID NO: 2719282 - DNA, 25 bp, Homo sapien
gggagaggtcacaacactgctgcag

SEQ ID NO: 2719283 - DNA, 25 bp, Homo sapien
ctgggagaggtcacaacactgctgc

SEQ ID NO: 2719284 - DNA, 25 bp, Homo sapien
ggaactggattcgtcggcccatggt

SEQ ID NO: 2719285 - DNA, 25 bp, Homo sapien
gaatccagggcatggacatctcgat

SEQ ID NO: 2719286 - DNA, 25 bp, Homo sapien
ttcgtcggcccatggttaactccag

SEQ ID NO: 2719287 - DNA, 25 bp, Homo sapien
tctttggtttccaggatatggtccg

SEQ ID NO: 2719288 - DNA, 25 bp, Homo sapien
agccacttgctggcccaatcctgcc

SEQ ID NO: 2719289 - DNA, 25 bp, Homo sapien
ccctgtggtgggacatatggcctca

SEQ ID NO: 2719290 - DNA, 25 bp, Homo sapien
tgtcaactcagtgcttccttctgga

SEQ ID NO: 2719291 - DNA, 25 bp, Homo sapien
aagaacggatctccctggcaaactg

SEQ ID NO: 2719292 - DNA, 25 bp, Homo sapien
cagttgggctgggaaacttcagaat

SEQ ID NO: 2719293 - DNA, 25 bp, Homo sapien
ttcttttctgagcatagctgttatg

SEQ ID NO: 2719294 - DNA, 25 bp, Homo sapien
ttttctgagcatagctgttatgagg

SEQ ID NO: 2719295 - DNA, 25 bp, Homo sapien
atgattcttttctgagcatagctgt

SEQ ID NO: 2719296 - DNA, 25 bp, Homo sapien
tgattcttttctgagcatagctgtt

SEQ ID NO: 2719297 - DNA, 25 bp, Homo sapien
tcatttgggactaaaacacatcagg

SEQ ID NO: 2719298 - DNA, 25 bp, Homo sapien
tcatccctctcttacgttccttgag

SEQ ID NO: 2719299 - DNA, 25 bp, Homo sapien
cttgagcctccaccgcttagaagca

SEQ ID NO: 2719300 - DNA, 25 bp, Homo sapien
aagcaacttactttacagtcagtcc

SEQ ID NO: 2719301 - DNA, 25 bp, Homo sapien
cccttaaggaagacagctttatact

SEQ ID NO: 2719302 - DNA, 25 bp, Homo sapien
cacagccagccgcttgctaataacc

SEQ ID NO: 2719303 - DNA, 25 bp, Homo sapien
agccagccgcttgctaataaccccc

SEQ ID NO: 2719304 - DNA, 25 bp, Homo sapien
cttaaggaagacagctttatacttg

SEQ ID NO: 2719305 - DNA, 25 bp, Homo sapien
gcatagtaggcgctgtcgttgtaca

SEQ ID NO: 2719306 - DNA, 25 bp, Homo sapien
ttctatctcatcgtacaggaactgc

SEQ ID NO: 2719307 - DNA, 25 bp, Homo sapien
taggcgctgtcgttgtacagatcca

SEQ ID NO: 2719308 - DNA, 25 bp, Homo sapien
ttttaaacttggtcagagcatagta

SEQ ID NO: 2719309 - DNA, 25 bp, Homo sapien
tagtaagcaaagatctggtctgcca

SEQ ID NO: 2719310 - DNA, 25 bp, Homo sapien
gtaagcaaagatctggtctgccagc

SEQ ID NO: 2719311 - DNA, 25 bp, Homo sapien
tgccagcttgtagacaaactgatca

SEQ ID NO: 2719312 - DNA, 25 bp, Homo sapien
tgtagtaagcaaagatctggtctgc

SEQ ID NO: 2719313 - DNA, 25 bp, Homo sapien
tcgaaaacgtttatccaacaggaca

SEQ ID NO: 2719314 - DNA, 25 bp, Homo sapien
cagtgtttcatagcgattggacggt

SEQ ID NO: 2719315 - DNA, 25 bp, Homo sapien
gatgacgccataattcttacactca

SEQ ID NO: 2719316 - DNA, 25 bp, Homo sapien
cggtggatacggaatgatgacgcca

SEQ ID NO: 2719317 - DNA, 25 bp, Homo sapien
atgctaacttcgcagctgctctctc

SEQ ID NO: 2719318 - DNA, 25 bp, Homo sapien
ggcctgatttctgatctctatgcta

SEQ ID NO: 2719319 - DNA, 25 bp, Homo sapien
tctgatctctatgctaacttcgcag

SEQ ID NO: 2719320 - DNA, 25 bp, Homo sapien
gatctctatgctaacttcgcagctg

SEQ ID NO: 2719321 - DNA, 25 bp, Homo sapien
ccaggctcggaaatccacactggca

SEQ ID NO: 2719322 - DNA, 25 bp, Homo sapien
ggctcggaaatccacactggcaaca

SEQ ID NO: 2719323 - DNA, 25 bp, Homo sapien
tggcaacatgccgggcagacaatac

SEQ ID NO: 2719324 - DNA, 25 bp, Homo sapien
actggcaacatgccgggcagacaat

SEQ ID NO: 2719325 - DNA, 25 bp, Homo sapien
tcctcacttagaccggcacttgggc

SEQ ID NO: 2719326 - DNA, 25 bp, Homo sapien
ccatctctaagtggcagtcccagct

SEQ ID NO: 2719327 - DNA, 25 bp, Homo sapien
gacaaaggctttggttgccataact

SEQ ID NO: 2719328 - DNA, 25 bp, Homo sapien
tttcatttcaaaggcgccacagtct

SEQ ID NO: 2719329 - DNA, 25 bp, Homo sapien
cagagatgcgctgggtaatgagtct

SEQ ID NO: 2719330 - DNA, 25 bp, Homo sapien
tcaagtcaattgatctacccaacag

SEQ ID NO: 2719331 - DNA, 25 bp, Homo sapien
caaggatttatacatggcggcagag

SEQ ID NO: 2719332 - DNA, 25 bp, Homo sapien
caaagcggctgatagcttggtccaa

SEQ ID NO: 2719333 - DNA, 25 bp, Homo sapien
cctgtgaagccaaccctcttgtgca

SEQ ID NO: 2719334 - DNA, 25 bp, Homo sapien
cccaaggcaatcaggaacgtaagat

SEQ ID NO: 2719335 - DNA, 25 bp, Homo sapien
gaatggtaaaccagctgcaaagccc

SEQ ID NO: 2719336 - DNA, 25 bp, Homo sapien
tgctcagcctgcaggatcctaagga

SEQ ID NO: 2719337 - DNA, 25 bp, Homo sapien
actatcagcaccatccttttctaga

SEQ ID NO: 2719338 - DNA, 25 bp, Homo sapien
catttgtaggtgtactgcggcatta

SEQ ID NO: 2719339 - DNA, 25 bp, Homo sapien
tgcggcattacgtacattcacatgg

SEQ ID NO: 2719340 - DNA, 25 bp, Homo sapien
gactatgcaagtatcctatttcttc

SEQ ID NO: 2719341 - DNA, 25 bp, Homo sapien
tagtggacccattgtagcagtagtt

SEQ ID NO: 2719342 - DNA, 25 bp, Homo sapien
tcatatgcttacagagcagccgatg

SEQ ID NO: 2719343 - DNA, 25 bp, Homo sapien
tgattggcctctcggaacatggcat

SEQ ID NO: 2719344 - DNA, 25 bp, Homo sapien
tgcgtgagccggttaatctccagca

SEQ ID NO: 2719345 - DNA, 25 bp, Homo sapien
ggcaggtttgtctcgttgtggttct

SEQ ID NO: 2719346 - DNA, 25 bp, Homo sapien
tctcgttgtggttcttgggtgaaag

SEQ ID NO: 2719347 - DNA, 25 bp, Homo sapien
gaaaggaatggcagtccgcacaaaa

SEQ ID NO: 2719348 - DNA, 25 bp, Homo sapien
ggatccatagaggtaataaggctgg

SEQ ID NO: 2719349 - DNA, 25 bp, Homo sapien
ggatgcccctgatgcgggtgcctta

SEQ ID NO: 2719350 - DNA, 25 bp, Homo sapien
tcactgctattgtaggtcacctggg

SEQ ID NO: 2719351 - DNA, 25 bp, Homo sapien
gaatgccccatgacaaagcttctca

SEQ ID NO: 2719352 - DNA, 25 bp, Homo sapien
taaagctttccacacagtaggtcgt

SEQ ID NO: 2719353 - DNA, 25 bp, Homo sapien
gtggaaatgccacgcaagaactcca

SEQ ID NO: 2719354 - DNA, 25 bp, Homo sapien
tggtggaaatgccacgcaagaactc

SEQ ID NO: 2719355 - DNA, 25 bp, Homo sapien
ggaaatgccacgcaagaactccaga

SEQ ID NO: 2719356 - DNA, 25 bp, Homo sapien
aaatgccacgcaagaactccagaga

SEQ ID NO: 2719357 - DNA, 25 bp, Homo sapien
catgagccgcgatggtcttacaggg

SEQ ID NO: 2719358 - DNA, 25 bp, Homo sapien
tccacaccctggataagagtccgct

SEQ ID NO: 2719359 - DNA, 25 bp, Homo sapien
tatgtacaggcccaactggaacagc

SEQ ID NO: 2719360 - DNA, 25 bp, Homo sapien
aaggtgcctcgaacgatcagctccg

SEQ ID NO: 2719361 - DNA, 25 bp, Homo sapien
tctttgtctgtaagatgagggcaac

SEQ ID NO: 2719362 - DNA, 25 bp, Homo sapien
gcatgggtgcatctgttcttaggcc

SEQ ID NO: 2719363 - DNA, 25 bp, Homo sapien
catgagtgcccgtctcaaatgtgca

SEQ ID NO: 2719364 - DNA, 25 bp, Homo sapien
tatctgaaggatctcagctagggtg

SEQ ID NO: 2719365 - DNA, 25 bp, Homo sapien
cacagtacttggagcagaaacagga

SEQ ID NO: 2719366 - DNA, 25 bp, Homo sapien
gatcactgagctcacagtacttgga

SEQ ID NO: 2719367 - DNA, 25 bp, Homo sapien
gggcaacagaaccaggaggctaaaa

SEQ ID NO: 2719368 - DNA, 25 bp, Homo sapien
gcagtgggcagaatgttctagatca

SEQ ID NO: 2719369 - DNA, 25 bp, Homo sapien
gggctgattatcttcacccataaaa

SEQ ID NO: 2719370 - DNA, 25 bp, Homo sapien
aataaatttcctggtaccgctggct

SEQ ID NO: 2719371 - DNA, 25 bp, Homo sapien
taacagcagaattaaatagtggtag

SEQ ID NO: 2719372 - DNA, 25 bp, Homo sapien
caaagagtgacgaagcgaatttcca

SEQ ID NO: 2719373 - DNA, 25 bp, Homo sapien
tagattcctagggttgctatcacaa

SEQ ID NO: 2719374 - DNA, 25 bp, Homo sapien
tgaaatcaaggctctcgcagaacca

SEQ ID NO: 2719375 - DNA, 25 bp, Homo sapien
ggatggaacctcaaagccagacggc

SEQ ID NO: 2719376 - DNA, 25 bp, Homo sapien
cagtttcttgggacgcttgtgttca

SEQ ID NO: 2719377 - DNA, 25 bp, Homo sapien
tttctgtggaaaaaggcttgagttc

SEQ ID NO: 2719378 - DNA, 25 bp, Homo sapien
ctgtggaaaaaggcttgagttctac

SEQ ID NO: 2719379 - DNA, 25 bp, Homo sapien
ttctgtggaaaaaggcttgagttct

SEQ ID NO: 2719380 - DNA, 25 bp, Homo sapien
tctgtggaaaaaggcttgagttcta

SEQ ID NO: 2719381 - DNA, 25 bp, Homo sapien
gttctgagtgtagttctcccaactg

SEQ ID NO: 2719382 - DNA, 25 bp, Homo sapien
actggaattgcaaaaatcttgtaca

SEQ ID NO: 2719383 - DNA, 25 bp, Homo sapien
aaaatcttgtacatggaacatgcaa

SEQ ID NO: 2719384 - DNA, 25 bp, Homo sapien
acccagcccaaaacttagttctgag

SEQ ID NO: 2719385 - DNA, 25 bp, Homo sapien
gaagtgggtacggctgattccaaag

SEQ ID NO: 2719386 - DNA, 25 bp, Homo sapien
ctgaagtgggtacggctgattccaa

SEQ ID NO: 2719387 - DNA, 25 bp, Homo sapien
aagtgggtacggctgattccaaagc

SEQ ID NO: 2719388 - DNA, 25 bp, Homo sapien
cctgaagtgggtacggctgattcca

SEQ ID NO: 2719389 - DNA, 25 bp, Homo sapien
tccatgaccacagcgatgccctgat

SEQ ID NO: 2719390 - DNA, 25 bp, Homo sapien
ttgaaatgaggtggccccacgaaat

SEQ ID NO: 2719391 - DNA, 25 bp, Homo sapien
cagcgatgccctgataacccaggag

SEQ ID NO: 2719392 - DNA, 25 bp, Homo sapien
ccaggagtctgcagatagtcttgaa

SEQ ID NO: 2719393 - DNA, 25 bp, Homo sapien
ggcatcacctctatcagtgttttca

SEQ ID NO: 2719394 - DNA, 25 bp, Homo sapien
cttgggcatcacctctatcagtgtt

SEQ ID NO: 2719395 - DNA, 25 bp, Homo sapien
tttcacatactggagaatggttcct

SEQ ID NO: 2719396 - DNA, 25 bp, Homo sapien
catgtcggggcaagcggcatatctt

SEQ ID NO: 2719397 - DNA, 25 bp, Homo sapien
tcagtgggaagttgacactgctcag

SEQ ID NO: 2719398 - DNA, 25 bp, Homo sapien
tggtcagtgggaagttgacactgct

SEQ ID NO: 2719399 - DNA, 25 bp, Homo sapien
ggtgaatcggggtggtcagtgggaa

SEQ ID NO: 2719400 - DNA, 25 bp, Homo sapien
ggaagttgacactgctcagtagggt

SEQ ID NO: 2719401 - DNA, 25 bp, Homo sapien
cagagcttgctctatgaggaggcag

SEQ ID NO: 2719402 - DNA, 25 bp, Homo sapien
gcttgctctatgaggaggcagaaga

SEQ ID NO: 2719403 - DNA, 25 bp, Homo sapien
gagctctgcgtactcaatgatgtcc

SEQ ID NO: 2719404 - DNA, 25 bp, Homo sapien
tctggaacacgtctgttttgagctc

SEQ ID NO: 2719405 - DNA, 25 bp, Homo sapien
tcatgggatgtttgattccctacag

SEQ ID NO: 2719406 - DNA, 25 bp, Homo sapien
tatctaatgagtgagatggagcagg

SEQ ID NO: 2719407 - DNA, 25 bp, Homo sapien
cagccaaggaagctagaatcatggg

SEQ ID NO: 2719408 - DNA, 25 bp, Homo sapien
taacagtagacacatgatttcggtg

SEQ ID NO: 2719409 - DNA, 25 bp, Homo sapien
ttcctcaacctcaagaacacatcga

SEQ ID NO: 2719410 - DNA, 25 bp, Homo sapien
aacacatcgagttctctgtcttctg

SEQ ID NO: 2719411 - DNA, 25 bp, Homo sapien
tcaacctcaagaacacatcgagttc

SEQ ID NO: 2719412 - DNA, 25 bp, Homo sapien
caagaacacatcgagttctctgtct

SEQ ID NO: 2719413 - DNA, 25 bp, Homo sapien
tagttcttactgcatgagctttaca

SEQ ID NO: 2719414 - DNA, 25 bp, Homo sapien
tacatgtggtgtatctttctggcct

SEQ ID NO: 2719415 - DNA, 25 bp, Homo sapien
taacagtgcatgttctcccctcagc

SEQ ID NO: 2719416 - DNA, 25 bp, Homo sapien
tcaatatgacaacactaccaatggt

SEQ ID NO: 2719417 - DNA, 25 bp, Homo sapien
gaggcagagcaaatacaagtggtca

SEQ ID NO: 2719418 - DNA, 25 bp, Homo sapien
cagagcaaatacaagtggtcatgca

SEQ ID NO: 2719419 - DNA, 25 bp, Homo sapien
ctcgacacctgtaggactgggccga

SEQ ID NO: 2719420 - DNA, 25 bp, Homo sapien
actgggccgactgggagcaccatgt

SEQ ID NO: 2719421 - DNA, 25 bp, Homo sapien
gatgctaaaagagattcccactagg

SEQ ID NO: 2719422 - DNA, 25 bp, Homo sapien
cacaacctagaactgctcctggcaa

SEQ ID NO: 2719423 - DNA, 25 bp, Homo sapien
actctgattgttacgactttgctcg

SEQ ID NO: 2719424 - DNA, 25 bp, Homo sapien
tgaggcatcccagagtaacatcctg

SEQ ID NO: 2719425 - DNA, 25 bp, Homo sapien
tagaggaagcgcaaacagtccccat

SEQ ID NO: 2719426 - DNA, 25 bp, Homo sapien
cctgggtctgctgatctgtgtaaaa

SEQ ID NO: 2719427 - DNA, 25 bp, Homo sapien
tatcaattagctgtctggagagtcc

SEQ ID NO: 2719428 - DNA, 25 bp, Homo sapien
tcagtgatacatgtgagtgaccacc

SEQ ID NO: 2719429 - DNA, 25 bp, Homo sapien
tggtgagggcagtaatgctctcaaa

SEQ ID NO: 2719430 - DNA, 25 bp, Homo sapien
ctctggtgagggcagtaatgctctc

SEQ ID NO: 2719431 - DNA, 25 bp, Homo sapien
tgactgaccggagtgtttctgtggt

SEQ ID NO: 2719432 - DNA, 25 bp, Homo sapien
tctggtgagggcagtaatgctctca

SEQ ID NO: 2719433 - DNA, 25 bp, Homo sapien
ttcccaagtcctgatatgttcacac

SEQ ID NO: 2719434 - DNA, 25 bp, Homo sapien
atgttcacactagcaggttgttttt

SEQ ID NO: 2719435 - DNA, 25 bp, Homo sapien
caagtcctgatatgttcacactagc

SEQ ID NO: 2719436 - DNA, 25 bp, Homo sapien
tgttcacactagcaggttgtttttc

SEQ ID NO: 2719437 - DNA, 25 bp, Homo sapien
acctcactgtgttctacttcataag

SEQ ID NO: 2719438 - DNA, 25 bp, Homo sapien
cctcactgtgttctacttcataagt

SEQ ID NO: 2719439 - DNA, 25 bp, Homo sapien
tcattctgtgtaagagtctccagac

SEQ ID NO: 2719440 - DNA, 25 bp, Homo sapien
gtgtaagagtctccagacttaatga

SEQ ID NO: 2719441 - DNA, 25 bp, Homo sapien
ttccccttggcctcattctgtgtaa

SEQ ID NO: 2719442 - DNA, 25 bp, Homo sapien
tccccttggcctcattctgtgtaag

SEQ ID NO: 2719443 - DNA, 25 bp, Homo sapien
tgaagatgaaacacaccatggagcc

SEQ ID NO: 2719444 - DNA, 25 bp, Homo sapien
taagaactctgtgaggtagctcctc

SEQ ID NO: 2719445 - DNA, 25 bp, Homo sapien
gcttcttaagcgctggagacttcgc

SEQ ID NO: 2719446 - DNA, 25 bp, Homo sapien
caactagatgtgaggcctaggccct

SEQ ID NO: 2719447 - DNA, 25 bp, Homo sapien
gacaaggacatcaaggctggtagta

SEQ ID NO: 2719448 - DNA, 25 bp, Homo sapien
tgtgagatagggctcactgtcccca

SEQ ID NO: 2719449 - DNA, 25 bp, Homo sapien
tcctaactaggtccgcacacagatg

SEQ ID NO: 2719450 - DNA, 25 bp, Homo sapien
tctttccaagtagggagtcagtaag

SEQ ID NO: 2719451 - DNA, 25 bp, Homo sapien
gcaaatcgcagacctcctcctgaga

SEQ ID NO: 2719452 - DNA, 25 bp, Homo sapien
tgatgtagactctaggcaagatgtt

SEQ ID NO: 2719453 - DNA, 25 bp, Homo sapien
gactctaggcaagatgttttggaag

SEQ ID NO: 2719454 - DNA, 25 bp, Homo sapien
ttttggaagggtgcggcatggagca

SEQ ID NO: 2719455 - DNA, 25 bp, Homo sapien
actgcaattaggaagtgagaataag

SEQ ID NO: 2719456 - DNA, 25 bp, Homo sapien
gctgactagatctgagttgactgca

SEQ ID NO: 2719457 - DNA, 25 bp, Homo sapien
agaataaggttcaaacgccagttgg

SEQ ID NO: 2719458 - DNA, 25 bp, Homo sapien
caaacgccagttggctattcagctg

SEQ ID NO: 2719459 - DNA, 25 bp, Homo sapien
gcggggcatacttggcttccagacg

SEQ ID NO: 2719460 - DNA, 25 bp, Homo sapien
cagacgtttcatccggacctccagg

SEQ ID NO: 2719461 - DNA, 25 bp, Homo sapien
cggggcatacttggcttccagacgt

SEQ ID NO: 2719462 - DNA, 25 bp, Homo sapien
cttccagacgtttcatccggacctc

SEQ ID NO: 2719463 - DNA, 25 bp, Homo sapien
tgatgttcatcgtgactcgtactgg

SEQ ID NO: 2719464 - DNA, 25 bp, Homo sapien
gaggttgccaccatgataaactagg

SEQ ID NO: 2719465 - DNA, 25 bp, Homo sapien
gcttgcttcatccaattgactgtgc

SEQ ID NO: 2719466 - DNA, 25 bp, Homo sapien
tcacccttgttagaacactacagaa

SEQ ID NO: 2719467 - DNA, 25 bp, Homo sapien
ctgctccctgcataatctgaattct

SEQ ID NO: 2719468 - DNA, 25 bp, Homo sapien
ggagatagcacatgccttttgtttc

SEQ ID NO: 2719469 - DNA, 25 bp, Homo sapien
tgtttctccgctctccccctatttc

SEQ ID NO: 2719470 - DNA, 25 bp, Homo sapien
cttgaaaggagatagcacatgcctt

SEQ ID NO: 2719471 - DNA, 25 bp, Homo sapien
tgtcctccgctgaggatttgagtcc

SEQ ID NO: 2719472 - DNA, 25 bp, Homo sapien
atctcttaaacagtcagcattggct

SEQ ID NO: 2719473 - DNA, 25 bp, Homo sapien
acaccaaagaggaccgccggaatgc

SEQ ID NO: 2719474 - DNA, 25 bp, Homo sapien
gccggaatgcgagttcaaaagcaga

SEQ ID NO: 2719475 - DNA, 25 bp, Homo sapien
gatgaggctttgcatcgtgctccaa

SEQ ID NO: 2719476 - DNA, 25 bp, Homo sapien
catgacgtctgtgcagatgaggctt

SEQ ID NO: 2719477 - DNA, 25 bp, Homo sapien
ggcttcctcagcatgacgtctgtgc

SEQ ID NO: 2719478 - DNA, 25 bp, Homo sapien
accattttcagaaggaggttggtgg

SEQ ID NO: 2719479 - DNA, 25 bp, Homo sapien
ttcagagcagggcacaaaattgatg

SEQ ID NO: 2719480 - DNA, 25 bp, Homo sapien
tgcacctgaaattggttcaccagaa

SEQ ID NO: 2719481 - DNA, 25 bp, Homo sapien
gatgatcctgaatgcaacagcaggg

SEQ ID NO: 2719482 - DNA, 25 bp, Homo sapien
agattcccgaactctggagctggct

SEQ ID NO: 2719483 - DNA, 25 bp, Homo sapien
cagtacacgaactgcatggcgctcc

SEQ ID NO: 2719484 - DNA, 25 bp, Homo sapien
ggtcaccctcgcgagcaatggcgat

SEQ ID NO: 2719485 - DNA, 25 bp, Homo sapien
tcgacgtgcatgacgccattggtgg

SEQ ID NO: 2719486 - DNA, 25 bp, Homo sapien
tggaactccacacactcatcgacgt

SEQ ID NO: 2719487 - DNA, 25 bp, Homo sapien
tcagctgtgaactcgttggttccca

SEQ ID NO: 2719488 - DNA, 25 bp, Homo sapien
tgctctaaggactcctaaaggctcc

SEQ ID NO: 2719489 - DNA, 25 bp, Homo sapien
gccccatgacttgcaggagcacagg

SEQ ID NO: 2719490 - DNA, 25 bp, Homo sapien
tcttactatcaaacccttactgggc

SEQ ID NO: 2719491 - DNA, 25 bp, Homo sapien
tcctcattttccagtagtacagtgt

SEQ ID NO: 2719492 - DNA, 25 bp, Homo sapien
gaagcagctggagtgagaggtcggg

SEQ ID NO: 2719493 - DNA, 25 bp, Homo sapien
cagctggagtgagaggtcgggggag

SEQ ID NO: 2719494 - DNA, 25 bp, Homo sapien
gaggaagcagctggagtgagaggtc

SEQ ID NO: 2719495 - DNA, 25 bp, Homo sapien
gcagctggagtgagaggtcggggga

SEQ ID NO: 2719496 - DNA, 25 bp, Homo sapien
agcccagttcaagccatcgccgaaa

SEQ ID NO: 2719497 - DNA, 25 bp, Homo sapien
tcgaacaggtcaaagcgacgctgct

SEQ ID NO: 2719498 - DNA, 25 bp, Homo sapien
tgctggcccagcaggacaatgatgg

SEQ ID NO: 2719499 - DNA, 25 bp, Homo sapien
tagcaggtggtaacagaagtcgaac

SEQ ID NO: 2719500 - DNA, 25 bp, Homo sapien
ttgctgcttggttctttgctgcggg

SEQ ID NO: 2719501 - DNA, 25 bp, Homo sapien
cataccacctttgctgcttggttct

SEQ ID NO: 2719502 - DNA, 25 bp, Homo sapien
gctgcttggttctttgctgcgggcc

SEQ ID NO: 2719503 - DNA, 25 bp, Homo sapien
tgcttggttctttgctgcgggccat

SEQ ID NO: 2719504 - DNA, 25 bp, Homo sapien
ggatggaagtttggacactacaaca

SEQ ID NO: 2719505 - DNA, 25 bp, Homo sapien
gataactttttcacccctcaggatg

SEQ ID NO: 2719506 - DNA, 25 bp, Homo sapien
tcatgcatcaaagggacaccatgag

SEQ ID NO: 2719507 - DNA, 25 bp, Homo sapien
tgagtggacaaacacaacgtggtct

SEQ ID NO: 2719508 - DNA, 25 bp, Homo sapien
tttgttcaggatggcaaaaacctca

SEQ ID NO: 2719509 - DNA, 25 bp, Homo sapien
tgatacttcctgatccggtcggcca

SEQ ID NO: 2719510 - DNA, 25 bp, Homo sapien
cagtggaactgtctgtctccacgga

SEQ ID NO: 2719511 - DNA, 25 bp, Homo sapien
aaaaacctcattgttcaagatctga

SEQ ID NO: 2719512 - DNA, 25 bp, Homo sapien
tagcaagtggtggccaaggactggt

SEQ ID NO: 2719513 - DNA, 25 bp, Homo sapien
gcaagtggtggccaaggactggtgg

SEQ ID NO: 2719514 - DNA, 25 bp, Homo sapien
ttagcaagtggtggccaaggactgg

SEQ ID NO: 2719515 - DNA, 25 bp, Homo sapien
agcaagtggtggccaaggactggtg

SEQ ID NO: 2719516 - DNA, 25 bp, Homo sapien
tatgttcttaaaatctcagggccac

SEQ ID NO: 2719517 - DNA, 25 bp, Homo sapien
gaagcctatgtggtagaatccctgg

SEQ ID NO: 2719518 - DNA, 25 bp, Homo sapien
tgaagtagtaagctgaggcatgccc

SEQ ID NO: 2719519 - DNA, 25 bp, Homo sapien
tgatgtgcaacagaacaacttgggt

SEQ ID NO: 2719520 - DNA, 25 bp, Homo sapien
gccagttactacttggaacctcctc

SEQ ID NO: 2719521 - DNA, 25 bp, Homo sapien
gaggatctgccagttactacttgga

SEQ ID NO: 2719522 - DNA, 25 bp, Homo sapien
ctccagacaggaggatctgccagtt

SEQ ID NO: 2719523 - DNA, 25 bp, Homo sapien
aggaggatctgccagttactacttg

SEQ ID NO: 2719524 - DNA, 25 bp, Homo sapien
gactcggcccagagggtcaaattta

SEQ ID NO: 2719525 - DNA, 25 bp, Homo sapien
tcagtctactgggatcaagtctcct

SEQ ID NO: 2719526 - DNA, 25 bp, Homo sapien
tcctgaaggtaatgtgactcggccc

SEQ ID NO: 2719527 - DNA, 25 bp, Homo sapien
ctttctgctgaaagggaagacctca

SEQ ID NO: 2719528 - DNA, 25 bp, Homo sapien
aattttataatagctactctaacta

SEQ ID NO: 2719529 - DNA, 25 bp, Homo sapien
ttataatagctactctaactatatc

SEQ ID NO: 2719530 - DNA, 25 bp, Homo sapien
tggcaatgctaatctacattcccac

SEQ ID NO: 2719531 - DNA, 25 bp, Homo sapien
taatagctactctaactatatctca

SEQ ID NO: 2719532 - DNA, 25 bp, Homo sapien
ttggttgctcccactttggtgatgg

SEQ ID NO: 2719533 - DNA, 25 bp, Homo sapien
caattcttccttcggttggaagtca

SEQ ID NO: 2719534 - DNA, 25 bp, Homo sapien
tgcaattcttccttcggttggaagt

SEQ ID NO: 2719535 - DNA, 25 bp, Homo sapien
tttgcaattcttccttcggttggaa

SEQ ID NO: 2719536 - DNA, 25 bp, Homo sapien
tgggcagggaccacacgttgtactt

SEQ ID NO: 2719537 - DNA, 25 bp, Homo sapien
ctttcggatgggcagggaccacacg

SEQ ID NO: 2719538 - DNA, 25 bp, Homo sapien
gcagggaccacacgttgtacttctg

SEQ ID NO: 2719539 - DNA, 25 bp, Homo sapien
cggatgggcagggaccacacgttgt

SEQ ID NO: 2719540 - DNA, 25 bp, Homo sapien
gcacccatacagtgtagataacata

SEQ ID NO: 2719541 - DNA, 25 bp, Homo sapien
ctgcacccatacagtgtagataaca

SEQ ID NO: 2719542 - DNA, 25 bp, Homo sapien
cccatacagtgtagataacatattt

SEQ ID NO: 2719543 - DNA, 25 bp, Homo sapien
cacccatacagtgtagataacatat

SEQ ID NO: 2719544 - DNA, 25 bp, Homo sapien
tgaatgcatatgtggacagtggcac

SEQ ID NO: 2719545 - DNA, 25 bp, Homo sapien
cctgaatggaaacccgagttggaga

SEQ ID NO: 2719546 - DNA, 25 bp, Homo sapien
gatgaagatcttccaagatatactt

SEQ ID NO: 2719547 - DNA, 25 bp, Homo sapien
caggaaacggggcactgacacctgg

SEQ ID NO: 2719548 - DNA, 25 bp, Homo sapien
ggaaacaggaaacggggcactgaca

SEQ ID NO: 2719549 - DNA, 25 bp, Homo sapien
gggagagtgacgcgtcccagagtgg

SEQ ID NO: 2719550 - DNA, 25 bp, Homo sapien
tggggagagtgacgcgtcccagagt

SEQ ID NO: 2719551 - DNA, 25 bp, Homo sapien
gggtggggagagtgacgcgtcccag

SEQ ID NO: 2719552 - DNA, 25 bp, Homo sapien
agagtgacgcgtcccagagtgggag

SEQ ID NO: 2719553 - DNA, 25 bp, Homo sapien
gccgcgacttgtcccccgcgtggct

SEQ ID NO: 2719554 - DNA, 25 bp, Homo sapien
cgcgtggctcgcgcgcgagaagccg

SEQ ID NO: 2719555 - DNA, 25 bp, Homo sapien
gcccggggcacacgaaccgacgcgc

SEQ ID NO: 2719556 - DNA, 25 bp, Homo sapien
cacacgaaccgacgcgcgggcggac

SEQ ID NO: 2719557 - DNA, 25 bp, Homo sapien
cgttctcgcagctggtgttgctgac

SEQ ID NO: 2719558 - DNA, 25 bp, Homo sapien
tctcgcagctggtgttgctgacccg

SEQ ID NO: 2719559 - DNA, 25 bp, Homo sapien
tcgcagctggtgttgctgacccgca

SEQ ID NO: 2719560 - DNA, 25 bp, Homo sapien
cagctggtgttgctgacccgcagct

SEQ ID NO: 2719561 - DNA, 25 bp, Homo sapien
tcttcttgaggatgacgctgctgcc

SEQ ID NO: 2719562 - DNA, 25 bp, Homo sapien
ggaagctagacaggaatgccaggcc

SEQ ID NO: 2719563 - DNA, 25 bp, Homo sapien
gccacgagtcgcaagaggcctttct

SEQ ID NO: 2719564 - DNA, 25 bp, Homo sapien
ggcccaggccgatgtagaagccata

SEQ ID NO: 2719565 - DNA, 25 bp, Homo sapien
gccctgggccctatcctctcctggc

SEQ ID NO: 2719566 - DNA, 25 bp, Homo sapien
ctgccctgggccctatcctctcctg

SEQ ID NO: 2719567 - DNA, 25 bp, Homo sapien
tgccctgggccctatcctctcctgg

SEQ ID NO: 2719568 - DNA, 25 bp, Homo sapien
catctttcaggtagccgaagcctcc

SEQ ID NO: 2719569 - DNA, 25 bp, Homo sapien
tctttcaggtagccgaagcctccat

SEQ ID NO: 2719570 - DNA, 25 bp, Homo sapien
ctttcaggtagccgaagcctccatc

SEQ ID NO: 2719571 - DNA, 25 bp, Homo sapien
atctttcaggtagccgaagcctcca

SEQ ID NO: 2719572 - DNA, 25 bp, Homo sapien
atgaggacactcagcgctcccagag

SEQ ID NO: 2719573 - DNA, 25 bp, Homo sapien
tgcaaatgcgtaggctccaaagttg

SEQ ID NO: 2719574 - DNA, 25 bp, Homo sapien
agcgctcccagaggcgtgacgactg

SEQ ID NO: 2719575 - DNA, 25 bp, Homo sapien
gcgtgacgactgttgcaggtgcaaa

SEQ ID NO: 2719576 - DNA, 25 bp, Homo sapien
tctccttcaaatagggctccaggac

SEQ ID NO: 2719577 - DNA, 25 bp, Homo sapien
ggttacgccaacaatcagagtctcc

SEQ ID NO: 2719578 - DNA, 25 bp, Homo sapien
tacgccaacaatcagagtctccttc

SEQ ID NO: 2719579 - DNA, 25 bp, Homo sapien
agagtctccttcaaatagggctcca

SEQ ID NO: 2719580 - DNA, 25 bp, Homo sapien
tccatgatggtagtgaccttctctt

SEQ ID NO: 2719581 - DNA, 25 bp, Homo sapien
atcactgtgcttccggccacacaga

SEQ ID NO: 2719582 - DNA, 25 bp, Homo sapien
cagactctccctcaggaaatatgag

SEQ ID NO: 2719583 - DNA, 25 bp, Homo sapien
catgatggtagtgaccttctcttcc

SEQ ID NO: 2719584 - DNA, 25 bp, Homo sapien
catgaacacgcccaagatgatggtg

SEQ ID NO: 2719585 - DNA, 25 bp, Homo sapien
cagtctaataacagtgggttccggg

SEQ ID NO: 2719586 - DNA, 25 bp, Homo sapien
gacatgctgtaccactccttgaaga

SEQ ID NO: 2719587 - DNA, 25 bp, Homo sapien
tgatggacgaggtaacgaccaccgt

SEQ ID NO: 2719588 - DNA, 25 bp, Homo sapien
aaaggtactccccatagcaggtggt

SEQ ID NO: 2719589 - DNA, 25 bp, Homo sapien
tcttcccaacggcatagagatggca

SEQ ID NO: 2719590 - DNA, 25 bp, Homo sapien
cacagagtgcaggtagagtcacaca

SEQ ID NO: 2719591 - DNA, 25 bp, Homo sapien
tagcccctagtatccagagagcctg

SEQ ID NO: 2719592 - DNA, 25 bp, Homo sapien
catgggaacgccaactggaaaggtc

SEQ ID NO: 2719593 - DNA, 25 bp, Homo sapien
tcaggctgaggatggcccaaagtcc

SEQ ID NO: 2719594 - DNA, 25 bp, Homo sapien
ttaaccacgtgtataacagctctgc

SEQ ID NO: 2719595 - DNA, 25 bp, Homo sapien
caatcttgtaactgcctgctagcca

SEQ ID NO: 2719596 - DNA, 25 bp, Homo sapien
cacagccttaaaagttgagaagtgg

SEQ ID NO: 2719597 - DNA, 25 bp, Homo sapien
gggtgaggacccagaacactgtcct

SEQ ID NO: 2719598 - DNA, 25 bp, Homo sapien
ctcttaggaaggatgtgcagtggtt

SEQ ID NO: 2719599 - DNA, 25 bp, Homo sapien
gttccttccagatacaaagcccagg

SEQ ID NO: 2719600 - DNA, 25 bp, Homo sapien
catatgcagatgaaagggcacctgt

SEQ ID NO: 2719601 - DNA, 25 bp, Homo sapien
cacctgtggtctggagaacgaggcc

SEQ ID NO: 2719602 - DNA, 25 bp, Homo sapien
tcctgactatgagcttgaatgggca

SEQ ID NO: 2719603 - DNA, 25 bp, Homo sapien
gaaagcagttggaatcctggccagg

SEQ ID NO: 2719604 - DNA, 25 bp, Homo sapien
gctagagaagttgttcctactcacc

SEQ ID NO: 2719605 - DNA, 25 bp, Homo sapien
ggctaatctgatcaacactgtggtt

SEQ ID NO: 2719606 - DNA, 25 bp, Homo sapien
ctgtggtatcggctaatctgatcaa

SEQ ID NO: 2719607 - DNA, 25 bp, Homo sapien
taccaaaaactggttgctagagaag

SEQ ID NO: 2719608 - DNA, 25 bp, Homo sapien
gtcagcatttgccaagcacttggga

SEQ ID NO: 2719609 - DNA, 25 bp, Homo sapien
gtgtcagcatttgccaagcacttgg

SEQ ID NO: 2719610 - DNA, 25 bp, Homo sapien
tcagcatttgccaagcacttgggag

SEQ ID NO: 2719611 - DNA, 25 bp, Homo sapien
ggtgtcagcatttgccaagcacttg

SEQ ID NO: 2719612 - DNA, 25 bp, Homo sapien
gagaaactagaaattggttaccaca

SEQ ID NO: 2719613 - DNA, 25 bp, Homo sapien
gtgtagacagctttttaggagaaac

SEQ ID NO: 2719614 - DNA, 25 bp, Homo sapien
aactagaaattggttaccacactgg

SEQ ID NO: 2719615 - DNA, 25 bp, Homo sapien
gtgcgtgcacatatacatcccttct

SEQ ID NO: 2719616 - DNA, 25 bp, Homo sapien
tatctctagggcaatgggaagcgga

SEQ ID NO: 2719617 - DNA, 25 bp, Homo sapien
tagagttatgccaccacaggcgaag

SEQ ID NO: 2719618 - DNA, 25 bp, Homo sapien
caaggtatcagcgtctcatgagggc

SEQ ID NO: 2719619 - DNA, 25 bp, Homo sapien
tgaggcctaccttccaacactgttg

SEQ ID NO: 2719620 - DNA, 25 bp, Homo sapien
gaggccctgaactgtccaatatgag

SEQ ID NO: 2719621 - DNA, 25 bp, Homo sapien
ggccttagatggacccttatccgaa

SEQ ID NO: 2719622 - DNA, 25 bp, Homo sapien
gaatgggaggaagctgtcaactgcc

SEQ ID NO: 2719623 - DNA, 25 bp, Homo sapien
tgcagccaggaaggatgtccacggt

SEQ ID NO: 2719624 - DNA, 25 bp, Homo sapien
ctaacattctcgtttttcctcaagt

SEQ ID NO: 2719625 - DNA, 25 bp, Homo sapien
ttcctcaagtccattatacaatttg

SEQ ID NO: 2719626 - DNA, 25 bp, Homo sapien
acattctcgtttttcctcaagtcca

SEQ ID NO: 2719627 - DNA, 25 bp, Homo sapien
tcctcaagtccattatacaatttgg

SEQ ID NO: 2719628 - DNA, 25 bp, Homo sapien
cacttttcgttctgccacacagacg

SEQ ID NO: 2719629 - DNA, 25 bp, Homo sapien
cgtcgcagataaggctgcgtggctt

SEQ ID NO: 2719630 - DNA, 25 bp, Homo sapien
ccctggaagccaatgagtaatcaaa

SEQ ID NO: 2719631 - DNA, 25 bp, Homo sapien
gaaccccctggaagccaatgagtaa

SEQ ID NO: 2719632 - DNA, 25 bp, Homo sapien
taacttctgtgtcaacgccggacgc

SEQ ID NO: 2719633 - DNA, 25 bp, Homo sapien
aagaatgagtaagtggactcctcct

SEQ ID NO: 2719634 - DNA, 25 bp, Homo sapien
ctgtgcccgacccagggagcctggt

SEQ ID NO: 2719635 - DNA, 25 bp, Homo sapien
aatgttggagcgctgtgctagatcc

SEQ ID NO: 2719636 - DNA, 25 bp, Homo sapien
taatagacgtagtgctgaagcaagc

SEQ ID NO: 2719637 - DNA, 25 bp, Homo sapien
ccaatttaatagacgtagtgctgaa

SEQ ID NO: 2719638 - DNA, 25 bp, Homo sapien
ctttccaatttaatagacgtagtgc

SEQ ID NO: 2719639 - DNA, 25 bp, Homo sapien
tatctttccaatttaatagacgtag

SEQ ID NO: 2719640 - DNA, 25 bp, Homo sapien
ggcgttttgacggttcctctgtggc

SEQ ID NO: 2719641 - DNA, 25 bp, Homo sapien
catcagaaacaagtctgaacaagcc

SEQ ID NO: 2719642 - DNA, 25 bp, Homo sapien
agccaggtactgtccatccgatacc

SEQ ID NO: 2719643 - DNA, 25 bp, Homo sapien
catccgatacccaggcgttttgacg

SEQ ID NO: 2719644 - DNA, 25 bp, Homo sapien
cagagcaaaagcctcgggatccact

SEQ ID NO: 2719645 - DNA, 25 bp, Homo sapien
agagcaaaagcctcgggatccactc

SEQ ID NO: 2719646 - DNA, 25 bp, Homo sapien
agcaaaagcctcgggatccactcac

SEQ ID NO: 2719647 - DNA, 25 bp, Homo sapien
gcagagcaaaagcctcgggatccac

SEQ ID NO: 2719648 - DNA, 25 bp, Homo sapien
tactgagaaggtaaaaggatcaagc

SEQ ID NO: 2719649 - DNA, 25 bp, Homo sapien
gggcagagatcagagtaaccctgaa

SEQ ID NO: 2719650 - DNA, 25 bp, Homo sapien
gggtaggaccacacacatcttgcaa

SEQ ID NO: 2719651 - DNA, 25 bp, Homo sapien
tgggtagaagctacatgagcacagg

SEQ ID NO: 2719652 - DNA, 25 bp, Homo sapien
agagatcctccggttctggtgcggc

SEQ ID NO: 2719653 - DNA, 25 bp, Homo sapien
ctggtgcggctgatcacaatagtgc

SEQ ID NO: 2719654 - DNA, 25 bp, Homo sapien
tagtgcacccggtcacagtgactgg

SEQ ID NO: 2719655 - DNA, 25 bp, Homo sapien
cttttgagagatcctccggttctgg

SEQ ID NO: 2719656 - DNA, 25 bp, Homo sapien
aattccattgccacctgccagagca

SEQ ID NO: 2719657 - DNA, 25 bp, Homo sapien
acctgccagagcacagtggatccct

SEQ ID NO: 2719658 - DNA, 25 bp, Homo sapien
ccacctgccagagcacagtggatcc

SEQ ID NO: 2719659 - DNA, 25 bp, Homo sapien
ctaattccattgccacctgccagag

SEQ ID NO: 2719660 - DNA, 25 bp, Homo sapien
cttccatagatacaaacgccctgtc

SEQ ID NO: 2719661 - DNA, 25 bp, Homo sapien
tccatagatacaaacgccctgtcca

SEQ ID NO: 2719662 - DNA, 25 bp, Homo sapien
catagatacaaacgccctgtccaga

SEQ ID NO: 2719663 - DNA, 25 bp, Homo sapien
ttccatagatacaaacgccctgtcc

SEQ ID NO: 2719664 - DNA, 25 bp, Homo sapien
gcctcagctggacattggaaccttg

SEQ ID NO: 2719665 - DNA, 25 bp, Homo sapien
ctataacagtcatagccacagtggg

SEQ ID NO: 2719666 - DNA, 25 bp, Homo sapien
gacatcaactccttctagcatccag

SEQ ID NO: 2719667 - DNA, 25 bp, Homo sapien
ccagcaagtcaatgtcaccgacagt

SEQ ID NO: 2719668 - DNA, 25 bp, Homo sapien
ggattagtaaatagcctcatcaagg

SEQ ID NO: 2719669 - DNA, 25 bp, Homo sapien
tcaaggttgtacagtggcagagcca

SEQ ID NO: 2719670 - DNA, 25 bp, Homo sapien
aaaacctcacatagtcaagtggaca

SEQ ID NO: 2719671 - DNA, 25 bp, Homo sapien
gcagctgttagttgctagcagagaa

SEQ ID NO: 2719672 - DNA, 25 bp, Homo sapien
tcatgagagactcgatgcaaggcgg

SEQ ID NO: 2719673 - DNA, 25 bp, Homo sapien
ggtcatgagagactcgatgcaaggc

SEQ ID NO: 2719674 - DNA, 25 bp, Homo sapien
aggaggtcatgagagactcgatgca

SEQ ID NO: 2719675 - DNA, 25 bp, Homo sapien
aggcggaggaggtcatgagagactc

SEQ ID NO: 2719676 - DNA, 25 bp, Homo sapien
aggtctgaggccaattccccaaggg

SEQ ID NO: 2719677 - DNA, 25 bp, Homo sapien
aaaccctgtacaggggctgttgtag

SEQ ID NO: 2719678 - DNA, 25 bp, Homo sapien
taaaggaaaacgtgccattccagtc

SEQ ID NO: 2719679 - DNA, 25 bp, Homo sapien
gctgttgtagacaaggtctgaggcc

SEQ ID NO: 2719680 - DNA, 25 bp, Homo sapien
cttgcttaactatgagagtctcttg

SEQ ID NO: 2719681 - DNA, 25 bp, Homo sapien
ggttgcagagggttgaaaatccatc

SEQ ID NO: 2719682 - DNA, 25 bp, Homo sapien
ttacacagcttctactcaaaatgga

SEQ ID NO: 2719683 - DNA, 25 bp, Homo sapien
gcgagggcaattcataactccgagt

SEQ ID NO: 2719684 - DNA, 25 bp, Homo sapien
tccacagtatagtgggaccattcca

SEQ ID NO: 2719685 - DNA, 25 bp, Homo sapien
gggtttccacagtatagtgggacca

SEQ ID NO: 2719686 - DNA, 25 bp, Homo sapien
ccacagtatagtgggaccattccat

SEQ ID NO: 2719687 - DNA, 25 bp, Homo sapien
tttccacagtatagtgggaccattc

SEQ ID NO: 2719688 - DNA, 25 bp, Homo sapien
caatgaaatggacccctccttttgg

SEQ ID NO: 2719689 - DNA, 25 bp, Homo sapien
tatatagcttggcacggtgactcat

SEQ ID NO: 2719690 - DNA, 25 bp, Homo sapien
tgcccatgtcggtctaaaattcttg

SEQ ID NO: 2719691 - DNA, 25 bp, Homo sapien
caaggtgtcagttttcccaaaattg

SEQ ID NO: 2719692 - DNA, 25 bp, Homo sapien
tatagaacaacactcgtcatgaatg

SEQ ID NO: 2719693 - DNA, 25 bp, Homo sapien
gaaaatgttgctgacccttaaagga

SEQ ID NO: 2719694 - DNA, 25 bp, Homo sapien
aaagcaaactatagcccttgggcca

SEQ ID NO: 2719695 - DNA, 25 bp, Homo sapien
caagtgtggtcgatttattacagga

SEQ ID NO: 2719696 - DNA, 25 bp, Homo sapien
atccctccccgctctgccaatccca

SEQ ID NO: 2719697 - DNA, 25 bp, Homo sapien
tccccgctctgccaatcccacaaca

SEQ ID NO: 2719698 - DNA, 25 bp, Homo sapien
tatccctccccgctctgccaatccc

SEQ ID NO: 2719699 - DNA, 25 bp, Homo sapien
ccgctctgccaatcccacaacaggc

SEQ ID NO: 2719700 - DNA, 25 bp, Homo sapien
cttttccgcttcgacgtggggactg

SEQ ID NO: 2719701 - DNA, 25 bp, Homo sapien
tttccgcttcgacgtggggactgca

SEQ ID NO: 2719702 - DNA, 25 bp, Homo sapien
tccgcttcgacgtggggactgcagt

SEQ ID NO: 2719703 - DNA, 25 bp, Homo sapien
agtgaccccggcctgctggcggggc

SEQ ID NO: 2719704 - DNA, 25 bp, Homo sapien
ggaaactggtggctggttgccagcc

SEQ ID NO: 2719705 - DNA, 25 bp, Homo sapien
aactggtggctggttgccagcccac

SEQ ID NO: 2719706 - DNA, 25 bp, Homo sapien
gagttggaaactggtggctggttgc

SEQ ID NO: 2719707 - DNA, 25 bp, Homo sapien
ggagaaagagttggaaactggtggc

SEQ ID NO: 2719708 - DNA, 25 bp, Homo sapien
tatcgcgctggtagttcgaacccga

SEQ ID NO: 2719709 - DNA, 25 bp, Homo sapien
cctagtcggctgtgtcattgcggct

SEQ ID NO: 2719710 - DNA, 25 bp, Homo sapien
cgatcgtggaggatccctggtcaca

SEQ ID NO: 2719711 - DNA, 25 bp, Homo sapien
ggaaagcagatctgcggctgacccc

SEQ ID NO: 2719712 - DNA, 25 bp, Homo sapien
tgaacagcaccggctgctgcgcgga

SEQ ID NO: 2719713 - DNA, 25 bp, Homo sapien
gaacagcaccggctgctgcgcggac

SEQ ID NO: 2719714 - DNA, 25 bp, Homo sapien
ctgaacagcaccggctgctgcgcgg

SEQ ID NO: 2719715 - DNA, 25 bp, Homo sapien
tgatgcggttatcatgaataatcac

SEQ ID NO: 2719716 - DNA, 25 bp, Homo sapien
catagattcgttgtgtgatgcggtt

SEQ ID NO: 2719717 - DNA, 25 bp, Homo sapien
taaagtttttttcatcgctgcttca

SEQ ID NO: 2719718 - DNA, 25 bp, Homo sapien
gaataatcacccgagataaatggct

SEQ ID NO: 2719719 - DNA, 25 bp, Homo sapien
aaaacagaggtgaggttaggatcaa

SEQ ID NO: 2719720 - DNA, 25 bp, Homo sapien
aaacagaggtgaggttaggatcaag

SEQ ID NO: 2719721 - DNA, 25 bp, Homo sapien
cagaggtgaggttaggatcaagatc

SEQ ID NO: 2719722 - DNA, 25 bp, Homo sapien
aacagaggtgaggttaggatcaaga

SEQ ID NO: 2719723 - DNA, 25 bp, Homo sapien
tgagctgctctgtcatgaacttttt

SEQ ID NO: 2719724 - DNA, 25 bp, Homo sapien
gagctgctctgtcatgaactttttt

SEQ ID NO: 2719725 - DNA, 25 bp, Homo sapien
ctgagctgctctgtcatgaactttt

SEQ ID NO: 2719726 - DNA, 25 bp, Homo sapien
ggttgctgttcacggattcctctct

SEQ ID NO: 2719727 - DNA, 25 bp, Homo sapien
cggttgctgttcacggattcctctc

SEQ ID NO: 2719728 - DNA, 25 bp, Homo sapien
ttctcctcgggtcacactggtgtca

SEQ ID NO: 2719729 - DNA, 25 bp, Homo sapien
atccctttgccagaactagggtggt

SEQ ID NO: 2719730 - DNA, 25 bp, Homo sapien
acagttgtgtaggttgtagttacta

SEQ ID NO: 2719731 - DNA, 25 bp, Homo sapien
ccctttgccagaactagggtggttg

SEQ ID NO: 2719732 - DNA, 25 bp, Homo sapien
ctttttgagttgagcatctacgaga

SEQ ID NO: 2719733 - DNA, 25 bp, Homo sapien
caaggaatatgaggattgctgagga

SEQ ID NO: 2719734 - DNA, 25 bp, Homo sapien
gactatcaggacctccttcaccaaa

SEQ ID NO: 2719735 - DNA, 25 bp, Homo sapien
ggatttattatgctccgctgtctgc

SEQ ID NO: 2719736 - DNA, 25 bp, Homo sapien
tacagtgtggggactatccaggtgt

SEQ ID NO: 2719737 - DNA, 25 bp, Homo sapien
acattccagatgaaggatcttcgca

SEQ ID NO: 2719738 - DNA, 25 bp, Homo sapien
ttcgcaaataaagctacagtgtggg

SEQ ID NO: 2719739 - DNA, 25 bp, Homo sapien
gagagctaaagggacattccagatg

SEQ ID NO: 2719740 - DNA, 25 bp, Homo sapien
ccaccattcctgaagagcaagtggg

SEQ ID NO: 2719741 - DNA, 25 bp, Homo sapien
cattcctgaagagcaagtgggagag

SEQ ID NO: 2719742 - DNA, 25 bp, Homo sapien
caccattcctgaagagcaagtggga

SEQ ID NO: 2719743 - DNA, 25 bp, Homo sapien
cagccccaccattcctgaagagcaa

SEQ ID NO: 2719744 - DNA, 25 bp, Homo sapien
cattatgtatgcaaagctctgtgcc

SEQ ID NO: 2719745 - DNA, 25 bp, Homo sapien
aaactctccctgagtgatcattttg

SEQ ID NO: 2719746 - DNA, 25 bp, Homo sapien
cactcagcagacattcgtgaagcat

SEQ ID NO: 2719747 - DNA, 25 bp, Homo sapien
cactttgtaaagtgattagtcaagt

SEQ ID NO: 2719748 - DNA, 25 bp, Homo sapien
tgaccaaccattgctcctgaccagg

SEQ ID NO: 2719749 - DNA, 25 bp, Homo sapien
cccagaagtaactgtggaaggcttg

SEQ ID NO: 2719750 - DNA, 25 bp, Homo sapien
gaaggcttggttggaaccccagtga

SEQ ID NO: 2719751 - DNA, 25 bp, Homo sapien
ttgtggaacgagtgcactcagcccc

SEQ ID NO: 2719752 - DNA, 25 bp, Homo sapien
gcataatgcaatttgcaaagaaagg

SEQ ID NO: 2719753 - DNA, 25 bp, Homo sapien
agaaagggttatccatccaagcctc

SEQ ID NO: 2719754 - DNA, 25 bp, Homo sapien
ttcctgatgtgtccaacccctgcct

SEQ ID NO: 2719755 - DNA, 25 bp, Homo sapien
gagctccagagaatatggctggttc

SEQ ID NO: 2719756 - DNA, 25 bp, Homo sapien
gtccaatggcccggctcgtggcagc

SEQ ID NO: 2719757 - DNA, 25 bp, Homo sapien
gggaaggcaaaagctcggcggccat

SEQ ID NO: 2719758 - DNA, 25 bp, Homo sapien
ggaggtcatcttggccccaacgtcc

SEQ ID NO: 2719759 - DNA, 25 bp, Homo sapien
caagacctcaggatccctctggact

SEQ ID NO: 2719760 - DNA, 25 bp, Homo sapien
gcgctgcacgtcaaggccaagaagt

SEQ ID NO: 2719761 - DNA, 25 bp, Homo sapien
aggtgttgctgctaccacagcccca

SEQ ID NO: 2719762 - DNA, 25 bp, Homo sapien
ctgtaggcccgagttacacccggtg

SEQ ID NO: 2719763 - DNA, 25 bp, Homo sapien
cgaccgtggcctcctcgtgtaggga

SEQ ID NO: 2719764 - DNA, 25 bp, Homo sapien
gcggactggaagcacaacgtttctt

SEQ ID NO: 2719765 - DNA, 25 bp, Homo sapien
tattccctggaggtcagcggactgg

SEQ ID NO: 2719766 - DNA, 25 bp, Homo sapien
tactcagggccgacagattactcag

SEQ ID NO: 2719767 - DNA, 25 bp, Homo sapien
aaggccgtgcgagtcttgagaccca

SEQ ID NO: 2719768 - DNA, 25 bp, Homo sapien
cgccccggaagtgttctcttcgcgg

SEQ ID NO: 2719769 - DNA, 25 bp, Homo sapien
tctcgcctctccctgtagttcttaa

SEQ ID NO: 2719770 - DNA, 25 bp, Homo sapien
tactctagccgtagggcagtcatag

SEQ ID NO: 2719771 - DNA, 25 bp, Homo sapien
aagtgttctcttcgcggctactcta

SEQ ID NO: 2719772 - DNA, 25 bp, Homo sapien
tcgtgaaccttaactttacaggcgc

SEQ ID NO: 2719773 - DNA, 25 bp, Homo sapien
gtgatggaaatggtggccaaggaat

SEQ ID NO: 2719774 - DNA, 25 bp, Homo sapien
ggtggccaaggaatcgtgaacctta

SEQ ID NO: 2719775 - DNA, 25 bp, Homo sapien
cccaatctcaggtaccgtctcagag

SEQ ID NO: 2719776 - DNA, 25 bp, Homo sapien
agccgcactaccacccagcagtgtg

SEQ ID NO: 2719777 - DNA, 25 bp, Homo sapien
gaagtccctcacgtactcgaacttg

SEQ ID NO: 2719778 - DNA, 25 bp, Homo sapien
gatggaaattccggccgtccagccg

SEQ ID NO: 2719779 - DNA, 25 bp, Homo sapien
ggcaggtgtcgtcagcctcgaagtc

SEQ ID NO: 2719780 - DNA, 25 bp, Homo sapien
ggaagaagctggattccccggaagc

SEQ ID NO: 2719781 - DNA, 25 bp, Homo sapien
gacgccccgagtcgagctcgctcac

SEQ ID NO: 2719782 - DNA, 25 bp, Homo sapien
aagcgctggcgcatcgcgacgcccc

SEQ ID NO: 2719783 - DNA, 25 bp, Homo sapien
agcgggcgggaggacttgcaaggga

SEQ ID NO: 2719784 - DNA, 25 bp, Homo sapien
tgtcctagccaacacgcagggcggg

SEQ ID NO: 2719785 - DNA, 25 bp, Homo sapien
aatgctccatgctgcgcactcattg

SEQ ID NO: 2719786 - DNA, 25 bp, Homo sapien
cattggctaccgcgttaccctggta

SEQ ID NO: 2719787 - DNA, 25 bp, Homo sapien
acagccagcgttcaggcactgtcct

SEQ ID NO: 2719788 - DNA, 25 bp, Homo sapien
tctgttgaatctagtccatgtggcc

SEQ ID NO: 2719789 - DNA, 25 bp, Homo sapien
ttaacacgggcactccaagccagat

SEQ ID NO: 2719790 - DNA, 25 bp, Homo sapien
tagtggcggagtttcacaaacaaca

SEQ ID NO: 2719791 - DNA, 25 bp, Homo sapien
aagccagatcctcatcacgggagca

SEQ ID NO: 2719792 - DNA, 25 bp, Homo sapien
ccaattggttttccgcttgaacaca

SEQ ID NO: 2719793 - DNA, 25 bp, Homo sapien
cacatttggtcatcagctggagagc

SEQ ID NO: 2719794 - DNA, 25 bp, Homo sapien
tgtccatacgcgatcacaatatcct

SEQ ID NO: 2719795 - DNA, 25 bp, Homo sapien
tgaacacaaagctgtactcatcact

SEQ ID NO: 2719796 - DNA, 25 bp, Homo sapien
atacacggaattagttcaacaccat

SEQ ID NO: 2719797 - DNA, 25 bp, Homo sapien
aatacacggaattagttcaacacca

SEQ ID NO: 2719798 - DNA, 25 bp, Homo sapien
gggaggccacgtgagtcatgaactt

SEQ ID NO: 2719799 - DNA, 25 bp, Homo sapien
tgggaggccacgtgagtcatgaact

SEQ ID NO: 2719800 - DNA, 25 bp, Homo sapien
ggaggccacgtgagtcatgaactta

SEQ ID NO: 2719801 - DNA, 25 bp, Homo sapien
tggaggcaaactgggaggccacgtg

SEQ ID NO: 2719802 - DNA, 25 bp, Homo sapien
gtaatcccgccaataaaacacatag

SEQ ID NO: 2719803 - DNA, 25 bp, Homo sapien
tggtcctcaaagtaatcccgccaat

SEQ ID NO: 2719804 - DNA, 25 bp, Homo sapien
tcaaagtaatcccgccaataaaaca

SEQ ID NO: 2719805 - DNA, 25 bp, Homo sapien
tctgcttgtcgccagctgaggtagt

SEQ ID NO: 2719806 - DNA, 25 bp, Homo sapien
tggttgctgggatacaccacgactc

SEQ ID NO: 2719807 - DNA, 25 bp, Homo sapien
tcgccagctgaggtagtcctttaaa

SEQ ID NO: 2719808 - DNA, 25 bp, Homo sapien
gatacaccacgactcttccgtcaaa

SEQ ID NO: 2719809 - DNA, 25 bp, Homo sapien
tactggtgttagtccagattgttgt

SEQ ID NO: 2719810 - DNA, 25 bp, Homo sapien
tagtccagattgttgtataagtgcc

SEQ ID NO: 2719811 - DNA, 25 bp, Homo sapien
cttgggcttgtactggtgttagtcc

SEQ ID NO: 2719812 - DNA, 25 bp, Homo sapien
gattgttgtataagtgcccagaaaa

SEQ ID NO: 2719813 - DNA, 25 bp, Homo sapien
acagtccctttcctatacatcggca

SEQ ID NO: 2719814 - DNA, 25 bp, Homo sapien
ttattatagttgatgttgaattcag

SEQ ID NO: 2719815 - DNA, 25 bp, Homo sapien
cctttcctatacatcggcagctcat

SEQ ID NO: 2719816 - DNA, 25 bp, Homo sapien
catcggcagctcattattatagttg

SEQ ID NO: 2719817 - DNA, 25 bp, Homo sapien
gaaagcatccccgatgatatcgcag

SEQ ID NO: 2719818 - DNA, 25 bp, Homo sapien
tgtcttcatctagaatctctggatg

SEQ ID NO: 2719819 - DNA, 25 bp, Homo sapien
tgttggcagcttaatttcttttgtc

SEQ ID NO: 2719820 - DNA, 25 bp, Homo sapien
gctttgtcctggtccgggtcactgc

SEQ ID NO: 2719821 - DNA, 25 bp, Homo sapien
tgcatggttaagcacaccagaactg

SEQ ID NO: 2719822 - DNA, 25 bp, Homo sapien
acaccagaactgaagcgcaaaaggg

SEQ ID NO: 2719823 - DNA, 25 bp, Homo sapien
ggagggcttgcatggttaagcacac

SEQ ID NO: 2719824 - DNA, 25 bp, Homo sapien
gttaagcacaccagaactgaagcgc

SEQ ID NO: 2719825 - DNA, 25 bp, Homo sapien
ggtggtagggatgctacagccacct

SEQ ID NO: 2719826 - DNA, 25 bp, Homo sapien
tggtagggatgctacagccacctaa

SEQ ID NO: 2719827 - DNA, 25 bp, Homo sapien
tagggatgctacagccacctaaggc

SEQ ID NO: 2719828 - DNA, 25 bp, Homo sapien
ggtagggatgctacagccacctaag

SEQ ID NO: 2719829 - DNA, 25 bp, Homo sapien
cacagaatgtgtacgcaaggacact

SEQ ID NO: 2719830 - DNA, 25 bp, Homo sapien
tatcttgaggtctgccaaagacgaa

SEQ ID NO: 2719831 - DNA, 25 bp, Homo sapien
gtaaatggccttggcaactatgccc

SEQ ID NO: 2719832 - DNA, 25 bp, Homo sapien
tgcccctggctagaagatgatgatc

SEQ ID NO: 2719833 - DNA, 25 bp, Homo sapien
atcctcattcacgcattcttgtttc

SEQ ID NO: 2719834 - DNA, 25 bp, Homo sapien
cctcattcacgcattcttgtttctt

SEQ ID NO: 2719835 - DNA, 25 bp, Homo sapien
tcctcattcacgcattcttgtttct

SEQ ID NO: 2719836 - DNA, 25 bp, Homo sapien
ctcattcacgcattcttgtttcttt

SEQ ID NO: 2719837 - DNA, 25 bp, Homo sapien
ttctgcagtgcaagacgagggactg

SEQ ID NO: 2719838 - DNA, 25 bp, Homo sapien
aatggcatcgacagatgggttgtca

SEQ ID NO: 2719839 - DNA, 25 bp, Homo sapien
tggctgcatgtgatgatccctgctg

SEQ ID NO: 2719840 - DNA, 25 bp, Homo sapien
tcgattagcagaggatgtttacccc

SEQ ID NO: 2719841 - DNA, 25 bp, Homo sapien
tactccgccacgttgttgaagcagg

SEQ ID NO: 2719842 - DNA, 25 bp, Homo sapien
tccggtcctgaggaagctctcgtac

SEQ ID NO: 2719843 - DNA, 25 bp, Homo sapien
ggccagcagcgggtcgaagctgtca

SEQ ID NO: 2719844 - DNA, 25 bp, Homo sapien
agagctgacatccagccgcgggctg

SEQ ID NO: 2719845 - DNA, 25 bp, Homo sapien
cagagcccgcggccgcgccccgagc

SEQ ID NO: 2719846 - DNA, 25 bp, Homo sapien
cgcggccgcgccccgagcccgcccg

SEQ ID NO: 2719847 - DNA, 25 bp, Homo sapien
ctgcccgagggcccgggtgcggcgg

SEQ ID NO: 2719848 - DNA, 25 bp, Homo sapien
gtgcggcgggaaccccagagcccgc

SEQ ID NO: 2719849 - DNA, 25 bp, Homo sapien
acggcggaggcgctggatgcgctcg

SEQ ID NO: 2719850 - DNA, 25 bp, Homo sapien
tggcgccttcctgctccgacccgga

SEQ ID NO: 2719851 - DNA, 25 bp, Homo sapien
cgtgagcacgttgcgtggcgccttc

SEQ ID NO: 2719852 - DNA, 25 bp, Homo sapien
ctttggccaccatgagacggcggag

SEQ ID NO: 2719853 - DNA, 25 bp, Homo sapien
aaggcgctcccgcaatacgtgcaga

SEQ ID NO: 2719854 - DNA, 25 bp, Homo sapien
tagtcactgatgatccccgcaaatt

SEQ ID NO: 2719855 - DNA, 25 bp, Homo sapien
ttactcaagcagatccaccccatag

SEQ ID NO: 2719856 - DNA, 25 bp, Homo sapien
tgatccccgcaaattttcaccaagg

SEQ ID NO: 2719857 - DNA, 25 bp, Homo sapien
tctctcatgtacactcaactgtctg

SEQ ID NO: 2719858 - DNA, 25 bp, Homo sapien
tcaactctgtgcgacgtcaatgcct

SEQ ID NO: 2719859 - DNA, 25 bp, Homo sapien
atatacttaatcataagaagttgac

SEQ ID NO: 2719860 - DNA, 25 bp, Homo sapien
gaaaattttcagtatgtagggcata

SEQ ID NO: 2719861 - DNA, 25 bp, Homo sapien
gatcaggaggtacacgaaaggtttg

SEQ ID NO: 2719862 - DNA, 25 bp, Homo sapien
caacttttgtttttggatcaggagg

SEQ ID NO: 2719863 - DNA, 25 bp, Homo sapien
taaattaaaactgtggcatacatat

SEQ ID NO: 2719864 - DNA, 25 bp, Homo sapien
tacatataaaacatacctagttctt

SEQ ID NO: 2719865 - DNA, 25 bp, Homo sapien
agtacgacactagcaccacctatca

SEQ ID NO: 2719866 - DNA, 25 bp, Homo sapien
gcaaaccgccaaggcaaaaatgagc

SEQ ID NO: 2719867 - DNA, 25 bp, Homo sapien
ttgctctccttgtatccttgtgtga

SEQ ID NO: 2719868 - DNA, 25 bp, Homo sapien
taataaggtgtaattccaggaagca

SEQ ID NO: 2719869 - DNA, 25 bp, Homo sapien
cgatggagttcacccagagggctgc

SEQ ID NO: 2719870 - DNA, 25 bp, Homo sapien
ccctcacggatacagcgatggagtt

SEQ ID NO: 2719871 - DNA, 25 bp, Homo sapien
gaaagtgcggatgtgaacattcacc

SEQ ID NO: 2719872 - DNA, 25 bp, Homo sapien
tgtcgaatgcaacaaggaagcctgt

SEQ ID NO: 2719873 - DNA, 25 bp, Homo sapien
taggtctcatccacatcagtaagtg

SEQ ID NO: 2719874 - DNA, 25 bp, Homo sapien
tgagagtcagtgaagaatcccgttc

SEQ ID NO: 2719875 - DNA, 25 bp, Homo sapien
tgctttgcctaggacaggttttcgg

SEQ ID NO: 2719876 - DNA, 25 bp, Homo sapien
gaagaatcccgttcatatgctttgc

SEQ ID NO: 2719877 - DNA, 25 bp, Homo sapien
gacctggactcctcccttgcagagg

SEQ ID NO: 2719878 - DNA, 25 bp, Homo sapien
actgtgcaagatgaaccagcaggac

SEQ ID NO: 2719879 - DNA, 25 bp, Homo sapien
gacagagtggaatcttcaactgcag

SEQ ID NO: 2719880 - DNA, 25 bp, Homo sapien
tggaaaaggtacctcccacactgga

SEQ ID NO: 2719881 - DNA, 25 bp, Homo sapien
tagcagcaattcatgcactttattt

SEQ ID NO: 2719882 - DNA, 25 bp, Homo sapien
acagcatagcagcaattcatgcact

SEQ ID NO: 2719883 - DNA, 25 bp, Homo sapien
agcaattcatgcactttatttctaa

SEQ ID NO: 2719884 - DNA, 25 bp, Homo sapien
tctaaaaaccaaagctcaggctgag

SEQ ID NO: 2719885 - DNA, 25 bp, Homo sapien
gacagttcacactacggacagaggg

SEQ ID NO: 2719886 - DNA, 25 bp, Homo sapien
tagttacaagacgtggatgcagggc

SEQ ID NO: 2719887 - DNA, 25 bp, Homo sapien
taaactttagtgcacctgatctggc

SEQ ID NO: 2719888 - DNA, 25 bp, Homo sapien
tatgcaggaccagagggaatcattc

SEQ ID NO: 2719889 - DNA, 25 bp, Homo sapien
ggcttcccgagcttcgaattaggta

SEQ ID NO: 2719890 - DNA, 25 bp, Homo sapien
cagtcctgactggtgagcatttaac

SEQ ID NO: 2719891 - DNA, 25 bp, Homo sapien
gacactgagaaatcccgctttgcca

SEQ ID NO: 2719892 - DNA, 25 bp, Homo sapien
gtgagagaccccttaaacagcagac

SEQ ID NO: 2719893 - DNA, 25 bp, Homo sapien
ggtgaagtgcctaactctgtctgca

SEQ ID NO: 2719894 - DNA, 25 bp, Homo sapien
gaatattgggtgaaaaatccctgca

SEQ ID NO: 2719895 - DNA, 25 bp, Homo sapien
cagggctagtgctgcgatccacagt

SEQ ID NO: 2719896 - DNA, 25 bp, Homo sapien
gaagaccttaactcggtgctgagaa

SEQ ID NO: 2719897 - DNA, 25 bp, Homo sapien
caggcaatccgcaacagtgtctagt

SEQ ID NO: 2719898 - DNA, 25 bp, Homo sapien
ggatattcaaggagacactacaggc

SEQ ID NO: 2719899 - DNA, 25 bp, Homo sapien
gagagcaggaacttatctgtcccgt

SEQ ID NO: 2719900 - DNA, 25 bp, Homo sapien
ttgaaaggaaccctagaagagctgt

SEQ ID NO: 2719901 - DNA, 25 bp, Homo sapien
gcttccttccgtgtttatccctgta

SEQ ID NO: 2719902 - DNA, 25 bp, Homo sapien
tgtaattatcctgtgcagaactagg

SEQ ID NO: 2719903 - DNA, 25 bp, Homo sapien
cctggatcgccttgtcataattggg

SEQ ID NO: 2719904 - DNA, 25 bp, Homo sapien
taaaggagacctgtagcagtcaaag

SEQ ID NO: 2719905 - DNA, 25 bp, Homo sapien
tgggcatgcccaacatagccatgac

SEQ ID NO: 2719906 - DNA, 25 bp, Homo sapien
aacatagggatgtccgctgctggga

SEQ ID NO: 2719907 - DNA, 25 bp, Homo sapien
tgtgcaacccaagcaagatgccttt

SEQ ID NO: 2719908 - DNA, 25 bp, Homo sapien
caggcaagagcacttcagatgaggc

SEQ ID NO: 2719909 - DNA, 25 bp, Homo sapien
tcttaaatgtgcaagttatccttgc

SEQ ID NO: 2719910 - DNA, 25 bp, Homo sapien
cttaaatgtgcaagttatccttgca

SEQ ID NO: 2719911 - DNA, 25 bp, Homo sapien
gtcttaaatgtgcaagttatccttg

SEQ ID NO: 2719912 - DNA, 25 bp, Homo sapien
taaatgtgcaagttatccttgcaca

SEQ ID NO: 2719913 - DNA, 25 bp, Homo sapien
tttcatcctacttcccttaacgtca

SEQ ID NO: 2719914 - DNA, 25 bp, Homo sapien
atcctacttcccttaacgtcacaat

SEQ ID NO: 2719915 - DNA, 25 bp, Homo sapien
ctggaaaataaaaacgccttagcat

SEQ ID NO: 2719916 - DNA, 25 bp, Homo sapien
catcctacttcccttaacgtcacaa

SEQ ID NO: 2719917 - DNA, 25 bp, Homo sapien
actcactgcagccttgacctcctgg

SEQ ID NO: 2719918 - DNA, 25 bp, Homo sapien
gagcgcagtggcatgcacgatcttg

SEQ ID NO: 2719919 - DNA, 25 bp, Homo sapien
gcgcagtggcatgcacgatcttgac

SEQ ID NO: 2719920 - DNA, 25 bp, Homo sapien
gctcaatccatcctcccaccttagt

SEQ ID NO: 2719921 - DNA, 25 bp, Homo sapien
tgtgctgccgcgtctcgacgtgtca

SEQ ID NO: 2719922 - DNA, 25 bp, Homo sapien
gtctcgacgtgtcaccggcggcgcc

SEQ ID NO: 2719923 - DNA, 25 bp, Homo sapien
gcctgtgctgccgcgtctcgacgtg

SEQ ID NO: 2719924 - DNA, 25 bp, Homo sapien
cgcagcgcctgtgctgccgcgtctc

SEQ ID NO: 2719925 - DNA, 25 bp, Homo sapien
aagaagagtgggtggagcattttct

SEQ ID NO: 2719926 - DNA, 25 bp, Homo sapien
atttgaattgccacaaagaagttac

SEQ ID NO: 2719927 - DNA, 25 bp, Homo sapien
tggtttggccttactaaaagtgtca

SEQ ID NO: 2719928 - DNA, 25 bp, Homo sapien
tatggaaactgctctcgaacttgca

SEQ ID NO: 2719929 - DNA, 25 bp, Homo sapien
agaatgccagcagcgccaccgcagc

SEQ ID NO: 2719930 - DNA, 25 bp, Homo sapien
gccccgccatcagtctacctgctgc

SEQ ID NO: 2719931 - DNA, 25 bp, Homo sapien
ccgccatcagtctacctgctgcaga

SEQ ID NO: 2719932 - DNA, 25 bp, Homo sapien
tcagtctacctgctgcagaatgcca

SEQ ID NO: 2719933 - DNA, 25 bp, Homo sapien
gagcccaactgtcggcagaacagga

SEQ ID NO: 2719934 - DNA, 25 bp, Homo sapien
caagaagagcccaactgtcggcaga

SEQ ID NO: 2719935 - DNA, 25 bp, Homo sapien
gccaagaagagcccaactgtcggca

SEQ ID NO: 2719936 - DNA, 25 bp, Homo sapien
cccaactgtcggcagaacaggaagg

SEQ ID NO: 2719937 - DNA, 25 bp, Homo sapien
actccttactgcaggtgatctgctc

SEQ ID NO: 2719938 - DNA, 25 bp, Homo sapien
aactccttactgcaggtgatctgct

SEQ ID NO: 2719939 - DNA, 25 bp, Homo sapien
aaaacaagcgatgggaatgactcct

SEQ ID NO: 2719940 - DNA, 25 bp, Homo sapien
gcgatgggaatgactccttccctgg

SEQ ID NO: 2719941 - DNA, 25 bp, Homo sapien
gacagagtatttgaagcagaagaaa

SEQ ID NO: 2719942 - DNA, 25 bp, Homo sapien
tgttagacagagtatttgaagcaga

SEQ ID NO: 2719943 - DNA, 25 bp, Homo sapien
atgggccactgaactagggtctgca

SEQ ID NO: 2719944 - DNA, 25 bp, Homo sapien
actagggtctgcaactgctttcgga

SEQ ID NO: 2719945 - DNA, 25 bp, Homo sapien
gctttcggatctctgggtgtatcat

SEQ ID NO: 2719946 - DNA, 25 bp, Homo sapien
ggaacccgtttctgatgtaaatcac

SEQ ID NO: 2719947 - DNA, 25 bp, Homo sapien
cccgaagatagctcaatatctgaaa

SEQ ID NO: 2719948 - DNA, 25 bp, Homo sapien
aggaagatacccgaagatagctcaa

SEQ ID NO: 2719949 - DNA, 25 bp, Homo sapien
aggccttgaggaagatacccgaaga

SEQ ID NO: 2719950 - DNA, 25 bp, Homo sapien
gatacccgaagatagctcaatatct

SEQ ID NO: 2719951 - DNA, 25 bp, Homo sapien
tactctcggtactagagactgcgtg

SEQ ID NO: 2719952 - DNA, 25 bp, Homo sapien
tgagaaagccagtaacacccacaat

SEQ ID NO: 2719953 - DNA, 25 bp, Homo sapien
tgccagtacatagggtactctcggt

SEQ ID NO: 2719954 - DNA, 25 bp, Homo sapien
tccaggctcggcagcctttcaaagg

SEQ ID NO: 2719955 - DNA, 25 bp, Homo sapien
ctcgccttgagtgccagaaaccttt

SEQ ID NO: 2719956 - DNA, 25 bp, Homo sapien
ggcttcagaagccttagcaacaatc

SEQ ID NO: 2719957 - DNA, 25 bp, Homo sapien
cttagcaacaatcccatagcagagc

SEQ ID NO: 2719958 - DNA, 25 bp, Homo sapien
gaagccttagcaacaatcccatagc

SEQ ID NO: 2719959 - DNA, 25 bp, Homo sapien
cctgagtcccaagtgctgtggcttc

SEQ ID NO: 2719960 - DNA, 25 bp, Homo sapien
gtgtccacagtgatcccatttgcaa

SEQ ID NO: 2719961 - DNA, 25 bp, Homo sapien
ggccaggcatatgtggttcaaacac

SEQ ID NO: 2719962 - DNA, 25 bp, Homo sapien
ccatttgcaatgttcaggtggccag

SEQ ID NO: 2719963 - DNA, 25 bp, Homo sapien
ggaaatggaattgcccagcctgagt

SEQ ID NO: 2719964 - DNA, 25 bp, Homo sapien
ggaatttggcaaggtgctcaacaca

SEQ ID NO: 2719965 - DNA, 25 bp, Homo sapien
aaagaggccgacctatacttgctac

SEQ ID NO: 2719966 - DNA, 25 bp, Homo sapien
gagcaaggcagatcctcaagaggtt

SEQ ID NO: 2719967 - DNA, 25 bp, Homo sapien
taagagtattcagaggagcaaggca

SEQ ID NO: 2719968 - DNA, 25 bp, Homo sapien
ggattttgcctagatgaatttccca

SEQ ID NO: 2719969 - DNA, 25 bp, Homo sapien
tccaaagcttgggtaggacggcatg

SEQ ID NO: 2719970 - DNA, 25 bp, Homo sapien
tgagggctaatggtgcaatcggatt

SEQ ID NO: 2719971 - DNA, 25 bp, Homo sapien
ggacggcatggagctcttatgttct

SEQ ID NO: 2719972 - DNA, 25 bp, Homo sapien
gctgccctaactgccctgatggagc

SEQ ID NO: 2719973 - DNA, 25 bp, Homo sapien
ttgctgccctaactgccctgatgga

SEQ ID NO: 2719974 - DNA, 25 bp, Homo sapien
tcttgctgccctaactgccctgatg

SEQ ID NO: 2719975 - DNA, 25 bp, Homo sapien
ttgctctcttgctgccctaactgcc

SEQ ID NO: 2719976 - DNA, 25 bp, Homo sapien
ctaatgtcttgatgactgagcctca

SEQ ID NO: 2719977 - DNA, 25 bp, Homo sapien
tgactctgagaaaagcctgctaatg

SEQ ID NO: 2719978 - DNA, 25 bp, Homo sapien
gacacggcagttatgtgagctgact

SEQ ID NO: 2719979 - DNA, 25 bp, Homo sapien
cacaggaaggacacggcagttatgt

SEQ ID NO: 2719980 - DNA, 25 bp, Homo sapien
tgcaggtaggtggaaaacctatctc

SEQ ID NO: 2719981 - DNA, 25 bp, Homo sapien
catgtttgttgtcctgtctctgcag

SEQ ID NO: 2719982 - DNA, 25 bp, Homo sapien
gcatgtttgttgtcctgtctctgca

SEQ ID NO: 2719983 - DNA, 25 bp, Homo sapien
acgatggagtttctgtgatggggcc

SEQ ID NO: 2719984 - DNA, 25 bp, Homo sapien
gctctccattggatgaaaatgtcac

SEQ ID NO: 2719985 - DNA, 25 bp, Homo sapien
tctccattggatgaaaatgtcaccc

SEQ ID NO: 2719986 - DNA, 25 bp, Homo sapien
ggctctccattggatgaaaatgtca

SEQ ID NO: 2719987 - DNA, 25 bp, Homo sapien
tccattggatgaaaatgtcacccat

SEQ ID NO: 2719988 - DNA, 25 bp, Homo sapien
ctttcagactgcatcgattagctgc

SEQ ID NO: 2719989 - DNA, 25 bp, Homo sapien
actgcatcgattagctgctccatct

SEQ ID NO: 2719990 - DNA, 25 bp, Homo sapien
tttcagactgcatcgattagctgct

SEQ ID NO: 2719991 - DNA, 25 bp, Homo sapien
ttcagactgcatcgattagctgctc

SEQ ID NO: 2719992 - DNA, 25 bp, Homo sapien
gcttgtaagttagcagctgctgttg

SEQ ID NO: 2719993 - DNA, 25 bp, Homo sapien
gctgttgccaaggagaggtacctgg

SEQ ID NO: 2719994 - DNA, 25 bp, Homo sapien
cttgtaagttagcagctgctgttgc

SEQ ID NO: 2719995 - DNA, 25 bp, Homo sapien
ctgcttgtaagttagcagctgctgt

SEQ ID NO: 2719996 - DNA, 25 bp, Homo sapien
tcactcagttctgctacattgttca

SEQ ID NO: 2719997 - DNA, 25 bp, Homo sapien
cactcagttctgctacattgttcat

SEQ ID NO: 2719998 - DNA, 25 bp, Homo sapien
tatcactcagttctgctacattgtt

SEQ ID NO: 2719999 - DNA, 25 bp, Homo sapien
atcactcagttctgctacattgttc

SEQ ID NO: 2720000 - DNA, 25 bp, Homo sapien
tcaccacccggcactcaatgagaat

SEQ ID NO: 2720001 - DNA, 25 bp, Homo sapien
cagttgccacatcgcatgatgctca

SEQ ID NO: 2720002 - DNA, 25 bp, Homo sapien
tcggaaatgtagatctaattagctc

SEQ ID NO: 2720003 - DNA, 25 bp, Homo sapien
tgatgctcatgccattcggaaatgt

SEQ ID NO: 2720004 - DNA, 25 bp, Homo sapien
tgtgcctttacagctggtaatgaac

SEQ ID NO: 2720005 - DNA, 25 bp, Homo sapien
tgccgtttacagcttggtgattctg

SEQ ID NO: 2720006 - DNA, 25 bp, Homo sapien
gatttgtaaggtgtgccgtttacag

SEQ ID NO: 2720007 - DNA, 25 bp, Homo sapien
gtaatgaacgctccaaccacgtcag

SEQ ID NO: 2720008 - DNA, 25 bp, Homo sapien
ttcccactgatctggtgtaagtcaa

SEQ ID NO: 2720009 - DNA, 25 bp, Homo sapien
tctttttcccactgatctggtgtaa

SEQ ID NO: 2720010 - DNA, 25 bp, Homo sapien
caaagaccagggctgagacgtgtca

SEQ ID NO: 2720011 - DNA, 25 bp, Homo sapien
gtcatttgtaggttgcagccttggg

SEQ ID NO: 2720012 - DNA, 25 bp, Homo sapien
ggctccaatcacctcggcatcaaag

SEQ ID NO: 2720013 - DNA, 25 bp, Homo sapien
gcaagagggtgattgcatctgtgca

SEQ ID NO: 2720014 - DNA, 25 bp, Homo sapien
tatcctaatccggtcaacctgtctg

SEQ ID NO: 2720015 - DNA, 25 bp, Homo sapien
aaagcaggtagaagcctggctccaa

SEQ ID NO: 2720016 - DNA, 25 bp, Homo sapien
tcttttccaaacagcgtaagccctg

SEQ ID NO: 2720017 - DNA, 25 bp, Homo sapien
tctgctggctctcaaagcgtgggct

SEQ ID NO: 2720018 - DNA, 25 bp, Homo sapien
gaattggctcggacagtttcaaggc

SEQ ID NO: 2720019 - DNA, 25 bp, Homo sapien
tgtgtacttgcaacagaccagcctc

SEQ ID NO: 2720020 - DNA, 25 bp, Homo sapien
cacaaatcagtggacacgttcagtt

SEQ ID NO: 2720021 - DNA, 25 bp, Homo sapien
gaaaaccatcagagtagtcatcagg

SEQ ID NO: 2720022 - DNA, 25 bp, Homo sapien
cagttaactcttgaacaatgcaggg

SEQ ID NO: 2720023 - DNA, 25 bp, Homo sapien
tctagttgcttatacttgtgtaaca

SEQ ID NO: 2720024 - DNA, 25 bp, Homo sapien
tctaagagaaaacagccgcgcaatt

SEQ ID NO: 2720025 - DNA, 25 bp, Homo sapien
gatgtctcgataggtggtctcccag

SEQ ID NO: 2720026 - DNA, 25 bp, Homo sapien
tcagcagactgcttacaccgatgtc

SEQ ID NO: 2720027 - DNA, 25 bp, Homo sapien
ccgcgcaattagctggagttctgta

SEQ ID NO: 2720028 - DNA, 25 bp, Homo sapien
tggcaagagctgcattaaaccaacc

SEQ ID NO: 2720029 - DNA, 25 bp, Homo sapien
tcttggcaagagctgcattaaacca

SEQ ID NO: 2720030 - DNA, 25 bp, Homo sapien
tcccgtgatacttgtctgacaatcc

SEQ ID NO: 2720031 - DNA, 25 bp, Homo sapien
tgacaatcccttaatcttggcaaga

SEQ ID NO: 2720032 - DNA, 25 bp, Homo sapien
ccagatgtgatgttcctgaaaccca

SEQ ID NO: 2720033 - DNA, 25 bp, Homo sapien
gaaacccactgctggatcatcgatt

SEQ ID NO: 2720034 - DNA, 25 bp, Homo sapien
tatggataagggagcaatcagcttc

SEQ ID NO: 2720035 - DNA, 25 bp, Homo sapien
tcccctgaagactgatctgttaaag

SEQ ID NO: 2720036 - DNA, 25 bp, Homo sapien
tacaagctaaagacgttcaatgtgc

SEQ ID NO: 2720037 - DNA, 25 bp, Homo sapien
cttgtacccattgaaggagctgatt

SEQ ID NO: 2720038 - DNA, 25 bp, Homo sapien
taggcagacagatgaatatcaactg

SEQ ID NO: 2720039 - DNA, 25 bp, Homo sapien
cctaaagtagctgaatcttgtaccc

SEQ ID NO: 2720040 - DNA, 25 bp, Homo sapien
gcggagagaagccaccgccagccag

SEQ ID NO: 2720041 - DNA, 25 bp, Homo sapien
gaatgcatctacatcagccaaggaa

SEQ ID NO: 2720042 - DNA, 25 bp, Homo sapien
ggcagcgacagtggccctgggcgga

SEQ ID NO: 2720043 - DNA, 25 bp, Homo sapien
ggcaaaagcatatgcctgcccgcct

SEQ ID NO: 2720044 - DNA, 25 bp, Homo sapien
agtgccatgaggcatgttcttctcc

SEQ ID NO: 2720045 - DNA, 25 bp, Homo sapien
tcattctcttgggaccagtgagtgc

SEQ ID NO: 2720046 - DNA, 25 bp, Homo sapien
tagctgctcagctccacgtatctct

SEQ ID NO: 2720047 - DNA, 25 bp, Homo sapien
tctcaggtgcatgcggtaacaagca

SEQ ID NO: 2720048 - DNA, 25 bp, Homo sapien
tactcagtgaggtggccatgccttc

SEQ ID NO: 2720049 - DNA, 25 bp, Homo sapien
acagccgtcatagccacaaggcagc

SEQ ID NO: 2720050 - DNA, 25 bp, Homo sapien
catatccgcatgagaaatctggctc

SEQ ID NO: 2720051 - DNA, 25 bp, Homo sapien
tcagtacagagcctttacagccaca

SEQ ID NO: 2720052 - DNA, 25 bp, Homo sapien
gattgcagcagtttactcacgtctt

SEQ ID NO: 2720053 - DNA, 25 bp, Homo sapien
gtttactcacgtctttaggctccac

SEQ ID NO: 2720054 - DNA, 25 bp, Homo sapien
gaagtctgccatattgatttatgaa

SEQ ID NO: 2720055 - DNA, 25 bp, Homo sapien
tcttagcttatccagaagaaataat

SEQ ID NO: 2720056 - DNA, 25 bp, Homo sapien
gattggcacaatttgtatcactggt

SEQ ID NO: 2720057 - DNA, 25 bp, Homo sapien
agggctcgcatagcccagagccaag

SEQ ID NO: 2720058 - DNA, 25 bp, Homo sapien
tgtatcactggtgctcagaacccac

SEQ ID NO: 2720059 - DNA, 25 bp, Homo sapien
ctaggtccgctttagcagattggca

SEQ ID NO: 2720060 - DNA, 25 bp, Homo sapien
caaggctccgaaccaacaacaggat

SEQ ID NO: 2720061 - DNA, 25 bp, Homo sapien
taatttctcttttatggccggagca

SEQ ID NO: 2720062 - DNA, 25 bp, Homo sapien
agttacccaccagaacccaaagcat

SEQ ID NO: 2720063 - DNA, 25 bp, Homo sapien
taaatgccgctataacaaggctccg

SEQ ID NO: 2720064 - DNA, 25 bp, Homo sapien
tggaatttgcaatcgggccatcctc

SEQ ID NO: 2720065 - DNA, 25 bp, Homo sapien
ttgcacagcaggcaccgctgcaatc

SEQ ID NO: 2720066 - DNA, 25 bp, Homo sapien
catgtgcgtgccctggaatttgcaa

SEQ ID NO: 2720067 - DNA, 25 bp, Homo sapien
caatcaacaggccatgtgcgtgccc

SEQ ID NO: 2720068 - DNA, 25 bp, Homo sapien
gacttctcggcggattcccatttgt

SEQ ID NO: 2720069 - DNA, 25 bp, Homo sapien
ggatgctgggcctctatttattcca

SEQ ID NO: 2720070 - DNA, 25 bp, Homo sapien
ctccgtatgccaggctccaagactt

SEQ ID NO: 2720071 - DNA, 25 bp, Homo sapien
cagaagtgtgatatttaagagcagg

SEQ ID NO: 2720072 - DNA, 25 bp, Homo sapien
catgactgtcctggtaatgaaggga

SEQ ID NO: 2720073 - DNA, 25 bp, Homo sapien
gttagaaacgttgacaataagtcga

SEQ ID NO: 2720074 - DNA, 25 bp, Homo sapien
gaaactcttgcaactgtctccttga

SEQ ID NO: 2720075 - DNA, 25 bp, Homo sapien
taaagtctccattaacattgttagg

SEQ ID NO: 2720076 - DNA, 25 bp, Homo sapien
ccaagctgaggtgagttatgtgcag

SEQ ID NO: 2720077 - DNA, 25 bp, Homo sapien
tccttttactagcataccctggagt

SEQ ID NO: 2720078 - DNA, 25 bp, Homo sapien
tactttgttggtaggtgtaagttga

SEQ ID NO: 2720079 - DNA, 25 bp, Homo sapien
ggagtagtataaccaagctgaggtg

SEQ ID NO: 2720080 - DNA, 25 bp, Homo sapien
gacagttttcgccactcttccagat

SEQ ID NO: 2720081 - DNA, 25 bp, Homo sapien
catcccctcagacatgacagttttc

SEQ ID NO: 2720082 - DNA, 25 bp, Homo sapien
aatgataacatgcaggggtgcctcc

SEQ ID NO: 2720083 - DNA, 25 bp, Homo sapien
gattccctgccatcggatccgtctt

SEQ ID NO: 2720084 - DNA, 25 bp, Homo sapien
tcatggaagcatcttcctctcctca

SEQ ID NO: 2720085 - DNA, 25 bp, Homo sapien
atggaagcatcttcctctcctcaca

SEQ ID NO: 2720086 - DNA, 25 bp, Homo sapien
catggaagcatcttcctctcctcac

SEQ ID NO: 2720087 - DNA, 25 bp, Homo sapien
tggaagcatcttcctctcctcacac

SEQ ID NO: 2720088 - DNA, 25 bp, Homo sapien
gcagccaagtgtttaggaggcacat

SEQ ID NO: 2720089 - DNA, 25 bp, Homo sapien
tggatccttccagtaaagctgcctc

SEQ ID NO: 2720090 - DNA, 25 bp, Homo sapien
tcaataaaatgtcccaagtgcagca

SEQ ID NO: 2720091 - DNA, 25 bp, Homo sapien
catttctttcggaccaggaatggct

SEQ ID NO: 2720092 - DNA, 25 bp, Homo sapien
atgttggctatgtctgcacagaatt

SEQ ID NO: 2720093 - DNA, 25 bp, Homo sapien
tgttggctatgtctgcacagaattt

SEQ ID NO: 2720094 - DNA, 25 bp, Homo sapien
aatgttggctatgtctgcacagaat

SEQ ID NO: 2720095 - DNA, 25 bp, Homo sapien
gttggctatgtctgcacagaatttc

SEQ ID NO: 2720096 - DNA, 25 bp, Homo sapien
aagcaccattattgcccatataaca

SEQ ID NO: 2720097 - DNA, 25 bp, Homo sapien
tcattatcaaagtctctgcccaaag

SEQ ID NO: 2720098 - DNA, 25 bp, Homo sapien
gtttttatgttgtctcatacagacc

SEQ ID NO: 2720099 - DNA, 25 bp, Homo sapien
tacagaccataagccctaatggtgg

SEQ ID NO: 2720100 - DNA, 25 bp, Homo sapien
gtggcttccttagtacttggcccat

SEQ ID NO: 2720101 - DNA, 25 bp, Homo sapien
catttgagattgacaccctggtcta

SEQ ID NO: 2720102 - DNA, 25 bp, Homo sapien
cctggtctaaagttactgacgatgt

SEQ ID NO: 2720103 - DNA, 25 bp, Homo sapien
aattggtctttaggctctgttttca

SEQ ID NO: 2720104 - DNA, 25 bp, Homo sapien
tactgacgatgtctggaaattggtc

SEQ ID NO: 2720105 - DNA, 25 bp, Homo sapien
gaggcagccacgcttatgctggcat

SEQ ID NO: 2720106 - DNA, 25 bp, Homo sapien
tcgtgaagcccagtaagggctgtta

SEQ ID NO: 2720107 - DNA, 25 bp, Homo sapien
tctcaattacacattcagaggcagc

SEQ ID NO: 2720108 - DNA, 25 bp, Homo sapien
gataatcagcttggaagaattcaca

SEQ ID NO: 2720109 - DNA, 25 bp, Homo sapien
cagcaggacacactgattctctgac

SEQ ID NO: 2720110 - DNA, 25 bp, Homo sapien
tccagaatcaggagcgctcgggaat

SEQ ID NO: 2720111 - DNA, 25 bp, Homo sapien
taccccagtgccgagcacagtgttt

SEQ ID NO: 2720112 - DNA, 25 bp, Homo sapien
ctttgttagagccaagacccagcag

SEQ ID NO: 2720113 - DNA, 25 bp, Homo sapien
ggaccatagggaccatccccgaatg

SEQ ID NO: 2720114 - DNA, 25 bp, Homo sapien
catagggaccatccccgaatgcttt

SEQ ID NO: 2720115 - DNA, 25 bp, Homo sapien
ccccgaatgctttgccttgtctcat

SEQ ID NO: 2720116 - DNA, 25 bp, Homo sapien
aaactgggctcaggaccatagggac

SEQ ID NO: 2720117 - DNA, 25 bp, Homo sapien
ttgtccatgccaatgtctaaggcaa

SEQ ID NO: 2720118 - DNA, 25 bp, Homo sapien
taaggcaatgacagcgccaaaatat

SEQ ID NO: 2720119 - DNA, 25 bp, Homo sapien
gctggagaaacattcgcgcttcaca

SEQ ID NO: 2720120 - DNA, 25 bp, Homo sapien
gaaacattcgcgcttcacagaccac

SEQ ID NO: 2720121 - DNA, 25 bp, Homo sapien
gccatgattcttctactcactgaag

SEQ ID NO: 2720122 - DNA, 25 bp, Homo sapien
tctgagatgagactcgggcatttta

SEQ ID NO: 2720123 - DNA, 25 bp, Homo sapien
tgagactcgggcattttagcaagct

SEQ ID NO: 2720124 - DNA, 25 bp, Homo sapien
gcattttagcaagctgccatgattc

SEQ ID NO: 2720125 - DNA, 25 bp, Homo sapien
gtgagtagtggttttcccagcatgg

SEQ ID NO: 2720126 - DNA, 25 bp, Homo sapien
cctgaactctgagtagcctaactgg

SEQ ID NO: 2720127 - DNA, 25 bp, Homo sapien
ggttttcccagcatggagtttgaga

SEQ ID NO: 2720128 - DNA, 25 bp, Homo sapien
agtggttttcccagcatggagtttg

SEQ ID NO: 2720129 - DNA, 25 bp, Homo sapien
aacagtggatatctcaggagaaacc

SEQ ID NO: 2720130 - DNA, 25 bp, Homo sapien
gcatcaattcatgggcaaaataaac

SEQ ID NO: 2720131 - DNA, 25 bp, Homo sapien
aagaaaaaagtgttgagggcagcca

SEQ ID NO: 2720132 - DNA, 25 bp, Homo sapien
caattcatgggcaaaataaacagct

SEQ ID NO: 2720133 - DNA, 25 bp, Homo sapien
cagatgggccatgagtaagaagacc

SEQ ID NO: 2720134 - DNA, 25 bp, Homo sapien
aaagcctgtgtttatggccccgtgg

SEQ ID NO: 2720135 - DNA, 25 bp, Homo sapien
cgttcagcgggatgacttcacagga

SEQ ID NO: 2720136 - DNA, 25 bp, Homo sapien
tgaggtccgagttttgtgcaagcca

SEQ ID NO: 2720137 - DNA, 25 bp, Homo sapien
cacttcctgtttgagatgggcatgg

SEQ ID NO: 2720138 - DNA, 25 bp, Homo sapien
gatgggcatggaaaatgagctttag

SEQ ID NO: 2720139 - DNA, 25 bp, Homo sapien
atctaggatcacttcctgtttgaga

SEQ ID NO: 2720140 - DNA, 25 bp, Homo sapien
aaatgagctttaggggcttcgtgca

SEQ ID NO: 2720141 - DNA, 25 bp, Homo sapien
catgccacagcccacttttgctgct

SEQ ID NO: 2720142 - DNA, 25 bp, Homo sapien
agcagctcaaactcagcaggtccac

SEQ ID NO: 2720143 - DNA, 25 bp, Homo sapien
ggacacttctaccttgctaagcagc

SEQ ID NO: 2720144 - DNA, 25 bp, Homo sapien
ggtccacagttagaaacactatctt

SEQ ID NO: 2720145 - DNA, 25 bp, Homo sapien
caagctttggttgaccctgacgggt

SEQ ID NO: 2720146 - DNA, 25 bp, Homo sapien
gcaggtgatccctgactgtcaaaag

SEQ ID NO: 2720147 - DNA, 25 bp, Homo sapien
caggtaatccctgaccactgttgaa

SEQ ID NO: 2720148 - DNA, 25 bp, Homo sapien
tctcccatttgtaccagagtctgct

SEQ ID NO: 2720149 - DNA, 25 bp, Homo sapien
cttcccccaagtgagtaatcagagg

SEQ ID NO: 2720150 - DNA, 25 bp, Homo sapien
caaccatcactgtcaggcaacatca

SEQ ID NO: 2720151 - DNA, 25 bp, Homo sapien
atagccttgatctacttcccccaag

SEQ ID NO: 2720152 - DNA, 25 bp, Homo sapien
actgtcaggcaacatcatagccttg

SEQ ID NO: 2720153 - DNA, 25 bp, Homo sapien
cagggttgccctgagtgagcactga

SEQ ID NO: 2720154 - DNA, 25 bp, Homo sapien
gcatatccacctgcatttgcctgaa

SEQ ID NO: 2720155 - DNA, 25 bp, Homo sapien
gtttctcttgcccaaagactagcat

SEQ ID NO: 2720156 - DNA, 25 bp, Homo sapien
gcatgaggctcccttcacaatcacc

SEQ ID NO: 2720157 - DNA, 25 bp, Homo sapien
caccacacggagaccaacagtgaag

SEQ ID NO: 2720158 - DNA, 25 bp, Homo sapien
gactgactgaaggtgcaactttccc

SEQ ID NO: 2720159 - DNA, 25 bp, Homo sapien
ctctgtggacgagtgtcatgttccc

SEQ ID NO: 2720160 - DNA, 25 bp, Homo sapien
gaaaacaaggctttccagctgccac

SEQ ID NO: 2720161 - DNA, 25 bp, Homo sapien
tccagtgcaatgtgtcatccaaagg

SEQ ID NO: 2720162 - DNA, 25 bp, Homo sapien
tcccctaagggagtatatctgacct

SEQ ID NO: 2720163 - DNA, 25 bp, Homo sapien
tgcaagaacacactttcagggttag

SEQ ID NO: 2720164 - DNA, 25 bp, Homo sapien
gagtactctctatgtatcagcacca

SEQ ID NO: 2720165 - DNA, 25 bp, Homo sapien
ggaggagcagcatgaggtacgtgct

SEQ ID NO: 2720166 - DNA, 25 bp, Homo sapien
ttgtaagtcagaggcaactgggatt

SEQ ID NO: 2720167 - DNA, 25 bp, Homo sapien
caactgggattgtgctcaagagtgg

SEQ ID NO: 2720168 - DNA, 25 bp, Homo sapien
gcaaagttgtaagtcagaggcaact

SEQ ID NO: 2720169 - DNA, 25 bp, Homo sapien
agtggagaggcagtcaacacagaag

SEQ ID NO: 2720170 - DNA, 25 bp, Homo sapien
gaagatctcctggccattttcaaaa

SEQ ID NO: 2720171 - DNA, 25 bp, Homo sapien
gatctcctggccattttcaaaactc

SEQ ID NO: 2720172 - DNA, 25 bp, Homo sapien
ctcctggccattttcaaaactcctg

SEQ ID NO: 2720173 - DNA, 25 bp, Homo sapien
ttctgtggattttctgcacaattgc

SEQ ID NO: 2720174 - DNA, 25 bp, Homo sapien
gaaccatgtgacaactttgctacct

SEQ ID NO: 2720175 - DNA, 25 bp, Homo sapien
catggcaacaacagaaccatgtgac

SEQ ID NO: 2720176 - DNA, 25 bp, Homo sapien
gccacttacgggcaacacacatcat

SEQ ID NO: 2720177 - DNA, 25 bp, Homo sapien
ggaaagccagcttggccaatgcgct

SEQ ID NO: 2720178 - DNA, 25 bp, Homo sapien
cgagggcgttcaccatagttagatg

SEQ ID NO: 2720179 - DNA, 25 bp, Homo sapien
tcataaccacatcaattcagggctt

SEQ ID NO: 2720180 - DNA, 25 bp, Homo sapien
gcccaatccactaaggagttgctca

SEQ ID NO: 2720181 - DNA, 25 bp, Homo sapien
ggaaagctaacaatgacttcagaag

SEQ ID NO: 2720182 - DNA, 25 bp, Homo sapien
ttgaagtgtgatggaggatactcct

SEQ ID NO: 2720183 - DNA, 25 bp, Homo sapien
ggatactccttgtgttgtcatgtgc

SEQ ID NO: 2720184 - DNA, 25 bp, Homo sapien
gcagttcgtcttacagattccagag

SEQ ID NO: 2720185 - DNA, 25 bp, Homo sapien
agtcccttccgcctcatcccttggt

SEQ ID NO: 2720186 - DNA, 25 bp, Homo sapien
catcaactttggtcccacaattgtt

SEQ ID NO: 2720187 - DNA, 25 bp, Homo sapien
tttggtcccacaattgttctgccct

SEQ ID NO: 2720188 - DNA, 25 bp, Homo sapien
tggtgttcttcccacggtatcccag

SEQ ID NO: 2720189 - DNA, 25 bp, Homo sapien
tctcctctctgtttggagttcctct

SEQ ID NO: 2720190 - DNA, 25 bp, Homo sapien
ctctcctctctgtttggagttcctc

SEQ ID NO: 2720191 - DNA, 25 bp, Homo sapien
ctcctctctgtttggagttcctctg

SEQ ID NO: 2720192 - DNA, 25 bp, Homo sapien
tcctctctgtttggagttcctctgc

SEQ ID NO: 2720193 - DNA, 25 bp, Homo sapien
ccatcaaagattggcctcggcgcat

SEQ ID NO: 2720194 - DNA, 25 bp, Homo sapien
gcagatccccatttgtgtagagcca

SEQ ID NO: 2720195 - DNA, 25 bp, Homo sapien
cactgctcatgaggaagtaaccagc

SEQ ID NO: 2720196 - DNA, 25 bp, Homo sapien
tgtgaaggtcaagacactctccaag

SEQ ID NO: 2720197 - DNA, 25 bp, Homo sapien
gagatgtggctgtctattcacagat

SEQ ID NO: 2720198 - DNA, 25 bp, Homo sapien
agatgtggctgtctattcacagatg

SEQ ID NO: 2720199 - DNA, 25 bp, Homo sapien
gatgtggctgtctattcacagatgt

SEQ ID NO: 2720200 - DNA, 25 bp, Homo sapien
ctgtgccatggattttctccgaatt

SEQ ID NO: 2720201 - DNA, 25 bp, Homo sapien
tctccgaattctctgatatcctcag

SEQ ID NO: 2720202 - DNA, 25 bp, Homo sapien
tgtacagctactaccattcacccag

SEQ ID NO: 2720203 - DNA, 25 bp, Homo sapien
tatcctcagagtgtacataaaacct

SEQ ID NO: 2720204 - DNA, 25 bp, Homo sapien
cttatttctttcaattaggctgacc

SEQ ID NO: 2720205 - DNA, 25 bp, Homo sapien
gtaaaggaagtatcaccacagagac

SEQ ID NO: 2720206 - DNA, 25 bp, Homo sapien
aaggaagtatcaccacagagactga

SEQ ID NO: 2720207 - DNA, 25 bp, Homo sapien
caattaggctgacctgattcttgcc

SEQ ID NO: 2720208 - DNA, 25 bp, Homo sapien
tgtaagtttaagtggagtagcgtat

SEQ ID NO: 2720209 - DNA, 25 bp, Homo sapien
attgcaatgctgcttgcgccccaaa

SEQ ID NO: 2720210 - DNA, 25 bp, Homo sapien
gagttcagcttccagacacattgca

SEQ ID NO: 2720211 - DNA, 25 bp, Homo sapien
gagtagcgtataaaatgcttctcag

SEQ ID NO: 2720212 - DNA, 25 bp, Homo sapien
caaaatatgttctcccgataccaaa

SEQ ID NO: 2720213 - DNA, 25 bp, Homo sapien
cattccattcatgggacaacacaaa

SEQ ID NO: 2720214 - DNA, 25 bp, Homo sapien
agtatgatctatcctgtctttttgg

SEQ ID NO: 2720215 - DNA, 25 bp, Homo sapien
tcccgataccaaattcagcattctc

SEQ ID NO: 2720216 - DNA, 25 bp, Homo sapien
tcctccaggaggaagcgttaaccag

SEQ ID NO: 2720217 - DNA, 25 bp, Homo sapien
acagcctgagtagatggtagggcca

SEQ ID NO: 2720218 - DNA, 25 bp, Homo sapien
gtagggccagggtcttcatcactcc

SEQ ID NO: 2720219 - DNA, 25 bp, Homo sapien
ttcccgcagggcattggaggttagc

SEQ ID NO: 2720220 - DNA, 25 bp, Homo sapien
gagccaagacaagaggtgggagtga

SEQ ID NO: 2720221 - DNA, 25 bp, Homo sapien
ctcatacagttggagggtccagacc

SEQ ID NO: 2720222 - DNA, 25 bp, Homo sapien
gaggcactgacttagttctggggag

SEQ ID NO: 2720223 - DNA, 25 bp, Homo sapien
ctggggagaggattccacactgtag

SEQ ID NO: 2720224 - DNA, 25 bp, Homo sapien
cttcaggtggatccacaactccttg

SEQ ID NO: 2720225 - DNA, 25 bp, Homo sapien
tgccttcaggtggatccacaactcc

SEQ ID NO: 2720226 - DNA, 25 bp, Homo sapien
caggtggatccacaactccttgatg

SEQ ID NO: 2720227 - DNA, 25 bp, Homo sapien
ggtggatccacaactccttgatgct

SEQ ID NO: 2720228 - DNA, 25 bp, Homo sapien
cagagcatctgtggcctccacagca

SEQ ID NO: 2720229 - DNA, 25 bp, Homo sapien
acatcttgcatgctggacagtgagt

SEQ ID NO: 2720230 - DNA, 25 bp, Homo sapien
ctgatgcagtggctggaaacacctc

SEQ ID NO: 2720231 - DNA, 25 bp, Homo sapien
ggatttgagcacgaggcaagccaga

SEQ ID NO: 2720232 - DNA, 25 bp, Homo sapien
ctgtccaaaagaggggctgtcttac

SEQ ID NO: 2720233 - DNA, 25 bp, Homo sapien
agaagcttcgtggtggtgggaagtg

SEQ ID NO: 2720234 - DNA, 25 bp, Homo sapien
tgcctctccagggaccgcccacagt

SEQ ID NO: 2720235 - DNA, 25 bp, Homo sapien
gaccgcccacagtggtgttgctgag

SEQ ID NO: 2720236 - DNA, 25 bp, Homo sapien
tgctgagttttgcaagccctgcaca

SEQ ID NO: 2720237 - DNA, 25 bp, Homo sapien
gcaggcaacattcctgaaggttgtc

SEQ ID NO: 2720238 - DNA, 25 bp, Homo sapien
ctttgatgctggaatgcatccattt

SEQ ID NO: 2720239 - DNA, 25 bp, Homo sapien
aagctgtgtgaagctgctactttga

SEQ ID NO: 2720240 - DNA, 25 bp, Homo sapien
gagtgaagctgtgtgaagctgctac

SEQ ID NO: 2720241 - DNA, 25 bp, Homo sapien
gctgctcaatatccattggaaaaag

SEQ ID NO: 2720242 - DNA, 25 bp, Homo sapien
ctgctcaatatccattggaaaaagg

SEQ ID NO: 2720243 - DNA, 25 bp, Homo sapien
gcttccaaagaagtagtgataccaa

SEQ ID NO: 2720244 - DNA, 25 bp, Homo sapien
caacagttttgagagaagacccaga

SEQ ID NO: 2720245 - DNA, 25 bp, Homo sapien
agacccagagggaccagttttgttg

SEQ ID NO: 2720246 - DNA, 25 bp, Homo sapien
gttctccaaggccttcagtcggaag

SEQ ID NO: 2720247 - DNA, 25 bp, Homo sapien
tgacgtgaccaacccgttgtacaca

SEQ ID NO: 2720248 - DNA, 25 bp, Homo sapien
gaccaacccgttgtacacaagcacg

SEQ ID NO: 2720249 - DNA, 25 bp, Homo sapien
cccgttgtacacaagcacgaatgac

SEQ ID NO: 2720250 - DNA, 25 bp, Homo sapien
ttaggagtctgacgtgaccaacccg

SEQ ID NO: 2720251 - DNA, 25 bp, Homo sapien
ttctctaggcagtcagcttgagctg

SEQ ID NO: 2720252 - DNA, 25 bp, Homo sapien
cttctctaggcagtcagcttgagct

SEQ ID NO: 2720253 - DNA, 25 bp, Homo sapien
gataatgctctatcatctgggaact

SEQ ID NO: 2720254 - DNA, 25 bp, Homo sapien
gaagtttaaagcatccagaagatag

SEQ ID NO: 2720255 - DNA, 25 bp, Homo sapien
aaagtatgccagaaacttgctttgc

SEQ ID NO: 2720256 - DNA, 25 bp, Homo sapien
taatcaaccactacccgagaaatga

SEQ ID NO: 2720257 - DNA, 25 bp, Homo sapien
tgtgtaatctcacagcatcggtact

SEQ ID NO: 2720258 - DNA, 25 bp, Homo sapien
ggaatggtctccaccatggaccaga

SEQ ID NO: 2720259 - DNA, 25 bp, Homo sapien
tctcaaataagttagggtccctgct

SEQ ID NO: 2720260 - DNA, 25 bp, Homo sapien
tgcactgtgtgagattaaagggtac

SEQ ID NO: 2720261 - DNA, 25 bp, Homo sapien
gggctccagcaaacggtctccagga

SEQ ID NO: 2720262 - DNA, 25 bp, Homo sapien
tccagcaaacggtctccaggaagtg

SEQ ID NO: 2720263 - DNA, 25 bp, Homo sapien
ccagcaaacggtctccaggaagtga

SEQ ID NO: 2720264 - DNA, 25 bp, Homo sapien
cctgaacacgtactatatttatctt

SEQ ID NO: 2720265 - DNA, 25 bp, Homo sapien
cttttcttcctgaacacgtactata

SEQ ID NO: 2720266 - DNA, 25 bp, Homo sapien
atatttatctttcggctcctcagca

SEQ ID NO: 2720267 - DNA, 25 bp, Homo sapien
actatatttatctttcggctcctca

SEQ ID NO: 2720268 - DNA, 25 bp, Homo sapien
tggatagaacaacataagttggtac

SEQ ID NO: 2720269 - DNA, 25 bp, Homo sapien
ctggatagaacaacataagttggta

SEQ ID NO: 2720270 - DNA, 25 bp, Homo sapien
gctcttcagcatcaactttatgcca

SEQ ID NO: 2720271 - DNA, 25 bp, Homo sapien
aaggcagattcagttgcgatctcag

SEQ ID NO: 2720272 - DNA, 25 bp, Homo sapien
gaaacattgtctttctcaaggcaga

SEQ ID NO: 2720273 - DNA, 25 bp, Homo sapien
tctcagagccctcatttaagtcatc

SEQ ID NO: 2720274 - DNA, 25 bp, Homo sapien
ttgtatggttcctgtgtacaaccaa

SEQ ID NO: 2720275 - DNA, 25 bp, Homo sapien
gtgagttgttcaggcttgtatggtt

SEQ ID NO: 2720276 - DNA, 25 bp, Homo sapien
caggcttgtatggttcctgtgtaca

SEQ ID NO: 2720277 - DNA, 25 bp, Homo sapien
tgttcaggcttgtatggttcctgtg

SEQ ID NO: 2720278 - DNA, 25 bp, Homo sapien
tctgaccactctgataagggcaagg

SEQ ID NO: 2720279 - DNA, 25 bp, Homo sapien
caagcctttgtagtgggcaatgaga

SEQ ID NO: 2720280 - DNA, 25 bp, Homo sapien
ccccaagcctttgtagtgggcaatg

SEQ ID NO: 2720281 - DNA, 25 bp, Homo sapien
gggcaaggtctacaatcttaactaa

SEQ ID NO: 2720282 - DNA, 25 bp, Homo sapien
acaatgaggccagctggaagctggt

SEQ ID NO: 2720283 - DNA, 25 bp, Homo sapien
aatgaggccagctggaagctggtgg

SEQ ID NO: 2720284 - DNA, 25 bp, Homo sapien
cacaatgaggccagctggaagctgg

SEQ ID NO: 2720285 - DNA, 25 bp, Homo sapien
caatgaggccagctggaagctggtg

SEQ ID NO: 2720286 - DNA, 25 bp, Homo sapien
gaatcatatttctatggacatcatc

SEQ ID NO: 2720287 - DNA, 25 bp, Homo sapien
ggcagcatctaggatattcacctgg

SEQ ID NO: 2720288 - DNA, 25 bp, Homo sapien
gcatctaggatattcacctggaact

SEQ ID NO: 2720289 - DNA, 25 bp, Homo sapien
ggatattcacctggaactgaatcat

SEQ ID NO: 2720290 - DNA, 25 bp, Homo sapien
tttctggaagaccgtcatcaatcat

SEQ ID NO: 2720291 - DNA, 25 bp, Homo sapien
catttctggaagaccgtcatcaatc

SEQ ID NO: 2720292 - DNA, 25 bp, Homo sapien
atcatttctggaagaccgtcatcaa

SEQ ID NO: 2720293 - DNA, 25 bp, Homo sapien
catcatttctggaagaccgtcatca

SEQ ID NO: 2720294 - DNA, 25 bp, Homo sapien
ctgactgactggaactctccaccta

SEQ ID NO: 2720295 - DNA, 25 bp, Homo sapien
tgactgactggaactctccacctac

SEQ ID NO: 2720296 - DNA, 25 bp, Homo sapien
actgactgactggaactctccacct

SEQ ID NO: 2720297 - DNA, 25 bp, Homo sapien
tcactgactgactggaactctccac

SEQ ID NO: 2720298 - DNA, 25 bp, Homo sapien
tgggattggccatgggcttgctaca

SEQ ID NO: 2720299 - DNA, 25 bp, Homo sapien
gccattggatgtagacaataaccca

SEQ ID NO: 2720300 - DNA, 25 bp, Homo sapien
cctagaagctggtgtgagagccatt

SEQ ID NO: 2720301 - DNA, 25 bp, Homo sapien
ggtggttactatctgccagttgctg

SEQ ID NO: 2720302 - DNA, 25 bp, Homo sapien
atgcccacaccggtccatataggag

SEQ ID NO: 2720303 - DNA, 25 bp, Homo sapien
gggatttgctaatctgggatgcaaa

SEQ ID NO: 2720304 - DNA, 25 bp, Homo sapien
tgaacacgcgcagcgtactgctgcc

SEQ ID NO: 2720305 - DNA, 25 bp, Homo sapien
agcaacttcaacagccaagccctga

SEQ ID NO: 2720306 - DNA, 25 bp, Homo sapien
aaagtgcgtatttgtttggtcacct

SEQ ID NO: 2720307 - DNA, 25 bp, Homo sapien
gctcactacctttagcttgcacata

SEQ ID NO: 2720308 - DNA, 25 bp, Homo sapien
tggtcacctacacttgtattagctg

SEQ ID NO: 2720309 - DNA, 25 bp, Homo sapien
tatgtttgctacgtgaaaagtgcgt

SEQ ID NO: 2720310 - DNA, 25 bp, Homo sapien
acatgccaccccttagcagtgcaag

SEQ ID NO: 2720311 - DNA, 25 bp, Homo sapien
gggtcggcttttgcgccttaaagca

SEQ ID NO: 2720312 - DNA, 25 bp, Homo sapien
aatggtagttagctcagacagtgca

SEQ ID NO: 2720313 - DNA, 25 bp, Homo sapien
gcctggaaagttaaaacgcgatgta

SEQ ID NO: 2720314 - DNA, 25 bp, Homo sapien
caagcaggtcatagtcaacaagggt

SEQ ID NO: 2720315 - DNA, 25 bp, Homo sapien
cactgtatctgtggcgggaagcacc

SEQ ID NO: 2720316 - DNA, 25 bp, Homo sapien
tcactgtatctgtggcgggaagcac

SEQ ID NO: 2720317 - DNA, 25 bp, Homo sapien
ctccaagcaggtcatagtcaacaag

SEQ ID NO: 2720318 - DNA, 25 bp, Homo sapien
catacactaagagtccatatgggaa

SEQ ID NO: 2720319 - DNA, 25 bp, Homo sapien
tactgttgccttttaagaacaacac

SEQ ID NO: 2720320 - DNA, 25 bp, Homo sapien
catttaaaagatcttgcaagtcaga

SEQ ID NO: 2720321 - DNA, 25 bp, Homo sapien
ctgctgacagtttgtgatgaatgat

SEQ ID NO: 2720322 - DNA, 25 bp, Homo sapien
gatgtttgtcatttcacacagccga

SEQ ID NO: 2720323 - DNA, 25 bp, Homo sapien
cacgaagtcctactatgtgggttca

SEQ ID NO: 2720324 - DNA, 25 bp, Homo sapien
gaacgtttcagatgtacccctccat

SEQ ID NO: 2720325 - DNA, 25 bp, Homo sapien
tgatacagttcaaatggcatcctgg

SEQ ID NO: 2720326 - DNA, 25 bp, Homo sapien
taagctgtacacaactccacgaagt

SEQ ID NO: 2720327 - DNA, 25 bp, Homo sapien
tgccattgctctccatgggatcctt

SEQ ID NO: 2720328 - DNA, 25 bp, Homo sapien
tgtcttgctggtgccattgctctcc

SEQ ID NO: 2720329 - DNA, 25 bp, Homo sapien
taacttttctccctgtcttgctggt

SEQ ID NO: 2720330 - DNA, 25 bp, Homo sapien
tctccctgtcttgctggtgccattg

SEQ ID NO: 2720331 - DNA, 25 bp, Homo sapien
cagctacattcccagacacggggca

SEQ ID NO: 2720332 - DNA, 25 bp, Homo sapien
cctcgtgtgtgaagcaattagtctc

SEQ ID NO: 2720333 - DNA, 25 bp, Homo sapien
tagtctcacacaggttctcctcgtt

SEQ ID NO: 2720334 - DNA, 25 bp, Homo sapien
cacggggcatgaagtcaaaagaaac

SEQ ID NO: 2720335 - DNA, 25 bp, Homo sapien
acgggaggtgcgactgtgatcatca

SEQ ID NO: 2720336 - DNA, 25 bp, Homo sapien
tcagcccgagtgaaggatggacgac

SEQ ID NO: 2720337 - DNA, 25 bp, Homo sapien
tgtatcaaagccatcagcccgagtg

SEQ ID NO: 2720338 - DNA, 25 bp, Homo sapien
cattaaagtttggttctaacagcag

SEQ ID NO: 2720339 - DNA, 25 bp, Homo sapien
tgataatacatacggaaccagctgg

SEQ ID NO: 2720340 - DNA, 25 bp, Homo sapien
taaacaagtagggtctgcatgtcag

SEQ ID NO: 2720341 - DNA, 25 bp, Homo sapien
cccaggcagcgcattatgataatac

SEQ ID NO: 2720342 - DNA, 25 bp, Homo sapien
gcaggatcgcccatcaatttctgag

SEQ ID NO: 2720343 - DNA, 25 bp, Homo sapien
ggtaatgaattgcgggacactggct

SEQ ID NO: 2720344 - DNA, 25 bp, Homo sapien
gcccggtatggatgattaggtttcg

SEQ ID NO: 2720345 - DNA, 25 bp, Homo sapien
cattaatttataggcactgagtgac

SEQ ID NO: 2720346 - DNA, 25 bp, Homo sapien
tgacgtgtgaaatataacagggccc

SEQ ID NO: 2720347 - DNA, 25 bp, Homo sapien
gaattttcaggctttggtcccagtc

SEQ ID NO: 2720348 - DNA, 25 bp, Homo sapien
tagtagcagctagatgagcacctca

SEQ ID NO: 2720349 - DNA, 25 bp, Homo sapien
tctgaggaaggttgtggccccaact

SEQ ID NO: 2720350 - DNA, 25 bp, Homo sapien
ccaagggagcccaaatgtgtctaga

SEQ ID NO: 2720351 - DNA, 25 bp, Homo sapien
gccgagatgtagcatagcccatgtg

SEQ ID NO: 2720352 - DNA, 25 bp, Homo sapien
tgttagcagttagcactccagtgcc

SEQ ID NO: 2720353 - DNA, 25 bp, Homo sapien
ttcaaaaggtaaacatggctgtcga

SEQ ID NO: 2720354 - DNA, 25 bp, Homo sapien
cagtgccatactgtgcctctgctcg

SEQ ID NO: 2720355 - DNA, 25 bp, Homo sapien
gcaaacaataatccttgaagcctga

SEQ ID NO: 2720356 - DNA, 25 bp, Homo sapien
ggcaataaaatccttgcacagtagg

SEQ ID NO: 2720357 - DNA, 25 bp, Homo sapien
aagcagaagcaactagggaagtcaa

SEQ ID NO: 2720358 - DNA, 25 bp, Homo sapien
taatgtgtgtaccatctctcagcaa

SEQ ID NO: 2720359 - DNA, 25 bp, Homo sapien
tataggatttcctatattgcaagtg

SEQ ID NO: 2720360 - DNA, 25 bp, Homo sapien
agtgttcttcccgttaacagctttg

SEQ ID NO: 2720361 - DNA, 25 bp, Homo sapien
tattgcaagtgttcttcccgttaac

SEQ ID NO: 2720362 - DNA, 25 bp, Homo sapien
tcctatattgcaagtgttcttcccg

SEQ ID NO: 2720363 - DNA, 25 bp, Homo sapien
gctgctggaagcctcttgcctccca

SEQ ID NO: 2720364 - DNA, 25 bp, Homo sapien
gttcgatgatgccatccaaaagagg

SEQ ID NO: 2720365 - DNA, 25 bp, Homo sapien
cctcccagcttgtcatctgggttcg

SEQ ID NO: 2720366 - DNA, 25 bp, Homo sapien
agtgggagggcgatgagcaatccat

SEQ ID NO: 2720367 - DNA, 25 bp, Homo sapien
cccatgtcgttaccaaatcagaact

SEQ ID NO: 2720368 - DNA, 25 bp, Homo sapien
catctccgatgacagttcttttatc

SEQ ID NO: 2720369 - DNA, 25 bp, Homo sapien
tcatgcccatgtcgttaccaaatca

SEQ ID NO: 2720370 - DNA, 25 bp, Homo sapien
cctccatctccgatgacagttcttt

SEQ ID NO: 2720371 - DNA, 25 bp, Homo sapien
atttatgggcccatttttcagtaag

SEQ ID NO: 2720372 - DNA, 25 bp, Homo sapien
taagataaatatgacacacgccaag

SEQ ID NO: 2720373 - DNA, 25 bp, Homo sapien
tcatgaaccaaattagtaccaaaac

SEQ ID NO: 2720374 - DNA, 25 bp, Homo sapien
ggctttgttcgaaaggtaatatgca

SEQ ID NO: 2720375 - DNA, 25 bp, Homo sapien
ctgagtatatgttgccgttccacca

SEQ ID NO: 2720376 - DNA, 25 bp, Homo sapien
tgcagtttgtaacaccttcgtgcat

SEQ ID NO: 2720377 - DNA, 25 bp, Homo sapien
cagtgcagtttgtaacaccttcgtg

SEQ ID NO: 2720378 - DNA, 25 bp, Homo sapien
gttccaccagagaaggaatgcaaac

SEQ ID NO: 2720379 - DNA, 25 bp, Homo sapien
ccgtggttgatctttcgaagaaact

SEQ ID NO: 2720380 - DNA, 25 bp, Homo sapien
taaatgtaggcacagctggtaaggg

SEQ ID NO: 2720381 - DNA, 25 bp, Homo sapien
agctggtaagggttgattgaaatgt

SEQ ID NO: 2720382 - DNA, 25 bp, Homo sapien
taaggttgccggctggagtccttcc

SEQ ID NO: 2720383 - DNA, 25 bp, Homo sapien
gggccagagcacatcttttggcact

SEQ ID NO: 2720384 - DNA, 25 bp, Homo sapien
tgttcaacaaacaccggggccagag

SEQ ID NO: 2720385 - DNA, 25 bp, Homo sapien
ggcactcggtactggcatccttcta

SEQ ID NO: 2720386 - DNA, 25 bp, Homo sapien
ccagaacgtgcttaatttgttcaac

SEQ ID NO: 2720387 - DNA, 25 bp, Homo sapien
tgttgcattgagttttgtcatccgt

SEQ ID NO: 2720388 - DNA, 25 bp, Homo sapien
ctgccagaaagtgtgaaagccttga

SEQ ID NO: 2720389 - DNA, 25 bp, Homo sapien
tatgcctggcattgttgcattgagt

SEQ ID NO: 2720390 - DNA, 25 bp, Homo sapien
gaatgtggaccccttttgatatgcc

SEQ ID NO: 2720391 - DNA, 25 bp, Homo sapien
gatatgtacccaagctaggttccca

SEQ ID NO: 2720392 - DNA, 25 bp, Homo sapien
caccaagtgggtttcagggagtcac

SEQ ID NO: 2720393 - DNA, 25 bp, Homo sapien
tattgtgaggtcaaacgcataaacg

SEQ ID NO: 2720394 - DNA, 25 bp, Homo sapien
cataaacgtgtgcagcattagcttg

SEQ ID NO: 2720395 - DNA, 25 bp, Homo sapien
aatcaaatcactgagaggatactgg

SEQ ID NO: 2720396 - DNA, 25 bp, Homo sapien
gaggatactgggtagaaagttgctt

SEQ ID NO: 2720397 - DNA, 25 bp, Homo sapien
tgccaccagcttccttagaagtgca

SEQ ID NO: 2720398 - DNA, 25 bp, Homo sapien
aatagcaaccaaatcaaatcactga

SEQ ID NO: 2720399 - DNA, 25 bp, Homo sapien
tcttactttgcagatacaagtggcc

SEQ ID NO: 2720400 - DNA, 25 bp, Homo sapien
gatacaagtggccacttgaattctc

SEQ ID NO: 2720401 - DNA, 25 bp, Homo sapien
tgcagatacaagtggccacttgaat

SEQ ID NO: 2720402 - DNA, 25 bp, Homo sapien
tactttgcagatacaagtggccact

SEQ ID NO: 2720403 - DNA, 25 bp, Homo sapien
tgaagaggctaacgctcttcctggg

SEQ ID NO: 2720404 - DNA, 25 bp, Homo sapien
cacggaggggctttctgcgttcaaa

SEQ ID NO: 2720405 - DNA, 25 bp, Homo sapien
ctggagaattttagagctttaggaa

SEQ ID NO: 2720406 - DNA, 25 bp, Homo sapien
ggctttctgcgttcaaatcgcccct

SEQ ID NO: 2720407 - DNA, 25 bp, Homo sapien
ctgcaggtgaaatggaacaacagcc

SEQ ID NO: 2720408 - DNA, 25 bp, Homo sapien
gaaaggacctgcatgttacagagac

SEQ ID NO: 2720409 - DNA, 25 bp, Homo sapien
gtggcttttgcaacacactgaaagg

SEQ ID NO: 2720410 - DNA, 25 bp, Homo sapien
acatgagggaattgcgtggaaaacc

SEQ ID NO: 2720411 - DNA, 25 bp, Homo sapien
tgagttcaccttaactgtgccctcg

SEQ ID NO: 2720412 - DNA, 25 bp, Homo sapien
agcagcacatttgcgtctccggaat

SEQ ID NO: 2720413 - DNA, 25 bp, Homo sapien
ctccggaatgtgtcctcagctcctt

SEQ ID NO: 2720414 - DNA, 25 bp, Homo sapien
caagatgcctctggcaaacgccttg

SEQ ID NO: 2720415 - DNA, 25 bp, Homo sapien
ttatgctaatctgggagtgggacag

SEQ ID NO: 2720416 - DNA, 25 bp, Homo sapien
gcccttgtcccgcacataataagcc

SEQ ID NO: 2720417 - DNA, 25 bp, Homo sapien
agcccttgtcccgcacataataagc

SEQ ID NO: 2720418 - DNA, 25 bp, Homo sapien
cagcccttgtcccgcacataataag

SEQ ID NO: 2720419 - DNA, 25 bp, Homo sapien
tcagcccttgtcccgcacataataa

SEQ ID NO: 2720420 - DNA, 25 bp, Homo sapien
tctgtccatgaagacgagaatgcca

SEQ ID NO: 2720421 - DNA, 25 bp, Homo sapien
tcgagagctcggcttctctgtccat

SEQ ID NO: 2720422 - DNA, 25 bp, Homo sapien
taatgtcgataaccatcgagagctc

SEQ ID NO: 2720423 - DNA, 25 bp, Homo sapien
tgtgtcagtggtgtccacgtccaga

SEQ ID NO: 2720424 - DNA, 25 bp, Homo sapien
aacaccctgggtcaaggagctttga

SEQ ID NO: 2720425 - DNA, 25 bp, Homo sapien
aaggagctttgaaatggtagtggca

SEQ ID NO: 2720426 - DNA, 25 bp, Homo sapien
cctgggtcaaggagctttgaaatgg

SEQ ID NO: 2720427 - DNA, 25 bp, Homo sapien
caccctgggtcaaggagctttgaaa

SEQ ID NO: 2720428 - DNA, 25 bp, Homo sapien
ctgacaggtcaatggcaccactggg

SEQ ID NO: 2720429 - DNA, 25 bp, Homo sapien
caatcagcaccgcaaattggaggca

SEQ ID NO: 2720430 - DNA, 25 bp, Homo sapien
tcctgaatttaaaggtgtggtactc

SEQ ID NO: 2720431 - DNA, 25 bp, Homo sapien
aggagtgggtcacaaccttctgaca

SEQ ID NO: 2720432 - DNA, 25 bp, Homo sapien
tctcatctggatctgaagcctcttc

SEQ ID NO: 2720433 - DNA, 25 bp, Homo sapien
taccagtgggatgtgtatattaacc

SEQ ID NO: 2720434 - DNA, 25 bp, Homo sapien
aacggcgtttctggttgtgtaagag

SEQ ID NO: 2720435 - DNA, 25 bp, Homo sapien
gactgggtgacttcgcaaagcaata

SEQ ID NO: 2720436 - DNA, 25 bp, Homo sapien
tggttgatcggcctgtgcatcggca

SEQ ID NO: 2720437 - DNA, 25 bp, Homo sapien
tcggcacagatgcaaggtgtaaaca

SEQ ID NO: 2720438 - DNA, 25 bp, Homo sapien
ccttcagcgtttgtatggaaagatg

SEQ ID NO: 2720439 - DNA, 25 bp, Homo sapien
tgtgacaattggtaaccttcagcgt

SEQ ID NO: 2720440 - DNA, 25 bp, Homo sapien
tgctgccatcgatagcagtccaaac

SEQ ID NO: 2720441 - DNA, 25 bp, Homo sapien
agctgccaccggctttatcagatca

SEQ ID NO: 2720442 - DNA, 25 bp, Homo sapien
tcagatcacttaaacacagtcctgt

SEQ ID NO: 2720443 - DNA, 25 bp, Homo sapien
cagtcctgtgctgccatcgatagca

SEQ ID NO: 2720444 - DNA, 25 bp, Homo sapien
gatccctggggtcgttctatttgtg

SEQ ID NO: 2720445 - DNA, 25 bp, Homo sapien
cattgcatgctttgtgatatgtttt

SEQ ID NO: 2720446 - DNA, 25 bp, Homo sapien
aggtgaccaccagcttccctagtag

SEQ ID NO: 2720447 - DNA, 25 bp, Homo sapien
tatttgtgattctacattgcatgct

SEQ ID NO: 2720448 - DNA, 25 bp, Homo sapien
tcattaaaagagtgccgatgggcta

SEQ ID NO: 2720449 - DNA, 25 bp, Homo sapien
gacaccgttgtacccatctgaatga

SEQ ID NO: 2720450 - DNA, 25 bp, Homo sapien
cagcaccattaggatgtagattatc

SEQ ID NO: 2720451 - DNA, 25 bp, Homo sapien
tctaagccaaggttttgcagcacca

SEQ ID NO: 2720452 - DNA, 25 bp, Homo sapien
tttgtgggcatggaataggcagata

SEQ ID NO: 2720453 - DNA, 25 bp, Homo sapien
tgatgatttccaagtctcctgtgag

SEQ ID NO: 2720454 - DNA, 25 bp, Homo sapien
ctgcactctggaagaaatgatgatt

SEQ ID NO: 2720455 - DNA, 25 bp, Homo sapien
tggcccaactgatatctgcactctg

SEQ ID NO: 2720456 - DNA, 25 bp, Homo sapien
gtctccttggcaatttccggcttta

SEQ ID NO: 2720457 - DNA, 25 bp, Homo sapien
gtaattaacacaggtgatgctaatg

SEQ ID NO: 2720458 - DNA, 25 bp, Homo sapien
gatttccccaggtgacttttgtctc

SEQ ID NO: 2720459 - DNA, 25 bp, Homo sapien
gaaggagctgttgattggtttgcta

SEQ ID NO: 2720460 - DNA, 25 bp, Homo sapien
tcctgaatcaggcttgggacaaaag

SEQ ID NO: 2720461 - DNA, 25 bp, Homo sapien
gaaaaatgtgtcaatgtgagcccct

SEQ ID NO: 2720462 - DNA, 25 bp, Homo sapien
tcaggactatggaaagagatacagg

SEQ ID NO: 2720463 - DNA, 25 bp, Homo sapien
gaatgtctcatcagtgaccagagct

SEQ ID NO: 2720464 - DNA, 25 bp, Homo sapien
caagactaggtgaaaagtattagaa

SEQ ID NO: 2720465 - DNA, 25 bp, Homo sapien
gcctgtctccactcagtagctaagg

SEQ ID NO: 2720466 - DNA, 25 bp, Homo sapien
ggatgacagggttggcgttttcact

SEQ ID NO: 2720467 - DNA, 25 bp, Homo sapien
tagctaaggttaggcatctgtcaag

SEQ ID NO: 2720468 - DNA, 25 bp, Homo sapien
ggcgcaccggggcgcagtgagccag

SEQ ID NO: 2720469 - DNA, 25 bp, Homo sapien
gcatgtcgggggtcagggcgcaccg

SEQ ID NO: 2720470 - DNA, 25 bp, Homo sapien
agtgagccagccctcgccacttccc

SEQ ID NO: 2720471 - DNA, 25 bp, Homo sapien
gcggccgcatgtcgggggtcagggc

SEQ ID NO: 2720472 - DNA, 25 bp, Homo sapien
ggtttctgccgtcatcggtttccag

SEQ ID NO: 2720473 - DNA, 25 bp, Homo sapien
attttttaggtttctgccgtcatcg

SEQ ID NO: 2720474 - DNA, 25 bp, Homo sapien
taggtttctgccgtcatcggtttcc

SEQ ID NO: 2720475 - DNA, 25 bp, Homo sapien
tttctgccgtcatcggtttccagcc

SEQ ID NO: 2720476 - DNA, 25 bp, Homo sapien
gacattgcctttgttaagtgttgca

SEQ ID NO: 2720477 - DNA, 25 bp, Homo sapien
acatttctgacattgcctttgttaa

SEQ ID NO: 2720478 - DNA, 25 bp, Homo sapien
tgacattgcctttgttaagtgttgc

SEQ ID NO: 2720479 - DNA, 25 bp, Homo sapien
ttctgacattgcctttgttaagtgt

SEQ ID NO: 2720480 - DNA, 25 bp, Homo sapien
tactttttcagccagaagttggaac

SEQ ID NO: 2720481 - DNA, 25 bp, Homo sapien
tttcccactggatgaacccatctgg

SEQ ID NO: 2720482 - DNA, 25 bp, Homo sapien
cagtctcaaggtgttagtacagccg

SEQ ID NO: 2720483 - DNA, 25 bp, Homo sapien
gccttcagtttggatcagtctcaag

SEQ ID NO: 2720484 - DNA, 25 bp, Homo sapien
tgaaatgccttcacagccatagaca

SEQ ID NO: 2720485 - DNA, 25 bp, Homo sapien
taagtaacggaaagccttgatgacc

SEQ ID NO: 2720486 - DNA, 25 bp, Homo sapien
cagatagataccttttgtgtgggct

SEQ ID NO: 2720487 - DNA, 25 bp, Homo sapien
aaattcagggctttggtggccaaag

SEQ ID NO: 2720488 - DNA, 25 bp, Homo sapien
tccacatcggttctcagagtgaatg

SEQ ID NO: 2720489 - DNA, 25 bp, Homo sapien
ggctagggcaactgcttgtgacctc

SEQ ID NO: 2720490 - DNA, 25 bp, Homo sapien
taaaaaggctgctattagttccaca

SEQ ID NO: 2720491 - DNA, 25 bp, Homo sapien
agggttcaggctagggcaactgctt

SEQ ID NO: 2720492 - DNA, 25 bp, Homo sapien
taacttgaaaggtgataaaatgccc

SEQ ID NO: 2720493 - DNA, 25 bp, Homo sapien
gacccattgaaagagagcttcctat

SEQ ID NO: 2720494 - DNA, 25 bp, Homo sapien
gatacattaaggagatgacccattg

SEQ ID NO: 2720495 - DNA, 25 bp, Homo sapien
cagtagttagcaggaatcacatctc

SEQ ID NO: 2720496 - DNA, 25 bp, Homo sapien
agcttgacgggcatcatctgaaatc

SEQ ID NO: 2720497 - DNA, 25 bp, Homo sapien
gaatgtcaaagactgagcccggggc

SEQ ID NO: 2720498 - DNA, 25 bp, Homo sapien
caactgggccataagatccagcttg

SEQ ID NO: 2720499 - DNA, 25 bp, Homo sapien
gaccttttagggttgtgaatgtcaa

SEQ ID NO: 2720500 - DNA, 25 bp, Homo sapien
actgaaaagttgctgaacggccctc

SEQ ID NO: 2720501 - DNA, 25 bp, Homo sapien
tgtgtactgcttccactgaaaacat

SEQ ID NO: 2720502 - DNA, 25 bp, Homo sapien
tgaaaagttgctgaacggccctcac

SEQ ID NO: 2720503 - DNA, 25 bp, Homo sapien
gtgtactgcttccactgaaaacatc

SEQ ID NO: 2720504 - DNA, 25 bp, Homo sapien
gtatccactttcttgacatactcct

SEQ ID NO: 2720505 - DNA, 25 bp, Homo sapien
tcttgacatactccttgccttcttc

SEQ ID NO: 2720506 - DNA, 25 bp, Homo sapien
tctccccgctgtcccctggttctcc

SEQ ID NO: 2720507 - DNA, 25 bp, Homo sapien
cactttcttgacatactccttgcct

SEQ ID NO: 2720508 - DNA, 25 bp, Homo sapien
ccacaccacgtacattgtcctggaa

SEQ ID NO: 2720509 - DNA, 25 bp, Homo sapien
caggaggggagacagtcccttgtgg

SEQ ID NO: 2720510 - DNA, 25 bp, Homo sapien
atgtttatcacacccacaccacgta

SEQ ID NO: 2720511 - DNA, 25 bp, Homo sapien
caccacgtacattgtcctggaaatt

SEQ ID NO: 2720512 - DNA, 25 bp, Homo sapien
gaaagccgaaacacgagtcgcacat

SEQ ID NO: 2720513 - DNA, 25 bp, Homo sapien
ataaatccagccctggtgccgagcg

SEQ ID NO: 2720514 - DNA, 25 bp, Homo sapien
cggctccagtttgtcgccagcgaaa

SEQ ID NO: 2720515 - DNA, 25 bp, Homo sapien
gcgacacgtagcgagttcctcctaa

SEQ ID NO: 2720516 - DNA, 25 bp, Homo sapien
taaggaaattggatttggtgtagaa

SEQ ID NO: 2720517 - DNA, 25 bp, Homo sapien
tattaaggaaattggatttggtgta

SEQ ID NO: 2720518 - DNA, 25 bp, Homo sapien
ggaaattggatttggtgtagaatct

SEQ ID NO: 2720519 - DNA, 25 bp, Homo sapien
aggaaattggatttggtgtagaatc

SEQ ID NO: 2720520 - DNA, 25 bp, Homo sapien
gctgctcagggtagattgcctggaa

SEQ ID NO: 2720521 - DNA, 25 bp, Homo sapien
gaaatttgtcagctttccagacatg

SEQ ID NO: 2720522 - DNA, 25 bp, Homo sapien
gccagctttggtttgtatctacgga

SEQ ID NO: 2720523 - DNA, 25 bp, Homo sapien
acacccgttgggctacagttgccac

SEQ ID NO: 2720524 - DNA, 25 bp, Homo sapien
tcgccctgactaatcgcatctcgga

SEQ ID NO: 2720525 - DNA, 25 bp, Homo sapien
catgtttcgattcttcggcttccga

SEQ ID NO: 2720526 - DNA, 25 bp, Homo sapien
agtagcttcttgagccatgtttcga

SEQ ID NO: 2720527 - DNA, 25 bp, Homo sapien
ttcggcttccgagccggacactggg

SEQ ID NO: 2720528 - DNA, 25 bp, Homo sapien
gggcttgaagttacccacagggcat

SEQ ID NO: 2720529 - DNA, 25 bp, Homo sapien
catcatgtgcctggttgactctgaa

SEQ ID NO: 2720530 - DNA, 25 bp, Homo sapien
agcagaggccctcacatttgatagg

SEQ ID NO: 2720531 - DNA, 25 bp, Homo sapien
tagtctctctgacctgcgagctggg

SEQ ID NO: 2720532 - DNA, 25 bp, Homo sapien
tgtatagtggaggttggtgctcact

SEQ ID NO: 2720533 - DNA, 25 bp, Homo sapien
ggtgctcactcttggtccttctgag

SEQ ID NO: 2720534 - DNA, 25 bp, Homo sapien
tctgccttaaacataagtgaattca

SEQ ID NO: 2720535 - DNA, 25 bp, Homo sapien
cctggtttcctcctgtgtatagtgg

SEQ ID NO: 2720536 - DNA, 25 bp, Homo sapien
tctactccgcgaaggtgggttcact

SEQ ID NO: 2720537 - DNA, 25 bp, Homo sapien
tatagagtttcatctcgcgcgcaaa

SEQ ID NO: 2720538 - DNA, 25 bp, Homo sapien
ccctgctagctgagacgtgagattc

SEQ ID NO: 2720539 - DNA, 25 bp, Homo sapien
ggcgagacgccgagcatgttttcca

SEQ ID NO: 2720540 - DNA, 25 bp, Homo sapien
tttcttagtctaccggtagaatagc

SEQ ID NO: 2720541 - DNA, 25 bp, Homo sapien
gtagaatagcaactcccaactttaa

SEQ ID NO: 2720542 - DNA, 25 bp, Homo sapien
tatttctgctatctcgttctccttc

SEQ ID NO: 2720543 - DNA, 25 bp, Homo sapien
taattctgatatctcccaaaagtct

SEQ ID NO: 2720544 - DNA, 25 bp, Homo sapien
tcagggcgcggcgaggatgctaaag

SEQ ID NO: 2720545 - DNA, 25 bp, Homo sapien
ccgacgtcccagaacggcggagcag

SEQ ID NO: 2720546 - DNA, 25 bp, Homo sapien
gggacgcgcgtcctgctttttctgc

SEQ ID NO: 2720547 - DNA, 25 bp, Homo sapien
ccaggatgcagatccccagctcaaa

SEQ ID NO: 2720548 - DNA, 25 bp, Homo sapien
aatttaaaaacgcatcctgacacag

SEQ ID NO: 2720549 - DNA, 25 bp, Homo sapien
caaataaccagctaatcaaggacgg

SEQ ID NO: 2720550 - DNA, 25 bp, Homo sapien
ctagcggccgagagagaagcgtttc

SEQ ID NO: 2720551 - DNA, 25 bp, Homo sapien
attcacatatctcgaggactgcccg

SEQ ID NO: 2720552 - DNA, 25 bp, Homo sapien
gagacgattccctcttccgctggga

SEQ ID NO: 2720553 - DNA, 25 bp, Homo sapien
gaagtaggcatctgtcctcccgcct

SEQ ID NO: 2720554 - DNA, 25 bp, Homo sapien
ggtatgtttctactggagtccccag

SEQ ID NO: 2720555 - DNA, 25 bp, Homo sapien
tactggtagatgttgcctttcagaa

SEQ ID NO: 2720556 - DNA, 25 bp, Homo sapien
aaagagccacggttttgagggctgg

SEQ ID NO: 2720557 - DNA, 25 bp, Homo sapien
cggtgtgtcacggtgttcggccact

SEQ ID NO: 2720558 - DNA, 25 bp, Homo sapien
gcgttccccgaggactgcgcatgga

SEQ ID NO: 2720559 - DNA, 25 bp, Homo sapien
aggactgcgcatggagatcaccgag

SEQ ID NO: 2720560 - DNA, 25 bp, Homo sapien
ttcagtgagttcctgcccgtaaagc

SEQ ID NO: 2720561 - DNA, 25 bp, Homo sapien
tgtaaaacgccggagtggtcttatc

SEQ ID NO: 2720562 - DNA, 25 bp, Homo sapien
gagtggtcttatctgccgtggtctg

SEQ ID NO: 2720563 - DNA, 25 bp, Homo sapien
ccgtggtctgtggcggatattcagt

SEQ ID NO: 2720564 - DNA, 25 bp, Homo sapien
caaaaccacgtgtgagttcaggctc

SEQ ID NO: 2720565 - DNA, 25 bp, Homo sapien
gatgctcttgcacaatacacacgga

SEQ ID NO: 2720566 - DNA, 25 bp, Homo sapien
tcagcaaattgtccctcgaaggaag

SEQ ID NO: 2720567 - DNA, 25 bp, Homo sapien
tacacacggacttttgcaaatgcac

SEQ ID NO: 2720568 - DNA, 25 bp, Homo sapien
caataatcagagaccgtaggcgagg

SEQ ID NO: 2720569 - DNA, 25 bp, Homo sapien
tcagtccgcgtaatctgtaggcccg

SEQ ID NO: 2720570 - DNA, 25 bp, Homo sapien
gcgtctccctaaagccaaagtcgta

SEQ ID NO: 2720571 - DNA, 25 bp, Homo sapien
ttaagagcacggaactgtccagcag

SEQ ID NO: 2720572 - DNA, 25 bp, Homo sapien
tttcctgtccaatgtgatgcgagca

SEQ ID NO: 2720573 - DNA, 25 bp, Homo sapien
ccagggaaaggcacgaatgactgcg

SEQ ID NO: 2720574 - DNA, 25 bp, Homo sapien
gaaagattctggagctcgcgggtca

SEQ ID NO: 2720575 - DNA, 25 bp, Homo sapien
tgttgaataagcaaggacagccatg

SEQ ID NO: 2720576 - DNA, 25 bp, Homo sapien
caaagcccacggatatacagctgaa

SEQ ID NO: 2720577 - DNA, 25 bp, Homo sapien
tatctgataattgcagtgccttccc

SEQ ID NO: 2720578 - DNA, 25 bp, Homo sapien
caaggtctcctagctacttagcaga

SEQ ID NO: 2720579 - DNA, 25 bp, Homo sapien
tacagctgaataagtctgcaagtca

SEQ ID NO: 2720580 - DNA, 25 bp, Homo sapien
ctggcctcagatgatcctcacacct

SEQ ID NO: 2720581 - DNA, 25 bp, Homo sapien
cctggcctcagatgatcctcacacc

SEQ ID NO: 2720582 - DNA, 25 bp, Homo sapien
tcctggcctcagatgatcctcacac

SEQ ID NO: 2720583 - DNA, 25 bp, Homo sapien
gagtgcttgctagctttagtctcta

SEQ ID NO: 2720584 - DNA, 25 bp, Homo sapien
cattgagtccatcacaccacatgag

SEQ ID NO: 2720585 - DNA, 25 bp, Homo sapien
tatctgtgggaagtaataccatcac

SEQ ID NO: 2720586 - DNA, 25 bp, Homo sapien
gccctagatcacgttattaaattca

SEQ ID NO: 2720587 - DNA, 25 bp, Homo sapien
catagtcctcaggtatggccaggat

SEQ ID NO: 2720588 - DNA, 25 bp, Homo sapien
tgaaccaggcatctgttaccagcga

SEQ ID NO: 2720589 - DNA, 25 bp, Homo sapien
cttctagaagaggagcatagtcctc

SEQ ID NO: 2720590 - DNA, 25 bp, Homo sapien
ccagcgatcatgtctgcaacagaaa

SEQ ID NO: 2720591 - DNA, 25 bp, Homo sapien
attaaatccattgcatattggtaaa

SEQ ID NO: 2720592 - DNA, 25 bp, Homo sapien
aatccattgcatattggtaaagagc

SEQ ID NO: 2720593 - DNA, 25 bp, Homo sapien
aaatccattgcatattggtaaagag

SEQ ID NO: 2720594 - DNA, 25 bp, Homo sapien
taaatccattgcatattggtaaaga

SEQ ID NO: 2720595 - DNA, 25 bp, Homo sapien
tgcttaagaagtcaaacccaggccg

SEQ ID NO: 2720596 - DNA, 25 bp, Homo sapien
aatgatgtttaggactcaggcagcc

SEQ ID NO: 2720597 - DNA, 25 bp, Homo sapien
tgactttacaatgggttccagggac

SEQ ID NO: 2720598 - DNA, 25 bp, Homo sapien
cagattactagtgttgccagccata

SEQ ID NO: 2720599 - DNA, 25 bp, Homo sapien
tgctgatcagtgttgatgattccat

SEQ ID NO: 2720600 - DNA, 25 bp, Homo sapien
ccatttgttcctgatgctgatcagt

SEQ ID NO: 2720601 - DNA, 25 bp, Homo sapien
tcctgatgctgatcagtgttgatga

SEQ ID NO: 2720602 - DNA, 25 bp, Homo sapien
tctgaagaattcttcaggtttcctc

SEQ ID NO: 2720603 - DNA, 25 bp, Homo sapien
gaattctgctgagtacaacctgagg

SEQ ID NO: 2720604 - DNA, 25 bp, Homo sapien
aaatggcttgtgatgtgccatctcc

SEQ ID NO: 2720605 - DNA, 25 bp, Homo sapien
ggctcatgatagataggatgtggca

SEQ ID NO: 2720606 - DNA, 25 bp, Homo sapien
tgagggtatccttcaaattgcttga

SEQ ID NO: 2720607 - DNA, 25 bp, Homo sapien
ctctagtccaaacatagatggttgg

SEQ ID NO: 2720608 - DNA, 25 bp, Homo sapien
gtttatttgttcatcgccagcttcc

SEQ ID NO: 2720609 - DNA, 25 bp, Homo sapien
caggacccaacctggatagccagtt

SEQ ID NO: 2720610 - DNA, 25 bp, Homo sapien
gttggttgggttcaatgccaggacc

SEQ ID NO: 2720611 - DNA, 25 bp, Homo sapien
tcctcgccagcactccagtttcttt

SEQ ID NO: 2720612 - DNA, 25 bp, Homo sapien
aaccatgaggtcgtgggtagggctg

SEQ ID NO: 2720613 - DNA, 25 bp, Homo sapien
tggtgcaccaccttaagaagcgact

SEQ ID NO: 2720614 - DNA, 25 bp, Homo sapien
taagaagcgactccagatccagtga

SEQ ID NO: 2720615 - DNA, 25 bp, Homo sapien
ctgtcaattgacgttttgctggtga

SEQ ID NO: 2720616 - DNA, 25 bp, Homo sapien
tcaactgcatcctggccagcactcc

SEQ ID NO: 2720617 - DNA, 25 bp, Homo sapien
tctctcaactgcatcctggccagca

SEQ ID NO: 2720618 - DNA, 25 bp, Homo sapien
gtcaattgacgttttgctggtgacc

SEQ ID NO: 2720619 - DNA, 25 bp, Homo sapien
cacacctggtaccaagttctgttca

SEQ ID NO: 2720620 - DNA, 25 bp, Homo sapien
cacctggtaccaagttctgttcaat

SEQ ID NO: 2720621 - DNA, 25 bp, Homo sapien
tcagttcacacctggtaccaagttc

SEQ ID NO: 2720622 - DNA, 25 bp, Homo sapien
gttcacacctggtaccaagttctgt

SEQ ID NO: 2720623 - DNA, 25 bp, Homo sapien
tgcaccttttctttgacaaggatgt

SEQ ID NO: 2720624 - DNA, 25 bp, Homo sapien
tagactttgcaccttttctttgaca

SEQ ID NO: 2720625 - DNA, 25 bp, Homo sapien
ctttgcaccttttctttgacaagga

SEQ ID NO: 2720626 - DNA, 25 bp, Homo sapien
tgttaatagactttgcaccttttct

SEQ ID NO: 2720627 - DNA, 25 bp, Homo sapien
tcagaattataagattggacagaac

SEQ ID NO: 2720628 - DNA, 25 bp, Homo sapien
actgaatgggtcaatgtgaaaacac

SEQ ID NO: 2720629 - DNA, 25 bp, Homo sapien
acatagttttgtacagtgtgtgaca

SEQ ID NO: 2720630 - DNA, 25 bp, Homo sapien
tgtggctgagaagtagtatacgttc

SEQ ID NO: 2720631 - DNA, 25 bp, Homo sapien
tgttaaatcagtaatagctcctccc

SEQ ID NO: 2720632 - DNA, 25 bp, Homo sapien
gatgatcctctgtacggattaggga

SEQ ID NO: 2720633 - DNA, 25 bp, Homo sapien
gcagatcttgatttctaaagcagga

SEQ ID NO: 2720634 - DNA, 25 bp, Homo sapien
acccgtttaggagccacagtaaatg

SEQ ID NO: 2720635 - DNA, 25 bp, Homo sapien
tttgggggtgcggaagggcctgcca

SEQ ID NO: 2720636 - DNA, 25 bp, Homo sapien
ccccgctttcaggtggtgcgaggtt

SEQ ID NO: 2720637 - DNA, 25 bp, Homo sapien
tgctttgatctacgcagccccaaac

SEQ ID NO: 2720638 - DNA, 25 bp, Homo sapien
aagctccccgctttcaggtggtgcg

SEQ ID NO: 2720639 - DNA, 25 bp, Homo sapien
ctgtgagccgtgccgtaccggcccc

SEQ ID NO: 2720640 - DNA, 25 bp, Homo sapien
acatccgaggctcggcgcagaagag

SEQ ID NO: 2720641 - DNA, 25 bp, Homo sapien
caacatccgaggctcggcgcagaag

SEQ ID NO: 2720642 - DNA, 25 bp, Homo sapien
gaagcaacatccgaggctcggcgca

SEQ ID NO: 2720643 - DNA, 25 bp, Homo sapien
cccagaagcaacatccgaggctcgg

SEQ ID NO: 2720644 - DNA, 25 bp, Homo sapien
ctgccgcggacgatggtgaccgtac

SEQ ID NO: 2720645 - DNA, 25 bp, Homo sapien
gctcggcccgcgagcgcctgctgcc

SEQ ID NO: 2720646 - DNA, 25 bp, Homo sapien
gctgctaaggggctcggcccgcgag

SEQ ID NO: 2720647 - DNA, 25 bp, Homo sapien
cgagcgcctgctgccgcggacgatg

SEQ ID NO: 2720648 - DNA, 25 bp, Homo sapien
tgagccatcccagacgccaaggagt

SEQ ID NO: 2720649 - DNA, 25 bp, Homo sapien
tcccagacgccaaggagtttacagt

SEQ ID NO: 2720650 - DNA, 25 bp, Homo sapien
agtttacagtctagtccagtcagtg

SEQ ID NO: 2720651 - DNA, 25 bp, Homo sapien
tttgagtgcctgcacttggtgctgg

SEQ ID NO: 2720652 - DNA, 25 bp, Homo sapien
gctagattaagagactcatgaactg

SEQ ID NO: 2720653 - DNA, 25 bp, Homo sapien
caggctagattaagagactcatgaa

SEQ ID NO: 2720654 - DNA, 25 bp, Homo sapien
ggatgtgacaggatttatgactatg

SEQ ID NO: 2720655 - DNA, 25 bp, Homo sapien
tatgactatggtgaagtagtctgag

SEQ ID NO: 2720656 - DNA, 25 bp, Homo sapien
ctaataggactcttttgtaattcat

SEQ ID NO: 2720657 - DNA, 25 bp, Homo sapien
tcctaataggactcttttgtaattc

SEQ ID NO: 2720658 - DNA, 25 bp, Homo sapien
cctaataggactcttttgtaattca

SEQ ID NO: 2720659 - DNA, 25 bp, Homo sapien
gtgaactcagtgacatcaagttgga

SEQ ID NO: 2720660 - DNA, 25 bp, Homo sapien
ctcctgatatttcatctgggttcca

SEQ ID NO: 2720661 - DNA, 25 bp, Homo sapien
tcaagttggacagcttgagacttgc

SEQ ID NO: 2720662 - DNA, 25 bp, Homo sapien
actcagtgacatcaagttggacagc

SEQ ID NO: 2720663 - DNA, 25 bp, Homo sapien
gctcctccatgaacaacagacccat

SEQ ID NO: 2720664 - DNA, 25 bp, Homo sapien
ctgtcagctgttggtctccccacac

SEQ ID NO: 2720665 - DNA, 25 bp, Homo sapien
aagggctgatccctgtcagctgttg

SEQ ID NO: 2720666 - DNA, 25 bp, Homo sapien
cctgtcagctgttggtctccccaca

SEQ ID NO: 2720667 - DNA, 25 bp, Homo sapien
gatgataatgagcaacagcaagaac

SEQ ID NO: 2720668 - DNA, 25 bp, Homo sapien
ggatgataatgagcaacagcaagaa

SEQ ID NO: 2720669 - DNA, 25 bp, Homo sapien
gcacagccacagtcccgcaaaggtg

SEQ ID NO: 2720670 - DNA, 25 bp, Homo sapien
caaatttactgcgaggggcacagcc

SEQ ID NO: 2720671 - DNA, 25 bp, Homo sapien
aaggtgacaagatgtgctcgctgtt

SEQ ID NO: 2720672 - DNA, 25 bp, Homo sapien
aagatgtgctcgctgtttgcatctg

SEQ ID NO: 2720673 - DNA, 25 bp, Homo sapien
caacacatatgccatgggtttgact

SEQ ID NO: 2720674 - DNA, 25 bp, Homo sapien
ccaacacatatgccatgggtttgac

SEQ ID NO: 2720675 - DNA, 25 bp, Homo sapien
tttctcacagacacttactgatatt

SEQ ID NO: 2720676 - DNA, 25 bp, Homo sapien
acacatatgccatgggtttgacttc

SEQ ID NO: 2720677 - DNA, 25 bp, Homo sapien
tccacttctgaaggtgcatgtctct

SEQ ID NO: 2720678 - DNA, 25 bp, Homo sapien
gacagaaggtttgcttctcaggaac

SEQ ID NO: 2720679 - DNA, 25 bp, Homo sapien
gaaagaatccttgaggaggtccatg

SEQ ID NO: 2720680 - DNA, 25 bp, Homo sapien
tatcattgaaagaaggcagcaaagg

SEQ ID NO: 2720681 - DNA, 25 bp, Homo sapien
tcaagttgtgtgaacagaagacaaa

SEQ ID NO: 2720682 - DNA, 25 bp, Homo sapien
gtgaacagaagacaaaatccagcac

SEQ ID NO: 2720683 - DNA, 25 bp, Homo sapien
agttgtgtgaacagaagacaaaatc

SEQ ID NO: 2720684 - DNA, 25 bp, Homo sapien
tgtgaacagaagacaaaatccagca

SEQ ID NO: 2720685 - DNA, 25 bp, Homo sapien
cagtgtttaatacattgcgcccagt

SEQ ID NO: 2720686 - DNA, 25 bp, Homo sapien
tatgtcactgctcttaatgtgccag

SEQ ID NO: 2720687 - DNA, 25 bp, Homo sapien
aacatcctctcttatagtgcttggg

SEQ ID NO: 2720688 - DNA, 25 bp, Homo sapien
tcacatgacattgcaccgatccagc

SEQ ID NO: 2720689 - DNA, 25 bp, Homo sapien
gttcttcctctttattgacagctat

SEQ ID NO: 2720690 - DNA, 25 bp, Homo sapien
cctgatatctgcatatatctctcct

SEQ ID NO: 2720691 - DNA, 25 bp, Homo sapien
gaaacataagcatcacgtaatccgt

SEQ ID NO: 2720692 - DNA, 25 bp, Homo sapien
tcaatcttccgtttgcaaaatgaga

SEQ ID NO: 2720693 - DNA, 25 bp, Homo sapien
atctggtccatacagcgaactccca

SEQ ID NO: 2720694 - DNA, 25 bp, Homo sapien
gttaagaggcacacgctattttgca

SEQ ID NO: 2720695 - DNA, 25 bp, Homo sapien
actcccagtgagcaccacggcaatg

SEQ ID NO: 2720696 - DNA, 25 bp, Homo sapien
gagccaagttttgtatcttaacagt

SEQ ID NO: 2720697 - DNA, 25 bp, Homo sapien
ccatccatacttccatgctgtcttt

SEQ ID NO: 2720698 - DNA, 25 bp, Homo sapien
tcctctgaatgcaaggaaaaccggt

SEQ ID NO: 2720699 - DNA, 25 bp, Homo sapien
cttgaatggaaattcggagcagtac

SEQ ID NO: 2720700 - DNA, 25 bp, Homo sapien
ccggttacacaaacgctgacaaaag

SEQ ID NO: 2720701 - DNA, 25 bp, Homo sapien
gaactgaagacttgagacccctcca

SEQ ID NO: 2720702 - DNA, 25 bp, Homo sapien
gggctgccaacactaataatttcag

SEQ ID NO: 2720703 - DNA, 25 bp, Homo sapien
caggggctgccaacactaataattt

SEQ ID NO: 2720704 - DNA, 25 bp, Homo sapien
gaagacttgagacccctccatgggc

SEQ ID NO: 2720705 - DNA, 25 bp, Homo sapien
tgtactgaggtcttcgtgagattca

SEQ ID NO: 2720706 - DNA, 25 bp, Homo sapien
ctagtagtgtcgtaactgggtgtgc

SEQ ID NO: 2720707 - DNA, 25 bp, Homo sapien
tgctgaggcgtgtgacgtctctagt

SEQ ID NO: 2720708 - DNA, 25 bp, Homo sapien
tcgtgagattcagggctaggactcg

SEQ ID NO: 2720709 - DNA, 25 bp, Homo sapien
tgggtggccgctctctcgttctgcg

SEQ ID NO: 2720710 - DNA, 25 bp, Homo sapien
tgtaaccgctgtgcagatagcgccg

SEQ ID NO: 2720711 - DNA, 25 bp, Homo sapien
aagaagccaggcctttccgagactg

SEQ ID NO: 2720712 - DNA, 25 bp, Homo sapien
caaatggccgctgtaagggatctcc

SEQ ID NO: 2720713 - DNA, 25 bp, Homo sapien
aatatgttggggacggaacaactgc

SEQ ID NO: 2720714 - DNA, 25 bp, Homo sapien
agaaaccggccgctgagagaccgaa

SEQ ID NO: 2720715 - DNA, 25 bp, Homo sapien
ctggagcgcggtggaacctgcggca

SEQ ID NO: 2720716 - DNA, 25 bp, Homo sapien
agaccgaaagcgaccggaagtgaag

SEQ ID NO: 2720717 - DNA, 25 bp, Homo sapien
aacagcgtctccaagggcagcgcgc

SEQ ID NO: 2720718 - DNA, 25 bp, Homo sapien
tggaggctccagaaccaaaaaggcc

SEQ ID NO: 2720719 - DNA, 25 bp, Homo sapien
gactaggacagacactatccccagc

SEQ ID NO: 2720720 - DNA, 25 bp, Homo sapien
caaataggctagactgctggatggg

SEQ ID NO: 2720721 - DNA, 25 bp, Homo sapien
gaagcactaagaactccggcgagaa

SEQ ID NO: 2720722 - DNA, 25 bp, Homo sapien
ttaactttcaacaatcccagcaaaa

SEQ ID NO: 2720723 - DNA, 25 bp, Homo sapien
ggcgagaaccgcacaccagcaacaa

SEQ ID NO: 2720724 - DNA, 25 bp, Homo sapien
ccagcaaaagataaccgtgaagcac

SEQ ID NO: 2720725 - DNA, 25 bp, Homo sapien
tacgagagctagaaaggcaaccagc

SEQ ID NO: 2720726 - DNA, 25 bp, Homo sapien
tggtccctgggctaacgaacagcat

SEQ ID NO: 2720727 - DNA, 25 bp, Homo sapien
tacgaagcacctatcccacaagtgg

SEQ ID NO: 2720728 - DNA, 25 bp, Homo sapien
tatgaagtaacacctgtgacagcac

SEQ ID NO: 2720729 - DNA, 25 bp, Homo sapien
tgaaacatatgaggaagcagctttc

SEQ ID NO: 2720730 - DNA, 25 bp, Homo sapien
cttgaaacatatgaggaagcagctt

SEQ ID NO: 2720731 - DNA, 25 bp, Homo sapien
ttgaaacatatgaggaagcagcttt

SEQ ID NO: 2720732 - DNA, 25 bp, Homo sapien
tcttgaaacatatgaggaagcagct

SEQ ID NO: 2720733 - DNA, 25 bp, Homo sapien
tgtggtcactgaatactcctgtcca

SEQ ID NO: 2720734 - DNA, 25 bp, Homo sapien
ctttgagtccaagtaacttttggcg

SEQ ID NO: 2720735 - DNA, 25 bp, Homo sapien
cttttggcgttctggaagaactcct

SEQ ID NO: 2720736 - DNA, 25 bp, Homo sapien
tgagaaactgtttgagatcgagcac

SEQ ID NO: 2720737 - DNA, 25 bp, Homo sapien
caagctctcctcacgagttcccatc

SEQ ID NO: 2720738 - DNA, 25 bp, Homo sapien
ctcctcacgagttcccatcatcatg

SEQ ID NO: 2720739 - DNA, 25 bp, Homo sapien
tgagagctccaagcttaacatcatt

SEQ ID NO: 2720740 - DNA, 25 bp, Homo sapien
tggtttcagtttgagagctccaagc

SEQ ID NO: 2720741 - DNA, 25 bp, Homo sapien
cattgtcagggggtggacctaagac

SEQ ID NO: 2720742 - DNA, 25 bp, Homo sapien
tcatcattgtcagggggtggaccta

SEQ ID NO: 2720743 - DNA, 25 bp, Homo sapien
aacaacatcatcattgtcagggggt

SEQ ID NO: 2720744 - DNA, 25 bp, Homo sapien
caacatcatcattgtcagggggtgg

SEQ ID NO: 2720745 - DNA, 25 bp, Homo sapien
gtataatcaacatctagcaccaaaa

SEQ ID NO: 2720746 - DNA, 25 bp, Homo sapien
tataatcaacatctagcaccaaaag

SEQ ID NO: 2720747 - DNA, 25 bp, Homo sapien
tttcactctgcgagaaattttcagt

SEQ ID NO: 2720748 - DNA, 25 bp, Homo sapien
tgcgagaaattttcagtaggttttc

SEQ ID NO: 2720749 - DNA, 25 bp, Homo sapien
tggccgcattaattctaccccagtc

SEQ ID NO: 2720750 - DNA, 25 bp, Homo sapien
tagaaattcatgaagatatggccgc

SEQ ID NO: 2720751 - DNA, 25 bp, Homo sapien
ccagtctctgcacaagacctgtggt

SEQ ID NO: 2720752 - DNA, 25 bp, Homo sapien
tgtcataatcttcataggcagatgt

SEQ ID NO: 2720753 - DNA, 25 bp, Homo sapien
ctaaaacacgaggaatgataataca

SEQ ID NO: 2720754 - DNA, 25 bp, Homo sapien
tctgtataagtaagttttctaagca

SEQ ID NO: 2720755 - DNA, 25 bp, Homo sapien
gcatcagaattaacagtccctagca

SEQ ID NO: 2720756 - DNA, 25 bp, Homo sapien
aacagtccctagcatacttatggta

SEQ ID NO: 2720757 - DNA, 25 bp, Homo sapien
cattttagcttcaatccacttcata

SEQ ID NO: 2720758 - DNA, 25 bp, Homo sapien
tagcttcaatccacttcatatttgt

SEQ ID NO: 2720759 - DNA, 25 bp, Homo sapien
ttttagcttcaatccacttcatatt

SEQ ID NO: 2720760 - DNA, 25 bp, Homo sapien
tttcattttagcttcaatccacttc

SEQ ID NO: 2720761 - DNA, 25 bp, Homo sapien
aatcctctccttggagtatgtactg

SEQ ID NO: 2720762 - DNA, 25 bp, Homo sapien
catagcagcactatccaacatgaaa

SEQ ID NO: 2720763 - DNA, 25 bp, Homo sapien
aatttgcatttgtgctcactcccag

SEQ ID NO: 2720764 - DNA, 25 bp, Homo sapien
gtctattaatcctctccttggagta

SEQ ID NO: 2720765 - DNA, 25 bp, Homo sapien
cattaaatagaaataaaatgacttc

SEQ ID NO: 2720766 - DNA, 25 bp, Homo sapien
taaatagaaataaaatgacttctta

SEQ ID NO: 2720767 - DNA, 25 bp, Homo sapien
attaaatagaaataaaatgacttct

SEQ ID NO: 2720768 - DNA, 25 bp, Homo sapien
agtcctacttcaagatccctaattt

SEQ ID NO: 2720769 - DNA, 25 bp, Homo sapien
cccagtaacattgtgctgtcatcaa

SEQ ID NO: 2720770 - DNA, 25 bp, Homo sapien
tgtgctgtcatcaacacaggtcaat

SEQ ID NO: 2720771 - DNA, 25 bp, Homo sapien
ggtcaattacccacaatcacaagtt

SEQ ID NO: 2720772 - DNA, 25 bp, Homo sapien
aaaagcaggaatactgcaaactgcc

SEQ ID NO: 2720773 - DNA, 25 bp, Homo sapien
aagcaggaatactgcaaactgccct

SEQ ID NO: 2720774 - DNA, 25 bp, Homo sapien
tgccctgcagaacaatgccaaagtg

SEQ ID NO: 2720775 - DNA, 25 bp, Homo sapien
gcagaacaatgccaaagtgttcctt

SEQ ID NO: 2720776 - DNA, 25 bp, Homo sapien
tacatttaactcaaattttatcaat

SEQ ID NO: 2720777 - DNA, 25 bp, Homo sapien
ctcaaattttatcaatatttcatcc

SEQ ID NO: 2720778 - DNA, 25 bp, Homo sapien
tttacatttaactcaaattttatca

SEQ ID NO: 2720779 - DNA, 25 bp, Homo sapien
caaattttatcaatatttcatcctg

SEQ ID NO: 2720780 - DNA, 25 bp, Homo sapien
attctgtgggttcattagaaaattt

SEQ ID NO: 2720781 - DNA, 25 bp, Homo sapien
cattctgtgggttcattagaaaatt

SEQ ID NO: 2720782 - DNA, 25 bp, Homo sapien
ccattctgtgggttcattagaaaat

SEQ ID NO: 2720783 - DNA, 25 bp, Homo sapien
gggatcacctccttgcaagaacagg

SEQ ID NO: 2720784 - DNA, 25 bp, Homo sapien
gagactccatgtgcaatagtgccat

SEQ ID NO: 2720785 - DNA, 25 bp, Homo sapien
gattgtcactgacctaggaaccaag

SEQ ID NO: 2720786 - DNA, 25 bp, Homo sapien
caaggacccagctagtagaaaagtt

SEQ ID NO: 2720787 - DNA, 25 bp, Homo sapien
gaacaatgagtgagcccaaaggagt

SEQ ID NO: 2720788 - DNA, 25 bp, Homo sapien
gaagacgacgctttacagggccttg

SEQ ID NO: 2720789 - DNA, 25 bp, Homo sapien
tcaagagctgtcaaagggagtctcc

SEQ ID NO: 2720790 - DNA, 25 bp, Homo sapien
catcagaacagcttggtgccagtga

SEQ ID NO: 2720791 - DNA, 25 bp, Homo sapien
tatcttgacttgagtggcggtgcta

SEQ ID NO: 2720792 - DNA, 25 bp, Homo sapien
gggactgcaattagtaaggaatacc

SEQ ID NO: 2720793 - DNA, 25 bp, Homo sapien
ttatttcaaaccacacatgtcagaa

SEQ ID NO: 2720794 - DNA, 25 bp, Homo sapien
tgtcagaataatagaccgaggtagg

SEQ ID NO: 2720795 - DNA, 25 bp, Homo sapien
tgtctttatcacgatttaggtgcgc

SEQ ID NO: 2720796 - DNA, 25 bp, Homo sapien
tctccttgaggtactgagttaattt

SEQ ID NO: 2720797 - DNA, 25 bp, Homo sapien
tcccaatatttgtgatttagatcca

SEQ ID NO: 2720798 - DNA, 25 bp, Homo sapien
ggtgcgctttcataaaaggccttat

SEQ ID NO: 2720799 - DNA, 25 bp, Homo sapien
taatttacaggcagcatcaccaaca

SEQ ID NO: 2720800 - DNA, 25 bp, Homo sapien
tctgctacactcaagttactggtaa

SEQ ID NO: 2720801 - DNA, 25 bp, Homo sapien
tgattcataaaggagtagcttacct

SEQ ID NO: 2720802 - DNA, 25 bp, Homo sapien
accaacatatgctagtctctcaagt

SEQ ID NO: 2720803 - DNA, 25 bp, Homo sapien
tgctcactttgtggcactgcactaa

SEQ ID NO: 2720804 - DNA, 25 bp, Homo sapien
ctgaaagactatataccaagatggt

SEQ ID NO: 2720805 - DNA, 25 bp, Homo sapien
aaaaccttgatgtttataggcaacg

SEQ ID NO: 2720806 - DNA, 25 bp, Homo sapien
aacttggacatgttttgctggtaca

SEQ ID NO: 2720807 - DNA, 25 bp, Homo sapien
ctgtccttgcttctttgagagatat

SEQ ID NO: 2720808 - DNA, 25 bp, Homo sapien
tactgtccttgcttctttgagagat

SEQ ID NO: 2720809 - DNA, 25 bp, Homo sapien
ctactgtccttgcttctttgagaga

SEQ ID NO: 2720810 - DNA, 25 bp, Homo sapien
actgtccttgcttctttgagagata

SEQ ID NO: 2720811 - DNA, 25 bp, Homo sapien
tggtcacattacgtatctgcaggct

SEQ ID NO: 2720812 - DNA, 25 bp, Homo sapien
acatacaggcctaactgagaccgct

SEQ ID NO: 2720813 - DNA, 25 bp, Homo sapien
ggtggtcagtaaccaacgctggaga

SEQ ID NO: 2720814 - DNA, 25 bp, Homo sapien
tgagaccgctcagaatttagaaatg

SEQ ID NO: 2720815 - DNA, 25 bp, Homo sapien
gctgctataggtatcattagtccaa

SEQ ID NO: 2720816 - DNA, 25 bp, Homo sapien
caataactgatttcggtaacaaaga

SEQ ID NO: 2720817 - DNA, 25 bp, Homo sapien
actgaagagctgctataggtatcat

SEQ ID NO: 2720818 - DNA, 25 bp, Homo sapien
tcattagtccaataactgatttcgg

SEQ ID NO: 2720819 - DNA, 25 bp, Homo sapien
caaaagatctaggtcttcagaggtt

SEQ ID NO: 2720820 - DNA, 25 bp, Homo sapien
tctaggtcttcagaggtttccttat

SEQ ID NO: 2720821 - DNA, 25 bp, Homo sapien
agatctaggtcttcagaggtttcct

SEQ ID NO: 2720822 - DNA, 25 bp, Homo sapien
taggtcttcagaggtttccttattc

SEQ ID NO: 2720823 - DNA, 25 bp, Homo sapien
gacgtaaaagcagctggatacttac

SEQ ID NO: 2720824 - DNA, 25 bp, Homo sapien
cagtcatagtcactttaaggttggg

SEQ ID NO: 2720825 - DNA, 25 bp, Homo sapien
ccagtccaaaccaatactaaatgga

SEQ ID NO: 2720826 - DNA, 25 bp, Homo sapien
tggaatttgcagacgtaaaagcagc

SEQ ID NO: 2720827 - DNA, 25 bp, Homo sapien
cctgtggtcctggtaggacctcctt

SEQ ID NO: 2720828 - DNA, 25 bp, Homo sapien
ctgtggtcctggtaggacctccttg

SEQ ID NO: 2720829 - DNA, 25 bp, Homo sapien
acctgtggtcctggtaggacctcct

SEQ ID NO: 2720830 - DNA, 25 bp, Homo sapien
taacctgtggtcctggtaggacctc

SEQ ID NO: 2720831 - DNA, 25 bp, Homo sapien
agcaaagccaaatgctgacatcaag

SEQ ID NO: 2720832 - DNA, 25 bp, Homo sapien
agccaaatgctgacatcaagatttg

SEQ ID NO: 2720833 - DNA, 25 bp, Homo sapien
ttggcacagcaaagccaaatgctga

SEQ ID NO: 2720834 - DNA, 25 bp, Homo sapien
tggcacagcaaagccaaatgctgac

SEQ ID NO: 2720835 - DNA, 25 bp, Homo sapien
gcagactgctttgcagggtaatgtt

SEQ ID NO: 2720836 - DNA, 25 bp, Homo sapien
aagctgctttgcagactgctttgca

SEQ ID NO: 2720837 - DNA, 25 bp, Homo sapien
ggaacaaactgtacagacttagtca

SEQ ID NO: 2720838 - DNA, 25 bp, Homo sapien
gggatggctgtccaagcatggatca

SEQ ID NO: 2720839 - DNA, 25 bp, Homo sapien
taaatcagactttaatcatctccgt

SEQ ID NO: 2720840 - DNA, 25 bp, Homo sapien
ctccgtttcatttcagtgtagtcct

SEQ ID NO: 2720841 - DNA, 25 bp, Homo sapien
actttaatcatctccgtttcatttc

SEQ ID NO: 2720842 - DNA, 25 bp, Homo sapien
gtgtagtccttcttctagggcggcg

SEQ ID NO: 2720843 - DNA, 25 bp, Homo sapien
gttagcatatttaaaagcctctccg

SEQ ID NO: 2720844 - DNA, 25 bp, Homo sapien
aaagctggtccagtctgttagcata

SEQ ID NO: 2720845 - DNA, 25 bp, Homo sapien
aaatcgccaaaacgtccccacatgg

SEQ ID NO: 2720846 - DNA, 25 bp, Homo sapien
gggtatcaagatgccgtgaaccccg

SEQ ID NO: 2720847 - DNA, 25 bp, Homo sapien
gtgaggacataaacctgcaggcccc

SEQ ID NO: 2720848 - DNA, 25 bp, Homo sapien
cacggagtactcgatttccagagac

SEQ ID NO: 2720849 - DNA, 25 bp, Homo sapien
tgtgaggtgtaaaacaagtgaggac

SEQ ID NO: 2720850 - DNA, 25 bp, Homo sapien
tggtgataccctgcttcgctgacct

SEQ ID NO: 2720851 - DNA, 25 bp, Homo sapien
caccagaactatttaatcagacccc

SEQ ID NO: 2720852 - DNA, 25 bp, Homo sapien
gctgctggccaagtcagaaaaagga

SEQ ID NO: 2720853 - DNA, 25 bp, Homo sapien
tcagacccccatctatgagaggctg

SEQ ID NO: 2720854 - DNA, 25 bp, Homo sapien
gaaaaaggacccatgccagcacagg

SEQ ID NO: 2720855 - DNA, 25 bp, Homo sapien
gcaaggtaaagtaaagctgtagctg

SEQ ID NO: 2720856 - DNA, 25 bp, Homo sapien
caggaattttgtgtaggtgttagca

SEQ ID NO: 2720857 - DNA, 25 bp, Homo sapien
tgtgtaggtgttagcagcactgccc

SEQ ID NO: 2720858 - DNA, 25 bp, Homo sapien
aattttgtgtaggtgttagcagcac

SEQ ID NO: 2720859 - DNA, 25 bp, Homo sapien
gggtggaacagggacttgatcccaa

SEQ ID NO: 2720860 - DNA, 25 bp, Homo sapien
tggaacagggacttgatcccaattc

SEQ ID NO: 2720861 - DNA, 25 bp, Homo sapien
gaacagggacttgatcccaattctg

SEQ ID NO: 2720862 - DNA, 25 bp, Homo sapien
ggtggaacagggacttgatcccaat

SEQ ID NO: 2720863 - DNA, 25 bp, Homo sapien
tgccgagacaaacggctggagggag

SEQ ID NO: 2720864 - DNA, 25 bp, Homo sapien
aagttagcccggaaatctgcgcccg

SEQ ID NO: 2720865 - DNA, 25 bp, Homo sapien
tgcggctgggaagctccgctgctct

SEQ ID NO: 2720866 - DNA, 25 bp, Homo sapien
ttcccgcgctgagacggcgaggaaa

SEQ ID NO: 2720867 - DNA, 25 bp, Homo sapien
aaggtcggataaccagtgggcctgc

SEQ ID NO: 2720868 - DNA, 25 bp, Homo sapien
gcgctctgagctggatgtaaggtct

SEQ ID NO: 2720869 - DNA, 25 bp, Homo sapien
ttggatacagaacttgtttcactgg

SEQ ID NO: 2720870 - DNA, 25 bp, Homo sapien
cactggaaggctaaaaggcaaagtc

SEQ ID NO: 2720871 - DNA, 25 bp, Homo sapien
cccttgtgagctacgaaaagacttt

SEQ ID NO: 2720872 - DNA, 25 bp, Homo sapien
tcactgtgggaagacaattcagagc

SEQ ID NO: 2720873 - DNA, 25 bp, Homo sapien
ttggctcagcaatagacaagtgatt

SEQ ID NO: 2720874 - DNA, 25 bp, Homo sapien
tgttccaggctcctcacattgattc

SEQ ID NO: 2720875 - DNA, 25 bp, Homo sapien
tctgaatcacaatctccaagcatca

SEQ ID NO: 2720876 - DNA, 25 bp, Homo sapien
ccatcccagatctgaatcacaatct

SEQ ID NO: 2720877 - DNA, 25 bp, Homo sapien
tgaccacattagaacctccattgtt

SEQ ID NO: 2720878 - DNA, 25 bp, Homo sapien
tacatgcagataaagtacgagaacc

SEQ ID NO: 2720879 - DNA, 25 bp, Homo sapien
taaaagtaagcccagtgcaccatga

SEQ ID NO: 2720880 - DNA, 25 bp, Homo sapien
agctctcttcatgttctaggcttaa

SEQ ID NO: 2720881 - DNA, 25 bp, Homo sapien
tctcttcatgttctaggcttaaaag

SEQ ID NO: 2720882 - DNA, 25 bp, Homo sapien
catgatgttgttccggttgtacctg

SEQ ID NO: 2720883 - DNA, 25 bp, Homo sapien
agtgtgacctgggataattagtccc

SEQ ID NO: 2720884 - DNA, 25 bp, Homo sapien
gcccagagagaagtgtgacctggga

SEQ ID NO: 2720885 - DNA, 25 bp, Homo sapien
gataattagtcccatttcattgttg

SEQ ID NO: 2720886 - DNA, 25 bp, Homo sapien
cctgggataattagtcccatttcat

SEQ ID NO: 2720887 - DNA, 25 bp, Homo sapien
gagtcatgatcgtatcactgcattc

SEQ ID NO: 2720888 - DNA, 25 bp, Homo sapien
gtgagtcatgatcgtatcactgcat

SEQ ID NO: 2720889 - DNA, 25 bp, Homo sapien
cagtgagtcatgatcgtatcactgc

SEQ ID NO: 2720890 - DNA, 25 bp, Homo sapien
agtcatgatcgtatcactgcattcc

SEQ ID NO: 2720891 - DNA, 25 bp, Homo sapien
tacccaagagcatagctagatggcg

SEQ ID NO: 2720892 - DNA, 25 bp, Homo sapien
caacactgtctaggagaaagagctc

SEQ ID NO: 2720893 - DNA, 25 bp, Homo sapien
catttctgtttaaccccacagggca

SEQ ID NO: 2720894 - DNA, 25 bp, Homo sapien
caggactctcagttgcatgtgacaa

SEQ ID NO: 2720895 - DNA, 25 bp, Homo sapien
gcagttccttatgagagtcaagtca

SEQ ID NO: 2720896 - DNA, 25 bp, Homo sapien
gcctaatgagagactggtgaaccac

SEQ ID NO: 2720897 - DNA, 25 bp, Homo sapien
tgggttccacatatgcctaacagac

SEQ ID NO: 2720898 - DNA, 25 bp, Homo sapien
tccattaaccacaggtgggcatcac

SEQ ID NO: 2720899 - DNA, 25 bp, Homo sapien
aggaatcccacaatcctcagcaaca

SEQ ID NO: 2720900 - DNA, 25 bp, Homo sapien
ccaagatttggaggaatcccacaat

SEQ ID NO: 2720901 - DNA, 25 bp, Homo sapien
ccacagcttgaggtctttccccaaa

SEQ ID NO: 2720902 - DNA, 25 bp, Homo sapien
cattctgaagttgctcaagttgtca

SEQ ID NO: 2720903 - DNA, 25 bp, Homo sapien
caaccatgggttcagatttcgagat

SEQ ID NO: 2720904 - DNA, 25 bp, Homo sapien
aatcagaactcaggaggagtgtgga

SEQ ID NO: 2720905 - DNA, 25 bp, Homo sapien
aggagtgtggatcacaaccatgggt

SEQ ID NO: 2720906 - DNA, 25 bp, Homo sapien
tttcgagatgatttacccaaagtca

SEQ ID NO: 2720907 - DNA, 25 bp, Homo sapien
ggctacagcatcatccttcataacg

SEQ ID NO: 2720908 - DNA, 25 bp, Homo sapien
cttcataacgccatcagattccagc

SEQ ID NO: 2720909 - DNA, 25 bp, Homo sapien
tcatccttcataacgccatcagatt

SEQ ID NO: 2720910 - DNA, 25 bp, Homo sapien
tacagcatcatccttcataacgcca

SEQ ID NO: 2720911 - DNA, 25 bp, Homo sapien
agaagcacaccttccctgggtggag

SEQ ID NO: 2720912 - DNA, 25 bp, Homo sapien
gaagcacaccttccctgggtggagg

SEQ ID NO: 2720913 - DNA, 25 bp, Homo sapien
cgagaagcacaccttccctgggtgg

SEQ ID NO: 2720914 - DNA, 25 bp, Homo sapien
gagaagcacaccttccctgggtgga

SEQ ID NO: 2720915 - DNA, 25 bp, Homo sapien
tccttcagcccgattattggcctct

SEQ ID NO: 2720916 - DNA, 25 bp, Homo sapien
ttggcaaacgaaacattccttcagc

SEQ ID NO: 2720917 - DNA, 25 bp, Homo sapien
ttattggcctctagcttgtcccttg

SEQ ID NO: 2720918 - DNA, 25 bp, Homo sapien
ttttggcaaacgaaacattccttca

SEQ ID NO: 2720919 - DNA, 25 bp, Homo sapien
gctgatgccagtagggtgaaaggct

SEQ ID NO: 2720920 - DNA, 25 bp, Homo sapien
tccatgctgtggtcccgggacgagt

SEQ ID NO: 2720921 - DNA, 25 bp, Homo sapien
tttccatgctgtggtcccgggacga

SEQ ID NO: 2720922 - DNA, 25 bp, Homo sapien
cagctgatgccagtagggtgaaagg

SEQ ID NO: 2720923 - DNA, 25 bp, Homo sapien
ccttgaccaagaatagtgcagaact

SEQ ID NO: 2720924 - DNA, 25 bp, Homo sapien
tctttgccacgtccccttgaagctg

SEQ ID NO: 2720925 - DNA, 25 bp, Homo sapien
actgccaggcatgtaagtgataacc

SEQ ID NO: 2720926 - DNA, 25 bp, Homo sapien
taaggcaccacatggacaggccatg

SEQ ID NO: 2720927 - DNA, 25 bp, Homo sapien
ggactgcgactcaagcacgttcctc

SEQ ID NO: 2720928 - DNA, 25 bp, Homo sapien
ctttttggggactgcgactcaagca

SEQ ID NO: 2720929 - DNA, 25 bp, Homo sapien
gacaccaggcctaagctgggccaat

SEQ ID NO: 2720930 - DNA, 25 bp, Homo sapien
cttctctgccgcccacttctgagga

SEQ ID NO: 2720931 - DNA, 25 bp, Homo sapien
tcatcttggcatagtgtgtccaaca

SEQ ID NO: 2720932 - DNA, 25 bp, Homo sapien
gaggaggctgcatttacatttgtca

SEQ ID NO: 2720933 - DNA, 25 bp, Homo sapien
catttgtcaccttgctggaggatcc

SEQ ID NO: 2720934 - DNA, 25 bp, Homo sapien
aatatcatgtggcagatacagctgg

SEQ ID NO: 2720935 - DNA, 25 bp, Homo sapien
gaaagtgagtattgctgattaaaca

SEQ ID NO: 2720936 - DNA, 25 bp, Homo sapien
gctgattaaacacactcctcttatg

SEQ ID NO: 2720937 - DNA, 25 bp, Homo sapien
aaatcagaagaaagtgagtattgct

SEQ ID NO: 2720938 - DNA, 25 bp, Homo sapien
taaacacactcctcttatgtttggg

SEQ ID NO: 2720939 - DNA, 25 bp, Homo sapien
tcttccactctgagggaatgagtca

SEQ ID NO: 2720940 - DNA, 25 bp, Homo sapien
cctcttccactctgagggaatgagt

SEQ ID NO: 2720941 - DNA, 25 bp, Homo sapien
cttccactctgagggaatgagtcat

SEQ ID NO: 2720942 - DNA, 25 bp, Homo sapien
ttcctcttccactctgagggaatga

SEQ ID NO: 2720943 - DNA, 25 bp, Homo sapien
ggaatagctttgagtgtgagcatgt

SEQ ID NO: 2720944 - DNA, 25 bp, Homo sapien
gagggactctagtcaagggcaccat

SEQ ID NO: 2720945 - DNA, 25 bp, Homo sapien
gagctgaacttctgaacgggagcct

SEQ ID NO: 2720946 - DNA, 25 bp, Homo sapien
gaggaaagggcttgtaggcagggtc

SEQ ID NO: 2720947 - DNA, 25 bp, Homo sapien
ccaccacaacctgcaatttcagtga

SEQ ID NO: 2720948 - DNA, 25 bp, Homo sapien
ctcccaccacaacctgcaatttcag

SEQ ID NO: 2720949 - DNA, 25 bp, Homo sapien
cccaccacaacctgcaatttcagtg

SEQ ID NO: 2720950 - DNA, 25 bp, Homo sapien
caccacaacctgcaatttcagtgaa

SEQ ID NO: 2720951 - DNA, 25 bp, Homo sapien
aactcacaaaacccctaactgtgca

SEQ ID NO: 2720952 - DNA, 25 bp, Homo sapien
ctgtctcgagtcacagagccctttg

SEQ ID NO: 2720953 - DNA, 25 bp, Homo sapien
tgtctcgagtcacagagccctttga

SEQ ID NO: 2720954 - DNA, 25 bp, Homo sapien
caaaacccctaactgtgcatctaat

SEQ ID NO: 2720955 - DNA, 25 bp, Homo sapien
ggaagagctaggtttctgctcagcc

SEQ ID NO: 2720956 - DNA, 25 bp, Homo sapien
cactgtggacatggaagagctaggt

SEQ ID NO: 2720957 - DNA, 25 bp, Homo sapien
tgttctttgatgtgtgttcctcttc

SEQ ID NO: 2720958 - DNA, 25 bp, Homo sapien
ttctccttagacactgcagcgaggc

SEQ ID NO: 2720959 - DNA, 25 bp, Homo sapien
agccccgttcgaggtctactggcca

SEQ ID NO: 2720960 - DNA, 25 bp, Homo sapien
tcttgaaagccccgttcgaggtcta

SEQ ID NO: 2720961 - DNA, 25 bp, Homo sapien
gccccgttcgaggtctactggccat

SEQ ID NO: 2720962 - DNA, 25 bp, Homo sapien
tgaaagccccgttcgaggtctactg

SEQ ID NO: 2720963 - DNA, 25 bp, Homo sapien
gagggaccatttttgctctctctca

SEQ ID NO: 2720964 - DNA, 25 bp, Homo sapien
tccagaaagaatgggcgcttagcaa

SEQ ID NO: 2720965 - DNA, 25 bp, Homo sapien
tgtgaatgatggacatgagggacca

SEQ ID NO: 2720966 - DNA, 25 bp, Homo sapien
acttcccaaggatatgtctagcatc

SEQ ID NO: 2720967 - DNA, 25 bp, Homo sapien
ccttggctaatggagtctataaatt

SEQ ID NO: 2720968 - DNA, 25 bp, Homo sapien
tcagtggccactatccaaagatcag

SEQ ID NO: 2720969 - DNA, 25 bp, Homo sapien
tattactaaccactgaggctaggca

SEQ ID NO: 2720970 - DNA, 25 bp, Homo sapien
taggcatgacctaagattttctcag

SEQ ID NO: 2720971 - DNA, 25 bp, Homo sapien
ggggtacaaatttggtcttatgcat

SEQ ID NO: 2720972 - DNA, 25 bp, Homo sapien
ctgggggtacaaatttggtcttatg

SEQ ID NO: 2720973 - DNA, 25 bp, Homo sapien
gggggtacaaatttggtcttatgca

SEQ ID NO: 2720974 - DNA, 25 bp, Homo sapien
tgggggtacaaatttggtcttatgc

SEQ ID NO: 2720975 - DNA, 25 bp, Homo sapien
caattaagggataggagtaggctct

SEQ ID NO: 2720976 - DNA, 25 bp, Homo sapien
agtcaattaagggataggagtaggc

SEQ ID NO: 2720977 - DNA, 25 bp, Homo sapien
ttcaagtcaattaagggataggagt

SEQ ID NO: 2720978 - DNA, 25 bp, Homo sapien
tcttcaagtcaattaagggatagga

SEQ ID NO: 2720979 - DNA, 25 bp, Homo sapien
tatgtgtcgaggaatttacctattt

SEQ ID NO: 2720980 - DNA, 25 bp, Homo sapien
taaaatggggtcacttcaagcccca

SEQ ID NO: 2720981 - DNA, 25 bp, Homo sapien
ttaaatggcacattacgagctgttt

SEQ ID NO: 2720982 - DNA, 25 bp, Homo sapien
tacgagctgtttatccacacagcag

SEQ ID NO: 2720983 - DNA, 25 bp, Homo sapien
gcacattacgagctgtttatccaca

SEQ ID NO: 2720984 - DNA, 25 bp, Homo sapien
aagatgtggcctgggcacctccaca

SEQ ID NO: 2720985 - DNA, 25 bp, Homo sapien
ttaagatgtggcctgggcacctcca

SEQ ID NO: 2720986 - DNA, 25 bp, Homo sapien
taagatgtggcctgggcacctccac

SEQ ID NO: 2720987 - DNA, 25 bp, Homo sapien
gccttacaggattaaccatttgctg

SEQ ID NO: 2720988 - DNA, 25 bp, Homo sapien
tcaaccaaagggtgggacaatgaga

SEQ ID NO: 2720989 - DNA, 25 bp, Homo sapien
gttacccccagctgcatgaccggat

SEQ ID NO: 2720990 - DNA, 25 bp, Homo sapien
tttgctgtccagtggttccagatgg

SEQ ID NO: 2720991 - DNA, 25 bp, Homo sapien
gcaacaggacaaggcaagtgcaaaa

SEQ ID NO: 2720992 - DNA, 25 bp, Homo sapien
tggcacgcagcacatagctctaaaa

SEQ ID NO: 2720993 - DNA, 25 bp, Homo sapien
gggtcacccaccaaacaaatgtcat

SEQ ID NO: 2720994 - DNA, 25 bp, Homo sapien
gcttgaaaggctatgactggtgctg

SEQ ID NO: 2720995 - DNA, 25 bp, Homo sapien
gaagaataggcaatgagatgaccca

SEQ ID NO: 2720996 - DNA, 25 bp, Homo sapien
caaaagacagttggttggtccacgt

SEQ ID NO: 2720997 - DNA, 25 bp, Homo sapien
tttgatttgccaagagctcagcaag

SEQ ID NO: 2720998 - DNA, 25 bp, Homo sapien
tgatttgccaagagctcagcaagga

SEQ ID NO: 2720999 - DNA, 25 bp, Homo sapien
ttatagttgctgtcatctttgcagc

SEQ ID NO: 2721000 - DNA, 25 bp, Homo sapien
ctttttgatttgccaagagctcagc

SEQ ID NO: 2721001 - DNA, 25 bp, Homo sapien
gttttgaggttgattctacgatccc

SEQ ID NO: 2721002 - DNA, 25 bp, Homo sapien
gaggttgattctacgatcccacaaa

SEQ ID NO: 2721003 - DNA, 25 bp, Homo sapien
ggttgattctacgatcccacaaaac

SEQ ID NO: 2721004 - DNA, 25 bp, Homo sapien
tgcttccttctacactctgaaagct

SEQ ID NO: 2721005 - DNA, 25 bp, Homo sapien
gaagcaaatgctctcatccacaaca

SEQ ID NO: 2721006 - DNA, 25 bp, Homo sapien
taactgcattggcttggtaggacag

SEQ ID NO: 2721007 - DNA, 25 bp, Homo sapien
gaagtactagcctgtgacatcctgt

SEQ ID NO: 2721008 - DNA, 25 bp, Homo sapien
gacaaccggcagtctaagattccat

SEQ ID NO: 2721009 - DNA, 25 bp, Homo sapien
agcaactgctagcttggtggagacg

SEQ ID NO: 2721010 - DNA, 25 bp, Homo sapien
ctgaggtcagggaagcgaggaggaa

SEQ ID NO: 2721011 - DNA, 25 bp, Homo sapien
cagaggtaagtacaataaagggaag

SEQ ID NO: 2721012 - DNA, 25 bp, Homo sapien
gggaaggaacgcaattttgtgagaa

SEQ ID NO: 2721013 - DNA, 25 bp, Homo sapien
gattgctctgctaattgactcagag

SEQ ID NO: 2721014 - DNA, 25 bp, Homo sapien
ttgcctttcaccatctgagggtccc

SEQ ID NO: 2721015 - DNA, 25 bp, Homo sapien
gggaaagaactccatgaatcctgct

SEQ ID NO: 2721016 - DNA, 25 bp, Homo sapien
gacttgatttccgatgattgctctg

SEQ ID NO: 2721017 - DNA, 25 bp, Homo sapien
tgtcatagattccaaggagcaccat

SEQ ID NO: 2721018 - DNA, 25 bp, Homo sapien
gagtgggaggccatctctgaatcta

SEQ ID NO: 2721019 - DNA, 25 bp, Homo sapien
gaaaatggtcgtaataaaactagca

SEQ ID NO: 2721020 - DNA, 25 bp, Homo sapien
aaagcaaaggcacaagcagctcagc

SEQ ID NO: 2721021 - DNA, 25 bp, Homo sapien
ttaaggccaaaatagagcgagtctg

SEQ ID NO: 2721022 - DNA, 25 bp, Homo sapien
tgtccagcataaagttgaggtaaac

SEQ ID NO: 2721023 - DNA, 25 bp, Homo sapien
tgcatagtcactaacaaaatccagc

SEQ ID NO: 2721024 - DNA, 25 bp, Homo sapien
aaaatccagctgacaaattaaggcc

SEQ ID NO: 2721025 - DNA, 25 bp, Homo sapien
gttcacacgttgtttccaatcaagg

SEQ ID NO: 2721026 - DNA, 25 bp, Homo sapien
gtaaaatgttcacacgttgtttcca

SEQ ID NO: 2721027 - DNA, 25 bp, Homo sapien
cacgttgtttccaatcaaggtctgc

SEQ ID NO: 2721028 - DNA, 25 bp, Homo sapien
gttgtttccaatcaaggtctgccac

SEQ ID NO: 2721029 - DNA, 25 bp, Homo sapien
taattctatgtagcaacaaccctcc

SEQ ID NO: 2721030 - DNA, 25 bp, Homo sapien
tcacatcatacggaaaaaaccactg

SEQ ID NO: 2721031 - DNA, 25 bp, Homo sapien
tactcagtgtatcagcagatttctg

SEQ ID NO: 2721032 - DNA, 25 bp, Homo sapien
tgggaaagagcacaaccatgtagcc

SEQ ID NO: 2721033 - DNA, 25 bp, Homo sapien
aatgaggtgtcctgctatttgggca

SEQ ID NO: 2721034 - DNA, 25 bp, Homo sapien
gagttaactttgcttggctaccaca

SEQ ID NO: 2721035 - DNA, 25 bp, Homo sapien
gctgtctacactggtattctctgca

SEQ ID NO: 2721036 - DNA, 25 bp, Homo sapien
cacattttccgtaaacccaaggctg

SEQ ID NO: 2721037 - DNA, 25 bp, Homo sapien
cgctattgggagatggctctgggct

SEQ ID NO: 2721038 - DNA, 25 bp, Homo sapien
ctattgggagatggctctgggctct

SEQ ID NO: 2721039 - DNA, 25 bp, Homo sapien
tctggcgctattgggagatggctct

SEQ ID NO: 2721040 - DNA, 25 bp, Homo sapien
ttgtctggcgctattgggagatggc

SEQ ID NO: 2721041 - DNA, 25 bp, Homo sapien
tgtttgtgttacggatttatttcag

SEQ ID NO: 2721042 - DNA, 25 bp, Homo sapien
ccatttgtttgtgttacggatttat

SEQ ID NO: 2721043 - DNA, 25 bp, Homo sapien
gtttgtgttacggatttatttcagc

SEQ ID NO: 2721044 - DNA, 25 bp, Homo sapien
gagattctcaatcaggaaggagccc

SEQ ID NO: 2721045 - DNA, 25 bp, Homo sapien
gattctcaatcaggaaggagcccca

SEQ ID NO: 2721046 - DNA, 25 bp, Homo sapien
tgcagagattctcaatcaggaagga

SEQ ID NO: 2721047 - DNA, 25 bp, Homo sapien
gcagagattctcaatcaggaaggag

SEQ ID NO: 2721048 - DNA, 25 bp, Homo sapien
taggaacgccttgataaagtgataa

SEQ ID NO: 2721049 - DNA, 25 bp, Homo sapien
gaatttctctaggaacgccttgata

SEQ ID NO: 2721050 - DNA, 25 bp, Homo sapien
tggttggggaaagtcagcttgagcc

SEQ ID NO: 2721051 - DNA, 25 bp, Homo sapien
aactggccccttcatgtgaaattgg

SEQ ID NO: 2721052 - DNA, 25 bp, Homo sapien
gggcttgtatagcatgaagcttgac

SEQ ID NO: 2721053 - DNA, 25 bp, Homo sapien
tgtgcccagcaacgagggcagagat

SEQ ID NO: 2721054 - DNA, 25 bp, Homo sapien
cagagatgagcctagagagtggtaa

SEQ ID NO: 2721055 - DNA, 25 bp, Homo sapien
cagaaccgggcttctggagcatgat

SEQ ID NO: 2721056 - DNA, 25 bp, Homo sapien
gggaacagcaaaatagcctctgcct

SEQ ID NO: 2721057 - DNA, 25 bp, Homo sapien
gatgtgagttgtgggactggtcctc

SEQ ID NO: 2721058 - DNA, 25 bp, Homo sapien
tgagcctgtcttattcccaacctac

SEQ ID NO: 2721059 - DNA, 25 bp, Homo sapien
tgcctctaacatagtcaccttcctg

SEQ ID NO: 2721060 - DNA, 25 bp, Homo sapien
tttccggggccctggtgctccctga

SEQ ID NO: 2721061 - DNA, 25 bp, Homo sapien
cggggccctggtgctccctgaaact

SEQ ID NO: 2721062 - DNA, 25 bp, Homo sapien
cctggtgctccctgaaacttgccat

SEQ ID NO: 2721063 - DNA, 25 bp, Homo sapien
gggccctggtgctccctgaaacttg

SEQ ID NO: 2721064 - DNA, 25 bp, Homo sapien
gaggcgggacacatttctcccaatc

SEQ ID NO: 2721065 - DNA, 25 bp, Homo sapien
gggaggcgggacacatttctcccaa

SEQ ID NO: 2721066 - DNA, 25 bp, Homo sapien
gcgggacacatttctcccaatccat

SEQ ID NO: 2721067 - DNA, 25 bp, Homo sapien
ggcgggacacatttctcccaatcca

SEQ ID NO: 2721068 - DNA, 25 bp, Homo sapien
gagttacattctccgctctgcatat

SEQ ID NO: 2721069 - DNA, 25 bp, Homo sapien
tatgtggagttacattctccgctct

SEQ ID NO: 2721070 - DNA, 25 bp, Homo sapien
gcaagaggcagattcccaaatacca

SEQ ID NO: 2721071 - DNA, 25 bp, Homo sapien
tgtggagttacattctccgctctgc

SEQ ID NO: 2721072 - DNA, 25 bp, Homo sapien
acaaaggtcctgtcccttggcatcc

SEQ ID NO: 2721073 - DNA, 25 bp, Homo sapien
ctacaataggactcaaatgtcccac

SEQ ID NO: 2721074 - DNA, 25 bp, Homo sapien
aatgtcccacaaaggtcctgtccct

SEQ ID NO: 2721075 - DNA, 25 bp, Homo sapien
ttggcatcccagatgaaggtcccag

SEQ ID NO: 2721076 - DNA, 25 bp, Homo sapien
gacagcagggtggtttcaggccaac

SEQ ID NO: 2721077 - DNA, 25 bp, Homo sapien
actaacaggaagcaagacatcactt

SEQ ID NO: 2721078 - DNA, 25 bp, Homo sapien
gcttctcgtttgctgagtcccagag

SEQ ID NO: 2721079 - DNA, 25 bp, Homo sapien
gagatgatgctttcaaaagcctctt

SEQ ID NO: 2721080 - DNA, 25 bp, Homo sapien
caatcttggctggagagacaagcag

SEQ ID NO: 2721081 - DNA, 25 bp, Homo sapien
gatgttgttggaaaagtaaggaaca

SEQ ID NO: 2721082 - DNA, 25 bp, Homo sapien
gtaggactgaaaaagagggatagaa

SEQ ID NO: 2721083 - DNA, 25 bp, Homo sapien
gagggatagaagacacatgatgttg

SEQ ID NO: 2721084 - DNA, 25 bp, Homo sapien
gatttgaagagggttcagaaccaac

SEQ ID NO: 2721085 - DNA, 25 bp, Homo sapien
gacattggcatcaagagctggcaaa

SEQ ID NO: 2721086 - DNA, 25 bp, Homo sapien
cgtagtttgatcttaagacattggc

SEQ ID NO: 2721087 - DNA, 25 bp, Homo sapien
gggttcagaaccaacttttgcctgc

SEQ ID NO: 2721088 - DNA, 25 bp, Homo sapien
tctccatcaagggcacaggaaggcc

SEQ ID NO: 2721089 - DNA, 25 bp, Homo sapien
catctccatcaagggcacaggaagg

SEQ ID NO: 2721090 - DNA, 25 bp, Homo sapien
ctcatctccatcaagggcacaggaa

SEQ ID NO: 2721091 - DNA, 25 bp, Homo sapien
tcatctccatcaagggcacaggaag

SEQ ID NO: 2721092 - DNA, 25 bp, Homo sapien
gagcccaggtctaatgtgttaatat

SEQ ID NO: 2721093 - DNA, 25 bp, Homo sapien
ctgagcccaggtctaatgtgttaat

SEQ ID NO: 2721094 - DNA, 25 bp, Homo sapien
gttaatattgtcatcctgggcagtc

SEQ ID NO: 2721095 - DNA, 25 bp, Homo sapien
cctgggcagtctctctattgtccat

SEQ ID NO: 2721096 - DNA, 25 bp, Homo sapien
ctcctccatgtaagcattctgtgtt

SEQ ID NO: 2721097 - DNA, 25 bp, Homo sapien
catgtaagcattctgtgttttgtgg

SEQ ID NO: 2721098 - DNA, 25 bp, Homo sapien
gctgatttgtaagcggagaattcct

SEQ ID NO: 2721099 - DNA, 25 bp, Homo sapien
ggtgctgatttgtaagcggagaatt

SEQ ID NO: 2721100 - DNA, 25 bp, Homo sapien
tatgcagggctgtaacacaacatcc

SEQ ID NO: 2721101 - DNA, 25 bp, Homo sapien
aagatcttttctaagaagaatgagg

SEQ ID NO: 2721102 - DNA, 25 bp, Homo sapien
gacgtgagtaggaagttgtctctga

SEQ ID NO: 2721103 - DNA, 25 bp, Homo sapien
tctaagaagtcgaggacaagaggct

SEQ ID NO: 2721104 - DNA, 25 bp, Homo sapien
cccagtggagagtctaccttctgct

SEQ ID NO: 2721105 - DNA, 25 bp, Homo sapien
gacttctgagcaaccctagtcctca

SEQ ID NO: 2721106 - DNA, 25 bp, Homo sapien
tccacgctgacttctgagcaaccct

SEQ ID NO: 2721107 - DNA, 25 bp, Homo sapien
ccccagtggagagtctaccttctgc

SEQ ID NO: 2721108 - DNA, 25 bp, Homo sapien
catcttgcattttctggagcactga

SEQ ID NO: 2721109 - DNA, 25 bp, Homo sapien
gtcagcatcagccaatagattgaga

SEQ ID NO: 2721110 - DNA, 25 bp, Homo sapien
tgagcatctcgtcttgaaccttctg

SEQ ID NO: 2721111 - DNA, 25 bp, Homo sapien
aaacatggaaaggtcagcatcagcc

SEQ ID NO: 2721112 - DNA, 25 bp, Homo sapien
cctgctgcaggccagtgaaacagtg

SEQ ID NO: 2721113 - DNA, 25 bp, Homo sapien
tccttggcaaaagaaccagacctgc

SEQ ID NO: 2721114 - DNA, 25 bp, Homo sapien
aaagcccttgacattcgttccttgg

SEQ ID NO: 2721115 - DNA, 25 bp, Homo sapien
aaacagtgcgttcctttctaagaca

SEQ ID NO: 2721116 - DNA, 25 bp, Homo sapien
gacaaaagactaggcagagagctgc

SEQ ID NO: 2721117 - DNA, 25 bp, Homo sapien
aatttatcatcgactcaagaggcag

SEQ ID NO: 2721118 - DNA, 25 bp, Homo sapien
tcctgcaaagaatagagggccccat

SEQ ID NO: 2721119 - DNA, 25 bp, Homo sapien
cactaggtgctctctggaaggtata

SEQ ID NO: 2721120 - DNA, 25 bp, Homo sapien
atattcattcacttcgttctctagg

SEQ ID NO: 2721121 - DNA, 25 bp, Homo sapien
agagtagattcaaggttatcgcaat

SEQ ID NO: 2721122 - DNA, 25 bp, Homo sapien
caaggttatcgcaataataatgtca

SEQ ID NO: 2721123 - DNA, 25 bp, Homo sapien
tattcattcacttcgttctctagga

SEQ ID NO: 2721124 - DNA, 25 bp, Homo sapien
gcgcagagctgtctgcaaaggccac

SEQ ID NO: 2721125 - DNA, 25 bp, Homo sapien
tgcgagagccttgaaactgcagctc

SEQ ID NO: 2721126 - DNA, 25 bp, Homo sapien
gcaccaaagtcagggcgcagagctg

SEQ ID NO: 2721127 - DNA, 25 bp, Homo sapien
tcattctgatgggatcagtctctgc

SEQ ID NO: 2721128 - DNA, 25 bp, Homo sapien
aatcagatagtgttaaccttccaac

SEQ ID NO: 2721129 - DNA, 25 bp, Homo sapien
ttttggctatcctaggtctttcgca

SEQ ID NO: 2721130 - DNA, 25 bp, Homo sapien
tgtcttgacactaacatcacattga

SEQ ID NO: 2721131 - DNA, 25 bp, Homo sapien
tttcttcaccgaattgcctttgcac

SEQ ID NO: 2721132 - DNA, 25 bp, Homo sapien
tcctcgcagcgggaccactcttgtc

SEQ ID NO: 2721133 - DNA, 25 bp, Homo sapien
ggatggaattgagtccccccaggta

SEQ ID NO: 2721134 - DNA, 25 bp, Homo sapien
gaaagagtgctatacggtgagctcc

SEQ ID NO: 2721135 - DNA, 25 bp, Homo sapien
tgcttctggacatatctcagaaaga

SEQ ID NO: 2721136 - DNA, 25 bp, Homo sapien
aggatccgtgaagggcctgggtgag

SEQ ID NO: 2721137 - DNA, 25 bp, Homo sapien
cattagccctagtcttgcaaatggc

SEQ ID NO: 2721138 - DNA, 25 bp, Homo sapien
gcaaatggctctctggcctttcaag

SEQ ID NO: 2721139 - DNA, 25 bp, Homo sapien
tgcattagccctagtcttgcaaatg

SEQ ID NO: 2721140 - DNA, 25 bp, Homo sapien
agtattctaggacatcagctgctga

SEQ ID NO: 2721141 - DNA, 25 bp, Homo sapien
gtattctaggacatcagctgctgaa

SEQ ID NO: 2721142 - DNA, 25 bp, Homo sapien
gacaatgccatcagagttgacaaca

SEQ ID NO: 2721143 - DNA, 25 bp, Homo sapien
aaagtgcgtgctaaccagtgttccc

SEQ ID NO: 2721144 - DNA, 25 bp, Homo sapien
ggagccaaacgcaaatgacaatgcc

SEQ ID NO: 2721145 - DNA, 25 bp, Homo sapien
cagaagtgtgattaaagtgcgtgct

SEQ ID NO: 2721146 - DNA, 25 bp, Homo sapien
gagcccttgcaggtctcaattacaa

SEQ ID NO: 2721147 - DNA, 25 bp, Homo sapien
tacaatacattgacagacagcacgg

SEQ ID NO: 2721148 - DNA, 25 bp, Homo sapien
tgttcccaggtgtgagaagagccct

SEQ ID NO: 2721149 - DNA, 25 bp, Homo sapien
gctggtggcagatgcaatgtcacca

SEQ ID NO: 2721150 - DNA, 25 bp, Homo sapien
tgcagggtaccgcacaggtgaatcc

SEQ ID NO: 2721151 - DNA, 25 bp, Homo sapien
tgagccatggctcgtaaatatacag

SEQ ID NO: 2721152 - DNA, 25 bp, Homo sapien
gaaaaagtacagaatgtcctcctgg

SEQ ID NO: 2721153 - DNA, 25 bp, Homo sapien
caatcaaggagactggcaagggaca

SEQ ID NO: 2721154 - DNA, 25 bp, Homo sapien
gggagtttgagtcccagtgaccagc

SEQ ID NO: 2721155 - DNA, 25 bp, Homo sapien
gctggtgtctccactgccaaaaagc

SEQ ID NO: 2721156 - DNA, 25 bp, Homo sapien
gtgaccagccccagaagctttcagg

SEQ ID NO: 2721157 - DNA, 25 bp, Homo sapien
ttttagattcttgacttggccccaa

SEQ ID NO: 2721158 - DNA, 25 bp, Homo sapien
actgtatttggatgacgccccactc

SEQ ID NO: 2721159 - DNA, 25 bp, Homo sapien
actccatgaaacaaactgtatttgg

SEQ ID NO: 2721160 - DNA, 25 bp, Homo sapien
tgctccttaggtgagtctgctggct

SEQ ID NO: 2721161 - DNA, 25 bp, Homo sapien
aaactcataaggatgtggagactca

SEQ ID NO: 2721162 - DNA, 25 bp, Homo sapien
gggcccgctcgatttcccagtctta

SEQ ID NO: 2721163 - DNA, 25 bp, Homo sapien
agtcatgtgagggagaaccccacac

SEQ ID NO: 2721164 - DNA, 25 bp, Homo sapien
tggcacagcacagtcatgtgaggga

SEQ ID NO: 2721165 - DNA, 25 bp, Homo sapien
tgttgagtgtcagtgctggcacagc

SEQ ID NO: 2721166 - DNA, 25 bp, Homo sapien
ctctttattcttggtcttaactgga

SEQ ID NO: 2721167 - DNA, 25 bp, Homo sapien
ttggcatgttttccagggcccctcc

SEQ ID NO: 2721168 - DNA, 25 bp, Homo sapien
agtgactgatatggttctaagctgg

SEQ ID NO: 2721169 - DNA, 25 bp, Homo sapien
tctaagctgggagttagtgaggact

SEQ ID NO: 2721170 - DNA, 25 bp, Homo sapien
ctgctgctctgaagacgtttttggg

SEQ ID NO: 2721171 - DNA, 25 bp, Homo sapien
tgctgctgctctgaagacgtttttg

SEQ ID NO: 2721172 - DNA, 25 bp, Homo sapien
gctgctgctctgaagacgtttttgg

SEQ ID NO: 2721173 - DNA, 25 bp, Homo sapien
gctgctctgaagacgtttttggggt

SEQ ID NO: 2721174 - DNA, 25 bp, Homo sapien
tgctgtgtgttgagataatgtttgt

SEQ ID NO: 2721175 - DNA, 25 bp, Homo sapien
gcattctcagattacccctcaggtt

SEQ ID NO: 2721176 - DNA, 25 bp, Homo sapien
tggctgggctggtcggctcaccttc

SEQ ID NO: 2721177 - DNA, 25 bp, Homo sapien
tctagttggctctttttggacggtc

SEQ ID NO: 2721178 - DNA, 25 bp, Homo sapien
cctgctaccacctgtaaagtgaagg

SEQ ID NO: 2721179 - DNA, 25 bp, Homo sapien
tccagaggtgctaggagtgcagcat

SEQ ID NO: 2721180 - DNA, 25 bp, Homo sapien
ttgacataatgcctgactatcagct

SEQ ID NO: 2721181 - DNA, 25 bp, Homo sapien
ctgcagaccactcgtggtgcatggg

SEQ ID NO: 2721182 - DNA, 25 bp, Homo sapien
ttgactcagtcgtgccccaagtgac

SEQ ID NO: 2721183 - DNA, 25 bp, Homo sapien
caggaaccaagccctcagaggtgat

SEQ ID NO: 2721184 - DNA, 25 bp, Homo sapien
aggaaccaagccctcagaggtgatt

SEQ ID NO: 2721185 - DNA, 25 bp, Homo sapien
ggaaccaagccctcagaggtgattt

SEQ ID NO: 2721186 - DNA, 25 bp, Homo sapien
tcagaggtgatttctgttgctaact

SEQ ID NO: 2721187 - DNA, 25 bp, Homo sapien
gagatacccgactccgataataccg

SEQ ID NO: 2721188 - DNA, 25 bp, Homo sapien
ctgtggtaaggagatacccgactcc

SEQ ID NO: 2721189 - DNA, 25 bp, Homo sapien
agagacttttggccaagcagggcct

SEQ ID NO: 2721190 - DNA, 25 bp, Homo sapien
gactccgataataccgcagactgag

SEQ ID NO: 2721191 - DNA, 25 bp, Homo sapien
tctctgccatgttggatgccatcaa

SEQ ID NO: 2721192 - DNA, 25 bp, Homo sapien
tctgccatgttggatgccatcaact

SEQ ID NO: 2721193 - DNA, 25 bp, Homo sapien
gccatgttggatgccatcaactggg

SEQ ID NO: 2721194 - DNA, 25 bp, Homo sapien
tgccatgttggatgccatcaactgg

SEQ ID NO: 2721195 - DNA, 25 bp, Homo sapien
tttctctcctagttggacctctgac

SEQ ID NO: 2721196 - DNA, 25 bp, Homo sapien
ttttctctcctagttggacctctga

SEQ ID NO: 2721197 - DNA, 25 bp, Homo sapien
ttcttttctctcctagttggacctc

SEQ ID NO: 2721198 - DNA, 25 bp, Homo sapien
cttttctctcctagttggacctctg

SEQ ID NO: 2721199 - DNA, 25 bp, Homo sapien
gttaatcagggtgacccaagccaag

SEQ ID NO: 2721200 - DNA, 25 bp, Homo sapien
ctgttaatcagggtgacccaagcca

SEQ ID NO: 2721201 - DNA, 25 bp, Homo sapien
cccaagccaagggcaaagccaacag

SEQ ID NO: 2721202 - DNA, 25 bp, Homo sapien
caaagccaacagccatcttgacaag

SEQ ID NO: 2721203 - DNA, 25 bp, Homo sapien
tccagtcagcttagtcagagtcaaa

SEQ ID NO: 2721204 - DNA, 25 bp, Homo sapien
ccatcactggccaagttaaggagct

SEQ ID NO: 2721205 - DNA, 25 bp, Homo sapien
cagattgtcggatgagtttcacaga

SEQ ID NO: 2721206 - DNA, 25 bp, Homo sapien
gttaaggagctcctcccaactcagt

SEQ ID NO: 2721207 - DNA, 25 bp, Homo sapien
gttccacagagcgtggaccttcatt

SEQ ID NO: 2721208 - DNA, 25 bp, Homo sapien
taactactgtagttgggtccagctc

SEQ ID NO: 2721209 - DNA, 25 bp, Homo sapien
tccaacagtcacattggctcttggc

SEQ ID NO: 2721210 - DNA, 25 bp, Homo sapien
tgcaggtgaaattccattgggcgag

SEQ ID NO: 2721211 - DNA, 25 bp, Homo sapien
cgtctgaaacccgaggtctgggtca

SEQ ID NO: 2721212 - DNA, 25 bp, Homo sapien
cagtggcctgtatgaagttccaggt

SEQ ID NO: 2721213 - DNA, 25 bp, Homo sapien
tcagaagtggccaaatcagggtaat

SEQ ID NO: 2721214 - DNA, 25 bp, Homo sapien
aatcagggtaatgagggttcgtctg

SEQ ID NO: 2721215 - DNA, 25 bp, Homo sapien
tcagagcaaatccatgtaggggagg

SEQ ID NO: 2721216 - DNA, 25 bp, Homo sapien
atccatgtaggggaggaggacaatt

SEQ ID NO: 2721217 - DNA, 25 bp, Homo sapien
caagggctgtgttgagggctagagt

SEQ ID NO: 2721218 - DNA, 25 bp, Homo sapien
caattgcttgcgaggcaagggctgt

SEQ ID NO: 2721219 - DNA, 25 bp, Homo sapien
cagcgttggctacaaaccatgcgag

SEQ ID NO: 2721220 - DNA, 25 bp, Homo sapien
tgcgagaattagtgatcagcgttgg

SEQ ID NO: 2721221 - DNA, 25 bp, Homo sapien
ccccgtttctgtgaggatccctcag

SEQ ID NO: 2721222 - DNA, 25 bp, Homo sapien
gaccaagccatatagagattgcgag

SEQ ID NO: 2721223 - DNA, 25 bp, Homo sapien
tgcacactgtctagagatggaagga

SEQ ID NO: 2721224 - DNA, 25 bp, Homo sapien
gcacactgtctagagatggaaggag

SEQ ID NO: 2721225 - DNA, 25 bp, Homo sapien
gcctgcacactgtctagagatggaa

SEQ ID NO: 2721226 - DNA, 25 bp, Homo sapien
tctggacccgactgattcaagaggg

SEQ ID NO: 2721227 - DNA, 25 bp, Homo sapien
caactgtaggactgctgggcctggc

SEQ ID NO: 2721228 - DNA, 25 bp, Homo sapien
gattcttgggcctcgttcagccctg

SEQ ID NO: 2721229 - DNA, 25 bp, Homo sapien
gacatagcctaggtaacagctgctg

SEQ ID NO: 2721230 - DNA, 25 bp, Homo sapien
tgctgggttttgagcgacatcagaa

SEQ ID NO: 2721231 - DNA, 25 bp, Homo sapien
gctgggttttgagcgacatcagaaa

SEQ ID NO: 2721232 - DNA, 25 bp, Homo sapien
ggccggggtgaggatgtaaggaggc

SEQ ID NO: 2721233 - DNA, 25 bp, Homo sapien
gatacagtctaatccgttggtccca

SEQ ID NO: 2721234 - DNA, 25 bp, Homo sapien
cagacaatctctacgctaatccgag

SEQ ID NO: 2721235 - DNA, 25 bp, Homo sapien
cctttccccggtgaacagacaatct

SEQ ID NO: 2721236 - DNA, 25 bp, Homo sapien
gcagaggatgcagcttagattcaaa

SEQ ID NO: 2721237 - DNA, 25 bp, Homo sapien
gacacccaggagcaagtttggcaat

SEQ ID NO: 2721238 - DNA, 25 bp, Homo sapien
gcttggatattaccaagcacagctg

SEQ ID NO: 2721239 - DNA, 25 bp, Homo sapien
cttgagccctgaagccacgagttca

SEQ ID NO: 2721240 - DNA, 25 bp, Homo sapien
tcaatagtgaatgcctgacgctttg

SEQ ID NO: 2721241 - DNA, 25 bp, Homo sapien
gagatgagcatagacaaacagagaa

SEQ ID NO: 2721242 - DNA, 25 bp, Homo sapien
catagacaaacagagaatgtgatca

SEQ ID NO: 2721243 - DNA, 25 bp, Homo sapien
tgtctctctttaatggctacaaaaa

SEQ ID NO: 2721244 - DNA, 25 bp, Homo sapien
taatgagctgaaaaggcagaaatga

SEQ ID NO: 2721245 - DNA, 25 bp, Homo sapien
catccttagcaagaggcagcttcaa

SEQ ID NO: 2721246 - DNA, 25 bp, Homo sapien
atcaagatgaaatcaattagcatgg

SEQ ID NO: 2721247 - DNA, 25 bp, Homo sapien
tgcccccagcagacagcttaatttc

SEQ ID NO: 2721248 - DNA, 25 bp, Homo sapien
tagcatgggagacctgccaactcat

SEQ ID NO: 2721249 - DNA, 25 bp, Homo sapien
agtgatgtcagaaggcggtttctgc

SEQ ID NO: 2721250 - DNA, 25 bp, Homo sapien
ggagcagcgtgagaaagaggcagtt

SEQ ID NO: 2721251 - DNA, 25 bp, Homo sapien
tagcatgtggcatgacttgggaacg

SEQ ID NO: 2721252 - DNA, 25 bp, Homo sapien
gctgtttactggacaccaaaccaaa

SEQ ID NO: 2721253 - DNA, 25 bp, Homo sapien
agttcagaaaagtctaaaggaagtg

SEQ ID NO: 2721254 - DNA, 25 bp, Homo sapien
ttttttgtgctctctgaaccaaacc

SEQ ID NO: 2721255 - DNA, 25 bp, Homo sapien
cctttttttgtgctctctgaaccaa

SEQ ID NO: 2721256 - DNA, 25 bp, Homo sapien
cagaaaagtctaaaggaagtggtgg

SEQ ID NO: 2721257 - DNA, 25 bp, Homo sapien
gatttaacgggatatgcaacttgtc

SEQ ID NO: 2721258 - DNA, 25 bp, Homo sapien
gctagtcactcttccgtgtcaaagg

SEQ ID NO: 2721259 - DNA, 25 bp, Homo sapien
gtttaatggtccacgtcaggcgcgc

SEQ ID NO: 2721260 - DNA, 25 bp, Homo sapien
tctgctttcaatgagccgcttctgg

SEQ ID NO: 2721261 - DNA, 25 bp, Homo sapien
ggcagcccagcccggcagcacgtct

SEQ ID NO: 2721262 - DNA, 25 bp, Homo sapien
ctggcgaggagtcatctcccccggg

SEQ ID NO: 2721263 - DNA, 25 bp, Homo sapien
ctgcctgcaccgagtcgctcgctcg

SEQ ID NO: 2721264 - DNA, 25 bp, Homo sapien
agcacgtctcctgcctgcaccgagt

SEQ ID NO: 2721265 - DNA, 25 bp, Homo sapien
ctgccctgaaactttgcttcccccg

SEQ ID NO: 2721266 - DNA, 25 bp, Homo sapien
agctgccctgaaactttgcttcccc

SEQ ID NO: 2721267 - DNA, 25 bp, Homo sapien
tcagctgccctgaaactttgcttcc

SEQ ID NO: 2721268 - DNA, 25 bp, Homo sapien
tgcttcccccgtggtcttcttccca

SEQ ID NO: 2721269 - DNA, 25 bp, Homo sapien
agggggatgattgggctcggaaggg

SEQ ID NO: 2721270 - DNA, 25 bp, Homo sapien
cttagagtccgccctccatagccag

SEQ ID NO: 2721271 - DNA, 25 bp, Homo sapien
gccagggggatgattgggctcggaa

SEQ ID NO: 2721272 - DNA, 25 bp, Homo sapien
ttagagtccgccctccatagccagg

SEQ ID NO: 2721273 - DNA, 25 bp, Homo sapien
caagatgactaggatgttgcccacg

SEQ ID NO: 2721274 - DNA, 25 bp, Homo sapien
caggctcagaatggacgctgtgcag

SEQ ID NO: 2721275 - DNA, 25 bp, Homo sapien
cggtgaagctcaacagcaggtcggc

SEQ ID NO: 2721276 - DNA, 25 bp, Homo sapien
ggatactgcagagagtagcgcaccc

SEQ ID NO: 2721277 - DNA, 25 bp, Homo sapien
tcttggaatggatcctcagggtcag

SEQ ID NO: 2721278 - DNA, 25 bp, Homo sapien
gtttgacagctatggaactcctggg

SEQ ID NO: 2721279 - DNA, 25 bp, Homo sapien
tgactagaatgaccgccagagggat

SEQ ID NO: 2721280 - DNA, 25 bp, Homo sapien
cttgtcatcgttgggtgccggctcc

SEQ ID NO: 2721281 - DNA, 25 bp, Homo sapien
tgcccaacgtcttagctgctttctt

SEQ ID NO: 2721282 - DNA, 25 bp, Homo sapien
ccaacgtcttagctgctttcttttc

SEQ ID NO: 2721283 - DNA, 25 bp, Homo sapien
gaccacaatgcccaacgtcttagct

SEQ ID NO: 2721284 - DNA, 25 bp, Homo sapien
cacaatgcccaacgtcttagctgct

SEQ ID NO: 2721285 - DNA, 25 bp, Homo sapien
aagcggtagagcgatgaagaagggt

SEQ ID NO: 2721286 - DNA, 25 bp, Homo sapien
gaagaagggtagccagcacaagatg

SEQ ID NO: 2721287 - DNA, 25 bp, Homo sapien
gggtagccagcacaagatgaacata

SEQ ID NO: 2721288 - DNA, 25 bp, Homo sapien
gaagggtagccagcacaagatgaac

SEQ ID NO: 2721289 - DNA, 25 bp, Homo sapien
acatgactgtgtcatgataaactcc

SEQ ID NO: 2721290 - DNA, 25 bp, Homo sapien
gcacatgactgtgtcatgataaact

SEQ ID NO: 2721291 - DNA, 25 bp, Homo sapien
tgtcatgataaactccctccattca

SEQ ID NO: 2721292 - DNA, 25 bp, Homo sapien
gactgtgtcatgataaactccctcc

SEQ ID NO: 2721293 - DNA, 25 bp, Homo sapien
tatgtggtccgcagtatagcagctg

SEQ ID NO: 2721294 - DNA, 25 bp, Homo sapien
tgagactccggtgtgattgcaggca

SEQ ID NO: 2721295 - DNA, 25 bp, Homo sapien
tccgcagtatagcagctgttacctc

SEQ ID NO: 2721296 - DNA, 25 bp, Homo sapien
tgattgcaggcatatgtggtccgca

SEQ ID NO: 2721297 - DNA, 25 bp, Homo sapien
tgagcatgctctggtcacagcctct

SEQ ID NO: 2721298 - DNA, 25 bp, Homo sapien
ctgagcatgctctggtcacagcctc

SEQ ID NO: 2721299 - DNA, 25 bp, Homo sapien
ccctgcccctaaaagccaaagcctg

SEQ ID NO: 2721300 - DNA, 25 bp, Homo sapien
ctgtttggagctatttcccctgccc

SEQ ID NO: 2721301 - DNA, 25 bp, Homo sapien
caggggccaaataaagaggtccttg

SEQ ID NO: 2721302 - DNA, 25 bp, Homo sapien
tggagtccattcctgctcctgagta

SEQ ID NO: 2721303 - DNA, 25 bp, Homo sapien
ccattcctgctcctgagtaagtgag

SEQ ID NO: 2721304 - DNA, 25 bp, Homo sapien
aagtgagcactggtccctggtccaa

SEQ ID NO: 2721305 - DNA, 25 bp, Homo sapien
gcactttcttaaatctggctcagag

SEQ ID NO: 2721306 - DNA, 25 bp, Homo sapien
cttggttgctgaatgacgggcagcc

SEQ ID NO: 2721307 - DNA, 25 bp, Homo sapien
gacgggcagccacatgctttttctt

SEQ ID NO: 2721308 - DNA, 25 bp, Homo sapien
caggatatggtgcctcttggttgct

SEQ ID NO: 2721309 - DNA, 25 bp, Homo sapien
tgtgagcacccatgttcggcagaga

SEQ ID NO: 2721310 - DNA, 25 bp, Homo sapien
cttcatgggaccctacacgacctga

SEQ ID NO: 2721311 - DNA, 25 bp, Homo sapien
cctgaggagagtagccttagggctt

SEQ ID NO: 2721312 - DNA, 25 bp, Homo sapien
tgcttagacgtccacagtaggtaga

SEQ ID NO: 2721313 - DNA, 25 bp, Homo sapien
ggtcttgacctagccaatctcgctt

SEQ ID NO: 2721314 - DNA, 25 bp, Homo sapien
tccacacgggtcttgacctagccaa

SEQ ID NO: 2721315 - DNA, 25 bp, Homo sapien
cttgtgtccacacgggtcttgacct

SEQ ID NO: 2721316 - DNA, 25 bp, Homo sapien
tagccaatctcgcttcaccggcttc

SEQ ID NO: 2721317 - DNA, 25 bp, Homo sapien
caatagagtcgtaagagcagagcct

SEQ ID NO: 2721318 - DNA, 25 bp, Homo sapien
agcagagcctgccaatgtggacaga

SEQ ID NO: 2721319 - DNA, 25 bp, Homo sapien
gacagattctactgtatcctgagct

SEQ ID NO: 2721320 - DNA, 25 bp, Homo sapien
gatgagctgcgggtgagtgtggcca

SEQ ID NO: 2721321 - DNA, 25 bp, Homo sapien
tatagcacaattcctgtgctcgcac

SEQ ID NO: 2721322 - DNA, 25 bp, Homo sapien
ttatagcacaattcctgtgctcgca

SEQ ID NO: 2721323 - DNA, 25 bp, Homo sapien
cactagagtcagcaggatttgtcac

SEQ ID NO: 2721324 - DNA, 25 bp, Homo sapien
gacaaggaatcacaaatgggcgctg

SEQ ID NO: 2721325 - DNA, 25 bp, Homo sapien
ttgataggaaagtgggcaagcagcc

SEQ ID NO: 2721326 - DNA, 25 bp, Homo sapien
catctttgtaatgtcccgaggcagg

SEQ ID NO: 2721327 - DNA, 25 bp, Homo sapien
gaaaatgtttcatcgtgttccttta

SEQ ID NO: 2721328 - DNA, 25 bp, Homo sapien
atgtttcatcgtgttcctttaaaat

SEQ ID NO: 2721329 - DNA, 25 bp, Homo sapien
tgagaaaatgtttcatcgtgttcct

SEQ ID NO: 2721330 - DNA, 25 bp, Homo sapien
aaattttatcttttcttcctatgat

SEQ ID NO: 2721331 - DNA, 25 bp, Homo sapien
tggatttacagcaagcattcaacgt

SEQ ID NO: 2721332 - DNA, 25 bp, Homo sapien
gatgcaatgtagctcccgtgtccct

SEQ ID NO: 2721333 - DNA, 25 bp, Homo sapien
tcaacgtcttcaagcttaaagagcc

SEQ ID NO: 2721334 - DNA, 25 bp, Homo sapien
gtgtccctcacgtggccagactcta

SEQ ID NO: 2721335 - DNA, 25 bp, Homo sapien
tgtgtccacatcaccaacgtgtcag

SEQ ID NO: 2721336 - DNA, 25 bp, Homo sapien
tatgttgtgaagtccaccagcgtct

SEQ ID NO: 2721337 - DNA, 25 bp, Homo sapien
tagggtcacccaaaagggcagatca

SEQ ID NO: 2721338 - DNA, 25 bp, Homo sapien
agcatgagaggaagcgagaagccct

SEQ ID NO: 2721339 - DNA, 25 bp, Homo sapien
tttggatgtattgggcacctgctca

SEQ ID NO: 2721340 - DNA, 25 bp, Homo sapien
atttggatgtattgggcacctgctc

SEQ ID NO: 2721341 - DNA, 25 bp, Homo sapien
ttggatgtattgggcacctgctcac

SEQ ID NO: 2721342 - DNA, 25 bp, Homo sapien
gatttggatgtattgggcacctgct

SEQ ID NO: 2721343 - DNA, 25 bp, Homo sapien
tatccatccagaccgtgctaaattc

SEQ ID NO: 2721344 - DNA, 25 bp, Homo sapien
tcgtctatccatccagaccgtgcta

SEQ ID NO: 2721345 - DNA, 25 bp, Homo sapien
catccagaccgtgctaaattctcca

SEQ ID NO: 2721346 - DNA, 25 bp, Homo sapien
agtggtctcgtctatccatccagac

SEQ ID NO: 2721347 - DNA, 25 bp, Homo sapien
tacatatggtagcttggatgccagg

SEQ ID NO: 2721348 - DNA, 25 bp, Homo sapien
gatctgtggacgagcaatgccagca

SEQ ID NO: 2721349 - DNA, 25 bp, Homo sapien
tattgatgcggatctcgctgacccc

SEQ ID NO: 2721350 - DNA, 25 bp, Homo sapien
taaggtaccttgttacagcagccgg

SEQ ID NO: 2721351 - DNA, 25 bp, Homo sapien
ttcttgtctttcggtatcctgaagg

SEQ ID NO: 2721352 - DNA, 25 bp, Homo sapien
cttgtctttcggtatcctgaaggct

SEQ ID NO: 2721353 - DNA, 25 bp, Homo sapien
tcttgtctttcggtatcctgaaggc

SEQ ID NO: 2721354 - DNA, 25 bp, Homo sapien
ttctccaatacagagtgaatgacgc

SEQ ID NO: 2721355 - DNA, 25 bp, Homo sapien
ttgacacccgcagccctcaggactt

SEQ ID NO: 2721356 - DNA, 25 bp, Homo sapien
tccaatacagagtgaatgacgctgg

SEQ ID NO: 2721357 - DNA, 25 bp, Homo sapien
cagagtgaatgacgctggtacacca

SEQ ID NO: 2721358 - DNA, 25 bp, Homo sapien
ggttatgtctggacccctggatggc

SEQ ID NO: 2721359 - DNA, 25 bp, Homo sapien
aggaggccacatatgggactcatac

SEQ ID NO: 2721360 - DNA, 25 bp, Homo sapien
tgcatccaaactgatatgacaggtt

SEQ ID NO: 2721361 - DNA, 25 bp, Homo sapien
gtcacctctcgcttgtttggctcag

SEQ ID NO: 2721362 - DNA, 25 bp, Homo sapien
gaacagggacaatttccagccttgg

SEQ ID NO: 2721363 - DNA, 25 bp, Homo sapien
cctttcgctggtgtgcatcaaaact

SEQ ID NO: 2721364 - DNA, 25 bp, Homo sapien
gaaaggctctacaagagaacaggga

SEQ ID NO: 2721365 - DNA, 25 bp, Homo sapien
cacaggtgtcttaggatgaaaggct

SEQ ID NO: 2721366 - DNA, 25 bp, Homo sapien
tagctggtagaccttcaagctgggt

SEQ ID NO: 2721367 - DNA, 25 bp, Homo sapien
ggactactcagtgtcaccaggcctg

SEQ ID NO: 2721368 - DNA, 25 bp, Homo sapien
caagctgggtcatggcctttctggg

SEQ ID NO: 2721369 - DNA, 25 bp, Homo sapien
ccagagtttctttgagcctaggaca

SEQ ID NO: 2721370 - DNA, 25 bp, Homo sapien
gattctctggccttaagttgctggg

SEQ ID NO: 2721371 - DNA, 25 bp, Homo sapien
attctctggccttaagttgctggga

SEQ ID NO: 2721372 - DNA, 25 bp, Homo sapien
tctctggccttaagttgctgggaat

SEQ ID NO: 2721373 - DNA, 25 bp, Homo sapien
tgattctctggccttaagttgctgg

SEQ ID NO: 2721374 - DNA, 25 bp, Homo sapien
ctgcatggctggcctggggggccat

SEQ ID NO: 2721375 - DNA, 25 bp, Homo sapien
caggcgatgggctaagtgcttaacc

SEQ ID NO: 2721376 - DNA, 25 bp, Homo sapien
gaagtgcaagggtcaaaggctcaca

SEQ ID NO: 2721377 - DNA, 25 bp, Homo sapien
catcatgactgtgctctagaaggca

SEQ ID NO: 2721378 - DNA, 25 bp, Homo sapien
cacattgagcaggatatacacaggg

SEQ ID NO: 2721379 - DNA, 25 bp, Homo sapien
caatgatgggctagatttttgcctc

SEQ ID NO: 2721380 - DNA, 25 bp, Homo sapien
cgttcatcacactggaagcaccatg

SEQ ID NO: 2721381 - DNA, 25 bp, Homo sapien
tcttacaatgtaccctccaaggacc

SEQ ID NO: 2721382 - DNA, 25 bp, Homo sapien
aagcaccatgtcagggacaatgatg

SEQ ID NO: 2721383 - DNA, 25 bp, Homo sapien
ttccccctatgtctgcgcggcatac

SEQ ID NO: 2721384 - DNA, 25 bp, Homo sapien
tttccccctatgtctgcgcggcata

SEQ ID NO: 2721385 - DNA, 25 bp, Homo sapien
gaaagcgcgcttgaactccttgctg

SEQ ID NO: 2721386 - DNA, 25 bp, Homo sapien
aacaccaccttgaacacggcgtcgg

SEQ ID NO: 2721387 - DNA, 25 bp, Homo sapien
agaacaccaccttgaacacggcgtc

SEQ ID NO: 2721388 - DNA, 25 bp, Homo sapien
cgcttgaactccttgctggagcatg

SEQ ID NO: 2721389 - DNA, 25 bp, Homo sapien
ggcgcacagctcgactggcggtggc

SEQ ID NO: 2721390 - DNA, 25 bp, Homo sapien
aggccgagggcagggtccgctggct

SEQ ID NO: 2721391 - DNA, 25 bp, Homo sapien
cagctgccgctgtcgtccagcgagt

SEQ ID NO: 2721392 - DNA, 25 bp, Homo sapien
ttgcgcgactgcgagcgctccagcg

SEQ ID NO: 2721393 - DNA, 25 bp, Homo sapien
tgaagcccggctgcccgttggccac

SEQ ID NO: 2721394 - DNA, 25 bp, Homo sapien
tgctggcgccgccgtcggtcccggg

SEQ ID NO: 2721395 - DNA, 25 bp, Homo sapien
ccgttggccacgtcggccgcggcct

SEQ ID NO: 2721396 - DNA, 25 bp, Homo sapien
cggctgcccgttggccacgtcggcc

SEQ ID NO: 2721397 - DNA, 25 bp, Homo sapien
gagagggactcgtttatatatacac

SEQ ID NO: 2721398 - DNA, 25 bp, Homo sapien
cttgagaggtacgaagtcacgacac

SEQ ID NO: 2721399 - DNA, 25 bp, Homo sapien
tgcacccacggttaaatacaagtag

SEQ ID NO: 2721400 - DNA, 25 bp, Homo sapien
cggttgcctcctgggcgcacagtcg

SEQ ID NO: 2721401 - DNA, 25 bp, Homo sapien
ttactccgtgataaatttatgtctt

SEQ ID NO: 2721402 - DNA, 25 bp, Homo sapien
tcttcttcacggtggaccctaagtc

SEQ ID NO: 2721403 - DNA, 25 bp, Homo sapien
tcttcacggtggaccctaagtccta

SEQ ID NO: 2721404 - DNA, 25 bp, Homo sapien
tcttttactccgtgataaatttatg

SEQ ID NO: 2721405 - DNA, 25 bp, Homo sapien
gcttgaatcctcatttctggccagt

SEQ ID NO: 2721406 - DNA, 25 bp, Homo sapien
cacacacgatggtccgcttacattg

SEQ ID NO: 2721407 - DNA, 25 bp, Homo sapien
tgctgcccagtggaccccatgaaac

SEQ ID NO: 2721408 - DNA, 25 bp, Homo sapien
ttctatggcaaatcttaggctctcc

SEQ ID NO: 2721409 - DNA, 25 bp, Homo sapien
agttctgtgaccaccgatccagcca

SEQ ID NO: 2721410 - DNA, 25 bp, Homo sapien
accgtaatggggcaactctatggac

SEQ ID NO: 2721411 - DNA, 25 bp, Homo sapien
tcagcctgtcacatgaaaaccgtaa

SEQ ID NO: 2721412 - DNA, 25 bp, Homo sapien
ctctatggacatggaaactcttggg

SEQ ID NO: 2721413 - DNA, 25 bp, Homo sapien
ctgttaagacagtaggcgccgttga

SEQ ID NO: 2721414 - DNA, 25 bp, Homo sapien
tctagggacccttaaggcagagggc

SEQ ID NO: 2721415 - DNA, 25 bp, Homo sapien
taaatcgagccctcctgagtcactg

SEQ ID NO: 2721416 - DNA, 25 bp, Homo sapien
ccggcaatgtaagctggatcaccca

SEQ ID NO: 2721417 - DNA, 25 bp, Homo sapien
ttcccagtctctgcacgtaaggagg

SEQ ID NO: 2721418 - DNA, 25 bp, Homo sapien
gcagtgtctaaagagctgcttccca

SEQ ID NO: 2721419 - DNA, 25 bp, Homo sapien
tgagcccgcaggagagacccgcgca

SEQ ID NO: 2721420 - DNA, 25 bp, Homo sapien
ctccaggcggcgaggaaaggcccca

SEQ ID NO: 2721421 - DNA, 25 bp, Homo sapien
tcaaagtcagcagtgtggcatctta

SEQ ID NO: 2721422 - DNA, 25 bp, Homo sapien
cagagtctgcccacatcctttggct

SEQ ID NO: 2721423 - DNA, 25 bp, Homo sapien
tgccataacgggtaacattcacagg

SEQ ID NO: 2721424 - DNA, 25 bp, Homo sapien
gcatcttaaaatgtccgtccctttg

SEQ ID NO: 2721425 - DNA, 25 bp, Homo sapien
ttctgggaccctctaagtcctgagc

SEQ ID NO: 2721426 - DNA, 25 bp, Homo sapien
gcttcttgagcttgccaaaggaggg

SEQ ID NO: 2721427 - DNA, 25 bp, Homo sapien
tgagcttcttgagcttgccaaagga

SEQ ID NO: 2721428 - DNA, 25 bp, Homo sapien
attctgggaccctctaagtcctgag

SEQ ID NO: 2721429 - DNA, 25 bp, Homo sapien
aacaccactgcactcagaccaacct

SEQ ID NO: 2721430 - DNA, 25 bp, Homo sapien
ggagtggagaagaaacaaaaagatc

SEQ ID NO: 2721431 - DNA, 25 bp, Homo sapien
aagggctagccaagtcaaacagtgg

SEQ ID NO: 2721432 - DNA, 25 bp, Homo sapien
gaagaaacaaaaagatctgtaactg

SEQ ID NO: 2721433 - DNA, 25 bp, Homo sapien
tcaggtgcacttccgtcgatgacga

SEQ ID NO: 2721434 - DNA, 25 bp, Homo sapien
gaaatgtagcgaaactctcagggag

SEQ ID NO: 2721435 - DNA, 25 bp, Homo sapien
tgggttacggcaagactccgcgtta

SEQ ID NO: 2721436 - DNA, 25 bp, Homo sapien
tagcgtcgctattggcaaagcatcc

SEQ ID NO: 2721437 - DNA, 25 bp, Homo sapien
tctccggtctccaccttcttagcct

SEQ ID NO: 2721438 - DNA, 25 bp, Homo sapien
cttcttagcctctgagagctcctac

SEQ ID NO: 2721439 - DNA, 25 bp, Homo sapien
ttctccggtctccaccttcttagcc

SEQ ID NO: 2721440 - DNA, 25 bp, Homo sapien
tctgagagctcctacttccgctcag

SEQ ID NO: 2721441 - DNA, 25 bp, Homo sapien
gccaattgcgaaccactgctgtaga

SEQ ID NO: 2721442 - DNA, 25 bp, Homo sapien
tacagttagggaagtgatgcctcgc

SEQ ID NO: 2721443 - DNA, 25 bp, Homo sapien
taacccaaatgcgtgtggtagagcc

SEQ ID NO: 2721444 - DNA, 25 bp, Homo sapien
tattagtgtcgcgtcaagcaagggc

SEQ ID NO: 2721445 - DNA, 25 bp, Homo sapien
gcccagtgagggaggtgacgctaaa

SEQ ID NO: 2721446 - DNA, 25 bp, Homo sapien
cccagtgagggaggtgacgctaaag

SEQ ID NO: 2721447 - DNA, 25 bp, Homo sapien
tgcccagtgagggaggtgacgctaa

SEQ ID NO: 2721448 - DNA, 25 bp, Homo sapien
gctgcccagtgagggaggtgacgct

SEQ ID NO: 2721449 - DNA, 25 bp, Homo sapien
ccagttctattaggtattcttcatc

SEQ ID NO: 2721450 - DNA, 25 bp, Homo sapien
catttaacagatcctctggaacccc

SEQ ID NO: 2721451 - DNA, 25 bp, Homo sapien
cctgagcagcttactctgggaatgc

SEQ ID NO: 2721452 - DNA, 25 bp, Homo sapien
cttcatctagttcagaggaattcac

SEQ ID NO: 2721453 - DNA, 25 bp, Homo sapien
gaaatctcagcagccaaccgtagaa

SEQ ID NO: 2721454 - DNA, 25 bp, Homo sapien
aacattttaagtcagtggatggcac

SEQ ID NO: 2721455 - DNA, 25 bp, Homo sapien
tatactctagctttggaatccaaca

SEQ ID NO: 2721456 - DNA, 25 bp, Homo sapien
ggcattcaacaaaggatagctagct

SEQ ID NO: 2721457 - DNA, 25 bp, Homo sapien
cacgttcacattaaagctaactgat

SEQ ID NO: 2721458 - DNA, 25 bp, Homo sapien
gcacaaaaacgaacacgttcacatt

SEQ ID NO: 2721459 - DNA, 25 bp, Homo sapien
aacgaacacgttcacattaaagcta

SEQ ID NO: 2721460 - DNA, 25 bp, Homo sapien
ctagcacaaaaacgaacacgttcac

SEQ ID NO: 2721461 - DNA, 25 bp, Homo sapien
tgccctttttcctcctgttctggtg

SEQ ID NO: 2721462 - DNA, 25 bp, Homo sapien
cctttttcctcctgttctggtggtg

SEQ ID NO: 2721463 - DNA, 25 bp, Homo sapien
tttcctcctgttctggtggtgcaca

SEQ ID NO: 2721464 - DNA, 25 bp, Homo sapien
tttttcctcctgttctggtggtgca

SEQ ID NO: 2721465 - DNA, 25 bp, Homo sapien
agaatattaaacttacaggcaataa

SEQ ID NO: 2721466 - DNA, 25 bp, Homo sapien
ataaaaataattatcctcactgggt

SEQ ID NO: 2721467 - DNA, 25 bp, Homo sapien
aaataattatcctcactgggtgtgg

SEQ ID NO: 2721468 - DNA, 25 bp, Homo sapien
aagtattgttctacttagaatatta

SEQ ID NO: 2721469 - DNA, 25 bp, Homo sapien
gaaggcaatctgcactcttataggt

SEQ ID NO: 2721470 - DNA, 25 bp, Homo sapien
tgactgataaagcacacaaatggag

SEQ ID NO: 2721471 - DNA, 25 bp, Homo sapien
tcagaagagtggttaaccagagact

SEQ ID NO: 2721472 - DNA, 25 bp, Homo sapien
cacctatgggacaggaatcagaaga

SEQ ID NO: 2721473 - DNA, 25 bp, Homo sapien
tgagaagcctgaccccacaaggaat

SEQ ID NO: 2721474 - DNA, 25 bp, Homo sapien
gcaaagtcagcagagtttgagaagc

SEQ ID NO: 2721475 - DNA, 25 bp, Homo sapien
aagcctgaccccacaaggaatcctt

SEQ ID NO: 2721476 - DNA, 25 bp, Homo sapien
tttgagaagcctgaccccacaagga

SEQ ID NO: 2721477 - DNA, 25 bp, Homo sapien
taaaggccactttgcaaaagattgt

SEQ ID NO: 2721478 - DNA, 25 bp, Homo sapien
aaggccactttgcaaaagattgttt

SEQ ID NO: 2721479 - DNA, 25 bp, Homo sapien
gcaaaagattgtttcatgcaaccag

SEQ ID NO: 2721480 - DNA, 25 bp, Homo sapien
aaaagattgtttcatgcaaccaggt

SEQ ID NO: 2721481 - DNA, 25 bp, Homo sapien
ccagagtatattgattgaacactac

SEQ ID NO: 2721482 - DNA, 25 bp, Homo sapien
ccacacttacatgctaaccagagta

SEQ ID NO: 2721483 - DNA, 25 bp, Homo sapien
cttatggcacagaatgtgtaggcac

SEQ ID NO: 2721484 - DNA, 25 bp, Homo sapien
gagaaggctctacccattgcccatc

SEQ ID NO: 2721485 - DNA, 25 bp, Homo sapien
gcccggccaaggctgataactttaa

SEQ ID NO: 2721486 - DNA, 25 bp, Homo sapien
cagtgaacctcaagtagaatagaag

SEQ ID NO: 2721487 - DNA, 25 bp, Homo sapien
tgaagacaccagagtatcagagtgg

SEQ ID NO: 2721488 - DNA, 25 bp, Homo sapien
gatccaagaagctcatctcagtgaa

SEQ ID NO: 2721489 - DNA, 25 bp, Homo sapien
atcaaacacaaaggctgagagaatg

SEQ ID NO: 2721490 - DNA, 25 bp, Homo sapien
aaacacaaaggctgagagaatgtta

SEQ ID NO: 2721491 - DNA, 25 bp, Homo sapien
caaacacaaaggctgagagaatgtt

SEQ ID NO: 2721492 - DNA, 25 bp, Homo sapien
tcaaacacaaaggctgagagaatgt

SEQ ID NO: 2721493 - DNA, 25 bp, Homo sapien
cctcctttagtctagtgctctcttc

SEQ ID NO: 2721494 - DNA, 25 bp, Homo sapien
tcctcctttagtctagtgctctctt

SEQ ID NO: 2721495 - DNA, 25 bp, Homo sapien
ccctcctcctttagtctagtgctct

SEQ ID NO: 2721496 - DNA, 25 bp, Homo sapien
ctcctcctttagtctagtgctctct

SEQ ID NO: 2721497 - DNA, 25 bp, Homo sapien
ccttgctgcagctctatttgaaaat

SEQ ID NO: 2721498 - DNA, 25 bp, Homo sapien
gagggctcgactataagaactttca

SEQ ID NO: 2721499 - DNA, 25 bp, Homo sapien
caggatgggcacatttcgagggctc

SEQ ID NO: 2721500 - DNA, 25 bp, Homo sapien
aatagaatcgacctctccttttgga

SEQ ID NO: 2721501 - DNA, 25 bp, Homo sapien
gcagttaaaccatcatttccttgaa

SEQ ID NO: 2721502 - DNA, 25 bp, Homo sapien
tcctagaagttatcaagtctctcat

SEQ ID NO: 2721503 - DNA, 25 bp, Homo sapien
tgtgtcagggtactaatcctagaag

SEQ ID NO: 2721504 - DNA, 25 bp, Homo sapien
gatatgaaatgtgaagcgtggccag

SEQ ID NO: 2721505 - DNA, 25 bp, Homo sapien
ttacaatggtagtccccaaagtgga

SEQ ID NO: 2721506 - DNA, 25 bp, Homo sapien
tatccactgtctcctcaaatcaagg

SEQ ID NO: 2721507 - DNA, 25 bp, Homo sapien
tacctcagaggacccaggtgttgtc

SEQ ID NO: 2721508 - DNA, 25 bp, Homo sapien
gatggtattctttgtgtgcctagaa

SEQ ID NO: 2721509 - DNA, 25 bp, Homo sapien
ctttgctgcagtcattgatggccat

SEQ ID NO: 2721510 - DNA, 25 bp, Homo sapien
tttgctgcagtcattgatggccatt

SEQ ID NO: 2721511 - DNA, 25 bp, Homo sapien
atctcatgagtaatccaccccttgc

SEQ ID NO: 2721512 - DNA, 25 bp, Homo sapien
attcttggaaatctcatgagtaatc

SEQ ID NO: 2721513 - DNA, 25 bp, Homo sapien
tctcatgagtaatccaccccttgct

SEQ ID NO: 2721514 - DNA, 25 bp, Homo sapien
ttggaaatctcatgagtaatccacc

SEQ ID NO: 2721515 - DNA, 25 bp, Homo sapien
cagcagcttgttcctaatttaaact

SEQ ID NO: 2721516 - DNA, 25 bp, Homo sapien
cttggtaacacatcagaagtggtct

SEQ ID NO: 2721517 - DNA, 25 bp, Homo sapien
gtacattcagagttagttccagtcc

SEQ ID NO: 2721518 - DNA, 25 bp, Homo sapien
gctaatcacgcttacaaggcatttt

SEQ ID NO: 2721519 - DNA, 25 bp, Homo sapien
gctccagcactatgaggtggttgat

SEQ ID NO: 2721520 - DNA, 25 bp, Homo sapien
cagctgcccttctaataatcctttg

SEQ ID NO: 2721521 - DNA, 25 bp, Homo sapien
ttttggttcaacatactgcatttct

SEQ ID NO: 2721522 - DNA, 25 bp, Homo sapien
gtggttgatgcataatatcttttcc

SEQ ID NO: 2721523 - DNA, 25 bp, Homo sapien
tccagggcttcatctagcttgtccg

SEQ ID NO: 2721524 - DNA, 25 bp, Homo sapien
tattgccctgatatagctggggttt

SEQ ID NO: 2721525 - DNA, 25 bp, Homo sapien
catacaactctgctctcctcaatat

SEQ ID NO: 2721526 - DNA, 25 bp, Homo sapien
ctcttgcttgatgtattgatggatc

SEQ ID NO: 2721527 - DNA, 25 bp, Homo sapien
aagacaaaagttctgtttgggccag

SEQ ID NO: 2721528 - DNA, 25 bp, Homo sapien
tgtttccagttcttaatagaaagtc

SEQ ID NO: 2721529 - DNA, 25 bp, Homo sapien
catatcagatgtttacagtgctata

SEQ ID NO: 2721530 - DNA, 25 bp, Homo sapien
tctacactaaaggagggcatcaata

SEQ ID NO: 2721531 - DNA, 25 bp, Homo sapien
tctttcattacgttcttcaatttgc

SEQ ID NO: 2721532 - DNA, 25 bp, Homo sapien
tagtctttcattacgttcttcaatt

SEQ ID NO: 2721533 - DNA, 25 bp, Homo sapien
ttttagtctttcattacgttcttca

SEQ ID NO: 2721534 - DNA, 25 bp, Homo sapien
tttagtctttcattacgttcttcaa

SEQ ID NO: 2721535 - DNA, 25 bp, Homo sapien
caagcaaagtaagaagtaagcttac

SEQ ID NO: 2721536 - DNA, 25 bp, Homo sapien
tcaagcaaagtaagaagtaagctta

SEQ ID NO: 2721537 - DNA, 25 bp, Homo sapien
tttgttcccattgtctggatgctga

SEQ ID NO: 2721538 - DNA, 25 bp, Homo sapien
tcagaatgatcctttgggaaatttg

SEQ ID NO: 2721539 - DNA, 25 bp, Homo sapien
caatcaacttggctatcagaatgat

SEQ ID NO: 2721540 - DNA, 25 bp, Homo sapien
ttggctatcagaatgatcctttggg

SEQ ID NO: 2721541 - DNA, 25 bp, Homo sapien
gctatcctgaatcggaagcagccgt

SEQ ID NO: 2721542 - DNA, 25 bp, Homo sapien
ggctccagagctatcctgaatcgga

SEQ ID NO: 2721543 - DNA, 25 bp, Homo sapien
tctttacagtctgagtctacccggc

SEQ ID NO: 2721544 - DNA, 25 bp, Homo sapien
tccagagctatcctgaatcggaagc

SEQ ID NO: 2721545 - DNA, 25 bp, Homo sapien
caagtgatcgtcttgatgctatcac

SEQ ID NO: 2721546 - DNA, 25 bp, Homo sapien
gccaccctgggtctcttgttctaaa

SEQ ID NO: 2721547 - DNA, 25 bp, Homo sapien
cattttgtactactcaaggtgatcc

SEQ ID NO: 2721548 - DNA, 25 bp, Homo sapien
ttctgtgatcagcaaggactgtgcc

SEQ ID NO: 2721549 - DNA, 25 bp, Homo sapien
aaaaattgctgctcactgacaatgt

SEQ ID NO: 2721550 - DNA, 25 bp, Homo sapien
caaaaaattgctgctcactgacaat

SEQ ID NO: 2721551 - DNA, 25 bp, Homo sapien
tcaaaaaattgctgctcactgacaa

SEQ ID NO: 2721552 - DNA, 25 bp, Homo sapien
aaaaaattgctgctcactgacaatg

SEQ ID NO: 2721553 - DNA, 25 bp, Homo sapien
ttgcagtggcacgaagaggctacat

SEQ ID NO: 2721554 - DNA, 25 bp, Homo sapien
tatagccagcggttcttgccaagca

SEQ ID NO: 2721555 - DNA, 25 bp, Homo sapien
tatgtccagagaaaggccaacccat

SEQ ID NO: 2721556 - DNA, 25 bp, Homo sapien
taactggccagtgctatcagaggac

SEQ ID NO: 2721557 - DNA, 25 bp, Homo sapien
tggaaattttccgtggagagcccaa

SEQ ID NO: 2721558 - DNA, 25 bp, Homo sapien
gaggaatcctgtttgatctggaaat

SEQ ID NO: 2721559 - DNA, 25 bp, Homo sapien
gagagcccaaaaggtcggagaacca

SEQ ID NO: 2721560 - DNA, 25 bp, Homo sapien
atctggaaattttccgtggagagcc

SEQ ID NO: 2721561 - DNA, 25 bp, Homo sapien
attttgaacgaaattgatggagtac

SEQ ID NO: 2721562 - DNA, 25 bp, Homo sapien
tggattttgaacgaaattgatggag

SEQ ID NO: 2721563 - DNA, 25 bp, Homo sapien
tttggattttgaacgaaattgatgg

SEQ ID NO: 2721564 - DNA, 25 bp, Homo sapien
ttatttggattttgaacgaaattga

SEQ ID NO: 2721565 - DNA, 25 bp, Homo sapien
agggcctttcccctagctaacagca

SEQ ID NO: 2721566 - DNA, 25 bp, Homo sapien
ggacaagggagcactgggctctact

SEQ ID NO: 2721567 - DNA, 25 bp, Homo sapien
tcaaattaggttcattacatcagga

SEQ ID NO: 2721568 - DNA, 25 bp, Homo sapien
catttcaccctgatcataaaagagg

SEQ ID NO: 2721569 - DNA, 25 bp, Homo sapien
cagcctcgttagctgtgtgatcagg

SEQ ID NO: 2721570 - DNA, 25 bp, Homo sapien
ggtcagcctcaacaaatgggcttct

SEQ ID NO: 2721571 - DNA, 25 bp, Homo sapien
tcatcaatcatgtctgggcagtctc

SEQ ID NO: 2721572 - DNA, 25 bp, Homo sapien
tggacataggacagccagaatcggg

SEQ ID NO: 2721573 - DNA, 25 bp, Homo sapien
taattatctatacaaacctggaggg

SEQ ID NO: 2721574 - DNA, 25 bp, Homo sapien
tacatggtagaatggtcaactcttc

SEQ ID NO: 2721575 - DNA, 25 bp, Homo sapien
gaatcagtaaccctgcttgaaacca

SEQ ID NO: 2721576 - DNA, 25 bp, Homo sapien
aaactttgggcagatctgtggaatc

SEQ ID NO: 2721577 - DNA, 25 bp, Homo sapien
taggtgaatttaacagcatggatcc

SEQ ID NO: 2721578 - DNA, 25 bp, Homo sapien
caagacttgatggaaatgtggcctg

SEQ ID NO: 2721579 - DNA, 25 bp, Homo sapien
gcagaggccccaaccaatggaaaag

SEQ ID NO: 2721580 - DNA, 25 bp, Homo sapien
gaatgaatccacagtgcactctaca

SEQ ID NO: 2721581 - DNA, 25 bp, Homo sapien
ggtgccctactctatatggcctagg

SEQ ID NO: 2721582 - DNA, 25 bp, Homo sapien
caccagcagtactttcgggctcact

SEQ ID NO: 2721583 - DNA, 25 bp, Homo sapien
tctttcagatacataacaccagcag

SEQ ID NO: 2721584 - DNA, 25 bp, Homo sapien
tctcatggcatattctcaaaggtgt

SEQ ID NO: 2721585 - DNA, 25 bp, Homo sapien
taaccccaggctcaggattaacaga

SEQ ID NO: 2721586 - DNA, 25 bp, Homo sapien
cagtgtcaaacttctcatgcatgga

SEQ ID NO: 2721587 - DNA, 25 bp, Homo sapien
gcaggcagtcttgtgtctaatgagc

SEQ ID NO: 2721588 - DNA, 25 bp, Homo sapien
gaaattccaacaggtgtcagtagga

SEQ ID NO: 2721589 - DNA, 25 bp, Homo sapien
ccaaggtttaggttaatcagttcag

SEQ ID NO: 2721590 - DNA, 25 bp, Homo sapien
tacagtttggacaggcctaaaaggc

SEQ ID NO: 2721591 - DNA, 25 bp, Homo sapien
gcaatagtcacatatgccaaggcca

SEQ ID NO: 2721592 - DNA, 25 bp, Homo sapien
cctaaaaggcatgggatgatgcaga

SEQ ID NO: 2721593 - DNA, 25 bp, Homo sapien
tagtcattacttcttactgtatata

SEQ ID NO: 2721594 - DNA, 25 bp, Homo sapien
tattcattaaacttcttagtcatta

SEQ ID NO: 2721595 - DNA, 25 bp, Homo sapien
aacttcttagtcattacttcttact

SEQ ID NO: 2721596 - DNA, 25 bp, Homo sapien
cattaaacttcttagtcattacttc

SEQ ID NO: 2721597 - DNA, 25 bp, Homo sapien
gatactacctgccatgccaaaaaag

SEQ ID NO: 2721598 - DNA, 25 bp, Homo sapien
cattgactttggtagccgggtgtgc

SEQ ID NO: 2721599 - DNA, 25 bp, Homo sapien
tagaagttgggtgtgaccttgcaga

SEQ ID NO: 2721600 - DNA, 25 bp, Homo sapien
caaaaaagaggagtctcctgtgagc

SEQ ID NO: 2721601 - DNA, 25 bp, Homo sapien
taaaactgtcaagactggataggtg

SEQ ID NO: 2721602 - DNA, 25 bp, Homo sapien
gaacacttagcctttctatgcgcat

SEQ ID NO: 2721603 - DNA, 25 bp, Homo sapien
tgtgacacagattgcatatttggga

SEQ ID NO: 2721604 - DNA, 25 bp, Homo sapien
gacaaacagatggttgcaattcagt

SEQ ID NO: 2721605 - DNA, 25 bp, Homo sapien
tttttcacagactgtacttgaagaa

SEQ ID NO: 2721606 - DNA, 25 bp, Homo sapien
ctgtacttgaagaattagggttttg

SEQ ID NO: 2721607 - DNA, 25 bp, Homo sapien
tccactgcaaacactccgaggagtt

SEQ ID NO: 2721608 - DNA, 25 bp, Homo sapien
tcaaacattttagcctacttagaaa

SEQ ID NO: 2721609 - DNA, 25 bp, Homo sapien
gcagtggtgcatcccgggtcactgc

SEQ ID NO: 2721610 - DNA, 25 bp, Homo sapien
ctcctgagtagatgggattatggat

SEQ ID NO: 2721611 - DNA, 25 bp, Homo sapien
gagtgcagtggtgcatcccgggtca

SEQ ID NO: 2721612 - DNA, 25 bp, Homo sapien
aggttcacgccattaccctggctca

SEQ ID NO: 2721613 - DNA, 25 bp, Homo sapien
ctctcattagcacctggggctgatg

SEQ ID NO: 2721614 - DNA, 25 bp, Homo sapien
tctctcattagcacctggggctgat

SEQ ID NO: 2721615 - DNA, 25 bp, Homo sapien
tctcattagcacctggggctgatgg

SEQ ID NO: 2721616 - DNA, 25 bp, Homo sapien
tgaggaaattgttatagtcttttag

SEQ ID NO: 2721617 - DNA, 25 bp, Homo sapien
ccacatcattgaggacgcgcttgtc

SEQ ID NO: 2721618 - DNA, 25 bp, Homo sapien
tgcgggtcacgctggaccacatcat

SEQ ID NO: 2721619 - DNA, 25 bp, Homo sapien
gggactccacggtgtcgcaactgat

SEQ ID NO: 2721620 - DNA, 25 bp, Homo sapien
tccggggtcctcatggatctgtcca

SEQ ID NO: 2721621 - DNA, 25 bp, Homo sapien
gatgatagacgtccatccctggcca

SEQ ID NO: 2721622 - DNA, 25 bp, Homo sapien
gcagtgttcacatatcagtccagca

SEQ ID NO: 2721623 - DNA, 25 bp, Homo sapien
cactgaagcgtctgtgccggatggc

SEQ ID NO: 2721624 - DNA, 25 bp, Homo sapien
gtgtagaatgcaaccaatggcgagg

SEQ ID NO: 2721625 - DNA, 25 bp, Homo sapien
actgaccacagactacattctctct

SEQ ID NO: 2721626 - DNA, 25 bp, Homo sapien
tgctggaagattctgggtcacagct

SEQ ID NO: 2721627 - DNA, 25 bp, Homo sapien
gcgagctctgggttctggccatctg

SEQ ID NO: 2721628 - DNA, 25 bp, Homo sapien
caccaggcgccttgtttatgctcct

SEQ ID NO: 2721629 - DNA, 25 bp, Homo sapien
tcaggagaccccttcaaagtgggct

SEQ ID NO: 2721630 - DNA, 25 bp, Homo sapien
cctgactgatgcctgagtgctgggc

SEQ ID NO: 2721631 - DNA, 25 bp, Homo sapien
tgtggcagctgcttgcccggtgcct

SEQ ID NO: 2721632 - DNA, 25 bp, Homo sapien
agccccatgctgtccctgactgatg

SEQ ID NO: 2721633 - DNA, 25 bp, Homo sapien
cgtgcagttgattccaatcacattc

SEQ ID NO: 2721634 - DNA, 25 bp, Homo sapien
gattccaatcacattcagtggacac

SEQ ID NO: 2721635 - DNA, 25 bp, Homo sapien
tccaatcacattcagtggacacgct

SEQ ID NO: 2721636 - DNA, 25 bp, Homo sapien
aatcacattcagtggacacgctggg

SEQ ID NO: 2721637 - DNA, 25 bp, Homo sapien
gctctgtaacttgccagctgccttc

SEQ ID NO: 2721638 - DNA, 25 bp, Homo sapien
accctgtgtcctccttctagtccct

SEQ ID NO: 2721639 - DNA, 25 bp, Homo sapien
ctgctctgtaacttgccagctgcct

SEQ ID NO: 2721640 - DNA, 25 bp, Homo sapien
aggaccctgtgtcctccttctagtc

SEQ ID NO: 2721641 - DNA, 25 bp, Homo sapien
tgccctccaggaattaagaagataa

SEQ ID NO: 2721642 - DNA, 25 bp, Homo sapien
tgtggacaccttaatgcttaggaca

SEQ ID NO: 2721643 - DNA, 25 bp, Homo sapien
agaagaaacacgtgaggtccctgcc

SEQ ID NO: 2721644 - DNA, 25 bp, Homo sapien
taacgcctcagttggtaaaaagcta

SEQ ID NO: 2721645 - DNA, 25 bp, Homo sapien
atcatcgtcactgtcttcatcgcct

SEQ ID NO: 2721646 - DNA, 25 bp, Homo sapien
tcatcgtcactgtcttcatcgcctc

SEQ ID NO: 2721647 - DNA, 25 bp, Homo sapien
actggaatcccctaaactcactgtg

SEQ ID NO: 2721648 - DNA, 25 bp, Homo sapien
ctggaatcccctaaactcactgtgc

SEQ ID NO: 2721649 - DNA, 25 bp, Homo sapien
tttccactggaatcccctaaactca

SEQ ID NO: 2721650 - DNA, 25 bp, Homo sapien
ccactggaatcccctaaactcactg

SEQ ID NO: 2721651 - DNA, 25 bp, Homo sapien
tccaccatagggatagattccttca

SEQ ID NO: 2721652 - DNA, 25 bp, Homo sapien
atctaccccacttgcccactgcttg

SEQ ID NO: 2721653 - DNA, 25 bp, Homo sapien
ttgggcctgaatttccaccataggg

SEQ ID NO: 2721654 - DNA, 25 bp, Homo sapien
gacttctgttctgcagtgttagagc

SEQ ID NO: 2721655 - DNA, 25 bp, Homo sapien
accgtgagggccaactgctctgggt

SEQ ID NO: 2721656 - DNA, 25 bp, Homo sapien
tcgttgggccccatgtagtggaaag

SEQ ID NO: 2721657 - DNA, 25 bp, Homo sapien
ggtaccaaccatctcgaccgtgagg

SEQ ID NO: 2721658 - DNA, 25 bp, Homo sapien
ttgatcccaccaaaagcgtcatgtg

SEQ ID NO: 2721659 - DNA, 25 bp, Homo sapien
tcatgtccatgcaccctcattgcca

SEQ ID NO: 2721660 - DNA, 25 bp, Homo sapien
tcagctttgtactagaaggtgggcc

SEQ ID NO: 2721661 - DNA, 25 bp, Homo sapien
ttgccatcgggcgatgggacaaacg

SEQ ID NO: 2721662 - DNA, 25 bp, Homo sapien
gacatgagtactggccttttcagct

SEQ ID NO: 2721663 - DNA, 25 bp, Homo sapien
ctcacccatgtgcacgcagacaaca

SEQ ID NO: 2721664 - DNA, 25 bp, Homo sapien
ccatgtgcacgcagacaacacagct

SEQ ID NO: 2721665 - DNA, 25 bp, Homo sapien
tctcctttccggctcacccatgtgc

SEQ ID NO: 2721666 - DNA, 25 bp, Homo sapien
ctcctttccggctcacccatgtgca

SEQ ID NO: 2721667 - DNA, 25 bp, Homo sapien
agaaggtgccaggtgccttgaagat

SEQ ID NO: 2721668 - DNA, 25 bp, Homo sapien
agggactctatctcctccgtgatca

SEQ ID NO: 2721669 - DNA, 25 bp, Homo sapien
gggttcagaatcttgacttccattt

SEQ ID NO: 2721670 - DNA, 25 bp, Homo sapien
ttgaagatgcctgtgcaccaggcac

SEQ ID NO: 2721671 - DNA, 25 bp, Homo sapien
acttggatgtgtagagaagcaggaa

SEQ ID NO: 2721672 - DNA, 25 bp, Homo sapien
agcaatggtgtccagcgcagggcta

SEQ ID NO: 2721673 - DNA, 25 bp, Homo sapien
cacccgtcttggaggaccaatagga

SEQ ID NO: 2721674 - DNA, 25 bp, Homo sapien
tgtaagcaggatgtgatgtgcccca

SEQ ID NO: 2721675 - DNA, 25 bp, Homo sapien
cctttggtttagtccagagacaagc

SEQ ID NO: 2721676 - DNA, 25 bp, Homo sapien
tggtttagtccagagacaagcacac

SEQ ID NO: 2721677 - DNA, 25 bp, Homo sapien
agcctttggtttagtccagagacaa

SEQ ID NO: 2721678 - DNA, 25 bp, Homo sapien
tttggtttagtccagagacaagcac

SEQ ID NO: 2721679 - DNA, 25 bp, Homo sapien
aggggtctgctatcccagcttataa

SEQ ID NO: 2721680 - DNA, 25 bp, Homo sapien
cagcccctaagtcaccccacttctt

SEQ ID NO: 2721681 - DNA, 25 bp, Homo sapien
gaggctcagcccctaagtcacccca

SEQ ID NO: 2721682 - DNA, 25 bp, Homo sapien
tgaggggtctgctatcccagcttat

SEQ ID NO: 2721683 - DNA, 25 bp, Homo sapien
tctcgaacttgccggtgaaagccat

SEQ ID NO: 2721684 - DNA, 25 bp, Homo sapien
catctcgaacttgccggtgaaagcc

SEQ ID NO: 2721685 - DNA, 25 bp, Homo sapien
tccatctcgaacttgccggtgaaag

SEQ ID NO: 2721686 - DNA, 25 bp, Homo sapien
tctccatctcgaacttgccggtgaa

SEQ ID NO: 2721687 - DNA, 25 bp, Homo sapien
acccggggacaagcagagtagccat

SEQ ID NO: 2721688 - DNA, 25 bp, Homo sapien
aagcagagtagccatataagagctg

SEQ ID NO: 2721689 - DNA, 25 bp, Homo sapien
cagagtagccatataagagctgctt

SEQ ID NO: 2721690 - DNA, 25 bp, Homo sapien
gggacaagcagagtagccatataag

SEQ ID NO: 2721691 - DNA, 25 bp, Homo sapien
cctccgtgacgatcttgaagttgcg

SEQ ID NO: 2721692 - DNA, 25 bp, Homo sapien
ccccggagtagtgctgggaccaagt

SEQ ID NO: 2721693 - DNA, 25 bp, Homo sapien
gaagttgcgggccttttcgattaca

SEQ ID NO: 2721694 - DNA, 25 bp, Homo sapien
ccccattgtctgtatgttgctttcc

SEQ ID NO: 2721695 - DNA, 25 bp, Homo sapien
atctctgaggtctggtgatagttgg

SEQ ID NO: 2721696 - DNA, 25 bp, Homo sapien
tgatagttggggaaattcaccacca

SEQ ID NO: 2721697 - DNA, 25 bp, Homo sapien
caccagcttgtcacccacgatctct

SEQ ID NO: 2721698 - DNA, 25 bp, Homo sapien
tgtcacccacgatctctgaggtctg

SEQ ID NO: 2721699 - DNA, 25 bp, Homo sapien
cacagtgagggaatgaagtatggaa

SEQ ID NO: 2721700 - DNA, 25 bp, Homo sapien
gtcacaggctcacagtgagggaatg

SEQ ID NO: 2721701 - DNA, 25 bp, Homo sapien
ttctagacctacacgggaccccaga

SEQ ID NO: 2721702 - DNA, 25 bp, Homo sapien
ggctcacagtgagggaatgaagtat

SEQ ID NO: 2721703 - DNA, 25 bp, Homo sapien
gctcataggtcacgcctccgatggt

SEQ ID NO: 2721704 - DNA, 25 bp, Homo sapien
gcgctcataggtcacgcctccgatg

SEQ ID NO: 2721705 - DNA, 25 bp, Homo sapien
taggtcacgcctccgatggtggaga

SEQ ID NO: 2721706 - DNA, 25 bp, Homo sapien
cataggtcacgcctccgatggtgga

SEQ ID NO: 2721707 - DNA, 25 bp, Homo sapien
ttattggtgggtttgtagctccctg

SEQ ID NO: 2721708 - DNA, 25 bp, Homo sapien
cagttttattggtgggtttgtagct

SEQ ID NO: 2721709 - DNA, 25 bp, Homo sapien
tattggtgggtttgtagctccctgg

SEQ ID NO: 2721710 - DNA, 25 bp, Homo sapien
cttcttacctagagtcaggtccagc

SEQ ID NO: 2721711 - DNA, 25 bp, Homo sapien
tcccaggagaggctcgtgcacagcc

SEQ ID NO: 2721712 - DNA, 25 bp, Homo sapien
ccaggagaggctcgtgcacagccag

SEQ ID NO: 2721713 - DNA, 25 bp, Homo sapien
catggtcttcttacctagagtcagg

SEQ ID NO: 2721714 - DNA, 25 bp, Homo sapien
tgcctcagtgctggctcagaccagt

SEQ ID NO: 2721715 - DNA, 25 bp, Homo sapien
tgccagcaaccagcatccttgtatt

SEQ ID NO: 2721716 - DNA, 25 bp, Homo sapien
gttccaggcaccatccagcttgtca

SEQ ID NO: 2721717 - DNA, 25 bp, Homo sapien
catccttgtatttctgaggcaatcc

SEQ ID NO: 2721718 - DNA, 25 bp, Homo sapien
ttcacactcctgattcatggccggg

SEQ ID NO: 2721719 - DNA, 25 bp, Homo sapien
gcaaagagttgcctggcgttcacac

SEQ ID NO: 2721720 - DNA, 25 bp, Homo sapien
tctgccaccggctaacaagatttgc

SEQ ID NO: 2721721 - DNA, 25 bp, Homo sapien
caatggacgtgggttcataaaagca

SEQ ID NO: 2721722 - DNA, 25 bp, Homo sapien
gaaaatctcagcatggagacagtaa

SEQ ID NO: 2721723 - DNA, 25 bp, Homo sapien
tgcaaaggaccgtggaagcaatttt

SEQ ID NO: 2721724 - DNA, 25 bp, Homo sapien
tcacactagcataggaggctgcacg

SEQ ID NO: 2721725 - DNA, 25 bp, Homo sapien
caacctccgttctatttatgtgcaa

SEQ ID NO: 2721726 - DNA, 25 bp, Homo sapien
ggacccgcaggtaaccacagagctt

SEQ ID NO: 2721727 - DNA, 25 bp, Homo sapien
cagctctcggttccggaagattcca

SEQ ID NO: 2721728 - DNA, 25 bp, Homo sapien
tggaggctgtgttcaccactagaac

SEQ ID NO: 2721729 - DNA, 25 bp, Homo sapien
cttacagggcatgagtttaacccag

SEQ ID NO: 2721730 - DNA, 25 bp, Homo sapien
tcctgtggcgttgtaataccatttt

SEQ ID NO: 2721731 - DNA, 25 bp, Homo sapien
ttattgaatcctgtggcgttgtaat

SEQ ID NO: 2721732 - DNA, 25 bp, Homo sapien
gcctgatgctgcaacagccttcttg

SEQ ID NO: 2721733 - DNA, 25 bp, Homo sapien
acttgcctgatgctgcaacagcctt

SEQ ID NO: 2721734 - DNA, 25 bp, Homo sapien
taagattgtttcaggtttaaccatc

SEQ ID NO: 2721735 - DNA, 25 bp, Homo sapien
taaccatcttcgtaacagctgcatc

SEQ ID NO: 2721736 - DNA, 25 bp, Homo sapien
tccacagacttcaactacatgatta

SEQ ID NO: 2721737 - DNA, 25 bp, Homo sapien
aaacagctgcagaccaaataattct

SEQ ID NO: 2721738 - DNA, 25 bp, Homo sapien
tgctgcaaggcttgccgagaaggga

SEQ ID NO: 2721739 - DNA, 25 bp, Homo sapien
caaggcttgccgagaagggagcaac

SEQ ID NO: 2721740 - DNA, 25 bp, Homo sapien
gcttgccgagaagggagcaaccctg

SEQ ID NO: 2721741 - DNA, 25 bp, Homo sapien
ggcttgccgagaagggagcaaccct

SEQ ID NO: 2721742 - DNA, 25 bp, Homo sapien
gagggagcaggtgaaatcagattcc

SEQ ID NO: 2721743 - DNA, 25 bp, Homo sapien
tggcctgccgtgtgcgttcccagga

SEQ ID NO: 2721744 - DNA, 25 bp, Homo sapien
cattggaggataatcctcttgggcc

SEQ ID NO: 2721745 - DNA, 25 bp, Homo sapien
gattccgcagtaatccctggtgcct

SEQ ID NO: 2721746 - DNA, 25 bp, Homo sapien
tgccgggggcttgtgaagcactttc

SEQ ID NO: 2721747 - DNA, 25 bp, Homo sapien
ttttatcttcatgtgggacaaggtc

SEQ ID NO: 2721748 - DNA, 25 bp, Homo sapien
tgaccagctcgaagcacagcccatt

SEQ ID NO: 2721749 - DNA, 25 bp, Homo sapien
tagaaggttcctgccacgagcaagt

SEQ ID NO: 2721750 - DNA, 25 bp, Homo sapien
aagcagctgagtaacggtgcttggt

SEQ ID NO: 2721751 - DNA, 25 bp, Homo sapien
cctgtgcagtttgtcgataaggagg

SEQ ID NO: 2721752 - DNA, 25 bp, Homo sapien
gtttgtcgataaggaggaagcagct

SEQ ID NO: 2721753 - DNA, 25 bp, Homo sapien
gtaacggtgcttggtggtggcagcg

SEQ ID NO: 2721754 - DNA, 25 bp, Homo sapien
cctgaatgggtccatcagtaggcat

SEQ ID NO: 2721755 - DNA, 25 bp, Homo sapien
agccctgaatgggtccatcagtagg

SEQ ID NO: 2721756 - DNA, 25 bp, Homo sapien
cagcaggtagccctgaatgggtcca

SEQ ID NO: 2721757 - DNA, 25 bp, Homo sapien
ggtagccctgaatgggtccatcagt

SEQ ID NO: 2721758 - DNA, 25 bp, Homo sapien
tcagcacctgcagggtaggctggtg

SEQ ID NO: 2721759 - DNA, 25 bp, Homo sapien
cactgggcggtccttgatccctctg

SEQ ID NO: 2721760 - DNA, 25 bp, Homo sapien
tgggcggtccttgatccctctgacc

SEQ ID NO: 2721761 - DNA, 25 bp, Homo sapien
ggtaccactgggcggtccttgatcc

SEQ ID NO: 2721762 - DNA, 25 bp, Homo sapien
ataaagctggtagaagttctgcctt

SEQ ID NO: 2721763 - DNA, 25 bp, Homo sapien
taaataaagctggtagaagttctgc

SEQ ID NO: 2721764 - DNA, 25 bp, Homo sapien
aaataaagctggtagaagttctgcc

SEQ ID NO: 2721765 - DNA, 25 bp, Homo sapien
cataaataaagctggtagaagttct

SEQ ID NO: 2721766 - DNA, 25 bp, Homo sapien
tgactgtggagtcgggtaagggtag

SEQ ID NO: 2721767 - DNA, 25 bp, Homo sapien
agctgtaacgactccagtccactcc

SEQ ID NO: 2721768 - DNA, 25 bp, Homo sapien
tccactccatgcattccagcacagt

SEQ ID NO: 2721769 - DNA, 25 bp, Homo sapien
ctggggaaaggaagctgtaacgact

SEQ ID NO: 2721770 - DNA, 25 bp, Homo sapien
cgcgtattcagaggtatgatcccaa

SEQ ID NO: 2721771 - DNA, 25 bp, Homo sapien
taatatataagagatgggcacctgg

SEQ ID NO: 2721772 - DNA, 25 bp, Homo sapien
caggcttgaatgcagcgcgtattca

SEQ ID NO: 2721773 - DNA, 25 bp, Homo sapien
tccatttccaagtcgggccagttca

SEQ ID NO: 2721774 - DNA, 25 bp, Homo sapien
aaggaagctacaggctggacttcag

SEQ ID NO: 2721775 - DNA, 25 bp, Homo sapien
cagcaggaggggacgttacgggcat

SEQ ID NO: 2721776 - DNA, 25 bp, Homo sapien
tcagcaggaggggacgttacgggca

SEQ ID NO: 2721777 - DNA, 25 bp, Homo sapien
ggaaggaagctacaggctggacttc

SEQ ID NO: 2721778 - DNA, 25 bp, Homo sapien
gatgcggtcctgtaggaagctggca

SEQ ID NO: 2721779 - DNA, 25 bp, Homo sapien
gaattcagttggagggtgtggcgtc

SEQ ID NO: 2721780 - DNA, 25 bp, Homo sapien
ttaaaaaggccatgaatgttgtgta

SEQ ID NO: 2721781 - DNA, 25 bp, Homo sapien
ttcccctggataacagagggcgtgg

SEQ ID NO: 2721782 - DNA, 25 bp, Homo sapien
ttctcattagggtcgaagctcccag

SEQ ID NO: 2721783 - DNA, 25 bp, Homo sapien
gagctttggagccactccacagagt

SEQ ID NO: 2721784 - DNA, 25 bp, Homo sapien
tactgtcccattttgggcttctcat

SEQ ID NO: 2721785 - DNA, 25 bp, Homo sapien
cacagagtgatccaggaggaaagcg

SEQ ID NO: 2721786 - DNA, 25 bp, Homo sapien
gcgtgtggtcaactggcaacccatt

SEQ ID NO: 2721787 - DNA, 25 bp, Homo sapien
tagatgggtagggaagtagagtcgc

SEQ ID NO: 2721788 - DNA, 25 bp, Homo sapien
acccatttgagaaacctttggactg

SEQ ID NO: 2721789 - DNA, 25 bp, Homo sapien
gaaacctttggactgtagatgggta

SEQ ID NO: 2721790 - DNA, 25 bp, Homo sapien
cagtgccttgtaggtccctggagca

SEQ ID NO: 2721791 - DNA, 25 bp, Homo sapien
ttaaggtgacctggctggaaaactc

SEQ ID NO: 2721792 - DNA, 25 bp, Homo sapien
tcttagtccccgcattgcagtgtgt

SEQ ID NO: 2721793 - DNA, 25 bp, Homo sapien
gaatttgaatcatcctgaggcactc

SEQ ID NO: 2721794 - DNA, 25 bp, Homo sapien
catcaaaactaatgatacagccttc

SEQ ID NO: 2721795 - DNA, 25 bp, Homo sapien
gaatctcttctgtatcatctaatac

SEQ ID NO: 2721796 - DNA, 25 bp, Homo sapien
tcttctgtatcatctaatacaaggt

SEQ ID NO: 2721797 - DNA, 25 bp, Homo sapien
caaggttcatatactcatcaaaact

SEQ ID NO: 2721798 - DNA, 25 bp, Homo sapien
ttggccaggatctgatccactcctt

SEQ ID NO: 2721799 - DNA, 25 bp, Homo sapien
tggccaggatctgatccactccttt

SEQ ID NO: 2721800 - DNA, 25 bp, Homo sapien
ttcagggctgtatctccgcaccctg

SEQ ID NO: 2721801 - DNA, 25 bp, Homo sapien
cctgagggaccttggtaatactgtg

SEQ ID NO: 2721802 - DNA, 25 bp, Homo sapien
tggtaatactgtgtcagctcccgtg

SEQ ID NO: 2721803 - DNA, 25 bp, Homo sapien
gagagcagagtcttcagggctgtat

SEQ ID NO: 2721804 - DNA, 25 bp, Homo sapien
taggcatcctacaacctgaaaccga

SEQ ID NO: 2721805 - DNA, 25 bp, Homo sapien
gggtgtggagggtctagaagtgcca

SEQ ID NO: 2721806 - DNA, 25 bp, Homo sapien
cacctgccgtaggagtgttggctgt

SEQ ID NO: 2721807 - DNA, 25 bp, Homo sapien
atgttgagtctggttctaggcatcc

SEQ ID NO: 2721808 - DNA, 25 bp, Homo sapien
ttctagattgcctgccagaaagcag

SEQ ID NO: 2721809 - DNA, 25 bp, Homo sapien
tatctggcaccacaacctcattcag

SEQ ID NO: 2721810 - DNA, 25 bp, Homo sapien
tcagcagacgtgtcctgagcactca

SEQ ID NO: 2721811 - DNA, 25 bp, Homo sapien
cagaaagcaggttgttgttcagtcc

SEQ ID NO: 2721812 - DNA, 25 bp, Homo sapien
acagggccgggatcagggcgaggta

SEQ ID NO: 2721813 - DNA, 25 bp, Homo sapien
ggagaacgtcgactacacaaacctc

SEQ ID NO: 2721814 - DNA, 25 bp, Homo sapien
taaagatgagatctgacagggccgg

SEQ ID NO: 2721815 - DNA, 25 bp, Homo sapien
catcttcactcaggccactaggggg

SEQ ID NO: 2721816 - DNA, 25 bp, Homo sapien
gggcaagagagcaaatccgccttcc

SEQ ID NO: 2721817 - DNA, 25 bp, Homo sapien
tgggcaagagagcaaatccgccttc

SEQ ID NO: 2721818 - DNA, 25 bp, Homo sapien
gcaagagagcaaatccgccttcctc

SEQ ID NO: 2721819 - DNA, 25 bp, Homo sapien
tgtgggcaagagagcaaatccgcct

SEQ ID NO: 2721820 - DNA, 25 bp, Homo sapien
ccccaaaccagctttcgcagacagg

SEQ ID NO: 2721821 - DNA, 25 bp, Homo sapien
tgccccaaaccagctttcgcagaca

SEQ ID NO: 2721822 - DNA, 25 bp, Homo sapien
accagctttcgcagacaggcattcc

SEQ ID NO: 2721823 - DNA, 25 bp, Homo sapien
caaaccagctttcgcagacaggcat

SEQ ID NO: 2721824 - DNA, 25 bp, Homo sapien
tcgacacccttgtgtagagagtggg

SEQ ID NO: 2721825 - DNA, 25 bp, Homo sapien
gaactagaatctagtctccccgcct

SEQ ID NO: 2721826 - DNA, 25 bp, Homo sapien
caggctccagttcagaaaacgcttc

SEQ ID NO: 2721827 - DNA, 25 bp, Homo sapien
cagttcctggctctagctcccaaga

SEQ ID NO: 2721828 - DNA, 25 bp, Homo sapien
gcagccagccgctttttcctccaaa

SEQ ID NO: 2721829 - DNA, 25 bp, Homo sapien
catttcgtgagtactgtgaggagcg

SEQ ID NO: 2721830 - DNA, 25 bp, Homo sapien
tcctccaaaggatctctttagcttt

SEQ ID NO: 2721831 - DNA, 25 bp, Homo sapien
taagcctctgtatttagactctgga

SEQ ID NO: 2721832 - DNA, 25 bp, Homo sapien
tctcccatggcagtccttggtctcc

SEQ ID NO: 2721833 - DNA, 25 bp, Homo sapien
aaagcttgatggctttgtcttcagc

SEQ ID NO: 2721834 - DNA, 25 bp, Homo sapien
tggtctccacgtggcagaaaacagc

SEQ ID NO: 2721835 - DNA, 25 bp, Homo sapien
aagcttgatggctttgtcttcagcc

SEQ ID NO: 2721836 - DNA, 25 bp, Homo sapien
agagcttctttgctccggacgcccc

SEQ ID NO: 2721837 - DNA, 25 bp, Homo sapien
gacgggatgggaaaactatgcctgg

SEQ ID NO: 2721838 - DNA, 25 bp, Homo sapien
ctgctgccgctgaggaaagccggga

SEQ ID NO: 2721839 - DNA, 25 bp, Homo sapien
cgggcagccgcgagggtgagtgtcc

SEQ ID NO: 2721840 - DNA, 25 bp, Homo sapien
ggccagcccacgtgaccgggaggaa

SEQ ID NO: 2721841 - DNA, 25 bp, Homo sapien
gaatgctgcgctgcgggccagccca

SEQ ID NO: 2721842 - DNA, 25 bp, Homo sapien
aaagagaatgctgcgctgcgggcca

SEQ ID NO: 2721843 - DNA, 25 bp, Homo sapien
aaaaagagaatgctgcgctgcgggc

SEQ ID NO: 2721844 - DNA, 25 bp, Homo sapien
acaaacgcagagatgcatcgacaca

SEQ ID NO: 2721845 - DNA, 25 bp, Homo sapien
tacaaacgcagagatgcatcgacac

SEQ ID NO: 2721846 - DNA, 25 bp, Homo sapien
caaacgcagagatgcatcgacacac

SEQ ID NO: 2721847 - DNA, 25 bp, Homo sapien
ctacaaacgcagagatgcatcgaca

SEQ ID NO: 2721848 - DNA, 25 bp, Homo sapien
ctttgcaaacgcgtgggaaacaatc

SEQ ID NO: 2721849 - DNA, 25 bp, Homo sapien
aaacctccaaatacgctaacaagct

SEQ ID NO: 2721850 - DNA, 25 bp, Homo sapien
tctggcgcacaaaacctccaaatac

SEQ ID NO: 2721851 - DNA, 25 bp, Homo sapien
caatcactctgatcactctggcgca

SEQ ID NO: 2721852 - DNA, 25 bp, Homo sapien
ctatgatttatcatcacactcaagt

SEQ ID NO: 2721853 - DNA, 25 bp, Homo sapien
atcatcacactcaagtacatgcaca

SEQ ID NO: 2721854 - DNA, 25 bp, Homo sapien
tatgatttatcatcacactcaagta

SEQ ID NO: 2721855 - DNA, 25 bp, Homo sapien
tttatcatcacactcaagtacatgc

SEQ ID NO: 2721856 - DNA, 25 bp, Homo sapien
ttccatgatatcaaaccaaacaaat

SEQ ID NO: 2721857 - DNA, 25 bp, Homo sapien
ggaaacctgaatagacccataacaa

SEQ ID NO: 2721858 - DNA, 25 bp, Homo sapien
gaacaattgcataccaacaaattag

SEQ ID NO: 2721859 - DNA, 25 bp, Homo sapien
ggaggaacacttacctcattccatg

SEQ ID NO: 2721860 - DNA, 25 bp, Homo sapien
ctcttgtaatgatttctaatgtgac

SEQ ID NO: 2721861 - DNA, 25 bp, Homo sapien
caaaagtggtcatgtagtctcatta

SEQ ID NO: 2721862 - DNA, 25 bp, Homo sapien
caccgtgcagggcccctcttgtaat

SEQ ID NO: 2721863 - DNA, 25 bp, Homo sapien
tagaagtggttctaagcaaaagtgg

SEQ ID NO: 2721864 - DNA, 25 bp, Homo sapien
catagtgtcgagctttagattggta

SEQ ID NO: 2721865 - DNA, 25 bp, Homo sapien
accacctgtaggatactgcattaag

SEQ ID NO: 2721866 - DNA, 25 bp, Homo sapien
aatagattgccatgatcctgaagcc

SEQ ID NO: 2721867 - DNA, 25 bp, Homo sapien
tcagcatctcagaaacagtggtgtg

SEQ ID NO: 2721868 - DNA, 25 bp, Homo sapien
ttgcttcgatttttgtggccctata

SEQ ID NO: 2721869 - DNA, 25 bp, Homo sapien
tgtaaaaaagccttggctctctacc

SEQ ID NO: 2721870 - DNA, 25 bp, Homo sapien
tctacctattaagaatgtctctttc

SEQ ID NO: 2721871 - DNA, 25 bp, Homo sapien
ttatgtgagtcatgtaaaaaagcct

SEQ ID NO: 2721872 - DNA, 25 bp, Homo sapien
gcaggtcttaacagccgcattcatc

SEQ ID NO: 2721873 - DNA, 25 bp, Homo sapien
cggacgcggcgcactcctggtttaa

SEQ ID NO: 2721874 - DNA, 25 bp, Homo sapien
ccgcggtgaacggacgcggcgcact

SEQ ID NO: 2721875 - DNA, 25 bp, Homo sapien
cgcattcatctgaggccgcggtgaa

SEQ ID NO: 2721876 - DNA, 25 bp, Homo sapien
cgttggtccagttagcagtccgaga

SEQ ID NO: 2721877 - DNA, 25 bp, Homo sapien
cagaggctctaaggtcccgagcagc

SEQ ID NO: 2721878 - DNA, 25 bp, Homo sapien
tcatcagacagttgccgttggtcca

SEQ ID NO: 2721879 - DNA, 25 bp, Homo sapien
aaacgggctcggagccatctaagcc

SEQ ID NO: 2721880 - DNA, 25 bp, Homo sapien
tatcctaggagtgtccacacaaaaa

SEQ ID NO: 2721881 - DNA, 25 bp, Homo sapien
aaaacaagagctaaacagcggaaca

SEQ ID NO: 2721882 - DNA, 25 bp, Homo sapien
gaagcaaaggtatagcaacatacca

SEQ ID NO: 2721883 - DNA, 25 bp, Homo sapien
cataccaaactttctatcctaggag

SEQ ID NO: 2721884 - DNA, 25 bp, Homo sapien
ccatccttagcaaccacacgggtgc

SEQ ID NO: 2721885 - DNA, 25 bp, Homo sapien
cccatccttagcaaccacacgggtg

SEQ ID NO: 2721886 - DNA, 25 bp, Homo sapien
gcccatccttagcaaccacacgggt

SEQ ID NO: 2721887 - DNA, 25 bp, Homo sapien
gtgtatccgactgcagccttgtata

SEQ ID NO: 2721888 - DNA, 25 bp, Homo sapien
gataggcctaatagcagagattcag

SEQ ID NO: 2721889 - DNA, 25 bp, Homo sapien
tacactaaatgtctcgtccagctcc

SEQ ID NO: 2721890 - DNA, 25 bp, Homo sapien
ggccacgtccacaataccagtgtat

SEQ ID NO: 2721891 - DNA, 25 bp, Homo sapien
aaacgtggtgttgaaacttgagatc

SEQ ID NO: 2721892 - DNA, 25 bp, Homo sapien
gtggggcatcgaacgttttgccaaa

SEQ ID NO: 2721893 - DNA, 25 bp, Homo sapien
catcgaacgttttgccaaaacgtgg

SEQ ID NO: 2721894 - DNA, 25 bp, Homo sapien
ggctggtggggcatcgaacgttttg

SEQ ID NO: 2721895 - DNA, 25 bp, Homo sapien
aggatgatgccaatagtcattttaa

SEQ ID NO: 2721896 - DNA, 25 bp, Homo sapien
cagtgtctttatagccaacacttac

SEQ ID NO: 2721897 - DNA, 25 bp, Homo sapien
gaagaaagctacgtaggatgatgcc

SEQ ID NO: 2721898 - DNA, 25 bp, Homo sapien
tcaaaagtgcttaagtgtttaaaca

SEQ ID NO: 2721899 - DNA, 25 bp, Homo sapien
tttctggataggcatcatctgaggc

SEQ ID NO: 2721900 - DNA, 25 bp, Homo sapien
tctggataggcatcatctgaggcag

SEQ ID NO: 2721901 - DNA, 25 bp, Homo sapien
ctagaggattgaagggaaagaattt

SEQ ID NO: 2721902 - DNA, 25 bp, Homo sapien
gaacagagctttttgctttaacagt

SEQ ID NO: 2721903 - DNA, 25 bp, Homo sapien
gaatacatcttacctcctctaggtg

SEQ ID NO: 2721904 - DNA, 25 bp, Homo sapien
gcaacccagattcagacagtctcat

SEQ ID NO: 2721905 - DNA, 25 bp, Homo sapien
aagccttgtgagaaagactgtccac

SEQ ID NO: 2721906 - DNA, 25 bp, Homo sapien
gtacacttgtccaaagcaacccaga

SEQ ID NO: 2721907 - DNA, 25 bp, Homo sapien
ccactcaaggggaggtgcgcaatct

SEQ ID NO: 2721908 - DNA, 25 bp, Homo sapien
ttcaggcaggtcaaaactctcaaag

SEQ ID NO: 2721909 - DNA, 25 bp, Homo sapien
tctctctcctcgtcaaggatcatga

SEQ ID NO: 2721910 - DNA, 25 bp, Homo sapien
aggtgcgcaatctggtgctcttcag

SEQ ID NO: 2721911 - DNA, 25 bp, Homo sapien
atatctatgtcacagcaaacaggtg

SEQ ID NO: 2721912 - DNA, 25 bp, Homo sapien
gaatgcttgaaggagactgcaacag

SEQ ID NO: 2721913 - DNA, 25 bp, Homo sapien
tccagggtcgacagaatgcttgaag

SEQ ID NO: 2721914 - DNA, 25 bp, Homo sapien
ggtggcaattcaacatccagggtcg

SEQ ID NO: 2721915 - DNA, 25 bp, Homo sapien
aatacacacaaactctgaagcacta

SEQ ID NO: 2721916 - DNA, 25 bp, Homo sapien
acaaatacacacaaactctgaagca

SEQ ID NO: 2721917 - DNA, 25 bp, Homo sapien
acacacaaactctgaagcactaaga

SEQ ID NO: 2721918 - DNA, 25 bp, Homo sapien
caaatacacacaaactctgaagcac

SEQ ID NO: 2721919 - DNA, 25 bp, Homo sapien
cagacacagccgagcatggtaagtg

SEQ ID NO: 2721920 - DNA, 25 bp, Homo sapien
atcctgctcccagtagagcggagga

SEQ ID NO: 2721921 - DNA, 25 bp, Homo sapien
cagccgagcatggtaagtgcaaagg

SEQ ID NO: 2721922 - DNA, 25 bp, Homo sapien
cctgctcccagtagagcggaggaga

SEQ ID NO: 2721923 - DNA, 25 bp, Homo sapien
gagagggctcttgagagagcattct

SEQ ID NO: 2721924 - DNA, 25 bp, Homo sapien
aataggtaagcctatgctggtgcca

SEQ ID NO: 2721925 - DNA, 25 bp, Homo sapien
ggtaagcctatgctggtgccaccaa

SEQ ID NO: 2721926 - DNA, 25 bp, Homo sapien
agagagggctcttgagagagcattc

SEQ ID NO: 2721927 - DNA, 25 bp, Homo sapien
gtggggcctgcggtctgttccacta

SEQ ID NO: 2721928 - DNA, 25 bp, Homo sapien
cctgcggtctgttccactatgtgat

SEQ ID NO: 2721929 - DNA, 25 bp, Homo sapien
aggtgagcgctggtgcgtgccattg

SEQ ID NO: 2721930 - DNA, 25 bp, Homo sapien
gtgagcgctggtgcgtgccattgcc

SEQ ID NO: 2721931 - DNA, 25 bp, Homo sapien
atgtccttgaaggcaactctttctt

SEQ ID NO: 2721932 - DNA, 25 bp, Homo sapien
ttcctctgtgttccggatgcagcca

SEQ ID NO: 2721933 - DNA, 25 bp, Homo sapien
cttcctctgtgttccggatgcagcc

SEQ ID NO: 2721934 - DNA, 25 bp, Homo sapien
tccttgaaggcaactctttcttcct

SEQ ID NO: 2721935 - DNA, 25 bp, Homo sapien
actgtttggtctcaggattccttta

SEQ ID NO: 2721936 - DNA, 25 bp, Homo sapien
gacatgcagttctcaaactgtttgg

SEQ ID NO: 2721937 - DNA, 25 bp, Homo sapien
ttcaaaccaagcatactaactccag

SEQ ID NO: 2721938 - DNA, 25 bp, Homo sapien
tccagagcctcggtgcttatccact

SEQ ID NO: 2721939 - DNA, 25 bp, Homo sapien
agctccagtgtgcacacttagaagg

SEQ ID NO: 2721940 - DNA, 25 bp, Homo sapien
aaggatggcctctaggcacatgtgc

SEQ ID NO: 2721941 - DNA, 25 bp, Homo sapien
tctaggcacatgtgcctggaagcct

SEQ ID NO: 2721942 - DNA, 25 bp, Homo sapien
tgtgcacacttagaaggatggcctc

SEQ ID NO: 2721943 - DNA, 25 bp, Homo sapien
caagggcaccatgagtttctgtgca

SEQ ID NO: 2721944 - DNA, 25 bp, Homo sapien
caataatgataccagctgtgttcct

SEQ ID NO: 2721945 - DNA, 25 bp, Homo sapien
actgggcctataagagaagcacagc

SEQ ID NO: 2721946 - DNA, 25 bp, Homo sapien
ctctgcatagctagatgtggaaaca

SEQ ID NO: 2721947 - DNA, 25 bp, Homo sapien
cggaatggaaggttccagcctggca

SEQ ID NO: 2721948 - DNA, 25 bp, Homo sapien
tagagcgttctgtgcaggatgcgcc

SEQ ID NO: 2721949 - DNA, 25 bp, Homo sapien
tccaggaaaggaagagcggtcaagc

SEQ ID NO: 2721950 - DNA, 25 bp, Homo sapien
ttggcatgccttccggcccagggtt

SEQ ID NO: 2721951 - DNA, 25 bp, Homo sapien
caaggagtaccatgcataaggacag

SEQ ID NO: 2721952 - DNA, 25 bp, Homo sapien
tggcttttagggaccacacccaaga

SEQ ID NO: 2721953 - DNA, 25 bp, Homo sapien
gctgcttatctgttccaaggagtac

SEQ ID NO: 2721954 - DNA, 25 bp, Homo sapien
agaagtgcatgcgtctgattcccgc

SEQ ID NO: 2721955 - DNA, 25 bp, Homo sapien
ttttagcggagtcaggaacctagga

SEQ ID NO: 2721956 - DNA, 25 bp, Homo sapien
tactggaaagtggagccttaaatca

SEQ ID NO: 2721957 - DNA, 25 bp, Homo sapien
tacaaagaggtagacagccctcagc

SEQ ID NO: 2721958 - DNA, 25 bp, Homo sapien
tcagatgtgagtccctactggaaag

SEQ ID NO: 2721959 - DNA, 25 bp, Homo sapien
tatagctatatagctcacacaccag

SEQ ID NO: 2721960 - DNA, 25 bp, Homo sapien
tccccaaaatagatcccataaccat

SEQ ID NO: 2721961 - DNA, 25 bp, Homo sapien
gggaatcactgatctacgttctgtc

SEQ ID NO: 2721962 - DNA, 25 bp, Homo sapien
gaaatcatataatcagcggcctttt

SEQ ID NO: 2721963 - DNA, 25 bp, Homo sapien
tttcagagatggtgcaaagacccct

SEQ ID NO: 2721964 - DNA, 25 bp, Homo sapien
gagatggtgcaaagacccctccttg

SEQ ID NO: 2721965 - DNA, 25 bp, Homo sapien
atggtgcaaagacccctccttgcag

SEQ ID NO: 2721966 - DNA, 25 bp, Homo sapien
cttgcagtccaggcctgtcccagcc

SEQ ID NO: 2721967 - DNA, 25 bp, Homo sapien
tctcaaagctgaggatacacatcgg

SEQ ID NO: 2721968 - DNA, 25 bp, Homo sapien
tctgacactgacacaacccatggaa

SEQ ID NO: 2721969 - DNA, 25 bp, Homo sapien
ggtctgacactgacacaacccatgg

SEQ ID NO: 2721970 - DNA, 25 bp, Homo sapien
cccatggaattcagttctcaaagct

SEQ ID NO: 2721971 - DNA, 25 bp, Homo sapien
tgtctggactcatcacaattgggtg

SEQ ID NO: 2721972 - DNA, 25 bp, Homo sapien
taggactgaagacaccgatctctgg

SEQ ID NO: 2721973 - DNA, 25 bp, Homo sapien
ttcatgggacaacaaatcagggctc

SEQ ID NO: 2721974 - DNA, 25 bp, Homo sapien
gaatgagtcactggctaagggtctg

SEQ ID NO: 2721975 - DNA, 25 bp, Homo sapien
aatggagcaagatgcaggttgccat

SEQ ID NO: 2721976 - DNA, 25 bp, Homo sapien
aaatggagcaagatgcaggttgcca

SEQ ID NO: 2721977 - DNA, 25 bp, Homo sapien
tggagcaagatgcaggttgccatgg

SEQ ID NO: 2721978 - DNA, 25 bp, Homo sapien
atggagcaagatgcaggttgccatg

SEQ ID NO: 2721979 - DNA, 25 bp, Homo sapien
tcgaaaaagatggtggctttaggca

SEQ ID NO: 2721980 - DNA, 25 bp, Homo sapien
gggacactcttcgaaaaagatggtg

SEQ ID NO: 2721981 - DNA, 25 bp, Homo sapien
tccacctcttgttggggcctagcct

SEQ ID NO: 2721982 - DNA, 25 bp, Homo sapien
tagcctcgtagagatagtccatcat

SEQ ID NO: 2721983 - DNA, 25 bp, Homo sapien
cacagagagctggagggtggtccac

SEQ ID NO: 2721984 - DNA, 25 bp, Homo sapien
gagcagcccttcaccgtcaatcagg

SEQ ID NO: 2721985 - DNA, 25 bp, Homo sapien
cagcatggagcagcccttcaccgtc

SEQ ID NO: 2721986 - DNA, 25 bp, Homo sapien
catggagcagcccttcaccgtcaat

SEQ ID NO: 2721987 - DNA, 25 bp, Homo sapien
atggagcagcccttcaccgtcaatc

SEQ ID NO: 2721988 - DNA, 25 bp, Homo sapien
gttttccacacttgatcacccctct

SEQ ID NO: 2721989 - DNA, 25 bp, Homo sapien
ttctgcaggccagcggtaccgctat

SEQ ID NO: 2721990 - DNA, 25 bp, Homo sapien
agttctcattgctaaaccactgcat

SEQ ID NO: 2721991 - DNA, 25 bp, Homo sapien
cgctataattaatattcaactggca

SEQ ID NO: 2721992 - DNA, 25 bp, Homo sapien
tgcaggtggcttgaagcagaatgcc

SEQ ID NO: 2721993 - DNA, 25 bp, Homo sapien
cacctgcaagttgattagaactgcc

SEQ ID NO: 2721994 - DNA, 25 bp, Homo sapien
tcccaggcttgacataggtattaag

SEQ ID NO: 2721995 - DNA, 25 bp, Homo sapien
tgaaagctgtaacaccctcagtaat

SEQ ID NO: 2721996 - DNA, 25 bp, Homo sapien
tttaatcatgttgggacagagaaat

SEQ ID NO: 2721997 - DNA, 25 bp, Homo sapien
taggaggccagcacaaagcatatca

SEQ ID NO: 2721998 - DNA, 25 bp, Homo sapien
gatgctagcattggttgataaagaa

SEQ ID NO: 2721999 - DNA, 25 bp, Homo sapien
agcatatcaccaatagatgctagca

SEQ ID NO: 2722000 - DNA, 25 bp, Homo sapien
tagaaagcaccataccagcatgacg

SEQ ID NO: 2722001 - DNA, 25 bp, Homo sapien
ccgtagtccgttcaaaccaatgtga

SEQ ID NO: 2722002 - DNA, 25 bp, Homo sapien
tatctaccacgcaggaatgttctga

SEQ ID NO: 2722003 - DNA, 25 bp, Homo sapien
gatcctgactccactactaagtttg

SEQ ID NO: 2722004 - DNA, 25 bp, Homo sapien
tatgcatccaacgtaaccactttgc

SEQ ID NO: 2722005 - DNA, 25 bp, Homo sapien
ttccaccgagaaattggcacaccac

SEQ ID NO: 2722006 - DNA, 25 bp, Homo sapien
tttcaatatgcatccaacgtaacca

SEQ ID NO: 2722007 - DNA, 25 bp, Homo sapien
ggcacaccactaaaaagctgtaatg

SEQ ID NO: 2722008 - DNA, 25 bp, Homo sapien
tgaaaagggatggacagaagtcagc

SEQ ID NO: 2722009 - DNA, 25 bp, Homo sapien
cagaagtcagcagaatgttcctgca

SEQ ID NO: 2722010 - DNA, 25 bp, Homo sapien
tgagtgaaaagggatggacagaagt

SEQ ID NO: 2722011 - DNA, 25 bp, Homo sapien
agcagaatgttcctgcagacagacc

SEQ ID NO: 2722012 - DNA, 25 bp, Homo sapien
acaagggcttacttagtctctgaag

SEQ ID NO: 2722013 - DNA, 25 bp, Homo sapien
tgtggactgaaaatcagttggattg

SEQ ID NO: 2722014 - DNA, 25 bp, Homo sapien
tgaaaatcagttggattgacgaaag

SEQ ID NO: 2722015 - DNA, 25 bp, Homo sapien
cttttcaggcttgctacaagggctt

SEQ ID NO: 2722016 - DNA, 25 bp, Homo sapien
ggtgaaatcataggacagacagatg

SEQ ID NO: 2722017 - DNA, 25 bp, Homo sapien
ctcaaatccacctccgtgaggagtt

SEQ ID NO: 2722018 - DNA, 25 bp, Homo sapien
tggagggctaccgaataaagagatg

SEQ ID NO: 2722019 - DNA, 25 bp, Homo sapien
ttggcgtcagctgtttcaccggact

SEQ ID NO: 2722020 - DNA, 25 bp, Homo sapien
tctgggctggctttccatcccaaga

SEQ ID NO: 2722021 - DNA, 25 bp, Homo sapien
ggctggctttccatcccaagatggt

SEQ ID NO: 2722022 - DNA, 25 bp, Homo sapien
ccatcccaagatggtttggcttgct

SEQ ID NO: 2722023 - DNA, 25 bp, Homo sapien
ggctttccatcccaagatggtttgg

SEQ ID NO: 2722024 - DNA, 25 bp, Homo sapien
ctgcttccactgtcaaggtgttgct

SEQ ID NO: 2722025 - DNA, 25 bp, Homo sapien
tgttctgtaattagcagagctgctg

SEQ ID NO: 2722026 - DNA, 25 bp, Homo sapien
ctggttgttctgtaattagcagagc

SEQ ID NO: 2722027 - DNA, 25 bp, Homo sapien
cttccactgtcaaggtgttgctcat

SEQ ID NO: 2722028 - DNA, 25 bp, Homo sapien
ggtactgcagtaatctacaccgcat

SEQ ID NO: 2722029 - DNA, 25 bp, Homo sapien
agtcctgggcaagcttattgttctc

SEQ ID NO: 2722030 - DNA, 25 bp, Homo sapien
tacaccgcatgtttcagattcctgc

SEQ ID NO: 2722031 - DNA, 25 bp, Homo sapien
tgttctcgcagcttccaaaagcggt

SEQ ID NO: 2722032 - DNA, 25 bp, Homo sapien
tctggaagttactcctgcaccttga

SEQ ID NO: 2722033 - DNA, 25 bp, Homo sapien
caggagccaggtctactgagagtgg

SEQ ID NO: 2722034 - DNA, 25 bp, Homo sapien
gagccaggtctactgagagtgggca

SEQ ID NO: 2722035 - DNA, 25 bp, Homo sapien
agctggcatctggaagttactcctg

SEQ ID NO: 2722036 - DNA, 25 bp, Homo sapien
caggaagtccagtgttaaactcttc

SEQ ID NO: 2722037 - DNA, 25 bp, Homo sapien
tgttctttcttccaggaagtccagt

SEQ ID NO: 2722038 - DNA, 25 bp, Homo sapien
aagtccagtgttaaactcttcatca

SEQ ID NO: 2722039 - DNA, 25 bp, Homo sapien
ggaagtccagtgttaaactcttcat

SEQ ID NO: 2722040 - DNA, 25 bp, Homo sapien
cttgactcccatgttccaaaacatg

SEQ ID NO: 2722041 - DNA, 25 bp, Homo sapien
ttgactcccatgttccaaaacatga

SEQ ID NO: 2722042 - DNA, 25 bp, Homo sapien
tgactcccatgttccaaaacatgac

SEQ ID NO: 2722043 - DNA, 25 bp, Homo sapien
gactcccatgttccaaaacatgacc

SEQ ID NO: 2722044 - DNA, 25 bp, Homo sapien
ggtctgactgataaacacggccacg

SEQ ID NO: 2722045 - DNA, 25 bp, Homo sapien
gctacagatcacgaacagagttgcg

SEQ ID NO: 2722046 - DNA, 25 bp, Homo sapien
tagagtttgacttggctgcgtgcag

SEQ ID NO: 2722047 - DNA, 25 bp, Homo sapien
gccacggctagtgacttctgcagaa

SEQ ID NO: 2722048 - DNA, 25 bp, Homo sapien
aattggtatcttagctgaacaagcc

SEQ ID NO: 2722049 - DNA, 25 bp, Homo sapien
tattaggtgactttgctggaagact

SEQ ID NO: 2722050 - DNA, 25 bp, Homo sapien
gaacaagccccacaatgctaccatg

SEQ ID NO: 2722051 - DNA, 25 bp, Homo sapien
tatagccagcttctgtacacatccg

SEQ ID NO: 2722052 - DNA, 25 bp, Homo sapien
tcccttggtagccttgtggaagaca

SEQ ID NO: 2722053 - DNA, 25 bp, Homo sapien
cccttggtagccttgtggaagacaa

SEQ ID NO: 2722054 - DNA, 25 bp, Homo sapien
taaagttagcaatgagtgtgtcaac

SEQ ID NO: 2722055 - DNA, 25 bp, Homo sapien
tgtttaaagtcagtaaagttagcaa

SEQ ID NO: 2722056 - DNA, 25 bp, Homo sapien
gaggtacctgtgtgaggagtccact

SEQ ID NO: 2722057 - DNA, 25 bp, Homo sapien
gggaggtacctgtgtgaggagtcca

SEQ ID NO: 2722058 - DNA, 25 bp, Homo sapien
aggtacctgtgtgaggagtccactc

SEQ ID NO: 2722059 - DNA, 25 bp, Homo sapien
gtgggaggtacctgtgtgaggagtc

SEQ ID NO: 2722060 - DNA, 25 bp, Homo sapien
aattaattggtgtaggagatttcat

SEQ ID NO: 2722061 - DNA, 25 bp, Homo sapien
acctgttaaattgacaaattttatg

SEQ ID NO: 2722062 - DNA, 25 bp, Homo sapien
tcttccattcctccataccattttt

SEQ ID NO: 2722063 - DNA, 25 bp, Homo sapien
aaccttggtcacaattttatctcct

SEQ ID NO: 2722064 - DNA, 25 bp, Homo sapien
gtgtgaacaatgaaaccttggtcac

SEQ ID NO: 2722065 - DNA, 25 bp, Homo sapien
caaggttgaaatccaattccatttt

SEQ ID NO: 2722066 - DNA, 25 bp, Homo sapien
ccccaaggttgaaatccaattccat

SEQ ID NO: 2722067 - DNA, 25 bp, Homo sapien
ccaaggttgaaatccaattccattt

SEQ ID NO: 2722068 - DNA, 25 bp, Homo sapien
cccaaggttgaaatccaattccatt

SEQ ID NO: 2722069 - DNA, 25 bp, Homo sapien
cctcagcaactgcaaacataggtag

SEQ ID NO: 2722070 - DNA, 25 bp, Homo sapien
ggagacctggcagtctggtaacaca

SEQ ID NO: 2722071 - DNA, 25 bp, Homo sapien
tgccacctggcaaagtagcatgagg

SEQ ID NO: 2722072 - DNA, 25 bp, Homo sapien
ggcaaagtagcatgaggacaagttg

SEQ ID NO: 2722073 - DNA, 25 bp, Homo sapien
ctgctgagggcagagtaagtgatcc

SEQ ID NO: 2722074 - DNA, 25 bp, Homo sapien
tcctgctgagggcagagtaagtgat

SEQ ID NO: 2722075 - DNA, 25 bp, Homo sapien
cctgctgagggcagagtaagtgatc

SEQ ID NO: 2722076 - DNA, 25 bp, Homo sapien
ctttcagatcaccattgtgttcctg

SEQ ID NO: 2722077 - DNA, 25 bp, Homo sapien
aattctttgccagataaattggctt

SEQ ID NO: 2722078 - DNA, 25 bp, Homo sapien
cagtgcctgcccttctctatcagag

SEQ ID NO: 2722079 - DNA, 25 bp, Homo sapien
aagagcatccttcctcatagtctgg

SEQ ID NO: 2722080 - DNA, 25 bp, Homo sapien
aattggcttcttacagtgctgaaaa

SEQ ID NO: 2722081 - DNA, 25 bp, Homo sapien
gcagtcccatagtaactgcttctag

SEQ ID NO: 2722082 - DNA, 25 bp, Homo sapien
tagtaactgcttctagtgccagtgt

SEQ ID NO: 2722083 - DNA, 25 bp, Homo sapien
tctagtgccagtgtggcctccatga

SEQ ID NO: 2722084 - DNA, 25 bp, Homo sapien
tcccatagtaactgcttctagtgcc

SEQ ID NO: 2722085 - DNA, 25 bp, Homo sapien
cacacgtacacttgcacgtatactc

SEQ ID NO: 2722086 - DNA, 25 bp, Homo sapien
ctgtgttctataccagcatgctgta

SEQ ID NO: 2722087 - DNA, 25 bp, Homo sapien
ccagcatgctgtaaaccacacgaca

SEQ ID NO: 2722088 - DNA, 25 bp, Homo sapien
acttgcacgtatactcagacacagc

SEQ ID NO: 2722089 - DNA, 25 bp, Homo sapien
gttagcgacccgagatggctgccaa

SEQ ID NO: 2722090 - DNA, 25 bp, Homo sapien
ccaagacatcgcagttggcctcaga

SEQ ID NO: 2722091 - DNA, 25 bp, Homo sapien
agctagcggaagctactgggatttc

SEQ ID NO: 2722092 - DNA, 25 bp, Homo sapien
tgccaagtgtaaagagagctagcgg

SEQ ID NO: 2722093 - DNA, 25 bp, Homo sapien
attgattccaattgtatattttggt

SEQ ID NO: 2722094 - DNA, 25 bp, Homo sapien
ggcctttggatctgaaaaatgtagt

SEQ ID NO: 2722095 - DNA, 25 bp, Homo sapien
tcccaggcctttggatctgaaaaat

SEQ ID NO: 2722096 - DNA, 25 bp, Homo sapien
cagggtgcttggcagtagattaggt

SEQ ID NO: 2722097 - DNA, 25 bp, Homo sapien
ttttctgtaggttgccagaattcca

SEQ ID NO: 2722098 - DNA, 25 bp, Homo sapien
gacatgaatgatcattgcaacttaa

SEQ ID NO: 2722099 - DNA, 25 bp, Homo sapien
aaagctcagatcttcaagttgccct

SEQ ID NO: 2722100 - DNA, 25 bp, Homo sapien
gaattccaagacatgaatgatcatt

SEQ ID NO: 2722101 - DNA, 25 bp, Homo sapien
ttcttcaccctgcaagcgattttgg

SEQ ID NO: 2722102 - DNA, 25 bp, Homo sapien
ggccagaactgatgccatactcatc

SEQ ID NO: 2722103 - DNA, 25 bp, Homo sapien
caggggctggcccatgtcacacaac

SEQ ID NO: 2722104 - DNA, 25 bp, Homo sapien
tccacagtcccatgatatctccatt

SEQ ID NO: 2722105 - DNA, 25 bp, Homo sapien
ttttaatgcagacctaagggtcacc

SEQ ID NO: 2722106 - DNA, 25 bp, Homo sapien
tctcacatcattgtttgcattgcca

SEQ ID NO: 2722107 - DNA, 25 bp, Homo sapien
cacttgaactagatgcatttctgtg

SEQ ID NO: 2722108 - DNA, 25 bp, Homo sapien
cccagaacatggaagcttaaccaat

SEQ ID NO: 2722109 - DNA, 25 bp, Homo sapien
tattgggtatggaatgtgttgagca

SEQ ID NO: 2722110 - DNA, 25 bp, Homo sapien
ggcagcttaaaggtcatcgtggtgt

SEQ ID NO: 2722111 - DNA, 25 bp, Homo sapien
ttcagataagaaggtttggcaaaca

SEQ ID NO: 2722112 - DNA, 25 bp, Homo sapien
catcgtggtgtattgggtatggaat

SEQ ID NO: 2722113 - DNA, 25 bp, Homo sapien
atctgtgggtccgatgagggcatct

SEQ ID NO: 2722114 - DNA, 25 bp, Homo sapien
accctcccatctgtgggtccgatga

SEQ ID NO: 2722115 - DNA, 25 bp, Homo sapien
cagaacctttgcctgagttggtctg

SEQ ID NO: 2722116 - DNA, 25 bp, Homo sapien
ccacaaaacctactggcatgcatgc

SEQ ID NO: 2722117 - DNA, 25 bp, Homo sapien
ccttggtagagccatgacaggtttc

SEQ ID NO: 2722118 - DNA, 25 bp, Homo sapien
aggatgcccacagctcatgcaccaa

SEQ ID NO: 2722119 - DNA, 25 bp, Homo sapien
cttcatgaccttggtagagccatga

SEQ ID NO: 2722120 - DNA, 25 bp, Homo sapien
catgacaggtttcctccaaggatgc

SEQ ID NO: 2722121 - DNA, 25 bp, Homo sapien
tccactcagttttggtgaagacctc

SEQ ID NO: 2722122 - DNA, 25 bp, Homo sapien
gacaaagtctctcacgtgtgtcctt

SEQ ID NO: 2722123 - DNA, 25 bp, Homo sapien
gcttcatagaagtccacatccaagg

SEQ ID NO: 2722124 - DNA, 25 bp, Homo sapien
ggcagtgtcactttgatccccttca

SEQ ID NO: 2722125 - DNA, 25 bp, Homo sapien
ccaatatgacagtatagtgacttct

SEQ ID NO: 2722126 - DNA, 25 bp, Homo sapien
tctgatccatcaaccgggctccaat

SEQ ID NO: 2722127 - DNA, 25 bp, Homo sapien
aggatggagattctccagacaggcc

SEQ ID NO: 2722128 - DNA, 25 bp, Homo sapien
gacaggccaatctcatcatatttaa

SEQ ID NO: 2722129 - DNA, 25 bp, Homo sapien
ggaatggcagatcgaggcttccatg

SEQ ID NO: 2722130 - DNA, 25 bp, Homo sapien
ggccatatgtttgagtcgagggact

SEQ ID NO: 2722131 - DNA, 25 bp, Homo sapien
aatgtatgttgagacttgactgaac

SEQ ID NO: 2722132 - DNA, 25 bp, Homo sapien
gcttctagagttaagtttgccaaaa

SEQ ID NO: 2722133 - DNA, 25 bp, Homo sapien
ttagccctcgcaagtgaagggctca

SEQ ID NO: 2722134 - DNA, 25 bp, Homo sapien
caagtgaagggctcacaagctggtg

SEQ ID NO: 2722135 - DNA, 25 bp, Homo sapien
acatcgctctatgacctcagaagtc

SEQ ID NO: 2722136 - DNA, 25 bp, Homo sapien
agaacacatcgctctatgacctcag

SEQ ID NO: 2722137 - DNA, 25 bp, Homo sapien
aagagcagagatggcttcttcaggc

SEQ ID NO: 2722138 - DNA, 25 bp, Homo sapien
gcgaatgagtacagacttttccaca

SEQ ID NO: 2722139 - DNA, 25 bp, Homo sapien
ggagcatcggggcttttaagtacag

SEQ ID NO: 2722140 - DNA, 25 bp, Homo sapien
tgccttttcgcctccggatgccaat

SEQ ID NO: 2722141 - DNA, 25 bp, Homo sapien
accagtcttccagtcaggttccacc

SEQ ID NO: 2722142 - DNA, 25 bp, Homo sapien
cagtcttccagtcaggttccacctc

SEQ ID NO: 2722143 - DNA, 25 bp, Homo sapien
ccagtcttccagtcaggttccacct

SEQ ID NO: 2722144 - DNA, 25 bp, Homo sapien
catgtcaagaaatccctgcatgtct

SEQ ID NO: 2722145 - DNA, 25 bp, Homo sapien
gaacatgctgcaccataaagctaca

SEQ ID NO: 2722146 - DNA, 25 bp, Homo sapien
taaagctacaggcagcatgtcaaga

SEQ ID NO: 2722147 - DNA, 25 bp, Homo sapien
acctggtccgcagaacatgctgcac

SEQ ID NO: 2722148 - DNA, 25 bp, Homo sapien
taaagtttggttcctgtgtcatccc

SEQ ID NO: 2722149 - DNA, 25 bp, Homo sapien
ggagctatgccctgagtattgtgaa

SEQ ID NO: 2722150 - DNA, 25 bp, Homo sapien
ccctgacttgtgagtaagatggcaa

SEQ ID NO: 2722151 - DNA, 25 bp, Homo sapien
agatggcaaatacttggagctatgc

SEQ ID NO: 2722152 - DNA, 25 bp, Homo sapien
ttattgtcaaaatatccacagtggc

SEQ ID NO: 2722153 - DNA, 25 bp, Homo sapien
agcacagtttattgtcaaaatatcc

SEQ ID NO: 2722154 - DNA, 25 bp, Homo sapien
aatatccacagtggcttcagtggtt

SEQ ID NO: 2722155 - DNA, 25 bp, Homo sapien
tttagcacagtttattgtcaaaata

SEQ ID NO: 2722156 - DNA, 25 bp, Homo sapien
gtctcagttgctatattttcttcac

SEQ ID NO: 2722157 - DNA, 25 bp, Homo sapien
tccatattccttggacttcctcagt

SEQ ID NO: 2722158 - DNA, 25 bp, Homo sapien
aaaaggacttaaagtctcagttgct

SEQ ID NO: 2722159 - DNA, 25 bp, Homo sapien
aaaatcatcctgtgcctgctcactg

SEQ ID NO: 2722160 - DNA, 25 bp, Homo sapien
gatcaatttcaacaatctttcgata

SEQ ID NO: 2722161 - DNA, 25 bp, Homo sapien
caatttcaacaatctttcgatacag

SEQ ID NO: 2722162 - DNA, 25 bp, Homo sapien
atttcaacaatctttcgatacagta

SEQ ID NO: 2722163 - DNA, 25 bp, Homo sapien
tcaagatcaatttcaacaatctttc

SEQ ID NO: 2722164 - DNA, 25 bp, Homo sapien
gaaacattcaatagattgttgcaaa

SEQ ID NO: 2722165 - DNA, 25 bp, Homo sapien
tagaaacattcaatagattgttgca

SEQ ID NO: 2722166 - DNA, 25 bp, Homo sapien
aaacattcaatagattgttgcaaat

SEQ ID NO: 2722167 - DNA, 25 bp, Homo sapien
ctagaaacattcaatagattgttgc

SEQ ID NO: 2722168 - DNA, 25 bp, Homo sapien
ggttgcgcatccctttggtctggtg

SEQ ID NO: 2722169 - DNA, 25 bp, Homo sapien
catcggctcccattctggttgcgca

SEQ ID NO: 2722170 - DNA, 25 bp, Homo sapien
gcatccagctagaattcatcatcgg

SEQ ID NO: 2722171 - DNA, 25 bp, Homo sapien
ttcaaaggtcaaagggtaaatctca

SEQ ID NO: 2722172 - DNA, 25 bp, Homo sapien
tggaactaaagccagacttcttgaa

SEQ ID NO: 2722173 - DNA, 25 bp, Homo sapien
tgcatttcaacacaatatccaggtg

SEQ ID NO: 2722174 - DNA, 25 bp, Homo sapien
gaagtccaaagctaaatctacaaga

SEQ ID NO: 2722175 - DNA, 25 bp, Homo sapien
tccaggtgacttgtacacattagga

SEQ ID NO: 2722176 - DNA, 25 bp, Homo sapien
ccttggaaagccctcttgtaggagg

SEQ ID NO: 2722177 - DNA, 25 bp, Homo sapien
agagaggctctgctcgagttctgca

SEQ ID NO: 2722178 - DNA, 25 bp, Homo sapien
tgaacaatacaagagacctaatcag

SEQ ID NO: 2722179 - DNA, 25 bp, Homo sapien
agagacctaatcagtctccttggaa

SEQ ID NO: 2722180 - DNA, 25 bp, Homo sapien
ggagcttctattactgccacacagt

SEQ ID NO: 2722181 - DNA, 25 bp, Homo sapien
ttctattactgccacacagtgtgag

SEQ ID NO: 2722182 - DNA, 25 bp, Homo sapien
cgcgtagtataatttgccaggattc

SEQ ID NO: 2722183 - DNA, 25 bp, Homo sapien
agtgtgagtactgaaaattagtccg

SEQ ID NO: 2722184 - DNA, 25 bp, Homo sapien
taagtttcctgtctccgtcttgatg

SEQ ID NO: 2722185 - DNA, 25 bp, Homo sapien
tctccgtcttgatgacttgtcttct

SEQ ID NO: 2722186 - DNA, 25 bp, Homo sapien
ttccctctccggtaatgtataacat

SEQ ID NO: 2722187 - DNA, 25 bp, Homo sapien
ccctctccggtaatgtataacatga

SEQ ID NO: 2722188 - DNA, 25 bp, Homo sapien
ataagtcttaacttgtgttacatag

SEQ ID NO: 2722189 - DNA, 25 bp, Homo sapien
tacatagtcagtggaaaatgagttt

SEQ ID NO: 2722190 - DNA, 25 bp, Homo sapien
aacttgtgttacatagtcagtggaa

SEQ ID NO: 2722191 - DNA, 25 bp, Homo sapien
ggggcatctgttataagtcttaact

SEQ ID NO: 2722192 - DNA, 25 bp, Homo sapien
gagcatcttgctctaagcagttcat

SEQ ID NO: 2722193 - DNA, 25 bp, Homo sapien
gcacaaagcctttggcgtagagcct

SEQ ID NO: 2722194 - DNA, 25 bp, Homo sapien
ctgaatgatgctgatgactttgaca

SEQ ID NO: 2722195 - DNA, 25 bp, Homo sapien
acaatgatgaggataataggtgtca

SEQ ID NO: 2722196 - DNA, 25 bp, Homo sapien
ttgctttgttagcttgccagatggg

SEQ ID NO: 2722197 - DNA, 25 bp, Homo sapien
ccagatggggatctgaggtccgaga

SEQ ID NO: 2722198 - DNA, 25 bp, Homo sapien
aggtccgagaggtagggattgagcc

SEQ ID NO: 2722199 - DNA, 25 bp, Homo sapien
ttgagccgtggggtgcctcctcaca

SEQ ID NO: 2722200 - DNA, 25 bp, Homo sapien
ccaacagtggtgtaagggggcatcc

SEQ ID NO: 2722201 - DNA, 25 bp, Homo sapien
caccaacagtggtgtaagggggcat

SEQ ID NO: 2722202 - DNA, 25 bp, Homo sapien
catttagtatggtactagctgtgaa

SEQ ID NO: 2722203 - DNA, 25 bp, Homo sapien
gtatggtactagctgtgaatctgtc

SEQ ID NO: 2722204 - DNA, 25 bp, Homo sapien
cagagcaaactgactggtcatcagg

SEQ ID NO: 2722205 - DNA, 25 bp, Homo sapien
actggtcatcagggtttagtggcaa

SEQ ID NO: 2722206 - DNA, 25 bp, Homo sapien
gtcatcagggtttagtggcaactga

SEQ ID NO: 2722207 - DNA, 25 bp, Homo sapien
atcagggtttagtggcaactgacac

SEQ ID NO: 2722208 - DNA, 25 bp, Homo sapien
aggtttgtcttgactgagctaagtc

SEQ ID NO: 2722209 - DNA, 25 bp, Homo sapien
caggtttgtcttgactgagctaagt

SEQ ID NO: 2722210 - DNA, 25 bp, Homo sapien
tcaggtttgtcttgactgagctaag

SEQ ID NO: 2722211 - DNA, 25 bp, Homo sapien
gtttgtcttgactgagctaagtcac

SEQ ID NO: 2722212 - DNA, 25 bp, Homo sapien
cacctccatggtttatgggaatctt

SEQ ID NO: 2722213 - DNA, 25 bp, Homo sapien
gggaatcttcaggaaggaatagaac

SEQ ID NO: 2722214 - DNA, 25 bp, Homo sapien
agtcacctccatggtttatgggaat

SEQ ID NO: 2722215 - DNA, 25 bp, Homo sapien
cctccatggtttatgggaatcttca

SEQ ID NO: 2722216 - DNA, 25 bp, Homo sapien
tagaggtgaagataaagaaccccga

SEQ ID NO: 2722217 - DNA, 25 bp, Homo sapien
gctaattcaccaggaagcaccatct

SEQ ID NO: 2722218 - DNA, 25 bp, Homo sapien
ggatttgtgcaaaagtcttaataga

SEQ ID NO: 2722219 - DNA, 25 bp, Homo sapien
tcagaagcagctaattcaccaggaa

SEQ ID NO: 2722220 - DNA, 25 bp, Homo sapien
gaaggagcagttaagaaaatctttg

SEQ ID NO: 2722221 - DNA, 25 bp, Homo sapien
aaactgctgatggtgttttcctacc

SEQ ID NO: 2722222 - DNA, 25 bp, Homo sapien
tgttttcctacccacaacctggtga

SEQ ID NO: 2722223 - DNA, 25 bp, Homo sapien
agctggcagagaacccaaccattgt

SEQ ID NO: 2722224 - DNA, 25 bp, Homo sapien
tttcaaacatcacaacagccatggc

SEQ ID NO: 2722225 - DNA, 25 bp, Homo sapien
tcacaacagccatggctgtcagtgg

SEQ ID NO: 2722226 - DNA, 25 bp, Homo sapien
caaacatcacaacagccatggctgt

SEQ ID NO: 2722227 - DNA, 25 bp, Homo sapien
catcacaacagccatggctgtcagt

SEQ ID NO: 2722228 - DNA, 25 bp, Homo sapien
atcccacatgttttgccatgtagta

SEQ ID NO: 2722229 - DNA, 25 bp, Homo sapien
ccttttaaggatagcgttagctgta

SEQ ID NO: 2722230 - DNA, 25 bp, Homo sapien
taatagataagatttgaacaccaac

SEQ ID NO: 2722231 - DNA, 25 bp, Homo sapien
taatatatcccacacgtttgaatat

SEQ ID NO: 2722232 - DNA, 25 bp, Homo sapien
taataaaggccggtccactatcaga

SEQ ID NO: 2722233 - DNA, 25 bp, Homo sapien
cgtagaggtgggaagcccaaactga

SEQ ID NO: 2722234 - DNA, 25 bp, Homo sapien
cactatcagactgcgtagaggtggg

SEQ ID NO: 2722235 - DNA, 25 bp, Homo sapien
cgcttaataaaaaggagcgcctata

SEQ ID NO: 2722236 - DNA, 25 bp, Homo sapien
ggatcatagggtagacatcttccca

SEQ ID NO: 2722237 - DNA, 25 bp, Homo sapien
taaccctcagtggaaacatattagg

SEQ ID NO: 2722238 - DNA, 25 bp, Homo sapien
tcttgaattttcaatcggcctggat

SEQ ID NO: 2722239 - DNA, 25 bp, Homo sapien
caaatggctggccttgtaaacaaag

SEQ ID NO: 2722240 - DNA, 25 bp, Homo sapien
gcaacatcatcaaaataggtcttac

SEQ ID NO: 2722241 - DNA, 25 bp, Homo sapien
cataaagaaagagcagtggaatgcg

SEQ ID NO: 2722242 - DNA, 25 bp, Homo sapien
tacattctagcattaggaacacaca

SEQ ID NO: 2722243 - DNA, 25 bp, Homo sapien
cttcatactcaacaagaaaaatggc

SEQ ID NO: 2722244 - DNA, 25 bp, Homo sapien
ccaagccactaatgatgcttaggat

SEQ ID NO: 2722245 - DNA, 25 bp, Homo sapien
gactaccttgcaattctgcgaatga

SEQ ID NO: 2722246 - DNA, 25 bp, Homo sapien
tgatactctgacacaagtgcgtgga

SEQ ID NO: 2722247 - DNA, 25 bp, Homo sapien
taggattgcaatccgactaccttgc

SEQ ID NO: 2722248 - DNA, 25 bp, Homo sapien
tcaggaacaaagagtgcctctctgt

SEQ ID NO: 2722249 - DNA, 25 bp, Homo sapien
tcaggagccctgtgcacgttttcca

SEQ ID NO: 2722250 - DNA, 25 bp, Homo sapien
gcatctctggtttgctcaggagccc

SEQ ID NO: 2722251 - DNA, 25 bp, Homo sapien
taggacctaaagcaggcttcaggaa

SEQ ID NO: 2722252 - DNA, 25 bp, Homo sapien
aattcatgaccacaagccacctagg

SEQ ID NO: 2722253 - DNA, 25 bp, Homo sapien
cacctaggccttggacgttgctgga

SEQ ID NO: 2722254 - DNA, 25 bp, Homo sapien
ttttcaaggaggcaaagctgtttcc

SEQ ID NO: 2722255 - DNA, 25 bp, Homo sapien
gacagtcacacataatggtgcccta

SEQ ID NO: 2722256 - DNA, 25 bp, Homo sapien
ttaagatttttagccctgctgaaag

SEQ ID NO: 2722257 - DNA, 25 bp, Homo sapien
gatttttagccctgctgaaagtttc

SEQ ID NO: 2722258 - DNA, 25 bp, Homo sapien
tcttaagatttttagccctgctgaa

SEQ ID NO: 2722259 - DNA, 25 bp, Homo sapien
tggtcttaagatttttagccctgct

SEQ ID NO: 2722260 - DNA, 25 bp, Homo sapien
catgttaaattttccggtgagtaat

SEQ ID NO: 2722261 - DNA, 25 bp, Homo sapien
tccatgttaaattttccggtgagta

SEQ ID NO: 2722262 - DNA, 25 bp, Homo sapien
ctcttccatgttaaattttccggtg

SEQ ID NO: 2722263 - DNA, 25 bp, Homo sapien
cttccatgttaaattttccggtgag

SEQ ID NO: 2722264 - DNA, 25 bp, Homo sapien
gccctttcacactgtggcactggta

SEQ ID NO: 2722265 - DNA, 25 bp, Homo sapien
gtggcttcaaatgttcccctttctg

SEQ ID NO: 2722266 - DNA, 25 bp, Homo sapien
cacactgtggcactggtaactgaca

SEQ ID NO: 2722267 - DNA, 25 bp, Homo sapien
tttattgctgtagttaattgtgttc

SEQ ID NO: 2722268 - DNA, 25 bp, Homo sapien
tatctctgagtaagttggactggcc

SEQ ID NO: 2722269 - DNA, 25 bp, Homo sapien
tcagtcaatctcagccatagtggga

SEQ ID NO: 2722270 - DNA, 25 bp, Homo sapien
tcataggccttcacagggatacaca

SEQ ID NO: 2722271 - DNA, 25 bp, Homo sapien
tccacttagggcgtgtgaactgctt

SEQ ID NO: 2722272 - DNA, 25 bp, Homo sapien
cgtgaatgtattcctcatatgagcc

SEQ ID NO: 2722273 - DNA, 25 bp, Homo sapien
ggtactgaacgtgaatgtattcctc

SEQ ID NO: 2722274 - DNA, 25 bp, Homo sapien
tcaaaccaggtactgaacgtgaatg

SEQ ID NO: 2722275 - DNA, 25 bp, Homo sapien
agcatttacttcaaaccaggtactg

SEQ ID NO: 2722276 - DNA, 25 bp, Homo sapien
gatgaagttaccaaggaggagaaaa

SEQ ID NO: 2722277 - DNA, 25 bp, Homo sapien
cagatgaagttaccaaggaggagaa

SEQ ID NO: 2722278 - DNA, 25 bp, Homo sapien
ggcagatgaagttaccaaggaggag

SEQ ID NO: 2722279 - DNA, 25 bp, Homo sapien
aaatgctgtgtccaccacatgggtg

SEQ ID NO: 2722280 - DNA, 25 bp, Homo sapien
catcattatccctttgagtttcttg

SEQ ID NO: 2722281 - DNA, 25 bp, Homo sapien
ttcttgattctatattgagcatcaa

SEQ ID NO: 2722282 - DNA, 25 bp, Homo sapien
ggctgcacaaacatcattatccctt

SEQ ID NO: 2722283 - DNA, 25 bp, Homo sapien
ttgagtttcttgattctatattgag

SEQ ID NO: 2722284 - DNA, 25 bp, Homo sapien
tatctgggaaataccactcaacatt

SEQ ID NO: 2722285 - DNA, 25 bp, Homo sapien
tctattatctgggaaataccactca

SEQ ID NO: 2722286 - DNA, 25 bp, Homo sapien
tctctcgtgtgtacagaatcttcta

SEQ ID NO: 2722287 - DNA, 25 bp, Homo sapien
tagttcccatctctcgtgtgtacag

SEQ ID NO: 2722288 - DNA, 25 bp, Homo sapien
tatacggtcccggtacctctgtcta

SEQ ID NO: 2722289 - DNA, 25 bp, Homo sapien
tgtctacggcaatttcttttcagta

SEQ ID NO: 2722290 - DNA, 25 bp, Homo sapien
cttttcagtagtacgtatgagtaat

SEQ ID NO: 2722291 - DNA, 25 bp, Homo sapien
gtatgagtaataattagaaggaggc

SEQ ID NO: 2722292 - DNA, 25 bp, Homo sapien
tgatgttttggtacgccgtgcgcat

SEQ ID NO: 2722293 - DNA, 25 bp, Homo sapien
ttgatgttttggtacgccgtgcgca

SEQ ID NO: 2722294 - DNA, 25 bp, Homo sapien
ccctggagcggagggaagacttctt

SEQ ID NO: 2722295 - DNA, 25 bp, Homo sapien
agaacacagtgcctccggaggtgag

SEQ ID NO: 2722296 - DNA, 25 bp, Homo sapien
taaactcaggagtacccggagagcc

SEQ ID NO: 2722297 - DNA, 25 bp, Homo sapien
agccgctggtgtggactccggttcc

SEQ ID NO: 2722298 - DNA, 25 bp, Homo sapien
tgagaggctgcaccaacataaccat

SEQ ID NO: 2722299 - DNA, 25 bp, Homo sapien
ttgagaggctgcaccaacataacca

SEQ ID NO: 2722300 - DNA, 25 bp, Homo sapien
cttgagaggctgcaccaacataacc

SEQ ID NO: 2722301 - DNA, 25 bp, Homo sapien
tgcactgtgtttaaggttactacct

SEQ ID NO: 2722302 - DNA, 25 bp, Homo sapien
ctaggatcatgactatctggttcct

SEQ ID NO: 2722303 - DNA, 25 bp, Homo sapien
ctgtgtttaaggttactacctggag

SEQ ID NO: 2722304 - DNA, 25 bp, Homo sapien
ggttcctacatggaagcctgtatct

SEQ ID NO: 2722305 - DNA, 25 bp, Homo sapien
tgctacagaatcaggttcttttatc

SEQ ID NO: 2722306 - DNA, 25 bp, Homo sapien
ctacagaatcaggttcttttatctt

SEQ ID NO: 2722307 - DNA, 25 bp, Homo sapien
ttctgctacagaatcaggttctttt

SEQ ID NO: 2722308 - DNA, 25 bp, Homo sapien
atttctgctacagaatcaggttctt

SEQ ID NO: 2722309 - DNA, 25 bp, Homo sapien
catcttgcaagccacctttctcatg

SEQ ID NO: 2722310 - DNA, 25 bp, Homo sapien
gatgcatcttgcaagccacctttct

SEQ ID NO: 2722311 - DNA, 25 bp, Homo sapien
tttttttgaatgtcttaggctgtag

SEQ ID NO: 2722312 - DNA, 25 bp, Homo sapien
aggatgcatcttgcaagccaccttt

SEQ ID NO: 2722313 - DNA, 25 bp, Homo sapien
tctcaaggttccagtaacctgtgtg

SEQ ID NO: 2722314 - DNA, 25 bp, Homo sapien
gagctgtgttctcaaggttccagta

SEQ ID NO: 2722315 - DNA, 25 bp, Homo sapien
aaggttccagtaacctgtgtgtgta

SEQ ID NO: 2722316 - DNA, 25 bp, Homo sapien
tgttctcaaggttccagtaacctgt

SEQ ID NO: 2722317 - DNA, 25 bp, Homo sapien
caggcttcctgataccgctttatgt

SEQ ID NO: 2722318 - DNA, 25 bp, Homo sapien
ggcttcctgataccgctttatgtgc

SEQ ID NO: 2722319 - DNA, 25 bp, Homo sapien
gcttcctgataccgctttatgtgca

SEQ ID NO: 2722320 - DNA, 25 bp, Homo sapien
ctcaggcttcctgataccgctttat

SEQ ID NO: 2722321 - DNA, 25 bp, Homo sapien
gaagtcggtgtggtgattccttaag

SEQ ID NO: 2722322 - DNA, 25 bp, Homo sapien
tcggtgtggtgattccttaaggatc

SEQ ID NO: 2722323 - DNA, 25 bp, Homo sapien
agtcggtgtggtgattccttaagga

SEQ ID NO: 2722324 - DNA, 25 bp, Homo sapien
ggaagtcggtgtggtgattccttaa

SEQ ID NO: 2722325 - DNA, 25 bp, Homo sapien
caggagtctgtaaagtagagaccac

SEQ ID NO: 2722326 - DNA, 25 bp, Homo sapien
acccaggagtctgtaaagtagagac

SEQ ID NO: 2722327 - DNA, 25 bp, Homo sapien
gacccaggagtctgtaaagtagaga

SEQ ID NO: 2722328 - DNA, 25 bp, Homo sapien
caaaatgcttcgaaggagagctaca

SEQ ID NO: 2722329 - DNA, 25 bp, Homo sapien
ctattgagtcaaaatgcttcgaagg

SEQ ID NO: 2722330 - DNA, 25 bp, Homo sapien
ggccctctgcatcattgctacaaaa

SEQ ID NO: 2722331 - DNA, 25 bp, Homo sapien
ggagagctacattgacattggccct

SEQ ID NO: 2722332 - DNA, 25 bp, Homo sapien
ggtagccagtatagttgtatcagtg

SEQ ID NO: 2722333 - DNA, 25 bp, Homo sapien
cattgatggcagagtaattaagttc

SEQ ID NO: 2722334 - DNA, 25 bp, Homo sapien
catttgccggctgtaggtagccagt

SEQ ID NO: 2722335 - DNA, 25 bp, Homo sapien
tgggctctgggcaatcagaacattt

SEQ ID NO: 2722336 - DNA, 25 bp, Homo sapien
tgtagttccaaagcctcactattca

SEQ ID NO: 2722337 - DNA, 25 bp, Homo sapien
ctgccttgagcttctgtagttccaa

SEQ ID NO: 2722338 - DNA, 25 bp, Homo sapien
ttctgtagttccaaagcctcactat

SEQ ID NO: 2722339 - DNA, 25 bp, Homo sapien
ttagaactttctgccttgagcttct

SEQ ID NO: 2722340 - DNA, 25 bp, Homo sapien
ctgctttatattgacttcctgtgtt

SEQ ID NO: 2722341 - DNA, 25 bp, Homo sapien
tgaacaggttcagcaatcgatggct

SEQ ID NO: 2722342 - DNA, 25 bp, Homo sapien
agcaatcgatggctcttttgtgtct

SEQ ID NO: 2722343 - DNA, 25 bp, Homo sapien
ttttgtgcctttgaaggtaggagtg

SEQ ID NO: 2722344 - DNA, 25 bp, Homo sapien
ggaattcaaattctacaaaggccat

SEQ ID NO: 2722345 - DNA, 25 bp, Homo sapien
ctttggaattcaaattctacaaagg

SEQ ID NO: 2722346 - DNA, 25 bp, Homo sapien
ttggaattcaaattctacaaaggcc

SEQ ID NO: 2722347 - DNA, 25 bp, Homo sapien
tggaattcaaattctacaaaggcca

SEQ ID NO: 2722348 - DNA, 25 bp, Homo sapien
gcagaattcaccctcctagggtcgt

SEQ ID NO: 2722349 - DNA, 25 bp, Homo sapien
gcctcaagtcagtaatccaatagat

SEQ ID NO: 2722350 - DNA, 25 bp, Homo sapien
tccaatagataaagaggttgcctaa

SEQ ID NO: 2722351 - DNA, 25 bp, Homo sapien
tccttctcacgtggaacaaggtggt

SEQ ID NO: 2722352 - DNA, 25 bp, Homo sapien
cacagaataatgcacagccagggca

SEQ ID NO: 2722353 - DNA, 25 bp, Homo sapien
atgcacagccagggcagagacgacg

SEQ ID NO: 2722354 - DNA, 25 bp, Homo sapien
gcacagccagggcagagacgacgcc

SEQ ID NO: 2722355 - DNA, 25 bp, Homo sapien
acagccagggcagagacgacgccat

SEQ ID NO: 2722356 - DNA, 25 bp, Homo sapien
caggatccgactgacgttttctgag

SEQ ID NO: 2722357 - DNA, 25 bp, Homo sapien
atcccggccgcagccgattgtcata

SEQ ID NO: 2722358 - DNA, 25 bp, Homo sapien
tgtcatagccttcaagcaagttgtc

SEQ ID NO: 2722359 - DNA, 25 bp, Homo sapien
tagaagttgccttcaacttcgagtt

SEQ ID NO: 2722360 - DNA, 25 bp, Homo sapien
tctccacatctgacacgggcccaaa

SEQ ID NO: 2722361 - DNA, 25 bp, Homo sapien
acatctgacacgggcccaaaactgg

SEQ ID NO: 2722362 - DNA, 25 bp, Homo sapien
catctgacacgggcccaaaactggt

SEQ ID NO: 2722363 - DNA, 25 bp, Homo sapien
ccacatctgacacgggcccaaaact

SEQ ID NO: 2722364 - DNA, 25 bp, Homo sapien
ctgaagagtttattaggagttgtca

SEQ ID NO: 2722365 - DNA, 25 bp, Homo sapien
caggtctggcggaaaaaaacatcca

SEQ ID NO: 2722366 - DNA, 25 bp, Homo sapien
ctgaaaaaggtgtcaggcgtccaga

SEQ ID NO: 2722367 - DNA, 25 bp, Homo sapien
gaaaaaggtgtcaggcgtccagatt

SEQ ID NO: 2722368 - DNA, 25 bp, Homo sapien
ttgagtggacaagcatgcccatcca

SEQ ID NO: 2722369 - DNA, 25 bp, Homo sapien
agctcccaaacttgagtggacaagc

SEQ ID NO: 2722370 - DNA, 25 bp, Homo sapien
gaaagttaaccagcctcatgggaca

SEQ ID NO: 2722371 - DNA, 25 bp, Homo sapien
gcatgcccatccataggaaagttaa

SEQ ID NO: 2722372 - DNA, 25 bp, Homo sapien
aaatatagcagtgaatttgacgagt

SEQ ID NO: 2722373 - DNA, 25 bp, Homo sapien
tagcagtgaatttgacgagttgtct

SEQ ID NO: 2722374 - DNA, 25 bp, Homo sapien
atatagcagtgaatttgacgagttg

SEQ ID NO: 2722375 - DNA, 25 bp, Homo sapien
gcagtgaatttgacgagttgtcttt

SEQ ID NO: 2722376 - DNA, 25 bp, Homo sapien
tatgatttcacttttgggataagca

SEQ ID NO: 2722377 - DNA, 25 bp, Homo sapien
gaaggcttgaagattcttctgggac

SEQ ID NO: 2722378 - DNA, 25 bp, Homo sapien
gacttctactgagtaaagtggtcct

SEQ ID NO: 2722379 - DNA, 25 bp, Homo sapien
gtttgtccaatcagatcatactgga

SEQ ID NO: 2722380 - DNA, 25 bp, Homo sapien
aaatgtgcactggagtcatcctgag

SEQ ID NO: 2722381 - DNA, 25 bp, Homo sapien
gatagagcgaagagacacatcaact

SEQ ID NO: 2722382 - DNA, 25 bp, Homo sapien
gagaaagctacttgatcagcagatg

SEQ ID NO: 2722383 - DNA, 25 bp, Homo sapien
tgttggaagacacatacatcagtat

SEQ ID NO: 2722384 - DNA, 25 bp, Homo sapien
tgctgggacggactccttattaatc

SEQ ID NO: 2722385 - DNA, 25 bp, Homo sapien
cacctgggaaagaatgactgtcata

SEQ ID NO: 2722386 - DNA, 25 bp, Homo sapien
gtatatctgtatcatgaagtagccc

SEQ ID NO: 2722387 - DNA, 25 bp, Homo sapien
tcataatgcaaggagtgtatatctg

SEQ ID NO: 2722388 - DNA, 25 bp, Homo sapien
ggatgaatgtacgtgaagtacaaaa

SEQ ID NO: 2722389 - DNA, 25 bp, Homo sapien
tggaggatgaatgtacgtgaagtac

SEQ ID NO: 2722390 - DNA, 25 bp, Homo sapien
gaatgtacgtgaagtacaaaatgtg

SEQ ID NO: 2722391 - DNA, 25 bp, Homo sapien
agcaatgaaaggtggaggatgaatg

SEQ ID NO: 2722392 - DNA, 25 bp, Homo sapien
acttttggcaaagagtgccgggcac

SEQ ID NO: 2722393 - DNA, 25 bp, Homo sapien
ccatggcagtggcatatgacacttt

SEQ ID NO: 2722394 - DNA, 25 bp, Homo sapien
taagcgcagagaagacgaatgcaaa

SEQ ID NO: 2722395 - DNA, 25 bp, Homo sapien
ggtaaagtagttgacagctgcgaac

SEQ ID NO: 2722396 - DNA, 25 bp, Homo sapien
ctacggtaggtaatgatagaaaaag

SEQ ID NO: 2722397 - DNA, 25 bp, Homo sapien
aattacagcctggtttattgacgcc

SEQ ID NO: 2722398 - DNA, 25 bp, Homo sapien
tatccttagggaaagacgagccagg

SEQ ID NO: 2722399 - DNA, 25 bp, Homo sapien
ttgcagaggcctagccactcctggt

SEQ ID NO: 2722400 - DNA, 25 bp, Homo sapien
ctggttgtgcattagtctgtagggc

SEQ ID NO: 2722401 - DNA, 25 bp, Homo sapien
cgtgagcactttattggcctcggaa

SEQ ID NO: 2722402 - DNA, 25 bp, Homo sapien
cctcggaagatgaaactattggcaa

SEQ ID NO: 2722403 - DNA, 25 bp, Homo sapien
taagatgggcgctctcgtgagcact

SEQ ID NO: 2722404 - DNA, 25 bp, Homo sapien
ttttactggtgcctccaaaggctgg

SEQ ID NO: 2722405 - DNA, 25 bp, Homo sapien
tttgcccacacatgcttacggaagc

SEQ ID NO: 2722406 - DNA, 25 bp, Homo sapien
caaatggctaagctcaatgtaggct

SEQ ID NO: 2722407 - DNA, 25 bp, Homo sapien
tgccctctcgggaactaagccaaaa

SEQ ID NO: 2722408 - DNA, 25 bp, Homo sapien
cataaaggcctccaacatgctggta

SEQ ID NO: 2722409 - DNA, 25 bp, Homo sapien
aagccaaatcaatctgaagtaccat

SEQ ID NO: 2722410 - DNA, 25 bp, Homo sapien
agaagccaaatcaatctgaagtacc

SEQ ID NO: 2722411 - DNA, 25 bp, Homo sapien
gaagccaaatcaatctgaagtacca

SEQ ID NO: 2722412 - DNA, 25 bp, Homo sapien
ctccctcagttgaactttgtttctc

SEQ ID NO: 2722413 - DNA, 25 bp, Homo sapien
ttgtccaccaaacaaaggcttctgg

SEQ ID NO: 2722414 - DNA, 25 bp, Homo sapien
attgtccaccaaacaaaggcttctg

SEQ ID NO: 2722415 - DNA, 25 bp, Homo sapien
tgtccaccaaacaaaggcttctgga

SEQ ID NO: 2722416 - DNA, 25 bp, Homo sapien
gtgatcctatgtgctccttaccaaa

SEQ ID NO: 2722417 - DNA, 25 bp, Homo sapien
tgtggcatcactactgtacaatatc

SEQ ID NO: 2722418 - DNA, 25 bp, Homo sapien
gattcacaggcagttataagaaatt

SEQ ID NO: 2722419 - DNA, 25 bp, Homo sapien
ccccaatgggaacatgtggcatcac

SEQ ID NO: 2722420 - DNA, 25 bp, Homo sapien
cagatgctcaagtgtccaatatggt

SEQ ID NO: 2722421 - DNA, 25 bp, Homo sapien
tcttcaagaagcttggtcttgtcat

SEQ ID NO: 2722422 - DNA, 25 bp, Homo sapien
gaacgaagagattcatgtaaagctt

SEQ ID NO: 2722423 - DNA, 25 bp, Homo sapien
tggttcccacttgccaaagaacgaa

SEQ ID NO: 2722424 - DNA, 25 bp, Homo sapien
tgctgagtatattttaagctgtcat

SEQ ID NO: 2722425 - DNA, 25 bp, Homo sapien
catggtggggcattggaaaattttt

SEQ ID NO: 2722426 - DNA, 25 bp, Homo sapien
cattggttgtgacactgccctgtgc

SEQ ID NO: 2722427 - DNA, 25 bp, Homo sapien
tgcactttggataaacttcattggt

SEQ ID NO: 2722428 - DNA, 25 bp, Homo sapien
tatggagtcagtgataatctcaaaa

SEQ ID NO: 2722429 - DNA, 25 bp, Homo sapien
cttgtatggagtcagtgataatctc

SEQ ID NO: 2722430 - DNA, 25 bp, Homo sapien
taattctatggctccgtatgtcaca

SEQ ID NO: 2722431 - DNA, 25 bp, Homo sapien
tgctgtgtattgctgagagtaggaa

SEQ ID NO: 2722432 - DNA, 25 bp, Homo sapien
tttgccagaactgacagcagtctta

SEQ ID NO: 2722433 - DNA, 25 bp, Homo sapien
cagcagtcttatagttactgctttc

SEQ ID NO: 2722434 - DNA, 25 bp, Homo sapien
actgacagcagtcttatagttactg

SEQ ID NO: 2722435 - DNA, 25 bp, Homo sapien
gtgtgatctcgtttgccagaactga

SEQ ID NO: 2722436 - DNA, 25 bp, Homo sapien
acaaaagtactgagcatctgggtcc

SEQ ID NO: 2722437 - DNA, 25 bp, Homo sapien
gacaaaagtactgagcatctgggtc

SEQ ID NO: 2722438 - DNA, 25 bp, Homo sapien
aaaagtactgagcatctgggtccat

SEQ ID NO: 2722439 - DNA, 25 bp, Homo sapien
caaaagtactgagcatctgggtcca

SEQ ID NO: 2722440 - DNA, 25 bp, Homo sapien
cacatcttgcaaacgtaagtaacag

SEQ ID NO: 2722441 - DNA, 25 bp, Homo sapien
caagaaactgatgaacacatcttgc

SEQ ID NO: 2722442 - DNA, 25 bp, Homo sapien
caaacgtaagtaacagctgccaata

SEQ ID NO: 2722443 - DNA, 25 bp, Homo sapien
gatgaacacatcttgcaaacgtaag

SEQ ID NO: 2722444 - DNA, 25 bp, Homo sapien
aggaaacatgtaatagtaggaacac

SEQ ID NO: 2722445 - DNA, 25 bp, Homo sapien
tatgtggctttacccacaggaaaca

SEQ ID NO: 2722446 - DNA, 25 bp, Homo sapien
ctatgtggctttacccacaggaaac

SEQ ID NO: 2722447 - DNA, 25 bp, Homo sapien
catgtaatagtaggaacacccttct

SEQ ID NO: 2722448 - DNA, 25 bp, Homo sapien
gaggatatagctgatccatgctgca

SEQ ID NO: 2722449 - DNA, 25 bp, Homo sapien
tgtagcatgaggatatagctgatcc

SEQ ID NO: 2722450 - DNA, 25 bp, Homo sapien
gaagtgcctaaatcaatcatgtagc

SEQ ID NO: 2722451 - DNA, 25 bp, Homo sapien
cacaatacgatgagtagaagtgcct

SEQ ID NO: 2722452 - DNA, 25 bp, Homo sapien
cctggacgaagaatatttaactaat

SEQ ID NO: 2722453 - DNA, 25 bp, Homo sapien
cactccgatcatttctaggtttgag

SEQ ID NO: 2722454 - DNA, 25 bp, Homo sapien
tttaactaataaatcactccgatca

SEQ ID NO: 2722455 - DNA, 25 bp, Homo sapien
ctgaattgtgctgggttcctggacg

SEQ ID NO: 2722456 - DNA, 25 bp, Homo sapien
gaggcaactgtttgtctatgttatc

SEQ ID NO: 2722457 - DNA, 25 bp, Homo sapien
tggaggcaactgtttgtctatgtta

SEQ ID NO: 2722458 - DNA, 25 bp, Homo sapien
ggcaactgtttgtctatgttatcat

SEQ ID NO: 2722459 - DNA, 25 bp, Homo sapien
aggcaactgtttgtctatgttatca

SEQ ID NO: 2722460 - DNA, 25 bp, Homo sapien
gatcaaatattaaaccactgcctgc

SEQ ID NO: 2722461 - DNA, 25 bp, Homo sapien
gaatgaacgcaagctctgaaactgg

SEQ ID NO: 2722462 - DNA, 25 bp, Homo sapien
gggagagcactcgtctcgcctctct

SEQ ID NO: 2722463 - DNA, 25 bp, Homo sapien
ggagatgcagggttacacgtgtggg

SEQ ID NO: 2722464 - DNA, 25 bp, Homo sapien
gaaaggaaggtggtaccagcctctg

SEQ ID NO: 2722465 - DNA, 25 bp, Homo sapien
cagtagtaatacgtcccagggcaaa

SEQ ID NO: 2722466 - DNA, 25 bp, Homo sapien
gaaataggcggtgacttcatgccag

SEQ ID NO: 2722467 - DNA, 25 bp, Homo sapien
gagagacatacggactgcacttaga

SEQ ID NO: 2722468 - DNA, 25 bp, Homo sapien
ctatacaacaaaagatttctcttta

SEQ ID NO: 2722469 - DNA, 25 bp, Homo sapien
tatacaacaaaagatttctctttac

SEQ ID NO: 2722470 - DNA, 25 bp, Homo sapien
tctgagccatcatggactctgcgtg

SEQ ID NO: 2722471 - DNA, 25 bp, Homo sapien
tgagccatcatggactctgcgtgct

SEQ ID NO: 2722472 - DNA, 25 bp, Homo sapien
ctgagccatcatggactctgcgtgc

SEQ ID NO: 2722473 - DNA, 25 bp, Homo sapien
ccctctggacacaggatctcttaag

SEQ ID NO: 2722474 - DNA, 25 bp, Homo sapien
ccagagcagaggggcgtcctcgctc

SEQ ID NO: 2722475 - DNA, 25 bp, Homo sapien
aggccccctctggacacaggatctc

SEQ ID NO: 2722476 - DNA, 25 bp, Homo sapien
cgagtccgggcgcgccagagcagag

SEQ ID NO: 2722477 - DNA, 25 bp, Homo sapien
tgctgtgggatcaggctcctgtcct

SEQ ID NO: 2722478 - DNA, 25 bp, Homo sapien
gctgtgggatcaggctcctgtcctg

SEQ ID NO: 2722479 - DNA, 25 bp, Homo sapien
ctgctgtgggatcaggctcctgtcc

SEQ ID NO: 2722480 - DNA, 25 bp, Homo sapien
gagataagaactctgagcctcgtca

SEQ ID NO: 2722481 - DNA, 25 bp, Homo sapien
tttgcagccaggacaagagcgtgcc

SEQ ID NO: 2722482 - DNA, 25 bp, Homo sapien
tgagacaggttttccgtcccagcgt

SEQ ID NO: 2722483 - DNA, 25 bp, Homo sapien
cgtcttaactttagatgatggcccc

SEQ ID NO: 2722484 - DNA, 25 bp, Homo sapien
agaaggaggatccaggcccaaagac

SEQ ID NO: 2722485 - DNA, 25 bp, Homo sapien
tcagtgtgctcagaaggaggatcca

SEQ ID NO: 2722486 - DNA, 25 bp, Homo sapien
caggcccaaagacagtcagacagac

SEQ ID NO: 2722487 - DNA, 25 bp, Homo sapien
gcccaaagacagtcagacagacctg

SEQ ID NO: 2722488 - DNA, 25 bp, Homo sapien
atcttgtaatgacggctgtccatag

SEQ ID NO: 2722489 - DNA, 25 bp, Homo sapien
tcatcttgtaatgacggctgtccat

SEQ ID NO: 2722490 - DNA, 25 bp, Homo sapien
gattgtcataaccatctaggagtct

SEQ ID NO: 2722491 - DNA, 25 bp, Homo sapien
gacagtggtattgtctttaagttca

SEQ ID NO: 2722492 - DNA, 25 bp, Homo sapien
gaagcaggaaattgggcgagtgagt

SEQ ID NO: 2722493 - DNA, 25 bp, Homo sapien
cgggtccgaaactggtgacgaagat

SEQ ID NO: 2722494 - DNA, 25 bp, Homo sapien
tcagtcttcacttcggttacacgct

SEQ ID NO: 2722495 - DNA, 25 bp, Homo sapien
catatcatggtctgaaacgggtccg

SEQ ID NO: 2722496 - DNA, 25 bp, Homo sapien
tggtgacgaagatatcagtcttcac

SEQ ID NO: 2722497 - DNA, 25 bp, Homo sapien
cagctttgacggaaaaatacatcta

SEQ ID NO: 2722498 - DNA, 25 bp, Homo sapien
tatttaaccggaggactgtcatagg

SEQ ID NO: 2722499 - DNA, 25 bp, Homo sapien
aatgtgtccggagtccagattttac

SEQ ID NO: 2722500 - DNA, 25 bp, Homo sapien
gtccagattttacttgccattaggt

SEQ ID NO: 2722501 - DNA, 25 bp, Homo sapien
gtcatgttgtgggccactgacttct

SEQ ID NO: 2722502 - DNA, 25 bp, Homo sapien
ggtcatgttgtgggccactgacttc

SEQ ID NO: 2722503 - DNA, 25 bp, Homo sapien
ccactgacttctttccattgtggaa

SEQ ID NO: 2722504 - DNA, 25 bp, Homo sapien
gggccactgacttctttccattgtg

SEQ ID NO: 2722505 - DNA, 25 bp, Homo sapien
tgtgatccgcaggagtttgttgggc

SEQ ID NO: 2722506 - DNA, 25 bp, Homo sapien
tgatccgcaggagtttgttgggcat

SEQ ID NO: 2722507 - DNA, 25 bp, Homo sapien
aggtgccatcctctgtgatccgcag

SEQ ID NO: 2722508 - DNA, 25 bp, Homo sapien
ggtgccatcctctgtgatccgcagg

SEQ ID NO: 2722509 - DNA, 25 bp, Homo sapien
ggcaagcatgggcatccatagggaa

SEQ ID NO: 2722510 - DNA, 25 bp, Homo sapien
catgggcatccatagggaagtcctc

SEQ ID NO: 2722511 - DNA, 25 bp, Homo sapien
ggcatccatagggaagtcctccaaa

SEQ ID NO: 2722512 - DNA, 25 bp, Homo sapien
gtcctccaaatgcatcggacattca

SEQ ID NO: 2722513 - DNA, 25 bp, Homo sapien
cattgactggagttacagcagccat

SEQ ID NO: 2722514 - DNA, 25 bp, Homo sapien
acaaacagaattgcattgactggag

SEQ ID NO: 2722515 - DNA, 25 bp, Homo sapien
tcacaaacagaattgcattgactgg

SEQ ID NO: 2722516 - DNA, 25 bp, Homo sapien
tctatcacaaacagaattgcattga

SEQ ID NO: 2722517 - DNA, 25 bp, Homo sapien
catactggtttagacgtgatccatc

SEQ ID NO: 2722518 - DNA, 25 bp, Homo sapien
gctacaaccactgagcgtgctggct

SEQ ID NO: 2722519 - DNA, 25 bp, Homo sapien
gctggctctctggtccattcataaa

SEQ ID NO: 2722520 - DNA, 25 bp, Homo sapien
ccagagtctactgtttgtccaagaa

SEQ ID NO: 2722521 - DNA, 25 bp, Homo sapien
gaaatctatcaaggtggactcttgg

SEQ ID NO: 2722522 - DNA, 25 bp, Homo sapien
ggaaggtaatggtactcaaggtcat

SEQ ID NO: 2722523 - DNA, 25 bp, Homo sapien
gttttcagggctccacaaagagatg

SEQ ID NO: 2722524 - DNA, 25 bp, Homo sapien
cagcattgcagaccttacacaaagg

SEQ ID NO: 2722525 - DNA, 25 bp, Homo sapien
tcaagtggaaatgagtggtcataac

SEQ ID NO: 2722526 - DNA, 25 bp, Homo sapien
gcatggcaggtatgtttgaataaca

SEQ ID NO: 2722527 - DNA, 25 bp, Homo sapien
tcactgtcattatgcatggcaggta

SEQ ID NO: 2722528 - DNA, 25 bp, Homo sapien
tcttgctggtacagactctctgttg

SEQ ID NO: 2722529 - DNA, 25 bp, Homo sapien
atgacataacttgtcttccataccc

SEQ ID NO: 2722530 - DNA, 25 bp, Homo sapien
tccttgcgtatgtatcttgattggg

SEQ ID NO: 2722531 - DNA, 25 bp, Homo sapien
gtcttccatacccttccttgcgtat

SEQ ID NO: 2722532 - DNA, 25 bp, Homo sapien
catacccttccttgcgtatgtatct

SEQ ID NO: 2722533 - DNA, 25 bp, Homo sapien
aatccatagctgttgcataagccac

SEQ ID NO: 2722534 - DNA, 25 bp, Homo sapien
cataagccaccttagggagggagtt

SEQ ID NO: 2722535 - DNA, 25 bp, Homo sapien
ttactgtggcaaactcaatcagagc

SEQ ID NO: 2722536 - DNA, 25 bp, Homo sapien
ccatgcataacctctcttagtgaaa

SEQ ID NO: 2722537 - DNA, 25 bp, Homo sapien
gctgaggctctctgtttaaatacgt

SEQ ID NO: 2722538 - DNA, 25 bp, Homo sapien
ttccaaatagcagcgggaaggctat

SEQ ID NO: 2722539 - DNA, 25 bp, Homo sapien
gaaggctattcttgacagtcggtca

SEQ ID NO: 2722540 - DNA, 25 bp, Homo sapien
tagcaatggtggctaagcccgggtc

SEQ ID NO: 2722541 - DNA, 25 bp, Homo sapien
tgctcaagacttgggtttggatccc

SEQ ID NO: 2722542 - DNA, 25 bp, Homo sapien
gagcaactgcacctttacgtatgaa

SEQ ID NO: 2722543 - DNA, 25 bp, Homo sapien
taggcaggaccaaatcaaacaatga

SEQ ID NO: 2722544 - DNA, 25 bp, Homo sapien
acattccaacagctaagtgcagtga

SEQ ID NO: 2722545 - DNA, 25 bp, Homo sapien
ggaactgtcccctataagagtgtat

SEQ ID NO: 2722546 - DNA, 25 bp, Homo sapien
tcctgggagtgaacaggaactgtcc

SEQ ID NO: 2722547 - DNA, 25 bp, Homo sapien
cagtcattgcgtagcaggaagcaga

SEQ ID NO: 2722548 - DNA, 25 bp, Homo sapien
tactacatggtttagcaaagcactg

SEQ ID NO: 2722549 - DNA, 25 bp, Homo sapien
gaaggctgaagcttgccgatgggtc

SEQ ID NO: 2722550 - DNA, 25 bp, Homo sapien
ttgccgatgggtcttattatagcct

SEQ ID NO: 2722551 - DNA, 25 bp, Homo sapien
aaggctgaagcttgccgatgggtct

SEQ ID NO: 2722552 - DNA, 25 bp, Homo sapien
cagaaggctgaagcttgccgatggg

SEQ ID NO: 2722553 - DNA, 25 bp, Homo sapien
ctttggcaacaacaaaagcaaacag

SEQ ID NO: 2722554 - DNA, 25 bp, Homo sapien
ttggcaacaacaaaagcaaacaggt

SEQ ID NO: 2722555 - DNA, 25 bp, Homo sapien
ggcaacaacaaaagcaaacaggtac

SEQ ID NO: 2722556 - DNA, 25 bp, Homo sapien
caacaacaaaagcaaacaggtacct

SEQ ID NO: 2722557 - DNA, 25 bp, Homo sapien
gcttctagcagccttatggtctcca

SEQ ID NO: 2722558 - DNA, 25 bp, Homo sapien
tgtcatttctgctatgtcccaataa

SEQ ID NO: 2722559 - DNA, 25 bp, Homo sapien
cagtctgtggaagtttgctccctgg

SEQ ID NO: 2722560 - DNA, 25 bp, Homo sapien
gtcctgattaaagagcacagggcct

SEQ ID NO: 2722561 - DNA, 25 bp, Homo sapien
gctggaagtcacaacaatgtctggg

SEQ ID NO: 2722562 - DNA, 25 bp, Homo sapien
tctctggggatttgaaagagctgga

SEQ ID NO: 2722563 - DNA, 25 bp, Homo sapien
actgatagctggaagtcacaacaat

SEQ ID NO: 2722564 - DNA, 25 bp, Homo sapien
gggatttgaaagagctggacaactg

SEQ ID NO: 2722565 - DNA, 25 bp, Homo sapien
ggtcttgttcttttatggagactaa

SEQ ID NO: 2722566 - DNA, 25 bp, Homo sapien
tcttgttcttttatggagactaaga

SEQ ID NO: 2722567 - DNA, 25 bp, Homo sapien
tggtcttgttcttttatggagacta

SEQ ID NO: 2722568 - DNA, 25 bp, Homo sapien
tttggtcttgttcttttatggagac

SEQ ID NO: 2722569 - DNA, 25 bp, Homo sapien
tgcccactacggcttggaactccag

SEQ ID NO: 2722570 - DNA, 25 bp, Homo sapien
cattgcccactacggcttggaactc

SEQ ID NO: 2722571 - DNA, 25 bp, Homo sapien
cactacggcttggaactccagggct

SEQ ID NO: 2722572 - DNA, 25 bp, Homo sapien
caatcattgcccactacggcttgga

SEQ ID NO: 2722573 - DNA, 25 bp, Homo sapien
actggcattcatggggacaagagat

SEQ ID NO: 2722574 - DNA, 25 bp, Homo sapien
cagaaggtttgtggtcgtcagatct

SEQ ID NO: 2722575 - DNA, 25 bp, Homo sapien
ggtcgtcagatctgccaagaatcct

SEQ ID NO: 2722576 - DNA, 25 bp, Homo sapien
agcccagaagctacatcatcaatga

SEQ ID NO: 2722577 - DNA, 25 bp, Homo sapien
gagagggaaagacacgcacactcgt

SEQ ID NO: 2722578 - DNA, 25 bp, Homo sapien
gatggattgctaccagattagggaa

SEQ ID NO: 2722579 - DNA, 25 bp, Homo sapien
tacaaggagagactcatacggagac

SEQ ID NO: 2722580 - DNA, 25 bp, Homo sapien
atcaaagcgtcactctggcagcggc

SEQ ID NO: 2722581 - DNA, 25 bp, Homo sapien
tgctccatatatttggcgaactcat

SEQ ID NO: 2722582 - DNA, 25 bp, Homo sapien
tacaggagtcgagtagactgagctt

SEQ ID NO: 2722583 - DNA, 25 bp, Homo sapien
aaatacaggagtcgagtagactgag

SEQ ID NO: 2722584 - DNA, 25 bp, Homo sapien
gtgctccatatatttggcgaactca

SEQ ID NO: 2722585 - DNA, 25 bp, Homo sapien
cagcaggagcagaatccacaccgtc

SEQ ID NO: 2722586 - DNA, 25 bp, Homo sapien
gcaggagcagaatccacaccgtcat

SEQ ID NO: 2722587 - DNA, 25 bp, Homo sapien
ccagggtagagcgacagcaggagca

SEQ ID NO: 2722588 - DNA, 25 bp, Homo sapien
agcaggagcagaatccacaccgtca

SEQ ID NO: 2722589 - DNA, 25 bp, Homo sapien
caaaatgcttgcaacacggcctcaa

SEQ ID NO: 2722590 - DNA, 25 bp, Homo sapien
gcacagcccactccgatatcagatt

SEQ ID NO: 2722591 - DNA, 25 bp, Homo sapien
caaatgccggcgtgtatcagcacag

SEQ ID NO: 2722592 - DNA, 25 bp, Homo sapien
atatctctccggtgtgcgccaggac

SEQ ID NO: 2722593 - DNA, 25 bp, Homo sapien
tgccaggtgcagaagcatgcgatgc

SEQ ID NO: 2722594 - DNA, 25 bp, Homo sapien
taagaatgccaggtgcagaagcatg

SEQ ID NO: 2722595 - DNA, 25 bp, Homo sapien
cttaagaatgccaggtgcagaagca

SEQ ID NO: 2722596 - DNA, 25 bp, Homo sapien
agaatgccaggtgcagaagcatgcg

SEQ ID NO: 2722597 - DNA, 25 bp, Homo sapien
ttgggtcaatgggactggatgcaaa

SEQ ID NO: 2722598 - DNA, 25 bp, Homo sapien
tgggactggatgcaaaacctggctg

SEQ ID NO: 2722599 - DNA, 25 bp, Homo sapien
gctgaaccatgtttgcacacgggta

SEQ ID NO: 2722600 - DNA, 25 bp, Homo sapien
tttgcacacgggtagttggctgttg

SEQ ID NO: 2722601 - DNA, 25 bp, Homo sapien
taggtagactttggctttacagcaa

SEQ ID NO: 2722602 - DNA, 25 bp, Homo sapien
tcatggcagggtttcaattataaca

SEQ ID NO: 2722603 - DNA, 25 bp, Homo sapien
tacagcaacacttgggttcatggca

SEQ ID NO: 2722604 - DNA, 25 bp, Homo sapien
tcccagaattggctcaaatgatatt

SEQ ID NO: 2722605 - DNA, 25 bp, Homo sapien
caggttgtttaagatgacagtgaca

SEQ ID NO: 2722606 - DNA, 25 bp, Homo sapien
cagcaggttgtttaagatgacagtg

SEQ ID NO: 2722607 - DNA, 25 bp, Homo sapien
tcaggaacttttggagtcaagaccc

SEQ ID NO: 2722608 - DNA, 25 bp, Homo sapien
gacccatgttttgttagaagcataa

SEQ ID NO: 2722609 - DNA, 25 bp, Homo sapien
tatatatacaaaagcgagtgtgcca

SEQ ID NO: 2722610 - DNA, 25 bp, Homo sapien
tctcctggataaggctattcctctg

SEQ ID NO: 2722611 - DNA, 25 bp, Homo sapien
gcctctcgactttgggctggatcat

SEQ ID NO: 2722612 - DNA, 25 bp, Homo sapien
catctgattggcttcggctaataat

SEQ ID NO: 2722613 - DNA, 25 bp, Homo sapien
tctgtgtgaattaacgttggcttca

SEQ ID NO: 2722614 - DNA, 25 bp, Homo sapien
ttgatagcgttcactggaccaatgc

SEQ ID NO: 2722615 - DNA, 25 bp, Homo sapien
gcgttcactggaccaatgctattca

SEQ ID NO: 2722616 - DNA, 25 bp, Homo sapien
gctattcacatacatgtctgtgtga

SEQ ID NO: 2722617 - DNA, 25 bp, Homo sapien
agaaaatttgtacacagtaagatta

SEQ ID NO: 2722618 - DNA, 25 bp, Homo sapien
cagaaaatttgtacacagtaagatt

SEQ ID NO: 2722619 - DNA, 25 bp, Homo sapien
tgtcataccacgtttgcgcaaaaaa

SEQ ID NO: 2722620 - DNA, 25 bp, Homo sapien
ctgttaaatttcaaacgtctgtcat

SEQ ID NO: 2722621 - DNA, 25 bp, Homo sapien
ccacgtttgcgcaaaaaatatatca

SEQ ID NO: 2722622 - DNA, 25 bp, Homo sapien
aatttcaaacgtctgtcataccacg

SEQ ID NO: 2722623 - DNA, 25 bp, Homo sapien
gttcaatcggaggactttaatggtg

SEQ ID NO: 2722624 - DNA, 25 bp, Homo sapien
tgttcaatcggaggactttaatggt

SEQ ID NO: 2722625 - DNA, 25 bp, Homo sapien
gttgctgttcaatcggaggacttta

SEQ ID NO: 2722626 - DNA, 25 bp, Homo sapien
gctgttcaatcggaggactttaatg

SEQ ID NO: 2722627 - DNA, 25 bp, Homo sapien
cttagggtgtagagcactcgaccat

SEQ ID NO: 2722628 - DNA, 25 bp, Homo sapien
gatccagtgtgcatcagcttttttg

SEQ ID NO: 2722629 - DNA, 25 bp, Homo sapien
gagcactcgaccatcattccaaatt

SEQ ID NO: 2722630 - DNA, 25 bp, Homo sapien
ctggaatccagattttccccaccat

SEQ ID NO: 2722631 - DNA, 25 bp, Homo sapien
tgttcatccattggaaagttgtgca

SEQ ID NO: 2722632 - DNA, 25 bp, Homo sapien
caaggggcaggagtgttcatccatt

SEQ ID NO: 2722633 - DNA, 25 bp, Homo sapien
attggcactcagcatcaattgtcaa

SEQ ID NO: 2722634 - DNA, 25 bp, Homo sapien
ttggcactcagcatcaattgtcaac

SEQ ID NO: 2722635 - DNA, 25 bp, Homo sapien
gatcagttgagccccagaagcgaag

SEQ ID NO: 2722636 - DNA, 25 bp, Homo sapien
tgagccccagaagcgaaggctgtag

SEQ ID NO: 2722637 - DNA, 25 bp, Homo sapien
gttgagccccagaagcgaaggctgt

SEQ ID NO: 2722638 - DNA, 25 bp, Homo sapien
tcagttgagccccagaagcgaaggc

SEQ ID NO: 2722639 - DNA, 25 bp, Homo sapien
gaacttcgcttccattgataaacaa

SEQ ID NO: 2722640 - DNA, 25 bp, Homo sapien
cactacttcggtggtatttcttaga

SEQ ID NO: 2722641 - DNA, 25 bp, Homo sapien
acaaatgagaattgataaagcctcc

SEQ ID NO: 2722642 - DNA, 25 bp, Homo sapien
ccaggatcttgtgtcgcccacttca

SEQ ID NO: 2722643 - DNA, 25 bp, Homo sapien
caagttgttttggtattaagatcag

SEQ ID NO: 2722644 - DNA, 25 bp, Homo sapien
cagcaaaggcactgttgaagagatg

SEQ ID NO: 2722645 - DNA, 25 bp, Homo sapien
ttggtattaagatcagcaaaggcac

SEQ ID NO: 2722646 - DNA, 25 bp, Homo sapien
ttgaagagatgccactgatttaagc

SEQ ID NO: 2722647 - DNA, 25 bp, Homo sapien
gtaatccagatatttgcttcccctg

SEQ ID NO: 2722648 - DNA, 25 bp, Homo sapien
gctttggtcagtagaatgtgagtca

SEQ ID NO: 2722649 - DNA, 25 bp, Homo sapien
catccctatagaggccttccctggt

SEQ ID NO: 2722650 - DNA, 25 bp, Homo sapien
tgcatcttattccatggacatcagg

SEQ ID NO: 2722651 - DNA, 25 bp, Homo sapien
aagacacccaggataggacgacaat

SEQ ID NO: 2722652 - DNA, 25 bp, Homo sapien
acagcatccttattgatccagaaag

SEQ ID NO: 2722653 - DNA, 25 bp, Homo sapien
ctggctggaacagcatccttattga

SEQ ID NO: 2722654 - DNA, 25 bp, Homo sapien
tataggtctggatggtaaagtatcc

SEQ ID NO: 2722655 - DNA, 25 bp, Homo sapien
actgcaacataaacaaaggtgtctc

SEQ ID NO: 2722656 - DNA, 25 bp, Homo sapien
gaaactgcaacataaacaaaggtgt

SEQ ID NO: 2722657 - DNA, 25 bp, Homo sapien
gagaaactgcaacataaacaaaggt

SEQ ID NO: 2722658 - DNA, 25 bp, Homo sapien
tgcaacataaacaaaggtgtctcac

SEQ ID NO: 2722659 - DNA, 25 bp, Homo sapien
gatcaacatagaaatggacataaaa

SEQ ID NO: 2722660 - DNA, 25 bp, Homo sapien
taaagcagatcaacatagaaatgga

SEQ ID NO: 2722661 - DNA, 25 bp, Homo sapien
aatttaaagcagatcaacatagaaa

SEQ ID NO: 2722662 - DNA, 25 bp, Homo sapien
gcagatcaacatagaaatggacata

SEQ ID NO: 2722663 - DNA, 25 bp, Homo sapien
ttccccatgtgaagaaacagatgtg

SEQ ID NO: 2722664 - DNA, 25 bp, Homo sapien
tggcatcaccgaataccaagttggg

SEQ ID NO: 2722665 - DNA, 25 bp, Homo sapien
tgaattttgttcacgtccactagct

SEQ ID NO: 2722666 - DNA, 25 bp, Homo sapien
caatggcgtgctggtgaatgtgtaa

SEQ ID NO: 2722667 - DNA, 25 bp, Homo sapien
ctatttgcttaagggcctcttgctc

SEQ ID NO: 2722668 - DNA, 25 bp, Homo sapien
ctgctatttgcttaagggcctcttg

SEQ ID NO: 2722669 - DNA, 25 bp, Homo sapien
gaagcacctatctgctatttgctta

SEQ ID NO: 2722670 - DNA, 25 bp, Homo sapien
caagtagaagcacctatctgctatt

SEQ ID NO: 2722671 - DNA, 25 bp, Homo sapien
gagatccatcgctgtgacataggag

SEQ ID NO: 2722672 - DNA, 25 bp, Homo sapien
caaggtgccatactccaccagagca

SEQ ID NO: 2722673 - DNA, 25 bp, Homo sapien
gtcattgtcaggacagtggtgatac

SEQ ID NO: 2722674 - DNA, 25 bp, Homo sapien
ttccggttgctgacaaaataatgca

SEQ ID NO: 2722675 - DNA, 25 bp, Homo sapien
tatttgcataagaactctgacacag

SEQ ID NO: 2722676 - DNA, 25 bp, Homo sapien
ataatagcaacaagaagaaggtcac

SEQ ID NO: 2722677 - DNA, 25 bp, Homo sapien
aaatgaatcgttatggcctggctaa

SEQ ID NO: 2722678 - DNA, 25 bp, Homo sapien
gcctggctaaactcatacatgctgt

SEQ ID NO: 2722679 - DNA, 25 bp, Homo sapien
cataggagccccataagacaagtgt

SEQ ID NO: 2722680 - DNA, 25 bp, Homo sapien
tcatcaccaactactaatgttaagt

SEQ ID NO: 2722681 - DNA, 25 bp, Homo sapien
aatgtagtcagccttgaaacttcaa

SEQ ID NO: 2722682 - DNA, 25 bp, Homo sapien
gaaattatctggtgacaatacccac

SEQ ID NO: 2722683 - DNA, 25 bp, Homo sapien
tggttgcaagtagaagtcatcctcc

SEQ ID NO: 2722684 - DNA, 25 bp, Homo sapien
tctcaaagcagaaggccatgatcca

SEQ ID NO: 2722685 - DNA, 25 bp, Homo sapien
tctgcaatggcgtagctgacagaga

SEQ ID NO: 2722686 - DNA, 25 bp, Homo sapien
gaccctgaataagggaatctgcctc

SEQ ID NO: 2722687 - DNA, 25 bp, Homo sapien
gctatagcaaggagattgaacacca

SEQ ID NO: 2722688 - DNA, 25 bp, Homo sapien
aaattttgagcttaagcagtgcagc

SEQ ID NO: 2722689 - DNA, 25 bp, Homo sapien
aaaaggctcagggatcactctggaa

SEQ ID NO: 2722690 - DNA, 25 bp, Homo sapien
tcacagggattatagcttttgggct

SEQ ID NO: 2722691 - DNA, 25 bp, Homo sapien
gttctcgagagatcctaggctgttt

SEQ ID NO: 2722692 - DNA, 25 bp, Homo sapien
gggatcagttagttgttctcgagag

SEQ ID NO: 2722693 - DNA, 25 bp, Homo sapien
tagttgttctcgagagatcctaggc

SEQ ID NO: 2722694 - DNA, 25 bp, Homo sapien
tttccacaatgtcaccaatgtgatg

SEQ ID NO: 2722695 - DNA, 25 bp, Homo sapien
tcacaggtagaggtaggagacccaa

SEQ ID NO: 2722696 - DNA, 25 bp, Homo sapien
gaagaagatccgagcataggagtcc

SEQ ID NO: 2722697 - DNA, 25 bp, Homo sapien
taggagtccattttggcaatgcgga

SEQ ID NO: 2722698 - DNA, 25 bp, Homo sapien
gaaaaaactggcacagtccttgccg

SEQ ID NO: 2722699 - DNA, 25 bp, Homo sapien
taagtggacttagaacagacatctc

SEQ ID NO: 2722700 - DNA, 25 bp, Homo sapien
gagatgcatgcactaaacttgaagc

SEQ ID NO: 2722701 - DNA, 25 bp, Homo sapien
aaatttatcacaacttgacccggag

SEQ ID NO: 2722702 - DNA, 25 bp, Homo sapien
tacactaaccaaaggagggctgggc
